United States Patent Application Publication US 2018/0305689 A1 - sequence listing, part 166

SEQ ID NO: 2437245 - RNA, 19 nt, Artificial Sequence
  Description of Artificial Sequence: Synthetic oligonucleotide
  Antisense strand to SEQ ID NO: 2437244
uguuuggcuaccaucacuu

SEQ ID NO: 2437246 - RNA, 19 nt, Artificial Sequence
  Description of Artificial Sequence: Synthetic oligonucleotide
  Sense strand starting at position 2502 of SEQ ID NO: 1886943
agugguaaagguggagaaa

SEQ ID NO: 2437247 - RNA, 19 nt, Artificial Sequence
  Description of Artificial Sequence: Synthetic oligonucleotide
  Antisense strand to SEQ ID NO: 2437246
uuucuccaccuuuaccacu

SEQ ID NO: 2437248 - RNA, 19 nt, Artificial Sequence
  Description of Artificial Sequence: Synthetic oligonucleotide
  Sense strand starting at position 2554 of SEQ ID NO: 1886943
ggagacaacuuacuaaguu

SEQ ID NO: 2437249 - RNA, 19 nt, Artificial Sequence
  Description of Artificial Sequence: Synthetic oligonucleotide
  Antisense strand to SEQ ID NO: 2437248
aacuuaguaaguugucucc

SEQ ID NO: 2437250 - RNA, 19 nt, Artificial Sequence
  Description of Artificial Sequence: Synthetic oligonucleotide
  Sense strand starting at position 2624 of SEQ ID NO: 1886943
gaaagaacaugagugcauu

SEQ ID NO: 2437251 - RNA, 19 nt, Artificial Sequence
  Description of Artificial Sequence: Synthetic oligonucleotide
  Antisense strand to SEQ ID NO: 2437250
aaugcacucauguucuuuc

SEQ ID NO: 2437252 - RNA, 19 nt, Artificial Sequence
  Description of Artificial Sequence: Synthetic oligonucleotide
  Sense strand starting at position 2741 of SEQ ID NO: 1886943
gagaaucugggcuggagau

SEQ ID NO: 2437253 - RNA, 19 nt, Artificial Sequence
  Description of Artificial Sequence: Synthetic oligonucleotide
  Antisense strand to SEQ ID NO: 2437252
aucuccagcccagauucuc

SEQ ID NO: 2437254 - RNA, 19 nt, Artificial Sequence
  Description of Artificial Sequence: Synthetic oligonucleotide
  Sense strand starting at position 2914 of SEQ ID NO: 1886943
auuuguauguaguugguau

SEQ ID NO: 2437255 - RNA, 19 nt, Artificial Sequence
  Description of Artificial Sequence: Synthetic oligonucleotide
  Antisense strand to SEQ ID NO: 2437254
auaccaacuacauacaaau

SEQ ID NO: 2437256 - RNA, 19 nt, Artificial Sequence
  Description of Artificial Sequence: Synthetic oligonucleotide
  Sense strand starting at position 2957 of SEQ ID NO: 1886943
cagagacuuuggccaugau

SEQ ID NO: 2437257 - RNA, 19 nt, Artificial Sequence
  Description of Artificial Sequence: Synthetic oligonucleotide
  Antisense strand to SEQ ID NO: 2437256
aucauggccaaagucucug

SEQ ID NO: 2437258 - RNA, 19 nt, Artificial Sequence
  Description of Artificial Sequence: Synthetic oligonucleotide
  Sense strand starting at position 2960 of SEQ ID NO: 1886943
agacuuuggccaugaugga

SEQ ID NO: 2437259 - RNA, 19 nt, Artificial Sequence
  Description of Artificial Sequence: Synthetic oligonucleotide
  Antisense strand to SEQ ID NO: 2437258
uccaucauggccaaagucu

SEQ ID NO: 2437260 - RNA, 19 nt, Artificial Sequence
  Description of Artificial Sequence: Synthetic oligonucleotide
  Sense strand starting at position 3062 of SEQ ID NO: 1886943
acagaaguguaaucucuga

SEQ ID NO: 2437261 - RNA, 19 nt, Artificial Sequence
  Description of Artificial Sequence: Synthetic oligonucleotide
  Antisense strand to SEQ ID NO: 2437260
ucagagauuacacuucugu

SEQ ID NO: 2437262 - RNA, 19 nt, Artificial Sequence
  Description of Artificial Sequence: Synthetic oligonucleotide
  Sense strand starting at position 3066 of SEQ ID NO: 1886943
aaguguaaucucugacaga

SEQ ID NO: 2437263 - RNA, 19 nt, Artificial Sequence
  Description of Artificial Sequence: Synthetic oligonucleotide
  Antisense strand to SEQ ID NO: 2437262
ucugucagagauuacacuu

SEQ ID NO: 2437264 - RNA, 19 nt, Artificial Sequence
  Description of Artificial Sequence: Synthetic oligonucleotide
  Sense strand starting at position 3201 of SEQ ID NO: 1886943
aggagauaguguuuagggu

SEQ ID NO: 2437265 - RNA, 19 nt, Artificial Sequence
  Description of Artificial Sequence: Synthetic oligonucleotide
  Antisense strand to SEQ ID NO: 2437264
acccuaaacacuaucuccu

SEQ ID NO: 2437266 - RNA, 19 nt, Artificial Sequence
  Description of Artificial Sequence: Synthetic oligonucleotide
  Sense strand starting at position 3296 of SEQ ID NO: 1886943
ucuagagaucugcagacga

SEQ ID NO: 2437267 - RNA, 19 nt, Artificial Sequence
  Description of Artificial Sequence: Synthetic oligonucleotide
  Antisense strand to SEQ ID NO: 2437266
ucgucugcagaucucuaga

SEQ ID NO: 2437268 - RNA, 19 nt, Artificial Sequence
  Description of Artificial Sequence: Synthetic oligonucleotide
  Sense strand starting at position 3298 of SEQ ID NO: 1886943
uagagaucugcagacgacu

SEQ ID NO: 2437269 - RNA, 19 nt, Artificial Sequence
  Description of Artificial Sequence: Synthetic oligonucleotide
  Antisense strand to SEQ ID NO: 2437268
agucgucugcagaucucua

SEQ ID NO: 2437270 - RNA, 19 nt, Artificial Sequence
  Description of Artificial Sequence: Synthetic oligonucleotide
  Sense strand starting at position 3333 of SEQ ID NO: 1886943
cugaauauugaucagugca

SEQ ID NO: 2437271 - RNA, 19 nt, Artificial Sequence
  Description of Artificial Sequence: Synthetic oligonucleotide
  Antisense strand to SEQ ID NO: 2437270
ugcacugaucaauauucag

SEQ ID NO: 2437272 - RNA, 19 nt, Artificial Sequence
  Description of Artificial Sequence: Synthetic oligonucleotide
  Sense strand starting at position 3415 of SEQ ID NO: 1886943
cucacaaaggcuggagaau

SEQ ID NO: 2437273 - RNA, 19 nt, Artificial Sequence
  Description of Artificial Sequence: Synthetic oligonucleotide
  Antisense strand to SEQ ID NO: 2437272
auucuccagccuuugugag

SEQ ID NO: 2437274 - RNA, 19 nt, Artificial Sequence
  Description of Artificial Sequence: Synthetic oligonucleotide
  Sense strand starting at position 3424 of SEQ ID NO: 1886943
gcuggagaauaucuuacau

SEQ ID NO: 2437275 - RNA, 19 nt, Artificial Sequence
  Description of Artificial Sequence: Synthetic oligonucleotide
  Antisense strand to SEQ ID NO: 2437274
auguaagauauucuccagc

SEQ ID NO: 2437276 - RNA, 19 nt, Artificial Sequence
  Description of Artificial Sequence: Synthetic oligonucleotide
  Sense strand starting at position 3484 of SEQ ID NO: 1886943
caagcagaguccucagaaa

SEQ ID NO: 2437277 - RNA, 19 nt, Artificial Sequence
  Description of Artificial Sequence: Synthetic oligonucleotide
  Antisense strand to SEQ ID NO: 2437276
uuucugaggacucugcuug

SEQ ID NO: 2437278 - RNA, 19 nt, Artificial Sequence
  Description of Artificial Sequence: Synthetic oligonucleotide
  Sense strand starting at position 3521 of SEQ ID NO: 1886943
ggacuaaauuagcccuaga

SEQ ID NO: 2437279 - RNA, 19 nt, Artificial Sequence
  Description of Artificial Sequence: Synthetic oligonucleotide
  Antisense strand to SEQ ID NO: 2437278
ucuagggcuaauuuagucc

SEQ ID NO: 2437280 - RNA, 19 nt, Artificial Sequence
  Description of Artificial Sequence: Synthetic oligonucleotide
  Sense strand starting at position 3536 of SEQ ID NO: 1886943
uagacuaaagguuguucua

SEQ ID NO: 2437281 - RNA, 19 nt, Artificial Sequence
  Description of Artificial Sequence: Synthetic oligonucleotide
  Antisense strand to SEQ ID NO: 2437280
uagaacaaccuuuagucua

SEQ ID NO: 2437282 - RNA, 19 nt, Artificial Sequence
  Description of Artificial Sequence: Synthetic oligonucleotide
  Sense strand starting at position 3538 of SEQ ID NO: 1886943
gacuaaagguuguucuaaa

SEQ ID NO: 2437283 - RNA, 19 nt, Artificial Sequence
  Description of Artificial Sequence: Synthetic oligonucleotide
  Antisense strand to SEQ ID NO: 2437282
uuuagaacaaccuuuaguc

SEQ ID NO: 2437284 - RNA, 19 nt, Artificial Sequence
  Description of Artificial Sequence: Synthetic oligonucleotide
  Sense strand starting at position 3539 of SEQ ID NO: 1886943
acuaaagguuguucuaaac

SEQ ID NO: 2437285 - RNA, 19 nt, Artificial Sequence
  Description of Artificial Sequence: Synthetic oligonucleotide
  Antisense strand to SEQ ID NO: 2437284
guuuagaacaaccuuuagu

SEQ ID NO: 2437286 - RNA, 19 nt, Artificial Sequence
  Description of Artificial Sequence: Synthetic oligonucleotide
  Sense strand starting at position 3653 of SEQ ID NO: 1886943
aaggaauaauuagaggaau

SEQ ID NO: 2437287 - RNA, 19 nt, Artificial Sequence
  Description of Artificial Sequence: Synthetic oligonucleotide
  Antisense strand to SEQ ID NO: 2437286
auuccucuaauuauuccuu

SEQ ID NO: 2437288 - RNA, 19 nt, Artificial Sequence
  Description of Artificial Sequence: Synthetic oligonucleotide
  Sense strand starting at position 3729 of SEQ ID NO: 1886943
gcucuacagccagaagaaa

SEQ ID NO: 2437289 - RNA, 19 nt, Artificial Sequence
  Description of Artificial Sequence: Synthetic oligonucleotide
  Antisense strand to SEQ ID NO: 2437288
uuucuucuggcuguagagc

SEQ ID NO: 2437290 - RNA, 19 nt, Artificial Sequence
  Description of Artificial Sequence: Synthetic oligonucleotide
  Sense strand starting at position 3783 of SEQ ID NO: 1886943
aucauaaguuuaguacaca

SEQ ID NO: 2437291 - RNA, 19 nt, Artificial Sequence
  Description of Artificial Sequence: Synthetic oligonucleotide
  Antisense strand to SEQ ID NO: 2437290
uguguacuaaacuuaugau

SEQ ID NO: 2437292 - RNA, 19 nt, Artificial Sequence
  Description of Artificial Sequence: Synthetic oligonucleotide
  Sense strand starting at position 2446 of SEQ ID NO: 1886944
cagccugucccagggagaa

SEQ ID NO: 2437293 - RNA, 19 nt, Artificial Sequence
  Description of Artificial Sequence: Synthetic oligonucleotide
  Antisense strand to SEQ ID NO: 2437292
uucucccugggacaggcug

SEQ ID NO: 2437294 - RNA, 19 nt, Artificial Sequence
  Description of Artificial Sequence: Synthetic oligonucleotide
  Sense strand starting at position 2570 of SEQ ID NO: 1886944
ggguguugagaccgaagga

SEQ ID NO: 2437295 - RNA, 19 nt, Artificial Sequence
  Description of Artificial Sequence: Synthetic oligonucleotide
  Antisense strand to SEQ ID NO: 2437294
uccuucggucucaacaccc

SEQ ID NO: 2437296 - RNA, 19 nt, Artificial Sequence
  Description of Artificial Sequence: Synthetic oligonucleotide
  Sense strand starting at position 2815 of SEQ ID NO: 1886944
gcuucucgcucuuguguaa

SEQ ID NO: 2437297 - RNA, 19 nt, Artificial Sequence
  Description of Artificial Sequence: Synthetic oligonucleotide
  Antisense strand to SEQ ID NO: 2437296
uuacacaagagcgagaagc

SEQ ID NO: 2437298 - RNA, 19 nt, Artificial Sequence
  Description of Artificial Sequence: Synthetic oligonucleotide
  Sense strand starting at position 2816 of SEQ ID NO: 1886944
cuucucgcucuuguguaau

SEQ ID NO: 2437299 - RNA, 19 nt, Artificial Sequence
  Description of Artificial Sequence: Synthetic oligonucleotide
  Antisense strand to SEQ ID NO: 2437298
auuacacaagagcgagaag

SEQ ID NO: 2437300 - RNA, 19 nt, Artificial Sequence
  Description of Artificial Sequence: Synthetic oligonucleotide
  Sense strand starting at position 2822 of SEQ ID NO: 1886944
gcucuuguguaaucccaca

SEQ ID NO: 2437301 - RNA, 19 nt, Artificial Sequence
  Description of Artificial Sequence: Synthetic oligonucleotide
  Antisense strand to SEQ ID NO: 2437300
ugugggauuacacaagagc

SEQ ID NO: 2437302 - RNA, 19 nt, Artificial Sequence
  Description of Artificial Sequence: Synthetic oligonucleotide
  Sense strand starting at position 2827 of SEQ ID NO: 1886944
uguguaaucccacaagcga

SEQ ID NO: 2437303 - RNA, 19 nt, Artificial Sequence
  Description of Artificial Sequence: Synthetic oligonucleotide
  Antisense strand to SEQ ID NO: 2437302
ucgcuugugggauuacaca

SEQ ID NO: 2437304 - RNA, 19 nt, Artificial Sequence
  Description of Artificial Sequence: Synthetic oligonucleotide
  Sense strand starting at position 3286 of SEQ ID NO: 1886944
cccucauucucugacgaua

SEQ ID NO: 2437305 - RNA, 19 nt, Artificial Sequence
  Description of Artificial Sequence: Synthetic oligonucleotide
  Antisense strand to SEQ ID NO: 2437304
uaucgucagagaaugaggg

SEQ ID NO: 2437306 - RNA, 19 nt, Artificial Sequence
  Description of Artificial Sequence: Synthetic oligonucleotide
  Sense strand starting at position 3291 of SEQ ID NO: 1886944
auucucugacgauaggagu

SEQ ID NO: 2437307 - RNA, 19 nt, Artificial Sequence
  Description of Artificial Sequence: Synthetic oligonucleotide
  Antisense strand to SEQ ID NO: 2437306
acuccuaucgucagagaau

SEQ ID NO: 2437308 - RNA, 19 nt, Artificial Sequence
  Description of Artificial Sequence: Synthetic oligonucleotide
  Sense strand starting at position 3304 of SEQ ID NO: 1886944
aggagucggcaacguaauu

SEQ ID NO: 2437309 - RNA, 19 nt, Artificial Sequence
  Description of Artificial Sequence: Synthetic oligonucleotide
  Antisense strand to SEQ ID NO: 2437308
aauuacguugccgacuccu

SEQ ID NO: 2437310 - RNA, 19 nt, Artificial Sequence
  Description of Artificial Sequence: Synthetic oligonucleotide
  Sense strand starting at position 3512 of SEQ ID NO: 1886944
ccggaaacaugguguaaac

SEQ ID NO: 2437311 - RNA, 19 nt, Artificial Sequence
  Description of Artificial Sequence: Synthetic oligonucleotide
  Antisense strand to SEQ ID NO: 2437310
guuuacaccauguuuccgg

SEQ ID NO: 2437312 - RNA, 19 nt, Artificial Sequence
  Description of Artificial Sequence: Synthetic oligonucleotide
  Sense strand starting at position 3602 of SEQ ID NO: 1886944
ggucccagcuacuuaagau

SEQ ID NO: 2437313 - RNA, 19 nt, Artificial Sequence
  Description of Artificial Sequence: Synthetic oligonucleotide
  Antisense strand to SEQ ID NO: 2437312
aucuuaaguagcugggacc

SEQ ID NO: 2437314 - RNA, 19 nt, Artificial Sequence
  Description of Artificial Sequence: Synthetic oligonucleotide
  Sense strand starting at position 3785 of SEQ ID NO: 1886944
ccuugaagcgcuuacauuu

SEQ ID NO: 2437315 - RNA, 19 nt, Artificial Sequence
  Description of Artificial Sequence: Synthetic oligonucleotide
  Antisense strand to SEQ ID NO: 2437314
aaauguaagcgcuucaagg

SEQ ID NO: 2437316 - RNA, 19 nt, Artificial Sequence
  Description of Artificial Sequence: Synthetic oligonucleotide
  Sense strand starting at position 3800 of SEQ ID NO: 1886944
auuugaauugcugguuucu

SEQ ID NO: 2437317 - RNA, 19 nt, Artificial Sequence
  Description of Artificial Sequence: Synthetic oligonucleotide
  Antisense strand to SEQ ID NO: 2437316
agaaaccagcaauucaaau

SEQ ID NO: 2437318 - RNA, 19 nt, Artificial Sequence
  Description of Artificial Sequence: Synthetic oligonucleotide
  Sense strand starting at position 3811 of SEQ ID NO: 1886944
ugguuucugugcugccaua

SEQ ID NO: 2437319 - RNA, 19 nt, Artificial Sequence
  Description of Artificial Sequence: Synthetic oligonucleotide
  Antisense strand to SEQ ID NO: 2437318
uauggcagcacagaaacca

SEQ ID NO: 2437320 - RNA, 19 nt, Artificial Sequence
  Description of Artificial Sequence: Synthetic oligonucleotide
  Sense strand starting at position 3848 of SEQ ID NO: 1886944
acaguugccugcuuugaga

SEQ ID NO: 2437321 - RNA, 19 nt, Artificial Sequence
  Description of Artificial Sequence: Synthetic oligonucleotide
  Antisense strand to SEQ ID NO: 2437320
ucucaaagcaggcaacugu

SEQ ID NO: 2437322 - RNA, 19 nt, Artificial Sequence
  Description of Artificial Sequence: Synthetic oligonucleotide
  Sense strand starting at position 3850 of SEQ ID NO: 1886944
aguugccugcuuugagaca

SEQ ID NO: 2437323 - RNA, 19 nt, Artificial Sequence
  Description of Artificial Sequence: Synthetic oligonucleotide
  Antisense strand to SEQ ID NO: 2437322
ugucucaaagcaggcaacu

SEQ ID NO: 2437324 - RNA, 19 nt, Artificial Sequence
  Description of Artificial Sequence: Synthetic oligonucleotide
  Sense strand starting at position 3872 of SEQ ID NO: 1886944
gauggagaauauuccguuu

SEQ ID NO: 2437325 - RNA, 19 nt, Artificial Sequence
  Description of Artificial Sequence: Synthetic oligonucleotide
  Antisense strand to SEQ ID NO: 2437324
aaacggaauauucuccauc

SEQ ID NO: 2437326 - RNA, 19 nt, Artificial Sequence
  Description of Artificial Sequence: Synthetic oligonucleotide
  Sense strand starting at position 3878 of SEQ ID NO: 1886944
gaauauuccguuugccaga

SEQ ID NO: 2437327 - RNA, 19 nt, Artificial Sequence
  Description of Artificial Sequence: Synthetic oligonucleotide
  Antisense strand to SEQ ID NO: 2437326
ucuggcaaacggaauauuc

SEQ ID NO: 2437328 - RNA, 19 nt, Artificial Sequence
  Description of Artificial Sequence: Synthetic oligonucleotide
  Sense strand starting at position 3898 of SEQ ID NO: 1886944
gagcuauaguaauugcucu

SEQ ID NO: 2437329 - RNA, 19 nt, Artificial Sequence
  Description of Artificial Sequence: Synthetic oligonucleotide
  Antisense strand to SEQ ID NO: 2437328
agagcaauuacuauagcuc

SEQ ID NO: 2437330 - RNA, 19 nt, Artificial Sequence
  Description of Artificial Sequence: Synthetic oligonucleotide
  Sense strand starting at position 3905 of SEQ ID NO: 1886944
aguaauugcucucgccuga

SEQ ID NO: 2437331 - RNA, 19 nt, Artificial Sequence
  Description of Artificial Sequence: Synthetic oligonucleotide
  Antisense strand to SEQ ID NO: 2437330
ucaggcgagagcaauuacu

SEQ ID NO: 2437332 - RNA, 19 nt, Artificial Sequence
  Description of Artificial Sequence: Synthetic oligonucleotide
  Sense strand starting at position 3906 of SEQ ID NO: 1886944
guaauugcucucgccugau

SEQ ID NO: 2437333 - RNA, 19 nt, Artificial Sequence
  Description of Artificial Sequence: Synthetic oligonucleotide
  Antisense strand to SEQ ID NO: 2437332
aucaggcgagagcaauuac

SEQ ID NO: 2437334 - RNA, 19 nt, Artificial Sequence
  Description of Artificial Sequence: Synthetic oligonucleotide
  Sense strand starting at position 3921 of SEQ ID NO: 1886944
ugaugccuucccgcuguaa

SEQ ID NO: 2437335 - RNA, 19 nt, Artificial Sequence
  Description of Artificial Sequence: Synthetic oligonucleotide
  Antisense strand to SEQ ID NO: 2437334
uuacagcgggaaggcauca

SEQ ID NO: 2437336 - RNA, 19 nt, Artificial Sequence
  Description of Artificial Sequence: Synthetic oligonucleotide
  Sense strand starting at position 3923 of SEQ ID NO: 1886944
augccuucccgcuguaaca

SEQ ID NO: 2437337 - RNA, 19 nt, Artificial Sequence
  Description of Artificial Sequence: Synthetic oligonucleotide
  Antisense strand to SEQ ID NO: 2437336
uguuacagcgggaaggcau

SEQ ID NO: 2437338 - RNA, 19 nt, Artificial Sequence
  Description of Artificial Sequence: Synthetic oligonucleotide
  Sense strand starting at position 91 of SEQ ID NO: 1886945
cacugcuccuggcgagaaa

SEQ ID NO: 2437339 - RNA, 19 nt, Artificial Sequence
  Description of Artificial Sequence: Synthetic oligonucleotide
  Antisense strand to SEQ ID NO: 2437338
uuucucgccaggagcagug

SEQ ID NO: 2437340 - RNA, 19 nt, Artificial Sequence
  Description of Artificial Sequence: Synthetic oligonucleotide
  Sense strand starting at position 139 of SEQ ID NO: 1886945
cccuuaguagccuauaugu

SEQ ID NO: 2437341 - RNA, 19 nt, Artificial Sequence
  Description of Artificial Sequence: Synthetic oligonucleotide
  Antisense strand to SEQ ID NO: 2437340
acauauaggcuacuaaggg

SEQ ID NO: 2437342 - RNA, 19 nt, Artificial Sequence
  Description of Artificial Sequence: Synthetic oligonucleotide
  Sense strand starting at position 141 of SEQ ID NO: 1886945
cuuaguagccuauauguaa

SEQ ID NO: 2437343 - RNA, 19 nt, Artificial Sequence
  Description of Artificial Sequence: Synthetic oligonucleotide
  Antisense strand to SEQ ID NO: 2437342
uuacauauaggcuacuaag

SEQ ID NO: 2437344 - RNA, 19 nt, Artificial Sequence
  Description of Artificial Sequence: Synthetic oligonucleotide
  Sense strand starting at position 246 of SEQ ID NO: 1886945
gcauauauuguacaacuga

SEQ ID NO: 2437345 - RNA, 19 nt, Artificial Sequence
  Description of Artificial Sequence: Synthetic oligonucleotide
  Antisense strand to SEQ ID NO: 2437344
ucaguuguacaauauaugc

SEQ ID NO: 2437346 - RNA, 19 nt, Artificial Sequence
  Description of Artificial Sequence: Synthetic oligonucleotide
  Sense strand starting at position 291 of SEQ ID NO: 1886945
uuaccagaguucucacugu

SEQ ID NO: 2437347 - RNA, 19 nt, Artificial Sequence
  Description of Artificial Sequence: Synthetic oligonucleotide
  Antisense strand to SEQ ID NO: 2437346
acagugagaacucugguaa

SEQ ID NO: 2437348 - RNA, 19 nt, Artificial Sequence
  Description of Artificial Sequence: Synthetic oligonucleotide
  Sense strand starting at position 655 of SEQ ID NO: 1886945
aguagaacgcuauggaauu

SEQ ID NO: 2437349 - RNA, 19 nt, Artificial Sequence
  Description of Artificial Sequence: Synthetic oligonucleotide
  Antisense strand to SEQ ID NO: 2437348
aauuccauagcguucuacu

SEQ ID NO: 2437350 - RNA, 19 nt, Artificial Sequence
  Description of Artificial Sequence: Synthetic oligonucleotide
  Sense strand starting at position 674 of SEQ ID NO: 1886945
cgacuagaauuagggcuaa

SEQ ID NO: 2437351 - RNA, 19 nt, Artificial Sequence
  Description of Artificial Sequence: Synthetic oligonucleotide
  Antisense strand to SEQ ID NO: 2437350
uuagcccuaauucuagucg

SEQ ID NO: 2437352 - RNA, 19 nt, Artificial Sequence
  Description of Artificial Sequence: Synthetic oligonucleotide
  Sense strand starting at position 1649 of SEQ ID NO: 1886945
acagaagaaugacaauaua

SEQ ID NO: 2437353 - RNA, 19 nt, Artificial Sequence
  Description of Artificial Sequence: Synthetic oligonucleotide
  Antisense strand to SEQ ID NO: 2437352
uauauugucauucuucugu

SEQ ID NO: 2437354 - RNA, 19 nt, Artificial Sequence
  Description of Artificial Sequence: Synthetic oligonucleotide
  Sense strand starting at position 1756 of SEQ ID NO: 1886945
aguaaagauuauuauggga

SEQ ID NO: 2437355 - RNA, 19 nt, Artificial Sequence
  Description of Artificial Sequence: Synthetic oligonucleotide
  Antisense strand to SEQ ID NO: 2437354
ucccauaauaaucuuuacu

SEQ ID NO: 2437356 - RNA, 19 nt, Artificial Sequence
  Description of Artificial Sequence: Synthetic oligonucleotide
  Sense strand starting at position 1761 of SEQ ID NO: 1886945
agauuauuaugggacagaa

SEQ ID NO: 2437357 - RNA, 19 nt, Artificial Sequence
  Description of Artificial Sequence: Synthetic oligonucleotide
  Antisense strand to SEQ ID NO: 2437356
uucugucccauaauaaucu

SEQ ID NO: 2437358 - RNA, 19 nt, Artificial Sequence
  Description of Artificial Sequence: Synthetic oligonucleotide
  Sense strand starting at position 1800 of SEQ ID NO: 1886945
uuccauagaucacuuguua

SEQ ID NO: 2437359 - RNA, 19 nt, Artificial Sequence
  Description of Artificial Sequence: Synthetic oligonucleotide
  Antisense strand to SEQ ID NO: 2437358
uaacaagugaucuauggaa

SEQ ID NO: 2437360 - RNA, 19 nt, Artificial Sequence
  Description of Artificial Sequence: Synthetic oligonucleotide
  Sense strand starting at position 2299 of SEQ ID NO: 1886945
augguaucaacuggugauc

SEQ ID NO: 2437361 - RNA, 19 nt, Artificial Sequence
  Description of Artificial Sequence: Synthetic oligonucleotide
  Antisense strand to SEQ ID NO: 2437360
gaucaccaguugauaccau

SEQ ID NO: 2437362 - RNA, 19 nt, Artificial Sequence
  Description of Artificial Sequence: Synthetic oligonucleotide
  Sense strand starting at position 2422 of SEQ ID NO: 1886945
aaucaauugugaggaaguc

SEQ ID NO: 2437363 - RNA, 19 nt, Artificial Sequence
  Description of Artificial Sequence: Synthetic oligonucleotide
  Antisense strand to SEQ ID NO: 2437362
gacuuccucacaauugauu

SEQ ID NO: 2437364 - RNA, 19 nt, Artificial Sequence
  Description of Artificial Sequence: Synthetic oligonucleotide
  Sense strand starting at position 2447 of SEQ ID NO: 1886945
gccacagacuaagagauaa

SEQ ID NO: 2437365 - RNA, 19 nt, Artificial Sequence
  Description of Artificial Sequence: Synthetic oligonucleotide
  Antisense strand to SEQ ID NO: 2437364
uuaucucuuagucuguggc

SEQ ID NO: 2437366 - RNA, 19 nt, Artificial Sequence
  Description of Artificial Sequence: Synthetic oligonucleotide
  Sense strand starting at position 2550 of SEQ ID NO: 1886945
aaguuaaauuaaggacgaa

SEQ ID NO: 2437367 - RNA, 19 nt, Artificial Sequence
  Description of Artificial Sequence: Synthetic oligonucleotide
  Antisense strand to SEQ ID NO: 2437366
uucguccuuaauuuaacuu

SEQ ID NO: 2437368 - RNA, 19 nt, Artificial Sequence
  Description of Artificial Sequence: Synthetic oligonucleotide
  Sense strand starting at position 2596 of SEQ ID NO: 1886945
cugggaagucagugaugac

SEQ ID NO: 2437369 - RNA, 19 nt, Artificial Sequence
  Description of Artificial Sequence: Synthetic oligonucleotide
  Antisense strand to SEQ ID NO: 2437368
gucaucacugacuucccag

SEQ ID NO: 2437370 - RNA, 19 nt, Artificial Sequence
  Description of Artificial Sequence: Synthetic oligonucleotide
  Sense strand starting at position 2599 of SEQ ID NO: 1886945
ggaagucagugaugaccua

SEQ ID NO: 2437371 - RNA, 19 nt, Artificial Sequence
  Description of Artificial Sequence: Synthetic oligonucleotide
  Antisense strand to SEQ ID NO: 2437370
uaggucaucacugacuucc

SEQ ID NO: 2437372 - RNA, 19 nt, Artificial Sequence
  Description of Artificial Sequence: Synthetic oligonucleotide
  Sense strand starting at position 2606 of SEQ ID NO: 1886945
agugaugaccuaggguaca

SEQ ID NO: 2437373 - RNA, 19 nt, Artificial Sequence
  Description of Artificial Sequence: Synthetic oligonucleotide
  Antisense strand to SEQ ID NO: 2437372
uguacccuaggucaucacu

SEQ ID NO: 2437374 - RNA, 19 nt, Artificial Sequence
  Description of Artificial Sequence: Synthetic oligonucleotide
  Sense strand starting at position 2672 of SEQ ID NO: 1886945
ccuauaauccagcaguuug

SEQ ID NO: 2437375 - RNA, 19 nt, Artificial Sequence
  Description of Artificial Sequence: Synthetic oligonucleotide
  Antisense strand to SEQ ID NO: 2437374
caaacugcuggauuauagg

SEQ ID NO: 2437376 - RNA, 19 nt, Artificial Sequence
  Description of Artificial Sequence: Synthetic oligonucleotide
  Sense strand starting at position 3232 of SEQ ID NO: 1886945
ggaaguaaacuggguaucu

SEQ ID NO: 2437377 - RNA, 19 nt, Artificial Sequence
  Description of Artificial Sequence: Synthetic oligonucleotide
  Antisense strand to SEQ ID NO: 2437376
agauacccaguuuacuucc

SEQ ID NO: 2437378 - RNA, 19 nt, Artificial Sequence
  Description of Artificial Sequence: Synthetic oligonucleotide
  Sense strand starting at position 3241 of SEQ ID NO: 1886945
cuggguaucugccuuuaga

SEQ ID NO: 2437379 - RNA, 19 nt, Artificial Sequence
  Description of Artificial Sequence: Synthetic oligonucleotide
  Antisense strand to SEQ ID NO: 2437378
ucuaaaggcagauacccag

SEQ ID NO: 2437380 - RNA, 19 nt, Artificial Sequence
  Description of Artificial Sequence: Synthetic oligonucleotide
  Sense strand starting at position 3244 of SEQ ID NO: 1886945
gguaucugccuuuagaggu

SEQ ID NO: 2437381 - RNA, 19 nt, Artificial Sequence
  Description of Artificial Sequence: Synthetic oligonucleotide
  Antisense strand to SEQ ID NO: 2437380
accucuaaaggcagauacc

SEQ ID NO: 2437382 - RNA, 19 nt, Artificial Sequence
  Description of Artificial Sequence: Synthetic oligonucleotide
  Sense strand starting at position 3250 of SEQ ID NO: 1886945
ugccuuuagagguguugua

SEQ ID NO: 2437383 - RNA, 19 nt, Artificial Sequence
  Description of Artificial Sequence: Synthetic oligonucleotide
  Antisense strand to SEQ ID NO: 2437382
uacaacaccucuaaaggca

SEQ ID NO: 2437384 - RNA, 19 nt, Artificial Sequence
  Description of Artificial Sequence: Synthetic oligonucleotide
  Sense strand starting at position 3301 of SEQ ID NO: 1886945
uggcaauaguuacuuggua

SEQ ID NO: 2437385 - RNA, 19 nt, Artificial Sequence
  Description of Artificial Sequence: Synthetic oligonucleotide
  Antisense strand to SEQ ID NO: 2437384
uaccaaguaacuauugcca

SEQ ID NO: 2437386 - RNA, 19 nt, Artificial Sequence
  Description of Artificial Sequence: Synthetic oligonucleotide
  Sense strand starting at position 3308 of SEQ ID NO: 1886945
aguuacuugguacauagau

SEQ ID NO: 2437387 - RNA, 19 nt, Artificial Sequence
  Description of Artificial Sequence: Synthetic oligonucleotide
  Antisense strand to SEQ ID NO: 2437386
aucuauguaccaaguaacu

SEQ ID NO: 2437388 - RNA, 19 nt, Artificial Sequence
  Description of Artificial Sequence: Synthetic oligonucleotide
  Sense strand starting at position 3497 of SEQ ID NO: 1886945
augaucuuugagcaaacgu

SEQ ID NO: 2437389 - RNA, 19 nt, Artificial Sequence
  Description of Artificial Sequence: Synthetic oligonucleotide
  Antisense strand to SEQ ID NO: 2437388
acguuugcucaaagaucau

SEQ ID NO: 2437390 - RNA, 19 nt, Artificial Sequence
  Description of Artificial Sequence: Synthetic oligonucleotide
  Sense strand starting at position 3506 of SEQ ID NO: 1886945
gagcaaacgucuuagcuuc

SEQ ID NO: 2437391 - RNA, 19 nt, Artificial Sequence
  Description of Artificial Sequence: Synthetic oligonucleotide
  Antisense strand to SEQ ID NO: 2437390
gaagcuaagacguuugcuc

SEQ ID NO: 2437392 - RNA, 19 nt, Artificial Sequence
  Description of Artificial Sequence: Synthetic oligonucleotide
  Sense strand starting at position 68 of SEQ ID NO: 1886946
uugcaaauugccugcuaaa

SEQ ID NO: 2437393 - RNA, 19 nt, Artificial Sequence
  Description of Artificial Sequence: Synthetic oligonucleotide
  Antisense strand to SEQ ID NO: 2437392
uuuagcaggcaauuugcaa

SEQ ID NO: 2437394 - RNA, 19 nt, Artificial Sequence
  Description of Artificial Sequence: Synthetic oligonucleotide
  Sense strand starting at position 77 of SEQ ID NO: 1886946
gccugcuaaacaugagaga

SEQ ID NO: 2437395 - RNA, 19 nt, Artificial Sequence
  Description of Artificial Sequence: Synthetic oligonucleotide
  Antisense strand to SEQ ID NO: 2437394
ucucucauguuuagcaggc

SEQ ID NO: 2437396 - RNA, 19 nt, Artificial Sequence
  Description of Artificial Sequence: Synthetic oligonucleotide
  Sense strand starting at position 80 of SEQ ID NO: 1886946
ugcuaaacaugagagauua

SEQ ID NO: 2437397 - RNA, 19 nt, Artificial Sequence
  Description of Artificial Sequence: Synthetic oligonucleotide
  Antisense strand to SEQ ID NO: 2437396
uaaucucucauguuuagca

SEQ ID NO: 2437398 - RNA, 19 nt, Artificial Sequence
  Description of Artificial Sequence: Synthetic oligonucleotide
  Sense strand starting at position 302 of SEQ ID NO: 1886946
auaggauucuuccaagggu

SEQ ID NO: 2437399 - RNA, 19 nt, Artificial Sequence
  Description of Artificial Sequence: Synthetic oligonucleotide
  Antisense strand to SEQ ID NO: 2437398
acccuuggaagaauccuau

SEQ ID NO: 2437400 - RNA, 19 nt, Artificial Sequence
  Description of Artificial Sequence: Synthetic oligonucleotide
  Sense strand starting at position 305 of SEQ ID NO: 1886946
ggauucuuccaagggugag

SEQ ID NO: 2437401 - RNA, 19 nt, Artificial Sequence
  Description of Artificial Sequence: Synthetic oligonucleotide
  Antisense strand to SEQ ID NO: 2437400
cucacccuuggaagaaucc

SEQ ID NO: 2437402 - RNA, 19 nt, Artificial Sequence
  Description of Artificial Sequence: Synthetic oligonucleotide
  Sense strand starting at position 332 of SEQ ID NO: 1886946
aggugaaagcaucagaggu

SEQ ID NO: 2437403 - RNA, 19 nt, Artificial Sequence
  Description of Artificial Sequence: Synthetic oligonucleotide
  Antisense strand to SEQ ID NO: 2437402
accucugaugcuuucaccu

SEQ ID NO: 2437404 - RNA, 19 nt, Artificial Sequence
  Description of Artificial Sequence: Synthetic oligonucleotide
  Sense strand starting at position 342 of SEQ ID NO: 1886946
aucagaggugcucagcaaa

SEQ ID NO: 2437405 - RNA, 19 nt, Artificial Sequence
  Description of Artificial Sequence: Synthetic oligonucleotide
  Antisense strand to SEQ ID NO: 2437404
uuugcugagcaccucugau

SEQ ID NO: 2437406 - RNA, 19 nt, Artificial Sequence
  Description of Artificial Sequence: Synthetic oligonucleotide
  Sense strand starting at position 422 of SEQ ID NO: 1886946
gaccuaaagugcucaguuc

SEQ ID NO: 2437407 - RNA, 19 nt, Artificial Sequence
  Description of Artificial Sequence: Synthetic oligonucleotide
  Antisense strand to SEQ ID NO: 2437406
gaacugagcacuuuagguc

SEQ ID NO: 2437408 - RNA, 19 nt, Artificial Sequence
  Description of Artificial Sequence: Synthetic oligonucleotide
  Sense strand starting at position 545 of SEQ ID NO: 1886946
gcuguuagugugcuuggua

SEQ ID NO: 2437409 - RNA, 19 nt, Artificial Sequence
  Description of Artificial Sequence: Synthetic oligonucleotide
  Antisense strand to SEQ ID NO: 2437408
uaccaagcacacuaacagc

SEQ ID NO: 2437410 - RNA, 19 nt, Artificial Sequence
  Description of Artificial Sequence: Synthetic oligonucleotide
  Sense strand starting at position 554 of SEQ ID NO: 1886946
gugcuugguacacagaguu

SEQ ID NO: 2437411 - RNA, 19 nt, Artificial Sequence
  Description of Artificial Sequence: Synthetic oligonucleotide
  Antisense strand to SEQ ID NO: 2437410
aacucuguguaccaagcac

SEQ ID NO: 2437412 - RNA, 19 nt, Artificial Sequence
  Description of Artificial Sequence: Synthetic oligonucleotide
  Sense strand starting at position 569 of SEQ ID NO: 1886946
aguuuacugugucuuggau

SEQ ID NO: 2437413 - RNA, 19 nt, Artificial Sequence
  Description of Artificial Sequence: Synthetic oligonucleotide
  Antisense strand to SEQ ID NO: 2437412
auccaagacacaguaaacu

SEQ ID NO: 2437414 - RNA, 19 nt, Artificial Sequence
  Description of Artificial Sequence: Synthetic oligonucleotide
  Sense strand starting at position 628 of SEQ ID NO: 1886946
ggguacaguuguugucaaa

SEQ ID NO: 2437415 - RNA, 19 nt, Artificial Sequence
  Description of Artificial Sequence: Synthetic oligonucleotide
  Antisense strand to SEQ ID NO: 2437414
uuugacaacaacuguaccc

SEQ ID NO: 2437416 - RNA, 19 nt, Artificial Sequence
  Description of Artificial Sequence: Synthetic oligonucleotide
  Sense strand starting at position 805 of SEQ ID NO: 1886946
cucgguuccugucuaccaa

SEQ ID NO: 2437417 - RNA, 19 nt, Artificial Sequence
  Description of Artificial Sequence: Synthetic oligonucleotide
  Antisense strand to SEQ ID NO: 2437416
uugguagacaggaaccgag

SEQ ID NO: 2437418 - RNA, 19 nt, Artificial Sequence
  Description of Artificial Sequence: Synthetic oligonucleotide
  Sense strand starting at position 809 of SEQ ID NO: 1886946
guuccugucuaccaacuaa

SEQ ID NO: 2437419 - RNA, 19 nt, Artificial Sequence
  Description of Artificial Sequence: Synthetic oligonucleotide
  Antisense strand to SEQ ID NO: 2437418
uuaguugguagacaggaac

SEQ ID NO: 2437420 - RNA, 19 nt, Artificial Sequence
  Description of Artificial Sequence: Synthetic oligonucleotide
  Sense strand starting at position 848 of SEQ ID NO: 1886946
ccagaaucugcaugaugca

SEQ ID NO: 2437421 - RNA, 19 nt, Artificial Sequence
  Description of Artificial Sequence: Synthetic oligonucleotide
  Antisense strand to SEQ ID NO: 2437420
ugcaucaugcagauucugg

SEQ ID NO: 2437422 - RNA, 19 nt, Artificial Sequence
  Description of Artificial Sequence: Synthetic oligonucleotide
  Sense strand starting at position 894 of SEQ ID NO: 1886946
gcaccuugagcgugagaac

SEQ ID NO: 2437423 - RNA, 19 nt, Artificial Sequence
  Description of Artificial Sequence: Synthetic oligonucleotide
  Antisense strand to SEQ ID NO: 2437422
guucucacgcucaaggugc

SEQ ID NO: 2437424 - RNA, 19 nt, Artificial Sequence
  Description of Artificial Sequence: Synthetic oligonucleotide
  Sense strand starting at position 968 of SEQ ID NO: 1886946
cccuguuccucccuggaau

SEQ ID NO: 2437425 - RNA, 19 nt, Artificial Sequence
  Description of Artificial Sequence: Synthetic oligonucleotide
  Antisense strand to SEQ ID NO: 2437424
auuccagggaggaacaggg

SEQ ID NO: 2437426 - RNA, 19 nt, Artificial Sequence
  Description of Artificial Sequence: Synthetic oligonucleotide
  Sense strand starting at position 1115 of SEQ ID NO: 1886946
ccagacuugacauggcgaa

SEQ ID NO: 2437427 - RNA, 19 nt, Artificial Sequence
  Description of Artificial Sequence: Synthetic oligonucleotide
  Antisense strand to SEQ ID NO: 2437426
uucgccaugucaagucugg

SEQ ID NO: 2437428 - RNA, 19 nt, Artificial Sequence
  Description of Artificial Sequence: Synthetic oligonucleotide
  Sense strand starting at position 1116 of SEQ ID NO: 1886946
cagacuugacauggcgaaa

SEQ ID NO: 2437429 - RNA, 19 nt, Artificial Sequence
  Description of Artificial Sequence: Synthetic oligonucleotide
  Antisense strand to SEQ ID NO: 2437428
uuucgccaugucaagucug

SEQ ID NO: 2437430 - RNA, 19 nt, Artificial Sequence
  Description of Artificial Sequence: Synthetic oligonucleotide
  Sense strand starting at position 1349 of SEQ ID NO: 1886946
cugcauuugucuccuaaug

SEQ ID NO: 2437431 - RNA, 19 nt, Artificial Sequence
  Description of Artificial Sequence: Synthetic oligonucleotide
  Antisense strand to SEQ ID NO: 2437430
cauuaggagacaaaugcag

SEQ ID NO: 2437432 - RNA, 19 nt, Artificial Sequence
  Description of Artificial Sequence: Synthetic oligonucleotide
  Sense strand starting at position 1351 of SEQ ID NO: 1886946
gcauuugucuccuaaugau

SEQ ID NO: 2437433 - RNA, 19 nt, Artificial Sequence
  Description of Artificial Sequence: Synthetic oligonucleotide
  Antisense strand to SEQ ID NO: 2437432
aucauuaggagacaaaugc

SEQ ID NO: 2437434 - RNA, 19 nt, Artificial Sequence
  Description of Artificial Sequence: Synthetic oligonucleotide
  Sense strand starting at position 1387 of SEQ ID NO: 1886946
ccucuaguccagggaauuc

SEQ ID NO: 2437435 - RNA, 19 nt, Artificial Sequence
  Description of Artificial Sequence: Synthetic oligonucleotide
  Antisense strand to SEQ ID NO: 2437434
gaauucccuggacuagagg

SEQ ID NO: 2437436 - RNA, 19 nt, Artificial Sequence
  Description of Artificial Sequence: Synthetic oligonucleotide
  Sense strand starting at position 1608 of SEQ ID NO: 1886946
aggaauagcccuugccaga

SEQ ID NO: 2437437 - RNA, 19 nt, Artificial Sequence
  Description of Artificial Sequence: Synthetic oligonucleotide
  Antisense strand to SEQ ID NO: 2437436
ucuggcaagggcuauuccu

SEQ ID NO: 2437438 - RNA, 19 nt, Artificial Sequence
  Description of Artificial Sequence: Synthetic oligonucleotide
  Sense strand starting at position 1792 of SEQ ID NO: 1886946
uccacacuugccgaugaga

SEQ ID NO: 2437439 - RNA, 19 nt, Artificial Sequence
  Description of Artificial Sequence: Synthetic oligonucleotide
  Antisense strand to SEQ ID NO: 2437438
ucucaucggcaagugugga

SEQ ID NO: 2437440 - RNA, 19 nt, Artificial Sequence
  Description of Artificial Sequence: Synthetic oligonucleotide
  Sense strand starting at position 1794 of SEQ ID NO: 1886946
cacacuugccgaugagauc

SEQ ID NO: 2437441 - RNA, 19 nt, Artificial Sequence
  Description of Artificial Sequence: Synthetic oligonucleotide
  Antisense strand to SEQ ID NO: 2437440
gaucucaucggcaagugug

SEQ ID NO: 2437442 - RNA, 19 nt, Artificial Sequence
  Description of Artificial Sequence: Synthetic oligonucleotide
  Sense strand starting at position 1991 of SEQ ID NO: 1886946
gagcaaaugugugggaagu

SEQ ID NO: 2437443 - RNA, 19 nt, Artificial Sequence
  Description of Artificial Sequence: Synthetic oligonucleotide
  Antisense strand to SEQ ID NO: 2437442
acuucccacacauuugcuc

SEQ ID NO: 2437444 - RNA, 19 nt, Artificial Sequence
  Description of Artificial Sequence: Synthetic oligonucleotide
  Sense strand starting at position 2016 of SEQ ID NO: 1886946
gcgagaacuuccguuuacu

SEQ ID NO: 2437445 - RNA, 19 nt, Artificial Sequence
  Description of Artificial Sequence: Synthetic oligonucleotide
  Antisense strand to SEQ ID NO: 2437444
aguaaacggaaguucucgc

SEQ ID NO: 2437446 - RNA, 19 nt, Artificial Sequence
  Description of Artificial Sequence: Synthetic oligonucleotide
  Sense strand starting at position 2069 of SEQ ID NO: 1886946
gcgcuuuguuugcacauuu

SEQ ID NO: 2437447 - RNA, 19 nt, Artificial Sequence
  Description of Artificial Sequence: Synthetic oligonucleotide
  Antisense strand to SEQ ID NO: 2437446
aaaugugcaaacaaagcgc

SEQ ID NO: 2437448 - RNA, 19 nt, Artificial Sequence
  Description of Artificial Sequence: Synthetic oligonucleotide
  Sense strand starting at position 2092 of SEQ ID NO: 1886946
ucauuugguucuugcaaga

SEQ ID NO: 2437449 - RNA, 19 nt, Artificial Sequence
  Description of Artificial Sequence: Synthetic oligonucleotide
  Antisense strand to SEQ ID NO: 2437448
ucuugcaagaaccaaauga

SEQ ID NO: 2437450 - RNA, 19 nt, Artificial Sequence
  Description of Artificial Sequence: Synthetic oligonucleotide
  Sense strand starting at position 2097 of SEQ ID NO: 1886946
ugguucuugcaagaacaga

SEQ ID NO: 2437451 - RNA, 19 nt, Artificial Sequence
  Description of Artificial Sequence: Synthetic oligonucleotide
  Antisense strand to SEQ ID NO: 2437450
ucuguucuugcaagaacca

SEQ ID NO: 2437452 - RNA, 19 nt, Artificial Sequence
  Description of Artificial Sequence: Synthetic oligonucleotide
  Sense strand starting at position 2186 of SEQ ID NO: 1886946
gggacugucuggccugaaa

SEQ ID NO: 2437453 - RNA, 19 nt, Artificial Sequence
  Description of Artificial Sequence: Synthetic oligonucleotide
  Antisense strand to SEQ ID NO: 2437452
uuucaggccagacaguccc

SEQ ID NO: 2437454 - RNA, 19 nt, Artificial Sequence
  Description of Artificial Sequence: Synthetic oligonucleotide
  Sense strand starting at position 2465 of SEQ ID NO: 1886946
ccaagaaagagcuguugca

SEQ ID NO: 2437455 - RNA, 19 nt, Artificial Sequence
  Description of Artificial Sequence: Synthetic oligonucleotide
  Antisense strand to SEQ ID NO: 2437454
ugcaacagcucuuucuugg

SEQ ID NO: 2437456 - RNA, 19 nt, Artificial Sequence
  Description of Artificial Sequence: Synthetic oligonucleotide
  Sense strand starting at position 2523 of SEQ ID NO: 1886946
cugugaugcugucuggguu

SEQ ID NO: 2437457 - RNA, 19 nt, Artificial Sequence
  Description of Artificial Sequence: Synthetic oligonucleotide
  Antisense strand to SEQ ID NO: 2437456
aacccagacagcaucacag

SEQ ID NO: 2437458 - RNA, 19 nt, Artificial Sequence
  Description of Artificial Sequence: Synthetic oligonucleotide
  Sense strand starting at position 2574 of SEQ ID NO: 1886946
ccaggcugauauuaagauu

SEQ ID NO: 2437459 - RNA, 19 nt, Artificial Sequence
  Description of Artificial Sequence: Synthetic oligonucleotide
  Antisense strand to SEQ ID NO: 2437458
aaucuuaauaucagccugg

SEQ ID NO: 2437460 - RNA, 19 nt, Artificial Sequence
  Description of Artificial Sequence: Synthetic oligonucleotide
  Sense strand starting at position 3007 of SEQ ID NO: 1886946
gaggguaaguagugaauaa

SEQ ID NO: 2437461 - RNA, 19 nt, Artificial Sequence
  Description of Artificial Sequence: Synthetic oligonucleotide
  Antisense strand to SEQ ID NO: 2437460
uuauucacuacuuacccuc

SEQ ID NO: 2437462 - RNA, 19 nt, Artificial Sequence
  Description of Artificial Sequence: Synthetic oligonucleotide
  Sense strand starting at position 3170 of SEQ ID NO: 1886946
ccgagaagguccagggauu

SEQ ID NO: 2437463 - RNA, 19 nt, Artificial Sequence
  Description of Artificial Sequence: Synthetic oligonucleotide
  Antisense strand to SEQ ID NO: 2437462
aaucccuggaccuucucgg

SEQ ID NO: 2437464 - RNA, 19 nt, Artificial Sequence
  Description of Artificial Sequence: Synthetic oligonucleotide
  Sense strand starting at position 3171 of SEQ ID NO: 1886946
cgagaagguccagggauua

SEQ ID NO: 2437465 - RNA, 19 nt, Artificial Sequence
  Description of Artificial Sequence: Synthetic oligonucleotide
  Antisense strand to SEQ ID NO: 2437464
uaaucccuggaccuucucg

SEQ ID NO: 2437466 - RNA, 19 nt, Artificial Sequence
  Description of Artificial Sequence: Synthetic oligonucleotide
  Sense strand starting at position 3546 of SEQ ID NO: 1886946
aggaguuaacuccggaggu

SEQ ID NO: 2437467 - RNA, 19 nt, Artificial Sequence
  Description of Artificial Sequence: Synthetic oligonucleotide
  Antisense strand to SEQ ID NO: 2437466
accuccggaguuaacuccu

SEQ ID NO: 2437468 - RNA, 19 nt, Artificial Sequence
  Description of Artificial Sequence: Synthetic oligonucleotide
  Sense strand starting at position 3547 of SEQ ID NO: 1886946
ggaguuaacuccggaggua

SEQ ID NO: 2437469 - RNA, 19 nt, Artificial Sequence
  Description of Artificial Sequence: Synthetic oligonucleotide
  Antisense strand to SEQ ID NO: 2437468
uaccuccggaguuaacucc

SEQ ID NO: 2437470 - RNA, 19 nt, Artificial Sequence
  Description of Artificial Sequence: Synthetic oligonucleotide
  Sense strand starting at position 3548 of SEQ ID NO: 1886946
gaguuaacuccggagguac

SEQ ID NO: 2437471 - RNA, 19 nt, Artificial Sequence
  Description of Artificial Sequence: Synthetic oligonucleotide
  Antisense strand to SEQ ID NO: 2437470
guaccuccggaguuaacuc

SEQ ID NO: 2437472 - RNA, 19 nt, Artificial Sequence
  Description of Artificial Sequence: Synthetic oligonucleotide
  Sense strand starting at position 403 of SEQ ID NO: 1886947
ugacgcucauucgcugaaa

SEQ ID NO: 2437473 - RNA, 19 nt, Artificial Sequence
  Description of Artificial Sequence: Synthetic oligonucleotide
  Antisense strand to SEQ ID NO: 2437472
uuucagcgaaugagcguca

SEQ ID NO: 2437474 - RNA, 19 nt, Artificial Sequence
  Description of Artificial Sequence: Synthetic oligonucleotide
  Sense strand starting at position 528 of SEQ ID NO: 1886947
aguccaaacugcgucauuu

SEQ ID NO: 2437475 - RNA, 19 nt, Artificial Sequence
  Description of Artificial Sequence: Synthetic oligonucleotide
  Antisense strand to SEQ ID NO: 2437474
aaaugacgcaguuuggacu

SEQ ID NO: 2437476 - RNA, 19 nt, Artificial Sequence
  Description of Artificial Sequence: Synthetic oligonucleotide
  Sense strand starting at position 564 of SEQ ID NO: 1886947
uuuguagaccuuggucaaa

SEQ ID NO: 2437477 - RNA, 19 nt, Artificial Sequence
  Description of Artificial Sequence: Synthetic oligonucleotide
  Antisense strand to SEQ ID NO: 2437476
uuugaccaaggucuacaaa

SEQ ID NO: 2437478 - RNA, 19 nt, Artificial Sequence
  Description of Artificial Sequence: Synthetic oligonucleotide
  Sense strand starting at position 566 of SEQ ID NO: 1886947
uguagaccuuggucaaagu

SEQ ID NO: 2437479 - RNA, 19 nt, Artificial Sequence
  Description of Artificial Sequence: Synthetic oligonucleotide
  Antisense strand to SEQ ID NO: 2437478
acuuugaccaaggucuaca

SEQ ID NO: 2437480 - RNA, 19 nt, Artificial Sequence
  Description of Artificial Sequence: Synthetic oligonucleotide
  Sense strand starting at position 599 of SEQ ID NO: 1886947
ggguucgagccaugagaaa

SEQ ID NO: 2437481 - RNA, 19 nt, Artificial Sequence
  Description of Artificial Sequence: Synthetic oligonucleotide
  Antisense strand to SEQ ID NO: 2437480
uuucucauggcucgaaccc

SEQ ID NO: 2437482 - RNA, 19 nt, Artificial Sequence
  Description of Artificial Sequence: Synthetic oligonucleotide
  Sense strand starting at position 629 of SEQ ID NO: 1886947
uuaacauauucugcuggga

SEQ ID NO: 2437483 - RNA, 19 nt, Artificial Sequence
  Description of Artificial Sequence: Synthetic oligonucleotide
  Antisense strand to SEQ ID NO: 2437482
ucccagcagaauauguuaa

SEQ ID NO: 2437484 - RNA, 19 nt, Artificial Sequence
  Description of Artificial Sequence: Synthetic oligonucleotide
  Sense strand starting at position 632 of SEQ ID NO: 1886947
acauauucugcugggacaa

SEQ ID NO: 2437485 - RNA, 19 nt, Artificial Sequence
  Description of Artificial Sequence: Synthetic oligonucleotide
  Antisense strand to SEQ ID NO: 2437484
uugucccagcagaauaugu

SEQ ID NO: 2437486 - RNA, 19 nt, Artificial Sequence
  Description of Artificial Sequence: Synthetic oligonucleotide
  Sense strand starting at position 700 of SEQ ID NO: 1886947
guuaacaucuucccggaca

SEQ ID NO: 2437487 - RNA, 19 nt, Artificial Sequence
  Description of Artificial Sequence: Synthetic oligonucleotide
  Antisense strand to SEQ ID NO: 2437486
uguccgggaagauguuaac

SEQ ID NO: 2437488 - RNA, 19 nt, Artificial Sequence
  Description of Artificial Sequence: Synthetic oligonucleotide
  Sense strand starting at position 806 of SEQ ID NO: 1886947
cccgacagguguuugcaau

SEQ ID NO: 2437489 - RNA, 19 nt, Artificial Sequence
  Description of Artificial Sequence: Synthetic oligonucleotide
  Antisense strand to SEQ ID NO: 2437488
auugcaaacaccugucggg

SEQ ID NO: 2437490 - RNA, 19 nt, Artificial Sequence
  Description of Artificial Sequence: Synthetic oligonucleotide
  Sense strand starting at position 807 of SEQ ID NO: 1886947
ccgacagguguuugcaaua

SEQ ID NO: 2437491 - RNA, 19 nt, Artificial Sequence
  Description of Artificial Sequence: Synthetic oligonucleotide
  Antisense strand to SEQ ID NO: 2437490
uauugcaaacaccugucgg

SEQ ID NO: 2437492 - RNA, 19 nt, Artificial Sequence
  Description of Artificial Sequence: Synthetic oligonucleotide
  Sense strand starting at position 812 of SEQ ID NO: 1886947
agguguuugcaauacaccu

SEQ ID NO: 2437493 - RNA, 19 nt, Artificial Sequence
  Description of Artificial Sequence: Synthetic oligonucleotide
  Antisense strand to SEQ ID NO: 2437492
agguguauugcaaacaccu

SEQ ID NO: 2437494 - RNA, 19 nt, Artificial Sequence
  Description of Artificial Sequence: Synthetic oligonucleotide
  Sense strand starting at position 866 of SEQ ID NO: 1886947
cacugugcgucauucuuua

SEQ ID NO: 2437495 - RNA, 19 nt, Artificial Sequence
  Description of Artificial Sequence: Synthetic oligonucleotide
  Antisense strand to SEQ ID NO: 2437494
uaaagaaugacgcacagug

SEQ ID NO: 2437496 - RNA, 19 nt, Artificial Sequence
  Description of Artificial Sequence: Synthetic oligonucleotide
  Sense strand starting at position 870 of SEQ ID NO: 1886947
gugcgucauucuuuaaccu

SEQ ID NO: 2437497 - RNA, 19 nt, Artificial Sequence
  Description of Artificial Sequence: Synthetic oligonucleotide
  Antisense strand to SEQ ID NO: 2437496
agguuaaagaaugacgcac

SEQ ID NO: 2437498 - RNA, 19 nt, Artificial Sequence
  Description of Artificial Sequence: Synthetic oligonucleotide
  Sense strand starting at position 871 of SEQ ID NO: 1886947
ugcgucauucuuuaaccuu

SEQ ID NO: 2437499 - RNA, 19 nt, Artificial Sequence
  Description of Artificial Sequence: Synthetic oligonucleotide
  Antisense strand to SEQ ID NO: 2437498
aagguuaaagaaugacgca

SEQ ID NO: 2437500 - RNA, 19 nt, Artificial Sequence
  Description of Artificial Sequence: Synthetic oligonucleotide
  Sense strand starting at position 964 of SEQ ID NO: 1886947
ucugaauccucccaggaga

SEQ ID NO: 2437501 - RNA, 19 nt, Artificial Sequence
  Description of Artificial Sequence: Synthetic oligonucleotide
  Antisense strand to SEQ ID NO: 2437500
ucuccugggaggauucaga

SEQ ID NO: 2437502 - RNA, 19 nt, Artificial Sequence
  Description of Artificial Sequence: Synthetic oligonucleotide
  Sense strand starting at position 1308 of SEQ ID NO: 1886947
uacuuugucugguaggaga

SEQ ID NO: 2437503 - RNA, 19 nt, Artificial Sequence
  Description of Artificial Sequence: Synthetic oligonucleotide
  Antisense strand to SEQ ID NO: 2437502
ucuccuaccagacaaagua

SEQ ID NO: 2437504 - RNA, 19 nt, Artificial Sequence
  Description of Artificial Sequence: Synthetic oligonucleotide
  Sense strand starting at position 1397 of SEQ ID NO: 1886947
cccgcuaaacugugaagaa

SEQ ID NO: 2437505 - RNA, 19 nt, Artificial Sequence
  Description of Artificial Sequence: Synthetic oligonucleotide
  Antisense strand to SEQ ID NO: 2437504
uucuucacaguuuagcggg

SEQ ID NO: 2437506 - RNA, 19 nt, Artificial Sequence
  Description of Artificial Sequence: Synthetic oligonucleotide
  Sense strand starting at position 1398 of SEQ ID NO: 1886947
ccgcuaaacugugaagaau

SEQ ID NO: 2437507 - RNA, 19 nt, Artificial Sequence
  Description of Artificial Sequence: Synthetic oligonucleotide
  Antisense strand to SEQ ID NO: 2437506
auucuucacaguuuagcgg

SEQ ID NO: 2437508 - RNA, 19 nt, Artificial Sequence
  Description of Artificial Sequence: Synthetic oligonucleotide
  Sense strand starting at position 1500 of SEQ ID NO: 1886947
guaagugcuccugaggcaa

SEQ ID NO: 2437509 - RNA, 19 nt, Artificial Sequence
  Description of Artificial Sequence: Synthetic oligonucleotide
  Antisense strand to SEQ ID NO: 2437508
uugccucaggagcacuuac

SEQ ID NO: 2437510 - RNA, 19 nt, Artificial Sequence
  Description of Artificial Sequence: Synthetic oligonucleotide
  Sense strand starting at position 1528 of SEQ ID NO: 1886947
uguccuggaccuggugaau

SEQ ID NO: 2437511 - RNA, 19 nt, Artificial Sequence
  Description of Artificial Sequence: Synthetic oligonucleotide
  Antisense strand to SEQ ID NO: 2437510
auucaccagguccaggaca

SEQ ID NO: 2437512 - RNA, 19 nt, Artificial Sequence
  Description of Artificial Sequence: Synthetic oligonucleotide
  Sense strand starting at position 1975 of SEQ ID NO: 1886947
gagcgagucgcuuccggaa

SEQ ID NO: 2437513 - RNA, 19 nt, Artificial Sequence
  Description of Artificial Sequence: Synthetic oligonucleotide
  Antisense strand to SEQ ID NO: 2437512
uuccggaagcgacucgcuc

SEQ ID NO: 2437514 - RNA, 19 nt, Artificial Sequence
  Description of Artificial Sequence: Synthetic oligonucleotide
  Sense strand starting at position 2348 of SEQ ID NO: 1886947
gcgguaugucccuugcuuu

SEQ ID NO: 2437515 - RNA, 19 nt, Artificial Sequence
  Description of Artificial Sequence: Synthetic oligonucleotide
  Antisense strand to SEQ ID NO: 2437514
aaagcaagggacauaccgc

SEQ ID NO: 2437516 - RNA, 19 nt, Artificial Sequence
  Description of Artificial Sequence: Synthetic oligonucleotide
  Sense strand starting at position 2639 of SEQ ID NO: 1886947
uucccugagcucgagguaa

SEQ ID NO: 2437517 - RNA, 19 nt, Artificial Sequence
  Description of Artificial Sequence: Synthetic oligonucleotide
  Antisense strand to SEQ ID NO: 2437516
uuaccucgagcucagggaa

SEQ ID NO: 2437518 - RNA, 19 nt, Artificial Sequence
  Description of Artificial Sequence: Synthetic oligonucleotide
  Sense strand starting at position 2756 of SEQ ID NO: 1886947
uuuguaggaugucauuaau

SEQ ID NO: 2437519 - RNA, 19 nt, Artificial Sequence
  Description of Artificial Sequence: Synthetic oligonucleotide
  Antisense strand to SEQ ID NO: 2437518
auuaaugacauccuacaaa

SEQ ID NO: 2437520 - RNA, 19 nt, Artificial Sequence
  Description of Artificial Sequence: Synthetic oligonucleotide
  Sense strand starting at position 2759 of SEQ ID NO: 1886947
guaggaugucauuaauagu

SEQ ID NO: 2437521 - RNA, 19 nt, Artificial Sequence
  Description of Artificial Sequence: Synthetic oligonucleotide
  Antisense strand to SEQ ID NO: 2437520
acuauuaaugacauccuac

SEQ ID NO: 2437522 - RNA, 19 nt, Artificial Sequence
  Description of Artificial Sequence: Synthetic oligonucleotide
  Sense strand starting at position 3131 of SEQ ID NO: 1886947
aagggaauucugugacuau

SEQ ID NO: 2437523 - RNA, 19 nt, Artificial Sequence
  Description of Artificial Sequence: Synthetic oligonucleotide
  Antisense strand to SEQ ID NO: 2437522
auagucacagaauucccuu

SEQ ID NO: 2437524 - RNA, 19 nt, Artificial Sequence
  Description of Artificial Sequence: Synthetic oligonucleotide
  Sense strand starting at position 3132 of SEQ ID NO: 1886947
agggaauucugugacuauu

SEQ ID NO: 2437525 - RNA, 19 nt, Artificial Sequence
  Description of Artificial Sequence: Synthetic oligonucleotide
  Antisense strand to SEQ ID NO: 2437524
aauagucacagaauucccu

SEQ ID NO: 2437526 - RNA, 19 nt, Artificial Sequence
  Description of Artificial Sequence: Synthetic oligonucleotide
  Sense strand starting at position 3134 of SEQ ID NO: 1886947
ggaauucugugacuauuaa

SEQ ID NO: 2437527 - RNA, 19 nt, Artificial Sequence
  Description of Artificial Sequence: Synthetic oligonucleotide
  Antisense strand to SEQ ID NO: 2437526
uuaauagucacagaauucc

SEQ ID NO: 2437528 - RNA, 19 nt, Artificial Sequence
  Description of Artificial Sequence: Synthetic oligonucleotide
  Sense strand starting at position 3138 of SEQ ID NO: 1886947
uucugugacuauuaagaau

SEQ ID NO: 2437529 - RNA, 19 nt, Artificial Sequence
  Description of Artificial Sequence: Synthetic oligonucleotide
  Antisense strand to SEQ ID NO: 2437528
auucuuaauagucacagaa

SEQ ID NO: 2437530 - RNA, 19 nt, Artificial Sequence
  Description of Artificial Sequence: Synthetic oligonucleotide
  Sense strand starting at position 3159 of SEQ ID NO: 1886947
gcucaugagcuuuaucuuc

SEQ ID NO: 2437531 - RNA, 19 nt, Artificial Sequence
  Description of Artificial Sequence: Synthetic oligonucleotide
  Antisense strand to SEQ ID NO: 2437530
gaagauaaagcucaugagc

SEQ ID NO: 2437532 - RNA, 19 nt, Artificial Sequence
  Description of Artificial Sequence: Synthetic oligonucleotide
  Sense strand starting at position 3184 of SEQ ID NO: 1886947
gauuguuaucuuggguucu

SEQ ID NO: 2437533 - RNA, 19 nt, Artificial Sequence
  Description of Artificial Sequence: Synthetic oligonucleotide
  Antisense strand to SEQ ID NO: 2437532
agaacccaagauaacaauc

SEQ ID NO: 2437534 - RNA, 19 nt, Artificial Sequence
  Description of Artificial Sequence: Synthetic oligonucleotide
  Sense strand starting at position 3319 of SEQ ID NO: 1886947
ucuuaaaugucgcuggaau

SEQ ID NO: 2437535 - RNA, 19 nt, Artificial Sequence
  Description of Artificial Sequence: Synthetic oligonucleotide
  Antisense strand to SEQ ID NO: 2437534
auuccagcgacauuuaaga

SEQ ID NO: 2437536 - RNA, 19 nt, Artificial Sequence
  Description of Artificial Sequence: Synthetic oligonucleotide
  Sense strand starting at position 3320 of SEQ ID NO: 1886947
cuuaaaugucgcuggaauc

SEQ ID NO: 2437537 - RNA, 19 nt, Artificial Sequence
  Description of Artificial Sequence: Synthetic oligonucleotide
  Antisense strand to SEQ ID NO: 2437536
gauuccagcgacauuuaag

SEQ ID NO: 2437538 - RNA, 19 nt, Artificial Sequence
  Description of Artificial Sequence: Synthetic oligonucleotide
  Sense strand starting at position 3321 of SEQ ID NO: 1886947
uuaaaugucgcuggaaucu

SEQ ID NO: 2437539 - RNA, 19 nt, Artificial Sequence
  Description of Artificial Sequence: Synthetic oligonucleotide
  Antisense strand to SEQ ID NO: 2437538
agauuccagcgacauuuaa

SEQ ID NO: 2437540 - RNA, 19 nt, Artificial Sequence
  Description of Artificial Sequence: Synthetic oligonucleotide
  Sense strand starting at position 3395 of SEQ ID NO: 1886947
guggguuccugagcagcau

SEQ ID NO: 2437541 - RNA, 19 nt, Artificial Sequence
  Description of Artificial Sequence: Synthetic oligonucleotide
  Antisense strand to SEQ ID NO: 2437540
augcugcucaggaacccac

SEQ ID NO: 2437542 - RNA, 19 nt, Artificial Sequence
  Description of Artificial Sequence: Synthetic oligonucleotide
  Sense strand starting at position 3652 of SEQ ID NO: 1886947
gcucacugucaagaucuga

SEQ ID NO: 2437543 - RNA, 19 nt, Artificial Sequence
  Description of Artificial Sequence: Synthetic oligonucleotide
  Antisense strand to SEQ ID NO: 2437542
ucagaucuugacagugagc

SEQ ID NO: 2437544 - RNA, 19 nt, Artificial Sequence
  Description of Artificial Sequence: Synthetic oligonucleotide
  Sense strand starting at position 3657 of SEQ ID NO: 1886947
cugucaagaucugaucuca

SEQ ID NO: 2437545 - RNA, 19 nt, Artificial Sequence
  Description of Artificial Sequence: Synthetic oligonucleotide
  Antisense strand to SEQ ID NO: 2437544
ugagaucagaucuugacag

SEQ ID NO: 2437546 - RNA, 19 nt, Artificial Sequence
  Description of Artificial Sequence: Synthetic oligonucleotide
  Sense strand starting at position 3884 of SEQ ID NO: 1886947
gcccacaaguccucuuaga

SEQ ID NO: 2437547 - RNA, 19 nt, Artificial Sequence
  Description of Artificial Sequence: Synthetic oligonucleotide
  Antisense strand to SEQ ID NO: 2437546
ucuaagaggacuugugggc

SEQ ID NO: 2437548 - RNA, 19 nt, Artificial Sequence
  Description of Artificial Sequence: Synthetic oligonucleotide
  Sense strand starting at position 3922 of SEQ ID NO: 1886947
augaccucauggugaauaa

SEQ ID NO: 2437549 - RNA, 19 nt, Artificial Sequence
  Description of Artificial Sequence: Synthetic oligonucleotide
  Antisense strand to SEQ ID NO: 2437548
uuauucaccaugaggucau

SEQ ID NO: 2437550 - RNA, 19 nt, Artificial Sequence
  Description of Artificial Sequence: Synthetic oligonucleotide
  Sense strand starting at position 3926 of SEQ ID NO: 1886947
ccucauggugaauaaaguu

SEQ ID NO: 2437551 - RNA, 19 nt, Artificial Sequence
  Description of Artificial Sequence: Synthetic oligonucleotide
  Antisense strand to SEQ ID NO: 2437550
aacuuuauucaccaugagg

SEQ ID NO: 2437552 - RNA, 19 nt, Artificial Sequence
  Description of Artificial Sequence: Synthetic oligonucleotide
  Sense strand starting at position 98 of SEQ ID NO: 1886948
aagagccaucucgauuagu

SEQ ID NO: 2437553 - RNA, 19 nt, Artificial Sequence
  Description of Artificial Sequence: Synthetic oligonucleotide
  Antisense strand to SEQ ID NO: 2437552
acuaaucgagauggcucuu

SEQ ID NO: 2437554 - RNA, 19 nt, Artificial Sequence
  Description of Artificial Sequence: Synthetic oligonucleotide
  Sense strand starting at position 276 of SEQ ID NO: 1886948
gaaggugagucauucagug

SEQ ID NO: 2437555 - RNA, 19 nt, Artificial Sequence
  Description of Artificial Sequence: Synthetic oligonucleotide
  Antisense strand to SEQ ID NO: 2437554
cacugaaugacucaccuuc

SEQ ID NO: 2437556 - RNA, 19 nt, Artificial Sequence
  Description of Artificial Sequence: Synthetic oligonucleotide
  Sense strand starting at position 285 of SEQ ID NO: 1886948
ucauucagugguuaaggga

SEQ ID NO: 2437557 - RNA, 19 nt, Artificial Sequence
  Description of Artificial Sequence: Synthetic oligonucleotide
  Antisense strand to SEQ ID NO: 2437556
ucccuuaaccacugaauga

SEQ ID NO: 2437558 - RNA, 19 nt, Artificial Sequence
  Description of Artificial Sequence: Synthetic oligonucleotide
  Sense strand starting at position 299 of SEQ ID NO: 1886948
agggauucugcuggugaca

SEQ ID NO: 2437559 - RNA, 19 nt, Artificial Sequence
  Description of Artificial Sequence: Synthetic oligonucleotide
  Antisense strand to SEQ ID NO: 2437558
ugucaccagcagaaucccu

SEQ ID NO: 2437560 - RNA, 19 nt, Artificial Sequence
  Description of Artificial Sequence: Synthetic oligonucleotide
  Sense strand starting at position 302 of SEQ ID NO: 1886948
gauucugcuggugacauaa

SEQ ID NO: 2437561 - RNA, 19 nt, Artificial Sequence
  Description of Artificial Sequence: Synthetic oligonucleotide
  Antisense strand to SEQ ID NO: 2437560
uuaugucaccagcagaauc

SEQ ID NO: 2437562 - RNA, 19 nt, Artificial Sequence
  Description of Artificial Sequence: Synthetic oligonucleotide
  Sense strand starting at position 397 of SEQ ID NO: 1886948
aaagauuagcuuugaugag

SEQ ID NO: 2437563 - RNA, 19 nt, Artificial Sequence
  Description of Artificial Sequence: Synthetic oligonucleotide
  Antisense strand to SEQ ID NO: 2437562
cucaucaaagcuaaucuuu

SEQ ID NO: 2437564 - RNA, 19 nt, Artificial Sequence
  Description of Artificial Sequence: Synthetic oligonucleotide
  Sense strand starting at position 461 of SEQ ID NO: 1886948
ugugaagaguuucccugga

SEQ ID NO: 2437565 - RNA, 19 nt, Artificial Sequence
  Description of Artificial Sequence: Synthetic oligonucleotide
  Antisense strand to SEQ ID NO: 2437564
uccagggaaacucuucaca

SEQ ID NO: 2437566 - RNA, 19 nt, Artificial Sequence
  Description of Artificial Sequence: Synthetic oligonucleotide
  Sense strand starting at position 465 of SEQ ID NO: 1886948
aagaguuucccuggaaacc

SEQ ID NO: 2437567 - RNA, 19 nt, Artificial Sequence
  Description of Artificial Sequence: Synthetic oligonucleotide
  Antisense strand to SEQ ID NO: 2437566
gguuuccagggaaacucuu

SEQ ID NO: 2437568 - RNA, 19 nt, Artificial Sequence
  Description of Artificial Sequence: Synthetic oligonucleotide
  Sense strand starting at position 557 of SEQ ID NO: 1886948
ucaucaucauugucauaga

SEQ ID NO: 2437569 - RNA, 19 nt, Artificial Sequence
  Description of Artificial Sequence: Synthetic oligonucleotide
  Antisense strand to SEQ ID NO: 2437568
ucuaugacaaugaugauga

SEQ ID NO: 2437570 - RNA, 19 nt, Artificial Sequence
  Description of Artificial Sequence: Synthetic oligonucleotide
  Sense strand starting at position 631 of SEQ ID NO: 1886948
acagucauauggguaaacu

SEQ ID NO: 2437571 - RNA, 19 nt, Artificial Sequence
  Description of Artificial Sequence: Synthetic oligonucleotide
  Antisense strand to SEQ ID NO: 2437570
aguuuacccauaugacugu

SEQ ID NO: 2437572 - RNA, 19 nt, Artificial Sequence
  Description of Artificial Sequence: Synthetic oligonucleotide
  Sense strand starting at position 632 of SEQ ID NO: 1886948
cagucauauggguaaacuc

SEQ ID NO: 2437573 - RNA, 19 nt, Artificial Sequence
  Description of Artificial Sequence: Synthetic oligonucleotide
  Antisense strand to SEQ ID NO: 2437572
gaguuuacccauaugacug

SEQ ID NO: 2437574 - RNA, 19 nt, Artificial Sequence
  Description of Artificial Sequence: Synthetic oligonucleotide
  Sense strand starting at position 754 of SEQ ID NO: 1886948
acagcuauuagguggugaa

SEQ ID NO: 2437575 - RNA, 19 nt, Artificial Sequence
  Description of Artificial Sequence: Synthetic oligonucleotide
  Antisense strand to SEQ ID NO: 2437574
uucaccaccuaauagcugu

SEQ ID NO: 2437576 - RNA, 19 nt, Artificial Sequence
  Description of Artificial Sequence: Synthetic oligonucleotide
  Sense strand starting at position 755 of SEQ ID NO: 1886948
cagcuauuagguggugaag

SEQ ID NO: 2437577 - RNA, 19 nt, Artificial Sequence
  Description of Artificial Sequence: Synthetic oligonucleotide
  Antisense strand to SEQ ID NO: 2437576
cuucaccaccuaauagcug

SEQ ID NO: 2437578 - RNA, 19 nt, Artificial Sequence
  Description of Artificial Sequence: Synthetic oligonucleotide
  Sense strand starting at position 910 of SEQ ID NO: 1886948
aggaaaugaguauguuuau

SEQ ID NO: 2437579 - RNA, 19 nt, Artificial Sequence
  Description of Artificial Sequence: Synthetic oligonucleotide
  Antisense strand to SEQ ID NO: 2437578
auaaacauacucauuuccu

SEQ ID NO: 2437580 - RNA, 19 nt, Artificial Sequence
  Description of Artificial Sequence: Synthetic oligonucleotide
  Sense strand starting at position 911 of SEQ ID NO: 1886948
ggaaaugaguauguuuaug

SEQ ID NO: 2437581 - RNA, 19 nt, Artificial Sequence
  Description of Artificial Sequence: Synthetic oligonucleotide
  Antisense strand to SEQ ID NO: 2437580
cauaaacauacucauuucc

SEQ ID NO: 2437582 - RNA, 19 nt, Artificial Sequence
  Description of Artificial Sequence: Synthetic oligonucleotide
  Sense strand starting at position 917 of SEQ ID NO: 1886948
gaguauguuuauguuagaa

SEQ ID NO: 2437583 - RNA, 19 nt, Artificial Sequence
  Description of Artificial Sequence: Synthetic oligonucleotide
  Antisense strand to SEQ ID NO: 2437582
uucuaacauaaacauacuc

SEQ ID NO: 2437584 - RNA, 19 nt, Artificial Sequence
  Description of Artificial Sequence: Synthetic oligonucleotide
  Sense strand starting at position 933 of SEQ ID NO: 1886948
gaagaaacguuucugagaa

SEQ ID NO: 2437585 - RNA, 19 nt, Artificial Sequence
  Description of Artificial Sequence: Synthetic oligonucleotide
  Antisense strand to SEQ ID NO: 2437584
uucucagaaacguuucuuc

SEQ ID NO: 2437586 - RNA, 19 nt, Artificial Sequence
  Description of Artificial Sequence: Synthetic oligonucleotide
  Sense strand starting at position 937 of SEQ ID NO: 1886948
aaacguuucugagaauuua

SEQ ID NO: 2437587 - RNA, 19 nt, Artificial Sequence
  Description of Artificial Sequence: Synthetic oligonucleotide
  Antisense strand to SEQ ID NO: 2437586
uaaauucucagaaacguuu

SEQ ID NO: 2437588 - RNA, 19 nt, Artificial Sequence
  Description of Artificial Sequence: Synthetic oligonucleotide
  Sense strand starting at position 1613 of SEQ ID NO: 1886948
ccucccugguucuuggaua

SEQ ID NO: 2437589 - RNA, 19 nt, Artificial Sequence
  Description of Artificial Sequence: Synthetic oligonucleotide
  Antisense strand to SEQ ID NO: 2437588
uauccaagaaccagggagg

SEQ ID NO: 2437590 - RNA, 19 nt, Artificial Sequence
  Description of Artificial Sequence: Synthetic oligonucleotide
  Sense strand starting at position 1618 of SEQ ID NO: 1886948
cugguucuuggauauccua

SEQ ID NO: 2437591 - RNA, 19 nt, Artificial Sequence
  Description of Artificial Sequence: Synthetic oligonucleotide
  Antisense strand to SEQ ID NO: 2437590
uaggauauccaagaaccag

SEQ ID NO: 2437592 - RNA, 19 nt, Artificial Sequence
  Description of Artificial Sequence: Synthetic oligonucleotide
  Sense strand starting at position 1689 of SEQ ID NO: 1886948
agguuucucuggucucaag

SEQ ID NO: 2437593 - RNA, 19 nt, Artificial Sequence
  Description of Artificial Sequence: Synthetic oligonucleotide
  Antisense strand to SEQ ID NO: 2437592
cuugagaccagagaaaccu

SEQ ID NO: 2437594 - RNA, 19 nt, Artificial Sequence
  Description of Artificial Sequence: Synthetic oligonucleotide
  Sense strand starting at position 1897 of SEQ ID NO: 1886948
uuugaaacuuaccuugaug

SEQ ID NO: 2437595 - RNA, 19 nt, Artificial Sequence
  Description of Artificial Sequence: Synthetic oligonucleotide
  Antisense strand to SEQ ID NO: 2437594
caucaagguaaguuucaaa

SEQ ID NO: 2437596 - RNA, 19 nt, Artificial Sequence
  Description of Artificial Sequence: Synthetic oligonucleotide
  Sense strand starting at position 2069 of SEQ ID NO: 1886948
ugagaacaguucucugaau

SEQ ID NO: 2437597 - RNA, 19 nt, Artificial Sequence
  Description of Artificial Sequence: Synthetic oligonucleotide
  Antisense strand to SEQ ID NO: 2437596
auucagagaacuguucuca

SEQ ID NO: 2437598 - RNA, 19 nt, Artificial Sequence
  Description of Artificial Sequence: Synthetic oligonucleotide
  Sense strand starting at position 2070 of SEQ ID NO: 1886948
gagaacaguucucugaauu

SEQ ID NO: 2437599 - RNA, 19 nt, Artificial Sequence
  Description of Artificial Sequence: Synthetic oligonucleotide
  Antisense strand to SEQ ID NO: 2437598
aauucagagaacuguucuc

SEQ ID NO: 2437600 - RNA, 19 nt, Artificial Sequence
  Description of Artificial Sequence: Synthetic oligonucleotide
  Sense strand starting at position 2071 of SEQ ID NO: 1886948
agaacaguucucugaauuc

SEQ ID NO: 2437601 - RNA, 19 nt, Artificial Sequence
  Description of Artificial Sequence: Synthetic oligonucleotide
  Antisense strand to SEQ ID NO: 2437600
gaauucagagaacuguucu

SEQ ID NO: 2437602 - RNA, 19 nt, Artificial Sequence
  Description of Artificial Sequence: Synthetic oligonucleotide
  Sense strand starting at position 2081 of SEQ ID NO: 1886948
ucugaauucugcuuaugag

SEQ ID NO: 2437603 - RNA, 19 nt, Artificial Sequence
  Description of Artificial Sequence: Synthetic oligonucleotide
  Antisense strand to SEQ ID NO: 2437602
cucauaagcagaauucaga

SEQ ID NO: 2437604 - RNA, 19 nt, Artificial Sequence
  Description of Artificial Sequence: Synthetic oligonucleotide
  Sense strand starting at position 2091 of SEQ ID NO: 1886948
gcuuaugagucacuuagag

SEQ ID NO: 2437605 - RNA, 19 nt, Artificial Sequence
  Description of Artificial Sequence: Synthetic oligonucleotide
  Antisense strand to SEQ ID NO: 2437604
cucuaagugacucauaagc

SEQ ID NO: 2437606 - RNA, 19 nt, Artificial Sequence
  Description of Artificial Sequence: Synthetic oligonucleotide
  Sense strand starting at position 2430 of SEQ ID NO: 1886948
agugacuaaugcccauaau

SEQ ID NO: 2437607 - RNA, 19 nt, Artificial Sequence
  Description of Artificial Sequence: Synthetic oligonucleotide
  Antisense strand to SEQ ID NO: 2437606
auuaugggcauuagucacu

SEQ ID NO: 2437608 - RNA, 19 nt, Artificial Sequence
  Description of Artificial Sequence: Synthetic oligonucleotide
  Sense strand starting at position 2431 of SEQ ID NO: 1886948
gugacuaaugcccauaaug

SEQ ID NO: 2437609 - RNA, 19 nt, Artificial Sequence
  Description of Artificial Sequence: Synthetic oligonucleotide
  Antisense strand to SEQ ID NO: 2437608
cauuaugggcauuagucac

SEQ ID NO: 2437610 - RNA, 19 nt, Artificial Sequence
  Description of Artificial Sequence: Synthetic oligonucleotide
  Sense strand starting at position 3066 of SEQ ID NO: 1886948
gacccaucuuggccggaau

SEQ ID NO: 2437611 - RNA, 19 nt, Artificial Sequence
  Description of Artificial Sequence: Synthetic oligonucleotide
  Antisense strand to SEQ ID NO: 2437610
auuccggccaagauggguc

SEQ ID NO: 2437612 - RNA, 19 nt, Artificial Sequence
  Description of Artificial Sequence: Synthetic oligonucleotide
  Sense strand starting at position 3137 of SEQ ID NO: 1886948
auaugcucagcauagagaa

SEQ ID NO: 2437613 - RNA, 19 nt, Artificial Sequence
  Description of Artificial Sequence: Synthetic oligonucleotide
  Antisense strand to SEQ ID NO: 2437612
uucucuaugcugagcauau

SEQ ID NO: 2437614 - RNA, 19 nt, Artificial Sequence
  Description of Artificial Sequence: Synthetic oligonucleotide
  Sense strand starting at position 3149 of SEQ ID NO: 1886948
uagagaagcugucuaauca

SEQ ID NO: 2437615 - RNA, 19 nt, Artificial Sequence
  Description of Artificial Sequence: Synthetic oligonucleotide
  Antisense strand to SEQ ID NO: 2437614
ugauuagacagcuucucua

SEQ ID NO: 2437616 - RNA, 19 nt, Artificial Sequence
  Description of Artificial Sequence: Synthetic oligonucleotide
  Sense strand starting at position 3192 of SEQ ID NO: 1886948
ggauaaugaauguggguuu

SEQ ID NO: 2437617 - RNA, 19 nt, Artificial Sequence
  Description of Artificial Sequence: Synthetic oligonucleotide
  Antisense strand to SEQ ID NO: 2437616
aaacccacauucauuaucc

SEQ ID NO: 2437618 - RNA, 19 nt, Artificial Sequence
  Description of Artificial Sequence: Synthetic oligonucleotide
  Sense strand starting at position 3195 of SEQ ID NO: 1886948
uaaugaauguggguuugau

SEQ ID NO: 2437619 - RNA, 19 nt, Artificial Sequence
  Description of Artificial Sequence: Synthetic oligonucleotide
  Antisense strand to SEQ ID NO: 2437618
aucaaacccacauucauua

SEQ ID NO: 2437620 - RNA, 19 nt, Artificial Sequence
  Description of Artificial Sequence: Synthetic oligonucleotide
  Sense strand starting at position 3376 of SEQ ID NO: 1886948
acucaagcccauugagauc

SEQ ID NO: 2437621 - RNA, 19 nt, Artificial Sequence
  Description of Artificial Sequence: Synthetic oligonucleotide
  Antisense strand to SEQ ID NO: 2437620
gaucucaaugggcuugagu

SEQ ID NO: 2437622 - RNA, 19 nt, Artificial Sequence
  Description of Artificial Sequence: Synthetic oligonucleotide
  Sense strand starting at position 3482 of SEQ ID NO: 1886948
uugaauucuugugccauuu

SEQ ID NO: 2437623 - RNA, 19 nt, Artificial Sequence
  Description of Artificial Sequence: Synthetic oligonucleotide
  Antisense strand to SEQ ID NO: 2437622
aaauggcacaagaauucaa

SEQ ID NO: 2437624 - RNA, 19 nt, Artificial Sequence
  Description of Artificial Sequence: Synthetic oligonucleotide
  Sense strand starting at position 3740 of SEQ ID NO: 1886948
gcaguauauuucucagcca

SEQ ID NO: 2437625 - RNA, 19 nt, Artificial Sequence
  Description of Artificial Sequence: Synthetic oligonucleotide
  Antisense strand to SEQ ID NO: 2437624
uggcugagaaauauacugc

SEQ ID NO: 2437626 - RNA, 19 nt, Artificial Sequence
  Description of Artificial Sequence: Synthetic oligonucleotide
  Sense strand starting at position 3766 of SEQ ID NO: 1886948
ucucaagcuugaucacaga

SEQ ID NO: 2437627 - RNA, 19 nt, Artificial Sequence
  Description of Artificial Sequence: Synthetic oligonucleotide
  Antisense strand to SEQ ID NO: 2437626
ucugugaucaagcuugaga

SEQ ID NO: 2437628 - RNA, 19 nt, Artificial Sequence
  Description of Artificial Sequence: Synthetic oligonucleotide
  Sense strand starting at position 3847 of SEQ ID NO: 1886948
uaguccuguguccauagau

SEQ ID NO: 2437629 - RNA, 19 nt, Artificial Sequence
  Description of Artificial Sequence: Synthetic oligonucleotide
  Antisense strand to SEQ ID NO: 2437628
aucuauggacacaggacua

SEQ ID NO: 2437630 - RNA, 19 nt, Artificial Sequence
  Description of Artificial Sequence: Synthetic oligonucleotide
  Sense strand starting at position 3882 of SEQ ID NO: 1886948
ccauuuacgccuugcagga

SEQ ID NO: 2437631 - RNA, 19 nt, Artificial Sequence
  Description of Artificial Sequence: Synthetic oligonucleotide
  Antisense strand to SEQ ID NO: 2437630
uccugcaaggcguaaaugg

SEQ ID NO: 2437632 - RNA, 19 nt, Artificial Sequence
  Description of Artificial Sequence: Synthetic oligonucleotide
  Sense strand starting at position 338 of SEQ ID NO: 1886949
uggguuagagggugcuaau

SEQ ID NO: 2437633 - RNA, 19 nt, Artificial Sequence
  Description of Artificial Sequence: Synthetic oligonucleotide
  Antisense strand to SEQ ID NO: 2437632
auuagcacccucuaaccca

SEQ ID NO: 2437634 - RNA, 19 nt, Artificial Sequence
  Description of Artificial Sequence: Synthetic oligonucleotide
  Sense strand starting at position 345 of SEQ ID NO: 1886949
gagggugcuaaugguuuaa

SEQ ID NO: 2437635 - RNA, 19 nt, Artificial Sequence
  Description of Artificial Sequence: Synthetic oligonucleotide
  Antisense strand to SEQ ID NO: 2437634
uuaaaccauuagcacccuc

SEQ ID NO: 2437636 - RNA, 19 nt, Artificial Sequence
  Description of Artificial Sequence: Synthetic oligonucleotide
  Sense strand starting at position 409 of SEQ ID NO: 1886949
guaacauaugcccaucagu

SEQ ID NO: 2437637 - RNA, 19 nt, Artificial Sequence
  Description of Artificial Sequence: Synthetic oligonucleotide
  Antisense strand to SEQ ID NO: 2437636
acugaugggcauauguuac

SEQ ID NO: 2437638 - RNA, 19 nt, Artificial Sequence
  Description of Artificial Sequence: Synthetic oligonucleotide
  Sense strand starting at position 548 of SEQ ID NO: 1886949
uggguauucugaccucuuu

SEQ ID NO: 2437639 - RNA, 19 nt, Artificial Sequence
  Description of Artificial Sequence: Synthetic oligonucleotide
  Antisense strand to SEQ ID NO: 2437638
aaagaggucagaauaccca

SEQ ID NO: 2437640 - RNA, 19 nt, Artificial Sequence
  Description of Artificial Sequence: Synthetic oligonucleotide
  Sense strand starting at position 560 of SEQ ID NO: 1886949
ccucuuucccgguggagaa

SEQ ID NO: 2437641 - RNA, 19 nt, Artificial Sequence
  Description of Artificial Sequence: Synthetic oligonucleotide
  Antisense strand to SEQ ID NO: 2437640
uucuccaccgggaaagagg

SEQ ID NO: 2437642 - RNA, 19 nt, Artificial Sequence
  Description of Artificial Sequence: Synthetic oligonucleotide
  Sense strand starting at position 775 of SEQ ID NO: 1886949
caaacaauaccgugaguga

SEQ ID NO: 2437643 - RNA, 19 nt, Artificial Sequence
  Description of Artificial Sequence: Synthetic oligonucleotide
  Antisense strand to SEQ ID NO: 2437642
ucacucacgguauuguuug

SEQ ID NO: 2437644 - RNA, 19 nt, Artificial Sequence
  Description of Artificial Sequence: Synthetic oligonucleotide
  Sense strand starting at position 776 of SEQ ID NO: 1886949
aaacaauaccgugagugau

SEQ ID NO: 2437645 - RNA, 19 nt, Artificial Sequence
  Description of Artificial Sequence: Synthetic oligonucleotide
  Antisense strand to SEQ ID NO: 2437644
aucacucacgguauuguuu

SEQ ID NO: 2437646 - RNA, 19 nt, Artificial Sequence
  Description of Artificial Sequence: Synthetic oligonucleotide
  Sense strand starting at position 1080 of SEQ ID NO: 1886949
gcuggucucggcagagaag

SEQ ID NO: 2437647 - RNA, 19 nt, Artificial Sequence
  Description of Artificial Sequence: Synthetic oligonucleotide
  Antisense strand to SEQ ID NO: 2437646
cuucucugccgagaccagc

SEQ ID NO: 2437648 - RNA, 19 nt, Artificial Sequence
  Description of Artificial Sequence: Synthetic oligonucleotide
  Sense strand starting at position 1111 of SEQ ID NO: 1886949
gcucuucuuagcguaggua

SEQ ID NO: 2437649 - RNA, 19 nt, Artificial Sequence
  Description of Artificial Sequence: Synthetic oligonucleotide
  Antisense strand to SEQ ID NO: 2437648
uaccuacgcuaagaagagc

SEQ ID NO: 2437650 - RNA, 19 nt, Artificial Sequence
  Description of Artificial Sequence: Synthetic oligonucleotide
  Sense strand starting at position 1130 of SEQ ID NO: 1886949
acguguguuguugaggaaa

SEQ ID NO: 2437651 - RNA, 19 nt, Artificial Sequence
  Description of Artificial Sequence: Synthetic oligonucleotide
  Antisense strand to SEQ ID NO: 2437650
uuuccucaacaacacacgu

SEQ ID NO: 2437652 - RNA, 19 nt, Artificial Sequence
  Description of Artificial Sequence: Synthetic oligonucleotide
  Sense strand starting at position 1311 of SEQ ID NO: 1886949
gaacguucucuguauuaac

SEQ ID NO: 2437653 - RNA, 19 nt, Artificial Sequence
  Description of Artificial Sequence: Synthetic oligonucleotide
  Antisense strand to SEQ ID NO: 2437652
guuaauacagagaacguuc

SEQ ID NO: 2437654 - RNA, 19 nt, Artificial Sequence
  Description of Artificial Sequence: Synthetic oligonucleotide
  Sense strand starting at position 1751 of SEQ ID NO: 1886949
cugauaauuuaugcgcauu

SEQ ID NO: 2437655 - RNA, 19 nt, Artificial Sequence
  Description of Artificial Sequence: Synthetic oligonucleotide
  Antisense strand to SEQ ID NO: 2437654
aaugcgcauaaauuaucag

SEQ ID NO: 2437656 - RNA, 19 nt, Artificial Sequence
  Description of Artificial Sequence: Synthetic oligonucleotide
  Sense strand starting at position 1894 of SEQ ID NO: 1886949
ggcucaauggugcaaagaa

SEQ ID NO: 2437657 - RNA, 19 nt, Artificial Sequence
  Description of Artificial Sequence: Synthetic oligonucleotide
  Antisense strand to SEQ ID NO: 2437656
uucuuugcaccauugagcc

SEQ ID NO: 2437658 - RNA, 19 nt, Artificial Sequence
  Description of Artificial Sequence: Synthetic oligonucleotide
  Sense strand starting at position 1902 of SEQ ID NO: 1886949
ggugcaaagaaaugugagu

SEQ ID NO: 2437659 - RNA, 19 nt, Artificial Sequence
  Description of Artificial Sequence: Synthetic oligonucleotide
  Antisense strand to SEQ ID NO: 2437658
acucacauuucuuugcacc

SEQ ID NO: 2437660 - RNA, 19 nt, Artificial Sequence
  Description of Artificial Sequence: Synthetic oligonucleotide
  Sense strand starting at position 1907 of SEQ ID NO: 1886949
aaagaaaugugagucuuuc

SEQ ID NO: 2437661 - RNA, 19 nt, Artificial Sequence
  Description of Artificial Sequence: Synthetic oligonucleotide
  Antisense strand to SEQ ID NO: 2437660
gaaagacucacauuucuuu

SEQ ID NO: 2437662 - RNA, 19 nt, Artificial Sequence
  Description of Artificial Sequence: Synthetic oligonucleotide
  Sense strand starting at position 2005 of SEQ ID NO: 1886949
ugcugugggauuggaaaga

SEQ ID NO: 2437663 - RNA, 19 nt, Artificial Sequence
  Description of Artificial Sequence: Synthetic oligonucleotide
  Antisense strand to SEQ ID NO: 2437662
ucuuuccaaucccacagca

SEQ ID NO: 2437664 - RNA, 19 nt, Artificial Sequence
  Description of Artificial Sequence: Synthetic oligonucleotide
  Sense strand starting at position 2074 of SEQ ID NO: 1886949
ugccuaaggcaagagauua

SEQ ID NO: 2437665 - RNA, 19 nt, Artificial Sequence
  Description of Artificial Sequence: Synthetic oligonucleotide
  Antisense strand to SEQ ID NO: 2437664
uaaucucuugccuuaggca

SEQ ID NO: 2437666 - RNA, 19 nt, Artificial Sequence
  Description of Artificial Sequence: Synthetic oligonucleotide
  Sense strand starting at position 2164 of SEQ ID NO: 1886949
gagccugaggcuuacauca

SEQ ID NO: 2437667 - RNA, 19 nt, Artificial Sequence
  Description of Artificial Sequence: Synthetic oligonucleotide
  Antisense strand to SEQ ID NO: 2437666
ugauguaagccucaggcuc

SEQ ID NO: 2437668 - RNA, 19 nt, Artificial Sequence
  Description of Artificial Sequence: Synthetic oligonucleotide
  Sense strand starting at position 2232 of SEQ ID NO: 1886949
gggucuucaugacugaagu

SEQ ID NO: 2437669 - RNA, 19 nt, Artificial Sequence
  Description of Artificial Sequence: Synthetic oligonucleotide
  Antisense strand to SEQ ID NO: 2437668
acuucagucaugaagaccc

SEQ ID NO: 2437670 - RNA, 19 nt, Artificial Sequence
  Description of Artificial Sequence: Synthetic oligonucleotide
  Sense strand starting at position 2233 of SEQ ID NO: 1886949
ggucuucaugacugaagug

SEQ ID NO: 2437671 - RNA, 19 nt, Artificial Sequence
  Description of Artificial Sequence: Synthetic oligonucleotide
  Antisense strand to SEQ ID NO: 2437670
cacuucagucaugaagacc

SEQ ID NO: 2437672 - RNA, 19 nt, Artificial Sequence
  Description of Artificial Sequence: Synthetic oligonucleotide
  Sense strand starting at position 2249 of SEQ ID NO: 1886949
gugaacaucucagcauuau

SEQ ID NO: 2437673 - RNA, 19 nt, Artificial Sequence
  Description of Artificial Sequence: Synthetic oligonucleotide
  Antisense strand to SEQ ID NO: 2437672
auaaugcugagauguucac

SEQ ID NO: 2437674 - RNA, 19 nt, Artificial Sequence
  Description of Artificial Sequence: Synthetic oligonucleotide
  Sense strand starting at position 2378 of SEQ ID NO: 1886949
aggaauuaacaaugcaagu

SEQ ID NO: 2437675 - RNA, 19 nt, Artificial Sequence
  Description of Artificial Sequence: Synthetic oligonucleotide
  Antisense strand to SEQ ID NO: 2437674
acuugcauuguuaauuccu

SEQ ID NO: 2437676 - RNA, 19 nt, Artificial Sequence
  Description of Artificial Sequence: Synthetic oligonucleotide
  Sense strand starting at position 2982 of SEQ ID NO: 1886949
cuacaaauguguguaccua

SEQ ID NO: 2437677 - RNA, 19 nt, Artificial Sequence
  Description of Artificial Sequence: Synthetic oligonucleotide
  Antisense strand to SEQ ID NO: 2437676
uagguacacacauuuguag

SEQ ID NO: 2437678 - RNA, 19 nt, Artificial Sequence
  Description of Artificial Sequence: Synthetic oligonucleotide
  Sense strand starting at position 3156 of SEQ ID NO: 1886949
acuguuccacuaugugaau

SEQ ID NO: 2437679 - RNA, 19 nt, Artificial Sequence
  Description of Artificial Sequence: Synthetic oligonucleotide
  Antisense strand to SEQ ID NO: 2437678
auucacauaguggaacagu

SEQ ID NO: 2437680 - RNA, 19 nt, Artificial Sequence
  Description of Artificial Sequence: Synthetic oligonucleotide
  Sense strand starting at position 3157 of SEQ ID NO: 1886949
cuguuccacuaugugaaua

SEQ ID NO: 2437681 - RNA, 19 nt, Artificial Sequence
  Description of Artificial Sequence: Synthetic oligonucleotide
  Antisense strand to SEQ ID NO: 2437680
uauucacauaguggaacag

SEQ ID NO: 2437682 - RNA, 19 nt, Artificial Sequence
  Description of Artificial Sequence: Synthetic oligonucleotide
  Sense strand starting at position 3165 of SEQ ID NO: 1886949
cuaugugaauacgccauaa

SEQ ID NO: 2437683 - RNA, 19 nt, Artificial Sequence
  Description of Artificial Sequence: Synthetic oligonucleotide
  Antisense strand to SEQ ID NO: 2437682
uuauggcguauucacauag

SEQ ID NO: 2437684 - RNA, 19 nt, Artificial Sequence
  Description of Artificial Sequence: Synthetic oligonucleotide
  Sense strand starting at position 3167 of SEQ ID NO: 1886949
augugaauacgccauaauu

SEQ ID NO: 2437685 - RNA, 19 nt, Artificial Sequence
  Description of Artificial Sequence: Synthetic oligonucleotide
  Antisense strand to SEQ ID NO: 2437684
aauuauggcguauucacau

SEQ ID NO: 2437686 - RNA, 19 nt, Artificial Sequence
  Description of Artificial Sequence: Synthetic oligonucleotide
  Sense strand starting at position 3197 of SEQ ID NO: 1886949
ucuccuauuguugaucauu

SEQ ID NO: 2437687 - RNA, 19 nt, Artificial Sequence
  Description of Artificial Sequence: Synthetic oligonucleotide
  Antisense strand to SEQ ID NO: 2437686
aaugaucaacaauaggaga

SEQ ID NO: 2437688 - RNA, 19 nt, Artificial Sequence
  Description of Artificial Sequence: Synthetic oligonucleotide
  Sense strand starting at position 3273 of SEQ ID NO: 1886949
cuggucuguauaugggauu

SEQ ID NO: 2437689 - RNA, 19 nt, Artificial Sequence
  Description of Artificial Sequence: Synthetic oligonucleotide
  Antisense strand to SEQ ID NO: 2437688
aaucccauauacagaccag

SEQ ID NO: 2437690 - RNA, 19 nt, Artificial Sequence
  Description of Artificial Sequence: Synthetic oligonucleotide
  Sense strand starting at position 3582 of SEQ ID NO: 1886949
cagggagaguuucuuuaag

SEQ ID NO: 2437691 - RNA, 19 nt, Artificial Sequence
  Description of Artificial Sequence: Synthetic oligonucleotide
  Antisense strand to SEQ ID NO: 2437690
cuuaaagaaacucucccug

SEQ ID NO: 2437692 - RNA, 19 nt, Artificial Sequence
  Description of Artificial Sequence: Synthetic oligonucleotide
  Sense strand starting at position 3596 of SEQ ID NO: 1886949
uuaagagaguuucuuggau

SEQ ID NO: 2437693 - RNA, 19 nt, Artificial Sequence
  Description of Artificial Sequence: Synthetic oligonucleotide
  Antisense strand to SEQ ID NO: 2437692
auccaagaaacucucuuaa

SEQ ID NO: 2437694 - RNA, 19 nt, Artificial Sequence
  Description of Artificial Sequence: Synthetic oligonucleotide
  Sense strand starting at position 3604 of SEQ ID NO: 1886949
guuucuuggauaggaaauu

SEQ ID NO: 2437695 - RNA, 19 nt, Artificial Sequence
  Description of Artificial Sequence: Synthetic oligonucleotide
  Antisense strand to SEQ ID NO: 2437694
aauuuccuauccaagaaac

SEQ ID NO: 2437696 - RNA, 19 nt, Artificial Sequence
  Description of Artificial Sequence: Synthetic oligonucleotide
  Sense strand starting at position 3605 of SEQ ID NO: 1886949
uuucuuggauaggaaauuu

SEQ ID NO: 2437697 - RNA, 19 nt, Artificial Sequence
  Description of Artificial Sequence: Synthetic oligonucleotide
  Antisense strand to SEQ ID NO: 2437696
aaauuuccuauccaagaaa

SEQ ID NO: 2437698 - RNA, 19 nt, Artificial Sequence
  Description of Artificial Sequence: Synthetic oligonucleotide
  Sense strand starting at position 3640 of SEQ ID NO: 1886949
guauaucuuuaccuugacu

SEQ ID NO: 2437699 - RNA, 19 nt, Artificial Sequence
  Description of Artificial Sequence: Synthetic oligonucleotide
  Antisense strand to SEQ ID NO: 2437698
agucaagguaaagauauac

SEQ ID NO: 2437700 - RNA, 19 nt, Artificial Sequence
  Description of Artificial Sequence: Synthetic oligonucleotide
  Sense strand starting at position 3755 of SEQ ID NO: 1886949
uugguauugccagacuuga

SEQ ID NO: 2437701 - RNA, 19 nt, Artificial Sequence
  Description of Artificial Sequence: Synthetic oligonucleotide
  Antisense strand to SEQ ID NO: 2437700
ucaagucuggcaauaccaa

SEQ ID NO: 2437702 - RNA, 19 nt, Artificial Sequence
  Description of Artificial Sequence: Synthetic oligonucleotide
  Sense strand starting at position 3862 of SEQ ID NO: 1886949
augugcugucaauagauaa

SEQ ID NO: 2437703 - RNA, 19 nt, Artificial Sequence
  Description of Artificial Sequence: Synthetic oligonucleotide
  Antisense strand to SEQ ID NO: 2437702
uuaucuauugacagcacau

SEQ ID NO: 2437704 - RNA, 19 nt, Artificial Sequence
  Description of Artificial Sequence: Synthetic oligonucleotide
  Sense strand starting at position 3912 of SEQ ID NO: 1886949
ucaauaagggauuggcuaa

SEQ ID NO: 2437705 - RNA, 19 nt, Artificial Sequence
  Description of Artificial Sequence: Synthetic oligonucleotide
  Antisense strand to SEQ ID NO: 2437704
uuagccaaucccuuauuga

SEQ ID NO: 2437706 - RNA, 19 nt, Artificial Sequence
  Description of Artificial Sequence: Synthetic oligonucleotide
  Sense strand starting at position 3940 of SEQ ID NO: 1886949
gccucaccuguacaauaga

SEQ ID NO: 2437707 - RNA, 19 nt, Artificial Sequence
  Description of Artificial Sequence: Synthetic oligonucleotide
  Antisense strand to SEQ ID NO: 2437706
ucuauuguacaggugaggc

SEQ ID NO: 2437708 - RNA, 19 nt, Artificial Sequence
  Description of Artificial Sequence: Synthetic oligonucleotide
  Sense strand starting at position 3977 of SEQ ID NO: 1886949
caaagaugagugugcugau

SEQ ID NO: 2437709 - RNA, 19 nt, Artificial Sequence
  Description of Artificial Sequence: Synthetic oligonucleotide
  Antisense strand to SEQ ID NO: 2437708
aucagcacacucaucuuug

SEQ ID NO: 2437710 - RNA, 19 nt, Artificial Sequence
  Description of Artificial Sequence: Synthetic oligonucleotide
  Sense strand starting at position 3978 of SEQ ID NO: 1886949
aaagaugagugugcugaua

SEQ ID NO: 2437711 - RNA, 19 nt, Artificial Sequence
  Description of Artificial Sequence: Synthetic oligonucleotide
  Antisense strand to SEQ ID NO: 2437710
uaucagcacacucaucuuu

SEQ ID NO: 2437712 - RNA, 19 nt, Artificial Sequence
  Description of Artificial Sequence: Synthetic oligonucleotide
  Sense strand starting at position 141 of SEQ ID NO: 1886950
uugcauccuccuggaagaa

SEQ ID NO: 2437713 - RNA, 19 nt, Artificial Sequence
  Description of Artificial Sequence: Synthetic oligonucleotide
  Antisense strand to SEQ ID NO: 2437712
uucuuccaggaggaugcaa

SEQ ID NO: 2437714 - RNA, 19 nt, Artificial Sequence
  Description of Artificial Sequence: Synthetic oligonucleotide
  Sense strand starting at position 232 of SEQ ID NO: 1886950
gggaaauuaucaccggcaa

SEQ ID NO: 2437715 - RNA, 19 nt, Artificial Sequence
  Description of Artificial Sequence: Synthetic oligonucleotide
  Antisense strand to SEQ ID NO: 2437714
uugccggugauaauuuccc

SEQ ID NO: 2437716 - RNA, 19 nt, Artificial Sequence
  Description of Artificial Sequence: Synthetic oligonucleotide
  Sense strand starting at position 233 of SEQ ID NO: 1886950
ggaaauuaucaccggcaac

SEQ ID NO: 2437717 - RNA, 19 nt, Artificial Sequence
  Description of Artificial Sequence: Synthetic oligonucleotide
  Antisense strand to SEQ ID NO: 2437716
guugccggugauaauuucc

SEQ ID NO: 2437718 - RNA, 19 nt, Artificial Sequence
  Description of Artificial Sequence: Synthetic oligonucleotide
  Sense strand starting at position 603 of SEQ ID NO: 1886950
uucuuccuugucugggaaa

SEQ ID NO: 2437719 - RNA, 19 nt, Artificial Sequence
  Description of Artificial Sequence: Synthetic oligonucleotide
  Antisense strand to SEQ ID NO: 2437718
uuucccagacaaggaagaa

SEQ ID NO: 2437720 - RNA, 19 nt, Artificial Sequence
  Description of Artificial Sequence: Synthetic oligonucleotide
  Sense strand starting at position 622 of SEQ ID NO: 1886950
gccacaucucucugaugaa

SEQ ID NO: 2437721 - RNA, 19 nt, Artificial Sequence
  Description of Artificial Sequence: Synthetic oligonucleotide
  Antisense strand to SEQ ID NO: 2437720
uucaucagagagauguggc

SEQ ID NO: 2437722 - RNA, 19 nt, Artificial Sequence
  Description of Artificial Sequence: Synthetic oligonucleotide
  Sense strand starting at position 656 of SEQ ID NO: 1886950
auggauauucccugagcac

SEQ ID NO: 2437723 - RNA, 19 nt, Artificial Sequence
  Description of Artificial Sequence: Synthetic oligonucleotide
  Antisense strand to SEQ ID NO: 2437722
gugcucagggaauauccau

SEQ ID NO: 2437724 - RNA, 19 nt, Artificial Sequence
  Description of Artificial Sequence: Synthetic oligonucleotide
  Sense strand starting at position 872 of SEQ ID NO: 1886950
ugaccuaugugcucauuga

SEQ ID NO: 2437725 - RNA, 19 nt, Artificial Sequence
  Description of Artificial Sequence: Synthetic oligonucleotide
  Antisense strand to SEQ ID NO: 2437724
ucaaugagcacauagguca

SEQ ID NO: 2437726 - RNA, 19 nt, Artificial Sequence
  Description of Artificial Sequence: Synthetic oligonucleotide
  Sense strand starting at position 873 of SEQ ID NO: 1886950
gaccuaugugcucauugaa

SEQ ID NO: 2437727 - RNA, 19 nt, Artificial Sequence
  Description of Artificial Sequence: Synthetic oligonucleotide
  Antisense strand to SEQ ID NO: 2437726
uucaaugagcacauagguc

SEQ ID NO: 2437728 - RNA, 19 nt, Artificial Sequence
  Description of Artificial Sequence: Synthetic oligonucleotide
  Sense strand starting at position 876 of SEQ ID NO: 1886950
cuaugugcucauugaauau

SEQ ID NO: 2437729 - RNA, 19 nt, Artificial Sequence
  Description of Artificial Sequence: Synthetic oligonucleotide
  Antisense strand to SEQ ID NO: 2437728
auauucaaugagcacauag

SEQ ID NO: 2437730 - RNA, 19 nt, Artificial Sequence
  Description of Artificial Sequence: Synthetic oligonucleotide
  Sense strand starting at position 993 of SEQ ID NO: 1886950
ggaucacgucucuaguuua

SEQ ID NO: 2437731 - RNA, 19 nt, Artificial Sequence
  Description of Artificial Sequence: Synthetic oligonucleotide
  Antisense strand to SEQ ID NO: 2437730
uaaacuagagacgugaucc

SEQ ID NO: 2437732 - RNA, 19 nt, Artificial Sequence
  Description of Artificial Sequence: Synthetic oligonucleotide
  Sense strand starting at position 1296 of SEQ ID NO: 1886950
guucccucaucaguuuaau

SEQ ID NO: 2437733 - RNA, 19 nt, Artificial Sequence
  Description of Artificial Sequence: Synthetic oligonucleotide
  Antisense strand to SEQ ID NO: 2437732
auuaaacugaugagggaac

SEQ ID NO: 2437734 - RNA, 19 nt, Artificial Sequence
  Description of Artificial Sequence: Synthetic oligonucleotide
  Sense strand starting at position 1330 of SEQ ID NO: 1886950
auggucauaccugaguaca

SEQ ID NO: 2437735 - RNA, 19 nt, Artificial Sequence
  Description of Artificial Sequence: Synthetic oligonucleotide
  Antisense strand to SEQ ID NO: 2437734
uguacucagguaugaccau

SEQ ID NO: 2437736 - RNA, 19 nt, Artificial Sequence
  Description of Artificial Sequence: Synthetic oligonucleotide
  Sense strand starting at position 1332 of SEQ ID NO: 1886950
ggucauaccugaguacaag

SEQ ID NO: 2437737 - RNA, 19 nt, Artificial Sequence
  Description of Artificial Sequence: Synthetic oligonucleotide
  Antisense strand to SEQ ID NO: 2437736
cuuguacucagguaugacc

SEQ ID NO: 2437738 - RNA, 19 nt, Artificial Sequence
  Description of Artificial Sequence: Synthetic oligonucleotide
  Sense strand starting at position 1477 of SEQ ID NO: 1886950
uaguuuacccacuggugaa

SEQ ID NO: 2437739 - RNA, 19 nt, Artificial Sequence
  Description of Artificial Sequence: Synthetic oligonucleotide
  Antisense strand to SEQ ID NO: 2437738
uucaccaguggguaaacua

SEQ ID NO: 2437740 - RNA, 19 nt, Artificial Sequence
  Description of Artificial Sequence: Synthetic oligonucleotide
  Sense strand starting at position 2260 of SEQ ID NO: 1886950
guugacuuguuccuggacu

SEQ ID NO: 2437741 - RNA, 19 nt, Artificial Sequence
  Description of Artificial Sequence: Synthetic oligonucleotide
  Antisense strand to SEQ ID NO: 2437740
aguccaggaacaagucaac

SEQ ID NO: 2437742 - RNA, 19 nt, Artificial Sequence
  Description of Artificial Sequence: Synthetic oligonucleotide
  Sense strand starting at position 2262 of SEQ ID NO: 1886950
ugacuuguuccuggacuuc

SEQ ID NO: 2437743 - RNA, 19 nt, Artificial Sequence
  Description of Artificial Sequence: Synthetic oligonucleotide
  Antisense strand to SEQ ID NO: 2437742
gaaguccaggaacaaguca

SEQ ID NO: 2437744 - RNA, 19 nt, Artificial Sequence
  Description of Artificial Sequence: Synthetic oligonucleotide
  Sense strand starting at position 2642 of SEQ ID NO: 1886950
agaauaaugcuuuguacac

SEQ ID NO: 2437745 - RNA, 19 nt, Artificial Sequence
  Description of Artificial Sequence: Synthetic oligonucleotide
  Antisense strand to SEQ ID NO: 2437744
guguacaaagcauuauucu

SEQ ID NO: 2437746 - RNA, 19 nt, Artificial Sequence
  Description of Artificial Sequence: Synthetic oligonucleotide
  Sense strand starting at position 2675 of SEQ ID NO: 1886950
gugacugcacaagauaacu

SEQ ID NO: 2437747 - RNA, 19 nt, Artificial Sequence
  Description of Artificial Sequence: Synthetic oligonucleotide
  Antisense strand to SEQ ID NO: 2437746
aguuaucuugugcagucac

SEQ ID NO: 2437748 - RNA, 19 nt, Artificial Sequence
  Description of Artificial Sequence: Synthetic oligonucleotide
  Sense strand starting at position 2752 of SEQ ID NO: 1886950
uuuaaaguuguuugaggac

SEQ ID NO: 2437749 - RNA, 19 nt, Artificial Sequence
  Description of Artificial Sequence: Synthetic oligonucleotide
  Antisense strand to SEQ ID NO: 2437748
guccucaaacaacuuuaaa

SEQ ID NO: 2437750 - RNA, 19 nt, Artificial Sequence
  Description of Artificial Sequence: Synthetic oligonucleotide
  Sense strand starting at position 2761 of SEQ ID NO: 1886950
guuugaggacgguaucauu

SEQ ID NO: 2437751 - RNA, 19 nt, Artificial Sequence
  Description of Artificial Sequence: Synthetic oligonucleotide
  Antisense strand to SEQ ID NO: 2437750
aaugauaccguccucaaac

SEQ ID NO: 2437752 - RNA, 19 nt, Artificial Sequence
  Description of Artificial Sequence: Synthetic oligonucleotide
  Sense strand starting at position 2841 of SEQ ID NO: 1886950
ugaggagguccugggugau

SEQ ID NO: 2437753 - RNA, 19 nt, Artificial Sequence
  Description of Artificial Sequence: Synthetic oligonucleotide
  Antisense strand to SEQ ID NO: 2437752
aucacccaggaccuccuca

SEQ ID NO: 2437754 - RNA, 19 nt, Artificial Sequence
  Description of Artificial Sequence: Synthetic oligonucleotide
  Sense strand starting at position 3062 of SEQ ID NO: 1886950
accucugcuggucaucaua

SEQ ID NO: 2437755 - RNA, 19 nt, Artificial Sequence
  Description of Artificial Sequence: Synthetic oligonucleotide
  Antisense strand to SEQ ID NO: 2437754
uaugaugaccagcagaggu

SEQ ID NO: 2437756 - RNA, 19 nt, Artificial Sequence
  Description of Artificial Sequence: Synthetic oligonucleotide
  Sense strand starting at position 3064 of SEQ ID NO: 1886950
cucugcuggucaucauaga

SEQ ID NO: 2437757 - RNA, 19 nt, Artificial Sequence
  Description of Artificial Sequence: Synthetic oligonucleotide
  Antisense strand to SEQ ID NO: 2437756
ucuaugaugaccagcagag

SEQ ID NO: 2437758 - RNA, 19 nt, Artificial Sequence
  Description of Artificial Sequence: Synthetic oligonucleotide
  Sense strand starting at position 3065 of SEQ ID NO: 1886950
ucugcuggucaucauagaa

SEQ ID NO: 2437759 - RNA, 19 nt, Artificial Sequence
  Description of Artificial Sequence: Synthetic oligonucleotide
  Antisense strand to SEQ ID NO: 2437758
uucuaugaugaccagcaga

SEQ ID NO: 2437760 - RNA, 19 nt, Artificial Sequence
  Description of Artificial Sequence: Synthetic oligonucleotide
  Sense strand starting at position 3158 of SEQ ID NO: 1886950
cggagauccacaggucaaa

SEQ ID NO: 2437761 - RNA, 19 nt, Artificial Sequence
  Description of Artificial Sequence: Synthetic oligonucleotide
  Antisense strand to SEQ ID NO: 2437760
uuugaccuguggaucuccg

SEQ ID NO: 2437762 - RNA, 19 nt, Artificial Sequence
  Description of Artificial Sequence: Synthetic oligonucleotide
  Sense strand starting at position 3195 of SEQ ID NO: 1886950
gucauaggacucuggguuu

SEQ ID NO: 2437763 - RNA, 19 nt, Artificial Sequence
  Description of Artificial Sequence: Synthetic oligonucleotide
  Antisense strand to SEQ ID NO: 2437762
aaacccagaguccuaugac

SEQ ID NO: 2437764 - RNA, 19 nt, Artificial Sequence
  Description of Artificial Sequence: Synthetic oligonucleotide
  Sense strand starting at position 3238 of SEQ ID NO: 1886950
aggagaaguucauugaugu

SEQ ID NO: 2437765 - RNA, 19 nt, Artificial Sequence
  Description of Artificial Sequence: Synthetic oligonucleotide
  Antisense strand to SEQ ID NO: 2437764
acaucaaugaacuucuccu

SEQ ID NO: 2437766 - RNA, 19 nt, Artificial Sequence
  Description of Artificial Sequence: Synthetic oligonucleotide
  Sense strand starting at position 3239 of SEQ ID NO: 1886950
ggagaaguucauugaugug

SEQ ID NO: 2437767 - RNA, 19 nt, Artificial Sequence
  Description of Artificial Sequence: Synthetic oligonucleotide
  Antisense strand to SEQ ID NO: 2437766
cacaucaaugaacuucucc

SEQ ID NO: 2437768 - RNA, 19 nt, Artificial Sequence
  Description of Artificial Sequence: Synthetic oligonucleotide
  Sense strand starting at position 3305 of SEQ ID NO: 1886950
ugaguuugggugcaauauc

SEQ ID NO: 2437769 - RNA, 19 nt, Artificial Sequence
  Description of Artificial Sequence: Synthetic oligonucleotide
  Antisense strand to SEQ ID NO: 2437768
gauauugcacccaaacuca

SEQ ID NO: 2437770 - RNA, 19 nt, Artificial Sequence
  Description of Artificial Sequence: Synthetic oligonucleotide
  Sense strand starting at position 3396 of SEQ ID NO: 1886950
gggucuggauguccuucaa

SEQ ID NO: 2437771 - RNA, 19 nt, Artificial Sequence
  Description of Artificial Sequence: Synthetic oligonucleotide
  Antisense strand to SEQ ID NO: 2437770
uugaaggacauccagaccc

SEQ ID NO: 2437772 - RNA, 19 nt, Artificial Sequence
  Description of Artificial Sequence: Synthetic oligonucleotide
  Sense strand starting at position 3436 of SEQ ID NO: 1886950
ccacaaaugcgugaaugaa

SEQ ID NO: 2437773 - RNA, 19 nt, Artificial Sequence
  Description of Artificial Sequence: Synthetic oligonucleotide
  Antisense strand to SEQ ID NO: 2437772
uucauucacgcauuugugg

SEQ ID NO: 2437774 - RNA, 19 nt, Artificial Sequence
  Description of Artificial Sequence: Synthetic oligonucleotide
  Sense strand starting at position 3525 of SEQ ID NO: 1886950
agugucauuugucuaauug

SEQ ID NO: 2437775 - RNA, 19 nt, Artificial Sequence
  Description of Artificial Sequence: Synthetic oligonucleotide
  Antisense strand to SEQ ID NO: 2437774
caauuagacaaaugacacu

SEQ ID NO: 2437776 - RNA, 19 nt, Artificial Sequence
  Description of Artificial Sequence: Synthetic oligonucleotide
  Sense strand starting at position 3542 of SEQ ID NO: 1886950
ugcuuuguaaguguaguuu

SEQ ID NO: 2437777 - RNA, 19 nt, Artificial Sequence
  Description of Artificial Sequence: Synthetic oligonucleotide
  Antisense strand to SEQ ID NO: 2437776
aaacuacacuuacaaagca

SEQ ID NO: 2437778 - RNA, 19 nt, Artificial Sequence
  Description of Artificial Sequence: Synthetic oligonucleotide
  Sense strand starting at position 3571 of SEQ ID NO: 1886950
auguaaauuaugugaacgu

SEQ ID NO: 2437779 - RNA, 19 nt, Artificial Sequence
  Description of Artificial Sequence: Synthetic oligonucleotide
  Antisense strand to SEQ ID NO: 2437778
acguucacauaauuuacau

SEQ ID NO: 2437780 - RNA, 19 nt, Artificial Sequence
  Description of Artificial Sequence: Synthetic oligonucleotide
  Sense strand starting at position 3575 of SEQ ID NO: 1886950
aaauuaugugaacgucuaa

SEQ ID NO: 2437781 - RNA, 19 nt, Artificial Sequence
  Description of Artificial Sequence: Synthetic oligonucleotide
  Antisense strand to SEQ ID NO: 2437780
uuagacguucacauaauuu

SEQ ID NO: 2437782 - RNA, 19 nt, Artificial Sequence
  Description of Artificial Sequence: Synthetic oligonucleotide
  Sense strand starting at position 3588 of SEQ ID NO: 1886950
gucuaauggguuuauuauu

SEQ ID NO: 2437783 - RNA, 19 nt, Artificial Sequence
  Description of Artificial Sequence: Synthetic oligonucleotide
  Antisense strand to SEQ ID NO: 2437782
aauaauaaacccauuagac

SEQ ID NO: 2437784 - RNA, 19 nt, Artificial Sequence
  Description of Artificial Sequence: Synthetic oligonucleotide
  Sense strand starting at position 3659 of SEQ ID NO: 1886950
gguaacuagcaauggucau

SEQ ID NO: 2437785 - RNA, 19 nt, Artificial Sequence
  Description of Artificial Sequence: Synthetic oligonucleotide
  Antisense strand to SEQ ID NO: 2437784
augaccauugcuaguuacc

SEQ ID NO: 2437786 - RNA, 19 nt, Artificial Sequence
  Description of Artificial Sequence: Synthetic oligonucleotide
  Sense strand starting at position 3670 of SEQ ID NO: 1886950
auggucauagcccauguau

SEQ ID NO: 2437787 - RNA, 19 nt, Artificial Sequence
  Description of Artificial Sequence: Synthetic oligonucleotide
  Antisense strand to SEQ ID NO: 2437786
auacaugggcuaugaccau

SEQ ID NO: 2437788 - RNA, 19 nt, Artificial Sequence
  Description of Artificial Sequence: Synthetic oligonucleotide
  Sense strand starting at position 3672 of SEQ ID NO: 1886950
ggucauagcccauguauuu

SEQ ID NO: 2437789 - RNA, 19 nt, Artificial Sequence
  Description of Artificial Sequence: Synthetic oligonucleotide
  Antisense strand to SEQ ID NO: 2437788
aaauacaugggcuaugacc

SEQ ID NO: 2437790 - RNA, 19 nt, Artificial Sequence
  Description of Artificial Sequence: Synthetic oligonucleotide
  Sense strand starting at position 3694 of SEQ ID NO: 1886950
aguucucaagaauauaugu

SEQ ID NO: 2437791 - RNA, 19 nt, Artificial Sequence
  Description of Artificial Sequence: Synthetic oligonucleotide
  Antisense strand to SEQ ID NO: 2437790
acauauauucuugagaacu

SEQ ID NO: 2437792 - RNA, 19 nt, Artificial Sequence
  Description of Artificial Sequence: Synthetic oligonucleotide
  Sense strand starting at position 196 of SEQ ID NO: 1886951
guaucaugucaacaauucu

SEQ ID NO: 2437793 - RNA, 19 nt, Artificial Sequence
  Description of Artificial Sequence: Synthetic oligonucleotide
  Antisense strand to SEQ ID NO: 2437792
agaauuguugacaugauac

SEQ ID NO: 2437794 - RNA, 19 nt, Artificial Sequence
  Description of Artificial Sequence: Synthetic oligonucleotide
  Sense strand starting at position 471 of SEQ ID NO: 1886951
ggaggaagcuugguacuuu

SEQ ID NO: 2437795 - RNA, 19 nt, Artificial Sequence
  Description of Artificial Sequence: Synthetic oligonucleotide
  Antisense strand to SEQ ID NO: 2437794
aaaguaccaagcuuccucc

SEQ ID NO: 2437796 - RNA, 19 nt, Artificial Sequence
  Description of Artificial Sequence: Synthetic oligonucleotide
  Sense strand starting at position 619 of SEQ ID NO: 1886951
gggcacuuacaguagaagu

SEQ ID NO: 2437797 - RNA, 19 nt, Artificial Sequence
  Description of Artificial Sequence: Synthetic oligonucleotide
  Antisense strand to SEQ ID NO: 2437796
acuucuacuguaagugccc

SEQ ID NO: 2437798 - RNA, 19 nt, Artificial Sequence
  Description of Artificial Sequence: Synthetic oligonucleotide
  Sense strand starting at position 630 of SEQ ID NO: 1886951
guagaagucccugauguug

SEQ ID NO: 2437799 - RNA, 19 nt, Artificial Sequence
  Description of Artificial Sequence: Synthetic oligonucleotide
  Antisense strand to SEQ ID NO: 2437798
caacaucagggacuucuac

SEQ ID NO: 2437800 - RNA, 19 nt, Artificial Sequence
  Description of Artificial Sequence: Synthetic oligonucleotide
  Sense strand starting at position 638 of SEQ ID NO: 1886951
cccugauguugggugggau

SEQ ID NO: 2437801 - RNA, 19 nt, Artificial Sequence
  Description of Artificial Sequence: Synthetic oligonucleotide
  Antisense strand to SEQ ID NO: 2437800
aucccacccaacaucaggg

SEQ ID NO: 2437802 - RNA, 19 nt, Artificial Sequence
  Description of Artificial Sequence: Synthetic oligonucleotide
  Sense strand starting at position 650 of SEQ ID NO: 1886951
gugggaugucaacaccauc

SEQ ID NO: 2437803 - RNA, 19 nt, Artificial Sequence
  Description of Artificial Sequence: Synthetic oligonucleotide
  Antisense strand to SEQ ID NO: 2437802
gaugguguugacaucccac

SEQ ID NO: 2437804 - RNA, 19 nt, Artificial Sequence
  Description of Artificial Sequence: Synthetic oligonucleotide
  Sense strand starting at position 714 of SEQ ID NO: 1886951
uuggcuccucuagaaagau

SEQ ID NO: 2437805 - RNA, 19 nt, Artificial Sequence
  Description of Artificial Sequence: Synthetic oligonucleotide
  Antisense strand to SEQ ID NO: 2437804
aucuuucuagaggagccaa

SEQ ID NO: 2437806 - RNA, 19 nt, Artificial Sequence
  Description of Artificial Sequence: Synthetic oligonucleotide
  Sense strand starting at position 1280 of SEQ ID NO: 1886951
gcagaaugagguuauggca

SEQ ID NO: 2437807 - RNA, 19 nt, Artificial Sequence
  Description of Artificial Sequence: Synthetic oligonucleotide
  Antisense strand to SEQ ID NO: 2437806
ugccauaaccucauucugc

SEQ ID NO: 2437808 - RNA, 19 nt, Artificial Sequence
  Description of Artificial Sequence: Synthetic oligonucleotide
  Sense strand starting at position 1384 of SEQ ID NO: 1886951
uagguugugguguaagaua

SEQ ID NO: 2437809 - RNA, 19 nt, Artificial Sequence
  Description of Artificial Sequence: Synthetic oligonucleotide
  Antisense strand to SEQ ID NO: 2437808
uaucuuacaccacaaccua

SEQ ID NO: 2437810 - RNA, 19 nt, Artificial Sequence
  Description of Artificial Sequence: Synthetic oligonucleotide
  Sense strand starting at position 1410 of SEQ ID NO: 1886951
agaucuauguauguaagau

SEQ ID NO: 2437811 - RNA, 19 nt, Artificial Sequence
  Description of Artificial Sequence: Synthetic oligonucleotide
  Antisense strand to SEQ ID NO: 2437810
aucuuacauacauagaucu

SEQ ID NO: 2437812 - RNA, 19 nt, Artificial Sequence
  Description of Artificial Sequence: Synthetic oligonucleotide
  Sense strand starting at position 1416 of SEQ ID NO: 1886951
auguauguaagauaacguu

SEQ ID NO: 2437813 - RNA, 19 nt, Artificial Sequence
  Description of Artificial Sequence: Synthetic oligonucleotide
  Antisense strand to SEQ ID NO: 2437812
aacguuaucuuacauacau

SEQ ID NO: 2437814 - RNA, 19 nt, Artificial Sequence
  Description of Artificial Sequence: Synthetic oligonucleotide
  Sense strand starting at position 1450 of SEQ ID NO: 1886951
ucacacuucggaugcagaa

SEQ ID NO: 2437815 - RNA, 19 nt, Artificial Sequence
  Description of Artificial Sequence: Synthetic oligonucleotide
  Antisense strand to SEQ ID NO: 2437814
uucugcauccgaaguguga

SEQ ID NO: 2437816 - RNA, 19 nt, Artificial Sequence
  Description of Artificial Sequence: Synthetic oligonucleotide
  Sense strand starting at position 1612 of SEQ ID NO: 1886951
cggaauugucuuuaucaca

SEQ ID NO: 2437817 - RNA, 19 nt, Artificial Sequence
  Description of Artificial Sequence: Synthetic oligonucleotide
  Antisense strand to SEQ ID NO: 2437816
ugugauaaagacaauuccg

SEQ ID NO: 2437818 - RNA, 19 nt, Artificial Sequence
  Description of Artificial Sequence: Synthetic oligonucleotide
  Sense strand starting at position 1651 of SEQ ID NO: 1886951
gaaaucgagcugcacaaau

SEQ ID NO: 2437819 - RNA, 19 nt, Artificial Sequence
  Description of Artificial Sequence: Synthetic oligonucleotide
  Antisense strand to SEQ ID NO: 2437818
auuugugcagcucgauuuc

SEQ ID NO: 2437820 - RNA, 19 nt, Artificial Sequence
  Description of Artificial Sequence: Synthetic oligonucleotide
  Sense strand starting at position 2585 of SEQ ID NO: 1886951
gugcuugguggugaagaau

SEQ ID NO: 2437821 - RNA, 19 nt, Artificial Sequence
  Description of Artificial Sequence: Synthetic oligonucleotide
  Antisense strand to SEQ ID NO: 2437820
auucuucaccaccaagcac

SEQ ID NO: 2437822 - RNA, 19 nt, Artificial Sequence
  Description of Artificial Sequence: Synthetic oligonucleotide
  Sense strand starting at position 2627 of SEQ ID NO: 1886951
ggcucugagcccuggauuu

SEQ ID NO: 2437823 - RNA, 19 nt, Artificial Sequence
  Description of Artificial Sequence: Synthetic oligonucleotide
  Antisense strand to SEQ ID NO: 2437822
aaauccagggcucagagcc

SEQ ID NO: 2437824 - RNA, 19 nt, Artificial Sequence
  Description of Artificial Sequence: Synthetic oligonucleotide
  Sense strand starting at position 2702 of SEQ ID NO: 1886951
cucaucugaugagugagaa

SEQ ID NO: 2437825 - RNA, 19 nt, Artificial Sequence
  Description of Artificial Sequence: Synthetic oligonucleotide
  Antisense strand to SEQ ID NO: 2437824
uucucacucaucagaugag

SEQ ID NO: 2437826 - RNA, 19 nt, Artificial Sequence
  Description of Artificial Sequence: Synthetic oligonucleotide
  Sense strand starting at position 2703 of SEQ ID NO: 1886951
ucaucugaugagugagaau

SEQ ID NO: 2437827 - RNA, 19 nt, Artificial Sequence
  Description of Artificial Sequence: Synthetic oligonucleotide
  Antisense strand to SEQ ID NO: 2437826
auucucacucaucagauga

SEQ ID NO: 2437828 - RNA, 19 nt, Artificial Sequence
  Description of Artificial Sequence: Synthetic oligonucleotide
  Sense strand starting at position 2712 of SEQ ID NO: 1886951
gagugagaaucacugcacu

SEQ ID NO: 2437829 - RNA, 19 nt, Artificial Sequence
  Description of Artificial Sequence: Synthetic oligonucleotide
  Antisense strand to SEQ ID NO: 2437828
agugcagugauucucacuc

SEQ ID NO: 2437830 - RNA, 19 nt, Artificial Sequence
  Description of Artificial Sequence: Synthetic oligonucleotide
  Sense strand starting at position 2804 of SEQ ID NO: 1886951
agcgcuuagaacuaugacu

SEQ ID NO: 2437831 - RNA, 19 nt, Artificial Sequence
  Description of Artificial Sequence: Synthetic oligonucleotide
  Antisense strand to SEQ ID NO: 2437830
agucauaguucuaagcgcu

SEQ ID NO: 2437832 - RNA, 19 nt, Artificial Sequence
  Description of Artificial Sequence: Synthetic oligonucleotide
  Sense strand starting at position 2806 of SEQ ID NO: 1886951
cgcuuagaacuaugacuga

SEQ ID NO: 2437833 - RNA, 19 nt, Artificial Sequence
  Description of Artificial Sequence: Synthetic oligonucleotide
  Antisense strand to SEQ ID NO: 2437832
ucagucauaguucuaagcg

SEQ ID NO: 2437834 - RNA, 19 nt, Artificial Sequence
  Description of Artificial Sequence: Synthetic oligonucleotide
  Sense strand starting at position 2817 of SEQ ID NO: 1886951
augacugacacuuggugaa

SEQ ID NO: 2437835 - RNA, 19 nt, Artificial Sequence
  Description of Artificial Sequence: Synthetic oligonucleotide
  Antisense strand to SEQ ID NO: 2437834
uucaccaagugucagucau

SEQ ID NO: 2437836 - RNA, 19 nt, Artificial Sequence
  Description of Artificial Sequence: Synthetic oligonucleotide
  Sense strand starting at position 2819 of SEQ ID NO: 1886951
gacugacacuuggugaaug

SEQ ID NO: 2437837 - RNA, 19 nt, Artificial Sequence
  Description of Artificial Sequence: Synthetic oligonucleotide
  Antisense strand to SEQ ID NO: 2437836
cauucaccaagugucaguc

SEQ ID NO: 2437838 - RNA, 19 nt, Artificial Sequence
  Description of Artificial Sequence: Synthetic oligonucleotide
  Sense strand starting at position 2831 of SEQ ID NO: 1886951
gugaauguccaguaaccaa

SEQ ID NO: 2437839 - RNA, 19 nt, Artificial Sequence
  Description of Artificial Sequence: Synthetic oligonucleotide
  Antisense strand to SEQ ID NO: 2437838
uugguuacuggacauucac

SEQ ID NO: 2437840 - RNA, 19 nt, Artificial Sequence
  Description of Artificial Sequence: Synthetic oligonucleotide
  Sense strand starting at position 2887 of SEQ ID NO: 1886951
acaauuuacuaggcguagu

SEQ ID NO: 2437841 - RNA, 19 nt, Artificial Sequence
  Description of Artificial Sequence: Synthetic oligonucleotide
  Antisense strand to SEQ ID NO: 2437840
acuacgccuaguaaauugu

SEQ ID NO: 2437842 - RNA, 19 nt, Artificial Sequence
  Description of Artificial Sequence: Synthetic oligonucleotide
  Sense strand starting at position 2932 of SEQ ID NO: 1886951
auauacauagucuggcaua

SEQ ID NO: 2437843 - RNA, 19 nt, Artificial Sequence
  Description of Artificial Sequence: Synthetic oligonucleotide
  Antisense strand to SEQ ID NO: 2437842
uaugccagacuauguauau

SEQ ID NO: 2437844 - RNA, 19 nt, Artificial Sequence
  Description of Artificial Sequence: Synthetic oligonucleotide
  Sense strand starting at position 3042 of SEQ ID NO: 1886951
uggagucauaauuggaggu

SEQ ID NO: 2437845 - RNA, 19 nt, Artificial Sequence
  Description of Artificial Sequence: Synthetic oligonucleotide
  Antisense strand to SEQ ID NO: 2437844
accuccaauuaugacucca

SEQ ID NO: 2437846 - RNA, 19 nt, Artificial Sequence
  Description of Artificial Sequence: Synthetic oligonucleotide
  Sense strand starting at position 3043 of SEQ ID NO: 1886951
ggagucauaauuggaggua

SEQ ID NO: 2437847 - RNA, 19 nt, Artificial Sequence
  Description of Artificial Sequence: Synthetic oligonucleotide
  Antisense strand to SEQ ID NO: 2437846
uaccuccaauuaugacucc

SEQ ID NO: 2437848 - RNA, 19 nt, Artificial Sequence
  Description of Artificial Sequence: Synthetic oligonucleotide
  Sense strand starting at position 3155 of SEQ ID NO: 1886951
gugcuuugauuucuguaaa

SEQ ID NO: 2437849 - RNA, 19 nt, Artificial Sequence
  Description of Artificial Sequence: Synthetic oligonucleotide
  Antisense strand to SEQ ID NO: 2437848
uuuacagaaaucaaagcac

SEQ ID NO: 2437850 - RNA, 19 nt, Artificial Sequence
  Description of Artificial Sequence: Synthetic oligonucleotide
  Sense strand starting at position 3413 of SEQ ID NO: 1886951
gggcauuuaucauaagagg

SEQ ID NO: 2437851 - RNA, 19 nt, Artificial Sequence
  Description of Artificial Sequence: Synthetic oligonucleotide
  Antisense strand to SEQ ID NO: 2437850
ccucuuaugauaaaugccc

SEQ ID NO: 2437852 - RNA, 19 nt, Artificial Sequence
  Description of Artificial Sequence: Synthetic oligonucleotide
  Sense strand starting at position 3431 of SEQ ID NO: 1886951
guaugcucaggagauaugu

SEQ ID NO: 2437853 - RNA, 19 nt, Artificial Sequence
  Description of Artificial Sequence: Synthetic oligonucleotide
  Antisense strand to SEQ ID NO: 2437852
acauaucuccugagcauac

SEQ ID NO: 2437854 - RNA, 19 nt, Artificial Sequence
  Description of Artificial Sequence: Synthetic oligonucleotide
  Sense strand starting at position 3465 of SEQ ID NO: 1886951
gucucauucccauggaaga

SEQ ID NO: 2437855 - RNA, 19 nt, Artificial Sequence
  Description of Artificial Sequence: Synthetic oligonucleotide
  Antisense strand to SEQ ID NO: 2437854
ucuuccaugggaaugagac

SEQ ID NO: 2437856 - RNA, 19 nt, Artificial Sequence
  Description of Artificial Sequence: Synthetic oligonucleotide
  Sense strand starting at position 3509 of SEQ ID NO: 1886951
acaucuuagcucuagguua

SEQ ID NO: 2437857 - RNA, 19 nt, Artificial Sequence
  Description of Artificial Sequence: Synthetic oligonucleotide
  Antisense strand to SEQ ID NO: 2437856
uaaccuagagcuaagaugu

SEQ ID NO: 2437858 - RNA, 19 nt, Artificial Sequence
  Description of Artificial Sequence: Synthetic oligonucleotide
  Sense strand starting at position 3514 of SEQ ID NO: 1886951
uuagcucuagguuagagua

SEQ ID NO: 2437859 - RNA, 19 nt, Artificial Sequence
  Description of Artificial Sequence: Synthetic oligonucleotide
  Antisense strand to SEQ ID NO: 2437858
uacucuaaccuagagcuaa

SEQ ID NO: 2437860 - RNA, 19 nt, Artificial Sequence
  Description of Artificial Sequence: Synthetic oligonucleotide
  Sense strand starting at position 3557 of SEQ ID NO: 1886951
gacucugaagucugguuga

SEQ ID NO: 2437861 - RNA, 19 nt, Artificial Sequence
  Description of Artificial Sequence: Synthetic oligonucleotide
  Antisense strand to SEQ ID NO: 2437860
ucaaccagacuucagaguc

SEQ ID NO: 2437862 - RNA, 19 nt, Artificial Sequence
  Description of Artificial Sequence: Synthetic oligonucleotide
  Sense strand starting at position 3571 of SEQ ID NO: 1886951
guugacucacagggaaauu

SEQ ID NO: 2437863 - RNA, 19 nt, Artificial Sequence
  Description of Artificial Sequence: Synthetic oligonucleotide
  Antisense strand to SEQ ID NO: 2437862
aauuucccugugagucaac

SEQ ID NO: 2437864 - RNA, 19 nt, Artificial Sequence
  Description of Artificial Sequence: Synthetic oligonucleotide
  Sense strand starting at position 3594 of SEQ ID NO: 1886951
ggcagaaagccaugagaug

SEQ ID NO: 2437865 - RNA, 19 nt, Artificial Sequence
  Description of Artificial Sequence: Synthetic oligonucleotide
  Antisense strand to SEQ ID NO: 2437864
caucucauggcuuucugcc

SEQ ID NO: 2437866 - RNA, 19 nt, Artificial Sequence
  Description of Artificial Sequence: Synthetic oligonucleotide
  Sense strand starting at position 3595 of SEQ ID NO: 1886951
gcagaaagccaugagaugu

SEQ ID NO: 2437867 - RNA, 19 nt, Artificial Sequence
  Description of Artificial Sequence: Synthetic oligonucleotide
  Antisense strand to SEQ ID NO: 2437866
acaucucauggcuuucugc

SEQ ID NO: 2437868 - RNA, 19 nt, Artificial Sequence
  Description of Artificial Sequence: Synthetic oligonucleotide
  Sense strand starting at position 3644 of SEQ ID NO: 1886951
ggugaaugacaacguggaa

SEQ ID NO: 2437869 - RNA, 19 nt, Artificial Sequence
  Description of Artificial Sequence: Synthetic oligonucleotide
  Antisense strand to SEQ ID NO: 2437868
uuccacguugucauucacc

SEQ ID NO: 2437870 - RNA, 19 nt, Artificial Sequence
  Description of Artificial Sequence: Synthetic oligonucleotide
  Sense strand starting at position 3681 of SEQ ID NO: 1886951
guugaauggguucagcaaa

SEQ ID NO: 2437871 - RNA, 19 nt, Artificial Sequence
  Description of Artificial Sequence: Synthetic oligonucleotide
  Antisense strand to SEQ ID NO: 2437870
uuugcugaacccauucaac

SEQ ID NO: 2437872 - RNA, 19 nt, Artificial Sequence
  Description of Artificial Sequence: Synthetic oligonucleotide
  Sense strand starting at position 5 of SEQ ID NO: 1886952
gcuccaucccuauggaacu

SEQ ID NO: 2437873 - RNA, 19 nt, Artificial Sequence
  Description of Artificial Sequence: Synthetic oligonucleotide
  Antisense strand to SEQ ID NO: 2437872
aguuccauagggauggagc

SEQ ID NO: 2437874 - RNA, 19 nt, Artificial Sequence
  Description of Artificial Sequence: Synthetic oligonucleotide
  Sense strand starting at position 54 of SEQ ID NO: 1886952
accugauucuuagccaaag

SEQ ID NO: 2437875 - RNA, 19 nt, Artificial Sequence
  Description of Artificial Sequence: Synthetic oligonucleotide
  Antisense strand to SEQ ID NO: 2437874
cuuuggcuaagaaucaggu

SEQ ID NO: 2437876 - RNA, 19 nt, Artificial Sequence
  Description of Artificial Sequence: Synthetic oligonucleotide
  Sense strand starting at position 99 of SEQ ID NO: 1886952
acaggucaccagugagcaa

SEQ ID NO: 2437877 - RNA, 19 nt, Artificial Sequence
  Description of Artificial Sequence: Synthetic oligonucleotide
  Antisense strand to SEQ ID NO: 2437876
uugcucacuggugaccugu

SEQ ID NO: 2437878 - RNA, 19 nt, Artificial Sequence
  Description of Artificial Sequence: Synthetic oligonucleotide
  Sense strand starting at position 649 of SEQ ID NO: 1886952
gucagaggucuuuagccuu

SEQ ID NO: 2437879 - RNA, 19 nt, Artificial Sequence
  Description of Artificial Sequence: Synthetic oligonucleotide
  Antisense strand to SEQ ID NO: 2437878
aaggcuaaagaccucugac

SEQ ID NO: 2437880 - RNA, 19 nt, Artificial Sequence
  Description of Artificial Sequence: Synthetic oligonucleotide
  Sense strand starting at position 748 of SEQ ID NO: 1886952
caggcaucacaugggaaau

SEQ ID NO: 2437881 - RNA, 19 nt, Artificial Sequence
  Description of Artificial Sequence: Synthetic oligonucleotide
  Antisense strand to SEQ ID NO: 2437880
auuucccaugugaugccug

SEQ ID NO: 2437882 - RNA, 19 nt, Artificial Sequence
  Description of Artificial Sequence: Synthetic oligonucleotide
  Sense strand starting at position 750 of SEQ ID NO: 1886952
ggcaucacaugggaaauaa

SEQ ID NO: 2437883 - RNA, 19 nt, Artificial Sequence
  Description of Artificial Sequence: Synthetic oligonucleotide
  Antisense strand to SEQ ID NO: 2437882
uuauuucccaugugaugcc

SEQ ID NO: 2437884 - RNA, 19 nt, Artificial Sequence
  Description of Artificial Sequence: Synthetic oligonucleotide
  Sense strand starting at position 793 of SEQ ID NO: 1886952
ugucuucuuugagccaaga

SEQ ID NO: 2437885 - RNA, 19 nt, Artificial Sequence
  Description of Artificial Sequence: Synthetic oligonucleotide
  Antisense strand to SEQ ID NO: 2437884
ucuuggcucaaagaagaca

SEQ ID NO: 2437886 - RNA, 19 nt, Artificial Sequence
  Description of Artificial Sequence: Synthetic oligonucleotide
  Sense strand starting at position 820 of SEQ ID NO: 1886952
acaagucaccgguaagcaa

SEQ ID NO: 2437887 - RNA, 19 nt, Artificial Sequence
  Description of Artificial Sequence: Synthetic oligonucleotide
  Antisense strand to SEQ ID NO: 2437886
uugcuuaccggugacuugu

SEQ ID NO: 2437888 - RNA, 19 nt, Artificial Sequence
  Description of Artificial Sequence: Synthetic oligonucleotide
  Sense strand starting at position 2104 of SEQ ID NO: 1886952
ccagcucucccuggaggau

SEQ ID NO: 2437889 - RNA, 19 nt, Artificial Sequence
  Description of Artificial Sequence: Synthetic oligonucleotide
  Antisense strand to SEQ ID NO: 2437888
auccuccagggagagcugg

SEQ ID NO: 2437890 - RNA, 19 nt, Artificial Sequence
  Description of Artificial Sequence: Synthetic oligonucleotide
  Sense strand starting at position 2105 of SEQ ID NO: 1886952
cagcucucccuggaggauu

SEQ ID NO: 2437891 - RNA, 19 nt, Artificial Sequence
  Description of Artificial Sequence: Synthetic oligonucleotide
  Antisense strand to SEQ ID NO: 2437890
aauccuccagggagagcug

SEQ ID NO: 2437892 - RNA, 19 nt, Artificial Sequence
  Description of Artificial Sequence: Synthetic oligonucleotide
  Sense strand starting at position 2116 of SEQ ID NO: 1886952
ggaggauuccugcguuuaa

SEQ ID NO: 2437893 - RNA, 19 nt, Artificial Sequence
  Description of Artificial Sequence: Synthetic oligonucleotide
  Antisense strand to SEQ ID NO: 2437892
uuaaacgcaggaauccucc

SEQ ID NO: 2437894 - RNA, 19 nt, Artificial Sequence
  Description of Artificial Sequence: Synthetic oligonucleotide
  Sense strand starting at position 2117 of SEQ ID NO: 1886952
gaggauuccugcguuuaag

SEQ ID NO: 2437895 - RNA, 19 nt, Artificial Sequence
  Description of Artificial Sequence: Synthetic oligonucleotide
  Antisense strand to SEQ ID NO: 2437894
cuuaaacgcaggaauccuc

SEQ ID NO: 2437896 - RNA, 19 nt, Artificial Sequence
  Description of Artificial Sequence: Synthetic oligonucleotide
  Sense strand starting at position 2153 of SEQ ID NO: 1886952
cagugaaagcuccgaguca

SEQ ID NO: 2437897 - RNA, 19 nt, Artificial Sequence
  Description of Artificial Sequence: Synthetic oligonucleotide
  Antisense strand to SEQ ID NO: 2437896
ugacucggagcuuucacug

SEQ ID NO: 2437898 - RNA, 19 nt, Artificial Sequence
  Description of Artificial Sequence: Synthetic oligonucleotide
  Sense strand starting at position 2184 of SEQ ID NO: 1886952
gcaugcacuguuuaaaguu

SEQ ID NO: 2437899 - RNA, 19 nt, Artificial Sequence
  Description of Artificial Sequence: Synthetic oligonucleotide
  Antisense strand to SEQ ID NO: 2437898
aacuuuaaacagugcaugc

SEQ ID NO: 2437900 - RNA, 19 nt, Artificial Sequence
  Description of Artificial Sequence: Synthetic oligonucleotide
  Sense strand starting at position 2199 of SEQ ID NO: 1886952
aguugaacuccucagcuuu

SEQ ID NO: 2437901 - RNA, 19 nt, Artificial Sequence
  Description of Artificial Sequence: Synthetic oligonucleotide
  Antisense strand to SEQ ID NO: 2437900
aaagcugaggaguucaacu

SEQ ID NO: 2437902 - RNA, 19 nt, Artificial Sequence
  Description of Artificial Sequence: Synthetic oligonucleotide
  Sense strand starting at position 2206 of SEQ ID NO: 1886952
cuccucagcuuugucauua

SEQ ID NO: 2437903 - RNA, 19 nt, Artificial Sequence
  Description of Artificial Sequence: Synthetic oligonucleotide
  Antisense strand to SEQ ID NO: 2437902
uaaugacaaagcugaggag

SEQ ID NO: 2437904 - RNA, 19 nt, Artificial Sequence
  Description of Artificial Sequence: Synthetic oligonucleotide
  Sense strand starting at position 2210 of SEQ ID NO: 1886952
ucagcuuugucauuaaguu

SEQ ID NO: 2437905 - RNA, 19 nt, Artificial Sequence
  Description of Artificial Sequence: Synthetic oligonucleotide
  Antisense strand to SEQ ID NO: 2437904
aacuuaaugacaaagcuga

SEQ ID NO: 2437906 - RNA, 19 nt, Artificial Sequence
  Description of Artificial Sequence: Synthetic oligonucleotide
  Sense strand starting at position 2459 of SEQ ID NO: 1886952
ugccgugagccgagauguu

SEQ ID NO: 2437907 - RNA, 19 nt, Artificial Sequence
  Description of Artificial Sequence: Synthetic oligonucleotide
  Antisense strand to SEQ ID NO: 2437906
aacaucucggcucacggca

SEQ ID NO: 2437908 - RNA, 19 nt, Artificial Sequence
  Description of Artificial Sequence: Synthetic oligonucleotide
  Sense strand starting at position 2684 of SEQ ID NO: 1886952
gucagucagucauucugaa

SEQ ID NO: 2437909 - RNA, 19 nt, Artificial Sequence
  Description of Artificial Sequence: Synthetic oligonucleotide
  Antisense strand to SEQ ID NO: 2437908
uucagaaugacugacugac

SEQ ID NO: 2437910 - RNA, 19 nt, Artificial Sequence
  Description of Artificial Sequence: Synthetic oligonucleotide
  Sense strand starting at position 2699 of SEQ ID NO: 1886952
ugaauugccuguuuggauu

SEQ ID NO: 2437911 - RNA, 19 nt, Artificial Sequence
  Description of Artificial Sequence: Synthetic oligonucleotide
  Antisense strand to SEQ ID NO: 2437910
aauccaaacaggcaauuca

SEQ ID NO: 2437912 - RNA, 19 nt, Artificial Sequence
  Description of Artificial Sequence: Synthetic oligonucleotide
  Sense strand starting at position 2711 of SEQ ID NO: 1886952
uuggauuccuggucaguuu

SEQ ID NO: 2437913 - RNA, 19 nt, Artificial Sequence
  Description of Artificial Sequence: Synthetic oligonucleotide
  Antisense strand to SEQ ID NO: 2437912
aaacugaccaggaauccaa

SEQ ID NO: 2437914 - RNA, 19 nt, Artificial Sequence
  Description of Artificial Sequence: Synthetic oligonucleotide
  Sense strand starting at position 2803 of SEQ ID NO: 1886952
gauccaguggcuuaaacua

SEQ ID NO: 2437915 - RNA, 19 nt, Artificial Sequence
  Description of Artificial Sequence: Synthetic oligonucleotide
  Antisense strand to SEQ ID NO: 2437914
uaguuuaagccacuggauc

SEQ ID NO: 2437916 - RNA, 19 nt, Artificial Sequence
  Description of Artificial Sequence: Synthetic oligonucleotide
  Sense strand starting at position 2854 of SEQ ID NO: 1886952
ccagaaaucuggcuugggu

SEQ ID NO: 2437917 - RNA, 19 nt, Artificial Sequence
  Description of Artificial Sequence: Synthetic oligonucleotide
  Antisense strand to SEQ ID NO: 2437916
acccaagccagauuucugg

SEQ ID NO: 2437918 - RNA, 19 nt, Artificial Sequence
  Description of Artificial Sequence: Synthetic oligonucleotide
  Sense strand starting at position 3071 of SEQ ID NO: 1886952
ggaaaugucuacuucuaag

SEQ ID NO: 2437919 - RNA, 19 nt, Artificial Sequence
  Description of Artificial Sequence: Synthetic oligonucleotide
  Antisense strand to SEQ ID NO: 2437918
cuuagaaguagacauuucc

SEQ ID NO: 2437920 - RNA, 19 nt, Artificial Sequence
  Description of Artificial Sequence: Synthetic oligonucleotide
  Sense strand starting at position 3227 of SEQ ID NO: 1886952
uauggacaccuuuguggaa

SEQ ID NO: 2437921 - RNA, 19 nt, Artificial Sequence
  Description of Artificial Sequence: Synthetic oligonucleotide
  Antisense strand to SEQ ID NO: 2437920
uuccacaaagguguccaua

SEQ ID NO: 2437922 - RNA, 19 nt, Artificial Sequence
  Description of Artificial Sequence: Synthetic oligonucleotide
  Sense strand starting at position 3258 of SEQ ID NO: 1886952
ccaccacaguguucuauga

SEQ ID NO: 2437923 - RNA, 19 nt, Artificial Sequence
  Description of Artificial Sequence: Synthetic oligonucleotide
  Antisense strand to SEQ ID NO: 2437922
ucauagaacacuguggugg

SEQ ID NO: 2437924 - RNA, 19 nt, Artificial Sequence
  Description of Artificial Sequence: Synthetic oligonucleotide
  Sense strand starting at position 3266 of SEQ ID NO: 1886952
guguucuaugaacacacaa

SEQ ID NO: 2437925 - RNA, 19 nt, Artificial Sequence
  Description of Artificial Sequence: Synthetic oligonucleotide
  Antisense strand to SEQ ID NO: 2437924
uuguguguucauagaacac

SEQ ID NO: 2437926 - RNA, 19 nt, Artificial Sequence
  Description of Artificial Sequence: Synthetic oligonucleotide
  Sense strand starting at position 3291 of SEQ ID NO: 1886952
gguaggugggcucagugau

SEQ ID NO: 2437927 - RNA, 19 nt, Artificial Sequence
  Description of Artificial Sequence: Synthetic oligonucleotide
  Antisense strand to SEQ ID NO: 2437926
aucacugagcccaccuacc

SEQ ID NO: 2437928 - RNA, 19 nt, Artificial Sequence
  Description of Artificial Sequence: Synthetic oligonucleotide
  Sense strand starting at position 3292 of SEQ ID NO: 1886952
guaggugggcucagugauc

SEQ ID NO: 2437929 - RNA, 19 nt, Artificial Sequence
  Description of Artificial Sequence: Synthetic oligonucleotide
  Antisense strand to SEQ ID NO: 2437928
gaucacugagcccaccuac

SEQ ID NO: 2437930 - RNA, 19 nt, Artificial Sequence
  Description of Artificial Sequence: Synthetic oligonucleotide
  Sense strand starting at position 3297 of SEQ ID NO: 1886952
ugggcucagugaucguaca

SEQ ID NO: 2437931 - RNA, 19 nt, Artificial Sequence
  Description of Artificial Sequence: Synthetic oligonucleotide
  Antisense strand to SEQ ID NO: 2437930
uguacgaucacugagccca

SEQ ID NO: 2437932 - RNA, 19 nt, Artificial Sequence
  Description of Artificial Sequence: Synthetic oligonucleotide
  Sense strand starting at position 3298 of SEQ ID NO: 1886952
gggcucagugaucguacaa

SEQ ID NO: 2437933 - RNA, 19 nt, Artificial Sequence
  Description of Artificial Sequence: Synthetic oligonucleotide
  Antisense strand to SEQ ID NO: 2437932
uuguacgaucacugagccc

SEQ ID NO: 2437934 - RNA, 19 nt, Artificial Sequence
  Description of Artificial Sequence: Synthetic oligonucleotide
  Sense strand starting at position 3308 of SEQ ID NO: 1886952
aucguacaaaugugagagu

SEQ ID NO: 2437935 - RNA, 19 nt, Artificial Sequence
  Description of Artificial Sequence: Synthetic oligonucleotide
  Antisense strand to SEQ ID NO: 2437934
acucucacauuuguacgau

SEQ ID NO: 2437936 - RNA, 19 nt, Artificial Sequence
  Description of Artificial Sequence: Synthetic oligonucleotide
  Sense strand starting at position 3317 of SEQ ID NO: 1886952
augugagagucacuccauu

SEQ ID NO: 2437937 - RNA, 19 nt, Artificial Sequence
  Description of Artificial Sequence: Synthetic oligonucleotide
  Antisense strand to SEQ ID NO: 2437936
aauggagugacucucacau

SEQ ID NO: 2437938 - RNA, 19 nt, Artificial Sequence
  Description of Artificial Sequence: Synthetic oligonucleotide
  Sense strand starting at position 3388 of SEQ ID NO: 1886952
ugcuaauaagcauggugaa

SEQ ID NO: 2437939 - RNA, 19 nt, Artificial Sequence
  Description of Artificial Sequence: Synthetic oligonucleotide
  Antisense strand to SEQ ID NO: 2437938
uucaccaugcuuauuagca

SEQ ID NO: 2437940 - RNA, 19 nt, Artificial Sequence
  Description of Artificial Sequence: Synthetic oligonucleotide
  Sense strand starting at position 3389 of SEQ ID NO: 1886952
gcuaauaagcauggugaau

SEQ ID NO: 2437941 - RNA, 19 nt, Artificial Sequence
  Description of Artificial Sequence: Synthetic oligonucleotide
  Antisense strand to SEQ ID NO: 2437940
auucaccaugcuuauuagc

SEQ ID NO: 2437942 - RNA, 19 nt, Artificial Sequence
  Description of Artificial Sequence: Synthetic oligonucleotide
  Sense strand starting at position 3443 of SEQ ID NO: 1886952
aaaguuuggcugcacacau

SEQ ID NO: 2437943 - RNA, 19 nt, Artificial Sequence
  Description of Artificial Sequence: Synthetic oligonucleotide
  Antisense strand to SEQ ID NO: 2437942
augugugcagccaaacuuu

SEQ ID NO: 2437944 - RNA, 19 nt, Artificial Sequence
  Description of Artificial Sequence: Synthetic oligonucleotide
  Sense strand starting at position 3636 of SEQ ID NO: 1886952
augucugagcucuggaacu

SEQ ID NO: 2437945 - RNA, 19 nt, Artificial Sequence
  Description of Artificial Sequence: Synthetic oligonucleotide
  Antisense strand to SEQ ID NO: 2437944
aguuccagagcucagacau

SEQ ID NO: 2437946 - RNA, 19 nt, Artificial Sequence
  Description of Artificial Sequence: Synthetic oligonucleotide
  Sense strand starting at position 3664 of SEQ ID NO: 1886952
gaaccauggcuugggugaa

SEQ ID NO: 2437947 - RNA, 19 nt, Artificial Sequence
  Description of Artificial Sequence: Synthetic oligonucleotide
  Antisense strand to SEQ ID NO: 2437946
uucacccaagccaugguuc

SEQ ID NO: 2437948 - RNA, 19 nt, Artificial Sequence
  Description of Artificial Sequence: Synthetic oligonucleotide
  Sense strand starting at position 3809 of SEQ ID NO: 1886952
ugugccucugcguuaguga

SEQ ID NO: 2437949 - RNA, 19 nt, Artificial Sequence
  Description of Artificial Sequence: Synthetic oligonucleotide
  Antisense strand to SEQ ID NO: 2437948
ucacuaacgcagaggcaca

SEQ ID NO: 2437950 - RNA, 19 nt, Artificial Sequence
  Description of Artificial Sequence: Synthetic oligonucleotide
  Sense strand starting at position 3928 of SEQ ID NO: 1886952
uugagagguucuccucuca

SEQ ID NO: 2437951 - RNA, 19 nt, Artificial Sequence
  Description of Artificial Sequence: Synthetic oligonucleotide
  Antisense strand to SEQ ID NO: 2437950
ugagaggagaaccucucaa

SEQ ID NO: 2437952 - RNA, 19 nt, Artificial Sequence
  Description of Artificial Sequence: Synthetic oligonucleotide
  Sense strand starting at position 140 of SEQ ID NO: 1886953
guggcuuguggagaaguuu

SEQ ID NO: 2437953 - RNA, 19 nt, Artificial Sequence
  Description of Artificial Sequence: Synthetic oligonucleotide
  Antisense strand to SEQ ID NO: 2437952
aaacuucuccacaagccac

SEQ ID NO: 2437954 - RNA, 19 nt, Artificial Sequence
  Description of Artificial Sequence: Synthetic oligonucleotide
  Sense strand starting at position 155 of SEQ ID NO: 1886953
guuuauuucuccuucugua

SEQ ID NO: 2437955 - RNA, 19 nt, Artificial Sequence
  Description of Artificial Sequence: Synthetic oligonucleotide
  Antisense strand to SEQ ID NO: 2437954
uacagaaggagaaauaaac

SEQ ID NO: 2437956 - RNA, 19 nt, Artificial Sequence
  Description of Artificial Sequence: Synthetic oligonucleotide
  Sense strand starting at position 229 of SEQ ID NO: 1886953
ggcggaugcugcuuugcua

SEQ ID NO: 2437957 - RNA, 19 nt, Artificial Sequence
  Description of Artificial Sequence: Synthetic oligonucleotide
  Antisense strand to SEQ ID NO: 2437956
uagcaaagcagcauccgcc

SEQ ID NO: 2437958 - RNA, 19 nt, Artificial Sequence
  Description of Artificial Sequence: Synthetic oligonucleotide
  Sense strand starting at position 321 of SEQ ID NO: 1886953
ccaggauugaugggcuaag

SEQ ID NO: 2437959 - RNA, 19 nt, Artificial Sequence
  Description of Artificial Sequence: Synthetic oligonucleotide
  Antisense strand to SEQ ID NO: 2437958
cuuagcccaucaauccugg

SEQ ID NO: 2437960 - RNA, 19 nt, Artificial Sequence
  Description of Artificial Sequence: Synthetic oligonucleotide
  Sense strand starting at position 674 of SEQ ID NO: 1886953
cccggucucaguugauauu

SEQ ID NO: 2437961 - RNA, 19 nt, Artificial Sequence
  Description of Artificial Sequence: Synthetic oligonucleotide
  Antisense strand to SEQ ID NO: 2437960
aauaucaacugagaccggg

SEQ ID NO: 2437962 - RNA, 19 nt, Artificial Sequence
  Description of Artificial Sequence: Synthetic oligonucleotide
  Sense strand starting at position 686 of SEQ ID NO: 1886953
ugauauuucuaagaaucug

SEQ ID NO: 2437963 - RNA, 19 nt, Artificial Sequence
  Description of Artificial Sequence: Synthetic oligonucleotide
  Antisense strand to SEQ ID NO: 2437962
cagauucuuagaaauauca

SEQ ID NO: 2437964 - RNA, 19 nt, Artificial Sequence
  Description of Artificial Sequence: Synthetic oligonucleotide
  Sense strand starting at position 692 of SEQ ID NO: 1886953
uucuaagaaucugcauaga

SEQ ID NO: 2437965 - RNA, 19 nt, Artificial Sequence
  Description of Artificial Sequence: Synthetic oligonucleotide
  Antisense strand to SEQ ID NO: 2437964
ucuaugcagauucuuagaa

SEQ ID NO: 2437966 - RNA, 19 nt, Artificial Sequence
  Description of Artificial Sequence: Synthetic oligonucleotide
  Sense strand starting at position 722 of SEQ ID NO: 1886953
gacccuggauccuaucaga

SEQ ID NO: 2437967 - RNA, 19 nt, Artificial Sequence
  Description of Artificial Sequence: Synthetic oligonucleotide
  Antisense strand to SEQ ID NO: 2437966
ucugauaggauccaggguc

SEQ ID NO: 2437968 - RNA, 19 nt, Artificial Sequence
  Description of Artificial Sequence: Synthetic oligonucleotide
  Sense strand starting at position 777 of SEQ ID NO: 1886953
auaacuaaugcguacuaga

SEQ ID NO: 2437969 - RNA, 19 nt, Artificial Sequence
  Description of Artificial Sequence: Synthetic oligonucleotide
  Antisense strand to SEQ ID NO: 2437968
ucuaguacgcauuaguuau

SEQ ID NO: 2437970 - RNA, 19 nt, Artificial Sequence
  Description of Artificial Sequence: Synthetic oligonucleotide
  Sense strand starting at position 1400 of SEQ ID NO: 1886953
cugaaauggucuccuugga

SEQ ID NO: 2437971 - RNA, 19 nt, Artificial Sequence
  Description of Artificial Sequence: Synthetic oligonucleotide
  Antisense strand to SEQ ID NO: 2437970
uccaaggagaccauuucag

SEQ ID NO: 2437972 - RNA, 19 nt, Artificial Sequence
  Description of Artificial Sequence: Synthetic oligonucleotide
  Sense strand starting at position 1404 of SEQ ID NO: 1886953
aauggucuccuuggaucau

SEQ ID NO: 2437973 - RNA, 19 nt, Artificial Sequence
  Description of Artificial Sequence: Synthetic oligonucleotide
  Antisense strand to SEQ ID NO: 2437972
augauccaaggagaccauu

SEQ ID NO: 2437974 - RNA, 19 nt, Artificial Sequence
  Description of Artificial Sequence: Synthetic oligonucleotide
  Sense strand starting at position 1413 of SEQ ID NO: 1886953
cuuggaucaugggcagaga

SEQ ID NO: 2437975 - RNA, 19 nt, Artificial Sequence
  Description of Artificial Sequence: Synthetic oligonucleotide
  Antisense strand to SEQ ID NO: 2437974
ucucugcccaugauccaag

SEQ ID NO: 2437976 - RNA, 19 nt, Artificial Sequence
  Description of Artificial Sequence: Synthetic oligonucleotide
  Sense strand starting at position 1567 of SEQ ID NO: 1886953
cgcugagguucacaggaua

SEQ ID NO: 2437977 - RNA, 19 nt, Artificial Sequence
  Description of Artificial Sequence: Synthetic oligonucleotide
  Antisense strand to SEQ ID NO: 2437976
uauccugugaaccucagcg

SEQ ID NO: 2437978 - RNA, 19 nt, Artificial Sequence
  Description of Artificial Sequence: Synthetic oligonucleotide
  Sense strand starting at position 1973 of SEQ ID NO: 1886953
cugggaggcucuccucauu

SEQ ID NO: 2437979 - RNA, 19 nt, Artificial Sequence
  Description of Artificial Sequence: Synthetic oligonucleotide
  Antisense strand to SEQ ID NO: 2437978
aaugaggagagccucccag

SEQ ID NO: 2437980 - RNA, 19 nt, Artificial Sequence
  Description of Artificial Sequence: Synthetic oligonucleotide
  Sense strand starting at position 2049 of SEQ ID NO: 1886953
ccagcugugcuugaagaca

SEQ ID NO: 2437981 - RNA, 19 nt, Artificial Sequence
  Description of Artificial Sequence: Synthetic oligonucleotide
  Antisense strand to SEQ ID NO: 2437980
ugucuucaagcacagcugg

SEQ ID NO: 2437982 - RNA, 19 nt, Artificial Sequence
  Description of Artificial Sequence: Synthetic oligonucleotide
  Sense strand starting at position 2664 of SEQ ID NO: 1886953
ucuugucucuccucagauc

SEQ ID NO: 2437983 - RNA, 19 nt, Artificial Sequence
  Description of Artificial Sequence: Synthetic oligonucleotide
  Antisense strand to SEQ ID NO: 2437982
gaucugaggagagacaaga

SEQ ID NO: 2437984 - RNA, 19 nt, Artificial Sequence
  Description of Artificial Sequence: Synthetic oligonucleotide
  Sense strand starting at position 3023 of SEQ ID NO: 1886953
cucaauguggcuuguagga

SEQ ID NO: 2437985 - RNA, 19 nt, Artificial Sequence
  Description of Artificial Sequence: Synthetic oligonucleotide
  Antisense strand to SEQ ID NO: 2437984
uccuacaagccacauugag

SEQ ID NO: 2437986 - RNA, 19 nt, Artificial Sequence
  Description of Artificial Sequence: Synthetic oligonucleotide
  Sense strand starting at position 3117 of SEQ ID NO: 1886953
acugaagcccucuggucau

SEQ ID NO: 2437987 - RNA, 19 nt, Artificial Sequence
  Description of Artificial Sequence: Synthetic oligonucleotide
  Antisense strand to SEQ ID NO: 2437986
augaccagagggcuucagu

SEQ ID NO: 2437988 - RNA, 19 nt, Artificial Sequence
  Description of Artificial Sequence: Synthetic oligonucleotide
  Sense strand starting at position 3127 of SEQ ID NO: 1886953
ucuggucaucagcaggaau

SEQ ID NO: 2437989 - RNA, 19 nt, Artificial Sequence
  Description of Artificial Sequence: Synthetic oligonucleotide
  Antisense strand to SEQ ID NO: 2437988
auuccugcugaugaccaga

SEQ ID NO: 2437990 - RNA, 19 nt, Artificial Sequence
  Description of Artificial Sequence: Synthetic oligonucleotide
  Sense strand starting at position 3212 of SEQ ID NO: 1886953
ccagguaagcuauagucaa

SEQ ID NO: 2437991 - RNA, 19 nt, Artificial Sequence
  Description of Artificial Sequence: Synthetic oligonucleotide
  Antisense strand to SEQ ID NO: 2437990
uugacuauagcuuaccugg

SEQ ID NO: 2437992 - RNA, 19 nt, Artificial Sequence
  Description of Artificial Sequence: Synthetic oligonucleotide
  Sense strand starting at position 3321 of SEQ ID NO: 1886953
gacagaugcauguguguuc

SEQ ID NO: 2437993 - RNA, 19 nt, Artificial Sequence
  Description of Artificial Sequence: Synthetic oligonucleotide
  Antisense strand to SEQ ID NO: 2437992
gaacacacaugcaucuguc

SEQ ID NO: 2437994 - RNA, 19 nt, Artificial Sequence
  Description of Artificial Sequence: Synthetic oligonucleotide
  Sense strand starting at position 3324 of SEQ ID NO: 1886953
agaugcauguguguucuga

SEQ ID NO: 2437995 - RNA, 19 nt, Artificial Sequence
  Description of Artificial Sequence: Synthetic oligonucleotide
  Antisense strand to SEQ ID NO: 2437994
ucagaacacacaugcaucu

SEQ ID NO: 2437996 - RNA, 19 nt, Artificial Sequence
  Description of Artificial Sequence: Synthetic oligonucleotide
  Sense strand starting at position 3326 of SEQ ID NO: 1886953
augcauguguguucugaga

SEQ ID NO: 2437997 - RNA, 19 nt, Artificial Sequence
  Description of Artificial Sequence: Synthetic oligonucleotide
  Antisense strand to SEQ ID NO: 2437996
ucucagaacacacaugcau

SEQ ID NO: 2437998 - RNA, 19 nt, Artificial Sequence
  Description of Artificial Sequence: Synthetic oligonucleotide
  Sense strand starting at position 3332 of SEQ ID NO: 1886953
guguguucugagagguggu

SEQ ID NO: 2437999 - RNA, 19 nt, Artificial Sequence
  Description of Artificial Sequence: Synthetic oligonucleotide
  Antisense strand to SEQ ID NO: 2437998
accaccucucagaacacac

SEQ ID NO: 2438000 - RNA, 19 nt, Artificial Sequence
  Description of Artificial Sequence: Synthetic oligonucleotide
  Sense strand starting at position 3333 of SEQ ID NO: 1886953
uguguucugagaggugguu

SEQ ID NO: 2438001 - RNA, 19 nt, Artificial Sequence
  Description of Artificial Sequence: Synthetic oligonucleotide
  Antisense strand to SEQ ID NO: 2438000
aaccaccucucagaacaca

SEQ ID NO: 2438002 - RNA, 19 nt, Artificial Sequence
  Description of Artificial Sequence: Synthetic oligonucleotide
  Sense strand starting at position 3345 of SEQ ID NO: 1886953
ggugguuguguacaagcaa

SEQ ID NO: 2438003 - RNA, 19 nt, Artificial Sequence
  Description of Artificial Sequence: Synthetic oligonucleotide
  Antisense strand to SEQ ID NO: 2438002
uugcuuguacacaaccacc

SEQ ID NO: 2438004 - RNA, 19 nt, Artificial Sequence
  Description of Artificial Sequence: Synthetic oligonucleotide
  Sense strand starting at position 3398 of SEQ ID NO: 1886953
ucugcaaacucggugucua

SEQ ID NO: 2438005 - RNA, 19 nt, Artificial Sequence
  Description of Artificial Sequence: Synthetic oligonucleotide
  Antisense strand to SEQ ID NO: 2438004
uagacaccgaguuugcaga

SEQ ID NO: 2438006 - RNA, 19 nt, Artificial Sequence
  Description of Artificial Sequence: Synthetic oligonucleotide
  Sense strand starting at position 3399 of SEQ ID NO: 1886953
cugcaaacucggugucuau

SEQ ID NO: 2438007 - RNA, 19 nt, Artificial Sequence
  Description of Artificial Sequence: Synthetic oligonucleotide
  Antisense strand to SEQ ID NO: 2438006
auagacaccgaguuugcag

SEQ ID NO: 2438008 - RNA, 19 nt, Artificial Sequence
  Description of Artificial Sequence: Synthetic oligonucleotide
  Sense strand starting at position 3402 of SEQ ID NO: 1886953
caaacucggugucuauuau

SEQ ID NO: 2438009 - RNA, 19 nt, Artificial Sequence
  Description of Artificial Sequence: Synthetic oligonucleotide
  Antisense strand to SEQ ID NO: 2438008
auaauagacaccgaguuug

SEQ ID NO: 2438010 - RNA, 19 nt, Artificial Sequence
  Description of Artificial Sequence: Synthetic oligonucleotide
  Sense strand starting at position 3538 of SEQ ID NO: 1886953
accgguguauguuccagaa

SEQ ID NO: 2438011 - RNA, 19 nt, Artificial Sequence
  Description of Artificial Sequence: Synthetic oligonucleotide
  Antisense strand to SEQ ID NO: 2438010
uucuggaacauacaccggu

SEQ ID NO: 2438012 - RNA, 19 nt, Artificial Sequence
  Description of Artificial Sequence: Synthetic oligonucleotide
  Sense strand starting at position 3542 of SEQ ID NO: 1886953
guguauguuccagaaacca

SEQ ID NO: 2438013 - RNA, 19 nt, Artificial Sequence
  Description of Artificial Sequence: Synthetic oligonucleotide
  Antisense strand to SEQ ID NO: 2438012
ugguuucuggaacauacac

SEQ ID NO: 2438014 - RNA, 19 nt, Artificial Sequence
  Description of Artificial Sequence: Synthetic oligonucleotide
  Sense strand starting at position 3603 of SEQ ID NO: 1886953
aagaguauggucugugcag

SEQ ID NO: 2438015 - RNA, 19 nt, Artificial Sequence
  Description of Artificial Sequence: Synthetic oligonucleotide
  Antisense strand to SEQ ID NO: 2438014
cugcacagaccauacucuu

SEQ ID NO: 2438016 - RNA, 19 nt, Artificial Sequence
  Description of Artificial Sequence: Synthetic oligonucleotide
  Sense strand starting at position 3764 of SEQ ID NO: 1886953
gcugagaaguggucggauu

SEQ ID NO: 2438017 - RNA, 19 nt, Artificial Sequence
  Description of Artificial Sequence: Synthetic oligonucleotide
  Antisense strand to SEQ ID NO: 2438016
aauccgaccacuucucagc

SEQ ID NO: 2438018 - RNA, 19 nt, Artificial Sequence
  Description of Artificial Sequence: Synthetic oligonucleotide
  Sense strand starting at position 3765 of SEQ ID NO: 1886953
cugagaaguggucggauuc

SEQ ID NO: 2438019 - RNA, 19 nt, Artificial Sequence
  Description of Artificial Sequence: Synthetic oligonucleotide
  Antisense strand to SEQ ID NO: 2438018
gaauccgaccacuucucag

SEQ ID NO: 2438020 - RNA, 19 nt, Artificial Sequence
  Description of Artificial Sequence: Synthetic oligonucleotide
  Sense strand starting at position 3766 of SEQ ID NO: 1886953
ugagaaguggucggauucu

SEQ ID NO: 2438021 - RNA, 19 nt, Artificial Sequence
  Description of Artificial Sequence: Synthetic oligonucleotide
  Antisense strand to SEQ ID NO: 2438020
agaauccgaccacuucuca

SEQ ID NO: 2438022 - RNA, 19 nt, Artificial Sequence
  Description of Artificial Sequence: Synthetic oligonucleotide
  Sense strand starting at position 3775 of SEQ ID NO: 1886953
gucggauucuggguuagga

SEQ ID NO: 2438023 - RNA, 19 nt, Artificial Sequence
  Description of Artificial Sequence: Synthetic oligonucleotide
  Antisense strand to SEQ ID NO: 2438022
uccuaacccagaauccgac

SEQ ID NO: 2438024 - RNA, 19 nt, Artificial Sequence
  Description of Artificial Sequence: Synthetic oligonucleotide
  Sense strand starting at position 3814 of SEQ ID NO: 1886953
cucugaagcuucgccgaaa

SEQ ID NO: 2438025 - RNA, 19 nt, Artificial Sequence
  Description of Artificial Sequence: Synthetic oligonucleotide
  Antisense strand to SEQ ID NO: 2438024
uuucggcgaagcuucagag

SEQ ID NO: 2438026 - RNA, 19 nt, Artificial Sequence
  Description of Artificial Sequence: Synthetic oligonucleotide
  Sense strand starting at position 3910 of SEQ ID NO: 1886953
ggacgugauuacccaguaa

SEQ ID NO: 2438027 - RNA, 19 nt, Artificial Sequence
  Description of Artificial Sequence: Synthetic oligonucleotide
  Antisense strand to SEQ ID NO: 2438026
uuacuggguaaucacgucc

SEQ ID NO: 2438028 - RNA, 19 nt, Artificial Sequence
  Description of Artificial Sequence: Synthetic oligonucleotide
  Sense strand starting at position 3914 of SEQ ID NO: 1886953
gugauuacccaguaaucca

SEQ ID NO: 2438029 - RNA, 19 nt, Artificial Sequence
  Description of Artificial Sequence: Synthetic oligonucleotide
  Antisense strand to SEQ ID NO: 2438028
uggauuacuggguaaucac

SEQ ID NO: 2438030 - RNA, 19 nt, Artificial Sequence
  Description of Artificial Sequence: Synthetic oligonucleotide
  Sense strand starting at position 3954 of SEQ ID NO: 1886953
gcccuuccucaugggagaa

SEQ ID NO: 2438031 - RNA, 19 nt, Artificial Sequence
  Description of Artificial Sequence: Synthetic oligonucleotide
  Antisense strand to SEQ ID NO: 2438030
uucucccaugaggaagggc

SEQ ID NO: 2438032 - RNA, 19 nt, Artificial Sequence
  Description of Artificial Sequence: Synthetic oligonucleotide
  Sense strand starting at position 24 of SEQ ID NO: 1886954
caacgaaggcuuuguaaua

SEQ ID NO: 2438033 - RNA, 19 nt, Artificial Sequence
  Description of Artificial Sequence: Synthetic oligonucleotide
  Antisense strand to SEQ ID NO: 2438032
uauuacaaagccuucguug

SEQ ID NO: 2438034 - RNA, 19 nt, Artificial Sequence
  Description of Artificial Sequence: Synthetic oligonucleotide
  Sense strand starting at position 49 of SEQ ID NO: 1886954
gugagagugaaugguaauu

SEQ ID NO: 2438035 - RNA, 19 nt, Artificial Sequence
  Description of Artificial Sequence: Synthetic oligonucleotide
  Antisense strand to SEQ ID NO: 2438034
aauuaccauucacucucac

SEQ ID NO: 2438036 - RNA, 19 nt, Artificial Sequence
  Description of Artificial Sequence: Synthetic oligonucleotide
  Sense strand starting at position 51 of SEQ ID NO: 1886954
gagagugaaugguaauuug

SEQ ID NO: 2438037 - RNA, 19 nt, Artificial Sequence
  Description of Artificial Sequence: Synthetic oligonucleotide
  Antisense strand to SEQ ID NO: 2438036
caaauuaccauucacucuc

SEQ ID NO: 2438038 - RNA, 19 nt, Artificial Sequence
  Description of Artificial Sequence: Synthetic oligonucleotide
  Sense strand starting at position 103 of SEQ ID NO: 1886954
acgcuauuggguuaaugua

SEQ ID NO: 2438039 - RNA, 19 nt, Artificial Sequence
  Description of Artificial Sequence: Synthetic oligonucleotide
  Antisense strand to SEQ ID NO: 2438038
uacauuaacccaauagcgu

SEQ ID NO: 2438040 - RNA, 19 nt, Artificial Sequence
  Description of Artificial Sequence: Synthetic oligonucleotide
  Sense strand starting at position 479 of SEQ ID NO: 1886954
acucuuggauuugaaucua

SEQ ID NO: 2438041 - RNA, 19 nt, Artificial Sequence
  Description of Artificial Sequence: Synthetic oligonucleotide
  Antisense strand to SEQ ID NO: 2438040
uagauucaaauccaagagu

SEQ ID NO: 2438042 - RNA, 19 nt, Artificial Sequence
  Description of Artificial Sequence: Synthetic oligonucleotide
  Sense strand starting at position 571 of SEQ ID NO: 1886954
uggagcagccuuuaagcau

SEQ ID NO: 2438043 - RNA, 19 nt, Artificial Sequence
  Description of Artificial Sequence: Synthetic oligonucleotide
  Antisense strand to SEQ ID NO: 2438042
augcuuaaaggcugcucca

SEQ ID NO: 2438044 - RNA, 19 nt, Artificial Sequence
  Description of Artificial Sequence: Synthetic oligonucleotide
  Sense strand starting at position 659 of SEQ ID NO: 1886954
uaaagaaggccaugaguga

SEQ ID NO: 2438045 - RNA, 19 nt, Artificial Sequence
  Description of Artificial Sequence: Synthetic oligonucleotide
  Antisense strand to SEQ ID NO: 2438044
ucacucauggccuucuuua

SEQ ID NO: 2438046 - RNA, 19 nt, Artificial Sequence
  Description of Artificial Sequence: Synthetic oligonucleotide
  Sense strand starting at position 1100 of SEQ ID NO: 1886954
ugaccuagcacguggaauu

SEQ ID NO: 2438047 - RNA, 19 nt, Artificial Sequence
  Description of Artificial Sequence: Synthetic oligonucleotide
  Antisense strand to SEQ ID NO: 2438046
aauuccacgugcuagguca

SEQ ID NO: 2438048 - RNA, 19 nt, Artificial Sequence
  Description of Artificial Sequence: Synthetic oligonucleotide
  Sense strand starting at position 1178 of SEQ ID NO: 1886954
cuaugaugagccuacuaug

SEQ ID NO: 2438049 - RNA, 19 nt, Artificial Sequence
  Description of Artificial Sequence: Synthetic oligonucleotide
  Antisense strand to SEQ ID NO: 2438048
cauaguaggcucaucauag

SEQ ID NO: 2438050 - RNA, 19 nt, Artificial Sequence
  Description of Artificial Sequence: Synthetic oligonucleotide
  Sense strand starting at position 1188 of SEQ ID NO: 1886954
ccuacuauguaugucaagu

SEQ ID NO: 2438051 - RNA, 19 nt, Artificial Sequence
  Description of Artificial Sequence: Synthetic oligonucleotide
  Antisense strand to SEQ ID NO: 2438050
acuugacauacauaguagg

SEQ ID NO: 2438052 - RNA, 19 nt, Artificial Sequence
  Description of Artificial Sequence: Synthetic oligonucleotide
  Sense strand starting at position 1386 of SEQ ID NO: 1886954
aucgaagaguacuugaaau

SEQ ID NO: 2438053 - RNA, 19 nt, Artificial Sequence
  Description of Artificial Sequence: Synthetic oligonucleotide
  Antisense strand to SEQ ID NO: 2438052
auuucaaguacucuucgau

SEQ ID NO: 2438054 - RNA, 19 nt, Artificial Sequence
  Description of Artificial Sequence: Synthetic oligonucleotide
  Sense strand starting at position 1760 of SEQ ID NO: 1886954
aaaugagaguuauugauuc

SEQ ID NO: 2438055 - RNA, 19 nt, Artificial Sequence
  Description of Artificial Sequence: Synthetic oligonucleotide
  Antisense strand to SEQ ID NO: 2438054
gaaucaauaacucucauuu

SEQ ID NO: 2438056 - RNA, 19 nt, Artificial Sequence
  Description of Artificial Sequence: Synthetic oligonucleotide
  Sense strand starting at position 1773 of SEQ ID NO: 1886954
ugauuccuacagcgaagau

SEQ ID NO: 2438057 - RNA, 19 nt, Artificial Sequence
  Description of Artificial Sequence: Synthetic oligonucleotide
  Antisense strand to SEQ ID NO: 2438056
aucuucgcuguaggaauca

SEQ ID NO: 2438058 - RNA, 19 nt, Artificial Sequence
  Description of Artificial Sequence: Synthetic oligonucleotide
  Sense strand starting at position 1782 of SEQ ID NO: 1886954
cagcgaagaugucccaaga

SEQ ID NO: 2438059 - RNA, 19 nt, Artificial Sequence
  Description of Artificial Sequence: Synthetic oligonucleotide
  Antisense strand to SEQ ID NO: 2438058
ucuugggacaucuucgcug

SEQ ID NO: 2438060 - RNA, 19 nt, Artificial Sequence
  Description of Artificial Sequence: Synthetic oligonucleotide
  Sense strand starting at position 2232 of SEQ ID NO: 1886954
uggagaguguuucugguuu

SEQ ID NO: 2438061 - RNA, 19 nt, Artificial Sequence
  Description of Artificial Sequence: Synthetic oligonucleotide
  Antisense strand to SEQ ID NO: 2438060
aaaccagaaacacucucca

SEQ ID NO: 2438062 - RNA, 19 nt, Artificial Sequence
  Description of Artificial Sequence: Synthetic oligonucleotide
  Sense strand starting at position 2514 of SEQ ID NO: 1886954
acgggaugcacguauuucu

SEQ ID NO: 2438063 - RNA, 19 nt, Artificial Sequence
  Description of Artificial Sequence: Synthetic oligonucleotide
  Antisense strand to SEQ ID NO: 2438062
agaaauacgugcaucccgu

SEQ ID NO: 2438064 - RNA, 19 nt, Artificial Sequence
  Description of Artificial Sequence: Synthetic oligonucleotide
  Sense strand starting at position 2521 of SEQ ID NO: 1886954
gcacguauuucuccuuuau

SEQ ID NO: 2438065 - RNA, 19 nt, Artificial Sequence
  Description of Artificial Sequence: Synthetic oligonucleotide
  Antisense strand to SEQ ID NO: 2438064
auaaaggagaaauacgugc

SEQ ID NO: 2438066 - RNA, 19 nt, Artificial Sequence
  Description of Artificial Sequence: Synthetic oligonucleotide
  Sense strand starting at position 2532 of SEQ ID NO: 1886954
uccuuuaucggccaugagu

SEQ ID NO: 2438067 - RNA, 19 nt, Artificial Sequence
  Description of Artificial Sequence: Synthetic oligonucleotide
  Antisense strand to SEQ ID NO: 2438066
acucauggccgauaaagga

SEQ ID NO: 2438068 - RNA, 19 nt, Artificial Sequence
  Description of Artificial Sequence: Synthetic oligonucleotide
  Sense strand starting at position 2633 of SEQ ID NO: 1886954
gucacucacuaguuguaua

SEQ ID NO: 2438069 - RNA, 19 nt, Artificial Sequence
  Description of Artificial Sequence: Synthetic oligonucleotide
  Antisense strand to SEQ ID NO: 2438068
uauacaacuagugagugac

SEQ ID NO: 2438070 - RNA, 19 nt, Artificial Sequence
  Description of Artificial Sequence: Synthetic oligonucleotide
  Sense strand starting at position 2638 of SEQ ID NO: 1886954
ucacuaguuguauaaucua

SEQ ID NO: 2438071 - RNA, 19 nt, Artificial Sequence
  Description of Artificial Sequence: Synthetic oligonucleotide
  Antisense strand to SEQ ID NO: 2438070
uagauuauacaacuaguga

SEQ ID NO: 2438072 - RNA, 19 nt, Artificial Sequence
  Description of Artificial Sequence: Synthetic oligonucleotide
  Sense strand starting at position 2693 of SEQ ID NO: 1886954
gauuguuucgacugacuga

SEQ ID NO: 2438073 - RNA, 19 nt, Artificial Sequence
  Description of Artificial Sequence: Synthetic oligonucleotide
  Antisense strand to SEQ ID NO: 2438072
ucagucagucgaaacaauc

SEQ ID NO: 2438074 - RNA, 19 nt, Artificial Sequence
  Description of Artificial Sequence: Synthetic oligonucleotide
  Sense strand starting at position 2694 of SEQ ID NO: 1886954
auuguuucgacugacugaa

SEQ ID NO: 2438075 - RNA, 19 nt, Artificial Sequence
  Description of Artificial Sequence: Synthetic oligonucleotide
  Antisense strand to SEQ ID NO: 2438074
uucagucagucgaaacaau

SEQ ID NO: 2438076 - RNA, 19 nt, Artificial Sequence
  Description of Artificial Sequence: Synthetic oligonucleotide
  Sense strand starting at position 2742 of SEQ ID NO: 1886954
gcucuuauugagggucaga

SEQ ID NO: 2438077 - RNA, 19 nt, Artificial Sequence
  Description of Artificial Sequence: Synthetic oligonucleotide
  Antisense strand to SEQ ID NO: 2438076
ucugacccucaauaagagc

SEQ ID NO: 2438078 - RNA, 19 nt, Artificial Sequence
  Description of Artificial Sequence: Synthetic oligonucleotide
  Sense strand starting at position 2811 of SEQ ID NO: 1886954
ugcgaaacaagaugagaau

SEQ ID NO: 2438079 - RNA, 19 nt, Artificial Sequence
  Description of Artificial Sequence: Synthetic oligonucleotide
  Antisense strand to SEQ ID NO: 2438078
auucucaucuuguuucgca

SEQ ID NO: 2438080 - RNA, 19 nt, Artificial Sequence
  Description of Artificial Sequence: Synthetic oligonucleotide
  Sense strand starting at position 2814 of SEQ ID NO: 1886954
gaaacaagaugagaauuga

SEQ ID NO: 2438081 - RNA, 19 nt, Artificial Sequence
  Description of Artificial Sequence: Synthetic oligonucleotide
  Antisense strand to SEQ ID NO: 2438080
ucaauucucaucuuguuuc

SEQ ID NO: 2438082 - RNA, 19 nt, Artificial Sequence
  Description of Artificial Sequence: Synthetic oligonucleotide
  Sense strand starting at position 2841 of SEQ ID NO: 1886954
ggucucuaaccuuaucuga

SEQ ID NO: 2438083 - RNA, 19 nt, Artificial Sequence
  Description of Artificial Sequence: Synthetic oligonucleotide
  Antisense strand to SEQ ID NO: 2438082
ucagauaagguuagagacc

SEQ ID NO: 2438084 - RNA, 19 nt, Artificial Sequence
  Description of Artificial Sequence: Synthetic oligonucleotide
  Sense strand starting at position 2879 of SEQ ID NO: 1886954
caaagaaaccggcguuuaa

SEQ ID NO: 2438085 - RNA, 19 nt, Artificial Sequence
  Description of Artificial Sequence: Synthetic oligonucleotide
  Antisense strand to SEQ ID NO: 2438084
uuaaacgccgguuucuuug

SEQ ID NO: 2438086 - RNA, 19 nt, Artificial Sequence
  Description of Artificial Sequence: Synthetic oligonucleotide
  Sense strand starting at position 2975 of SEQ ID NO: 1886954
gugggaagacccuguggua

SEQ ID NO: 2438087 - RNA, 19 nt, Artificial Sequence
  Description of Artificial Sequence: Synthetic oligonucleotide
  Antisense strand to SEQ ID NO: 2438086
uaccacagggucuucccac

SEQ ID NO: 2438088 - RNA, 19 nt, Artificial Sequence
  Description of Artificial Sequence: Synthetic oligonucleotide
  Sense strand starting at position 3131 of SEQ ID NO: 1886954
ggacuucuauaagaaugga

SEQ ID NO: 2438089 - RNA, 19 nt, Artificial Sequence
  Description of Artificial Sequence: Synthetic oligonucleotide
  Antisense strand to SEQ ID NO: 2438088
uccauucuuauagaagucc

SEQ ID NO: 2438090 - RNA, 19 nt, Artificial Sequence
  Description of Artificial Sequence: Synthetic oligonucleotide
  Sense strand starting at position 3245 of SEQ ID NO: 1886954
uuuauccuuugaguaguuu

SEQ ID NO: 2438091 - RNA, 19 nt, Artificial Sequence
  Description of Artificial Sequence: Synthetic oligonucleotide
  Antisense strand to SEQ ID NO: 2438090
aaacuacucaaaggauaaa

SEQ ID NO: 2438092 - RNA, 19 nt, Artificial Sequence
  Description of Artificial Sequence: Synthetic oligonucleotide
  Sense strand starting at position 3323 of SEQ ID NO: 1886954
ccaucuuguccgggugaag

SEQ ID NO: 2438093 - RNA, 19 nt, Artificial Sequence
  Description of Artificial Sequence: Synthetic oligonucleotide
  Antisense strand to SEQ ID NO: 2438092
cuucacccggacaagaugg

SEQ ID NO: 2438094 - RNA, 19 nt, Artificial Sequence
  Description of Artificial Sequence: Synthetic oligonucleotide
  Sense strand starting at position 3334 of SEQ ID NO: 1886954
gggugaaggcacugauucu

SEQ ID NO: 2438095 - RNA, 19 nt, Artificial Sequence
  Description of Artificial Sequence: Synthetic oligonucleotide
  Antisense strand to SEQ ID NO: 2438094
agaaucagugccuucaccc

SEQ ID NO: 2438096 - RNA, 19 nt, Artificial Sequence
  Description of Artificial Sequence: Synthetic oligonucleotide
  Sense strand starting at position 3335 of SEQ ID NO: 1886954
ggugaaggcacugauucua

SEQ ID NO: 2438097 - RNA, 19 nt, Artificial Sequence
  Description of Artificial Sequence: Synthetic oligonucleotide
  Antisense strand to SEQ ID NO: 2438096
uagaaucagugccuucacc

SEQ ID NO: 2438098 - RNA, 19 nt, Artificial Sequence
  Description of Artificial Sequence: Synthetic oligonucleotide
  Sense strand starting at position 3346 of SEQ ID NO: 1886954
ugauucuaagaaggcauau

SEQ ID NO: 2438099 - RNA, 19 nt, Artificial Sequence
  Description of Artificial Sequence: Synthetic oligonucleotide
  Antisense strand to SEQ ID NO: 2438098
auaugccuucuuagaauca

SEQ ID NO: 2438100 - RNA, 19 nt, Artificial Sequence
  Description of Artificial Sequence: Synthetic oligonucleotide
  Sense strand starting at position 3514 of SEQ ID NO: 1886954
ugcuaccuuccaggaagau

SEQ ID NO: 2438101 - RNA, 19 nt, Artificial Sequence
  Description of Artificial Sequence: Synthetic oligonucleotide
  Antisense strand to SEQ ID NO: 2438100
aucuuccuggaagguagca

SEQ ID NO: 2438102 - RNA, 19 nt, Artificial Sequence
  Description of Artificial Sequence: Synthetic oligonucleotide
  Sense strand starting at position 3524 of SEQ ID NO: 1886954
caggaagaugguugucaca

SEQ ID NO: 2438103 - RNA, 19 nt, Artificial Sequence
  Description of Artificial Sequence: Synthetic oligonucleotide
  Antisense strand to SEQ ID NO: 2438102
ugugacaaccaucuuccug

SEQ ID NO: 2438104 - RNA, 19 nt, Artificial Sequence
  Description of Artificial Sequence: Synthetic oligonucleotide
  Sense strand starting at position 3526 of SEQ ID NO: 1886954
ggaagaugguugucacaau

SEQ ID NO: 2438105 - RNA, 19 nt, Artificial Sequence
  Description of Artificial Sequence: Synthetic oligonucleotide
  Antisense strand to SEQ ID NO: 2438104
auugugacaaccaucuucc

SEQ ID NO: 2438106 - RNA, 19 nt, Artificial Sequence
  Description of Artificial Sequence: Synthetic oligonucleotide
  Sense strand starting at position 3595 of SEQ ID NO: 1886954
aucuguuugucuuuaacau

SEQ ID NO: 2438107 - RNA, 19 nt, Artificial Sequence
  Description of Artificial Sequence: Synthetic oligonucleotide
  Antisense strand to SEQ ID NO: 2438106
auguuaaagacaaacagau

SEQ ID NO: 2438108 - RNA, 19 nt, Artificial Sequence
  Description of Artificial Sequence: Synthetic oligonucleotide
  Sense strand starting at position 3619 of SEQ ID NO: 1886954
ugcauaauugagggugaca

SEQ ID NO: 2438109 - RNA, 19 nt, Artificial Sequence
  Description of Artificial Sequence: Synthetic oligonucleotide
  Antisense strand to SEQ ID NO: 2438108
ugucacccucaauuaugca

SEQ ID NO: 2438110 - RNA, 19 nt, Artificial Sequence
  Description of Artificial Sequence: Synthetic oligonucleotide
  Sense strand starting at position 3674 of SEQ ID NO: 1886954
gcuggagcugauuauguau

SEQ ID NO: 2438111 - RNA, 19 nt, Artificial Sequence
  Description of Artificial Sequence: Synthetic oligonucleotide
  Antisense strand to SEQ ID NO: 2438110
auacauaaucagcuccagc

SEQ ID NO: 2438112 - RNA, 19 nt, Artificial Sequence
  Description of Artificial Sequence: Synthetic oligonucleotide
  Sense strand starting at position 508 of SEQ ID NO: 1886955
ggcucugagauggaacuuu

SEQ ID NO: 2438113 - RNA, 19 nt, Artificial Sequence
  Description of Artificial Sequence: Synthetic oligonucleotide
  Antisense strand to SEQ ID NO: 2438112
aaaguuccaucucagagcc

SEQ ID NO: 2438114 - RNA, 19 nt, Artificial Sequence
  Description of Artificial Sequence: Synthetic oligonucleotide
  Sense strand starting at position 547 of SEQ ID NO: 1886955
auagaaucugcagaucucu

SEQ ID NO: 2438115 - RNA, 19 nt, Artificial Sequence
  Description of Artificial Sequence: Synthetic oligonucleotide
  Antisense strand to SEQ ID NO: 2438114
agagaucugcagauucuau

SEQ ID NO: 2438116 - RNA, 19 nt, Artificial Sequence
  Description of Artificial Sequence: Synthetic oligonucleotide
  Sense strand starting at position 720 of SEQ ID NO: 1886955
agcugauugaggcagguau

SEQ ID NO: 2438117 - RNA, 19 nt, Artificial Sequence
  Description of Artificial Sequence: Synthetic oligonucleotide
  Antisense strand to SEQ ID NO: 2438116
auaccugccucaaucagcu

SEQ ID NO: 2438118 - RNA, 19 nt, Artificial Sequence
  Description of Artificial Sequence: Synthetic oligonucleotide
  Sense strand starting at position 722 of SEQ ID NO: 1886955
cugauugaggcagguauga

SEQ ID NO: 2438119 - RNA, 19 nt, Artificial Sequence
  Description of Artificial Sequence: Synthetic oligonucleotide
  Antisense strand to SEQ ID NO: 2438118
ucauaccugccucaaucag

SEQ ID NO: 2438120 - RNA, 19 nt, Artificial Sequence
  Description of Artificial Sequence: Synthetic oligonucleotide
  Sense strand starting at position 803 of SEQ ID NO: 1886955
uaggaagucuuccauuuga

SEQ ID NO: 2438121 - RNA, 19 nt, Artificial Sequence
  Description of Artificial Sequence: Synthetic oligonucleotide
  Antisense strand to SEQ ID NO: 2438120
ucaaauggaagacuuccua

SEQ ID NO: 2438122 - RNA, 19 nt, Artificial Sequence
  Description of Artificial Sequence: Synthetic oligonucleotide
  Sense strand starting at position 976 of SEQ ID NO: 1886955
cuacaaacccaguguuaau

SEQ ID NO: 2438123 - RNA, 19 nt, Artificial Sequence
  Description of Artificial Sequence: Synthetic oligonucleotide
  Antisense strand to SEQ ID NO: 2438122
auuaacacuggguuuguag

SEQ ID NO: 2438124 - RNA, 19 nt, Artificial Sequence
  Description of Artificial Sequence: Synthetic oligonucleotide
  Sense strand starting at position 1030 of SEQ ID NO: 1886955
aagggauggucacuccuua

SEQ ID NO: 2438125 - RNA, 19 nt, Artificial Sequence
  Description of Artificial Sequence: Synthetic oligonucleotide
  Antisense strand to SEQ ID NO: 2438124
uaaggagugaccaucccuu

SEQ ID NO: 2438126 - RNA, 19 nt, Artificial Sequence
  Description of Artificial Sequence: Synthetic oligonucleotide
  Sense strand starting at position 1034 of SEQ ID NO: 1886955
gauggucacuccuuagguu

SEQ ID NO: 2438127 - RNA, 19 nt, Artificial Sequence
  Description of Artificial Sequence: Synthetic oligonucleotide
  Antisense strand to SEQ ID NO: 2438126
aaccuaaggagugaccauc

SEQ ID NO: 2438128 - RNA, 19 nt, Artificial Sequence
  Description of Artificial Sequence: Synthetic oligonucleotide
  Sense strand starting at position 1035 of SEQ ID NO: 1886955
auggucacuccuuagguua

SEQ ID NO: 2438129 - RNA, 19 nt, Artificial Sequence
  Description of Artificial Sequence: Synthetic oligonucleotide
  Antisense strand to SEQ ID NO: 2438128
uaaccuaaggagugaccau

SEQ ID NO: 2438130 - RNA, 19 nt, Artificial Sequence
  Description of Artificial Sequence: Synthetic oligonucleotide
  Sense strand starting at position 1050 of SEQ ID NO: 1886955
guuauuaugagugaugcug

SEQ ID NO: 2438131 - RNA, 19 nt, Artificial Sequence
  Description of Artificial Sequence: Synthetic oligonucleotide
  Antisense strand to SEQ ID NO: 2438130
cagcaucacucauaauaac

SEQ ID NO: 2438132 - RNA, 19 nt, Artificial Sequence
  Description of Artificial Sequence: Synthetic oligonucleotide
  Sense strand starting at position 1165 of SEQ ID NO: 1886955
gccucaaagggcuaguuau

SEQ ID NO: 2438133 - RNA, 19 nt, Artificial Sequence
  Description of Artificial Sequence: Synthetic oligonucleotide
  Antisense strand to SEQ ID NO: 2438132
auaacuagcccuuugaggc

SEQ ID NO: 2438134 - RNA, 19 nt, Artificial Sequence
  Description of Artificial Sequence: Synthetic oligonucleotide
  Sense strand starting at position 1275 of SEQ ID NO: 1886955
uucgccgaaagguaauaau

SEQ ID NO: 2438135 - RNA, 19 nt, Artificial Sequence
  Description of Artificial Sequence: Synthetic oligonucleotide
  Antisense strand to SEQ ID NO: 2438134
auuauuaccuuucggcgaa

SEQ ID NO: 2438136 - RNA, 19 nt, Artificial Sequence
  Description of Artificial Sequence: Synthetic oligonucleotide
  Sense strand starting at position 1301 of SEQ ID NO: 1886955
ucugaagacuguccagaaa

SEQ ID NO: 2438137 - RNA, 19 nt, Artificial Sequence
  Description of Artificial Sequence: Synthetic oligonucleotide
  Antisense strand to SEQ ID NO: 2438136
uuucuggacagucuucaga

SEQ ID NO: 2438138 - RNA, 19 nt, Artificial Sequence
  Description of Artificial Sequence: Synthetic oligonucleotide
  Sense strand starting at position 1324 of SEQ ID NO: 1886955
gauccagagcacugauaug

SEQ ID NO: 2438139 - RNA, 19 nt, Artificial Sequence
  Description of Artificial Sequence: Synthetic oligonucleotide
  Antisense strand to SEQ ID NO: 2438138
cauaucagugcucuggauc

SEQ ID NO: 2438140 - RNA, 19 nt, Artificial Sequence
  Description of Artificial Sequence: Synthetic oligonucleotide
  Sense strand starting at position 1329 of SEQ ID NO: 1886955
agagcacugauaugcuaga

SEQ ID NO: 2438141 - RNA, 19 nt, Artificial Sequence
  Description of Artificial Sequence: Synthetic oligonucleotide
  Antisense strand to SEQ ID NO: 2438140
ucuagcauaucagugcucu

SEQ ID NO: 2438142 - RNA, 19 nt, Artificial Sequence
  Description of Artificial Sequence: Synthetic oligonucleotide
  Sense strand starting at position 1334 of SEQ ID NO: 1886955
acugauaugcuagagcuaa

SEQ ID NO: 2438143 - RNA, 19 nt, Artificial Sequence
  Description of Artificial Sequence: Synthetic oligonucleotide
  Antisense strand to SEQ ID NO: 2438142
uuagcucuagcauaucagu

SEQ ID NO: 2438144 - RNA, 19 nt, Artificial Sequence
  Description of Artificial Sequence: Synthetic oligonucleotide
  Sense strand starting at position 1426 of SEQ ID NO: 1886955
cauggugacuguuuggaau

SEQ ID NO: 2438145 - RNA, 19 nt, Artificial Sequence
  Description of Artificial Sequence: Synthetic oligonucleotide
  Antisense strand to SEQ ID NO: 2438144
auuccaaacagucaccaug

SEQ ID NO: 2438146 - RNA, 19 nt, Artificial Sequence
  Description of Artificial Sequence: Synthetic oligonucleotide
  Sense strand starting at position 2044 of SEQ ID NO: 1886955
gacuuccuugguugcagaa

SEQ ID NO: 2438147 - RNA, 19 nt, Artificial Sequence
  Description of Artificial Sequence: Synthetic oligonucleotide
  Antisense strand to SEQ ID NO: 2438146
uucugcaaccaaggaaguc

SEQ ID NO: 2438148 - RNA, 19 nt, Artificial Sequence
  Description of Artificial Sequence: Synthetic oligonucleotide
  Sense strand starting at position 2060 of SEQ ID NO: 1886955
gaaacaggaugagaugauu

SEQ ID NO: 2438149 - RNA, 19 nt, Artificial Sequence
  Description of Artificial Sequence: Synthetic oligonucleotide
  Antisense strand to SEQ ID NO: 2438148
aaucaucucauccuguuuc

SEQ ID NO: 2438150 - RNA, 19 nt, Artificial Sequence
  Description of Artificial Sequence: Synthetic oligonucleotide
  Sense strand starting at position 2072 of SEQ ID NO: 1886955
gaugauuaagauugugguu

SEQ ID NO: 2438151 - RNA, 19 nt, Artificial Sequence
  Description of Artificial Sequence: Synthetic oligonucleotide
  Antisense strand to SEQ ID NO: 2438150
aaccacaaucuuaaucauc

SEQ ID NO: 2438152 - RNA, 19 nt, Artificial Sequence
  Description of Artificial Sequence: Synthetic oligonucleotide
  Sense strand starting at position 2079 of SEQ ID NO: 1886955
aagauugugguuuaugugu

SEQ ID NO: 2438153 - RNA, 19 nt, Artificial Sequence
  Description of Artificial Sequence: Synthetic oligonucleotide
  Antisense strand to SEQ ID NO: 2438152
acacauaaaccacaaucuu

SEQ ID NO: 2438154 - RNA, 19 nt, Artificial Sequence
  Description of Artificial Sequence: Synthetic oligonucleotide
  Sense strand starting at position 2286 of SEQ ID NO: 1886955
cccuaauuagguuagagca

SEQ ID NO: 2438155 - RNA, 19 nt, Artificial Sequence
  Description of Artificial Sequence: Synthetic oligonucleotide
  Antisense strand to SEQ ID NO: 2438154
ugcucuaaccuaauuaggg

SEQ ID NO: 2438156 - RNA, 19 nt, Artificial Sequence
  Description of Artificial Sequence: Synthetic oligonucleotide
  Sense strand starting at position 2420 of SEQ ID NO: 1886955
aggaaauauuauguuagug

SEQ ID NO: 2438157 - RNA, 19 nt, Artificial Sequence
  Description of Artificial Sequence: Synthetic oligonucleotide
  Antisense strand to SEQ ID NO: 2438156
cacuaacauaauauuuccu

SEQ ID NO: 2438158 - RNA, 19 nt, Artificial Sequence
  Description of Artificial Sequence: Synthetic oligonucleotide
  Sense strand starting at position 2465 of SEQ ID NO: 1886955
acguuaucccauuaucuau

SEQ ID NO: 2438159 - RNA, 19 nt, Artificial Sequence
  Description of Artificial Sequence: Synthetic oligonucleotide
  Antisense strand to SEQ ID NO: 2438158
auagauaaugggauaacgu

SEQ ID NO: 2438160 - RNA, 19 nt, Artificial Sequence
  Description of Artificial Sequence: Synthetic oligonucleotide
  Sense strand starting at position 2705 of SEQ ID NO: 1886955
cauggcacuucuccugaga

SEQ ID NO: 2438161 - RNA, 19 nt, Artificial Sequence
  Description of Artificial Sequence: Synthetic oligonucleotide
  Antisense strand to SEQ ID NO: 2438160
ucucaggagaagugccaug

SEQ ID NO: 2438162 - RNA, 19 nt, Artificial Sequence
  Description of Artificial Sequence: Synthetic oligonucleotide
  Sense strand starting at position 2929 of SEQ ID NO: 1886955
aucccuuucguauauauga

SEQ ID NO: 2438163 - RNA, 19 nt, Artificial Sequence
  Description of Artificial Sequence: Synthetic oligonucleotide
  Antisense strand to SEQ ID NO: 2438162
ucauauauacgaaagggau

SEQ ID NO: 2438164 - RNA, 19 nt, Artificial Sequence
  Description of Artificial Sequence: Synthetic oligonucleotide
  Sense strand starting at position 3094 of SEQ ID NO: 1886955
aggucuccuaccuggagau

SEQ ID NO: 2438165 - RNA, 19 nt, Artificial Sequence
  Description of Artificial Sequence: Synthetic oligonucleotide
  Antisense strand to SEQ ID NO: 2438164
aucuccagguaggagaccu

SEQ ID NO: 2438166 - RNA, 19 nt, Artificial Sequence
  Description of Artificial Sequence: Synthetic oligonucleotide
  Sense strand starting at position 3096 of SEQ ID NO: 1886955
gucuccuaccuggagauca

SEQ ID NO: 2438167 - RNA, 19 nt, Artificial Sequence
  Description of Artificial Sequence: Synthetic oligonucleotide
  Antisense strand to SEQ ID NO: 2438166
ugaucuccagguaggagac

SEQ ID NO: 2438168 - RNA, 19 nt, Artificial Sequence
  Description of Artificial Sequence: Synthetic oligonucleotide
  Sense strand starting at position 3104 of SEQ ID NO: 1886955
ccuggagaucaguguuaaa

SEQ ID NO: 2438169 - RNA, 19 nt, Artificial Sequence
  Description of Artificial Sequence: Synthetic oligonucleotide
  Antisense strand to SEQ ID NO: 2438168
uuuaacacugaucuccagg

SEQ ID NO: 2438170 - RNA, 19 nt, Artificial Sequence
  Description of Artificial Sequence: Synthetic oligonucleotide
  Sense strand starting at position 3277 of SEQ ID NO: 1886955
gucagaaggcucuauagug

SEQ ID NO: 2438171 - RNA, 19 nt, Artificial Sequence
  Description of Artificial Sequence: Synthetic oligonucleotide
  Antisense strand to SEQ ID NO: 2438170
cacuauagagccuucugac

SEQ ID NO: 2438172 - RNA, 19 nt, Artificial Sequence
  Description of Artificial Sequence: Synthetic oligonucleotide
  Sense strand starting at position 3636 of SEQ ID NO: 1886955
auuuauucucacuguguua

SEQ ID NO: 2438173 - RNA, 19 nt, Artificial Sequence
  Description of Artificial Sequence: Synthetic oligonucleotide
  Antisense strand to SEQ ID NO: 2438172
uaacacagugagaauaaau

SEQ ID NO: 2438174 - RNA, 19 nt, Artificial Sequence
  Description of Artificial Sequence: Synthetic oligonucleotide
  Sense strand starting at position 3682 of SEQ ID NO: 1886955
auagauguuguaugucaua

SEQ ID NO: 2438175 - RNA, 19 nt, Artificial Sequence
  Description of Artificial Sequence: Synthetic oligonucleotide
  Antisense strand to SEQ ID NO: 2438174
uaugacauacaacaucuau

SEQ ID NO: 2438176 - RNA, 19 nt, Artificial Sequence
  Description of Artificial Sequence: Synthetic oligonucleotide
  Sense strand starting at position 3695 of SEQ ID NO: 1886955
gucauacaaugaguuaaug

SEQ ID NO: 2438177 - RNA, 19 nt, Artificial Sequence
  Description of Artificial Sequence: Synthetic oligonucleotide
  Antisense strand to SEQ ID NO: 2438176
cauuaacucauuguaugac

SEQ ID NO: 2438178 - RNA, 19 nt, Artificial Sequence
  Description of Artificial Sequence: Synthetic oligonucleotide
  Sense strand starting at position 3729 of SEQ ID NO: 1886955
uuguauaguuauuccuaac

SEQ ID NO: 2438179 - RNA, 19 nt, Artificial Sequence
  Description of Artificial Sequence: Synthetic oligonucleotide
  Antisense strand to SEQ ID NO: 2438178
guuaggaauaacuauacaa

SEQ ID NO: 2438180 - RNA, 19 nt, Artificial Sequence
  Description of Artificial Sequence: Synthetic oligonucleotide
  Sense strand starting at position 3809 of SEQ ID NO: 1886955
uugugucaacuuuaacaga

SEQ ID NO: 2438181 - RNA, 19 nt, Artificial Sequence
  Description of Artificial Sequence: Synthetic oligonucleotide
  Antisense strand to SEQ ID NO: 2438180
ucuguuaaaguugacacaa

SEQ ID NO: 2438182 - RNA, 19 nt, Artificial Sequence
  Description of Artificial Sequence: Synthetic oligonucleotide
  Sense strand starting at position 3847 of SEQ ID NO: 1886955
gguagaugagucugugaua

SEQ ID NO: 2438183 - RNA, 19 nt, Artificial Sequence
  Description of Artificial Sequence: Synthetic oligonucleotide
  Antisense strand to SEQ ID NO: 2438182
uaucacagacucaucuacc

SEQ ID NO: 2438184 - RNA, 19 nt, Artificial Sequence
  Description of Artificial Sequence: Synthetic oligonucleotide
  Sense strand starting at position 3848 of SEQ ID NO: 1886955
guagaugagucugugauau

SEQ ID NO: 2438185 - RNA, 19 nt, Artificial Sequence
  Description of Artificial Sequence: Synthetic oligonucleotide
  Antisense strand to SEQ ID NO: 2438184
auaucacagacucaucuac

SEQ ID NO: 2438186 - RNA, 19 nt, Artificial Sequence
  Description of Artificial Sequence: Synthetic oligonucleotide
  Sense strand starting at position 3854 of SEQ ID NO: 1886955
gagucugugauaugugaag

SEQ ID NO: 2438187 - RNA, 19 nt, Artificial Sequence
  Description of Artificial Sequence: Synthetic oligonucleotide
  Antisense strand to SEQ ID NO: 2438186
cuucacauaucacagacuc

SEQ ID NO: 2438188 - RNA, 19 nt, Artificial Sequence
  Description of Artificial Sequence: Synthetic oligonucleotide
  Sense strand starting at position 3885 of SEQ ID NO: 1886955
uuugauuaguggucuacca

SEQ ID NO: 2438189 - RNA, 19 nt, Artificial Sequence
  Description of Artificial Sequence: Synthetic oligonucleotide
  Antisense strand to SEQ ID NO: 2438188
ugguagaccacuaaucaaa

SEQ ID NO: 2438190 - RNA, 19 nt, Artificial Sequence
  Description of Artificial Sequence: Synthetic oligonucleotide
  Sense strand starting at position 3892 of SEQ ID NO: 1886955
aguggucuaccaggacuuu

SEQ ID NO: 2438191 - RNA, 19 nt, Artificial Sequence
  Description of Artificial Sequence: Synthetic oligonucleotide
  Antisense strand to SEQ ID NO: 2438190
aaaguccugguagaccacu

SEQ ID NO: 2438192 - RNA, 19 nt, Artificial Sequence
  Description of Artificial Sequence: Synthetic oligonucleotide
  Sense strand starting at position 1 of SEQ ID NO: 1886956
guaaguuauuugcucauuc

SEQ ID NO: 2438193 - RNA, 19 nt, Artificial Sequence
  Description of Artificial Sequence: Synthetic oligonucleotide
  Antisense strand to SEQ ID NO: 2438192
gaaugagcaaauaacuuac

SEQ ID NO: 2438194 - RNA, 19 nt, Artificial Sequence
  Description of Artificial Sequence: Synthetic oligonucleotide
  Sense strand starting at position 5 of SEQ ID NO: 1886956
guuauuugcucauucuuag

SEQ ID NO: 2438195 - RNA, 19 nt, Artificial Sequence
  Description of Artificial Sequence: Synthetic oligonucleotide
  Antisense strand to SEQ ID NO: 2438194
cuaagaaugagcaaauaac

SEQ ID NO: 2438196 - RNA, 19 nt, Artificial Sequence
  Description of Artificial Sequence: Synthetic oligonucleotide
  Sense strand starting at position 32 of SEQ ID NO: 1886956
aguguacagucagauuuga

SEQ ID NO: 2438197 - RNA, 19 nt, Artificial Sequence
  Description of Artificial Sequence: Synthetic oligonucleotide
  Antisense strand to SEQ ID NO: 2438196
ucaaaucugacuguacacu

SEQ ID NO: 2438198 - RNA, 19 nt, Artificial Sequence
  Description of Artificial Sequence: Synthetic oligonucleotide
  Sense strand starting at position 164 of SEQ ID NO: 1886956
acaaguuuggucuguuggu

SEQ ID NO: 2438199 - RNA, 19 nt, Artificial Sequence
  Description of Artificial Sequence: Synthetic oligonucleotide
  Antisense strand to SEQ ID NO: 2438198
accaacagaccaaacuugu

SEQ ID NO: 2438200 - RNA, 19 nt, Artificial Sequence
  Description of Artificial Sequence: Synthetic oligonucleotide
  Sense strand starting at position 165 of SEQ ID NO: 1886956
caaguuuggucuguuggua

SEQ ID NO: 2438201 - RNA, 19 nt, Artificial Sequence
  Description of Artificial Sequence: Synthetic oligonucleotide
  Antisense strand to SEQ ID NO: 2438200
uaccaacagaccaaacuug

SEQ ID NO: 2438202 - RNA, 19 nt, Artificial Sequence
  Description of Artificial Sequence: Synthetic oligonucleotide
  Sense strand starting at position 181 of SEQ ID NO: 1886956
guagcuaucagcugaagca

SEQ ID NO: 2438203 - RNA, 19 nt, Artificial Sequence
  Description of Artificial Sequence: Synthetic oligonucleotide
  Antisense strand to SEQ ID NO: 2438202
ugcuucagcugauagcuac

SEQ ID NO: 2438204 - RNA, 19 nt, Artificial Sequence
  Description of Artificial Sequence: Synthetic oligonucleotide
  Sense strand starting at position 398 of SEQ ID NO: 1886956
uuugcuuccugggcucaau

SEQ ID NO: 2438205 - RNA, 19 nt, Artificial Sequence
  Description of Artificial Sequence: Synthetic oligonucleotide
  Antisense strand to SEQ ID NO: 2438204
auugagcccaggaagcaaa

SEQ ID NO: 2438206 - RNA, 19 nt, Artificial Sequence
  Description of Artificial Sequence: Synthetic oligonucleotide
  Sense strand starting at position 708 of SEQ ID NO: 1886956
agagguagagcaugucuaa

SEQ ID NO: 2438207 - RNA, 19 nt, Artificial Sequence
  Description of Artificial Sequence: Synthetic oligonucleotide
  Antisense strand to SEQ ID NO: 2438206
uuagacaugcucuaccucu

SEQ ID NO: 2438208 - RNA, 19 nt, Artificial Sequence
  Description of Artificial Sequence: Synthetic oligonucleotide
  Sense strand starting at position 720 of SEQ ID NO: 1886956
ugucuaagaguccaaaccu

SEQ ID NO: 2438209 - RNA, 19 nt, Artificial Sequence
  Description of Artificial Sequence: Synthetic oligonucleotide
  Antisense strand to SEQ ID NO: 2438208
agguuuggacucuuagaca

SEQ ID NO: 2438210 - RNA, 19 nt, Artificial Sequence
  Description of Artificial Sequence: Synthetic oligonucleotide
  Sense strand starting at position 749 of SEQ ID NO: 1886956
cugagaacaguuugguugu

SEQ ID NO: 2438211 - RNA, 19 nt, Artificial Sequence
  Description of Artificial Sequence: Synthetic oligonucleotide
  Antisense strand to SEQ ID NO: 2438210
acaaccaaacuguucucag

SEQ ID NO: 2438212 - RNA, 19 nt, Artificial Sequence
  Description of Artificial Sequence: Synthetic oligonucleotide
  Sense strand starting at position 751 of SEQ ID NO: 1886956
gagaacaguuugguuguau

SEQ ID NO: 2438213 - RNA, 19 nt, Artificial Sequence
  Description of Artificial Sequence: Synthetic oligonucleotide
  Antisense strand to SEQ ID NO: 2438212
auacaaccaaacuguucuc

SEQ ID NO: 2438214 - RNA, 19 nt, Artificial Sequence
  Description of Artificial Sequence: Synthetic oligonucleotide
  Sense strand starting at position 752 of SEQ ID NO: 1886956
agaacaguuugguuguaua

SEQ ID NO: 2438215 - RNA, 19 nt, Artificial Sequence
  Description of Artificial Sequence: Synthetic oligonucleotide
  Antisense strand to SEQ ID NO: 2438214
uauacaaccaaacuguucu

SEQ ID NO: 2438216 - RNA, 19 nt, Artificial Sequence
  Description of Artificial Sequence: Synthetic oligonucleotide
  Sense strand starting at position 760 of SEQ ID NO: 1886956
uugguuguauauccagaaa

SEQ ID NO: 2438217 - RNA, 19 nt, Artificial Sequence
  Description of Artificial Sequence: Synthetic oligonucleotide
  Antisense strand to SEQ ID NO: 2438216
uuucuggauauacaaccaa

SEQ ID NO: 2438218 - RNA, 19 nt, Artificial Sequence
  Description of Artificial Sequence: Synthetic oligonucleotide
  Sense strand starting at position 790 of SEQ ID NO: 1886956
auagucugccauggugaca

SEQ ID NO: 2438219 - RNA, 19 nt, Artificial Sequence
  Description of Artificial Sequence: Synthetic oligonucleotide
  Antisense strand to SEQ ID NO: 2438218
ugucaccauggcagacuau

SEQ ID NO: 2438220 - RNA, 19 nt, Artificial Sequence
  Description of Artificial Sequence: Synthetic oligonucleotide
  Sense strand starting at position 832 of SEQ ID NO: 1886956
aacuauuugugucccggau

SEQ ID NO: 2438221 - RNA, 19 nt, Artificial Sequence
  Description of Artificial Sequence: Synthetic oligonucleotide
  Antisense strand to SEQ ID NO: 2438220
auccgggacacaaauaguu

SEQ ID NO: 2438222 - RNA, 19 nt, Artificial Sequence
  Description of Artificial Sequence: Synthetic oligonucleotide
  Sense strand starting at position 866 of SEQ ID NO: 1886956
agcccugagauacgugaau

SEQ ID NO: 2438223 - RNA, 19 nt, Artificial Sequence
  Description of Artificial Sequence: Synthetic oligonucleotide
  Antisense strand to SEQ ID NO: 2438222
auucacguaucucagggcu

SEQ ID NO: 2438224 - RNA, 19 nt, Artificial Sequence
  Description of Artificial Sequence: Synthetic oligonucleotide
  Sense strand starting at position 868 of SEQ ID NO: 1886956
cccugagauacgugaauua

SEQ ID NO: 2438225 - RNA, 19 nt, Artificial Sequence
  Description of Artificial Sequence: Synthetic oligonucleotide
  Antisense strand to SEQ ID NO: 2438224
uaauucacguaucucaggg

SEQ ID NO: 2438226 - RNA, 19 nt, Artificial Sequence
  Description of Artificial Sequence: Synthetic oligonucleotide
  Sense strand starting at position 2058 of SEQ ID NO: 1886956
cugggacuuugugaaagaa

SEQ ID NO: 2438227 - RNA, 19 nt, Artificial Sequence
  Description of Artificial Sequence: Synthetic oligonucleotide
  Antisense strand to SEQ ID NO: 2438226
uucuuucacaaagucccag

SEQ ID NO: 2438228 - RNA, 19 nt, Artificial Sequence
  Description of Artificial Sequence: Synthetic oligonucleotide
  Sense strand starting at position 2119 of SEQ ID NO: 1886956
ugcauaggcagcgacaaau

SEQ ID NO: 2438229 - RNA, 19 nt, Artificial Sequence
  Description of Artificial Sequence: Synthetic oligonucleotide
  Antisense strand to SEQ ID NO: 2438228
auuugucgcugccuaugca

SEQ ID NO: 2438230 - RNA, 19 nt, Artificial Sequence
  Description of Artificial Sequence: Synthetic oligonucleotide
  Sense strand starting at position 2745 of SEQ ID NO: 1886956
ggaauauccucauucuuag

SEQ ID NO: 2438231 - RNA, 19 nt, Artificial Sequence
  Description of Artificial Sequence: Synthetic oligonucleotide
  Antisense strand to SEQ ID NO: 2438230
cuaagaaugaggauauucc

SEQ ID NO: 2438232 - RNA, 19 nt, Artificial Sequence
  Description of Artificial Sequence: Synthetic oligonucleotide
  Sense strand starting at position 2793 of SEQ ID NO: 1886956
gagcgugaugacuguaauu

SEQ ID NO: 2438233 - RNA, 19 nt, Artificial Sequence
  Description of Artificial Sequence: Synthetic oligonucleotide
  Antisense strand to SEQ ID NO: 2438232
aauuacagucaucacgcuc

SEQ ID NO: 2438234 - RNA, 19 nt, Artificial Sequence
  Description of Artificial Sequence: Synthetic oligonucleotide
  Sense strand starting at position 2942 of SEQ ID NO: 1886956
cgaaguuaauaauugauga

SEQ ID NO: 2438235 - RNA, 19 nt, Artificial Sequence
  Description of Artificial Sequence: Synthetic oligonucleotide
  Antisense strand to SEQ ID NO: 2438234
ucaucaauuauuaacuucg

SEQ ID NO: 2438236 - RNA, 19 nt, Artificial Sequence
  Description of Artificial Sequence: Synthetic oligonucleotide
  Sense strand starting at position 2960 of SEQ ID NO: 1886956
auuccaagugaaugguaua

SEQ ID NO: 2438237 - RNA, 19 nt, Artificial Sequence
  Description of Artificial Sequence: Synthetic oligonucleotide
  Antisense strand to SEQ ID NO: 2438236
uauaccauucacuuggaau

SEQ ID NO: 2438238 - RNA, 19 nt, Artificial Sequence
  Description of Artificial Sequence: Synthetic oligonucleotide
  Sense strand starting at position 2972 of SEQ ID NO: 1886956
ugguauacuugaguucuag

SEQ ID NO: 2438239 - RNA, 19 nt, Artificial Sequence
  Description of Artificial Sequence: Synthetic oligonucleotide
  Antisense strand to SEQ ID NO: 2438238
cuagaacucaaguauacca

SEQ ID NO: 2438240 - RNA, 19 nt, Artificial Sequence
  Description of Artificial Sequence: Synthetic oligonucleotide
  Sense strand starting at position 3371 of SEQ ID NO: 1886956
acagacuuaccuuguagca

SEQ ID NO: 2438241 - RNA, 19 nt, Artificial Sequence
  Description of Artificial Sequence: Synthetic oligonucleotide
  Antisense strand to SEQ ID NO: 2438240
ugcuacaagguaagucugu

SEQ ID NO: 2438242 - RNA, 19 nt, Artificial Sequence
  Description of Artificial Sequence: Synthetic oligonucleotide
  Sense strand starting at position 3397 of SEQ ID NO: 1886956
aguaauccuuuauugagga

SEQ ID NO: 2438243 - RNA, 19 nt, Artificial Sequence
  Description of Artificial Sequence: Synthetic oligonucleotide
  Antisense strand to SEQ ID NO: 2438242
uccucaauaaaggauuacu

SEQ ID NO: 2438244 - RNA, 19 nt, Artificial Sequence
  Description of Artificial Sequence: Synthetic oligonucleotide
  Sense strand starting at position 3433 of SEQ ID NO: 1886956
auagcaguugcugggaaua

SEQ ID NO: 2438245 - RNA, 19 nt, Artificial Sequence
  Description of Artificial Sequence: Synthetic oligonucleotide
  Antisense strand to SEQ ID NO: 2438244
uauucccagcaacugcuau

SEQ ID NO: 2438246 - RNA, 19 nt, Artificial Sequence
  Description of Artificial Sequence: Synthetic oligonucleotide
  Sense strand starting at position 3438 of SEQ ID NO: 1886956
aguugcugggaauacauua

SEQ ID NO: 2438247 - RNA, 19 nt, Artificial Sequence
  Description of Artificial Sequence: Synthetic oligonucleotide
  Antisense strand to SEQ ID NO: 2438246
uaauguauucccagcaacu

SEQ ID NO: 2438248 - RNA, 19 nt, Artificial Sequence
  Description of Artificial Sequence: Synthetic oligonucleotide
  Sense strand starting at position 3445 of SEQ ID NO: 1886956
gggaauacauuaggaaaua

SEQ ID NO: 2438249 - RNA, 19 nt, Artificial Sequence
  Description of Artificial Sequence: Synthetic oligonucleotide
  Antisense strand to SEQ ID NO: 2438248
uauuuccuaauguauuccc

SEQ ID NO: 2438250 - RNA, 19 nt, Artificial Sequence
  Description of Artificial Sequence: Synthetic oligonucleotide
  Sense strand starting at position 3446 of SEQ ID NO: 1886956
ggaauacauuaggaaauaa

SEQ ID NO: 2438251 - RNA, 19 nt, Artificial Sequence
  Description of Artificial Sequence: Synthetic oligonucleotide
  Antisense strand to SEQ ID NO: 2438250
uuauuuccuaauguauucc

SEQ ID NO: 2438252 - RNA, 19 nt, Artificial Sequence
  Description of Artificial Sequence: Synthetic oligonucleotide
  Sense strand starting at position 3462 of SEQ ID NO: 1886956
uaagauagguaagaucuga

SEQ ID NO: 2438253 - RNA, 19 nt, Artificial Sequence
  Description of Artificial Sequence: Synthetic oligonucleotide
  Antisense strand to SEQ ID NO: 2438252
ucagaucuuaccuaucuua

SEQ ID NO: 2438254 - RNA, 19 nt, Artificial Sequence
  Description of Artificial Sequence: Synthetic oligonucleotide
  Sense strand starting at position 3579 of SEQ ID NO: 1886956
acagaugggaugugaguuu

SEQ ID NO: 2438255 - RNA, 19 nt, Artificial Sequence
  Description of Artificial Sequence: Synthetic oligonucleotide
  Antisense strand to SEQ ID NO: 2438254
aaacucacaucccaucugu

SEQ ID NO: 2438256 - RNA, 19 nt, Artificial Sequence
  Description of Artificial Sequence: Synthetic oligonucleotide
  Sense strand starting at position 3597 of SEQ ID NO: 1886956
uugaauagcaggugcuaaa

SEQ ID NO: 2438257 - RNA, 19 nt, Artificial Sequence
  Description of Artificial Sequence: Synthetic oligonucleotide
  Antisense strand to SEQ ID NO: 2438256
uuuagcaccugcuauucaa

SEQ ID NO: 2438258 - RNA, 19 nt, Artificial Sequence
  Description of Artificial Sequence: Synthetic oligonucleotide
  Sense strand starting at position 3609 of SEQ ID NO: 1886956
ugcuaaaugcuacaggaau

SEQ ID NO: 2438259 - RNA, 19 nt, Artificial Sequence
  Description of Artificial Sequence: Synthetic oligonucleotide
  Antisense strand to SEQ ID NO: 2438258
auuccuguagcauuuagca

SEQ ID NO: 2438260 - RNA, 19 nt, Artificial Sequence
  Description of Artificial Sequence: Synthetic oligonucleotide
  Sense strand starting at position 3699 of SEQ ID NO: 1886956
gaagcaugaguaggaguua

SEQ ID NO: 2438261 - RNA, 19 nt, Artificial Sequence
  Description of Artificial Sequence: Synthetic oligonucleotide
  Antisense strand to SEQ ID NO: 2438260
uaacuccuacucaugcuuc

SEQ ID NO: 2438262 - RNA, 19 nt, Artificial Sequence
  Description of Artificial Sequence: Synthetic oligonucleotide
  Sense strand starting at position 3708 of SEQ ID NO: 1886956
guaggaguuagcuggguga

SEQ ID NO: 2438263 - RNA, 19 nt, Artificial Sequence
  Description of Artificial Sequence: Synthetic oligonucleotide
  Antisense strand to SEQ ID NO: 2438262
ucacccagcuaacuccuac

SEQ ID NO: 2438264 - RNA, 19 nt, Artificial Sequence
  Description of Artificial Sequence: Synthetic oligonucleotide
  Sense strand starting at position 3789 of SEQ ID NO: 1886956
guggguaugacucauugaa

SEQ ID NO: 2438265 - RNA, 19 nt, Artificial Sequence
  Description of Artificial Sequence: Synthetic oligonucleotide
  Antisense strand to SEQ ID NO: 2438264
uucaaugagucauacccac

SEQ ID NO: 2438266 - RNA, 19 nt, Artificial Sequence
  Description of Artificial Sequence: Synthetic oligonucleotide
  Sense strand starting at position 3816 of SEQ ID NO: 1886956
ggaagucuguuacugaaga

SEQ ID NO: 2438267 - RNA, 19 nt, Artificial Sequence
  Description of Artificial Sequence: Synthetic oligonucleotide
  Antisense strand to SEQ ID NO: 2438266
ucuucaguaacagacuucc

SEQ ID NO: 2438268 - RNA, 19 nt, Artificial Sequence
  Description of Artificial Sequence: Synthetic oligonucleotide
  Sense strand starting at position 3861 of SEQ ID NO: 1886956
gcagcaaggcuagaaagau

SEQ ID NO: 2438269 - RNA, 19 nt, Artificial Sequence
  Description of Artificial Sequence: Synthetic oligonucleotide
  Antisense strand to SEQ ID NO: 2438268
aucuuucuagccuugcugc

SEQ ID NO: 2438270 - RNA, 19 nt, Artificial Sequence
  Description of Artificial Sequence: Synthetic oligonucleotide
  Sense strand starting at position 3920 of SEQ ID NO: 1886956
agccauugugaggaaguga

SEQ ID NO: 2438271 - RNA, 19 nt, Artificial Sequence
  Description of Artificial Sequence: Synthetic oligonucleotide
  Antisense strand to SEQ ID NO: 2438270
ucacuuccucacaauggcu

SEQ ID NO: 2438272 - RNA, 19 nt, Artificial Sequence
  Description of Artificial Sequence: Synthetic oligonucleotide
  Sense strand starting at position 113 of SEQ ID NO: 1886957
agugaaugccuauggagag

SEQ ID NO: 2438273 - RNA, 19 nt, Artificial Sequence
  Description of Artificial Sequence: Synthetic oligonucleotide
  Antisense strand to SEQ ID NO: 2438272
cucuccauaggcauucacu

SEQ ID NO: 2438274 - RNA, 19 nt, Artificial Sequence
  Description of Artificial Sequence: Synthetic oligonucleotide
  Sense strand starting at position 220 of SEQ ID NO: 1886957
cuuccuaucuugucagauu

SEQ ID NO: 2438275 - RNA, 19 nt, Artificial Sequence
  Description of Artificial Sequence: Synthetic oligonucleotide
  Antisense strand to SEQ ID NO: 2438274
aaucugacaagauaggaag

SEQ ID NO: 2438276 - RNA, 19 nt, Artificial Sequence
  Description of Artificial Sequence: Synthetic oligonucleotide
  Sense strand starting at position 228 of SEQ ID NO: 1886957
cuugucagauugucaugaa

SEQ ID NO: 2438277 - RNA, 19 nt, Artificial Sequence
  Description of Artificial Sequence: Synthetic oligonucleotide
  Antisense strand to SEQ ID NO: 2438276
uucaugacaaucugacaag

SEQ ID NO: 2438278 - RNA, 19 nt, Artificial Sequence
  Description of Artificial Sequence: Synthetic oligonucleotide
  Sense strand starting at position 287 of SEQ ID NO: 1886957
cuuuguaaacucuguauga

SEQ ID NO: 2438279 - RNA, 19 nt, Artificial Sequence
  Description of Artificial Sequence: Synthetic oligonucleotide
  Antisense strand to SEQ ID NO: 2438278
ucauacagaguuuacaaag

SEQ ID NO: 2438280 - RNA, 19 nt, Artificial Sequence
  Description of Artificial Sequence: Synthetic oligonucleotide
  Sense strand starting at position 288 of SEQ ID NO: 1886957
uuuguaaacucuguaugaa

SEQ ID NO: 2438281 - RNA, 19 nt, Artificial Sequence
  Description of Artificial Sequence: Synthetic oligonucleotide
  Antisense strand to SEQ ID NO: 2438280
uucauacagaguuuacaaa

SEQ ID NO: 2438282 - RNA, 19 nt, Artificial Sequence
  Description of Artificial Sequence: Synthetic oligonucleotide
  Sense strand starting at position 289 of SEQ ID NO: 1886957
uuguaaacucuguaugaaa

SEQ ID NO: 2438283 - RNA, 19 nt, Artificial Sequence
  Description of Artificial Sequence: Synthetic oligonucleotide
  Antisense strand to SEQ ID NO: 2438282
uuucauacagaguuuacaa

SEQ ID NO: 2438284 - RNA, 19 nt, Artificial Sequence
  Description of Artificial Sequence: Synthetic oligonucleotide
  Sense strand starting at position 349 of SEQ ID NO: 1886957
gaggcugcucaguauugaa

SEQ ID NO: 2438285 - RNA, 19 nt, Artificial Sequence
  Description of Artificial Sequence: Synthetic oligonucleotide
  Antisense strand to SEQ ID NO: 2438284
uucaauacugagcagccuc

SEQ ID NO: 2438286 - RNA, 19 nt, Artificial Sequence
  Description of Artificial Sequence: Synthetic oligonucleotide
  Sense strand starting at position 686 of SEQ ID NO: 1886957
gcaccuagucagugaugga

SEQ ID NO: 2438287 - RNA, 19 nt, Artificial Sequence
  Description of Artificial Sequence: Synthetic oligonucleotide
  Antisense strand to SEQ ID NO: 2438286
uccaucacugacuaggugc

SEQ ID NO: 2438288 - RNA, 19 nt, Artificial Sequence
  Description of Artificial Sequence: Synthetic oligonucleotide
  Sense strand starting at position 838 of SEQ ID NO: 1886957
gugggaggauaugucauaa

SEQ ID NO: 2438289 - RNA, 19 nt, Artificial Sequence
  Description of Artificial Sequence: Synthetic oligonucleotide
  Antisense strand to SEQ ID NO: 2438288
uuaugacauauccucccac

SEQ ID NO: 2438290 - RNA, 19 nt, Artificial Sequence
  Description of Artificial Sequence: Synthetic oligonucleotide
  Sense strand starting at position 956 of SEQ ID NO: 1886957
ccaggacaucugugucuag

SEQ ID NO: 2438291 - RNA, 19 nt, Artificial Sequence
  Description of Artificial Sequence: Synthetic oligonucleotide
  Antisense strand to SEQ ID NO: 2438290
cuagacacagauguccugg

SEQ ID NO: 2438292 - RNA, 19 nt, Artificial Sequence
  Description of Artificial Sequence: Synthetic oligonucleotide
  Sense strand starting at position 957 of SEQ ID NO: 1886957
caggacaucugugucuaga

SEQ ID NO: 2438293 - RNA, 19 nt, Artificial Sequence
  Description of Artificial Sequence: Synthetic oligonucleotide
  Antisense strand to SEQ ID NO: 2438292
ucuagacacagauguccug

SEQ ID NO: 2438294 - RNA, 19 nt, Artificial Sequence
  Description of Artificial Sequence: Synthetic oligonucleotide
  Sense strand starting at position 959 of SEQ ID NO: 1886957
ggacaucugugucuagaug

SEQ ID NO: 2438295 - RNA, 19 nt, Artificial Sequence
  Description of Artificial Sequence: Synthetic oligonucleotide
  Antisense strand to SEQ ID NO: 2438294
caucuagacacagaugucc

SEQ ID NO: 2438296 - RNA, 19 nt, Artificial Sequence
  Description of Artificial Sequence: Synthetic oligonucleotide
  Sense strand starting at position 960 of SEQ ID NO: 1886957
gacaucugugucuagauga

SEQ ID NO: 2438297 - RNA, 19 nt, Artificial Sequence
  Description of Artificial Sequence: Synthetic oligonucleotide
  Antisense strand to SEQ ID NO: 2438296
ucaucuagacacagauguc

SEQ ID NO: 2438298 - RNA, 19 nt, Artificial Sequence
  Description of Artificial Sequence: Synthetic oligonucleotide
  Sense strand starting at position 1193 of SEQ ID NO: 1886957
aaaguauguucugugggac

SEQ ID NO: 2438299 - RNA, 19 nt, Artificial Sequence
  Description of Artificial Sequence: Synthetic oligonucleotide
  Antisense strand to SEQ ID NO: 2438298
gucccacagaacauacuuu

SEQ ID NO: 2438300 - RNA, 19 nt, Artificial Sequence
  Description of Artificial Sequence: Synthetic oligonucleotide
  Sense strand starting at position 1194 of SEQ ID NO: 1886957
aaguauguucugugggacu

SEQ ID NO: 2438301 - RNA, 19 nt, Artificial Sequence
  Description of Artificial Sequence: Synthetic oligonucleotide
  Antisense strand to SEQ ID NO: 2438300
agucccacagaacauacuu

SEQ ID NO: 2438302 - RNA, 19 nt, Artificial Sequence
  Description of Artificial Sequence: Synthetic oligonucleotide
  Sense strand starting at position 1492 of SEQ ID NO: 1886957
uggagagucccugaggcau

SEQ ID NO: 2438303 - RNA, 19 nt, Artificial Sequence
  Description of Artificial Sequence: Synthetic oligonucleotide
  Antisense strand to SEQ ID NO: 2438302
augccucagggacucucca

SEQ ID NO: 2438304 - RNA, 19 nt, Artificial Sequence
  Description of Artificial Sequence: Synthetic oligonucleotide
  Sense strand starting at position 1533 of SEQ ID NO: 1886957
aucagucagugucuuagga

SEQ ID NO: 2438305 - RNA, 19 nt, Artificial Sequence
  Description of Artificial Sequence: Synthetic oligonucleotide
  Antisense strand to SEQ ID NO: 2438304
uccuaagacacugacugau

SEQ ID NO: 2438306 - RNA, 19 nt, Artificial Sequence
  Description of Artificial Sequence: Synthetic oligonucleotide
  Sense strand starting at position 1541 of SEQ ID NO: 1886957
gugucuuaggaagacugua

SEQ ID NO: 2438307 - RNA, 19 nt, Artificial Sequence
  Description of Artificial Sequence: Synthetic oligonucleotide
  Antisense strand to SEQ ID NO: 2438306
uacagucuuccuaagacac

SEQ ID NO: 2438308 - RNA, 19 nt, Artificial Sequence
  Description of Artificial Sequence: Synthetic oligonucleotide
  Sense strand starting at position 1778 of SEQ ID NO: 1886957
ucgucaauccaagaagacu

SEQ ID NO: 2438309 - RNA, 19 nt, Artificial Sequence
  Description of Artificial Sequence: Synthetic oligonucleotide
  Antisense strand to SEQ ID NO: 2438308
agucuucuuggauugacga

SEQ ID NO: 2438310 - RNA, 19 nt, Artificial Sequence
  Description of Artificial Sequence: Synthetic oligonucleotide
  Sense strand starting at position 1915 of SEQ ID NO: 1886957
cccucauugauaggguuga

SEQ ID NO: 2438311 - RNA, 19 nt, Artificial Sequence
  Description of Artificial Sequence: Synthetic oligonucleotide
  Antisense strand to SEQ ID NO: 2438310
ucaacccuaucaaugaggg

SEQ ID NO: 2438312 - RNA, 19 nt, Artificial Sequence
  Description of Artificial Sequence: Synthetic oligonucleotide
  Sense strand starting at position 1919 of SEQ ID NO: 1886957
cauugauaggguugauggu

SEQ ID NO: 2438313 - RNA, 19 nt, Artificial Sequence
  Description of Artificial Sequence: Synthetic oligonucleotide
  Antisense strand to SEQ ID NO: 2438312
accaucaacccuaucaaug

SEQ ID NO: 2438314 - RNA, 19 nt, Artificial Sequence
  Description of Artificial Sequence: Synthetic oligonucleotide
  Sense strand starting at position 1925 of SEQ ID NO: 1886957
uaggguugauggucucagu

SEQ ID NO: 2438315 - RNA, 19 nt, Artificial Sequence
  Description of Artificial Sequence: Synthetic oligonucleotide
  Antisense strand to SEQ ID NO: 2438314
acugagaccaucaacccua

SEQ ID NO: 2438316 - RNA, 19 nt, Artificial Sequence
  Description of Artificial Sequence: Synthetic oligonucleotide
  Sense strand starting at position 2008 of SEQ ID NO: 1886957
gagacuuggcucuaaggcu

SEQ ID NO: 2438317 - RNA, 19 nt, Artificial Sequence
  Description of Artificial Sequence: Synthetic oligonucleotide
  Antisense strand to SEQ ID NO: 2438316
agccuuagagccaagucuc

SEQ ID NO: 2438318 - RNA, 19 nt, Artificial Sequence
  Description of Artificial Sequence: Synthetic oligonucleotide
  Sense strand starting at position 2016 of SEQ ID NO: 1886957
gcucuaaggcuuuaaagug

SEQ ID NO: 2438319 - RNA, 19 nt, Artificial Sequence
  Description of Artificial Sequence: Synthetic oligonucleotide
  Antisense strand to SEQ ID NO: 2438318
cacuuuaaagccuuagagc

SEQ ID NO: 2438320 - RNA, 19 nt, Artificial Sequence
  Description of Artificial Sequence: Synthetic oligonucleotide
  Sense strand starting at position 2022 of SEQ ID NO: 1886957
aggcuuuaaagugguaaau

SEQ ID NO: 2438321 - RNA, 19 nt, Artificial Sequence
  Description of Artificial Sequence: Synthetic oligonucleotide
  Antisense strand to SEQ ID NO: 2438320
auuuaccacuuuaaagccu

SEQ ID NO: 2438322 - RNA, 19 nt, Artificial Sequence
  Description of Artificial Sequence: Synthetic oligonucleotide
  Sense strand starting at position 2032 of SEQ ID NO: 1886957
gugguaaaugcccaguuua

SEQ ID NO: 2438323 - RNA, 19 nt, Artificial Sequence
  Description of Artificial Sequence: Synthetic oligonucleotide
  Antisense strand to SEQ ID NO: 2438322
uaaacugggcauuuaccac

SEQ ID NO: 2438324 - RNA, 19 nt, Artificial Sequence
  Description of Artificial Sequence: Synthetic oligonucleotide
  Sense strand starting at position 2121 of SEQ ID NO: 1886957
aggguauagguaggacuua

SEQ ID NO: 2438325 - RNA, 19 nt, Artificial Sequence
  Description of Artificial Sequence: Synthetic oligonucleotide
  Antisense strand to SEQ ID NO: 2438324
uaaguccuaccuauacccu

SEQ ID NO: 2438326 - RNA, 19 nt, Artificial Sequence
  Description of Artificial Sequence: Synthetic oligonucleotide
  Sense strand starting at position 2212 of SEQ ID NO: 1886957
ggauaauguaaugggcuaa

SEQ ID NO: 2438327 - RNA, 19 nt, Artificial Sequence
  Description of Artificial Sequence: Synthetic oligonucleotide
  Antisense strand to SEQ ID NO: 2438326
uuagcccauuacauuaucc

SEQ ID NO: 2438328 - RNA, 19 nt, Artificial Sequence
  Description of Artificial Sequence: Synthetic oligonucleotide
  Sense strand starting at position 2669 of SEQ ID NO: 1886957
gccuguucuguauuagucu

SEQ ID NO: 2438329 - RNA, 19 nt, Artificial Sequence
  Description of Artificial Sequence: Synthetic oligonucleotide
  Antisense strand to SEQ ID NO: 2438328
agacuaauacagaacaggc

SEQ ID NO: 2438330 - RNA, 19 nt, Artificial Sequence
  Description of Artificial Sequence: Synthetic oligonucleotide
  Sense strand starting at position 2732 of SEQ ID NO: 1886957
gguacuuuagagugagcau

SEQ ID NO: 2438331 - RNA, 19 nt, Artificial Sequence
  Description of Artificial Sequence: Synthetic oligonucleotide
  Antisense strand to SEQ ID NO: 2438330
augcucacucuaaaguacc

SEQ ID NO: 2438332 - RNA, 19 nt, Artificial Sequence
  Description of Artificial Sequence: Synthetic oligonucleotide
  Sense strand starting at position 2733 of SEQ ID NO: 1886957
guacuuuagagugagcauu

SEQ ID NO: 2438333 - RNA, 19 nt, Artificial Sequence
  Description of Artificial Sequence: Synthetic oligonucleotide
  Antisense strand to SEQ ID NO: 2438332
aaugcucacucuaaaguac

SEQ ID NO: 2438334 - RNA, 19 nt, Artificial Sequence
  Description of Artificial Sequence: Synthetic oligonucleotide
  Sense strand starting at position 2868 of SEQ ID NO: 1886957
ugcugugauucuccugaaa

SEQ ID NO: 2438335 - RNA, 19 nt, Artificial Sequence
  Description of Artificial Sequence: Synthetic oligonucleotide
  Antisense strand to SEQ ID NO: 2438334
uuucaggagaaucacagca

SEQ ID NO: 2438336 - RNA, 19 nt, Artificial Sequence
  Description of Artificial Sequence: Synthetic oligonucleotide
  Sense strand starting at position 2897 of SEQ ID NO: 1886957
cagagaucaucucuggguu

SEQ ID NO: 2438337 - RNA, 19 nt, Artificial Sequence
  Description of Artificial Sequence: Synthetic oligonucleotide
  Antisense strand to SEQ ID NO: 2438336
aacccagagaugaucucug

SEQ ID NO: 2438338 - RNA, 19 nt, Artificial Sequence
  Description of Artificial Sequence: Synthetic oligonucleotide
  Sense strand starting at position 3236 of SEQ ID NO: 1886957
guugaauuggaaugggauc

SEQ ID NO: 2438339 - RNA, 19 nt, Artificial Sequence
  Description of Artificial Sequence: Synthetic oligonucleotide
  Antisense strand to SEQ ID NO: 2438338
gaucccauuccaauucaac

SEQ ID NO: 2438340 - RNA, 19 nt, Artificial Sequence
  Description of Artificial Sequence: Synthetic oligonucleotide
  Sense strand starting at position 3267 of SEQ ID NO: 1886957
cccuguuucucuuuggaac

SEQ ID NO: 2438341 - RNA, 19 nt, Artificial Sequence
  Description of Artificial Sequence: Synthetic oligonucleotide
  Antisense strand to SEQ ID NO: 2438340
guuccaaagagaaacaggg

SEQ ID NO: 2438342 - RNA, 19 nt, Artificial Sequence
  Description of Artificial Sequence: Synthetic oligonucleotide
  Sense strand starting at position 3384 of SEQ ID NO: 1886957
gcaucuuuagaaugacaua

SEQ ID NO: 2438343 - RNA, 19 nt, Artificial Sequence
  Description of Artificial Sequence: Synthetic oligonucleotide
  Antisense strand to SEQ ID NO: 2438342
uaugucauucuaaagaugc

SEQ ID NO: 2438344 - RNA, 19 nt, Artificial Sequence
  Description of Artificial Sequence: Synthetic oligonucleotide
  Sense strand starting at position 3574 of SEQ ID NO: 1886957
agaagagcuuccuccuguu

SEQ ID NO: 2438345 - RNA, 19 nt, Artificial Sequence
  Description of Artificial Sequence: Synthetic oligonucleotide
  Antisense strand to SEQ ID NO: 2438344
aacaggaggaagcucuucu

SEQ ID NO: 2438346 - RNA, 19 nt, Artificial Sequence
  Description of Artificial Sequence: Synthetic oligonucleotide
  Sense strand starting at position 3672 of SEQ ID NO: 1886957
gagcaaauacuagguguaa

SEQ ID NO: 2438347 - RNA, 19 nt, Artificial Sequence
  Description of Artificial Sequence: Synthetic oligonucleotide
  Antisense strand to SEQ ID NO: 2438346
uuacaccuaguauuugcuc

SEQ ID NO: 2438348 - RNA, 19 nt, Artificial Sequence
  Description of Artificial Sequence: Synthetic oligonucleotide
  Sense strand starting at position 3740 of SEQ ID NO: 1886957
ccaugagauaggugucauu

SEQ ID NO: 2438349 - RNA, 19 nt, Artificial Sequence
  Description of Artificial Sequence: Synthetic oligonucleotide
  Antisense strand to SEQ ID NO: 2438348
aaugacaccuaucucaugg

SEQ ID NO: 2438350 - RNA, 19 nt, Artificial Sequence
  Description of Artificial Sequence: Synthetic oligonucleotide
  Sense strand starting at position 3793 of SEQ ID NO: 1886957
auagguagggcauaguaau

SEQ ID NO: 2438351 - RNA, 19 nt, Artificial Sequence
  Description of Artificial Sequence: Synthetic oligonucleotide
  Antisense strand to SEQ ID NO: 2438350
auuacuaugcccuaccuau

SEQ ID NO: 2438352 - RNA, 19 nt, Artificial Sequence
  Description of Artificial Sequence: Synthetic oligonucleotide
  Sense strand starting at position 5 of SEQ ID NO: 1886958
ccuuuaaugucaccuguaa

SEQ ID NO: 2438353 - RNA, 19 nt, Artificial Sequence
  Description of Artificial Sequence: Synthetic oligonucleotide
  Antisense strand to SEQ ID NO: 2438352
uuacaggugacauuaaagg

SEQ ID NO: 2438354 - RNA, 19 nt, Artificial Sequence
  Description of Artificial Sequence: Synthetic oligonucleotide
  Sense strand starting at position 77 of SEQ ID NO: 1886958
agaugagcuuucuuaucug

SEQ ID NO: 2438355 - RNA, 19 nt, Artificial Sequence
  Description of Artificial Sequence: Synthetic oligonucleotide
  Antisense strand to SEQ ID NO: 2438354
cagauaagaaagcucaucu

SEQ ID NO: 2438356 - RNA, 19 nt, Artificial Sequence
  Description of Artificial Sequence: Synthetic oligonucleotide
  Sense strand starting at position 88 of SEQ ID NO: 1886958
cuuaucugcugggcaagaa

SEQ ID NO: 2438357 - RNA, 19 nt, Artificial Sequence
  Description of Artificial Sequence: Synthetic oligonucleotide
  Antisense strand to SEQ ID NO: 2438356
uucuugcccagcagauaag

SEQ ID NO: 2438358 - RNA, 19 nt, Artificial Sequence
  Description of Artificial Sequence: Synthetic oligonucleotide
  Sense strand starting at position 89 of SEQ ID NO: 1886958
uuaucugcugggcaagaau

SEQ ID NO: 2438359 - RNA, 19 nt, Artificial Sequence
  Description of Artificial Sequence: Synthetic oligonucleotide
  Antisense strand to SEQ ID NO: 2438358
auucuugcccagcagauaa

SEQ ID NO: 2438360 - RNA, 19 nt, Artificial Sequence
  Description of Artificial Sequence: Synthetic oligonucleotide
  Sense strand starting at position 186 of SEQ ID NO: 1886958
acacuaaaucuuuguagga

SEQ ID NO: 2438361 - RNA, 19 nt, Artificial Sequence
  Description of Artificial Sequence: Synthetic oligonucleotide
  Antisense strand to SEQ ID NO: 2438360
uccuacaaagauuuagugu

SEQ ID NO: 2438362 - RNA, 19 nt, Artificial Sequence
  Description of Artificial Sequence: Synthetic oligonucleotide
  Sense strand starting at position 187 of SEQ ID NO: 1886958
cacuaaaucuuuguaggag

SEQ ID NO: 2438363 - RNA, 19 nt, Artificial Sequence
  Description of Artificial Sequence: Synthetic oligonucleotide
  Antisense strand to SEQ ID NO: 2438362
cuccuacaaagauuuagug

SEQ ID NO: 2438364 - RNA, 19 nt, Artificial Sequence
  Description of Artificial Sequence: Synthetic oligonucleotide
  Sense strand starting at position 190 of SEQ ID NO: 1886958
uaaaucuuuguaggaguuu

SEQ ID NO: 2438365 - RNA, 19 nt, Artificial Sequence
  Description of Artificial Sequence: Synthetic oligonucleotide
  Antisense strand to SEQ ID NO: 2438364
aaacuccuacaaagauuua

SEQ ID NO: 2438366 - RNA, 19 nt, Artificial Sequence
  Description of Artificial Sequence: Synthetic oligonucleotide
  Sense strand starting at position 633 of SEQ ID NO: 1886958
ucaccagaaguauguaaga

SEQ ID NO: 2438367 - RNA, 19 nt, Artificial Sequence
  Description of Artificial Sequence: Synthetic oligonucleotide
  Antisense strand to SEQ ID NO: 2438366
ucuuacauacuucugguga

SEQ ID NO: 2438368 - RNA, 19 nt, Artificial Sequence
  Description of Artificial Sequence: Synthetic oligonucleotide
  Sense strand starting at position 663 of SEQ ID NO: 1886958
guuuauaauucccugucua

SEQ ID NO: 2438369 - RNA, 19 nt, Artificial Sequence
  Description of Artificial Sequence: Synthetic oligonucleotide
  Antisense strand to SEQ ID NO: 2438368
uagacagggaauuauaaac

SEQ ID NO: 2438370 - RNA, 19 nt, Artificial Sequence
  Description of Artificial Sequence: Synthetic oligonucleotide
  Sense strand starting at position 810 of SEQ ID NO: 1886958
gggaucauuucucaucacu

SEQ ID NO: 2438371 - RNA, 19 nt, Artificial Sequence
  Description of Artificial Sequence: Synthetic oligonucleotide
  Antisense strand to SEQ ID NO: 2438370
agugaugagaaaugauccc

SEQ ID NO: 2438372 - RNA, 19 nt, Artificial Sequence
  Description of Artificial Sequence: Synthetic oligonucleotide
  Sense strand starting at position 821 of SEQ ID NO: 1886958
ucaucacugcugugaccau

SEQ ID NO: 2438373 - RNA, 19 nt, Artificial Sequence
  Description of Artificial Sequence: Synthetic oligonucleotide
  Antisense strand to SEQ ID NO: 2438372
auggucacagcagugauga

SEQ ID NO: 2438374 - RNA, 19 nt, Artificial Sequence
  Description of Artificial Sequence: Synthetic oligonucleotide
  Sense strand starting at position 865 of SEQ ID NO: 1886958
agauuaggacucugcagaa

SEQ ID NO: 2438375 - RNA, 19 nt, Artificial Sequence
  Description of Artificial Sequence: Synthetic oligonucleotide
  Antisense strand to SEQ ID NO: 2438374
uucugcagaguccuaaucu

SEQ ID NO: 2438376 - RNA, 19 nt, Artificial Sequence
  Description of Artificial Sequence: Synthetic oligonucleotide
  Sense strand starting at position 992 of SEQ ID NO: 1886958
cugagaaacucucaagaac

SEQ ID NO: 2438377 - RNA, 19 nt, Artificial Sequence
  Description of Artificial Sequence: Synthetic oligonucleotide
  Antisense strand to SEQ ID NO: 2438376
guucuugagaguuucucag

SEQ ID NO: 2438378 - RNA, 19 nt, Artificial Sequence
  Description of Artificial Sequence: Synthetic oligonucleotide
  Sense strand starting at position 1046 of SEQ ID NO: 1886958
augugauauccugggugga

SEQ ID NO: 2438379 - RNA, 19 nt, Artificial Sequence
  Description of Artificial Sequence: Synthetic oligonucleotide
  Antisense strand to SEQ ID NO: 2438378
uccacccaggauaucacau

SEQ ID NO: 2438380 - RNA, 19 nt, Artificial Sequence
  Description of Artificial Sequence: Synthetic oligonucleotide
  Sense strand starting at position 1047 of SEQ ID NO: 1886958
ugugauauccuggguggaa

SEQ ID NO: 2438381 - RNA, 19 nt, Artificial Sequence
  Description of Artificial Sequence: Synthetic oligonucleotide
  Antisense strand to SEQ ID NO: 2438380
uuccacccaggauaucaca

SEQ ID NO: 2438382 - RNA, 19 nt, Artificial Sequence
  Description of Artificial Sequence: Synthetic oligonucleotide
  Sense strand starting at position 1048 of SEQ ID NO: 1886958
gugauauccuggguggaau

SEQ ID NO: 2438383 - RNA, 19 nt, Artificial Sequence
  Description of Artificial Sequence: Synthetic oligonucleotide
  Antisense strand to SEQ ID NO: 2438382
auuccacccaggauaucac

SEQ ID NO: 2438384 - RNA, 19 nt, Artificial Sequence
  Description of Artificial Sequence: Synthetic oligonucleotide
  Sense strand starting at position 1049 of SEQ ID NO: 1886958
ugauauccuggguggaaug

SEQ ID NO: 2438385 - RNA, 19 nt, Artificial Sequence
  Description of Artificial Sequence: Synthetic oligonucleotide
  Antisense strand to SEQ ID NO: 2438384
cauuccacccaggauauca

SEQ ID NO: 2438386 - RNA, 19 nt, Artificial Sequence
  Description of Artificial Sequence: Synthetic oligonucleotide
  Sense strand starting at position 1109 of SEQ ID NO: 1886958
ccgaauaaagucuggaguu

SEQ ID NO: 2438387 - RNA, 19 nt, Artificial Sequence
  Description of Artificial Sequence: Synthetic oligonucleotide
  Antisense strand to SEQ ID NO: 2438386
aacuccagacuuuauucgg

SEQ ID NO: 2438388 - RNA, 19 nt, Artificial Sequence
  Description of Artificial Sequence: Synthetic oligonucleotide
  Sense strand starting at position 1168 of SEQ ID NO: 1886958
gcaaauguuccaugaugau

SEQ ID NO: 2438389 - RNA, 19 nt, Artificial Sequence
  Description of Artificial Sequence: Synthetic oligonucleotide
  Antisense strand to SEQ ID NO: 2438388
aucaucauggaacauuugc

SEQ ID NO: 2438390 - RNA, 19 nt, Artificial Sequence
  Description of Artificial Sequence: Synthetic oligonucleotide
  Sense strand starting at position 1217 of SEQ ID NO: 1886958
agggauauaugggaacuuu

SEQ ID NO: 2438391 - RNA, 19 nt, Artificial Sequence
  Description of Artificial Sequence: Synthetic oligonucleotide
  Antisense strand to SEQ ID NO: 2438390
aaaguucccauauaucccu

SEQ ID NO: 2438392 - RNA, 19 nt, Artificial Sequence
  Description of Artificial Sequence: Synthetic oligonucleotide
  Sense strand starting at position 1621 of SEQ ID NO: 1886958
ggaaguugagcuuacugga

SEQ ID NO: 2438393 - RNA, 19 nt, Artificial Sequence
  Description of Artificial Sequence: Synthetic oligonucleotide
  Antisense strand to SEQ ID NO: 2438392
uccaguaagcucaacuucc

SEQ ID NO: 2438394 - RNA, 19 nt, Artificial Sequence
  Description of Artificial Sequence: Synthetic oligonucleotide
  Sense strand starting at position 1880 of SEQ ID NO: 1886958
cagagagcucucugucuga

SEQ ID NO: 2438395 - RNA, 19 nt, Artificial Sequence
  Description of Artificial Sequence: Synthetic oligonucleotide
  Antisense strand to SEQ ID NO: 2438394
ucagacagagagcucucug

SEQ ID NO: 2438396 - RNA, 19 nt, Artificial Sequence
  Description of Artificial Sequence: Synthetic oligonucleotide
  Sense strand starting at position 1884 of SEQ ID NO: 1886958
gagcucucugucugaacga

SEQ ID NO: 2438397 - RNA, 19 nt, Artificial Sequence
  Description of Artificial Sequence: Synthetic oligonucleotide
  Antisense strand to SEQ ID NO: 2438396
ucguucagacagagagcuc

SEQ ID NO: 2438398 - RNA, 19 nt, Artificial Sequence
  Description of Artificial Sequence: Synthetic oligonucleotide
  Sense strand starting at position 2014 of SEQ ID NO: 1886958
ugggcugaccuuuagacau

SEQ ID NO: 2438399 - RNA, 19 nt, Artificial Sequence
  Description of Artificial Sequence: Synthetic oligonucleotide
  Antisense strand to SEQ ID NO: 2438398
augucuaaaggucagccca

SEQ ID NO: 2438400 - RNA, 19 nt, Artificial Sequence
  Description of Artificial Sequence: Synthetic oligonucleotide
  Sense strand starting at position 2096 of SEQ ID NO: 1886958
agagaaggccaguguaaag

SEQ ID NO: 2438401 - RNA, 19 nt, Artificial Sequence
  Description of Artificial Sequence: Synthetic oligonucleotide
  Antisense strand to SEQ ID NO: 2438400
cuuuacacuggccuucucu

SEQ ID NO: 2438402 - RNA, 19 nt, Artificial Sequence
  Description of Artificial Sequence: Synthetic oligonucleotide
  Sense strand starting at position 2161 of SEQ ID NO: 1886958
agaccuagauguccauauu

SEQ ID NO: 2438403 - RNA, 19 nt, Artificial Sequence
  Description of Artificial Sequence: Synthetic oligonucleotide
  Antisense strand to SEQ ID NO: 2438402
aauauggacaucuaggucu

SEQ ID NO: 2438404 - RNA, 19 nt, Artificial Sequence
  Description of Artificial Sequence: Synthetic oligonucleotide
  Sense strand starting at position 2164 of SEQ ID NO: 1886958
ccuagauguccauauuggu

SEQ ID NO: 2438405 - RNA, 19 nt, Artificial Sequence
  Description of Artificial Sequence: Synthetic oligonucleotide
  Antisense strand to SEQ ID NO: 2438404
accaauauggacaucuagg

SEQ ID NO: 2438406 - RNA, 19 nt, Artificial Sequence
  Description of Artificial Sequence: Synthetic oligonucleotide
  Sense strand starting at position 2984 of SEQ ID NO: 1886958
cacagcagucaguaauagu

SEQ ID NO: 2438407 - RNA, 19 nt, Artificial Sequence
  Description of Artificial Sequence: Synthetic oligonucleotide
  Antisense strand to SEQ ID NO: 2438406
acuauuacugacugcugug

SEQ ID NO: 2438408 - RNA, 19 nt, Artificial Sequence
  Description of Artificial Sequence: Synthetic oligonucleotide
  Sense strand starting at position 2991 of SEQ ID NO: 1886958
gucaguaauaguugaugac

SEQ ID NO: 2438409 - RNA, 19 nt, Artificial Sequence
  Description of Artificial Sequence: Synthetic oligonucleotide
  Antisense strand to SEQ ID NO: 2438408
gucaucaacuauuacugac

SEQ ID NO: 2438410 - RNA, 19 nt, Artificial Sequence
  Description of Artificial Sequence: Synthetic oligonucleotide
  Sense strand starting at position 2992 of SEQ ID NO: 1886958
ucaguaauaguugaugacu

SEQ ID NO: 2438411 - RNA, 19 nt, Artificial Sequence
  Description of Artificial Sequence: Synthetic oligonucleotide
  Antisense strand to SEQ ID NO: 2438410
agucaucaacuauuacuga

SEQ ID NO: 2438412 - RNA, 19 nt, Artificial Sequence
  Description of Artificial Sequence: Synthetic oligonucleotide
  Sense strand starting at position 3015 of SEQ ID NO: 1886958
gaaugaguagcaugcaauc

SEQ ID NO: 2438413 - RNA, 19 nt, Artificial Sequence
  Description of Artificial Sequence: Synthetic oligonucleotide
  Antisense strand to SEQ ID NO: 2438412
gauugcaugcuacucauuc

SEQ ID NO: 2438414 - RNA, 19 nt, Artificial Sequence
  Description of Artificial Sequence: Synthetic oligonucleotide
  Sense strand starting at position 3024 of SEQ ID NO: 1886958
gcaugcaaucaauauuaga

SEQ ID NO: 2438415 - RNA, 19 nt, Artificial Sequence
  Description of Artificial Sequence: Synthetic oligonucleotide
  Antisense strand to SEQ ID NO: 2438414
ucuaauauugauugcaugc

SEQ ID NO: 2438416 - RNA, 19 nt, Artificial Sequence
  Description of Artificial Sequence: Synthetic oligonucleotide
  Sense strand starting at position 3061 of SEQ ID NO: 1886958
ugguuaaagccugcguuca

SEQ ID NO: 2438417 - RNA, 19 nt, Artificial Sequence
  Description of Artificial Sequence: Synthetic oligonucleotide
  Antisense strand to SEQ ID NO: 2438416
ugaacgcaggcuuuaacca

SEQ ID NO: 2438418 - RNA, 19 nt, Artificial Sequence
  Description of Artificial Sequence: Synthetic oligonucleotide
  Sense strand starting at position 3295 of SEQ ID NO: 1886958
gcagguacuacaugagugu

SEQ ID NO: 2438419 - RNA, 19 nt, Artificial Sequence
  Description of Artificial Sequence: Synthetic oligonucleotide
  Antisense strand to SEQ ID NO: 2438418
acacucauguaguaccugc

SEQ ID NO: 2438420 - RNA, 19 nt, Artificial Sequence
  Description of Artificial Sequence: Synthetic oligonucleotide
  Sense strand starting at position 3298 of SEQ ID NO: 1886958
gguacuacaugagugugau

SEQ ID NO: 2438421 - RNA, 19 nt, Artificial Sequence
  Description of Artificial Sequence: Synthetic oligonucleotide
  Antisense strand to SEQ ID NO: 2438420
aucacacucauguaguacc

SEQ ID NO: 2438422 - RNA, 19 nt, Artificial Sequence
  Description of Artificial Sequence: Synthetic oligonucleotide
  Sense strand starting at position 3299 of SEQ ID NO: 1886958
guacuacaugagugugauu

SEQ ID NO: 2438423 - RNA, 19 nt, Artificial Sequence
  Description of Artificial Sequence: Synthetic oligonucleotide
  Antisense strand to SEQ ID NO: 2438422
aaucacacucauguaguac

SEQ ID NO: 2438424 - RNA, 19 nt, Artificial Sequence
  Description of Artificial Sequence: Synthetic oligonucleotide
  Sense strand starting at position 3591 of SEQ ID NO: 1886958
acuaccgagagcuguaauu

SEQ ID NO: 2438425 - RNA, 19 nt, Artificial Sequence
  Description of Artificial Sequence: Synthetic oligonucleotide
  Antisense strand to SEQ ID NO: 2438424
aauuacagcucucgguagu

SEQ ID NO: 2438426 - RNA, 19 nt, Artificial Sequence
  Description of Artificial Sequence: Synthetic oligonucleotide
  Sense strand starting at position 3903 of SEQ ID NO: 1886958
ggccaagagcuguaauucu

SEQ ID NO: 2438427 - RNA, 19 nt, Artificial Sequence
  Description of Artificial Sequence: Synthetic oligonucleotide
  Antisense strand to SEQ ID NO: 2438426
agaauuacagcucuuggcc

SEQ ID NO: 2438428 - RNA, 19 nt, Artificial Sequence
  Description of Artificial Sequence: Synthetic oligonucleotide
  Sense strand starting at position 3971 of SEQ ID NO: 1886958
ccauguagauuuggaaaua

SEQ ID NO: 2438429 - RNA, 19 nt, Artificial Sequence
  Description of Artificial Sequence: Synthetic oligonucleotide
  Antisense strand to SEQ ID NO: 2438428
uauuuccaaaucuacaugg

SEQ ID NO: 2438430 - RNA, 19 nt, Artificial Sequence
  Description of Artificial Sequence: Synthetic oligonucleotide
  Sense strand starting at position 3972 of SEQ ID NO: 1886958
cauguagauuuggaaauag

SEQ ID NO: 2438431 - RNA, 19 nt, Artificial Sequence
  Description of Artificial Sequence: Synthetic oligonucleotide
  Antisense strand to SEQ ID NO: 2438430
cuauuuccaaaucuacaug

SEQ ID NO: 2438432 - RNA, 19 nt, Artificial Sequence
  Description of Artificial Sequence: Synthetic oligonucleotide
  Sense strand starting at position 247 of SEQ ID NO: 1886959
agauucuuaucucuauguu

SEQ ID NO: 2438433 - RNA, 19 nt, Artificial Sequence
  Description of Artificial Sequence: Synthetic oligonucleotide
  Antisense strand to SEQ ID NO: 2438432
aacauagagauaagaaucu

SEQ ID NO: 2438434 - RNA, 19 nt, Artificial Sequence
  Description of Artificial Sequence: Synthetic oligonucleotide
  Sense strand starting at position 253 of SEQ ID NO: 1886959
uuaucucuauguuagguau

SEQ ID NO: 2438435 - RNA, 19 nt, Artificial Sequence
  Description of Artificial Sequence: Synthetic oligonucleotide
  Antisense strand to SEQ ID NO: 2438434
auaccuaacauagagauaa

SEQ ID NO: 2438436 - RNA, 19 nt, Artificial Sequence
  Description of Artificial Sequence: Synthetic oligonucleotide
  Sense strand starting at position 255 of SEQ ID NO: 1886959
aucucuauguuagguauaa

SEQ ID NO: 2438437 - RNA, 19 nt, Artificial Sequence
  Description of Artificial Sequence: Synthetic oligonucleotide
  Antisense strand to SEQ ID NO: 2438436
uuauaccuaacauagagau

SEQ ID NO: 2438438 - RNA, 19 nt, Artificial Sequence
  Description of Artificial Sequence: Synthetic oligonucleotide
  Sense strand starting at position 256 of SEQ ID NO: 1886959
ucucuauguuagguauaau

SEQ ID NO: 2438439 - RNA, 19 nt, Artificial Sequence
  Description of Artificial Sequence: Synthetic oligonucleotide
  Antisense strand to SEQ ID NO: 2438438
auuauaccuaacauagaga

SEQ ID NO: 2438440 - RNA, 19 nt, Artificial Sequence
  Description of Artificial Sequence: Synthetic oligonucleotide
  Sense strand starting at position 294 of SEQ ID NO: 1886959
guuagaucauuauaacaag

SEQ ID NO: 2438441 - RNA, 19 nt, Artificial Sequence
  Description of Artificial Sequence: Synthetic oligonucleotide
  Antisense strand to SEQ ID NO: 2438440
cuuguuauaaugaucuaac

SEQ ID NO: 2438442 - RNA, 19 nt, Artificial Sequence
  Description of Artificial Sequence: Synthetic oligonucleotide
  Sense strand starting at position 455 of SEQ ID NO: 1886959
gaugcaucaucccugugaa

SEQ ID NO: 2438443 - RNA, 19 nt, Artificial Sequence
  Description of Artificial Sequence: Synthetic oligonucleotide
  Antisense strand to SEQ ID NO: 2438442
uucacagggaugaugcauc

SEQ ID NO: 2438444 - RNA, 19 nt, Artificial Sequence
  Description of Artificial Sequence: Synthetic oligonucleotide
  Sense strand starting at position 456 of SEQ ID NO: 1886959
augcaucaucccugugaac

SEQ ID NO: 2438445 - RNA, 19 nt, Artificial Sequence
  Description of Artificial Sequence: Synthetic oligonucleotide
  Antisense strand to SEQ ID NO: 2438444
guucacagggaugaugcau

SEQ ID NO: 2438446 - RNA, 19 nt, Artificial Sequence
  Description of Artificial Sequence: Synthetic oligonucleotide
  Sense strand starting at position 458 of SEQ ID NO: 1886959
gcaucaucccugugaacac

SEQ ID NO: 2438447 - RNA, 19 nt, Artificial Sequence
  Description of Artificial Sequence: Synthetic oligonucleotide
  Antisense strand to SEQ ID NO: 2438446
guguucacagggaugaugc

SEQ ID NO: 2438448 - RNA, 19 nt, Artificial Sequence
  Description of Artificial Sequence: Synthetic oligonucleotide
  Sense strand starting at position 591 of SEQ ID NO: 1886959
agagcuaucugauuccuua

SEQ ID NO: 2438449 - RNA, 19 nt, Artificial Sequence
  Description of Artificial Sequence: Synthetic oligonucleotide
  Antisense strand to SEQ ID NO: 2438448
uaaggaaucagauagcucu

SEQ ID NO: 2438450 - RNA, 19 nt, Artificial Sequence
  Description of Artificial Sequence: Synthetic oligonucleotide
  Sense strand starting at position 623 of SEQ ID NO: 1886959
ugaucuacuguuugucacu

SEQ ID NO: 2438451 - RNA, 19 nt, Artificial Sequence
  Description of Artificial Sequence: Synthetic oligonucleotide
  Antisense strand to SEQ ID NO: 2438450
agugacaaacaguagauca

SEQ ID NO: 2438452 - RNA, 19 nt, Artificial Sequence
  Description of Artificial Sequence: Synthetic oligonucleotide
  Sense strand starting at position 625 of SEQ ID NO: 1886959
aucuacuguuugucacuau

SEQ ID NO: 2438453 - RNA, 19 nt, Artificial Sequence
  Description of Artificial Sequence: Synthetic oligonucleotide
  Antisense strand to SEQ ID NO: 2438452
auagugacaaacaguagau

SEQ ID NO: 2438454 - RNA, 19 nt, Artificial Sequence
  Description of Artificial Sequence: Synthetic oligonucleotide
  Sense strand starting at position 626 of SEQ ID NO: 1886959
ucuacuguuugucacuauu

SEQ ID NO: 2438455 - RNA, 19 nt, Artificial Sequence
  Description of Artificial Sequence: Synthetic oligonucleotide
  Antisense strand to SEQ ID NO: 2438454
aauagugacaaacaguaga

SEQ ID NO: 2438456 - RNA, 19 nt, Artificial Sequence
  Description of Artificial Sequence: Synthetic oligonucleotide
  Sense strand starting at position 689 of SEQ ID NO: 1886959
uuuccucucuuggauguaa

SEQ ID NO: 2438457 - RNA, 19 nt, Artificial Sequence
  Description of Artificial Sequence: Synthetic oligonucleotide
  Antisense strand to SEQ ID NO: 2438456
uuacauccaagagaggaaa

SEQ ID NO: 2438458 - RNA, 19 nt, Artificial Sequence
  Description of Artificial Sequence: Synthetic oligonucleotide
  Sense strand starting at position 722 of SEQ ID NO: 1886959
aaaugagcaguuuguacua

SEQ ID NO: 2438459 - RNA, 19 nt, Artificial Sequence
  Description of Artificial Sequence: Synthetic oligonucleotide
  Antisense strand to SEQ ID NO: 2438458
uaguacaaacugcucauuu

SEQ ID NO: 2438460 - RNA, 19 nt, Artificial Sequence
  Description of Artificial Sequence: Synthetic oligonucleotide
  Sense strand starting at position 724 of SEQ ID NO: 1886959
augagcaguuuguacuaaa

SEQ ID NO: 2438461 - RNA, 19 nt, Artificial Sequence
  Description of Artificial Sequence: Synthetic oligonucleotide
  Antisense strand to SEQ ID NO: 2438460
uuuaguacaaacugcucau

SEQ ID NO: 2438462 - RNA, 19 nt, Artificial Sequence
  Description of Artificial Sequence: Synthetic oligonucleotide
  Sense strand starting at position 727 of SEQ ID NO: 1886959
agcaguuuguacuaaauga

SEQ ID NO: 2438463 - RNA, 19 nt, Artificial Sequence
  Description of Artificial Sequence: Synthetic oligonucleotide
  Antisense strand to SEQ ID NO: 2438462
ucauuuaguacaaacugcu

SEQ ID NO: 2438464 - RNA, 19 nt, Artificial Sequence
  Description of Artificial Sequence: Synthetic oligonucleotide
  Sense strand starting at position 924 of SEQ ID NO: 1886959
augaaaucacguggcaaga

SEQ ID NO: 2438465 - RNA, 19 nt, Artificial Sequence
  Description of Artificial Sequence: Synthetic oligonucleotide
  Antisense strand to SEQ ID NO: 2438464
ucuugccacgugauuucau

SEQ ID NO: 2438466 - RNA, 19 nt, Artificial Sequence
  Description of Artificial Sequence: Synthetic oligonucleotide
  Sense strand starting at position 926 of SEQ ID NO: 1886959
gaaaucacguggcaagaau

SEQ ID NO: 2438467 - RNA, 19 nt, Artificial Sequence
  Description of Artificial Sequence: Synthetic oligonucleotide
  Antisense strand to SEQ ID NO: 2438466
auucuugccacgugauuuc

SEQ ID NO: 2438468 - RNA, 19 nt, Artificial Sequence
  Description of Artificial Sequence: Synthetic oligonucleotide
  Sense strand starting at position 934 of SEQ ID NO: 1886959
guggcaagaaugugguuau

SEQ ID NO: 2438469 - RNA, 19 nt, Artificial Sequence
  Description of Artificial Sequence: Synthetic oligonucleotide
  Antisense strand to SEQ ID NO: 2438468
auaaccacauucuugccac

SEQ ID NO: 2438470 - RNA, 19 nt, Artificial Sequence
  Description of Artificial Sequence: Synthetic oligonucleotide
  Sense strand starting at position 935 of SEQ ID NO: 1886959
uggcaagaaugugguuauu

SEQ ID NO: 2438471 - RNA, 19 nt, Artificial Sequence
  Description of Artificial Sequence: Synthetic oligonucleotide
  Antisense strand to SEQ ID NO: 2438470
aauaaccacauucuugcca

SEQ ID NO: 2438472 - RNA, 19 nt, Artificial Sequence
  Description of Artificial Sequence: Synthetic oligonucleotide
  Sense strand starting at position 937 of SEQ ID NO: 1886959
gcaagaaugugguuauucu

SEQ ID NO: 2438473 - RNA, 19 nt, Artificial Sequence
  Description of Artificial Sequence: Synthetic oligonucleotide
  Antisense strand to SEQ ID NO: 2438472
agaauaaccacauucuugc

SEQ ID NO: 2438474 - RNA, 19 nt, Artificial Sequence
  Description of Artificial Sequence: Synthetic oligonucleotide
  Sense strand starting at position 941 of SEQ ID NO: 1886959
gaaugugguuauucugaga

SEQ ID NO: 2438475 - RNA, 19 nt, Artificial Sequence
  Description of Artificial Sequence: Synthetic oligonucleotide
  Antisense strand to SEQ ID NO: 2438474
ucucagaauaaccacauuc

SEQ ID NO: 2438476 - RNA, 19 nt, Artificial Sequence
  Description of Artificial Sequence: Synthetic oligonucleotide
  Sense strand starting at position 944 of SEQ ID NO: 1886959
ugugguuauucugagaaac

SEQ ID NO: 2438477 - RNA, 19 nt, Artificial Sequence
  Description of Artificial Sequence: Synthetic oligonucleotide
  Antisense strand to SEQ ID NO: 2438476
guuucucagaauaaccaca

SEQ ID NO: 2438478 - RNA, 19 nt, Artificial Sequence
  Description of Artificial Sequence: Synthetic oligonucleotide
  Sense strand starting at position 946 of SEQ ID NO: 1886959
ugguuauucugagaaacag

SEQ ID NO: 2438479 - RNA, 19 nt, Artificial Sequence
  Description of Artificial Sequence: Synthetic oligonucleotide
  Antisense strand to SEQ ID NO: 2438478
cuguuucucagaauaacca

SEQ ID NO: 2438480 - RNA, 19 nt, Artificial Sequence
  Description of Artificial Sequence: Synthetic oligonucleotide
  Sense strand starting at position 1012 of SEQ ID NO: 1886959
gguacaugcuggcauacuu

SEQ ID NO: 2438481 - RNA, 19 nt, Artificial Sequence
  Description of Artificial Sequence: Synthetic oligonucleotide
  Antisense strand to SEQ ID NO: 2438480
aaguaugccagcauguacc

SEQ ID NO: 2438482 - RNA, 19 nt, Artificial Sequence
  Description of Artificial Sequence: Synthetic oligonucleotide
  Sense strand starting at position 1032 of SEQ ID NO: 1886959
cagaauagcugcucuguuu

SEQ ID NO: 2438483 - RNA, 19 nt, Artificial Sequence
  Description of Artificial Sequence: Synthetic oligonucleotide
  Antisense strand to SEQ ID NO: 2438482
aaacagagcagcuauucug

SEQ ID NO: 2438484 - RNA, 19 nt, Artificial Sequence
  Description of Artificial Sequence: Synthetic oligonucleotide
  Sense strand starting at position 1279 of SEQ ID NO: 1886959
ccuccucugugcuauuaga

SEQ ID NO: 2438485 - RNA, 19 nt, Artificial Sequence
  Description of Artificial Sequence: Synthetic oligonucleotide
  Antisense strand to SEQ ID NO: 2438484
ucuaauagcacagaggagg

SEQ ID NO: 2438486 - RNA, 19 nt, Artificial Sequence
  Description of Artificial Sequence: Synthetic oligonucleotide
  Sense strand starting at position 1287 of SEQ ID NO: 1886959
gugcuauuagaguaauauu

SEQ ID NO: 2438487 - RNA, 19 nt, Artificial Sequence
  Description of Artificial Sequence: Synthetic oligonucleotide
  Antisense strand to SEQ ID NO: 2438486
aauauuacucuaauagcac

SEQ ID NO: 2438488 - RNA, 19 nt, Artificial Sequence
  Description of Artificial Sequence: Synthetic oligonucleotide
  Sense strand starting at position 1312 of SEQ ID NO: 1886959
augcaaaucugaucaugac

SEQ ID NO: 2438489 - RNA, 19 nt, Artificial Sequence
  Description of Artificial Sequence: Synthetic oligonucleotide
  Antisense strand to SEQ ID NO: 2438488
gucaugaucagauuugcau

SEQ ID NO: 2438490 - RNA, 19 nt, Artificial Sequence
  Description of Artificial Sequence: Synthetic oligonucleotide
  Sense strand starting at position 1912 of SEQ ID NO: 1886959
gccugcacccaaugaaaua

SEQ ID NO: 2438491 - RNA, 19 nt, Artificial Sequence
  Description of Artificial Sequence: Synthetic oligonucleotide
  Antisense strand to SEQ ID NO: 2438490
uauuucauugggugcaggc

SEQ ID NO: 2438492 - RNA, 19 nt, Artificial Sequence
  Description of Artificial Sequence: Synthetic oligonucleotide
  Sense strand starting at position 3031 of SEQ ID NO: 1886959
auacaaacucgucaauagu

SEQ ID NO: 2438493 - RNA, 19 nt, Artificial Sequence
  Description of Artificial Sequence: Synthetic oligonucleotide
  Antisense strand to SEQ ID NO: 2438492
acuauugacgaguuuguau

SEQ ID NO: 2438494 - RNA, 19 nt, Artificial Sequence
  Description of Artificial Sequence: Synthetic oligonucleotide
  Sense strand starting at position 3037 of SEQ ID NO: 1886959
acucgucaauaguuccaaa

SEQ ID NO: 2438495 - RNA, 19 nt, Artificial Sequence
  Description of Artificial Sequence: Synthetic oligonucleotide
  Antisense strand to SEQ ID NO: 2438494
uuuggaacuauugacgagu

SEQ ID NO: 2438496 - RNA, 19 nt, Artificial Sequence
  Description of Artificial Sequence: Synthetic oligonucleotide
  Sense strand starting at position 3040 of SEQ ID NO: 1886959
cgucaauaguuccaaauag

SEQ ID NO: 2438497 - RNA, 19 nt, Artificial Sequence
  Description of Artificial Sequence: Synthetic oligonucleotide
  Antisense strand to SEQ ID NO: 2438496
cuauuuggaacuauugacg

SEQ ID NO: 2438498 - RNA, 19 nt, Artificial Sequence
  Description of Artificial Sequence: Synthetic oligonucleotide
  Sense strand starting at position 3098 of SEQ ID NO: 1886959
ccaaauaauuccugucgua

SEQ ID NO: 2438499 - RNA, 19 nt, Artificial Sequence
  Description of Artificial Sequence: Synthetic oligonucleotide
  Antisense strand to SEQ ID NO: 2438498
uacgacaggaauuauuugg

SEQ ID NO: 2438500 - RNA, 19 nt, Artificial Sequence
  Description of Artificial Sequence: Synthetic oligonucleotide
  Sense strand starting at position 3258 of SEQ ID NO: 1886959
auagcugagucuuucuaau

SEQ ID NO: 2438501 - RNA, 19 nt, Artificial Sequence
  Description of Artificial Sequence: Synthetic oligonucleotide
  Antisense strand to SEQ ID NO: 2438500
auuagaaagacucagcuau

SEQ ID NO: 2438502 - RNA, 19 nt, Artificial Sequence
  Description of Artificial Sequence: Synthetic oligonucleotide
  Sense strand starting at position 46 of SEQ ID NO: 1886960
aggacuaagugagaacaga

SEQ ID NO: 2438503 - RNA, 19 nt, Artificial Sequence
  Description of Artificial Sequence: Synthetic oligonucleotide
  Antisense strand to SEQ ID NO: 2438502
ucuguucucacuuaguccu

SEQ ID NO: 2438504 - RNA, 19 nt, Artificial Sequence
  Description of Artificial Sequence: Synthetic oligonucleotide
  Sense strand starting at position 147 of SEQ ID NO: 1886960
uucuaagacuaagagaaga

SEQ ID NO: 2438505 - RNA, 19 nt, Artificial Sequence
  Description of Artificial Sequence: Synthetic oligonucleotide
  Antisense strand to SEQ ID NO: 2438504
ucuucucuuagucuuagaa

SEQ ID NO: 2438506 - RNA, 19 nt, Artificial Sequence
  Description of Artificial Sequence: Synthetic oligonucleotide
  Sense strand starting at position 228 of SEQ ID NO: 1886960
cuagcauccuagucagaaa

SEQ ID NO: 2438507 - RNA, 19 nt, Artificial Sequence
  Description of Artificial Sequence: Synthetic oligonucleotide
  Antisense strand to SEQ ID NO: 2438506
uuucugacuaggaugcuag

SEQ ID NO: 2438508 - RNA, 19 nt, Artificial Sequence
  Description of Artificial Sequence: Synthetic oligonucleotide
  Sense strand starting at position 255 of SEQ ID NO: 1886960
cucccuccauagucugaua

SEQ ID NO: 2438509 - RNA, 19 nt, Artificial Sequence
  Description of Artificial Sequence: Synthetic oligonucleotide
  Antisense strand to SEQ ID NO: 2438508
uaucagacuauggagggag

SEQ ID NO: 2438510 - RNA, 19 nt, Artificial Sequence
  Description of Artificial Sequence: Synthetic oligonucleotide
  Sense strand starting at position 257 of SEQ ID NO: 1886960
cccuccauagucugauaca

SEQ ID NO: 2438511 - RNA, 19 nt, Artificial Sequence
  Description of Artificial Sequence: Synthetic oligonucleotide
  Antisense strand to SEQ ID NO: 2438510
uguaucagacuauggaggg

SEQ ID NO: 2438512 - RNA, 19 nt, Artificial Sequence
  Description of Artificial Sequence: Synthetic oligonucleotide
  Sense strand starting at position 341 of SEQ ID NO: 1886960
ucucuagcagcugauuaaa

SEQ ID NO: 2438513 - RNA, 19 nt, Artificial Sequence
  Description of Artificial Sequence: Synthetic oligonucleotide
  Antisense strand to SEQ ID NO: 2438512
uuuaaucagcugcuagaga

SEQ ID NO: 2438514 - RNA, 19 nt, Artificial Sequence
  Description of Artificial Sequence: Synthetic oligonucleotide
  Sense strand starting at position 343 of SEQ ID NO: 1886960
ucuagcagcugauuaaauu

SEQ ID NO: 2438515 - RNA, 19 nt, Artificial Sequence
  Description of Artificial Sequence: Synthetic oligonucleotide
  Antisense strand to SEQ ID NO: 2438514
aauuuaaucagcugcuaga

SEQ ID NO: 2438516 - RNA, 19 nt, Artificial Sequence
  Description of Artificial Sequence: Synthetic oligonucleotide
  Sense strand starting at position 378 of SEQ ID NO: 1886960
cauggaacuugcuugagga

SEQ ID NO: 2438517 - RNA, 19 nt, Artificial Sequence
  Description of Artificial Sequence: Synthetic oligonucleotide
  Antisense strand to SEQ ID NO: 2438516
uccucaagcaaguuccaug

SEQ ID NO: 2438518 - RNA, 19 nt, Artificial Sequence
  Description of Artificial Sequence: Synthetic oligonucleotide
  Sense strand starting at position 399 of SEQ ID NO: 1886960
gguggaguaccuggacuau

SEQ ID NO: 2438519 - RNA, 19 nt, Artificial Sequence
  Description of Artificial Sequence: Synthetic oligonucleotide
  Antisense strand to SEQ ID NO: 2438518
auaguccagguacuccacc

SEQ ID NO: 2438520 - RNA, 19 nt, Artificial Sequence
  Description of Artificial Sequence: Synthetic oligonucleotide
  Sense strand starting at position 614 of SEQ ID NO: 1886960
ugccuuggaccaugcaaua

SEQ ID NO: 2438521 - RNA, 19 nt, Artificial Sequence
  Description of Artificial Sequence: Synthetic oligonucleotide
  Antisense strand to SEQ ID NO: 2438520
uauugcaugguccaaggca

SEQ ID NO: 2438522 - RNA, 19 nt, Artificial Sequence
  Description of Artificial Sequence: Synthetic oligonucleotide
  Sense strand starting at position 645 of SEQ ID NO: 1886960
caaguaauccuuuagugag

SEQ ID NO: 2438523 - RNA, 19 nt, Artificial Sequence
  Description of Artificial Sequence: Synthetic oligonucleotide
  Antisense strand to SEQ ID NO: 2438522
cucacuaaaggauuacuug

SEQ ID NO: 2438524 - RNA, 19 nt, Artificial Sequence
  Description of Artificial Sequence: Synthetic oligonucleotide
  Sense strand starting at position 647 of SEQ ID NO: 1886960
aguaauccuuuagugagca

SEQ ID NO: 2438525 - RNA, 19 nt, Artificial Sequence
  Description of Artificial Sequence: Synthetic oligonucleotide
  Antisense strand to SEQ ID NO: 2438524
ugcucacuaaaggauuacu

SEQ ID NO: 2438526 - RNA, 19 nt, Artificial Sequence
  Description of Artificial Sequence: Synthetic oligonucleotide
  Sense strand starting at position 651 of SEQ ID NO: 1886960
auccuuuagugagcacuua

SEQ ID NO: 2438527 - RNA, 19 nt, Artificial Sequence
  Description of Artificial Sequence: Synthetic oligonucleotide
  Antisense strand to SEQ ID NO: 2438526
uaagugcucacuaaaggau

SEQ ID NO: 2438528 - RNA, 19 nt, Artificial Sequence
  Description of Artificial Sequence: Synthetic oligonucleotide
  Sense strand starting at position 652 of SEQ ID NO: 1886960
uccuuuagugagcacuuau

SEQ ID NO: 2438529 - RNA, 19 nt, Artificial Sequence
  Description of Artificial Sequence: Synthetic oligonucleotide
  Antisense strand to SEQ ID NO: 2438528
auaagugcucacuaaagga

SEQ ID NO: 2438530 - RNA, 19 nt, Artificial Sequence
  Description of Artificial Sequence: Synthetic oligonucleotide
  Sense strand starting at position 826 of SEQ ID NO: 1886960
aacucaggcuuguuagaag

SEQ ID NO: 2438531 - RNA, 19 nt, Artificial Sequence
  Description of Artificial Sequence: Synthetic oligonucleotide
  Antisense strand to SEQ ID NO: 2438530
cuucuaacaagccugaguu

SEQ ID NO: 2438532 - RNA, 19 nt, Artificial Sequence
  Description of Artificial Sequence: Synthetic oligonucleotide
  Sense strand starting at position 876 of SEQ ID NO: 1886960
gcaugaggguucccagaag

SEQ ID NO: 2438533 - RNA, 19 nt, Artificial Sequence
  Description of Artificial Sequence: Synthetic oligonucleotide
  Antisense strand to SEQ ID NO: 2438532
cuucugggaacccucaugc

SEQ ID NO: 2438534 - RNA, 19 nt, Artificial Sequence
  Description of Artificial Sequence: Synthetic oligonucleotide
  Sense strand starting at position 890 of SEQ ID NO: 1886960
agaagcuagcucugagaug

SEQ ID NO: 2438535 - RNA, 19 nt, Artificial Sequence
  Description of Artificial Sequence: Synthetic oligonucleotide
  Antisense strand to SEQ ID NO: 2438534
caucucagagcuagcuucu

SEQ ID NO: 2438536 - RNA, 19 nt, Artificial Sequence
  Description of Artificial Sequence: Synthetic oligonucleotide
  Sense strand starting at position 895 of SEQ ID NO: 1886960
cuagcucugagauggagau

SEQ ID NO: 2438537 - RNA, 19 nt, Artificial Sequence
  Description of Artificial Sequence: Synthetic oligonucleotide
  Antisense strand to SEQ ID NO: 2438536
aucuccaucucagagcuag

SEQ ID NO: 2438538 - RNA, 19 nt, Artificial Sequence
  Description of Artificial Sequence: Synthetic oligonucleotide
  Sense strand starting at position 896 of SEQ ID NO: 1886960
uagcucugagauggagauu

SEQ ID NO: 2438539 - RNA, 19 nt, Artificial Sequence
  Description of Artificial Sequence: Synthetic oligonucleotide
  Antisense strand to SEQ ID NO: 2438538
aaucuccaucucagagcua

SEQ ID NO: 2438540 - RNA, 19 nt, Artificial Sequence
  Description of Artificial Sequence: Synthetic oligonucleotide
  Sense strand starting at position 920 of SEQ ID NO: 1886960
gcaggagauuuacgaggaa

SEQ ID NO: 2438541 - RNA, 19 nt, Artificial Sequence
  Description of Artificial Sequence: Synthetic oligonucleotide
  Antisense strand to SEQ ID NO: 2438540
uuccucguaaaucuccugc

SEQ ID NO: 2438542 - RNA, 19 nt, Artificial Sequence
  Description of Artificial Sequence: Synthetic oligonucleotide
  Sense strand starting at position 934 of SEQ ID NO: 1886960
aggaaugugcuucggauca

SEQ ID NO: 2438543 - RNA, 19 nt, Artificial Sequence
  Description of Artificial Sequence: Synthetic oligonucleotide
  Antisense strand to SEQ ID NO: 2438542
ugauccgaagcacauuccu

SEQ ID NO: 2438544 - RNA, 19 nt, Artificial Sequence
  Description of Artificial Sequence: Synthetic oligonucleotide
  Sense strand starting at position 946 of SEQ ID NO: 1886960
cggaucaacaccuguggaa

SEQ ID NO: 2438545 - RNA, 19 nt, Artificial Sequence
  Description of Artificial Sequence: Synthetic oligonucleotide
  Antisense strand to SEQ ID NO: 2438544
uuccacagguguugauccg

SEQ ID NO: 2438546 - RNA, 19 nt, Artificial Sequence
  Description of Artificial Sequence: Synthetic oligonucleotide
  Sense strand starting at position 1337 of SEQ ID NO: 1886960
uagagaugugcacaggguu

SEQ ID NO: 2438547 - RNA, 19 nt, Artificial Sequence
  Description of Artificial Sequence: Synthetic oligonucleotide
  Antisense strand to SEQ ID NO: 2438546
aacccugugcacaucucua

SEQ ID NO: 2438548 - RNA, 19 nt, Artificial Sequence
  Description of Artificial Sequence: Synthetic oligonucleotide
  Sense strand starting at position 1813 of SEQ ID NO: 1886960
cagauaggguuaucuuagu

SEQ ID NO: 2438549 - RNA, 19 nt, Artificial Sequence
  Description of Artificial Sequence: Synthetic oligonucleotide
  Antisense strand to SEQ ID NO: 2438548
acuaagauaacccuaucug

SEQ ID NO: 2438550 - RNA, 19 nt, Artificial Sequence
  Description of Artificial Sequence: Synthetic oligonucleotide
  Sense strand starting at position 1818 of SEQ ID NO: 1886960
aggguuaucuuaguuaauu

SEQ ID NO: 2438551 - RNA, 19 nt, Artificial Sequence
  Description of Artificial Sequence: Synthetic oligonucleotide
  Antisense strand to SEQ ID NO: 2438550
aauuaacuaagauaacccu

SEQ ID NO: 2438552 - RNA, 19 nt, Artificial Sequence
  Description of Artificial Sequence: Synthetic oligonucleotide
  Sense strand starting at position 1860 of SEQ ID NO: 1886960
gacagaguggcuuguaaac

SEQ ID NO: 2438553 - RNA, 19 nt, Artificial Sequence
  Description of Artificial Sequence: Synthetic oligonucleotide
  Antisense strand to SEQ ID NO: 2438552
guuuacaagccacucuguc

SEQ ID NO: 2438554 - RNA, 19 nt, Artificial Sequence
  Description of Artificial Sequence: Synthetic oligonucleotide
  Sense strand starting at position 1889 of SEQ ID NO: 1886960
gacuucuuauaguucugga

SEQ ID NO: 2438555 - RNA, 19 nt, Artificial Sequence
  Description of Artificial Sequence: Synthetic oligonucleotide
  Antisense strand to SEQ ID NO: 2438554
uccagaacuauaagaaguc

SEQ ID NO: 2438556 - RNA, 19 nt, Artificial Sequence
  Description of Artificial Sequence: Synthetic oligonucleotide
  Sense strand starting at position 2405 of SEQ ID NO: 1886960
guagaaagauuugggaaga

SEQ ID NO: 2438557 - RNA, 19 nt, Artificial Sequence
  Description of Artificial Sequence: Synthetic oligonucleotide
  Antisense strand to SEQ ID NO: 2438556
ucuucccaaaucuuucuac

SEQ ID NO: 2438558 - RNA, 19 nt, Artificial Sequence
  Description of Artificial Sequence: Synthetic oligonucleotide
  Sense strand starting at position 2424 of SEQ ID NO: 1886960
aggugugaucagcagaaag

SEQ ID NO: 2438559 - RNA, 19 nt, Artificial Sequence
  Description of Artificial Sequence: Synthetic oligonucleotide
  Antisense strand to SEQ ID NO: 2438558
cuuucugcugaucacaccu

SEQ ID NO: 2438560 - RNA, 19 nt, Artificial Sequence
  Description of Artificial Sequence: Synthetic oligonucleotide
  Sense strand starting at position 2426 of SEQ ID NO: 1886960
gugugaucagcagaaagca

SEQ ID NO: 2438561 - RNA, 19 nt, Artificial Sequence
  Description of Artificial Sequence: Synthetic oligonucleotide
  Antisense strand to SEQ ID NO: 2438560
ugcuuucugcugaucacac

SEQ ID NO: 2438562 - RNA, 19 nt, Artificial Sequence
  Description of Artificial Sequence: Synthetic oligonucleotide
  Sense strand starting at position 2819 of SEQ ID NO: 1886960
agguaaagaguuugcccau

SEQ ID NO: 2438563 - RNA, 19 nt, Artificial Sequence
  Description of Artificial Sequence: Synthetic oligonucleotide
  Antisense strand to SEQ ID NO: 2438562
augggcaaacucuuuaccu

SEQ ID NO: 2438564 - RNA, 19 nt, Artificial Sequence
  Description of Artificial Sequence: Synthetic oligonucleotide
  Sense strand starting at position 2822 of SEQ ID NO: 1886960
uaaagaguuugcccaugga

SEQ ID NO: 2438565 - RNA, 19 nt, Artificial Sequence
  Description of Artificial Sequence: Synthetic oligonucleotide
  Antisense strand to SEQ ID NO: 2438564
uccaugggcaaacucuuua

SEQ ID NO: 2438566 - RNA, 19 nt, Artificial Sequence
  Description of Artificial Sequence: Synthetic oligonucleotide
  Sense strand starting at position 2825 of SEQ ID NO: 1886960
agaguuugcccauggagaa

SEQ ID NO: 2438567 - RNA, 19 nt, Artificial Sequence
  Description of Artificial Sequence: Synthetic oligonucleotide
  Antisense strand to SEQ ID NO: 2438566
uucuccaugggcaaacucu

SEQ ID NO: 2438568 - RNA, 19 nt, Artificial Sequence
  Description of Artificial Sequence: Synthetic oligonucleotide
  Sense strand starting at position 2826 of SEQ ID NO: 1886960
gaguuugcccauggagaag

SEQ ID NO: 2438569 - RNA, 19 nt, Artificial Sequence
  Description of Artificial Sequence: Synthetic oligonucleotide
  Antisense strand to SEQ ID NO: 2438568
cuucuccaugggcaaacuc

SEQ ID NO: 2438570 - RNA, 19 nt, Artificial Sequence
  Description of Artificial Sequence: Synthetic oligonucleotide
  Sense strand starting at position 2921 of SEQ ID NO: 1886960
ggcacaagggaguaauugu

SEQ ID NO: 2438571 - RNA, 19 nt, Artificial Sequence
  Description of Artificial Sequence: Synthetic oligonucleotide
  Antisense strand to SEQ ID NO: 2438570
acaauuacucccuugugcc

SEQ ID NO: 2438572 - RNA, 19 nt, Artificial Sequence
  Description of Artificial Sequence: Synthetic oligonucleotide
  Sense strand starting at position 2931 of SEQ ID NO: 1886960
aguaauugucagggaucca

SEQ ID NO: 2438573 - RNA, 19 nt, Artificial Sequence
  Description of Artificial Sequence: Synthetic oligonucleotide
  Antisense strand to SEQ ID NO: 2438572
uggaucccugacaauuacu

SEQ ID NO: 2438574 - RNA, 19 nt, Artificial Sequence
  Description of Artificial Sequence: Synthetic oligonucleotide
  Sense strand starting at position 3131 of SEQ ID NO: 1886960
gguaccuuggaaugugaau

SEQ ID NO: 2438575 - RNA, 19 nt, Artificial Sequence
  Description of Artificial Sequence: Synthetic oligonucleotide
  Antisense strand to SEQ ID NO: 2438574
auucacauuccaagguacc

SEQ ID NO: 2438576 - RNA, 19 nt, Artificial Sequence
  Description of Artificial Sequence: Synthetic oligonucleotide
  Sense strand starting at position 3227 of SEQ ID NO: 1886960
guguguuuacaagagauua

SEQ ID NO: 2438577 - RNA, 19 nt, Artificial Sequence
  Description of Artificial Sequence: Synthetic oligonucleotide
  Antisense strand to SEQ ID NO: 2438576
uaaucucuuguaaacacac

SEQ ID NO: 2438578 - RNA, 19 nt, Artificial Sequence
  Description of Artificial Sequence: Synthetic oligonucleotide
  Sense strand starting at position 3341 of SEQ ID NO: 1886960
ccucccaaucugugagaaa

SEQ ID NO: 2438579 - RNA, 19 nt, Artificial Sequence
  Description of Artificial Sequence: Synthetic oligonucleotide
  Antisense strand to SEQ ID NO: 2438578
uuucucacagauugggagg

SEQ ID NO: 2438580 - RNA, 19 nt, Artificial Sequence
  Description of Artificial Sequence: Synthetic oligonucleotide
  Sense strand starting at position 3441 of SEQ ID NO: 1886960
uuucuucucucaguagauu

SEQ ID NO: 2438581 - RNA, 19 nt, Artificial Sequence
  Description of Artificial Sequence: Synthetic oligonucleotide
  Antisense strand to SEQ ID NO: 2438580
aaucuacugagagaagaaa

SEQ ID NO: 2438582 - RNA, 19 nt, Artificial Sequence
  Description of Artificial Sequence: Synthetic oligonucleotide
  Sense strand starting at position 246 of SEQ ID NO: 1886961
cugcuugguaaauaguaga

SEQ ID NO: 2438583 - RNA, 19 nt, Artificial Sequence
  Description of Artificial Sequence: Synthetic oligonucleotide
  Antisense strand to SEQ ID NO: 2438582
ucuacuauuuaccaagcag

SEQ ID NO: 2438584 - RNA, 19 nt, Artificial Sequence
  Description of Artificial Sequence: Synthetic oligonucleotide
  Sense strand starting at position 257 of SEQ ID NO: 1886961
auaguagaugcuuaauguu

SEQ ID NO: 2438585 - RNA, 19 nt, Artificial Sequence
  Description of Artificial Sequence: Synthetic oligonucleotide
  Antisense strand to SEQ ID NO: 2438584
aacauuaagcaucuacuau

SEQ ID NO: 2438586 - RNA, 19 nt, Artificial Sequence
  Description of Artificial Sequence: Synthetic oligonucleotide
  Sense strand starting at position 376 of SEQ ID NO: 1886961
agaucaguuguggaagcua

SEQ ID NO: 2438587 - RNA, 19 nt, Artificial Sequence
  Description of Artificial Sequence: Synthetic oligonucleotide
  Antisense strand to SEQ ID NO: 2438586
uagcuuccacaacugaucu

SEQ ID NO: 2438588 - RNA, 19 nt, Artificial Sequence
  Description of Artificial Sequence: Synthetic oligonucleotide
  Sense strand starting at position 387 of SEQ ID NO: 1886961
ggaagcuagcaucgggaaa

SEQ ID NO: 2438589 - RNA, 19 nt, Artificial Sequence
  Description of Artificial Sequence: Synthetic oligonucleotide
  Antisense strand to SEQ ID NO: 2438588
uuucccgaugcuagcuucc

SEQ ID NO: 2438590 - RNA, 19 nt, Artificial Sequence
  Description of Artificial Sequence: Synthetic oligonucleotide
  Sense strand starting at position 400 of SEQ ID NO: 1886961
gggaaaggcuuugugaacu

SEQ ID NO: 2438591 - RNA, 19 nt, Artificial Sequence
  Description of Artificial Sequence: Synthetic oligonucleotide
  Antisense strand to SEQ ID NO: 2438590
aguucacaaagccuuuccc

SEQ ID NO: 2438592 - RNA, 19 nt, Artificial Sequence
  Description of Artificial Sequence: Synthetic oligonucleotide
  Sense strand starting at position 542 of SEQ ID NO: 1886961
gggucuaugauuggauucu

SEQ ID NO: 2438593 - RNA, 19 nt, Artificial Sequence
  Description of Artificial Sequence: Synthetic oligonucleotide
  Antisense strand to SEQ ID NO: 2438592
agaauccaaucauagaccc

SEQ ID NO: 2438594 - RNA, 19 nt, Artificial Sequence
  Description of Artificial Sequence: Synthetic oligonucleotide
  Sense strand starting at position 680 of SEQ ID NO: 1886961
guugacaaccauggacauu

SEQ ID NO: 2438595 - RNA, 19 nt, Artificial Sequence
  Description of Artificial Sequence: Synthetic oligonucleotide
  Antisense strand to SEQ ID NO: 2438594
aauguccaugguugucaac

SEQ ID NO: 2438596 - RNA, 19 nt, Artificial Sequence
  Description of Artificial Sequence: Synthetic oligonucleotide
  Sense strand starting at position 730 of SEQ ID NO: 1886961
cuuuauauccauuaugugu

SEQ ID NO: 2438597 - RNA, 19 nt, Artificial Sequence
  Description of Artificial Sequence: Synthetic oligonucleotide
  Antisense strand to SEQ ID NO: 2438596
acacauaauggauauaaag

SEQ ID NO: 2438598 - RNA, 19 nt, Artificial Sequence
  Description of Artificial Sequence: Synthetic oligonucleotide
  Sense strand starting at position 736 of SEQ ID NO: 1886961
auccauuauguguauaugu

SEQ ID NO: 2438599 - RNA, 19 nt, Artificial Sequence
  Description of Artificial Sequence: Synthetic oligonucleotide
  Antisense strand to SEQ ID NO: 2438598
acauauacacauaauggau

SEQ ID NO: 2438600 - RNA, 19 nt, Artificial Sequence
  Description of Artificial Sequence: Synthetic oligonucleotide
  Sense strand starting at position 792 of SEQ ID NO: 1886961
ugccuaguuauggauagca

SEQ ID NO: 2438601 - RNA, 19 nt, Artificial Sequence
  Description of Artificial Sequence: Synthetic oligonucleotide
  Antisense strand to SEQ ID NO: 2438600
ugcuauccauaacuaggca

SEQ ID NO: 2438602 - RNA, 19 nt, Artificial Sequence
  Description of Artificial Sequence: Synthetic oligonucleotide
  Sense strand starting at position 794 of SEQ ID NO: 1886961
ccuaguuauggauagcacu

SEQ ID NO: 2438603 - RNA, 19 nt, Artificial Sequence
  Description of Artificial Sequence: Synthetic oligonucleotide
  Antisense strand to SEQ ID NO: 2438602
agugcuauccauaacuagg

SEQ ID NO: 2438604 - RNA, 19 nt, Artificial Sequence
  Description of Artificial Sequence: Synthetic oligonucleotide
  Sense strand starting at position 955 of SEQ ID NO: 1886961
ccugccuuucccuauggaa

SEQ ID NO: 2438605 - RNA, 19 nt, Artificial Sequence
  Description of Artificial Sequence: Synthetic oligonucleotide
  Antisense strand to SEQ ID NO: 2438604
uuccauagggaaaggcagg

SEQ ID NO: 2438606 - RNA, 19 nt, Artificial Sequence
  Description of Artificial Sequence: Synthetic oligonucleotide
  Sense strand starting at position 982 of SEQ ID NO: 1886961
cuccauuucuguuugcaca

SEQ ID NO: 2438607 - RNA, 19 nt, Artificial Sequence
  Description of Artificial Sequence: Synthetic oligonucleotide
  Antisense strand to SEQ ID NO: 2438606
ugugcaaacagaaauggag

SEQ ID NO: 2438608 - RNA, 19 nt, Artificial Sequence
  Description of Artificial Sequence: Synthetic oligonucleotide
  Sense strand starting at position 1130 of SEQ ID NO: 1886961
caaggacagugccugauua

SEQ ID NO: 2438609 - RNA, 19 nt, Artificial Sequence
  Description of Artificial Sequence: Synthetic oligonucleotide
  Antisense strand to SEQ ID NO: 2438608
uaaucaggcacuguccuug

SEQ ID NO: 2438610 - RNA, 19 nt, Artificial Sequence
  Description of Artificial Sequence: Synthetic oligonucleotide
  Sense strand starting at position 1131 of SEQ ID NO: 1886961
aaggacagugccugauuau

SEQ ID NO: 2438611 - RNA, 19 nt, Artificial Sequence
  Description of Artificial Sequence: Synthetic oligonucleotide
  Antisense strand to SEQ ID NO: 2438610
auaaucaggcacuguccuu

SEQ ID NO: 2438612 - RNA, 19 nt, Artificial Sequence
  Description of Artificial Sequence: Synthetic oligonucleotide
  Sense strand starting at position 1132 of SEQ ID NO: 1886961
aggacagugccugauuaug

SEQ ID NO: 2438613 - RNA, 19 nt, Artificial Sequence
  Description of Artificial Sequence: Synthetic oligonucleotide
  Antisense strand to SEQ ID NO: 2438612
cauaaucaggcacuguccu

SEQ ID NO: 2438614 - RNA, 19 nt, Artificial Sequence
  Description of Artificial Sequence: Synthetic oligonucleotide
  Sense strand starting at position 1134 of SEQ ID NO: 1886961
gacagugccugauuaugau

SEQ ID NO: 2438615 - RNA, 19 nt, Artificial Sequence
  Description of Artificial Sequence: Synthetic oligonucleotide
  Antisense strand to SEQ ID NO: 2438614
aucauaaucaggcacuguc

SEQ ID NO: 2438616 - RNA, 19 nt, Artificial Sequence
  Description of Artificial Sequence: Synthetic oligonucleotide
  Sense strand starting at position 1143 of SEQ ID NO: 1886961
ugauuaugaugucugagaa

SEQ ID NO: 2438617 - RNA, 19 nt, Artificial Sequence
  Description of Artificial Sequence: Synthetic oligonucleotide
  Antisense strand to SEQ ID NO: 2438616
uucucagacaucauaauca

SEQ ID NO: 2438618 - RNA, 19 nt, Artificial Sequence
  Description of Artificial Sequence: Synthetic oligonucleotide
  Sense strand starting at position 1482 of SEQ ID NO: 1886961
cgaguaagagcucacucau

SEQ ID NO: 2438619 - RNA, 19 nt, Artificial Sequence
  Description of Artificial Sequence: Synthetic oligonucleotide
  Antisense strand to SEQ ID NO: 2438618
augagugagcucuuacucg

SEQ ID NO: 2438620 - RNA, 19 nt, Artificial Sequence
  Description of Artificial Sequence: Synthetic oligonucleotide
  Sense strand starting at position 1631 of SEQ ID NO: 1886961
cuauaugacuaccugaguu

SEQ ID NO: 2438621 - RNA, 19 nt, Artificial Sequence
  Description of Artificial Sequence: Synthetic oligonucleotide
  Antisense strand to SEQ ID NO: 2438620
aacucagguagucauauag

SEQ ID NO: 2438622 - RNA, 19 nt, Artificial Sequence
  Description of Artificial Sequence: Synthetic oligonucleotide
  Sense strand starting at position 1667 of SEQ ID NO: 1886961
gcuuguaccagugagggaa

SEQ ID NO: 2438623 - RNA, 19 nt, Artificial Sequence
  Description of Artificial Sequence: Synthetic oligonucleotide
  Antisense strand to SEQ ID NO: 2438622
uucccucacugguacaagc

SEQ ID NO: 2438624 - RNA, 19 nt, Artificial Sequence
  Description of Artificial Sequence: Synthetic oligonucleotide
  Sense strand starting at position 1921 of SEQ ID NO: 1886961
agauguuagaacugaguag

SEQ ID NO: 2438625 - RNA, 19 nt, Artificial Sequence
  Description of Artificial Sequence: Synthetic oligonucleotide
  Antisense strand to SEQ ID NO: 2438624
cuacucaguucuaacaucu

SEQ ID NO: 2438626 - RNA, 19 nt, Artificial Sequence
  Description of Artificial Sequence: Synthetic oligonucleotide
  Sense strand starting at position 1925 of SEQ ID NO: 1886961
guuagaacugaguagaggu

SEQ ID NO: 2438627 - RNA, 19 nt, Artificial Sequence
  Description of Artificial Sequence: Synthetic oligonucleotide
  Antisense strand to SEQ ID NO: 2438626
accucuacucaguucuaac

SEQ ID NO: 2438628 - RNA, 19 nt, Artificial Sequence
  Description of Artificial Sequence: Synthetic oligonucleotide
  Sense strand starting at position 2220 of SEQ ID NO: 1886961
cuuuguugccgucuugcaa

SEQ ID NO: 2438629 - RNA, 19 nt, Artificial Sequence
  Description of Artificial Sequence: Synthetic oligonucleotide
  Antisense strand to SEQ ID NO: 2438628
uugcaagacggcaacaaag

SEQ ID NO: 2438630 - RNA, 19 nt, Artificial Sequence
  Description of Artificial Sequence: Synthetic oligonucleotide
  Sense strand starting at position 2221 of SEQ ID NO: 1886961
uuuguugccgucuugcaaa

SEQ ID NO: 2438631 - RNA, 19 nt, Artificial Sequence
  Description of Artificial Sequence: Synthetic oligonucleotide
  Antisense strand to SEQ ID NO: 2438630
uuugcaagacggcaacaaa

SEQ ID NO: 2438632 - RNA, 19 nt, Artificial Sequence
  Description of Artificial Sequence: Synthetic oligonucleotide
  Sense strand starting at position 2245 of SEQ ID NO: 1886961
gucauuguuggucaaagga

SEQ ID NO: 2438633 - RNA, 19 nt, Artificial Sequence
  Description of Artificial Sequence: Synthetic oligonucleotide
  Antisense strand to SEQ ID NO: 2438632
uccuuugaccaacaaugac

SEQ ID NO: 2438634 - RNA, 19 nt, Artificial Sequence
  Description of Artificial Sequence: Synthetic oligonucleotide
  Sense strand starting at position 2347 of SEQ ID NO: 1886961
ggaguugaacucugaucaa

SEQ ID NO: 2438635 - RNA, 19 nt, Artificial Sequence
  Description of Artificial Sequence: Synthetic oligonucleotide
  Antisense strand to SEQ ID NO: 2438634
uugaucagaguucaacucc

SEQ ID NO: 2438636 - RNA, 19 nt, Artificial Sequence
  Description of Artificial Sequence: Synthetic oligonucleotide
  Sense strand starting at position 2421 of SEQ ID NO: 1886961
cccgaaucuugauuauaaa

SEQ ID NO: 2438637 - RNA, 19 nt, Artificial Sequence
  Description of Artificial Sequence: Synthetic oligonucleotide
  Antisense strand to SEQ ID NO: 2438636
uuuauaaucaagauucggg

SEQ ID NO: 2438638 - RNA, 19 nt, Artificial Sequence
  Description of Artificial Sequence: Synthetic oligonucleotide
  Sense strand starting at position 2481 of SEQ ID NO: 1886961
uccagaaaggcuugugauu

SEQ ID NO: 2438639 - RNA, 19 nt, Artificial Sequence
  Description of Artificial Sequence: Synthetic oligonucleotide
  Antisense strand to SEQ ID NO: 2438638
aaucacaagccuuucugga

SEQ ID NO: 2438640 - RNA, 19 nt, Artificial Sequence
  Description of Artificial Sequence: Synthetic oligonucleotide
  Sense strand starting at position 2573 of SEQ ID NO: 1886961
cagggagguaugugugaca

SEQ ID NO: 2438641 - RNA, 19 nt, Artificial Sequence
  Description of Artificial Sequence: Synthetic oligonucleotide
  Antisense strand to SEQ ID NO: 2438640
ugucacacauaccucccug

SEQ ID NO: 2438642 - RNA, 19 nt, Artificial Sequence
  Description of Artificial Sequence: Synthetic oligonucleotide
  Sense strand starting at position 3051 of SEQ ID NO: 1886961
ccuguuuggagugagaaau

SEQ ID NO: 2438643 - RNA, 19 nt, Artificial Sequence
  Description of Artificial Sequence: Synthetic oligonucleotide
  Antisense strand to SEQ ID NO: 2438642
auuucucacuccaaacagg

SEQ ID NO: 2438644 - RNA, 19 nt, Artificial Sequence
  Description of Artificial Sequence: Synthetic oligonucleotide
  Sense strand starting at position 3108 of SEQ ID NO: 1886961
uuccuuguccuggauggua

SEQ ID NO: 2438645 - RNA, 19 nt, Artificial Sequence
  Description of Artificial Sequence: Synthetic oligonucleotide
  Antisense strand to SEQ ID NO: 2438644
uaccauccaggacaaggaa

SEQ ID NO: 2438646 - RNA, 19 nt, Artificial Sequence
  Description of Artificial Sequence: Synthetic oligonucleotide
  Sense strand starting at position 3481 of SEQ ID NO: 1886961
gcagaucgggauuaacauc

SEQ ID NO: 2438647 - RNA, 19 nt, Artificial Sequence
  Description of Artificial Sequence: Synthetic oligonucleotide
  Antisense strand to SEQ ID NO: 2438646
gauguuaaucccgaucugc

SEQ ID NO: 2438648 - RNA, 19 nt, Artificial Sequence
  Description of Artificial Sequence: Synthetic oligonucleotide
  Sense strand starting at position 3569 of SEQ ID NO: 1886961
cuccgugggauggauauau

SEQ ID NO: 2438649 - RNA, 19 nt, Artificial Sequence
  Description of Artificial Sequence: Synthetic oligonucleotide
  Antisense strand to SEQ ID NO: 2438648
auauauccaucccacggag

SEQ ID NO: 2438650 - RNA, 19 nt, Artificial Sequence
  Description of Artificial Sequence: Synthetic oligonucleotide
  Sense strand starting at position 3573 of SEQ ID NO: 1886961
gugggauggauauauagcu

SEQ ID NO: 2438651 - RNA, 19 nt, Artificial Sequence
  Description of Artificial Sequence: Synthetic oligonucleotide
  Antisense strand to SEQ ID NO: 2438650
agcuauauauccaucccac

SEQ ID NO: 2438652 - RNA, 19 nt, Artificial Sequence
  Description of Artificial Sequence: Synthetic oligonucleotide
  Sense strand starting at position 3626 of SEQ ID NO: 1886961
gcguauggaagguaaagua

SEQ ID NO: 2438653 - RNA, 19 nt, Artificial Sequence
  Description of Artificial Sequence: Synthetic oligonucleotide
  Antisense strand to SEQ ID NO: 2438652
uacuuuaccuuccauacgc

SEQ ID NO: 2438654 - RNA, 19 nt, Artificial Sequence
  Description of Artificial Sequence: Synthetic oligonucleotide
  Sense strand starting at position 3661 of SEQ ID NO: 1886961
cguacugagacugauaacu

SEQ ID NO: 2438655 - RNA, 19 nt, Artificial Sequence
  Description of Artificial Sequence: Synthetic oligonucleotide
  Antisense strand to SEQ ID NO: 2438654
aguuaucagucucaguacg

SEQ ID NO: 2438656 - RNA, 19 nt, Artificial Sequence
  Description of Artificial Sequence: Synthetic oligonucleotide
  Sense strand starting at position 3669 of SEQ ID NO: 1886961
gacugauaacugugcuaug

SEQ ID NO: 2438657 - RNA, 19 nt, Artificial Sequence
  Description of Artificial Sequence: Synthetic oligonucleotide
  Antisense strand to SEQ ID NO: 2438656
cauagcacaguuaucaguc

SEQ ID NO: 2438658 - RNA, 19 nt, Artificial Sequence
  Description of Artificial Sequence: Synthetic oligonucleotide
  Sense strand starting at position 3670 of SEQ ID NO: 1886961
acugauaacugugcuauga

SEQ ID NO: 2438659 - RNA, 19 nt, Artificial Sequence
  Description of Artificial Sequence: Synthetic oligonucleotide
  Antisense strand to SEQ ID NO: 2438658
ucauagcacaguuaucagu

SEQ ID NO: 2438660 - RNA, 19 nt, Artificial Sequence
  Description of Artificial Sequence: Synthetic oligonucleotide
  Sense strand starting at position 3702 of SEQ ID NO: 1886961
ugcccucauguuuaugaaa

SEQ ID NO: 2438661 - RNA, 19 nt, Artificial Sequence
  Description of Artificial Sequence: Synthetic oligonucleotide
  Antisense strand to SEQ ID NO: 2438660
uuucauaaacaugagggca

SEQ ID NO: 2438662 - RNA, 19 nt, Artificial Sequence
  Description of Artificial Sequence: Synthetic oligonucleotide
  Sense strand starting at position 130 of SEQ ID NO: 1886962
ggcuguacccuggaucacu

SEQ ID NO: 2438663 - RNA, 19 nt, Artificial Sequence
  Description of Artificial Sequence: Synthetic oligonucleotide
  Antisense strand to SEQ ID NO: 2438662
agugauccaggguacagcc

SEQ ID NO: 2438664 - RNA, 19 nt, Artificial Sequence
  Description of Artificial Sequence: Synthetic oligonucleotide
  Sense strand starting at position 304 of SEQ ID NO: 1886962
guccuuccucuuuggagaa

SEQ ID NO: 2438665 - RNA, 19 nt, Artificial Sequence
  Description of Artificial Sequence: Synthetic oligonucleotide
  Antisense strand to SEQ ID NO: 2438664
uucuccaaagaggaaggac

SEQ ID NO: 2438666 - RNA, 19 nt, Artificial Sequence
  Description of Artificial Sequence: Synthetic oligonucleotide
  Sense strand starting at position 311 of SEQ ID NO: 1886962
cucuuuggagaaugguuaa

SEQ ID NO: 2438667 - RNA, 19 nt, Artificial Sequence
  Description of Artificial Sequence: Synthetic oligonucleotide
  Antisense strand to SEQ ID NO: 2438666
uuaaccauucuccaaagag

SEQ ID NO: 2438668 - RNA, 19 nt, Artificial Sequence
  Description of Artificial Sequence: Synthetic oligonucleotide
  Sense strand starting at position 400 of SEQ ID NO: 1886962
auuccugagcuuuacggaa

SEQ ID NO: 2438669 - RNA, 19 nt, Artificial Sequence
  Description of Artificial Sequence: Synthetic oligonucleotide
  Antisense strand to SEQ ID NO: 2438668
uuccguaaagcucaggaau

SEQ ID NO: 2438670 - RNA, 19 nt, Artificial Sequence
  Description of Artificial Sequence: Synthetic oligonucleotide
  Sense strand starting at position 650 of SEQ ID NO: 1886962
ugcauuugaggguguuuau

SEQ ID NO: 2438671 - RNA, 19 nt, Artificial Sequence
  Description of Artificial Sequence: Synthetic oligonucleotide
  Antisense strand to SEQ ID NO: 2438670
auaaacacccucaaaugca

SEQ ID NO: 2438672 - RNA, 19 nt, Artificial Sequence
  Description of Artificial Sequence: Synthetic oligonucleotide
  Sense strand starting at position 967 of SEQ ID NO: 1886962
ccaagucaaugcuuccaga

SEQ ID NO: 2438673 - RNA, 19 nt, Artificial Sequence
  Description of Artificial Sequence: Synthetic oligonucleotide
  Antisense strand to SEQ ID NO: 2438672
ucuggaagcauugacuugg

SEQ ID NO: 2438674 - RNA, 19 nt, Artificial Sequence
  Description of Artificial Sequence: Synthetic oligonucleotide
  Sense strand starting at position 1031 of SEQ ID NO: 1886962
gagagucuuuaugcaugga

SEQ ID NO: 2438675 - RNA, 19 nt, Artificial Sequence
  Description of Artificial Sequence: Synthetic oligonucleotide
  Antisense strand to SEQ ID NO: 2438674
uccaugcauaaagacucuc

SEQ ID NO: 2438676 - RNA, 19 nt, Artificial Sequence
  Description of Artificial Sequence: Synthetic oligonucleotide
  Sense strand starting at position 1032 of SEQ ID NO: 1886962
agagucuuuaugcauggau

SEQ ID NO: 2438677 - RNA, 19 nt, Artificial Sequence
  Description of Artificial Sequence: Synthetic oligonucleotide
  Antisense strand to SEQ ID NO: 2438676
auccaugcauaaagacucu

SEQ ID NO: 2438678 - RNA, 19 nt, Artificial Sequence
  Description of Artificial Sequence: Synthetic oligonucleotide
  Sense strand starting at position 1118 of SEQ ID NO: 1886962
acugguccucagugagauc

SEQ ID NO: 2438679 - RNA, 19 nt, Artificial Sequence
  Description of Artificial Sequence: Synthetic oligonucleotide
  Antisense strand to SEQ ID NO: 2438678
gaucucacugaggaccagu

SEQ ID NO: 2438680 - RNA, 19 nt, Artificial Sequence
  Description of Artificial Sequence: Synthetic oligonucleotide
  Sense strand starting at position 1251 of SEQ ID NO: 1886962
agcugucuccugggaacaa

SEQ ID NO: 2438681 - RNA, 19 nt, Artificial Sequence
  Description of Artificial Sequence: Synthetic oligonucleotide
  Antisense strand to SEQ ID NO: 2438680
uuguucccaggagacagcu

SEQ ID NO: 2438682 - RNA, 19 nt, Artificial Sequence
  Description of Artificial Sequence: Synthetic oligonucleotide
  Sense strand starting at position 1395 of SEQ ID NO: 1886962
gccagcuaacuggacaaua

SEQ ID NO: 2438683 - RNA, 19 nt, Artificial Sequence
  Description of Artificial Sequence: Synthetic oligonucleotide
  Antisense strand to SEQ ID NO: 2438682
uauuguccaguuagcuggc

SEQ ID NO: 2438684 - RNA, 19 nt, Artificial Sequence
  Description of Artificial Sequence: Synthetic oligonucleotide
  Sense strand starting at position 1748 of SEQ ID NO: 1886962
gccugcauugcgucuuuaa

SEQ ID NO: 2438685 - RNA, 19 nt, Artificial Sequence
  Description of Artificial Sequence: Synthetic oligonucleotide
  Antisense strand to SEQ ID NO: 2438684
uuaaagacgcaaugcaggc

SEQ ID NO: 2438686 - RNA, 19 nt, Artificial Sequence
  Description of Artificial Sequence: Synthetic oligonucleotide
  Sense strand starting at position 1952 of SEQ ID NO: 1886962
cacugacuugagugguaau

SEQ ID NO: 2438687 - RNA, 19 nt, Artificial Sequence
  Description of Artificial Sequence: Synthetic oligonucleotide
  Antisense strand to SEQ ID NO: 2438686
auuaccacucaagucagug

SEQ ID NO: 2438688 - RNA, 19 nt, Artificial Sequence
  Description of Artificial Sequence: Synthetic oligonucleotide
  Sense strand starting at position 1953 of SEQ ID NO: 1886962
acugacuugagugguaauu

SEQ ID NO: 2438689 - RNA, 19 nt, Artificial Sequence
  Description of Artificial Sequence: Synthetic oligonucleotide
  Antisense strand to SEQ ID NO: 2438688
aauuaccacucaagucagu

SEQ ID NO: 2438690 - RNA, 19 nt, Artificial Sequence
  Description of Artificial Sequence: Synthetic oligonucleotide
  Sense strand starting at position 2151 of SEQ ID NO: 1886962
ggaaccugauaguuuaauu

SEQ ID NO: 2438691 - RNA, 19 nt, Artificial Sequence
  Description of Artificial Sequence: Synthetic oligonucleotide
  Antisense strand to SEQ ID NO: 2438690
aauuaaacuaucagguucc

SEQ ID NO: 2438692 - RNA, 19 nt, Artificial Sequence
  Description of Artificial Sequence: Synthetic oligonucleotide
  Sense strand starting at position 2296 of SEQ ID NO: 1886962
gaggaccacguaugaguua

SEQ ID NO: 2438693 - RNA, 19 nt, Artificial Sequence
  Description of Artificial Sequence: Synthetic oligonucleotide
  Antisense strand to SEQ ID NO: 2438692
uaacucauacgugguccuc

SEQ ID NO: 2438694 - RNA, 19 nt, Artificial Sequence
  Description of Artificial Sequence: Synthetic oligonucleotide
  Sense strand starting at position 2326 of SEQ ID NO: 1886962
aagaaugcuguguaacuaa

SEQ ID NO: 2438695 - RNA, 19 nt, Artificial Sequence
  Description of Artificial Sequence: Synthetic oligonucleotide
  Antisense strand to SEQ ID NO: 2438694
uuaguuacacagcauucuu

SEQ ID NO: 2438696 - RNA, 19 nt, Artificial Sequence
  Description of Artificial Sequence: Synthetic oligonucleotide
  Sense strand starting at position 2916 of SEQ ID NO: 1886962
uagacaugaguuuaucugu

SEQ ID NO: 2438697 - RNA, 19 nt, Artificial Sequence
  Description of Artificial Sequence: Synthetic oligonucleotide
  Antisense strand to SEQ ID NO: 2438696
acagauaaacucaugucua

SEQ ID NO: 2438698 - RNA, 19 nt, Artificial Sequence
  Description of Artificial Sequence: Synthetic oligonucleotide
  Sense strand starting at position 2919 of SEQ ID NO: 1886962
acaugaguuuaucuguuag

SEQ ID NO: 2438699 - RNA, 19 nt, Artificial Sequence
  Description of Artificial Sequence: Synthetic oligonucleotide
  Antisense strand to SEQ ID NO: 2438698
cuaacagauaaacucaugu

SEQ ID NO: 2438700 - RNA, 19 nt, Artificial Sequence
  Description of Artificial Sequence: Synthetic oligonucleotide
  Sense strand starting at position 2921 of SEQ ID NO: 1886962
augaguuuaucuguuagau

SEQ ID NO: 2438701 - RNA, 19 nt, Artificial Sequence
  Description of Artificial Sequence: Synthetic oligonucleotide
  Antisense strand to SEQ ID NO: 2438700
aucuaacagauaaacucau

SEQ ID NO: 2438702 - RNA, 19 nt, Artificial Sequence
  Description of Artificial Sequence: Synthetic oligonucleotide
  Sense strand starting at position 2948 of SEQ ID NO: 1886962
acaugaguuuaucugugaa

SEQ ID NO: 2438703 - RNA, 19 nt, Artificial Sequence
  Description of Artificial Sequence: Synthetic oligonucleotide
  Antisense strand to SEQ ID NO: 2438702
uucacagauaaacucaugu

SEQ ID NO: 2438704 - RNA, 19 nt, Artificial Sequence
  Description of Artificial Sequence: Synthetic oligonucleotide
  Sense strand starting at position 2950 of SEQ ID NO: 1886962
augaguuuaucugugaaua

SEQ ID NO: 2438705 - RNA, 19 nt, Artificial Sequence
  Description of Artificial Sequence: Synthetic oligonucleotide
  Antisense strand to SEQ ID NO: 2438704
uauucacagauaaacucau

SEQ ID NO: 2438706 - RNA, 19 nt, Artificial Sequence
  Description of Artificial Sequence: Synthetic oligonucleotide
  Sense strand starting at position 2951 of SEQ ID NO: 1886962
ugaguuuaucugugaauaa

SEQ ID NO: 2438707 - RNA, 19 nt, Artificial Sequence
  Description of Artificial Sequence: Synthetic oligonucleotide
  Antisense strand to SEQ ID NO: 2438706
uuauucacagauaaacuca

SEQ ID NO: 2438708 - RNA, 19 nt, Artificial Sequence
  Description of Artificial Sequence: Synthetic oligonucleotide
  Sense strand starting at position 2955 of SEQ ID NO: 1886962
uuuaucugugaauaagagu

SEQ ID NO: 2438709 - RNA, 19 nt, Artificial Sequence
  Description of Artificial Sequence: Synthetic oligonucleotide
  Antisense strand to SEQ ID NO: 2438708
acucuuauucacagauaaa

SEQ ID NO: 2438710 - RNA, 19 nt, Artificial Sequence
  Description of Artificial Sequence: Synthetic oligonucleotide
  Sense strand starting at position 2963 of SEQ ID NO: 1886962
ugaauaagaguuuaucugu

SEQ ID NO: 2438711 - RNA, 19 nt, Artificial Sequence
  Description of Artificial Sequence: Synthetic oligonucleotide
  Antisense strand to SEQ ID NO: 2438710
acagauaaacucuuauuca

SEQ ID NO: 2438712 - RNA, 19 nt, Artificial Sequence
  Description of Artificial Sequence: Synthetic oligonucleotide
  Sense strand starting at position 2966 of SEQ ID NO: 1886962
auaagaguuuaucuguuag

SEQ ID NO: 2438713 - RNA, 19 nt, Artificial Sequence
  Description of Artificial Sequence: Synthetic oligonucleotide
  Antisense strand to SEQ ID NO: 2438712
cuaacagauaaacucuuau

SEQ ID NO: 2438714 - RNA, 19 nt, Artificial Sequence
  Description of Artificial Sequence: Synthetic oligonucleotide
  Sense strand starting at position 2968 of SEQ ID NO: 1886962
aagaguuuaucuguuagaa

SEQ ID NO: 2438715 - RNA, 19 nt, Artificial Sequence
  Description of Artificial Sequence: Synthetic oligonucleotide
  Antisense strand to SEQ ID NO: 2438714
uucuaacagauaaacucuu

SEQ ID NO: 2438716 - RNA, 19 nt, Artificial Sequence
  Description of Artificial Sequence: Synthetic oligonucleotide
  Sense strand starting at position 3045 of SEQ ID NO: 1886962
guugguugccacuaagaaa

SEQ ID NO: 2438717 - RNA, 19 nt, Artificial Sequence
  Description of Artificial Sequence: Synthetic oligonucleotide
  Antisense strand to SEQ ID NO: 2438716
uuucuuaguggcaaccaac

SEQ ID NO: 2438718 - RNA, 19 nt, Artificial Sequence
  Description of Artificial Sequence: Synthetic oligonucleotide
  Sense strand starting at position 3187 of SEQ ID NO: 1886962
cuugcuccuagaugggaaa

SEQ ID NO: 2438719 - RNA, 19 nt, Artificial Sequence
  Description of Artificial Sequence: Synthetic oligonucleotide
  Antisense strand to SEQ ID NO: 2438718
uuucccaucuaggagcaag

SEQ ID NO: 2438720 - RNA, 19 nt, Artificial Sequence
  Description of Artificial Sequence: Synthetic oligonucleotide
  Sense strand starting at position 3189 of SEQ ID NO: 1886962
ugcuccuagaugggaaauu

SEQ ID NO: 2438721 - RNA, 19 nt, Artificial Sequence
  Description of Artificial Sequence: Synthetic oligonucleotide
  Antisense strand to SEQ ID NO: 2438720
aauuucccaucuaggagca

SEQ ID NO: 2438722 - RNA, 19 nt, Artificial Sequence
  Description of Artificial Sequence: Synthetic oligonucleotide
  Sense strand starting at position 3222 of SEQ ID NO: 1886962
gaccacugaguguauguua

SEQ ID NO: 2438723 - RNA, 19 nt, Artificial Sequence
  Description of Artificial Sequence: Synthetic oligonucleotide
  Antisense strand to SEQ ID NO: 2438722
uaacauacacucagugguc

SEQ ID NO: 2438724 - RNA, 19 nt, Artificial Sequence
  Description of Artificial Sequence: Synthetic oligonucleotide
  Sense strand starting at position 3225 of SEQ ID NO: 1886962
cacugaguguauguuaaag

SEQ ID NO: 2438725 - RNA, 19 nt, Artificial Sequence
  Description of Artificial Sequence: Synthetic oligonucleotide
  Antisense strand to SEQ ID NO: 2438724
cuuuaacauacacucagug

SEQ ID NO: 2438726 - RNA, 19 nt, Artificial Sequence
  Description of Artificial Sequence: Synthetic oligonucleotide
  Sense strand starting at position 3287 of SEQ ID NO: 1886962
gcuucuuacccuuagagua

SEQ ID NO: 2438727 - RNA, 19 nt, Artificial Sequence
  Description of Artificial Sequence: Synthetic oligonucleotide
  Antisense strand to SEQ ID NO: 2438726
uacucuaaggguaagaagc

SEQ ID NO: 2438728 - RNA, 19 nt, Artificial Sequence
  Description of Artificial Sequence: Synthetic oligonucleotide
  Sense strand starting at position 3297 of SEQ ID NO: 1886962
cuuagaguagcucauggaa

SEQ ID NO: 2438729 - RNA, 19 nt, Artificial Sequence
  Description of Artificial Sequence: Synthetic oligonucleotide
  Antisense strand to SEQ ID NO: 2438728
uuccaugagcuacucuaag

SEQ ID NO: 2438730 - RNA, 19 nt, Artificial Sequence
  Description of Artificial Sequence: Synthetic oligonucleotide
  Sense strand starting at position 3300 of SEQ ID NO: 1886962
agaguagcucauggaaaga

SEQ ID NO: 2438731 - RNA, 19 nt, Artificial Sequence
  Description of Artificial Sequence: Synthetic oligonucleotide
  Antisense strand to SEQ ID NO: 2438730
ucuuuccaugagcuacucu

SEQ ID NO: 2438732 - RNA, 19 nt, Artificial Sequence
  Description of Artificial Sequence: Synthetic oligonucleotide
  Sense strand starting at position 3414 of SEQ ID NO: 1886962
ggagaucuguggcuuaaca

SEQ ID NO: 2438733 - RNA, 19 nt, Artificial Sequence
  Description of Artificial Sequence: Synthetic oligonucleotide
  Antisense strand to SEQ ID NO: 2438732
uguuaagccacagaucucc

SEQ ID NO: 2438734 - RNA, 19 nt, Artificial Sequence
  Description of Artificial Sequence: Synthetic oligonucleotide
  Sense strand starting at position 3416 of SEQ ID NO: 1886962
agaucuguggcuuaacagu

SEQ ID NO: 2438735 - RNA, 19 nt, Artificial Sequence
  Description of Artificial Sequence: Synthetic oligonucleotide
  Antisense strand to SEQ ID NO: 2438734
acuguuaagccacagaucu

SEQ ID NO: 2438736 - RNA, 19 nt, Artificial Sequence
  Description of Artificial Sequence: Synthetic oligonucleotide
  Sense strand starting at position 3432 of SEQ ID NO: 1886962
agucccucugaugaugauu

SEQ ID NO: 2438737 - RNA, 19 nt, Artificial Sequence
  Description of Artificial Sequence: Synthetic oligonucleotide
  Antisense strand to SEQ ID NO: 2438736
aaucaucaucagagggacu

SEQ ID NO: 2438738 - RNA, 19 nt, Artificial Sequence
  Description of Artificial Sequence: Synthetic oligonucleotide
  Sense strand starting at position 3445 of SEQ ID NO: 1886962
augauucugauguggauga

SEQ ID NO: 2438739 - RNA, 19 nt, Artificial Sequence
  Description of Artificial Sequence: Synthetic oligonucleotide
  Antisense strand to SEQ ID NO: 2438738
ucauccacaucagaaucau

SEQ ID NO: 2438740 - RNA, 19 nt, Artificial Sequence
  Description of Artificial Sequence: Synthetic oligonucleotide
  Sense strand starting at position 3452 of SEQ ID NO: 1886962
ugauguggaugauauuuga

SEQ ID NO: 2438741 - RNA, 19 nt, Artificial Sequence
  Description of Artificial Sequence: Synthetic oligonucleotide
  Antisense strand to SEQ ID NO: 2438740
ucaaauaucauccacauca

SEQ ID NO: 2438742 - RNA, 19 nt, Artificial Sequence
  Description of Artificial Sequence: Synthetic oligonucleotide
  Sense strand starting at position 134 of SEQ ID NO: 1886963
ccuguuauucuacaguuua

SEQ ID NO: 2438743 - RNA, 19 nt, Artificial Sequence
  Description of Artificial Sequence: Synthetic oligonucleotide
  Antisense strand to SEQ ID NO: 2438742
uaaacuguagaauaacagg

SEQ ID NO: 2438744 - RNA, 19 nt, Artificial Sequence
  Description of Artificial Sequence: Synthetic oligonucleotide
  Sense strand starting at position 145 of SEQ ID NO: 1886963
acaguuuaguccuugacac

SEQ ID NO: 2438745 - RNA, 19 nt, Artificial Sequence
  Description of Artificial Sequence: Synthetic oligonucleotide
  Antisense strand to SEQ ID NO: 2438744
gugucaaggacuaaacugu

SEQ ID NO: 2438746 - RNA, 19 nt, Artificial Sequence
  Description of Artificial Sequence: Synthetic oligonucleotide
  Sense strand starting at position 147 of SEQ ID NO: 1886963
aguuuaguccuugacacac

SEQ ID NO: 2438747 - RNA, 19 nt, Artificial Sequence
  Description of Artificial Sequence: Synthetic oligonucleotide
  Antisense strand to SEQ ID NO: 2438746
gugugucaaggacuaaacu

SEQ ID NO: 2438748 - RNA, 19 nt, Artificial Sequence
  Description of Artificial Sequence: Synthetic oligonucleotide
  Sense strand starting at position 176 of SEQ ID NO: 1886963
acacaagagcacugauauu

SEQ ID NO: 2438749 - RNA, 19 nt, Artificial Sequence
  Description of Artificial Sequence: Synthetic oligonucleotide
  Antisense strand to SEQ ID NO: 2438748
aauaucagugcucuugugu

SEQ ID NO: 2438750 - RNA, 19 nt, Artificial Sequence
  Description of Artificial Sequence: Synthetic oligonucleotide
  Sense strand starting at position 226 of SEQ ID NO: 1886963
ugacuucuguuaguugaag

SEQ ID NO: 2438751 - RNA, 19 nt, Artificial Sequence
  Description of Artificial Sequence: Synthetic oligonucleotide
  Antisense strand to SEQ ID NO: 2438750
cuucaacuaacagaaguca

SEQ ID NO: 2438752 - RNA, 19 nt, Artificial Sequence
  Description of Artificial Sequence: Synthetic oligonucleotide
  Sense strand starting at position 227 of SEQ ID NO: 1886963
gacuucuguuaguugaagu

SEQ ID NO: 2438753 - RNA, 19 nt, Artificial Sequence
  Description of Artificial Sequence: Synthetic oligonucleotide
  Antisense strand to SEQ ID NO: 2438752
acuucaacuaacagaaguc

SEQ ID NO: 2438754 - RNA, 19 nt, Artificial Sequence
  Description of Artificial Sequence: Synthetic oligonucleotide
  Sense strand starting at position 228 of SEQ ID NO: 1886963
acuucuguuaguugaaguu

SEQ ID NO: 2438755 - RNA, 19 nt, Artificial Sequence
  Description of Artificial Sequence: Synthetic oligonucleotide
  Antisense strand to SEQ ID NO: 2438754
aacuucaacuaacagaagu

SEQ ID NO: 2438756 - RNA, 19 nt, Artificial Sequence
  Description of Artificial Sequence: Synthetic oligonucleotide
  Sense strand starting at position 339 of SEQ ID NO: 1886963
gauuuaugcccuggcagca

SEQ ID NO: 2438757 - RNA, 19 nt, Artificial Sequence
  Description of Artificial Sequence: Synthetic oligonucleotide
  Antisense strand to SEQ ID NO: 2438756
ugcugccagggcauaaauc

SEQ ID NO: 2438758 - RNA, 19 nt, Artificial Sequence
  Description of Artificial Sequence: Synthetic oligonucleotide
  Sense strand starting at position 384 of SEQ ID NO: 1886963
cauaguaacccuugggaac

SEQ ID NO: 2438759 - RNA, 19 nt, Artificial Sequence
  Description of Artificial Sequence: Synthetic oligonucleotide
  Antisense strand to SEQ ID NO: 2438758
guucccaaggguuacuaug

SEQ ID NO: 2438760 - RNA, 19 nt, Artificial Sequence
  Description of Artificial Sequence: Synthetic oligonucleotide
  Sense strand starting at position 385 of SEQ ID NO: 1886963
auaguaacccuugggaaca

SEQ ID NO: 2438761 - RNA, 19 nt, Artificial Sequence
  Description of Artificial Sequence: Synthetic oligonucleotide
  Antisense strand to SEQ ID NO: 2438760
uguucccaaggguuacuau

SEQ ID NO: 2438762 - RNA, 19 nt, Artificial Sequence
  Description of Artificial Sequence: Synthetic oligonucleotide
  Sense strand starting at position 414 of SEQ ID NO: 1886963
gucaucuucugguuggaca

SEQ ID NO: 2438763 - RNA, 19 nt, Artificial Sequence
  Description of Artificial Sequence: Synthetic oligonucleotide
  Antisense strand to SEQ ID NO: 2438762
uguccaaccagaagaugac

SEQ ID NO: 2438764 - RNA, 19 nt, Artificial Sequence
  Description of Artificial Sequence: Synthetic oligonucleotide
  Sense strand starting at position 496 of SEQ ID NO: 1886963
gcuccaucgguuggauacu

SEQ ID NO: 2438765 - RNA, 19 nt, Artificial Sequence
  Description of Artificial Sequence: Synthetic oligonucleotide
  Antisense strand to SEQ ID NO: 2438764
aguauccaaccgauggagc

SEQ ID NO: 2438766 - RNA, 19 nt, Artificial Sequence
  Description of Artificial Sequence: Synthetic oligonucleotide
  Sense strand starting at position 508 of SEQ ID NO: 1886963
ggauacucuugcgcaguga

SEQ ID NO: 2438767 - RNA, 19 nt, Artificial Sequence
  Description of Artificial Sequence: Synthetic oligonucleotide
  Antisense strand to SEQ ID NO: 2438766
ucacugcgcaagaguaucc

SEQ ID NO: 2438768 - RNA, 19 nt, Artificial Sequence
  Description of Artificial Sequence: Synthetic oligonucleotide
  Sense strand starting at position 509 of SEQ ID NO: 1886963
gauacucuugcgcagugaa

SEQ ID NO: 2438769 - RNA, 19 nt, Artificial Sequence
  Description of Artificial Sequence: Synthetic oligonucleotide
  Antisense strand to SEQ ID NO: 2438768
uucacugcgcaagaguauc

SEQ ID NO: 2438770 - RNA, 19 nt, Artificial Sequence
  Description of Artificial Sequence: Synthetic oligonucleotide
  Sense strand starting at position 512 of SEQ ID NO: 1886963
acucuugcgcagugaauga

SEQ ID NO: 2438771 - RNA, 19 nt, Artificial Sequence
  Description of Artificial Sequence: Synthetic oligonucleotide
  Antisense strand to SEQ ID NO: 2438770
ucauucacugcgcaagagu

SEQ ID NO: 2438772 - RNA, 19 nt, Artificial Sequence
  Description of Artificial Sequence: Synthetic oligonucleotide
  Sense strand starting at position 525 of SEQ ID NO: 1886963
gaaugaccugugcaaccau

SEQ ID NO: 2438773 - RNA, 19 nt, Artificial Sequence
  Description of Artificial Sequence: Synthetic oligonucleotide
  Antisense strand to SEQ ID NO: 2438772
augguugcacaggucauuc

SEQ ID NO: 2438774 - RNA, 19 nt, Artificial Sequence
  Description of Artificial Sequence: Synthetic oligonucleotide
  Sense strand starting at position 658 of SEQ ID NO: 1886963
gcccuaaguguauaaauca

SEQ ID NO: 2438775 - RNA, 19 nt, Artificial Sequence
  Description of Artificial Sequence: Synthetic oligonucleotide
  Antisense strand to SEQ ID NO: 2438774
ugauuuauacacuuagggc

SEQ ID NO: 2438776 - RNA, 19 nt, Artificial Sequence
  Description of Artificial Sequence: Synthetic oligonucleotide
  Sense strand starting at position 778 of SEQ ID NO: 1886963
ggccuuaacuggucucuga

SEQ ID NO: 2438777 - RNA, 19 nt, Artificial Sequence
  Description of Artificial Sequence: Synthetic oligonucleotide
  Antisense strand to SEQ ID NO: 2438776
ucagagaccaguuaaggcc

SEQ ID NO: 2438778 - RNA, 19 nt, Artificial Sequence
  Description of Artificial Sequence: Synthetic oligonucleotide
  Sense strand starting at position 781 of SEQ ID NO: 1886963
cuuaacuggucucugaaau

SEQ ID NO: 2438779 - RNA, 19 nt, Artificial Sequence
  Description of Artificial Sequence: Synthetic oligonucleotide
  Antisense strand to SEQ ID NO: 2438778
auuucagagaccaguuaag

SEQ ID NO: 2438780 - RNA, 19 nt, Artificial Sequence
  Description of Artificial Sequence: Synthetic oligonucleotide
  Sense strand starting at position 782 of SEQ ID NO: 1886963
uuaacuggucucugaaauc

SEQ ID NO: 2438781 - RNA, 19 nt, Artificial Sequence
  Description of Artificial Sequence: Synthetic oligonucleotide
  Antisense strand to SEQ ID NO: 2438780
gauuucagagaccaguuaa

SEQ ID NO: 2438782 - RNA, 19 nt, Artificial Sequence
  Description of Artificial Sequence: Synthetic oligonucleotide
  Sense strand starting at position 809 of SEQ ID NO: 1886963
gagguuguuagaggacaga

SEQ ID NO: 2438783 - RNA, 19 nt, Artificial Sequence
  Description of Artificial Sequence: Synthetic oligonucleotide
  Antisense strand to SEQ ID NO: 2438782
ucuguccucuaacaaccuc

SEQ ID NO: 2438784 - RNA, 19 nt, Artificial Sequence
  Description of Artificial Sequence: Synthetic oligonucleotide
  Sense strand starting at position 1069 of SEQ ID NO: 1886963
guagacacuucuguauaaa

SEQ ID NO: 2438785 - RNA, 19 nt, Artificial Sequence
  Description of Artificial Sequence: Synthetic oligonucleotide
  Antisense strand to SEQ ID NO: 2438784
uuuauacagaagugucuac

SEQ ID NO: 2438786 - RNA, 19 nt, Artificial Sequence
  Description of Artificial Sequence: Synthetic oligonucleotide
  Sense strand starting at position 1283 of SEQ ID NO: 1886963
ggcucucuguacuuggauu

SEQ ID NO: 2438787 - RNA, 19 nt, Artificial Sequence
  Description of Artificial Sequence: Synthetic oligonucleotide
  Antisense strand to SEQ ID NO: 2438786
aauccaaguacagagagcc

SEQ ID NO: 2438788 - RNA, 19 nt, Artificial Sequence
  Description of Artificial Sequence: Synthetic oligonucleotide
  Sense strand starting at position 1475 of SEQ ID NO: 1886963
ggccauaaaugugcaagga

SEQ ID NO: 2438789 - RNA, 19 nt, Artificial Sequence
  Description of Artificial Sequence: Synthetic oligonucleotide
  Antisense strand to SEQ ID NO: 2438788
uccuugcacauuuauggcc

SEQ ID NO: 2438790 - RNA, 19 nt, Artificial Sequence
  Description of Artificial Sequence: Synthetic oligonucleotide
  Sense strand starting at position 1553 of SEQ ID NO: 1886963
auugcuccuguagacaaau

SEQ ID NO: 2438791 - RNA, 19 nt, Artificial Sequence
  Description of Artificial Sequence: Synthetic oligonucleotide
  Antisense strand to SEQ ID NO: 2438790
auuugucuacaggagcaau

SEQ ID NO: 2438792 - RNA, 19 nt, Artificial Sequence
  Description of Artificial Sequence: Synthetic oligonucleotide
  Sense strand starting at position 1815 of SEQ ID NO: 1886963
aucuguucccugggucuga

SEQ ID NO: 2438793 - RNA, 19 nt, Artificial Sequence
  Description of Artificial Sequence: Synthetic oligonucleotide
  Antisense strand to SEQ ID NO: 2438792
ucagacccagggaacagau

SEQ ID NO: 2438794 - RNA, 19 nt, Artificial Sequence
  Description of Artificial Sequence: Synthetic oligonucleotide
  Sense strand starting at position 1819 of SEQ ID NO: 1886963
guucccugggucugaaauc

SEQ ID NO: 2438795 - RNA, 19 nt, Artificial Sequence
  Description of Artificial Sequence: Synthetic oligonucleotide
  Antisense strand to SEQ ID NO: 2438794
gauuucagacccagggaac

SEQ ID NO: 2438796 - RNA, 19 nt, Artificial Sequence
  Description of Artificial Sequence: Synthetic oligonucleotide
  Sense strand starting at position 1907 of SEQ ID NO: 1886963
aggaccaugucucuuuauu

SEQ ID NO: 2438797 - RNA, 19 nt, Artificial Sequence
  Description of Artificial Sequence: Synthetic oligonucleotide
  Antisense strand to SEQ ID NO: 2438796
aauaaagagacaugguccu

SEQ ID NO: 2438798 - RNA, 19 nt, Artificial Sequence
  Description of Artificial Sequence: Synthetic oligonucleotide
  Sense strand starting at position 2047 of SEQ ID NO: 1886963
cgaggcauugugggaggaa

SEQ ID NO: 2438799 - RNA, 19 nt, Artificial Sequence
  Description of Artificial Sequence: Synthetic oligonucleotide
  Antisense strand to SEQ ID NO: 2438798
uuccucccacaaugccucg

SEQ ID NO: 2438800 - RNA, 19 nt, Artificial Sequence
  Description of Artificial Sequence: Synthetic oligonucleotide
  Sense strand starting at position 2050 of SEQ ID NO: 1886963
ggcauugugggaggaaaca

SEQ ID NO: 2438801 - RNA, 19 nt, Artificial Sequence
  Description of Artificial Sequence: Synthetic oligonucleotide
  Antisense strand to SEQ ID NO: 2438800
uguuuccucccacaaugcc

SEQ ID NO: 2438802 - RNA, 19 nt, Artificial Sequence
  Description of Artificial Sequence: Synthetic oligonucleotide
  Sense strand starting at position 3059 of SEQ ID NO: 1886963
augggauaguggagggaua

SEQ ID NO: 2438803 - RNA, 19 nt, Artificial Sequence
  Description of Artificial Sequence: Synthetic oligonucleotide
  Antisense strand to SEQ ID NO: 2438802
uaucccuccacuaucccau

SEQ ID NO: 2438804 - RNA, 19 nt, Artificial Sequence
  Description of Artificial Sequence: Synthetic oligonucleotide
  Sense strand starting at position 3440 of SEQ ID NO: 1886963
ucguaagaccaauauuaug

SEQ ID NO: 2438805 - RNA, 19 nt, Artificial Sequence
  Description of Artificial Sequence: Synthetic oligonucleotide
  Antisense strand to SEQ ID NO: 2438804
cauaauauuggucuuacga

SEQ ID NO: 2438806 - RNA, 19 nt, Artificial Sequence
  Description of Artificial Sequence: Synthetic oligonucleotide
  Sense strand starting at position 3464 of SEQ ID NO: 1886963
gcaggcucuuuccuggaga

SEQ ID NO: 2438807 - RNA, 19 nt, Artificial Sequence
  Description of Artificial Sequence: Synthetic oligonucleotide
  Antisense strand to SEQ ID NO: 2438806
ucuccaggaaagagccugc

SEQ ID NO: 2438808 - RNA, 19 nt, Artificial Sequence
  Description of Artificial Sequence: Synthetic oligonucleotide
  Sense strand starting at position 3466 of SEQ ID NO: 1886963
aggcucuuuccuggagagu

SEQ ID NO: 2438809 - RNA, 19 nt, Artificial Sequence
  Description of Artificial Sequence: Synthetic oligonucleotide
  Antisense strand to SEQ ID NO: 2438808
acucuccaggaaagagccu

SEQ ID NO: 2438810 - RNA, 19 nt, Artificial Sequence
  Description of Artificial Sequence: Synthetic oligonucleotide
  Sense strand starting at position 3517 of SEQ ID NO: 1886963
uccuuuggacuuugggaau

SEQ ID NO: 2438811 - RNA, 19 nt, Artificial Sequence
  Description of Artificial Sequence: Synthetic oligonucleotide
  Antisense strand to SEQ ID NO: 2438810
auucccaaaguccaaagga

SEQ ID NO: 2438812 - RNA, 19 nt, Artificial Sequence
  Description of Artificial Sequence: Synthetic oligonucleotide
  Sense strand starting at position 3523 of SEQ ID NO: 1886963
ggacuuugggaaugaggca

SEQ ID NO: 2438813 - RNA, 19 nt, Artificial Sequence
  Description of Artificial Sequence: Synthetic oligonucleotide
  Antisense strand to SEQ ID NO: 2438812
ugccucauucccaaagucc

SEQ ID NO: 2438814 - RNA, 19 nt, Artificial Sequence
  Description of Artificial Sequence: Synthetic oligonucleotide
  Sense strand starting at position 3742 of SEQ ID NO: 1886963
uguuguaccuuugcucaga

SEQ ID NO: 2438815 - RNA, 19 nt, Artificial Sequence
  Description of Artificial Sequence: Synthetic oligonucleotide
  Antisense strand to SEQ ID NO: 2438814
ucugagcaaagguacaaca

SEQ ID NO: 2438816 - RNA, 19 nt, Artificial Sequence
  Description of Artificial Sequence: Synthetic oligonucleotide
  Sense strand starting at position 3808 of SEQ ID NO: 1886963
aaaugaagauguugauuug

SEQ ID NO: 2438817 - RNA, 19 nt, Artificial Sequence
  Description of Artificial Sequence: Synthetic oligonucleotide
  Antisense strand to SEQ ID NO: 2438816
caaaucaacaucuucauuu

SEQ ID NO: 2438818 - RNA, 19 nt, Artificial Sequence
  Description of Artificial Sequence: Synthetic oligonucleotide
  Sense strand starting at position 3842 of SEQ ID NO: 1886963
cuagucauuccuugaacag

SEQ ID NO: 2438819 - RNA, 19 nt, Artificial Sequence
  Description of Artificial Sequence: Synthetic oligonucleotide
  Antisense strand to SEQ ID NO: 2438818
cuguucaaggaaugacuag

SEQ ID NO: 2438820 - RNA, 19 nt, Artificial Sequence
  Description of Artificial Sequence: Synthetic oligonucleotide
  Sense strand starting at position 3854 of SEQ ID NO: 1886963
ugaacaggguucuccgaau

SEQ ID NO: 2438821 - RNA, 19 nt, Artificial Sequence
  Description of Artificial Sequence: Synthetic oligonucleotide
  Antisense strand to SEQ ID NO: 2438820
auucggagaacccuguuca

SEQ ID NO: 2438822 - RNA, 19 nt, Artificial Sequence
  Description of Artificial Sequence: Synthetic oligonucleotide
  Sense strand starting at position 31 of SEQ ID NO: 1886964
agucaaguuacuuggguga

SEQ ID NO: 2438823 - RNA, 19 nt, Artificial Sequence
  Description of Artificial Sequence: Synthetic oligonucleotide
  Antisense strand to SEQ ID NO: 2438822
ucacccaaguaacuugacu

SEQ ID NO: 2438824 - RNA, 19 nt, Artificial Sequence
  Description of Artificial Sequence: Synthetic oligonucleotide
  Sense strand starting at position 34 of SEQ ID NO: 1886964
caaguuacuugggugaaau

SEQ ID NO: 2438825 - RNA, 19 nt, Artificial Sequence
  Description of Artificial Sequence: Synthetic oligonucleotide
  Antisense strand to SEQ ID NO: 2438824
auuucacccaaguaacuug

SEQ ID NO: 2438826 - RNA, 19 nt, Artificial Sequence
  Description of Artificial Sequence: Synthetic oligonucleotide
  Sense strand starting at position 86 of SEQ ID NO: 1886964
ggacuaauauaccugcagu

SEQ ID NO: 2438827 - RNA, 19 nt, Artificial Sequence
  Description of Artificial Sequence: Synthetic oligonucleotide
  Antisense strand to SEQ ID NO: 2438826
acugcagguauauuagucc

SEQ ID NO: 2438828 - RNA, 19 nt, Artificial Sequence
  Description of Artificial Sequence: Synthetic oligonucleotide
  Sense strand starting at position 89 of SEQ ID NO: 1886964
cuaauauaccugcaguguu

SEQ ID NO: 2438829 - RNA, 19 nt, Artificial Sequence
  Description of Artificial Sequence: Synthetic oligonucleotide
  Antisense strand to SEQ ID NO: 2438828
aacacugcagguauauuag

SEQ ID NO: 2438830 - RNA, 19 nt, Artificial Sequence
  Description of Artificial Sequence: Synthetic oligonucleotide
  Sense strand starting at position 101 of SEQ ID NO: 1886964
caguguuaugaguauguca

SEQ ID NO: 2438831 - RNA, 19 nt, Artificial Sequence
  Description of Artificial Sequence: Synthetic oligonucleotide
  Antisense strand to SEQ ID NO: 2438830
ugacauacucauaacacug

SEQ ID NO: 2438832 - RNA, 19 nt, Artificial Sequence
  Description of Artificial Sequence: Synthetic oligonucleotide
  Sense strand starting at position 394 of SEQ ID NO: 1886964
auaggaaugaaccguagua

SEQ ID NO: 2438833 - RNA, 19 nt, Artificial Sequence
  Description of Artificial Sequence: Synthetic oligonucleotide
  Antisense strand to SEQ ID NO: 2438832
uacuacgguucauuccuau

SEQ ID NO: 2438834 - RNA, 19 nt, Artificial Sequence
  Description of Artificial Sequence: Synthetic oligonucleotide
  Sense strand starting at position 396 of SEQ ID NO: 1886964
aggaaugaaccguaguauc

SEQ ID NO: 2438835 - RNA, 19 nt, Artificial Sequence
  Description of Artificial Sequence: Synthetic oligonucleotide
  Antisense strand to SEQ ID NO: 2438834
gauacuacgguucauuccu

SEQ ID NO: 2438836 - RNA, 19 nt, Artificial Sequence
  Description of Artificial Sequence: Synthetic oligonucleotide
  Sense strand starting at position 407 of SEQ ID NO: 1886964
guaguaucuggccaagaug

SEQ ID NO: 2438837 - RNA, 19 nt, Artificial Sequence
  Description of Artificial Sequence: Synthetic oligonucleotide
  Antisense strand to SEQ ID NO: 2438836
caucuuggccagauacuac

SEQ ID NO: 2438838 - RNA, 19 nt, Artificial Sequence
  Description of Artificial Sequence: Synthetic oligonucleotide
  Sense strand starting at position 708 of SEQ ID NO: 1886964
uuaaauuaguaagcacaga

SEQ ID NO: 2438839 - RNA, 19 nt, Artificial Sequence
  Description of Artificial Sequence: Synthetic oligonucleotide
  Antisense strand to SEQ ID NO: 2438838
ucugugcuuacuaauuuaa

SEQ ID NO: 2438840 - RNA, 19 nt, Artificial Sequence
  Description of Artificial Sequence: Synthetic oligonucleotide
  Sense strand starting at position 785 of SEQ ID NO: 1886964
aaagaaagccaauguguuu

SEQ ID NO: 2438841 - RNA, 19 nt, Artificial Sequence
  Description of Artificial Sequence: Synthetic oligonucleotide
  Antisense strand to SEQ ID NO: 2438840
aaacacauuggcuuucuuu

SEQ ID NO: 2438842 - RNA, 19 nt, Artificial Sequence
  Description of Artificial Sequence: Synthetic oligonucleotide
  Sense strand starting at position 2470 of SEQ ID NO: 1886964
uccgcuucuggucaugaga

SEQ ID NO: 2438843 - RNA, 19 nt, Artificial Sequence
  Description of Artificial Sequence: Synthetic oligonucleotide
  Antisense strand to SEQ ID NO: 2438842
ucucaugaccagaagcgga

SEQ ID NO: 2438844 - RNA, 19 nt, Artificial Sequence
  Description of Artificial Sequence: Synthetic oligonucleotide
  Sense strand starting at position 2473 of SEQ ID NO: 1886964
gcuucuggucaugagaggu

SEQ ID NO: 2438845 - RNA, 19 nt, Artificial Sequence
  Description of Artificial Sequence: Synthetic oligonucleotide
  Antisense strand to SEQ ID NO: 2438844
accucucaugaccagaagc

SEQ ID NO: 2438846 - RNA, 19 nt, Artificial Sequence
  Description of Artificial Sequence: Synthetic oligonucleotide
  Sense strand starting at position 2589 of SEQ ID NO: 1886964
gaacucugcccucggagau

SEQ ID NO: 2438847 - RNA, 19 nt, Artificial Sequence
  Description of Artificial Sequence: Synthetic oligonucleotide
  Antisense strand to SEQ ID NO: 2438846
aucuccgagggcagaguuc

SEQ ID NO: 2438848 - RNA, 19 nt, Artificial Sequence
  Description of Artificial Sequence: Synthetic oligonucleotide
  Sense strand starting at position 2590 of SEQ ID NO: 1886964
aacucugcccucggagauu

SEQ ID NO: 2438849 - RNA, 19 nt, Artificial Sequence
  Description of Artificial Sequence: Synthetic oligonucleotide
  Antisense strand to SEQ ID NO: 2438848
aaucuccgagggcagaguu

SEQ ID NO: 2438850 - RNA, 19 nt, Artificial Sequence
  Description of Artificial Sequence: Synthetic oligonucleotide
  Sense strand starting at position 2654 of SEQ ID NO: 1886964
uugucugugcaugaaggaa

SEQ ID NO: 2438851 - RNA, 19 nt, Artificial Sequence
  Description of Artificial Sequence: Synthetic oligonucleotide
  Antisense strand to SEQ ID NO: 2438850
uuccuucaugcacagacaa

SEQ ID NO: 2438852 - RNA, 19 nt, Artificial Sequence
  Description of Artificial Sequence: Synthetic oligonucleotide
  Sense strand starting at position 2775 of SEQ ID NO: 1886964
ggugaaagccuuuagugaa

SEQ ID NO: 2438853 - RNA, 19 nt, Artificial Sequence
  Description of Artificial Sequence: Synthetic oligonucleotide
  Antisense strand to SEQ ID NO: 2438852
uucacuaaaggcuuucacc

SEQ ID NO: 2438854 - RNA, 19 nt, Artificial Sequence
  Description of Artificial Sequence: Synthetic oligonucleotide
  Sense strand starting at position 2840 of SEQ ID NO: 1886964
caguccugggagugaaaua

SEQ ID NO: 2438855 - RNA, 19 nt, Artificial Sequence
  Description of Artificial Sequence: Synthetic oligonucleotide
  Antisense strand to SEQ ID NO: 2438854
uauuucacucccaggacug

SEQ ID NO: 2438856 - RNA, 19 nt, Artificial Sequence
  Description of Artificial Sequence: Synthetic oligonucleotide
  Sense strand starting at position 2867 of SEQ ID NO: 1886964
cagaacauucccugacguu

SEQ ID NO: 2438857 - RNA, 19 nt, Artificial Sequence
  Description of Artificial Sequence: Synthetic oligonucleotide
  Antisense strand to SEQ ID NO: 2438856
aacgucagggaauguucug

SEQ ID NO: 2438858 - RNA, 19 nt, Artificial Sequence
  Description of Artificial Sequence: Synthetic oligonucleotide
  Sense strand starting at position 2868 of SEQ ID NO: 1886964
agaacauucccugacguua

SEQ ID NO: 2438859 - RNA, 19 nt, Artificial Sequence
  Description of Artificial Sequence: Synthetic oligonucleotide
  Antisense strand to SEQ ID NO: 2438858
uaacgucagggaauguucu

SEQ ID NO: 2438860 - RNA, 19 nt, Artificial Sequence
  Description of Artificial Sequence: Synthetic oligonucleotide
  Sense strand starting at position 2928 of SEQ ID NO: 1886964
gugggauagccucugcguu

SEQ ID NO: 2438861 - RNA, 19 nt, Artificial Sequence
  Description of Artificial Sequence: Synthetic oligonucleotide
  Antisense strand to SEQ ID NO: 2438860
aacgcagaggcuaucccac

SEQ ID NO: 2438862 - RNA, 19 nt, Artificial Sequence
  Description of Artificial Sequence: Synthetic oligonucleotide
  Sense strand starting at position 2999 of SEQ ID NO: 1886964
gaucauuuauuagagagau

SEQ ID NO: 2438863 - RNA, 19 nt, Artificial Sequence
  Description of Artificial Sequence: Synthetic oligonucleotide
  Antisense strand to SEQ ID NO: 2438862
aucucucuaauaaaugauc

SEQ ID NO: 2438864 - RNA, 19 nt, Artificial Sequence
  Description of Artificial Sequence: Synthetic oligonucleotide
  Sense strand starting at position 3011 of SEQ ID NO: 1886964
gagagaucuuucucugcua

SEQ ID NO: 2438865 - RNA, 19 nt, Artificial Sequence
  Description of Artificial Sequence: Synthetic oligonucleotide
  Antisense strand to SEQ ID NO: 2438864
uagcagagaaagaucucuc

SEQ ID NO: 2438866 - RNA, 19 nt, Artificial Sequence
  Description of Artificial Sequence: Synthetic oligonucleotide
  Sense strand starting at position 3012 of SEQ ID NO: 1886964
agagaucuuucucugcuag

SEQ ID NO: 2438867 - RNA, 19 nt, Artificial Sequence
  Description of Artificial Sequence: Synthetic oligonucleotide
  Antisense strand to SEQ ID NO: 2438866
cuagcagagaaagaucucu

SEQ ID NO: 2438868 - RNA, 19 nt, Artificial Sequence
  Description of Artificial Sequence: Synthetic oligonucleotide
  Sense strand starting at position 3013 of SEQ ID NO: 1886964
gagaucuuucucugcuaga

SEQ ID NO: 2438869 - RNA, 19 nt, Artificial Sequence
  Description of Artificial Sequence: Synthetic oligonucleotide
  Antisense strand to SEQ ID NO: 2438868
ucuagcagagaaagaucuc

SEQ ID NO: 2438870 - RNA, 19 nt, Artificial Sequence
  Description of Artificial Sequence: Synthetic oligonucleotide
  Sense strand starting at position 3014 of SEQ ID NO: 1886964
agaucuuucucugcuagag

SEQ ID NO: 2438871 - RNA, 19 nt, Artificial Sequence
  Description of Artificial Sequence: Synthetic oligonucleotide
  Antisense strand to SEQ ID NO: 2438870
cucuagcagagaaagaucu

SEQ ID NO: 2438872 - RNA, 19 nt, Artificial Sequence
  Description of Artificial Sequence: Synthetic oligonucleotide
  Sense strand starting at position 3160 of SEQ ID NO: 1886964
guaucuaugcuuuaaaugu

SEQ ID NO: 2438873 - RNA, 19 nt, Artificial Sequence
  Description of Artificial Sequence: Synthetic oligonucleotide
  Antisense strand to SEQ ID NO: 2438872
acauuuaaagcauagauac

SEQ ID NO: 2438874 - RNA, 19 nt, Artificial Sequence
  Description of Artificial Sequence: Synthetic oligonucleotide
  Sense strand starting at position 3207 of SEQ ID NO: 1886964
gguaauauuauugguggca

SEQ ID NO: 2438875 - RNA, 19 nt, Artificial Sequence
  Description of Artificial Sequence: Synthetic oligonucleotide
  Antisense strand to SEQ ID NO: 2438874
ugccaccaauaauauuacc

SEQ ID NO: 2438876 - RNA, 19 nt, Artificial Sequence
  Description of Artificial Sequence: Synthetic oligonucleotide
  Sense strand starting at position 3243 of SEQ ID NO: 1886964
cuuuaugagcuuugggaaa

SEQ ID NO: 2438877 - RNA, 19 nt, Artificial Sequence
  Description of Artificial Sequence: Synthetic oligonucleotide
  Antisense strand to SEQ ID NO: 2438876
uuucccaaagcucauaaag

SEQ ID NO: 2438878 - RNA, 19 nt, Artificial Sequence
  Description of Artificial Sequence: Synthetic oligonucleotide
  Sense strand starting at position 3259 of SEQ ID NO: 1886964
aaagcugcuugagcagaaa

SEQ ID NO: 2438879 - RNA, 19 nt, Artificial Sequence
  Description of Artificial Sequence: Synthetic oligonucleotide
  Antisense strand to SEQ ID NO: 2438878
uuucugcucaagcagcuuu

SEQ ID NO: 2438880 - RNA, 19 nt, Artificial Sequence
  Description of Artificial Sequence: Synthetic oligonucleotide
  Sense strand starting at position 3314 of SEQ ID NO: 1886964
auuaguuaccuaugaugau

SEQ ID NO: 2438881 - RNA, 19 nt, Artificial Sequence
  Description of Artificial Sequence: Synthetic oligonucleotide
  Antisense strand to SEQ ID NO: 2438880
aucaucauagguaacuaau

SEQ ID NO: 2438882 - RNA, 19 nt, Artificial Sequence
  Description of Artificial Sequence: Synthetic oligonucleotide
  Sense strand starting at position 3395 of SEQ ID NO: 1886964
ggcucacucuuccuuauga

SEQ ID NO: 2438883 - RNA, 19 nt, Artificial Sequence
  Description of Artificial Sequence: Synthetic oligonucleotide
  Antisense strand to SEQ ID NO: 2438882
ucauaaggaagagugagcc

SEQ ID NO: 2438884 - RNA, 19 nt, Artificial Sequence
  Description of Artificial Sequence: Synthetic oligonucleotide
  Sense strand starting at position 3408 of SEQ ID NO: 1886964
uuaugaaacuucuuugaug

SEQ ID NO: 2438885 - RNA, 19 nt, Artificial Sequence
  Description of Artificial Sequence: Synthetic oligonucleotide
  Antisense strand to SEQ ID NO: 2438884
caucaaagaaguuucauaa

SEQ ID NO: 2438886 - RNA, 19 nt, Artificial Sequence
  Description of Artificial Sequence: Synthetic oligonucleotide
  Sense strand starting at position 3410 of SEQ ID NO: 1886964
augaaacuucuuugaugua

SEQ ID NO: 2438887 - RNA, 19 nt, Artificial Sequence
  Description of Artificial Sequence: Synthetic oligonucleotide
  Antisense strand to SEQ ID NO: 2438886
uacaucaaagaaguuucau

SEQ ID NO: 2438888 - RNA, 19 nt, Artificial Sequence
  Description of Artificial Sequence: Synthetic oligonucleotide
  Sense strand starting at position 3417 of SEQ ID NO: 1886964
uucuuugauguagaaucua

SEQ ID NO: 2438889 - RNA, 19 nt, Artificial Sequence
  Description of Artificial Sequence: Synthetic oligonucleotide
  Antisense strand to SEQ ID NO: 2438888
uagauucuacaucaaagaa

SEQ ID NO: 2438890 - RNA, 19 nt, Artificial Sequence
  Description of Artificial Sequence: Synthetic oligonucleotide
  Sense strand starting at position 3491 of SEQ ID NO: 1886964
gaggacuggugcucauuaa

SEQ ID NO: 2438891 - RNA, 19 nt, Artificial Sequence
  Description of Artificial Sequence: Synthetic oligonucleotide
  Antisense strand to SEQ ID NO: 2438890
uuaaugagcaccaguccuc

SEQ ID NO: 2438892 - RNA, 19 nt, Artificial Sequence
  Description of Artificial Sequence: Synthetic oligonucleotide
  Sense strand starting at position 3492 of SEQ ID NO: 1886964
aggacuggugcucauuaac

SEQ ID NO: 2438893 - RNA, 19 nt, Artificial Sequence
  Description of Artificial Sequence: Synthetic oligonucleotide
  Antisense strand to SEQ ID NO: 2438892
guuaaugagcaccaguccu

SEQ ID NO: 2438894 - RNA, 19 nt, Artificial Sequence
  Description of Artificial Sequence: Synthetic oligonucleotide
  Sense strand starting at position 3550 of SEQ ID NO: 1886964
gccuucugccauuagagaa

SEQ ID NO: 2438895 - RNA, 19 nt, Artificial Sequence
  Description of Artificial Sequence: Synthetic oligonucleotide
  Antisense strand to SEQ ID NO: 2438894
uucucuaauggcagaaggc

SEQ ID NO: 2438896 - RNA, 19 nt, Artificial Sequence
  Description of Artificial Sequence: Synthetic oligonucleotide
  Sense strand starting at position 3575 of SEQ ID NO: 1886964
gcauuugcagcucaacuuu

SEQ ID NO: 2438897 - RNA, 19 nt, Artificial Sequence
  Description of Artificial Sequence: Synthetic oligonucleotide
  Antisense strand to SEQ ID NO: 2438896
aaaguugagcugcaaaugc

SEQ ID NO: 2438898 - RNA, 19 nt, Artificial Sequence
  Description of Artificial Sequence: Synthetic oligonucleotide
  Sense strand starting at position 3644 of SEQ ID NO: 1886964
gagccuuggcauuaaggga

SEQ ID NO: 2438899 - RNA, 19 nt, Artificial Sequence
  Description of Artificial Sequence: Synthetic oligonucleotide
  Antisense strand to SEQ ID NO: 2438898
ucccuuaaugccaaggcuc

SEQ ID NO: 2438900 - RNA, 19 nt, Artificial Sequence
  Description of Artificial Sequence: Synthetic oligonucleotide
  Sense strand starting at position 3974 of SEQ ID NO: 1886964
gcccucauucuggagaugu

SEQ ID NO: 2438901 - RNA, 19 nt, Artificial Sequence
  Description of Artificial Sequence: Synthetic oligonucleotide
  Antisense strand to SEQ ID NO: 2438900
acaucuccagaaugagggc

SEQ ID NO: 2438902 - RNA, 19 nt, Artificial Sequence
  Description of Artificial Sequence: Synthetic oligonucleotide
  Sense strand starting at position 16 of SEQ ID NO: 1886965
gcuucuauuccauggaaag

SEQ ID NO: 2438903 - RNA, 19 nt, Artificial Sequence
  Description of Artificial Sequence: Synthetic oligonucleotide
  Antisense strand to SEQ ID NO: 2438902
cuuuccauggaauagaagc

SEQ ID NO: 2438904 - RNA, 19 nt, Artificial Sequence
  Description of Artificial Sequence: Synthetic oligonucleotide
  Sense strand starting at position 17 of SEQ ID NO: 1886965
cuucuauuccauggaaagg

SEQ ID NO: 2438905 - RNA, 19 nt, Artificial Sequence
  Description of Artificial Sequence: Synthetic oligonucleotide
  Antisense strand to SEQ ID NO: 2438904
ccuuuccauggaauagaag

SEQ ID NO: 2438906 - RNA, 19 nt, Artificial Sequence
  Description of Artificial Sequence: Synthetic oligonucleotide
  Sense strand starting at position 82 of SEQ ID NO: 1886965
gcuguuguuaaguaaaggu

SEQ ID NO: 2438907 - RNA, 19 nt, Artificial Sequence
  Description of Artificial Sequence: Synthetic oligonucleotide
  Antisense strand to SEQ ID NO: 2438906
accuuuacuuaacaacagc

SEQ ID NO: 2438908 - RNA, 19 nt, Artificial Sequence
  Description of Artificial Sequence: Synthetic oligonucleotide
  Sense strand starting at position 463 of SEQ ID NO: 1886965
guaagauggugaguacaga

SEQ ID NO: 2438909 - RNA, 19 nt, Artificial Sequence
  Description of Artificial Sequence: Synthetic oligonucleotide
  Antisense strand to SEQ ID NO: 2438908
ucuguacucaccaucuuac

SEQ ID NO: 2438910 - RNA, 19 nt, Artificial Sequence
  Description of Artificial Sequence: Synthetic oligonucleotide
  Sense strand starting at position 480 of SEQ ID NO: 1886965
gagaaagaaaucgguuguu

SEQ ID NO: 2438911 - RNA, 19 nt, Artificial Sequence
  Description of Artificial Sequence: Synthetic oligonucleotide
  Antisense strand to SEQ ID NO: 2438910
aacaaccgauuucuuucuc

SEQ ID NO: 2438912 - RNA, 19 nt, Artificial Sequence
  Description of Artificial Sequence: Synthetic oligonucleotide
  Sense strand starting at position 534 of SEQ ID NO: 1886965
cuuccauggugggucauaa

SEQ ID NO: 2438913 - RNA, 19 nt, Artificial Sequence
  Description of Artificial Sequence: Synthetic oligonucleotide
  Antisense strand to SEQ ID NO: 2438912
uuaugacccaccauggaag

SEQ ID NO: 2438914 - RNA, 19 nt, Artificial Sequence
  Description of Artificial Sequence: Synthetic oligonucleotide
  Sense strand starting at position 584 of SEQ ID NO: 1886965
aaauaaagcccguacuuga

SEQ ID NO: 2438915 - RNA, 19 nt, Artificial Sequence
  Description of Artificial Sequence: Synthetic oligonucleotide
  Antisense strand to SEQ ID NO: 2438914
ucaaguacgggcuuuauuu

SEQ ID NO: 2438916 - RNA, 19 nt, Artificial Sequence
  Description of Artificial Sequence: Synthetic oligonucleotide
  Sense strand starting at position 640 of SEQ ID NO: 1886965
accucauugucaccucgau

SEQ ID NO: 2438917 - RNA, 19 nt, Artificial Sequence
  Description of Artificial Sequence: Synthetic oligonucleotide
  Antisense strand to SEQ ID NO: 2438916
aucgaggugacaaugaggu

SEQ ID NO: 2438918 - RNA, 19 nt, Artificial Sequence
  Description of Artificial Sequence: Synthetic oligonucleotide
  Sense strand starting at position 911 of SEQ ID NO: 1886965
gcacaugagucaucaucuu

SEQ ID NO: 2438919 - RNA, 19 nt, Artificial Sequence
  Description of Artificial Sequence: Synthetic oligonucleotide
  Antisense strand to SEQ ID NO: 2438918
aagaugaugacucaugugc

SEQ ID NO: 2438920 - RNA, 19 nt, Artificial Sequence
  Description of Artificial Sequence: Synthetic oligonucleotide
  Sense strand starting at position 1755 of SEQ ID NO: 1886965
aguuuagaugguggugaga

SEQ ID NO: 2438921 - RNA, 19 nt, Artificial Sequence
  Description of Artificial Sequence: Synthetic oligonucleotide
  Antisense strand to SEQ ID NO: 2438920
ucucaccaccaucuaaacu

SEQ ID NO: 2438922 - RNA, 19 nt, Artificial Sequence
  Description of Artificial Sequence: Synthetic oligonucleotide
  Sense strand starting at position 1784 of SEQ ID NO: 1886965
uuugccuuucccuagguua

SEQ ID NO: 2438923 - RNA, 19 nt, Artificial Sequence
  Description of Artificial Sequence: Synthetic oligonucleotide
  Antisense strand to SEQ ID NO: 2438922
uaaccuagggaaaggcaaa

SEQ ID NO: 2438924 - RNA, 19 nt, Artificial Sequence
  Description of Artificial Sequence: Synthetic oligonucleotide
  Sense strand starting at position 1865 of SEQ ID NO: 1886965
cuuccuacagggcgaaaua

SEQ ID NO: 2438925 - RNA, 19 nt, Artificial Sequence
  Description of Artificial Sequence: Synthetic oligonucleotide
  Antisense strand to SEQ ID NO: 2438924
uauuucgcccuguaggaag

SEQ ID NO: 2438926 - RNA, 19 nt, Artificial Sequence
  Description of Artificial Sequence: Synthetic oligonucleotide
  Sense strand starting at position 1875 of SEQ ID NO: 1886965
ggcgaaauaaguugaguaa

SEQ ID NO: 2438927 - RNA, 19 nt, Artificial Sequence
  Description of Artificial Sequence: Synthetic oligonucleotide
  Antisense strand to SEQ ID NO: 2438926
uuacucaacuuauuucgcc

SEQ ID NO: 2438928 - RNA, 19 nt, Artificial Sequence
  Description of Artificial Sequence: Synthetic oligonucleotide
  Sense strand starting at position 1876 of SEQ ID NO: 1886965
gcgaaauaaguugaguaau

SEQ ID NO: 2438929 - RNA, 19 nt, Artificial Sequence
  Description of Artificial Sequence: Synthetic oligonucleotide
  Antisense strand to SEQ ID NO: 2438928
auuacucaacuuauuucgc

SEQ ID NO: 2438930 - RNA, 19 nt, Artificial Sequence
  Description of Artificial Sequence: Synthetic oligonucleotide
  Sense strand starting at position 1887 of SEQ ID NO: 1886965
ugaguaaugccacauuauu

SEQ ID NO: 2438931 - RNA, 19 nt, Artificial Sequence
  Description of Artificial Sequence: Synthetic oligonucleotide
  Antisense strand to SEQ ID NO: 2438930
aauaauguggcauuacuca

SEQ ID NO: 2438932 - RNA, 19 nt, Artificial Sequence
  Description of Artificial Sequence: Synthetic oligonucleotide
  Sense strand starting at position 2146 of SEQ ID NO: 1886965
uaagcauuugcugagugca

SEQ ID NO: 2438933 - RNA, 19 nt, Artificial Sequence
  Description of Artificial Sequence: Synthetic oligonucleotide
  Antisense strand to SEQ ID NO: 2438932
ugcacucagcaaaugcuua

SEQ ID NO: 2438934 - RNA, 19 nt, Artificial Sequence
  Description of Artificial Sequence: Synthetic oligonucleotide
  Sense strand starting at position 2280 of SEQ ID NO: 1886965
ugauaaucucucuaaggca

SEQ ID NO: 2438935 - RNA, 19 nt, Artificial Sequence
  Description of Artificial Sequence: Synthetic oligonucleotide
  Antisense strand to SEQ ID NO: 2438934
ugccuuagagagauuauca

SEQ ID NO: 2438936 - RNA, 19 nt, Artificial Sequence
  Description of Artificial Sequence: Synthetic oligonucleotide
  Sense strand starting at position 2294 of SEQ ID NO: 1886965
aggcauuccugagccugaa

SEQ ID NO: 2438937 - RNA, 19 nt, Artificial Sequence
  Description of Artificial Sequence: Synthetic oligonucleotide
  Antisense strand to SEQ ID NO: 2438936
uucaggcucaggaaugccu

SEQ ID NO: 2438938 - RNA, 19 nt, Artificial Sequence
  Description of Artificial Sequence: Synthetic oligonucleotide
  Sense strand starting at position 2343 of SEQ ID NO: 1886965
uauuuaacacuucgguagu

SEQ ID NO: 2438939 - RNA, 19 nt, Artificial Sequence
  Description of Artificial Sequence: Synthetic oligonucleotide
  Antisense strand to SEQ ID NO: 2438938
acuaccgaaguguuaaaua

SEQ ID NO: 2438940 - RNA, 19 nt, Artificial Sequence
  Description of Artificial Sequence: Synthetic oligonucleotide
  Sense strand starting at position 2346 of SEQ ID NO: 1886965
uuaacacuucgguagucau

SEQ ID NO: 2438941 - RNA, 19 nt, Artificial Sequence
  Description of Artificial Sequence: Synthetic oligonucleotide
  Antisense strand to SEQ ID NO: 2438940
augacuaccgaaguguuaa

SEQ ID NO: 2438942 - RNA, 19 nt, Artificial Sequence
  Description of Artificial Sequence: Synthetic oligonucleotide
  Sense strand starting at position 2358 of SEQ ID NO: 1886965
uagucaucucauugguuga

SEQ ID NO: 2438943 - RNA, 19 nt, Artificial Sequence
  Description of Artificial Sequence: Synthetic oligonucleotide
  Antisense strand to SEQ ID NO: 2438942
ucaaccaaugagaugacua

SEQ ID NO: 2438944 - RNA, 19 nt, Artificial Sequence
  Description of Artificial Sequence: Synthetic oligonucleotide
  Sense strand starting at position 2391 of SEQ ID NO: 1886965
gugaccuauugaucuaaac

SEQ ID NO: 2438945 - RNA, 19 nt, Artificial Sequence
  Description of Artificial Sequence: Synthetic oligonucleotide
  Antisense strand to SEQ ID NO: 2438944
guuuagaucaauaggucac

SEQ ID NO: 2438946 - RNA, 19 nt, Artificial Sequence
  Description of Artificial Sequence: Synthetic oligonucleotide
  Sense strand starting at position 2542 of SEQ ID NO: 1886965
gugcccaauuuguuccaau

SEQ ID NO: 2438947 - RNA, 19 nt, Artificial Sequence
  Description of Artificial Sequence: Synthetic oligonucleotide
  Antisense strand to SEQ ID NO: 2438946
auuggaacaaauugggcac

SEQ ID NO: 2438948 - RNA, 19 nt, Artificial Sequence
  Description of Artificial Sequence: Synthetic oligonucleotide
  Sense strand starting at position 2698 of SEQ ID NO: 1886965
ccuauaaaucacuggaugu

SEQ ID NO: 2438949 - RNA, 19 nt, Artificial Sequence
  Description of Artificial Sequence: Synthetic oligonucleotide
  Antisense strand to SEQ ID NO: 2438948
acauccagugauuuauagg

SEQ ID NO: 2438950 - RNA, 19 nt, Artificial Sequence
  Description of Artificial Sequence: Synthetic oligonucleotide
  Sense strand starting at position 2711 of SEQ ID NO: 1886965
ggauguuacucauuggcca

SEQ ID NO: 2438951 - RNA, 19 nt, Artificial Sequence
  Description of Artificial Sequence: Synthetic oligonucleotide
  Antisense strand to SEQ ID NO: 2438950
uggccaaugaguaacaucc

SEQ ID NO: 2438952 - RNA, 19 nt, Artificial Sequence
  Description of Artificial Sequence: Synthetic oligonucleotide
  Sense strand starting at position 3280 of SEQ ID NO: 1886965
ugguguuaguaauccugaa

SEQ ID NO: 2438953 - RNA, 19 nt, Artificial Sequence
  Description of Artificial Sequence: Synthetic oligonucleotide
  Antisense strand to SEQ ID NO: 2438952
uucaggauuacuaacacca

SEQ ID NO: 2438954 - RNA, 19 nt, Artificial Sequence
  Description of Artificial Sequence: Synthetic oligonucleotide
  Sense strand starting at position 3284 of SEQ ID NO: 1886965
guuaguaauccugaauuac

SEQ ID NO: 2438955 - RNA, 19 nt, Artificial Sequence
  Description of Artificial Sequence: Synthetic oligonucleotide
  Antisense strand to SEQ ID NO: 2438954
guaauucaggauuacuaac

SEQ ID NO: 2438956 - RNA, 19 nt, Artificial Sequence
  Description of Artificial Sequence: Synthetic oligonucleotide
  Sense strand starting at position 3313 of SEQ ID NO: 1886965
gggagugucacaugugggu

SEQ ID NO: 2438957 - RNA, 19 nt, Artificial Sequence
  Description of Artificial Sequence: Synthetic oligonucleotide
  Antisense strand to SEQ ID NO: 2438956
acccacaugugacacuccc

SEQ ID NO: 2438958 - RNA, 19 nt, Artificial Sequence
  Description of Artificial Sequence: Synthetic oligonucleotide
  Sense strand starting at position 3363 of SEQ ID NO: 1886965
uacagcugucuguauagga

SEQ ID NO: 2438959 - RNA, 19 nt, Artificial Sequence
  Description of Artificial Sequence: Synthetic oligonucleotide
  Antisense strand to SEQ ID NO: 2438958
uccuauacagacagcugua

SEQ ID NO: 2438960 - RNA, 19 nt, Artificial Sequence
  Description of Artificial Sequence: Synthetic oligonucleotide
  Sense strand starting at position 3433 of SEQ ID NO: 1886965
ggaggugacucuaguugag

SEQ ID NO: 2438961 - RNA, 19 nt, Artificial Sequence
  Description of Artificial Sequence: Synthetic oligonucleotide
  Antisense strand to SEQ ID NO: 2438960
cucaacuagagucaccucc

SEQ ID NO: 2438962 - RNA, 19 nt, Artificial Sequence
  Description of Artificial Sequence: Synthetic oligonucleotide
  Sense strand starting at position 3435 of SEQ ID NO: 1886965
aggugacucuaguugaguu

SEQ ID NO: 2438963 - RNA, 19 nt, Artificial Sequence
  Description of Artificial Sequence: Synthetic oligonucleotide
  Antisense strand to SEQ ID NO: 2438962
aacucaacuagagucaccu

SEQ ID NO: 2438964 - RNA, 19 nt, Artificial Sequence
  Description of Artificial Sequence: Synthetic oligonucleotide
  Sense strand starting at position 3574 of SEQ ID NO: 1886965
guaugaagugccuaauccu

SEQ ID NO: 2438965 - RNA, 19 nt, Artificial Sequence
  Description of Artificial Sequence: Synthetic oligonucleotide
  Antisense strand to SEQ ID NO: 2438964
aggauuaggcacuucauac

SEQ ID NO: 2438966 - RNA, 19 nt, Artificial Sequence
  Description of Artificial Sequence: Synthetic oligonucleotide
  Sense strand starting at position 3647 of SEQ ID NO: 1886965
gaguuagcuguguaaacug

SEQ ID NO: 2438967 - RNA, 19 nt, Artificial Sequence
  Description of Artificial Sequence: Synthetic oligonucleotide
  Antisense strand to SEQ ID NO: 2438966
caguuuacacagcuaacuc

SEQ ID NO: 2438968 - RNA, 19 nt, Artificial Sequence
  Description of Artificial Sequence: Synthetic oligonucleotide
  Sense strand starting at position 3697 of SEQ ID NO: 1886965
gguagaaacccuugggcuu

SEQ ID NO: 2438969 - RNA, 19 nt, Artificial Sequence
  Description of Artificial Sequence: Synthetic oligonucleotide
  Antisense strand to SEQ ID NO: 2438968
aagcccaaggguuucuacc

SEQ ID NO: 2438970 - RNA, 19 nt, Artificial Sequence
  Description of Artificial Sequence: Synthetic oligonucleotide
  Sense strand starting at position 3698 of SEQ ID NO: 1886965
guagaaacccuugggcuuu

SEQ ID NO: 2438971 - RNA, 19 nt, Artificial Sequence
  Description of Artificial Sequence: Synthetic oligonucleotide
  Antisense strand to SEQ ID NO: 2438970
aaagcccaaggguuucuac

SEQ ID NO: 2438972 - RNA, 19 nt, Artificial Sequence
  Description of Artificial Sequence: Synthetic oligonucleotide
  Sense strand starting at position 3724 of SEQ ID NO: 1886965
caaggaucucuguggguag

SEQ ID NO: 2438973 - RNA, 19 nt, Artificial Sequence
  Description of Artificial Sequence: Synthetic oligonucleotide
  Antisense strand to SEQ ID NO: 2438972
cuacccacagagauccuug

SEQ ID NO: 2438974 - RNA, 19 nt, Artificial Sequence
  Description of Artificial Sequence: Synthetic oligonucleotide
  Sense strand starting at position 3726 of SEQ ID NO: 1886965
aggaucucuguggguagau

SEQ ID NO: 2438975 - RNA, 19 nt, Artificial Sequence
  Description of Artificial Sequence: Synthetic oligonucleotide
  Antisense strand to SEQ ID NO: 2438974
aucuacccacagagauccu

SEQ ID NO: 2438976 - RNA, 19 nt, Artificial Sequence
  Description of Artificial Sequence: Synthetic oligonucleotide
  Sense strand starting at position 3781 of SEQ ID NO: 1886965
caggaugccucaguuuaga

SEQ ID NO: 2438977 - RNA, 19 nt, Artificial Sequence
  Description of Artificial Sequence: Synthetic oligonucleotide
  Antisense strand to SEQ ID NO: 2438976
ucuaaacugaggcauccug

SEQ ID NO: 2438978 - RNA, 19 nt, Artificial Sequence
  Description of Artificial Sequence: Synthetic oligonucleotide
  Sense strand starting at position 3784 of SEQ ID NO: 1886965
gaugccucaguuuagagaa

SEQ ID NO: 2438979 - RNA, 19 nt, Artificial Sequence
  Description of Artificial Sequence: Synthetic oligonucleotide
  Antisense strand to SEQ ID NO: 2438978
uucucuaaacugaggcauc

SEQ ID NO: 2438980 - RNA, 19 nt, Artificial Sequence
  Description of Artificial Sequence: Synthetic oligonucleotide
  Sense strand starting at position 3871 of SEQ ID NO: 1886965
gucagaauagguuaggcuu

SEQ ID NO: 2438981 - RNA, 19 nt, Artificial Sequence
  Description of Artificial Sequence: Synthetic oligonucleotide
  Antisense strand to SEQ ID NO: 2438980
aagccuaaccuauucugac

SEQ ID NO: 2438982 - RNA, 19 nt, Artificial Sequence
  Description of Artificial Sequence: Synthetic oligonucleotide
  Sense strand starting at position 575 of SEQ ID NO: 1886966
gucuuaguuggagaggucu

SEQ ID NO: 2438983 - RNA, 19 nt, Artificial Sequence
  Description of Artificial Sequence: Synthetic oligonucleotide
  Antisense strand to SEQ ID NO: 2438982
agaccucuccaacuaagac

SEQ ID NO: 2438984 - RNA, 19 nt, Artificial Sequence
  Description of Artificial Sequence: Synthetic oligonucleotide
  Sense strand starting at position 577 of SEQ ID NO: 1886966
cuuaguuggagaggucuga

SEQ ID NO: 2438985 - RNA, 19 nt, Artificial Sequence
  Description of Artificial Sequence: Synthetic oligonucleotide
  Antisense strand to SEQ ID NO: 2438984
ucagaccucuccaacuaag

SEQ ID NO: 2438986 - RNA, 19 nt, Artificial Sequence
  Description of Artificial Sequence: Synthetic oligonucleotide
  Sense strand starting at position 1253 of SEQ ID NO: 1886966
gguaucuugugguuaagaa

SEQ ID NO: 2438987 - RNA, 19 nt, Artificial Sequence
  Description of Artificial Sequence: Synthetic oligonucleotide
  Antisense strand to SEQ ID NO: 2438986
uucuuaaccacaagauacc

SEQ ID NO: 2438988 - RNA, 19 nt, Artificial Sequence
  Description of Artificial Sequence: Synthetic oligonucleotide
  Sense strand starting at position 1254 of SEQ ID NO: 1886966
guaucuugugguuaagaac

SEQ ID NO: 2438989 - RNA, 19 nt, Artificial Sequence
  Description of Artificial Sequence: Synthetic oligonucleotide
  Antisense strand to SEQ ID NO: 2438988
guucuuaaccacaagauac

SEQ ID NO: 2438990 - RNA, 19 nt, Artificial Sequence
  Description of Artificial Sequence: Synthetic oligonucleotide
  Sense strand starting at position 1301 of SEQ ID NO: 1886966
guuugaacccuggaucugu

SEQ ID NO: 2438991 - RNA, 19 nt, Artificial Sequence
  Description of Artificial Sequence: Synthetic oligonucleotide
  Antisense strand to SEQ ID NO: 2438990
acagauccaggguucaaac

SEQ ID NO: 2438992 - RNA, 19 nt, Artificial Sequence
  Description of Artificial Sequence: Synthetic oligonucleotide
  Sense strand starting at position 1312 of SEQ ID NO: 1886966
ggaucugucccuuacucau

SEQ ID NO: 2438993 - RNA, 19 nt, Artificial Sequence
  Description of Artificial Sequence: Synthetic oligonucleotide
  Antisense strand to SEQ ID NO: 2438992
augaguaagggacagaucc

SEQ ID NO: 2438994 - RNA, 19 nt, Artificial Sequence
  Description of Artificial Sequence: Synthetic oligonucleotide
  Sense strand starting at position 1396 of SEQ ID NO: 1886966
auguucucucccggauaca

SEQ ID NO: 2438995 - RNA, 19 nt, Artificial Sequence
  Description of Artificial Sequence: Synthetic oligonucleotide
  Antisense strand to SEQ ID NO: 2438994
uguauccgggagagaacau

SEQ ID NO: 2438996 - RNA, 19 nt, Artificial Sequence
  Description of Artificial Sequence: Synthetic oligonucleotide
  Sense strand starting at position 1414 of SEQ ID NO: 1886966
agcuguggucaggacugaa

SEQ ID NO: 2438997 - RNA, 19 nt, Artificial Sequence
  Description of Artificial Sequence: Synthetic oligonucleotide
  Antisense strand to SEQ ID NO: 2438996
uucaguccugaccacagcu

SEQ ID NO: 2438998 - RNA, 19 nt, Artificial Sequence
  Description of Artificial Sequence: Synthetic oligonucleotide
  Sense strand starting at position 1430 of SEQ ID NO: 1886966
gaaggagauaguggguauu

SEQ ID NO: 2438999 - RNA, 19 nt, Artificial Sequence
  Description of Artificial Sequence: Synthetic oligonucleotide
  Antisense strand to SEQ ID NO: 2438998
aauacccacuaucuccuuc

SEQ ID NO: 2439000 - RNA, 19 nt, Artificial Sequence
  Description of Artificial Sequence: Synthetic oligonucleotide
  Sense strand starting at position 1507 of SEQ ID NO: 1886966
gucguugucauugucauca

SEQ ID NO: 2439001 - RNA, 19 nt, Artificial Sequence
  Description of Artificial Sequence: Synthetic oligonucleotide
  Antisense strand to SEQ ID NO: 2439000
ugaugacaaugacaacgac

SEQ ID NO: 2439002 - RNA, 19 nt, Artificial Sequence
  Description of Artificial Sequence: Synthetic oligonucleotide
  Sense strand starting at position 1511 of SEQ ID NO: 1886966
uugucauugucaucaguag

SEQ ID NO: 2439003 - RNA, 19 nt, Artificial Sequence
  Description of Artificial Sequence: Synthetic oligonucleotide
  Antisense strand to SEQ ID NO: 2439002
cuacugaugacaaugacaa

SEQ ID NO: 2439004 - RNA, 19 nt, Artificial Sequence
  Description of Artificial Sequence: Synthetic oligonucleotide
  Sense strand starting at position 2020 of SEQ ID NO: 1886966
aguccauggcucugaggaa

SEQ ID NO: 2439005 - RNA, 19 nt, Artificial Sequence
  Description of Artificial Sequence: Synthetic oligonucleotide
  Antisense strand to SEQ ID NO: 2439004
uuccucagagccauggacu

SEQ ID NO: 2439006 - RNA, 19 nt, Artificial Sequence
  Description of Artificial Sequence: Synthetic oligonucleotide
  Sense strand starting at position 2104 of SEQ ID NO: 1886966
ggagaggguucgccagagu

SEQ ID NO: 2439007 - RNA, 19 nt, Artificial Sequence
  Description of Artificial Sequence: Synthetic oligonucleotide
  Antisense strand to SEQ ID NO: 2439006
acucuggcgaacccucucc

SEQ ID NO: 2439008 - RNA, 19 nt, Artificial Sequence
  Description of Artificial Sequence: Synthetic oligonucleotide
  Sense strand starting at position 2133 of SEQ ID NO: 1886966
guauacaucuugccaggaa

SEQ ID NO: 2439009 - RNA, 19 nt, Artificial Sequence
  Description of Artificial Sequence: Synthetic oligonucleotide
  Antisense strand to SEQ ID NO: 2439008
uuccuggcaagauguauac

SEQ ID NO: 2439010 - RNA, 19 nt, Artificial Sequence
  Description of Artificial Sequence: Synthetic oligonucleotide
  Sense strand starting at position 2294 of SEQ ID NO: 1886966
uucuguuugguuuagcuaa

SEQ ID NO: 2439011 - RNA, 19 nt, Artificial Sequence
  Description of Artificial Sequence: Synthetic oligonucleotide
  Antisense strand to SEQ ID NO: 2439010
uuagcuaaaccaaacagaa

SEQ ID NO: 2439012 - RNA, 19 nt, Artificial Sequence
  Description of Artificial Sequence: Synthetic oligonucleotide
  Sense strand starting at position 2341 of SEQ ID NO: 1886966
ggaacugcgauagguguua

SEQ ID NO: 2439013 - RNA, 19 nt, Artificial Sequence
  Description of Artificial Sequence: Synthetic oligonucleotide
  Antisense strand to SEQ ID NO: 2439012
uaacaccuaucgcaguucc

SEQ ID NO: 2439014 - RNA, 19 nt, Artificial Sequence
  Description of Artificial Sequence: Synthetic oligonucleotide
  Sense strand starting at position 2343 of SEQ ID NO: 1886966
aacugcgauagguguuaga

SEQ ID NO: 2439015 - RNA, 19 nt, Artificial Sequence
  Description of Artificial Sequence: Synthetic oligonucleotide
  Antisense strand to SEQ ID NO: 2439014
ucuaacaccuaucgcaguu

SEQ ID NO: 2439016 - RNA, 19 nt, Artificial Sequence
  Description of Artificial Sequence: Synthetic oligonucleotide
  Sense strand starting at position 2364 of SEQ ID NO: 1886966
uaccaugauggcugagacu

SEQ ID NO: 2439017 - RNA, 19 nt, Artificial Sequence
  Description of Artificial Sequence: Synthetic oligonucleotide
  Antisense strand to SEQ ID NO: 2439016
agucucagccaucauggua

SEQ ID NO: 2439018 - RNA, 19 nt, Artificial Sequence
  Description of Artificial Sequence: Synthetic oligonucleotide
  Sense strand starting at position 2383 of SEQ ID NO: 1886966
uggucccuguucucugaaa

SEQ ID NO: 2439019 - RNA, 19 nt, Artificial Sequence
  Description of Artificial Sequence: Synthetic oligonucleotide
  Antisense strand to SEQ ID NO: 2439018
uuucagagaacagggacca

SEQ ID NO: 2439020 - RNA, 19 nt, Artificial Sequence
  Description of Artificial Sequence: Synthetic oligonucleotide
  Sense strand starting at position 2394 of SEQ ID NO: 1886966
cucugaaaggcauaugguu

SEQ ID NO: 2439021 - RNA, 19 nt, Artificial Sequence
  Description of Artificial Sequence: Synthetic oligonucleotide
  Antisense strand to SEQ ID NO: 2439020
aaccauaugccuuucagag

SEQ ID NO: 2439022 - RNA, 19 nt, Artificial Sequence
  Description of Artificial Sequence: Synthetic oligonucleotide
  Sense strand starting at position 2477 of SEQ ID NO: 1886966
gaaggaaucugugucuuau

SEQ ID NO: 2439023 - RNA, 19 nt, Artificial Sequence
  Description of Artificial Sequence: Synthetic oligonucleotide
  Antisense strand to SEQ ID NO: 2439022
auaagacacagauuccuuc

SEQ ID NO: 2439024 - RNA, 19 nt, Artificial Sequence
  Description of Artificial Sequence: Synthetic oligonucleotide
  Sense strand starting at position 2483 of SEQ ID NO: 1886966
aucugugucuuauuuaucu

SEQ ID NO: 2439025 - RNA, 19 nt, Artificial Sequence
  Description of Artificial Sequence: Synthetic oligonucleotide
  Antisense strand to SEQ ID NO: 2439024
agauaaauaagacacagau

SEQ ID NO: 2439026 - RNA, 19 nt, Artificial Sequence
  Description of Artificial Sequence: Synthetic oligonucleotide
  Sense strand starting at position 2525 of SEQ ID NO: 1886966
agcagaaugcugugaaccu

SEQ ID NO: 2439027 - RNA, 19 nt, Artificial Sequence
  Description of Artificial Sequence: Synthetic oligonucleotide
  Antisense strand to SEQ ID NO: 2439026
agguucacagcauucugcu

SEQ ID NO: 2439028 - RNA, 19 nt, Artificial Sequence
  Description of Artificial Sequence: Synthetic oligonucleotide
  Sense strand starting at position 2565 of SEQ ID NO: 1886966
uguggagucuaauugaaga

SEQ ID NO: 2439029 - RNA, 19 nt, Artificial Sequence
  Description of Artificial Sequence: Synthetic oligonucleotide
  Antisense strand to SEQ ID NO: 2439028
ucuucaauuagacuccaca

SEQ ID NO: 2439030 - RNA, 19 nt, Artificial Sequence
  Description of Artificial Sequence: Synthetic oligonucleotide
  Sense strand starting at position 2640 of SEQ ID NO: 1886966
agauaaauauuggagggaa

SEQ ID NO: 2439031 - RNA, 19 nt, Artificial Sequence
  Description of Artificial Sequence: Synthetic oligonucleotide
  Antisense strand to SEQ ID NO: 2439030
uucccuccaauauuuaucu

SEQ ID NO: 2439032 - RNA, 19 nt, Artificial Sequence
  Description of Artificial Sequence: Synthetic oligonucleotide
  Sense strand starting at position 2724 of SEQ ID NO: 1886966
auccaaucuuaguuuguuu

SEQ ID NO: 2439033 - RNA, 19 nt, Artificial Sequence
  Description of Artificial Sequence: Synthetic oligonucleotide
  Antisense strand to SEQ ID NO: 2439032
aaacaaacuaagauuggau

SEQ ID NO: 2439034 - RNA, 19 nt, Artificial Sequence
  Description of Artificial Sequence: Synthetic oligonucleotide
  Sense strand starting at position 2735 of SEQ ID NO: 1886966
guuuguuucuuaucaagaa

SEQ ID NO: 2439035 - RNA, 19 nt, Artificial Sequence
  Description of Artificial Sequence: Synthetic oligonucleotide
  Antisense strand to SEQ ID NO: 2439034
uucuugauaagaaacaaac

SEQ ID NO: 2439036 - RNA, 19 nt, Artificial Sequence
  Description of Artificial Sequence: Synthetic oligonucleotide
  Sense strand starting at position 2775 of SEQ ID NO: 1886966
agguucacuuggcuggaaa

SEQ ID NO: 2439037 - RNA, 19 nt, Artificial Sequence
  Description of Artificial Sequence: Synthetic oligonucleotide
  Antisense strand to SEQ ID NO: 2439036
uuuccagccaagugaaccu

SEQ ID NO: 2439038 - RNA, 19 nt, Artificial Sequence
  Description of Artificial Sequence: Synthetic oligonucleotide
  Sense strand starting at position 2776 of SEQ ID NO: 1886966
gguucacuuggcuggaaau

SEQ ID NO: 2439039 - RNA, 19 nt, Artificial Sequence
  Description of Artificial Sequence: Synthetic oligonucleotide
  Antisense strand to SEQ ID NO: 2439038
auuuccagccaagugaacc

SEQ ID NO: 2439040 - RNA, 19 nt, Artificial Sequence
  Description of Artificial Sequence: Synthetic oligonucleotide
  Sense strand starting at position 2892 of SEQ ID NO: 1886966
aggugaaccucugugaaga

SEQ ID NO: 2439041 - RNA, 19 nt, Artificial Sequence
  Description of Artificial Sequence: Synthetic oligonucleotide
  Antisense strand to SEQ ID NO: 2439040
ucuucacagagguucaccu

SEQ ID NO: 2439042 - RNA, 19 nt, Artificial Sequence
  Description of Artificial Sequence: Synthetic oligonucleotide
  Sense strand starting at position 2893 of SEQ ID NO: 1886966
ggugaaccucugugaagaa

SEQ ID NO: 2439043 - RNA, 19 nt, Artificial Sequence
  Description of Artificial Sequence: Synthetic oligonucleotide
  Antisense strand to SEQ ID NO: 2439042
uucuucacagagguucacc

SEQ ID NO: 2439044 - RNA, 19 nt, Artificial Sequence
  Description of Artificial Sequence: Synthetic oligonucleotide
  Sense strand starting at position 3519 of SEQ ID NO: 1886966
agcaaugucguaugggaau

SEQ ID NO: 2439045 - RNA, 19 nt, Artificial Sequence
  Description of Artificial Sequence: Synthetic oligonucleotide
  Antisense strand to SEQ ID NO: 2439044
auucccauacgacauugcu

SEQ ID NO: 2439046 - RNA, 19 nt, Artificial Sequence
  Description of Artificial Sequence: Synthetic oligonucleotide
  Sense strand starting at position 3525 of SEQ ID NO: 1886966
gucguaugggaauauauga

SEQ ID NO: 2439047 - RNA, 19 nt, Artificial Sequence
  Description of Artificial Sequence: Synthetic oligonucleotide
  Antisense strand to SEQ ID NO: 2439046
ucauauauucccauacgac

SEQ ID NO: 2439048 - RNA, 19 nt, Artificial Sequence
  Description of Artificial Sequence: Synthetic oligonucleotide
  Sense strand starting at position 3569 of SEQ ID NO: 1886966
ccucuuuaggagugagagu

SEQ ID NO: 2439049 - RNA, 19 nt, Artificial Sequence
  Description of Artificial Sequence: Synthetic oligonucleotide
  Antisense strand to SEQ ID NO: 2439048
acucucacuccuaaagagg

SEQ ID NO: 2439050 - RNA, 19 nt, Artificial Sequence
  Description of Artificial Sequence: Synthetic oligonucleotide
  Sense strand starting at position 3641 of SEQ ID NO: 1886966
ggucaacagcauugaaauc

SEQ ID NO: 2439051 - RNA, 19 nt, Artificial Sequence
  Description of Artificial Sequence: Synthetic oligonucleotide
  Antisense strand to SEQ ID NO: 2439050
gauuucaaugcuguugacc

SEQ ID NO: 2439052 - RNA, 19 nt, Artificial Sequence
  Description of Artificial Sequence: Synthetic oligonucleotide
  Sense strand starting at position 3686 of SEQ ID NO: 1886966
aaauguggcucucccagau

SEQ ID NO: 2439053 - RNA, 19 nt, Artificial Sequence
  Description of Artificial Sequence: Synthetic oligonucleotide
  Antisense strand to SEQ ID NO: 2439052
aucugggagagccacauuu

SEQ ID NO: 2439054 - RNA, 19 nt, Artificial Sequence
  Description of Artificial Sequence: Synthetic oligonucleotide
  Sense strand starting at position 3690 of SEQ ID NO: 1886966
guggcucucccagauggaa

SEQ ID NO: 2439055 - RNA, 19 nt, Artificial Sequence
  Description of Artificial Sequence: Synthetic oligonucleotide
  Antisense strand to SEQ ID NO: 2439054
uuccaucugggagagccac

SEQ ID NO: 2439056 - RNA, 19 nt, Artificial Sequence
  Description of Artificial Sequence: Synthetic oligonucleotide
  Sense strand starting at position 3780 of SEQ ID NO: 1886966
gagugauugccaggccaaa

SEQ ID NO: 2439057 - RNA, 19 nt, Artificial Sequence
  Description of Artificial Sequence: Synthetic oligonucleotide
  Antisense strand to SEQ ID NO: 2439056
uuuggccuggcaaucacuc

SEQ ID NO: 2439058 - RNA, 19 nt, Artificial Sequence
  Description of Artificial Sequence: Synthetic oligonucleotide
  Sense strand starting at position 3892 of SEQ ID NO: 1886966
ggugacuacuguccaaacu

SEQ ID NO: 2439059 - RNA, 19 nt, Artificial Sequence
  Description of Artificial Sequence: Synthetic oligonucleotide
  Antisense strand to SEQ ID NO: 2439058
aguuuggacaguagucacc

SEQ ID NO: 2439060 - RNA, 19 nt, Artificial Sequence
  Description of Artificial Sequence: Synthetic oligonucleotide
  Sense strand starting at position 3893 of SEQ ID NO: 1886966
gugacuacuguccaaacuu

SEQ ID NO: 2439061 - RNA, 19 nt, Artificial Sequence
  Description of Artificial Sequence: Synthetic oligonucleotide
  Antisense strand to SEQ ID NO: 2439060
aaguuuggacaguagucac

SEQ ID NO: 2439062 - RNA, 19 nt, Artificial Sequence
  Description of Artificial Sequence: Synthetic oligonucleotide
  Sense strand starting at position 74 of SEQ ID NO: 1886967
ugaaaccguagguaucaua

SEQ ID NO: 2439063 - RNA, 19 nt, Artificial Sequence
  Description of Artificial Sequence: Synthetic oligonucleotide
  Antisense strand to SEQ ID NO: 2439062
uaugauaccuacgguuuca

SEQ ID NO: 2439064 - RNA, 19 nt, Artificial Sequence
  Description of Artificial Sequence: Synthetic oligonucleotide
  Sense strand starting at position 217 of SEQ ID NO: 1886967
uguauacucuuccuuggaa

SEQ ID NO: 2439065 - RNA, 19 nt, Artificial Sequence
  Description of Artificial Sequence: Synthetic oligonucleotide
  Antisense strand to SEQ ID NO: 2439064
uuccaaggaagaguauaca

SEQ ID NO: 2439066 - RNA, 19 nt, Artificial Sequence
  Description of Artificial Sequence: Synthetic oligonucleotide
  Sense strand starting at position 218 of SEQ ID NO: 1886967
guauacucuuccuuggaaa

SEQ ID NO: 2439067 - RNA, 19 nt, Artificial Sequence
  Description of Artificial Sequence: Synthetic oligonucleotide
  Antisense strand to SEQ ID NO: 2439066
uuuccaaggaagaguauac

SEQ ID NO: 2439068 - RNA, 19 nt, Artificial Sequence
  Description of Artificial Sequence: Synthetic oligonucleotide
  Sense strand starting at position 231 of SEQ ID NO: 1886967
uggaaacacccuugaguau

SEQ ID NO: 2439069 - RNA, 19 nt, Artificial Sequence
  Description of Artificial Sequence: Synthetic oligonucleotide
  Antisense strand to SEQ ID NO: 2439068
auacucaaggguguuucca

SEQ ID NO: 2439070 - RNA, 19 nt, Artificial Sequence
  Description of Artificial Sequence: Synthetic oligonucleotide
  Sense strand starting at position 255 of SEQ ID NO: 1886967
aagauagaguccucuagau

SEQ ID NO: 2439071 - RNA, 19 nt, Artificial Sequence
  Description of Artificial Sequence: Synthetic oligonucleotide
  Antisense strand to SEQ ID NO: 2439070
aucuagaggacucuaucuu

SEQ ID NO: 2439072 - RNA, 19 nt, Artificial Sequence
  Description of Artificial Sequence: Synthetic oligonucleotide
  Sense strand starting at position 692 of SEQ ID NO: 1886967
uaggcuuauuaucuuagga

SEQ ID NO: 2439073 - RNA, 19 nt, Artificial Sequence
  Description of Artificial Sequence: Synthetic oligonucleotide
  Antisense strand to SEQ ID NO: 2439072
uccuaagauaauaagccua

SEQ ID NO: 2439074 - RNA, 19 nt, Artificial Sequence
  Description of Artificial Sequence: Synthetic oligonucleotide
  Sense strand starting at position 702 of SEQ ID NO: 1886967
aucuuaggauugguauuga

SEQ ID NO: 2439075 - RNA, 19 nt, Artificial Sequence
  Description of Artificial Sequence: Synthetic oligonucleotide
  Antisense strand to SEQ ID NO: 2439074
ucaauaccaauccuaagau

SEQ ID NO: 2439076 - RNA, 19 nt, Artificial Sequence
  Description of Artificial Sequence: Synthetic oligonucleotide
  Sense strand starting at position 809 of SEQ ID NO: 1886967
cuaagcaaauguuucuaga

SEQ ID NO: 2439077 - RNA, 19 nt, Artificial Sequence
  Description of Artificial Sequence: Synthetic oligonucleotide
  Antisense strand to SEQ ID NO: 2439076
ucuagaaacauuugcuuag

SEQ ID NO: 2439078 - RNA, 19 nt, Artificial Sequence
  Description of Artificial Sequence: Synthetic oligonucleotide
  Sense strand starting at position 826 of SEQ ID NO: 1886967
gaugcaaaguagucucaau

SEQ ID NO: 2439079 - RNA, 19 nt, Artificial Sequence
  Description of Artificial Sequence: Synthetic oligonucleotide
  Antisense strand to SEQ ID NO: 2439078
auugagacuacuuugcauc

SEQ ID NO: 2439080 - RNA, 19 nt, Artificial Sequence
  Description of Artificial Sequence: Synthetic oligonucleotide
  Sense strand starting at position 838 of SEQ ID NO: 1886967
ucucaauagcaauggagaa

SEQ ID NO: 2439081 - RNA, 19 nt, Artificial Sequence
  Description of Artificial Sequence: Synthetic oligonucleotide
  Antisense strand to SEQ ID NO: 2439080
uucuccauugcuauugaga

SEQ ID NO: 2439082 - RNA, 19 nt, Artificial Sequence
  Description of Artificial Sequence: Synthetic oligonucleotide
  Sense strand starting at position 858 of SEQ ID NO: 1886967
acuaucagggcauauuauu

SEQ ID NO: 2439083 - RNA, 19 nt, Artificial Sequence
  Description of Artificial Sequence: Synthetic oligonucleotide
  Antisense strand to SEQ ID NO: 2439082
aauaauaugcccugauagu

SEQ ID NO: 2439084 - RNA, 19 nt, Artificial Sequence
  Description of Artificial Sequence: Synthetic oligonucleotide
  Sense strand starting at position 913 of SEQ ID NO: 1886967
ggucauaugccucaugauu

SEQ ID NO: 2439085 - RNA, 19 nt, Artificial Sequence
  Description of Artificial Sequence: Synthetic oligonucleotide
  Antisense strand to SEQ ID NO: 2439084
aaucaugaggcauaugacc

SEQ ID NO: 2439086 - RNA, 19 nt, Artificial Sequence
  Description of Artificial Sequence: Synthetic oligonucleotide
  Sense strand starting at position 1050 of SEQ ID NO: 1886967
ugucaauuccuuugaugau

SEQ ID NO: 2439087 - RNA, 19 nt, Artificial Sequence
  Description of Artificial Sequence: Synthetic oligonucleotide
  Antisense strand to SEQ ID NO: 2439086
aucaucaaaggaauugaca

SEQ ID NO: 2439088 - RNA, 19 nt, Artificial Sequence
  Description of Artificial Sequence: Synthetic oligonucleotide
  Sense strand starting at position 1104 of SEQ ID NO: 1886967
gcauuaacagcauauggua

SEQ ID NO: 2439089 - RNA, 19 nt, Artificial Sequence
  Description of Artificial Sequence: Synthetic oligonucleotide
  Antisense strand to SEQ ID NO: 2439088
uaccauaugcuguuaaugc

SEQ ID NO: 2439090 - RNA, 19 nt, Artificial Sequence
  Description of Artificial Sequence: Synthetic oligonucleotide
  Sense strand starting at position 2019 of SEQ ID NO: 1886967
ggcguacccagauagaaug

SEQ ID NO: 2439091 - RNA, 19 nt, Artificial Sequence
  Description of Artificial Sequence: Synthetic oligonucleotide
  Antisense strand to SEQ ID NO: 2439090
cauucuaucuggguacgcc

SEQ ID NO: 2439092 - RNA, 19 nt, Artificial Sequence
  Description of Artificial Sequence: Synthetic oligonucleotide
  Sense strand starting at position 2083 of SEQ ID NO: 1886967
uuuguuguggaagguaaga

SEQ ID NO: 2439093 - RNA, 19 nt, Artificial Sequence
  Description of Artificial Sequence: Synthetic oligonucleotide
  Antisense strand to SEQ ID NO: 2439092
ucuuaccuuccacaacaaa

SEQ ID NO: 2439094 - RNA, 19 nt, Artificial Sequence
  Description of Artificial Sequence: Synthetic oligonucleotide
  Sense strand starting at position 2138 of SEQ ID NO: 1886967
gugccauauuuauuccauu

SEQ ID NO: 2439095 - RNA, 19 nt, Artificial Sequence
  Description of Artificial Sequence: Synthetic oligonucleotide
  Antisense strand to SEQ ID NO: 2439094
aauggaauaaauauggcac

SEQ ID NO: 2439096 - RNA, 19 nt, Artificial Sequence
  Description of Artificial Sequence: Synthetic oligonucleotide
  Sense strand starting at position 2430 of SEQ ID NO: 1886967
auuccagaucaaggcuaaa

SEQ ID NO: 2439097 - RNA, 19 nt, Artificial Sequence
  Description of Artificial Sequence: Synthetic oligonucleotide
  Antisense strand to SEQ ID NO: 2439096
uuuagccuugaucuggaau

SEQ ID NO: 2439098 - RNA, 19 nt, Artificial Sequence
  Description of Artificial Sequence: Synthetic oligonucleotide
  Sense strand starting at position 2631 of SEQ ID NO: 1886967
gugugcuuucuggcuguuu

SEQ ID NO: 2439099 - RNA, 19 nt, Artificial Sequence
  Description of Artificial Sequence: Synthetic oligonucleotide
  Antisense strand to SEQ ID NO: 2439098
aaacagccagaaagcacac

SEQ ID NO: 2439100 - RNA, 19 nt, Artificial Sequence
  Description of Artificial Sequence: Synthetic oligonucleotide
  Sense strand starting at position 2806 of SEQ ID NO: 1886967
agaguuuggacaggaguuu

SEQ ID NO: 2439101 - RNA, 19 nt, Artificial Sequence
  Description of Artificial Sequence: Synthetic oligonucleotide
  Antisense strand to SEQ ID NO: 2439100
aaacuccuguccaaacucu

SEQ ID NO: 2439102 - RNA, 19 nt, Artificial Sequence
  Description of Artificial Sequence: Synthetic oligonucleotide
  Sense strand starting at position 2815 of SEQ ID NO: 1886967
acaggaguuucuguugaca

SEQ ID NO: 2439103 - RNA, 19 nt, Artificial Sequence
  Description of Artificial Sequence: Synthetic oligonucleotide
  Antisense strand to SEQ ID NO: 2439102
ugucaacagaaacuccugu

SEQ ID NO: 2439104 - RNA, 19 nt, Artificial Sequence
  Description of Artificial Sequence: Synthetic oligonucleotide
  Sense strand starting at position 2818 of SEQ ID NO: 1886967
ggaguuucuguugacacuu

SEQ ID NO: 2439105 - RNA, 19 nt, Artificial Sequence
  Description of Artificial Sequence: Synthetic oligonucleotide
  Antisense strand to SEQ ID NO: 2439104
aagugucaacagaaacucc

SEQ ID NO: 2439106 - RNA, 19 nt, Artificial Sequence
  Description of Artificial Sequence: Synthetic oligonucleotide
  Sense strand starting at position 3011 of SEQ ID NO: 1886967
gucuuaggccgucuagguu

SEQ ID NO: 2439107 - RNA, 19 nt, Artificial Sequence
  Description of Artificial Sequence: Synthetic oligonucleotide
  Antisense strand to SEQ ID NO: 2439106
aaccuagacggccuaagac

SEQ ID NO: 2439108 - RNA, 19 nt, Artificial Sequence
  Description of Artificial Sequence: Synthetic oligonucleotide
  Sense strand starting at position 3025 of SEQ ID NO: 1886967
agguuauaaucacugcuag

SEQ ID NO: 2439109 - RNA, 19 nt, Artificial Sequence
  Description of Artificial Sequence: Synthetic oligonucleotide
  Antisense strand to SEQ ID NO: 2439108
cuagcagugauuauaaccu

SEQ ID NO: 2439110 - RNA, 19 nt, Artificial Sequence
  Description of Artificial Sequence: Synthetic oligonucleotide
  Sense strand starting at position 3026 of SEQ ID NO: 1886967
gguuauaaucacugcuaga

SEQ ID NO: 2439111 - RNA, 19 nt, Artificial Sequence
  Description of Artificial Sequence: Synthetic oligonucleotide
  Antisense strand to SEQ ID NO: 2439110
ucuagcagugauuauaacc

SEQ ID NO: 2439112 - RNA, 19 nt, Artificial Sequence
  Description of Artificial Sequence: Synthetic oligonucleotide
  Sense strand starting at position 3143 of SEQ ID NO: 1886967
uugcaagucccaggaucaa

SEQ ID NO: 2439113 - RNA, 19 nt, Artificial Sequence
  Description of Artificial Sequence: Synthetic oligonucleotide
  Antisense strand to SEQ ID NO: 2439112
uugauccugggacuugcaa

SEQ ID NO: 2439114 - RNA, 19 nt, Artificial Sequence
  Description of Artificial Sequence: Synthetic oligonucleotide
  Sense strand starting at position 3185 of SEQ ID NO: 1886967
cguaaaguggcugaaaucu

SEQ ID NO: 2439115 - RNA, 19 nt, Artificial Sequence
  Description of Artificial Sequence: Synthetic oligonucleotide
  Antisense strand to SEQ ID NO: 2439114
agauuucagccacuuuacg

SEQ ID NO: 2439116 - RNA, 19 nt, Artificial Sequence
  Description of Artificial Sequence: Synthetic oligonucleotide
  Sense strand starting at position 3220 of SEQ ID NO: 1886967
gugucauggagucauugaa

SEQ ID NO: 2439117 - RNA, 19 nt, Artificial Sequence
  Description of Artificial Sequence: Synthetic oligonucleotide
  Antisense strand to SEQ ID NO: 2439116
uucaaugacuccaugacac

SEQ ID NO: 2439118 - RNA, 19 nt, Artificial Sequence
  Description of Artificial Sequence: Synthetic oligonucleotide
  Sense strand starting at position 3300 of SEQ ID NO: 1886967
uggaaauccuuucuacagu

SEQ ID NO: 2439119 - RNA, 19 nt, Artificial Sequence
  Description of Artificial Sequence: Synthetic oligonucleotide
  Antisense strand to SEQ ID NO: 2439118
acuguagaaaggauuucca

SEQ ID NO: 2439120 - RNA, 19 nt, Artificial Sequence
  Description of Artificial Sequence: Synthetic oligonucleotide
  Sense strand starting at position 3315 of SEQ ID NO: 1886967
caguaacucugugugggaa

SEQ ID NO: 2439121 - RNA, 19 nt, Artificial Sequence
  Description of Artificial Sequence: Synthetic oligonucleotide
  Antisense strand to SEQ ID NO: 2439120
uucccacacagaguuacug

SEQ ID NO: 2439122 - RNA, 19 nt, Artificial Sequence
  Description of Artificial Sequence: Synthetic oligonucleotide
  Sense strand starting at position 3318 of SEQ ID NO: 1886967
uaacucugugugggaauca

SEQ ID NO: 2439123 - RNA, 19 nt, Artificial Sequence
  Description of Artificial Sequence: Synthetic oligonucleotide
  Antisense strand to SEQ ID NO: 2439122
ugauucccacacagaguua

SEQ ID NO: 2439124 - RNA, 19 nt, Artificial Sequence
  Description of Artificial Sequence: Synthetic oligonucleotide
  Sense strand starting at position 3373 of SEQ ID NO: 1886967
ucuucuuccuaagugggaa

SEQ ID NO: 2439125 - RNA, 19 nt, Artificial Sequence
  Description of Artificial Sequence: Synthetic oligonucleotide
  Antisense strand to SEQ ID NO: 2439124
uucccacuuaggaagaaga

SEQ ID NO: 2439126 - RNA, 19 nt, Artificial Sequence
  Description of Artificial Sequence: Synthetic oligonucleotide
  Sense strand starting at position 3376 of SEQ ID NO: 1886967
ucuuccuaagugggaaauu

SEQ ID NO: 2439127 - RNA, 19 nt, Artificial Sequence
  Description of Artificial Sequence: Synthetic oligonucleotide
  Antisense strand to SEQ ID NO: 2439126
aauuucccacuuaggaaga

SEQ ID NO: 2439128 - RNA, 19 nt, Artificial Sequence
  Description of Artificial Sequence: Synthetic oligonucleotide
  Sense strand starting at position 3414 of SEQ ID NO: 1886967
ucaguaguuguuuaauacu

SEQ ID NO: 2439129 - RNA, 19 nt, Artificial Sequence
  Description of Artificial Sequence: Synthetic oligonucleotide
  Antisense strand to SEQ ID NO: 2439128
aguauuaaacaacuacuga

SEQ ID NO: 2439130 - RNA, 19 nt, Artificial Sequence
  Description of Artificial Sequence: Synthetic oligonucleotide
  Sense strand starting at position 3511 of SEQ ID NO: 1886967
uauggauauguauacguau

SEQ ID NO: 2439131 - RNA, 19 nt, Artificial Sequence
  Description of Artificial Sequence: Synthetic oligonucleotide
  Antisense strand to SEQ ID NO: 2439130
auacguauacauauccaua

SEQ ID NO: 2439132 - RNA, 19 nt, Artificial Sequence
  Description of Artificial Sequence: Synthetic oligonucleotide
  Sense strand starting at position 3561 of SEQ ID NO: 1886967
gagagaguauaucuccauc

SEQ ID NO: 2439133 - RNA, 19 nt, Artificial Sequence
  Description of Artificial Sequence: Synthetic oligonucleotide
  Antisense strand to SEQ ID NO: 2439132
gauggagauauacucucuc

SEQ ID NO: 2439134 - RNA, 19 nt, Artificial Sequence
  Description of Artificial Sequence: Synthetic oligonucleotide
  Sense strand starting at position 3615 of SEQ ID NO: 1886967
ccaagauccaguuaggugu

SEQ ID NO: 2439135 - RNA, 19 nt, Artificial Sequence
  Description of Artificial Sequence: Synthetic oligonucleotide
  Antisense strand to SEQ ID NO: 2439134
acaccuaacuggaucuugg

SEQ ID NO: 2439136 - RNA, 19 nt, Artificial Sequence
  Description of Artificial Sequence: Synthetic oligonucleotide
  Sense strand starting at position 3769 of SEQ ID NO: 1886967
agugacuuauagucuagaa

SEQ ID NO: 2439137 - RNA, 19 nt, Artificial Sequence
  Description of Artificial Sequence: Synthetic oligonucleotide
  Antisense strand to SEQ ID NO: 2439136
uucuagacuauaagucacu

SEQ ID NO: 2439138 - RNA, 19 nt, Artificial Sequence
  Description of Artificial Sequence: Synthetic oligonucleotide
  Sense strand starting at position 3773 of SEQ ID NO: 1886967
acuuauagucuagaaggca

SEQ ID NO: 2439139 - RNA, 19 nt, Artificial Sequence
  Description of Artificial Sequence: Synthetic oligonucleotide
  Antisense strand to SEQ ID NO: 2439138
ugccuucuagacuauaagu

SEQ ID NO: 2439140 - RNA, 19 nt, Artificial Sequence
  Description of Artificial Sequence: Synthetic oligonucleotide
  Sense strand starting at position 3896 of SEQ ID NO: 1886967
agugcuugacgugaauuaa

SEQ ID NO: 2439141 - RNA, 19 nt, Artificial Sequence
  Description of Artificial Sequence: Synthetic oligonucleotide
  Antisense strand to SEQ ID NO: 2439140
uuaauucacgucaagcacu

SEQ ID NO: 2439142 - RNA, 19 nt, Artificial Sequence
  Description of Artificial Sequence: Synthetic oligonucleotide
  Sense strand starting at position 3 of SEQ ID NO: 1886968
uaggucagauucuugcaga

SEQ ID NO: 2439143 - RNA, 19 nt, Artificial Sequence
  Description of Artificial Sequence: Synthetic oligonucleotide
  Antisense strand to SEQ ID NO: 2439142
ucugcaagaaucugaccua

SEQ ID NO: 2439144 - RNA, 19 nt, Artificial Sequence
  Description of Artificial Sequence: Synthetic oligonucleotide
  Sense strand starting at position 16 of SEQ ID NO: 1886968
ugcagaaucucagaaagau

SEQ ID NO: 2439145 - RNA, 19 nt, Artificial Sequence
  Description of Artificial Sequence: Synthetic oligonucleotide
  Antisense strand to SEQ ID NO: 2439144
aucuuucugagauucugca

SEQ ID NO: 2439146 - RNA, 19 nt, Artificial Sequence
  Description of Artificial Sequence: Synthetic oligonucleotide
  Sense strand starting at position 298 of SEQ ID NO: 1886968
acgugugacuuggcucuga

SEQ ID NO: 2439147 - RNA, 19 nt, Artificial Sequence
  Description of Artificial Sequence: Synthetic oligonucleotide
  Antisense strand to SEQ ID NO: 2439146
ucagagccaagucacacgu

SEQ ID NO: 2439148 - RNA, 19 nt, Artificial Sequence
  Description of Artificial Sequence: Synthetic oligonucleotide
  Sense strand starting at position 302 of SEQ ID NO: 1886968
gugacuuggcucugaacgu

SEQ ID NO: 2439149 - RNA, 19 nt, Artificial Sequence
  Description of Artificial Sequence: Synthetic oligonucleotide
  Antisense strand to SEQ ID NO: 2439148
acguucagagccaagucac

SEQ ID NO: 2439150 - RNA, 19 nt, Artificial Sequence
  Description of Artificial Sequence: Synthetic oligonucleotide
  Sense strand starting at position 414 of SEQ ID NO: 1886968
ggagaaugucuuggcauga

SEQ ID NO: 2439151 - RNA, 19 nt, Artificial Sequence
  Description of Artificial Sequence: Synthetic oligonucleotide
  Antisense strand to SEQ ID NO: 2439150
ucaugccaagacauucucc

SEQ ID NO: 2439152 - RNA, 19 nt, Artificial Sequence
  Description of Artificial Sequence: Synthetic oligonucleotide
  Sense strand starting at position 415 of SEQ ID NO: 1886968
gagaaugucuuggcaugaa

SEQ ID NO: 2439153 - RNA, 19 nt, Artificial Sequence
  Description of Artificial Sequence: Synthetic oligonucleotide
  Antisense strand to SEQ ID NO: 2439152
uucaugccaagacauucuc

SEQ ID NO: 2439154 - RNA, 19 nt, Artificial Sequence
  Description of Artificial Sequence: Synthetic oligonucleotide
  Sense strand starting at position 418 of SEQ ID NO: 1886968
aaugucuuggcaugaaucu

SEQ ID NO: 2439155 - RNA, 19 nt, Artificial Sequence
  Description of Artificial Sequence: Synthetic oligonucleotide
  Antisense strand to SEQ ID NO: 2439154
agauucaugccaagacauu

SEQ ID NO: 2439156 - RNA, 19 nt, Artificial Sequence
  Description of Artificial Sequence: Synthetic oligonucleotide
  Sense strand starting at position 419 of SEQ ID NO: 1886968
augucuuggcaugaaucuu

SEQ ID NO: 2439157 - RNA, 19 nt, Artificial Sequence
  Description of Artificial Sequence: Synthetic oligonucleotide
  Antisense strand to SEQ ID NO: 2439156
aagauucaugccaagacau

SEQ ID NO: 2439158 - RNA, 19 nt, Artificial Sequence
  Description of Artificial Sequence: Synthetic oligonucleotide
  Sense strand starting at position 438 of SEQ ID NO: 1886968
aggauuaccagcuggcuaa

SEQ ID NO: 2439159 - RNA, 19 nt, Artificial Sequence
  Description of Artificial Sequence: Synthetic oligonucleotide
  Antisense strand to SEQ ID NO: 2439158
uuagccagcugguaauccu

SEQ ID NO: 2439160 - RNA, 19 nt, Artificial Sequence
  Description of Artificial Sequence: Synthetic oligonucleotide
  Sense strand starting at position 597 of SEQ ID NO: 1886968
ggacgaauuuaagagacca

SEQ ID NO: 2439161 - RNA, 19 nt, Artificial Sequence
  Description of Artificial Sequence: Synthetic oligonucleotide
  Antisense strand to SEQ ID NO: 2439160
uggucucuuaaauucgucc

SEQ ID NO: 2439162 - RNA, 19 nt, Artificial Sequence
  Description of Artificial Sequence: Synthetic oligonucleotide
  Sense strand starting at position 739 of SEQ ID NO: 1886968
acuugaauuuaggguacau

SEQ ID NO: 2439163 - RNA, 19 nt, Artificial Sequence
  Description of Artificial Sequence: Synthetic oligonucleotide
  Antisense strand to SEQ ID NO: 2439162
auguacccuaaauucaagu

SEQ ID NO: 2439164 - RNA, 19 nt, Artificial Sequence
  Description of Artificial Sequence: Synthetic oligonucleotide
  Sense strand starting at position 750 of SEQ ID NO: 1886968
ggguacaucuaagaagaca

SEQ ID NO: 2439165 - RNA, 19 nt, Artificial Sequence
  Description of Artificial Sequence: Synthetic oligonucleotide
  Antisense strand to SEQ ID NO: 2439164
ugucuucuuagauguaccc

SEQ ID NO: 2439166 - RNA, 19 nt, Artificial Sequence
  Description of Artificial Sequence: Synthetic oligonucleotide
  Sense strand starting at position 1245 of SEQ ID NO: 1886968
cccucacucugagugauuc

SEQ ID NO: 2439167 - RNA, 19 nt, Artificial Sequence
  Description of Artificial Sequence: Synthetic oligonucleotide
  Antisense strand to SEQ ID NO: 2439166
gaaucacucagagugaggg

SEQ ID NO: 2439168 - RNA, 19 nt, Artificial Sequence
  Description of Artificial Sequence: Synthetic oligonucleotide
  Sense strand starting at position 1255 of SEQ ID NO: 1886968
gagugauuccaggagguuu

SEQ ID NO: 2439169 - RNA, 19 nt, Artificial Sequence
  Description of Artificial Sequence: Synthetic oligonucleotide
  Antisense strand to SEQ ID NO: 2439168
aaaccuccuggaaucacuc

SEQ ID NO: 2439170 - RNA, 19 nt, Artificial Sequence
  Description of Artificial Sequence: Synthetic oligonucleotide
  Sense strand starting at position 1272 of SEQ ID NO: 1886968
uuugcauguccagacacaa

SEQ ID NO: 2439171 - RNA, 19 nt, Artificial Sequence
  Description of Artificial Sequence: Synthetic oligonucleotide
  Antisense strand to SEQ ID NO: 2439170
uugugucuggacaugcaaa

SEQ ID NO: 2439172 - RNA, 19 nt, Artificial Sequence
  Description of Artificial Sequence: Synthetic oligonucleotide
  Sense strand starting at position 1442 of SEQ ID NO: 1886968
cagugcuugcugggaaguu

SEQ ID NO: 2439173 - RNA, 19 nt, Artificial Sequence
  Description of Artificial Sequence: Synthetic oligonucleotide
  Antisense strand to SEQ ID NO: 2439172
aacuucccagcaagcacug

SEQ ID NO: 2439174 - RNA, 19 nt, Artificial Sequence
  Description of Artificial Sequence: Synthetic oligonucleotide
  Sense strand starting at position 1762 of SEQ ID NO: 1886968
aucuguguuggugggacau

SEQ ID NO: 2439175 - RNA, 19 nt, Artificial Sequence
  Description of Artificial Sequence: Synthetic oligonucleotide
  Antisense strand to SEQ ID NO: 2439174
augucccaccaacacagau

SEQ ID NO: 2439176 - RNA, 19 nt, Artificial Sequence
  Description of Artificial Sequence: Synthetic oligonucleotide
  Sense strand starting at position 2000 of SEQ ID NO: 1886968
cugggaguuuccuuuaccu

SEQ ID NO: 2439177 - RNA, 19 nt, Artificial Sequence
  Description of Artificial Sequence: Synthetic oligonucleotide
  Antisense strand to SEQ ID NO: 2439176
agguaaaggaaacucccag

SEQ ID NO: 2439178 - RNA, 19 nt, Artificial Sequence
  Description of Artificial Sequence: Synthetic oligonucleotide
  Sense strand starting at position 2002 of SEQ ID NO: 1886968
gggaguuuccuuuaccucu

SEQ ID NO: 2439179 - RNA, 19 nt, Artificial Sequence
  Description of Artificial Sequence: Synthetic oligonucleotide
  Antisense strand to SEQ ID NO: 2439178
agagguaaaggaaacuccc

SEQ ID NO: 2439180 - RNA, 19 nt, Artificial Sequence
  Description of Artificial Sequence: Synthetic oligonucleotide
  Sense strand starting at position 2059 of SEQ ID NO: 1886968
aaaugaucaccgugacccu

SEQ ID NO: 2439181 - RNA, 19 nt, Artificial Sequence
  Description of Artificial Sequence: Synthetic oligonucleotide
  Antisense strand to SEQ ID NO: 2439180
agggucacggugaucauuu

SEQ ID NO: 2439182 - RNA, 19 nt, Artificial Sequence
  Description of Artificial Sequence: Synthetic oligonucleotide
  Sense strand starting at position 2077 of SEQ ID NO: 1886968
ucucuagugcuacaguuua

SEQ ID NO: 2439183 - RNA, 19 nt, Artificial Sequence
  Description of Artificial Sequence: Synthetic oligonucleotide
  Antisense strand to SEQ ID NO: 2439182
uaaacuguagcacuagaga

SEQ ID NO: 2439184 - RNA, 19 nt, Artificial Sequence
  Description of Artificial Sequence: Synthetic oligonucleotide
  Sense strand starting at position 2380 of SEQ ID NO: 1886968
cugccuucccgagaaggua

SEQ ID NO: 2439185 - RNA, 19 nt, Artificial Sequence
  Description of Artificial Sequence: Synthetic oligonucleotide
  Antisense strand to SEQ ID NO: 2439184
uaccuucucgggaaggcag

SEQ ID NO: 2439186 - RNA, 19 nt, Artificial Sequence
  Description of Artificial Sequence: Synthetic oligonucleotide
  Sense strand starting at position 2897 of SEQ ID NO: 1886968
ugaggaugcuagucacuga

SEQ ID NO: 2439187 - RNA, 19 nt, Artificial Sequence
  Description of Artificial Sequence: Synthetic oligonucleotide
  Antisense strand to SEQ ID NO: 2439186
ucagugacuagcauccuca

SEQ ID NO: 2439188 - RNA, 19 nt, Artificial Sequence
  Description of Artificial Sequence: Synthetic oligonucleotide
  Sense strand starting at position 2900 of SEQ ID NO: 1886968
ggaugcuagucacugaugu

SEQ ID NO: 2439189 - RNA, 19 nt, Artificial Sequence
  Description of Artificial Sequence: Synthetic oligonucleotide
  Antisense strand to SEQ ID NO: 2439188
acaucagugacuagcaucc

SEQ ID NO: 2439190 - RNA, 19 nt, Artificial Sequence
  Description of Artificial Sequence: Synthetic oligonucleotide
  Sense strand starting at position 2901 of SEQ ID NO: 1886968
gaugcuagucacugauguu

SEQ ID NO: 2439191 - RNA, 19 nt, Artificial Sequence
  Description of Artificial Sequence: Synthetic oligonucleotide
  Antisense strand to SEQ ID NO: 2439190
aacaucagugacuagcauc

SEQ ID NO: 2439192 - RNA, 19 nt, Artificial Sequence
  Description of Artificial Sequence: Synthetic oligonucleotide
  Sense strand starting at position 3303 of SEQ ID NO: 1886968
cucauagaguucuugcaga

SEQ ID NO: 2439193 - RNA, 19 nt, Artificial Sequence
  Description of Artificial Sequence: Synthetic oligonucleotide
  Antisense strand to SEQ ID NO: 2439192
ucugcaagaacucuaugag

SEQ ID NO: 2439194 - RNA, 19 nt, Artificial Sequence
  Description of Artificial Sequence: Synthetic oligonucleotide
  Sense strand starting at position 3308 of SEQ ID NO: 1886968
agaguucuugcagaagcca

SEQ ID NO: 2439195 - RNA, 19 nt, Artificial Sequence
  Description of Artificial Sequence: Synthetic oligonucleotide
  Antisense strand to SEQ ID NO: 2439194
uggcuucugcaagaacucu

SEQ ID NO: 2439196 - RNA, 19 nt, Artificial Sequence
  Description of Artificial Sequence: Synthetic oligonucleotide
  Sense strand starting at position 3355 of SEQ ID NO: 1886968
gaggcugucuauccugaca

SEQ ID NO: 2439197 - RNA, 19 nt, Artificial Sequence
  Description of Artificial Sequence: Synthetic oligonucleotide
  Antisense strand to SEQ ID NO: 2439196
ugucaggauagacagccuc

SEQ ID NO: 2439198 - RNA, 19 nt, Artificial Sequence
  Description of Artificial Sequence: Synthetic oligonucleotide
  Sense strand starting at position 3358 of SEQ ID NO: 1886968
gcugucuauccugacaaac

SEQ ID NO: 2439199 - RNA, 19 nt, Artificial Sequence
  Description of Artificial Sequence: Synthetic oligonucleotide
  Antisense strand to SEQ ID NO: 2439198
guuugucaggauagacagc

SEQ ID NO: 2439200 - RNA, 19 nt, Artificial Sequence
  Description of Artificial Sequence: Synthetic oligonucleotide
  Sense strand starting at position 3486 of SEQ ID NO: 1886968
uugucacuauugccggaau

SEQ ID NO: 2439201 - RNA, 19 nt, Artificial Sequence
  Description of Artificial Sequence: Synthetic oligonucleotide
  Antisense strand to SEQ ID NO: 2439200
auuccggcaauagugacaa

SEQ ID NO: 2439202 - RNA, 19 nt, Artificial Sequence
  Description of Artificial Sequence: Synthetic oligonucleotide
  Sense strand starting at position 3605 of SEQ ID NO: 1886968
gucccuaaugaaggaugau

SEQ ID NO: 2439203 - RNA, 19 nt, Artificial Sequence
  Description of Artificial Sequence: Synthetic oligonucleotide
  Antisense strand to SEQ ID NO: 2439202
aucauccuucauuagggac

SEQ ID NO: 2439204 - RNA, 19 nt, Artificial Sequence
  Description of Artificial Sequence: Synthetic oligonucleotide
  Sense strand starting at position 3683 of SEQ ID NO: 1886968
ggguccaagccuugguaga

SEQ ID NO: 2439205 - RNA, 19 nt, Artificial Sequence
  Description of Artificial Sequence: Synthetic oligonucleotide
  Antisense strand to SEQ ID NO: 2439204
ucuaccaaggcuuggaccc

SEQ ID NO: 2439206 - RNA, 19 nt, Artificial Sequence
  Description of Artificial Sequence: Synthetic oligonucleotide
  Sense strand starting at position 3723 of SEQ ID NO: 1886968
ggcagagcagguugaaaua

SEQ ID NO: 2439207 - RNA, 19 nt, Artificial Sequence
  Description of Artificial Sequence: Synthetic oligonucleotide
  Antisense strand to SEQ ID NO: 2439206
uauuucaaccugcucugcc

SEQ ID NO: 2439208 - RNA, 19 nt, Artificial Sequence
  Description of Artificial Sequence: Synthetic oligonucleotide
  Sense strand starting at position 3766 of SEQ ID NO: 1886968
agccucacaguuugucaaa

SEQ ID NO: 2439209 - RNA, 19 nt, Artificial Sequence
  Description of Artificial Sequence: Synthetic oligonucleotide
  Antisense strand to SEQ ID NO: 2439208
uuugacaaacugugaggcu

SEQ ID NO: 2439210 - RNA, 19 nt, Artificial Sequence
  Description of Artificial Sequence: Synthetic oligonucleotide
  Sense strand starting at position 3873 of SEQ ID NO: 1886968
gaggucucccgucagggaa

SEQ ID NO: 2439211 - RNA, 19 nt, Artificial Sequence
  Description of Artificial Sequence: Synthetic oligonucleotide
  Antisense strand to SEQ ID NO: 2439210
uucccugacgggagaccuc

SEQ ID NO: 2439212 - RNA, 19 nt, Artificial Sequence
  Description of Artificial Sequence: Synthetic oligonucleotide
  Sense strand starting at position 3876 of SEQ ID NO: 1886968
gucucccgucagggaauua

SEQ ID NO: 2439213 - RNA, 19 nt, Artificial Sequence
  Description of Artificial Sequence: Synthetic oligonucleotide
  Antisense strand to SEQ ID NO: 2439212
uaauucccugacgggagac

SEQ ID NO: 2439214 - RNA, 19 nt, Artificial Sequence
  Description of Artificial Sequence: Synthetic oligonucleotide
  Sense strand starting at position 3898 of SEQ ID NO: 1886968
guucucagguugcucagaa

SEQ ID NO: 2439215 - RNA, 19 nt, Artificial Sequence
  Description of Artificial Sequence: Synthetic oligonucleotide
  Antisense strand to SEQ ID NO: 2439214
uucugagcaaccugagaac

SEQ ID NO: 2439216 - RNA, 19 nt, Artificial Sequence
  Description of Artificial Sequence: Synthetic oligonucleotide
  Sense strand starting at position 3899 of SEQ ID NO: 1886968
uucucagguugcucagaaa

SEQ ID NO: 2439217 - RNA, 19 nt, Artificial Sequence
  Description of Artificial Sequence: Synthetic oligonucleotide
  Antisense strand to SEQ ID NO: 2439216
uuucugagcaaccugagaa

SEQ ID NO: 2439218 - RNA, 19 nt, Artificial Sequence
  Description of Artificial Sequence: Synthetic oligonucleotide
  Sense strand starting at position 3912 of SEQ ID NO: 1886968
cagaaaugguuggaaccaa

SEQ ID NO: 2439219 - RNA, 19 nt, Artificial Sequence
  Description of Artificial Sequence: Synthetic oligonucleotide
  Antisense strand to SEQ ID NO: 2439218
uugguuccaaccauuucug

SEQ ID NO: 2439220 - RNA, 19 nt, Artificial Sequence
  Description of Artificial Sequence: Synthetic oligonucleotide
  Sense strand starting at position 3970 of SEQ ID NO: 1886968
gagagcugguguuucugaa

SEQ ID NO: 2439221 - RNA, 19 nt, Artificial Sequence
  Description of Artificial Sequence: Synthetic oligonucleotide
  Antisense strand to SEQ ID NO: 2439220
uucagaaacaccagcucuc

SEQ ID NO: 2439222 - RNA, 19 nt, Artificial Sequence
  Description of Artificial Sequence: Synthetic oligonucleotide
  Sense strand starting at position 52 of SEQ ID NO: 1886969
gcagaugauuaauccaagu

SEQ ID NO: 2439223 - RNA, 19 nt, Artificial Sequence
  Description of Artificial Sequence: Synthetic oligonucleotide
  Antisense strand to SEQ ID NO: 2439222
acuuggauuaaucaucugc

SEQ ID NO: 2439224 - RNA, 19 nt, Artificial Sequence
  Description of Artificial Sequence: Synthetic oligonucleotide
  Sense strand starting at position 149 of SEQ ID NO: 1886969
aagauagaauguguuugga

SEQ ID NO: 2439225 - RNA, 19 nt, Artificial Sequence
  Description of Artificial Sequence: Synthetic oligonucleotide
  Antisense strand to SEQ ID NO: 2439224
uccaaacacauucuaucuu

SEQ ID NO: 2439226 - RNA, 19 nt, Artificial Sequence
  Description of Artificial Sequence: Synthetic oligonucleotide
  Sense strand starting at position 152 of SEQ ID NO: 1886969
auagaauguguuuggagga

SEQ ID NO: 2439227 - RNA, 19 nt, Artificial Sequence
  Description of Artificial Sequence: Synthetic oligonucleotide
  Antisense strand to SEQ ID NO: 2439226
uccuccaaacacauucuau

SEQ ID NO: 2439228 - RNA, 19 nt, Artificial Sequence
  Description of Artificial Sequence: Synthetic oligonucleotide
  Sense strand starting at position 287 of SEQ ID NO: 1886969
auacguaauauugggaaca

SEQ ID NO: 2439229 - RNA, 19 nt, Artificial Sequence
  Description of Artificial Sequence: Synthetic oligonucleotide
  Antisense strand to SEQ ID NO: 2439228
uguucccaauauuacguau

SEQ ID NO: 2439230 - RNA, 19 nt, Artificial Sequence
  Description of Artificial Sequence: Synthetic oligonucleotide
  Sense strand starting at position 449 of SEQ ID NO: 1886969
uuacaugugccagacauuc

SEQ ID NO: 2439231 - RNA, 19 nt, Artificial Sequence
  Description of Artificial Sequence: Synthetic oligonucleotide
  Antisense strand to SEQ ID NO: 2439230
gaaugucuggcacauguaa

SEQ ID NO: 2439232 - RNA, 19 nt, Artificial Sequence
  Description of Artificial Sequence: Synthetic oligonucleotide
  Sense strand starting at position 571 of SEQ ID NO: 1886969
aagcaacuugcuuagggau

SEQ ID NO: 2439233 - RNA, 19 nt, Artificial Sequence
  Description of Artificial Sequence: Synthetic oligonucleotide
  Antisense strand to SEQ ID NO: 2439232
aucccuaagcaaguugcuu

SEQ ID NO: 2439234 - RNA, 19 nt, Artificial Sequence
  Description of Artificial Sequence: Synthetic oligonucleotide
  Sense strand starting at position 696 of SEQ ID NO: 1886969
uugcaaaugacagagugua

SEQ ID NO: 2439235 - RNA, 19 nt, Artificial Sequence
  Description of Artificial Sequence: Synthetic oligonucleotide
  Antisense strand to SEQ ID NO: 2439234
uacacucugucauuugcaa

SEQ ID NO: 2439236 - RNA, 19 nt, Artificial Sequence
  Description of Artificial Sequence: Synthetic oligonucleotide
  Sense strand starting at position 760 of SEQ ID NO: 1886969
ggagacaaguauucuaauu

SEQ ID NO: 2439237 - RNA, 19 nt, Artificial Sequence
  Description of Artificial Sequence: Synthetic oligonucleotide
  Antisense strand to SEQ ID NO: 2439236
aauuagaauacuugucucc

SEQ ID NO: 2439238 - RNA, 19 nt, Artificial Sequence
  Description of Artificial Sequence: Synthetic oligonucleotide
  Sense strand starting at position 771 of SEQ ID NO: 1886969
uucuaauucuaguuuggga

SEQ ID NO: 2439239 - RNA, 19 nt, Artificial Sequence
  Description of Artificial Sequence: Synthetic oligonucleotide
  Antisense strand to SEQ ID NO: 2439238
ucccaaacuagaauuagaa

SEQ ID NO: 2439240 - RNA, 19 nt, Artificial Sequence
  Description of Artificial Sequence: Synthetic oligonucleotide
  Sense strand starting at position 773 of SEQ ID NO: 1886969
cuaauucuaguuugggaca

SEQ ID NO: 2439241 - RNA, 19 nt, Artificial Sequence
  Description of Artificial Sequence: Synthetic oligonucleotide
  Antisense strand to SEQ ID NO: 2439240
ugucccaaacuagaauuag

SEQ ID NO: 2439242 - RNA, 19 nt, Artificial Sequence
  Description of Artificial Sequence: Synthetic oligonucleotide
  Sense strand starting at position 786 of SEQ ID NO: 1886969
gggacagacuuacugcaaa

SEQ ID NO: 2439243 - RNA, 19 nt, Artificial Sequence
  Description of Artificial Sequence: Synthetic oligonucleotide
  Antisense strand to SEQ ID NO: 2439242
uuugcaguaagucuguccc

SEQ ID NO: 2439244 - RNA, 19 nt, Artificial Sequence
  Description of Artificial Sequence: Synthetic oligonucleotide
  Sense strand starting at position 843 of SEQ ID NO: 1886969
cugugucuacaacagaaau

SEQ ID NO: 2439245 - RNA, 19 nt, Artificial Sequence
  Description of Artificial Sequence: Synthetic oligonucleotide
  Antisense strand to SEQ ID NO: 2439244
auuucuguuguagacacag

SEQ ID NO: 2439246 - RNA, 19 nt, Artificial Sequence
  Description of Artificial Sequence: Synthetic oligonucleotide
  Sense strand starting at position 907 of SEQ ID NO: 1886969
ugagacgaucuaugaaugu

SEQ ID NO: 2439247 - RNA, 19 nt, Artificial Sequence
  Description of Artificial Sequence: Synthetic oligonucleotide
  Antisense strand to SEQ ID NO: 2439246
acauucauagaucgucuca

SEQ ID NO: 2439248 - RNA, 19 nt, Artificial Sequence
  Description of Artificial Sequence: Synthetic oligonucleotide
  Sense strand starting at position 911 of SEQ ID NO: 1886969
acgaucuaugaauguguaa

SEQ ID NO: 2439249 - RNA, 19 nt, Artificial Sequence
  Description of Artificial Sequence: Synthetic oligonucleotide
  Antisense strand to SEQ ID NO: 2439248
uuacacauucauagaucgu

SEQ ID NO: 2439250 - RNA, 19 nt, Artificial Sequence
  Description of Artificial Sequence: Synthetic oligonucleotide
  Sense strand starting at position 914 of SEQ ID NO: 1886969
aucuaugaauguguaauga

SEQ ID NO: 2439251 - RNA, 19 nt, Artificial Sequence
  Description of Artificial Sequence: Synthetic oligonucleotide
  Antisense strand to SEQ ID NO: 2439250
ucauuacacauucauagau

SEQ ID NO: 2439252 - RNA, 19 nt, Artificial Sequence
  Description of Artificial Sequence: Synthetic oligonucleotide
  Sense strand starting at position 1259 of SEQ ID NO: 1886969
gauacugguuaugccuaaa

SEQ ID NO: 2439253 - RNA, 19 nt, Artificial Sequence
  Description of Artificial Sequence: Synthetic oligonucleotide
  Antisense strand to SEQ ID NO: 2439252
uuuaggcauaaccaguauc

SEQ ID NO: 2439254 - RNA, 19 nt, Artificial Sequence
  Description of Artificial Sequence: Synthetic oligonucleotide
  Sense strand starting at position 1289 of SEQ ID NO: 1886969
guggauuuguucucagggu

SEQ ID NO: 2439255 - RNA, 19 nt, Artificial Sequence
  Description of Artificial Sequence: Synthetic oligonucleotide
  Antisense strand to SEQ ID NO: 2439254
acccugagaacaaauccac

SEQ ID NO: 2439256 - RNA, 19 nt, Artificial Sequence
  Description of Artificial Sequence: Synthetic oligonucleotide
  Sense strand starting at position 1422 of SEQ ID NO: 1886969
uucuguuugggauauugga

SEQ ID NO: 2439257 - RNA, 19 nt, Artificial Sequence
  Description of Artificial Sequence: Synthetic oligonucleotide
  Antisense strand to SEQ ID NO: 2439256
uccaauaucccaaacagaa

SEQ ID NO: 2439258 - RNA, 19 nt, Artificial Sequence
  Description of Artificial Sequence: Synthetic oligonucleotide
  Sense strand starting at position 1441 of SEQ ID NO: 1886969
guccacaagucauugaaua

SEQ ID NO: 2439259 - RNA, 19 nt, Artificial Sequence
  Description of Artificial Sequence: Synthetic oligonucleotide
  Antisense strand to SEQ ID NO: 2439258
uauucaaugacuuguggac

SEQ ID NO: 2439260 - RNA, 19 nt, Artificial Sequence
  Description of Artificial Sequence: Synthetic oligonucleotide
  Sense strand starting at position 1451 of SEQ ID NO: 1886969
cauugaauauuggucaagu

SEQ ID NO: 2439261 - RNA, 19 nt, Artificial Sequence
  Description of Artificial Sequence: Synthetic oligonucleotide
  Antisense strand to SEQ ID NO: 2439260
acuugaccaauauucaaug

SEQ ID NO: 2439262 - RNA, 19 nt, Artificial Sequence
  Description of Artificial Sequence: Synthetic oligonucleotide
  Sense strand starting at position 1452 of SEQ ID NO: 1886969
auugaauauuggucaagua

SEQ ID NO: 2439263 - RNA, 19 nt, Artificial Sequence
  Description of Artificial Sequence: Synthetic oligonucleotide
  Antisense strand to SEQ ID NO: 2439262
uacuugaccaauauucaau

SEQ ID NO: 2439264 - RNA, 19 nt, Artificial Sequence
  Description of Artificial Sequence: Synthetic oligonucleotide
  Sense strand starting at position 1453 of SEQ ID NO: 1886969
uugaauauuggucaaguau

SEQ ID NO: 2439265 - RNA, 19 nt, Artificial Sequence
  Description of Artificial Sequence: Synthetic oligonucleotide
  Antisense strand to SEQ ID NO: 2439264
auacuugaccaauauucaa

SEQ ID NO: 2439266 - RNA, 19 nt, Artificial Sequence
  Description of Artificial Sequence: Synthetic oligonucleotide
  Sense strand starting at position 1525 of SEQ ID NO: 1886969
uugaauuacuggccacgaa

SEQ ID NO: 2439267 - RNA, 19 nt, Artificial Sequence
  Description of Artificial Sequence: Synthetic oligonucleotide
  Antisense strand to SEQ ID NO: 2439266
uucguggccaguaauucaa

SEQ ID NO: 2439268 - RNA, 19 nt, Artificial Sequence
  Description of Artificial Sequence: Synthetic oligonucleotide
  Sense strand starting at position 1625 of SEQ ID NO: 1886969
cuugguuaucuguagaaau

SEQ ID NO: 2439269 - RNA, 19 nt, Artificial Sequence
  Description of Artificial Sequence: Synthetic oligonucleotide
  Antisense strand to SEQ ID NO: 2439268
auuucuacagauaaccaag

SEQ ID NO: 2439270 - RNA, 19 nt, Artificial Sequence
  Description of Artificial Sequence: Synthetic oligonucleotide
  Sense strand starting at position 1667 of SEQ ID NO: 1886969
auaagucauggguaaagcu

SEQ ID NO: 2439271 - RNA, 19 nt, Artificial Sequence
  Description of Artificial Sequence: Synthetic oligonucleotide
  Antisense strand to SEQ ID NO: 2439270
agcuuuacccaugacuuau

SEQ ID NO: 2439272 - RNA, 19 nt, Artificial Sequence
  Description of Artificial Sequence: Synthetic oligonucleotide
  Sense strand starting at position 1742 of SEQ ID NO: 1886969
uaaugacuugugcagaaau

SEQ ID NO: 2439273 - RNA, 19 nt, Artificial Sequence
  Description of Artificial Sequence: Synthetic oligonucleotide
  Antisense strand to SEQ ID NO: 2439272
auuucugcacaagucauua

SEQ ID NO: 2439274 - RNA, 19 nt, Artificial Sequence
  Description of Artificial Sequence: Synthetic oligonucleotide
  Sense strand starting at position 1744 of SEQ ID NO: 1886969
augacuugugcagaaauuc

SEQ ID NO: 2439275 - RNA, 19 nt, Artificial Sequence
  Description of Artificial Sequence: Synthetic oligonucleotide
  Antisense strand to SEQ ID NO: 2439274
gaauuucugcacaagucau

SEQ ID NO: 2439276 - RNA, 19 nt, Artificial Sequence
  Description of Artificial Sequence: Synthetic oligonucleotide
  Sense strand starting at position 1951 of SEQ ID NO: 1886969
auggcuaaacauugaaagu

SEQ ID NO: 2439277 - RNA, 19 nt, Artificial Sequence
  Description of Artificial Sequence: Synthetic oligonucleotide
  Antisense strand to SEQ ID NO: 2439276
acuuucaauguuuagccau

SEQ ID NO: 2439278 - RNA, 19 nt, Artificial Sequence
  Description of Artificial Sequence: Synthetic oligonucleotide
  Sense strand starting at position 2053 of SEQ ID NO: 1886969
ggcuaagcucuagaauagu

SEQ ID NO: 2439279 - RNA, 19 nt, Artificial Sequence
  Description of Artificial Sequence: Synthetic oligonucleotide
  Antisense strand to SEQ ID NO: 2439278
acuauucuagagcuuagcc

SEQ ID NO: 2439280 - RNA, 19 nt, Artificial Sequence
  Description of Artificial Sequence: Synthetic oligonucleotide
  Sense strand starting at position 2092 of SEQ ID NO: 1886969
gugggacaacucuguuaga

SEQ ID NO: 2439281 - RNA, 19 nt, Artificial Sequence
  Description of Artificial Sequence: Synthetic oligonucleotide
  Antisense strand to SEQ ID NO: 2439280
ucuaacagaguugucccac

SEQ ID NO: 2439282 - RNA, 19 nt, Artificial Sequence
  Description of Artificial Sequence: Synthetic oligonucleotide
  Sense strand starting at position 2415 of SEQ ID NO: 1886969
gauuuaaaguuggacucau

SEQ ID NO: 2439283 - RNA, 19 nt, Artificial Sequence
  Description of Artificial Sequence: Synthetic oligonucleotide
  Antisense strand to SEQ ID NO: 2439282
augaguccaacuuuaaauc

SEQ ID NO: 2439284 - RNA, 19 nt, Artificial Sequence
  Description of Artificial Sequence: Synthetic oligonucleotide
  Sense strand starting at position 2426 of SEQ ID NO: 1886969
ggacucaugugcuuaaaua

SEQ ID NO: 2439285 - RNA, 19 nt, Artificial Sequence
  Description of Artificial Sequence: Synthetic oligonucleotide
  Antisense strand to SEQ ID NO: 2439284
uauuuaagcacaugagucc

SEQ ID NO: 2439286 - RNA, 19 nt, Artificial Sequence
  Description of Artificial Sequence: Synthetic oligonucleotide
  Sense strand starting at position 2465 of SEQ ID NO: 1886969
gcuggcauuuggcugagaa

SEQ ID NO: 2439287 - RNA, 19 nt, Artificial Sequence
  Description of Artificial Sequence: Synthetic oligonucleotide
  Antisense strand to SEQ ID NO: 2439286
uucucagccaaaugccagc

SEQ ID NO: 2439288 - RNA, 19 nt, Artificial Sequence
  Description of Artificial Sequence: Synthetic oligonucleotide
  Sense strand starting at position 2534 of SEQ ID NO: 1886969
cccaaugaagaugguaauu

SEQ ID NO: 2439289 - RNA, 19 nt, Artificial Sequence
  Description of Artificial Sequence: Synthetic oligonucleotide
  Antisense strand to SEQ ID NO: 2439288
aauuaccaucuucauuggg

SEQ ID NO: 2439290 - RNA, 19 nt, Artificial Sequence
  Description of Artificial Sequence: Synthetic oligonucleotide
  Sense strand starting at position 2546 of SEQ ID NO: 1886969
gguaauuaacccuagcaua

SEQ ID NO: 2439291 - RNA, 19 nt, Artificial Sequence
  Description of Artificial Sequence: Synthetic oligonucleotide
  Antisense strand to SEQ ID NO: 2439290
uaugcuaggguuaauuacc

SEQ ID NO: 2439292 - RNA, 19 nt, Artificial Sequence
  Description of Artificial Sequence: Synthetic oligonucleotide
  Sense strand starting at position 2620 of SEQ ID NO: 1886969
aguagaguccaaugaaaua

SEQ ID NO: 2439293 - RNA, 19 nt, Artificial Sequence
  Description of Artificial Sequence: Synthetic oligonucleotide
  Antisense strand to SEQ ID NO: 2439292
uauuucauuggacucuacu

SEQ ID NO: 2439294 - RNA, 19 nt, Artificial Sequence
  Description of Artificial Sequence: Synthetic oligonucleotide
  Sense strand starting at position 2844 of SEQ ID NO: 1886969
caggcuuuccaagagugua

SEQ ID NO: 2439295 - RNA, 19 nt, Artificial Sequence
  Description of Artificial Sequence: Synthetic oligonucleotide
  Antisense strand to SEQ ID NO: 2439294
uacacucuuggaaagccug

SEQ ID NO: 2439296 - RNA, 19 nt, Artificial Sequence
  Description of Artificial Sequence: Synthetic oligonucleotide
  Sense strand starting at position 2939 of SEQ ID NO: 1886969
agcucuucucaggaagcua

SEQ ID NO: 2439297 - RNA, 19 nt, Artificial Sequence
  Description of Artificial Sequence: Synthetic oligonucleotide
  Antisense strand to SEQ ID NO: 2439296
uagcuuccugagaagagcu

SEQ ID NO: 2439298 - RNA, 19 nt, Artificial Sequence
  Description of Artificial Sequence: Synthetic oligonucleotide
  Sense strand starting at position 3223 of SEQ ID NO: 1886969
gcaagauggucccucagag

SEQ ID NO: 2439299 - RNA, 19 nt, Artificial Sequence
  Description of Artificial Sequence: Synthetic oligonucleotide
  Antisense strand to SEQ ID NO: 2439298
cucugagggaccaucuugc

SEQ ID NO: 2439300 - RNA, 19 nt, Artificial Sequence
  Description of Artificial Sequence: Synthetic oligonucleotide
  Sense strand starting at position 3867 of SEQ ID NO: 1886969
ggcagugucaaggaucuau

SEQ ID NO: 2439301 - RNA, 19 nt, Artificial Sequence
  Description of Artificial Sequence: Synthetic oligonucleotide
  Antisense strand to SEQ ID NO: 2439300
auagauccuugacacugcc

SEQ ID NO: 2439302 - RNA, 19 nt, Artificial Sequence
  Description of Artificial Sequence: Synthetic oligonucleotide
  Sense strand starting at position 245 of SEQ ID NO: 1886970
ccagucugaguaugguauu

SEQ ID NO: 2439303 - RNA, 19 nt, Artificial Sequence
  Description of Artificial Sequence: Synthetic oligonucleotide
  Antisense strand to SEQ ID NO: 2439302
aauaccauacucagacugg

SEQ ID NO: 2439304 - RNA, 19 nt, Artificial Sequence
  Description of Artificial Sequence: Synthetic oligonucleotide
  Sense strand starting at position 251 of SEQ ID NO: 1886970
ugaguaugguauuaauaga

SEQ ID NO: 2439305 - RNA, 19 nt, Artificial Sequence
  Description of Artificial Sequence: Synthetic oligonucleotide
  Antisense strand to SEQ ID NO: 2439304
ucuauuaauaccauacuca

SEQ ID NO: 2439306 - RNA, 19 nt, Artificial Sequence
  Description of Artificial Sequence: Synthetic oligonucleotide
  Sense strand starting at position 316 of SEQ ID NO: 1886970
agaaacacaucuuaagguu

SEQ ID NO: 2439307 - RNA, 19 nt, Artificial Sequence
  Description of Artificial Sequence: Synthetic oligonucleotide
  Antisense strand to SEQ ID NO: 2439306
aaccuuaagauguguuucu

SEQ ID NO: 2439308 - RNA, 19 nt, Artificial Sequence
  Description of Artificial Sequence: Synthetic oligonucleotide
  Sense strand starting at position 401 of SEQ ID NO: 1886970
acuguucuguagccagaca

SEQ ID NO: 2439309 - RNA, 19 nt, Artificial Sequence
  Description of Artificial Sequence: Synthetic oligonucleotide
  Antisense strand to SEQ ID NO: 2439308
ugucuggcuacagaacagu

SEQ ID NO: 2439310 - RNA, 19 nt, Artificial Sequence
  Description of Artificial Sequence: Synthetic oligonucleotide
  Sense strand starting at position 457 of SEQ ID NO: 1886970
agguuauuaugugugucau

SEQ ID NO: 2439311 - RNA, 19 nt, Artificial Sequence
  Description of Artificial Sequence: Synthetic oligonucleotide
  Antisense strand to SEQ ID NO: 2439310
augacacacauaauaaccu

SEQ ID NO: 2439312 - RNA, 19 nt, Artificial Sequence
  Description of Artificial Sequence: Synthetic oligonucleotide
  Sense strand starting at position 458 of SEQ ID NO: 1886970
gguuauuaugugugucauu

SEQ ID NO: 2439313 - RNA, 19 nt, Artificial Sequence
  Description of Artificial Sequence: Synthetic oligonucleotide
  Antisense strand to SEQ ID NO: 2439312
aaugacacacauaauaacc

SEQ ID NO: 2439314 - RNA, 19 nt, Artificial Sequence
  Description of Artificial Sequence: Synthetic oligonucleotide
  Sense strand starting at position 459 of SEQ ID NO: 1886970
guuauuaugugugucauuu

SEQ ID NO: 2439315 - RNA, 19 nt, Artificial Sequence
  Description of Artificial Sequence: Synthetic oligonucleotide
  Antisense strand to SEQ ID NO: 2439314
aaaugacacacauaauaac

SEQ ID NO: 2439316 - RNA, 19 nt, Artificial Sequence
  Description of Artificial Sequence: Synthetic oligonucleotide
  Sense strand starting at position 505 of SEQ ID NO: 1886970
gcaacaauccauugcgagu

SEQ ID NO: 2439317 - RNA, 19 nt, Artificial Sequence
  Description of Artificial Sequence: Synthetic oligonucleotide
  Antisense strand to SEQ ID NO: 2439316
acucgcaauggauuguugc

SEQ ID NO: 2439318 - RNA, 19 nt, Artificial Sequence
  Description of Artificial Sequence: Synthetic oligonucleotide
  Sense strand starting at position 514 of SEQ ID NO: 1886970
cauugcgaguuggcuauua

SEQ ID NO: 2439319 - RNA, 19 nt, Artificial Sequence
  Description of Artificial Sequence: Synthetic oligonucleotide
  Antisense strand to SEQ ID NO: 2439318
uaauagccaacucgcaaug

SEQ ID NO: 2439320 - RNA, 19 nt, Artificial Sequence
  Description of Artificial Sequence: Synthetic oligonucleotide
  Sense strand starting at position 576 of SEQ ID NO: 1886970
aaaggagaaggcuguuuaa

SEQ ID NO: 2439321 - RNA, 19 nt, Artificial Sequence
  Description of Artificial Sequence: Synthetic oligonucleotide
  Antisense strand to SEQ ID NO: 2439320
uuaaacagccuucuccuuu

SEQ ID NO: 2439322 - RNA, 19 nt, Artificial Sequence
  Description of Artificial Sequence: Synthetic oligonucleotide
  Sense strand starting at position 579 of SEQ ID NO: 1886970
ggagaaggcuguuuaauug

SEQ ID NO: 2439323 - RNA, 19 nt, Artificial Sequence
  Description of Artificial Sequence: Synthetic oligonucleotide
  Antisense strand to SEQ ID NO: 2439322
caauuaaacagccuucucc

SEQ ID NO: 2439324 - RNA, 19 nt, Artificial Sequence
  Description of Artificial Sequence: Synthetic oligonucleotide
  Sense strand starting at position 583 of SEQ ID NO: 1886970
aaggcuguuuaauuggaaa

SEQ ID NO: 2439325 - RNA, 19 nt, Artificial Sequence
  Description of Artificial Sequence: Synthetic oligonucleotide
  Antisense strand to SEQ ID NO: 2439324
uuuccaauuaaacagccuu

SEQ ID NO: 2439326 - RNA, 19 nt, Artificial Sequence
  Description of Artificial Sequence: Synthetic oligonucleotide
  Sense strand starting at position 596 of SEQ ID NO: 1886970
uggaaaggauuucauaggu

SEQ ID NO: 2439327 - RNA, 19 nt, Artificial Sequence
  Description of Artificial Sequence: Synthetic oligonucleotide
  Antisense strand to SEQ ID NO: 2439326
accuaugaaauccuuucca

SEQ ID NO: 2439328 - RNA, 19 nt, Artificial Sequence
  Description of Artificial Sequence: Synthetic oligonucleotide
  Sense strand starting at position 654 of SEQ ID NO: 1886970
agugauuccuuacuggaca

SEQ ID NO: 2439329 - RNA, 19 nt, Artificial Sequence
  Description of Artificial Sequence: Synthetic oligonucleotide
  Antisense strand to SEQ ID NO: 2439328
uguccaguaaggaaucacu

SEQ ID NO: 2439330 - RNA, 19 nt, Artificial Sequence
  Description of Artificial Sequence: Synthetic oligonucleotide
  Sense strand starting at position 744 of SEQ ID NO: 1886970
uuagccagauacuuaguaa

SEQ ID NO: 2439331 - RNA, 19 nt, Artificial Sequence
  Description of Artificial Sequence: Synthetic oligonucleotide
  Antisense strand to SEQ ID NO: 2439330
uuacuaaguaucuggcuaa

SEQ ID NO: 2439332 - RNA, 19 nt, Artificial Sequence
  Description of Artificial Sequence: Synthetic oligonucleotide
  Sense strand starting at position 1185 of SEQ ID NO: 1886970
agaugaugcaucugaucag

SEQ ID NO: 2439333 - RNA, 19 nt, Artificial Sequence
  Description of Artificial Sequence: Synthetic oligonucleotide
  Antisense strand to SEQ ID NO: 2439332
cugaucagaugcaucaucu

SEQ ID NO: 2439334 - RNA, 19 nt, Artificial Sequence
  Description of Artificial Sequence: Synthetic oligonucleotide
  Sense strand starting at position 1188 of SEQ ID NO: 1886970
ugaugcaucugaucagaua

SEQ ID NO: 2439335 - RNA, 19 nt, Artificial Sequence
  Description of Artificial Sequence: Synthetic oligonucleotide
  Antisense strand to SEQ ID NO: 2439334
uaucugaucagaugcauca

SEQ ID NO: 2439336 - RNA, 19 nt, Artificial Sequence
  Description of Artificial Sequence: Synthetic oligonucleotide
  Sense strand starting at position 1191 of SEQ ID NO: 1886970
ugcaucugaucagauaaua

SEQ ID NO: 2439337 - RNA, 19 nt, Artificial Sequence
  Description of Artificial Sequence: Synthetic oligonucleotide
  Antisense strand to SEQ ID NO: 2439336
uauuaucugaucagaugca

SEQ ID NO: 2439338 - RNA, 19 nt, Artificial Sequence
  Description of Artificial Sequence: Synthetic oligonucleotide
  Sense strand starting at position 1236 of SEQ ID NO: 1886970
auagaauauuuaggugacu

SEQ ID NO: 2439339 - RNA, 19 nt, Artificial Sequence
  Description of Artificial Sequence: Synthetic oligonucleotide
  Antisense strand to SEQ ID NO: 2439338
agucaccuaaauauucuau

SEQ ID NO: 2439340 - RNA, 19 nt, Artificial Sequence
  Description of Artificial Sequence: Synthetic oligonucleotide
  Sense strand starting at position 1248 of SEQ ID NO: 1886970
ggugacuuguaagcuuuaa

SEQ ID NO: 2439341 - RNA, 19 nt, Artificial Sequence
  Description of Artificial Sequence: Synthetic oligonucleotide
  Antisense strand to SEQ ID NO: 2439340
uuaaagcuuacaagucacc

SEQ ID NO: 2439342 - RNA, 19 nt, Artificial Sequence
  Description of Artificial Sequence: Synthetic oligonucleotide
  Sense strand starting at position 1252 of SEQ ID NO: 1886970
acuuguaagcuuuaagcuu

SEQ ID NO: 2439343 - RNA, 19 nt, Artificial Sequence
  Description of Artificial Sequence: Synthetic oligonucleotide
  Antisense strand to SEQ ID NO: 2439342
aagcuuaaagcuuacaagu

SEQ ID NO: 2439344 - RNA, 19 nt, Artificial Sequence
  Description of Artificial Sequence: Synthetic oligonucleotide
  Sense strand starting at position 1259 of SEQ ID NO: 1886970
agcuuuaagcuuugggcaa

SEQ ID NO: 2439345 - RNA, 19 nt, Artificial Sequence
  Description of Artificial Sequence: Synthetic oligonucleotide
  Antisense strand to SEQ ID NO: 2439344
uugcccaaagcuuaaagcu

SEQ ID NO: 2439346 - RNA, 19 nt, Artificial Sequence
  Description of Artificial Sequence: Synthetic oligonucleotide
  Sense strand starting at position 1305 of SEQ ID NO: 1886970
agagaaaugcuuugcaaua

SEQ ID NO: 2439347 - RNA, 19 nt, Artificial Sequence
  Description of Artificial Sequence: Synthetic oligonucleotide
  Antisense strand to SEQ ID NO: 2439346
uauugcaaagcauuucucu

SEQ ID NO: 2439348 - RNA, 19 nt, Artificial Sequence
  Description of Artificial Sequence: Synthetic oligonucleotide
  Sense strand starting at position 1339 of SEQ ID NO: 1886970
aggugugguucugcgauau

SEQ ID NO: 2439349 - RNA, 19 nt, Artificial Sequence
  Description of Artificial Sequence: Synthetic oligonucleotide
  Antisense strand to SEQ ID NO: 2439348
auaucgcagaaccacaccu

SEQ ID NO: 2439350 - RNA, 19 nt, Artificial Sequence
  Description of Artificial Sequence: Synthetic oligonucleotide
  Sense strand starting at position 1343 of SEQ ID NO: 1886970
gugguucugcgauauaauu

SEQ ID NO: 2439351 - RNA, 19 nt, Artificial Sequence
  Description of Artificial Sequence: Synthetic oligonucleotide
  Antisense strand to SEQ ID NO: 2439350
aauuauaucgcagaaccac

SEQ ID NO: 2439352 - RNA, 19 nt, Artificial Sequence
  Description of Artificial Sequence: Synthetic oligonucleotide
  Sense strand starting at position 1345 of SEQ ID NO: 1886970
gguucugcgauauaauuag

SEQ ID NO: 2439353 - RNA, 19 nt, Artificial Sequence
  Description of Artificial Sequence: Synthetic oligonucleotide
  Antisense strand to SEQ ID NO: 2439352
cuaauuauaucgcagaacc

SEQ ID NO: 2439354 - RNA, 19 nt, Artificial Sequence
  Description of Artificial Sequence: Synthetic oligonucleotide
  Sense strand starting at position 1352 of SEQ ID NO: 1886970
cgauauaauuaggaaccau

SEQ ID NO: 2439355 - RNA, 19 nt, Artificial Sequence
  Description of Artificial Sequence: Synthetic oligonucleotide
  Antisense strand to SEQ ID NO: 2439354
augguuccuaauuauaucg

SEQ ID NO: 2439356 - RNA, 19 nt, Artificial Sequence
  Description of Artificial Sequence: Synthetic oligonucleotide
  Sense strand starting at position 2375 of SEQ ID NO: 1886970
ggcucagaccuuuacuaga

SEQ ID NO: 2439357 - RNA, 19 nt, Artificial Sequence
  Description of Artificial Sequence: Synthetic oligonucleotide
  Antisense strand to SEQ ID NO: 2439356
ucuaguaaaggucugagcc

SEQ ID NO: 2439358 - RNA, 19 nt, Artificial Sequence
  Description of Artificial Sequence: Synthetic oligonucleotide
  Sense strand starting at position 2444 of SEQ ID NO: 1886970
uccuacaagccuuggaauu

SEQ ID NO: 2439359 - RNA, 19 nt, Artificial Sequence
  Description of Artificial Sequence: Synthetic oligonucleotide
  Antisense strand to SEQ ID NO: 2439358
aauuccaaggcuuguagga

SEQ ID NO: 2439360 - RNA, 19 nt, Artificial Sequence
  Description of Artificial Sequence: Synthetic oligonucleotide
  Sense strand starting at position 2454 of SEQ ID NO: 1886970
cuuggaauuuccugaaaga

SEQ ID NO: 2439361 - RNA, 19 nt, Artificial Sequence
  Description of Artificial Sequence: Synthetic oligonucleotide
  Antisense strand to SEQ ID NO: 2439360
ucuuucaggaaauuccaag

SEQ ID NO: 2439362 - RNA, 19 nt, Artificial Sequence
  Description of Artificial Sequence: Synthetic oligonucleotide
  Sense strand starting at position 2467 of SEQ ID NO: 1886970
gaaagacaggagugucuuu

SEQ ID NO: 2439363 - RNA, 19 nt, Artificial Sequence
  Description of Artificial Sequence: Synthetic oligonucleotide
  Antisense strand to SEQ ID NO: 2439362
aaagacacuccugucuuuc

SEQ ID NO: 2439364 - RNA, 19 nt, Artificial Sequence
  Description of Artificial Sequence: Synthetic oligonucleotide
  Sense strand starting at position 2476 of SEQ ID NO: 1886970
gagugucuuugguuguuau

SEQ ID NO: 2439365 - RNA, 19 nt, Artificial Sequence
  Description of Artificial Sequence: Synthetic oligonucleotide
  Antisense strand to SEQ ID NO: 2439364
auaacaaccaaagacacuc

SEQ ID NO: 2439366 - RNA, 19 nt, Artificial Sequence
  Description of Artificial Sequence: Synthetic oligonucleotide
  Sense strand starting at position 2491 of SEQ ID NO: 1886970
uuaugagccucucugauaa

SEQ ID NO: 2439367 - RNA, 19 nt, Artificial Sequence
  Description of Artificial Sequence: Synthetic oligonucleotide
  Antisense strand to SEQ ID NO: 2439366
uuaucagagaggcucauaa

SEQ ID NO: 2439368 - RNA, 19 nt, Artificial Sequence
  Description of Artificial Sequence: Synthetic oligonucleotide
  Sense strand starting at position 2868 of SEQ ID NO: 1886970
gguggcuccgacguguaau

SEQ ID NO: 2439369 - RNA, 19 nt, Artificial Sequence
  Description of Artificial Sequence: Synthetic oligonucleotide
  Antisense strand to SEQ ID NO: 2439368
auuacacgucggagccacc

SEQ ID NO: 2439370 - RNA, 19 nt, Artificial Sequence
  Description of Artificial Sequence: Synthetic oligonucleotide
  Sense strand starting at position 3160 of SEQ ID NO: 1886970
uccugaguucugcaagcca

SEQ ID NO: 2439371 - RNA, 19 nt, Artificial Sequence
  Description of Artificial Sequence: Synthetic oligonucleotide
  Antisense strand to SEQ ID NO: 2439370
uggcuugcagaacucagga

SEQ ID NO: 2439372 - RNA, 19 nt, Artificial Sequence
  Description of Artificial Sequence: Synthetic oligonucleotide
  Sense strand starting at position 3228 of SEQ ID NO: 1886970
cuuuacagcuggucaguaa

SEQ ID NO: 2439373 - RNA, 19 nt, Artificial Sequence
  Description of Artificial Sequence: Synthetic oligonucleotide
  Antisense strand to SEQ ID NO: 2439372
uuacugaccagcuguaaag

SEQ ID NO: 2439374 - RNA, 19 nt, Artificial Sequence
  Description of Artificial Sequence: Synthetic oligonucleotide
  Sense strand starting at position 3231 of SEQ ID NO: 1886970
uacagcuggucaguaagaa

SEQ ID NO: 2439375 - RNA, 19 nt, Artificial Sequence
  Description of Artificial Sequence: Synthetic oligonucleotide
  Antisense strand to SEQ ID NO: 2439374
uucuuacugaccagcugua

SEQ ID NO: 2439376 - RNA, 19 nt, Artificial Sequence
  Description of Artificial Sequence: Synthetic oligonucleotide
  Sense strand starting at position 3373 of SEQ ID NO: 1886970
ccgcauucccaggauguca

SEQ ID NO: 2439377 - RNA, 19 nt, Artificial Sequence
  Description of Artificial Sequence: Synthetic oligonucleotide
  Antisense strand to SEQ ID NO: 2439376
ugacauccugggaaugcgg

SEQ ID NO: 2439378 - RNA, 19 nt, Artificial Sequence
  Description of Artificial Sequence: Synthetic oligonucleotide
  Sense strand starting at position 3539 of SEQ ID NO: 1886970
agggaacuuuagucauccu

SEQ ID NO: 2439379 - RNA, 19 nt, Artificial Sequence
  Description of Artificial Sequence: Synthetic oligonucleotide
  Antisense strand to SEQ ID NO: 2439378
aggaugacuaaaguucccu

SEQ ID NO: 2439380 - RNA, 19 nt, Artificial Sequence
  Description of Artificial Sequence: Synthetic oligonucleotide
  Sense strand starting at position 3608 of SEQ ID NO: 1886970
ccacuagagccgugacagu

SEQ ID NO: 2439381 - RNA, 19 nt, Artificial Sequence
  Description of Artificial Sequence: Synthetic oligonucleotide
  Antisense strand to SEQ ID NO: 2439380
acugucacggcucuagugg

SEQ ID NO: 2439382 - RNA, 19 nt, Artificial Sequence
  Description of Artificial Sequence: Synthetic oligonucleotide
  Sense strand starting at position 9 of SEQ ID NO: 1886971
gggugauauuaugaaguac

SEQ ID NO: 2439383 - RNA, 19 nt, Artificial Sequence
  Description of Artificial Sequence: Synthetic oligonucleotide
  Antisense strand to SEQ ID NO: 2439382
guacuucauaauaucaccc

SEQ ID NO: 2439384 - RNA, 19 nt, Artificial Sequence
  Description of Artificial Sequence: Synthetic oligonucleotide
  Sense strand starting at position 75 of SEQ ID NO: 1886971
ugaccuacuuccgugcaaa

SEQ ID NO: 2439385 - RNA, 19 nt, Artificial Sequence
  Description of Artificial Sequence: Synthetic oligonucleotide
  Antisense strand to SEQ ID NO: 2439384
uuugcacggaaguagguca

SEQ ID NO: 2439386 - RNA, 19 nt, Artificial Sequence
  Description of Artificial Sequence: Synthetic oligonucleotide
  Sense strand starting at position 76 of SEQ ID NO: 1886971
gaccuacuuccgugcaaag

SEQ ID NO: 2439387 - RNA, 19 nt, Artificial Sequence
  Description of Artificial Sequence: Synthetic oligonucleotide
  Antisense strand to SEQ ID NO: 2439386
cuuugcacggaaguagguc

SEQ ID NO: 2439388 - RNA, 19 nt, Artificial Sequence
  Description of Artificial Sequence: Synthetic oligonucleotide
  Sense strand starting at position 78 of SEQ ID NO: 1886971
ccuacuuccgugcaaagaa

SEQ ID NO: 2439389 - RNA, 19 nt, Artificial Sequence
  Description of Artificial Sequence: Synthetic oligonucleotide
  Antisense strand to SEQ ID NO: 2439388
uucuuugcacggaaguagg

SEQ ID NO: 2439390 - RNA, 19 nt, Artificial Sequence
  Description of Artificial Sequence: Synthetic oligonucleotide
  Sense strand starting at position 731 of SEQ ID NO: 1886971
cugaccauaugcuaagaau

SEQ ID NO: 2439391 - RNA, 19 nt, Artificial Sequence
  Description of Artificial Sequence: Synthetic oligonucleotide
  Antisense strand to SEQ ID NO: 2439390
auucuuagcauauggucag

SEQ ID NO: 2439392 - RNA, 19 nt, Artificial Sequence
  Description of Artificial Sequence: Synthetic oligonucleotide
  Sense strand starting at position 734 of SEQ ID NO: 1886971
accauaugcuaagaaugaa

SEQ ID NO: 2439393 - RNA, 19 nt, Artificial Sequence
  Description of Artificial Sequence: Synthetic oligonucleotide
  Antisense strand to SEQ ID NO: 2439392
uucauucuuagcauauggu

SEQ ID NO: 2439394 - RNA, 19 nt, Artificial Sequence
  Description of Artificial Sequence: Synthetic oligonucleotide
  Sense strand starting at position 870 of SEQ ID NO: 1886971
ugggaaugcucauacauug

SEQ ID NO: 2439395 - RNA, 19 nt, Artificial Sequence
  Description of Artificial Sequence: Synthetic oligonucleotide
  Antisense strand to SEQ ID NO: 2439394
caauguaugagcauuccca

SEQ ID NO: 2439396 - RNA, 19 nt, Artificial Sequence
  Description of Artificial Sequence: Synthetic oligonucleotide
  Sense strand starting at position 3038 of SEQ ID NO: 1886971
uugguauccauguguuaca

SEQ ID NO: 2439397 - RNA, 19 nt, Artificial Sequence
  Description of Artificial Sequence: Synthetic oligonucleotide
  Antisense strand to SEQ ID NO: 2439396
uguaacacauggauaccaa

SEQ ID NO: 2439398 - RNA, 19 nt, Artificial Sequence
  Description of Artificial Sequence: Synthetic oligonucleotide
  Sense strand starting at position 3039 of SEQ ID NO: 1886971
ugguauccauguguuacau

SEQ ID NO: 2439399 - RNA, 19 nt, Artificial Sequence
  Description of Artificial Sequence: Synthetic oligonucleotide
  Antisense strand to SEQ ID NO: 2439398
auguaacacauggauacca

SEQ ID NO: 2439400 - RNA, 19 nt, Artificial Sequence
  Description of Artificial Sequence: Synthetic oligonucleotide
  Sense strand starting at position 3217 of SEQ ID NO: 1886971
uucuucucuuuagaagagu

SEQ ID NO: 2439401 - RNA, 19 nt, Artificial Sequence
  Description of Artificial Sequence: Synthetic oligonucleotide
  Antisense strand to SEQ ID NO: 2439400
acucuucuaaagagaagaa

SEQ ID NO: 2439402 - RNA, 19 nt, Artificial Sequence
  Description of Artificial Sequence: Synthetic oligonucleotide
  Sense strand starting at position 3268 of SEQ ID NO: 1886971
uuuggaauaugucuuuaga

SEQ ID NO: 2439403 - RNA, 19 nt, Artificial Sequence
  Description of Artificial Sequence: Synthetic oligonucleotide
  Antisense strand to SEQ ID NO: 2439402
ucuaaagacauauuccaaa

SEQ ID NO: 2439404 - RNA, 19 nt, Artificial Sequence
  Description of Artificial Sequence: Synthetic oligonucleotide
  Sense strand starting at position 3270 of SEQ ID NO: 1886971
uggaauaugucuuuagacu

SEQ ID NO: 2439405 - RNA, 19 nt, Artificial Sequence
  Description of Artificial Sequence: Synthetic oligonucleotide
  Antisense strand to SEQ ID NO: 2439404
agucuaaagacauauucca

SEQ ID NO: 2439406 - RNA, 19 nt, Artificial Sequence
  Description of Artificial Sequence: Synthetic oligonucleotide
  Sense strand starting at position 3276 of SEQ ID NO: 1886971
augucuuuagacuagguau

SEQ ID NO: 2439407 - RNA, 19 nt, Artificial Sequence
  Description of Artificial Sequence: Synthetic oligonucleotide
  Antisense strand to SEQ ID NO: 2439406
auaccuagucuaaagacau

SEQ ID NO: 2439408 - RNA, 19 nt, Artificial Sequence
  Description of Artificial Sequence: Synthetic oligonucleotide
  Sense strand starting at position 3279 of SEQ ID NO: 1886971
ucuuuagacuagguaugga

SEQ ID NO: 2439409 - RNA, 19 nt, Artificial Sequence
  Description of Artificial Sequence: Synthetic oligonucleotide
  Antisense strand to SEQ ID NO: 2439408
uccauaccuagucuaaaga

SEQ ID NO: 2439410 - RNA, 19 nt, Artificial Sequence
  Description of Artificial Sequence: Synthetic oligonucleotide
  Sense strand starting at position 3282 of SEQ ID NO: 1886971
uuagacuagguauggaauu

SEQ ID NO: 2439411 - RNA, 19 nt, Artificial Sequence
  Description of Artificial Sequence: Synthetic oligonucleotide
  Antisense strand to SEQ ID NO: 2439410
aauuccauaccuagucuaa

SEQ ID NO: 2439412 - RNA, 19 nt, Artificial Sequence
  Description of Artificial Sequence: Synthetic oligonucleotide
  Sense strand starting at position 3283 of SEQ ID NO: 1886971
uagacuagguauggaauuu

SEQ ID NO: 2439413 - RNA, 19 nt, Artificial Sequence
  Description of Artificial Sequence: Synthetic oligonucleotide
  Antisense strand to SEQ ID NO: 2439412
aaauuccauaccuagucua

SEQ ID NO: 2439414 - RNA, 19 nt, Artificial Sequence
  Description of Artificial Sequence: Synthetic oligonucleotide
  Sense strand starting at position 3880 of SEQ ID NO: 1886971
gugucuuaauaauacacua

SEQ ID NO: 2439415 - RNA, 19 nt, Artificial Sequence
  Description of Artificial Sequence: Synthetic oligonucleotide
  Antisense strand to SEQ ID NO: 2439414
uaguguauuauuaagacac

SEQ ID NO: 2439416 - RNA, 19 nt, Artificial Sequence
  Description of Artificial Sequence: Synthetic oligonucleotide
  Sense strand starting at position 3923 of SEQ ID NO: 1886971
gguuccugauagugaucuu

SEQ ID NO: 2439417 - RNA, 19 nt, Artificial Sequence
  Description of Artificial Sequence: Synthetic oligonucleotide
  Antisense strand to SEQ ID NO: 2439416
aagaucacuaucaggaacc

SEQ ID NO: 2439418 - RNA, 19 nt, Artificial Sequence
  Description of Artificial Sequence: Synthetic oligonucleotide
  Sense strand starting at position 19 of SEQ ID NO: 1886972
acgcuuugaugugcagaau

SEQ ID NO: 2439419 - RNA, 19 nt, Artificial Sequence
  Description of Artificial Sequence: Synthetic oligonucleotide
  Antisense strand to SEQ ID NO: 2439418
auucugcacaucaaagcgu

SEQ ID NO: 2439420 - RNA, 19 nt, Artificial Sequence
  Description of Artificial Sequence: Synthetic oligonucleotide
  Sense strand starting at position 20 of SEQ ID NO: 1886972
cgcuuugaugugcagaauc

SEQ ID NO: 2439421 - RNA, 19 nt, Artificial Sequence
  Description of Artificial Sequence: Synthetic oligonucleotide
  Antisense strand to SEQ ID NO: 2439420
gauucugcacaucaaagcg

SEQ ID NO: 2439422 - RNA, 19 nt, Artificial Sequence
  Description of Artificial Sequence: Synthetic oligonucleotide
  Sense strand starting at position 742 of SEQ ID NO: 1886972
cagagaaacugugugucuu

SEQ ID NO: 2439423 - RNA, 19 nt, Artificial Sequence
  Description of Artificial Sequence: Synthetic oligonucleotide
  Antisense strand to SEQ ID NO: 2439422
aagacacacaguuucucug

SEQ ID NO: 2439424 - RNA, 19 nt, Artificial Sequence
  Description of Artificial Sequence: Synthetic oligonucleotide
  Sense strand starting at position 743 of SEQ ID NO: 1886972
agagaaacugugugucuug

SEQ ID NO: 2439425 - RNA, 19 nt, Artificial Sequence
  Description of Artificial Sequence: Synthetic oligonucleotide
  Antisense strand to SEQ ID NO: 2439424
caagacacacaguuucucu

SEQ ID NO: 2439426 - RNA, 19 nt, Artificial Sequence
  Description of Artificial Sequence: Synthetic oligonucleotide
  Sense strand starting at position 744 of SEQ ID NO: 1886972
gagaaacugugugucuugu

SEQ ID NO: 2439427 - RNA, 19 nt, Artificial Sequence
  Description of Artificial Sequence: Synthetic oligonucleotide
  Antisense strand to SEQ ID NO: 2439426
acaagacacacaguuucuc

SEQ ID NO: 2439428 - RNA, 19 nt, Artificial Sequence
  Description of Artificial Sequence: Synthetic oligonucleotide
  Sense strand starting at position 748 of SEQ ID NO: 1886972
aacugugugucuuguccaa

SEQ ID NO: 2439429 - RNA, 19 nt, Artificial Sequence
  Description of Artificial Sequence: Synthetic oligonucleotide
  Antisense strand to SEQ ID NO: 2439428
uuggacaagacacacaguu

SEQ ID NO: 2439430 - RNA, 19 nt, Artificial Sequence
  Description of Artificial Sequence: Synthetic oligonucleotide
  Sense strand starting at position 750 of SEQ ID NO: 1886972
cugugugucuuguccaaau

SEQ ID NO: 2439431 - RNA, 19 nt, Artificial Sequence
  Description of Artificial Sequence: Synthetic oligonucleotide
  Antisense strand to SEQ ID NO: 2439430
auuuggacaagacacacag

SEQ ID NO: 2439432 - RNA, 19 nt, Artificial Sequence
  Description of Artificial Sequence: Synthetic oligonucleotide
  Sense strand starting at position 752 of SEQ ID NO: 1886972
gugugucuuguccaaaucu

SEQ ID NO: 2439433 - RNA, 19 nt, Artificial Sequence
  Description of Artificial Sequence: Synthetic oligonucleotide
  Antisense strand to SEQ ID NO: 2439432
agauuuggacaagacacac

SEQ ID NO: 2439434 - RNA, 19 nt, Artificial Sequence
  Description of Artificial Sequence: Synthetic oligonucleotide
  Sense strand starting at position 761 of SEQ ID NO: 1886972
guccaaaucucacugaguc

SEQ ID NO: 2439435 - RNA, 19 nt, Artificial Sequence
  Description of Artificial Sequence: Synthetic oligonucleotide
  Antisense strand to SEQ ID NO: 2439434
gacucagugagauuuggac

SEQ ID NO: 2439436 - RNA, 19 nt, Artificial Sequence
  Description of Artificial Sequence: Synthetic oligonucleotide
  Sense strand starting at position 833 of SEQ ID NO: 1886972
ggcagugcgcaccuaucaa

SEQ ID NO: 2439437 - RNA, 19 nt, Artificial Sequence
  Description of Artificial Sequence: Synthetic oligonucleotide
  Antisense strand to SEQ ID NO: 2439436
uugauaggugcgcacugcc

SEQ ID NO: 2439438 - RNA, 19 nt, Artificial Sequence
  Description of Artificial Sequence: Synthetic oligonucleotide
  Sense strand starting at position 938 of SEQ ID NO: 1886972
accucauuauccugguauc

SEQ ID NO: 2439439 - RNA, 19 nt, Artificial Sequence
  Description of Artificial Sequence: Synthetic oligonucleotide
  Antisense strand to SEQ ID NO: 2439438
gauaccaggauaaugaggu

SEQ ID NO: 2439440 - RNA, 19 nt, Artificial Sequence
  Description of Artificial Sequence: Synthetic oligonucleotide
  Sense strand starting at position 939 of SEQ ID NO: 1886972
ccucauuauccugguaucu

SEQ ID NO: 2439441 - RNA, 19 nt, Artificial Sequence
  Description of Artificial Sequence: Synthetic oligonucleotide
  Antisense strand to SEQ ID NO: 2439440
agauaccaggauaaugagg

SEQ ID NO: 2439442 - RNA, 19 nt, Artificial Sequence
  Description of Artificial Sequence: Synthetic oligonucleotide
  Sense strand starting at position 941 of SEQ ID NO: 1886972
ucauuauccugguaucuag

SEQ ID NO: 2439443 - RNA, 19 nt, Artificial Sequence
  Description of Artificial Sequence: Synthetic oligonucleotide
  Antisense strand to SEQ ID NO: 2439442
cuagauaccaggauaauga

SEQ ID NO: 2439444 - RNA, 19 nt, Artificial Sequence
  Description of Artificial Sequence: Synthetic oligonucleotide
  Sense strand starting at position 1122 of SEQ ID NO: 1886972
ccaaacuaucuacgucagu

SEQ ID NO: 2439445 - RNA, 19 nt, Artificial Sequence
  Description of Artificial Sequence: Synthetic oligonucleotide
  Antisense strand to SEQ ID NO: 2439444
acugacguagauaguuugg

SEQ ID NO: 2439446 - RNA, 19 nt, Artificial Sequence
  Description of Artificial Sequence: Synthetic oligonucleotide
  Sense strand starting at position 1312 of SEQ ID NO: 1886972
cggaaauucucuccugcua

SEQ ID NO: 2439447 - RNA, 19 nt, Artificial Sequence
  Description of Artificial Sequence: Synthetic oligonucleotide
  Antisense strand to SEQ ID NO: 2439446
uagcaggagagaauuuccg

SEQ ID NO: 2439448 - RNA, 19 nt, Artificial Sequence
  Description of Artificial Sequence: Synthetic oligonucleotide
  Sense strand starting at position 2001 of SEQ ID NO: 1886972
ccgccucugccagaaauca

SEQ ID NO: 2439449 - RNA, 19 nt, Artificial Sequence
  Description of Artificial Sequence: Synthetic oligonucleotide
  Antisense strand to SEQ ID NO: 2439448
ugauuucuggcagaggcgg

SEQ ID NO: 2439450 - RNA, 19 nt, Artificial Sequence
  Description of Artificial Sequence: Synthetic oligonucleotide
  Sense strand starting at position 2254 of SEQ ID NO: 1886972
gccuuucucugcugcgagu

SEQ ID NO: 2439451 - RNA, 19 nt, Artificial Sequence
  Description of Artificial Sequence: Synthetic oligonucleotide
  Antisense strand to SEQ ID NO: 2439450
acucgcagcagagaaaggc

SEQ ID NO: 2439452 - RNA, 19 nt, Artificial Sequence
  Description of Artificial Sequence: Synthetic oligonucleotide
  Sense strand starting at position 2255 of SEQ ID NO: 1886972
ccuuucucugcugcgagua

SEQ ID NO: 2439453 - RNA, 19 nt, Artificial Sequence
  Description of Artificial Sequence: Synthetic oligonucleotide
  Antisense strand to SEQ ID NO: 2439452
uacucgcagcagagaaagg

SEQ ID NO: 2439454 - RNA, 19 nt, Artificial Sequence
  Description of Artificial Sequence: Synthetic oligonucleotide
  Sense strand starting at position 2267 of SEQ ID NO: 1886972
gcgaguagugacuaaacau

SEQ ID NO: 2439455 - RNA, 19 nt, Artificial Sequence
  Description of Artificial Sequence: Synthetic oligonucleotide
  Antisense strand to SEQ ID NO: 2439454
auguuuagucacuacucgc

SEQ ID NO: 2439456 - RNA, 19 nt, Artificial Sequence
  Description of Artificial Sequence: Synthetic oligonucleotide
  Sense strand starting at position 2833 of SEQ ID NO: 1886972
aucccagguucccggaaua

SEQ ID NO: 2439457 - RNA, 19 nt, Artificial Sequence
  Description of Artificial Sequence: Synthetic oligonucleotide
  Antisense strand to SEQ ID NO: 2439456
uauuccgggaaccugggau

SEQ ID NO: 2439458 - RNA, 19 nt, Artificial Sequence
  Description of Artificial Sequence: Synthetic oligonucleotide
  Sense strand starting at position 3222 of SEQ ID NO: 1886972
gaggguuccgggcacucaa

SEQ ID NO: 2439459 - RNA, 19 nt, Artificial Sequence
  Description of Artificial Sequence: Synthetic oligonucleotide
  Antisense strand to SEQ ID NO: 2439458
uugagugcccggaacccuc

SEQ ID NO: 2439460 - RNA, 19 nt, Artificial Sequence
  Description of Artificial Sequence: Synthetic oligonucleotide
  Sense strand starting at position 3550 of SEQ ID NO: 1886972
gcaccuuucugauccgcga

SEQ ID NO: 2439461 - RNA, 19 nt, Artificial Sequence
  Description of Artificial Sequence: Synthetic oligonucleotide
  Antisense strand to SEQ ID NO: 2439460
ucgcggaucagaaaggugc

SEQ ID NO: 2439462 - RNA, 19 nt, Artificial Sequence
  Description of Artificial Sequence: Synthetic oligonucleotide
  Sense strand starting at position 3651 of SEQ ID NO: 1886972
ggcagcuucucucugcaga

SEQ ID NO: 2439463 - RNA, 19 nt, Artificial Sequence
  Description of Artificial Sequence: Synthetic oligonucleotide
  Antisense strand to SEQ ID NO: 2439462
ucugcagagagaagcugcc

SEQ ID NO: 2439464 - RNA, 19 nt, Artificial Sequence
  Description of Artificial Sequence: Synthetic oligonucleotide
  Sense strand starting at position 3837 of SEQ ID NO: 1886972
agaagagccuauuacaucu

SEQ ID NO: 2439465 - RNA, 19 nt, Artificial Sequence
  Description of Artificial Sequence: Synthetic oligonucleotide
  Antisense strand to SEQ ID NO: 2439464
agauguaauaggcucuucu

SEQ ID NO: 2439466 - RNA, 19 nt, Artificial Sequence
  Description of Artificial Sequence: Synthetic oligonucleotide
  Sense strand starting at position 3921 of SEQ ID NO: 1886972
cagcaucucugucggaaga

SEQ ID NO: 2439467 - RNA, 19 nt, Artificial Sequence
  Description of Artificial Sequence: Synthetic oligonucleotide
  Antisense strand to SEQ ID NO: 2439466
ucuuccgacagagaugcug

SEQ ID NO: 2439468 - RNA, 19 nt, Artificial Sequence
  Description of Artificial Sequence: Synthetic oligonucleotide
  Sense strand starting at position 3954 of SEQ ID NO: 1886972
cuggacuccuaugagaaag

SEQ ID NO: 2439469 - RNA, 19 nt, Artificial Sequence
  Description of Artificial Sequence: Synthetic oligonucleotide
  Antisense strand to SEQ ID NO: 2439468
cuuucucauaggaguccag

SEQ ID NO: 2439470 - RNA, 19 nt, Artificial Sequence
  Description of Artificial Sequence: Synthetic oligonucleotide
  Sense strand starting at position 8 of SEQ ID NO: 1886973
uggaucuccugcugagaug

SEQ ID NO: 2439471 - RNA, 19 nt, Artificial Sequence
  Description of Artificial Sequence: Synthetic oligonucleotide
  Antisense strand to SEQ ID NO: 2439470
caucucagcaggagaucca

SEQ ID NO: 2439472 - RNA, 19 nt, Artificial Sequence
  Description of Artificial Sequence: Synthetic oligonucleotide
  Sense strand starting at position 9 of SEQ ID NO: 1886973
ggaucuccugcugagauga

SEQ ID NO: 2439473 - RNA, 19 nt, Artificial Sequence
  Description of Artificial Sequence: Synthetic oligonucleotide
  Antisense strand to SEQ ID NO: 2439472
ucaucucagcaggagaucc

SEQ ID NO: 2439474 - RNA, 19 nt, Artificial Sequence
  Description of Artificial Sequence: Synthetic oligonucleotide
  Sense strand starting at position 79 of SEQ ID NO: 1886973
ugccgauugccuuggccau

SEQ ID NO: 2439475 - RNA, 19 nt, Artificial Sequence
  Description of Artificial Sequence: Synthetic oligonucleotide
  Antisense strand to SEQ ID NO: 2439474
auggccaaggcaaucggca

SEQ ID NO: 2439476 - RNA, 19 nt, Artificial Sequence
  Description of Artificial Sequence: Synthetic oligonucleotide
  Sense strand starting at position 120 of SEQ ID NO: 1886973
gcacuucugucuuccagca

SEQ ID NO: 2439477 - RNA, 19 nt, Artificial Sequence
  Description of Artificial Sequence: Synthetic oligonucleotide
  Antisense strand to SEQ ID NO: 2439476
ugcuggaagacagaagugc

SEQ ID NO: 2439478 - RNA, 19 nt, Artificial Sequence
  Description of Artificial Sequence: Synthetic oligonucleotide
  Sense strand starting at position 164 of SEQ ID NO: 1886973
ggcucucggcagagguuua

SEQ ID NO: 2439479 - RNA, 19 nt, Artificial Sequence
  Description of Artificial Sequence: Synthetic oligonucleotide
  Antisense strand to SEQ ID NO: 2439478
uaaaccucugccgagagcc

SEQ ID NO: 2439480 - RNA, 19 nt, Artificial Sequence
  Description of Artificial Sequence: Synthetic oligonucleotide
  Sense strand starting at position 169 of SEQ ID NO: 1886973
ucggcagagguuuauggaa

SEQ ID NO: 2439481 - RNA, 19 nt, Artificial Sequence
  Description of Artificial Sequence: Synthetic oligonucleotide
  Antisense strand to SEQ ID NO: 2439480
uuccauaaaccucugccga

SEQ ID NO: 2439482 - RNA, 19 nt, Artificial Sequence
  Description of Artificial Sequence: Synthetic oligonucleotide
  Sense strand starting at position 171 of SEQ ID NO: 1886973
ggcagagguuuauggaaug

SEQ ID NO: 2439483 - RNA, 19 nt, Artificial Sequence
  Description of Artificial Sequence: Synthetic oligonucleotide
  Antisense strand to SEQ ID NO: 2439482
cauuccauaaaccucugcc

SEQ ID NO: 2439484 - RNA, 19 nt, Artificial Sequence
  Description of Artificial Sequence: Synthetic oligonucleotide
  Sense strand starting at position 193 of SEQ ID NO: 1886973
gaaugaacuugacuugugu

SEQ ID NO: 2439485 - RNA, 19 nt, Artificial Sequence
  Description of Artificial Sequence: Synthetic oligonucleotide
  Antisense strand to SEQ ID NO: 2439484
acacaagucaaguucauuc

SEQ ID NO: 2439486 - RNA, 19 nt, Artificial Sequence
  Description of Artificial Sequence: Synthetic oligonucleotide
  Sense strand starting at position 200 of SEQ ID NO: 1886973
cuugacuugugucagagca

SEQ ID NO: 2439487 - RNA, 19 nt, Artificial Sequence
  Description of Artificial Sequence: Synthetic oligonucleotide
  Antisense strand to SEQ ID NO: 2439486
ugcucugacacaagucaag

SEQ ID NO: 2439488 - RNA, 19 nt, Artificial Sequence
  Description of Artificial Sequence: Synthetic oligonucleotide
  Sense strand starting at position 202 of SEQ ID NO: 1886973
ugacuugugucagagcauu

SEQ ID NO: 2439489 - RNA, 19 nt, Artificial Sequence
  Description of Artificial Sequence: Synthetic oligonucleotide
  Antisense strand to SEQ ID NO: 2439488
aaugcucugacacaaguca

SEQ ID NO: 2439490 - RNA, 19 nt, Artificial Sequence
  Description of Artificial Sequence: Synthetic oligonucleotide
  Sense strand starting at position 208 of SEQ ID NO: 1886973
gugucagagcauuguaauu

SEQ ID NO: 2439491 - RNA, 19 nt, Artificial Sequence
  Description of Artificial Sequence: Synthetic oligonucleotide
  Antisense strand to SEQ ID NO: 2439490
aauuacaaugcucugacac

SEQ ID NO: 2439492 - RNA, 19 nt, Artificial Sequence
  Description of Artificial Sequence: Synthetic oligonucleotide
  Sense strand starting at position 210 of SEQ ID NO: 1886973
gucagagcauuguaauuua

SEQ ID NO: 2439493 - RNA, 19 nt, Artificial Sequence
  Description of Artificial Sequence: Synthetic oligonucleotide
  Antisense strand to SEQ ID NO: 2439492
uaaauuacaaugcucugac

SEQ ID NO: 2439494 - RNA, 19 nt, Artificial Sequence
  Description of Artificial Sequence: Synthetic oligonucleotide
  Sense strand starting at position 395 of SEQ ID NO: 1886973
caagcauugugagggcaaa

SEQ ID NO: 2439495 - RNA, 19 nt, Artificial Sequence
  Description of Artificial Sequence: Synthetic oligonucleotide
  Antisense strand to SEQ ID NO: 2439494
uuugcccucacaaugcuug

SEQ ID NO: 2439496 - RNA, 19 nt, Artificial Sequence
  Description of Artificial Sequence: Synthetic oligonucleotide
  Sense strand starting at position 418 of SEQ ID NO: 1886973
agguccuacucaucauuau

SEQ ID NO: 2439497 - RNA, 19 nt, Artificial Sequence
  Description of Artificial Sequence: Synthetic oligonucleotide
  Antisense strand to SEQ ID NO: 2439496
auaaugaugaguaggaccu

SEQ ID NO: 2439498 - RNA, 19 nt, Artificial Sequence
  Description of Artificial Sequence: Synthetic oligonucleotide
  Sense strand starting at position 419 of SEQ ID NO: 1886973
gguccuacucaucauuaua

SEQ ID NO: 2439499 - RNA, 19 nt, Artificial Sequence
  Description of Artificial Sequence: Synthetic oligonucleotide
  Antisense strand to SEQ ID NO: 2439498
uauaaugaugaguaggacc

SEQ ID NO: 2439500 - RNA, 19 nt, Artificial Sequence
  Description of Artificial Sequence: Synthetic oligonucleotide
  Sense strand starting at position 462 of SEQ ID NO: 1886973
gugcauggagcucaauauu

SEQ ID NO: 2439501 - RNA, 19 nt, Artificial Sequence
  Description of Artificial Sequence: Synthetic oligonucleotide
  Antisense strand to SEQ ID NO: 2439500
aauauugagcuccaugcac

SEQ ID NO: 2439502 - RNA, 19 nt, Artificial Sequence
  Description of Artificial Sequence: Synthetic oligonucleotide
  Sense strand starting at position 471 of SEQ ID NO: 1886973
gcucaauauuugugaaaug

SEQ ID NO: 2439503 - RNA, 19 nt, Artificial Sequence
  Description of Artificial Sequence: Synthetic oligonucleotide
  Antisense strand to SEQ ID NO: 2439502
cauuucacaaauauugagc

SEQ ID NO: 2439504 - RNA, 19 nt, Artificial Sequence
  Description of Artificial Sequence: Synthetic oligonucleotide
  Sense strand starting at position 472 of SEQ ID NO: 1886973
cucaauauuugugaaaugu

SEQ ID NO: 2439505 - RNA, 19 nt, Artificial Sequence
  Description of Artificial Sequence: Synthetic oligonucleotide
  Antisense strand to SEQ ID NO: 2439504
acauuucacaaauauugag

SEQ ID NO: 2439506 - RNA, 19 nt, Artificial Sequence
  Description of Artificial Sequence: Synthetic oligonucleotide
  Sense strand starting at position 481 of SEQ ID NO: 1886973
ugugaaauguguugaauaa

SEQ ID NO: 2439507 - RNA, 19 nt, Artificial Sequence
  Description of Artificial Sequence: Synthetic oligonucleotide
  Antisense strand to SEQ ID NO: 2439506
uuauucaacacauuucaca

SEQ ID NO: 2439508 - RNA, 19 nt, Artificial Sequence
  Description of Artificial Sequence: Synthetic oligonucleotide
  Sense strand starting at position 540 of SEQ ID NO: 1886973
aguugaacuaacuggguua

SEQ ID NO: 2439509 - RNA, 19 nt, Artificial Sequence
  Description of Artificial Sequence: Synthetic oligonucleotide
  Antisense strand to SEQ ID NO: 2439508
uaacccaguuaguucaacu

SEQ ID NO: 2439510 - RNA, 19 nt, Artificial Sequence
  Description of Artificial Sequence: Synthetic oligonucleotide
  Sense strand starting at position 543 of SEQ ID NO: 1886973
ugaacuaacuggguuacuu

SEQ ID NO: 2439511 - RNA, 19 nt, Artificial Sequence
  Description of Artificial Sequence: Synthetic oligonucleotide
  Antisense strand to SEQ ID NO: 2439510
aaguaacccaguuaguuca

SEQ ID NO: 2439512 - RNA, 19 nt, Artificial Sequence
  Description of Artificial Sequence: Synthetic oligonucleotide
  Sense strand starting at position 551 of SEQ ID NO: 1886973
cuggguuacuucuauuucu

SEQ ID NO: 2439513 - RNA, 19 nt, Artificial Sequence
  Description of Artificial Sequence: Synthetic oligonucleotide
  Antisense strand to SEQ ID NO: 2439512
agaaauagaaguaacccag

SEQ ID NO: 2439514 - RNA, 19 nt, Artificial Sequence
  Description of Artificial Sequence: Synthetic oligonucleotide
  Sense strand starting at position 573 of SEQ ID NO: 1886973
acgcuuugaugugcagaau

SEQ ID NO: 2439515 - RNA, 19 nt, Artificial Sequence
  Description of Artificial Sequence: Synthetic oligonucleotide
  Antisense strand to SEQ ID NO: 2439514
auucugcacaucaaagcgu

SEQ ID NO: 2439516 - RNA, 19 nt, Artificial Sequence
  Description of Artificial Sequence: Synthetic oligonucleotide
  Sense strand starting at position 574 of SEQ ID NO: 1886973
cgcuuugaugugcagaauc

SEQ ID NO: 2439517 - RNA, 19 nt, Artificial Sequence
  Description of Artificial Sequence: Synthetic oligonucleotide
  Antisense strand to SEQ ID NO: 2439516
gauucugcacaucaaagcg

SEQ ID NO: 2439518 - RNA, 19 nt, Artificial Sequence
  Description of Artificial Sequence: Synthetic oligonucleotide
  Sense strand starting at position 1296 of SEQ ID NO: 1886973
cagagaaacugugugucuu

SEQ ID NO: 2439519 - RNA, 19 nt, Artificial Sequence
  Description of Artificial Sequence: Synthetic oligonucleotide
  Antisense strand to SEQ ID NO: 2439518
aagacacacaguuucucug

SEQ ID NO: 2439520 - RNA, 19 nt, Artificial Sequence
  Description of Artificial Sequence: Synthetic oligonucleotide
  Sense strand starting at position 1297 of SEQ ID NO: 1886973
agagaaacugugugucuug

SEQ ID NO: 2439521 - RNA, 19 nt, Artificial Sequence
  Description of Artificial Sequence: Synthetic oligonucleotide
  Antisense strand to SEQ ID NO: 2439520
caagacacacaguuucucu

SEQ ID NO: 2439522 - RNA, 19 nt, Artificial Sequence
  Description of Artificial Sequence: Synthetic oligonucleotide
  Sense strand starting at position 1298 of SEQ ID NO: 1886973
gagaaacugugugucuugu

SEQ ID NO: 2439523 - RNA, 19 nt, Artificial Sequence
  Description of Artificial Sequence: Synthetic oligonucleotide
  Antisense strand to SEQ ID NO: 2439522
acaagacacacaguuucuc

SEQ ID NO: 2439524 - RNA, 19 nt, Artificial Sequence
  Description of Artificial Sequence: Synthetic oligonucleotide
  Sense strand starting at position 1304 of SEQ ID NO: 1886973
cugugugucuuguccaaau

SEQ ID NO: 2439525 - RNA, 19 nt, Artificial Sequence
  Description of Artificial Sequence: Synthetic oligonucleotide
  Antisense strand to SEQ ID NO: 2439524
auuuggacaagacacacag

SEQ ID NO: 2439526 - RNA, 19 nt, Artificial Sequence
  Description of Artificial Sequence: Synthetic oligonucleotide
  Sense strand starting at position 1306 of SEQ ID NO: 1886973
gugugucuuguccaaaucu

SEQ ID NO: 2439527 - RNA, 19 nt, Artificial Sequence
  Description of Artificial Sequence: Synthetic oligonucleotide
  Antisense strand to SEQ ID NO: 2439526
agauuuggacaagacacac

SEQ ID NO: 2439528 - RNA, 19 nt, Artificial Sequence
  Description of Artificial Sequence: Synthetic oligonucleotide
  Sense strand starting at position 1315 of SEQ ID NO: 1886973
guccaaaucucacugaguc

SEQ ID NO: 2439529 - RNA, 19 nt, Artificial Sequence
  Description of Artificial Sequence: Synthetic oligonucleotide
  Antisense strand to SEQ ID NO: 2439528
gacucagugagauuuggac

SEQ ID NO: 2439530 - RNA, 19 nt, Artificial Sequence
  Description of Artificial Sequence: Synthetic oligonucleotide
  Sense strand starting at position 1387 of SEQ ID NO: 1886973
ggcagugcgcaccuaucaa

SEQ ID NO: 2439531 - RNA, 19 nt, Artificial Sequence
  Description of Artificial Sequence: Synthetic oligonucleotide
  Antisense strand to SEQ ID NO: 2439530
uugauaggugcgcacugcc

SEQ ID NO: 2439532 - RNA, 19 nt, Artificial Sequence
  Description of Artificial Sequence: Synthetic oligonucleotide
  Sense strand starting at position 1493 of SEQ ID NO: 1886973
ccucauuauccugguaucu

SEQ ID NO: 2439533 - RNA, 19 nt, Artificial Sequence
  Description of Artificial Sequence: Synthetic oligonucleotide
  Antisense strand to SEQ ID NO: 2439532
agauaccaggauaaugagg

SEQ ID NO: 2439534 - RNA, 19 nt, Artificial Sequence
  Description of Artificial Sequence: Synthetic oligonucleotide
  Sense strand starting at position 1495 of SEQ ID NO: 1886973
ucauuauccugguaucuag

SEQ ID NO: 2439535 - RNA, 19 nt, Artificial Sequence
  Description of Artificial Sequence: Synthetic oligonucleotide
  Antisense strand to SEQ ID NO: 2439534
cuagauaccaggauaauga

SEQ ID NO: 2439536 - RNA, 19 nt, Artificial Sequence
  Description of Artificial Sequence: Synthetic oligonucleotide
  Sense strand starting at position 1676 of SEQ ID NO: 1886973
ccaaacuaucuacgucagu

SEQ ID NO: 2439537 - RNA, 19 nt, Artificial Sequence
  Description of Artificial Sequence: Synthetic oligonucleotide
  Antisense strand to SEQ ID NO: 2439536
acugacguagauaguuugg

SEQ ID NO: 2439538 - RNA, 19 nt, Artificial Sequence
  Description of Artificial Sequence: Synthetic oligonucleotide
  Sense strand starting at position 1866 of SEQ ID NO: 1886973
cggaaauucucuccugcua

SEQ ID NO: 2439539 - RNA, 19 nt, Artificial Sequence
  Description of Artificial Sequence: Synthetic oligonucleotide
  Antisense strand to SEQ ID NO: 2439538
uagcaggagagaauuuccg

SEQ ID NO: 2439540 - RNA, 19 nt, Artificial Sequence
  Description of Artificial Sequence: Synthetic oligonucleotide
  Sense strand starting at position 2555 of SEQ ID NO: 1886973
ccgccucugccagaaauca

SEQ ID NO: 2439541 - RNA, 19 nt, Artificial Sequence
  Description of Artificial Sequence: Synthetic oligonucleotide
  Antisense strand to SEQ ID NO: 2439540
ugauuucuggcagaggcgg

SEQ ID NO: 2439542 - RNA, 19 nt, Artificial Sequence
  Description of Artificial Sequence: Synthetic oligonucleotide
  Sense strand starting at position 2809 of SEQ ID NO: 1886973
ccuuucucugcugcgagua

SEQ ID NO: 2439543 - RNA, 19 nt, Artificial Sequence
  Description of Artificial Sequence: Synthetic oligonucleotide
  Antisense strand to SEQ ID NO: 2439542
uacucgcagcagagaaagg

SEQ ID NO: 2439544 - RNA, 19 nt, Artificial Sequence
  Description of Artificial Sequence: Synthetic oligonucleotide
  Sense strand starting at position 2821 of SEQ ID NO: 1886973
gcgaguagugacuaaacau

SEQ ID NO: 2439545 - RNA, 19 nt, Artificial Sequence
  Description of Artificial Sequence: Synthetic oligonucleotide
  Antisense strand to SEQ ID NO: 2439544
auguuuagucacuacucgc

SEQ ID NO: 2439546 - RNA, 19 nt, Artificial Sequence
  Description of Artificial Sequence: Synthetic oligonucleotide
  Sense strand starting at position 3387 of SEQ ID NO: 1886973
aucccagguucccggaaua

SEQ ID NO: 2439547 - RNA, 19 nt, Artificial Sequence
  Description of Artificial Sequence: Synthetic oligonucleotide
  Antisense strand to SEQ ID NO: 2439546
uauuccgggaaccugggau

SEQ ID NO: 2439548 - RNA, 19 nt, Artificial Sequence
  Description of Artificial Sequence: Synthetic oligonucleotide
  Sense strand starting at position 3776 of SEQ ID NO: 1886973
gaggguuccgggcacucaa

SEQ ID NO: 2439549 - RNA, 19 nt, Artificial Sequence
  Description of Artificial Sequence: Synthetic oligonucleotide
  Antisense strand to SEQ ID NO: 2439548
uugagugcccggaacccuc

SEQ ID NO: 2439550 - RNA, 19 nt, Artificial Sequence
  Description of Artificial Sequence: Synthetic oligonucleotide
  Sense strand starting at position 16 of SEQ ID NO: 1886974
guguccuuguucccaguga

SEQ ID NO: 2439551 - RNA, 19 nt, Artificial Sequence
  Description of Artificial Sequence: Synthetic oligonucleotide
  Antisense strand to SEQ ID NO: 2439550
ucacugggaacaaggacac

SEQ ID NO: 2439552 - RNA, 19 nt, Artificial Sequence
  Description of Artificial Sequence: Synthetic oligonucleotide
  Sense strand starting at position 20 of SEQ ID NO: 1886974
ccuuguucccagugacauu

SEQ ID NO: 2439553 - RNA, 19 nt, Artificial Sequence
  Description of Artificial Sequence: Synthetic oligonucleotide
  Antisense strand to SEQ ID NO: 2439552
aaugucacugggaacaagg

SEQ ID NO: 2439554 - RNA, 19 nt, Artificial Sequence
  Description of Artificial Sequence: Synthetic oligonucleotide
  Sense strand starting at position 121 of SEQ ID NO: 1886974
gauggugagccgcagacau

SEQ ID NO: 2439555 - RNA, 19 nt, Artificial Sequence
  Description of Artificial Sequence: Synthetic oligonucleotide
  Antisense strand to SEQ ID NO: 2439554
augucugcggcucaccauc

SEQ ID NO: 2439556 - RNA, 19 nt, Artificial Sequence
  Description of Artificial Sequence: Synthetic oligonucleotide
  Sense strand starting at position 233 of SEQ ID NO: 1886974
gcagaacagugucucucaa

SEQ ID NO: 2439557 - RNA, 19 nt, Artificial Sequence
  Description of Artificial Sequence: Synthetic oligonucleotide
  Antisense strand to SEQ ID NO: 2439556
uugagagacacuguucugc

SEQ ID NO: 2439558 - RNA, 19 nt, Artificial Sequence
  Description of Artificial Sequence: Synthetic oligonucleotide
  Sense strand starting at position 265 of SEQ ID NO: 1886974
cgagaagucucagaaugug

SEQ ID NO: 2439559 - RNA, 19 nt, Artificial Sequence
  Description of Artificial Sequence: Synthetic oligonucleotide
  Antisense strand to SEQ ID NO: 2439558
cacauucugagacuucucg

SEQ ID NO: 2439560 - RNA, 19 nt, Artificial Sequence
  Description of Artificial Sequence: Synthetic oligonucleotide
  Sense strand starting at position 301 of SEQ ID NO: 1886974
ggucucugcagaugucuuu

SEQ ID NO: 2439561 - RNA, 19 nt, Artificial Sequence
  Description of Artificial Sequence: Synthetic oligonucleotide
  Antisense strand to SEQ ID NO: 2439560
aaagacaucugcagagacc

SEQ ID NO: 2439562 - RNA, 19 nt, Artificial Sequence
  Description of Artificial Sequence: Synthetic oligonucleotide
  Sense strand starting at position 331 of SEQ ID NO: 1886974
ggccauauugagugagggu

SEQ ID NO: 2439563 - RNA, 19 nt, Artificial Sequence
  Description of Artificial Sequence: Synthetic oligonucleotide
  Antisense strand to SEQ ID NO: 2439562
acccucacucaauauggcc

SEQ ID NO: 2439564 - RNA, 19 nt, Artificial Sequence
  Description of Artificial Sequence: Synthetic oligonucleotide
  Sense strand starting at position 535 of SEQ ID NO: 1886974
ggagcaggucauuaucugu

SEQ ID NO: 2439565 - RNA, 19 nt, Artificial Sequence
  Description of Artificial Sequence: Synthetic oligonucleotide
  Antisense strand to SEQ ID NO: 2439564
acagauaaugaccugcucc

SEQ ID NO: 2439566 - RNA, 19 nt, Artificial Sequence
  Description of Artificial Sequence: Synthetic oligonucleotide
  Sense strand starting at position 538 of SEQ ID NO: 1886974
gcaggucauuaucuguuaa

SEQ ID NO: 2439567 - RNA, 19 nt, Artificial Sequence
  Description of Artificial Sequence: Synthetic oligonucleotide
  Antisense strand to SEQ ID NO: 2439566
uuaacagauaaugaccugc

SEQ ID NO: 2439568 - RNA, 19 nt, Artificial Sequence
  Description of Artificial Sequence: Synthetic oligonucleotide
  Sense strand starting at position 540 of SEQ ID NO: 1886974
aggucauuaucuguuaaua

SEQ ID NO: 2439569 - RNA, 19 nt, Artificial Sequence
  Description of Artificial Sequence: Synthetic oligonucleotide
  Antisense strand to SEQ ID NO: 2439568
uauuaacagauaaugaccu

SEQ ID NO: 2439570 - RNA, 19 nt, Artificial Sequence
  Description of Artificial Sequence: Synthetic oligonucleotide
  Sense strand starting at position 551 of SEQ ID NO: 1886974
uguuaauaucuugauguug

SEQ ID NO: 2439571 - RNA, 19 nt, Artificial Sequence
  Description of Artificial Sequence: Synthetic oligonucleotide
  Antisense strand to SEQ ID NO: 2439570
caacaucaagauauuaaca

SEQ ID NO: 2439572 - RNA, 19 nt, Artificial Sequence
  Description of Artificial Sequence: Synthetic oligonucleotide
  Sense strand starting at position 570 of SEQ ID NO: 1886974
caguuuggccuccagaacu

SEQ ID NO: 2439573 - RNA, 19 nt, Artificial Sequence
  Description of Artificial Sequence: Synthetic oligonucleotide
  Antisense strand to SEQ ID NO: 2439572
aguucuggaggccaaacug

SEQ ID NO: 2439574 - RNA, 19 nt, Artificial Sequence
  Description of Artificial Sequence: Synthetic oligonucleotide
  Sense strand starting at position 587 of SEQ ID NO: 1886974
cugugagaaaugugauguu

SEQ ID NO: 2439575 - RNA, 19 nt, Artificial Sequence
  Description of Artificial Sequence: Synthetic oligonucleotide
  Antisense strand to SEQ ID NO: 2439574
aacaucacauuucucacag

SEQ ID NO: 2439576 - RNA, 19 nt, Artificial Sequence
  Description of Artificial Sequence: Synthetic oligonucleotide
  Sense strand starting at position 617 of SEQ ID NO: 1886974
cccaguuuguguuccucua

SEQ ID NO: 2439577 - RNA, 19 nt, Artificial Sequence
  Description of Artificial Sequence: Synthetic oligonucleotide
  Antisense strand to SEQ ID NO: 2439576
uagaggaacacaaacuggg

SEQ ID NO: 2439578 - RNA, 19 nt, Artificial Sequence
  Description of Artificial Sequence: Synthetic oligonucleotide
  Sense strand starting at position 619 of SEQ ID NO: 1886974
caguuuguguuccucuauu

SEQ ID NO: 2439579 - RNA, 19 nt, Artificial Sequence
  Description of Artificial Sequence: Synthetic oligonucleotide
  Antisense strand to SEQ ID NO: 2439578
aauagaggaacacaaacug

SEQ ID NO: 2439580 - RNA, 19 nt, Artificial Sequence
  Description of Artificial Sequence: Synthetic oligonucleotide
  Sense strand starting at position 717 of SEQ ID NO: 1886974
ccaccugggcuccgagaaa

SEQ ID NO: 2439581 - RNA, 19 nt, Artificial Sequence
  Description of Artificial Sequence: Synthetic oligonucleotide
  Antisense strand to SEQ ID NO: 2439580
uuucucggagcccaggugg

SEQ ID NO: 2439582 - RNA, 19 nt, Artificial Sequence
  Description of Artificial Sequence: Synthetic oligonucleotide
  Sense strand starting at position 760 of SEQ ID NO: 1886974
acacuaaugcuggaauguu

SEQ ID NO: 2439583 - RNA, 19 nt, Artificial Sequence
  Description of Artificial Sequence: Synthetic oligonucleotide
  Antisense strand to SEQ ID NO: 2439582
aacauuccagcauuagugu

SEQ ID NO: 2439584 - RNA, 19 nt, Artificial Sequence
  Description of Artificial Sequence: Synthetic oligonucleotide
  Sense strand starting at position 769 of SEQ ID NO: 1886974
cuggaauguucucugugag

SEQ ID NO: 2439585 - RNA, 19 nt, Artificial Sequence
  Description of Artificial Sequence: Synthetic oligonucleotide
  Antisense strand to SEQ ID NO: 2439584
cucacagagaacauuccag

SEQ ID NO: 2439586 - RNA, 19 nt, Artificial Sequence
  Description of Artificial Sequence: Synthetic oligonucleotide
  Sense strand starting at position 772 of SEQ ID NO: 1886974
gaauguucucugugagcga

SEQ ID NO: 2439587 - RNA, 19 nt, Artificial Sequence
  Description of Artificial Sequence: Synthetic oligonucleotide
  Antisense strand to SEQ ID NO: 2439586
ucgcucacagagaacauuc

SEQ ID NO: 2439588 - RNA, 19 nt, Artificial Sequence
  Description of Artificial Sequence: Synthetic oligonucleotide
  Sense strand starting at position 775 of SEQ ID NO: 1886974
uguucucugugagcgauga

SEQ ID NO: 2439589 - RNA, 19 nt, Artificial Sequence
  Description of Artificial Sequence: Synthetic oligonucleotide
  Antisense strand to SEQ ID NO: 2439588
ucaucgcucacagagaaca

SEQ ID NO: 2439590 - RNA, 19 nt, Artificial Sequence
  Description of Artificial Sequence: Synthetic oligonucleotide
  Sense strand starting at position 776 of SEQ ID NO: 1886974
guucucugugagcgaugaa

SEQ ID NO: 2439591 - RNA, 19 nt, Artificial Sequence
  Description of Artificial Sequence: Synthetic oligonucleotide
  Antisense strand to SEQ ID NO: 2439590
uucaucgcucacagagaac

SEQ ID NO: 2439592 - RNA, 19 nt, Artificial Sequence
  Description of Artificial Sequence: Synthetic oligonucleotide
  Sense strand starting at position 802 of SEQ ID NO: 1886974
accagacuccgcuagagaa

SEQ ID NO: 2439593 - RNA, 19 nt, Artificial Sequence
  Description of Artificial Sequence: Synthetic oligonucleotide
  Antisense strand to SEQ ID NO: 2439592
uucucuagcggagucuggu

SEQ ID NO: 2439594 - RNA, 19 nt, Artificial Sequence
  Description of Artificial Sequence: Synthetic oligonucleotide
  Sense strand starting at position 829 of SEQ ID NO: 1886974
gacagaacuguuuacccga

SEQ ID NO: 2439595 - RNA, 19 nt, Artificial Sequence
  Description of Artificial Sequence: Synthetic oligonucleotide
  Antisense strand to SEQ ID NO: 2439594
ucggguaaacaguucuguc

SEQ ID NO: 2439596 - RNA, 19 nt, Artificial Sequence
  Description of Artificial Sequence: Synthetic oligonucleotide
  Sense strand starting at position 831 of SEQ ID NO: 1886974
cagaacuguuuacccgauu

SEQ ID NO: 2439597 - RNA, 19 nt, Artificial Sequence
  Description of Artificial Sequence: Synthetic oligonucleotide
  Antisense strand to SEQ ID NO: 2439596
aaucggguaaacaguucug

SEQ ID NO: 2439598 - RNA, 19 nt, Artificial Sequence
  Description of Artificial Sequence: Synthetic oligonucleotide
  Sense strand starting at position 832 of SEQ ID NO: 1886974
agaacuguuuacccgauua

SEQ ID NO: 2439599 - RNA, 19 nt, Artificial Sequence
  Description of Artificial Sequence: Synthetic oligonucleotide
  Antisense strand to SEQ ID NO: 2439598
uaaucggguaaacaguucu

SEQ ID NO: 2439600 - RNA, 19 nt, Artificial Sequence
  Description of Artificial Sequence: Synthetic oligonucleotide
  Sense strand starting at position 837 of SEQ ID NO: 1886974
uguuuacccgauuaaauga

SEQ ID NO: 2439601 - RNA, 19 nt, Artificial Sequence
  Description of Artificial Sequence: Synthetic oligonucleotide
  Antisense strand to SEQ ID NO: 2439600
ucauuuaaucggguaaaca

SEQ ID NO: 2439602 - RNA, 19 nt, Artificial Sequence
  Description of Artificial Sequence: Synthetic oligonucleotide
  Sense strand starting at position 891 of SEQ ID NO: 1886974
gaggcccugucauaggaau

SEQ ID NO: 2439603 - RNA, 19 nt, Artificial Sequence
  Description of Artificial Sequence: Synthetic oligonucleotide
  Antisense strand to SEQ ID NO: 2439602
auuccuaugacagggccuc

SEQ ID NO: 2439604 - RNA, 19 nt, Artificial Sequence
  Description of Artificial Sequence: Synthetic oligonucleotide
  Sense strand starting at position 897 of SEQ ID NO: 1886974
cugucauaggaaugucuga

SEQ ID NO: 2439605 - RNA, 19 nt, Artificial Sequence
  Description of Artificial Sequence: Synthetic oligonucleotide
  Antisense strand to SEQ ID NO: 2439604
ucagacauuccuaugacag

SEQ ID NO: 2439606 - RNA, 19 nt, Artificial Sequence
  Description of Artificial Sequence: Synthetic oligonucleotide
  Sense strand starting at position 904 of SEQ ID NO: 1886974
aggaaugucugagcaguua

SEQ ID NO: 2439607 - RNA, 19 nt, Artificial Sequence
  Description of Artificial Sequence: Synthetic oligonucleotide
  Antisense strand to SEQ ID NO: 2439606
uaacugcucagacauuccu

SEQ ID NO: 2439608 - RNA, 19 nt, Artificial Sequence
  Description of Artificial Sequence: Synthetic oligonucleotide
  Sense strand starting at position 971 of SEQ ID NO: 1886974
ucacaccugcucuaagaga

SEQ ID NO: 2439609 - RNA, 19 nt, Artificial Sequence
  Description of Artificial Sequence: Synthetic oligonucleotide
  Antisense strand to SEQ ID NO: 2439608
ucucuuagagcagguguga

SEQ ID NO: 2439610 - RNA, 19 nt, Artificial Sequence
  Description of Artificial Sequence: Synthetic oligonucleotide
  Sense strand starting at position 1479 of SEQ ID NO: 1886974
caaagaacuggcuguuuga

SEQ ID NO: 2439611 - RNA, 19 nt, Artificial Sequence
  Description of Artificial Sequence: Synthetic oligonucleotide
  Antisense strand to SEQ ID NO: 2439610
ucaaacagccaguucuuug

SEQ ID NO: 2439612 - RNA, 19 nt, Artificial Sequence
  Description of Artificial Sequence: Synthetic oligonucleotide
  Sense strand starting at position 2114 of SEQ ID NO: 1886974
gagcacgaacgguauugua

SEQ ID NO: 2439613 - RNA, 19 nt, Artificial Sequence
  Description of Artificial Sequence: Synthetic oligonucleotide
  Antisense strand to SEQ ID NO: 2439612
uacaauaccguucgugcuc

SEQ ID NO: 2439614 - RNA, 19 nt, Artificial Sequence
  Description of Artificial Sequence: Synthetic oligonucleotide
  Sense strand starting at position 2501 of SEQ ID NO: 1886974
uggacuucuuaugagaauc

SEQ ID NO: 2439615 - RNA, 19 nt, Artificial Sequence
  Description of Artificial Sequence: Synthetic oligonucleotide
  Antisense strand to SEQ ID NO: 2439614
gauucucauaagaagucca

SEQ ID NO: 2439616 - RNA, 19 nt, Artificial Sequence
  Description of Artificial Sequence: Synthetic oligonucleotide
  Sense strand starting at position 2555 of SEQ ID NO: 1886974
ccagaugggucugucuagu

SEQ ID NO: 2439617 - RNA, 19 nt, Artificial Sequence
  Description of Artificial Sequence: Synthetic oligonucleotide
  Antisense strand to SEQ ID NO: 2439616
acuagacagacccaucugg

SEQ ID NO: 2439618 - RNA, 19 nt, Artificial Sequence
  Description of Artificial Sequence: Synthetic oligonucleotide
  Sense strand starting at position 2616 of SEQ ID NO: 1886974
agcgcaguuguauaaggau

SEQ ID NO: 2439619 - RNA, 19 nt, Artificial Sequence
  Description of Artificial Sequence: Synthetic oligonucleotide
  Antisense strand to SEQ ID NO: 2439618
auccuuauacaacugcgcu

SEQ ID NO: 2439620 - RNA, 19 nt, Artificial Sequence
  Description of Artificial Sequence: Synthetic oligonucleotide
  Sense strand starting at position 3439 of SEQ ID NO: 1886974
ugaccaaaguagucaagga

SEQ ID NO: 2439621 - RNA, 19 nt, Artificial Sequence
  Description of Artificial Sequence: Synthetic oligonucleotide
  Antisense strand to SEQ ID NO: 2439620
uccuugacuacuuugguca

SEQ ID NO: 2439622 - RNA, 19 nt, Artificial Sequence
  Description of Artificial Sequence: Synthetic oligonucleotide
  Sense strand starting at position 3460 of SEQ ID NO: 1886974
augagagaucaaugucuca

SEQ ID NO: 2439623 - RNA, 19 nt, Artificial Sequence
  Description of Artificial Sequence: Synthetic oligonucleotide
  Antisense strand to SEQ ID NO: 2439622
ugagacauugaucucucau

SEQ ID NO: 2439624 - RNA, 19 nt, Artificial Sequence
  Description of Artificial Sequence: Synthetic oligonucleotide
  Sense strand starting at position 3465 of SEQ ID NO: 1886974
agaucaaugucucacggga

SEQ ID NO: 2439625 - RNA, 19 nt, Artificial Sequence
  Description of Artificial Sequence: Synthetic oligonucleotide
  Antisense strand to SEQ ID NO: 2439624
ucccgugagacauugaucu

SEQ ID NO: 2439626 - RNA, 19 nt, Artificial Sequence
  Description of Artificial Sequence: Synthetic oligonucleotide
  Sense strand starting at position 3524 of SEQ ID NO: 1886974
ggcaguaacugucccuauu

SEQ ID NO: 2439627 - RNA, 19 nt, Artificial Sequence
  Description of Artificial Sequence: Synthetic oligonucleotide
  Antisense strand to SEQ ID NO: 2439626
aauagggacaguuacugcc

SEQ ID NO: 2439628 - RNA, 19 nt, Artificial Sequence
  Description of Artificial Sequence: Synthetic oligonucleotide
  Sense strand starting at position 3527 of SEQ ID NO: 1886974
aguaacugucccuauuaaa

SEQ ID NO: 2439629 - RNA, 19 nt, Artificial Sequence
  Description of Artificial Sequence: Synthetic oligonucleotide
  Antisense strand to SEQ ID NO: 2439628
uuuaauagggacaguuacu

SEQ ID NO: 2439630 - RNA, 19 nt, Artificial Sequence
  Description of Artificial Sequence: Synthetic oligonucleotide
  Sense strand starting at position 57 of SEQ ID NO: 1886975
aagguuuccgggugcggaa

SEQ ID NO: 2439631 - RNA, 19 nt, Artificial Sequence
  Description of Artificial Sequence: Synthetic oligonucleotide
  Antisense strand to SEQ ID NO: 2439630
uuccgcacccggaaaccuu

SEQ ID NO: 2439632 - RNA, 19 nt, Artificial Sequence
  Description of Artificial Sequence: Synthetic oligonucleotide
  Sense strand starting at position 234 of SEQ ID NO: 1886975
ccgggaaguccuugcugga

SEQ ID NO: 2439633 - RNA, 19 nt, Artificial Sequence
  Description of Artificial Sequence: Synthetic oligonucleotide
  Antisense strand to SEQ ID NO: 2439632
uccagcaaggacuucccgg

SEQ ID NO: 2439634 - RNA, 19 nt, Artificial Sequence
  Description of Artificial Sequence: Synthetic oligonucleotide
  Sense strand starting at position 578 of SEQ ID NO: 1886975
ggguuuggugcuaguuaag

SEQ ID NO: 2439635 - RNA, 19 nt, Artificial Sequence
  Description of Artificial Sequence: Synthetic oligonucleotide
  Antisense strand to SEQ ID NO: 2439634
cuuaacuagcaccaaaccc

SEQ ID NO: 2439636 - RNA, 19 nt, Artificial Sequence
  Description of Artificial Sequence: Synthetic oligonucleotide
  Sense strand starting at position 677 of SEQ ID NO: 1886975
uggcuaaugucucccuaaa

SEQ ID NO: 2439637 - RNA, 19 nt, Artificial Sequence
  Description of Artificial Sequence: Synthetic oligonucleotide
  Antisense strand to SEQ ID NO: 2439636
uuuagggagacauuagcca

SEQ ID NO: 2439638 - RNA, 19 nt, Artificial Sequence
  Description of Artificial Sequence: Synthetic oligonucleotide
  Sense strand starting at position 842 of SEQ ID NO: 1886975
cccagaguuggaugucacu

SEQ ID NO: 2439639 - RNA, 19 nt, Artificial Sequence
  Description of Artificial Sequence: Synthetic oligonucleotide
  Antisense strand to SEQ ID NO: 2439638
agugacauccaacucuggg

SEQ ID NO: 2439640 - RNA, 19 nt, Artificial Sequence
  Description of Artificial Sequence: Synthetic oligonucleotide
  Sense strand starting at position 942 of SEQ ID NO: 1886975
ucugguuugugccucaaca

SEQ ID NO: 2439641 - RNA, 19 nt, Artificial Sequence
  Description of Artificial Sequence: Synthetic oligonucleotide
  Antisense strand to SEQ ID NO: 2439640
uguugaggcacaaaccaga

SEQ ID NO: 2439642 - RNA, 19 nt, Artificial Sequence
  Description of Artificial Sequence: Synthetic oligonucleotide
  Sense strand starting at position 944 of SEQ ID NO: 1886975
ugguuugugccucaacaga

SEQ ID NO: 2439643 - RNA, 19 nt, Artificial Sequence
  Description of Artificial Sequence: Synthetic oligonucleotide
  Antisense strand to SEQ ID NO: 2439642
ucuguugaggcacaaacca

SEQ ID NO: 2439644 - RNA, 19 nt, Artificial Sequence
  Description of Artificial Sequence: Synthetic oligonucleotide
  Sense strand starting at position 1017 of SEQ ID NO: 1886975
ugccucuauugucccagaa

SEQ ID NO: 2439645 - RNA, 19 nt, Artificial Sequence
  Description of Artificial Sequence: Synthetic oligonucleotide
  Antisense strand to SEQ ID NO: 2439644
uucugggacaauagaggca

SEQ ID NO: 2439646 - RNA, 19 nt, Artificial Sequence
  Description of Artificial Sequence: Synthetic oligonucleotide
  Sense strand starting at position 1165 of SEQ ID NO: 1886975
gugggugagcgcuuuccau

SEQ ID NO: 2439647 - RNA, 19 nt, Artificial Sequence
  Description of Artificial Sequence: Synthetic oligonucleotide
  Antisense strand to SEQ ID NO: 2439646
auggaaagcgcucacccac

SEQ ID NO: 2439648 - RNA, 19 nt, Artificial Sequence
  Description of Artificial Sequence: Synthetic oligonucleotide
  Sense strand starting at position 1741 of SEQ ID NO: 1886975
guuuccuuacagggaaaca

SEQ ID NO: 2439649 - RNA, 19 nt, Artificial Sequence
  Description of Artificial Sequence: Synthetic oligonucleotide
  Antisense strand to SEQ ID NO: 2439648
uguuucccuguaaggaaac

SEQ ID NO: 2439650 - RNA, 19 nt, Artificial Sequence
  Description of Artificial Sequence: Synthetic oligonucleotide
  Sense strand starting at position 1758 of SEQ ID NO: 1886975
caagcugagugguccguaa

SEQ ID NO: 2439651 - RNA, 19 nt, Artificial Sequence
  Description of Artificial Sequence: Synthetic oligonucleotide
  Antisense strand to SEQ ID NO: 2439650
uuacggaccacucagcuug

SEQ ID NO: 2439652 - RNA, 19 nt, Artificial Sequence
  Description of Artificial Sequence: Synthetic oligonucleotide
  Sense strand starting at position 1760 of SEQ ID NO: 1886975
agcugagugguccguaaca

SEQ ID NO: 2439653 - RNA, 19 nt, Artificial Sequence
  Description of Artificial Sequence: Synthetic oligonucleotide
  Antisense strand to SEQ ID NO: 2439652
uguuacggaccacucagcu

SEQ ID NO: 2439654 - RNA, 19 nt, Artificial Sequence
  Description of Artificial Sequence: Synthetic oligonucleotide
  Sense strand starting at position 1762 of SEQ ID NO: 1886975
cugagugguccguaacaua

SEQ ID NO: 2439655 - RNA, 19 nt, Artificial Sequence
  Description of Artificial Sequence: Synthetic oligonucleotide
  Antisense strand to SEQ ID NO: 2439654
uauguuacggaccacucag

SEQ ID NO: 2439656 - RNA, 19 nt, Artificial Sequence
  Description of Artificial Sequence: Synthetic oligonucleotide
  Sense strand starting at position 1776 of SEQ ID NO: 1886975
acauaccugaggcguuauu

SEQ ID NO: 2439657 - RNA, 19 nt, Artificial Sequence
  Description of Artificial Sequence: Synthetic oligonucleotide
  Antisense strand to SEQ ID NO: 2439656
aauaacgccucagguaugu

SEQ ID NO: 2439658 - RNA, 19 nt, Artificial Sequence
  Description of Artificial Sequence: Synthetic oligonucleotide
  Sense strand starting at position 2052 of SEQ ID NO: 1886975
acugccagcccaugaauaa

SEQ ID NO: 2439659 - RNA, 19 nt, Artificial Sequence
  Description of Artificial Sequence: Synthetic oligonucleotide
  Antisense strand to SEQ ID NO: 2439658
uuauucaugggcuggcagu

SEQ ID NO: 2439660 - RNA, 19 nt, Artificial Sequence
  Description of Artificial Sequence: Synthetic oligonucleotide
  Sense strand starting at position 2339 of SEQ ID NO: 1886975
acaggcugucgugagauca

SEQ ID NO: 2439661 - RNA, 19 nt, Artificial Sequence
  Description of Artificial Sequence: Synthetic oligonucleotide
  Antisense strand to SEQ ID NO: 2439660
ugaucucacgacagccugu

SEQ ID NO: 2439662 - RNA, 19 nt, Artificial Sequence
  Description of Artificial Sequence: Synthetic oligonucleotide
  Sense strand starting at position 2426 of SEQ ID NO: 1886975
ucucuugcccugugugaca

SEQ ID NO: 2439663 - RNA, 19 nt, Artificial Sequence
  Description of Artificial Sequence: Synthetic oligonucleotide
  Antisense strand to SEQ ID NO: 2439662
ugucacacagggcaagaga

SEQ ID NO: 2439664 - RNA, 19 nt, Artificial Sequence
  Description of Artificial Sequence: Synthetic oligonucleotide
  Sense strand starting at position 2531 of SEQ ID NO: 1886975
ccacaaacacugcgugaaa

SEQ ID NO: 2439665 - RNA, 19 nt, Artificial Sequence
  Description of Artificial Sequence: Synthetic oligonucleotide
  Antisense strand to SEQ ID NO: 2439664
uuucacgcaguguuugugg

SEQ ID NO: 2439666 - RNA, 19 nt, Artificial Sequence
  Description of Artificial Sequence: Synthetic oligonucleotide
  Sense strand starting at position 2533 of SEQ ID NO: 1886975
acaaacacugcgugaaagu

SEQ ID NO: 2439667 - RNA, 19 nt, Artificial Sequence
  Description of Artificial Sequence: Synthetic oligonucleotide
  Antisense strand to SEQ ID NO: 2439666
acuuucacgcaguguuugu

SEQ ID NO: 2439668 - RNA, 19 nt, Artificial Sequence
  Description of Artificial Sequence: Synthetic oligonucleotide
  Sense strand starting at position 2542 of SEQ ID NO: 1886975
gcgugaaagucaccaagua

SEQ ID NO: 2439669 - RNA, 19 nt, Artificial Sequence
  Description of Artificial Sequence: Synthetic oligonucleotide
  Antisense strand to SEQ ID NO: 2439668
uacuuggugacuuucacgc

SEQ ID NO: 2439670 - RNA, 19 nt, Artificial Sequence
  Description of Artificial Sequence: Synthetic oligonucleotide
  Sense strand starting at position 2543 of SEQ ID NO: 1886975
cgugaaagucaccaaguaa

SEQ ID NO: 2439671 - RNA, 19 nt, Artificial Sequence
  Description of Artificial Sequence: Synthetic oligonucleotide
  Antisense strand to SEQ ID NO: 2439670
uuacuuggugacuuucacg

SEQ ID NO: 2439672 - RNA, 19 nt, Artificial Sequence
  Description of Artificial Sequence: Synthetic oligonucleotide
  Sense strand starting at position 2557 of SEQ ID NO: 1886975
aguaacccuucugugauua

SEQ ID NO: 2439673 - RNA, 19 nt, Artificial Sequence
  Description of Artificial Sequence: Synthetic oligonucleotide
  Antisense strand to SEQ ID NO: 2439672
uaaucacagaaggguuacu

SEQ ID NO: 2439674 - RNA, 19 nt, Artificial Sequence
  Description of Artificial Sequence: Synthetic oligonucleotide
  Sense strand starting at position 2558 of SEQ ID NO: 1886975
guaacccuucugugauuau

SEQ ID NO: 2439675 - RNA, 19 nt, Artificial Sequence
  Description of Artificial Sequence: Synthetic oligonucleotide
  Antisense strand to SEQ ID NO: 2439674
auaaucacagaaggguuac

SEQ ID NO: 2439676 - RNA, 19 nt, Artificial Sequence
  Description of Artificial Sequence: Synthetic oligonucleotide
  Sense strand starting at position 2587 of SEQ ID NO: 1886975
gagguuugcucagcaacuu

SEQ ID NO: 2439677 - RNA, 19 nt, Artificial Sequence
  Description of Artificial Sequence: Synthetic oligonucleotide
  Antisense strand to SEQ ID NO: 2439676
aaguugcugagcaaaccuc

SEQ ID NO: 2439678 - RNA, 19 nt, Artificial Sequence
  Description of Artificial Sequence: Synthetic oligonucleotide
  Sense strand starting at position 2588 of SEQ ID NO: 1886975
agguuugcucagcaacuuu

SEQ ID NO: 2439679 - RNA, 19 nt, Artificial Sequence
  Description of Artificial Sequence: Synthetic oligonucleotide
  Antisense strand to SEQ ID NO: 2439678
aaaguugcugagcaaaccu

SEQ ID NO: 2439680 - RNA, 19 nt, Artificial Sequence
  Description of Artificial Sequence: Synthetic oligonucleotide
  Sense strand starting at position 2658 of SEQ ID NO: 1886975
ugggauugggaguaagugu

SEQ ID NO: 2439681 - RNA, 19 nt, Artificial Sequence
  Description of Artificial Sequence: Synthetic oligonucleotide
  Antisense strand to SEQ ID NO: 2439680
acacuuacucccaauccca

SEQ ID NO: 2439682 - RNA, 19 nt, Artificial Sequence
  Description of Artificial Sequence: Synthetic oligonucleotide
  Sense strand starting at position 2667 of SEQ ID NO: 1886975
gaguaaguguugccuuuag

SEQ ID NO: 2439683 - RNA, 19 nt, Artificial Sequence
  Description of Artificial Sequence: Synthetic oligonucleotide
  Antisense strand to SEQ ID NO: 2439682
cuaaaggcaacacuuacuc

SEQ ID NO: 2439684 - RNA, 19 nt, Artificial Sequence
  Description of Artificial Sequence: Synthetic oligonucleotide
  Sense strand starting at position 2669 of SEQ ID NO: 1886975
guaaguguugccuuuagca

SEQ ID NO: 2439685 - RNA, 19 nt, Artificial Sequence
  Description of Artificial Sequence: Synthetic oligonucleotide
  Antisense strand to SEQ ID NO: 2439684
ugcuaaaggcaacacuuac

SEQ ID NO: 2439686 - RNA, 19 nt, Artificial Sequence
  Description of Artificial Sequence: Synthetic oligonucleotide
  Sense strand starting at position 2698 of SEQ ID NO: 1886975
gugcuacuguuaucucaag

SEQ ID NO: 2439687 - RNA, 19 nt, Artificial Sequence
  Description of Artificial Sequence: Synthetic oligonucleotide
  Antisense strand to SEQ ID NO: 2439686
cuugagauaacaguagcac

SEQ ID NO: 2439688 - RNA, 19 nt, Artificial Sequence
  Description of Artificial Sequence: Synthetic oligonucleotide
  Sense strand starting at position 2713 of SEQ ID NO: 1886975
caagcaggugugugacuuu

SEQ ID NO: 2439689 - RNA, 19 nt, Artificial Sequence
  Description of Artificial Sequence: Synthetic oligonucleotide
  Antisense strand to SEQ ID NO: 2439688
aaagucacacaccugcuug

SEQ ID NO: 2439690 - RNA, 19 nt, Artificial Sequence
  Description of Artificial Sequence: Synthetic oligonucleotide
  Sense strand starting at position 2720 of SEQ ID NO: 1886975
gugugugacuuucuaugac

SEQ ID NO: 2439691 - RNA, 19 nt, Artificial Sequence
  Description of Artificial Sequence: Synthetic oligonucleotide
  Antisense strand to SEQ ID NO: 2439690
gucauagaaagucacacac

SEQ ID NO: 2439692 - RNA, 19 nt, Artificial Sequence
  Description of Artificial Sequence: Synthetic oligonucleotide
  Sense strand starting at position 2723 of SEQ ID NO: 1886975
ugugacuuucuaugacuuu

SEQ ID NO: 2439693 - RNA, 19 nt, Artificial Sequence
  Description of Artificial Sequence: Synthetic oligonucleotide
  Antisense strand to SEQ ID NO: 2439692
aaagucauagaaagucaca

SEQ ID NO: 2439694 - RNA, 19 nt, Artificial Sequence
  Description of Artificial Sequence: Synthetic oligonucleotide
  Sense strand starting at position 3362 of SEQ ID NO: 1886975
acgaaaugccagggucacu

SEQ ID NO: 2439695 - RNA, 19 nt, Artificial Sequence
  Description of Artificial Sequence: Synthetic oligonucleotide
  Antisense strand to SEQ ID NO: 2439694
agugacccuggcauuucgu

SEQ ID NO: 2439696 - RNA, 19 nt, Artificial Sequence
  Description of Artificial Sequence: Synthetic oligonucleotide
  Sense strand starting at position 3611 of SEQ ID NO: 1886975
ggacaacauuugggucaau

SEQ ID NO: 2439697 - RNA, 19 nt, Artificial Sequence
  Description of Artificial Sequence: Synthetic oligonucleotide
  Antisense strand to SEQ ID NO: 2439696
auugacccaaauguugucc

SEQ ID NO: 2439698 - RNA, 19 nt, Artificial Sequence
  Description of Artificial Sequence: Synthetic oligonucleotide
  Sense strand starting at position 3661 of SEQ ID NO: 1886975
gcacuuugcaagggaagga

SEQ ID NO: 2439699 - RNA, 19 nt, Artificial Sequence
  Description of Artificial Sequence: Synthetic oligonucleotide
  Antisense strand to SEQ ID NO: 2439698
uccuucccuugcaaagugc

SEQ ID NO: 2439700 - RNA, 19 nt, Artificial Sequence
  Description of Artificial Sequence: Synthetic oligonucleotide
  Sense strand starting at position 3869 of SEQ ID NO: 1886975
uggcuuuagugguugacca

SEQ ID NO: 2439701 - RNA, 19 nt, Artificial Sequence
  Description of Artificial Sequence: Synthetic oligonucleotide
  Antisense strand to SEQ ID NO: 2439700
uggucaaccacuaaagcca

SEQ ID NO: 2439702 - RNA, 19 nt, Artificial Sequence
  Description of Artificial Sequence: Synthetic oligonucleotide
  Sense strand starting at position 3870 of SEQ ID NO: 1886975
ggcuuuagugguugaccau

SEQ ID NO: 2439703 - RNA, 19 nt, Artificial Sequence
  Description of Artificial Sequence: Synthetic oligonucleotide
  Antisense strand to SEQ ID NO: 2439702
auggucaaccacuaaagcc

SEQ ID NO: 2439704 - RNA, 19 nt, Artificial Sequence
  Description of Artificial Sequence: Synthetic oligonucleotide
  Sense strand starting at position 3880 of SEQ ID NO: 1886975
guugaccauggcugagaau

SEQ ID NO: 2439705 - RNA, 19 nt, Artificial Sequence
  Description of Artificial Sequence: Synthetic oligonucleotide
  Antisense strand to SEQ ID NO: 2439704
auucucagccauggucaac

SEQ ID NO: 2439706 - RNA, 19 nt, Artificial Sequence
  Description of Artificial Sequence: Synthetic oligonucleotide
  Sense strand starting at position 3883 of SEQ ID NO: 1886975
gaccauggcugagaauauu

SEQ ID NO: 2439707 - RNA, 19 nt, Artificial Sequence
  Description of Artificial Sequence: Synthetic oligonucleotide
  Antisense strand to SEQ ID NO: 2439706
aauauucucagccaugguc

SEQ ID NO: 2439708 - RNA, 19 nt, Artificial Sequence
  Description of Artificial Sequence: Synthetic oligonucleotide
  Sense strand starting at position 3915 of SEQ ID NO: 1886975
uuuagaauccguugacaag

SEQ ID NO: 2439709 - RNA, 19 nt, Artificial Sequence
  Description of Artificial Sequence: Synthetic oligonucleotide
  Antisense strand to SEQ ID NO: 2439708
cuugucaacggauucuaaa

SEQ ID NO: 2439710 - RNA, 19 nt, Artificial Sequence
  Description of Artificial Sequence: Synthetic oligonucleotide
  Sense strand starting at position 107 of SEQ ID NO: 1886976
ggguucucuucugaugucu

SEQ ID NO: 2439711 - RNA, 19 nt, Artificial Sequence
  Description of Artificial Sequence: Synthetic oligonucleotide
  Antisense strand to SEQ ID NO: 2439710
agacaucagaagagaaccc

SEQ ID NO: 2439712 - RNA, 19 nt, Artificial Sequence
  Description of Artificial Sequence: Synthetic oligonucleotide
  Sense strand starting at position 300 of SEQ ID NO: 1886976
ugggaucaugcugggaaga

SEQ ID NO: 2439713 - RNA, 19 nt, Artificial Sequence
  Description of Artificial Sequence: Synthetic oligonucleotide
  Antisense strand to SEQ ID NO: 2439712
ucuucccagcaugauccca

SEQ ID NO: 2439714 - RNA, 19 nt, Artificial Sequence
  Description of Artificial Sequence: Synthetic oligonucleotide
  Sense strand starting at position 718 of SEQ ID NO: 1886976
gcagcaacugcugaacauu

SEQ ID NO: 2439715 - RNA, 19 nt, Artificial Sequence
  Description of Artificial Sequence: Synthetic oligonucleotide
  Antisense strand to SEQ ID NO: 2439714
aauguucagcaguugcugc

SEQ ID NO: 2439716 - RNA, 19 nt, Artificial Sequence
  Description of Artificial Sequence: Synthetic oligonucleotide
  Sense strand starting at position 871 of SEQ ID NO: 1886976
gacugugaggccuagugua

SEQ ID NO: 2439717 - RNA, 19 nt, Artificial Sequence
  Description of Artificial Sequence: Synthetic oligonucleotide
  Antisense strand to SEQ ID NO: 2439716
uacacuaggccucacaguc

SEQ ID NO: 2439718 - RNA, 19 nt, Artificial Sequence
  Description of Artificial Sequence: Synthetic oligonucleotide
  Sense strand starting at position 1144 of SEQ ID NO: 1886976
agaugagucugcgccggau

SEQ ID NO: 2439719 - RNA, 19 nt, Artificial Sequence
  Description of Artificial Sequence: Synthetic oligonucleotide
  Antisense strand to SEQ ID NO: 2439718
auccggcgcagacucaucu

SEQ ID NO: 2439720 - RNA, 19 nt, Artificial Sequence
  Description of Artificial Sequence: Synthetic oligonucleotide
  Sense strand starting at position 1251 of SEQ ID NO: 1886976
aaacauuggugguuugaca

SEQ ID NO: 2439721 - RNA, 19 nt, Artificial Sequence
  Description of Artificial Sequence: Synthetic oligonucleotide
  Antisense strand to SEQ ID NO: 2439720
ugucaaaccaccaauguuu

SEQ ID NO: 2439722 - RNA, 19 nt, Artificial Sequence
  Description of Artificial Sequence: Synthetic oligonucleotide
  Sense strand starting at position 1309 of SEQ ID NO: 1886976
gcaguuuccaggugcguua

SEQ ID NO: 2439723 - RNA, 19 nt, Artificial Sequence
  Description of Artificial Sequence: Synthetic oligonucleotide
  Antisense strand to SEQ ID NO: 2439722
uaacgcaccuggaaacugc

SEQ ID NO: 2439724 - RNA, 19 nt, Artificial Sequence
  Description of Artificial Sequence: Synthetic oligonucleotide
  Sense strand starting at position 1343 of SEQ ID NO: 1886976
ccgagaugcucugagaugu

SEQ ID NO: 2439725 - RNA, 19 nt, Artificial Sequence
  Description of Artificial Sequence: Synthetic oligonucleotide
  Antisense strand to SEQ ID NO: 2439724
acaucucagagcaucucgg

SEQ ID NO: 2439726 - RNA, 19 nt, Artificial Sequence
  Description of Artificial Sequence: Synthetic oligonucleotide
  Sense strand starting at position 1354 of SEQ ID NO: 1886976
ugagaugucccuuggcugu

SEQ ID NO: 2439727 - RNA, 19 nt, Artificial Sequence
  Description of Artificial Sequence: Synthetic oligonucleotide
  Antisense strand to SEQ ID NO: 2439726
acagccaagggacaucuca

SEQ ID NO: 2439728 - RNA, 19 nt, Artificial Sequence
  Description of Artificial Sequence: Synthetic oligonucleotide
  Sense strand starting at position 1594 of SEQ ID NO: 1886976
agcuauuguugugcuagaa

SEQ ID NO: 2439729 - RNA, 19 nt, Artificial Sequence
  Description of Artificial Sequence: Synthetic oligonucleotide
  Antisense strand to SEQ ID NO: 2439728
uucuagcacaacaauagcu

SEQ ID NO: 2439730 - RNA, 19 nt, Artificial Sequence
  Description of Artificial Sequence: Synthetic oligonucleotide
  Sense strand starting at position 1598 of SEQ ID NO: 1886976
auuguugugcuagaaguuu

SEQ ID NO: 2439731 - RNA, 19 nt, Artificial Sequence
  Description of Artificial Sequence: Synthetic oligonucleotide
  Antisense strand to SEQ ID NO: 2439730
aaacuucuagcacaacaau

SEQ ID NO: 2439732 - RNA, 19 nt, Artificial Sequence
  Description of Artificial Sequence: Synthetic oligonucleotide
  Sense strand starting at position 1606 of SEQ ID NO: 1886976
gcuagaaguuucucuguga

SEQ ID NO: 2439733 - RNA, 19 nt, Artificial Sequence
  Description of Artificial Sequence: Synthetic oligonucleotide
  Antisense strand to SEQ ID NO: 2439732
ucacagagaaacuucuagc

SEQ ID NO: 2439734 - RNA, 19 nt, Artificial Sequence
  Description of Artificial Sequence: Synthetic oligonucleotide
  Sense strand starting at position 1607 of SEQ ID NO: 1886976
cuagaaguuucucugugau

SEQ ID NO: 2439735 - RNA, 19 nt, Artificial Sequence
  Description of Artificial Sequence: Synthetic oligonucleotide
  Antisense strand to SEQ ID NO: 2439734
aucacagagaaacuucuag

SEQ ID NO: 2439736 - RNA, 19 nt, Artificial Sequence
  Description of Artificial Sequence: Synthetic oligonucleotide
  Sense strand starting at position 1609 of SEQ ID NO: 1886976
agaaguuucucugugauaa

SEQ ID NO: 2439737 - RNA, 19 nt, Artificial Sequence
  Description of Artificial Sequence: Synthetic oligonucleotide
  Antisense strand to SEQ ID NO: 2439736
uuaucacagagaaacuucu

SEQ ID NO: 2439738 - RNA, 19 nt, Artificial Sequence
  Description of Artificial Sequence: Synthetic oligonucleotide
  Sense strand starting at position 1610 of SEQ ID NO: 1886976
gaaguuucucugugauaag

SEQ ID NO: 2439739 - RNA, 19 nt, Artificial Sequence
  Description of Artificial Sequence: Synthetic oligonucleotide
  Antisense strand to SEQ ID NO: 2439738
cuuaucacagagaaacuuc

SEQ ID NO: 2439740 - RNA, 19 nt, Artificial Sequence
  Description of Artificial Sequence: Synthetic oligonucleotide
  Sense strand starting at position 1611 of SEQ ID NO: 1886976
aaguuucucugugauaaga

SEQ ID NO: 2439741 - RNA, 19 nt, Artificial Sequence
  Description of Artificial Sequence: Synthetic oligonucleotide
  Antisense strand to SEQ ID NO: 2439740
ucuuaucacagagaaacuu

SEQ ID NO: 2439742 - RNA, 19 nt, Artificial Sequence
  Description of Artificial Sequence: Synthetic oligonucleotide
  Sense strand starting at position 1613 of SEQ ID NO: 1886976
guuucucugugauaagaag

SEQ ID NO: 2439743 - RNA, 19 nt, Artificial Sequence
  Description of Artificial Sequence: Synthetic oligonucleotide
  Antisense strand to SEQ ID NO: 2439742
cuucuuaucacagagaaac

SEQ ID NO: 2439744 - RNA, 19 nt, Artificial Sequence
  Description of Artificial Sequence: Synthetic oligonucleotide
  Sense strand starting at position 1943 of SEQ ID NO: 1886976
ucccacauugucugcuuua

SEQ ID NO: 2439745 - RNA, 19 nt, Artificial Sequence
  Description of Artificial Sequence: Synthetic oligonucleotide
  Antisense strand to SEQ ID NO: 2439744
uaaagcagacaauguggga

SEQ ID NO: 2439746 - RNA, 19 nt, Artificial Sequence
  Description of Artificial Sequence: Synthetic oligonucleotide
  Sense strand starting at position 1948 of SEQ ID NO: 1886976
cauugucugcuuuagugau

SEQ ID NO: 2439747 - RNA, 19 nt, Artificial Sequence
  Description of Artificial Sequence: Synthetic oligonucleotide
  Antisense strand to SEQ ID NO: 2439746
aucacuaaagcagacaaug

SEQ ID NO: 2439748 - RNA, 19 nt, Artificial Sequence
  Description of Artificial Sequence: Synthetic oligonucleotide
  Sense strand starting at position 2184 of SEQ ID NO: 1886976
uugagcucccagugucauu

SEQ ID NO: 2439749 - RNA, 19 nt, Artificial Sequence
  Description of Artificial Sequence: Synthetic oligonucleotide
  Antisense strand to SEQ ID NO: 2439748
aaugacacugggagcucaa

SEQ ID NO: 2439750 - RNA, 19 nt, Artificial Sequence
  Description of Artificial Sequence: Synthetic oligonucleotide
  Sense strand starting at position 2279 of SEQ ID NO: 1886976
ugccucugguuccugaaau

SEQ ID NO: 2439751 - RNA, 19 nt, Artificial Sequence
  Description of Artificial Sequence: Synthetic oligonucleotide
  Antisense strand to SEQ ID NO: 2439750
auuucaggaaccagaggca

SEQ ID NO: 2439752 - RNA, 19 nt, Artificial Sequence
  Description of Artificial Sequence: Synthetic oligonucleotide
  Sense strand starting at position 2542 of SEQ ID NO: 1886976
cgccgagaucgcuuaucag

SEQ ID NO: 2439753 - RNA, 19 nt, Artificial Sequence
  Description of Artificial Sequence: Synthetic oligonucleotide
  Antisense strand to SEQ ID NO: 2439752
cugauaagcgaucucggcg

SEQ ID NO: 2439754 - RNA, 19 nt, Artificial Sequence
  Description of Artificial Sequence: Synthetic oligonucleotide
  Sense strand starting at position 2610 of SEQ ID NO: 1886976
gucuguauucgugcgacgu

SEQ ID NO: 2439755 - RNA, 19 nt, Artificial Sequence
  Description of Artificial Sequence: Synthetic oligonucleotide
  Antisense strand to SEQ ID NO: 2439754
acgucgcacgaauacagac

SEQ ID NO: 2439756 - RNA, 19 nt, Artificial Sequence
  Description of Artificial Sequence: Synthetic oligonucleotide
  Sense strand starting at position 2639 of SEQ ID NO: 1886976
aggcaauauuugcugagca

SEQ ID NO: 2439757 - RNA, 19 nt, Artificial Sequence
  Description of Artificial Sequence: Synthetic oligonucleotide
  Antisense strand to SEQ ID NO: 2439756
ugcucagcaaauauugccu

SEQ ID NO: 2439758 - RNA, 19 nt, Artificial Sequence
  Description of Artificial Sequence: Synthetic oligonucleotide
  Sense strand starting at position 2640 of SEQ ID NO: 1886976
ggcaauauuugcugagcau

SEQ ID NO: 2439759 - RNA, 19 nt, Artificial Sequence
  Description of Artificial Sequence: Synthetic oligonucleotide
  Antisense strand to SEQ ID NO: 2439758
augcucagcaaauauugcc

SEQ ID NO: 2439760 - RNA, 19 nt, Artificial Sequence
  Description of Artificial Sequence: Synthetic oligonucleotide
  Sense strand starting at position 2846 of SEQ ID NO: 1886976
gggugucucucugagcaca

SEQ ID NO: 2439761 - RNA, 19 nt, Artificial Sequence
  Description of Artificial Sequence: Synthetic oligonucleotide
  Antisense strand to SEQ ID NO: 2439760
ugugcucagagagacaccc

SEQ ID NO: 2439762 - RNA, 19 nt, Artificial Sequence
  Description of Artificial Sequence: Synthetic oligonucleotide
  Sense strand starting at position 2935 of SEQ ID NO: 1886976
caaaguuucuggcagggau

SEQ ID NO: 2439763 - RNA, 19 nt, Artificial Sequence
  Description of Artificial Sequence: Synthetic oligonucleotide
  Antisense strand to SEQ ID NO: 2439762
aucccugccagaaacuuug

SEQ ID NO: 2439764 - RNA, 19 nt, Artificial Sequence
  Description of Artificial Sequence: Synthetic oligonucleotide
  Sense strand starting at position 2937 of SEQ ID NO: 1886976
aaguuucuggcagggauaa

SEQ ID NO: 2439765 - RNA, 19 nt, Artificial Sequence
  Description of Artificial Sequence: Synthetic oligonucleotide
  Antisense strand to SEQ ID NO: 2439764
uuaucccugccagaaacuu

SEQ ID NO: 2439766 - RNA, 19 nt, Artificial Sequence
  Description of Artificial Sequence: Synthetic oligonucleotide
  Sense strand starting at position 3102 of SEQ ID NO: 1886976
ugaggaacaucucacggua

SEQ ID NO: 2439767 - RNA, 19 nt, Artificial Sequence
  Description of Artificial Sequence: Synthetic oligonucleotide
  Antisense strand to SEQ ID NO: 2439766
uaccgugagauguuccuca

SEQ ID NO: 2439768 - RNA, 19 nt, Artificial Sequence
  Description of Artificial Sequence: Synthetic oligonucleotide
  Sense strand starting at position 3105 of SEQ ID NO: 1886976
ggaacaucucacgguaugu

SEQ ID NO: 2439769 - RNA, 19 nt, Artificial Sequence
  Description of Artificial Sequence: Synthetic oligonucleotide
  Antisense strand to SEQ ID NO: 2439768
acauaccgugagauguucc

SEQ ID NO: 2439770 - RNA, 19 nt, Artificial Sequence
  Description of Artificial Sequence: Synthetic oligonucleotide
  Sense strand starting at position 3289 of SEQ ID NO: 1886976
ggugcugcgaucuaggagu

SEQ ID NO: 2439771 - RNA, 19 nt, Artificial Sequence
  Description of Artificial Sequence: Synthetic oligonucleotide
  Antisense strand to SEQ ID NO: 2439770
acuccuagaucgcagcacc

SEQ ID NO: 2439772 - RNA, 19 nt, Artificial Sequence
  Description of Artificial Sequence: Synthetic oligonucleotide
  Sense strand starting at position 3329 of SEQ ID NO: 1886976
gagacacuuucccgauggu

SEQ ID NO: 2439773 - RNA, 19 nt, Artificial Sequence
  Description of Artificial Sequence: Synthetic oligonucleotide
  Antisense strand to SEQ ID NO: 2439772
accaucgggaaagugucuc

SEQ ID NO: 2439774 - RNA, 19 nt, Artificial Sequence
  Description of Artificial Sequence: Synthetic oligonucleotide
  Sense strand starting at position 3434 of SEQ ID NO: 1886976
uggcuccucuuccaggaaa

SEQ ID NO: 2439775 - RNA, 19 nt, Artificial Sequence
  Description of Artificial Sequence: Synthetic oligonucleotide
  Antisense strand to SEQ ID NO: 2439774
uuuccuggaagaggagcca

SEQ ID NO: 2439776 - RNA, 19 nt, Artificial Sequence
  Description of Artificial Sequence: Synthetic oligonucleotide
  Sense strand starting at position 3437 of SEQ ID NO: 1886976
cuccucuuccaggaaaggu

SEQ ID NO: 2439777 - RNA, 19 nt, Artificial Sequence
  Description of Artificial Sequence: Synthetic oligonucleotide
  Antisense strand to SEQ ID NO: 2439776
accuuuccuggaagaggag

SEQ ID NO: 2439778 - RNA, 19 nt, Artificial Sequence
  Description of Artificial Sequence: Synthetic oligonucleotide
  Sense strand starting at position 3514 of SEQ ID NO: 1886976
gcaugaagguuccaugucu

SEQ ID NO: 2439779 - RNA, 19 nt, Artificial Sequence
  Description of Artificial Sequence: Synthetic oligonucleotide
  Antisense strand to SEQ ID NO: 2439778
agacauggaaccuucaugc

SEQ ID NO: 2439780 - RNA, 19 nt, Artificial Sequence
  Description of Artificial Sequence: Synthetic oligonucleotide
  Sense strand starting at position 3634 of SEQ ID NO: 1886976
ggaguaagaugugggagaa

SEQ ID NO: 2439781 - RNA, 19 nt, Artificial Sequence
  Description of Artificial Sequence: Synthetic oligonucleotide
  Antisense strand to SEQ ID NO: 2439780
uucucccacaucuuacucc

SEQ ID NO: 2439782 - RNA, 19 nt, Artificial Sequence
  Description of Artificial Sequence: Synthetic oligonucleotide
  Sense strand starting at position 3728 of SEQ ID NO: 1886976
gcccuaaucugucugugac

SEQ ID NO: 2439783 - RNA, 19 nt, Artificial Sequence
  Description of Artificial Sequence: Synthetic oligonucleotide
  Antisense strand to SEQ ID NO: 2439782
gucacagacagauuagggc

SEQ ID NO: 2439784 - RNA, 19 nt, Artificial Sequence
  Description of Artificial Sequence: Synthetic oligonucleotide
  Sense strand starting at position 3729 of SEQ ID NO: 1886976
cccuaaucugucugugaca

SEQ ID NO: 2439785 - RNA, 19 nt, Artificial Sequence
  Description of Artificial Sequence: Synthetic oligonucleotide
  Antisense strand to SEQ ID NO: 2439784
ugucacagacagauuaggg

SEQ ID NO: 2439786 - RNA, 19 nt, Artificial Sequence
  Description of Artificial Sequence: Synthetic oligonucleotide
  Sense strand starting at position 3849 of SEQ ID NO: 1886976
ugcucaaugugugcuccua

SEQ ID NO: 2439787 - RNA, 19 nt, Artificial Sequence
  Description of Artificial Sequence: Synthetic oligonucleotide
  Antisense strand to SEQ ID NO: 2439786
uaggagcacacauugagca

SEQ ID NO: 2439788 - RNA, 19 nt, Artificial Sequence
  Description of Artificial Sequence: Synthetic oligonucleotide
  Sense strand starting at position 3864 of SEQ ID NO: 1886976
ccuaccguucuccaggaaa

SEQ ID NO: 2439789 - RNA, 19 nt, Artificial Sequence
  Description of Artificial Sequence: Synthetic oligonucleotide
  Antisense strand to SEQ ID NO: 2439788
uuuccuggagaacgguagg

SEQ ID NO: 2439790 - RNA, 19 nt, Artificial Sequence
  Description of Artificial Sequence: Synthetic oligonucleotide
  Sense strand starting at position 150 of SEQ ID NO: 1886977
ccaggagagccaugugauc

SEQ ID NO: 2439791 - RNA, 19 nt, Artificial Sequence
  Description of Artificial Sequence: Synthetic oligonucleotide
  Antisense strand to SEQ ID NO: 2439790
gaucacauggcucuccugg

SEQ ID NO: 2439792 - RNA, 19 nt, Artificial Sequence
  Description of Artificial Sequence: Synthetic oligonucleotide
  Sense strand starting at position 162 of SEQ ID NO: 1886977
ugugaucgcacacaagagu

SEQ ID NO: 2439793 - RNA, 19 nt, Artificial Sequence
  Description of Artificial Sequence: Synthetic oligonucleotide
  Antisense strand to SEQ ID NO: 2439792
acucuugugugcgaucaca

SEQ ID NO: 2439794 - RNA, 19 nt, Artificial Sequence
  Description of Artificial Sequence: Synthetic oligonucleotide
  Sense strand starting at position 347 of SEQ ID NO: 1886977
aagggccuucuuugaaaga

SEQ ID NO: 2439795 - RNA, 19 nt, Artificial Sequence
  Description of Artificial Sequence: Synthetic oligonucleotide
  Antisense strand to SEQ ID NO: 2439794
ucuuucaaagaaggcccuu

SEQ ID NO: 2439796 - RNA, 19 nt, Artificial Sequence
  Description of Artificial Sequence: Synthetic oligonucleotide
  Sense strand starting at position 356 of SEQ ID NO: 1886977
cuuugaaagaggcauaugu

SEQ ID NO: 2439797 - RNA, 19 nt, Artificial Sequence
  Description of Artificial Sequence: Synthetic oligonucleotide
  Antisense strand to SEQ ID NO: 2439796
acauaugccucuuucaaag

SEQ ID NO: 2439798 - RNA, 19 nt, Artificial Sequence
  Description of Artificial Sequence: Synthetic oligonucleotide
  Sense strand starting at position 488 of SEQ ID NO: 1886977
ggagcuugauggcuaccua

SEQ ID NO: 2439799 - RNA, 19 nt, Artificial Sequence
  Description of Artificial Sequence: Synthetic oligonucleotide
  Antisense strand to SEQ ID NO: 2439798
uagguagccaucaagcucc

SEQ ID NO: 2439800 - RNA, 19 nt, Artificial Sequence
  Description of Artificial Sequence: Synthetic oligonucleotide
  Sense strand starting at position 638 of SEQ ID NO: 1886977
gguguucucaccugagaag

SEQ ID NO: 2439801 - RNA, 19 nt, Artificial Sequence
  Description of Artificial Sequence: Synthetic oligonucleotide
  Antisense strand to SEQ ID NO: 2439800
cuucucaggugagaacacc

SEQ ID NO: 2439802 - RNA, 19 nt, Artificial Sequence
  Description of Artificial Sequence: Synthetic oligonucleotide
  Sense strand starting at position 699 of SEQ ID NO: 1886977
uacgauuauuuccauggau

SEQ ID NO: 2439803 - RNA, 19 nt, Artificial Sequence
  Description of Artificial Sequence: Synthetic oligonucleotide
  Antisense strand to SEQ ID NO: 2439802
auccauggaaauaaucgua

SEQ ID NO: 2439804 - RNA, 19 nt, Artificial Sequence
  Description of Artificial Sequence: Synthetic oligonucleotide
  Sense strand starting at position 758 of SEQ ID NO: 1886977
cugugucuucuagcuguuu

SEQ ID NO: 2439805 - RNA, 19 nt, Artificial Sequence
  Description of Artificial Sequence: Synthetic oligonucleotide
  Antisense strand to SEQ ID NO: 2439804
aaacagcuagaagacacag

SEQ ID NO: 2439806 - RNA, 19 nt, Artificial Sequence
  Description of Artificial Sequence: Synthetic oligonucleotide
  Sense strand starting at position 770 of SEQ ID NO: 1886977
gcuguuucuggagaccaga

SEQ ID NO: 2439807 - RNA, 19 nt, Artificial Sequence
  Description of Artificial Sequence: Synthetic oligonucleotide
  Antisense strand to SEQ ID NO: 2439806
ucuggucuccagaaacagc

SEQ ID NO: 2439808 - RNA, 19 nt, Artificial Sequence
  Description of Artificial Sequence: Synthetic oligonucleotide
  Sense strand starting at position 997 of SEQ ID NO: 1886977
agaugaagugacugagucu

SEQ ID NO: 2439809 - RNA, 19 nt, Artificial Sequence
  Description of Artificial Sequence: Synthetic oligonucleotide
  Antisense strand to SEQ ID NO: 2439808
agacucagucacuucaucu

SEQ ID NO: 2439810 - RNA, 19 nt, Artificial Sequence
  Description of Artificial Sequence: Synthetic oligonucleotide
  Sense strand starting at position 1179 of SEQ ID NO: 1886977
aggaaaguggcaugaguuu

SEQ ID NO: 2439811 - RNA, 19 nt, Artificial Sequence
  Description of Artificial Sequence: Synthetic oligonucleotide
  Antisense strand to SEQ ID NO: 2439810
aaacucaugccacuuuccu

SEQ ID NO: 2439812 - RNA, 19 nt, Artificial Sequence
  Description of Artificial Sequence: Synthetic oligonucleotide
  Sense strand starting at position 1205 of SEQ ID NO: 1886977
caagaugccuggucucaaa

SEQ ID NO: 2439813 - RNA, 19 nt, Artificial Sequence
  Description of Artificial Sequence: Synthetic oligonucleotide
  Antisense strand to SEQ ID NO: 2439812
uuugagaccaggcaucuug

SEQ ID NO: 2439814 - RNA, 19 nt, Artificial Sequence
  Description of Artificial Sequence: Synthetic oligonucleotide
  Sense strand starting at position 1273 of SEQ ID NO: 1886977
ggaggagagaccgguuauu

SEQ ID NO: 2439815 - RNA, 19 nt, Artificial Sequence
  Description of Artificial Sequence: Synthetic oligonucleotide
  Antisense strand to SEQ ID NO: 2439814
aauaaccggucucuccucc

SEQ ID NO: 2439816 - RNA, 19 nt, Artificial Sequence
  Description of Artificial Sequence: Synthetic oligonucleotide
  Sense strand starting at position 1405 of SEQ ID NO: 1886977
ggcugccuguauuuggaaa

SEQ ID NO: 2439817 - RNA, 19 nt, Artificial Sequence
  Description of Artificial Sequence: Synthetic oligonucleotide
  Antisense strand to SEQ ID NO: 2439816
uuuccaaauacaggcagcc

SEQ ID NO: 2439818 - RNA, 19 nt, Artificial Sequence
  Description of Artificial Sequence: Synthetic oligonucleotide
  Sense strand starting at position 1586 of SEQ ID NO: 1886977
guguucguugaagauacuu

SEQ ID NO: 2439819 - RNA, 19 nt, Artificial Sequence
  Description of Artificial Sequence: Synthetic oligonucleotide
  Antisense strand to SEQ ID NO: 2439818
aaguaucuucaacgaacac

SEQ ID NO: 2439820 - RNA, 19 nt, Artificial Sequence
  Description of Artificial Sequence: Synthetic oligonucleotide
  Sense strand starting at position 1591 of SEQ ID NO: 1886977
cguugaagauacuuccaca

SEQ ID NO: 2439821 - RNA, 19 nt, Artificial Sequence
  Description of Artificial Sequence: Synthetic oligonucleotide
  Antisense strand to SEQ ID NO: 2439820
uguggaaguaucuucaacg

SEQ ID NO: 2439822 - RNA, 19 nt, Artificial Sequence
  Description of Artificial Sequence: Synthetic oligonucleotide
  Sense strand starting at position 1682 of SEQ ID NO: 1886977
cagagaagcucccugauga

SEQ ID NO: 2439823 - RNA, 19 nt, Artificial Sequence
  Description of Artificial Sequence: Synthetic oligonucleotide
  Antisense strand to SEQ ID NO: 2439822
ucaucagggagcuucucug

SEQ ID NO: 2439824 - RNA, 19 nt, Artificial Sequence
  Description of Artificial Sequence: Synthetic oligonucleotide
  Sense strand starting at position 1683 of SEQ ID NO: 1886977
agagaagcucccugaugag

SEQ ID NO: 2439825 - RNA, 19 nt, Artificial Sequence
  Description of Artificial Sequence: Synthetic oligonucleotide
  Antisense strand to SEQ ID NO: 2439824
cucaucagggagcuucucu

SEQ ID NO: 2439826 - RNA, 19 nt, Artificial Sequence
  Description of Artificial Sequence: Synthetic oligonucleotide
  Sense strand starting at position 1915 of SEQ ID NO: 1886977
ucaggaaaggucugucuga

SEQ ID NO: 2439827 - RNA, 19 nt, Artificial Sequence
  Description of Artificial Sequence: Synthetic oligonucleotide
  Antisense strand to SEQ ID NO: 2439826
ucagacagaccuuuccuga

SEQ ID NO: 2439828 - RNA, 19 nt, Artificial Sequence
  Description of Artificial Sequence: Synthetic oligonucleotide
  Sense strand starting at position 1916 of SEQ ID NO: 1886977
caggaaaggucugucugaa

SEQ ID NO: 2439829 - RNA, 19 nt, Artificial Sequence
  Description of Artificial Sequence: Synthetic oligonucleotide
  Antisense strand to SEQ ID NO: 2439828
uucagacagaccuuuccug

SEQ ID NO: 2439830 - RNA, 19 nt, Artificial Sequence
  Description of Artificial Sequence: Synthetic oligonucleotide
  Sense strand starting at position 2208 of SEQ ID NO: 1886977
ggcaauaauuugucguucu

SEQ ID NO: 2439831 - RNA, 19 nt, Artificial Sequence
  Description of Artificial Sequence: Synthetic oligonucleotide
  Antisense strand to SEQ ID NO: 2439830
agaacgacaaauuauugcc

SEQ ID NO: 2439832 - RNA, 19 nt, Artificial Sequence
  Description of Artificial Sequence: Synthetic oligonucleotide
  Sense strand starting at position 2279 of SEQ ID NO: 1886977
cuguuaagucagggaaacu

SEQ ID NO: 2439833 - RNA, 19 nt, Artificial Sequence
  Description of Artificial Sequence: Synthetic oligonucleotide
  Antisense strand to SEQ ID NO: 2439832
aguuucccugacuuaacag

SEQ ID NO: 2439834 - RNA, 19 nt, Artificial Sequence
  Description of Artificial Sequence: Synthetic oligonucleotide
  Sense strand starting at position 2339 of SEQ ID NO: 1886977
ugagcagaagucuguacua

SEQ ID NO: 2439835 - RNA, 19 nt, Artificial Sequence
  Description of Artificial Sequence: Synthetic oligonucleotide
  Antisense strand to SEQ ID NO: 2439834
uaguacagacuucugcuca

SEQ ID NO: 2439836 - RNA, 19 nt, Artificial Sequence
  Description of Artificial Sequence: Synthetic oligonucleotide
  Sense strand starting at position 2407 of SEQ ID NO: 1886977
gugcauaugaaccauguga

SEQ ID NO: 2439837 - RNA, 19 nt, Artificial Sequence
  Description of Artificial Sequence: Synthetic oligonucleotide
  Antisense strand to SEQ ID NO: 2439836
ucacaugguucauaugcac

SEQ ID NO: 2439838 - RNA, 19 nt, Artificial Sequence
  Description of Artificial Sequence: Synthetic oligonucleotide
  Sense strand starting at position 2523 of SEQ ID NO: 1886977
ggaacuuucuaguuucuau

SEQ ID NO: 2439839 - RNA, 19 nt, Artificial Sequence
  Description of Artificial Sequence: Synthetic oligonucleotide
  Antisense strand to SEQ ID NO: 2439838
auagaaacuagaaaguucc

SEQ ID NO: 2439840 - RNA, 19 nt, Artificial Sequence
  Description of Artificial Sequence: Synthetic oligonucleotide
  Sense strand starting at position 2589 of SEQ ID NO: 1886977
gccaguauauccuccugga

SEQ ID NO: 2439841 - RNA, 19 nt, Artificial Sequence
  Description of Artificial Sequence: Synthetic oligonucleotide
  Antisense strand to SEQ ID NO: 2439840
uccaggaggauauacuggc

SEQ ID NO: 2439842 - RNA, 19 nt, Artificial Sequence
  Description of Artificial Sequence: Synthetic oligonucleotide
  Sense strand starting at position 2593 of SEQ ID NO: 1886977
guauauccuccuggagaaa

SEQ ID NO: 2439843 - RNA, 19 nt, Artificial Sequence
  Description of Artificial Sequence: Synthetic oligonucleotide
  Antisense strand to SEQ ID NO: 2439842
uuucuccaggaggauauac

SEQ ID NO: 2439844 - RNA, 19 nt, Artificial Sequence
  Description of Artificial Sequence: Synthetic oligonucleotide
  Sense strand starting at position 2650 of SEQ ID NO: 1886977
ucaagucaugguugauuag

SEQ ID NO: 2439845 - RNA, 19 nt, Artificial Sequence
  Description of Artificial Sequence: Synthetic oligonucleotide
  Antisense strand to SEQ ID NO: 2439844
cuaaucaaccaugacuuga

SEQ ID NO: 2439846 - RNA, 19 nt, Artificial Sequence
  Description of Artificial Sequence: Synthetic oligonucleotide
  Sense strand starting at position 2651 of SEQ ID NO: 1886977
caagucaugguugauuagu

SEQ ID NO: 2439847 - RNA, 19 nt, Artificial Sequence
  Description of Artificial Sequence: Synthetic oligonucleotide
  Antisense strand to SEQ ID NO: 2439846
acuaaucaaccaugacuug

SEQ ID NO: 2439848 - RNA, 19 nt, Artificial Sequence
  Description of Artificial Sequence: Synthetic oligonucleotide
  Sense strand starting at position 2660 of SEQ ID NO: 1886977
guugauuaguggcuaugaa

SEQ ID NO: 2439849 - RNA, 19 nt, Artificial Sequence
  Description of Artificial Sequence: Synthetic oligonucleotide
  Antisense strand to SEQ ID NO: 2439848
uucauagccacuaaucaac

SEQ ID NO: 2439850 - RNA, 19 nt, Artificial Sequence
  Description of Artificial Sequence: Synthetic oligonucleotide
  Sense strand starting at position 2661 of SEQ ID NO: 1886977
uugauuaguggcuaugaaa

SEQ ID NO: 2439851 - RNA, 19 nt, Artificial Sequence
  Description of Artificial Sequence: Synthetic oligonucleotide
  Antisense strand to SEQ ID NO: 2439850
uuucauagccacuaaucaa

SEQ ID NO: 2439852 - RNA, 19 nt, Artificial Sequence
  Description of Artificial Sequence: Synthetic oligonucleotide
  Sense strand starting at position 2827 of SEQ ID NO: 1886977
aggguacgaaccugugaau

SEQ ID NO: 2439853 - RNA, 19 nt, Artificial Sequence
  Description of Artificial Sequence: Synthetic oligonucleotide
  Antisense strand to SEQ ID NO: 2439852
auucacagguucguacccu

SEQ ID NO: 2439854 - RNA, 19 nt, Artificial Sequence
  Description of Artificial Sequence: Synthetic oligonucleotide
  Sense strand starting at position 2833 of SEQ ID NO: 1886977
cgaaccugugaauauguau

SEQ ID NO: 2439855 - RNA, 19 nt, Artificial Sequence
  Description of Artificial Sequence: Synthetic oligonucleotide
  Antisense strand to SEQ ID NO: 2439854
auacauauucacagguucg

SEQ ID NO: 2439856 - RNA, 19 nt, Artificial Sequence
  Description of Artificial Sequence: Synthetic oligonucleotide
  Sense strand starting at position 2924 of SEQ ID NO: 1886977
uggaaagcuucuuauuuaa

SEQ ID NO: 2439857 - RNA, 19 nt, Artificial Sequence
  Description of Artificial Sequence: Synthetic oligonucleotide
  Antisense strand to SEQ ID NO: 2439856
uuaaauaagaagcuuucca

SEQ ID NO: 2439858 - RNA, 19 nt, Artificial Sequence
  Description of Artificial Sequence: Synthetic oligonucleotide
  Sense strand starting at position 3017 of SEQ ID NO: 1886977
caguguugugaauacuuag

SEQ ID NO: 2439859 - RNA, 19 nt, Artificial Sequence
  Description of Artificial Sequence: Synthetic oligonucleotide
  Antisense strand to SEQ ID NO: 2439858
cuaaguauucacaacacug

SEQ ID NO: 2439860 - RNA, 19 nt, Artificial Sequence
  Description of Artificial Sequence: Synthetic oligonucleotide
  Sense strand starting at position 3130 of SEQ ID NO: 1886977
uuaggaauauugcuuauac

SEQ ID NO: 2439861 - RNA, 19 nt, Artificial Sequence
  Description of Artificial Sequence: Synthetic oligonucleotide
  Antisense strand to SEQ ID NO: 2439860
guauaagcaauauuccuaa

SEQ ID NO: 2439862 - RNA, 19 nt, Artificial Sequence
  Description of Artificial Sequence: Synthetic oligonucleotide
  Sense strand starting at position 3132 of SEQ ID NO: 1886977
aggaauauugcuuauacgu

SEQ ID NO: 2439863 - RNA, 19 nt, Artificial Sequence
  Description of Artificial Sequence: Synthetic oligonucleotide
  Antisense strand to SEQ ID NO: 2439862
acguauaagcaauauuccu

SEQ ID NO: 2439864 - RNA, 19 nt, Artificial Sequence
  Description of Artificial Sequence: Synthetic oligonucleotide
  Sense strand starting at position 3329 of SEQ ID NO: 1886977
ccagauuaaccguaccaac

SEQ ID NO: 2439865 - RNA, 19 nt, Artificial Sequence
  Description of Artificial Sequence: Synthetic oligonucleotide
  Antisense strand to SEQ ID NO: 2439864
guugguacgguuaaucugg

SEQ ID NO: 2439866 - RNA, 19 nt, Artificial Sequence
  Description of Artificial Sequence: Synthetic oligonucleotide
  Sense strand starting at position 3443 of SEQ ID NO: 1886977
aaaguaucguagcugaaca

SEQ ID NO: 2439867 - RNA, 19 nt, Artificial Sequence
  Description of Artificial Sequence: Synthetic oligonucleotide
  Antisense strand to SEQ ID NO: 2439866
uguucagcuacgauacuuu

SEQ ID NO: 2439868 - RNA, 19 nt, Artificial Sequence
  Description of Artificial Sequence: Synthetic oligonucleotide
  Sense strand starting at position 3457 of SEQ ID NO: 1886977
gaacaacugucucuugguu

SEQ ID NO: 2439869 - RNA, 19 nt, Artificial Sequence
  Description of Artificial Sequence: Synthetic oligonucleotide
  Antisense strand to SEQ ID NO: 2439868
aaccaagagacaguuguuc

SEQ ID NO: 2439870 - RNA, 19 nt, Artificial Sequence
  Description of Artificial Sequence: Synthetic oligonucleotide
  Sense strand starting at position 711 of SEQ ID NO: 1886978
agacauauuccuggcacuu

SEQ ID NO: 2439871 - RNA, 19 nt, Artificial Sequence
  Description of Artificial Sequence: Synthetic oligonucleotide
  Antisense strand to SEQ ID NO: 2439870
aagugccaggaauaugucu

SEQ ID NO: 2439872 - RNA, 19 nt, Artificial Sequence
  Description of Artificial Sequence: Synthetic oligonucleotide
  Sense strand starting at position 742 of SEQ ID NO: 1886978
gggcccaucuucucauaua

SEQ ID NO: 2439873 - RNA, 19 nt, Artificial Sequence
  Description of Artificial Sequence: Synthetic oligonucleotide
  Antisense strand to SEQ ID NO: 2439872
uauaugagaagaugggccc

SEQ ID NO: 2439874 - RNA, 19 nt, Artificial Sequence
  Description of Artificial Sequence: Synthetic oligonucleotide
  Sense strand starting at position 768 of SEQ ID NO: 1886978
cgguguuuauuucuuuguu

SEQ ID NO: 2439875 - RNA, 19 nt, Artificial Sequence
  Description of Artificial Sequence: Synthetic oligonucleotide
  Antisense strand to SEQ ID NO: 2439874
aacaaagaaauaaacaccg

SEQ ID NO: 2439876 - RNA, 19 nt, Artificial Sequence
  Description of Artificial Sequence: Synthetic oligonucleotide
  Sense strand starting at position 769 of SEQ ID NO: 1886978
gguguuuauuucuuuguuu

SEQ ID NO: 2439877 - RNA, 19 nt, Artificial Sequence
  Description of Artificial Sequence: Synthetic oligonucleotide
  Antisense strand to SEQ ID NO: 2439876
aaacaaagaaauaaacacc

SEQ ID NO: 2439878 - RNA, 19 nt, Artificial Sequence
  Description of Artificial Sequence: Synthetic oligonucleotide
  Sense strand starting at position 1064 of SEQ ID NO: 1886978
accagcugauguucuuaua

SEQ ID NO: 2439879 - RNA, 19 nt, Artificial Sequence
  Description of Artificial Sequence: Synthetic oligonucleotide
  Antisense strand to SEQ ID NO: 2439878
uauaagaacaucagcuggu

SEQ ID NO: 2439880 - RNA, 19 nt, Artificial Sequence
  Description of Artificial Sequence: Synthetic oligonucleotide
  Sense strand starting at position 1124 of SEQ ID NO: 1886978
gaggauuccuccucggaca

SEQ ID NO: 2439881 - RNA, 19 nt, Artificial Sequence
  Description of Artificial Sequence: Synthetic oligonucleotide
  Antisense strand to SEQ ID NO: 2439880
uguccgaggaggaauccuc

SEQ ID NO: 2439882 - RNA, 19 nt, Artificial Sequence
  Description of Artificial Sequence: Synthetic oligonucleotide
  Sense strand starting at position 1126 of SEQ ID NO: 1886978
ggauuccuccucggacaca

SEQ ID NO: 2439883 - RNA, 19 nt, Artificial Sequence
  Description of Artificial Sequence: Synthetic oligonucleotide
  Antisense strand to SEQ ID NO: 2439882
uguguccgaggaggaaucc

SEQ ID NO: 2439884 - RNA, 19 nt, Artificial Sequence
  Description of Artificial Sequence: Synthetic oligonucleotide
  Sense strand starting at position 1591 of SEQ ID NO: 1886978
gaucuuauccuccguaaag

SEQ ID NO: 2439885 - RNA, 19 nt, Artificial Sequence
  Description of Artificial Sequence: Synthetic oligonucleotide
  Antisense strand to SEQ ID NO: 2439884
cuuuacggaggauaagauc

SEQ ID NO: 2439886 - RNA, 19 nt, Artificial Sequence
  Description of Artificial Sequence: Synthetic oligonucleotide
  Sense strand starting at position 1593 of SEQ ID NO: 1886978
ucuuauccuccguaaaggu

SEQ ID NO: 2439887 - RNA, 19 nt, Artificial Sequence
  Description of Artificial Sequence: Synthetic oligonucleotide
  Antisense strand to SEQ ID NO: 2439886
accuuuacggaggauaaga

SEQ ID NO: 2439888 - RNA, 19 nt, Artificial Sequence
  Description of Artificial Sequence: Synthetic oligonucleotide
  Sense strand starting at position 1602 of SEQ ID NO: 1886978
ccguaaaggucaccucaua

SEQ ID NO: 2439889 - RNA, 19 nt, Artificial Sequence
  Description of Artificial Sequence: Synthetic oligonucleotide
  Antisense strand to SEQ ID NO: 2439888
uaugaggugaccuuuacgg

SEQ ID NO: 2439890 - RNA, 19 nt, Artificial Sequence
  Description of Artificial Sequence: Synthetic oligonucleotide
  Sense strand starting at position 1615 of SEQ ID NO: 1886978
cucauaguccugcagaaug

SEQ ID NO: 2439891 - RNA, 19 nt, Artificial Sequence
  Description of Artificial Sequence: Synthetic oligonucleotide
  Antisense strand to SEQ ID NO: 2439890
cauucugcaggacuaugag

SEQ ID NO: 2439892 - RNA, 19 nt, Artificial Sequence
  Description of Artificial Sequence: Synthetic oligonucleotide
  Sense strand starting at position 1852 of SEQ ID NO: 1886978
acggaaaccgcugagcaau

SEQ ID NO: 2439893 - RNA, 19 nt, Artificial Sequence
  Description of Artificial Sequence: Synthetic oligonucleotide
  Antisense strand to SEQ ID NO: 2439892
auugcucagcgguuuccgu

SEQ ID NO: 2439894 - RNA, 19 nt, Artificial Sequence
  Description of Artificial Sequence: Synthetic oligonucleotide
  Sense strand starting at position 2062 of SEQ ID NO: 1886978
cggcuuauuacgucacagu

SEQ ID NO: 2439895 - RNA, 19 nt, Artificial Sequence
  Description of Artificial Sequence: Synthetic oligonucleotide
  Antisense strand to SEQ ID NO: 2439894
acugugacguaauaagccg

SEQ ID NO: 2439896 - RNA, 19 nt, Artificial Sequence
  Description of Artificial Sequence: Synthetic oligonucleotide
  Sense strand starting at position 2197 of SEQ ID NO: 1886978
ucuccaguuuagguaaaua

SEQ ID NO: 2439897 - RNA, 19 nt, Artificial Sequence
  Description of Artificial Sequence: Synthetic oligonucleotide
  Antisense strand to SEQ ID NO: 2439896
uauuuaccuaaacuggaga

SEQ ID NO: 2439898 - RNA, 19 nt, Artificial Sequence
  Description of Artificial Sequence: Synthetic oligonucleotide
  Sense strand starting at position 2285 of SEQ ID NO: 1886978
gccacacuguuccuuggaa

SEQ ID NO: 2439899 - RNA, 19 nt, Artificial Sequence
  Description of Artificial Sequence: Synthetic oligonucleotide
  Antisense strand to SEQ ID NO: 2439898
uuccaaggaacaguguggc

SEQ ID NO: 2439900 - RNA, 19 nt, Artificial Sequence
  Description of Artificial Sequence: Synthetic oligonucleotide
  Sense strand starting at position 2286 of SEQ ID NO: 1886978
ccacacuguuccuuggaaa

SEQ ID NO: 2439901 - RNA, 19 nt, Artificial Sequence
  Description of Artificial Sequence: Synthetic oligonucleotide
  Antisense strand to SEQ ID NO: 2439900
uuuccaaggaacagugugg

SEQ ID NO: 2439902 - RNA, 19 nt, Artificial Sequence
  Description of Artificial Sequence: Synthetic oligonucleotide
  Sense strand starting at position 2299 of SEQ ID NO: 1886978
uggaaacuguagucuuaug

SEQ ID NO: 2439903 - RNA, 19 nt, Artificial Sequence
  Description of Artificial Sequence: Synthetic oligonucleotide
  Antisense strand to SEQ ID NO: 2439902
cauaagacuacaguuucca

SEQ ID NO: 2439904 - RNA, 19 nt, Artificial Sequence
  Description of Artificial Sequence: Synthetic oligonucleotide
  Sense strand starting at position 2406 of SEQ ID NO: 1886978
caguaauggauuggagugu

SEQ ID NO: 2439905 - RNA, 19 nt, Artificial Sequence
  Description of Artificial Sequence: Synthetic oligonucleotide
  Antisense strand to SEQ ID NO: 2439904
acacuccaauccauuacug

SEQ ID NO: 2439906 - RNA, 19 nt, Artificial Sequence
  Description of Artificial Sequence: Synthetic oligonucleotide
  Sense strand starting at position 2410 of SEQ ID NO: 1886978
aauggauuggaguguuguu

SEQ ID NO: 2439907 - RNA, 19 nt, Artificial Sequence
  Description of Artificial Sequence: Synthetic oligonucleotide
  Antisense strand to SEQ ID NO: 2439906
aacaacacuccaauccauu

SEQ ID NO: 2439908 - RNA, 19 nt, Artificial Sequence
  Description of Artificial Sequence: Synthetic oligonucleotide
  Sense strand starting at position 2429 of SEQ ID NO: 1886978
auguucuccuaucuugaga

SEQ ID NO: 2439909 - RNA, 19 nt, Artificial Sequence
  Description of Artificial Sequence: Synthetic oligonucleotide
  Antisense strand to SEQ ID NO: 2439908
ucucaagauaggagaacau

SEQ ID NO: 2439910 - RNA, 19 nt, Artificial Sequence
  Description of Artificial Sequence: Synthetic oligonucleotide
  Sense strand starting at position 2525 of SEQ ID NO: 1886978
caaguaguccucuaagguc

SEQ ID NO: 2439911 - RNA, 19 nt, Artificial Sequence
  Description of Artificial Sequence: Synthetic oligonucleotide
  Antisense strand to SEQ ID NO: 2439910
gaccuuagaggacuacuug

SEQ ID NO: 2439912 - RNA, 19 nt, Artificial Sequence
  Description of Artificial Sequence: Synthetic oligonucleotide
  Sense strand starting at position 3095 of SEQ ID NO: 1886978
ggagagucugugggucaga

SEQ ID NO: 2439913 - RNA, 19 nt, Artificial Sequence
  Description of Artificial Sequence: Synthetic oligonucleotide
  Antisense strand to SEQ ID NO: 2439912
ucugacccacagacucucc

SEQ ID NO: 2439914 - RNA, 19 nt, Artificial Sequence
  Description of Artificial Sequence: Synthetic oligonucleotide
  Sense strand starting at position 3096 of SEQ ID NO: 1886978
gagagucugugggucagaa

SEQ ID NO: 2439915 - RNA, 19 nt, Artificial Sequence
  Description of Artificial Sequence: Synthetic oligonucleotide
  Antisense strand to SEQ ID NO: 2439914
uucugacccacagacucuc

SEQ ID NO: 2439916 - RNA, 19 nt, Artificial Sequence
  Description of Artificial Sequence: Synthetic oligonucleotide
  Sense strand starting at position 3098 of SEQ ID NO: 1886978
gagucugugggucagaaca

SEQ ID NO: 2439917 - RNA, 19 nt, Artificial Sequence
  Description of Artificial Sequence: Synthetic oligonucleotide
  Antisense strand to SEQ ID NO: 2439916
uguucugacccacagacuc

SEQ ID NO: 2439918 - RNA, 19 nt, Artificial Sequence
  Description of Artificial Sequence: Synthetic oligonucleotide
  Sense strand starting at position 3199 of SEQ ID NO: 1886978
ugacacugucuugggaaca

SEQ ID NO: 2439919 - RNA, 19 nt, Artificial Sequence
  Description of Artificial Sequence: Synthetic oligonucleotide
  Antisense strand to SEQ ID NO: 2439918
uguucccaagacaguguca

SEQ ID NO: 2439920 - RNA, 19 nt, Artificial Sequence
  Description of Artificial Sequence: Synthetic oligonucleotide
  Sense strand starting at position 3248 of SEQ ID NO: 1886978
uaggaugaacucugcaagu

SEQ ID NO: 2439921 - RNA, 19 nt, Artificial Sequence
  Description of Artificial Sequence: Synthetic oligonucleotide
  Antisense strand to SEQ ID NO: 2439920
acuugcagaguucauccua

SEQ ID NO: 2439922 - RNA, 19 nt, Artificial Sequence
  Description of Artificial Sequence: Synthetic oligonucleotide
  Sense strand starting at position 3326 of SEQ ID NO: 1886978
aagagaucuccuugguuag

SEQ ID NO: 2439923 - RNA, 19 nt, Artificial Sequence
  Description of Artificial Sequence: Synthetic oligonucleotide
  Antisense strand to SEQ ID NO: 2439922
cuaaccaaggagaucucuu

SEQ ID NO: 2439924 - RNA, 19 nt, Artificial Sequence
  Description of Artificial Sequence: Synthetic oligonucleotide
  Sense strand starting at position 3329 of SEQ ID NO: 1886978
agaucuccuugguuaggga

SEQ ID NO: 2439925 - RNA, 19 nt, Artificial Sequence
  Description of Artificial Sequence: Synthetic oligonucleotide
  Antisense strand to SEQ ID NO: 2439924
ucccuaaccaaggagaucu

SEQ ID NO: 2439926 - RNA, 19 nt, Artificial Sequence
  Description of Artificial Sequence: Synthetic oligonucleotide
  Sense strand starting at position 3422 of SEQ ID NO: 1886978
gagucuugcuuucucaaag

SEQ ID NO: 2439927 - RNA, 19 nt, Artificial Sequence
  Description of Artificial Sequence: Synthetic oligonucleotide
  Antisense strand to SEQ ID NO: 2439926
cuuugagaaagcaagacuc

SEQ ID NO: 2439928 - RNA, 19 nt, Artificial Sequence
  Description of Artificial Sequence: Synthetic oligonucleotide
  Sense strand starting at position 3561 of SEQ ID NO: 1886978
cuggauaacuuggcuugua

SEQ ID NO: 2439929 - RNA, 19 nt, Artificial Sequence
  Description of Artificial Sequence: Synthetic oligonucleotide
  Antisense strand to SEQ ID NO: 2439928
uacaagccaaguuauccag

SEQ ID NO: 2439930 - RNA, 19 nt, Artificial Sequence
  Description of Artificial Sequence: Synthetic oligonucleotide
  Sense strand starting at position 3562 of SEQ ID NO: 1886978
uggauaacuuggcuuguaa

SEQ ID NO: 2439931 - RNA, 19 nt, Artificial Sequence
  Description of Artificial Sequence: Synthetic oligonucleotide
  Antisense strand to SEQ ID NO: 2439930
uuacaagccaaguuaucca

SEQ ID NO: 2439932 - RNA, 19 nt, Artificial Sequence
  Description of Artificial Sequence: Synthetic oligonucleotide
  Sense strand starting at position 3564 of SEQ ID NO: 1886978
gauaacuuggcuuguaaag

SEQ ID NO: 2439933 - RNA, 19 nt, Artificial Sequence
  Description of Artificial Sequence: Synthetic oligonucleotide
  Antisense strand to SEQ ID NO: 2439932
cuuuacaagccaaguuauc

SEQ ID NO: 2439934 - RNA, 19 nt, Artificial Sequence
  Description of Artificial Sequence: Synthetic oligonucleotide
  Sense strand starting at position 3703 of SEQ ID NO: 1886978
gagucaguggcauggacuu

SEQ ID NO: 2439935 - RNA, 19 nt, Artificial Sequence
  Description of Artificial Sequence: Synthetic oligonucleotide
  Antisense strand to SEQ ID NO: 2439934
aaguccaugccacugacuc

SEQ ID NO: 2439936 - RNA, 19 nt, Artificial Sequence
  Description of Artificial Sequence: Synthetic oligonucleotide
  Sense strand starting at position 3709 of SEQ ID NO: 1886978
guggcauggacuuacaaua

SEQ ID NO: 2439937 - RNA, 19 nt, Artificial Sequence
  Description of Artificial Sequence: Synthetic oligonucleotide
  Antisense strand to SEQ ID NO: 2439936
uauuguaaguccaugccac

SEQ ID NO: 2439938 - RNA, 19 nt, Artificial Sequence
  Description of Artificial Sequence: Synthetic oligonucleotide
  Sense strand starting at position 3823 of SEQ ID NO: 1886978
uuuacacacguuuaagauu

SEQ ID NO: 2439939 - RNA, 19 nt, Artificial Sequence
  Description of Artificial Sequence: Synthetic oligonucleotide
  Antisense strand to SEQ ID NO: 2439938
aaucuuaaacguguguaaa

SEQ ID NO: 2439940 - RNA, 19 nt, Artificial Sequence
  Description of Artificial Sequence: Synthetic oligonucleotide
  Sense strand starting at position 3878 of SEQ ID NO: 1886978
caaagagaguuccuuauga

SEQ ID NO: 2439941 - RNA, 19 nt, Artificial Sequence
  Description of Artificial Sequence: Synthetic oligonucleotide
  Antisense strand to SEQ ID NO: 2439940
ucauaaggaacucucuuug

SEQ ID NO: 2439942 - RNA, 19 nt, Artificial Sequence
  Description of Artificial Sequence: Synthetic oligonucleotide
  Sense strand starting at position 3901 of SEQ ID NO: 1886978
cuggauaugguccagccaa

SEQ ID NO: 2439943 - RNA, 19 nt, Artificial Sequence
  Description of Artificial Sequence: Synthetic oligonucleotide
  Antisense strand to SEQ ID NO: 2439942
uuggcuggaccauauccag

SEQ ID NO: 2439944 - RNA, 19 nt, Artificial Sequence
  Description of Artificial Sequence: Synthetic oligonucleotide
  Sense strand starting at position 3966 of SEQ ID NO: 1886978
ggaggagcuccagaguauc

SEQ ID NO: 2439945 - RNA, 19 nt, Artificial Sequence
  Description of Artificial Sequence: Synthetic oligonucleotide
  Antisense strand to SEQ ID NO: 2439944
gauacucuggagcuccucc

SEQ ID NO: 2439946 - RNA, 19 nt, Artificial Sequence
  Description of Artificial Sequence: Synthetic oligonucleotide
  Sense strand starting at position 3969 of SEQ ID NO: 1886978
ggagcuccagaguaucuaa

SEQ ID NO: 2439947 - RNA, 19 nt, Artificial Sequence
  Description of Artificial Sequence: Synthetic oligonucleotide
  Antisense strand to SEQ ID NO: 2439946
uuagauacucuggagcucc

SEQ ID NO: 2439948 - RNA, 19 nt, Artificial Sequence
  Description of Artificial Sequence: Synthetic oligonucleotide
  Sense strand starting at position 3972 of SEQ ID NO: 1886978
gcuccagaguaucuaaauu

SEQ ID NO: 2439949 - RNA, 19 nt, Artificial Sequence
  Description of Artificial Sequence: Synthetic oligonucleotide
  Antisense strand to SEQ ID NO: 2439948
aauuuagauacucuggagc

SEQ ID NO: 2439950 - RNA, 19 nt, Artificial Sequence
  Description of Artificial Sequence: Synthetic oligonucleotide
  Sense strand starting at position 131 of SEQ ID NO: 1886979
agaauaaugaguuggcaac

SEQ ID NO: 2439951 - RNA, 19 nt, Artificial Sequence
  Description of Artificial Sequence: Synthetic oligonucleotide
  Antisense strand to SEQ ID NO: 2439950
guugccaacucauuauucu

SEQ ID NO: 2439952 - RNA, 19 nt, Artificial Sequence
  Description of Artificial Sequence: Synthetic oligonucleotide
  Sense strand starting at position 132 of SEQ ID NO: 1886979
gaauaaugaguuggcaacu

SEQ ID NO: 2439953 - RNA, 19 nt, Artificial Sequence
  Description of Artificial Sequence: Synthetic oligonucleotide
  Antisense strand to SEQ ID NO: 2439952
aguugccaacucauuauuc

SEQ ID NO: 2439954 - RNA, 19 nt, Artificial Sequence
  Description of Artificial Sequence: Synthetic oligonucleotide
  Sense strand starting at position 194 of SEQ ID NO: 1886979
ugauguagcggucugcgaa

SEQ ID NO: 2439955 - RNA, 19 nt, Artificial Sequence
  Description of Artificial Sequence: Synthetic oligonucleotide
  Antisense strand to SEQ ID NO: 2439954
uucgcagaccgcuacauca

SEQ ID NO: 2439956 - RNA, 19 nt, Artificial Sequence
  Description of Artificial Sequence: Synthetic oligonucleotide
  Sense strand starting at position 248 of SEQ ID NO: 1886979
uccugagauugucuaauua

SEQ ID NO: 2439957 - RNA, 19 nt, Artificial Sequence
  Description of Artificial Sequence: Synthetic oligonucleotide
  Antisense strand to SEQ ID NO: 2439956
uaauuagacaaucucagga

SEQ ID NO: 2439958 - RNA, 19 nt, Artificial Sequence
  Description of Artificial Sequence: Synthetic oligonucleotide
  Sense strand starting at position 252 of SEQ ID NO: 1886979
gagauugucuaauuauaga

SEQ ID NO: 2439959 - RNA, 19 nt, Artificial Sequence
  Description of Artificial Sequence: Synthetic oligonucleotide
  Antisense strand to SEQ ID NO: 2439958
ucuauaauuagacaaucuc

SEQ ID NO: 2439960 - RNA, 19 nt, Artificial Sequence
  Description of Artificial Sequence: Synthetic oligonucleotide
  Sense strand starting at position 260 of SEQ ID NO: 1886979
cuaauuauagaguaaugcu

SEQ ID NO: 2439961 - RNA, 19 nt, Artificial Sequence
  Description of Artificial Sequence: Synthetic oligonucleotide
  Antisense strand to SEQ ID NO: 2439960
agcauuacucuauaauuag

SEQ ID NO: 2439962 - RNA, 19 nt, Artificial Sequence
  Description of Artificial Sequence: Synthetic oligonucleotide
  Sense strand starting at position 268 of SEQ ID NO: 1886979
agaguaaugcuggaaguau

SEQ ID NO: 2439963 - RNA, 19 nt, Artificial Sequence
  Description of Artificial Sequence: Synthetic oligonucleotide
  Antisense strand to SEQ ID NO: 2439962
auacuuccagcauuacucu

SEQ ID NO: 2439964 - RNA, 19 nt, Artificial Sequence
  Description of Artificial Sequence: Synthetic oligonucleotide
  Sense strand starting at position 296 of SEQ ID NO: 1886979
gcagauuaauuaguugaug

SEQ ID NO: 2439965 - RNA, 19 nt, Artificial Sequence
  Description of Artificial Sequence: Synthetic oligonucleotide
  Antisense strand to SEQ ID NO: 2439964
caucaacuaauuaaucugc

SEQ ID NO: 2439966 - RNA, 19 nt, Artificial Sequence
  Description of Artificial Sequence: Synthetic oligonucleotide
  Sense strand starting at position 299 of SEQ ID NO: 1886979
gauuaauuaguugaugcuu

SEQ ID NO: 2439967 - RNA, 19 nt, Artificial Sequence
  Description of Artificial Sequence: Synthetic oligonucleotide
  Antisense strand to SEQ ID NO: 2439966
aagcaucaacuaauuaauc

SEQ ID NO: 2439968 - RNA, 19 nt, Artificial Sequence
  Description of Artificial Sequence: Synthetic oligonucleotide
  Sense strand starting at position 398 of SEQ ID NO: 1886979
cgcuuucugcuaguuuaac

SEQ ID NO: 2439969 - RNA, 19 nt, Artificial Sequence
  Description of Artificial Sequence: Synthetic oligonucleotide
  Antisense strand to SEQ ID NO: 2439968
guuaaacuagcagaaagcg

SEQ ID NO: 2439970 - RNA, 19 nt, Artificial Sequence
  Description of Artificial Sequence: Synthetic oligonucleotide
  Sense strand starting at position 466 of SEQ ID NO: 1886979
agagguaagauguagcuau

SEQ ID NO: 2439971 - RNA, 19 nt, Artificial Sequence
  Description of Artificial Sequence: Synthetic oligonucleotide
  Antisense strand to SEQ ID NO: 2439970
auagcuacaucuuaccucu

SEQ ID NO: 2439972 - RNA, 19 nt, Artificial Sequence
  Description of Artificial Sequence: Synthetic oligonucleotide
  Sense strand starting at position 716 of SEQ ID NO: 1886979
aaguuaacucuggaguguu

SEQ ID NO: 2439973 - RNA, 19 nt, Artificial Sequence
  Description of Artificial Sequence: Synthetic oligonucleotide
  Antisense strand to SEQ ID NO: 2439972
aacacuccagaguuaacuu

SEQ ID NO: 2439974 - RNA, 19 nt, Artificial Sequence
  Description of Artificial Sequence: Synthetic oligonucleotide
  Sense strand starting at position 777 of SEQ ID NO: 1886979
augguuuccuaacuaggaa

SEQ ID NO: 2439975 - RNA, 19 nt, Artificial Sequence
  Description of Artificial Sequence: Synthetic oligonucleotide
  Antisense strand to SEQ ID NO: 2439974
uuccuaguuaggaaaccau

SEQ ID NO: 2439976 - RNA, 19 nt, Artificial Sequence
  Description of Artificial Sequence: Synthetic oligonucleotide
  Sense strand starting at position 792 of SEQ ID NO: 1886979
ggaagucauguucaaguug

SEQ ID NO: 2439977 - RNA, 19 nt, Artificial Sequence
  Description of Artificial Sequence: Synthetic oligonucleotide
  Antisense strand to SEQ ID NO: 2439976
caacuugaacaugacuucc

SEQ ID NO: 2439978 - RNA, 19 nt, Artificial Sequence
  Description of Artificial Sequence: Synthetic oligonucleotide
  Sense strand starting at position 850 of SEQ ID NO: 1886979
guauuagacuuucuuacau

SEQ ID NO: 2439979 - RNA, 19 nt, Artificial Sequence
  Description of Artificial Sequence: Synthetic oligonucleotide
  Antisense strand to SEQ ID NO: 2439978
auguaagaaagucuaauac

SEQ ID NO: 2439980 - RNA, 19 nt, Artificial Sequence
  Description of Artificial Sequence: Synthetic oligonucleotide
  Sense strand starting at position 1284 of SEQ ID NO: 1886979
gggcaauugcaacaguuaa

SEQ ID NO: 2439981 - RNA, 19 nt, Artificial Sequence
  Description of Artificial Sequence: Synthetic oligonucleotide
  Antisense strand to SEQ ID NO: 2439980
uuaacuguugcaauugccc

SEQ ID NO: 2439982 - RNA, 19 nt, Artificial Sequence
  Description of Artificial Sequence: Synthetic oligonucleotide
  Sense strand starting at position 1338 of SEQ ID NO: 1886979
aggugucagcauuauuaac

SEQ ID NO: 2439983 - RNA, 19 nt, Artificial Sequence
  Description of Artificial Sequence: Synthetic oligonucleotide
  Antisense strand to SEQ ID NO: 2439982
guuaauaaugcugacaccu

SEQ ID NO: 2439984 - RNA, 19 nt, Artificial Sequence
  Description of Artificial Sequence: Synthetic oligonucleotide
  Sense strand starting at position 1603 of SEQ ID NO: 1886979
ggcaauagcaguuaugaag

SEQ ID NO: 2439985 - RNA, 19 nt, Artificial Sequence
  Description of Artificial Sequence: Synthetic oligonucleotide
  Antisense strand to SEQ ID NO: 2439984
cuucauaacugcuauugcc

SEQ ID NO: 2439986 - RNA, 19 nt, Artificial Sequence
  Description of Artificial Sequence: Synthetic oligonucleotide
  Sense strand starting at position 1691 of SEQ ID NO: 1886979
guauaauuaggguaauagu

SEQ ID NO: 2439987 - RNA, 19 nt, Artificial Sequence
  Description of Artificial Sequence: Synthetic oligonucleotide
  Antisense strand to SEQ ID NO: 2439986
acuauuacccuaauuauac

SEQ ID NO: 2439988 - RNA, 19 nt, Artificial Sequence
  Description of Artificial Sequence: Synthetic oligonucleotide
  Sense strand starting at position 1759 of SEQ ID NO: 1886979
guagaugagugucucaaag

SEQ ID NO: 2439989 - RNA, 19 nt, Artificial Sequence
  Description of Artificial Sequence: Synthetic oligonucleotide
  Antisense strand to SEQ ID NO: 2439988
cuuugagacacucaucuac

SEQ ID NO: 2439990 - RNA, 19 nt, Artificial Sequence
  Description of Artificial Sequence: Synthetic oligonucleotide
  Sense strand starting at position 1904 of SEQ ID NO: 1886979
uugggcaauccuuaccaaa

SEQ ID NO: 2439991 - RNA, 19 nt, Artificial Sequence
  Description of Artificial Sequence: Synthetic oligonucleotide
  Antisense strand to SEQ ID NO: 2439990
uuugguaaggauugcccaa

SEQ ID NO: 2439992 - RNA, 19 nt, Artificial Sequence
  Description of Artificial Sequence: Synthetic oligonucleotide
  Sense strand starting at position 1906 of SEQ ID NO: 1886979
gggcaauccuuaccaaaua

SEQ ID NO: 2439993 - RNA, 19 nt, Artificial Sequence
  Description of Artificial Sequence: Synthetic oligonucleotide
  Antisense strand to SEQ ID NO: 2439992
uauuugguaaggauugccc

SEQ ID NO: 2439994 - RNA, 19 nt, Artificial Sequence
  Description of Artificial Sequence: Synthetic oligonucleotide
  Sense strand starting at position 1917 of SEQ ID NO: 1886979
accaaauaggcuggucaua

SEQ ID NO: 2439995 - RNA, 19 nt, Artificial Sequence
  Description of Artificial Sequence: Synthetic oligonucleotide
  Antisense strand to SEQ ID NO: 2439994
uaugaccagccuauuuggu

SEQ ID NO: 2439996 - RNA, 19 nt, Artificial Sequence
  Description of Artificial Sequence: Synthetic oligonucleotide
  Sense strand starting at position 1919 of SEQ ID NO: 1886979
caaauaggcuggucauaca

SEQ ID NO: 2439997 - RNA, 19 nt, Artificial Sequence
  Description of Artificial Sequence: Synthetic oligonucleotide
  Antisense strand to SEQ ID NO: 2439996
uguaugaccagccuauuug

SEQ ID NO: 2439998 - RNA, 19 nt, Artificial Sequence
  Description of Artificial Sequence: Synthetic oligonucleotide
  Sense strand starting at position 1988 of SEQ ID NO: 1886979
ugaaauggucccugcagaa

SEQ ID NO: 2439999 - RNA, 19 nt, Artificial Sequence
  Description of Artificial Sequence: Synthetic oligonucleotide
  Antisense strand to SEQ ID NO: 2439998
uucugcagggaccauuuca

SEQ ID NO: 2440000 - RNA, 19 nt, Artificial Sequence
  Description of Artificial Sequence: Synthetic oligonucleotide
  Sense strand starting at position 2120 of SEQ ID NO: 1886979
uuacuucuugagcggauuu

SEQ ID NO: 2440001 - RNA, 19 nt, Artificial Sequence
  Description of Artificial Sequence: Synthetic oligonucleotide
  Antisense strand to SEQ ID NO: 2440000
aaauccgcucaagaaguaa

SEQ ID NO: 2440002 - RNA, 19 nt, Artificial Sequence
  Description of Artificial Sequence: Synthetic oligonucleotide
  Sense strand starting at position 2149 of SEQ ID NO: 1886979
acuucuacaguguauaaau

SEQ ID NO: 2440003 - RNA, 19 nt, Artificial Sequence
  Description of Artificial Sequence: Synthetic oligonucleotide
  Antisense strand to SEQ ID NO: 2440002
auuuauacacuguagaagu

SEQ ID NO: 2440004 - RNA, 19 nt, Artificial Sequence
  Description of Artificial Sequence: Synthetic oligonucleotide
  Sense strand starting at position 2253 of SEQ ID NO: 1886979
caugaaucuguguaaagca

SEQ ID NO: 2440005 - RNA, 19 nt, Artificial Sequence
  Description of Artificial Sequence: Synthetic oligonucleotide
  Antisense strand to SEQ ID NO: 2440004
ugcuuuacacagauucaug

SEQ ID NO: 2440006 - RNA, 19 nt, Artificial Sequence
  Description of Artificial Sequence: Synthetic oligonucleotide
  Sense strand starting at position 2367 of SEQ ID NO: 1886979
ugaaguggugucuaacacu

SEQ ID NO: 2440007 - RNA, 19 nt, Artificial Sequence
  Description of Artificial Sequence: Synthetic oligonucleotide
  Antisense strand to SEQ ID NO: 2440006
aguguuagacaccacuuca

SEQ ID NO: 2440008 - RNA, 19 nt, Artificial Sequence
  Description of Artificial Sequence: Synthetic oligonucleotide
  Sense strand starting at position 2485 of SEQ ID NO: 1886979
gcugauuuauucucaagcu

SEQ ID NO: 2440009 - RNA, 19 nt, Artificial Sequence
  Description of Artificial Sequence: Synthetic oligonucleotide
  Antisense strand to SEQ ID NO: 2440008
agcuugagaauaaaucagc

SEQ ID NO: 2440010 - RNA, 19 nt, Artificial Sequence
  Description of Artificial Sequence: Synthetic oligonucleotide
  Sense strand starting at position 2569 of SEQ ID NO: 1886979
gccauagaugcugaauucu

SEQ ID NO: 2440011 - RNA, 19 nt, Artificial Sequence
  Description of Artificial Sequence: Synthetic oligonucleotide
  Antisense strand to SEQ ID NO: 2440010
agaauucagcaucuauggc

SEQ ID NO: 2440012 - RNA, 19 nt, Artificial Sequence
  Description of Artificial Sequence: Synthetic oligonucleotide
  Sense strand starting at position 2580 of SEQ ID NO: 1886979
ugaauucugcuacaguuau

SEQ ID NO: 2440013 - RNA, 19 nt, Artificial Sequence
  Description of Artificial Sequence: Synthetic oligonucleotide
  Antisense strand to SEQ ID NO: 2440012
auaacuguagcagaauuca

SEQ ID NO: 2440014 - RNA, 19 nt, Artificial Sequence
  Description of Artificial Sequence: Synthetic oligonucleotide
  Sense strand starting at position 2602 of SEQ ID NO: 1886979
uuuguagaaggaugaguaa

SEQ ID NO: 2440015 - RNA, 19 nt, Artificial Sequence
  Description of Artificial Sequence: Synthetic oligonucleotide
  Antisense strand to SEQ ID NO: 2440014
uuacucauccuucuacaaa

SEQ ID NO: 2440016 - RNA, 19 nt, Artificial Sequence
  Description of Artificial Sequence: Synthetic oligonucleotide
  Sense strand starting at position 2632 of SEQ ID NO: 1886979
acacgugaguguucauuua

SEQ ID NO: 2440017 - RNA, 19 nt, Artificial Sequence
  Description of Artificial Sequence: Synthetic oligonucleotide
  Antisense strand to SEQ ID NO: 2440016
uaaaugaacacucacgugu

SEQ ID NO: 2440018 - RNA, 19 nt, Artificial Sequence
  Description of Artificial Sequence: Synthetic oligonucleotide
  Sense strand starting at position 2655 of SEQ ID NO: 1886979
aguuacaagcuuuaugaaa

SEQ ID NO: 2440019 - RNA, 19 nt, Artificial Sequence
  Description of Artificial Sequence: Synthetic oligonucleotide
  Antisense strand to SEQ ID NO: 2440018
uuucauaaagcuuguaacu

SEQ ID NO: 2440020 - RNA, 19 nt, Artificial Sequence
  Description of Artificial Sequence: Synthetic oligonucleotide
  Sense strand starting at position 2723 of SEQ ID NO: 1886979
acagaagucgaucauauuc

SEQ ID NO: 2440021 - RNA, 19 nt, Artificial Sequence
  Description of Artificial Sequence: Synthetic oligonucleotide
  Antisense strand to SEQ ID NO: 2440020
gaauaugaucgacuucugu

SEQ ID NO: 2440022 - RNA, 19 nt, Artificial Sequence
  Description of Artificial Sequence: Synthetic oligonucleotide
  Sense strand starting at position 3164 of SEQ ID NO: 1886979
gggugagacguugaucacu

SEQ ID NO: 2440023 - RNA, 19 nt, Artificial Sequence
  Description of Artificial Sequence: Synthetic oligonucleotide
  Antisense strand to SEQ ID NO: 2440022
agugaucaacgucucaccc

SEQ ID NO: 2440024 - RNA, 19 nt, Artificial Sequence
  Description of Artificial Sequence: Synthetic oligonucleotide
  Sense strand starting at position 3241 of SEQ ID NO: 1886979
ugugucuuggcgccuuaua

SEQ ID NO: 2440025 - RNA, 19 nt, Artificial Sequence
  Description of Artificial Sequence: Synthetic oligonucleotide
  Antisense strand to SEQ ID NO: 2440024
uauaaggcgccaagacaca

SEQ ID NO: 2440026 - RNA, 19 nt, Artificial Sequence
  Description of Artificial Sequence: Synthetic oligonucleotide
  Sense strand starting at position 3242 of SEQ ID NO: 1886979
gugucuuggcgccuuauau

SEQ ID NO: 2440027 - RNA, 19 nt, Artificial Sequence
  Description of Artificial Sequence: Synthetic oligonucleotide
  Antisense strand to SEQ ID NO: 2440026
auauaaggcgccaagacac

SEQ ID NO: 2440028 - RNA, 19 nt, Artificial Sequence
  Description of Artificial Sequence: Synthetic oligonucleotide
  Sense strand starting at position 3243 of SEQ ID NO: 1886979
ugucuuggcgccuuauauc

SEQ ID NO: 2440029 - RNA, 19 nt, Artificial Sequence
  Description of Artificial Sequence: Synthetic oligonucleotide
  Antisense strand to SEQ ID NO: 2440028
gauauaaggcgccaagaca

SEQ ID NO: 2440030 - RNA, 19 nt, Artificial Sequence
  Description of Artificial Sequence: Synthetic oligonucleotide
  Sense strand starting at position 122 of SEQ ID NO: 1886980
ccuugaagcugagcaaaua

SEQ ID NO: 2440031 - RNA, 19 nt, Artificial Sequence
  Description of Artificial Sequence: Synthetic oligonucleotide
  Antisense strand to SEQ ID NO: 2440030
uauuugcucagcuucaagg

SEQ ID NO: 2440032 - RNA, 19 nt, Artificial Sequence
  Description of Artificial Sequence: Synthetic oligonucleotide
  Sense strand starting at position 222 of SEQ ID NO: 1886980
cuuuguacgcgucuaugaa

SEQ ID NO: 2440033 - RNA, 19 nt, Artificial Sequence
  Description of Artificial Sequence: Synthetic oligonucleotide
  Antisense strand to SEQ ID NO: 2440032
uucauagacgcguacaaag

SEQ ID NO: 2440034 - RNA, 19 nt, Artificial Sequence
  Description of Artificial Sequence: Synthetic oligonucleotide
  Sense strand starting at position 367 of SEQ ID NO: 1886980
agucgaagucaccaaguua

SEQ ID NO: 2440035 - RNA, 19 nt, Artificial Sequence
  Description of Artificial Sequence: Synthetic oligonucleotide
  Antisense strand to SEQ ID NO: 2440034
uaacuuggugacuucgacu

SEQ ID NO: 2440036 - RNA, 19 nt, Artificial Sequence
  Description of Artificial Sequence: Synthetic oligonucleotide
  Sense strand starting at position 470 of SEQ ID NO: 1886980
ucccaugauguacauucua

SEQ ID NO: 2440037 - RNA, 19 nt, Artificial Sequence
  Description of Artificial Sequence: Synthetic oligonucleotide
  Antisense strand to SEQ ID NO: 2440036
uagaauguacaucauggga

SEQ ID NO: 2440038 - RNA, 19 nt, Artificial Sequence
  Description of Artificial Sequence: Synthetic oligonucleotide
  Sense strand starting at position 555 of SEQ ID NO: 1886980
gaaagacuucuguguaaua

SEQ ID NO: 2440039 - RNA, 19 nt, Artificial Sequence
  Description of Artificial Sequence: Synthetic oligonucleotide
  Antisense strand to SEQ ID NO: 2440038
uauuacacagaagucuuuc

SEQ ID NO: 2440040 - RNA, 19 nt, Artificial Sequence
  Description of Artificial Sequence: Synthetic oligonucleotide
  Sense strand starting at position 564 of SEQ ID NO: 1886980
cuguguaauaauuggaaga

SEQ ID NO: 2440041 - RNA, 19 nt, Artificial Sequence
  Description of Artificial Sequence: Synthetic oligonucleotide
  Antisense strand to SEQ ID NO: 2440040
ucuuccaauuauuacacag

SEQ ID NO: 2440042 - RNA, 19 nt, Artificial Sequence
  Description of Artificial Sequence: Synthetic oligonucleotide
  Sense strand starting at position 565 of SEQ ID NO: 1886980
uguguaauaauuggaagau

SEQ ID NO: 2440043 - RNA, 19 nt, Artificial Sequence
  Description of Artificial Sequence: Synthetic oligonucleotide
  Antisense strand to SEQ ID NO: 2440042
aucuuccaauuauuacaca

SEQ ID NO: 2440044 - RNA, 19 nt, Artificial Sequence
  Description of Artificial Sequence: Synthetic oligonucleotide
  Sense strand starting at position 690 of SEQ ID NO: 1886980
auguauuguguagauauag

SEQ ID NO: 2440045 - RNA, 19 nt, Artificial Sequence
  Description of Artificial Sequence: Synthetic oligonucleotide
  Antisense strand to SEQ ID NO: 2440044
cuauaucuacacaauacau

SEQ ID NO: 2440046 - RNA, 19 nt, Artificial Sequence
  Description of Artificial Sequence: Synthetic oligonucleotide
  Sense strand starting at position 696 of SEQ ID NO: 1886980
uguguagauauaggagaau

SEQ ID NO: 2440047 - RNA, 19 nt, Artificial Sequence
  Description of Artificial Sequence: Synthetic oligonucleotide
  Antisense strand to SEQ ID NO: 2440046
auucuccuauaucuacaca

SEQ ID NO: 2440048 - RNA, 19 nt, Artificial Sequence
  Description of Artificial Sequence: Synthetic oligonucleotide
  Sense strand starting at position 714 of SEQ ID NO: 1886980
ucuaguguuauagaaggua

SEQ ID NO: 2440049 - RNA, 19 nt, Artificial Sequence
  Description of Artificial Sequence: Synthetic oligonucleotide
  Antisense strand to SEQ ID NO: 2440048
uaccuucuauaacacuaga

SEQ ID NO: 2440050 - RNA, 19 nt, Artificial Sequence
  Description of Artificial Sequence: Synthetic oligonucleotide
  Sense strand starting at position 717 of SEQ ID NO: 1886980
aguguuauagaagguauac

SEQ ID NO: 2440051 - RNA, 19 nt, Artificial Sequence
  Description of Artificial Sequence: Synthetic oligonucleotide
  Antisense strand to SEQ ID NO: 2440050
guauaccuucuauaacacu

SEQ ID NO: 2440052 - RNA, 19 nt, Artificial Sequence
  Description of Artificial Sequence: Synthetic oligonucleotide
  Sense strand starting at position 811 of SEQ ID NO: 1886980
ucggaaugccuagaacuaa

SEQ ID NO: 2440053 - RNA, 19 nt, Artificial Sequence
  Description of Artificial Sequence: Synthetic oligonucleotide
  Antisense strand to SEQ ID NO: 2440052
uuaguucuaggcauuccga

SEQ ID NO: 2440054 - RNA, 19 nt, Artificial Sequence
  Description of Artificial Sequence: Synthetic oligonucleotide
  Sense strand starting at position 917 of SEQ ID NO: 1886980
gugggcauuucugugcaaa

SEQ ID NO: 2440055 - RNA, 19 nt, Artificial Sequence
  Description of Artificial Sequence: Synthetic oligonucleotide
  Antisense strand to SEQ ID NO: 2440054
uuugcacagaaaugcccac

SEQ ID NO: 2440056 - RNA, 19 nt, Artificial Sequence
  Description of Artificial Sequence: Synthetic oligonucleotide
  Sense strand starting at position 918 of SEQ ID NO: 1886980
ugggcauuucugugcaaau

SEQ ID NO: 2440057 - RNA, 19 nt, Artificial Sequence
  Description of Artificial Sequence: Synthetic oligonucleotide
  Antisense strand to SEQ ID NO: 2440056
auuugcacagaaaugccca

SEQ ID NO: 2440058 - RNA, 19 nt, Artificial Sequence
  Description of Artificial Sequence: Synthetic oligonucleotide
  Sense strand starting at position 919 of SEQ ID NO: 1886980
gggcauuucugugcaaaua

SEQ ID NO: 2440059 - RNA, 19 nt, Artificial Sequence
  Description of Artificial Sequence: Synthetic oligonucleotide
  Antisense strand to SEQ ID NO: 2440058
uauuugcacagaaaugccc

SEQ ID NO: 2440060 - RNA, 19 nt, Artificial Sequence
  Description of Artificial Sequence: Synthetic oligonucleotide
  Sense strand starting at position 1004 of SEQ ID NO: 1886980
ggucuauuacuugauuaua

SEQ ID NO: 2440061 - RNA, 19 nt, Artificial Sequence
  Description of Artificial Sequence: Synthetic oligonucleotide
  Antisense strand to SEQ ID NO: 2440060
uauaaucaaguaauagacc

SEQ ID NO: 2440062 - RNA, 19 nt, Artificial Sequence
  Description of Artificial Sequence: Synthetic oligonucleotide
  Sense strand starting at position 1023 of SEQ ID NO: 1886980
cccaguaaugauuauugua

SEQ ID NO: 2440063 - RNA, 19 nt, Artificial Sequence
  Description of Artificial Sequence: Synthetic oligonucleotide
  Antisense strand to SEQ ID NO: 2440062
uacaauaaucauuacuggg

SEQ ID NO: 2440064 - RNA, 19 nt, Artificial Sequence
  Description of Artificial Sequence: Synthetic oligonucleotide
  Sense strand starting at position 1031 of SEQ ID NO: 1886980
ugauuauuguaauccagga

SEQ ID NO: 2440065 - RNA, 19 nt, Artificial Sequence
  Description of Artificial Sequence: Synthetic oligonucleotide
  Antisense strand to SEQ ID NO: 2440064
uccuggauuacaauaauca

SEQ ID NO: 2440066 - RNA, 19 nt, Artificial Sequence
  Description of Artificial Sequence: Synthetic oligonucleotide
  Sense strand starting at position 1438 of SEQ ID NO: 1886980
ugcccuuugggagaagagu

SEQ ID NO: 2440067 - RNA, 19 nt, Artificial Sequence
  Description of Artificial Sequence: Synthetic oligonucleotide
  Antisense strand to SEQ ID NO: 2440066
acucuucucccaaagggca

SEQ ID NO: 2440068 - RNA, 19 nt, Artificial Sequence
  Description of Artificial Sequence: Synthetic oligonucleotide
  Sense strand starting at position 1528 of SEQ ID NO: 1886980
auacaauuccuuuguagag

SEQ ID NO: 2440069 - RNA, 19 nt, Artificial Sequence
  Description of Artificial Sequence: Synthetic oligonucleotide
  Antisense strand to SEQ ID NO: 2440068
cucuacaaaggaauuguau

SEQ ID NO: 2440070 - RNA, 19 nt, Artificial Sequence
  Description of Artificial Sequence: Synthetic oligonucleotide
  Sense strand starting at position 1581 of SEQ ID NO: 1886980
uagacucugcugggagauu

SEQ ID NO: 2440071 - RNA, 19 nt, Artificial Sequence
  Description of Artificial Sequence: Synthetic oligonucleotide
  Antisense strand to SEQ ID NO: 2440070
aaucucccagcagagucua

SEQ ID NO: 2440072 - RNA, 19 nt, Artificial Sequence
  Description of Artificial Sequence: Synthetic oligonucleotide
  Sense strand starting at position 1777 of SEQ ID NO: 1886980
gaguaaguccaagagucuc

SEQ ID NO: 2440073 - RNA, 19 nt, Artificial Sequence
  Description of Artificial Sequence: Synthetic oligonucleotide
  Antisense strand to SEQ ID NO: 2440072
gagacucuuggacuuacuc

SEQ ID NO: 2440074 - RNA, 19 nt, Artificial Sequence
  Description of Artificial Sequence: Synthetic oligonucleotide
  Sense strand starting at position 1837 of SEQ ID NO: 1886980
gguuuagcugaccaagauc

SEQ ID NO: 2440075 - RNA, 19 nt, Artificial Sequence
  Description of Artificial Sequence: Synthetic oligonucleotide
  Antisense strand to SEQ ID NO: 2440074
gaucuuggucagcuaaacc

SEQ ID NO: 2440076 - RNA, 19 nt, Artificial Sequence
  Description of Artificial Sequence: Synthetic oligonucleotide
  Sense strand starting at position 1980 of SEQ ID NO: 1886980
ugcuccagacauugaauga

SEQ ID NO: 2440077 - RNA, 19 nt, Artificial Sequence
  Description of Artificial Sequence: Synthetic oligonucleotide
  Antisense strand to SEQ ID NO: 2440076
ucauucaaugucuggagca

SEQ ID NO: 2440078 - RNA, 19 nt, Artificial Sequence
  Description of Artificial Sequence: Synthetic oligonucleotide
  Sense strand starting at position 2128 of SEQ ID NO: 1886980
agaugacuauuaguagcaa

SEQ ID NO: 2440079 - RNA, 19 nt, Artificial Sequence
  Description of Artificial Sequence: Synthetic oligonucleotide
  Antisense strand to SEQ ID NO: 2440078
uugcuacuaauagucaucu

SEQ ID NO: 2440080 - RNA, 19 nt, Artificial Sequence
  Description of Artificial Sequence: Synthetic oligonucleotide
  Sense strand starting at position 2182 of SEQ ID NO: 1886980
agcaaauguggccaaacaa

SEQ ID NO: 2440081 - RNA, 19 nt, Artificial Sequence
  Description of Artificial Sequence: Synthetic oligonucleotide
  Antisense strand to SEQ ID NO: 2440080
uuguuuggccacauuugcu

SEQ ID NO: 2440082 - RNA, 19 nt, Artificial Sequence
  Description of Artificial Sequence: Synthetic oligonucleotide
  Sense strand starting at position 2317 of SEQ ID NO: 1886980
cuccaaauaucuccggaga

SEQ ID NO: 2440083 - RNA, 19 nt, Artificial Sequence
  Description of Artificial Sequence: Synthetic oligonucleotide
  Antisense strand to SEQ ID NO: 2440082
ucuccggagauauuuggag

SEQ ID NO: 2440084 - RNA, 19 nt, Artificial Sequence
  Description of Artificial Sequence: Synthetic oligonucleotide
  Sense strand starting at position 2318 of SEQ ID NO: 1886980
uccaaauaucuccggagaa

SEQ ID NO: 2440085 - RNA, 19 nt, Artificial Sequence
  Description of Artificial Sequence: Synthetic oligonucleotide
  Antisense strand to SEQ ID NO: 2440084
uucuccggagauauuugga

SEQ ID NO: 2440086 - RNA, 19 nt, Artificial Sequence
  Description of Artificial Sequence: Synthetic oligonucleotide
  Sense strand starting at position 2565 of SEQ ID NO: 1886980
aaccaaauguaccugggau

SEQ ID NO: 2440087 - RNA, 19 nt, Artificial Sequence
  Description of Artificial Sequence: Synthetic oligonucleotide
  Antisense strand to SEQ ID NO: 2440086
aucccagguacauuugguu

SEQ ID NO: 2440088 - RNA, 19 nt, Artificial Sequence
  Description of Artificial Sequence: Synthetic oligonucleotide
  Sense strand starting at position 2597 of SEQ ID NO: 1886980
accuaauaccugggcagaa

SEQ ID NO: 2440089 - RNA, 19 nt, Artificial Sequence
  Description of Artificial Sequence: Synthetic oligonucleotide
  Antisense strand to SEQ ID NO: 2440088
uucugcccagguauuaggu

SEQ ID NO: 2440090 - RNA, 19 nt, Artificial Sequence
  Description of Artificial Sequence: Synthetic oligonucleotide
  Sense strand starting at position 2598 of SEQ ID NO: 1886980
ccuaauaccugggcagaaa

SEQ ID NO: 2440091 - RNA, 19 nt, Artificial Sequence
  Description of Artificial Sequence: Synthetic oligonucleotide
  Antisense strand to SEQ ID NO: 2440090
uuucugcccagguauuagg

SEQ ID NO: 2440092 - RNA, 19 nt, Artificial Sequence
  Description of Artificial Sequence: Synthetic oligonucleotide
  Sense strand starting at position 2791 of SEQ ID NO: 1886980
augaacaaucucuguuaag

SEQ ID NO: 2440093 - RNA, 19 nt, Artificial Sequence
  Description of Artificial Sequence: Synthetic oligonucleotide
  Antisense strand to SEQ ID NO: 2440092
cuuaacagagauuguucau

SEQ ID NO: 2440094 - RNA, 19 nt, Artificial Sequence
  Description of Artificial Sequence: Synthetic oligonucleotide
  Sense strand starting at position 2876 of SEQ ID NO: 1886980
ggugcauccgugucuggau

SEQ ID NO: 2440095 - RNA, 19 nt, Artificial Sequence
  Description of Artificial Sequence: Synthetic oligonucleotide
  Antisense strand to SEQ ID NO: 2440094
auccagacacggaugcacc

SEQ ID NO: 2440096 - RNA, 19 nt, Artificial Sequence
  Description of Artificial Sequence: Synthetic oligonucleotide
  Sense strand starting at position 3124 of SEQ ID NO: 1886980
caguucugacagugaagga

SEQ ID NO: 2440097 - RNA, 19 nt, Artificial Sequence
  Description of Artificial Sequence: Synthetic oligonucleotide
  Antisense strand to SEQ ID NO: 2440096
uccuucacugucagaacug

SEQ ID NO: 2440098 - RNA, 19 nt, Artificial Sequence
  Description of Artificial Sequence: Synthetic oligonucleotide
  Sense strand starting at position 3143 of SEQ ID NO: 1886980
aaaggaauuccugggucca

SEQ ID NO: 2440099 - RNA, 19 nt, Artificial Sequence
  Description of Artificial Sequence: Synthetic oligonucleotide
  Antisense strand to SEQ ID NO: 2440098
uggacccaggaauuccuuu

SEQ ID NO: 2440100 - RNA, 19 nt, Artificial Sequence
  Description of Artificial Sequence: Synthetic oligonucleotide
  Sense strand starting at position 3144 of SEQ ID NO: 1886980
aaggaauuccuggguccau

SEQ ID NO: 2440101 - RNA, 19 nt, Artificial Sequence
  Description of Artificial Sequence: Synthetic oligonucleotide
  Antisense strand to SEQ ID NO: 2440100
auggacccaggaauuccuu

SEQ ID NO: 2440102 - RNA, 19 nt, Artificial Sequence
  Description of Artificial Sequence: Synthetic oligonucleotide
  Sense strand starting at position 3145 of SEQ ID NO: 1886980
aggaauuccuggguccaua

SEQ ID NO: 2440103 - RNA, 19 nt, Artificial Sequence
  Description of Artificial Sequence: Synthetic oligonucleotide
  Antisense strand to SEQ ID NO: 2440102
uauggacccaggaauuccu

SEQ ID NO: 2440104 - RNA, 19 nt, Artificial Sequence
  Description of Artificial Sequence: Synthetic oligonucleotide
  Sense strand starting at position 3687 of SEQ ID NO: 1886980
ggaacaagugugcaccuua

SEQ ID NO: 2440105 - RNA, 19 nt, Artificial Sequence
  Description of Artificial Sequence: Synthetic oligonucleotide
  Antisense strand to SEQ ID NO: 2440104
uaaggugcacacuuguucc

SEQ ID NO: 2440106 - RNA, 19 nt, Artificial Sequence
  Description of Artificial Sequence: Synthetic oligonucleotide
  Sense strand starting at position 3819 of SEQ ID NO: 1886980
gggacuaugucacugaauc

SEQ ID NO: 2440107 - RNA, 19 nt, Artificial Sequence
  Description of Artificial Sequence: Synthetic oligonucleotide
  Antisense strand to SEQ ID NO: 2440106
gauucagugacauaguccc

SEQ ID NO: 2440108 - RNA, 19 nt, Artificial Sequence
  Description of Artificial Sequence: Synthetic oligonucleotide
  Sense strand starting at position 3960 of SEQ ID NO: 1886980
aggagccaauuauuaaauu

SEQ ID NO: 2440109 - RNA, 19 nt, Artificial Sequence
  Description of Artificial Sequence: Synthetic oligonucleotide
  Antisense strand to SEQ ID NO: 2440108
aauuuaauaauuggcuccu

SEQ ID NO: 2440110 - RNA, 19 nt, Artificial Sequence
  Description of Artificial Sequence: Synthetic oligonucleotide
  Sense strand starting at position 635 of SEQ ID NO: 1886981
gccauccaucacgauuaaa

SEQ ID NO: 2440111 - RNA, 19 nt, Artificial Sequence
  Description of Artificial Sequence: Synthetic oligonucleotide
  Antisense strand to SEQ ID NO: 2440110
uuuaaucgugauggauggc

SEQ ID NO: 2440112 - RNA, 19 nt, Artificial Sequence
  Description of Artificial Sequence: Synthetic oligonucleotide
  Sense strand starting at position 740 of SEQ ID NO: 1886981
auguauuucugagaccuag

SEQ ID NO: 2440113 - RNA, 19 nt, Artificial Sequence
  Description of Artificial Sequence: Synthetic oligonucleotide
  Antisense strand to SEQ ID NO: 2440112
cuaggucucagaaauacau

SEQ ID NO: 2440114 - RNA, 19 nt, Artificial Sequence
  Description of Artificial Sequence: Synthetic oligonucleotide
  Sense strand starting at position 764 of SEQ ID NO: 1886981
uaguguuuggaagauagua

SEQ ID NO: 2440115 - RNA, 19 nt, Artificial Sequence
  Description of Artificial Sequence: Synthetic oligonucleotide
  Antisense strand to SEQ ID NO: 2440114
uacuaucuuccaaacacua

SEQ ID NO: 2440116 - RNA, 19 nt, Artificial Sequence
  Description of Artificial Sequence: Synthetic oligonucleotide
  Sense strand starting at position 777 of SEQ ID NO: 1886981
auaguaggaguguggcaua

SEQ ID NO: 2440117 - RNA, 19 nt, Artificial Sequence
  Description of Artificial Sequence: Synthetic oligonucleotide
  Antisense strand to SEQ ID NO: 2440116
uaugccacacuccuacuau

SEQ ID NO: 2440118 - RNA, 19 nt, Artificial Sequence
  Description of Artificial Sequence: Synthetic oligonucleotide
  Sense strand starting at position 789 of SEQ ID NO: 1886981
uggcauauguggguuugaa

SEQ ID NO: 2440119 - RNA, 19 nt, Artificial Sequence
  Description of Artificial Sequence: Synthetic oligonucleotide
  Antisense strand to SEQ ID NO: 2440118
uucaaacccacauaugcca

SEQ ID NO: 2440120 - RNA, 19 nt, Artificial Sequence
  Description of Artificial Sequence: Synthetic oligonucleotide
  Sense strand starting at position 1083 of SEQ ID NO: 1886981
uuacuuccaguauaaguau

SEQ ID NO: 2440121 - RNA, 19 nt, Artificial Sequence
  Description of Artificial Sequence: Synthetic oligonucleotide
  Antisense strand to SEQ ID NO: 2440120
auacuuauacuggaaguaa

SEQ ID NO: 2440122 - RNA, 19 nt, Artificial Sequence
  Description of Artificial Sequence: Synthetic oligonucleotide
  Sense strand starting at position 1086 of SEQ ID NO: 1886981
cuuccaguauaaguauuau

SEQ ID NO: 2440123 - RNA, 19 nt, Artificial Sequence
  Description of Artificial Sequence: Synthetic oligonucleotide
  Antisense strand to SEQ ID NO: 2440122
auaauacuuauacuggaag

SEQ ID NO: 2440124 - RNA, 19 nt, Artificial Sequence
  Description of Artificial Sequence: Synthetic oligonucleotide
  Sense strand starting at position 1349 of SEQ ID NO: 1886981
cuggcaggcucagugauuu

SEQ ID NO: 2440125 - RNA, 19 nt, Artificial Sequence
  Description of Artificial Sequence: Synthetic oligonucleotide
  Antisense strand to SEQ ID NO: 2440124
aaaucacugagccugccag

SEQ ID NO: 2440126 - RNA, 19 nt, Artificial Sequence
  Description of Artificial Sequence: Synthetic oligonucleotide
  Sense strand starting at position 1355 of SEQ ID NO: 1886981
ggcucagugauuuguacug

SEQ ID NO: 2440127 - RNA, 19 nt, Artificial Sequence
  Description of Artificial Sequence: Synthetic oligonucleotide
  Antisense strand to SEQ ID NO: 2440126
caguacaaaucacugagcc

SEQ ID NO: 2440128 - RNA, 19 nt, Artificial Sequence
  Description of Artificial Sequence: Synthetic oligonucleotide
  Sense strand starting at position 1360 of SEQ ID NO: 1886981
agugauuuguacugaggag

SEQ ID NO: 2440129 - RNA, 19 nt, Artificial Sequence
  Description of Artificial Sequence: Synthetic oligonucleotide
  Antisense strand to SEQ ID NO: 2440128
cuccucaguacaaaucacu

SEQ ID NO: 2440130 - RNA, 19 nt, Artificial Sequence
  Description of Artificial Sequence: Synthetic oligonucleotide
  Sense strand starting at position 1402 of SEQ ID NO: 1886981
gguugacuuucucuuguca

SEQ ID NO: 2440131 - RNA, 19 nt, Artificial Sequence
  Description of Artificial Sequence: Synthetic oligonucleotide
  Antisense strand to SEQ ID NO: 2440130
ugacaagagaaagucaacc

SEQ ID NO: 2440132 - RNA, 19 nt, Artificial Sequence
  Description of Artificial Sequence: Synthetic oligonucleotide
  Sense strand starting at position 1425 of SEQ ID NO: 1886981
ucagcuguggcuugagaag

SEQ ID NO: 2440133 - RNA, 19 nt, Artificial Sequence
  Description of Artificial Sequence: Synthetic oligonucleotide
  Antisense strand to SEQ ID NO: 2440132
cuucucaagccacagcuga

SEQ ID NO: 2440134 - RNA, 19 nt, Artificial Sequence
  Description of Artificial Sequence: Synthetic oligonucleotide
  Sense strand starting at position 1431 of SEQ ID NO: 1886981
guggcuugagaagaugagu

SEQ ID NO: 2440135 - RNA, 19 nt, Artificial Sequence
  Description of Artificial Sequence: Synthetic oligonucleotide
  Antisense strand to SEQ ID NO: 2440134
acucaucuucucaagccac

SEQ ID NO: 2440136 - RNA, 19 nt, Artificial Sequence
  Description of Artificial Sequence: Synthetic oligonucleotide
  Sense strand starting at position 1442 of SEQ ID NO: 1886981
agaugagucagguggcagu

SEQ ID NO: 2440137 - RNA, 19 nt, Artificial Sequence
  Description of Artificial Sequence: Synthetic oligonucleotide
  Antisense strand to SEQ ID NO: 2440136
acugccaccugacucaucu

SEQ ID NO: 2440138 - RNA, 19 nt, Artificial Sequence
  Description of Artificial Sequence: Synthetic oligonucleotide
  Sense strand starting at position 1524 of SEQ ID NO: 1886981
gggauaaugucagugggaa

SEQ ID NO: 2440139 - RNA, 19 nt, Artificial Sequence
  Description of Artificial Sequence: Synthetic oligonucleotide
  Antisense strand to SEQ ID NO: 2440138
uucccacugacauuauccc

SEQ ID NO: 2440140 - RNA, 19 nt, Artificial Sequence
  Description of Artificial Sequence: Synthetic oligonucleotide
  Sense strand starting at position 1525 of SEQ ID NO: 1886981
ggauaaugucagugggaaa

SEQ ID NO: 2440141 - RNA, 19 nt, Artificial Sequence
  Description of Artificial Sequence: Synthetic oligonucleotide
  Antisense strand to SEQ ID NO: 2440140
uuucccacugacauuaucc

SEQ ID NO: 2440142 - RNA, 19 nt, Artificial Sequence
  Description of Artificial Sequence: Synthetic oligonucleotide
  Sense strand starting at position 1526 of SEQ ID NO: 1886981
gauaaugucagugggaaag

SEQ ID NO: 2440143 - RNA, 19 nt, Artificial Sequence
  Description of Artificial Sequence: Synthetic oligonucleotide
  Antisense strand to SEQ ID NO: 2440142
cuuucccacugacauuauc

SEQ ID NO: 2440144 - RNA, 19 nt, Artificial Sequence
  Description of Artificial Sequence: Synthetic oligonucleotide
  Sense strand starting at position 1587 of SEQ ID NO: 1886981
agcaguuaaacaugaggaa

SEQ ID NO: 2440145 - RNA, 19 nt, Artificial Sequence
  Description of Artificial Sequence: Synthetic oligonucleotide
  Antisense strand to SEQ ID NO: 2440144
uuccucauguuuaacugcu

SEQ ID NO: 2440146 - RNA, 19 nt, Artificial Sequence
  Description of Artificial Sequence: Synthetic oligonucleotide
  Sense strand starting at position 1976 of SEQ ID NO: 1886981
gcugaagucagguagaaga

SEQ ID NO: 2440147 - RNA, 19 nt, Artificial Sequence
  Description of Artificial Sequence: Synthetic oligonucleotide
  Antisense strand to SEQ ID NO: 2440146
ucuucuaccugacuucagc

SEQ ID NO: 2440148 - RNA, 19 nt, Artificial Sequence
  Description of Artificial Sequence: Synthetic oligonucleotide
  Sense strand starting at position 1992 of SEQ ID NO: 1886981
agaugugucgcagauugag

SEQ ID NO: 2440149 - RNA, 19 nt, Artificial Sequence
  Description of Artificial Sequence: Synthetic oligonucleotide
  Antisense strand to SEQ ID NO: 2440148
cucaaucugcgacacaucu

SEQ ID NO: 2440150 - RNA, 19 nt, Artificial Sequence
  Description of Artificial Sequence: Synthetic oligonucleotide
  Sense strand starting at position 2082 of SEQ ID NO: 1886981
ugaaauacaucagaaauag

SEQ ID NO: 2440151 - RNA, 19 nt, Artificial Sequence
  Description of Artificial Sequence: Synthetic oligonucleotide
  Antisense strand to SEQ ID NO: 2440150
cuauuucugauguauuuca

SEQ ID NO: 2440152 - RNA, 19 nt, Artificial Sequence
  Description of Artificial Sequence: Synthetic oligonucleotide
  Sense strand starting at position 2141 of SEQ ID NO: 1886981
gagucaggucuugguuucu

SEQ ID NO: 2440153 - RNA, 19 nt, Artificial Sequence
  Description of Artificial Sequence: Synthetic oligonucleotide
  Antisense strand to SEQ ID NO: 2440152
agaaaccaagaccugacuc

SEQ ID NO: 2440154 - RNA, 19 nt, Artificial Sequence
  Description of Artificial Sequence: Synthetic oligonucleotide
  Sense strand starting at position 2199 of SEQ ID NO: 1886981
ugcaauucccuuugguuga

SEQ ID NO: 2440155 - RNA, 19 nt, Artificial Sequence
  Description of Artificial Sequence: Synthetic oligonucleotide
  Antisense strand to SEQ ID NO: 2440154
ucaaccaaagggaauugca

SEQ ID NO: 2440156 - RNA, 19 nt, Artificial Sequence
  Description of Artificial Sequence: Synthetic oligonucleotide
  Sense strand starting at position 2204 of SEQ ID NO: 1886981
uucccuuugguugacaaga

SEQ ID NO: 2440157 - RNA, 19 nt, Artificial Sequence
  Description of Artificial Sequence: Synthetic oligonucleotide
  Antisense strand to SEQ ID NO: 2440156
ucuugucaaccaaagggaa

SEQ ID NO: 2440158 - RNA, 19 nt, Artificial Sequence
  Description of Artificial Sequence: Synthetic oligonucleotide
  Sense strand starting at position 2386 of SEQ ID NO: 1886981
cucccaucucuagggaaua

SEQ ID NO: 2440159 - RNA, 19 nt, Artificial Sequence
  Description of Artificial Sequence: Synthetic oligonucleotide
  Antisense strand to SEQ ID NO: 2440158
uauucccuagagaugggag

SEQ ID NO: 2440160 - RNA, 19 nt, Artificial Sequence
  Description of Artificial Sequence: Synthetic oligonucleotide
  Sense strand starting at position 2652 of SEQ ID NO: 1886981
guccuccucuugucagaua

SEQ ID NO: 2440161 - RNA, 19 nt, Artificial Sequence
  Description of Artificial Sequence: Synthetic oligonucleotide
  Antisense strand to SEQ ID NO: 2440160
uaucugacaagaggaggac

SEQ ID NO: 2440162 - RNA, 19 nt, Artificial Sequence
  Description of Artificial Sequence: Synthetic oligonucleotide
  Sense strand starting at position 2663 of SEQ ID NO: 1886981
gucagauacucaccaaggu

SEQ ID NO: 2440163 - RNA, 19 nt, Artificial Sequence
  Description of Artificial Sequence: Synthetic oligonucleotide
  Antisense strand to SEQ ID NO: 2440162
accuuggugaguaucugac

SEQ ID NO: 2440164 - RNA, 19 nt, Artificial Sequence
  Description of Artificial Sequence: Synthetic oligonucleotide
  Sense strand starting at position 2964 of SEQ ID NO: 1886981
gaaggaagauuccuccagu

SEQ ID NO: 2440165 - RNA, 19 nt, Artificial Sequence
  Description of Artificial Sequence: Synthetic oligonucleotide
  Antisense strand to SEQ ID NO: 2440164
acuggaggaaucuuccuuc

SEQ ID NO: 2440166 - RNA, 19 nt, Artificial Sequence
  Description of Artificial Sequence: Synthetic oligonucleotide
  Sense strand starting at position 2965 of SEQ ID NO: 1886981
aaggaagauuccuccaguu

SEQ ID NO: 2440167 - RNA, 19 nt, Artificial Sequence
  Description of Artificial Sequence: Synthetic oligonucleotide
  Antisense strand to SEQ ID NO: 2440166
aacuggaggaaucuuccuu

SEQ ID NO: 2440168 - RNA, 19 nt, Artificial Sequence
  Description of Artificial Sequence: Synthetic oligonucleotide
  Sense strand starting at position 3003 of SEQ ID NO: 1886981
ccaguuucucgugccaagu

SEQ ID NO: 2440169 - RNA, 19 nt, Artificial Sequence
  Description of Artificial Sequence: Synthetic oligonucleotide
  Antisense strand to SEQ ID NO: 2440168
acuuggcacgagaaacugg

SEQ ID NO: 2440170 - RNA, 19 nt, Artificial Sequence
  Description of Artificial Sequence: Synthetic oligonucleotide
  Sense strand starting at position 3004 of SEQ ID NO: 1886981
caguuucucgugccaaguu

SEQ ID NO: 2440171 - RNA, 19 nt, Artificial Sequence
  Description of Artificial Sequence: Synthetic oligonucleotide
  Antisense strand to SEQ ID NO: 2440170
aacuuggcacgagaaacug

SEQ ID NO: 2440172 - RNA, 19 nt, Artificial Sequence
  Description of Artificial Sequence: Synthetic oligonucleotide
  Sense strand starting at position 3047 of SEQ ID NO: 1886981
ccaccuguguugguauuaa

SEQ ID NO: 2440173 - RNA, 19 nt, Artificial Sequence
  Description of Artificial Sequence: Synthetic oligonucleotide
  Antisense strand to SEQ ID NO: 2440172
uuaauaccaacacaggugg

SEQ ID NO: 2440174 - RNA, 19 nt, Artificial Sequence
  Description of Artificial Sequence: Synthetic oligonucleotide
  Sense strand starting at position 3059 of SEQ ID NO: 1886981
guauuaagauuguuguggu

SEQ ID NO: 2440175 - RNA, 19 nt, Artificial Sequence
  Description of Artificial Sequence: Synthetic oligonucleotide
  Antisense strand to SEQ ID NO: 2440174
accacaacaaucuuaauac

SEQ ID NO: 2440176 - RNA, 19 nt, Artificial Sequence
  Description of Artificial Sequence: Synthetic oligonucleotide
  Sense strand starting at position 3695 of SEQ ID NO: 1886981
uuaagucuugcacaaaguu

SEQ ID NO: 2440177 - RNA, 19 nt, Artificial Sequence
  Description of Artificial Sequence: Synthetic oligonucleotide
  Antisense strand to SEQ ID NO: 2440176
aacuuugugcaagacuuaa

SEQ ID NO: 2440178 - RNA, 19 nt, Artificial Sequence
  Description of Artificial Sequence: Synthetic oligonucleotide
  Sense strand starting at position 3719 of SEQ ID NO: 1886981
cucgauuagcuacaacuaa

SEQ ID NO: 2440179 - RNA, 19 nt, Artificial Sequence
  Description of Artificial Sequence: Synthetic oligonucleotide
  Antisense strand to SEQ ID NO: 2440178
uuaguuguagcuaaucgag

SEQ ID NO: 2440180 - RNA, 19 nt, Artificial Sequence
  Description of Artificial Sequence: Synthetic oligonucleotide
  Sense strand starting at position 3773 of SEQ ID NO: 1886981
cuaaguacuccacguggau

SEQ ID NO: 2440181 - RNA, 19 nt, Artificial Sequence
  Description of Artificial Sequence: Synthetic oligonucleotide
  Antisense strand to SEQ ID NO: 2440180
auccacguggaguacuuag

SEQ ID NO: 2440182 - RNA, 19 nt, Artificial Sequence
  Description of Artificial Sequence: Synthetic oligonucleotide
  Sense strand starting at position 3798 of SEQ ID NO: 1886981
gguagaucccgucacuauc

SEQ ID NO: 2440183 - RNA, 19 nt, Artificial Sequence
  Description of Artificial Sequence: Synthetic oligonucleotide
  Antisense strand to SEQ ID NO: 2440182
gauagugacgggaucuacc

SEQ ID NO: 2440184 - RNA, 19 nt, Artificial Sequence
  Description of Artificial Sequence: Synthetic oligonucleotide
  Sense strand starting at position 3812 of SEQ ID NO: 1886981
cuaucucuguugucuagaa

SEQ ID NO: 2440185 - RNA, 19 nt, Artificial Sequence
  Description of Artificial Sequence: Synthetic oligonucleotide
  Antisense strand to SEQ ID NO: 2440184
uucuagacaacagagauag

SEQ ID NO: 2440186 - RNA, 19 nt, Artificial Sequence
  Description of Artificial Sequence: Synthetic oligonucleotide
  Sense strand starting at position 3814 of SEQ ID NO: 1886981
aucucuguugucuagaaga

SEQ ID NO: 2440187 - RNA, 19 nt, Artificial Sequence
  Description of Artificial Sequence: Synthetic oligonucleotide
  Antisense strand to SEQ ID NO: 2440186
ucuucuagacaacagagau

SEQ ID NO: 2440188 - RNA, 19 nt, Artificial Sequence
  Description of Artificial Sequence: Synthetic oligonucleotide
  Sense strand starting at position 3906 of SEQ ID NO: 1886981
cguguuuccaguguacuua

SEQ ID NO: 2440189 - RNA, 19 nt, Artificial Sequence
  Description of Artificial Sequence: Synthetic oligonucleotide
  Antisense strand to SEQ ID NO: 2440188
uaaguacacuggaaacacg

SEQ ID NO: 2440190 - RNA, 19 nt, Artificial Sequence
  Description of Artificial Sequence: Synthetic oligonucleotide
  Sense strand starting at position 18 of SEQ ID NO: 1886983
cuguuagcauggcuauuaa

SEQ ID NO: 2440191 - RNA, 19 nt, Artificial Sequence
  Description of Artificial Sequence: Synthetic oligonucleotide
  Antisense strand to SEQ ID NO: 2440190
uuaauagccaugcuaacag

SEQ ID NO: 2440192 - RNA, 19 nt, Artificial Sequence
  Description of Artificial Sequence: Synthetic oligonucleotide
  Sense strand starting at position 370 of SEQ ID NO: 1886983
aaauguguugcugaggaug

SEQ ID NO: 2440193 - RNA, 19 nt, Artificial Sequence
  Description of Artificial Sequence: Synthetic oligonucleotide
  Antisense strand to SEQ ID NO: 2440192
cauccucagcaacacauuu

SEQ ID NO: 2440194 - RNA, 19 nt, Artificial Sequence
  Description of Artificial Sequence: Synthetic oligonucleotide
  Sense strand starting at position 400 of SEQ ID NO: 1886983
uuuacacuguuaguguuau

SEQ ID NO: 2440195 - RNA, 19 nt, Artificial Sequence
  Description of Artificial Sequence: Synthetic oligonucleotide
  Antisense strand to SEQ ID NO: 2440194
auaacacuaacaguguaaa

SEQ ID NO: 2440196 - RNA, 19 nt, Artificial Sequence
  Description of Artificial Sequence: Synthetic oligonucleotide
  Sense strand starting at position 477 of SEQ ID NO: 1886983
auaugauccagcgaugcua

SEQ ID NO: 2440197 - RNA, 19 nt, Artificial Sequence
  Description of Artificial Sequence: Synthetic oligonucleotide
  Antisense strand to SEQ ID NO: 2440196
uagcaucgcuggaucauau

SEQ ID NO: 2440198 - RNA, 19 nt, Artificial Sequence
  Description of Artificial Sequence: Synthetic oligonucleotide
  Sense strand starting at position 479 of SEQ ID NO: 1886983
augauccagcgaugcuauu

SEQ ID NO: 2440199 - RNA, 19 nt, Artificial Sequence
  Description of Artificial Sequence: Synthetic oligonucleotide
  Antisense strand to SEQ ID NO: 2440198
aauagcaucgcuggaucau

SEQ ID NO: 2440200 - RNA, 19 nt, Artificial Sequence
  Description of Artificial Sequence: Synthetic oligonucleotide
  Sense strand starting at position 502 of SEQ ID NO: 1886983
ggcauauauugaguaacug

SEQ ID NO: 2440201 - RNA, 19 nt, Artificial Sequence
  Description of Artificial Sequence: Synthetic oligonucleotide
  Antisense strand to SEQ ID NO: 2440200
caguuacucaauauaugcc

SEQ ID NO: 2440202 - RNA, 19 nt, Artificial Sequence
  Description of Artificial Sequence: Synthetic oligonucleotide
  Sense strand starting at position 503 of SEQ ID NO: 1886983
gcauauauugaguaacuga

SEQ ID NO: 2440203 - RNA, 19 nt, Artificial Sequence
  Description of Artificial Sequence: Synthetic oligonucleotide
  Antisense strand to SEQ ID NO: 2440202
ucaguuacucaauauaugc

SEQ ID NO: 2440204 - RNA, 19 nt, Artificial Sequence
  Description of Artificial Sequence: Synthetic oligonucleotide
  Sense strand starting at position 570 of SEQ ID NO: 1886983
uaugcacaaucgcugagau

SEQ ID NO: 2440205 - RNA, 19 nt, Artificial Sequence
  Description of Artificial Sequence: Synthetic oligonucleotide
  Antisense strand to SEQ ID NO: 2440204
aucucagcgauugugcaua

SEQ ID NO: 2440206 - RNA, 19 nt, Artificial Sequence
  Description of Artificial Sequence: Synthetic oligonucleotide
  Sense strand starting at position 571 of SEQ ID NO: 1886983
augcacaaucgcugagaua

SEQ ID NO: 2440207 - RNA, 19 nt, Artificial Sequence
  Description of Artificial Sequence: Synthetic oligonucleotide
  Antisense strand to SEQ ID NO: 2440206
uaucucagcgauugugcau

SEQ ID NO: 2440208 - RNA, 19 nt, Artificial Sequence
  Description of Artificial Sequence: Synthetic oligonucleotide
  Sense strand starting at position 580 of SEQ ID NO: 1886983
cgcugagauaauggaauca

SEQ ID NO: 2440209 - RNA, 19 nt, Artificial Sequence
  Description of Artificial Sequence: Synthetic oligonucleotide
  Antisense strand to SEQ ID NO: 2440208
ugauuccauuaucucagcg

SEQ ID NO: 2440210 - RNA, 19 nt, Artificial Sequence
  Description of Artificial Sequence: Synthetic oligonucleotide
  Sense strand starting at position 599 of SEQ ID NO: 1886983
accuguguccaucgaugga

SEQ ID NO: 2440211 - RNA, 19 nt, Artificial Sequence
  Description of Artificial Sequence: Synthetic oligonucleotide
  Antisense strand to SEQ ID NO: 2440210
uccaucgauggacacaggu

SEQ ID NO: 2440212 - RNA, 19 nt, Artificial Sequence
  Description of Artificial Sequence: Synthetic oligonucleotide
  Sense strand starting at position 879 of SEQ ID NO: 1886983
guagaauaguuguuagagg

SEQ ID NO: 2440213 - RNA, 19 nt, Artificial Sequence
  Description of Artificial Sequence: Synthetic oligonucleotide
  Antisense strand to SEQ ID NO: 2440212
ccucuaacaacuauucuac

SEQ ID NO: 2440214 - RNA, 19 nt, Artificial Sequence
  Description of Artificial Sequence: Synthetic oligonucleotide
  Sense strand starting at position 1104 of SEQ ID NO: 1886983
auauguuaagcuugacuua

SEQ ID NO: 2440215 - RNA, 19 nt, Artificial Sequence
  Description of Artificial Sequence: Synthetic oligonucleotide
  Antisense strand to SEQ ID NO: 2440214
uaagucaagcuuaacauau

SEQ ID NO: 2440216 - RNA, 19 nt, Artificial Sequence
  Description of Artificial Sequence: Synthetic oligonucleotide
  Sense strand starting at position 1115 of SEQ ID NO: 1886983
uugacuuagucguuccaua

SEQ ID NO: 2440217 - RNA, 19 nt, Artificial Sequence
  Description of Artificial Sequence: Synthetic oligonucleotide
  Antisense strand to SEQ ID NO: 2440216
uauggaacgacuaagucaa

SEQ ID NO: 2440218 - RNA, 19 nt, Artificial Sequence
  Description of Artificial Sequence: Synthetic oligonucleotide
  Sense strand starting at position 1120 of SEQ ID NO: 1886983
uuagucguuccauauugua

SEQ ID NO: 2440219 - RNA, 19 nt, Artificial Sequence
  Description of Artificial Sequence: Synthetic oligonucleotide
  Antisense strand to SEQ ID NO: 2440218
uacaauauggaacgacuaa

SEQ ID NO: 2440220 - RNA, 19 nt, Artificial Sequence
  Description of Artificial Sequence: Synthetic oligonucleotide
  Sense strand starting at position 1280 of SEQ ID NO: 1886983
guaucacggaagggauuaa

SEQ ID NO: 2440221 - RNA, 19 nt, Artificial Sequence
  Description of Artificial Sequence: Synthetic oligonucleotide
  Antisense strand to SEQ ID NO: 2440220
uuaaucccuuccgugauac

SEQ ID NO: 2440222 - RNA, 19 nt, Artificial Sequence
  Description of Artificial Sequence: Synthetic oligonucleotide
  Sense strand starting at position 1310 of SEQ ID NO: 1886983
uuuauugagcacuacguau

SEQ ID NO: 2440223 - RNA, 19 nt, Artificial Sequence
  Description of Artificial Sequence: Synthetic oligonucleotide
  Antisense strand to SEQ ID NO: 2440222
auacguagugcucaauaaa

SEQ ID NO: 2440224 - RNA, 19 nt, Artificial Sequence
  Description of Artificial Sequence: Synthetic oligonucleotide
  Sense strand starting at position 1312 of SEQ ID NO: 1886983
uauugagcacuacguauau

SEQ ID NO: 2440225 - RNA, 19 nt, Artificial Sequence
  Description of Artificial Sequence: Synthetic oligonucleotide
  Antisense strand to SEQ ID NO: 2440224
auauacguagugcucaaua

SEQ ID NO: 2440226 - RNA, 19 nt, Artificial Sequence
  Description of Artificial Sequence: Synthetic oligonucleotide
  Sense strand starting at position 1546 of SEQ ID NO: 1886983
gcugcuguccauuauugag

SEQ ID NO: 2440227 - RNA, 19 nt, Artificial Sequence
  Description of Artificial Sequence: Synthetic oligonucleotide
  Antisense strand to SEQ ID NO: 2440226
cucaauaauggacagcagc

SEQ ID NO: 2440228 - RNA, 19 nt, Artificial Sequence
  Description of Artificial Sequence: Synthetic oligonucleotide
  Sense strand starting at position 1548 of SEQ ID NO: 1886983
ugcuguccauuauugagua

SEQ ID NO: 2440229 - RNA, 19 nt, Artificial Sequence
  Description of Artificial Sequence: Synthetic oligonucleotide
  Antisense strand to SEQ ID NO: 2440228
uacucaauaauggacagca

SEQ ID NO: 2440230 - RNA, 19 nt, Artificial Sequence
  Description of Artificial Sequence: Synthetic oligonucleotide
  Sense strand starting at position 1553 of SEQ ID NO: 1886983
uccauuauugaguagcaga

SEQ ID NO: 2440231 - RNA, 19 nt, Artificial Sequence
  Description of Artificial Sequence: Synthetic oligonucleotide
  Antisense strand to SEQ ID NO: 2440230
ucugcuacucaauaaugga

SEQ ID NO: 2440232 - RNA, 19 nt, Artificial Sequence
  Description of Artificial Sequence: Synthetic oligonucleotide
  Sense strand starting at position 2360 of SEQ ID NO: 1886983
ggcagauugaagggugacu

SEQ ID NO: 2440233 - RNA, 19 nt, Artificial Sequence
  Description of Artificial Sequence: Synthetic oligonucleotide
  Antisense strand to SEQ ID NO: 2440232
agucacccuucaaucugcc

SEQ ID NO: 2440234 - RNA, 19 nt, Artificial Sequence
  Description of Artificial Sequence: Synthetic oligonucleotide
  Sense strand starting at position 2387 of SEQ ID NO: 1886983
ucaggugguuccucagaaa

SEQ ID NO: 2440235 - RNA, 19 nt, Artificial Sequence
  Description of Artificial Sequence: Synthetic oligonucleotide
  Antisense strand to SEQ ID NO: 2440234
uuucugaggaaccaccuga

SEQ ID NO: 2440236 - RNA, 19 nt, Artificial Sequence
  Description of Artificial Sequence: Synthetic oligonucleotide
  Sense strand starting at position 2398 of SEQ ID NO: 1886983
cucagaaauggugguuguu

SEQ ID NO: 2440237 - RNA, 19 nt, Artificial Sequence
  Description of Artificial Sequence: Synthetic oligonucleotide
  Antisense strand to SEQ ID NO: 2440236
aacaaccaccauuucugag

SEQ ID NO: 2440238 - RNA, 19 nt, Artificial Sequence
  Description of Artificial Sequence: Synthetic oligonucleotide
  Sense strand starting at position 2401 of SEQ ID NO: 1886983
agaaauggugguuguugua

SEQ ID NO: 2440239 - RNA, 19 nt, Artificial Sequence
  Description of Artificial Sequence: Synthetic oligonucleotide
  Antisense strand to SEQ ID NO: 2440238
uacaacaaccaccauuucu

SEQ ID NO: 2440240 - RNA, 19 nt, Artificial Sequence
  Description of Artificial Sequence: Synthetic oligonucleotide
  Sense strand starting at position 2471 of SEQ ID NO: 1886983
ggcggagaccucuauuagc

SEQ ID NO: 2440241 - RNA, 19 nt, Artificial Sequence
  Description of Artificial Sequence: Synthetic oligonucleotide
  Antisense strand to SEQ ID NO: 2440240
gcuaauagaggucuccgcc

SEQ ID NO: 2440242 - RNA, 19 nt, Artificial Sequence
  Description of Artificial Sequence: Synthetic oligonucleotide
  Sense strand starting at position 2535 of SEQ ID NO: 1886983
uccucuuucuuccuguaga

SEQ ID NO: 2440243 - RNA, 19 nt, Artificial Sequence
  Description of Artificial Sequence: Synthetic oligonucleotide
  Antisense strand to SEQ ID NO: 2440242
ucuacaggaagaaagagga

SEQ ID NO: 2440244 - RNA, 19 nt, Artificial Sequence
  Description of Artificial Sequence: Synthetic oligonucleotide
  Sense strand starting at position 2538 of SEQ ID NO: 1886983
ucuuucuuccuguagaagu

SEQ ID NO: 2440245 - RNA, 19 nt, Artificial Sequence
  Description of Artificial Sequence: Synthetic oligonucleotide
  Antisense strand to SEQ ID NO: 2440244
acuucuacaggaagaaaga

SEQ ID NO: 2440246 - RNA, 19 nt, Artificial Sequence
  Description of Artificial Sequence: Synthetic oligonucleotide
  Sense strand starting at position 2631 of SEQ ID NO: 1886983
acucgacguuuguuacaca

SEQ ID NO: 2440247 - RNA, 19 nt, Artificial Sequence
  Description of Artificial Sequence: Synthetic oligonucleotide
  Antisense strand to SEQ ID NO: 2440246
uguguaacaaacgucgagu

SEQ ID NO: 2440248 - RNA, 19 nt, Artificial Sequence
  Description of Artificial Sequence: Synthetic oligonucleotide
  Sense strand starting at position 2699 of SEQ ID NO: 1886983
cugcaauggaguuguguau

SEQ ID NO: 2440249 - RNA, 19 nt, Artificial Sequence
  Description of Artificial Sequence: Synthetic oligonucleotide
  Antisense strand to SEQ ID NO: 2440248
auacacaacuccauugcag

SEQ ID NO: 2440250 - RNA, 19 nt, Artificial Sequence
  Description of Artificial Sequence: Synthetic oligonucleotide
  Sense strand starting at position 2721 of SEQ ID NO: 1886983
guugguauuaaugacguuu

SEQ ID NO: 2440251 - RNA, 19 nt, Artificial Sequence
  Description of Artificial Sequence: Synthetic oligonucleotide
  Antisense strand to SEQ ID NO: 2440250
aaacgucauuaauaccaac

SEQ ID NO: 2440252 - RNA, 19 nt, Artificial Sequence
  Description of Artificial Sequence: Synthetic oligonucleotide
  Sense strand starting at position 2776 of SEQ ID NO: 1886983
gcggcuugugagggaaaug

SEQ ID NO: 2440253 - RNA, 19 nt, Artificial Sequence
  Description of Artificial Sequence: Synthetic oligonucleotide
  Antisense strand to SEQ ID NO: 2440252
cauuucccucacaagccgc

SEQ ID NO: 2440254 - RNA, 19 nt, Artificial Sequence
  Description of Artificial Sequence: Synthetic oligonucleotide
  Sense strand starting at position 2777 of SEQ ID NO: 1886983
cggcuugugagggaaaugu

SEQ ID NO: 2440255 - RNA, 19 nt, Artificial Sequence
  Description of Artificial Sequence: Synthetic oligonucleotide
  Antisense strand to SEQ ID NO: 2440254
acauuucccucacaagccg

SEQ ID NO: 2440256 - RNA, 19 nt, Artificial Sequence
  Description of Artificial Sequence: Synthetic oligonucleotide
  Sense strand starting at position 3009 of SEQ ID NO: 1886983
ugacgacauugucuccuua

SEQ ID NO: 2440257 - RNA, 19 nt, Artificial Sequence
  Description of Artificial Sequence: Synthetic oligonucleotide
  Antisense strand to SEQ ID NO: 2440256
uaaggagacaaugucguca

SEQ ID NO: 2440258 - RNA, 19 nt, Artificial Sequence
  Description of Artificial Sequence: Synthetic oligonucleotide
  Sense strand starting at position 3073 of SEQ ID NO: 1886983
uguugugaaaccuagcgaa

SEQ ID NO: 2440259 - RNA, 19 nt, Artificial Sequence
  Description of Artificial Sequence: Synthetic oligonucleotide
  Antisense strand to SEQ ID NO: 2440258
uucgcuagguuucacaaca

SEQ ID NO: 2440260 - RNA, 19 nt, Artificial Sequence
  Description of Artificial Sequence: Synthetic oligonucleotide
  Sense strand starting at position 3231 of SEQ ID NO: 1886983
uggcucagucuuuggagua

SEQ ID NO: 2440261 - RNA, 19 nt, Artificial Sequence
  Description of Artificial Sequence: Synthetic oligonucleotide
  Antisense strand to SEQ ID NO: 2440260
uacuccaaagacugagcca

SEQ ID NO: 2440262 - RNA, 19 nt, Artificial Sequence
  Description of Artificial Sequence: Synthetic oligonucleotide
  Sense strand starting at position 3263 of SEQ ID NO: 1886983
ucgccauguccagcugauu

SEQ ID NO: 2440263 - RNA, 19 nt, Artificial Sequence
  Description of Artificial Sequence: Synthetic oligonucleotide
  Antisense strand to SEQ ID NO: 2440262
aaucagcuggacauggcga

SEQ ID NO: 2440264 - RNA, 19 nt, Artificial Sequence
  Description of Artificial Sequence: Synthetic oligonucleotide
  Sense strand starting at position 3422 of SEQ ID NO: 1886983
ccugauugcucacucuuga

SEQ ID NO: 2440265 - RNA, 19 nt, Artificial Sequence
  Description of Artificial Sequence: Synthetic oligonucleotide
  Antisense strand to SEQ ID NO: 2440264
ucaagagugagcaaucagg

SEQ ID NO: 2440266 - RNA, 19 nt, Artificial Sequence
  Description of Artificial Sequence: Synthetic oligonucleotide
  Sense strand starting at position 3789 of SEQ ID NO: 1886983
cuugcaggucuguacucaa

SEQ ID NO: 2440267 - RNA, 19 nt, Artificial Sequence
  Description of Artificial Sequence: Synthetic oligonucleotide
  Antisense strand to SEQ ID NO: 2440266
uugaguacagaccugcaag

SEQ ID NO: 2440268 - RNA, 19 nt, Artificial Sequence
  Description of Artificial Sequence: Synthetic oligonucleotide
  Sense strand starting at position 3913 of SEQ ID NO: 1886983
guacuuauugcagauaaca

SEQ ID NO: 2440269 - RNA, 19 nt, Artificial Sequence
  Description of Artificial Sequence: Synthetic oligonucleotide
  Antisense strand to SEQ ID NO: 2440268
uguuaucugcaauaaguac

SEQ ID NO: 2440270 - RNA, 19 nt, Artificial Sequence
  Description of Artificial Sequence: Synthetic oligonucleotide
  Sense strand starting at position 231 of SEQ ID NO: 1886982
ggccaacagguuugcgaaa

SEQ ID NO: 2440271 - RNA, 19 nt, Artificial Sequence
  Description of Artificial Sequence: Synthetic oligonucleotide
  Antisense strand to SEQ ID NO: 2440270
uuucgcaaaccuguuggcc

SEQ ID NO: 2440272 - RNA, 19 nt, Artificial Sequence
  Description of Artificial Sequence: Synthetic oligonucleotide
  Sense strand starting at position 306 of SEQ ID NO: 1886982
cuguuagcauggcuauuaa

SEQ ID NO: 2440273 - RNA, 19 nt, Artificial Sequence
  Description of Artificial Sequence: Synthetic oligonucleotide
  Antisense strand to SEQ ID NO: 2440272
uuaauagccaugcuaacag

SEQ ID NO: 2440274 - RNA, 19 nt, Artificial Sequence
  Description of Artificial Sequence: Synthetic oligonucleotide
  Sense strand starting at position 658 of SEQ ID NO: 1886982
aaauguguugcugaggaug

SEQ ID NO: 2440275 - RNA, 19 nt, Artificial Sequence
  Description of Artificial Sequence: Synthetic oligonucleotide
  Antisense strand to SEQ ID NO: 2440274
cauccucagcaacacauuu

SEQ ID NO: 2440276 - RNA, 19 nt, Artificial Sequence
  Description of Artificial Sequence: Synthetic oligonucleotide
  Sense strand starting at position 688 of SEQ ID NO: 1886982
uuuacacuguuaguguuau

SEQ ID NO: 2440277 - RNA, 19 nt, Artificial Sequence
  Description of Artificial Sequence: Synthetic oligonucleotide
  Antisense strand to SEQ ID NO: 2440276
auaacacuaacaguguaaa

SEQ ID NO: 2440278 - RNA, 19 nt, Artificial Sequence
  Description of Artificial Sequence: Synthetic oligonucleotide
  Sense strand starting at position 765 of SEQ ID NO: 1886982
auaugauccagcgaugcua

SEQ ID NO: 2440279 - RNA, 19 nt, Artificial Sequence
  Description of Artificial Sequence: Synthetic oligonucleotide
  Antisense strand to SEQ ID NO: 2440278
uagcaucgcuggaucauau

SEQ ID NO: 2440280 - RNA, 19 nt, Artificial Sequence
  Description of Artificial Sequence: Synthetic oligonucleotide
  Sense strand starting at position 767 of SEQ ID NO: 1886982
augauccagcgaugcuauu

SEQ ID NO: 2440281 - RNA, 19 nt, Artificial Sequence
  Description of Artificial Sequence: Synthetic oligonucleotide
  Antisense strand to SEQ ID NO: 2440280
aauagcaucgcuggaucau

SEQ ID NO: 2440282 - RNA, 19 nt, Artificial Sequence
  Description of Artificial Sequence: Synthetic oligonucleotide
  Sense strand starting at position 790 of SEQ ID NO: 1886982
ggcauauauugaguaacug

SEQ ID NO: 2440283 - RNA, 19 nt, Artificial Sequence
  Description of Artificial Sequence: Synthetic oligonucleotide
  Antisense strand to SEQ ID NO: 2440282
caguuacucaauauaugcc

SEQ ID NO: 2440284 - RNA, 19 nt, Artificial Sequence
  Description of Artificial Sequence: Synthetic oligonucleotide
  Sense strand starting at position 791 of SEQ ID NO: 1886982
gcauauauugaguaacuga

SEQ ID NO: 2440285 - RNA, 19 nt, Artificial Sequence
  Description of Artificial Sequence: Synthetic oligonucleotide
  Antisense strand to SEQ ID NO: 2440284
ucaguuacucaauauaugc

SEQ ID NO: 2440286 - RNA, 19 nt, Artificial Sequence
  Description of Artificial Sequence: Synthetic oligonucleotide
  Sense strand starting at position 858 of SEQ ID NO: 1886982
uaugcacaaucgcugagau

SEQ ID NO: 2440287 - RNA, 19 nt, Artificial Sequence
  Description of Artificial Sequence: Synthetic oligonucleotide
  Antisense strand to SEQ ID NO: 2440286
aucucagcgauugugcaua

SEQ ID NO: 2440288 - RNA, 19 nt, Artificial Sequence
  Description of Artificial Sequence: Synthetic oligonucleotide
  Sense strand starting at position 859 of SEQ ID NO: 1886982
augcacaaucgcugagaua

SEQ ID NO: 2440289 - RNA, 19 nt, Artificial Sequence
  Description of Artificial Sequence: Synthetic oligonucleotide
  Antisense strand to SEQ ID NO: 2440288
uaucucagcgauugugcau

SEQ ID NO: 2440290 - RNA, 19 nt, Artificial Sequence
  Description of Artificial Sequence: Synthetic oligonucleotide
  Sense strand starting at position 868 of SEQ ID NO: 1886982
cgcugagauaauggaauca

SEQ ID NO: 2440291 - RNA, 19 nt, Artificial Sequence
  Description of Artificial Sequence: Synthetic oligonucleotide
  Antisense strand to SEQ ID NO: 2440290
ugauuccauuaucucagcg

SEQ ID NO: 2440292 - RNA, 19 nt, Artificial Sequence
  Description of Artificial Sequence: Synthetic oligonucleotide
  Sense strand starting at position 887 of SEQ ID NO: 1886982
accuguguccaucgaugga

SEQ ID NO: 2440293 - RNA, 19 nt, Artificial Sequence
  Description of Artificial Sequence: Synthetic oligonucleotide
  Antisense strand to SEQ ID NO: 2440292
uccaucgauggacacaggu

SEQ ID NO: 2440294 - RNA, 19 nt, Artificial Sequence
  Description of Artificial Sequence: Synthetic oligonucleotide
  Sense strand starting at position 1167 of SEQ ID NO: 1886982
guagaauaguuguuagagg

SEQ ID NO: 2440295 - RNA, 19 nt, Artificial Sequence
  Description of Artificial Sequence: Synthetic oligonucleotide
  Antisense strand to SEQ ID NO: 2440294
ccucuaacaacuauucuac

SEQ ID NO: 2440296 - RNA, 19 nt, Artificial Sequence
  Description of Artificial Sequence: Synthetic oligonucleotide
  Sense strand starting at position 1392 of SEQ ID NO: 1886982
auauguuaagcuugacuua

SEQ ID NO: 2440297 - RNA, 19 nt, Artificial Sequence
  Description of Artificial Sequence: Synthetic oligonucleotide
  Antisense strand to SEQ ID NO: 2440296
uaagucaagcuuaacauau

SEQ ID NO: 2440298 - RNA, 19 nt, Artificial Sequence
  Description of Artificial Sequence: Synthetic oligonucleotide
  Sense strand starting at position 1403 of SEQ ID NO: 1886982
uugacuuagucguuccaua

SEQ ID NO: 2440299 - RNA, 19 nt, Artificial Sequence
  Description of Artificial Sequence: Synthetic oligonucleotide
  Antisense strand to SEQ ID NO: 2440298
uauggaacgacuaagucaa

SEQ ID NO: 2440300 - RNA, 19 nt, Artificial Sequence
  Description of Artificial Sequence: Synthetic oligonucleotide
  Sense strand starting at position 1408 of SEQ ID NO: 1886982
uuagucguuccauauugua

SEQ ID NO: 2440301 - RNA, 19 nt, Artificial Sequence
  Description of Artificial Sequence: Synthetic oligonucleotide
  Antisense strand to SEQ ID NO: 2440300
uacaauauggaacgacuaa

SEQ ID NO: 2440302 - RNA, 19 nt, Artificial Sequence
  Description of Artificial Sequence: Synthetic oligonucleotide
  Sense strand starting at position 1568 of SEQ ID NO: 1886982
guaucacggaagggauuaa

SEQ ID NO: 2440303 - RNA, 19 nt, Artificial Sequence
  Description of Artificial Sequence: Synthetic oligonucleotide
  Antisense strand to SEQ ID NO: 2440302
uuaaucccuuccgugauac

SEQ ID NO: 2440304 - RNA, 19 nt, Artificial Sequence
  Description of Artificial Sequence: Synthetic oligonucleotide
  Sense strand starting at position 1598 of SEQ ID NO: 1886982
uuuauugagcacuacguau

SEQ ID NO: 2440305 - RNA, 19 nt, Artificial Sequence
  Description of Artificial Sequence: Synthetic oligonucleotide
  Antisense strand to SEQ ID NO: 2440304
auacguagugcucaauaaa

SEQ ID NO: 2440306 - RNA, 19 nt, Artificial Sequence
  Description of Artificial Sequence: Synthetic oligonucleotide
  Sense strand starting at position 1600 of SEQ ID NO: 1886982
uauugagcacuacguauau

SEQ ID NO: 2440307 - RNA, 19 nt, Artificial Sequence
  Description of Artificial Sequence: Synthetic oligonucleotide
  Antisense strand to SEQ ID NO: 2440306
auauacguagugcucaaua

SEQ ID NO: 2440308 - RNA, 19 nt, Artificial Sequence
  Description of Artificial Sequence: Synthetic oligonucleotide
  Sense strand starting at position 1834 of SEQ ID NO: 1886982
gcugcuguccauuauugag

SEQ ID NO: 2440309 - RNA, 19 nt, Artificial Sequence
  Description of Artificial Sequence: Synthetic oligonucleotide
  Antisense strand to SEQ ID NO: 2440308
cucaauaauggacagcagc

SEQ ID NO: 2440310 - RNA, 19 nt, Artificial Sequence
  Description of Artificial Sequence: Synthetic oligonucleotide
  Sense strand starting at position 1836 of SEQ ID NO: 1886982
ugcuguccauuauugagua

SEQ ID NO: 2440311 - RNA, 19 nt, Artificial Sequence
  Description of Artificial Sequence: Synthetic oligonucleotide
  Antisense strand to SEQ ID NO: 2440310
uacucaauaauggacagca

SEQ ID NO: 2440312 - RNA, 19 nt, Artificial Sequence
  Description of Artificial Sequence: Synthetic oligonucleotide
  Sense strand starting at position 1841 of SEQ ID NO: 1886982
uccauuauugaguagcaga

SEQ ID NO: 2440313 - RNA, 19 nt, Artificial Sequence
  Description of Artificial Sequence: Synthetic oligonucleotide
  Antisense strand to SEQ ID NO: 2440312
ucugcuacucaauaaugga

SEQ ID NO: 2440314 - RNA, 19 nt, Artificial Sequence
  Description of Artificial Sequence: Synthetic oligonucleotide
  Sense strand starting at position 2648 of SEQ ID NO: 1886982
ggcagauugaagggugacu

SEQ ID NO: 2440315 - RNA, 19 nt, Artificial Sequence
  Description of Artificial Sequence: Synthetic oligonucleotide
  Antisense strand to SEQ ID NO: 2440314
agucacccuucaaucugcc

SEQ ID NO: 2440316 - RNA, 19 nt, Artificial Sequence
  Description of Artificial Sequence: Synthetic oligonucleotide
  Sense strand starting at position 2675 of SEQ ID NO: 1886982
ucaggugguuccucagaaa

SEQ ID NO: 2440317 - RNA, 19 nt, Artificial Sequence
  Description of Artificial Sequence: Synthetic oligonucleotide
  Antisense strand to SEQ ID NO: 2440316
uuucugaggaaccaccuga

SEQ ID NO: 2440318 - RNA, 19 nt, Artificial Sequence
  Description of Artificial Sequence: Synthetic oligonucleotide
  Sense strand starting at position 2686 of SEQ ID NO: 1886982
cucagaaauggugguuguu

SEQ ID NO: 2440319 - RNA, 19 nt, Artificial Sequence
  Description of Artificial Sequence: Synthetic oligonucleotide
  Antisense strand to SEQ ID NO: 2440318
aacaaccaccauuucugag

SEQ ID NO: 2440320 - RNA, 19 nt, Artificial Sequence
  Description of Artificial Sequence: Synthetic oligonucleotide
  Sense strand starting at position 2689 of SEQ ID NO: 1886982
agaaauggugguuguugua

SEQ ID NO: 2440321 - RNA, 19 nt, Artificial Sequence
  Description of Artificial Sequence: Synthetic oligonucleotide
  Antisense strand to SEQ ID NO: 2440320
uacaacaaccaccauuucu

SEQ ID NO: 2440322 - RNA, 19 nt, Artificial Sequence
  Description of Artificial Sequence: Synthetic oligonucleotide
  Sense strand starting at position 2759 of SEQ ID NO: 1886982
ggcggagaccucuauuagc

SEQ ID NO: 2440323 - RNA, 19 nt, Artificial Sequence
  Description of Artificial Sequence: Synthetic oligonucleotide
  Antisense strand to SEQ ID NO: 2440322
gcuaauagaggucuccgcc

SEQ ID NO: 2440324 - RNA, 19 nt, Artificial Sequence
  Description of Artificial Sequence: Synthetic oligonucleotide
  Sense strand starting at position 2823 of SEQ ID NO: 1886982
uccucuuucuuccuguaga

SEQ ID NO: 2440325 - RNA, 19 nt, Artificial Sequence
  Description of Artificial Sequence: Synthetic oligonucleotide
  Antisense strand to SEQ ID NO: 2440324
ucuacaggaagaaagagga

SEQ ID NO: 2440326 - RNA, 19 nt, Artificial Sequence
  Description of Artificial Sequence: Synthetic oligonucleotide
  Sense strand starting at position 2826 of SEQ ID NO: 1886982
ucuuucuuccuguagaagu

SEQ ID NO: 2440327 - RNA, 19 nt, Artificial Sequence
  Description of Artificial Sequence: Synthetic oligonucleotide
  Antisense strand to SEQ ID NO: 2440326
acuucuacaggaagaaaga

SEQ ID NO: 2440328 - RNA, 19 nt, Artificial Sequence
  Description of Artificial Sequence: Synthetic oligonucleotide
  Sense strand starting at position 2919 of SEQ ID NO: 1886982
acucgacguuuguuacaca

SEQ ID NO: 2440329 - RNA, 19 nt, Artificial Sequence
  Description of Artificial Sequence: Synthetic oligonucleotide
  Antisense strand to SEQ ID NO: 2440328
uguguaacaaacgucgagu

SEQ ID NO: 2440330 - RNA, 19 nt, Artificial Sequence
  Description of Artificial Sequence: Synthetic oligonucleotide
  Sense strand starting at position 2987 of SEQ ID NO: 1886982
cugcaauggaguuguguau

SEQ ID NO: 2440331 - RNA, 19 nt, Artificial Sequence
  Description of Artificial Sequence: Synthetic oligonucleotide
  Antisense strand to SEQ ID NO: 2440330
auacacaacuccauugcag

SEQ ID NO: 2440332 - RNA, 19 nt, Artificial Sequence
  Description of Artificial Sequence: Synthetic oligonucleotide
  Sense strand starting at position 3009 of SEQ ID NO: 1886982
guugguauuaaugacguuu

SEQ ID NO: 2440333 - RNA, 19 nt, Artificial Sequence
  Description of Artificial Sequence: Synthetic oligonucleotide
  Antisense strand to SEQ ID NO: 2440332
aaacgucauuaauaccaac

SEQ ID NO: 2440334 - RNA, 19 nt, Artificial Sequence
  Description of Artificial Sequence: Synthetic oligonucleotide
  Sense strand starting at position 3064 of SEQ ID NO: 1886982
gcggcuugugagggaaaug

SEQ ID NO: 2440335 - RNA, 19 nt, Artificial Sequence
  Description of Artificial Sequence: Synthetic oligonucleotide
  Antisense strand to SEQ ID NO: 2440334
cauuucccucacaagccgc

SEQ ID NO: 2440336 - RNA, 19 nt, Artificial Sequence
  Description of Artificial Sequence: Synthetic oligonucleotide
  Sense strand starting at position 3065 of SEQ ID NO: 1886982
cggcuugugagggaaaugu

SEQ ID NO: 2440337 - RNA, 19 nt, Artificial Sequence
  Description of Artificial Sequence: Synthetic oligonucleotide
  Antisense strand to SEQ ID NO: 2440336
acauuucccucacaagccg

SEQ ID NO: 2440338 - RNA, 19 nt, Artificial Sequence
  Description of Artificial Sequence: Synthetic oligonucleotide
  Sense strand starting at position 3074 of SEQ ID NO: 1886982
agggaaauguggcaugaga

SEQ ID NO: 2440339 - RNA, 19 nt, Artificial Sequence
  Description of Artificial Sequence: Synthetic oligonucleotide
  Antisense strand to SEQ ID NO: 2440338
ucucaugccacauuucccu

SEQ ID NO: 2440340 - RNA, 19 nt, Artificial Sequence
  Description of Artificial Sequence: Synthetic oligonucleotide
  Sense strand starting at position 3297 of SEQ ID NO: 1886982
ugacgacauugucuccuua

SEQ ID NO: 2440341 - RNA, 19 nt, Artificial Sequence
  Description of Artificial Sequence: Synthetic oligonucleotide
  Antisense strand to SEQ ID NO: 2440340
uaaggagacaaugucguca

SEQ ID NO: 2440342 - RNA, 19 nt, Artificial Sequence
  Description of Artificial Sequence: Synthetic oligonucleotide
  Sense strand starting at position 3361 of SEQ ID NO: 1886982
uguugugaaaccuagcgaa

SEQ ID NO: 2440343 - RNA, 19 nt, Artificial Sequence
  Description of Artificial Sequence: Synthetic oligonucleotide
  Antisense strand to SEQ ID NO: 2440342
uucgcuagguuucacaaca

SEQ ID NO: 2440344 - RNA, 19 nt, Artificial Sequence
  Description of Artificial Sequence: Synthetic oligonucleotide
  Sense strand starting at position 3519 of SEQ ID NO: 1886982
uggcucagucuuuggagua

SEQ ID NO: 2440345 - RNA, 19 nt, Artificial Sequence
  Description of Artificial Sequence: Synthetic oligonucleotide
  Antisense strand to SEQ ID NO: 2440344
uacuccaaagacugagcca

SEQ ID NO: 2440346 - RNA, 19 nt, Artificial Sequence
  Description of Artificial Sequence: Synthetic oligonucleotide
  Sense strand starting at position 3551 of SEQ ID NO: 1886982
ucgccauguccagcugauu

SEQ ID NO: 2440347 - RNA, 19 nt, Artificial Sequence
  Description of Artificial Sequence: Synthetic oligonucleotide
  Antisense strand to SEQ ID NO: 2440346
aaucagcuggacauggcga

SEQ ID NO: 2440348 - RNA, 19 nt, Artificial Sequence
  Description of Artificial Sequence: Synthetic oligonucleotide
  Sense strand starting at position 3710 of SEQ ID NO: 1886982
ccugauugcucacucuuga

SEQ ID NO: 2440349 - RNA, 19 nt, Artificial Sequence
  Description of Artificial Sequence: Synthetic oligonucleotide
  Antisense strand to SEQ ID NO: 2440348
ucaagagugagcaaucagg

SEQ ID NO: 2440350 - RNA, 19 nt, Artificial Sequence
  Description of Artificial Sequence: Synthetic oligonucleotide
  Sense strand starting at position 365 of SEQ ID NO: 1886986
gcuagaauaauaggugcau

SEQ ID NO: 2440351 - RNA, 19 nt, Artificial Sequence
  Description of Artificial Sequence: Synthetic oligonucleotide
  Antisense strand to SEQ ID NO: 2440350
augcaccuauuauucuagc

SEQ ID NO: 2440352 - RNA, 19 nt, Artificial Sequence
  Description of Artificial Sequence: Synthetic oligonucleotide
  Sense strand starting at position 546 of SEQ ID NO: 1886986
uaacgcacuguuuaugaua

SEQ ID NO: 2440353 - RNA, 19 nt, Artificial Sequence
  Description of Artificial Sequence: Synthetic oligonucleotide
  Antisense strand to SEQ ID NO: 2440352
uaucauaaacagugcguua

SEQ ID NO: 2440354 - RNA, 19 nt, Artificial Sequence
  Description of Artificial Sequence: Synthetic oligonucleotide
  Sense strand starting at position 641 of SEQ ID NO: 1886986
ugggauuauuaaguuucca

SEQ ID NO: 2440355 - RNA, 19 nt, Artificial Sequence
  Description of Artificial Sequence: Synthetic oligonucleotide
  Antisense strand to SEQ ID NO: 2440354
uggaaacuuaauaauccca

SEQ ID NO: 2440356 - RNA, 19 nt, Artificial Sequence
  Description of Artificial Sequence: Synthetic oligonucleotide
  Sense strand starting at position 1075 of SEQ ID NO: 1886986
gccuuagugcaagaacauu

SEQ ID NO: 2440357 - RNA, 19 nt, Artificial Sequence
  Description of Artificial Sequence: Synthetic oligonucleotide
  Antisense strand to SEQ ID NO: 2440356
aauguucuugcacuaaggc

SEQ ID NO: 2440358 - RNA, 19 nt, Artificial Sequence
  Description of Artificial Sequence: Synthetic oligonucleotide
  Sense strand starting at position 1081 of SEQ ID NO: 1886986
gugcaagaacauuaguuaa

SEQ ID NO: 2440359 - RNA, 19 nt, Artificial Sequence
  Description of Artificial Sequence: Synthetic oligonucleotide
  Antisense strand to SEQ ID NO: 2440358
uuaacuaauguucuugcac

SEQ ID NO: 2440360 - RNA, 19 nt, Artificial Sequence
  Description of Artificial Sequence: Synthetic oligonucleotide
  Sense strand starting at position 1083 of SEQ ID NO: 1886986
gcaagaacauuaguuaagu

SEQ ID NO: 2440361 - RNA, 19 nt, Artificial Sequence
  Description of Artificial Sequence: Synthetic oligonucleotide
  Antisense strand to SEQ ID NO: 2440360
acuuaacuaauguucuugc

SEQ ID NO: 2440362 - RNA, 19 nt, Artificial Sequence
  Description of Artificial Sequence: Synthetic oligonucleotide
  Sense strand starting at position 1153 of SEQ ID NO: 1886986
cagggaaguuugguuuaug

SEQ ID NO: 2440363 - RNA, 19 nt, Artificial Sequence
  Description of Artificial Sequence: Synthetic oligonucleotide
  Antisense strand to SEQ ID NO: 2440362
cauaaaccaaacuucccug

SEQ ID NO: 2440364 - RNA, 19 nt, Artificial Sequence
  Description of Artificial Sequence: Synthetic oligonucleotide
  Sense strand starting at position 1154 of SEQ ID NO: 1886986
agggaaguuugguuuaugu

SEQ ID NO: 2440365 - RNA, 19 nt, Artificial Sequence
  Description of Artificial Sequence: Synthetic oligonucleotide
  Antisense strand to SEQ ID NO: 2440364
acauaaaccaaacuucccu

SEQ ID NO: 2440366 - RNA, 19 nt, Artificial Sequence
  Description of Artificial Sequence: Synthetic oligonucleotide
  Sense strand starting at position 1156 of SEQ ID NO: 1886986
ggaaguuugguuuauguug

SEQ ID NO: 2440367 - RNA, 19 nt, Artificial Sequence
  Description of Artificial Sequence: Synthetic oligonucleotide
  Antisense strand to SEQ ID NO: 2440366
caacauaaaccaaacuucc

SEQ ID NO: 2440368 - RNA, 19 nt, Artificial Sequence
  Description of Artificial Sequence: Synthetic oligonucleotide
  Sense strand starting at position 1162 of SEQ ID NO: 1886986
uugguuuauguugggaaag

SEQ ID NO: 2440369 - RNA, 19 nt, Artificial Sequence
  Description of Artificial Sequence: Synthetic oligonucleotide
  Antisense strand to SEQ ID NO: 2440368
cuuucccaacauaaaccaa

SEQ ID NO: 2440370 - RNA, 19 nt, Artificial Sequence
  Description of Artificial Sequence: Synthetic oligonucleotide
  Sense strand starting at position 1294 of SEQ ID NO: 1886986
ugucucugaacucggauaa

SEQ ID NO: 2440371 - RNA, 19 nt, Artificial Sequence
  Description of Artificial Sequence: Synthetic oligonucleotide
  Antisense strand to SEQ ID NO: 2440370
uuauccgaguucagagaca

SEQ ID NO: 2440372 - RNA, 19 nt, Artificial Sequence
  Description of Artificial Sequence: Synthetic oligonucleotide
  Sense strand starting at position 1295 of SEQ ID NO: 1886986
gucucugaacucggauaaa

SEQ ID NO: 2440373 - RNA, 19 nt, Artificial Sequence
  Description of Artificial Sequence: Synthetic oligonucleotide
  Antisense strand to SEQ ID NO: 2440372
uuuauccgaguucagagac

SEQ ID NO: 2440374 - RNA, 19 nt, Artificial Sequence
  Description of Artificial Sequence: Synthetic oligonucleotide
  Sense strand starting at position 1333 of SEQ ID NO: 1886986
aguaccacugaguauauua

SEQ ID NO: 2440375 - RNA, 19 nt, Artificial Sequence
  Description of Artificial Sequence: Synthetic oligonucleotide
  Antisense strand to SEQ ID NO: 2440374
uaauauacucagugguacu

SEQ ID NO: 2440376 - RNA, 19 nt, Artificial Sequence
  Description of Artificial Sequence: Synthetic oligonucleotide
  Sense strand starting at position 1563 of SEQ ID NO: 1886986
gcaugcugccgagcugauu

SEQ ID NO: 2440377 - RNA, 19 nt, Artificial Sequence
  Description of Artificial Sequence: Synthetic oligonucleotide
  Antisense strand to SEQ ID NO: 2440376
aaucagcucggcagcaugc

SEQ ID NO: 2440378 - RNA, 19 nt, Artificial Sequence
  Description of Artificial Sequence: Synthetic oligonucleotide
  Sense strand starting at position 2917 of SEQ ID NO: 1886986
gaguauugugccgccagua

SEQ ID NO: 2440379 - RNA, 19 nt, Artificial Sequence
  Description of Artificial Sequence: Synthetic oligonucleotide
  Antisense strand to SEQ ID NO: 2440378
uacuggcggcacaauacuc

SEQ ID NO: 2440380 - RNA, 19 nt, Artificial Sequence
  Description of Artificial Sequence: Synthetic oligonucleotide
  Sense strand starting at position 3036 of SEQ ID NO: 1886986
ucaggcucugcugaagauu

SEQ ID NO: 2440381 - RNA, 19 nt, Artificial Sequence
  Description of Artificial Sequence: Synthetic oligonucleotide
  Antisense strand to SEQ ID NO: 2440380
aaucuucagcagagccuga

SEQ ID NO: 2440382 - RNA, 19 nt, Artificial Sequence
  Description of Artificial Sequence: Synthetic oligonucleotide
  Sense strand starting at position 3044 of SEQ ID NO: 1886986
ugcugaagauucuuagauc

SEQ ID NO: 2440383 - RNA, 19 nt, Artificial Sequence
  Description of Artificial Sequence: Synthetic oligonucleotide
  Antisense strand to SEQ ID NO: 2440382
gaucuaagaaucuucagca

SEQ ID NO: 2440384 - RNA, 19 nt, Artificial Sequence
  Description of Artificial Sequence: Synthetic oligonucleotide
  Sense strand starting at position 3088 of SEQ ID NO: 1886986
ccguuacaucuccacguaa

SEQ ID NO: 2440385 - RNA, 19 nt, Artificial Sequence
  Description of Artificial Sequence: Synthetic oligonucleotide
  Antisense strand to SEQ ID NO: 2440384
uuacguggagauguaacgg

SEQ ID NO: 2440386 - RNA, 19 nt, Artificial Sequence
  Description of Artificial Sequence: Synthetic oligonucleotide
  Sense strand starting at position 3090 of SEQ ID NO: 1886986
guuacaucuccacguaaca

SEQ ID NO: 2440387 - RNA, 19 nt, Artificial Sequence
  Description of Artificial Sequence: Synthetic oligonucleotide
  Antisense strand to SEQ ID NO: 2440386
uguuacguggagauguaac

SEQ ID NO: 2440388 - RNA, 19 nt, Artificial Sequence
  Description of Artificial Sequence: Synthetic oligonucleotide
  Sense strand starting at position 3108 of SEQ ID NO: 1886986
auguucauugucgagggau

SEQ ID NO: 2440389 - RNA, 19 nt, Artificial Sequence
  Description of Artificial Sequence: Synthetic oligonucleotide
  Antisense strand to SEQ ID NO: 2440388
aucccucgacaaugaacau

SEQ ID NO: 2440390 - RNA, 19 nt, Artificial Sequence
  Description of Artificial Sequence: Synthetic oligonucleotide
  Sense strand starting at position 3299 of SEQ ID NO: 1886986
gcggauccauugucagaaa

SEQ ID NO: 2440391 - RNA, 19 nt, Artificial Sequence
  Description of Artificial Sequence: Synthetic oligonucleotide
  Antisense strand to SEQ ID NO: 2440390
uuucugacaauggauccgc

SEQ ID NO: 2440392 - RNA, 19 nt, Artificial Sequence
  Description of Artificial Sequence: Synthetic oligonucleotide
  Sense strand starting at position 3487 of SEQ ID NO: 1886986
ggaacaccugagugaugcu

SEQ ID NO: 2440393 - RNA, 19 nt, Artificial Sequence
  Description of Artificial Sequence: Synthetic oligonucleotide
  Antisense strand to SEQ ID NO: 2440392
agcaucacucagguguucc

SEQ ID NO: 2440394 - RNA, 19 nt, Artificial Sequence
  Description of Artificial Sequence: Synthetic oligonucleotide
  Sense strand starting at position 3508 of SEQ ID NO: 1886986
uuucccaguugauuagaua

SEQ ID NO: 2440395 - RNA, 19 nt, Artificial Sequence
  Description of Artificial Sequence: Synthetic oligonucleotide
  Antisense strand to SEQ ID NO: 2440394
uaucuaaucaacugggaaa

SEQ ID NO: 2440396 - RNA, 19 nt, Artificial Sequence
  Description of Artificial Sequence: Synthetic oligonucleotide
  Sense strand starting at position 3509 of SEQ ID NO: 1886986
uucccaguugauuagauau

SEQ ID NO: 2440397 - RNA, 19 nt, Artificial Sequence
  Description of Artificial Sequence: Synthetic oligonucleotide
  Antisense strand to SEQ ID NO: 2440396
auaucuaaucaacugggaa

SEQ ID NO: 2440398 - RNA, 19 nt, Artificial Sequence
  Description of Artificial Sequence: Synthetic oligonucleotide
  Sense strand starting at position 3521 of SEQ ID NO: 1886986
uagauauggugugugcaag

SEQ ID NO: 2440399 - RNA, 19 nt, Artificial Sequence
  Description of Artificial Sequence: Synthetic oligonucleotide
  Antisense strand to SEQ ID NO: 2440398
cuugcacacaccauaucua

SEQ ID NO: 2440400 - RNA, 19 nt, Artificial Sequence
  Description of Artificial Sequence: Synthetic oligonucleotide
  Sense strand starting at position 3533 of SEQ ID NO: 1886986
gugcaaguuucuccuauuu

SEQ ID NO: 2440401 - RNA, 19 nt, Artificial Sequence
  Description of Artificial Sequence: Synthetic oligonucleotide
  Antisense strand to SEQ ID NO: 2440400
aaauaggagaaacuugcac

SEQ ID NO: 2440402 - RNA, 19 nt, Artificial Sequence
  Description of Artificial Sequence: Synthetic oligonucleotide
  Sense strand starting at position 3559 of SEQ ID NO: 1886986
guguuugggaucuaugauc

SEQ ID NO: 2440403 - RNA, 19 nt, Artificial Sequence
  Description of Artificial Sequence: Synthetic oligonucleotide
  Antisense strand to SEQ ID NO: 2440402
gaucauagaucccaaacac

SEQ ID NO: 2440404 - RNA, 19 nt, Artificial Sequence
  Description of Artificial Sequence: Synthetic oligonucleotide
  Sense strand starting at position 3568 of SEQ ID NO: 1886986
aucuaugaucaaggcauaa

SEQ ID NO: 2440405 - RNA, 19 nt, Artificial Sequence
  Description of Artificial Sequence: Synthetic oligonucleotide
  Antisense strand to SEQ ID NO: 2440404
uuaugccuugaucauagau

SEQ ID NO: 2440406 - RNA, 19 nt, Artificial Sequence
  Description of Artificial Sequence: Synthetic oligonucleotide
  Sense strand starting at position 3588 of SEQ ID NO: 1886986
guauucguaggguaguauu

SEQ ID NO: 2440407 - RNA, 19 nt, Artificial Sequence
  Description of Artificial Sequence: Synthetic oligonucleotide
  Antisense strand to SEQ ID NO: 2440406
aauacuacccuacgaauac

SEQ ID NO: 2440408 - RNA, 19 nt, Artificial Sequence
  Description of Artificial Sequence: Synthetic oligonucleotide
  Sense strand starting at position 3678 of SEQ ID NO: 1886986
acaugcuuuguugacaaca

SEQ ID NO: 2440409 - RNA, 19 nt, Artificial Sequence
  Description of Artificial Sequence: Synthetic oligonucleotide
  Antisense strand to SEQ ID NO: 2440408
uguugucaacaaagcaugu

SEQ ID NO: 2440410 - RNA, 19 nt, Artificial Sequence
  Description of Artificial Sequence: Synthetic oligonucleotide
  Sense strand starting at position 3740 of SEQ ID NO: 1886986
uggugucugagcugaauac

SEQ ID NO: 2440411 - RNA, 19 nt, Artificial Sequence
  Description of Artificial Sequence: Synthetic oligonucleotide
  Antisense strand to SEQ ID NO: 2440410
guauucagcucagacacca

SEQ ID NO: 2440412 - RNA, 19 nt, Artificial Sequence
  Description of Artificial Sequence: Synthetic oligonucleotide
  Sense strand starting at position 3741 of SEQ ID NO: 1886986
ggugucugagcugaauaca

SEQ ID NO: 2440413 - RNA, 19 nt, Artificial Sequence
  Description of Artificial Sequence: Synthetic oligonucleotide
  Antisense strand to SEQ ID NO: 2440412
uguauucagcucagacacc

SEQ ID NO: 2440414 - RNA, 19 nt, Artificial Sequence
  Description of Artificial Sequence: Synthetic oligonucleotide
  Sense strand starting at position 3750 of SEQ ID NO: 1886986
gcugaauacaggugauguc

SEQ ID NO: 2440415 - RNA, 19 nt, Artificial Sequence
  Description of Artificial Sequence: Synthetic oligonucleotide
  Antisense strand to SEQ ID NO: 2440414
gacaucaccuguauucagc

SEQ ID NO: 2440416 - RNA, 19 nt, Artificial Sequence
  Description of Artificial Sequence: Synthetic oligonucleotide
  Sense strand starting at position 3799 of SEQ ID NO: 1886986
ugacacugugauugucagu

SEQ ID NO: 2440417 - RNA, 19 nt, Artificial Sequence
  Description of Artificial Sequence: Synthetic oligonucleotide
  Antisense strand to SEQ ID NO: 2440416
acugacaaucacaguguca

SEQ ID NO: 2440418 - RNA, 19 nt, Artificial Sequence
  Description of Artificial Sequence: Synthetic oligonucleotide
  Sense strand starting at position 3869 of SEQ ID NO: 1886986
agguaauaccuuuaguaua

SEQ ID NO: 2440419 - RNA, 19 nt, Artificial Sequence
  Description of Artificial Sequence: Synthetic oligonucleotide
  Antisense strand to SEQ ID NO: 2440418
uauacuaaagguauuaccu

SEQ ID NO: 2440420 - RNA, 19 nt, Artificial Sequence
  Description of Artificial Sequence: Synthetic oligonucleotide
  Sense strand starting at position 3913 of SEQ ID NO: 1886986
uuuagugauccuggaacug

SEQ ID NO: 2440421 - RNA, 19 nt, Artificial Sequence
  Description of Artificial Sequence: Synthetic oligonucleotide
  Antisense strand to SEQ ID NO: 2440420
caguuccaggaucacuaaa

SEQ ID NO: 2440422 - RNA, 19 nt, Artificial Sequence
  Description of Artificial Sequence: Synthetic oligonucleotide
  Sense strand starting at position 3951 of SEQ ID NO: 1886986
uuuguuuggguucauggaa

SEQ ID NO: 2440423 - RNA, 19 nt, Artificial Sequence
  Description of Artificial Sequence: Synthetic oligonucleotide
  Antisense strand to SEQ ID NO: 2440422
uuccaugaacccaaacaaa

SEQ ID NO: 2440424 - RNA, 19 nt, Artificial Sequence
  Description of Artificial Sequence: Synthetic oligonucleotide
  Sense strand starting at position 3974 of SEQ ID NO: 1886986
uuagaaccgucuucuccau

SEQ ID NO: 2440425 - RNA, 19 nt, Artificial Sequence
  Description of Artificial Sequence: Synthetic oligonucleotide
  Antisense strand to SEQ ID NO: 2440424
auggagaagacgguucuaa

SEQ ID NO: 2440426 - RNA, 19 nt, Artificial Sequence
  Description of Artificial Sequence: Synthetic oligonucleotide
  Sense strand starting at position 3976 of SEQ ID NO: 1886986
agaaccgucuucuccauua

SEQ ID NO: 2440427 - RNA, 19 nt, Artificial Sequence
  Description of Artificial Sequence: Synthetic oligonucleotide
  Antisense strand to SEQ ID NO: 2440426
uaauggagaagacgguucu

SEQ ID NO: 2440428 - RNA, 19 nt, Artificial Sequence
  Description of Artificial Sequence: Synthetic oligonucleotide
  Sense strand starting at position 3981 of SEQ ID NO: 1886986
cgucuucuccauuaaauag

SEQ ID NO: 2440429 - RNA, 19 nt, Artificial Sequence
  Description of Artificial Sequence: Synthetic oligonucleotide
  Antisense strand to SEQ ID NO: 2440428
cuauuuaauggagaagacg

SEQ ID NO: 2440430 - RNA, 19 nt, Artificial Sequence
  Description of Artificial Sequence: Synthetic oligonucleotide
  Sense strand starting at position 63 of SEQ ID NO: 1886985
gccuuagugcaagaacauu

SEQ ID NO: 2440431 - RNA, 19 nt, Artificial Sequence
  Description of Artificial Sequence: Synthetic oligonucleotide
  Antisense strand to SEQ ID NO: 2440430
aauguucuugcacuaaggc

SEQ ID NO: 2440432 - RNA, 19 nt, Artificial Sequence
  Description of Artificial Sequence: Synthetic oligonucleotide
  Sense strand starting at position 69 of SEQ ID NO: 1886985
gugcaagaacauuaguuaa

SEQ ID NO: 2440433 - RNA, 19 nt, Artificial Sequence
  Description of Artificial Sequence: Synthetic oligonucleotide
  Antisense strand to SEQ ID NO: 2440432
uuaacuaauguucuugcac

SEQ ID NO: 2440434 - RNA, 19 nt, Artificial Sequence
  Description of Artificial Sequence: Synthetic oligonucleotide
  Sense strand starting at position 71 of SEQ ID NO: 1886985
gcaagaacauuaguuaagu

SEQ ID NO: 2440435 - RNA, 19 nt, Artificial Sequence
  Description of Artificial Sequence: Synthetic oligonucleotide
  Antisense strand to SEQ ID NO: 2440434
acuuaacuaauguucuugc

SEQ ID NO: 2440436 - RNA, 19 nt, Artificial Sequence
  Description of Artificial Sequence: Synthetic oligonucleotide
  Sense strand starting at position 141 of SEQ ID NO: 1886985
cagggaaguuugguuuaug

SEQ ID NO: 2440437 - RNA, 19 nt, Artificial Sequence
  Description of Artificial Sequence: Synthetic oligonucleotide
  Antisense strand to SEQ ID NO: 2440436
cauaaaccaaacuucccug

SEQ ID NO: 2440438 - RNA, 19 nt, Artificial Sequence
  Description of Artificial Sequence: Synthetic oligonucleotide
  Sense strand starting at position 144 of SEQ ID NO: 1886985
ggaaguuugguuuauguug

SEQ ID NO: 2440439 - RNA, 19 nt, Artificial Sequence
  Description of Artificial Sequence: Synthetic oligonucleotide
  Antisense strand to SEQ ID NO: 2440438
caacauaaaccaaacuucc

SEQ ID NO: 2440440 - RNA, 19 nt, Artificial Sequence
  Description of Artificial Sequence: Synthetic oligonucleotide
  Sense strand starting at position 150 of SEQ ID NO: 1886985
uugguuuauguugggaaag

SEQ ID NO: 2440441 - RNA, 19 nt, Artificial Sequence
  Description of Artificial Sequence: Synthetic oligonucleotide
  Antisense strand to SEQ ID NO: 2440440
cuuucccaacauaaaccaa

SEQ ID NO: 2440442 - RNA, 19 nt, Artificial Sequence
  Description of Artificial Sequence: Synthetic oligonucleotide
  Sense strand starting at position 282 of SEQ ID NO: 1886985
ugucucugaacucggauaa

SEQ ID NO: 2440443 - RNA, 19 nt, Artificial Sequence
  Description of Artificial Sequence: Synthetic oligonucleotide
  Antisense strand to SEQ ID NO: 2440442
uuauccgaguucagagaca

SEQ ID NO: 2440444 - RNA, 19 nt, Artificial Sequence
  Description of Artificial Sequence: Synthetic oligonucleotide
  Sense strand starting at position 283 of SEQ ID NO: 1886985
gucucugaacucggauaaa

SEQ ID NO: 2440445 - RNA, 19 nt, Artificial Sequence
  Description of Artificial Sequence: Synthetic oligonucleotide
  Antisense strand to SEQ ID NO: 2440444
uuuauccgaguucagagac

SEQ ID NO: 2440446 - RNA, 19 nt, Artificial Sequence
  Description of Artificial Sequence: Synthetic oligonucleotide
  Sense strand starting at position 321 of SEQ ID NO: 1886985
aguaccacugaguauauua

SEQ ID NO: 2440447 - RNA, 19 nt, Artificial Sequence
  Description of Artificial Sequence: Synthetic oligonucleotide
  Antisense strand to SEQ ID NO: 2440446
uaauauacucagugguacu

SEQ ID NO: 2440448 - RNA, 19 nt, Artificial Sequence
  Description of Artificial Sequence: Synthetic oligonucleotide
  Sense strand starting at position 551 of SEQ ID NO: 1886985
gcaugcugccgagcugauu

SEQ ID NO: 2440449 - RNA, 19 nt, Artificial Sequence
  Description of Artificial Sequence: Synthetic oligonucleotide
  Antisense strand to SEQ ID NO: 2440448
aaucagcucggcagcaugc

SEQ ID NO: 2440450 - RNA, 19 nt, Artificial Sequence
  Description of Artificial Sequence: Synthetic oligonucleotide
  Sense strand starting at position 1905 of SEQ ID NO: 1886985
gaguauugugccgccagua

SEQ ID NO: 2440451 - RNA, 19 nt, Artificial Sequence
  Description of Artificial Sequence: Synthetic oligonucleotide
  Antisense strand to SEQ ID NO: 2440450
uacuggcggcacaauacuc

SEQ ID NO: 2440452 - RNA, 19 nt, Artificial Sequence
  Description of Artificial Sequence: Synthetic oligonucleotide
  Sense strand starting at position 2024 of SEQ ID NO: 1886985
ucaggcucugcugaagauu

SEQ ID NO: 2440453 - RNA, 19 nt, Artificial Sequence
  Description of Artificial Sequence: Synthetic oligonucleotide
  Antisense strand to SEQ ID NO: 2440452
aaucuucagcagagccuga

SEQ ID NO: 2440454 - RNA, 19 nt, Artificial Sequence
  Description of Artificial Sequence: Synthetic oligonucleotide
  Sense strand starting at position 2032 of SEQ ID NO: 1886985
ugcugaagauucuuagauc

SEQ ID NO: 2440455 - RNA, 19 nt, Artificial Sequence
  Description of Artificial Sequence: Synthetic oligonucleotide
  Antisense strand to SEQ ID NO: 2440454
gaucuaagaaucuucagca

SEQ ID NO: 2440456 - RNA, 19 nt, Artificial Sequence
  Description of Artificial Sequence: Synthetic oligonucleotide
  Sense strand starting at position 2096 of SEQ ID NO: 1886985
auguucauugucgagggau

SEQ ID NO: 2440457 - RNA, 19 nt, Artificial Sequence
  Description of Artificial Sequence: Synthetic oligonucleotide
  Antisense strand to SEQ ID NO: 2440456
aucccucgacaaugaacau

SEQ ID NO: 2440458 - RNA, 19 nt, Artificial Sequence
  Description of Artificial Sequence: Synthetic oligonucleotide
  Sense strand starting at position 2475 of SEQ ID NO: 1886985
ggaacaccugagugaugcu

SEQ ID NO: 2440459 - RNA, 19 nt, Artificial Sequence
  Description of Artificial Sequence: Synthetic oligonucleotide
  Antisense strand to SEQ ID NO: 2440458
agcaucacucagguguucc

SEQ ID NO: 2440460 - RNA, 19 nt, Artificial Sequence
  Description of Artificial Sequence: Synthetic oligonucleotide
  Sense strand starting at position 2496 of SEQ ID NO: 1886985
uuucccaguugauuagaua

SEQ ID NO: 2440461 - RNA, 19 nt, Artificial Sequence
  Description of Artificial Sequence: Synthetic oligonucleotide
  Antisense strand to SEQ ID NO: 2440460
uaucuaaucaacugggaaa

SEQ ID NO: 2440462 - RNA, 19 nt, Artificial Sequence
  Description of Artificial Sequence: Synthetic oligonucleotide
  Sense strand starting at position 2497 of SEQ ID NO: 1886985
uucccaguugauuagauau

SEQ ID NO: 2440463 - RNA, 19 nt, Artificial Sequence
  Description of Artificial Sequence: Synthetic oligonucleotide
  Antisense strand to SEQ ID NO: 2440462
auaucuaaucaacugggaa

SEQ ID NO: 2440464 - RNA, 19 nt, Artificial Sequence
  Description of Artificial Sequence: Synthetic oligonucleotide
  Sense strand starting at position 2521 of SEQ ID NO: 1886985
gugcaaguuucuccuauuu

SEQ ID NO: 2440465 - RNA, 19 nt, Artificial Sequence
  Description of Artificial Sequence: Synthetic oligonucleotide
  Antisense strand to SEQ ID NO: 2440464
aaauaggagaaacuugcac

SEQ ID NO: 2440466 - RNA, 19 nt, Artificial Sequence
  Description of Artificial Sequence: Synthetic oligonucleotide
  Sense strand starting at position 2547 of SEQ ID NO: 1886985
guguuugggaucuaugauc

SEQ ID NO: 2440467 - RNA, 19 nt, Artificial Sequence
  Description of Artificial Sequence: Synthetic oligonucleotide
  Antisense strand to SEQ ID NO: 2440466
gaucauagaucccaaacac

SEQ ID NO: 2440468 - RNA, 19 nt, Artificial Sequence
  Description of Artificial Sequence: Synthetic oligonucleotide
  Sense strand starting at position 2556 of SEQ ID NO: 1886985
aucuaugaucaaggcauaa

SEQ ID NO: 2440469 - RNA, 19 nt, Artificial Sequence
  Description of Artificial Sequence: Synthetic oligonucleotide
  Antisense strand to SEQ ID NO: 2440468
uuaugccuugaucauagau

SEQ ID NO: 2440470 - RNA, 19 nt, Artificial Sequence
  Description of Artificial Sequence: Synthetic oligonucleotide
  Sense strand starting at position 2666 of SEQ ID NO: 1886985
acaugcuuuguugacaaca

SEQ ID NO: 2440471 - RNA, 19 nt, Artificial Sequence
  Description of Artificial Sequence: Synthetic oligonucleotide
  Antisense strand to SEQ ID NO: 2440470
uguugucaacaaagcaugu

SEQ ID NO: 2440472 - RNA, 19 nt, Artificial Sequence
  Description of Artificial Sequence: Synthetic oligonucleotide
  Sense strand starting at position 2729 of SEQ ID NO: 1886985
ggugucugagcugaauaca

SEQ ID NO: 2440473 - RNA, 19 nt, Artificial Sequence
  Description of Artificial Sequence: Synthetic oligonucleotide
  Antisense strand to SEQ ID NO: 2440472
uguauucagcucagacacc

SEQ ID NO: 2440474 - RNA, 19 nt, Artificial Sequence
  Description of Artificial Sequence: Synthetic oligonucleotide
  Sense strand starting at position 2857 of SEQ ID NO: 1886985
agguaauaccuuuaguaua

SEQ ID NO: 2440475 - RNA, 19 nt, Artificial Sequence
  Description of Artificial Sequence: Synthetic oligonucleotide
  Antisense strand to SEQ ID NO: 2440474
uauacuaaagguauuaccu

SEQ ID NO: 2440476 - RNA, 19 nt, Artificial Sequence
  Description of Artificial Sequence: Synthetic oligonucleotide
  Sense strand starting at position 2901 of SEQ ID NO: 1886985
uuuagugauccuggaacug

SEQ ID NO: 2440477 - RNA, 19 nt, Artificial Sequence
  Description of Artificial Sequence: Synthetic oligonucleotide
  Antisense strand to SEQ ID NO: 2440476
caguuccaggaucacuaaa

SEQ ID NO: 2440478 - RNA, 19 nt, Artificial Sequence
  Description of Artificial Sequence: Synthetic oligonucleotide
  Sense strand starting at position 2939 of SEQ ID NO: 1886985
uuuguuuggguucauggaa

SEQ ID NO: 2440479 - RNA, 19 nt, Artificial Sequence
  Description of Artificial Sequence: Synthetic oligonucleotide
  Antisense strand to SEQ ID NO: 2440478
uuccaugaacccaaacaaa

SEQ ID NO: 2440480 - RNA, 19 nt, Artificial Sequence
  Description of Artificial Sequence: Synthetic oligonucleotide
  Sense strand starting at position 2969 of SEQ ID NO: 1886985
cgucuucuccauuaaauag

SEQ ID NO: 2440481 - RNA, 19 nt, Artificial Sequence
  Description of Artificial Sequence: Synthetic oligonucleotide
  Antisense strand to SEQ ID NO: 2440480
cuauuuaauggagaagacg

SEQ ID NO: 2440482 - RNA, 19 nt, Artificial Sequence
  Description of Artificial Sequence: Synthetic oligonucleotide
  Sense strand starting at position 3041 of SEQ ID NO: 1886985
agguuaagaucucuguuau

SEQ ID NO: 2440483 - RNA, 19 nt, Artificial Sequence
  Description of Artificial Sequence: Synthetic oligonucleotide
  Antisense strand to SEQ ID NO: 2440482
auaacagagaucuuaaccu

SEQ ID NO: 2440484 - RNA, 19 nt, Artificial Sequence
  Description of Artificial Sequence: Synthetic oligonucleotide
  Sense strand starting at position 3140 of SEQ ID NO: 1886985
ggcccugagcaauaaacaa

SEQ ID NO: 2440485 - RNA, 19 nt, Artificial Sequence
  Description of Artificial Sequence: Synthetic oligonucleotide
  Antisense strand to SEQ ID NO: 2440484
uuguuuauugcucagggcc

SEQ ID NO: 2440486 - RNA, 19 nt, Artificial Sequence
  Description of Artificial Sequence: Synthetic oligonucleotide
  Sense strand starting at position 3188 of SEQ ID NO: 1886985
uuuguucuuugauuaggau

SEQ ID NO: 2440487 - RNA, 19 nt, Artificial Sequence
  Description of Artificial Sequence: Synthetic oligonucleotide
  Antisense strand to SEQ ID NO: 2440486
auccuaaucaaagaacaaa

SEQ ID NO: 2440488 - RNA, 19 nt, Artificial Sequence
  Description of Artificial Sequence: Synthetic oligonucleotide
  Sense strand starting at position 3189 of SEQ ID NO: 1886985
uuguucuuugauuaggaua

SEQ ID NO: 2440489 - RNA, 19 nt, Artificial Sequence
  Description of Artificial Sequence: Synthetic oligonucleotide
  Antisense strand to SEQ ID NO: 2440488
uauccuaaucaaagaacaa

SEQ ID NO: 2440490 - RNA, 19 nt, Artificial Sequence
  Description of Artificial Sequence: Synthetic oligonucleotide
  Sense strand starting at position 3252 of SEQ ID NO: 1886985
aggaaauguaugugagagu

SEQ ID NO: 2440491 - RNA, 19 nt, Artificial Sequence
  Description of Artificial Sequence: Synthetic oligonucleotide
  Antisense strand to SEQ ID NO: 2440490
acucucacauacauuuccu

SEQ ID NO: 2440492 - RNA, 19 nt, Artificial Sequence
  Description of Artificial Sequence: Synthetic oligonucleotide
  Sense strand starting at position 3306 of SEQ ID NO: 1886985
uuguuuagacuugaccaau

SEQ ID NO: 2440493 - RNA, 19 nt, Artificial Sequence
  Description of Artificial Sequence: Synthetic oligonucleotide
  Antisense strand to SEQ ID NO: 2440492
auuggucaagucuaaacaa

SEQ ID NO: 2440494 - RNA, 19 nt, Artificial Sequence
  Description of Artificial Sequence: Synthetic oligonucleotide
  Sense strand starting at position 3511 of SEQ ID NO: 1886985
cuuuguuaacugugauuuc

SEQ ID NO: 2440495 - RNA, 19 nt, Artificial Sequence
  Description of Artificial Sequence: Synthetic oligonucleotide
  Antisense strand to SEQ ID NO: 2440494
gaaaucacaguuaacaaag

SEQ ID NO: 2440496 - RNA, 19 nt, Artificial Sequence
  Description of Artificial Sequence: Synthetic oligonucleotide
  Sense strand starting at position 3594 of SEQ ID NO: 1886985
uuuaauugugguuagggaa

SEQ ID NO: 2440497 - RNA, 19 nt, Artificial Sequence
  Description of Artificial Sequence: Synthetic oligonucleotide
  Antisense strand to SEQ ID NO: 2440496
uucccuaaccacaauuaaa

SEQ ID NO: 2440498 - RNA, 19 nt, Artificial Sequence
  Description of Artificial Sequence: Synthetic oligonucleotide
  Sense strand starting at position 3664 of SEQ ID NO: 1886985
uaucaauaagcaggugaua

SEQ ID NO: 2440499 - RNA, 19 nt, Artificial Sequence
  Description of Artificial Sequence: Synthetic oligonucleotide
  Antisense strand to SEQ ID NO: 2440498
uaucaccugcuuauugaua

SEQ ID NO: 2440500 - RNA, 19 nt, Artificial Sequence
  Description of Artificial Sequence: Synthetic oligonucleotide
  Sense strand starting at position 3735 of SEQ ID NO: 1886985
ucguauugcaaucaggaga

SEQ ID NO: 2440501 - RNA, 19 nt, Artificial Sequence
  Description of Artificial Sequence: Synthetic oligonucleotide
  Antisense strand to SEQ ID NO: 2440500
ucuccugauugcaauacga

SEQ ID NO: 2440502 - RNA, 19 nt, Artificial Sequence
  Description of Artificial Sequence: Synthetic oligonucleotide
  Sense strand starting at position 3813 of SEQ ID NO: 1886985
ucuuuaggagcuuacgauu

SEQ ID NO: 2440503 - RNA, 19 nt, Artificial Sequence
  Description of Artificial Sequence: Synthetic oligonucleotide
  Antisense strand to SEQ ID NO: 2440502
aaucguaagcuccuaaaga

SEQ ID NO: 2440504 - RNA, 19 nt, Artificial Sequence
  Description of Artificial Sequence: Synthetic oligonucleotide
  Sense strand starting at position 3949 of SEQ ID NO: 1886985
cuuggaaucuugccuauag

SEQ ID NO: 2440505 - RNA, 19 nt, Artificial Sequence
  Description of Artificial Sequence: Synthetic oligonucleotide
  Antisense strand to SEQ ID NO: 2440504
cuauaggcaagauuccaag

SEQ ID NO: 2440506 - RNA, 19 nt, Artificial Sequence
  Description of Artificial Sequence: Synthetic oligonucleotide
  Sense strand starting at position 3950 of SEQ ID NO: 1886985
uuggaaucuugccuauaga

SEQ ID NO: 2440507 - RNA, 19 nt, Artificial Sequence
  Description of Artificial Sequence: Synthetic oligonucleotide
  Antisense strand to SEQ ID NO: 2440506
ucuauaggcaagauuccaa

SEQ ID NO: 2440508 - RNA, 19 nt, Artificial Sequence
  Description of Artificial Sequence: Synthetic oligonucleotide
  Sense strand starting at position 3983 of SEQ ID NO: 1886985
ccugaagaauagcauuuau

SEQ ID NO: 2440509 - RNA, 19 nt, Artificial Sequence
  Description of Artificial Sequence: Synthetic oligonucleotide
  Antisense strand to SEQ ID NO: 2440508
auaaaugcuauucuucagg

SEQ ID NO: 2440510 - RNA, 19 nt, Artificial Sequence
  Description of Artificial Sequence: Synthetic oligonucleotide
  Sense strand starting at position 77 of SEQ ID NO: 1886984
ugucucugaacucggauaa

SEQ ID NO: 2440511 - RNA, 19 nt, Artificial Sequence
  Description of Artificial Sequence: Synthetic oligonucleotide
  Antisense strand to SEQ ID NO: 2440510
uuauccgaguucagagaca

SEQ ID NO: 2440512 - RNA, 19 nt, Artificial Sequence
  Description of Artificial Sequence: Synthetic oligonucleotide
  Sense strand starting at position 78 of SEQ ID NO: 1886984
gucucugaacucggauaaa

SEQ ID NO: 2440513 - RNA, 19 nt, Artificial Sequence
  Description of Artificial Sequence: Synthetic oligonucleotide
  Antisense strand to SEQ ID NO: 2440512
uuuauccgaguucagagac

SEQ ID NO: 2440514 - RNA, 19 nt, Artificial Sequence
  Description of Artificial Sequence: Synthetic oligonucleotide
  Sense strand starting at position 116 of SEQ ID NO: 1886984
aguaccacugaguauauua

SEQ ID NO: 2440515 - RNA, 19 nt, Artificial Sequence
  Description of Artificial Sequence: Synthetic oligonucleotide
  Antisense strand to SEQ ID NO: 2440514
uaauauacucagugguacu

SEQ ID NO: 2440516 - RNA, 19 nt, Artificial Sequence
  Description of Artificial Sequence: Synthetic oligonucleotide
  Sense strand starting at position 346 of SEQ ID NO: 1886984
gcaugcugccgagcugauu

SEQ ID NO: 2440517 - RNA, 19 nt, Artificial Sequence
  Description of Artificial Sequence: Synthetic oligonucleotide
  Antisense strand to SEQ ID NO: 2440516
aaucagcucggcagcaugc

SEQ ID NO: 2440518 - RNA, 19 nt, Artificial Sequence
  Description of Artificial Sequence: Synthetic oligonucleotide
  Sense strand starting at position 1700 of SEQ ID NO: 1886984
gaguauugugccgccagua

SEQ ID NO: 2440519 - RNA, 19 nt, Artificial Sequence
  Description of Artificial Sequence: Synthetic oligonucleotide
  Antisense strand to SEQ ID NO: 2440518
uacuggcggcacaauacuc

SEQ ID NO: 2440520 - RNA, 19 nt, Artificial Sequence
  Description of Artificial Sequence: Synthetic oligonucleotide
  Sense strand starting at position 1819 of SEQ ID NO: 1886984
ucaggcucugcugaagauu

SEQ ID NO: 2440521 - RNA, 19 nt, Artificial Sequence
  Description of Artificial Sequence: Synthetic oligonucleotide
  Antisense strand to SEQ ID NO: 2440520
aaucuucagcagagccuga

SEQ ID NO: 2440522 - RNA, 19 nt, Artificial Sequence
  Description of Artificial Sequence: Synthetic oligonucleotide
  Sense strand starting at position 1827 of SEQ ID NO: 1886984
ugcugaagauucuuagauc

SEQ ID NO: 2440523 - RNA, 19 nt, Artificial Sequence
  Description of Artificial Sequence: Synthetic oligonucleotide
  Antisense strand to SEQ ID NO: 2440522
gaucuaagaaucuucagca

SEQ ID NO: 2440524 - RNA, 19 nt, Artificial Sequence
  Description of Artificial Sequence: Synthetic oligonucleotide
  Sense strand starting at position 1891 of SEQ ID NO: 1886984
auguucauugucgagggau

SEQ ID NO: 2440525 - RNA, 19 nt, Artificial Sequence
  Description of Artificial Sequence: Synthetic oligonucleotide
  Antisense strand to SEQ ID NO: 2440524
aucccucgacaaugaacau

SEQ ID NO: 2440526 - RNA, 19 nt, Artificial Sequence
  Description of Artificial Sequence: Synthetic oligonucleotide
  Sense strand starting at position 2082 of SEQ ID NO: 1886984
gcggauccauugucagaaa

SEQ ID NO: 2440527 - RNA, 19 nt, Artificial Sequence
  Description of Artificial Sequence: Synthetic oligonucleotide
  Antisense strand to SEQ ID NO: 2440526
uuucugacaauggauccgc

SEQ ID NO: 2440528 - RNA, 19 nt, Artificial Sequence
  Description of Artificial Sequence: Synthetic oligonucleotide
  Sense strand starting at position 2270 of SEQ ID NO: 1886984
ggaacaccugagugaugcu

SEQ ID NO: 2440529 - RNA, 19 nt, Artificial Sequence
  Description of Artificial Sequence: Synthetic oligonucleotide
  Antisense strand to SEQ ID NO: 2440528
agcaucacucagguguucc

SEQ ID NO: 2440530 - RNA, 19 nt, Artificial Sequence
  Description of Artificial Sequence: Synthetic oligonucleotide
  Sense strand starting at position 2291 of SEQ ID NO: 1886984
uuucccaguugauuagaua

SEQ ID NO: 2440531 - RNA, 19 nt, Artificial Sequence
  Description of Artificial Sequence: Synthetic oligonucleotide
  Antisense strand to SEQ ID NO: 2440530
uaucuaaucaacugggaaa

SEQ ID NO: 2440532 - RNA, 19 nt, Artificial Sequence
  Description of Artificial Sequence: Synthetic oligonucleotide
  Sense strand starting at position 2292 of SEQ ID NO: 1886984
uucccaguugauuagauau

SEQ ID NO: 2440533 - RNA, 19 nt, Artificial Sequence
  Description of Artificial Sequence: Synthetic oligonucleotide
  Antisense strand to SEQ ID NO: 2440532
auaucuaaucaacugggaa

SEQ ID NO: 2440534 - RNA, 19 nt, Artificial Sequence
  Description of Artificial Sequence: Synthetic oligonucleotide
  Sense strand starting at position 2316 of SEQ ID NO: 1886984
gugcaaguuucuccuauuu

SEQ ID NO: 2440535 - RNA, 19 nt, Artificial Sequence
  Description of Artificial Sequence: Synthetic oligonucleotide
  Antisense strand to SEQ ID NO: 2440534
aaauaggagaaacuugcac

SEQ ID NO: 2440536 - RNA, 19 nt, Artificial Sequence
  Description of Artificial Sequence: Synthetic oligonucleotide
  Sense strand starting at position 2342 of SEQ ID NO: 1886984
guguuugggaucuaugauc

SEQ ID NO: 2440537 - RNA, 19 nt, Artificial Sequence
  Description of Artificial Sequence: Synthetic oligonucleotide
  Antisense strand to SEQ ID NO: 2440536
gaucauagaucccaaacac

SEQ ID NO: 2440538 - RNA, 19 nt, Artificial Sequence
  Description of Artificial Sequence: Synthetic oligonucleotide
  Sense strand starting at position 2351 of SEQ ID NO: 1886984
aucuaugaucaaggcauaa

SEQ ID NO: 2440539 - RNA, 19 nt, Artificial Sequence
  Description of Artificial Sequence: Synthetic oligonucleotide
  Antisense strand to SEQ ID NO: 2440538
uuaugccuugaucauagau

SEQ ID NO: 2440540 - RNA, 19 nt, Artificial Sequence
  Description of Artificial Sequence: Synthetic oligonucleotide
  Sense strand starting at position 2461 of SEQ ID NO: 1886984
acaugcuuuguugacaaca

SEQ ID NO: 2440541 - RNA, 19 nt, Artificial Sequence
  Description of Artificial Sequence: Synthetic oligonucleotide
  Antisense strand to SEQ ID NO: 2440540
uguugucaacaaagcaugu

SEQ ID NO: 2440542 - RNA, 19 nt, Artificial Sequence
  Description of Artificial Sequence: Synthetic oligonucleotide
  Sense strand starting at position 2524 of SEQ ID NO: 1886984
ggugucugagcugaauaca

SEQ ID NO: 2440543 - RNA, 19 nt, Artificial Sequence
  Description of Artificial Sequence: Synthetic oligonucleotide
  Antisense strand to SEQ ID NO: 2440542
uguauucagcucagacacc

SEQ ID NO: 2440544 - RNA, 19 nt, Artificial Sequence
  Description of Artificial Sequence: Synthetic oligonucleotide
  Sense strand starting at position 2652 of SEQ ID NO: 1886984
agguaauaccuuuaguaua

SEQ ID NO: 2440545 - RNA, 19 nt, Artificial Sequence
  Description of Artificial Sequence: Synthetic oligonucleotide
  Antisense strand to SEQ ID NO: 2440544
uauacuaaagguauuaccu

SEQ ID NO: 2440546 - RNA, 19 nt, Artificial Sequence
  Description of Artificial Sequence: Synthetic oligonucleotide
  Sense strand starting at position 2696 of SEQ ID NO: 1886984
uuuagugauccuggaacug

SEQ ID NO: 2440547 - RNA, 19 nt, Artificial Sequence
  Description of Artificial Sequence: Synthetic oligonucleotide
  Antisense strand to SEQ ID NO: 2440546
caguuccaggaucacuaaa

SEQ ID NO: 2440548 - RNA, 19 nt, Artificial Sequence
  Description of Artificial Sequence: Synthetic oligonucleotide
  Sense strand starting at position 2734 of SEQ ID NO: 1886984
uuuguuuggguucauggaa

SEQ ID NO: 2440549 - RNA, 19 nt, Artificial Sequence
  Description of Artificial Sequence: Synthetic oligonucleotide
  Antisense strand to SEQ ID NO: 2440548
uuccaugaacccaaacaaa

SEQ ID NO: 2440550 - RNA, 19 nt, Artificial Sequence
  Description of Artificial Sequence: Synthetic oligonucleotide
  Sense strand starting at position 2764 of SEQ ID NO: 1886984
cgucuucuccauuaaauag

SEQ ID NO: 2440551 - RNA, 19 nt, Artificial Sequence
  Description of Artificial Sequence: Synthetic oligonucleotide
  Antisense strand to SEQ ID NO: 2440550
cuauuuaauggagaagacg

SEQ ID NO: 2440552 - RNA, 19 nt, Artificial Sequence
  Description of Artificial Sequence: Synthetic oligonucleotide
  Sense strand starting at position 2792 of SEQ ID NO: 1886984
uuuguaugccacuaaaguc

SEQ ID NO: 2440553 - RNA, 19 nt, Artificial Sequence
  Description of Artificial Sequence: Synthetic oligonucleotide
  Antisense strand to SEQ ID NO: 2440552
gacuuuaguggcauacaaa

SEQ ID NO: 2440554 - RNA, 19 nt, Artificial Sequence
  Description of Artificial Sequence: Synthetic oligonucleotide
  Sense strand starting at position 2836 of SEQ ID NO: 1886984
agguuaagaucucuguuau

SEQ ID NO: 2440555 - RNA, 19 nt, Artificial Sequence
  Description of Artificial Sequence: Synthetic oligonucleotide
  Antisense strand to SEQ ID NO: 2440554
auaacagagaucuuaaccu

SEQ ID NO: 2440556 - RNA, 19 nt, Artificial Sequence
  Description of Artificial Sequence: Synthetic oligonucleotide
  Sense strand starting at position 2837 of SEQ ID NO: 1886984
gguuaagaucucuguuaug

SEQ ID NO: 2440557 - RNA, 19 nt, Artificial Sequence
  Description of Artificial Sequence: Synthetic oligonucleotide
  Antisense strand to SEQ ID NO: 2440556
cauaacagagaucuuaacc

SEQ ID NO: 2440558 - RNA, 19 nt, Artificial Sequence
  Description of Artificial Sequence: Synthetic oligonucleotide
  Sense strand starting at position 2935 of SEQ ID NO: 1886984
ggcccugagcaauaaacaa

SEQ ID NO: 2440559 - RNA, 19 nt, Artificial Sequence
  Description of Artificial Sequence: Synthetic oligonucleotide
  Antisense strand to SEQ ID NO: 2440558
uuguuuauugcucagggcc

SEQ ID NO: 2440560 - RNA, 19 nt, Artificial Sequence
  Description of Artificial Sequence: Synthetic oligonucleotide
  Sense strand starting at position 2983 of SEQ ID NO: 1886984
uuuguucuuugauuaggau

SEQ ID NO: 2440561 - RNA, 19 nt, Artificial Sequence
  Description of Artificial Sequence: Synthetic oligonucleotide
  Antisense strand to SEQ ID NO: 2440560
auccuaaucaaagaacaaa

SEQ ID NO: 2440562 - RNA, 19 nt, Artificial Sequence
  Description of Artificial Sequence: Synthetic oligonucleotide
  Sense strand starting at position 2984 of SEQ ID NO: 1886984
uuguucuuugauuaggaua

SEQ ID NO: 2440563 - RNA, 19 nt, Artificial Sequence
  Description of Artificial Sequence: Synthetic oligonucleotide
  Antisense strand to SEQ ID NO: 2440562
uauccuaaucaaagaacaa

SEQ ID NO: 2440564 - RNA, 19 nt, Artificial Sequence
  Description of Artificial Sequence: Synthetic oligonucleotide
  Sense strand starting at position 3047 of SEQ ID NO: 1886984
aggaaauguaugugagagu

SEQ ID NO: 2440565 - RNA, 19 nt, Artificial Sequence
  Description of Artificial Sequence: Synthetic oligonucleotide
  Antisense strand to SEQ ID NO: 2440564
acucucacauacauuuccu

SEQ ID NO: 2440566 - RNA, 19 nt, Artificial Sequence
  Description of Artificial Sequence: Synthetic oligonucleotide
  Sense strand starting at position 3101 of SEQ ID NO: 1886984
uuguuuagacuugaccaau

SEQ ID NO: 2440567 - RNA, 19 nt, Artificial Sequence
  Description of Artificial Sequence: Synthetic oligonucleotide
  Antisense strand to SEQ ID NO: 2440566
auuggucaagucuaaacaa

SEQ ID NO: 2440568 - RNA, 19 nt, Artificial Sequence
  Description of Artificial Sequence: Synthetic oligonucleotide
  Sense strand starting at position 3220 of SEQ ID NO: 1886984
ggcugaaguugaucugauc

SEQ ID NO: 2440569 - RNA, 19 nt, Artificial Sequence
  Description of Artificial Sequence: Synthetic oligonucleotide
  Antisense strand to SEQ ID NO: 2440568
gaucagaucaacuucagcc

SEQ ID NO: 2440570 - RNA, 19 nt, Artificial Sequence
  Description of Artificial Sequence: Synthetic oligonucleotide
  Sense strand starting at position 3306 of SEQ ID NO: 1886984
cuuuguuaacugugauuuc

SEQ ID NO: 2440571 - RNA, 19 nt, Artificial Sequence
  Description of Artificial Sequence: Synthetic oligonucleotide
  Antisense strand to SEQ ID NO: 2440570
gaaaucacaguuaacaaag

SEQ ID NO: 2440572 - RNA, 19 nt, Artificial Sequence
  Description of Artificial Sequence: Synthetic oligonucleotide
  Sense strand starting at position 3389 of SEQ ID NO: 1886984
uuuaauugugguuagggaa

SEQ ID NO: 2440573 - RNA, 19 nt, Artificial Sequence
  Description of Artificial Sequence: Synthetic oligonucleotide
  Antisense strand to SEQ ID NO: 2440572
uucccuaaccacaauuaaa

SEQ ID NO: 2440574 - RNA, 19 nt, Artificial Sequence
  Description of Artificial Sequence: Synthetic oligonucleotide
  Sense strand starting at position 3459 of SEQ ID NO: 1886984
uaucaauaagcaggugaua

SEQ ID NO: 2440575 - RNA, 19 nt, Artificial Sequence
  Description of Artificial Sequence: Synthetic oligonucleotide
  Antisense strand to SEQ ID NO: 2440574
uaucaccugcuuauugaua

SEQ ID NO: 2440576 - RNA, 19 nt, Artificial Sequence
  Description of Artificial Sequence: Synthetic oligonucleotide
  Sense strand starting at position 3530 of SEQ ID NO: 1886984
ucguauugcaaucaggaga

SEQ ID NO: 2440577 - RNA, 19 nt, Artificial Sequence
  Description of Artificial Sequence: Synthetic oligonucleotide
  Antisense strand to SEQ ID NO: 2440576
ucuccugauugcaauacga

SEQ ID NO: 2440578 - RNA, 19 nt, Artificial Sequence
  Description of Artificial Sequence: Synthetic oligonucleotide
  Sense strand starting at position 3608 of SEQ ID NO: 1886984
ucuuuaggagcuuacgauu

SEQ ID NO: 2440579 - RNA, 19 nt, Artificial Sequence
  Description of Artificial Sequence: Synthetic oligonucleotide
  Antisense strand to SEQ ID NO: 2440578
aaucguaagcuccuaaaga

SEQ ID NO: 2440580 - RNA, 19 nt, Artificial Sequence
  Description of Artificial Sequence: Synthetic oligonucleotide
  Sense strand starting at position 3744 of SEQ ID NO: 1886984
cuuggaaucuugccuauag

SEQ ID NO: 2440581 - RNA, 19 nt, Artificial Sequence
  Description of Artificial Sequence: Synthetic oligonucleotide
  Antisense strand to SEQ ID NO: 2440580
cuauaggcaagauuccaag

SEQ ID NO: 2440582 - RNA, 19 nt, Artificial Sequence
  Description of Artificial Sequence: Synthetic oligonucleotide
  Sense strand starting at position 3745 of SEQ ID NO: 1886984
uuggaaucuugccuauaga

SEQ ID NO: 2440583 - RNA, 19 nt, Artificial Sequence
  Description of Artificial Sequence: Synthetic oligonucleotide
  Antisense strand to SEQ ID NO: 2440582
ucuauaggcaagauuccaa

SEQ ID NO: 2440584 - RNA, 19 nt, Artificial Sequence
  Description of Artificial Sequence: Synthetic oligonucleotide
  Sense strand starting at position 3778 of SEQ ID NO: 1886984
ccugaagaauagcauuuau

SEQ ID NO: 2440585 - RNA, 19 nt, Artificial Sequence
  Description of Artificial Sequence: Synthetic oligonucleotide
  Antisense strand to SEQ ID NO: 2440584
auaaaugcuauucuucagg

SEQ ID NO: 2440586 - RNA, 19 nt, Artificial Sequence
  Description of Artificial Sequence: Synthetic oligonucleotide
  Sense strand starting at position 3808 of SEQ ID NO: 1886984
ugcagcauacccuauaagu

SEQ ID NO: 2440587 - RNA, 19 nt, Artificial Sequence
  Description of Artificial Sequence: Synthetic oligonucleotide
  Antisense strand to SEQ ID NO: 2440586
acuuauaggguaugcugca

SEQ ID NO: 2440588 - RNA, 19 nt, Artificial Sequence
  Description of Artificial Sequence: Synthetic oligonucleotide
  Sense strand starting at position 3880 of SEQ ID NO: 1886984
gcugccagugcuuuauauu

SEQ ID NO: 2440589 - RNA, 19 nt, Artificial Sequence
  Description of Artificial Sequence: Synthetic oligonucleotide
  Antisense strand to SEQ ID NO: 2440588
aauauaaagcacuggcagc

SEQ ID NO: 2440590 - RNA, 19 nt, Artificial Sequence
  Description of Artificial Sequence: Synthetic oligonucleotide
  Sense strand starting at position 41 of SEQ ID NO: 1886987
uuucguaucaaauguagag

SEQ ID NO: 2440591 - RNA, 19 nt, Artificial Sequence
  Description of Artificial Sequence: Synthetic oligonucleotide
  Antisense strand to SEQ ID NO: 2440590
cucuacauuugauacgaaa

SEQ ID NO: 2440592 - RNA, 19 nt, Artificial Sequence
  Description of Artificial Sequence: Synthetic oligonucleotide
  Sense strand starting at position 45 of SEQ ID NO: 1886987
guaucaaauguagaggcau

SEQ ID NO: 2440593 - RNA, 19 nt, Artificial Sequence
  Description of Artificial Sequence: Synthetic oligonucleotide
  Antisense strand to SEQ ID NO: 2440592
augccucuacauuugauac

SEQ ID NO: 2440594 - RNA, 19 nt, Artificial Sequence
  Description of Artificial Sequence: Synthetic oligonucleotide
  Sense strand starting at position 102 of SEQ ID NO: 1886987
agaugacaucuccgacaga

SEQ ID NO: 2440595 - RNA, 19 nt, Artificial Sequence
  Description of Artificial Sequence: Synthetic oligonucleotide
  Antisense strand to SEQ ID NO: 2440594
ucugucggagaugucaucu

SEQ ID NO: 2440596 - RNA, 19 nt, Artificial Sequence
  Description of Artificial Sequence: Synthetic oligonucleotide
  Sense strand starting at position 308 of SEQ ID NO: 1886987
auaguugucccugaguuac

SEQ ID NO: 2440597 - RNA, 19 nt, Artificial Sequence
  Description of Artificial Sequence: Synthetic oligonucleotide
  Antisense strand to SEQ ID NO: 2440596
guaacucagggacaacuau

SEQ ID NO: 2440598 - RNA, 19 nt, Artificial Sequence
  Description of Artificial Sequence: Synthetic oligonucleotide
  Sense strand starting at position 333 of SEQ ID NO: 1886987
auuugcugcuugcugaaga

SEQ ID NO: 2440599 - RNA, 19 nt, Artificial Sequence
  Description of Artificial Sequence: Synthetic oligonucleotide
  Antisense strand to SEQ ID NO: 2440598
ucuucagcaagcagcaaau

SEQ ID NO: 2440600 - RNA, 19 nt, Artificial Sequence
  Description of Artificial Sequence: Synthetic oligonucleotide
  Sense strand starting at position 678 of SEQ ID NO: 1886987
aaaggauuguauuccaagu

SEQ ID NO: 2440601 - RNA, 19 nt, Artificial Sequence
  Description of Artificial Sequence: Synthetic oligonucleotide
  Antisense strand to SEQ ID NO: 2440600
acuuggaauacaauccuuu

SEQ ID NO: 2440602 - RNA, 19 nt, Artificial Sequence
  Description of Artificial Sequence: Synthetic oligonucleotide
  Sense strand starting at position 706 of SEQ ID NO: 1886987
gugugcagugcugacauuu

SEQ ID NO: 2440603 - RNA, 19 nt, Artificial Sequence
  Description of Artificial Sequence: Synthetic oligonucleotide
  Antisense strand to SEQ ID NO: 2440602
aaaugucagcacugcacac

SEQ ID NO: 2440604 - RNA, 19 nt, Artificial Sequence
  Description of Artificial Sequence: Synthetic oligonucleotide
  Sense strand starting at position 772 of SEQ ID NO: 1886987
gucacaaaguucuuaaaga

SEQ ID NO: 2440605 - RNA, 19 nt, Artificial Sequence
  Description of Artificial Sequence: Synthetic oligonucleotide
  Antisense strand to SEQ ID NO: 2440604
ucuuuaagaacuuugugac

SEQ ID NO: 2440606 - RNA, 19 nt, Artificial Sequence
  Description of Artificial Sequence: Synthetic oligonucleotide
  Sense strand starting at position 1065 of SEQ ID NO: 1886987
acgaauucucacugauucu

SEQ ID NO: 2440607 - RNA, 19 nt, Artificial Sequence
  Description of Artificial Sequence: Synthetic oligonucleotide
  Antisense strand to SEQ ID NO: 2440606
agaaucagugagaauucgu

SEQ ID NO: 2440608 - RNA, 19 nt, Artificial Sequence
  Description of Artificial Sequence: Synthetic oligonucleotide
  Sense strand starting at position 1313 of SEQ ID NO: 1886987
acgggaucuauacgucaaa

SEQ ID NO: 2440609 - RNA, 19 nt, Artificial Sequence
  Description of Artificial Sequence: Synthetic oligonucleotide
  Antisense strand to SEQ ID NO: 2440608
uuugacguauagaucccgu

SEQ ID NO: 2440610 - RNA, 19 nt, Artificial Sequence
  Description of Artificial Sequence: Synthetic oligonucleotide
  Sense strand starting at position 1314 of SEQ ID NO: 1886987
cgggaucuauacgucaaau

SEQ ID NO: 2440611 - RNA, 19 nt, Artificial Sequence
  Description of Artificial Sequence: Synthetic oligonucleotide
  Antisense strand to SEQ ID NO: 2440610
auuugacguauagaucccg

SEQ ID NO: 2440612 - RNA, 19 nt, Artificial Sequence
  Description of Artificial Sequence: Synthetic oligonucleotide
  Sense strand starting at position 1480 of SEQ ID NO: 1886987
ucuggcacucaguauuaua

SEQ ID NO: 2440613 - RNA, 19 nt, Artificial Sequence
  Description of Artificial Sequence: Synthetic oligonucleotide
  Antisense strand to SEQ ID NO: 2440612
uauaauacugagugccaga

SEQ ID NO: 2440614 - RNA, 19 nt, Artificial Sequence
  Description of Artificial Sequence: Synthetic oligonucleotide
  Sense strand starting at position 1618 of SEQ ID NO: 1886987
aucgcaauuucuuuguaca

SEQ ID NO: 2440615 - RNA, 19 nt, Artificial Sequence
  Description of Artificial Sequence: Synthetic oligonucleotide
  Antisense strand to SEQ ID NO: 2440614
uguacaaagaaauugcgau

SEQ ID NO: 2440616 - RNA, 19 nt, Artificial Sequence
  Description of Artificial Sequence: Synthetic oligonucleotide
  Sense strand starting at position 1619 of SEQ ID NO: 1886987
ucgcaauuucuuuguacaa

SEQ ID NO: 2440617 - RNA, 19 nt, Artificial Sequence
  Description of Artificial Sequence: Synthetic oligonucleotide
  Antisense strand to SEQ ID NO: 2440616
uuguacaaagaaauugcga

SEQ ID NO: 2440618 - RNA, 19 nt, Artificial Sequence
  Description of Artificial Sequence: Synthetic oligonucleotide
  Sense strand starting at position 1620 of SEQ ID NO: 1886987
cgcaauuucuuuguacaau

SEQ ID NO: 2440619 - RNA, 19 nt, Artificial Sequence
  Description of Artificial Sequence: Synthetic oligonucleotide
  Antisense strand to SEQ ID NO: 2440618
auuguacaaagaaauugcg

SEQ ID NO: 2440620 - RNA, 19 nt, Artificial Sequence
  Description of Artificial Sequence: Synthetic oligonucleotide
  Sense strand starting at position 1626 of SEQ ID NO: 1886987
uucuuuguacaauagguga

SEQ ID NO: 2440621 - RNA, 19 nt, Artificial Sequence
  Description of Artificial Sequence: Synthetic oligonucleotide
  Antisense strand to SEQ ID NO: 2440620
ucaccuauuguacaaagaa

SEQ ID NO: 2440622 - RNA, 19 nt, Artificial Sequence
  Description of Artificial Sequence: Synthetic oligonucleotide
  Sense strand starting at position 1628 of SEQ ID NO: 1886987
cuuuguacaauaggugaga

SEQ ID NO: 2440623 - RNA, 19 nt, Artificial Sequence
  Description of Artificial Sequence: Synthetic oligonucleotide
  Antisense strand to SEQ ID NO: 2440622
ucucaccuauuguacaaag

SEQ ID NO: 2440624 - RNA, 19 nt, Artificial Sequence
  Description of Artificial Sequence: Synthetic oligonucleotide
  Sense strand starting at position 1707 of SEQ ID NO: 1886987
gagaguaaauaggauuugu

SEQ ID NO: 2440625 - RNA, 19 nt, Artificial Sequence
  Description of Artificial Sequence: Synthetic oligonucleotide
  Antisense strand to SEQ ID NO: 2440624
acaaauccuauuuacucuc

SEQ ID NO: 2440626 - RNA, 19 nt, Artificial Sequence
  Description of Artificial Sequence: Synthetic oligonucleotide
  Sense strand starting at position 1716 of SEQ ID NO: 1886987
uaggauuuguaauagcaaa

SEQ ID NO: 2440627 - RNA, 19 nt, Artificial Sequence
  Description of Artificial Sequence: Synthetic oligonucleotide
  Antisense strand to SEQ ID NO: 2440626
uuugcuauuacaaauccua

SEQ ID NO: 2440628 - RNA, 19 nt, Artificial Sequence
  Description of Artificial Sequence: Synthetic oligonucleotide
  Sense strand starting at position 1813 of SEQ ID NO: 1886987
aagucagauuugcuauugu

SEQ ID NO: 2440629 - RNA, 19 nt, Artificial Sequence
  Description of Artificial Sequence: Synthetic oligonucleotide
  Antisense strand to SEQ ID NO: 2440628
acaauagcaaaucugacuu

SEQ ID NO: 2440630 - RNA, 19 nt, Artificial Sequence
  Description of Artificial Sequence: Synthetic oligonucleotide
  Sense strand starting at position 1988 of SEQ ID NO: 1886987
agugaugacuccuucgaag

SEQ ID NO: 2440631 - RNA, 19 nt, Artificial Sequence
  Description of Artificial Sequence: Synthetic oligonucleotide
  Antisense strand to SEQ ID NO: 2440630
cuucgaaggagucaucacu

SEQ ID NO: 2440632 - RNA, 19 nt, Artificial Sequence
  Description of Artificial Sequence: Synthetic oligonucleotide
  Sense strand starting at position 1990 of SEQ ID NO: 1886987
ugaugacuccuucgaaguc

SEQ ID NO: 2440633 - RNA, 19 nt, Artificial Sequence
  Description of Artificial Sequence: Synthetic oligonucleotide
  Antisense strand to SEQ ID NO: 2440632
gacuucgaaggagucauca

SEQ ID NO: 2440634 - RNA, 19 nt, Artificial Sequence
  Description of Artificial Sequence: Synthetic oligonucleotide
  Sense strand starting at position 1999 of SEQ ID NO: 1886987
cuucgaagucaucauuaaa

SEQ ID NO: 2440635 - RNA, 19 nt, Artificial Sequence
  Description of Artificial Sequence: Synthetic oligonucleotide
  Antisense strand to SEQ ID NO: 2440634
uuuaaugaugacuucgaag

SEQ ID NO: 2440636 - RNA, 19 nt, Artificial Sequence
  Description of Artificial Sequence: Synthetic oligonucleotide
  Sense strand starting at position 2023 of SEQ ID NO: 1886987
aguaauugcucauuaagua

SEQ ID NO: 2440637 - RNA, 19 nt, Artificial Sequence
  Description of Artificial Sequence: Synthetic oligonucleotide
  Antisense strand to SEQ ID NO: 2440636
uacuuaaugagcaauuacu

SEQ ID NO: 2440638 - RNA, 19 nt, Artificial Sequence
  Description of Artificial Sequence: Synthetic oligonucleotide
  Sense strand starting at position 2024 of SEQ ID NO: 1886987
guaauugcucauuaaguau

SEQ ID NO: 2440639 - RNA, 19 nt, Artificial Sequence
  Description of Artificial Sequence: Synthetic oligonucleotide
  Antisense strand to SEQ ID NO: 2440638
auacuuaaugagcaauuac

SEQ ID NO: 2440640 - RNA, 19 nt, Artificial Sequence
  Description of Artificial Sequence: Synthetic oligonucleotide
  Sense strand starting at position 2070 of SEQ ID NO: 1886987
aacauucuggcagguaaga

SEQ ID NO: 2440641 - RNA, 19 nt, Artificial Sequence
  Description of Artificial Sequence: Synthetic oligonucleotide
  Antisense strand to SEQ ID NO: 2440640
ucuuaccugccagaauguu

SEQ ID NO: 2440642 - RNA, 19 nt, Artificial Sequence
  Description of Artificial Sequence: Synthetic oligonucleotide
  Sense strand starting at position 2343 of SEQ ID NO: 1886987
uguauuuguggauguacau

SEQ ID NO: 2440643 - RNA, 19 nt, Artificial Sequence
  Description of Artificial Sequence: Synthetic oligonucleotide
  Antisense strand to SEQ ID NO: 2440642
auguacauccacaaauaca

SEQ ID NO: 2440644 - RNA, 19 nt, Artificial Sequence
  Description of Artificial Sequence: Synthetic oligonucleotide
  Sense strand starting at position 2397 of SEQ ID NO: 1886987
auguacaggucuuuacaau

SEQ ID NO: 2440645 - RNA, 19 nt, Artificial Sequence
  Description of Artificial Sequence: Synthetic oligonucleotide
  Antisense strand to SEQ ID NO: 2440644
auuguaaagaccuguacau

SEQ ID NO: 2440646 - RNA, 19 nt, Artificial Sequence
  Description of Artificial Sequence: Synthetic oligonucleotide
  Sense strand starting at position 2398 of SEQ ID NO: 1886987
uguacaggucuuuacaauu

SEQ ID NO: 2440647 - RNA, 19 nt, Artificial Sequence
  Description of Artificial Sequence: Synthetic oligonucleotide
  Antisense strand to SEQ ID NO: 2440646
aauuguaaagaccuguaca

SEQ ID NO: 2440648 - RNA, 19 nt, Artificial Sequence
  Description of Artificial Sequence: Synthetic oligonucleotide
  Sense strand starting at position 2411 of SEQ ID NO: 1886987
acaauucuuccugaagguu

SEQ ID NO: 2440649 - RNA, 19 nt, Artificial Sequence
  Description of Artificial Sequence: Synthetic oligonucleotide
  Antisense strand to SEQ ID NO: 2440648
aaccuucaggaagaauugu

SEQ ID NO: 2440650 - RNA, 19 nt, Artificial Sequence
  Description of Artificial Sequence: Synthetic oligonucleotide
  Sense strand starting at position 2414 of SEQ ID NO: 1886987
auucuuccugaagguuaaa

SEQ ID NO: 2440651 - RNA, 19 nt, Artificial Sequence
  Description of Artificial Sequence: Synthetic oligonucleotide
  Antisense strand to SEQ ID NO: 2440650
uuuaaccuucaggaagaau

SEQ ID NO: 2440652 - RNA, 19 nt, Artificial Sequence
  Description of Artificial Sequence: Synthetic oligonucleotide
  Sense strand starting at position 2456 of SEQ ID NO: 1886987
cguaaucaucuguaaguug

SEQ ID NO: 2440653 - RNA, 19 nt, Artificial Sequence
  Description of Artificial Sequence: Synthetic oligonucleotide
  Antisense strand to SEQ ID NO: 2440652
caacuuacagaugauuacg

SEQ ID NO: 2440654 - RNA, 19 nt, Artificial Sequence
  Description of Artificial Sequence: Synthetic oligonucleotide
  Sense strand starting at position 2488 of SEQ ID NO: 1886987
ucuugucagcauugauaac

SEQ ID NO: 2440655 - RNA, 19 nt, Artificial Sequence
  Description of Artificial Sequence: Synthetic oligonucleotide
  Antisense strand to SEQ ID NO: 2440654
guuaucaaugcugacaaga

SEQ ID NO: 2440656 - RNA, 19 nt, Artificial Sequence
  Description of Artificial Sequence: Synthetic oligonucleotide
  Sense strand starting at position 2917 of SEQ ID NO: 1886987
guauccuuaucaucacaga

SEQ ID NO: 2440657 - RNA, 19 nt, Artificial Sequence
  Description of Artificial Sequence: Synthetic oligonucleotide
  Antisense strand to SEQ ID NO: 2440656
ucugugaugauaaggauac

SEQ ID NO: 2440658 - RNA, 19 nt, Artificial Sequence
  Description of Artificial Sequence: Synthetic oligonucleotide
  Sense strand starting at position 3211 of SEQ ID NO: 1886987
ucuguuggccucguaucau

SEQ ID NO: 2440659 - RNA, 19 nt, Artificial Sequence
  Description of Artificial Sequence: Synthetic oligonucleotide
  Antisense strand to SEQ ID NO: 2440658
augauacgaggccaacaga

SEQ ID NO: 2440660 - RNA, 19 nt, Artificial Sequence
  Description of Artificial Sequence: Synthetic oligonucleotide
  Sense strand starting at position 3230 of SEQ ID NO: 1886987
ccaguuagacuguaaguca

SEQ ID NO: 2440661 - RNA, 19 nt, Artificial Sequence
  Description of Artificial Sequence: Synthetic oligonucleotide
  Antisense strand to SEQ ID NO: 2440660
ugacuuacagucuaacugg

SEQ ID NO: 2440662 - RNA, 19 nt, Artificial Sequence
  Description of Artificial Sequence: Synthetic oligonucleotide
  Sense strand starting at position 3233 of SEQ ID NO: 1886987
guuagacuguaagucaaga

SEQ ID NO: 2440663 - RNA, 19 nt, Artificial Sequence
  Description of Artificial Sequence: Synthetic oligonucleotide
  Antisense strand to SEQ ID NO: 2440662
ucuugacuuacagucuaac

SEQ ID NO: 2440664 - RNA, 19 nt, Artificial Sequence
  Description of Artificial Sequence: Synthetic oligonucleotide
  Sense strand starting at position 3305 of SEQ ID NO: 1886987
gcaugcuaagcgcuuuaca

SEQ ID NO: 2440665 - RNA, 19 nt, Artificial Sequence
  Description of Artificial Sequence: Synthetic oligonucleotide
  Antisense strand to SEQ ID NO: 2440664
uguaaagcgcuuagcaugc

SEQ ID NO: 2440666 - RNA, 19 nt, Artificial Sequence
  Description of Artificial Sequence: Synthetic oligonucleotide
  Sense strand starting at position 3398 of SEQ ID NO: 1886987
ccaauaaauggcugaguuu

SEQ ID NO: 2440667 - RNA, 19 nt, Artificial Sequence
  Description of Artificial Sequence: Synthetic oligonucleotide
  Antisense strand to SEQ ID NO: 2440666
aaacucagccauuuauugg

SEQ ID NO: 2440668 - RNA, 19 nt, Artificial Sequence
  Description of Artificial Sequence: Synthetic oligonucleotide
  Sense strand starting at position 3805 of SEQ ID NO: 1886987
uaauaugugcuuugaaagg

SEQ ID NO: 2440669 - RNA, 19 nt, Artificial Sequence
  Description of Artificial Sequence: Synthetic oligonucleotide
  Antisense strand to SEQ ID NO: 2440668
ccuuucaaagcacauauua

SEQ ID NO: 2440670 - RNA, 19 nt, Artificial Sequence
  Description of Artificial Sequence: Synthetic oligonucleotide
  Sense strand starting at position 19 of SEQ ID NO: 1886989
gguggucuucuccggaagu

SEQ ID NO: 2440671 - RNA, 19 nt, Artificial Sequence
  Description of Artificial Sequence: Synthetic oligonucleotide
  Antisense strand to SEQ ID NO: 2440670
acuuccggagaagaccacc

SEQ ID NO: 2440672 - RNA, 19 nt, Artificial Sequence
  Description of Artificial Sequence: Synthetic oligonucleotide
  Sense strand starting at position 196 of SEQ ID NO: 1886989
gcguuccucgacuaggaaa

SEQ ID NO: 2440673 - RNA, 19 nt, Artificial Sequence
  Description of Artificial Sequence: Synthetic oligonucleotide
  Antisense strand to SEQ ID NO: 2440672
uuuccuagucgaggaacgc

SEQ ID NO: 2440674 - RNA, 19 nt, Artificial Sequence
  Description of Artificial Sequence: Synthetic oligonucleotide
  Sense strand starting at position 214 of SEQ ID NO: 1886989
aggguauacacuugaguca

SEQ ID NO: 2440675 - RNA, 19 nt, Artificial Sequence
  Description of Artificial Sequence: Synthetic oligonucleotide
  Antisense strand to SEQ ID NO: 2440674
ugacucaaguguauacccu

SEQ ID NO: 2440676 - RNA, 19 nt, Artificial Sequence
  Description of Artificial Sequence: Synthetic oligonucleotide
  Sense strand starting at position 217 of SEQ ID NO: 1886989
guauacacuugagucacua

SEQ ID NO: 2440677 - RNA, 19 nt, Artificial Sequence
  Description of Artificial Sequence: Synthetic oligonucleotide
  Antisense strand to SEQ ID NO: 2440676
uagugacucaaguguauac

SEQ ID NO: 2440678 - RNA, 19 nt, Artificial Sequence
  Description of Artificial Sequence: Synthetic oligonucleotide
  Sense strand starting at position 221 of SEQ ID NO: 1886989
acacuugagucacuaagca

SEQ ID NO: 2440679 - RNA, 19 nt, Artificial Sequence
  Description of Artificial Sequence: Synthetic oligonucleotide
  Antisense strand to SEQ ID NO: 2440678
ugcuuagugacucaagugu

SEQ ID NO: 2440680 - RNA, 19 nt, Artificial Sequence
  Description of Artificial Sequence: Synthetic oligonucleotide
  Sense strand starting at position 442 of SEQ ID NO: 1886989
cggagagguuucgcggaau

SEQ ID NO: 2440681 - RNA, 19 nt, Artificial Sequence
  Description of Artificial Sequence: Synthetic oligonucleotide
  Antisense strand to SEQ ID NO: 2440680
auuccgcgaaaccucuccg

SEQ ID NO: 2440682 - RNA, 19 nt, Artificial Sequence
  Description of Artificial Sequence: Synthetic oligonucleotide
  Sense strand starting at position 443 of SEQ ID NO: 1886989
ggagagguuucgcggaauc

SEQ ID NO: 2440683 - RNA, 19 nt, Artificial Sequence
  Description of Artificial Sequence: Synthetic oligonucleotide
  Antisense strand to SEQ ID NO: 2440682
gauuccgcgaaaccucucc

SEQ ID NO: 2440684 - RNA, 19 nt, Artificial Sequence
  Description of Artificial Sequence: Synthetic oligonucleotide
  Sense strand starting at position 990 of SEQ ID NO: 1886989
agugucucgggcuggauaa

SEQ ID NO: 2440685 - RNA, 19 nt, Artificial Sequence
  Description of Artificial Sequence: Synthetic oligonucleotide
  Antisense strand to SEQ ID NO: 2440684
uuauccagcccgagacacu

SEQ ID NO: 2440686 - RNA, 19 nt, Artificial Sequence
  Description of Artificial Sequence: Synthetic oligonucleotide
  Sense strand starting at position 1533 of SEQ ID NO: 1886989
cugccagguuuccuguaua

SEQ ID NO: 2440687 - RNA, 19 nt, Artificial Sequence
  Description of Artificial Sequence: Synthetic oligonucleotide
  Antisense strand to SEQ ID NO: 2440686
uauacaggaaaccuggcag

SEQ ID NO: 2440688 - RNA, 19 nt, Artificial Sequence
  Description of Artificial Sequence: Synthetic oligonucleotide
  Sense strand starting at position 1536 of SEQ ID NO: 1886989
ccagguuuccuguauagca

SEQ ID NO: 2440689 - RNA, 19 nt, Artificial Sequence
  Description of Artificial Sequence: Synthetic oligonucleotide
  Antisense strand to SEQ ID NO: 2440688
ugcuauacaggaaaccugg

SEQ ID NO: 2440690 - RNA, 19 nt, Artificial Sequence
  Description of Artificial Sequence: Synthetic oligonucleotide
  Sense strand starting at position 1553 of SEQ ID NO: 1886989
cacuauaaccagugaggca

SEQ ID NO: 2440691 - RNA, 19 nt, Artificial Sequence
  Description of Artificial Sequence: Synthetic oligonucleotide
  Antisense strand to SEQ ID NO: 2440690
ugccucacugguuauagug

SEQ ID NO: 2440692 - RNA, 19 nt, Artificial Sequence
  Description of Artificial Sequence: Synthetic oligonucleotide
  Sense strand starting at position 1748 of SEQ ID NO: 1886989
ggcugucuccagggaggaa

SEQ ID NO: 2440693 - RNA, 19 nt, Artificial Sequence
  Description of Artificial Sequence: Synthetic oligonucleotide
  Antisense strand to SEQ ID NO: 2440692
uuccucccuggagacagcc

SEQ ID NO: 2440694 - RNA, 19 nt, Artificial Sequence
  Description of Artificial Sequence: Synthetic oligonucleotide
  Sense strand starting at position 1817 of SEQ ID NO: 1886989
gcagcuucuccuggccaga

SEQ ID NO: 2440695 - RNA, 19 nt, Artificial Sequence
  Description of Artificial Sequence: Synthetic oligonucleotide
  Antisense strand to SEQ ID NO: 2440694
ucuggccaggagaagcugc

SEQ ID NO: 2440696 - RNA, 19 nt, Artificial Sequence
  Description of Artificial Sequence: Synthetic oligonucleotide
  Sense strand starting at position 1819 of SEQ ID NO: 1886989
agcuucuccuggccagauu

SEQ ID NO: 2440697 - RNA, 19 nt, Artificial Sequence
  Description of Artificial Sequence: Synthetic oligonucleotide
  Antisense strand to SEQ ID NO: 2440696
aaucuggccaggagaagcu

SEQ ID NO: 2440698 - RNA, 19 nt, Artificial Sequence
  Description of Artificial Sequence: Synthetic oligonucleotide
  Sense strand starting at position 1969 of SEQ ID NO: 1886989
gggucuucuguuugggaau

SEQ ID NO: 2440699 - RNA, 19 nt, Artificial Sequence
  Description of Artificial Sequence: Synthetic oligonucleotide
  Antisense strand to SEQ ID NO: 2440698
auucccaaacagaagaccc

SEQ ID NO: 2440700 - RNA, 19 nt, Artificial Sequence
  Description of Artificial Sequence: Synthetic oligonucleotide
  Sense strand starting at position 1970 of SEQ ID NO: 1886989
ggucuucuguuugggaauu

SEQ ID NO: 2440701 - RNA, 19 nt, Artificial Sequence
  Description of Artificial Sequence: Synthetic oligonucleotide
  Antisense strand to SEQ ID NO: 2440700
aauucccaaacagaagacc

SEQ ID NO: 2440702 - RNA, 19 nt, Artificial Sequence
  Description of Artificial Sequence: Synthetic oligonucleotide
  Sense strand starting at position 1971 of SEQ ID NO: 1886989
gucuucuguuugggaauua

SEQ ID NO: 2440703 - RNA, 19 nt, Artificial Sequence
  Description of Artificial Sequence: Synthetic oligonucleotide
  Antisense strand to SEQ ID NO: 2440702
uaauucccaaacagaagac

SEQ ID NO: 2440704 - RNA, 19 nt, Artificial Sequence
  Description of Artificial Sequence: Synthetic oligonucleotide
  Sense strand starting at position 1983 of SEQ ID NO: 1886989
ggaauuaucugccucucug

SEQ ID NO: 2440705 - RNA, 19 nt, Artificial Sequence
  Description of Artificial Sequence: Synthetic oligonucleotide
  Antisense strand to SEQ ID NO: 2440704
cagagaggcagauaauucc

SEQ ID NO: 2440706 - RNA, 19 nt, Artificial Sequence
  Description of Artificial Sequence: Synthetic oligonucleotide
  Sense strand starting at position 2127 of SEQ ID NO: 1886989
cggagagcuggcugauuca

SEQ ID NO: 2440707 - RNA, 19 nt, Artificial Sequence
  Description of Artificial Sequence: Synthetic oligonucleotide
  Antisense strand to SEQ ID NO: 2440706
ugaaucagccagcucuccg

SEQ ID NO: 2440708 - RNA, 19 nt, Artificial Sequence
  Description of Artificial Sequence: Synthetic oligonucleotide
  Sense strand starting at position 2146 of SEQ ID NO: 1886989
ggccaguguucugggacga

SEQ ID NO: 2440709 - RNA, 19 nt, Artificial Sequence
  Description of Artificial Sequence: Synthetic oligonucleotide
  Antisense strand to SEQ ID NO: 2440708
ucgucccagaacacuggcc

SEQ ID NO: 2440710 - RNA, 19 nt, Artificial Sequence
  Description of Artificial Sequence: Synthetic oligonucleotide
  Sense strand starting at position 2147 of SEQ ID NO: 1886989
gccaguguucugggacgaa

SEQ ID NO: 2440711 - RNA, 19 nt, Artificial Sequence
  Description of Artificial Sequence: Synthetic oligonucleotide
  Antisense strand to SEQ ID NO: 2440710
uucgucccagaacacuggc

SEQ ID NO: 2440712 - RNA, 19 nt, Artificial Sequence
  Description of Artificial Sequence: Synthetic oligonucleotide
  Sense strand starting at position 2151 of SEQ ID NO: 1886989
guguucugggacgaagaga

SEQ ID NO: 2440713 - RNA, 19 nt, Artificial Sequence
  Description of Artificial Sequence: Synthetic oligonucleotide
  Antisense strand to SEQ ID NO: 2440712
ucucuucgucccagaacac

SEQ ID NO: 2440714 - RNA, 19 nt, Artificial Sequence
  Description of Artificial Sequence: Synthetic oligonucleotide
  Sense strand starting at position 2234 of SEQ ID NO: 1886989
agcugaaucuggccacacu

SEQ ID NO: 2440715 - RNA, 19 nt, Artificial Sequence
  Description of Artificial Sequence: Synthetic oligonucleotide
  Antisense strand to SEQ ID NO: 2440714
aguguggccagauucagcu

SEQ ID NO: 2440716 - RNA, 19 nt, Artificial Sequence
  Description of Artificial Sequence: Synthetic oligonucleotide
  Sense strand starting at position 2312 of SEQ ID NO: 1886989
gucuacacuuccucugaga

SEQ ID NO: 2440717 - RNA, 19 nt, Artificial Sequence
  Description of Artificial Sequence: Synthetic oligonucleotide
  Antisense strand to SEQ ID NO: 2440716
ucucagaggaaguguagac

SEQ ID NO: 2440718 - RNA, 19 nt, Artificial Sequence
  Description of Artificial Sequence: Synthetic oligonucleotide
  Sense strand starting at position 2325 of SEQ ID NO: 1886989
cugagaaucucaguguguc

SEQ ID NO: 2440719 - RNA, 19 nt, Artificial Sequence
  Description of Artificial Sequence: Synthetic oligonucleotide
  Antisense strand to SEQ ID NO: 2440718
gacacacugagauucucag

SEQ ID NO: 2440720 - RNA, 19 nt, Artificial Sequence
  Description of Artificial Sequence: Synthetic oligonucleotide
  Sense strand starting at position 2326 of SEQ ID NO: 1886989
ugagaaucucagugugucu

SEQ ID NO: 2440721 - RNA, 19 nt, Artificial Sequence
  Description of Artificial Sequence: Synthetic oligonucleotide
  Antisense strand to SEQ ID NO: 2440720
agacacacugagauucuca

SEQ ID NO: 2440722 - RNA, 19 nt, Artificial Sequence
  Description of Artificial Sequence: Synthetic oligonucleotide
  Sense strand starting at position 3449 of SEQ ID NO: 1886989
gccaacuuguaaucugaaa

SEQ ID NO: 2440723 - RNA, 19 nt, Artificial Sequence
  Description of Artificial Sequence: Synthetic oligonucleotide
  Antisense strand to SEQ ID NO: 2440722
uuucagauuacaaguuggc

SEQ ID NO: 2440724 - RNA, 19 nt, Artificial Sequence
  Description of Artificial Sequence: Synthetic oligonucleotide
  Sense strand starting at position 3487 of SEQ ID NO: 1886989
aaucgcagaucugaauguu

SEQ ID NO: 2440725 - RNA, 19 nt, Artificial Sequence
  Description of Artificial Sequence: Synthetic oligonucleotide
  Antisense strand to SEQ ID NO: 2440724
aacauucagaucugcgauu

SEQ ID NO: 2440726 - RNA, 19 nt, Artificial Sequence
  Description of Artificial Sequence: Synthetic oligonucleotide
  Sense strand starting at position 3495 of SEQ ID NO: 1886989
aucugaauguugucuguuu

SEQ ID NO: 2440727 - RNA, 19 nt, Artificial Sequence
  Description of Artificial Sequence: Synthetic oligonucleotide
  Antisense strand to SEQ ID NO: 2440726
aaacagacaacauucagau

SEQ ID NO: 2440728 - RNA, 19 nt, Artificial Sequence
  Description of Artificial Sequence: Synthetic oligonucleotide
  Sense strand starting at position 3541 of SEQ ID NO: 1886989
cccugagaauuagucuguu

SEQ ID NO: 2440729 - RNA, 19 nt, Artificial Sequence
  Description of Artificial Sequence: Synthetic oligonucleotide
  Antisense strand to SEQ ID NO: 2440728
aacagacuaauucucaggg

SEQ ID NO: 2440730 - RNA, 19 nt, Artificial Sequence
  Description of Artificial Sequence: Synthetic oligonucleotide
  Sense strand starting at position 3545 of SEQ ID NO: 1886989
gagaauuagucuguuucca

SEQ ID NO: 2440731 - RNA, 19 nt, Artificial Sequence
  Description of Artificial Sequence: Synthetic oligonucleotide
  Antisense strand to SEQ ID NO: 2440730
uggaaacagacuaauucuc

SEQ ID NO: 2440732 - RNA, 19 nt, Artificial Sequence
  Description of Artificial Sequence: Synthetic oligonucleotide
  Sense strand starting at position 3547 of SEQ ID NO: 1886989
gaauuagucuguuuccaag

SEQ ID NO: 2440733 - RNA, 19 nt, Artificial Sequence
  Description of Artificial Sequence: Synthetic oligonucleotide
  Antisense strand to SEQ ID NO: 2440732
cuuggaaacagacuaauuc

SEQ ID NO: 2440734 - RNA, 19 nt, Artificial Sequence
  Description of Artificial Sequence: Synthetic oligonucleotide
  Sense strand starting at position 3565 of SEQ ID NO: 1886989
gggcgccuucgggaagaau

SEQ ID NO: 2440735 - RNA, 19 nt, Artificial Sequence
  Description of Artificial Sequence: Synthetic oligonucleotide
  Antisense strand to SEQ ID NO: 2440734
auucuucccgaaggcgccc

SEQ ID NO: 2440736 - RNA, 19 nt, Artificial Sequence
  Description of Artificial Sequence: Synthetic oligonucleotide
  Sense strand starting at position 400 of SEQ ID NO: 1886988
ccucaaagcucuccggagu

SEQ ID NO: 2440737 - RNA, 19 nt, Artificial Sequence
  Description of Artificial Sequence: Synthetic oligonucleotide
  Antisense strand to SEQ ID NO: 2440736
acuccggagagcuuugagg

SEQ ID NO: 2440738 - RNA, 19 nt, Artificial Sequence
  Description of Artificial Sequence: Synthetic oligonucleotide
  Sense strand starting at position 464 of SEQ ID NO: 1886988
gggagagcuuaacuaaauc

SEQ ID NO: 2440739 - RNA, 19 nt, Artificial Sequence
  Description of Artificial Sequence: Synthetic oligonucleotide
  Antisense strand to SEQ ID NO: 2440738
gauuuaguuaagcucuccc

SEQ ID NO: 2440740 - RNA, 19 nt, Artificial Sequence
  Description of Artificial Sequence: Synthetic oligonucleotide
  Sense strand starting at position 514 of SEQ ID NO: 1886988
gguggucuucuccggaagu

SEQ ID NO: 2440741 - RNA, 19 nt, Artificial Sequence
  Description of Artificial Sequence: Synthetic oligonucleotide
  Antisense strand to SEQ ID NO: 2440740
acuuccggagaagaccacc

SEQ ID NO: 2440742 - RNA, 19 nt, Artificial Sequence
  Description of Artificial Sequence: Synthetic oligonucleotide
  Sense strand starting at position 691 of SEQ ID NO: 1886988
gcguuccucgacuaggaaa

SEQ ID NO: 2440743 - RNA, 19 nt, Artificial Sequence
  Description of Artificial Sequence: Synthetic oligonucleotide
  Antisense strand to SEQ ID NO: 2440742
uuuccuagucgaggaacgc

SEQ ID NO: 2440744 - RNA, 19 nt, Artificial Sequence
  Description of Artificial Sequence: Synthetic oligonucleotide
  Sense strand starting at position 709 of SEQ ID NO: 1886988
aggguauacacuugaguca

SEQ ID NO: 2440745 - RNA, 19 nt, Artificial Sequence
  Description of Artificial Sequence: Synthetic oligonucleotide
  Antisense strand to SEQ ID NO: 2440744
ugacucaaguguauacccu

SEQ ID NO: 2440746 - RNA, 19 nt, Artificial Sequence
  Description of Artificial Sequence: Synthetic oligonucleotide
  Sense strand starting at position 712 of SEQ ID NO: 1886988
guauacacuugagucacua

SEQ ID NO: 2440747 - RNA, 19 nt, Artificial Sequence
  Description of Artificial Sequence: Synthetic oligonucleotide
  Antisense strand to SEQ ID NO: 2440746
uagugacucaaguguauac

SEQ ID NO: 2440748 - RNA, 19 nt, Artificial Sequence
  Description of Artificial Sequence: Synthetic oligonucleotide
  Sense strand starting at position 716 of SEQ ID NO: 1886988
acacuugagucacuaagca

SEQ ID NO: 2440749 - RNA, 19 nt, Artificial Sequence
  Description of Artificial Sequence: Synthetic oligonucleotide
  Antisense strand to SEQ ID NO: 2440748
ugcuuagugacucaagugu

SEQ ID NO: 2440750 - RNA, 19 nt, Artificial Sequence
  Description of Artificial Sequence: Synthetic oligonucleotide
  Sense strand starting at position 937 of SEQ ID NO: 1886988
cggagagguuucgcggaau

SEQ ID NO: 2440751 - RNA, 19 nt, Artificial Sequence
  Description of Artificial Sequence: Synthetic oligonucleotide
  Antisense strand to SEQ ID NO: 2440750
auuccgcgaaaccucuccg

SEQ ID NO: 2440752 - RNA, 19 nt, Artificial Sequence
  Description of Artificial Sequence: Synthetic oligonucleotide
  Sense strand starting at position 938 of SEQ ID NO: 1886988
ggagagguuucgcggaauc

SEQ ID NO: 2440753 - RNA, 19 nt, Artificial Sequence
  Description of Artificial Sequence: Synthetic oligonucleotide
  Antisense strand to SEQ ID NO: 2440752
gauuccgcgaaaccucucc

SEQ ID NO: 2440754 - RNA, 19 nt, Artificial Sequence
  Description of Artificial Sequence: Synthetic oligonucleotide
  Sense strand starting at position 1485 of SEQ ID NO: 1886988
agugucucgggcuggauaa

SEQ ID NO: 2440755 - RNA, 19 nt, Artificial Sequence
  Description of Artificial Sequence: Synthetic oligonucleotide
  Antisense strand to SEQ ID NO: 2440754
uuauccagcccgagacacu

SEQ ID NO: 2440756 - RNA, 19 nt, Artificial Sequence
  Description of Artificial Sequence: Synthetic oligonucleotide
  Sense strand starting at position 2028 of SEQ ID NO: 1886988
cugccagguuuccuguaua

SEQ ID NO: 2440757 - RNA, 19 nt, Artificial Sequence
  Description of Artificial Sequence: Synthetic oligonucleotide
  Antisense strand to SEQ ID NO: 2440756
uauacaggaaaccuggcag

SEQ ID NO: 2440758 - RNA, 19 nt, Artificial Sequence
  Description of Artificial Sequence: Synthetic oligonucleotide
  Sense strand starting at position 2031 of SEQ ID NO: 1886988
ccagguuuccuguauagca

SEQ ID NO: 2440759 - RNA, 19 nt, Artificial Sequence
  Description of Artificial Sequence: Synthetic oligonucleotide
  Antisense strand to SEQ ID NO: 2440758
ugcuauacaggaaaccugg

SEQ ID NO: 2440760 - RNA, 19 nt, Artificial Sequence
  Description of Artificial Sequence: Synthetic oligonucleotide
  Sense strand starting at position 2048 of SEQ ID NO: 1886988
cacuauaaccagugaggca

SEQ ID NO: 2440761 - RNA, 19 nt, Artificial Sequence
  Description of Artificial Sequence: Synthetic oligonucleotide
  Antisense strand to SEQ ID NO: 2440760
ugccucacugguuauagug

SEQ ID NO: 2440762 - RNA, 19 nt, Artificial Sequence
  Description of Artificial Sequence: Synthetic oligonucleotide
  Sense strand starting at position 2243 of SEQ ID NO: 1886988
ggcugucuccagggaggaa

SEQ ID NO: 2440763 - RNA, 19 nt, Artificial Sequence
  Description of Artificial Sequence: Synthetic oligonucleotide
  Antisense strand to SEQ ID NO: 2440762
uuccucccuggagacagcc

SEQ ID NO: 2440764 - RNA, 19 nt, Artificial Sequence
  Description of Artificial Sequence: Synthetic oligonucleotide
  Sense strand starting at position 2312 of SEQ ID NO: 1886988
gcagcuucuccuggccaga

SEQ ID NO: 2440765 - RNA, 19 nt, Artificial Sequence
  Description of Artificial Sequence: Synthetic oligonucleotide
  Antisense strand to SEQ ID NO: 2440764
ucuggccaggagaagcugc

SEQ ID NO: 2440766 - RNA, 19 nt, Artificial Sequence
  Description of Artificial Sequence: Synthetic oligonucleotide
  Sense strand starting at position 2314 of SEQ ID NO: 1886988
agcuucuccuggccagauu

SEQ ID NO: 2440767 - RNA, 19 nt, Artificial Sequence
  Description of Artificial Sequence: Synthetic oligonucleotide
  Antisense strand to SEQ ID NO: 2440766
aaucuggccaggagaagcu

SEQ ID NO: 2440768 - RNA, 19 nt, Artificial Sequence
  Description of Artificial Sequence: Synthetic oligonucleotide
  Sense strand starting at position 2464 of SEQ ID NO: 1886988
gggucuucuguuugggaau

SEQ ID NO: 2440769 - RNA, 19 nt, Artificial Sequence
  Description of Artificial Sequence: Synthetic oligonucleotide
  Antisense strand to SEQ ID NO: 2440768
auucccaaacagaagaccc

SEQ ID NO: 2440770 - RNA, 19 nt, Artificial Sequence
  Description of Artificial Sequence: Synthetic oligonucleotide
  Sense strand starting at position 2465 of SEQ ID NO: 1886988
ggucuucuguuugggaauu

SEQ ID NO: 2440771 - RNA, 19 nt, Artificial Sequence
  Description of Artificial Sequence: Synthetic oligonucleotide
  Antisense strand to SEQ ID NO: 2440770
aauucccaaacagaagacc

SEQ ID NO: 2440772 - RNA, 19 nt, Artificial Sequence
  Description of Artificial Sequence: Synthetic oligonucleotide
  Sense strand starting at position 2466 of SEQ ID NO: 1886988
gucuucuguuugggaauua

SEQ ID NO: 2440773 - RNA, 19 nt, Artificial Sequence
  Description of Artificial Sequence: Synthetic oligonucleotide
  Antisense strand to SEQ ID NO: 2440772
uaauucccaaacagaagac

SEQ ID NO: 2440774 - RNA, 19 nt, Artificial Sequence
  Description of Artificial Sequence: Synthetic oligonucleotide
  Sense strand starting at position 2478 of SEQ ID NO: 1886988
ggaauuaucugccucucug

SEQ ID NO: 2440775 - RNA, 19 nt, Artificial Sequence
  Description of Artificial Sequence: Synthetic oligonucleotide
  Antisense strand to SEQ ID NO: 2440774
cagagaggcagauaauucc

SEQ ID NO: 2440776 - RNA, 19 nt, Artificial Sequence
  Description of Artificial Sequence: Synthetic oligonucleotide
  Sense strand starting at position 2622 of SEQ ID NO: 1886988
cggagagcuggcugauuca

SEQ ID NO: 2440777 - RNA, 19 nt, Artificial Sequence
  Description of Artificial Sequence: Synthetic oligonucleotide
  Antisense strand to SEQ ID NO: 2440776
ugaaucagccagcucuccg

SEQ ID NO: 2440778 - RNA, 19 nt, Artificial Sequence
  Description of Artificial Sequence: Synthetic oligonucleotide
  Sense strand starting at position 2641 of SEQ ID NO: 1886988
ggccaguguucugggacga

SEQ ID NO: 2440779 - RNA, 19 nt, Artificial Sequence
  Description of Artificial Sequence: Synthetic oligonucleotide
  Antisense strand to SEQ ID NO: 2440778
ucgucccagaacacuggcc

SEQ ID NO: 2440780 - RNA, 19 nt, Artificial Sequence
  Description of Artificial Sequence: Synthetic oligonucleotide
  Sense strand starting at position 2642 of SEQ ID NO: 1886988
gccaguguucugggacgaa

SEQ ID NO: 2440781 - RNA, 19 nt, Artificial Sequence
  Description of Artificial Sequence: Synthetic oligonucleotide
  Antisense strand to SEQ ID NO: 2440780
uucgucccagaacacuggc

SEQ ID NO: 2440782 - RNA, 19 nt, Artificial Sequence
  Description of Artificial Sequence: Synthetic oligonucleotide
  Sense strand starting at position 2646 of SEQ ID NO: 1886988
guguucugggacgaagaga

SEQ ID NO: 2440783 - RNA, 19 nt, Artificial Sequence
  Description of Artificial Sequence: Synthetic oligonucleotide
  Antisense strand to SEQ ID NO: 2440782
ucucuucgucccagaacac

SEQ ID NO: 2440784 - RNA, 19 nt, Artificial Sequence
  Description of Artificial Sequence: Synthetic oligonucleotide
  Sense strand starting at position 2729 of SEQ ID NO: 1886988
agcugaaucuggccacacu

SEQ ID NO: 2440785 - RNA, 19 nt, Artificial Sequence
  Description of Artificial Sequence: Synthetic oligonucleotide
  Antisense strand to SEQ ID NO: 2440784
aguguggccagauucagcu

SEQ ID NO: 2440786 - RNA, 19 nt, Artificial Sequence
  Description of Artificial Sequence: Synthetic oligonucleotide
  Sense strand starting at position 2807 of SEQ ID NO: 1886988
gucuacacuuccucugaga

SEQ ID NO: 2440787 - RNA, 19 nt, Artificial Sequence
  Description of Artificial Sequence: Synthetic oligonucleotide
  Antisense strand to SEQ ID NO: 2440786
ucucagaggaaguguagac

SEQ ID NO: 2440788 - RNA, 19 nt, Artificial Sequence
  Description of Artificial Sequence: Synthetic oligonucleotide
  Sense strand starting at position 2820 of SEQ ID NO: 1886988
cugagaaucucaguguguc

SEQ ID NO: 2440789 - RNA, 19 nt, Artificial Sequence
  Description of Artificial Sequence: Synthetic oligonucleotide
  Antisense strand to SEQ ID NO: 2440788
gacacacugagauucucag

SEQ ID NO: 2440790 - RNA, 19 nt, Artificial Sequence
  Description of Artificial Sequence: Synthetic oligonucleotide
  Sense strand starting at position 2821 of SEQ ID NO: 1886988
ugagaaucucagugugucu

SEQ ID NO: 2440791 - RNA, 19 nt, Artificial Sequence
  Description of Artificial Sequence: Synthetic oligonucleotide
  Antisense strand to SEQ ID NO: 2440790
agacacacugagauucuca

SEQ ID NO: 2440792 - RNA, 19 nt, Artificial Sequence
  Description of Artificial Sequence: Synthetic oligonucleotide
  Sense strand starting at position 3944 of SEQ ID NO: 1886988
gccaacuuguaaucugaaa

SEQ ID NO: 2440793 - RNA, 19 nt, Artificial Sequence
  Description of Artificial Sequence: Synthetic oligonucleotide
  Antisense strand to SEQ ID NO: 2440792
uuucagauuacaaguuggc

SEQ ID NO: 2440794 - RNA, 19 nt, Artificial Sequence
  Description of Artificial Sequence: Synthetic oligonucleotide
  Sense strand starting at position 3982 of SEQ ID NO: 1886988
aaucgcagaucugaauguu

SEQ ID NO: 2440795 - RNA, 19 nt, Artificial Sequence
  Description of Artificial Sequence: Synthetic oligonucleotide
  Antisense strand to SEQ ID NO: 2440794
aacauucagaucugcgauu

SEQ ID NO: 2440796 - RNA, 19 nt, Artificial Sequence
  Description of Artificial Sequence: Synthetic oligonucleotide
  Sense strand starting at position 227 of SEQ ID NO: 1886990
auacaaaguuccgugaaga

SEQ ID NO: 2440797 - RNA, 19 nt, Artificial Sequence
  Description of Artificial Sequence: Synthetic oligonucleotide
  Antisense strand to SEQ ID NO: 2440796
ucuucacggaacuuuguau

SEQ ID NO: 2440798 - RNA, 19 nt, Artificial Sequence
  Description of Artificial Sequence: Synthetic oligonucleotide
  Sense strand starting at position 228 of SEQ ID NO: 1886990
uacaaaguuccgugaagau

SEQ ID NO: 2440799 - RNA, 19 nt, Artificial Sequence
  Description of Artificial Sequence: Synthetic oligonucleotide
  Antisense strand to SEQ ID NO: 2440798
aucuucacggaacuuugua

SEQ ID NO: 2440800 - RNA, 19 nt, Artificial Sequence
  Description of Artificial Sequence: Synthetic oligonucleotide
  Sense strand starting at position 238 of SEQ ID NO: 1886990
cgugaagauuugguagcau

SEQ ID NO: 2440801 - RNA, 19 nt, Artificial Sequence
  Description of Artificial Sequence: Synthetic oligonucleotide
  Antisense strand to SEQ ID NO: 2440800
augcuaccaaaucuucacg

SEQ ID NO: 2440802 - RNA, 19 nt, Artificial Sequence
  Description of Artificial Sequence: Synthetic oligonucleotide
  Sense strand starting at position 242 of SEQ ID NO: 1886990
aagauuugguagcauaaau

SEQ ID NO: 2440803 - RNA, 19 nt, Artificial Sequence
  Description of Artificial Sequence: Synthetic oligonucleotide
  Antisense strand to SEQ ID NO: 2440802
auuuaugcuaccaaaucuu

SEQ ID NO: 2440804 - RNA, 19 nt, Artificial Sequence
  Description of Artificial Sequence: Synthetic oligonucleotide
  Sense strand starting at position 318 of SEQ ID NO: 1886990
auaauauuaccuugaagug

SEQ ID NO: 2440805 - RNA, 19 nt, Artificial Sequence
  Description of Artificial Sequence: Synthetic oligonucleotide
  Antisense strand to SEQ ID NO: 2440804
cacuucaagguaauauuau

SEQ ID NO: 2440806 - RNA, 19 nt, Artificial Sequence
  Description of Artificial Sequence: Synthetic oligonucleotide
  Sense strand starting at position 337 of SEQ ID NO: 1886990
cuaaacugugagggugaaa

SEQ ID NO: 2440807 - RNA, 19 nt, Artificial Sequence
  Description of Artificial Sequence: Synthetic oligonucleotide
  Antisense strand to SEQ ID NO: 2440806
uuucacccucacaguuuag

SEQ ID NO: 2440808 - RNA, 19 nt, Artificial Sequence
  Description of Artificial Sequence: Synthetic oligonucleotide
  Sense strand starting at position 539 of SEQ ID NO: 1886990
cguggauaaccuuacagca

SEQ ID NO: 2440809 - RNA, 19 nt, Artificial Sequence
  Description of Artificial Sequence: Synthetic oligonucleotide
  Antisense strand to SEQ ID NO: 2440808
ugcuguaagguuauccacg

SEQ ID NO: 2440810 - RNA, 19 nt, Artificial Sequence
  Description of Artificial Sequence: Synthetic oligonucleotide
  Sense strand starting at position 778 of SEQ ID NO: 1886990
agucuacugguagaagguu

SEQ ID NO: 2440811 - RNA, 19 nt, Artificial Sequence
  Description of Artificial Sequence: Synthetic oligonucleotide
  Antisense strand to SEQ ID NO: 2440810
aaccuucuaccaguagacu

SEQ ID NO: 2440812 - RNA, 19 nt, Artificial Sequence
  Description of Artificial Sequence: Synthetic oligonucleotide
  Sense strand starting at position 893 of SEQ ID NO: 1886990
cuaaaugugaagcgacaau

SEQ ID NO: 2440813 - RNA, 19 nt, Artificial Sequence
  Description of Artificial Sequence: Synthetic oligonucleotide
  Antisense strand to SEQ ID NO: 2440812
auugucgcuucacauuuag

SEQ ID NO: 2440814 - RNA, 19 nt, Artificial Sequence
  Description of Artificial Sequence: Synthetic oligonucleotide
  Sense strand starting at position 939 of SEQ ID NO: 1886990
ggcuuaguaaacggacuua

SEQ ID NO: 2440815 - RNA, 19 nt, Artificial Sequence
  Description of Artificial Sequence: Synthetic oligonucleotide
  Antisense strand to SEQ ID NO: 2440814
uaaguccguuuacuaagcc

SEQ ID NO: 2440816 - RNA, 19 nt, Artificial Sequence
  Description of Artificial Sequence: Synthetic oligonucleotide
  Sense strand starting at position 1369 of SEQ ID NO: 1886990
uagucauuuggcugagcca

SEQ ID NO: 2440817 - RNA, 19 nt, Artificial Sequence
  Description of Artificial Sequence: Synthetic oligonucleotide
  Antisense strand to SEQ ID NO: 2440816
uggcucagccaaaugacua

SEQ ID NO: 2440818 - RNA, 19 nt, Artificial Sequence
  Description of Artificial Sequence: Synthetic oligonucleotide
  Sense strand starting at position 1392 of SEQ ID NO: 1886990
agagcaugugaaugucaca

SEQ ID NO: 2440819 - RNA, 19 nt, Artificial Sequence
  Description of Artificial Sequence: Synthetic oligonucleotide
  Antisense strand to SEQ ID NO: 2440818
ugugacauucacaugcucu

SEQ ID NO: 2440820 - RNA, 19 nt, Artificial Sequence
  Description of Artificial Sequence: Synthetic oligonucleotide
  Sense strand starting at position 1437 of SEQ ID NO: 1886990
ugugaugcccaucaucagu

SEQ ID NO: 2440821 - RNA, 19 nt, Artificial Sequence
  Description of Artificial Sequence: Synthetic oligonucleotide
  Antisense strand to SEQ ID NO: 2440820
acugaugaugggcaucaca

SEQ ID NO: 2440822 - RNA, 19 nt, Artificial Sequence
  Description of Artificial Sequence: Synthetic oligonucleotide
  Sense strand starting at position 1511 of SEQ ID NO: 1886990
cguacucgggauuacuaga

SEQ ID NO: 2440823 - RNA, 19 nt, Artificial Sequence
  Description of Artificial Sequence: Synthetic oligonucleotide
  Antisense strand to SEQ ID NO: 2440822
ucuaguaaucccgaguacg

SEQ ID NO: 2440824 - RNA, 19 nt, Artificial Sequence
  Description of Artificial Sequence: Synthetic oligonucleotide
  Sense strand starting at position 1520 of SEQ ID NO: 1886990
gauuacuagagagguucga

SEQ ID NO: 2440825 - RNA, 19 nt, Artificial Sequence
  Description of Artificial Sequence: Synthetic oligonucleotide
  Antisense strand to SEQ ID NO: 2440824
ucgaaccucucuaguaauc

SEQ ID NO: 2440826 - RNA, 19 nt, Artificial Sequence
  Description of Artificial Sequence: Synthetic oligonucleotide
  Sense strand starting at position 1524 of SEQ ID NO: 1886990
acuagagagguucgacaca

SEQ ID NO: 2440827 - RNA, 19 nt, Artificial Sequence
  Description of Artificial Sequence: Synthetic oligonucleotide
  Antisense strand to SEQ ID NO: 2440826
ugugucgaaccucucuagu

SEQ ID NO: 2440828 - RNA, 19 nt, Artificial Sequence
  Description of Artificial Sequence: Synthetic oligonucleotide
  Sense strand starting at position 1529 of SEQ ID NO: 1886990
agagguucgacacaucagu

SEQ ID NO: 2440829 - RNA, 19 nt, Artificial Sequence
  Description of Artificial Sequence: Synthetic oligonucleotide
  Antisense strand to SEQ ID NO: 2440828
acugaugugucgaaccucu

SEQ ID NO: 2440830 - RNA, 19 nt, Artificial Sequence
  Description of Artificial Sequence: Synthetic oligonucleotide
  Sense strand starting at position 1735 of SEQ ID NO: 1886990
gagggcucuugacuuacuu

SEQ ID NO: 2440831 - RNA, 19 nt, Artificial Sequence
  Description of Artificial Sequence: Synthetic oligonucleotide
  Antisense strand to SEQ ID NO: 2440830
aaguaagucaagagcccuc

SEQ ID NO: 2440832 - RNA, 19 nt, Artificial Sequence
  Description of Artificial Sequence: Synthetic oligonucleotide
  Sense strand starting at position 2397 of SEQ ID NO: 1886990
gaaaguuacuguuugaaga

SEQ ID NO: 2440833 - RNA, 19 nt, Artificial Sequence
  Description of Artificial Sequence: Synthetic oligonucleotide
  Antisense strand to SEQ ID NO: 2440832
ucuucaaacaguaacuuuc

SEQ ID NO: 2440834 - RNA, 19 nt, Artificial Sequence
  Description of Artificial Sequence: Synthetic oligonucleotide
  Sense strand starting at position 2398 of SEQ ID NO: 1886990
aaaguuacuguuugaagau

SEQ ID NO: 2440835 - RNA, 19 nt, Artificial Sequence
  Description of Artificial Sequence: Synthetic oligonucleotide
  Antisense strand to SEQ ID NO: 2440834
aucuucaaacaguaacuuu

SEQ ID NO: 2440836 - RNA, 19 nt, Artificial Sequence
  Description of Artificial Sequence: Synthetic oligonucleotide
  Sense strand starting at position 2407 of SEQ ID NO: 1886990
guuugaagaucacucagca

SEQ ID NO: 2440837 - RNA, 19 nt, Artificial Sequence
  Description of Artificial Sequence: Synthetic oligonucleotide
  Antisense strand to SEQ ID NO: 2440836
ugcugagugaucuucaaac

SEQ ID NO: 2440838 - RNA, 19 nt, Artificial Sequence
  Description of Artificial Sequence: Synthetic oligonucleotide
  Sense strand starting at position 2482 of SEQ ID NO: 1886990
uggcccaaccuggauauau

SEQ ID NO: 2440839 - RNA, 19 nt, Artificial Sequence
  Description of Artificial Sequence: Synthetic oligonucleotide
  Antisense strand to SEQ ID NO: 2440838
auauauccagguugggcca

SEQ ID NO: 2440840 - RNA, 19 nt, Artificial Sequence
  Description of Artificial Sequence: Synthetic oligonucleotide
  Sense strand starting at position 2540 of SEQ ID NO: 1886990
gucagcugggaccauuaaa

SEQ ID NO: 2440841 - RNA, 19 nt, Artificial Sequence
  Description of Artificial Sequence: Synthetic oligonucleotide
  Antisense strand to SEQ ID NO: 2440840
uuuaauggucccagcugac

SEQ ID NO: 2440842 - RNA, 19 nt, Artificial Sequence
  Description of Artificial Sequence: Synthetic oligonucleotide
  Sense strand starting at position 2680 of SEQ ID NO: 1886990
auacaaaucuggguagcaa

SEQ ID NO: 2440843 - RNA, 19 nt, Artificial Sequence
  Description of Artificial Sequence: Synthetic oligonucleotide
  Antisense strand to SEQ ID NO: 2440842
uugcuacccagauuuguau

SEQ ID NO: 2440844 - RNA, 19 nt, Artificial Sequence
  Description of Artificial Sequence: Synthetic oligonucleotide
  Sense strand starting at position 2722 of SEQ ID NO: 1886990
uggacagacuugucuccau

SEQ ID NO: 2440845 - RNA, 19 nt, Artificial Sequence
  Description of Artificial Sequence: Synthetic oligonucleotide
  Antisense strand to SEQ ID NO: 2440844
auggagacaagucugucca

SEQ ID NO: 2440846 - RNA, 19 nt, Artificial Sequence
  Description of Artificial Sequence: Synthetic oligonucleotide
  Sense strand starting at position 2992 of SEQ ID NO: 1886990
gaggaaaggcuuuauguuu

SEQ ID NO: 2440847 - RNA, 19 nt, Artificial Sequence
  Description of Artificial Sequence: Synthetic oligonucleotide
  Antisense strand to SEQ ID NO: 2440846
aaacauaaagccuuuccuc

SEQ ID NO: 2440848 - RNA, 19 nt, Artificial Sequence
  Description of Artificial Sequence: Synthetic oligonucleotide
  Sense strand starting at position 3030 of SEQ ID NO: 1886990
aguaaucuacacgaagcuu

SEQ ID NO: 2440849 - RNA, 19 nt, Artificial Sequence
  Description of Artificial Sequence: Synthetic oligonucleotide
  Antisense strand to SEQ ID NO: 2440848
aagcuucguguagauuacu

SEQ ID NO: 2440850 - RNA, 19 nt, Artificial Sequence
  Description of Artificial Sequence: Synthetic oligonucleotide
  Sense strand starting at position 3044 of SEQ ID NO: 1886990
agcuuaggaugaguugaaa

SEQ ID NO: 2440851 - RNA, 19 nt, Artificial Sequence
  Description of Artificial Sequence: Synthetic oligonucleotide
  Antisense strand to SEQ ID NO: 2440850
uuucaacucauccuaagcu

SEQ ID NO: 2440852 - RNA, 19 nt, Artificial Sequence
  Description of Artificial Sequence: Synthetic oligonucleotide
  Sense strand starting at position 3255 of SEQ ID NO: 1886990
gccgauucuagggaccaga

SEQ ID NO: 2440853 - RNA, 19 nt, Artificial Sequence
  Description of Artificial Sequence: Synthetic oligonucleotide
  Antisense strand to SEQ ID NO: 2440852
ucuggucccuagaaucggc

SEQ ID NO: 2440854 - RNA, 19 nt, Artificial Sequence
  Description of Artificial Sequence: Synthetic oligonucleotide
  Sense strand starting at position 3283 of SEQ ID NO: 1886990
agggucacaucaccaagau

SEQ ID NO: 2440855 - RNA, 19 nt, Artificial Sequence
  Description of Artificial Sequence: Synthetic oligonucleotide
  Antisense strand to SEQ ID NO: 2440854
aucuuggugaugugacccu

SEQ ID NO: 2440856 - RNA, 19 nt, Artificial Sequence
  Description of Artificial Sequence: Synthetic oligonucleotide
  Sense strand starting at position 3328 of SEQ ID NO: 1886990
gaaugugaccucuggacac

SEQ ID NO: 2440857 - RNA, 19 nt, Artificial Sequence
  Description of Artificial Sequence: Synthetic oligonucleotide
  Antisense strand to SEQ ID NO: 2440856
guguccagaggucacauuc

SEQ ID NO: 2440858 - RNA, 19 nt, Artificial Sequence
  Description of Artificial Sequence: Synthetic oligonucleotide
  Sense strand starting at position 3365 of SEQ ID NO: 1886990
gguuaugacauaugaguca

SEQ ID NO: 2440859 - RNA, 19 nt, Artificial Sequence
  Description of Artificial Sequence: Synthetic oligonucleotide
  Antisense strand to SEQ ID NO: 2440858
ugacucauaugucauaacc

SEQ ID NO: 2440860 - RNA, 19 nt, Artificial Sequence
  Description of Artificial Sequence: Synthetic oligonucleotide
  Sense strand starting at position 3413 of SEQ ID NO: 1886990
ccaccuguaccagagguau

SEQ ID NO: 2440861 - RNA, 19 nt, Artificial Sequence
  Description of Artificial Sequence: Synthetic oligonucleotide
  Antisense strand to SEQ ID NO: 2440860
auaccucugguacaggugg

SEQ ID NO: 2440862 - RNA, 19 nt, Artificial Sequence
  Description of Artificial Sequence: Synthetic oligonucleotide
  Sense strand starting at position 3419 of SEQ ID NO: 1886990
guaccagagguauaugcua

SEQ ID NO: 2440863 - RNA, 19 nt, Artificial Sequence
  Description of Artificial Sequence: Synthetic oligonucleotide
  Antisense strand to SEQ ID NO: 2440862
uagcauauaccucugguac

SEQ ID NO: 2440864 - RNA, 19 nt, Artificial Sequence
  Description of Artificial Sequence: Synthetic oligonucleotide
  Sense strand starting at position 3426 of SEQ ID NO: 1886990
agguauaugcuaugaaaca

SEQ ID NO: 2440865 - RNA, 19 nt, Artificial Sequence
  Description of Artificial Sequence: Synthetic oligonucleotide
  Antisense strand to SEQ ID NO: 2440864
uguuucauagcauauaccu

SEQ ID NO: 2440866 - RNA, 19 nt, Artificial Sequence
  Description of Artificial Sequence: Synthetic oligonucleotide
  Sense strand starting at position 3480 of SEQ ID NO: 1886990
augcuuagauguccuuuaa

SEQ ID NO: 2440867 - RNA, 19 nt, Artificial Sequence
  Description of Artificial Sequence: Synthetic oligonucleotide
  Antisense strand to SEQ ID NO: 2440866
uuaaaggacaucuaagcau

SEQ ID NO: 2440868 - RNA, 19 nt, Artificial Sequence
  Description of Artificial Sequence: Synthetic oligonucleotide
  Sense strand starting at position 3946 of SEQ ID NO: 1886990
acucuaaggucauuagcuu

SEQ ID NO: 2440869 - RNA, 19 nt, Artificial Sequence
  Description of Artificial Sequence: Synthetic oligonucleotide
  Antisense strand to SEQ ID NO: 2440868
aagcuaaugaccuuagagu

SEQ ID NO: 2440870 - RNA, 19 nt, Artificial Sequence
  Description of Artificial Sequence: Synthetic oligonucleotide
  Sense strand starting at position 3950 of SEQ ID NO: 1886990
uaaggucauuagcuugaca

SEQ ID NO: 2440871 - RNA, 19 nt, Artificial Sequence
  Description of Artificial Sequence: Synthetic oligonucleotide
  Antisense strand to SEQ ID NO: 2440870
ugucaagcuaaugaccuua

SEQ ID NO: 2440872 - RNA, 19 nt, Artificial Sequence
  Description of Artificial Sequence: Synthetic oligonucleotide
  Sense strand starting at position 3952 of SEQ ID NO: 1886990
aggucauuagcuugacauc

SEQ ID NO: 2440873 - RNA, 19 nt, Artificial Sequence
  Description of Artificial Sequence: Synthetic oligonucleotide
  Antisense strand to SEQ ID NO: 2440872
gaugucaagcuaaugaccu

SEQ ID NO: 2440874 - RNA, 19 nt, Artificial Sequence
  Description of Artificial Sequence: Synthetic oligonucleotide
  Sense strand starting at position 3953 of SEQ ID NO: 1886990
ggucauuagcuugacaucu

SEQ ID NO: 2440875 - RNA, 19 nt, Artificial Sequence
  Description of Artificial Sequence: Synthetic oligonucleotide
  Antisense strand to SEQ ID NO: 2440874
agaugucaagcuaaugacc

SEQ ID NO: 2440876 - RNA, 19 nt, Artificial Sequence
  Description of Artificial Sequence: Synthetic oligonucleotide
  Sense strand starting at position 211 of SEQ ID NO: 1886991
cuaccuacagauggugaua

SEQ ID NO: 2440877 - RNA, 19 nt, Artificial Sequence
  Description of Artificial Sequence: Synthetic oligonucleotide
  Antisense strand to SEQ ID NO: 2440876
uaucaccaucuguagguag

SEQ ID NO: 2440878 - RNA, 19 nt, Artificial Sequence
  Description of Artificial Sequence: Synthetic oligonucleotide
  Sense strand starting at position 228 of SEQ ID NO: 1886991
uauccuaaagaguguagga

SEQ ID NO: 2440879 - RNA, 19 nt, Artificial Sequence
  Description of Artificial Sequence: Synthetic oligonucleotide
  Antisense strand to SEQ ID NO: 2440878
uccuacacucuuuaggaua

SEQ ID NO: 2440880 - RNA, 19 nt, Artificial Sequence
  Description of Artificial Sequence: Synthetic oligonucleotide
  Sense strand starting at position 245 of SEQ ID NO: 1886991
gaucuagaccaaugguacu

SEQ ID NO: 2440881 - RNA, 19 nt, Artificial Sequence
  Description of Artificial Sequence: Synthetic oligonucleotide
  Antisense strand to SEQ ID NO: 2440880
aguaccauuggucuagauc

SEQ ID NO: 2440882 - RNA, 19 nt, Artificial Sequence
  Description of Artificial Sequence: Synthetic oligonucleotide
  Sense strand starting at position 656 of SEQ ID NO: 1886991
gugggauccuagagugaga

SEQ ID NO: 2440883 - RNA, 19 nt, Artificial Sequence
  Description of Artificial Sequence: Synthetic oligonucleotide
  Antisense strand to SEQ ID NO: 2440882
ucucacucuaggaucccac

SEQ ID NO: 2440884 - RNA, 19 nt, Artificial Sequence
  Description of Artificial Sequence: Synthetic oligonucleotide
  Sense strand starting at position 703 of SEQ ID NO: 1886991
cacugcugguccuugacua

SEQ ID NO: 2440885 - RNA, 19 nt, Artificial Sequence
  Description of Artificial Sequence: Synthetic oligonucleotide
  Antisense strand to SEQ ID NO: 2440884
uagucaaggaccagcagug

SEQ ID NO: 2440886 - RNA, 19 nt, Artificial Sequence
  Description of Artificial Sequence: Synthetic oligonucleotide
  Sense strand starting at position 704 of SEQ ID NO: 1886991
acugcugguccuugacuau

SEQ ID NO: 2440887 - RNA, 19 nt, Artificial Sequence
  Description of Artificial Sequence: Synthetic oligonucleotide
  Antisense strand to SEQ ID NO: 2440886
auagucaaggaccagcagu

SEQ ID NO: 2440888 - RNA, 19 nt, Artificial Sequence
  Description of Artificial Sequence: Synthetic oligonucleotide
  Sense strand starting at position 710 of SEQ ID NO: 1886991
gguccuugacuaugacuuu

SEQ ID NO: 2440889 - RNA, 19 nt, Artificial Sequence
  Description of Artificial Sequence: Synthetic oligonucleotide
  Antisense strand to SEQ ID NO: 2440888
aaagucauagucaaggacc

SEQ ID NO: 2440890 - RNA, 19 nt, Artificial Sequence
  Description of Artificial Sequence: Synthetic oligonucleotide
  Sense strand starting at position 721 of SEQ ID NO: 1886991
augacuuuauggucauaag

SEQ ID NO: 2440891 - RNA, 19 nt, Artificial Sequence
  Description of Artificial Sequence: Synthetic oligonucleotide
  Antisense strand to SEQ ID NO: 2440890
cuuaugaccauaaagucau

SEQ ID NO: 2440892 - RNA, 19 nt, Artificial Sequence
  Description of Artificial Sequence: Synthetic oligonucleotide
  Sense strand starting at position 862 of SEQ ID NO: 1886991
cgugacuguaaagauaaca

SEQ ID NO: 2440893 - RNA, 19 nt, Artificial Sequence
  Description of Artificial Sequence: Synthetic oligonucleotide
  Antisense strand to SEQ ID NO: 2440892
uguuaucuuuacagucacg

SEQ ID NO: 2440894 - RNA, 19 nt, Artificial Sequence
  Description of Artificial Sequence: Synthetic oligonucleotide
  Sense strand starting at position 933 of SEQ ID NO: 1886991
cuacuuugauaggcucuaa

SEQ ID NO: 2440895 - RNA, 19 nt, Artificial Sequence
  Description of Artificial Sequence: Synthetic oligonucleotide
  Antisense strand to SEQ ID NO: 2440894
uuagagccuaucaaaguag

SEQ ID NO: 2440896 - RNA, 19 nt, Artificial Sequence
  Description of Artificial Sequence: Synthetic oligonucleotide
  Sense strand starting at position 937 of SEQ ID NO: 1886991
uuugauaggcucuaauuag

SEQ ID NO: 2440897 - RNA, 19 nt, Artificial Sequence
  Description of Artificial Sequence: Synthetic oligonucleotide
  Antisense strand to SEQ ID NO: 2440896
cuaauuagagccuaucaaa

SEQ ID NO: 2440898 - RNA, 19 nt, Artificial Sequence
  Description of Artificial Sequence: Synthetic oligonucleotide
  Sense strand starting at position 948 of SEQ ID NO: 1886991
cuaauuaggugccucacau

SEQ ID NO: 2440899 - RNA, 19 nt, Artificial Sequence
  Description of Artificial Sequence: Synthetic oligonucleotide
  Antisense strand to SEQ ID NO: 2440898
augugaggcaccuaauuag

SEQ ID NO: 2440900 - RNA, 19 nt, Artificial Sequence
  Description of Artificial Sequence: Synthetic oligonucleotide
  Sense strand starting at position 965 of SEQ ID NO: 1886991
auaaaugcccuuuggaauu

SEQ ID NO: 2440901 - RNA, 19 nt, Artificial Sequence
  Description of Artificial Sequence: Synthetic oligonucleotide
  Antisense strand to SEQ ID NO: 2440900
aauuccaaagggcauuuau

SEQ ID NO: 2440902 - RNA, 19 nt, Artificial Sequence
  Description of Artificial Sequence: Synthetic oligonucleotide
  Sense strand starting at position 1008 of SEQ ID NO: 1886991
aagggagauucugaaauga

SEQ ID NO: 2440903 - RNA, 19 nt, Artificial Sequence
  Description of Artificial Sequence: Synthetic oligonucleotide
  Antisense strand to SEQ ID NO: 2440902
ucauuucagaaucucccuu

SEQ ID NO: 2440904 - RNA, 19 nt, Artificial Sequence
  Description of Artificial Sequence: Synthetic oligonucleotide
  Sense strand starting at position 1119 of SEQ ID NO: 1886991
ccuuacaugccagagaagu

SEQ ID NO: 2440905 - RNA, 19 nt, Artificial Sequence
  Description of Artificial Sequence: Synthetic oligonucleotide
  Antisense strand to SEQ ID NO: 2440904
acuucucuggcauguaagg

SEQ ID NO: 2440906 - RNA, 19 nt, Artificial Sequence
  Description of Artificial Sequence: Synthetic oligonucleotide
  Sense strand starting at position 1125 of SEQ ID NO: 1886991
augccagagaagugagauu

SEQ ID NO: 2440907 - RNA, 19 nt, Artificial Sequence
  Description of Artificial Sequence: Synthetic oligonucleotide
  Antisense strand to SEQ ID NO: 2440906
aaucucacuucucuggcau

SEQ ID NO: 2440908 - RNA, 19 nt, Artificial Sequence
  Description of Artificial Sequence: Synthetic oligonucleotide
  Sense strand starting at position 1597 of SEQ ID NO: 1886991
uggccaauguccuugaucu

SEQ ID NO: 2440909 - RNA, 19 nt, Artificial Sequence
  Description of Artificial Sequence: Synthetic oligonucleotide
  Antisense strand to SEQ ID NO: 2440908
agaucaaggacauuggcca

SEQ ID NO: 2440910 - RNA, 19 nt, Artificial Sequence
  Description of Artificial Sequence: Synthetic oligonucleotide
  Sense strand starting at position 1598 of SEQ ID NO: 1886991
ggccaauguccuugaucuc

SEQ ID NO: 2440911 - RNA, 19 nt, Artificial Sequence
  Description of Artificial Sequence: Synthetic oligonucleotide
  Antisense strand to SEQ ID NO: 2440910
gagaucaaggacauuggcc

SEQ ID NO: 2440912 - RNA, 19 nt, Artificial Sequence
  Description of Artificial Sequence: Synthetic oligonucleotide
  Sense strand starting at position 1607 of SEQ ID NO: 1886991
ccuugaucuccgcacagua

SEQ ID NO: 2440913 - RNA, 19 nt, Artificial Sequence
  Description of Artificial Sequence: Synthetic oligonucleotide
  Antisense strand to SEQ ID NO: 2440912
uacugugcggagaucaagg

SEQ ID NO: 2440914 - RNA, 19 nt, Artificial Sequence
  Description of Artificial Sequence: Synthetic oligonucleotide
  Sense strand starting at position 1899 of SEQ ID NO: 1886991
gccucaucucguucgcacu

SEQ ID NO: 2440915 - RNA, 19 nt, Artificial Sequence
  Description of Artificial Sequence: Synthetic oligonucleotide
  Antisense strand to SEQ ID NO: 2440914
agugcgaacgagaugaggc

SEQ ID NO: 2440916 - RNA, 19 nt, Artificial Sequence
  Description of Artificial Sequence: Synthetic oligonucleotide
  Sense strand starting at position 2598 of SEQ ID NO: 1886991
acgccagcgcuccuuaauu

SEQ ID NO: 2440917 - RNA, 19 nt, Artificial Sequence
  Description of Artificial Sequence: Synthetic oligonucleotide
  Antisense strand to SEQ ID NO: 2440916
aauuaaggagcgcuggcgu

SEQ ID NO: 2440918 - RNA, 19 nt, Artificial Sequence
  Description of Artificial Sequence: Synthetic oligonucleotide
  Sense strand starting at position 2702 of SEQ ID NO: 1886991
aguugcucgcaguuaguuu

SEQ ID NO: 2440919 - RNA, 19 nt, Artificial Sequence
  Description of Artificial Sequence: Synthetic oligonucleotide
  Antisense strand to SEQ ID NO: 2440918
aaacuaacugcgagcaacu

SEQ ID NO: 2440920 - RNA, 19 nt, Artificial Sequence
  Description of Artificial Sequence: Synthetic oligonucleotide
  Sense strand starting at position 3027 of SEQ ID NO: 1886991
gggucugacuucucccacu

SEQ ID NO: 2440921 - RNA, 19 nt, Artificial Sequence
  Description of Artificial Sequence: Synthetic oligonucleotide
  Antisense strand to SEQ ID NO: 2440920
agugggagaagucagaccc

SEQ ID NO: 2440922 - RNA, 19 nt, Artificial Sequence
  Description of Artificial Sequence: Synthetic oligonucleotide
  Sense strand starting at position 3146 of SEQ ID NO: 1886991
uucuguuauggagggugau

SEQ ID NO: 2440923 - RNA, 19 nt, Artificial Sequence
  Description of Artificial Sequence: Synthetic oligonucleotide
  Antisense strand to SEQ ID NO: 2440922
aucacccuccauaacagaa

SEQ ID NO: 2440924 - RNA, 19 nt, Artificial Sequence
  Description of Artificial Sequence: Synthetic oligonucleotide
  Sense strand starting at position 3147 of SEQ ID NO: 1886991
ucuguuauggagggugaua

SEQ ID NO: 2440925 - RNA, 19 nt, Artificial Sequence
  Description of Artificial Sequence: Synthetic oligonucleotide
  Antisense strand to SEQ ID NO: 2440924
uaucacccuccauaacaga

SEQ ID NO: 2440926 - RNA, 19 nt, Artificial Sequence
  Description of Artificial Sequence: Synthetic oligonucleotide
  Sense strand starting at position 3224 of SEQ ID NO: 1886991
gugacacuuugagcaaguu

SEQ ID NO: 2440927 - RNA, 19 nt, Artificial Sequence
  Description of Artificial Sequence: Synthetic oligonucleotide
  Antisense strand to SEQ ID NO: 2440926
aacuugcucaaagugucac

SEQ ID NO: 2440928 - RNA, 19 nt, Artificial Sequence
  Description of Artificial Sequence: Synthetic oligonucleotide
  Sense strand starting at position 3309 of SEQ ID NO: 1886991
gaacuuauauguguaaggu

SEQ ID NO: 2440929 - RNA, 19 nt, Artificial Sequence
  Description of Artificial Sequence: Synthetic oligonucleotide
  Antisense strand to SEQ ID NO: 2440928
accuuacacauauaaguuc

SEQ ID NO: 2440930 - RNA, 19 nt, Artificial Sequence
  Description of Artificial Sequence: Synthetic oligonucleotide
  Sense strand starting at position 3310 of SEQ ID NO: 1886991
aacuuauauguguaaggug

SEQ ID NO: 2440931 - RNA, 19 nt, Artificial Sequence
  Description of Artificial Sequence: Synthetic oligonucleotide
  Antisense strand to SEQ ID NO: 2440930
caccuuacacauauaaguu

SEQ ID NO: 2440932 - RNA, 19 nt, Artificial Sequence
  Description of Artificial Sequence: Synthetic oligonucleotide
  Sense strand starting at position 3331 of SEQ ID NO: 1886991
ucaaaugguguccaguaca

SEQ ID NO: 2440933 - RNA, 19 nt, Artificial Sequence
  Description of Artificial Sequence: Synthetic oligonucleotide
  Antisense strand to SEQ ID NO: 2440932
uguacuggacaccauuuga

SEQ ID NO: 2440934 - RNA, 19 nt, Artificial Sequence
  Description of Artificial Sequence: Synthetic oligonucleotide
  Sense strand starting at position 3368 of SEQ ID NO: 1886991
guacuauauuagcuacuau

SEQ ID NO: 2440935 - RNA, 19 nt, Artificial Sequence
  Description of Artificial Sequence: Synthetic oligonucleotide
  Antisense strand to SEQ ID NO: 2440934
auaguagcuaauauaguac

SEQ ID NO: 2440936 - RNA, 19 nt, Artificial Sequence
  Description of Artificial Sequence: Synthetic oligonucleotide
  Sense strand starting at position 3786 of SEQ ID NO: 1886991
ugaccaauaugugcaugau

SEQ ID NO: 2440937 - RNA, 19 nt, Artificial Sequence
  Description of Artificial Sequence: Synthetic oligonucleotide
  Antisense strand to SEQ ID NO: 2440936
aucaugcacauauugguca

SEQ ID NO: 2440938 - RNA, 19 nt, Artificial Sequence
  Description of Artificial Sequence: Synthetic oligonucleotide
  Sense strand starting at position 3787 of SEQ ID NO: 1886991
gaccaauaugugcaugaug

SEQ ID NO: 2440939 - RNA, 19 nt, Artificial Sequence
  Description of Artificial Sequence: Synthetic oligonucleotide
  Antisense strand to SEQ ID NO: 2440938
caucaugcacauauugguc

SEQ ID NO: 2440940 - RNA, 19 nt, Artificial Sequence
  Description of Artificial Sequence: Synthetic oligonucleotide
  Sense strand starting at position 3789 of SEQ ID NO: 1886991
ccaauaugugcaugaugag

SEQ ID NO: 2440941 - RNA, 19 nt, Artificial Sequence
  Description of Artificial Sequence: Synthetic oligonucleotide
  Antisense strand to SEQ ID NO: 2440940
cucaucaugcacauauugg

SEQ ID NO: 2440942 - RNA, 19 nt, Artificial Sequence
  Description of Artificial Sequence: Synthetic oligonucleotide
  Sense strand starting at position 3882 of SEQ ID NO: 1886991
ccuagaggguaaucucuuu

SEQ ID NO: 2440943 - RNA, 19 nt, Artificial Sequence
  Description of Artificial Sequence: Synthetic oligonucleotide
  Antisense strand to SEQ ID NO: 2440942
aaagagauuacccucuagg

SEQ ID NO: 2440944 - RNA, 19 nt, Artificial Sequence
  Description of Artificial Sequence: Synthetic oligonucleotide
  Sense strand starting at position 3947 of SEQ ID NO: 1886991
aaugguauugucugugauc

SEQ ID NO: 2440945 - RNA, 19 nt, Artificial Sequence
  Description of Artificial Sequence: Synthetic oligonucleotide
  Antisense strand to SEQ ID NO: 2440944
gaucacagacaauaccauu

SEQ ID NO: 2440946 - RNA, 19 nt, Artificial Sequence
  Description of Artificial Sequence: Synthetic oligonucleotide
  Sense strand starting at position 3948 of SEQ ID NO: 1886991
augguauugucugugauca

SEQ ID NO: 2440947 - RNA, 19 nt, Artificial Sequence
  Description of Artificial Sequence: Synthetic oligonucleotide
  Antisense strand to SEQ ID NO: 2440946
ugaucacagacaauaccau

SEQ ID NO: 2440948 - RNA, 19 nt, Artificial Sequence
  Description of Artificial Sequence: Synthetic oligonucleotide
  Sense strand starting at position 3949 of SEQ ID NO: 1886991
ugguauugucugugaucau

SEQ ID NO: 2440949 - RNA, 19 nt, Artificial Sequence
  Description of Artificial Sequence: Synthetic oligonucleotide
  Antisense strand to SEQ ID NO: 2440948
augaucacagacaauacca

SEQ ID NO: 2440950 - RNA, 19 nt, Artificial Sequence
  Description of Artificial Sequence: Synthetic oligonucleotide
  Sense strand starting at position 3956 of SEQ ID NO: 1886991
gucugugaucaugggagaa

SEQ ID NO: 2440951 - RNA, 19 nt, Artificial Sequence
  Description of Artificial Sequence: Synthetic oligonucleotide
  Antisense strand to SEQ ID NO: 2440950
uucucccaugaucacagac

SEQ ID NO: 2440952 - RNA, 19 nt, Artificial Sequence
  Description of Artificial Sequence: Synthetic oligonucleotide
  Sense strand starting at position 3968 of SEQ ID NO: 1886991
gggagaagcugucuacuua

SEQ ID NO: 2440953 - RNA, 19 nt, Artificial Sequence
  Description of Artificial Sequence: Synthetic oligonucleotide
  Antisense strand to SEQ ID NO: 2440952
uaaguagacagcuucuccc

SEQ ID NO: 2440954 - RNA, 19 nt, Artificial Sequence
  Description of Artificial Sequence: Synthetic oligonucleotide
  Sense strand starting at position 3969 of SEQ ID NO: 1886991
ggagaagcugucuacuuau

SEQ ID NO: 2440955 - RNA, 19 nt, Artificial Sequence
  Description of Artificial Sequence: Synthetic oligonucleotide
  Antisense strand to SEQ ID NO: 2440954
auaaguagacagcuucucc

SEQ ID NO: 2440956 - RNA, 19 nt, Artificial Sequence
  Description of Artificial Sequence: Synthetic oligonucleotide
  Sense strand starting at position 38 of SEQ ID NO: 1886992
augucuagcugucugacaa

SEQ ID NO: 2440957 - RNA, 19 nt, Artificial Sequence
  Description of Artificial Sequence: Synthetic oligonucleotide
  Antisense strand to SEQ ID NO: 2440956
uugucagacagcuagacau

SEQ ID NO: 2440958 - RNA, 19 nt, Artificial Sequence
  Description of Artificial Sequence: Synthetic oligonucleotide
  Sense strand starting at position 39 of SEQ ID NO: 1886992
ugucuagcugucugacaac

SEQ ID NO: 2440959 - RNA, 19 nt, Artificial Sequence
  Description of Artificial Sequence: Synthetic oligonucleotide
  Antisense strand to SEQ ID NO: 2440958
guugucagacagcuagaca

SEQ ID NO: 2440960 - RNA, 19 nt, Artificial Sequence
  Description of Artificial Sequence: Synthetic oligonucleotide
  Sense strand starting at position 54 of SEQ ID NO: 1886992
caaccaucugccuggaguu

SEQ ID NO: 2440961 - RNA, 19 nt, Artificial Sequence
  Description of Artificial Sequence: Synthetic oligonucleotide
  Antisense strand to SEQ ID NO: 2440960
aacuccaggcagaugguug

SEQ ID NO: 2440962 - RNA, 19 nt, Artificial Sequence
  Description of Artificial Sequence: Synthetic oligonucleotide
  Sense strand starting at position 55 of SEQ ID NO: 1886992
aaccaucugccuggaguuu

SEQ ID NO: 2440963 - RNA, 19 nt, Artificial Sequence
  Description of Artificial Sequence: Synthetic oligonucleotide
  Antisense strand to SEQ ID NO: 2440962
aaacuccaggcagaugguu

SEQ ID NO: 2440964 - RNA, 19 nt, Artificial Sequence
  Description of Artificial Sequence: Synthetic oligonucleotide
  Sense strand starting at position 64 of SEQ ID NO: 1886992
ccuggaguuugucuucuua

SEQ ID NO: 2440965 - RNA, 19 nt, Artificial Sequence
  Description of Artificial Sequence: Synthetic oligonucleotide
  Antisense strand to SEQ ID NO: 2440964
uaagaagacaaacuccagg

SEQ ID NO: 2440966 - RNA, 19 nt, Artificial Sequence
  Description of Artificial Sequence: Synthetic oligonucleotide
  Sense strand starting at position 66 of SEQ ID NO: 1886992
uggaguuugucuucuuaaa

SEQ ID NO: 2440967 - RNA, 19 nt, Artificial Sequence
  Description of Artificial Sequence: Synthetic oligonucleotide
  Antisense strand to SEQ ID NO: 2440966
uuuaagaagacaaacucca

SEQ ID NO: 2440968 - RNA, 19 nt, Artificial Sequence
  Description of Artificial Sequence: Synthetic oligonucleotide
  Sense strand starting at position 68 of SEQ ID NO: 1886992
gaguuugucuucuuaaaga

SEQ ID NO: 2440969 - RNA, 19 nt, Artificial Sequence
  Description of Artificial Sequence: Synthetic oligonucleotide
  Antisense strand to SEQ ID NO: 2440968
ucuuuaagaagacaaacuc

SEQ ID NO: 2440970 - RNA, 19 nt, Artificial Sequence
  Description of Artificial Sequence: Synthetic oligonucleotide
  Sense strand starting at position 232 of SEQ ID NO: 1886992
aaaugagccugcuugugaa

SEQ ID NO: 2440971 - RNA, 19 nt, Artificial Sequence
  Description of Artificial Sequence: Synthetic oligonucleotide
  Antisense strand to SEQ ID NO: 2440970
uucacaagcaggcucauuu

SEQ ID NO: 2440972 - RNA, 19 nt, Artificial Sequence
  Description of Artificial Sequence: Synthetic oligonucleotide
  Sense strand starting at position 247 of SEQ ID NO: 1886992
ugaaaugauuuguaaacug

SEQ ID NO: 2440973 - RNA, 19 nt, Artificial Sequence
  Description of Artificial Sequence: Synthetic oligonucleotide
  Antisense strand to SEQ ID NO: 2440972
caguuuacaaaucauuuca

SEQ ID NO: 2440974 - RNA, 19 nt, Artificial Sequence
  Description of Artificial Sequence: Synthetic oligonucleotide
  Sense strand starting at position 401 of SEQ ID NO: 1886992
cccaaaguaguguauaaau

SEQ ID NO: 2440975 - RNA, 19 nt, Artificial Sequence
  Description of Artificial Sequence: Synthetic oligonucleotide
  Antisense strand to SEQ ID NO: 2440974
auuuauacacuacuuuggg

SEQ ID NO: 2440976 - RNA, 19 nt, Artificial Sequence
  Description of Artificial Sequence: Synthetic oligonucleotide
  Sense strand starting at position 403 of SEQ ID NO: 1886992
caaaguaguguauaaaugu

SEQ ID NO: 2440977 - RNA, 19 nt, Artificial Sequence
  Description of Artificial Sequence: Synthetic oligonucleotide
  Antisense strand to SEQ ID NO: 2440976
acauuuauacacuacuuug

SEQ ID NO: 2440978 - RNA, 19 nt, Artificial Sequence
  Description of Artificial Sequence: Synthetic oligonucleotide
  Sense strand starting at position 422 of SEQ ID NO: 1886992
ucauuauuagcauaaguag

SEQ ID NO: 2440979 - RNA, 19 nt, Artificial Sequence
  Description of Artificial Sequence: Synthetic oligonucleotide
  Antisense strand to SEQ ID NO: 2440978
cuacuuaugcuaauaauga

SEQ ID NO: 2440980 - RNA, 19 nt, Artificial Sequence
  Description of Artificial Sequence: Synthetic oligonucleotide
  Sense strand starting at position 483 of SEQ ID NO: 1886992
uugugugaccucugccaaa

SEQ ID NO: 2440981 - RNA, 19 nt, Artificial Sequence
  Description of Artificial Sequence: Synthetic oligonucleotide
  Antisense strand to SEQ ID NO: 2440980
uuuggcagaggucacacaa

SEQ ID NO: 2440982 - RNA, 19 nt, Artificial Sequence
  Description of Artificial Sequence: Synthetic oligonucleotide
  Sense strand starting at position 573 of SEQ ID NO: 1886992
auuuaacauuugugaagca

SEQ ID NO: 2440983 - RNA, 19 nt, Artificial Sequence
  Description of Artificial Sequence: Synthetic oligonucleotide
  Antisense strand to SEQ ID NO: 2440982
ugcuucacaaauguuaaau

SEQ ID NO: 2440984 - RNA, 19 nt, Artificial Sequence
  Description of Artificial Sequence: Synthetic oligonucleotide
  Sense strand starting at position 574 of SEQ ID NO: 1886992
uuuaacauuugugaagcau

SEQ ID NO: 2440985 - RNA, 19 nt, Artificial Sequence
  Description of Artificial Sequence: Synthetic oligonucleotide
  Antisense strand to SEQ ID NO: 2440984
augcuucacaaauguuaaa

SEQ ID NO: 2440986 - RNA, 19 nt, Artificial Sequence
  Description of Artificial Sequence: Synthetic oligonucleotide
  Sense strand starting at position 617 of SEQ ID NO: 1886992
ugcuuaauacaugguguuu

SEQ ID NO: 2440987 - RNA, 19 nt, Artificial Sequence
  Description of Artificial Sequence: Synthetic oligonucleotide
  Antisense strand to SEQ ID NO: 2440986
aaacaccauguauuaagca

SEQ ID NO: 2440988 - RNA, 19 nt, Artificial Sequence
  Description of Artificial Sequence: Synthetic oligonucleotide
  Sense strand starting at position 1009 of SEQ ID NO: 1886992
gggucucugagcugcaaua

SEQ ID NO: 2440989 - RNA, 19 nt, Artificial Sequence
  Description of Artificial Sequence: Synthetic oligonucleotide
  Antisense strand to SEQ ID NO: 2440988
uauugcagcucagagaccc

SEQ ID NO: 2440990 - RNA, 19 nt, Artificial Sequence
  Description of Artificial Sequence: Synthetic oligonucleotide
  Sense strand starting at position 1011 of SEQ ID NO: 1886992
gucucugagcugcaauaag

SEQ ID NO: 2440991 - RNA, 19 nt, Artificial Sequence
  Description of Artificial Sequence: Synthetic oligonucleotide
  Antisense strand to SEQ ID NO: 2440990
cuuauugcagcucagagac

SEQ ID NO: 2440992 - RNA, 19 nt, Artificial Sequence
  Description of Artificial Sequence: Synthetic oligonucleotide
  Sense strand starting at position 1019 of SEQ ID NO: 1886992
gcugcaauaagagaaaugu

SEQ ID NO: 2440993 - RNA, 19 nt, Artificial Sequence
  Description of Artificial Sequence: Synthetic oligonucleotide
  Antisense strand to SEQ ID NO: 2440992
acauuucucuuauugcagc

SEQ ID NO: 2440994 - RNA, 19 nt, Artificial Sequence
  Description of Artificial Sequence: Synthetic oligonucleotide
  Sense strand starting at position 1365 of SEQ ID NO: 1886992
gaguaaccucuugaaguuc

SEQ ID NO: 2440995 - RNA, 19 nt, Artificial Sequence
  Description of Artificial Sequence: Synthetic oligonucleotide
  Antisense strand to SEQ ID NO: 2440994
gaacuucaagagguuacuc

SEQ ID NO: 2440996 - RNA, 19 nt, Artificial Sequence
  Description of Artificial Sequence: Synthetic oligonucleotide
  Sense strand starting at position 1373 of SEQ ID NO: 1886992
ucuugaaguucccuuucga

SEQ ID NO: 2440997 - RNA, 19 nt, Artificial Sequence
  Description of Artificial Sequence: Synthetic oligonucleotide
  Antisense strand to SEQ ID NO: 2440996
ucgaaagggaacuucaaga

SEQ ID NO: 2440998 - RNA, 19 nt, Artificial Sequence
  Description of Artificial Sequence: Synthetic oligonucleotide
  Sense strand starting at position 1574 of SEQ ID NO: 1886992
gagaaauggauacggucua

SEQ ID NO: 2440999 - RNA, 19 nt, Artificial Sequence
  Description of Artificial Sequence: Synthetic oligonucleotide
  Antisense strand to SEQ ID NO: 2440998
uagaccguauccauuucuc

SEQ ID NO: 2441000 - RNA, 19 nt, Artificial Sequence
  Description of Artificial Sequence: Synthetic oligonucleotide
  Sense strand starting at position 1706 of SEQ ID NO: 1886992
ugguaauuauaauuagcga

SEQ ID NO: 2441001 - RNA, 19 nt, Artificial Sequence
  Description of Artificial Sequence: Synthetic oligonucleotide
  Antisense strand to SEQ ID NO: 2441000
ucgcuaauuauaauuacca

SEQ ID NO: 2441002 - RNA, 19 nt, Artificial Sequence
  Description of Artificial Sequence: Synthetic oligonucleotide
  Sense strand starting at position 1719 of SEQ ID NO: 1886992
uagcgacauuugguuguua

SEQ ID NO: 2441003 - RNA, 19 nt, Artificial Sequence
  Description of Artificial Sequence: Synthetic oligonucleotide
  Antisense strand to SEQ ID NO: 2441002
uaacaaccaaaugucgcua

SEQ ID NO: 2441004 - RNA, 19 nt, Artificial Sequence
  Description of Artificial Sequence: Synthetic oligonucleotide
  Sense strand starting at position 1730 of SEQ ID NO: 1886992
gguuguuaccacugcuaaa

SEQ ID NO: 2441005 - RNA, 19 nt, Artificial Sequence
  Description of Artificial Sequence: Synthetic oligonucleotide
  Antisense strand to SEQ ID NO: 2441004
uuuagcagugguaacaacc

SEQ ID NO: 2441006 - RNA, 19 nt, Artificial Sequence
  Description of Artificial Sequence: Synthetic oligonucleotide
  Sense strand starting at position 1742 of SEQ ID NO: 1886992
ugcuaaauaugucugucuu

SEQ ID NO: 2441007 - RNA, 19 nt, Artificial Sequence
  Description of Artificial Sequence: Synthetic oligonucleotide
  Antisense strand to SEQ ID NO: 2441006
aagacagacauauuuagca

SEQ ID NO: 2441008 - RNA, 19 nt, Artificial Sequence
  Description of Artificial Sequence: Synthetic oligonucleotide
  Sense strand starting at position 1792 of SEQ ID NO: 1886992
gugaguggauaggagaaau

SEQ ID NO: 2441009 - RNA, 19 nt, Artificial Sequence
  Description of Artificial Sequence: Synthetic oligonucleotide
  Antisense strand to SEQ ID NO: 2441008
auuucuccuauccacucac

SEQ ID NO: 2441010 - RNA, 19 nt, Artificial Sequence
  Description of Artificial Sequence: Synthetic oligonucleotide
  Sense strand starting at position 1806 of SEQ ID NO: 1886992
gaaauaaaucucggcaaag

SEQ ID NO: 2441011 - RNA, 19 nt, Artificial Sequence
  Description of Artificial Sequence: Synthetic oligonucleotide
  Antisense strand to SEQ ID NO: 2441010
cuuugccgagauuuauuuc

SEQ ID NO: 2441012 - RNA, 19 nt, Artificial Sequence
  Description of Artificial Sequence: Synthetic oligonucleotide
  Sense strand starting at position 1835 of SEQ ID NO: 1886992
gccugagugcgaggaagaa

SEQ ID NO: 2441013 - RNA, 19 nt, Artificial Sequence
  Description of Artificial Sequence: Synthetic oligonucleotide
  Antisense strand to SEQ ID NO: 2441012
uucuuccucgcacucaggc

SEQ ID NO: 2441014 - RNA, 19 nt, Artificial Sequence
  Description of Artificial Sequence: Synthetic oligonucleotide
  Sense strand starting at position 1900 of SEQ ID NO: 1886992
aggcgaguccagcauucua

SEQ ID NO: 2441015 - RNA, 19 nt, Artificial Sequence
  Description of Artificial Sequence: Synthetic oligonucleotide
  Antisense strand to SEQ ID NO: 2441014
uagaaugcuggacucgccu

SEQ ID NO: 2441016 - RNA, 19 nt, Artificial Sequence
  Description of Artificial Sequence: Synthetic oligonucleotide
  Sense strand starting at position 2896 of SEQ ID NO: 1886992
cagcgcuaccuguaaguga

SEQ ID NO: 2441017 - RNA, 19 nt, Artificial Sequence
  Description of Artificial Sequence: Synthetic oligonucleotide
  Antisense strand to SEQ ID NO: 2441016
ucacuuacagguagcgcug

SEQ ID NO: 2441018 - RNA, 19 nt, Artificial Sequence
  Description of Artificial Sequence: Synthetic oligonucleotide
  Sense strand starting at position 3077 of SEQ ID NO: 1886992
ggcaguaaucauuggcaag

SEQ ID NO: 2441019 - RNA, 19 nt, Artificial Sequence
  Description of Artificial Sequence: Synthetic oligonucleotide
  Antisense strand to SEQ ID NO: 2441018
cuugccaaugauuacugcc

SEQ ID NO: 2441020 - RNA, 19 nt, Artificial Sequence
  Description of Artificial Sequence: Synthetic oligonucleotide
  Sense strand starting at position 3078 of SEQ ID NO: 1886992
gcaguaaucauuggcaagu

SEQ ID NO: 2441021 - RNA, 19 nt, Artificial Sequence
  Description of Artificial Sequence: Synthetic oligonucleotide
  Antisense strand to SEQ ID NO: 2441020
acuugccaaugauuacugc

SEQ ID NO: 2441022 - RNA, 19 nt, Artificial Sequence
  Description of Artificial Sequence: Synthetic oligonucleotide
  Sense strand starting at position 3438 of SEQ ID NO: 1886992
gcguuuggagcuguccaua

SEQ ID NO: 2441023 - RNA, 19 nt, Artificial Sequence
  Description of Artificial Sequence: Synthetic oligonucleotide
  Antisense strand to SEQ ID NO: 2441022
uauggacagcuccaaacgc

SEQ ID NO: 2441024 - RNA, 19 nt, Artificial Sequence
  Description of Artificial Sequence: Synthetic oligonucleotide
  Sense strand starting at position 3463 of SEQ ID NO: 1886992
cucugacgccuugaggaua

SEQ ID NO: 2441025 - RNA, 19 nt, Artificial Sequence
  Description of Artificial Sequence: Synthetic oligonucleotide
  Antisense strand to SEQ ID NO: 2441024
uauccucaaggcgucagag

SEQ ID NO: 2441026 - RNA, 19 nt, Artificial Sequence
  Description of Artificial Sequence: Synthetic oligonucleotide
  Sense strand starting at position 3588 of SEQ ID NO: 1886992
cagauucguguuggaucuu

SEQ ID NO: 2441027 - RNA, 19 nt, Artificial Sequence
  Description of Artificial Sequence: Synthetic oligonucleotide
  Antisense strand to SEQ ID NO: 2441026
aagauccaacacgaaucug

SEQ ID NO: 2441028 - RNA, 19 nt, Artificial Sequence
  Description of Artificial Sequence: Synthetic oligonucleotide
  Sense strand starting at position 3786 of SEQ ID NO: 1886992
ggagcauguccaggcuuca

SEQ ID NO: 2441029 - RNA, 19 nt, Artificial Sequence
  Description of Artificial Sequence: Synthetic oligonucleotide
  Antisense strand to SEQ ID NO: 2441028
ugaagccuggacaugcucc

SEQ ID NO: 2441030 - RNA, 19 nt, Artificial Sequence
  Description of Artificial Sequence: Synthetic oligonucleotide
  Sense strand starting at position 3855 of SEQ ID NO: 1886992
aggugaagcuguccaaaga

SEQ ID NO: 2441031 - RNA, 19 nt, Artificial Sequence
  Description of Artificial Sequence: Synthetic oligonucleotide
  Antisense strand to SEQ ID NO: 2441030
ucuuuggacagcuucaccu

SEQ ID NO: 2441032 - RNA, 19 nt, Artificial Sequence
  Description of Artificial Sequence: Synthetic oligonucleotide
  Sense strand starting at position 3878 of SEQ ID NO: 1886992
cgguguuuaggacagguua

SEQ ID NO: 2441033 - RNA, 19 nt, Artificial Sequence
  Description of Artificial Sequence: Synthetic oligonucleotide
  Antisense strand to SEQ ID NO: 2441032
uaaccuguccuaaacaccg

SEQ ID NO: 2441034 - RNA, 19 nt, Artificial Sequence
  Description of Artificial Sequence: Synthetic oligonucleotide
  Sense strand starting at position 3880 of SEQ ID NO: 1886992
guguuuaggacagguuaag

SEQ ID NO: 2441035 - RNA, 19 nt, Artificial Sequence
  Description of Artificial Sequence: Synthetic oligonucleotide
  Antisense strand to SEQ ID NO: 2441034
cuuaaccuguccuaaacac

SEQ ID NO: 2441036 - RNA, 19 nt, Artificial Sequence
  Description of Artificial Sequence: Synthetic oligonucleotide
  Sense strand starting at position 54 of SEQ ID NO: 1886993
augccauauugacugacuu

SEQ ID NO: 2441037 - RNA, 19 nt, Artificial Sequence
  Description of Artificial Sequence: Synthetic oligonucleotide
  Antisense strand to SEQ ID NO: 2441036
aagucagucaauauggcau

SEQ ID NO: 2441038 - RNA, 19 nt, Artificial Sequence
  Description of Artificial Sequence: Synthetic oligonucleotide
  Sense strand starting at position 73 of SEQ ID NO: 1886993
cagagaagcucugggaauu

SEQ ID NO: 2441039 - RNA, 19 nt, Artificial Sequence
  Description of Artificial Sequence: Synthetic oligonucleotide
  Antisense strand to SEQ ID NO: 2441038
aauucccagagcuucucug

SEQ ID NO: 2441040 - RNA, 19 nt, Artificial Sequence
  Description of Artificial Sequence: Synthetic oligonucleotide
  Sense strand starting at position 140 of SEQ ID NO: 1886993
guuggugaacuugacaauu

SEQ ID NO: 2441041 - RNA, 19 nt, Artificial Sequence
  Description of Artificial Sequence: Synthetic oligonucleotide
  Antisense strand to SEQ ID NO: 2441040
aauugucaaguucaccaac

SEQ ID NO: 2441042 - RNA, 19 nt, Artificial Sequence
  Description of Artificial Sequence: Synthetic oligonucleotide
  Sense strand starting at position 322 of SEQ ID NO: 1886993
auggaauguuacugcucaa

SEQ ID NO: 2441043 - RNA, 19 nt, Artificial Sequence
  Description of Artificial Sequence: Synthetic oligonucleotide
  Antisense strand to SEQ ID NO: 2441042
uugagcaguaacauuccau

SEQ ID NO: 2441044 - RNA, 19 nt, Artificial Sequence
  Description of Artificial Sequence: Synthetic oligonucleotide
  Sense strand starting at position 561 of SEQ ID NO: 1886993
ggguuuauauucuagacag

SEQ ID NO: 2441045 - RNA, 19 nt, Artificial Sequence
  Description of Artificial Sequence: Synthetic oligonucleotide
  Antisense strand to SEQ ID NO: 2441044
cugucuagaauauaaaccc

SEQ ID NO: 2441046 - RNA, 19 nt, Artificial Sequence
  Description of Artificial Sequence: Synthetic oligonucleotide
  Sense strand starting at position 638 of SEQ ID NO: 1886993
caaacauuaugugcuggau

SEQ ID NO: 2441047 - RNA, 19 nt, Artificial Sequence
  Description of Artificial Sequence: Synthetic oligonucleotide
  Antisense strand to SEQ ID NO: 2441046
auccagcacauaauguuug

SEQ ID NO: 2441048 - RNA, 19 nt, Artificial Sequence
  Description of Artificial Sequence: Synthetic oligonucleotide
  Sense strand starting at position 640 of SEQ ID NO: 1886993
aacauuaugugcuggauga

SEQ ID NO: 2441049 - RNA, 19 nt, Artificial Sequence
  Description of Artificial Sequence: Synthetic oligonucleotide
  Antisense strand to SEQ ID NO: 2441048
ucauccagcacauaauguu

SEQ ID NO: 2441050 - RNA, 19 nt, Artificial Sequence
  Description of Artificial Sequence: Synthetic oligonucleotide
  Sense strand starting at position 641 of SEQ ID NO: 1886993
acauuaugugcuggaugag

SEQ ID NO: 2441051 - RNA, 19 nt, Artificial Sequence
  Description of Artificial Sequence: Synthetic oligonucleotide
  Antisense strand to SEQ ID NO: 2441050
cucauccagcacauaaugu

SEQ ID NO: 2441052 - RNA, 19 nt, Artificial Sequence
  Description of Artificial Sequence: Synthetic oligonucleotide
  Sense strand starting at position 650 of SEQ ID NO: 1886993
gcuggaugagccggaugau

SEQ ID NO: 2441053 - RNA, 19 nt, Artificial Sequence
  Description of Artificial Sequence: Synthetic oligonucleotide
  Antisense strand to SEQ ID NO: 2441052
aucauccggcucauccagc

SEQ ID NO: 2441054 - RNA, 19 nt, Artificial Sequence
  Description of Artificial Sequence: Synthetic oligonucleotide
  Sense strand starting at position 1111 of SEQ ID NO: 1886993
ugauguggguucgaagaug

SEQ ID NO: 2441055 - RNA, 19 nt, Artificial Sequence
  Description of Artificial Sequence: Synthetic oligonucleotide
  Antisense strand to SEQ ID NO: 2441054
caucuucgaacccacauca

SEQ ID NO: 2441056 - RNA, 19 nt, Artificial Sequence
  Description of Artificial Sequence: Synthetic oligonucleotide
  Sense strand starting at position 1166 of SEQ ID NO: 1886993
cguccucccugaucgcaaa

SEQ ID NO: 2441057 - RNA, 19 nt, Artificial Sequence
  Description of Artificial Sequence: Synthetic oligonucleotide
  Antisense strand to SEQ ID NO: 2441056
uuugcgaucagggaggacg

SEQ ID NO: 2441058 - RNA, 19 nt, Artificial Sequence
  Description of Artificial Sequence: Synthetic oligonucleotide
  Sense strand starting at position 3216 of SEQ ID NO: 1886993
gcaggucuucugggaagca

SEQ ID NO: 2441059 - RNA, 19 nt, Artificial Sequence
  Description of Artificial Sequence: Synthetic oligonucleotide
  Antisense strand to SEQ ID NO: 2441058
ugcuucccagaagaccugc

SEQ ID NO: 2441060 - RNA, 19 nt, Artificial Sequence
  Description of Artificial Sequence: Synthetic oligonucleotide
  Sense strand starting at position 3217 of SEQ ID NO: 1886993
caggucuucugggaagcaa

SEQ ID NO: 2441061 - RNA, 19 nt, Artificial Sequence
  Description of Artificial Sequence: Synthetic oligonucleotide
  Antisense strand to SEQ ID NO: 2441060
uugcuucccagaagaccug

SEQ ID NO: 2441062 - RNA, 19 nt, Artificial Sequence
  Description of Artificial Sequence: Synthetic oligonucleotide
  Sense strand starting at position 3238 of SEQ ID NO: 1886993
ggguaugagcguuaagaac

SEQ ID NO: 2441063 - RNA, 19 nt, Artificial Sequence
  Description of Artificial Sequence: Synthetic oligonucleotide
  Antisense strand to SEQ ID NO: 2441062
guucuuaacgcucauaccc

SEQ ID NO: 2441064 - RNA, 19 nt, Artificial Sequence
  Description of Artificial Sequence: Synthetic oligonucleotide
  Sense strand starting at position 3246 of SEQ ID NO: 1886993
gcguuaagaacuugggcuu

SEQ ID NO: 2441065 - RNA, 19 nt, Artificial Sequence
  Description of Artificial Sequence: Synthetic oligonucleotide
  Antisense strand to SEQ ID NO: 2441064
aagcccaaguucuuaacgc

SEQ ID NO: 2441066 - RNA, 19 nt, Artificial Sequence
  Description of Artificial Sequence: Synthetic oligonucleotide
  Sense strand starting at position 3269 of SEQ ID NO: 1886993
ggcagacacgcuuguuuca

SEQ ID NO: 2441067 - RNA, 19 nt, Artificial Sequence
  Description of Artificial Sequence: Synthetic oligonucleotide
  Antisense strand to SEQ ID NO: 2441066
ugaaacaagcgugucugcc

SEQ ID NO: 2441068 - RNA, 19 nt, Artificial Sequence
  Description of Artificial Sequence: Synthetic oligonucleotide
  Sense strand starting at position 3317 of SEQ ID NO: 1886993
ggccguguguauguuuauu

SEQ ID NO: 2441069 - RNA, 19 nt, Artificial Sequence
  Description of Artificial Sequence: Synthetic oligonucleotide
  Antisense strand to SEQ ID NO: 2441068
aauaaacauacacacggcc

SEQ ID NO: 2441070 - RNA, 19 nt, Artificial Sequence
  Description of Artificial Sequence: Synthetic oligonucleotide
  Sense strand starting at position 3319 of SEQ ID NO: 1886993
ccguguguauguuuauuga

SEQ ID NO: 2441071 - RNA, 19 nt, Artificial Sequence
  Description of Artificial Sequence: Synthetic oligonucleotide
  Antisense strand to SEQ ID NO: 2441070
ucaauaaacauacacacgg

SEQ ID NO: 2441072 - RNA, 19 nt, Artificial Sequence
  Description of Artificial Sequence: Synthetic oligonucleotide
  Sense strand starting at position 3322 of SEQ ID NO: 1886993
uguguauguuuauugaguu

SEQ ID NO: 2441073 - RNA, 19 nt, Artificial Sequence
  Description of Artificial Sequence: Synthetic oligonucleotide
  Antisense strand to SEQ ID NO: 2441072
aacucaauaaacauacaca

SEQ ID NO: 2441074 - RNA, 19 nt, Artificial Sequence
  Description of Artificial Sequence: Synthetic oligonucleotide
  Sense strand starting at position 3326 of SEQ ID NO: 1886993
uauguuuauugaguucuga

SEQ ID NO: 2441075 - RNA, 19 nt, Artificial Sequence
  Description of Artificial Sequence: Synthetic oligonucleotide
  Antisense strand to SEQ ID NO: 2441074
ucagaacucaauaaacaua

SEQ ID NO: 2441076 - RNA, 19 nt, Artificial Sequence
  Description of Artificial Sequence: Synthetic oligonucleotide
  Sense strand starting at position 3382 of SEQ ID NO: 1886993
gccugcauuccagagagau

SEQ ID NO: 2441077 - RNA, 19 nt, Artificial Sequence
  Description of Artificial Sequence: Synthetic oligonucleotide
  Antisense strand to SEQ ID NO: 2441076
aucucucuggaaugcaggc

SEQ ID NO: 2441078 - RNA, 19 nt, Artificial Sequence
  Description of Artificial Sequence: Synthetic oligonucleotide
  Sense strand starting at position 3392 of SEQ ID NO: 1886993
cagagagauugugagugga

SEQ ID NO: 2441079 - RNA, 19 nt, Artificial Sequence
  Description of Artificial Sequence: Synthetic oligonucleotide
  Antisense strand to SEQ ID NO: 2441078
uccacucacaaucucucug

SEQ ID NO: 2441080 - RNA, 19 nt, Artificial Sequence
  Description of Artificial Sequence: Synthetic oligonucleotide
  Sense strand starting at position 3394 of SEQ ID NO: 1886993
gagagauugugaguggauc

SEQ ID NO: 2441081 - RNA, 19 nt, Artificial Sequence
  Description of Artificial Sequence: Synthetic oligonucleotide
  Antisense strand to SEQ ID NO: 2441080
gauccacucacaaucucuc

SEQ ID NO: 2441082 - RNA, 19 nt, Artificial Sequence
  Description of Artificial Sequence: Synthetic oligonucleotide
  Sense strand starting at position 3413 of SEQ ID NO: 1886993
cuguuacagcgucagauau

SEQ ID NO: 2441083 - RNA, 19 nt, Artificial Sequence
  Description of Artificial Sequence: Synthetic oligonucleotide
  Antisense strand to SEQ ID NO: 2441082
auaucugacgcuguaacag

SEQ ID NO: 2441084 - RNA, 19 nt, Artificial Sequence
  Description of Artificial Sequence: Synthetic oligonucleotide
  Sense strand starting at position 3450 of SEQ ID NO: 1886993
uguccaaucugaucacugu

SEQ ID NO: 2441085 - RNA, 19 nt, Artificial Sequence
  Description of Artificial Sequence: Synthetic oligonucleotide
  Antisense strand to SEQ ID NO: 2441084
acagugaucagauuggaca

SEQ ID NO: 2441086 - RNA, 19 nt, Artificial Sequence
  Description of Artificial Sequence: Synthetic oligonucleotide
  Sense strand starting at position 3451 of SEQ ID NO: 1886993
guccaaucugaucacuguu

SEQ ID NO: 2441087 - RNA, 19 nt, Artificial Sequence
  Description of Artificial Sequence: Synthetic oligonucleotide
  Antisense strand to SEQ ID NO: 2441086
aacagugaucagauuggac

SEQ ID NO: 2441088 - RNA, 19 nt, Artificial Sequence
  Description of Artificial Sequence: Synthetic oligonucleotide
  Sense strand starting at position 3460 of SEQ ID NO: 1886993
gaucacuguuaugcugaca

SEQ ID NO: 2441089 - RNA, 19 nt, Artificial Sequence
  Description of Artificial Sequence: Synthetic oligonucleotide
  Antisense strand to SEQ ID NO: 2441088
ugucagcauaacagugauc

SEQ ID NO: 2441090 - RNA, 19 nt, Artificial Sequence
  Description of Artificial Sequence: Synthetic oligonucleotide
  Sense strand starting at position 3465 of SEQ ID NO: 1886993
cuguuaugcugacaccaga

SEQ ID NO: 2441091 - RNA, 19 nt, Artificial Sequence
  Description of Artificial Sequence: Synthetic oligonucleotide
  Antisense strand to SEQ ID NO: 2441090
ucuggugucagcauaacag

SEQ ID NO: 2441092 - RNA, 19 nt, Artificial Sequence
  Description of Artificial Sequence: Synthetic oligonucleotide
  Sense strand starting at position 3595 of SEQ ID NO: 1886993
cuuugugugucucuaugua

SEQ ID NO: 2441093 - RNA, 19 nt, Artificial Sequence
  Description of Artificial Sequence: Synthetic oligonucleotide
  Antisense strand to SEQ ID NO: 2441092
uacauagagacacacaaag

SEQ ID NO: 2441094 - RNA, 19 nt, Artificial Sequence
  Description of Artificial Sequence: Synthetic oligonucleotide
  Sense strand starting at position 3608 of SEQ ID NO: 1886993
uauguaucccacuguguuu

SEQ ID NO: 2441095 - RNA, 19 nt, Artificial Sequence
  Description of Artificial Sequence: Synthetic oligonucleotide
  Antisense strand to SEQ ID NO: 2441094
aaacacagugggauacaua

SEQ ID NO: 2441096 - RNA, 19 nt, Artificial Sequence
  Description of Artificial Sequence: Synthetic oligonucleotide
  Sense strand starting at position 3670 of SEQ ID NO: 1886993
cuccgugugucuuuguaag

SEQ ID NO: 2441097 - RNA, 19 nt, Artificial Sequence
  Description of Artificial Sequence: Synthetic oligonucleotide
  Antisense strand to SEQ ID NO: 2441096
cuuacaaagacacacggag

SEQ ID NO: 2441098 - RNA, 19 nt, Artificial Sequence
  Description of Artificial Sequence: Synthetic oligonucleotide
  Sense strand starting at position 3672 of SEQ ID NO: 1886993
ccgugugucuuuguaagug

SEQ ID NO: 2441099 - RNA, 19 nt, Artificial Sequence
  Description of Artificial Sequence: Synthetic oligonucleotide
  Antisense strand to SEQ ID NO: 2441098
cacuuacaaagacacacgg

SEQ ID NO: 2441100 - RNA, 19 nt, Artificial Sequence
  Description of Artificial Sequence: Synthetic oligonucleotide
  Sense strand starting at position 3676 of SEQ ID NO: 1886993
gugucuuuguaagugcauu

SEQ ID NO: 2441101 - RNA, 19 nt, Artificial Sequence
  Description of Artificial Sequence: Synthetic oligonucleotide
  Antisense strand to SEQ ID NO: 2441100
aaugcacuuacaaagacac

SEQ ID NO: 2441102 - RNA, 19 nt, Artificial Sequence
  Description of Artificial Sequence: Synthetic oligonucleotide
  Sense strand starting at position 3689 of SEQ ID NO: 1886993
ugcauuucccucugugcau

SEQ ID NO: 2441103 - RNA, 19 nt, Artificial Sequence
  Description of Artificial Sequence: Synthetic oligonucleotide
  Antisense strand to SEQ ID NO: 2441102
augcacagagggaaaugca

SEQ ID NO: 2441104 - RNA, 19 nt, Artificial Sequence
  Description of Artificial Sequence: Synthetic oligonucleotide
  Sense strand starting at position 3718 of SEQ ID NO: 1886993
guccacuucugagugugua

SEQ ID NO: 2441105 - RNA, 19 nt, Artificial Sequence
  Description of Artificial Sequence: Synthetic oligonucleotide
  Antisense strand to SEQ ID NO: 2441104
uacacacucagaaguggac

SEQ ID NO: 2441106 - RNA, 19 nt, Artificial Sequence
  Description of Artificial Sequence: Synthetic oligonucleotide
  Sense strand starting at position 3719 of SEQ ID NO: 1886993
uccacuucugaguguguau

SEQ ID NO: 2441107 - RNA, 19 nt, Artificial Sequence
  Description of Artificial Sequence: Synthetic oligonucleotide
  Antisense strand to SEQ ID NO: 2441106
auacacacucagaagugga

SEQ ID NO: 2441108 - RNA, 19 nt, Artificial Sequence
  Description of Artificial Sequence: Synthetic oligonucleotide
  Sense strand starting at position 3722 of SEQ ID NO: 1886993
acuucugaguguguaucua

SEQ ID NO: 2441109 - RNA, 19 nt, Artificial Sequence
  Description of Artificial Sequence: Synthetic oligonucleotide
  Antisense strand to SEQ ID NO: 2441108
uagauacacacucagaagu

SEQ ID NO: 2441110 - RNA, 19 nt, Artificial Sequence
  Description of Artificial Sequence: Synthetic oligonucleotide
  Sense strand starting at position 3730 of SEQ ID NO: 1886993
guguguaucuauuuccaaa

SEQ ID NO: 2441111 - RNA, 19 nt, Artificial Sequence
  Description of Artificial Sequence: Synthetic oligonucleotide
  Antisense strand to SEQ ID NO: 2441110
uuuggaaauagauacacac

SEQ ID NO: 2441112 - RNA, 19 nt, Artificial Sequence
  Description of Artificial Sequence: Synthetic oligonucleotide
  Sense strand starting at position 3862 of SEQ ID NO: 1886993
cuuugucucuguuucucaa

SEQ ID NO: 2441113 - RNA, 19 nt, Artificial Sequence
  Description of Artificial Sequence: Synthetic oligonucleotide
  Antisense strand to SEQ ID NO: 2441112
uugagaaacagagacaaag

SEQ ID NO: 2441114 - RNA, 19 nt, Artificial Sequence
  Description of Artificial Sequence: Synthetic oligonucleotide
  Sense strand starting at position 3979 of SEQ ID NO: 1886993
ucauucuuugcucgugcaa

SEQ ID NO: 2441115 - RNA, 19 nt, Artificial Sequence
  Description of Artificial Sequence: Synthetic oligonucleotide
  Antisense strand to SEQ ID NO: 2441114
uugcacgagcaaagaauga

SEQ ID NO: 2441116 - RNA, 19 nt, Artificial Sequence
  Description of Artificial Sequence: Synthetic oligonucleotide
  Sense strand starting at position 70 of SEQ ID NO: 1886994
agaccaauaucaggaauga

SEQ ID NO: 2441117 - RNA, 19 nt, Artificial Sequence
  Description of Artificial Sequence: Synthetic oligonucleotide
  Antisense strand to SEQ ID NO: 2441116
ucauuccugauauuggucu

SEQ ID NO: 2441118 - RNA, 19 nt, Artificial Sequence
  Description of Artificial Sequence: Synthetic oligonucleotide
  Sense strand starting at position 103 of SEQ ID NO: 1886994
ucuacagagcaguguauca

SEQ ID NO: 2441119 - RNA, 19 nt, Artificial Sequence
  Description of Artificial Sequence: Synthetic oligonucleotide
  Antisense strand to SEQ ID NO: 2441118
ugauacacugcucuguaga

SEQ ID NO: 2441120 - RNA, 19 nt, Artificial Sequence
  Description of Artificial Sequence: Synthetic oligonucleotide
  Sense strand starting at position 153 of SEQ ID NO: 1886994
gacugcaagcuugacaaga

SEQ ID NO: 2441121 - RNA, 19 nt, Artificial Sequence
  Description of Artificial Sequence: Synthetic oligonucleotide
  Antisense strand to SEQ ID NO: 2441120
ucuugucaagcuugcaguc

SEQ ID NO: 2441122 - RNA, 19 nt, Artificial Sequence
  Description of Artificial Sequence: Synthetic oligonucleotide
  Sense strand starting at position 400 of SEQ ID NO: 1886994
gaagaaauauagggacuau

SEQ ID NO: 2441123 - RNA, 19 nt, Artificial Sequence
  Description of Artificial Sequence: Synthetic oligonucleotide
  Antisense strand to SEQ ID NO: 2441122
auagucccuauauuucuuc

SEQ ID NO: 2441124 - RNA, 19 nt, Artificial Sequence
  Description of Artificial Sequence: Synthetic oligonucleotide
  Sense strand starting at position 807 of SEQ ID NO: 1886994
accgcauccggccagagau

SEQ ID NO: 2441125 - RNA, 19 nt, Artificial Sequence
  Description of Artificial Sequence: Synthetic oligonucleotide
  Antisense strand to SEQ ID NO: 2441124
aucucuggccggaugcggu

SEQ ID NO: 2441126 - RNA, 19 nt, Artificial Sequence
  Description of Artificial Sequence: Synthetic oligonucleotide
  Sense strand starting at position 917 of SEQ ID NO: 1886994
aggauugguuaacauuaaa

SEQ ID NO: 2441127 - RNA, 19 nt, Artificial Sequence
  Description of Artificial Sequence: Synthetic oligonucleotide
  Antisense strand to SEQ ID NO: 2441126
uuuaauguuaaccaauccu

SEQ ID NO: 2441128 - RNA, 19 nt, Artificial Sequence
  Description of Artificial Sequence: Synthetic oligonucleotide
  Sense strand starting at position 1078 of SEQ ID NO: 1886994
ucugauuaagcuugucuaa

SEQ ID NO: 2441129 - RNA, 19 nt, Artificial Sequence
  Description of Artificial Sequence: Synthetic oligonucleotide
  Antisense strand to SEQ ID NO: 2441128
uuagacaagcuuaaucaga

SEQ ID NO: 2441130 - RNA, 19 nt, Artificial Sequence
  Description of Artificial Sequence: Synthetic oligonucleotide
  Sense strand starting at position 1150 of SEQ ID NO: 1886994
gcaagacuuccuggacaua

SEQ ID NO: 2441131 - RNA, 19 nt, Artificial Sequence
  Description of Artificial Sequence: Synthetic oligonucleotide
  Antisense strand to SEQ ID NO: 2441130
uauguccaggaagucuugc

SEQ ID NO: 2441132 - RNA, 19 nt, Artificial Sequence
  Description of Artificial Sequence: Synthetic oligonucleotide
  Sense strand starting at position 1185 of SEQ ID NO: 1886994
cagugcuggagguguaauu

SEQ ID NO: 2441133 - RNA, 19 nt, Artificial Sequence
  Description of Artificial Sequence: Synthetic oligonucleotide
  Antisense strand to SEQ ID NO: 2441132
aauuacaccuccagcacug

SEQ ID NO: 2441134 - RNA, 19 nt, Artificial Sequence
  Description of Artificial Sequence: Synthetic oligonucleotide
  Sense strand starting at position 1192 of SEQ ID NO: 1886994
ggagguguaauugggacaa

SEQ ID NO: 2441135 - RNA, 19 nt, Artificial Sequence
  Description of Artificial Sequence: Synthetic oligonucleotide
  Antisense strand to SEQ ID NO: 2441134
uugucccaauuacaccucc

SEQ ID NO: 2441136 - RNA, 19 nt, Artificial Sequence
  Description of Artificial Sequence: Synthetic oligonucleotide
  Sense strand starting at position 1261 of SEQ ID NO: 1886994
auuguauguggcugacacu

SEQ ID NO: 2441137 - RNA, 19 nt, Artificial Sequence
  Description of Artificial Sequence: Synthetic oligonucleotide
  Antisense strand to SEQ ID NO: 2441136
agugucagccacauacaau

SEQ ID NO: 2441138 - RNA, 19 nt, Artificial Sequence
  Description of Artificial Sequence: Synthetic oligonucleotide
  Sense strand starting at position 1318 of SEQ ID NO: 1886994
ugguuaugaauaugugaau

SEQ ID NO: 2441139 - RNA, 19 nt, Artificial Sequence
  Description of Artificial Sequence: Synthetic oligonucleotide
  Antisense strand to SEQ ID NO: 2441138
auucacauauucauaacca

SEQ ID NO: 2441140 - RNA, 19 nt, Artificial Sequence
  Description of Artificial Sequence: Synthetic oligonucleotide
  Sense strand starting at position 1319 of SEQ ID NO: 1886994
gguuaugaauaugugaauu

SEQ ID NO: 2441141 - RNA, 19 nt, Artificial Sequence
  Description of Artificial Sequence: Synthetic oligonucleotide
  Antisense strand to SEQ ID NO: 2441140
aauucacauauucauaacc

SEQ ID NO: 2441142 - RNA, 19 nt, Artificial Sequence
  Description of Artificial Sequence: Synthetic oligonucleotide
  Sense strand starting at position 1330 of SEQ ID NO: 1886994
ugugaauuaagccaggcua

SEQ ID NO: 2441143 - RNA, 19 nt, Artificial Sequence
  Description of Artificial Sequence: Synthetic oligonucleotide
  Antisense strand to SEQ ID NO: 2441142
uagccuggcuuaauucaca

SEQ ID NO: 2441144 - RNA, 19 nt, Artificial Sequence
  Description of Artificial Sequence: Synthetic oligonucleotide
  Sense strand starting at position 1332 of SEQ ID NO: 1886994
ugaauuaagccaggcuaca

SEQ ID NO: 2441145 - RNA, 19 nt, Artificial Sequence
  Description of Artificial Sequence: Synthetic oligonucleotide
  Antisense strand to SEQ ID NO: 2441144
uguagccuggcuuaauuca

SEQ ID NO: 2441146 - RNA, 19 nt, Artificial Sequence
  Description of Artificial Sequence: Synthetic oligonucleotide
  Sense strand starting at position 1377 of SEQ ID NO: 1886994
aucagauuccuauguauca

SEQ ID NO: 2441147 - RNA, 19 nt, Artificial Sequence
  Description of Artificial Sequence: Synthetic oligonucleotide
  Antisense strand to SEQ ID NO: 2441146
ugauacauaggaaucugau

SEQ ID NO: 2441148 - RNA, 19 nt, Artificial Sequence
  Description of Artificial Sequence: Synthetic oligonucleotide
  Sense strand starting at position 1378 of SEQ ID NO: 1886994
ucagauuccuauguaucag

SEQ ID NO: 2441149 - RNA, 19 nt, Artificial Sequence
  Description of Artificial Sequence: Synthetic oligonucleotide
  Antisense strand to SEQ ID NO: 2441148
cugauacauaggaaucuga

SEQ ID NO: 2441150 - RNA, 19 nt, Artificial Sequence
  Description of Artificial Sequence: Synthetic oligonucleotide
  Sense strand starting at position 1384 of SEQ ID NO: 1886994
uccuauguaucagcaagaa

SEQ ID NO: 2441151 - RNA, 19 nt, Artificial Sequence
  Description of Artificial Sequence: Synthetic oligonucleotide
  Antisense strand to SEQ ID NO: 2441150
uucuugcugauacauagga

SEQ ID NO: 2441152 - RNA, 19 nt, Artificial Sequence
  Description of Artificial Sequence: Synthetic oligonucleotide
  Sense strand starting at position 1610 of SEQ ID NO: 1886994
gcuuauuuccagugccaga

SEQ ID NO: 2441153 - RNA, 19 nt, Artificial Sequence
  Description of Artificial Sequence: Synthetic oligonucleotide
  Antisense strand to SEQ ID NO: 2441152
ucuggcacuggaaauaagc

SEQ ID NO: 2441154 - RNA, 19 nt, Artificial Sequence
  Description of Artificial Sequence: Synthetic oligonucleotide
  Sense strand starting at position 2091 of SEQ ID NO: 1886994
caaucagaguuggagacua

SEQ ID NO: 2441155 - RNA, 19 nt, Artificial Sequence
  Description of Artificial Sequence: Synthetic oligonucleotide
  Antisense strand to SEQ ID NO: 2441154
uagucuccaacucugauug

SEQ ID NO: 2441156 - RNA, 19 nt, Artificial Sequence
  Description of Artificial Sequence: Synthetic oligonucleotide
  Sense strand starting at position 2296 of SEQ ID NO: 1886994
guagacuagccguggagaa

SEQ ID NO: 2441157 - RNA, 19 nt, Artificial Sequence
  Description of Artificial Sequence: Synthetic oligonucleotide
  Antisense strand to SEQ ID NO: 2441156
uucuccacggcuagucuac

SEQ ID NO: 2441158 - RNA, 19 nt, Artificial Sequence
  Description of Artificial Sequence: Synthetic oligonucleotide
  Sense strand starting at position 2525 of SEQ ID NO: 1886994
gugcccugugucgugaaca

SEQ ID NO: 2441159 - RNA, 19 nt, Artificial Sequence
  Description of Artificial Sequence: Synthetic oligonucleotide
  Antisense strand to SEQ ID NO: 2441158
uguucacgacacagggcac

SEQ ID NO: 2441160 - RNA, 19 nt, Artificial Sequence
  Description of Artificial Sequence: Synthetic oligonucleotide
  Sense strand starting at position 3135 of SEQ ID NO: 1886994
auuguaaugcauuagacuu

SEQ ID NO: 2441161 - RNA, 19 nt, Artificial Sequence
  Description of Artificial Sequence: Synthetic oligonucleotide
  Antisense strand to SEQ ID NO: 2441160
aagucuaaugcauuacaau

SEQ ID NO: 2441162 - RNA, 19 nt, Artificial Sequence
  Description of Artificial Sequence: Synthetic oligonucleotide
  Sense strand starting at position 3143 of SEQ ID NO: 1886994
gcauuagacuuaguguucu

SEQ ID NO: 2441163 - RNA, 19 nt, Artificial Sequence
  Description of Artificial Sequence: Synthetic oligonucleotide
  Antisense strand to SEQ ID NO: 2441162
agaacacuaagucuaaugc

SEQ ID NO: 2441164 - RNA, 19 nt, Artificial Sequence
  Description of Artificial Sequence: Synthetic oligonucleotide
  Sense strand starting at position 3260 of SEQ ID NO: 1886994
uugccuacauagcuguaaa

SEQ ID NO: 2441165 - RNA, 19 nt, Artificial Sequence
  Description of Artificial Sequence: Synthetic oligonucleotide
  Antisense strand to SEQ ID NO: 2441164
uuuacagcuauguaggcaa

SEQ ID NO: 2441166 - RNA, 19 nt, Artificial Sequence
  Description of Artificial Sequence: Synthetic oligonucleotide
  Sense strand starting at position 3401 of SEQ ID NO: 1886994
aaauguuuagagugugacu

SEQ ID NO: 2441167 - RNA, 19 nt, Artificial Sequence
  Description of Artificial Sequence: Synthetic oligonucleotide
  Antisense strand to SEQ ID NO: 2441166
agucacacucuaaacauuu

SEQ ID NO: 2441168 - RNA, 19 nt, Artificial Sequence
  Description of Artificial Sequence: Synthetic oligonucleotide
  Sense strand starting at position 3403 of SEQ ID NO: 1886994
auguuuagagugugacuca

SEQ ID NO: 2441169 - RNA, 19 nt, Artificial Sequence
  Description of Artificial Sequence: Synthetic oligonucleotide
  Antisense strand to SEQ ID NO: 2441168
ugagucacacucuaaacau

SEQ ID NO: 2441170 - RNA, 19 nt, Artificial Sequence
  Description of Artificial Sequence: Synthetic oligonucleotide
  Sense strand starting at position 3406 of SEQ ID NO: 1886994
uuuagagugugacucacaa

SEQ ID NO: 2441171 - RNA, 19 nt, Artificial Sequence
  Description of Artificial Sequence: Synthetic oligonucleotide
  Antisense strand to SEQ ID NO: 2441170
uugugagucacacucuaaa

SEQ ID NO: 2441172 - RNA, 19 nt, Artificial Sequence
  Description of Artificial Sequence: Synthetic oligonucleotide
  Sense strand starting at position 3487 of SEQ ID NO: 1886994
cccugugauuaccuggauu

SEQ ID NO: 2441173 - RNA, 19 nt, Artificial Sequence
  Description of Artificial Sequence: Synthetic oligonucleotide
  Antisense strand to SEQ ID NO: 2441172
aauccagguaaucacaggg

SEQ ID NO: 2441174 - RNA, 19 nt, Artificial Sequence
  Description of Artificial Sequence: Synthetic oligonucleotide
  Sense strand starting at position 3540 of SEQ ID NO: 1886994
agcucauaugauugcaauu

SEQ ID NO: 2441175 - RNA, 19 nt, Artificial Sequence
  Description of Artificial Sequence: Synthetic oligonucleotide
  Antisense strand to SEQ ID NO: 2441174
aauugcaaucauaugagcu

SEQ ID NO: 2441176 - RNA, 19 nt, Artificial Sequence
  Description of Artificial Sequence: Synthetic oligonucleotide
  Sense strand starting at position 3588 of SEQ ID NO: 1886994
auguaauacuugguugcuu

SEQ ID NO: 2441177 - RNA, 19 nt, Artificial Sequence
  Description of Artificial Sequence: Synthetic oligonucleotide
  Antisense strand to SEQ ID NO: 2441176
aagcaaccaaguauuacau

SEQ ID NO: 2441178 - RNA, 19 nt, Artificial Sequence
  Description of Artificial Sequence: Synthetic oligonucleotide
  Sense strand starting at position 3589 of SEQ ID NO: 1886994
uguaauacuugguugcuua

SEQ ID NO: 2441179 - RNA, 19 nt, Artificial Sequence
  Description of Artificial Sequence: Synthetic oligonucleotide
  Antisense strand to SEQ ID NO: 2441178
uaagcaaccaaguauuaca

SEQ ID NO: 2441180 - RNA, 19 nt, Artificial Sequence
  Description of Artificial Sequence: Synthetic oligonucleotide
  Sense strand starting at position 3697 of SEQ ID NO: 1886994
aggguaaugcuauacauau

SEQ ID NO: 2441181 - RNA, 19 nt, Artificial Sequence
  Description of Artificial Sequence: Synthetic oligonucleotide
  Antisense strand to SEQ ID NO: 2441180
auauguauagcauuacccu

SEQ ID NO: 2441182 - RNA, 19 nt, Artificial Sequence
  Description of Artificial Sequence: Synthetic oligonucleotide
  Sense strand starting at position 3755 of SEQ ID NO: 1886994
uggguugaauccucuaaua

SEQ ID NO: 2441183 - RNA, 19 nt, Artificial Sequence
  Description of Artificial Sequence: Synthetic oligonucleotide
  Antisense strand to SEQ ID NO: 2441182
uauuagaggauucaaccca

SEQ ID NO: 2441184 - RNA, 19 nt, Artificial Sequence
  Description of Artificial Sequence: Synthetic oligonucleotide
  Sense strand starting at position 3765 of SEQ ID NO: 1886994
ccucuaauagaguguacca

SEQ ID NO: 2441185 - RNA, 19 nt, Artificial Sequence
  Description of Artificial Sequence: Synthetic oligonucleotide
  Antisense strand to SEQ ID NO: 2441184
ugguacacucuauuagagg

SEQ ID NO: 2441186 - RNA, 19 nt, Artificial Sequence
  Description of Artificial Sequence: Synthetic oligonucleotide
  Sense strand starting at position 3767 of SEQ ID NO: 1886994
ucuaauagaguguaccauu

SEQ ID NO: 2441187 - RNA, 19 nt, Artificial Sequence
  Description of Artificial Sequence: Synthetic oligonucleotide
  Antisense strand to SEQ ID NO: 2441186
aaugguacacucuauuaga

SEQ ID NO: 2441188 - RNA, 19 nt, Artificial Sequence
  Description of Artificial Sequence: Synthetic oligonucleotide
  Sense strand starting at position 3807 of SEQ ID NO: 1886994
uguaacuauguggauguua

SEQ ID NO: 2441189 - RNA, 19 nt, Artificial Sequence
  Description of Artificial Sequence: Synthetic oligonucleotide
  Antisense strand to SEQ ID NO: 2441188
uaacauccacauaguuaca

SEQ ID NO: 2441190 - RNA, 19 nt, Artificial Sequence
  Description of Artificial Sequence: Synthetic oligonucleotide
  Sense strand starting at position 3809 of SEQ ID NO: 1886994
uaacuauguggauguuaau

SEQ ID NO: 2441191 - RNA, 19 nt, Artificial Sequence
  Description of Artificial Sequence: Synthetic oligonucleotide
  Antisense strand to SEQ ID NO: 2441190
auuaacauccacauaguua

SEQ ID NO: 2441192 - RNA, 19 nt, Artificial Sequence
  Description of Artificial Sequence: Synthetic oligonucleotide
  Sense strand starting at position 3961 of SEQ ID NO: 1886994
agcugauauaagcauugga

SEQ ID NO: 2441193 - RNA, 19 nt, Artificial Sequence
  Description of Artificial Sequence: Synthetic oligonucleotide
  Antisense strand to SEQ ID NO: 2441192
uccaaugcuuauaucagcu

SEQ ID NO: 2441194 - RNA, 19 nt, Artificial Sequence
  Description of Artificial Sequence: Synthetic oligonucleotide
  Sense strand starting at position 3964 of SEQ ID NO: 1886994
ugauauaagcauuggaguc

SEQ ID NO: 2441195 - RNA, 19 nt, Artificial Sequence
  Description of Artificial Sequence: Synthetic oligonucleotide
  Antisense strand to SEQ ID NO: 2441194
gacuccaaugcuuauauca

SEQ ID NO: 2441196 - RNA, 19 nt, Artificial Sequence
  Description of Artificial Sequence: Synthetic oligonucleotide
  Sense strand starting at position 177 of SEQ ID NO: 1886995
ggcagaugugccuaacaga

SEQ ID NO: 2441197 - RNA, 19 nt, Artificial Sequence
  Description of Artificial Sequence: Synthetic oligonucleotide
  Antisense strand to SEQ ID NO: 2441196
ucuguuaggcacaucugcc

SEQ ID NO: 2441198 - RNA, 19 nt, Artificial Sequence
  Description of Artificial Sequence: Synthetic oligonucleotide
  Sense strand starting at position 202 of SEQ ID NO: 1886995
uuaagcauacccggagaau

SEQ ID NO: 2441199 - RNA, 19 nt, Artificial Sequence
  Description of Artificial Sequence: Synthetic oligonucleotide
  Antisense strand to SEQ ID NO: 2441198
auucuccggguaugcuuaa

SEQ ID NO: 2441200 - RNA, 19 nt, Artificial Sequence
  Description of Artificial Sequence: Synthetic oligonucleotide
  Sense strand starting at position 847 of SEQ ID NO: 1886995
ucggaacucugagcuaaag

SEQ ID NO: 2441201 - RNA, 19 nt, Artificial Sequence
  Description of Artificial Sequence: Synthetic oligonucleotide
  Antisense strand to SEQ ID NO: 2441200
cuuuagcucagaguuccga

SEQ ID NO: 2441202 - RNA, 19 nt, Artificial Sequence
  Description of Artificial Sequence: Synthetic oligonucleotide
  Sense strand starting at position 862 of SEQ ID NO: 1886995
aaagaaucucugggaguuc

SEQ ID NO: 2441203 - RNA, 19 nt, Artificial Sequence
  Description of Artificial Sequence: Synthetic oligonucleotide
  Antisense strand to SEQ ID NO: 2441202
gaacucccagagauucuuu

SEQ ID NO: 2441204 - RNA, 19 nt, Artificial Sequence
  Description of Artificial Sequence: Synthetic oligonucleotide
  Sense strand starting at position 877 of SEQ ID NO: 1886995
guucaauugcuggucgguu

SEQ ID NO: 2441205 - RNA, 19 nt, Artificial Sequence
  Description of Artificial Sequence: Synthetic oligonucleotide
  Antisense strand to SEQ ID NO: 2441204
aaccgaccagcaauugaac

SEQ ID NO: 2441206 - RNA, 19 nt, Artificial Sequence
  Description of Artificial Sequence: Synthetic oligonucleotide
  Sense strand starting at position 947 of SEQ ID NO: 1886995
gcuucuggugguuauugau

SEQ ID NO: 2441207 - RNA, 19 nt, Artificial Sequence
  Description of Artificial Sequence: Synthetic oligonucleotide
  Antisense strand to SEQ ID NO: 2441206
aucaauaaccaccagaagc

SEQ ID NO: 2441208 - RNA, 19 nt, Artificial Sequence
  Description of Artificial Sequence: Synthetic oligonucleotide
  Sense strand starting at position 953 of SEQ ID NO: 1886995
ggugguuauugauuccaac

SEQ ID NO: 2441209 - RNA, 19 nt, Artificial Sequence
  Description of Artificial Sequence: Synthetic oligonucleotide
  Antisense strand to SEQ ID NO: 2441208
guuggaaucaauaaccacc

SEQ ID NO: 2441210 - RNA, 19 nt, Artificial Sequence
  Description of Artificial Sequence: Synthetic oligonucleotide
  Sense strand starting at position 1001 of SEQ ID NO: 1886995
gaggcaacuuauguuaauc

SEQ ID NO: 2441211 - RNA, 19 nt, Artificial Sequence
  Description of Artificial Sequence: Synthetic oligonucleotide
  Antisense strand to SEQ ID NO: 2441210
gauuaacauaaguugccuc

SEQ ID NO: 2441212 - RNA, 19 nt, Artificial Sequence
  Description of Artificial Sequence: Synthetic oligonucleotide
  Sense strand starting at position 1101 of SEQ ID NO: 1886995
uacuuacggguuugauaug

SEQ ID NO: 2441213 - RNA, 19 nt, Artificial Sequence
  Description of Artificial Sequence: Synthetic oligonucleotide
  Antisense strand to SEQ ID NO: 2441212
cauaucaaacccguaagua

SEQ ID NO: 2441214 - RNA, 19 nt, Artificial Sequence
  Description of Artificial Sequence: Synthetic oligonucleotide
  Sense strand starting at position 1106 of SEQ ID NO: 1886995
acggguuugauauggugga

SEQ ID NO: 2441215 - RNA, 19 nt, Artificial Sequence
  Description of Artificial Sequence: Synthetic oligonucleotide
  Antisense strand to SEQ ID NO: 2441214
uccaccauaucaaacccgu

SEQ ID NO: 2441216 - RNA, 19 nt, Artificial Sequence
  Description of Artificial Sequence: Synthetic oligonucleotide
  Sense strand starting at position 1135 of SEQ ID NO: 1886995
ggaacuucugugcaugcau

SEQ ID NO: 2441217 - RNA, 19 nt, Artificial Sequence
  Description of Artificial Sequence: Synthetic oligonucleotide
  Antisense strand to SEQ ID NO: 2441216
augcaugcacagaaguucc

SEQ ID NO: 2441218 - RNA, 19 nt, Artificial Sequence
  Description of Artificial Sequence: Synthetic oligonucleotide
  Sense strand starting at position 1594 of SEQ ID NO: 1886995
ggaggaauuucaggguaaa

SEQ ID NO: 2441219 - RNA, 19 nt, Artificial Sequence
  Description of Artificial Sequence: Synthetic oligonucleotide
  Antisense strand to SEQ ID NO: 2441218
uuuacccugaaauuccucc

SEQ ID NO: 2441220 - RNA, 19 nt, Artificial Sequence
  Description of Artificial Sequence: Synthetic oligonucleotide
  Sense strand starting at position 1655 of SEQ ID NO: 1886995
ggugcagacugaucugaau

SEQ ID NO: 2441221 - RNA, 19 nt, Artificial Sequence
  Description of Artificial Sequence: Synthetic oligonucleotide
  Antisense strand to SEQ ID NO: 2441220
auucagaucagucugcacc

SEQ ID NO: 2441222 - RNA, 19 nt, Artificial Sequence
  Description of Artificial Sequence: Synthetic oligonucleotide
  Sense strand starting at position 1657 of SEQ ID NO: 1886995
ugcagacugaucugaaugu

SEQ ID NO: 2441223 - RNA, 19 nt, Artificial Sequence
  Description of Artificial Sequence: Synthetic oligonucleotide
  Antisense strand to SEQ ID NO: 2441222
acauucagaucagucugca

SEQ ID NO: 2441224 - RNA, 19 nt, Artificial Sequence
  Description of Artificial Sequence: Synthetic oligonucleotide
  Sense strand starting at position 1661 of SEQ ID NO: 1886995
gacugaucugaauguggca

SEQ ID NO: 2441225 - RNA, 19 nt, Artificial Sequence
  Description of Artificial Sequence: Synthetic oligonucleotide
  Antisense strand to SEQ ID NO: 2441224
ugccacauucagaucaguc

SEQ ID NO: 2441226 - RNA, 19 nt, Artificial Sequence
  Description of Artificial Sequence: Synthetic oligonucleotide
  Sense strand starting at position 1700 of SEQ ID NO: 1886995
agcaauuccuuacugaaga

SEQ ID NO: 2441227 - RNA, 19 nt, Artificial Sequence
  Description of Artificial Sequence: Synthetic oligonucleotide
  Antisense strand to SEQ ID NO: 2441226
ucuucaguaaggaauugcu

SEQ ID NO: 2441228 - RNA, 19 nt, Artificial Sequence
  Description of Artificial Sequence: Synthetic oligonucleotide
  Sense strand starting at position 2418 of SEQ ID NO: 1886995
uggauugcccuguauguaa

SEQ ID NO: 2441229 - RNA, 19 nt, Artificial Sequence
  Description of Artificial Sequence: Synthetic oligonucleotide
  Antisense strand to SEQ ID NO: 2441228
uuacauacagggcaaucca

SEQ ID NO: 2441230 - RNA, 19 nt, Artificial Sequence
  Description of Artificial Sequence: Synthetic oligonucleotide
  Sense strand starting at position 2429 of SEQ ID NO: 1886995
guauguaagucuccucaau

SEQ ID NO: 2441231 - RNA, 19 nt, Artificial Sequence
  Description of Artificial Sequence: Synthetic oligonucleotide
  Antisense strand to SEQ ID NO: 2441230
auugaggagacuuacauac

SEQ ID NO: 2441232 - RNA, 19 nt, Artificial Sequence
  Description of Artificial Sequence: Synthetic oligonucleotide
  Sense strand starting at position 2454 of SEQ ID NO: 1886995
uaugucucagccugggaaa

SEQ ID NO: 2441233 - RNA, 19 nt, Artificial Sequence
  Description of Artificial Sequence: Synthetic oligonucleotide
  Antisense strand to SEQ ID NO: 2441232
uuucccaggcugagacaua

SEQ ID NO: 2441234 - RNA, 19 nt, Artificial Sequence
  Description of Artificial Sequence: Synthetic oligonucleotide
  Sense strand starting at position 2456 of SEQ ID NO: 1886995
ugucucagccugggaaaca

SEQ ID NO: 2441235 - RNA, 19 nt, Artificial Sequence
  Description of Artificial Sequence: Synthetic oligonucleotide
  Antisense strand to SEQ ID NO: 2441234
uguuucccaggcugagaca

SEQ ID NO: 2441236 - RNA, 19 nt, Artificial Sequence
  Description of Artificial Sequence: Synthetic oligonucleotide
  Sense strand starting at position 2518 of SEQ ID NO: 1886995
agaacuaaugccuguaguc

SEQ ID NO: 2441237 - RNA, 19 nt, Artificial Sequence
  Description of Artificial Sequence: Synthetic oligonucleotide
  Antisense strand to SEQ ID NO: 2441236
gacuacaggcauuaguucu

SEQ ID NO: 2441238 - RNA, 19 nt, Artificial Sequence
  Description of Artificial Sequence: Synthetic oligonucleotide
  Sense strand starting at position 2733 of SEQ ID NO: 1886995
gugccauugcuguugaagu

SEQ ID NO: 2441239 - RNA, 19 nt, Artificial Sequence
  Description of Artificial Sequence: Synthetic oligonucleotide
  Antisense strand to SEQ ID NO: 2441238
acuucaacagcaauggcac

SEQ ID NO: 2441240 - RNA, 19 nt, Artificial Sequence
  Description of Artificial Sequence: Synthetic oligonucleotide
  Sense strand starting at position 2793 of SEQ ID NO: 1886995
uuugguugccucuaggaaa

SEQ ID NO: 2441241 - RNA, 19 nt, Artificial Sequence
  Description of Artificial Sequence: Synthetic oligonucleotide
  Antisense strand to SEQ ID NO: 2441240
uuuccuagaggcaaccaaa

SEQ ID NO: 2441242 - RNA, 19 nt, Artificial Sequence
  Description of Artificial Sequence: Synthetic oligonucleotide
  Sense strand starting at position 2891 of SEQ ID NO: 1886995
uguuaaauguacuuagcaa

SEQ ID NO: 2441243 - RNA, 19 nt, Artificial Sequence
  Description of Artificial Sequence: Synthetic oligonucleotide
  Antisense strand to SEQ ID NO: 2441242
uugcuaaguacauuuaaca

SEQ ID NO: 2441244 - RNA, 19 nt, Artificial Sequence
  Description of Artificial Sequence: Synthetic oligonucleotide
  Sense strand starting at position 2933 of SEQ ID NO: 1886995
uagacugcugauugugaca

SEQ ID NO: 2441245 - RNA, 19 nt, Artificial Sequence
  Description of Artificial Sequence: Synthetic oligonucleotide
  Antisense strand to SEQ ID NO: 2441244
ugucacaaucagcagucua

SEQ ID NO: 2441246 - RNA, 19 nt, Artificial Sequence
  Description of Artificial Sequence: Synthetic oligonucleotide
  Sense strand starting at position 2945 of SEQ ID NO: 1886995
ugugacauuuaacauguua

SEQ ID NO: 2441247 - RNA, 19 nt, Artificial Sequence
  Description of Artificial Sequence: Synthetic oligonucleotide
  Antisense strand to SEQ ID NO: 2441246
uaacauguuaaaugucaca

SEQ ID NO: 2441248 - RNA, 19 nt, Artificial Sequence
  Description of Artificial Sequence: Synthetic oligonucleotide
  Sense strand starting at position 2996 of SEQ ID NO: 1886995
gguugcugagcccaacuau

SEQ ID NO: 2441249 - RNA, 19 nt, Artificial Sequence
  Description of Artificial Sequence: Synthetic oligonucleotide
  Antisense strand to SEQ ID NO: 2441248
auaguugggcucagcaacc

SEQ ID NO: 2441250 - RNA, 19 nt, Artificial Sequence
  Description of Artificial Sequence: Synthetic oligonucleotide
  Sense strand starting at position 3011 of SEQ ID NO: 1886995
cuaucagaguuucugauuc

SEQ ID NO: 2441251 - RNA, 19 nt, Artificial Sequence
  Description of Artificial Sequence: Synthetic oligonucleotide
  Antisense strand to SEQ ID NO: 2441250
gaaucagaaacucugauag

SEQ ID NO: 2441252 - RNA, 19 nt, Artificial Sequence
  Description of Artificial Sequence: Synthetic oligonucleotide
  Sense strand starting at position 3128 of SEQ ID NO: 1886995
cuuagaccugcuuguccaa

SEQ ID NO: 2441253 - RNA, 19 nt, Artificial Sequence
  Description of Artificial Sequence: Synthetic oligonucleotide
  Antisense strand to SEQ ID NO: 2441252
uuggacaagcaggucuaag

SEQ ID NO: 2441254 - RNA, 19 nt, Artificial Sequence
  Description of Artificial Sequence: Synthetic oligonucleotide
  Sense strand starting at position 3131 of SEQ ID NO: 1886995
agaccugcuuguccaauau

SEQ ID NO: 2441255 - RNA, 19 nt, Artificial Sequence
  Description of Artificial Sequence: Synthetic oligonucleotide
  Antisense strand to SEQ ID NO: 2441254
auauuggacaagcaggucu

SEQ ID NO: 2441256 - RNA, 19 nt, Artificial Sequence
  Description of Artificial Sequence: Synthetic oligonucleotide
  Sense strand starting at position 3308 of SEQ ID NO: 1886995
uagauauauuggguuaaca

SEQ ID NO: 2441257 - RNA, 19 nt, Artificial Sequence
  Description of Artificial Sequence: Synthetic oligonucleotide
  Antisense strand to SEQ ID NO: 2441256
uguuaacccaauauaucua

SEQ ID NO: 2441258 - RNA, 19 nt, Artificial Sequence
  Description of Artificial Sequence: Synthetic oligonucleotide
  Sense strand starting at position 3405 of SEQ ID NO: 1886995
acuugcuaauugcuagaaa

SEQ ID NO: 2441259 - RNA, 19 nt, Artificial Sequence
  Description of Artificial Sequence: Synthetic oligonucleotide
  Antisense strand to SEQ ID NO: 2441258
uuucuagcaauuagcaagu

SEQ ID NO: 2441260 - RNA, 19 nt, Artificial Sequence
  Description of Artificial Sequence: Synthetic oligonucleotide
  Sense strand starting at position 3504 of SEQ ID NO: 1886995
gcuguuuaacaacaggauu

SEQ ID NO: 2441261 - RNA, 19 nt, Artificial Sequence
  Description of Artificial Sequence: Synthetic oligonucleotide
  Antisense strand to SEQ ID NO: 2441260
aauccuguuguuaaacagc

SEQ ID NO: 2441262 - RNA, 19 nt, Artificial Sequence
  Description of Artificial Sequence: Synthetic oligonucleotide
  Sense strand starting at position 3546 of SEQ ID NO: 1886995
auaagcugauagucuaaau

SEQ ID NO: 2441263 - RNA, 19 nt, Artificial Sequence
  Description of Artificial Sequence: Synthetic oligonucleotide
  Antisense strand to SEQ ID NO: 2441262
auuuagacuaucagcuuau

SEQ ID NO: 2441264 - RNA, 19 nt, Artificial Sequence
  Description of Artificial Sequence: Synthetic oligonucleotide
  Sense strand starting at position 3563 of SEQ ID NO: 1886995
auuauugauaggugaugau

SEQ ID NO: 2441265 - RNA, 19 nt, Artificial Sequence
  Description of Artificial Sequence: Synthetic oligonucleotide
  Antisense strand to SEQ ID NO: 2441264
aucaucaccuaucaauaau

SEQ ID NO: 2441266 - RNA, 19 nt, Artificial Sequence
  Description of Artificial Sequence: Synthetic oligonucleotide
  Sense strand starting at position 3621 of SEQ ID NO: 1886995
agcuaauguccauguauaa

SEQ ID NO: 2441267 - RNA, 19 nt, Artificial Sequence
  Description of Artificial Sequence: Synthetic oligonucleotide
  Antisense strand to SEQ ID NO: 2441266
uuauacauggacauuagcu

SEQ ID NO: 2441268 - RNA, 19 nt, Artificial Sequence
  Description of Artificial Sequence: Synthetic oligonucleotide
  Sense strand starting at position 3859 of SEQ ID NO: 1886995
cuaaauuaauuuggagcua

SEQ ID NO: 2441269 - RNA, 19 nt, Artificial Sequence
  Description of Artificial Sequence: Synthetic oligonucleotide
  Antisense strand to SEQ ID NO: 2441268
uagcuccaaauuaauuuag

SEQ ID NO: 2441270 - RNA, 19 nt, Artificial Sequence
  Description of Artificial Sequence: Synthetic oligonucleotide
  Sense strand starting at position 3929 of SEQ ID NO: 1886995
uucuguuuaagugggucaa

SEQ ID NO: 2441271 - RNA, 19 nt, Artificial Sequence
  Description of Artificial Sequence: Synthetic oligonucleotide
  Antisense strand to SEQ ID NO: 2441270
uugacccacuuaaacagaa

SEQ ID NO: 2441272 - RNA, 19 nt, Artificial Sequence
  Description of Artificial Sequence: Synthetic oligonucleotide
  Sense strand starting at position 3930 of SEQ ID NO: 1886995
ucuguuuaagugggucaaa

SEQ ID NO: 2441273 - RNA, 19 nt, Artificial Sequence
  Description of Artificial Sequence: Synthetic oligonucleotide
  Antisense strand to SEQ ID NO: 2441272
uuugacccacuuaaacaga

SEQ ID NO: 2441274 - RNA, 19 nt, Artificial Sequence
  Description of Artificial Sequence: Synthetic oligonucleotide
  Sense strand starting at position 3933 of SEQ ID NO: 1886995
guuuaagugggucaaagga

SEQ ID NO: 2441275 - RNA, 19 nt, Artificial Sequence
  Description of Artificial Sequence: Synthetic oligonucleotide
  Antisense strand to SEQ ID NO: 2441274
uccuuugacccacuuaaac

SEQ ID NO: 2441276 - RNA, 19 nt, Artificial Sequence
  Description of Artificial Sequence: Synthetic oligonucleotide
  Sense strand starting at position 541 of SEQ ID NO: 1886996
gggagcagauccugccuua

SEQ ID NO: 2441277 - RNA, 19 nt, Artificial Sequence
  Description of Artificial Sequence: Synthetic oligonucleotide
  Antisense strand to SEQ ID NO: 2441276
uaaggcaggaucugcuccc

SEQ ID NO: 2441278 - RNA, 19 nt, Artificial Sequence
  Description of Artificial Sequence: Synthetic oligonucleotide
  Sense strand starting at position 1308 of SEQ ID NO: 1886996
gcuguuuggcaucugucau

SEQ ID NO: 2441279 - RNA, 19 nt, Artificial Sequence
  Description of Artificial Sequence: Synthetic oligonucleotide
  Antisense strand to SEQ ID NO: 2441278
augacagaugccaaacagc

SEQ ID NO: 2441280 - RNA, 19 nt, Artificial Sequence
  Description of Artificial Sequence: Synthetic oligonucleotide
  Sense strand starting at position 1312 of SEQ ID NO: 1886996
uuuggcaucugucauguuu

SEQ ID NO: 2441281 - RNA, 19 nt, Artificial Sequence
  Description of Artificial Sequence: Synthetic oligonucleotide
  Antisense strand to SEQ ID NO: 2441280
aaacaugacagaugccaaa

SEQ ID NO: 2441282 - RNA, 19 nt, Artificial Sequence
  Description of Artificial Sequence: Synthetic oligonucleotide
  Sense strand starting at position 1523 of SEQ ID NO: 1886996
gcugauauuuguugaacga

SEQ ID NO: 2441283 - RNA, 19 nt, Artificial Sequence
  Description of Artificial Sequence: Synthetic oligonucleotide
  Antisense strand to SEQ ID NO: 2441282
ucguucaacaaauaucagc

SEQ ID NO: 2441284 - RNA, 19 nt, Artificial Sequence
  Description of Artificial Sequence: Synthetic oligonucleotide
  Sense strand starting at position 1554 of SEQ ID NO: 1886996
augaaugguuagggauaca

SEQ ID NO: 2441285 - RNA, 19 nt, Artificial Sequence
  Description of Artificial Sequence: Synthetic oligonucleotide
  Antisense strand to SEQ ID NO: 2441284
uguaucccuaaccauucau

SEQ ID NO: 2441286 - RNA, 19 nt, Artificial Sequence
  Description of Artificial Sequence: Synthetic oligonucleotide
  Sense strand starting at position 1859 of SEQ ID NO: 1886996
ugugcaaggcuguguacau

SEQ ID NO: 2441287 - RNA, 19 nt, Artificial Sequence
  Description of Artificial Sequence: Synthetic oligonucleotide
  Antisense strand to SEQ ID NO: 2441286
auguacacagccuugcaca

SEQ ID NO: 2441288 - RNA, 19 nt, Artificial Sequence
  Description of Artificial Sequence: Synthetic oligonucleotide
  Sense strand starting at position 2040 of SEQ ID NO: 1886996
ugcauauagcucuaaggcu

SEQ ID NO: 2441289 - RNA, 19 nt, Artificial Sequence
  Description of Artificial Sequence: Synthetic oligonucleotide
  Antisense strand to SEQ ID NO: 2441288
agccuuagagcuauaugca

SEQ ID NO: 2441290 - RNA, 19 nt, Artificial Sequence
  Description of Artificial Sequence: Synthetic oligonucleotide
  Sense strand starting at position 2125 of SEQ ID NO: 1886996
uguuguucagcucggagga

SEQ ID NO: 2441291 - RNA, 19 nt, Artificial Sequence
  Description of Artificial Sequence: Synthetic oligonucleotide
  Antisense strand to SEQ ID NO: 2441290
uccuccgagcugaacaaca

SEQ ID NO: 2441292 - RNA, 19 nt, Artificial Sequence
  Description of Artificial Sequence: Synthetic oligonucleotide
  Sense strand starting at position 2211 of SEQ ID NO: 1886996
uggguccucagugaugaca

SEQ ID NO: 2441293 - RNA, 19 nt, Artificial Sequence
  Description of Artificial Sequence: Synthetic oligonucleotide
  Antisense strand to SEQ ID NO: 2441292
ugucaucacugaggaccca

SEQ ID NO: 2441294 - RNA, 19 nt, Artificial Sequence
  Description of Artificial Sequence: Synthetic oligonucleotide
  Sense strand starting at position 2213 of SEQ ID NO: 1886996
gguccucagugaugacaca

SEQ ID NO: 2441295 - RNA, 19 nt, Artificial Sequence
  Description of Artificial Sequence: Synthetic oligonucleotide
  Antisense strand to SEQ ID NO: 2441294
ugugucaucacugaggacc

SEQ ID NO: 2441296 - RNA, 19 nt, Artificial Sequence
  Description of Artificial Sequence: Synthetic oligonucleotide
  Sense strand starting at position 2214 of SEQ ID NO: 1886996
guccucagugaugacacau

SEQ ID NO: 2441297 - RNA, 19 nt, Artificial Sequence
  Description of Artificial Sequence: Synthetic oligonucleotide
  Antisense strand to SEQ ID NO: 2441296
augugucaucacugaggac

SEQ ID NO: 2441298 - RNA, 19 nt, Artificial Sequence
  Description of Artificial Sequence: Synthetic oligonucleotide
  Sense strand starting at position 2332 of SEQ ID NO: 1886996
gcucaacguccuugagcua

SEQ ID NO: 2441299 - RNA, 19 nt, Artificial Sequence
  Description of Artificial Sequence: Synthetic oligonucleotide
  Antisense strand to SEQ ID NO: 2441298
uagcucaaggacguugagc

SEQ ID NO: 2441300 - RNA, 19 nt, Artificial Sequence
  Description of Artificial Sequence: Synthetic oligonucleotide
  Sense strand starting at position 2341 of SEQ ID NO: 1886996
ccuugagcuacaggaguaa

SEQ ID NO: 2441301 - RNA, 19 nt, Artificial Sequence
  Description of Artificial Sequence: Synthetic oligonucleotide
  Antisense strand to SEQ ID NO: 2441300
uuacuccuguagcucaagg

SEQ ID NO: 2441302 - RNA, 19 nt, Artificial Sequence
  Description of Artificial Sequence: Synthetic oligonucleotide
  Sense strand starting at position 2352 of SEQ ID NO: 1886996
aggaguaaaugucuccaca

SEQ ID NO: 2441303 - RNA, 19 nt, Artificial Sequence
  Description of Artificial Sequence: Synthetic oligonucleotide
  Antisense strand to SEQ ID NO: 2441302
uguggagacauuuacuccu

SEQ ID NO: 2441304 - RNA, 19 nt, Artificial Sequence
  Description of Artificial Sequence: Synthetic oligonucleotide
  Sense strand starting at position 2355 of SEQ ID NO: 1886996
aguaaaugucuccacaauu

SEQ ID NO: 2441305 - RNA, 19 nt, Artificial Sequence
  Description of Artificial Sequence: Synthetic oligonucleotide
  Antisense strand to SEQ ID NO: 2441304
aauuguggagacauuuacu

SEQ ID NO: 2441306 - RNA, 19 nt, Artificial Sequence
  Description of Artificial Sequence: Synthetic oligonucleotide
  Sense strand starting at position 2367 of SEQ ID NO: 1886996
cacaauuuguuguccgcau

SEQ ID NO: 2441307 - RNA, 19 nt, Artificial Sequence
  Description of Artificial Sequence: Synthetic oligonucleotide
  Antisense strand to SEQ ID NO: 2441306
augcggacaacaaauugug

SEQ ID NO: 2441308 - RNA, 19 nt, Artificial Sequence
  Description of Artificial Sequence: Synthetic oligonucleotide
  Sense strand starting at position 2374 of SEQ ID NO: 1886996
uguuguccgcauguaguaa

SEQ ID NO: 2441309 - RNA, 19 nt, Artificial Sequence
  Description of Artificial Sequence: Synthetic oligonucleotide
  Antisense strand to SEQ ID NO: 2441308
uuacuacaugcggacaaca

SEQ ID NO: 2441310 - RNA, 19 nt, Artificial Sequence
  Description of Artificial Sequence: Synthetic oligonucleotide
  Sense strand starting at position 2375 of SEQ ID NO: 1886996
guuguccgcauguaguaaa

SEQ ID NO: 2441311 - RNA, 19 nt, Artificial Sequence
  Description of Artificial Sequence: Synthetic oligonucleotide
  Antisense strand to SEQ ID NO: 2441310
uuuacuacaugcggacaac

SEQ ID NO: 2441312 - RNA, 19 nt, Artificial Sequence
  Description of Artificial Sequence: Synthetic oligonucleotide
  Sense strand starting at position 2382 of SEQ ID NO: 1886996
gcauguaguaaacgcucaa

SEQ ID NO: 2441313 - RNA, 19 nt, Artificial Sequence
  Description of Artificial Sequence: Synthetic oligonucleotide
  Antisense strand to SEQ ID NO: 2441312
uugagcguuuacuacaugc

SEQ ID NO: 2441314 - RNA, 19 nt, Artificial Sequence
  Description of Artificial Sequence: Synthetic oligonucleotide
  Sense strand starting at position 2386 of SEQ ID NO: 1886996
guaguaaacgcucaauaaa

SEQ ID NO: 2441315 - RNA, 19 nt, Artificial Sequence
  Description of Artificial Sequence: Synthetic oligonucleotide
  Antisense strand to SEQ ID NO: 2441314
uuuauugagcguuuacuac

SEQ ID NO: 2441316 - RNA, 19 nt, Artificial Sequence
  Description of Artificial Sequence: Synthetic oligonucleotide
  Sense strand starting at position 3084 of SEQ ID NO: 1886996
agccuaucuggaggaaaua

SEQ ID NO: 2441317 - RNA, 19 nt, Artificial Sequence
  Description of Artificial Sequence: Synthetic oligonucleotide
  Antisense strand to SEQ ID NO: 2441316
uauuuccuccagauaggcu

SEQ ID NO: 2441318 - RNA, 19 nt, Artificial Sequence
  Description of Artificial Sequence: Synthetic oligonucleotide
  Sense strand starting at position 3130 of SEQ ID NO: 1886996
gggagagccugaugguaga

SEQ ID NO: 2441319 - RNA, 19 nt, Artificial Sequence
  Description of Artificial Sequence: Synthetic oligonucleotide
  Antisense strand to SEQ ID NO: 2441318
ucuaccaucaggcucuccc

SEQ ID NO: 2441320 - RNA, 19 nt, Artificial Sequence
  Description of Artificial Sequence: Synthetic oligonucleotide
  Sense strand starting at position 3478 of SEQ ID NO: 1886996
gcugguggucgguggagau

SEQ ID NO: 2441321 - RNA, 19 nt, Artificial Sequence
  Description of Artificial Sequence: Synthetic oligonucleotide
  Antisense strand to SEQ ID NO: 2441320
aucuccaccgaccaccagc

SEQ ID NO: 2441322 - RNA, 19 nt, Artificial Sequence
  Description of Artificial Sequence: Synthetic oligonucleotide
  Sense strand starting at position 3479 of SEQ ID NO: 1886996
cugguggucgguggagaua

SEQ ID NO: 2441323 - RNA, 19 nt, Artificial Sequence
  Description of Artificial Sequence: Synthetic oligonucleotide
  Antisense strand to SEQ ID NO: 2441322
uaucuccaccgaccaccag

SEQ ID NO: 2441324 - RNA, 19 nt, Artificial Sequence
  Description of Artificial Sequence: Synthetic oligonucleotide
  Sense strand starting at position 3491 of SEQ ID NO: 1886996
ggagauaacuuguggguga

SEQ ID NO: 2441325 - RNA, 19 nt, Artificial Sequence
  Description of Artificial Sequence: Synthetic oligonucleotide
  Antisense strand to SEQ ID NO: 2441324
ucacccacaaguuaucucc

SEQ ID NO: 2441326 - RNA, 19 nt, Artificial Sequence
  Description of Artificial Sequence: Synthetic oligonucleotide
  Sense strand starting at position 3492 of SEQ ID NO: 1886996
gagauaacuugugggugaa

SEQ ID NO: 2441327 - RNA, 19 nt, Artificial Sequence
  Description of Artificial Sequence: Synthetic oligonucleotide
  Antisense strand to SEQ ID NO: 2441326
uucacccacaaguuaucuc

SEQ ID NO: 2441328 - RNA, 19 nt, Artificial Sequence
  Description of Artificial Sequence: Synthetic oligonucleotide
  Sense strand starting at position 3493 of SEQ ID NO: 1886996
agauaacuugugggugaaa

SEQ ID NO: 2441329 - RNA, 19 nt, Artificial Sequence
  Description of Artificial Sequence: Synthetic oligonucleotide
  Antisense strand to SEQ ID NO: 2441328
uuucacccacaaguuaucu

SEQ ID NO: 2441330 - RNA, 19 nt, Artificial Sequence
  Description of Artificial Sequence: Synthetic oligonucleotide
  Sense strand starting at position 3494 of SEQ ID NO: 1886996
gauaacuugugggugaaac

SEQ ID NO: 2441331 - RNA, 19 nt, Artificial Sequence
  Description of Artificial Sequence: Synthetic oligonucleotide
  Antisense strand to SEQ ID NO: 2441330
guuucacccacaaguuauc

SEQ ID NO: 2441332 - RNA, 19 nt, Artificial Sequence
  Description of Artificial Sequence: Synthetic oligonucleotide
  Sense strand starting at position 3495 of SEQ ID NO: 1886996
auaacuugugggugaaacu

SEQ ID NO: 2441333 - RNA, 19 nt, Artificial Sequence
  Description of Artificial Sequence: Synthetic oligonucleotide
  Antisense strand to SEQ ID NO: 2441332
aguuucacccacaaguuau

SEQ ID NO: 2441334 - RNA, 19 nt, Artificial Sequence
  Description of Artificial Sequence: Synthetic oligonucleotide
  Sense strand starting at position 3805 of SEQ ID NO: 1886996
gagucaagaugagguucuu

SEQ ID NO: 2441335 - RNA, 19 nt, Artificial Sequence
  Description of Artificial Sequence: Synthetic oligonucleotide
  Antisense strand to SEQ ID NO: 2441334
aagaaccucaucuugacuc

SEQ ID NO: 2441336 - RNA, 19 nt, Artificial Sequence
  Description of Artificial Sequence: Synthetic oligonucleotide
  Sense strand starting at position 41 of SEQ ID NO: 1886997
aucuguaaaguaggaguaa

SEQ ID NO: 2441337 - RNA, 19 nt, Artificial Sequence
  Description of Artificial Sequence: Synthetic oligonucleotide
  Antisense strand to SEQ ID NO: 2441336
uuacuccuacuuuacagau

SEQ ID NO: 2441338 - RNA, 19 nt, Artificial Sequence
  Description of Artificial Sequence: Synthetic oligonucleotide
  Sense strand starting at position 61 of SEQ ID NO: 1886997
gcccauuugccaugugguu

SEQ ID NO: 2441339 - RNA, 19 nt, Artificial Sequence
  Description of Artificial Sequence: Synthetic oligonucleotide
  Antisense strand to SEQ ID NO: 2441338
aaccacauggcaaaugggc

SEQ ID NO: 2441340 - RNA, 19 nt, Artificial Sequence
  Description of Artificial Sequence: Synthetic oligonucleotide
  Sense strand starting at position 66 of SEQ ID NO: 1886997
uuugccaugugguuggaaa

SEQ ID NO: 2441341 - RNA, 19 nt, Artificial Sequence
  Description of Artificial Sequence: Synthetic oligonucleotide
  Antisense strand to SEQ ID NO: 2441340
uuuccaaccacauggcaaa

SEQ ID NO: 2441342 - RNA, 19 nt, Artificial Sequence
  Description of Artificial Sequence: Synthetic oligonucleotide
  Sense strand starting at position 68 of SEQ ID NO: 1886997
ugccaugugguuggaaaca

SEQ ID NO: 2441343 - RNA, 19 nt, Artificial Sequence
  Description of Artificial Sequence: Synthetic oligonucleotide
  Antisense strand to SEQ ID NO: 2441342
uguuuccaaccacauggca

SEQ ID NO: 2441344 - RNA, 19 nt, Artificial Sequence
  Description of Artificial Sequence: Synthetic oligonucleotide
  Sense strand starting at position 193 of SEQ ID NO: 1886997
caguuuagugaagacuuua

SEQ ID NO: 2441345 - RNA, 19 nt, Artificial Sequence
  Description of Artificial Sequence: Synthetic oligonucleotide
  Antisense strand to SEQ ID NO: 2441344
uaaagucuucacuaaacug

SEQ ID NO: 2441346 - RNA, 19 nt, Artificial Sequence
  Description of Artificial Sequence: Synthetic oligonucleotide
  Sense strand starting at position 538 of SEQ ID NO: 1886997
aaacauucuccaggugagu

SEQ ID NO: 2441347 - RNA, 19 nt, Artificial Sequence
  Description of Artificial Sequence: Synthetic oligonucleotide
  Antisense strand to SEQ ID NO: 2441346
acucaccuggagaauguuu

SEQ ID NO: 2441348 - RNA, 19 nt, Artificial Sequence
  Description of Artificial Sequence: Synthetic oligonucleotide
  Sense strand starting at position 578 of SEQ ID NO: 1886997
gcgcucuagcucuuacuca

SEQ ID NO: 2441349 - RNA, 19 nt, Artificial Sequence
  Description of Artificial Sequence: Synthetic oligonucleotide
  Antisense strand to SEQ ID NO: 2441348
ugaguaagagcuagagcgc

SEQ ID NO: 2441350 - RNA, 19 nt, Artificial Sequence
  Description of Artificial Sequence: Synthetic oligonucleotide
  Sense strand starting at position 606 of SEQ ID NO: 1886997
cagagucugcgugugugaa

SEQ ID NO: 2441351 - RNA, 19 nt, Artificial Sequence
  Description of Artificial Sequence: Synthetic oligonucleotide
  Antisense strand to SEQ ID NO: 2441350
uucacacacgcagacucug

SEQ ID NO: 2441352 - RNA, 19 nt, Artificial Sequence
  Description of Artificial Sequence: Synthetic oligonucleotide
  Sense strand starting at position 620 of SEQ ID NO: 1886997
gugaauuugcaaugcuuaa

SEQ ID NO: 2441353 - RNA, 19 nt, Artificial Sequence
  Description of Artificial Sequence: Synthetic oligonucleotide
  Antisense strand to SEQ ID NO: 2441352
uuaagcauugcaaauucac

SEQ ID NO: 2441354 - RNA, 19 nt, Artificial Sequence
  Description of Artificial Sequence: Synthetic oligonucleotide
  Sense strand starting at position 647 of SEQ ID NO: 1886997
aguugaguaauugggccaa

SEQ ID NO: 2441355 - RNA, 19 nt, Artificial Sequence
  Description of Artificial Sequence: Synthetic oligonucleotide
  Antisense strand to SEQ ID NO: 2441354
uuggcccaauuacucaacu

SEQ ID NO: 2441356 - RNA, 19 nt, Artificial Sequence
  Description of Artificial Sequence: Synthetic oligonucleotide
  Sense strand starting at position 649 of SEQ ID NO: 1886997
uugaguaauugggccaacu

SEQ ID NO: 2441357 - RNA, 19 nt, Artificial Sequence
  Description of Artificial Sequence: Synthetic oligonucleotide
  Antisense strand to SEQ ID NO: 2441356
aguuggcccaauuacucaa

SEQ ID NO: 2441358 - RNA, 19 nt, Artificial Sequence
  Description of Artificial Sequence: Synthetic oligonucleotide
  Sense strand starting at position 651 of SEQ ID NO: 1886997
gaguaauugggccaacucu

SEQ ID NO: 2441359 - RNA, 19 nt, Artificial Sequence
  Description of Artificial Sequence: Synthetic oligonucleotide
  Antisense strand to SEQ ID NO: 2441358
agaguuggcccaauuacuc

SEQ ID NO: 2441360 - RNA, 19 nt, Artificial Sequence
  Description of Artificial Sequence: Synthetic oligonucleotide
  Sense strand starting at position 769 of SEQ ID NO: 1886997
gaaggugguccaugcucua

SEQ ID NO: 2441361 - RNA, 19 nt, Artificial Sequence
  Description of Artificial Sequence: Synthetic oligonucleotide
  Antisense strand to SEQ ID NO: 2441360
uagagcauggaccaccuuc

SEQ ID NO: 2441362 - RNA, 19 nt, Artificial Sequence
  Description of Artificial Sequence: Synthetic oligonucleotide
  Sense strand starting at position 772 of SEQ ID NO: 1886997
ggugguccaugcucuaaua

SEQ ID NO: 2441363 - RNA, 19 nt, Artificial Sequence
  Description of Artificial Sequence: Synthetic oligonucleotide
  Antisense strand to SEQ ID NO: 2441362
uauuagagcauggaccacc

SEQ ID NO: 2441364 - RNA, 19 nt, Artificial Sequence
  Description of Artificial Sequence: Synthetic oligonucleotide
  Sense strand starting at position 774 of SEQ ID NO: 1886997
ugguccaugcucuaauaga

SEQ ID NO: 2441365 - RNA, 19 nt, Artificial Sequence
  Description of Artificial Sequence: Synthetic oligonucleotide
  Antisense strand to SEQ ID NO: 2441364
ucuauuagagcauggacca

SEQ ID NO: 2441366 - RNA, 19 nt, Artificial Sequence
  Description of Artificial Sequence: Synthetic oligonucleotide
  Sense strand starting at position 825 of SEQ ID NO: 1886997
uccagcauggccugagaau

SEQ ID NO: 2441367 - RNA, 19 nt, Artificial Sequence
  Description of Artificial Sequence: Synthetic oligonucleotide
  Antisense strand to SEQ ID NO: 2441366
auucucaggccaugcugga

SEQ ID NO: 2441368 - RNA, 19 nt, Artificial Sequence
  Description of Artificial Sequence: Synthetic oligonucleotide
  Sense strand starting at position 826 of SEQ ID NO: 1886997
ccagcauggccugagaaua

SEQ ID NO: 2441369 - RNA, 19 nt, Artificial Sequence
  Description of Artificial Sequence: Synthetic oligonucleotide
  Antisense strand to SEQ ID NO: 2441368
uauucucaggccaugcugg

SEQ ID NO: 2441370 - RNA, 19 nt, Artificial Sequence
  Description of Artificial Sequence: Synthetic oligonucleotide
  Sense strand starting at position 980 of SEQ ID NO: 1886997
cagacuagauuauaggauu

SEQ ID NO: 2441371 - RNA, 19 nt, Artificial Sequence
  Description of Artificial Sequence: Synthetic oligonucleotide
  Antisense strand to SEQ ID NO: 2441370
aauccuauaaucuagucug

SEQ ID NO: 2441372 - RNA, 19 nt, Artificial Sequence
  Description of Artificial Sequence: Synthetic oligonucleotide
  Sense strand starting at position 983 of SEQ ID NO: 1886997
acuagauuauaggauuaac

SEQ ID NO: 2441373 - RNA, 19 nt, Artificial Sequence
  Description of Artificial Sequence: Synthetic oligonucleotide
  Antisense strand to SEQ ID NO: 2441372
guuaauccuauaaucuagu

SEQ ID NO: 2441374 - RNA, 19 nt, Artificial Sequence
  Description of Artificial Sequence: Synthetic oligonucleotide
  Sense strand starting at position 2265 of SEQ ID NO: 1886997
uggagcuugcuagggauua

SEQ ID NO: 2441375 - RNA, 19 nt, Artificial Sequence
  Description of Artificial Sequence: Synthetic oligonucleotide
  Antisense strand to SEQ ID NO: 2441374
uaaucccuagcaagcucca

SEQ ID NO: 2441376 - RNA, 19 nt, Artificial Sequence
  Description of Artificial Sequence: Synthetic oligonucleotide
  Sense strand starting at position 2267 of SEQ ID NO: 1886997
gagcuugcuagggauuaga

SEQ ID NO: 2441377 - RNA, 19 nt, Artificial Sequence
  Description of Artificial Sequence: Synthetic oligonucleotide
  Antisense strand to SEQ ID NO: 2441376
ucuaaucccuagcaagcuc

SEQ ID NO: 2441378 - RNA, 19 nt, Artificial Sequence
  Description of Artificial Sequence: Synthetic oligonucleotide
  Sense strand starting at position 2314 of SEQ ID NO: 1886997
cagugagcuucccugaauc

SEQ ID NO: 2441379 - RNA, 19 nt, Artificial Sequence
  Description of Artificial Sequence: Synthetic oligonucleotide
  Antisense strand to SEQ ID NO: 2441378
gauucagggaagcucacug

SEQ ID NO: 2441380 - RNA, 19 nt, Artificial Sequence
  Description of Artificial Sequence: Synthetic oligonucleotide
  Sense strand starting at position 2316 of SEQ ID NO: 1886997
gugagcuucccugaaucag

SEQ ID NO: 2441381 - RNA, 19 nt, Artificial Sequence
  Description of Artificial Sequence: Synthetic oligonucleotide
  Antisense strand to SEQ ID NO: 2441380
cugauucagggaagcucac

SEQ ID NO: 2441382 - RNA, 19 nt, Artificial Sequence
  Description of Artificial Sequence: Synthetic oligonucleotide
  Sense strand starting at position 2352 of SEQ ID NO: 1886997
gcucgaaggcccuaucaau

SEQ ID NO: 2441383 - RNA, 19 nt, Artificial Sequence
  Description of Artificial Sequence: Synthetic oligonucleotide
  Antisense strand to SEQ ID NO: 2441382
auugauagggccuucgagc

SEQ ID NO: 2441384 - RNA, 19 nt, Artificial Sequence
  Description of Artificial Sequence: Synthetic oligonucleotide
  Sense strand starting at position 2448 of SEQ ID NO: 1886997
uuguaauuugcuggcucaa

SEQ ID NO: 2441385 - RNA, 19 nt, Artificial Sequence
  Description of Artificial Sequence: Synthetic oligonucleotide
  Antisense strand to SEQ ID NO: 2441384
uugagccagcaaauuacaa

SEQ ID NO: 2441386 - RNA, 19 nt, Artificial Sequence
  Description of Artificial Sequence: Synthetic oligonucleotide
  Sense strand starting at position 2450 of SEQ ID NO: 1886997
guaauuugcuggcucaaag

SEQ ID NO: 2441387 - RNA, 19 nt, Artificial Sequence
  Description of Artificial Sequence: Synthetic oligonucleotide
  Antisense strand to SEQ ID NO: 2441386
cuuugagccagcaaauuac

SEQ ID NO: 2441388 - RNA, 19 nt, Artificial Sequence
  Description of Artificial Sequence: Synthetic oligonucleotide
  Sense strand starting at position 2531 of SEQ ID NO: 1886997
ugaaaucaauuggcccaaa

SEQ ID NO: 2441389 - RNA, 19 nt, Artificial Sequence
  Description of Artificial Sequence: Synthetic oligonucleotide
  Antisense strand to SEQ ID NO: 2441388
uuugggccaauugauuuca

SEQ ID NO: 2441390 - RNA, 19 nt, Artificial Sequence
  Description of Artificial Sequence: Synthetic oligonucleotide
  Sense strand starting at position 2570 of SEQ ID NO: 1886997
uuaaauucccauugagggu

SEQ ID NO: 2441391 - RNA, 19 nt, Artificial Sequence
  Description of Artificial Sequence: Synthetic oligonucleotide
  Antisense strand to SEQ ID NO: 2441390
acccucaaugggaauuuaa

SEQ ID NO: 2441392 - RNA, 19 nt, Artificial Sequence
  Description of Artificial Sequence: Synthetic oligonucleotide
  Sense strand starting at position 3026 of SEQ ID NO: 1886997
acuggcugaccaugugaau

SEQ ID NO: 2441393 - RNA, 19 nt, Artificial Sequence
  Description of Artificial Sequence: Synthetic oligonucleotide
  Antisense strand to SEQ ID NO: 2441392
auucacauggucagccagu

SEQ ID NO: 2441394 - RNA, 19 nt, Artificial Sequence
  Description of Artificial Sequence: Synthetic oligonucleotide
  Sense strand starting at position 3249 of SEQ ID NO: 1886997
gauugaaggguccacaugu

SEQ ID NO: 2441395 - RNA, 19 nt, Artificial Sequence
  Description of Artificial Sequence: Synthetic oligonucleotide
  Antisense strand to SEQ ID NO: 2441394
acauguggacccuucaauc

SEQ ID NO: 2441396 - RNA, 19 nt, Artificial Sequence
  Description of Artificial Sequence: Synthetic oligonucleotide
  Sense strand starting at position 3268 of SEQ ID NO: 1886997
gucagcuuaacuggaggau

SEQ ID NO: 2441397 - RNA, 19 nt, Artificial Sequence
  Description of Artificial Sequence: Synthetic oligonucleotide
  Antisense strand to SEQ ID NO: 2441396
auccuccaguuaagcugac

SEQ ID NO: 2441398 - RNA, 19 nt, Artificial Sequence
  Description of Artificial Sequence: Synthetic oligonucleotide
  Sense strand starting at position 3333 of SEQ ID NO: 1886997
ugcccuucuguggaaugaa

SEQ ID NO: 2441399 - RNA, 19 nt, Artificial Sequence
  Description of Artificial Sequence: Synthetic oligonucleotide
  Antisense strand to SEQ ID NO: 2441398
uucauuccacagaagggca

SEQ ID NO: 2441400 - RNA, 19 nt, Artificial Sequence
  Description of Artificial Sequence: Synthetic oligonucleotide
  Sense strand starting at position 3336 of SEQ ID NO: 1886997
ccuucuguggaaugaaagu

SEQ ID NO: 2441401 - RNA, 19 nt, Artificial Sequence
  Description of Artificial Sequence: Synthetic oligonucleotide
  Antisense strand to SEQ ID NO: 2441400
acuuucauuccacagaagg

SEQ ID NO: 2441402 - RNA, 19 nt, Artificial Sequence
  Description of Artificial Sequence: Synthetic oligonucleotide
  Sense strand starting at position 3386 of SEQ ID NO: 1886997
aagaaagcuugauuaacga

SEQ ID NO: 2441403 - RNA, 19 nt, Artificial Sequence
  Description of Artificial Sequence: Synthetic oligonucleotide
  Antisense strand to SEQ ID NO: 2441402
ucguuaaucaagcuuucuu

SEQ ID NO: 2441404 - RNA, 19 nt, Artificial Sequence
  Description of Artificial Sequence: Synthetic oligonucleotide
  Sense strand starting at position 3394 of SEQ ID NO: 1886997
uugauuaacgaggguguga

SEQ ID NO: 2441405 - RNA, 19 nt, Artificial Sequence
  Description of Artificial Sequence: Synthetic oligonucleotide
  Antisense strand to SEQ ID NO: 2441404
ucacacccucguuaaucaa

SEQ ID NO: 2441406 - RNA, 19 nt, Artificial Sequence
  Description of Artificial Sequence: Synthetic oligonucleotide
  Sense strand starting at position 3686 of SEQ ID NO: 1886997
gguaaaugaccuggagcgu

SEQ ID NO: 2441407 - RNA, 19 nt, Artificial Sequence
  Description of Artificial Sequence: Synthetic oligonucleotide
  Antisense strand to SEQ ID NO: 2441406
acgcuccaggucauuuacc

SEQ ID NO: 2441408 - RNA, 19 nt, Artificial Sequence
  Description of Artificial Sequence: Synthetic oligonucleotide
  Sense strand starting at position 3749 of SEQ ID NO: 1886997
uucucuaacggcugaauga

SEQ ID NO: 2441409 - RNA, 19 nt, Artificial Sequence
  Description of Artificial Sequence: Synthetic oligonucleotide
  Antisense strand to SEQ ID NO: 2441408
ucauucagccguuagagaa

SEQ ID NO: 2441410 - RNA, 19 nt, Artificial Sequence
  Description of Artificial Sequence: Synthetic oligonucleotide
  Sense strand starting at position 3750 of SEQ ID NO: 1886997
ucucuaacggcugaaugaa

SEQ ID NO: 2441411 - RNA, 19 nt, Artificial Sequence
  Description of Artificial Sequence: Synthetic oligonucleotide
  Antisense strand to SEQ ID NO: 2441410
uucauucagccguuagaga

SEQ ID NO: 2441412 - RNA, 19 nt, Artificial Sequence
  Description of Artificial Sequence: Synthetic oligonucleotide
  Sense strand starting at position 3775 of SEQ ID NO: 1886997
guguuuauccucuaaugag

SEQ ID NO: 2441413 - RNA, 19 nt, Artificial Sequence
  Description of Artificial Sequence: Synthetic oligonucleotide
  Antisense strand to SEQ ID NO: 2441412
cucauuagaggauaaacac

SEQ ID NO: 2441414 - RNA, 19 nt, Artificial Sequence
  Description of Artificial Sequence: Synthetic oligonucleotide
  Sense strand starting at position 3819 of SEQ ID NO: 1886997
ggaggucagcgucauuaca

SEQ ID NO: 2441415 - RNA, 19 nt, Artificial Sequence
  Description of Artificial Sequence: Synthetic oligonucleotide
  Antisense strand to SEQ ID NO: 2441414
uguaaugacgcugaccucc

SEQ ID NO: 2441416 - RNA, 19 nt, Artificial Sequence
  Description of Artificial Sequence: Synthetic oligonucleotide
  Sense strand starting at position 3328 of SEQ ID NO: 1886998
guaacagagugauacucua

SEQ ID NO: 2441417 - RNA, 19 nt, Artificial Sequence
  Description of Artificial Sequence: Synthetic oligonucleotide
  Antisense strand to SEQ ID NO: 2441416
uagaguaucacucuguuac

SEQ ID NO: 2441418 - RNA, 19 nt, Artificial Sequence
  Description of Artificial Sequence: Synthetic oligonucleotide
  Sense strand starting at position 11 of SEQ ID NO: 1886999
auaguuaucuaucacagau

SEQ ID NO: 2441419 - RNA, 19 nt, Artificial Sequence
  Description of Artificial Sequence: Synthetic oligonucleotide
  Antisense strand to SEQ ID NO: 2441418
aucugugauagauaacuau

SEQ ID NO: 2441420 - RNA, 19 nt, Artificial Sequence
  Description of Artificial Sequence: Synthetic oligonucleotide
  Sense strand starting at position 311 of SEQ ID NO: 1886999
caggcuuccuguuacauag

SEQ ID NO: 2441421 - RNA, 19 nt, Artificial Sequence
  Description of Artificial Sequence: Synthetic oligonucleotide
  Antisense strand to SEQ ID NO: 2441420
cuauguaacaggaagccug

SEQ ID NO: 2441422 - RNA, 19 nt, Artificial Sequence
  Description of Artificial Sequence: Synthetic oligonucleotide
  Sense strand starting at position 313 of SEQ ID NO: 1886999
ggcuuccuguuacauagua

SEQ ID NO: 2441423 - RNA, 19 nt, Artificial Sequence
  Description of Artificial Sequence: Synthetic oligonucleotide
  Antisense strand to SEQ ID NO: 2441422
uacuauguaacaggaagcc

SEQ ID NO: 2441424 - RNA, 19 nt, Artificial Sequence
  Description of Artificial Sequence: Synthetic oligonucleotide
  Sense strand starting at position 318 of SEQ ID NO: 1886999
ccuguuacauaguaucaua

SEQ ID NO: 2441425 - RNA, 19 nt, Artificial Sequence
  Description of Artificial Sequence: Synthetic oligonucleotide
  Antisense strand to SEQ ID NO: 2441424
uaugauacuauguaacagg

SEQ ID NO: 2441426 - RNA, 19 nt, Artificial Sequence
  Description of Artificial Sequence: Synthetic oligonucleotide
  Sense strand starting at position 340 of SEQ ID NO: 1886999
gccuauugugcaggauguu

SEQ ID NO: 2441427 - RNA, 19 nt, Artificial Sequence
  Description of Artificial Sequence: Synthetic oligonucleotide
  Antisense strand to SEQ ID NO: 2441426
aacauccugcacaauaggc

SEQ ID NO: 2441428 - RNA, 19 nt, Artificial Sequence
  Description of Artificial Sequence: Synthetic oligonucleotide
  Sense strand starting at position 349 of SEQ ID NO: 1886999
gcaggauguuugucgggca

SEQ ID NO: 2441429 - RNA, 19 nt, Artificial Sequence
  Description of Artificial Sequence: Synthetic oligonucleotide
  Antisense strand to SEQ ID NO: 2441428
ugcccgacaaacauccugc

SEQ ID NO: 2441430 - RNA, 19 nt, Artificial Sequence
  Description of Artificial Sequence: Synthetic oligonucleotide
  Sense strand starting at position 350 of SEQ ID NO: 1886999
caggauguuugucgggcau

SEQ ID NO: 2441431 - RNA, 19 nt, Artificial Sequence
  Description of Artificial Sequence: Synthetic oligonucleotide
  Antisense strand to SEQ ID NO: 2441430
augcccgacaaacauccug

SEQ ID NO: 2441432 - RNA, 19 nt, Artificial Sequence
  Description of Artificial Sequence: Synthetic oligonucleotide
  Sense strand starting at position 352 of SEQ ID NO: 1886999
ggauguuugucgggcaucu

SEQ ID NO: 2441433 - RNA, 19 nt, Artificial Sequence
  Description of Artificial Sequence: Synthetic oligonucleotide
  Antisense strand to SEQ ID NO: 2441432
agaugcccgacaaacaucc

SEQ ID NO: 2441434 - RNA, 19 nt, Artificial Sequence
  Description of Artificial Sequence: Synthetic oligonucleotide
  Sense strand starting at position 354 of SEQ ID NO: 1886999
auguuugucgggcaucuau

SEQ ID NO: 2441435 - RNA, 19 nt, Artificial Sequence
  Description of Artificial Sequence: Synthetic oligonucleotide
  Antisense strand to SEQ ID NO: 2441434
auagaugcccgacaaacau

SEQ ID NO: 2441436 - RNA, 19 nt, Artificial Sequence
  Description of Artificial Sequence: Synthetic oligonucleotide
  Sense strand starting at position 369 of SEQ ID NO: 1886999
cuauacugauggucuccaa

SEQ ID NO: 2441437 - RNA, 19 nt, Artificial Sequence
  Description of Artificial Sequence: Synthetic oligonucleotide
  Antisense strand to SEQ ID NO: 2441436
uuggagaccaucaguauag

SEQ ID NO: 2441438 - RNA, 19 nt, Artificial Sequence
  Description of Artificial Sequence: Synthetic oligonucleotide
  Sense strand starting at position 453 of SEQ ID NO: 1886999
agugaagaguaauggaaua

SEQ ID NO: 2441439 - RNA, 19 nt, Artificial Sequence
  Description of Artificial Sequence: Synthetic oligonucleotide
  Antisense strand to SEQ ID NO: 2441438
uauuccauuacucuucacu

SEQ ID NO: 2441440 - RNA, 19 nt, Artificial Sequence
  Description of Artificial Sequence: Synthetic oligonucleotide
  Sense strand starting at position 816 of SEQ ID NO: 1886999
cagccagcuucuugggaga

SEQ ID NO: 2441441 - RNA, 19 nt, Artificial Sequence
  Description of Artificial Sequence: Synthetic oligonucleotide
  Antisense strand to SEQ ID NO: 2441440
ucucccaagaagcuggcug

SEQ ID NO: 2441442 - RNA, 19 nt, Artificial Sequence
  Description of Artificial Sequence: Synthetic oligonucleotide
  Sense strand starting at position 851 of SEQ ID NO: 1886999
caaccaucacgguagcaau

SEQ ID NO: 2441443 - RNA, 19 nt, Artificial Sequence
  Description of Artificial Sequence: Synthetic oligonucleotide
  Antisense strand to SEQ ID NO: 2441442
auugcuaccgugaugguug

SEQ ID NO: 2441444 - RNA, 19 nt, Artificial Sequence
  Description of Artificial Sequence: Synthetic oligonucleotide
  Sense strand starting at position 890 of SEQ ID NO: 1886999
ccgcaaagcuaggaagaua

SEQ ID NO: 2441445 - RNA, 19 nt, Artificial Sequence
  Description of Artificial Sequence: Synthetic oligonucleotide
  Antisense strand to SEQ ID NO: 2441444
uaucuuccuagcuuugcgg

SEQ ID NO: 2441446 - RNA, 19 nt, Artificial Sequence
  Description of Artificial Sequence: Synthetic oligonucleotide
  Sense strand starting at position 937 of SEQ ID NO: 1886999
acagcuucucuagagguua

SEQ ID NO: 2441447 - RNA, 19 nt, Artificial Sequence
  Description of Artificial Sequence: Synthetic oligonucleotide
  Antisense strand to SEQ ID NO: 2441446
uaaccucuagagaagcugu

SEQ ID NO: 2441448 - RNA, 19 nt, Artificial Sequence
  Description of Artificial Sequence: Synthetic oligonucleotide
  Sense strand starting at position 976 of SEQ ID NO: 1886999
ugcacugucacuugaggga

SEQ ID NO: 2441449 - RNA, 19 nt, Artificial Sequence
  Description of Artificial Sequence: Synthetic oligonucleotide
  Antisense strand to SEQ ID NO: 2441448
ucccucaagugacagugca

SEQ ID NO: 2441450 - RNA, 19 nt, Artificial Sequence
  Description of Artificial Sequence: Synthetic oligonucleotide
  Sense strand starting at position 1006 of SEQ ID NO: 1886999
ggcggaucaucuuggaaac

SEQ ID NO: 2441451 - RNA, 19 nt, Artificial Sequence
  Description of Artificial Sequence: Synthetic oligonucleotide
  Antisense strand to SEQ ID NO: 2441450
guuuccaagaugauccgcc

SEQ ID NO: 2441452 - RNA, 19 nt, Artificial Sequence
  Description of Artificial Sequence: Synthetic oligonucleotide
  Sense strand starting at position 1061 of SEQ ID NO: 1886999
agaggcugccuaggauuaa

SEQ ID NO: 2441453 - RNA, 19 nt, Artificial Sequence
  Description of Artificial Sequence: Synthetic oligonucleotide
  Antisense strand to SEQ ID NO: 2441452
uuaauccuaggcagccucu

SEQ ID NO: 2441454 - RNA, 19 nt, Artificial Sequence
  Description of Artificial Sequence: Synthetic oligonucleotide
  Sense strand starting at position 1065 of SEQ ID NO: 1886999
gcugccuaggauuaacauu

SEQ ID NO: 2441455 - RNA, 19 nt, Artificial Sequence
  Description of Artificial Sequence: Synthetic oligonucleotide
  Antisense strand to SEQ ID NO: 2441454
aauguuaauccuaggcagc

SEQ ID NO: 2441456 - RNA, 19 nt, Artificial Sequence
  Description of Artificial Sequence: Synthetic oligonucleotide
  Sense strand starting at position 1073 of SEQ ID NO: 1886999
ggauuaacauucucguucu

SEQ ID NO: 2441457 - RNA, 19 nt, Artificial Sequence
  Description of Artificial Sequence: Synthetic oligonucleotide
  Antisense strand to SEQ ID NO: 2441456
agaacgagaauguuaaucc

SEQ ID NO: 2441458 - RNA, 19 nt, Artificial Sequence
  Description of Artificial Sequence: Synthetic oligonucleotide
  Sense strand starting at position 1169 of SEQ ID NO: 1886999
aaucuaucacccgagaggu

SEQ ID NO: 2441459 - RNA, 19 nt, Artificial Sequence
  Description of Artificial Sequence: Synthetic oligonucleotide
  Antisense strand to SEQ ID NO: 2441458
accucucgggugauagauu

SEQ ID NO: 2441460 - RNA, 19 nt, Artificial Sequence
  Description of Artificial Sequence: Synthetic oligonucleotide
  Sense strand starting at position 2481 of SEQ ID NO: 1886999
ggccucaguuccuguuagu

SEQ ID NO: 2441461 - RNA, 19 nt, Artificial Sequence
  Description of Artificial Sequence: Synthetic oligonucleotide
  Antisense strand to SEQ ID NO: 2441460
acuaacaggaacugaggcc

SEQ ID NO: 2441462 - RNA, 19 nt, Artificial Sequence
  Description of Artificial Sequence: Synthetic oligonucleotide
  Sense strand starting at position 2487 of SEQ ID NO: 1886999
aguuccuguuaguagcaaa

SEQ ID NO: 2441463 - RNA, 19 nt, Artificial Sequence
  Description of Artificial Sequence: Synthetic oligonucleotide
  Antisense strand to SEQ ID NO: 2441462
uuugcuacuaacaggaacu

SEQ ID NO: 2441464 - RNA, 19 nt, Artificial Sequence
  Description of Artificial Sequence: Synthetic oligonucleotide
  Sense strand starting at position 2509 of SEQ ID NO: 1886999
aaaggaugauuugaaaguu

SEQ ID NO: 2441465 - RNA, 19 nt, Artificial Sequence
  Description of Artificial Sequence: Synthetic oligonucleotide
  Antisense strand to SEQ ID NO: 2441464
aacuuucaaaucauccuuu

SEQ ID NO: 2441466 - RNA, 19 nt, Artificial Sequence
  Description of Artificial Sequence: Synthetic oligonucleotide
  Sense strand starting at position 3347 of SEQ ID NO: 1886999
uggccucuuuaauggugaa

SEQ ID NO: 2441467 - RNA, 19 nt, Artificial Sequence
  Description of Artificial Sequence: Synthetic oligonucleotide
  Antisense strand to SEQ ID NO: 2441466
uucaccauuaaagaggcca

SEQ ID NO: 2441468 - RNA, 19 nt, Artificial Sequence
  Description of Artificial Sequence: Synthetic oligonucleotide
  Sense strand starting at position 3350 of SEQ ID NO: 1886999
ccucuuuaauggugaacua

SEQ ID NO: 2441469 - RNA, 19 nt, Artificial Sequence
  Description of Artificial Sequence: Synthetic oligonucleotide
  Antisense strand to SEQ ID NO: 2441468
uaguucaccauuaaagagg

SEQ ID NO: 2441470 - RNA, 19 nt, Artificial Sequence
  Description of Artificial Sequence: Synthetic oligonucleotide
  Sense strand starting at position 3351 of SEQ ID NO: 1886999
cucuuuaauggugaacuau

SEQ ID NO: 2441471 - RNA, 19 nt, Artificial Sequence
  Description of Artificial Sequence: Synthetic oligonucleotide
  Antisense strand to SEQ ID NO: 2441470
auaguucaccauuaaagag

SEQ ID NO: 2441472 - RNA, 19 nt, Artificial Sequence
  Description of Artificial Sequence: Synthetic oligonucleotide
  Sense strand starting at position 3359 of SEQ ID NO: 1886999
uggugaacuaucuguggcu

SEQ ID NO: 2441473 - RNA, 19 nt, Artificial Sequence
  Description of Artificial Sequence: Synthetic oligonucleotide
  Antisense strand to SEQ ID NO: 2441472
agccacagauaguucacca

SEQ ID NO: 2441474 - RNA, 19 nt, Artificial Sequence
  Description of Artificial Sequence: Synthetic oligonucleotide
  Sense strand starting at position 3361 of SEQ ID NO: 1886999
gugaacuaucuguggcucu

SEQ ID NO: 2441475 - RNA, 19 nt, Artificial Sequence
  Description of Artificial Sequence: Synthetic oligonucleotide
  Antisense strand to SEQ ID NO: 2441474
agagccacagauaguucac

SEQ ID NO: 2441476 - RNA, 19 nt, Artificial Sequence
  Description of Artificial Sequence: Synthetic oligonucleotide
  Sense strand starting at position 3376 of SEQ ID NO: 1886999
cucucucaguucuguagau

SEQ ID NO: 2441477 - RNA, 19 nt, Artificial Sequence
  Description of Artificial Sequence: Synthetic oligonucleotide
  Antisense strand to SEQ ID NO: 2441476
aucuacagaacugagagag

SEQ ID NO: 2441478 - RNA, 19 nt, Artificial Sequence
  Description of Artificial Sequence: Synthetic oligonucleotide
  Sense strand starting at position 3377 of SEQ ID NO: 1886999
ucucucaguucuguagaua

SEQ ID NO: 2441479 - RNA, 19 nt, Artificial Sequence
  Description of Artificial Sequence: Synthetic oligonucleotide
  Antisense strand to SEQ ID NO: 2441478
uaucuacagaacugagaga

SEQ ID NO: 2441480 - RNA, 19 nt, Artificial Sequence
  Description of Artificial Sequence: Synthetic oligonucleotide
  Sense strand starting at position 3378 of SEQ ID NO: 1886999
cucucaguucuguagauac

SEQ ID NO: 2441481 - RNA, 19 nt, Artificial Sequence
  Description of Artificial Sequence: Synthetic oligonucleotide
  Antisense strand to SEQ ID NO: 2441480
guaucuacagaacugagag

SEQ ID NO: 2441482 - RNA, 19 nt, Artificial Sequence
  Description of Artificial Sequence: Synthetic oligonucleotide
  Sense strand starting at position 3389 of SEQ ID NO: 1886999
guagauaccuugcaaauug

SEQ ID NO: 2441483 - RNA, 19 nt, Artificial Sequence
  Description of Artificial Sequence: Synthetic oligonucleotide
  Antisense strand to SEQ ID NO: 2441482
caauuugcaagguaucuac

SEQ ID NO: 2441484 - RNA, 19 nt, Artificial Sequence
  Description of Artificial Sequence: Synthetic oligonucleotide
  Sense strand starting at position 3400 of SEQ ID NO: 1886999
gcaaauugaggagguauau

SEQ ID NO: 2441485 - RNA, 19 nt, Artificial Sequence
  Description of Artificial Sequence: Synthetic oligonucleotide
  Antisense strand to SEQ ID NO: 2441484
auauaccuccucaauuugc

SEQ ID NO: 2441486 - RNA, 19 nt, Artificial Sequence
  Description of Artificial Sequence: Synthetic oligonucleotide
  Sense strand starting at position 3811 of SEQ ID NO: 1886999
ggugacgugugccuaugau

SEQ ID NO: 2441487 - RNA, 19 nt, Artificial Sequence
  Description of Artificial Sequence: Synthetic oligonucleotide
  Antisense strand to SEQ ID NO: 2441486
aucauaggcacacgucacc

SEQ ID NO: 2441488 - RNA, 19 nt, Artificial Sequence
  Description of Artificial Sequence: Synthetic oligonucleotide
  Sense strand starting at position 259 of SEQ ID NO: 1887000
ugaggugauauauguauag

SEQ ID NO: 2441489 - RNA, 19 nt, Artificial Sequence
  Description of Artificial Sequence: Synthetic oligonucleotide
  Antisense strand to SEQ ID NO: 2441488
cuauacauauaucaccuca

SEQ ID NO: 2441490 - RNA, 19 nt, Artificial Sequence
  Description of Artificial Sequence: Synthetic oligonucleotide
  Sense strand starting at position 261 of SEQ ID NO: 1887000
aggugauauauguauagca

SEQ ID NO: 2441491 - RNA, 19 nt, Artificial Sequence
  Description of Artificial Sequence: Synthetic oligonucleotide
  Antisense strand to SEQ ID NO: 2441490
ugcuauacauauaucaccu

SEQ ID NO: 2441492 - RNA, 19 nt, Artificial Sequence
  Description of Artificial Sequence: Synthetic oligonucleotide
  Sense strand starting at position 263 of SEQ ID NO: 1887000
gugauauauguauagcaga

SEQ ID NO: 2441493 - RNA, 19 nt, Artificial Sequence
  Description of Artificial Sequence: Synthetic oligonucleotide
  Antisense strand to SEQ ID NO: 2441492
ucugcuauacauauaucac

SEQ ID NO: 2441494 - RNA, 19 nt, Artificial Sequence
  Description of Artificial Sequence: Synthetic oligonucleotide
  Sense strand starting at position 270 of SEQ ID NO: 1887000
auguauagcagagagaugu

SEQ ID NO: 2441495 - RNA, 19 nt, Artificial Sequence
  Description of Artificial Sequence: Synthetic oligonucleotide
  Antisense strand to SEQ ID NO: 2441494
acaucucucugcuauacau

SEQ ID NO: 2441496 - RNA, 19 nt, Artificial Sequence
  Description of Artificial Sequence: Synthetic oligonucleotide
  Sense strand starting at position 319 of SEQ ID NO: 1887000
gagggaucugaguguucug

SEQ ID NO: 2441497 - RNA, 19 nt, Artificial Sequence
  Description of Artificial Sequence: Synthetic oligonucleotide
  Antisense strand to SEQ ID NO: 2441496
cagaacacucagaucccuc

SEQ ID NO: 2441498 - RNA, 19 nt, Artificial Sequence
  Description of Artificial Sequence: Synthetic oligonucleotide
  Sense strand starting at position 322 of SEQ ID NO: 1887000
ggaucugaguguucuguaa

SEQ ID NO: 2441499 - RNA, 19 nt, Artificial Sequence
  Description of Artificial Sequence: Synthetic oligonucleotide
  Antisense strand to SEQ ID NO: 2441498
uuacagaacacucagaucc

SEQ ID NO: 2441500 - RNA, 19 nt, Artificial Sequence
  Description of Artificial Sequence: Synthetic oligonucleotide
  Sense strand starting at position 326 of SEQ ID NO: 1887000
cugaguguucuguaaaugc

SEQ ID NO: 2441501 - RNA, 19 nt, Artificial Sequence
  Description of Artificial Sequence: Synthetic oligonucleotide
  Antisense strand to SEQ ID NO: 2441500
gcauuuacagaacacucag

SEQ ID NO: 2441502 - RNA, 19 nt, Artificial Sequence
  Description of Artificial Sequence: Synthetic oligonucleotide
  Sense strand starting at position 364 of SEQ ID NO: 1887000
cuuucuaagugucuuacua

SEQ ID NO: 2441503 - RNA, 19 nt, Artificial Sequence
  Description of Artificial Sequence: Synthetic oligonucleotide
  Antisense strand to SEQ ID NO: 2441502
uaguaagacacuuagaaag

SEQ ID NO: 2441504 - RNA, 19 nt, Artificial Sequence
  Description of Artificial Sequence: Synthetic oligonucleotide
  Sense strand starting at position 429 of SEQ ID NO: 1887000
uguagcaacugauuaagua

SEQ ID NO: 2441505 - RNA, 19 nt, Artificial Sequence
  Description of Artificial Sequence: Synthetic oligonucleotide
  Antisense strand to SEQ ID NO: 2441504
uacuuaaucaguugcuaca

SEQ ID NO: 2441506 - RNA, 19 nt, Artificial Sequence
  Description of Artificial Sequence: Synthetic oligonucleotide
  Sense strand starting at position 430 of SEQ ID NO: 1887000
guagcaacugauuaaguaa

SEQ ID NO: 2441507 - RNA, 19 nt, Artificial Sequence
  Description of Artificial Sequence: Synthetic oligonucleotide
  Antisense strand to SEQ ID NO: 2441506
uuacuuaaucaguugcuac

SEQ ID NO: 2441508 - RNA, 19 nt, Artificial Sequence
  Description of Artificial Sequence: Synthetic oligonucleotide
  Sense strand starting at position 433 of SEQ ID NO: 1887000
gcaacugauuaaguaauga

SEQ ID NO: 2441509 - RNA, 19 nt, Artificial Sequence
  Description of Artificial Sequence: Synthetic oligonucleotide
  Antisense strand to SEQ ID NO: 2441508
ucauuacuuaaucaguugc

SEQ ID NO: 2441510 - RNA, 19 nt, Artificial Sequence
  Description of Artificial Sequence: Synthetic oligonucleotide
  Sense strand starting at position 444 of SEQ ID NO: 1887000
aguaaugaagcaugagaac

SEQ ID NO: 2441511 - RNA, 19 nt, Artificial Sequence
  Description of Artificial Sequence: Synthetic oligonucleotide
  Antisense strand to SEQ ID NO: 2441510
guucucaugcuucauuacu

SEQ ID NO: 2441512 - RNA, 19 nt, Artificial Sequence
  Description of Artificial Sequence: Synthetic oligonucleotide
  Sense strand starting at position 642 of SEQ ID NO: 1887000
cccaucucccugugaaagu

SEQ ID NO: 2441513 - RNA, 19 nt, Artificial Sequence
  Description of Artificial Sequence: Synthetic oligonucleotide
  Antisense strand to SEQ ID NO: 2441512
acuuucacagggagauggg

SEQ ID NO: 2441514 - RNA, 19 nt, Artificial Sequence
  Description of Artificial Sequence: Synthetic oligonucleotide
  Sense strand starting at position 705 of SEQ ID NO: 1887000
cugcaaauaucaguggcaa

SEQ ID NO: 2441515 - RNA, 19 nt, Artificial Sequence
  Description of Artificial Sequence: Synthetic oligonucleotide
  Antisense strand to SEQ ID NO: 2441514
uugccacugauauuugcag

SEQ ID NO: 2441516 - RNA, 19 nt, Artificial Sequence
  Description of Artificial Sequence: Synthetic oligonucleotide
  Sense strand starting at position 706 of SEQ ID NO: 1887000
ugcaaauaucaguggcaau

SEQ ID NO: 2441517 - RNA, 19 nt, Artificial Sequence
  Description of Artificial Sequence: Synthetic oligonucleotide
  Antisense strand to SEQ ID NO: 2441516
auugccacugauauuugca

SEQ ID NO: 2441518 - RNA, 19 nt, Artificial Sequence
  Description of Artificial Sequence: Synthetic oligonucleotide
  Sense strand starting at position 2050 of SEQ ID NO: 1887000
gcaagugcucaguaagcau

SEQ ID NO: 2441519 - RNA, 19 nt, Artificial Sequence
  Description of Artificial Sequence: Synthetic oligonucleotide
  Antisense strand to SEQ ID NO: 2441518
augcuuacugagcacuugc

SEQ ID NO: 2441520 - RNA, 19 nt, Artificial Sequence
  Description of Artificial Sequence: Synthetic oligonucleotide
  Sense strand starting at position 2082 of SEQ ID NO: 1887000
acagcaugccuggaaucua

SEQ ID NO: 2441521 - RNA, 19 nt, Artificial Sequence
  Description of Artificial Sequence: Synthetic oligonucleotide
  Antisense strand to SEQ ID NO: 2441520
uagauuccaggcaugcugu

SEQ ID NO: 2441522 - RNA, 19 nt, Artificial Sequence
  Description of Artificial Sequence: Synthetic oligonucleotide
  Sense strand starting at position 2093 of SEQ ID NO: 1887000
ggaaucuacugagagaaga

SEQ ID NO: 2441523 - RNA, 19 nt, Artificial Sequence
  Description of Artificial Sequence: Synthetic oligonucleotide
  Antisense strand to SEQ ID NO: 2441522
ucuucucucaguagauucc

SEQ ID NO: 2441524 - RNA, 19 nt, Artificial Sequence
  Description of Artificial Sequence: Synthetic oligonucleotide
  Sense strand starting at position 2211 of SEQ ID NO: 1887000
aggcuagaacucugagagu

SEQ ID NO: 2441525 - RNA, 19 nt, Artificial Sequence
  Description of Artificial Sequence: Synthetic oligonucleotide
  Antisense strand to SEQ ID NO: 2441524
acucucagaguucuagccu

SEQ ID NO: 2441526 - RNA, 19 nt, Artificial Sequence
  Description of Artificial Sequence: Synthetic oligonucleotide
  Sense strand starting at position 2220 of SEQ ID NO: 1887000
cucugagaguugguuucuu

SEQ ID NO: 2441527 - RNA, 19 nt, Artificial Sequence
  Description of Artificial Sequence: Synthetic oligonucleotide
  Antisense strand to SEQ ID NO: 2441526
aagaaaccaacucucagag

SEQ ID NO: 2441528 - RNA, 19 nt, Artificial Sequence
  Description of Artificial Sequence: Synthetic oligonucleotide
  Sense strand starting at position 2224 of SEQ ID NO: 1887000
gagaguugguuucuuuggu

SEQ ID NO: 2441529 - RNA, 19 nt, Artificial Sequence
  Description of Artificial Sequence: Synthetic oligonucleotide
  Antisense strand to SEQ ID NO: 2441528
accaaagaaaccaacucuc

SEQ ID NO: 2441530 - RNA, 19 nt, Artificial Sequence
  Description of Artificial Sequence: Synthetic oligonucleotide
  Sense strand starting at position 2327 of SEQ ID NO: 1887000
ccagucauauugguuagga

SEQ ID NO: 2441531 - RNA, 19 nt, Artificial Sequence
  Description of Artificial Sequence: Synthetic oligonucleotide
  Antisense strand to SEQ ID NO: 2441530
uccuaaccaauaugacugg

SEQ ID NO: 2441532 - RNA, 19 nt, Artificial Sequence
  Description of Artificial Sequence: Synthetic oligonucleotide
  Sense strand starting at position 2328 of SEQ ID NO: 1887000
cagucauauugguuaggac

SEQ ID NO: 2441533 - RNA, 19 nt, Artificial Sequence
  Description of Artificial Sequence: Synthetic oligonucleotide
  Antisense strand to SEQ ID NO: 2441532
guccuaaccaauaugacug

SEQ ID NO: 2441534 - RNA, 19 nt, Artificial Sequence
  Description of Artificial Sequence: Synthetic oligonucleotide
  Sense strand starting at position 2385 of SEQ ID NO: 1887000
guggcccuaucuccaaaua

SEQ ID NO: 2441535 - RNA, 19 nt, Artificial Sequence
  Description of Artificial Sequence: Synthetic oligonucleotide
  Antisense strand to SEQ ID NO: 2441534
uauuuggagauagggccac

SEQ ID NO: 2441536 - RNA, 19 nt, Artificial Sequence
  Description of Artificial Sequence: Synthetic oligonucleotide
  Sense strand starting at position 2582 of SEQ ID NO: 1887000
cagaaaggccucugcaagu

SEQ ID NO: 2441537 - RNA, 19 nt, Artificial Sequence
  Description of Artificial Sequence: Synthetic oligonucleotide
  Antisense strand to SEQ ID NO: 2441536
acuugcagaggccuuucug

SEQ ID NO: 2441538 - RNA, 19 nt, Artificial Sequence
  Description of Artificial Sequence: Synthetic oligonucleotide
  Sense strand starting at position 2600 of SEQ ID NO: 1887000
ugacuuggaucccugacaa

SEQ ID NO: 2441539 - RNA, 19 nt, Artificial Sequence
  Description of Artificial Sequence: Synthetic oligonucleotide
  Antisense strand to SEQ ID NO: 2441538
uugucagggauccaaguca

SEQ ID NO: 2441540 - RNA, 19 nt, Artificial Sequence
  Description of Artificial Sequence: Synthetic oligonucleotide
  Sense strand starting at position 2639 of SEQ ID NO: 1887000
ccacguguccuuguuccua

SEQ ID NO: 2441541 - RNA, 19 nt, Artificial Sequence
  Description of Artificial Sequence: Synthetic oligonucleotide
  Antisense strand to SEQ ID NO: 2441540
uaggaacaaggacacgugg

SEQ ID NO: 2441542 - RNA, 19 nt, Artificial Sequence
  Description of Artificial Sequence: Synthetic oligonucleotide
  Sense strand starting at position 2643 of SEQ ID NO: 1887000
guguccuuguuccuagaag

SEQ ID NO: 2441543 - RNA, 19 nt, Artificial Sequence
  Description of Artificial Sequence: Synthetic oligonucleotide
  Antisense strand to SEQ ID NO: 2441542
cuucuaggaacaaggacac

SEQ ID NO: 2441544 - RNA, 19 nt, Artificial Sequence
  Description of Artificial Sequence: Synthetic oligonucleotide
  Sense strand starting at position 2706 of SEQ ID NO: 1887000
uccucuucuccaugggcaa

SEQ ID NO: 2441545 - RNA, 19 nt, Artificial Sequence
  Description of Artificial Sequence: Synthetic oligonucleotide
  Antisense strand to SEQ ID NO: 2441544
uugcccauggagaagagga

SEQ ID NO: 2441546 - RNA, 19 nt, Artificial Sequence
  Description of Artificial Sequence: Synthetic oligonucleotide
  Sense strand starting at position 2707 of SEQ ID NO: 1887000
ccucuucuccaugggcaaa

SEQ ID NO: 2441547 - RNA, 19 nt, Artificial Sequence
  Description of Artificial Sequence: Synthetic oligonucleotide
  Antisense strand to SEQ ID NO: 2441546
uuugcccauggagaagagg

SEQ ID NO: 2441548 - RNA, 19 nt, Artificial Sequence
  Description of Artificial Sequence: Synthetic oligonucleotide
  Sense strand starting at position 2718 of SEQ ID NO: 1887000
ugggcaaacucuuuaccuu

SEQ ID NO: 2441549 - RNA, 19 nt, Artificial Sequence
  Description of Artificial Sequence: Synthetic oligonucleotide
  Antisense strand to SEQ ID NO: 2441548
aagguaaagaguuugccca

SEQ ID NO: 2441550 - RNA, 19 nt, Artificial Sequence
  Description of Artificial Sequence: Synthetic oligonucleotide
  Sense strand starting at position 2951 of SEQ ID NO: 1887000
acuccucugcacugggaua

SEQ ID NO: 2441551 - RNA, 19 nt, Artificial Sequence
  Description of Artificial Sequence: Synthetic oligonucleotide
  Antisense strand to SEQ ID NO: 2441550
uaucccagugcagaggagu

SEQ ID NO: 2441552 - RNA, 19 nt, Artificial Sequence
  Description of Artificial Sequence: Synthetic oligonucleotide
  Sense strand starting at position 2953 of SEQ ID NO: 1887000
uccucugcacugggauaaa

SEQ ID NO: 2441553 - RNA, 19 nt, Artificial Sequence
  Description of Artificial Sequence: Synthetic oligonucleotide
  Antisense strand to SEQ ID NO: 2441552
uuuaucccagugcagagga

SEQ ID NO: 2441554 - RNA, 19 nt, Artificial Sequence
  Description of Artificial Sequence: Synthetic oligonucleotide
  Sense strand starting at position 3109 of SEQ ID NO: 1887000
cugcuuucugcugaucaca

SEQ ID NO: 2441555 - RNA, 19 nt, Artificial Sequence
  Description of Artificial Sequence: Synthetic oligonucleotide
  Antisense strand to SEQ ID NO: 2441554
ugugaucagcagaaagcag

SEQ ID NO: 2441556 - RNA, 19 nt, Artificial Sequence
  Description of Artificial Sequence: Synthetic oligonucleotide
  Sense strand starting at position 3171 of SEQ ID NO: 1887000
cuggaacuuaauggguaau

SEQ ID NO: 2441557 - RNA, 19 nt, Artificial Sequence
  Description of Artificial Sequence: Synthetic oligonucleotide
  Antisense strand to SEQ ID NO: 2441556
auuacccauuaaguuccag

SEQ ID NO: 2441558 - RNA, 19 nt, Artificial Sequence
  Description of Artificial Sequence: Synthetic oligonucleotide
  Sense strand starting at position 3385 of SEQ ID NO: 1887000
ccugucaugggcuaaaugu

SEQ ID NO: 2441559 - RNA, 19 nt, Artificial Sequence
  Description of Artificial Sequence: Synthetic oligonucleotide
  Antisense strand to SEQ ID NO: 2441558
acauuuagcccaugacagg

SEQ ID NO: 2441560 - RNA, 19 nt, Artificial Sequence
  Description of Artificial Sequence: Synthetic oligonucleotide
  Sense strand starting at position 3464 of SEQ ID NO: 1887000
ggccuuugggaguaauuag

SEQ ID NO: 2441561 - RNA, 19 nt, Artificial Sequence
  Description of Artificial Sequence: Synthetic oligonucleotide
  Antisense strand to SEQ ID NO: 2441560
cuaauuacucccaaaggcc

SEQ ID NO: 2441562 - RNA, 19 nt, Artificial Sequence
  Description of Artificial Sequence: Synthetic oligonucleotide
  Sense strand starting at position 3601 of SEQ ID NO: 1887000
gggcccuaaccagaaaguu

SEQ ID NO: 2441563 - RNA, 19 nt, Artificial Sequence
  Description of Artificial Sequence: Synthetic oligonucleotide
  Antisense strand to SEQ ID NO: 2441562
aacuuucugguuagggccc

SEQ ID NO: 2441564 - RNA, 19 nt, Artificial Sequence
  Description of Artificial Sequence: Synthetic oligonucleotide
  Sense strand starting at position 3656 of SEQ ID NO: 1887000
auaagaagucaaugucugu

SEQ ID NO: 2441565 - RNA, 19 nt, Artificial Sequence
  Description of Artificial Sequence: Synthetic oligonucleotide
  Antisense strand to SEQ ID NO: 2441564
acagacauugacuucuuau

SEQ ID NO: 2441566 - RNA, 19 nt, Artificial Sequence
  Description of Artificial Sequence: Synthetic oligonucleotide
  Sense strand starting at position 3704 of SEQ ID NO: 1887000
guuacaggagcccaaauua

SEQ ID NO: 2441567 - RNA, 19 nt, Artificial Sequence
  Description of Artificial Sequence: Synthetic oligonucleotide
  Antisense strand to SEQ ID NO: 2441566
uaauuugggcuccuguaac

SEQ ID NO: 2441568 - RNA, 19 nt, Artificial Sequence
  Description of Artificial Sequence: Synthetic oligonucleotide
  Sense strand starting at position 84 of SEQ ID NO: 1887001
gggcaucaguguucauggu

SEQ ID NO: 2441569 - RNA, 19 nt, Artificial Sequence
  Description of Artificial Sequence: Synthetic oligonucleotide
  Antisense strand to SEQ ID NO: 2441568
accaugaacacugaugccc

SEQ ID NO: 2441570 - RNA, 19 nt, Artificial Sequence
  Description of Artificial Sequence: Synthetic oligonucleotide
  Sense strand starting at position 85 of SEQ ID NO: 1887001
ggcaucaguguucauggua

SEQ ID NO: 2441571 - RNA, 19 nt, Artificial Sequence
  Description of Artificial Sequence: Synthetic oligonucleotide
  Antisense strand to SEQ ID NO: 2441570
uaccaugaacacugaugcc

SEQ ID NO: 2441572 - RNA, 19 nt, Artificial Sequence
  Description of Artificial Sequence: Synthetic oligonucleotide
  Sense strand starting at position 251 of SEQ ID NO: 1887001
aaagaacgguucugagcau

SEQ ID NO: 2441573 - RNA, 19 nt, Artificial Sequence
  Description of Artificial Sequence: Synthetic oligonucleotide
  Antisense strand to SEQ ID NO: 2441572
augcucagaaccguucuuu

SEQ ID NO: 2441574 - RNA, 19 nt, Artificial Sequence
  Description of Artificial Sequence: Synthetic oligonucleotide
  Sense strand starting at position 333 of SEQ ID NO: 1887001
cccagaguguucugaggau

SEQ ID NO: 2441575 - RNA, 19 nt, Artificial Sequence
  Description of Artificial Sequence: Synthetic oligonucleotide
  Antisense strand to SEQ ID NO: 2441574
auccucagaacacucuggg

SEQ ID NO: 2441576 - RNA, 19 nt, Artificial Sequence
  Description of Artificial Sequence: Synthetic oligonucleotide
  Sense strand starting at position 337 of SEQ ID NO: 1887001
gaguguucugaggauguaa

SEQ ID NO: 2441577 - RNA, 19 nt, Artificial Sequence
  Description of Artificial Sequence: Synthetic oligonucleotide
  Antisense strand to SEQ ID NO: 2441576
uuacauccucagaacacuc

SEQ ID NO: 2441578 - RNA, 19 nt, Artificial Sequence
  Description of Artificial Sequence: Synthetic oligonucleotide
  Sense strand starting at position 345 of SEQ ID NO: 1887001
ugaggauguaagcguguuu

SEQ ID NO: 2441579 - RNA, 19 nt, Artificial Sequence
  Description of Artificial Sequence: Synthetic oligonucleotide
  Antisense strand to SEQ ID NO: 2441578
aaacacgcuuacauccuca

SEQ ID NO: 2441580 - RNA, 19 nt, Artificial Sequence
  Description of Artificial Sequence: Synthetic oligonucleotide
  Sense strand starting at position 2112 of SEQ ID NO: 1887001
cacgcuuacucaggugacu

SEQ ID NO: 2441581 - RNA, 19 nt, Artificial Sequence
  Description of Artificial Sequence: Synthetic oligonucleotide
  Antisense strand to SEQ ID NO: 2441580
agucaccugaguaagcgug

SEQ ID NO: 2441582 - RNA, 19 nt, Artificial Sequence
  Description of Artificial Sequence: Synthetic oligonucleotide
  Sense strand starting at position 2114 of SEQ ID NO: 1887001
cgcuuacucaggugacuga

SEQ ID NO: 2441583 - RNA, 19 nt, Artificial Sequence
  Description of Artificial Sequence: Synthetic oligonucleotide
  Antisense strand to SEQ ID NO: 2441582
ucagucaccugaguaagcg

SEQ ID NO: 2441584 - RNA, 19 nt, Artificial Sequence
  Description of Artificial Sequence: Synthetic oligonucleotide
  Sense strand starting at position 2541 of SEQ ID NO: 1887001
cccggaugccuccacgaga

SEQ ID NO: 2441585 - RNA, 19 nt, Artificial Sequence
  Description of Artificial Sequence: Synthetic oligonucleotide
  Antisense strand to SEQ ID NO: 2441584
ucucguggaggcauccggg

SEQ ID NO: 2441586 - RNA, 19 nt, Artificial Sequence
  Description of Artificial Sequence: Synthetic oligonucleotide
  Sense strand starting at position 2666 of SEQ ID NO: 1887001
gcuccagugugucagggau

SEQ ID NO: 2441587 - RNA, 19 nt, Artificial Sequence
  Description of Artificial Sequence: Synthetic oligonucleotide
  Antisense strand to SEQ ID NO: 2441586
aucccugacacacuggagc

SEQ ID NO: 2441588 - RNA, 19 nt, Artificial Sequence
  Description of Artificial Sequence: Synthetic oligonucleotide
  Sense strand starting at position 2912 of SEQ ID NO: 1887001
agcguuccucgacgaggaa

SEQ ID NO: 2441589 - RNA, 19 nt, Artificial Sequence
  Description of Artificial Sequence: Synthetic oligonucleotide
  Antisense strand to SEQ ID NO: 2441588
uuccucgucgaggaacgcu

SEQ ID NO: 2441590 - RNA, 19 nt, Artificial Sequence
  Description of Artificial Sequence: Synthetic oligonucleotide
  Sense strand starting at position 2913 of SEQ ID NO: 1887001
gcguuccucgacgaggaaa

SEQ ID NO: 2441591 - RNA, 19 nt, Artificial Sequence
  Description of Artificial Sequence: Synthetic oligonucleotide
  Antisense strand to SEQ ID NO: 2441590
uuuccucgucgaggaacgc

SEQ ID NO: 2441592 - RNA, 19 nt, Artificial Sequence
  Description of Artificial Sequence: Synthetic oligonucleotide
  Sense strand starting at position 2933 of SEQ ID NO: 1887001
aguguaaacugagucacua

SEQ ID NO: 2441593 - RNA, 19 nt, Artificial Sequence
  Description of Artificial Sequence: Synthetic oligonucleotide
  Antisense strand to SEQ ID NO: 2441592
uagugacucaguuuacacu

SEQ ID NO: 2441594 - RNA, 19 nt, Artificial Sequence
  Description of Artificial Sequence: Synthetic oligonucleotide
  Sense strand starting at position 3377 of SEQ ID NO: 1887001
cuggcugaucgcuagcaga

SEQ ID NO: 2441595 - RNA, 19 nt, Artificial Sequence
  Description of Artificial Sequence: Synthetic oligonucleotide
  Antisense strand to SEQ ID NO: 2441594
ucugcuagcgaucagccag

SEQ ID NO: 2441596 - RNA, 19 nt, Artificial Sequence
  Description of Artificial Sequence: Synthetic oligonucleotide
  Sense strand starting at position 28 of SEQ ID NO: 1887002
gccugagcucaggguucuu

SEQ ID NO: 2441597 - RNA, 19 nt, Artificial Sequence
  Description of Artificial Sequence: Synthetic oligonucleotide
  Antisense strand to SEQ ID NO: 2441596
aagaacccugagcucaggc

SEQ ID NO: 2441598 - RNA, 19 nt, Artificial Sequence
  Description of Artificial Sequence: Synthetic oligonucleotide
  Sense strand starting at position 182 of SEQ ID NO: 1887002
gggccgugugcuccuggaa

SEQ ID NO: 2441599 - RNA, 19 nt, Artificial Sequence
  Description of Artificial Sequence: Synthetic oligonucleotide
  Antisense strand to SEQ ID NO: 2441598
uuccaggagcacacggccc

SEQ ID NO: 2441600 - RNA, 19 nt, Artificial Sequence
  Description of Artificial Sequence: Synthetic oligonucleotide
  Sense strand starting at position 483 of SEQ ID NO: 1887002
gcggcuacuccagguagau

SEQ ID NO: 2441601 - RNA, 19 nt, Artificial Sequence
  Description of Artificial Sequence: Synthetic oligonucleotide
  Antisense strand to SEQ ID NO: 2441600
aucuaccuggaguagccgc

SEQ ID NO: 2441602 - RNA, 19 nt, Artificial Sequence
  Description of Artificial Sequence: Synthetic oligonucleotide
  Sense strand starting at position 485 of SEQ ID NO: 1887002
ggcuacuccagguagauau

SEQ ID NO: 2441603 - RNA, 19 nt, Artificial Sequence
  Description of Artificial Sequence: Synthetic oligonucleotide
  Antisense strand to SEQ ID NO: 2441602
auaucuaccuggaguagcc

SEQ ID NO: 2441604 - RNA, 19 nt, Artificial Sequence
  Description of Artificial Sequence: Synthetic oligonucleotide
  Sense strand starting at position 514 of SEQ ID NO: 1887002
gcagguguacuccacaaac

SEQ ID NO: 2441605 - RNA, 19 nt, Artificial Sequence
  Description of Artificial Sequence: Synthetic oligonucleotide
  Antisense strand to SEQ ID NO: 2441604
guuuguggaguacaccugc

SEQ ID NO: 2441606 - RNA, 19 nt, Artificial Sequence
  Description of Artificial Sequence: Synthetic oligonucleotide
  Sense strand starting at position 524 of SEQ ID NO: 1887002
uccacaaacugcuugugaa

SEQ ID NO: 2441607 - RNA, 19 nt, Artificial Sequence
  Description of Artificial Sequence: Synthetic oligonucleotide
  Antisense strand to SEQ ID NO: 2441606
uucacaagcaguuugugga

SEQ ID NO: 2441608 - RNA, 19 nt, Artificial Sequence
  Description of Artificial Sequence: Synthetic oligonucleotide
  Sense strand starting at position 525 of SEQ ID NO: 1887002
ccacaaacugcuugugaaa

SEQ ID NO: 2441609 - RNA, 19 nt, Artificial Sequence
  Description of Artificial Sequence: Synthetic oligonucleotide
  Antisense strand to SEQ ID NO: 2441608
uuucacaagcaguuugugg

SEQ ID NO: 2441610 - RNA, 19 nt, Artificial Sequence
  Description of Artificial Sequence: Synthetic oligonucleotide
  Sense strand starting at position 658 of SEQ ID NO: 1887002
cuuguuguucuuuggauga

SEQ ID NO: 2441611 - RNA, 19 nt, Artificial Sequence
  Description of Artificial Sequence: Synthetic oligonucleotide
  Antisense strand to SEQ ID NO: 2441610
ucauccaaagaacaacaag

SEQ ID NO: 2441612 - RNA, 19 nt, Artificial Sequence
  Description of Artificial Sequence: Synthetic oligonucleotide
  Sense strand starting at position 662 of SEQ ID NO: 1887002
uuguucuuuggaugauauc

SEQ ID NO: 2441613 - RNA, 19 nt, Artificial Sequence
  Description of Artificial Sequence: Synthetic oligonucleotide
  Antisense strand to SEQ ID NO: 2441612
gauaucauccaaagaacaa

SEQ ID NO: 2441614 - RNA, 19 nt, Artificial Sequence
  Description of Artificial Sequence: Synthetic oligonucleotide
  Sense strand starting at position 669 of SEQ ID NO: 1887002
uuggaugauauccgcggaa

SEQ ID NO: 2441615 - RNA, 19 nt, Artificial Sequence
  Description of Artificial Sequence: Synthetic oligonucleotide
  Antisense strand to SEQ ID NO: 2441614
uuccgcggauaucauccaa

SEQ ID NO: 2441616 - RNA, 19 nt, Artificial Sequence
  Description of Artificial Sequence: Synthetic oligonucleotide
  Sense strand starting at position 671 of SEQ ID NO: 1887002
ggaugauauccgcggaaag

SEQ ID NO: 2441617 - RNA, 19 nt, Artificial Sequence
  Description of Artificial Sequence: Synthetic oligonucleotide
  Antisense strand to SEQ ID NO: 2441616
cuuuccgcggauaucaucc

SEQ ID NO: 2441618 - RNA, 19 nt, Artificial Sequence
  Description of Artificial Sequence: Synthetic oligonucleotide
  Sense strand starting at position 672 of SEQ ID NO: 1887002
gaugauauccgcggaaaga

SEQ ID NO: 2441619 - RNA, 19 nt, Artificial Sequence
  Description of Artificial Sequence: Synthetic oligonucleotide
  Antisense strand to SEQ ID NO: 2441618
ucuuuccgcggauaucauc

SEQ ID NO: 2441620 - RNA, 19 nt, Artificial Sequence
  Description of Artificial Sequence: Synthetic oligonucleotide
  Sense strand starting at position 673 of SEQ ID NO: 1887002
augauauccgcggaaagag

SEQ ID NO: 2441621 - RNA, 19 nt, Artificial Sequence
  Description of Artificial Sequence: Synthetic oligonucleotide
  Antisense strand to SEQ ID NO: 2441620
cucuuuccgcggauaucau

SEQ ID NO: 2441622 - RNA, 19 nt, Artificial Sequence
  Description of Artificial Sequence: Synthetic oligonucleotide
  Sense strand starting at position 780 of SEQ ID NO: 1887002
cgcugaucuccaggacaca

SEQ ID NO: 2441623 - RNA, 19 nt, Artificial Sequence
  Description of Artificial Sequence: Synthetic oligonucleotide
  Antisense strand to SEQ ID NO: 2441622
uguguccuggagaucagcg

SEQ ID NO: 2441624 - RNA, 19 nt, Artificial Sequence
  Description of Artificial Sequence: Synthetic oligonucleotide
  Sense strand starting at position 809 of SEQ ID NO: 1887002
ggguuaaagugcacgguua

SEQ ID NO: 2441625 - RNA, 19 nt, Artificial Sequence
  Description of Artificial Sequence: Synthetic oligonucleotide
  Antisense strand to SEQ ID NO: 2441624
uaaccgugcacuuuaaccc

SEQ ID NO: 2441626 - RNA, 19 nt, Artificial Sequence
  Description of Artificial Sequence: Synthetic oligonucleotide
  Sense strand starting at position 990 of SEQ ID NO: 1887002
uggcguaauaggcaguaaa

SEQ ID NO: 2441627 - RNA, 19 nt, Artificial Sequence
  Description of Artificial Sequence: Synthetic oligonucleotide
  Antisense strand to SEQ ID NO: 2441626
uuuacugccuauuacgcca

SEQ ID NO: 2441628 - RNA, 19 nt, Artificial Sequence
  Description of Artificial Sequence: Synthetic oligonucleotide
  Sense strand starting at position 993 of SEQ ID NO: 1887002
cguaauaggcaguaaagaa

SEQ ID NO: 2441629 - RNA, 19 nt, Artificial Sequence
  Description of Artificial Sequence: Synthetic oligonucleotide
  Antisense strand to SEQ ID NO: 2441628
uucuuuacugccuauuacg

SEQ ID NO: 2441630 - RNA, 19 nt, Artificial Sequence
  Description of Artificial Sequence: Synthetic oligonucleotide
  Sense strand starting at position 1029 of SEQ ID NO: 1887002
gcauguuguaggccucgua

SEQ ID NO: 2441631 - RNA, 19 nt, Artificial Sequence
  Description of Artificial Sequence: Synthetic oligonucleotide
  Antisense strand to SEQ ID NO: 2441630
uacgaggccuacaacaugc

SEQ ID NO: 2441632 - RNA, 19 nt, Artificial Sequence
  Description of Artificial Sequence: Synthetic oligonucleotide
  Sense strand starting at position 1158 of SEQ ID NO: 1887002
gcuccucccgguugaugau

SEQ ID NO: 2441633 - RNA, 19 nt, Artificial Sequence
  Description of Artificial Sequence: Synthetic oligonucleotide
  Antisense strand to SEQ ID NO: 2441632
aucaucaaccgggaggagc

SEQ ID NO: 2441634 - RNA, 19 nt, Artificial Sequence
  Description of Artificial Sequence: Synthetic oligonucleotide
  Sense strand starting at position 1167 of SEQ ID NO: 1887002
gguugaugaugcaggagaa

SEQ ID NO: 2441635 - RNA, 19 nt, Artificial Sequence
  Description of Artificial Sequence: Synthetic oligonucleotide
  Antisense strand to SEQ ID NO: 2441634
uucuccugcaucaucaacc

SEQ ID NO: 2441636 - RNA, 19 nt, Artificial Sequence
  Description of Artificial Sequence: Synthetic oligonucleotide
  Sense strand starting at position 1241 of SEQ ID NO: 1887002
aggaacuucuuggagaaau

SEQ ID NO: 2441637 - RNA, 19 nt, Artificial Sequence
  Description of Artificial Sequence: Synthetic oligonucleotide
  Antisense strand to SEQ ID NO: 2441636
auuucuccaagaaguuccu

SEQ ID NO: 2441638 - RNA, 19 nt, Artificial Sequence
  Description of Artificial Sequence: Synthetic oligonucleotide
  Sense strand starting at position 1277 of SEQ ID NO: 1887002
ggcguggaguccuuggaga

SEQ ID NO: 2441639 - RNA, 19 nt, Artificial Sequence
  Description of Artificial Sequence: Synthetic oligonucleotide
  Antisense strand to SEQ ID NO: 2441638
ucuccaaggacuccacgcc

SEQ ID NO: 2441640 - RNA, 19 nt, Artificial Sequence
  Description of Artificial Sequence: Synthetic oligonucleotide
  Sense strand starting at position 1370 of SEQ ID NO: 1887002
gaggcacaguugucauaga

SEQ ID NO: 2441641 - RNA, 19 nt, Artificial Sequence
  Description of Artificial Sequence: Synthetic oligonucleotide
  Antisense strand to SEQ ID NO: 2441640
ucuaugacaacugugccuc

SEQ ID NO: 2441642 - RNA, 19 nt, Artificial Sequence
  Description of Artificial Sequence: Synthetic oligonucleotide
  Sense strand starting at position 1375 of SEQ ID NO: 1887002
acaguugucauagacgaug

SEQ ID NO: 2441643 - RNA, 19 nt, Artificial Sequence
  Description of Artificial Sequence: Synthetic oligonucleotide
  Antisense strand to SEQ ID NO: 2441642
caucgucuaugacaacugu

SEQ ID NO: 2441644 - RNA, 19 nt, Artificial Sequence
  Description of Artificial Sequence: Synthetic oligonucleotide
  Sense strand starting at position 1410 of SEQ ID NO: 1887002
cacuguagucuccgaagca

SEQ ID NO: 2441645 - RNA, 19 nt, Artificial Sequence
  Description of Artificial Sequence: Synthetic oligonucleotide
  Antisense strand to SEQ ID NO: 2441644
ugcuucggagacuacagug

SEQ ID NO: 2441646 - RNA, 19 nt, Artificial Sequence
  Description of Artificial Sequence: Synthetic oligonucleotide
  Sense strand starting at position 2476 of SEQ ID NO: 1887002
ucaagaaacuuugagauuc

SEQ ID NO: 2441647 - RNA, 19 nt, Artificial Sequence
  Description of Artificial Sequence: Synthetic oligonucleotide
  Antisense strand to SEQ ID NO: 2441646
gaaucucaaaguuucuuga

SEQ ID NO: 2441648 - RNA, 19 nt, Artificial Sequence
  Description of Artificial Sequence: Synthetic oligonucleotide
  Sense strand starting at position 2561 of SEQ ID NO: 1887002
cucaaagguuuauaauaga

SEQ ID NO: 2441649 - RNA, 19 nt, Artificial Sequence
  Description of Artificial Sequence: Synthetic oligonucleotide
  Antisense strand to SEQ ID NO: 2441648
ucuauuauaaaccuuugag

SEQ ID NO: 2441650 - RNA, 19 nt, Artificial Sequence
  Description of Artificial Sequence: Synthetic oligonucleotide
  Sense strand starting at position 2605 of SEQ ID NO: 1887002
aaguuugaagugugauaua

SEQ ID NO: 2441651 - RNA, 19 nt, Artificial Sequence
  Description of Artificial Sequence: Synthetic oligonucleotide
  Antisense strand to SEQ ID NO: 2441650
uauaucacacuucaaacuu

SEQ ID NO: 2441652 - RNA, 19 nt, Artificial Sequence
  Description of Artificial Sequence: Synthetic oligonucleotide
  Sense strand starting at position 2610 of SEQ ID NO: 1887002
ugaagugugauauagugaa

SEQ ID NO: 2441653 - RNA, 19 nt, Artificial Sequence
  Description of Artificial Sequence: Synthetic oligonucleotide
  Antisense strand to SEQ ID NO: 2441652
uucacuauaucacacuuca

SEQ ID NO: 2441654 - RNA, 19 nt, Artificial Sequence
  Description of Artificial Sequence: Synthetic oligonucleotide
  Sense strand starting at position 2614 of SEQ ID NO: 1887002
gugugauauagugaaauau

SEQ ID NO: 2441655 - RNA, 19 nt, Artificial Sequence
  Description of Artificial Sequence: Synthetic oligonucleotide
  Antisense strand to SEQ ID NO: 2441654
auauuucacuauaucacac

SEQ ID NO: 2441656 - RNA, 19 nt, Artificial Sequence
  Description of Artificial Sequence: Synthetic oligonucleotide
  Sense strand starting at position 2649 of SEQ ID NO: 1887002
accucauuuccucguauac

SEQ ID NO: 2441657 - RNA, 19 nt, Artificial Sequence
  Description of Artificial Sequence: Synthetic oligonucleotide
  Antisense strand to SEQ ID NO: 2441656
guauacgaggaaaugaggu

SEQ ID NO: 2441658 - RNA, 19 nt, Artificial Sequence
  Description of Artificial Sequence: Synthetic oligonucleotide
  Sense strand starting at position 2933 of SEQ ID NO: 1887002
gcaggaggauccuuugaaa

SEQ ID NO: 2441659 - RNA, 19 nt, Artificial Sequence
  Description of Artificial Sequence: Synthetic oligonucleotide
  Antisense strand to SEQ ID NO: 2441658
uuucaaaggauccuccugc

SEQ ID NO: 2441660 - RNA, 19 nt, Artificial Sequence
  Description of Artificial Sequence: Synthetic oligonucleotide
  Sense strand starting at position 2936 of SEQ ID NO: 1887002
ggaggauccuuugaaacca

SEQ ID NO: 2441661 - RNA, 19 nt, Artificial Sequence
  Description of Artificial Sequence: Synthetic oligonucleotide
  Antisense strand to SEQ ID NO: 2441660
ugguuucaaaggauccucc

SEQ ID NO: 2441662 - RNA, 19 nt, Artificial Sequence
  Description of Artificial Sequence: Synthetic oligonucleotide
  Sense strand starting at position 3431 of SEQ ID NO: 1887002
gugaccaauuucgauauua

SEQ ID NO: 2441663 - RNA, 19 nt, Artificial Sequence
  Description of Artificial Sequence: Synthetic oligonucleotide
  Antisense strand to SEQ ID NO: 2441662
uaauaucgaaauuggucac

SEQ ID NO: 2441664 - RNA, 19 nt, Artificial Sequence
  Description of Artificial Sequence: Synthetic oligonucleotide
  Sense strand starting at position 3480 of SEQ ID NO: 1887002
augaccaguuuagauaaau

SEQ ID NO: 2441665 - RNA, 19 nt, Artificial Sequence
  Description of Artificial Sequence: Synthetic oligonucleotide
  Antisense strand to SEQ ID NO: 2441664
auuuaucuaaacuggucau

SEQ ID NO: 2441666 - RNA, 19 nt, Artificial Sequence
  Description of Artificial Sequence: Synthetic oligonucleotide
  Sense strand starting at position 3556 of SEQ ID NO: 1887002
guggcuauugaauauugau

SEQ ID NO: 2441667 - RNA, 19 nt, Artificial Sequence
  Description of Artificial Sequence: Synthetic oligonucleotide
  Antisense strand to SEQ ID NO: 2441666
aucaauauucaauagccac

SEQ ID NO: 2441668 - RNA, 19 nt, Artificial Sequence
  Description of Artificial Sequence: Synthetic oligonucleotide
  Sense strand starting at position 3574 of SEQ ID NO: 1887002
uguuguguucaauauagug

SEQ ID NO: 2441669 - RNA, 19 nt, Artificial Sequence
  Description of Artificial Sequence: Synthetic oligonucleotide
  Antisense strand to SEQ ID NO: 2441668
cacuauauugaacacaaca

SEQ ID NO: 2441670 - RNA, 19 nt, Artificial Sequence
  Description of Artificial Sequence: Synthetic oligonucleotide
  Sense strand starting at position 3932 of SEQ ID NO: 1887002
ugcagaguuucuguuuaag

SEQ ID NO: 2441671 - RNA, 19 nt, Artificial Sequence
  Description of Artificial Sequence: Synthetic oligonucleotide
  Antisense strand to SEQ ID NO: 2441670
cuuaaacagaaacucugca

SEQ ID NO: 2441672 - RNA, 19 nt, Artificial Sequence
  Description of Artificial Sequence: Synthetic oligonucleotide
  Sense strand starting at position 3935 of SEQ ID NO: 1887002
agaguuucuguuuaagcca

SEQ ID NO: 2441673 - RNA, 19 nt, Artificial Sequence
  Description of Artificial Sequence: Synthetic oligonucleotide
  Antisense strand to SEQ ID NO: 2441672
uggcuuaaacagaaacucu

SEQ ID NO: 2441674 - RNA, 19 nt, Artificial Sequence
  Description of Artificial Sequence: Synthetic oligonucleotide
  Sense strand starting at position 3938 of SEQ ID NO: 1887002
guuucuguuuaagccauua

SEQ ID NO: 2441675 - RNA, 19 nt, Artificial Sequence
  Description of Artificial Sequence: Synthetic oligonucleotide
  Antisense strand to SEQ ID NO: 2441674
uaauggcuuaaacagaaac

SEQ ID NO: 2441676 - RNA, 19 nt, Artificial Sequence
  Description of Artificial Sequence: Synthetic oligonucleotide
  Sense strand starting at position 2515 of SEQ ID NO: 1887003
ucuugacacugggaauaua

SEQ ID NO: 2441677 - RNA, 19 nt, Artificial Sequence
  Description of Artificial Sequence: Synthetic oligonucleotide
  Antisense strand to SEQ ID NO: 2441676
uauauucccagugucaaga

SEQ ID NO: 2441678 - RNA, 19 nt, Artificial Sequence
  Description of Artificial Sequence: Synthetic oligonucleotide
  Sense strand starting at position 2604 of SEQ ID NO: 1887003
aaguuugaagugugauaua

SEQ ID NO: 2441679 - RNA, 19 nt, Artificial Sequence
  Description of Artificial Sequence: Synthetic oligonucleotide
  Antisense strand to SEQ ID NO: 2441678
uauaucacacuucaaacuu

SEQ ID NO: 2441680 - RNA, 19 nt, Artificial Sequence
  Description of Artificial Sequence: Synthetic oligonucleotide
  Sense strand starting at position 2607 of SEQ ID NO: 1887003
uuugaagugugauauagug

SEQ ID NO: 2441681 - RNA, 19 nt, Artificial Sequence
  Description of Artificial Sequence: Synthetic oligonucleotide
  Antisense strand to SEQ ID NO: 2441680
cacuauaucacacuucaaa

SEQ ID NO: 2441682 - RNA, 19 nt, Artificial Sequence
  Description of Artificial Sequence: Synthetic oligonucleotide
  Sense strand starting at position 2609 of SEQ ID NO: 1887003
ugaagugugauauagugaa

SEQ ID NO: 2441683 - RNA, 19 nt, Artificial Sequence
  Description of Artificial Sequence: Synthetic oligonucleotide
  Antisense strand to SEQ ID NO: 2441682
uucacuauaucacacuuca

SEQ ID NO: 2441684 - RNA, 19 nt, Artificial Sequence
  Description of Artificial Sequence: Synthetic oligonucleotide
  Sense strand starting at position 2682 of SEQ ID NO: 1887003
agugauaucuucuuguaug

SEQ ID NO: 2441685 - RNA, 19 nt, Artificial Sequence
  Description of Artificial Sequence: Synthetic oligonucleotide
  Antisense strand to SEQ ID NO: 2441684
cauacaagaagauaucacu

SEQ ID NO: 2441686 - RNA, 19 nt, Artificial Sequence
  Description of Artificial Sequence: Synthetic oligonucleotide
  Sense strand starting at position 2683 of SEQ ID NO: 1887003
gugauaucuucuuguaugc

SEQ ID NO: 2441687 - RNA, 19 nt, Artificial Sequence
  Description of Artificial Sequence: Synthetic oligonucleotide
  Antisense strand to SEQ ID NO: 2441686
gcauacaagaagauaucac

SEQ ID NO: 2441688 - RNA, 19 nt, Artificial Sequence
  Description of Artificial Sequence: Synthetic oligonucleotide
  Sense strand starting at position 2932 of SEQ ID NO: 1887003
gcaggaggauccuuugaaa

SEQ ID NO: 2441689 - RNA, 19 nt, Artificial Sequence
  Description of Artificial Sequence: Synthetic oligonucleotide
  Antisense strand to SEQ ID NO: 2441688
uuucaaaggauccuccugc

SEQ ID NO: 2441690 - RNA, 19 nt, Artificial Sequence
  Description of Artificial Sequence: Synthetic oligonucleotide
  Sense strand starting at position 3439 of SEQ ID NO: 1887003
ugugaccaauuucgauauu

SEQ ID NO: 2441691 - RNA, 19 nt, Artificial Sequence
  Description of Artificial Sequence: Synthetic oligonucleotide
  Antisense strand to SEQ ID NO: 2441690
aauaucgaaauuggucaca

SEQ ID NO: 2441692 - RNA, 19 nt, Artificial Sequence
  Description of Artificial Sequence: Synthetic oligonucleotide
  Sense strand starting at position 3440 of SEQ ID NO: 1887003
gugaccaauuucgauauua

SEQ ID NO: 2441693 - RNA, 19 nt, Artificial Sequence
  Description of Artificial Sequence: Synthetic oligonucleotide
  Antisense strand to SEQ ID NO: 2441692
uaauaucgaaauuggucac

SEQ ID NO: 2441694 - RNA, 19 nt, Artificial Sequence
  Description of Artificial Sequence: Synthetic oligonucleotide
  Sense strand starting at position 3498 of SEQ ID NO: 1887003
uuagauaaaucgugguccu

SEQ ID NO: 2441695 - RNA, 19 nt, Artificial Sequence
  Description of Artificial Sequence: Synthetic oligonucleotide
  Antisense strand to SEQ ID NO: 2441694
aggaccacgauuuaucuaa

SEQ ID NO: 2441696 - RNA, 19 nt, Artificial Sequence
  Description of Artificial Sequence: Synthetic oligonucleotide
  Sense strand starting at position 3507 of SEQ ID NO: 1887003
ucgugguccugggauggaa

SEQ ID NO: 2441697 - RNA, 19 nt, Artificial Sequence
  Description of Artificial Sequence: Synthetic oligonucleotide
  Antisense strand to SEQ ID NO: 2441696
uuccaucccaggaccacga

SEQ ID NO: 2441698 - RNA, 19 nt, Artificial Sequence
  Description of Artificial Sequence: Synthetic oligonucleotide
  Sense strand starting at position 3561 of SEQ ID NO: 1887003
gagaguggcuauugaacau

SEQ ID NO: 2441699 - RNA, 19 nt, Artificial Sequence
  Description of Artificial Sequence: Synthetic oligonucleotide
  Antisense strand to SEQ ID NO: 2441698
auguucaauagccacucuc

SEQ ID NO: 2441700 - RNA, 19 nt, Artificial Sequence
  Description of Artificial Sequence: Synthetic oligonucleotide
  Sense strand starting at position 3565 of SEQ ID NO: 1887003
guggcuauugaacauugau

SEQ ID NO: 2441701 - RNA, 19 nt, Artificial Sequence
  Description of Artificial Sequence: Synthetic oligonucleotide
  Antisense strand to SEQ ID NO: 2441700
aucaauguucaauagccac

SEQ ID NO: 2441702 - RNA, 19 nt, Artificial Sequence
  Description of Artificial Sequence: Synthetic oligonucleotide
  Sense strand starting at position 3568 of SEQ ID NO: 1887003
gcuauugaacauugauguu

SEQ ID NO: 2441703 - RNA, 19 nt, Artificial Sequence
  Description of Artificial Sequence: Synthetic oligonucleotide
  Antisense strand to SEQ ID NO: 2441702
aacaucaauguucaauagc

SEQ ID NO: 2441704 - RNA, 19 nt, Artificial Sequence
  Description of Artificial Sequence: Synthetic oligonucleotide
  Sense strand starting at position 3574 of SEQ ID NO: 1887003
gaacauugauguuguguuc

SEQ ID NO: 2441705 - RNA, 19 nt, Artificial Sequence
  Description of Artificial Sequence: Synthetic oligonucleotide
  Antisense strand to SEQ ID NO: 2441704
gaacacaacaucaauguuc

SEQ ID NO: 2441706 - RNA, 19 nt, Artificial Sequence
  Description of Artificial Sequence: Synthetic oligonucleotide
  Sense strand starting at position 3583 of SEQ ID NO: 1887003
uguuguguucaauauagug

SEQ ID NO: 2441707 - RNA, 19 nt, Artificial Sequence
  Description of Artificial Sequence: Synthetic oligonucleotide
  Antisense strand to SEQ ID NO: 2441706
cacuauauugaacacaaca

SEQ ID NO: 2441708 - RNA, 19 nt, Artificial Sequence
  Description of Artificial Sequence: Synthetic oligonucleotide
  Sense strand starting at position 3588 of SEQ ID NO: 1887003
uguucaauauagugagggu

SEQ ID NO: 2441709 - RNA, 19 nt, Artificial Sequence
  Description of Artificial Sequence: Synthetic oligonucleotide
  Antisense strand to SEQ ID NO: 2441708
acccucacuauauugaaca

SEQ ID NO: 2441710 - RNA, 19 nt, Artificial Sequence
  Description of Artificial Sequence: Synthetic oligonucleotide
  Sense strand starting at position 495 of SEQ ID NO: 1887004
cuccgagaguucccugaaa

SEQ ID NO: 2441711 - RNA, 19 nt, Artificial Sequence
  Description of Artificial Sequence: Synthetic oligonucleotide
  Antisense strand to SEQ ID NO: 2441710
uuucagggaacucucggag

SEQ ID NO: 2441712 - RNA, 19 nt, Artificial Sequence
  Description of Artificial Sequence: Synthetic oligonucleotide
  Sense strand starting at position 497 of SEQ ID NO: 1887004
ccgagaguucccugaaauu

SEQ ID NO: 2441713 - RNA, 19 nt, Artificial Sequence
  Description of Artificial Sequence: Synthetic oligonucleotide
  Antisense strand to SEQ ID NO: 2441712
aauuucagggaacucucgg

SEQ ID NO: 2441714 - RNA, 19 nt, Artificial Sequence
  Description of Artificial Sequence: Synthetic oligonucleotide
  Sense strand starting at position 566 of SEQ ID NO: 1887004
cggacucucaaagggauua

SEQ ID NO: 2441715 - RNA, 19 nt, Artificial Sequence
  Description of Artificial Sequence: Synthetic oligonucleotide
  Antisense strand to SEQ ID NO: 2441714
uaaucccuuugagaguccg

SEQ ID NO: 2441716 - RNA, 19 nt, Artificial Sequence
  Description of Artificial Sequence: Synthetic oligonucleotide
  Sense strand starting at position 1184 of SEQ ID NO: 1887004
uugacagaauugucauuac

SEQ ID NO: 2441717 - RNA, 19 nt, Artificial Sequence
  Description of Artificial Sequence: Synthetic oligonucleotide
  Antisense strand to SEQ ID NO: 2441716
guaaugacaauucugucaa

SEQ ID NO: 2441718 - RNA, 19 nt, Artificial Sequence
  Description of Artificial Sequence: Synthetic oligonucleotide
  Sense strand starting at position 1241 of SEQ ID NO: 1887004
ucaguacuccagcagguau

SEQ ID NO: 2441719 - RNA, 19 nt, Artificial Sequence
  Description of Artificial Sequence: Synthetic oligonucleotide
  Antisense strand to SEQ ID NO: 2441718
auaccugcuggaguacuga

SEQ ID NO: 2441720 - RNA, 19 nt, Artificial Sequence
  Description of Artificial Sequence: Synthetic oligonucleotide
  Sense strand starting at position 1252 of SEQ ID NO: 1887004
gcagguauucuaguacgcu

SEQ ID NO: 2441721 - RNA, 19 nt, Artificial Sequence
  Description of Artificial Sequence: Synthetic oligonucleotide
  Antisense strand to SEQ ID NO: 2441720
agcguacuagaauaccugc

SEQ ID NO: 2441722 - RNA, 19 nt, Artificial Sequence
  Description of Artificial Sequence: Synthetic oligonucleotide
  Sense strand starting at position 1890 of SEQ ID NO: 1887004
uuucucauuccauggguaa

SEQ ID NO: 2441723 - RNA, 19 nt, Artificial Sequence
  Description of Artificial Sequence: Synthetic oligonucleotide
  Antisense strand to SEQ ID NO: 2441722
uuacccauggaaugagaaa

SEQ ID NO: 2441724 - RNA, 19 nt, Artificial Sequence
  Description of Artificial Sequence: Synthetic oligonucleotide
  Sense strand starting at position 1960 of SEQ ID NO: 1887004
ggcucaugaugagcaaucu

SEQ ID NO: 2441725 - RNA, 19 nt, Artificial Sequence
  Description of Artificial Sequence: Synthetic oligonucleotide
  Antisense strand to SEQ ID NO: 2441724
agauugcucaucaugagcc

SEQ ID NO: 2441726 - RNA, 19 nt, Artificial Sequence
  Description of Artificial Sequence: Synthetic oligonucleotide
  Sense strand starting at position 1966 of SEQ ID NO: 1887004
ugaugagcaaucugggaau

SEQ ID NO: 2441727 - RNA, 19 nt, Artificial Sequence
  Description of Artificial Sequence: Synthetic oligonucleotide
  Antisense strand to SEQ ID NO: 2441726
auucccagauugcucauca

SEQ ID NO: 2441728 - RNA, 19 nt, Artificial Sequence
  Description of Artificial Sequence: Synthetic oligonucleotide
  Sense strand starting at position 1968 of SEQ ID NO: 1887004
augagcaaucugggaaugu

SEQ ID NO: 2441729 - RNA, 19 nt, Artificial Sequence
  Description of Artificial Sequence: Synthetic oligonucleotide
  Antisense strand to SEQ ID NO: 2441728
acauucccagauugcucau

SEQ ID NO: 2441730 - RNA, 19 nt, Artificial Sequence
  Description of Artificial Sequence: Synthetic oligonucleotide
  Sense strand starting at position 1972 of SEQ ID NO: 1887004
gcaaucugggaauguacau

SEQ ID NO: 2441731 - RNA, 19 nt, Artificial Sequence
  Description of Artificial Sequence: Synthetic oligonucleotide
  Antisense strand to SEQ ID NO: 2441730
auguacauucccagauugc

SEQ ID NO: 2441732 - RNA, 19 nt, Artificial Sequence
  Description of Artificial Sequence: Synthetic oligonucleotide
  Sense strand starting at position 2027 of SEQ ID NO: 1887004
ugaugucaugucuaguaau

SEQ ID NO: 2441733 - RNA, 19 nt, Artificial Sequence
  Description of Artificial Sequence: Synthetic oligonucleotide
  Antisense strand to SEQ ID NO: 2441732
auuacuagacaugacauca

SEQ ID NO: 2441734 - RNA, 19 nt, Artificial Sequence
  Description of Artificial Sequence: Synthetic oligonucleotide
  Sense strand starting at position 2037 of SEQ ID NO: 1887004
ucuaguaauuaguccuaag

SEQ ID NO: 2441735 - RNA, 19 nt, Artificial Sequence
  Description of Artificial Sequence: Synthetic oligonucleotide
  Antisense strand to SEQ ID NO: 2441734
cuuaggacuaauuacuaga

SEQ ID NO: 2441736 - RNA, 19 nt, Artificial Sequence
  Description of Artificial Sequence: Synthetic oligonucleotide
  Sense strand starting at position 2669 of SEQ ID NO: 1887004
gaaaguaagacacguugua

SEQ ID NO: 2441737 - RNA, 19 nt, Artificial Sequence
  Description of Artificial Sequence: Synthetic oligonucleotide
  Antisense strand to SEQ ID NO: 2441736
uacaacgugucuuacuuuc

SEQ ID NO: 2441738 - RNA, 19 nt, Artificial Sequence
  Description of Artificial Sequence: Synthetic oligonucleotide
  Sense strand starting at position 2676 of SEQ ID NO: 1887004
agacacguuguauauaaga

SEQ ID NO: 2441739 - RNA, 19 nt, Artificial Sequence
  Description of Artificial Sequence: Synthetic oligonucleotide
  Antisense strand to SEQ ID NO: 2441738
ucuuauauacaacgugucu

SEQ ID NO: 2441740 - RNA, 19 nt, Artificial Sequence
  Description of Artificial Sequence: Synthetic oligonucleotide
  Sense strand starting at position 2721 of SEQ ID NO: 1887004
guaaauacauuguuuggaa

SEQ ID NO: 2441741 - RNA, 19 nt, Artificial Sequence
  Description of Artificial Sequence: Synthetic oligonucleotide
  Antisense strand to SEQ ID NO: 2441740
uuccaaacaauguauuuac

SEQ ID NO: 2441742 - RNA, 19 nt, Artificial Sequence
  Description of Artificial Sequence: Synthetic oligonucleotide
  Sense strand starting at position 2723 of SEQ ID NO: 1887004
aaauacauuguuuggaagu

SEQ ID NO: 2441743 - RNA, 19 nt, Artificial Sequence
  Description of Artificial Sequence: Synthetic oligonucleotide
  Antisense strand to SEQ ID NO: 2441742
acuuccaaacaauguauuu

SEQ ID NO: 2441744 - RNA, 19 nt, Artificial Sequence
  Description of Artificial Sequence: Synthetic oligonucleotide
  Sense strand starting at position 2737 of SEQ ID NO: 1887004
gaaguaauguugucaacau

SEQ ID NO: 2441745 - RNA, 19 nt, Artificial Sequence
  Description of Artificial Sequence: Synthetic oligonucleotide
  Antisense strand to SEQ ID NO: 2441744
auguugacaacauuacuuc

SEQ ID NO: 2441746 - RNA, 19 nt, Artificial Sequence
  Description of Artificial Sequence: Synthetic oligonucleotide
  Sense strand starting at position 2824 of SEQ ID NO: 1887004
gacagaaugugauugugca

SEQ ID NO: 2441747 - RNA, 19 nt, Artificial Sequence
  Description of Artificial Sequence: Synthetic oligonucleotide
  Antisense strand to SEQ ID NO: 2441746
ugcacaaucacauucuguc

SEQ ID NO: 2441748 - RNA, 19 nt, Artificial Sequence
  Description of Artificial Sequence: Synthetic oligonucleotide
  Sense strand starting at position 2825 of SEQ ID NO: 1887004
acagaaugugauugugcau

SEQ ID NO: 2441749 - RNA, 19 nt, Artificial Sequence
  Description of Artificial Sequence: Synthetic oligonucleotide
  Antisense strand to SEQ ID NO: 2441748
augcacaaucacauucugu

SEQ ID NO: 2441750 - RNA, 19 nt, Artificial Sequence
  Description of Artificial Sequence: Synthetic oligonucleotide
  Sense strand starting at position 2971 of SEQ ID NO: 1887004
cuguaaugagugugaauaa

SEQ ID NO: 2441751 - RNA, 19 nt, Artificial Sequence
  Description of Artificial Sequence: Synthetic oligonucleotide
  Antisense strand to SEQ ID NO: 2441750
uuauucacacucauuacag

SEQ ID NO: 2441752 - RNA, 19 nt, Artificial Sequence
  Description of Artificial Sequence: Synthetic oligonucleotide
  Sense strand starting at position 3063 of SEQ ID NO: 1887004
gguccugggacagaucuuu

SEQ ID NO: 2441753 - RNA, 19 nt, Artificial Sequence
  Description of Artificial Sequence: Synthetic oligonucleotide
  Antisense strand to SEQ ID NO: 2441752
aaagaucugucccaggacc

SEQ ID NO: 2441754 - RNA, 19 nt, Artificial Sequence
  Description of Artificial Sequence: Synthetic oligonucleotide
  Sense strand starting at position 3068 of SEQ ID NO: 1887004
ugggacagaucuuuccuuu

SEQ ID NO: 2441755 - RNA, 19 nt, Artificial Sequence
  Description of Artificial Sequence: Synthetic oligonucleotide
  Antisense strand to SEQ ID NO: 2441754
aaaggaaagaucuguccca

SEQ ID NO: 2441756 - RNA, 19 nt, Artificial Sequence
  Description of Artificial Sequence: Synthetic oligonucleotide
  Sense strand starting at position 3071 of SEQ ID NO: 1887004
gacagaucuuuccuuugag

SEQ ID NO: 2441757 - RNA, 19 nt, Artificial Sequence
  Description of Artificial Sequence: Synthetic oligonucleotide
  Antisense strand to SEQ ID NO: 2441756
cucaaaggaaagaucuguc

SEQ ID NO: 2441758 - RNA, 19 nt, Artificial Sequence
  Description of Artificial Sequence: Synthetic oligonucleotide
  Sense strand starting at position 3072 of SEQ ID NO: 1887004
acagaucuuuccuuugaga

SEQ ID NO: 2441759 - RNA, 19 nt, Artificial Sequence
  Description of Artificial Sequence: Synthetic oligonucleotide
  Antisense strand to SEQ ID NO: 2441758
ucucaaaggaaagaucugu

SEQ ID NO: 2441760 - RNA, 19 nt, Artificial Sequence
  Description of Artificial Sequence: Synthetic oligonucleotide
  Sense strand starting at position 3074 of SEQ ID NO: 1887004
agaucuuuccuuugagaag

SEQ ID NO: 2441761 - RNA, 19 nt, Artificial Sequence
  Description of Artificial Sequence: Synthetic oligonucleotide
  Antisense strand to SEQ ID NO: 2441760
cuucucaaaggaaagaucu

SEQ ID NO: 2441762 - RNA, 19 nt, Artificial Sequence
  Description of Artificial Sequence: Synthetic oligonucleotide
  Sense strand starting at position 3119 of SEQ ID NO: 1887004
ucuguugcauuucuaguaa

SEQ ID NO: 2441763 - RNA, 19 nt, Artificial Sequence
  Description of Artificial Sequence: Synthetic oligonucleotide
  Antisense strand to SEQ ID NO: 2441762
uuacuagaaaugcaacaga

SEQ ID NO: 2441764 - RNA, 19 nt, Artificial Sequence
  Description of Artificial Sequence: Synthetic oligonucleotide
  Sense strand starting at position 3278 of SEQ ID NO: 1887004
cugucuucuccucacugau

SEQ ID NO: 2441765 - RNA, 19 nt, Artificial Sequence
  Description of Artificial Sequence: Synthetic oligonucleotide
  Antisense strand to SEQ ID NO: 2441764
aucagugaggagaagacag

SEQ ID NO: 2441766 - RNA, 19 nt, Artificial Sequence
  Description of Artificial Sequence: Synthetic oligonucleotide
  Sense strand starting at position 3288 of SEQ ID NO: 1887004
cucacugaugcacauagau

SEQ ID NO: 2441767 - RNA, 19 nt, Artificial Sequence
  Description of Artificial Sequence: Synthetic oligonucleotide
  Antisense strand to SEQ ID NO: 2441766
aucuaugugcaucagugag

SEQ ID NO: 2441768 - RNA, 19 nt, Artificial Sequence
  Description of Artificial Sequence: Synthetic oligonucleotide
  Sense strand starting at position 3417 of SEQ ID NO: 1887004
uguguacggcuugauagaa

SEQ ID NO: 2441769 - RNA, 19 nt, Artificial Sequence
  Description of Artificial Sequence: Synthetic oligonucleotide
  Antisense strand to SEQ ID NO: 2441768
uucuaucaagccguacaca

SEQ ID NO: 2441770 - RNA, 19 nt, Artificial Sequence
  Description of Artificial Sequence: Synthetic oligonucleotide
  Sense strand starting at position 3698 of SEQ ID NO: 1887004
aauaaauuaucugugggca

SEQ ID NO: 2441771 - RNA, 19 nt, Artificial Sequence
  Description of Artificial Sequence: Synthetic oligonucleotide
  Antisense strand to SEQ ID NO: 2441770
ugcccacagauaauuuauu

SEQ ID NO: 2441772 - RNA, 19 nt, Artificial Sequence
  Description of Artificial Sequence: Synthetic oligonucleotide
  Sense strand starting at position 3699 of SEQ ID NO: 1887004
auaaauuaucugugggcau

SEQ ID NO: 2441773 - RNA, 19 nt, Artificial Sequence
  Description of Artificial Sequence: Synthetic oligonucleotide
  Antisense strand to SEQ ID NO: 2441772
augcccacagauaauuuau

SEQ ID NO: 2441774 - RNA, 19 nt, Artificial Sequence
  Description of Artificial Sequence: Synthetic oligonucleotide
  Sense strand starting at position 3701 of SEQ ID NO: 1887004
aaauuaucugugggcauca

SEQ ID NO: 2441775 - RNA, 19 nt, Artificial Sequence
  Description of Artificial Sequence: Synthetic oligonucleotide
  Antisense strand to SEQ ID NO: 2441774
ugaugcccacagauaauuu

SEQ ID NO: 2441776 - RNA, 19 nt, Artificial Sequence
  Description of Artificial Sequence: Synthetic oligonucleotide
  Sense strand starting at position 3702 of SEQ ID NO: 1887004
aauuaucugugggcaucau

SEQ ID NO: 2441777 - RNA, 19 nt, Artificial Sequence
  Description of Artificial Sequence: Synthetic oligonucleotide
  Antisense strand to SEQ ID NO: 2441776
augaugcccacagauaauu

SEQ ID NO: 2441778 - RNA, 19 nt, Artificial Sequence
  Description of Artificial Sequence: Synthetic oligonucleotide
  Sense strand starting at position 3706 of SEQ ID NO: 1887004
aucugugggcaucaugaaa

SEQ ID NO: 2441779 - RNA, 19 nt, Artificial Sequence
  Description of Artificial Sequence: Synthetic oligonucleotide
  Antisense strand to SEQ ID NO: 2441778
uuucaugaugcccacagau

SEQ ID NO: 2441780 - RNA, 19 nt, Artificial Sequence
  Description of Artificial Sequence: Synthetic oligonucleotide
  Sense strand starting at position 3728 of SEQ ID NO: 1887004
guggauaauguacaacuuu

SEQ ID NO: 2441781 - RNA, 19 nt, Artificial Sequence
  Description of Artificial Sequence: Synthetic oligonucleotide
  Antisense strand to SEQ ID NO: 2441780
aaaguuguacauuauccac

SEQ ID NO: 2441782 - RNA, 19 nt, Artificial Sequence
  Description of Artificial Sequence: Synthetic oligonucleotide
  Sense strand starting at position 3750 of SEQ ID NO: 1887004
gagcuugacaguuggugaa

SEQ ID NO: 2441783 - RNA, 19 nt, Artificial Sequence
  Description of Artificial Sequence: Synthetic oligonucleotide
  Antisense strand to SEQ ID NO: 2441782
uucaccaacugucaagcuc

SEQ ID NO: 2441784 - RNA, 19 nt, Artificial Sequence
  Description of Artificial Sequence: Synthetic oligonucleotide
  Sense strand starting at position 3927 of SEQ ID NO: 1887004
ccuugucacuuccuagaua

SEQ ID NO: 2441785 - RNA, 19 nt, Artificial Sequence
  Description of Artificial Sequence: Synthetic oligonucleotide
  Antisense strand to SEQ ID NO: 2441784
uaucuaggaagugacaagg

SEQ ID NO: 2441786 - RNA, 19 nt, Artificial Sequence
  Description of Artificial Sequence: Synthetic oligonucleotide
  Sense strand starting at position 3955 of SEQ ID NO: 1887004
uuaauuaacuccucagugu

SEQ ID NO: 2441787 - RNA, 19 nt, Artificial Sequence
  Description of Artificial Sequence: Synthetic oligonucleotide
  Antisense strand to SEQ ID NO: 2441786
acacugaggaguuaauuaa

SEQ ID NO: 2441788 - RNA, 19 nt, Artificial Sequence
  Description of Artificial Sequence: Synthetic oligonucleotide
  Sense strand starting at position 3971 of SEQ ID NO: 1887004
uguucuuaucuguagaaug

SEQ ID NO: 2441789 - RNA, 19 nt, Artificial Sequence
  Description of Artificial Sequence: Synthetic oligonucleotide
  Antisense strand to SEQ ID NO: 2441788
cauucuacagauaagaaca

SEQ ID NO: 2441790 - RNA, 19 nt, Artificial Sequence
  Description of Artificial Sequence: Synthetic oligonucleotide
  Sense strand starting at position 2434 of SEQ ID NO: 1887005
gcucgaguccucguuucag

SEQ ID NO: 2441791 - RNA, 19 nt, Artificial Sequence
  Description of Artificial Sequence: Synthetic oligonucleotide
  Antisense strand to SEQ ID NO: 2441790
cugaaacgaggacucgagc

SEQ ID NO: 2441792 - RNA, 19 nt, Artificial Sequence
  Description of Artificial Sequence: Synthetic oligonucleotide
  Sense strand starting at position 2873 of SEQ ID NO: 1887005
ggaaaugacuuagggaaag

SEQ ID NO: 2441793 - RNA, 19 nt, Artificial Sequence
  Description of Artificial Sequence: Synthetic oligonucleotide
  Antisense strand to SEQ ID NO: 2441792
cuuucccuaagucauuucc

SEQ ID NO: 2441794 - RNA, 19 nt, Artificial Sequence
  Description of Artificial Sequence: Synthetic oligonucleotide
  Sense strand starting at position 3682 of SEQ ID NO: 1887005
gcagcuguuuaagagcaaa

SEQ ID NO: 2441795 - RNA, 19 nt, Artificial Sequence
  Description of Artificial Sequence: Synthetic oligonucleotide
  Antisense strand to SEQ ID NO: 2441794
uuugcucuuaaacagcugc

SEQ ID NO: 2441796 - RNA, 19 nt, Artificial Sequence
  Description of Artificial Sequence: Synthetic oligonucleotide
  Sense strand starting at position 81 of SEQ ID NO: 1887006
gcccuuugauuugcagcaa

SEQ ID NO: 2441797 - RNA, 19 nt, Artificial Sequence
  Description of Artificial Sequence: Synthetic oligonucleotide
  Antisense strand to SEQ ID NO: 2441796
uugcugcaaaucaaagggc

SEQ ID NO: 2441798 - RNA, 19 nt, Artificial Sequence
  Description of Artificial Sequence: Synthetic oligonucleotide
  Sense strand starting at position 105 of SEQ ID NO: 1887006
ggagccuucccugggacau

SEQ ID NO: 2441799 - RNA, 19 nt, Artificial Sequence
  Description of Artificial Sequence: Synthetic oligonucleotide
  Antisense strand to SEQ ID NO: 2441798
augucccagggaaggcucc

SEQ ID NO: 2441800 - RNA, 19 nt, Artificial Sequence
  Description of Artificial Sequence: Synthetic oligonucleotide
  Sense strand starting at position 439 of SEQ ID NO: 1887006
aggaccuaagcaugucaau

SEQ ID NO: 2441801 - RNA, 19 nt, Artificial Sequence
  Description of Artificial Sequence: Synthetic oligonucleotide
  Antisense strand to SEQ ID NO: 2441800
auugacaugcuuagguccu

SEQ ID NO: 2441802 - RNA, 19 nt, Artificial Sequence
  Description of Artificial Sequence: Synthetic oligonucleotide
  Sense strand starting at position 611 of SEQ ID NO: 1887006
ugcagauucugacucagaa

SEQ ID NO: 2441803 - RNA, 19 nt, Artificial Sequence
  Description of Artificial Sequence: Synthetic oligonucleotide
  Antisense strand to SEQ ID NO: 2441802
uucugagucagaaucugca

SEQ ID NO: 2441804 - RNA, 19 nt, Artificial Sequence
  Description of Artificial Sequence: Synthetic oligonucleotide
  Sense strand starting at position 653 of SEQ ID NO: 1887006
cugcauuuccaguaagcuc

SEQ ID NO: 2441805 - RNA, 19 nt, Artificial Sequence
  Description of Artificial Sequence: Synthetic oligonucleotide
  Antisense strand to SEQ ID NO: 2441804
gagcuuacuggaaaugcag

SEQ ID NO: 2441806 - RNA, 19 nt, Artificial Sequence
  Description of Artificial Sequence: Synthetic oligonucleotide
  Sense strand starting at position 725 of SEQ ID NO: 1887006
uccagacuuugguucucaa

SEQ ID NO: 2441807 - RNA, 19 nt, Artificial Sequence
  Description of Artificial Sequence: Synthetic oligonucleotide
  Antisense strand to SEQ ID NO: 2441806
uugagaaccaaagucugga

SEQ ID NO: 2441808 - RNA, 19 nt, Artificial Sequence
  Description of Artificial Sequence: Synthetic oligonucleotide
  Sense strand starting at position 752 of SEQ ID NO: 1887006
agcagucaccaaggagaua

SEQ ID NO: 2441809 - RNA, 19 nt, Artificial Sequence
  Description of Artificial Sequence: Synthetic oligonucleotide
  Antisense strand to SEQ ID NO: 2441808
uaucuccuuggugacugcu

SEQ ID NO: 2441810 - RNA, 19 nt, Artificial Sequence
  Description of Artificial Sequence: Synthetic oligonucleotide
  Sense strand starting at position 789 of SEQ ID NO: 1887006
ggaugaagucagugagauu

SEQ ID NO: 2441811 - RNA, 19 nt, Artificial Sequence
  Description of Artificial Sequence: Synthetic oligonucleotide
  Antisense strand to SEQ ID NO: 2441810
aaucucacugacuucaucc

SEQ ID NO: 2441812 - RNA, 19 nt, Artificial Sequence
  Description of Artificial Sequence: Synthetic oligonucleotide
  Sense strand starting at position 800 of SEQ ID NO: 1887006
gugagauucucuuccauga

SEQ ID NO: 2441813 - RNA, 19 nt, Artificial Sequence
  Description of Artificial Sequence: Synthetic oligonucleotide
  Antisense strand to SEQ ID NO: 2441812
ucauggaagagaaucucac

SEQ ID NO: 2441814 - RNA, 19 nt, Artificial Sequence
  Description of Artificial Sequence: Synthetic oligonucleotide
  Sense strand starting at position 805 of SEQ ID NO: 1887006
auucucuuccaugauugua

SEQ ID NO: 2441815 - RNA, 19 nt, Artificial Sequence
  Description of Artificial Sequence: Synthetic oligonucleotide
  Antisense strand to SEQ ID NO: 2441814
uacaaucauggaagagaau

SEQ ID NO: 2441816 - RNA, 19 nt, Artificial Sequence
  Description of Artificial Sequence: Synthetic oligonucleotide
  Sense strand starting at position 960 of SEQ ID NO: 1887006
cccucuagagcggaaauaa

SEQ ID NO: 2441817 - RNA, 19 nt, Artificial Sequence
  Description of Artificial Sequence: Synthetic oligonucleotide
  Antisense strand to SEQ ID NO: 2441816
uuauuuccgcucuagaggg

SEQ ID NO: 2441818 - RNA, 19 nt, Artificial Sequence
  Description of Artificial Sequence: Synthetic oligonucleotide
  Sense strand starting at position 1187 of SEQ ID NO: 1887006
gcaugagaugcuggaaaug

SEQ ID NO: 2441819 - RNA, 19 nt, Artificial Sequence
  Description of Artificial Sequence: Synthetic oligonucleotide
  Antisense strand to SEQ ID NO: 2441818
cauuuccagcaucucaugc

SEQ ID NO: 2441820 - RNA, 19 nt, Artificial Sequence
  Description of Artificial Sequence: Synthetic oligonucleotide
  Sense strand starting at position 1399 of SEQ ID NO: 1887006
guggauaagagaggucuau

SEQ ID NO: 2441821 - RNA, 19 nt, Artificial Sequence
  Description of Artificial Sequence: Synthetic oligonucleotide
  Antisense strand to SEQ ID NO: 2441820
auagaccucucuuauccac

SEQ ID NO: 2441822 - RNA, 19 nt, Artificial Sequence
  Description of Artificial Sequence: Synthetic oligonucleotide
  Sense strand starting at position 1429 of SEQ ID NO: 1887006
gcccuaagaguuuaugauu

SEQ ID NO: 2441823 - RNA, 19 nt, Artificial Sequence
  Description of Artificial Sequence: Synthetic oligonucleotide
  Antisense strand to SEQ ID NO: 2441822
aaucauaaacucuuagggc

SEQ ID NO: 2441824 - RNA, 19 nt, Artificial Sequence
  Description of Artificial Sequence: Synthetic oligonucleotide
  Sense strand starting at position 1437 of SEQ ID NO: 1887006
aguuuaugauucucugaca

SEQ ID NO: 2441825 - RNA, 19 nt, Artificial Sequence
  Description of Artificial Sequence: Synthetic oligonucleotide
  Antisense strand to SEQ ID NO: 2441824
ugucagagaaucauaaacu

SEQ ID NO: 2441826 - RNA, 19 nt, Artificial Sequence
  Description of Artificial Sequence: Synthetic oligonucleotide
  Sense strand starting at position 1438 of SEQ ID NO: 1887006
guuuaugauucucugacau

SEQ ID NO: 2441827 - RNA, 19 nt, Artificial Sequence
  Description of Artificial Sequence: Synthetic oligonucleotide
  Antisense strand to SEQ ID NO: 2441826
augucagagaaucauaaac

SEQ ID NO: 2441828 - RNA, 19 nt, Artificial Sequence
  Description of Artificial Sequence: Synthetic oligonucleotide
  Sense strand starting at position 1569 of SEQ ID NO: 1887006
ccagaaagugccugauaga

SEQ ID NO: 2441829 - RNA, 19 nt, Artificial Sequence
  Description of Artificial Sequence: Synthetic oligonucleotide
  Antisense strand to SEQ ID NO: 2441828
ucuaucaggcacuuucugg

SEQ ID NO: 2441830 - RNA, 19 nt, Artificial Sequence
  Description of Artificial Sequence: Synthetic oligonucleotide
  Sense strand starting at position 1576 of SEQ ID NO: 1887006
gugccugauagagacaagu

SEQ ID NO: 2441831 - RNA, 19 nt, Artificial Sequence
  Description of Artificial Sequence: Synthetic oligonucleotide
  Antisense strand to SEQ ID NO: 2441830
acuugucucuaucaggcac

SEQ ID NO: 2441832 - RNA, 19 nt, Artificial Sequence
  Description of Artificial Sequence: Synthetic oligonucleotide
  Sense strand starting at position 1578 of SEQ ID NO: 1887006
gccugauagagacaagucu

SEQ ID NO: 2441833 - RNA, 19 nt, Artificial Sequence
  Description of Artificial Sequence: Synthetic oligonucleotide
  Antisense strand to SEQ ID NO: 2441832
agacuugucucuaucaggc

SEQ ID NO: 2441834 - RNA, 19 nt, Artificial Sequence
  Description of Artificial Sequence: Synthetic oligonucleotide
  Sense strand starting at position 1611 of SEQ ID NO: 1887006
gcuuucugagaagacguua

SEQ ID NO: 2441835 - RNA, 19 nt, Artificial Sequence
  Description of Artificial Sequence: Synthetic oligonucleotide
  Antisense strand to SEQ ID NO: 2441834
uaacgucuucucagaaagc

SEQ ID NO: 2441836 - RNA, 19 nt, Artificial Sequence
  Description of Artificial Sequence: Synthetic oligonucleotide
  Sense strand starting at position 1619 of SEQ ID NO: 1887006
agaagacguuaggaaauuu

SEQ ID NO: 2441837 - RNA, 19 nt, Artificial Sequence
  Description of Artificial Sequence: Synthetic oligonucleotide
  Antisense strand to SEQ ID NO: 2441836
aaauuuccuaacgucuucu

SEQ ID NO: 2441838 - RNA, 19 nt, Artificial Sequence
  Description of Artificial Sequence: Synthetic oligonucleotide
  Sense strand starting at position 1667 of SEQ ID NO: 1887006
augaaaguugacgagucuu

SEQ ID NO: 2441839 - RNA, 19 nt, Artificial Sequence
  Description of Artificial Sequence: Synthetic oligonucleotide
  Antisense strand to SEQ ID NO: 2441838
aagacucgucaacuuucau

SEQ ID NO: 2441840 - RNA, 19 nt, Artificial Sequence
  Description of Artificial Sequence: Synthetic oligonucleotide
  Sense strand starting at position 2283 of SEQ ID NO: 1887006
ugagaagagcccuaagcuu

SEQ ID NO: 2441841 - RNA, 19 nt, Artificial Sequence
  Description of Artificial Sequence: Synthetic oligonucleotide
  Antisense strand to SEQ ID NO: 2441840
aagcuuagggcucuucuca

SEQ ID NO: 2441842 - RNA, 19 nt, Artificial Sequence
  Description of Artificial Sequence: Synthetic oligonucleotide
  Sense strand starting at position 2386 of SEQ ID NO: 1887006
auugaaaucaaugguuggu

SEQ ID NO: 2441843 - RNA, 19 nt, Artificial Sequence
  Description of Artificial Sequence: Synthetic oligonucleotide
  Antisense strand to SEQ ID NO: 2441842
accaaccauugauuucaau

SEQ ID NO: 2441844 - RNA, 19 nt, Artificial Sequence
  Description of Artificial Sequence: Synthetic oligonucleotide
  Sense strand starting at position 2388 of SEQ ID NO: 1887006
ugaaaucaaugguugguuu

SEQ ID NO: 2441845 - RNA, 19 nt, Artificial Sequence
  Description of Artificial Sequence: Synthetic oligonucleotide
  Antisense strand to SEQ ID NO: 2441844
aaaccaaccauugauuuca

SEQ ID NO: 2441846 - RNA, 19 nt, Artificial Sequence
  Description of Artificial Sequence: Synthetic oligonucleotide
  Sense strand starting at position 2931 of SEQ ID NO: 1887006
gaaauuauacuuugaguug

SEQ ID NO: 2441847 - RNA, 19 nt, Artificial Sequence
  Description of Artificial Sequence: Synthetic oligonucleotide
  Antisense strand to SEQ ID NO: 2441846
caacucaaaguauaauuuc

SEQ ID NO: 2441848 - RNA, 19 nt, Artificial Sequence
  Description of Artificial Sequence: Synthetic oligonucleotide
  Sense strand starting at position 3063 of SEQ ID NO: 1887006
uacuucucucgugaugaau

SEQ ID NO: 2441849 - RNA, 19 nt, Artificial Sequence
  Description of Artificial Sequence: Synthetic oligonucleotide
  Antisense strand to SEQ ID NO: 2441848
auucaucacgagagaagua

SEQ ID NO: 2441850 - RNA, 19 nt, Artificial Sequence
  Description of Artificial Sequence: Synthetic oligonucleotide
  Sense strand starting at position 3071 of SEQ ID NO: 1887006
ucgugaugaauccaggcaa

SEQ ID NO: 2441851 - RNA, 19 nt, Artificial Sequence
  Description of Artificial Sequence: Synthetic oligonucleotide
  Antisense strand to SEQ ID NO: 2441850
uugccuggauucaucacga

SEQ ID NO: 2441852 - RNA, 19 nt, Artificial Sequence
  Description of Artificial Sequence: Synthetic oligonucleotide
  Sense strand starting at position 3312 of SEQ ID NO: 1887006
guugguucugaauaaucug

SEQ ID NO: 2441853 - RNA, 19 nt, Artificial Sequence
  Description of Artificial Sequence: Synthetic oligonucleotide
  Antisense strand to SEQ ID NO: 2441852
cagauuauucagaaccaac

SEQ ID NO: 2441854 - RNA, 19 nt, Artificial Sequence
  Description of Artificial Sequence: Synthetic oligonucleotide
  Sense strand starting at position 3315 of SEQ ID NO: 1887006
gguucugaauaaucugaag

SEQ ID NO: 2441855 - RNA, 19 nt, Artificial Sequence
  Description of Artificial Sequence: Synthetic oligonucleotide
  Antisense strand to SEQ ID NO: 2441854
cuucagauuauucagaacc

SEQ ID NO: 2441856 - RNA, 19 nt, Artificial Sequence
  Description of Artificial Sequence: Synthetic oligonucleotide
  Sense strand starting at position 3361 of SEQ ID NO: 1887006
gggauaacauugcuuccua

SEQ ID NO: 2441857 - RNA, 19 nt, Artificial Sequence
  Description of Artificial Sequence: Synthetic oligonucleotide
  Antisense strand to SEQ ID NO: 2441856
uaggaagcaauguuauccc

SEQ ID NO: 2441858 - RNA, 19 nt, Artificial Sequence
  Description of Artificial Sequence: Synthetic oligonucleotide
  Sense strand starting at position 3362 of SEQ ID NO: 1887006
ggauaacauugcuuccuau

SEQ ID NO: 2441859 - RNA, 19 nt, Artificial Sequence
  Description of Artificial Sequence: Synthetic oligonucleotide
  Antisense strand to SEQ ID NO: 2441858
auaggaagcaauguuaucc

SEQ ID NO: 2441860 - RNA, 19 nt, Artificial Sequence
  Description of Artificial Sequence: Synthetic oligonucleotide
  Sense strand starting at position 3394 of SEQ ID NO: 1887006
ugacuuauuggucagggua

SEQ ID NO: 2441861 - RNA, 19 nt, Artificial Sequence
  Description of Artificial Sequence: Synthetic oligonucleotide
  Antisense strand to SEQ ID NO: 2441860
uacccugaccaauaaguca

SEQ ID NO: 2441862 - RNA, 19 nt, Artificial Sequence
  Description of Artificial Sequence: Synthetic oligonucleotide
  Sense strand starting at position 3397 of SEQ ID NO: 1887006
cuuauuggucaggguaaca

SEQ ID NO: 2441863 - RNA, 19 nt, Artificial Sequence
  Description of Artificial Sequence: Synthetic oligonucleotide
  Antisense strand to SEQ ID NO: 2441862
uguuacccugaccaauaag

SEQ ID NO: 2441864 - RNA, 19 nt, Artificial Sequence
  Description of Artificial Sequence: Synthetic oligonucleotide
  Sense strand starting at position 3666 of SEQ ID NO: 1887006
uuuaucucagucuagucaa

SEQ ID NO: 2441865 - RNA, 19 nt, Artificial Sequence
  Description of Artificial Sequence: Synthetic oligonucleotide
  Antisense strand to SEQ ID NO: 2441864
uugacuagacugagauaaa

SEQ ID NO: 2441866 - RNA, 19 nt, Artificial Sequence
  Description of Artificial Sequence: Synthetic oligonucleotide
  Sense strand starting at position 3720 of SEQ ID NO: 1887006
auggcaaauuggccugaga

SEQ ID NO: 2441867 - RNA, 19 nt, Artificial Sequence
  Description of Artificial Sequence: Synthetic oligonucleotide
  Antisense strand to SEQ ID NO: 2441866
ucucaggccaauuugccau

SEQ ID NO: 2441868 - RNA, 19 nt, Artificial Sequence
  Description of Artificial Sequence: Synthetic oligonucleotide
  Sense strand starting at position 3722 of SEQ ID NO: 1887006
ggcaaauuggccugagaaa

SEQ ID NO: 2441869 - RNA, 19 nt, Artificial Sequence
  Description of Artificial Sequence: Synthetic oligonucleotide
  Antisense strand to SEQ ID NO: 2441868
uuucucaggccaauuugcc

SEQ ID NO: 2441870 - RNA, 19 nt, Artificial Sequence
  Description of Artificial Sequence: Synthetic oligonucleotide
  Sense strand starting at position 3723 of SEQ ID NO: 1887006
gcaaauuggccugagaaau

SEQ ID NO: 2441871 - RNA, 19 nt, Artificial Sequence
  Description of Artificial Sequence: Synthetic oligonucleotide
  Antisense strand to SEQ ID NO: 2441870
auuucucaggccaauuugc

SEQ ID NO: 2441872 - RNA, 19 nt, Artificial Sequence
  Description of Artificial Sequence: Synthetic oligonucleotide
  Sense strand starting at position 3802 of SEQ ID NO: 1887006
cagugcagaguccaagaua

SEQ ID NO: 2441873 - RNA, 19 nt, Artificial Sequence
  Description of Artificial Sequence: Synthetic oligonucleotide
  Antisense strand to SEQ ID NO: 2441872
uaucuuggacucugcacug

SEQ ID NO: 2441874 - RNA, 19 nt, Artificial Sequence
  Description of Artificial Sequence: Synthetic oligonucleotide
  Sense strand starting at position 3857 of SEQ ID NO: 1887006
gaagauaaggucuaucgcu

SEQ ID NO: 2441875 - RNA, 19 nt, Artificial Sequence
  Description of Artificial Sequence: Synthetic oligonucleotide
  Antisense strand to SEQ ID NO: 2441874
agcgauagaccuuaucuuc

SEQ ID NO: 2441876 - RNA, 19 nt, Artificial Sequence
  Description of Artificial Sequence: Synthetic oligonucleotide
  Sense strand starting at position 1989 of SEQ ID NO: 1887007
gaaugcugagcuugacagu

SEQ ID NO: 2441877 - RNA, 19 nt, Artificial Sequence
  Description of Artificial Sequence: Synthetic oligonucleotide
  Antisense strand to SEQ ID NO: 2441876
acugucaagcucagcauuc

SEQ ID NO: 2441878 - RNA, 19 nt, Artificial Sequence
  Description of Artificial Sequence: Synthetic oligonucleotide
  Sense strand starting at position 2306 of SEQ ID NO: 1887007
acuguaacguuggacaagu

SEQ ID NO: 2441879 - RNA, 19 nt, Artificial Sequence
  Description of Artificial Sequence: Synthetic oligonucleotide
  Antisense strand to SEQ ID NO: 2441878
acuuguccaacguuacagu

SEQ ID NO: 2441880 - RNA, 19 nt, Artificial Sequence
  Description of Artificial Sequence: Synthetic oligonucleotide
  Sense strand starting at position 2352 of SEQ ID NO: 1887007
ggugaauggucaccucaug

SEQ ID NO: 2441881 - RNA, 19 nt, Artificial Sequence
  Description of Artificial Sequence: Synthetic oligonucleotide
  Antisense strand to SEQ ID NO: 2441880
caugaggugaccauucacc

SEQ ID NO: 2441882 - RNA, 19 nt, Artificial Sequence
  Description of Artificial Sequence: Synthetic oligonucleotide
  Sense strand starting at position 2399 of SEQ ID NO: 1887007
auagaagacucuggaaguu

SEQ ID NO: 2441883 - RNA, 19 nt, Artificial Sequence
  Description of Artificial Sequence: Synthetic oligonucleotide
  Antisense strand to SEQ ID NO: 2441882
aacuuccagagucuucuau

SEQ ID NO: 2441884 - RNA, 19 nt, Artificial Sequence
  Description of Artificial Sequence: Synthetic oligonucleotide
  Sense strand starting at position 2628 of SEQ ID NO: 1887007
cuugguagguucugaaauu

SEQ ID NO: 2441885 - RNA, 19 nt, Artificial Sequence
  Description of Artificial Sequence: Synthetic oligonucleotide
  Antisense strand to SEQ ID NO: 2441884
aauuucagaaccuaccaag

SEQ ID NO: 2441886 - RNA, 19 nt, Artificial Sequence
  Description of Artificial Sequence: Synthetic oligonucleotide
  Sense strand starting at position 2629 of SEQ ID NO: 1887007
uugguagguucugaaauua

SEQ ID NO: 2441887 - RNA, 19 nt, Artificial Sequence
  Description of Artificial Sequence: Synthetic oligonucleotide
  Antisense strand to SEQ ID NO: 2441886
uaauuucagaaccuaccaa

SEQ ID NO: 2441888 - RNA, 19 nt, Artificial Sequence
  Description of Artificial Sequence: Synthetic oligonucleotide
  Sense strand starting at position 2637 of SEQ ID NO: 1887007
uucugaaauuaugguaauc

SEQ ID NO: 2441889 - RNA, 19 nt, Artificial Sequence
  Description of Artificial Sequence: Synthetic oligonucleotide
  Antisense strand to SEQ ID NO: 2441888
gauuaccauaauuucagaa

SEQ ID NO: 2441890 - RNA, 19 nt, Artificial Sequence
  Description of Artificial Sequence: Synthetic oligonucleotide
  Sense strand starting at position 2639 of SEQ ID NO: 1887007
cugaaauuaugguaaucuc

SEQ ID NO: 2441891 - RNA, 19 nt, Artificial Sequence
  Description of Artificial Sequence: Synthetic oligonucleotide
  Antisense strand to SEQ ID NO: 2441890
gagauuaccauaauuucag

SEQ ID NO: 2441892 - RNA, 19 nt, Artificial Sequence
  Description of Artificial Sequence: Synthetic oligonucleotide
  Sense strand starting at position 2682 of SEQ ID NO: 1887007
gcuguaaugcugggcaagu

SEQ ID NO: 2441893 - RNA, 19 nt, Artificial Sequence
  Description of Artificial Sequence: Synthetic oligonucleotide
  Antisense strand to SEQ ID NO: 2441892
acuugcccagcauuacagc

SEQ ID NO: 2441894 - RNA, 19 nt, Artificial Sequence
  Description of Artificial Sequence: Synthetic oligonucleotide
  Sense strand starting at position 2742 of SEQ ID NO: 1887007
ucaugcuuugauggaguuu

SEQ ID NO: 2441895 - RNA, 19 nt, Artificial Sequence
  Description of Artificial Sequence: Synthetic oligonucleotide
  Antisense strand to SEQ ID NO: 2441894
aaacuccaucaaagcauga

SEQ ID NO: 2441896 - RNA, 19 nt, Artificial Sequence
  Description of Artificial Sequence: Synthetic oligonucleotide
  Sense strand starting at position 2992 of SEQ ID NO: 1887007
cucuaauuggguugaggaa

SEQ ID NO: 2441897 - RNA, 19 nt, Artificial Sequence
  Description of Artificial Sequence: Synthetic oligonucleotide
  Antisense strand to SEQ ID NO: 2441896
uuccucaacccaauuagag

SEQ ID NO: 2441898 - RNA, 19 nt, Artificial Sequence
  Description of Artificial Sequence: Synthetic oligonucleotide
  Sense strand starting at position 3050 of SEQ ID NO: 1887007
gccuguuccuggcuugaca

SEQ ID NO: 2441899 - RNA, 19 nt, Artificial Sequence
  Description of Artificial Sequence: Synthetic oligonucleotide
  Antisense strand to SEQ ID NO: 2441898
ugucaagccaggaacaggc

SEQ ID NO: 2441900 - RNA, 19 nt, Artificial Sequence
  Description of Artificial Sequence: Synthetic oligonucleotide
  Sense strand starting at position 3052 of SEQ ID NO: 1887007
cuguuccuggcuugacaua

SEQ ID NO: 2441901 - RNA, 19 nt, Artificial Sequence
  Description of Artificial Sequence: Synthetic oligonucleotide
  Antisense strand to SEQ ID NO: 2441900
uaugucaagccaggaacag

SEQ ID NO: 2441902 - RNA, 19 nt, Artificial Sequence
  Description of Artificial Sequence: Synthetic oligonucleotide
  Sense strand starting at position 3053 of SEQ ID NO: 1887007
uguuccuggcuugacauaa

SEQ ID NO: 2441903 - RNA, 19 nt, Artificial Sequence
  Description of Artificial Sequence: Synthetic oligonucleotide
  Antisense strand to SEQ ID NO: 2441902
uuaugucaagccaggaaca

SEQ ID NO: 2441904 - RNA, 19 nt, Artificial Sequence
  Description of Artificial Sequence: Synthetic oligonucleotide
  Sense strand starting at position 3075 of SEQ ID NO: 1887007
ccuucuggcucuggaguua

SEQ ID NO: 2441905 - RNA, 19 nt, Artificial Sequence
  Description of Artificial Sequence: Synthetic oligonucleotide
  Antisense strand to SEQ ID NO: 2441904
uaacuccagagccagaagg

SEQ ID NO: 2441906 - RNA, 19 nt, Artificial Sequence
  Description of Artificial Sequence: Synthetic oligonucleotide
  Sense strand starting at position 3112 of SEQ ID NO: 1887007
cagguuugacugugacacu

SEQ ID NO: 2441907 - RNA, 19 nt, Artificial Sequence
  Description of Artificial Sequence: Synthetic oligonucleotide
  Antisense strand to SEQ ID NO: 2441906
agugucacagucaaaccug

SEQ ID NO: 2441908 - RNA, 19 nt, Artificial Sequence
  Description of Artificial Sequence: Synthetic oligonucleotide
  Sense strand starting at position 3135 of SEQ ID NO: 1887007
aagugugagugcugagcuu

SEQ ID NO: 2441909 - RNA, 19 nt, Artificial Sequence
  Description of Artificial Sequence: Synthetic oligonucleotide
  Antisense strand to SEQ ID NO: 2441908
aagcucagcacucacacuu

SEQ ID NO: 2441910 - RNA, 19 nt, Artificial Sequence
  Description of Artificial Sequence: Synthetic oligonucleotide
  Sense strand starting at position 3186 of SEQ ID NO: 1887007
ugauguaucaauggcagag

SEQ ID NO: 2441911 - RNA, 19 nt, Artificial Sequence
  Description of Artificial Sequence: Synthetic oligonucleotide
  Antisense strand to SEQ ID NO: 2441910
cucugccauugauacauca

SEQ ID NO: 2441912 - RNA, 19 nt, Artificial Sequence
  Description of Artificial Sequence: Synthetic oligonucleotide
  Sense strand starting at position 3242 of SEQ ID NO: 1887007
ggccuccugcucuguugaa

SEQ ID NO: 2441913 - RNA, 19 nt, Artificial Sequence
  Description of Artificial Sequence: Synthetic oligonucleotide
  Antisense strand to SEQ ID NO: 2441912
uucaacagagcaggaggcc

SEQ ID NO: 2441914 - RNA, 19 nt, Artificial Sequence
  Description of Artificial Sequence: Synthetic oligonucleotide
  Sense strand starting at position 3249 of SEQ ID NO: 1887007
ugcucuguugaagaagagu

SEQ ID NO: 2441915 - RNA, 19 nt, Artificial Sequence
  Description of Artificial Sequence: Synthetic oligonucleotide
  Antisense strand to SEQ ID NO: 2441914
acucuucuucaacagagca

SEQ ID NO: 2441916 - RNA, 19 nt, Artificial Sequence
  Description of Artificial Sequence: Synthetic oligonucleotide
  Sense strand starting at position 3307 of SEQ ID NO: 1887007
gaagaagguucugccucuu

SEQ ID NO: 2441917 - RNA, 19 nt, Artificial Sequence
  Description of Artificial Sequence: Synthetic oligonucleotide
  Antisense strand to SEQ ID NO: 2441916
aagaggcagaaccuucuuc

SEQ ID NO: 2441918 - RNA, 19 nt, Artificial Sequence
  Description of Artificial Sequence: Synthetic oligonucleotide
  Sense strand starting at position 3500 of SEQ ID NO: 1887007
ugcgauacacuguauccau

SEQ ID NO: 2441919 - RNA, 19 nt, Artificial Sequence
  Description of Artificial Sequence: Synthetic oligonucleotide
  Antisense strand to SEQ ID NO: 2441918
auggauacaguguaucgca

SEQ ID NO: 2441920 - RNA, 19 nt, Artificial Sequence
  Description of Artificial Sequence: Synthetic oligonucleotide
  Sense strand starting at position 3547 of SEQ ID NO: 1887007
guuuguuucugacacugag

SEQ ID NO: 2441921 - RNA, 19 nt, Artificial Sequence
  Description of Artificial Sequence: Synthetic oligonucleotide
  Antisense strand to SEQ ID NO: 2441920
cucagugucagaaacaaac

SEQ ID NO: 2441922 - RNA, 19 nt, Artificial Sequence
  Description of Artificial Sequence: Synthetic oligonucleotide
  Sense strand starting at position 3573 of SEQ ID NO: 1887007
uacaaauagguguggaguu

SEQ ID NO: 2441923 - RNA, 19 nt, Artificial Sequence
  Description of Artificial Sequence: Synthetic oligonucleotide
  Antisense strand to SEQ ID NO: 2441922
aacuccacaccuauuugua

SEQ ID NO: 2441924 - RNA, 19 nt, Artificial Sequence
  Description of Artificial Sequence: Synthetic oligonucleotide
  Sense strand starting at position 3583 of SEQ ID NO: 1887007
uguggaguuccacacaaca

SEQ ID NO: 2441925 - RNA, 19 nt, Artificial Sequence
  Description of Artificial Sequence: Synthetic oligonucleotide
  Antisense strand to SEQ ID NO: 2441924
uguuguguggaacuccaca

SEQ ID NO: 2441926 - RNA, 19 nt, Artificial Sequence
  Description of Artificial Sequence: Synthetic oligonucleotide
  Sense strand starting at position 3615 of SEQ ID NO: 1887007
ucagauacuuagcuagauc

SEQ ID NO: 2441927 - RNA, 19 nt, Artificial Sequence
  Description of Artificial Sequence: Synthetic oligonucleotide
  Antisense strand to SEQ ID NO: 2441926
gaucuagcuaaguaucuga

SEQ ID NO: 2441928 - RNA, 19 nt, Artificial Sequence
  Description of Artificial Sequence: Synthetic oligonucleotide
  Sense strand starting at position 3656 of SEQ ID NO: 1887007
acaguaaacuugguugcuu

SEQ ID NO: 2441929 - RNA, 19 nt, Artificial Sequence
  Description of Artificial Sequence: Synthetic oligonucleotide
  Antisense strand to SEQ ID NO: 2441928
aagcaaccaaguuuacugu

SEQ ID NO: 2441930 - RNA, 19 nt, Artificial Sequence
  Description of Artificial Sequence: Synthetic oligonucleotide
  Sense strand starting at position 125 of SEQ ID NO: 1887008
augugaaauugguuuagaa

SEQ ID NO: 2441931 - RNA, 19 nt, Artificial Sequence
  Description of Artificial Sequence: Synthetic oligonucleotide
  Antisense strand to SEQ ID NO: 2441930
uucuaaaccaauuucacau

SEQ ID NO: 2441932 - RNA, 19 nt, Artificial Sequence
  Description of Artificial Sequence: Synthetic oligonucleotide
  Sense strand starting at position 127 of SEQ ID NO: 1887008
gugaaauugguuuagaagc

SEQ ID NO: 2441933 - RNA, 19 nt, Artificial Sequence
  Description of Artificial Sequence: Synthetic oligonucleotide
  Antisense strand to SEQ ID NO: 2441932
gcuucuaaaccaauuucac

SEQ ID NO: 2441934 - RNA, 19 nt, Artificial Sequence
  Description of Artificial Sequence: Synthetic oligonucleotide
  Sense strand starting at position 211 of SEQ ID NO: 1887008
cugucucucaucuguggua

SEQ ID NO: 2441935 - RNA, 19 nt, Artificial Sequence
  Description of Artificial Sequence: Synthetic oligonucleotide
  Antisense strand to SEQ ID NO: 2441934
uaccacagaugagagacag

SEQ ID NO: 2441936 - RNA, 19 nt, Artificial Sequence
  Description of Artificial Sequence: Synthetic oligonucleotide
  Sense strand starting at position 295 of SEQ ID NO: 1887008
gccuuaugcucuuggcuga

SEQ ID NO: 2441937 - RNA, 19 nt, Artificial Sequence
  Description of Artificial Sequence: Synthetic oligonucleotide
  Antisense strand to SEQ ID NO: 2441936
ucagccaagagcauaaggc

SEQ ID NO: 2441938 - RNA, 19 nt, Artificial Sequence
  Description of Artificial Sequence: Synthetic oligonucleotide
  Sense strand starting at position 296 of SEQ ID NO: 1887008
ccuuaugcucuuggcugaa

SEQ ID NO: 2441939 - RNA, 19 nt, Artificial Sequence
  Description of Artificial Sequence: Synthetic oligonucleotide
  Antisense strand to SEQ ID NO: 2441938
uucagccaagagcauaagg

SEQ ID NO: 2441940 - RNA, 19 nt, Artificial Sequence
  Description of Artificial Sequence: Synthetic oligonucleotide
  Sense strand starting at position 332 of SEQ ID NO: 1887008
uggcguuucccgcuaacuu

SEQ ID NO: 2441941 - RNA, 19 nt, Artificial Sequence
  Description of Artificial Sequence: Synthetic oligonucleotide
  Antisense strand to SEQ ID NO: 2441940
aaguuagcgggaaacgcca

SEQ ID NO: 2441942 - RNA, 19 nt, Artificial Sequence
  Description of Artificial Sequence: Synthetic oligonucleotide
  Sense strand starting at position 420 of SEQ ID NO: 1887008
ggcagcguucuccacagau

SEQ ID NO: 2441943 - RNA, 19 nt, Artificial Sequence
  Description of Artificial Sequence: Synthetic oligonucleotide
  Antisense strand to SEQ ID NO: 2441942
aucuguggagaacgcugcc

SEQ ID NO: 2441944 - RNA, 19 nt, Artificial Sequence
  Description of Artificial Sequence: Synthetic oligonucleotide
  Sense strand starting at position 548 of SEQ ID NO: 1887008
ggccuacaguuugaaucuu

SEQ ID NO: 2441945 - RNA, 19 nt, Artificial Sequence
  Description of Artificial Sequence: Synthetic oligonucleotide
  Antisense strand to SEQ ID NO: 2441944
aagauucaaacuguaggcc

SEQ ID NO: 2441946 - RNA, 19 nt, Artificial Sequence
  Description of Artificial Sequence: Synthetic oligonucleotide
  Sense strand starting at position 597 of SEQ ID NO: 1887008
aaugaacgguaguaacauu

SEQ ID NO: 2441947 - RNA, 19 nt, Artificial Sequence
  Description of Artificial Sequence: Synthetic oligonucleotide
  Antisense strand to SEQ ID NO: 2441946
aauguuacuaccguucauu

SEQ ID NO: 2441948 - RNA, 19 nt, Artificial Sequence
  Description of Artificial Sequence: Synthetic oligonucleotide
  Sense strand starting at position 627 of SEQ ID NO: 1887008
uagguuuacugcugagaaa

SEQ ID NO: 2441949 - RNA, 19 nt, Artificial Sequence
  Description of Artificial Sequence: Synthetic oligonucleotide
  Antisense strand to SEQ ID NO: 2441948
uuucucagcaguaaaccua

SEQ ID NO: 2441950 - RNA, 19 nt, Artificial Sequence
  Description of Artificial Sequence: Synthetic oligonucleotide
  Sense strand starting at position 628 of SEQ ID NO: 1887008
agguuuacugcugagaaau

SEQ ID NO: 2441951 - RNA, 19 nt, Artificial Sequence
  Description of Artificial Sequence: Synthetic oligonucleotide
  Antisense strand to SEQ ID NO: 2441950
auuucucagcaguaaaccu

SEQ ID NO: 2441952 - RNA, 19 nt, Artificial Sequence
  Description of Artificial Sequence: Synthetic oligonucleotide
  Sense strand starting at position 630 of SEQ ID NO: 1887008
guuuacugcugagaaauau

SEQ ID NO: 2441953 - RNA, 19 nt, Artificial Sequence
  Description of Artificial Sequence: Synthetic oligonucleotide
  Antisense strand to SEQ ID NO: 2441952
auauuucucagcaguaaac

SEQ ID NO: 2441954 - RNA, 19 nt, Artificial Sequence
  Description of Artificial Sequence: Synthetic oligonucleotide
  Sense strand starting at position 639 of SEQ ID NO: 1887008
ugagaaauauggcaaaugu

SEQ ID NO: 2441955 - RNA, 19 nt, Artificial Sequence
  Description of Artificial Sequence: Synthetic oligonucleotide
  Antisense strand to SEQ ID NO: 2441954
acauuugccauauuucuca

SEQ ID NO: 2441956 - RNA, 19 nt, Artificial Sequence
  Description of Artificial Sequence: Synthetic oligonucleotide
  Sense strand starting at position 863 of SEQ ID NO: 1887008
gacugcuuugcucgugaaa

SEQ ID NO: 2441957 - RNA, 19 nt, Artificial Sequence
  Description of Artificial Sequence: Synthetic oligonucleotide
  Antisense strand to SEQ ID NO: 2441956
uuucacgagcaaagcaguc

SEQ ID NO: 2441958 - RNA, 19 nt, Artificial Sequence
  Description of Artificial Sequence: Synthetic oligonucleotide
  Sense strand starting at position 865 of SEQ ID NO: 1887008
cugcuuugcucgugaaaga

SEQ ID NO: 2441959 - RNA, 19 nt, Artificial Sequence
  Description of Artificial Sequence: Synthetic oligonucleotide
  Antisense strand to SEQ ID NO: 2441958
ucuuucacgagcaaagcag

SEQ ID NO: 2441960 - RNA, 19 nt, Artificial Sequence
  Description of Artificial Sequence: Synthetic oligonucleotide
  Sense strand starting at position 866 of SEQ ID NO: 1887008
ugcuuugcucgugaaagau

SEQ ID NO: 2441961 - RNA, 19 nt, Artificial Sequence
  Description of Artificial Sequence: Synthetic oligonucleotide
  Antisense strand to SEQ ID NO: 2441960
aucuuucacgagcaaagca

SEQ ID NO: 2441962 - RNA, 19 nt, Artificial Sequence
  Description of Artificial Sequence: Synthetic oligonucleotide
  Sense strand starting at position 1043 of SEQ ID NO: 1887008
cggccaucuacuuggaaca

SEQ ID NO: 2441963 - RNA, 19 nt, Artificial Sequence
  Description of Artificial Sequence: Synthetic oligonucleotide
  Antisense strand to SEQ ID NO: 2441962
uguuccaaguagauggccg

SEQ ID NO: 2441964 - RNA, 19 nt, Artificial Sequence
  Description of Artificial Sequence: Synthetic oligonucleotide
  Sense strand starting at position 1044 of SEQ ID NO: 1887008
ggccaucuacuuggaacau

SEQ ID NO: 2441965 - RNA, 19 nt, Artificial Sequence
  Description of Artificial Sequence: Synthetic oligonucleotide
  Antisense strand to SEQ ID NO: 2441964
auguuccaaguagauggcc

SEQ ID NO: 2441966 - RNA, 19 nt, Artificial Sequence
  Description of Artificial Sequence: Synthetic oligonucleotide
  Sense strand starting at position 1045 of SEQ ID NO: 1887008
gccaucuacuuggaacauu

SEQ ID NO: 2441967 - RNA, 19 nt, Artificial Sequence
  Description of Artificial Sequence: Synthetic oligonucleotide
  Antisense strand to SEQ ID NO: 2441966
aauguuccaaguagauggc

SEQ ID NO: 2441968 - RNA, 19 nt, Artificial Sequence
  Description of Artificial Sequence: Synthetic oligonucleotide
  Sense strand starting at position 2176 of SEQ ID NO: 1887008
gagcguuuguucugugaac

SEQ ID NO: 2441969 - RNA, 19 nt, Artificial Sequence
  Description of Artificial Sequence: Synthetic oligonucleotide
  Antisense strand to SEQ ID NO: 2441968
guucacagaacaaacgcuc

SEQ ID NO: 2441970 - RNA, 19 nt, Artificial Sequence
  Description of Artificial Sequence: Synthetic oligonucleotide
  Sense strand starting at position 2177 of SEQ ID NO: 1887008
agcguuuguucugugaaca

SEQ ID NO: 2441971 - RNA, 19 nt, Artificial Sequence
  Description of Artificial Sequence: Synthetic oligonucleotide
  Antisense strand to SEQ ID NO: 2441970
uguucacagaacaaacgcu

SEQ ID NO: 2441972 - RNA, 19 nt, Artificial Sequence
  Description of Artificial Sequence: Synthetic oligonucleotide
  Sense strand starting at position 2178 of SEQ ID NO: 1887008
gcguuuguucugugaacag

SEQ ID NO: 2441973 - RNA, 19 nt, Artificial Sequence
  Description of Artificial Sequence: Synthetic oligonucleotide
  Antisense strand to SEQ ID NO: 2441972
cuguucacagaacaaacgc

SEQ ID NO: 2441974 - RNA, 19 nt, Artificial Sequence
  Description of Artificial Sequence: Synthetic oligonucleotide
  Sense strand starting at position 2254 of SEQ ID NO: 1887008
uccauucuauuagaagagu

SEQ ID NO: 2441975 - RNA, 19 nt, Artificial Sequence
  Description of Artificial Sequence: Synthetic oligonucleotide
  Antisense strand to SEQ ID NO: 2441974
acucuucuaauagaaugga

SEQ ID NO: 2441976 - RNA, 19 nt, Artificial Sequence
  Description of Artificial Sequence: Synthetic oligonucleotide
  Sense strand starting at position 2517 of SEQ ID NO: 1887008
uguuaauguuauucucuag

SEQ ID NO: 2441977 - RNA, 19 nt, Artificial Sequence
  Description of Artificial Sequence: Synthetic oligonucleotide
  Antisense strand to SEQ ID NO: 2441976
cuagagaauaacauuaaca

SEQ ID NO: 2441978 - RNA, 19 nt, Artificial Sequence
  Description of Artificial Sequence: Synthetic oligonucleotide
  Sense strand starting at position 2754 of SEQ ID NO: 1887008
acaauuuaucaccgcgcaa

SEQ ID NO: 2441979 - RNA, 19 nt, Artificial Sequence
  Description of Artificial Sequence: Synthetic oligonucleotide
  Antisense strand to SEQ ID NO: 2441978
uugcgcggugauaaauugu

SEQ ID NO: 2441980 - RNA, 19 nt, Artificial Sequence
  Description of Artificial Sequence: Synthetic oligonucleotide
  Sense strand starting at position 3141 of SEQ ID NO: 1887008
gacagugauuaguaguuua

SEQ ID NO: 2441981 - RNA, 19 nt, Artificial Sequence
  Description of Artificial Sequence: Synthetic oligonucleotide
  Antisense strand to SEQ ID NO: 2441980
uaaacuacuaaucacuguc

SEQ ID NO: 2441982 - RNA, 19 nt, Artificial Sequence
  Description of Artificial Sequence: Synthetic oligonucleotide
  Sense strand starting at position 3326 of SEQ ID NO: 1887008
agcuuaguuuaaccucgau

SEQ ID NO: 2441983 - RNA, 19 nt, Artificial Sequence
  Description of Artificial Sequence: Synthetic oligonucleotide
  Antisense strand to SEQ ID NO: 2441982
aucgagguuaaacuaagcu

SEQ ID NO: 2441984 - RNA, 19 nt, Artificial Sequence
  Description of Artificial Sequence: Synthetic oligonucleotide
  Sense strand starting at position 3329 of SEQ ID NO: 1887008
uuaguuuaaccucgauugu

SEQ ID NO: 2441985 - RNA, 19 nt, Artificial Sequence
  Description of Artificial Sequence: Synthetic oligonucleotide
  Antisense strand to SEQ ID NO: 2441984
acaaucgagguuaaacuaa

SEQ ID NO: 2441986 - RNA, 19 nt, Artificial Sequence
  Description of Artificial Sequence: Synthetic oligonucleotide
  Sense strand starting at position 3336 of SEQ ID NO: 1887008
aaccucgauuguggaguua

SEQ ID NO: 2441987 - RNA, 19 nt, Artificial Sequence
  Description of Artificial Sequence: Synthetic oligonucleotide
  Antisense strand to SEQ ID NO: 2441986
uaacuccacaaucgagguu

SEQ ID NO: 2441988 - RNA, 19 nt, Artificial Sequence
  Description of Artificial Sequence: Synthetic oligonucleotide
  Sense strand starting at position 3363 of SEQ ID NO: 1887008
caaagauugcauuggucaa

SEQ ID NO: 2441989 - RNA, 19 nt, Artificial Sequence
  Description of Artificial Sequence: Synthetic oligonucleotide
  Antisense strand to SEQ ID NO: 2441988
uugaccaaugcaaucuuug

SEQ ID NO: 2441990 - RNA, 19 nt, Artificial Sequence
  Description of Artificial Sequence: Synthetic oligonucleotide
  Sense strand starting at position 3365 of SEQ ID NO: 1887008
aagauugcauuggucaaau

SEQ ID NO: 2441991 - RNA, 19 nt, Artificial Sequence
  Description of Artificial Sequence: Synthetic oligonucleotide
  Antisense strand to SEQ ID NO: 2441990
auuugaccaaugcaaucuu

SEQ ID NO: 2441992 - RNA, 19 nt, Artificial Sequence
  Description of Artificial Sequence: Synthetic oligonucleotide
  Sense strand starting at position 3449 of SEQ ID NO: 1887008
auccacgaagagugauaua

SEQ ID NO: 2441993 - RNA, 19 nt, Artificial Sequence
  Description of Artificial Sequence: Synthetic oligonucleotide
  Antisense strand to SEQ ID NO: 2441992
uauaucacucuucguggau

SEQ ID NO: 2441994 - RNA, 19 nt, Artificial Sequence
  Description of Artificial Sequence: Synthetic oligonucleotide
  Sense strand starting at position 3452 of SEQ ID NO: 1887008
cacgaagagugauauagaa

SEQ ID NO: 2441995 - RNA, 19 nt, Artificial Sequence
  Description of Artificial Sequence: Synthetic oligonucleotide
  Antisense strand to SEQ ID NO: 2441994
uucuauaucacucuucgug

SEQ ID NO: 2441996 - RNA, 19 nt, Artificial Sequence
  Description of Artificial Sequence: Synthetic oligonucleotide
  Sense strand starting at position 3554 of SEQ ID NO: 1887008
cuuugcaaccaucagugua

SEQ ID NO: 2441997 - RNA, 19 nt, Artificial Sequence
  Description of Artificial Sequence: Synthetic oligonucleotide
  Antisense strand to SEQ ID NO: 2441996
uacacugaugguugcaaag

SEQ ID NO: 2441998 - RNA, 19 nt, Artificial Sequence
  Description of Artificial Sequence: Synthetic oligonucleotide
  Sense strand starting at position 3556 of SEQ ID NO: 1887008
uugcaaccaucaguguaau

SEQ ID NO: 2441999 - RNA, 19 nt, Artificial Sequence
  Description of Artificial Sequence: Synthetic oligonucleotide
  Antisense strand to SEQ ID NO: 2441998
auuacacugaugguugcaa

SEQ ID NO: 2442000 - RNA, 19 nt, Artificial Sequence
  Description of Artificial Sequence: Synthetic oligonucleotide
  Sense strand starting at position 3557 of SEQ ID NO: 1887008
ugcaaccaucaguguaaua

SEQ ID NO: 2442001 - RNA, 19 nt, Artificial Sequence
  Description of Artificial Sequence: Synthetic oligonucleotide
  Antisense strand to SEQ ID NO: 2442000
uauuacacugaugguugca

SEQ ID NO: 2442002 - RNA, 19 nt, Artificial Sequence
  Description of Artificial Sequence: Synthetic oligonucleotide
  Sense strand starting at position 3562 of SEQ ID NO: 1887008
ccaucaguguaauacaaau

SEQ ID NO: 2442003 - RNA, 19 nt, Artificial Sequence
  Description of Artificial Sequence: Synthetic oligonucleotide
  Antisense strand to SEQ ID NO: 2442002
auuuguauuacacugaugg

SEQ ID NO: 2442004 - RNA, 19 nt, Artificial Sequence
  Description of Artificial Sequence: Synthetic oligonucleotide
  Sense strand starting at position 81 of SEQ ID NO: 1887009
gcuacaaacuccuuaggua

SEQ ID NO: 2442005 - RNA, 19 nt, Artificial Sequence
  Description of Artificial Sequence: Synthetic oligonucleotide
  Antisense strand to SEQ ID NO: 2442004
uaccuaaggaguuuguagc

SEQ ID NO: 2442006 - RNA, 19 nt, Artificial Sequence
  Description of Artificial Sequence: Synthetic oligonucleotide
  Sense strand starting at position 201 of SEQ ID NO: 1887009
guugaacugugacuugaau

SEQ ID NO: 2442007 - RNA, 19 nt, Artificial Sequence
  Description of Artificial Sequence: Synthetic oligonucleotide
  Antisense strand to SEQ ID NO: 2442006
auucaagucacaguucaac

SEQ ID NO: 2442008 - RNA, 19 nt, Artificial Sequence
  Description of Artificial Sequence: Synthetic oligonucleotide
  Sense strand starting at position 214 of SEQ ID NO: 1887009
uugaaucagguuugaaugu

SEQ ID NO: 2442009 - RNA, 19 nt, Artificial Sequence
  Description of Artificial Sequence: Synthetic oligonucleotide
  Antisense strand to SEQ ID NO: 2442008
acauucaaaccugauucaa

SEQ ID NO: 2442010 - RNA, 19 nt, Artificial Sequence
  Description of Artificial Sequence: Synthetic oligonucleotide
  Sense strand starting at position 227 of SEQ ID NO: 1887009
gaauguagagucugaaccu

SEQ ID NO: 2442011 - RNA, 19 nt, Artificial Sequence
  Description of Artificial Sequence: Synthetic oligonucleotide
  Antisense strand to SEQ ID NO: 2442010
agguucagacucuacauuc

SEQ ID NO: 2442012 - RNA, 19 nt, Artificial Sequence
  Description of Artificial Sequence: Synthetic oligonucleotide
  Sense strand starting at position 255 of SEQ ID NO: 1887009
guggaagugucaucucagg

SEQ ID NO: 2442013 - RNA, 19 nt, Artificial Sequence
  Description of Artificial Sequence: Synthetic oligonucleotide
  Antisense strand to SEQ ID NO: 2442012
ccugagaugacacuuccac

SEQ ID NO: 2442014 - RNA, 19 nt, Artificial Sequence
  Description of Artificial Sequence: Synthetic oligonucleotide
  Sense strand starting at position 436 of SEQ ID NO: 1887009
ucuugauauacuggagguu

SEQ ID NO: 2442015 - RNA, 19 nt, Artificial Sequence
  Description of Artificial Sequence: Synthetic oligonucleotide
  Antisense strand to SEQ ID NO: 2442014
aaccuccaguauaucaaga

SEQ ID NO: 2442016 - RNA, 19 nt, Artificial Sequence
  Description of Artificial Sequence: Synthetic oligonucleotide
  Sense strand starting at position 457 of SEQ ID NO: 1887009
gguacaaauuccuuaggag

SEQ ID NO: 2442017 - RNA, 19 nt, Artificial Sequence
  Description of Artificial Sequence: Synthetic oligonucleotide
  Antisense strand to SEQ ID NO: 2442016
cuccuaaggaauuuguacc

SEQ ID NO: 2442018 - RNA, 19 nt, Artificial Sequence
  Description of Artificial Sequence: Synthetic oligonucleotide
  Sense strand starting at position 524 of SEQ ID NO: 1887009
uggauucuggagugaugau

SEQ ID NO: 2442019 - RNA, 19 nt, Artificial Sequence
  Description of Artificial Sequence: Synthetic oligonucleotide
  Antisense strand to SEQ ID NO: 2442018
aucaucacuccagaaucca

SEQ ID NO: 2442020 - RNA, 19 nt, Artificial Sequence
  Description of Artificial Sequence: Synthetic oligonucleotide
  Sense strand starting at position 614 of SEQ ID NO: 1887009
uuggaauugucaccucaua

SEQ ID NO: 2442021 - RNA, 19 nt, Artificial Sequence
  Description of Artificial Sequence: Synthetic oligonucleotide
  Antisense strand to SEQ ID NO: 2442020
uaugaggugacaauuccaa

SEQ ID NO: 2442022 - RNA, 19 nt, Artificial Sequence
  Description of Artificial Sequence: Synthetic oligonucleotide
  Sense strand starting at position 637 of SEQ ID NO: 1887009
gguggaaguugagcuacaa

SEQ ID NO: 2442023 - RNA, 19 nt, Artificial Sequence
  Description of Artificial Sequence: Synthetic oligonucleotide
  Antisense strand to SEQ ID NO: 2442022
uuguagcucaacuuccacc

SEQ ID NO: 2442024 - RNA, 19 nt, Artificial Sequence
  Description of Artificial Sequence: Synthetic oligonucleotide
  Sense strand starting at position 703 of SEQ ID NO: 1887009
ggaaauauauucucugcag

SEQ ID NO: 2442025 - RNA, 19 nt, Artificial Sequence
  Description of Artificial Sequence: Synthetic oligonucleotide
  Antisense strand to SEQ ID NO: 2442024
cugcagagaauauauuucc

SEQ ID NO: 2442026 - RNA, 19 nt, Artificial Sequence
  Description of Artificial Sequence: Synthetic oligonucleotide
  Sense strand starting at position 913 of SEQ ID NO: 1887009
aggucuaaagguugaaaug

SEQ ID NO: 2442027 - RNA, 19 nt, Artificial Sequence
  Description of Artificial Sequence: Synthetic oligonucleotide
  Antisense strand to SEQ ID NO: 2442026
cauuucaaccuuuagaccu

SEQ ID NO: 2442028 - RNA, 19 nt, Artificial Sequence
  Description of Artificial Sequence: Synthetic oligonucleotide
  Sense strand starting at position 914 of SEQ ID NO: 1887009
ggucuaaagguugaaaugu

SEQ ID NO: 2442029 - RNA, 19 nt, Artificial Sequence
  Description of Artificial Sequence: Synthetic oligonucleotide
  Antisense strand to SEQ ID NO: 2442028
acauuucaaccuuuagacc

SEQ ID NO: 2442030 - RNA, 19 nt, Artificial Sequence
  Description of Artificial Sequence: Synthetic oligonucleotide
  Sense strand starting at position 1149 of SEQ ID NO: 1887009
uauggagucugagcuggaa

SEQ ID NO: 2442031 - RNA, 19 nt, Artificial Sequence
  Description of Artificial Sequence: Synthetic oligonucleotide
  Antisense strand to SEQ ID NO: 2442030
uuccagcucagacuccaua

SEQ ID NO: 2442032 - RNA, 19 nt, Artificial Sequence
  Description of Artificial Sequence: Synthetic oligonucleotide
  Sense strand starting at position 1152 of SEQ ID NO: 1887009
ggagucugagcuggaaagu

SEQ ID NO: 2442033 - RNA, 19 nt, Artificial Sequence
  Description of Artificial Sequence: Synthetic oligonucleotide
  Antisense strand to SEQ ID NO: 2442032
acuuuccagcucagacucc

SEQ ID NO: 2442034 - RNA, 19 nt, Artificial Sequence
  Description of Artificial Sequence: Synthetic oligonucleotide
  Sense strand starting at position 1153 of SEQ ID NO: 1887009
gagucugagcuggaaaguu

SEQ ID NO: 2442035 - RNA, 19 nt, Artificial Sequence
  Description of Artificial Sequence: Synthetic oligonucleotide
  Antisense strand to SEQ ID NO: 2442034
aacuuuccagcucagacuc

SEQ ID NO: 2442036 - RNA, 19 nt, Artificial Sequence
  Description of Artificial Sequence: Synthetic oligonucleotide
  Sense strand starting at position 1173 of SEQ ID NO: 1887009
ugcugaguuagagaggguu

SEQ ID NO: 2442037 - RNA, 19 nt, Artificial Sequence
  Description of Artificial Sequence: Synthetic oligonucleotide
  Antisense strand to SEQ ID NO: 2442036
aacccucucuaacucagca

SEQ ID NO: 2442038 - RNA, 19 nt, Artificial Sequence
  Description of Artificial Sequence: Synthetic oligonucleotide
  Sense strand starting at position 1205 of SEQ ID NO: 1887009
gagcucuggaggcaaagau

SEQ ID NO: 2442039 - RNA, 19 nt, Artificial Sequence
  Description of Artificial Sequence: Synthetic oligonucleotide
  Antisense strand to SEQ ID NO: 2442038
aucuuugccuccagagcuc

SEQ ID NO: 2442040 - RNA, 19 nt, Artificial Sequence
  Description of Artificial Sequence: Synthetic oligonucleotide
  Sense strand starting at position 1349 of SEQ ID NO: 1887009
ugcuguaggacuggagaua

SEQ ID NO: 2442041 - RNA, 19 nt, Artificial Sequence
  Description of Artificial Sequence: Synthetic oligonucleotide
  Antisense strand to SEQ ID NO: 2442040
uaucuccaguccuacagca

SEQ ID NO: 2442042 - RNA, 19 nt, Artificial Sequence
  Description of Artificial Sequence: Synthetic oligonucleotide
  Sense strand starting at position 1410 of SEQ ID NO: 1887009
ccugcuuugguggaggauu

SEQ ID NO: 2442043 - RNA, 19 nt, Artificial Sequence
  Description of Artificial Sequence: Synthetic oligonucleotide
  Antisense strand to SEQ ID NO: 2442042
aauccuccaccaaagcagg

SEQ ID NO: 2442044 - RNA, 19 nt, Artificial Sequence
  Description of Artificial Sequence: Synthetic oligonucleotide
  Sense strand starting at position 1412 of SEQ ID NO: 1887009
ugcuuugguggaggauuga

SEQ ID NO: 2442045 - RNA, 19 nt, Artificial Sequence
  Description of Artificial Sequence: Synthetic oligonucleotide
  Antisense strand to SEQ ID NO: 2442044
ucaauccuccaccaaagca

SEQ ID NO: 2442046 - RNA, 19 nt, Artificial Sequence
  Description of Artificial Sequence: Synthetic oligonucleotide
  Sense strand starting at position 1586 of SEQ ID NO: 1887009
ucuugcugggcugaagauu

SEQ ID NO: 2442047 - RNA, 19 nt, Artificial Sequence
  Description of Artificial Sequence: Synthetic oligonucleotide
  Antisense strand to SEQ ID NO: 2442046
aaucuucagcccagcaaga

SEQ ID NO: 2442048 - RNA, 19 nt, Artificial Sequence
  Description of Artificial Sequence: Synthetic oligonucleotide
  Sense strand starting at position 1852 of SEQ ID NO: 1887009
gacuuacaaugucugagga

SEQ ID NO: 2442049 - RNA, 19 nt, Artificial Sequence
  Description of Artificial Sequence: Synthetic oligonucleotide
  Antisense strand to SEQ ID NO: 2442048
uccucagacauuguaaguc

SEQ ID NO: 2442050 - RNA, 19 nt, Artificial Sequence
  Description of Artificial Sequence: Synthetic oligonucleotide
  Sense strand starting at position 1936 of SEQ ID NO: 1887009
uaguuaacugcugaaugau

SEQ ID NO: 2442051 - RNA, 19 nt, Artificial Sequence
  Description of Artificial Sequence: Synthetic oligonucleotide
  Antisense strand to SEQ ID NO: 2442050
aucauucagcaguuaacua

SEQ ID NO: 2442052 - RNA, 19 nt, Artificial Sequence
  Description of Artificial Sequence: Synthetic oligonucleotide
  Sense strand starting at position 1939 of SEQ ID NO: 1887009
uuaacugcugaaugauaau

SEQ ID NO: 2442053 - RNA, 19 nt, Artificial Sequence
  Description of Artificial Sequence: Synthetic oligonucleotide
  Antisense strand to SEQ ID NO: 2442052
auuaucauucagcaguuaa

SEQ ID NO: 2442054 - RNA, 19 nt, Artificial Sequence
  Description of Artificial Sequence: Synthetic oligonucleotide
  Sense strand starting at position 1995 of SEQ ID NO: 1887009
gacauuaaggacugagcuu

SEQ ID NO: 2442055 - RNA, 19 nt, Artificial Sequence
  Description of Artificial Sequence: Synthetic oligonucleotide
  Antisense strand to SEQ ID NO: 2442054
aagcucaguccuuaauguc

SEQ ID NO: 2442056 - RNA, 19 nt, Artificial Sequence
  Description of Artificial Sequence: Synthetic oligonucleotide
  Sense strand starting at position 2029 of SEQ ID NO: 1887009
gugaaacuguuaccucaua

SEQ ID NO: 2442057 - RNA, 19 nt, Artificial Sequence
  Description of Artificial Sequence: Synthetic oligonucleotide
  Antisense strand to SEQ ID NO: 2442056
uaugagguaacaguuucac

SEQ ID NO: 2442058 - RNA, 19 nt, Artificial Sequence
  Description of Artificial Sequence: Synthetic oligonucleotide
  Sense strand starting at position 2329 of SEQ ID NO: 1887009
aagguauaaugagcuccau

SEQ ID NO: 2442059 - RNA, 19 nt, Artificial Sequence
  Description of Artificial Sequence: Synthetic oligonucleotide
  Antisense strand to SEQ ID NO: 2442058
auggagcucauuauaccuu

SEQ ID NO: 2442060 - RNA, 19 nt, Artificial Sequence
  Description of Artificial Sequence: Synthetic oligonucleotide
  Sense strand starting at position 2360 of SEQ ID NO: 1887009
guuaaauugucacccauga

SEQ ID NO: 2442061 - RNA, 19 nt, Artificial Sequence
  Description of Artificial Sequence: Synthetic oligonucleotide
  Antisense strand to SEQ ID NO: 2442060
ucaugggugacaauuuaac

SEQ ID NO: 2442062 - RNA, 19 nt, Artificial Sequence
  Description of Artificial Sequence: Synthetic oligonucleotide
  Sense strand starting at position 2393 of SEQ ID NO: 1887009
agcugcacucuccauagaa

SEQ ID NO: 2442063 - RNA, 19 nt, Artificial Sequence
  Description of Artificial Sequence: Synthetic oligonucleotide
  Antisense strand to SEQ ID NO: 2442062
uucuauggagagugcagcu

SEQ ID NO: 2442064 - RNA, 19 nt, Artificial Sequence
  Description of Artificial Sequence: Synthetic oligonucleotide
  Sense strand starting at position 2395 of SEQ ID NO: 1887009
cugcacucuccauagaaga

SEQ ID NO: 2442065 - RNA, 19 nt, Artificial Sequence
  Description of Artificial Sequence: Synthetic oligonucleotide
  Antisense strand to SEQ ID NO: 2442064
ucuucuauggagagugcag

SEQ ID NO: 2442066 - RNA, 19 nt, Artificial Sequence
  Description of Artificial Sequence: Synthetic oligonucleotide
  Sense strand starting at position 2691 of SEQ ID NO: 1887009
cgaccauaccuguaaccau

SEQ ID NO: 2442067 - RNA, 19 nt, Artificial Sequence
  Description of Artificial Sequence: Synthetic oligonucleotide
  Antisense strand to SEQ ID NO: 2442066
augguuacagguauggucg

SEQ ID NO: 2442068 - RNA, 19 nt, Artificial Sequence
  Description of Artificial Sequence: Synthetic oligonucleotide
  Sense strand starting at position 2844 of SEQ ID NO: 1887009
gaauucuagcacugauggu

SEQ ID NO: 2442069 - RNA, 19 nt, Artificial Sequence
  Description of Artificial Sequence: Synthetic oligonucleotide
  Antisense strand to SEQ ID NO: 2442068
accaucagugcuagaauuc

SEQ ID NO: 2442070 - RNA, 19 nt, Artificial Sequence
  Description of Artificial Sequence: Synthetic oligonucleotide
  Sense strand starting at position 2980 of SEQ ID NO: 1887009
acgggugcuacauauagaa

SEQ ID NO: 2442071 - RNA, 19 nt, Artificial Sequence
  Description of Artificial Sequence: Synthetic oligonucleotide
  Antisense strand to SEQ ID NO: 2442070
uucuauauguagcacccgu

SEQ ID NO: 2442072 - RNA, 19 nt, Artificial Sequence
  Description of Artificial Sequence: Synthetic oligonucleotide
  Sense strand starting at position 3034 of SEQ ID NO: 1887009
agagcuaaguaaucauguu

SEQ ID NO: 2442073 - RNA, 19 nt, Artificial Sequence
  Description of Artificial Sequence: Synthetic oligonucleotide
  Antisense strand to SEQ ID NO: 2442072
aacaugauuacuuagcucu

SEQ ID NO: 2442074 - RNA, 19 nt, Artificial Sequence
  Description of Artificial Sequence: Synthetic oligonucleotide
  Sense strand starting at position 3282 of SEQ ID NO: 1887009
agagcacuaucacugagau

SEQ ID NO: 2442075 - RNA, 19 nt, Artificial Sequence
  Description of Artificial Sequence: Synthetic oligonucleotide
  Antisense strand to SEQ ID NO: 2442074
aucucagugauagugcucu

SEQ ID NO: 2442076 - RNA, 19 nt, Artificial Sequence
  Description of Artificial Sequence: Synthetic oligonucleotide
  Sense strand starting at position 3283 of SEQ ID NO: 1887009
gagcacuaucacugagaug

SEQ ID NO: 2442077 - RNA, 19 nt, Artificial Sequence
  Description of Artificial Sequence: Synthetic oligonucleotide
  Antisense strand to SEQ ID NO: 2442076
caucucagugauagugcuc

SEQ ID NO: 2442078 - RNA, 19 nt, Artificial Sequence
  Description of Artificial Sequence: Synthetic oligonucleotide
  Sense strand starting at position 3560 of SEQ ID NO: 1887009
ugcuauaucaggcaggaca

SEQ ID NO: 2442079 - RNA, 19 nt, Artificial Sequence
  Description of Artificial Sequence: Synthetic oligonucleotide
  Antisense strand to SEQ ID NO: 2442078
uguccugccugauauagca

SEQ ID NO: 2442080 - RNA, 19 nt, Artificial Sequence
  Description of Artificial Sequence: Synthetic oligonucleotide
  Sense strand starting at position 3677 of SEQ ID NO: 1887009
ggcugaugucaauacauga

SEQ ID NO: 2442081 - RNA, 19 nt, Artificial Sequence
  Description of Artificial Sequence: Synthetic oligonucleotide
  Antisense strand to SEQ ID NO: 2442080
ucauguauugacaucagcc

SEQ ID NO: 2442082 - RNA, 19 nt, Artificial Sequence
  Description of Artificial Sequence: Synthetic oligonucleotide
  Sense strand starting at position 3820 of SEQ ID NO: 1887009
guagguucuaguugaaagg

SEQ ID NO: 2442083 - RNA, 19 nt, Artificial Sequence
  Description of Artificial Sequence: Synthetic oligonucleotide
  Antisense strand to SEQ ID NO: 2442082
ccuuucaacuagaaccuac

SEQ ID NO: 2442084 - RNA, 19 nt, Artificial Sequence
  Description of Artificial Sequence: Synthetic oligonucleotide
  Sense strand starting at position 384 of SEQ ID NO: 1887010
cggguaaaggugcaggaua

SEQ ID NO: 2442085 - RNA, 19 nt, Artificial Sequence
  Description of Artificial Sequence: Synthetic oligonucleotide
  Antisense strand to SEQ ID NO: 2442084
uauccugcaccuuuacccg

SEQ ID NO: 2442086 - RNA, 19 nt, Artificial Sequence
  Description of Artificial Sequence: Synthetic oligonucleotide
  Sense strand starting at position 656 of SEQ ID NO: 1887010
ggcauagucucccgggaga

SEQ ID NO: 2442087 - RNA, 19 nt, Artificial Sequence
  Description of Artificial Sequence: Synthetic oligonucleotide
  Antisense strand to SEQ ID NO: 2442086
ucucccgggagacuaugcc

SEQ ID NO: 2442088 - RNA, 19 nt, Artificial Sequence
  Description of Artificial Sequence: Synthetic oligonucleotide
  Sense strand starting at position 658 of SEQ ID NO: 1887010
cauagucucccgggagaaa

SEQ ID NO: 2442089 - RNA, 19 nt, Artificial Sequence
  Description of Artificial Sequence: Synthetic oligonucleotide
  Antisense strand to SEQ ID NO: 2442088
uuucucccgggagacuaug

SEQ ID NO: 2442090 - RNA, 19 nt, Artificial Sequence
  Description of Artificial Sequence: Synthetic oligonucleotide
  Sense strand starting at position 1162 of SEQ ID NO: 1887010
cuaaguacguaaguauuua

SEQ ID NO: 2442091 - RNA, 19 nt, Artificial Sequence
  Description of Artificial Sequence: Synthetic oligonucleotide
  Antisense strand to SEQ ID NO: 2442090
uaaauacuuacguacuuag

SEQ ID NO: 2442092 - RNA, 19 nt, Artificial Sequence
  Description of Artificial Sequence: Synthetic oligonucleotide
  Sense strand starting at position 1166 of SEQ ID NO: 1887010
guacguaaguauuuaagua

SEQ ID NO: 2442093 - RNA, 19 nt, Artificial Sequence
  Description of Artificial Sequence: Synthetic oligonucleotide
  Antisense strand to SEQ ID NO: 2442092
uacuuaaauacuuacguac

SEQ ID NO: 2442094 - RNA, 19 nt, Artificial Sequence
  Description of Artificial Sequence: Synthetic oligonucleotide
  Sense strand starting at position 1170 of SEQ ID NO: 1887010
guaaguauuuaaguacgua

SEQ ID NO: 2442095 - RNA, 19 nt, Artificial Sequence
  Description of Artificial Sequence: Synthetic oligonucleotide
  Antisense strand to SEQ ID NO: 2442094
uacguacuuaaauacuuac

SEQ ID NO: 2442096 - RNA, 19 nt, Artificial Sequence
  Description of Artificial Sequence: Synthetic oligonucleotide
  Sense strand starting at position 1186 of SEQ ID NO: 1887010
guaaguacguaaguacaua

SEQ ID NO: 2442097 - RNA, 19 nt, Artificial Sequence
  Description of Artificial Sequence: Synthetic oligonucleotide
  Antisense strand to SEQ ID NO: 2442096
uauguacuuacguacuuac

SEQ ID NO: 2442098 - RNA, 19 nt, Artificial Sequence
  Description of Artificial Sequence: Synthetic oligonucleotide
  Sense strand starting at position 2070 of SEQ ID NO: 1887010
uugauugggugagaaggaa

SEQ ID NO: 2442099 - RNA, 19 nt, Artificial Sequence
  Description of Artificial Sequence: Synthetic oligonucleotide
  Antisense strand to SEQ ID NO: 2442098
uuccuucucacccaaucaa

SEQ ID NO: 2442100 - RNA, 19 nt, Artificial Sequence
  Description of Artificial Sequence: Synthetic oligonucleotide
  Sense strand starting at position 2094 of SEQ ID NO: 1887010
uucgacaacucuuauugga

SEQ ID NO: 2442101 - RNA, 19 nt, Artificial Sequence
  Description of Artificial Sequence: Synthetic oligonucleotide
  Antisense strand to SEQ ID NO: 2442100
uccaauaagaguugucgaa

SEQ ID NO: 2442102 - RNA, 19 nt, Artificial Sequence
  Description of Artificial Sequence: Synthetic oligonucleotide
  Sense strand starting at position 2096 of SEQ ID NO: 1887010
cgacaacucuuauuggaua

SEQ ID NO: 2442103 - RNA, 19 nt, Artificial Sequence
  Description of Artificial Sequence: Synthetic oligonucleotide
  Antisense strand to SEQ ID NO: 2442102
uauccaauaagaguugucg

SEQ ID NO: 2442104 - RNA, 19 nt, Artificial Sequence
  Description of Artificial Sequence: Synthetic oligonucleotide
  Sense strand starting at position 2209 of SEQ ID NO: 1887010
gaaagaggcuuccagggua

SEQ ID NO: 2442105 - RNA, 19 nt, Artificial Sequence
  Description of Artificial Sequence: Synthetic oligonucleotide
  Antisense strand to SEQ ID NO: 2442104
uacccuggaagccucuuuc

SEQ ID NO: 2442106 - RNA, 19 nt, Artificial Sequence
  Description of Artificial Sequence: Synthetic oligonucleotide
  Sense strand starting at position 2332 of SEQ ID NO: 1887010
gcagaacacuugccucaua

SEQ ID NO: 2442107 - RNA, 19 nt, Artificial Sequence
  Description of Artificial Sequence: Synthetic oligonucleotide
  Antisense strand to SEQ ID NO: 2442106
uaugaggcaaguguucugc

SEQ ID NO: 2442108 - RNA, 19 nt, Artificial Sequence
  Description of Artificial Sequence: Synthetic oligonucleotide
  Sense strand starting at position 2752 of SEQ ID NO: 1887010
gccgcugcucccuggauua

SEQ ID NO: 2442109 - RNA, 19 nt, Artificial Sequence
  Description of Artificial Sequence: Synthetic oligonucleotide
  Antisense strand to SEQ ID NO: 2442108
uaauccagggagcagcggc

SEQ ID NO: 2442110 - RNA, 19 nt, Artificial Sequence
  Description of Artificial Sequence: Synthetic oligonucleotide
  Sense strand starting at position 2762 of SEQ ID NO: 1887010
ccuggauuaccgggauguu

SEQ ID NO: 2442111 - RNA, 19 nt, Artificial Sequence
  Description of Artificial Sequence: Synthetic oligonucleotide
  Antisense strand to SEQ ID NO: 2442110
aacaucccgguaauccagg

SEQ ID NO: 2442112 - RNA, 19 nt, Artificial Sequence
  Description of Artificial Sequence: Synthetic oligonucleotide
  Sense strand starting at position 2763 of SEQ ID NO: 1887010
cuggauuaccgggauguuu

SEQ ID NO: 2442113 - RNA, 19 nt, Artificial Sequence
  Description of Artificial Sequence: Synthetic oligonucleotide
  Antisense strand to SEQ ID NO: 2442112
aaacaucccgguaauccag

SEQ ID NO: 2442114 - RNA, 19 nt, Artificial Sequence
  Description of Artificial Sequence: Synthetic oligonucleotide
  Sense strand starting at position 3916 of SEQ ID NO: 1887010
ucaguaagugucgggugaa

SEQ ID NO: 2442115 - RNA, 19 nt, Artificial Sequence
  Description of Artificial Sequence: Synthetic oligonucleotide
  Antisense strand to SEQ ID NO: 2442114
uucacccgacacuuacuga

SEQ ID NO: 2442116 - RNA, 19 nt, Artificial Sequence
  Description of Artificial Sequence: Synthetic oligonucleotide
  Sense strand starting at position 3917 of SEQ ID NO: 1887010
caguaagugucgggugaac

SEQ ID NO: 2442117 - RNA, 19 nt, Artificial Sequence
  Description of Artificial Sequence: Synthetic oligonucleotide
  Antisense strand to SEQ ID NO: 2442116
guucacccgacacuuacug

SEQ ID NO: 2442118 - RNA, 19 nt, Artificial Sequence
  Description of Artificial Sequence: Synthetic oligonucleotide
  Sense strand starting at position 3919 of SEQ ID NO: 1887010
guaagugucgggugaacac

SEQ ID NO: 2442119 - RNA, 19 nt, Artificial Sequence
  Description of Artificial Sequence: Synthetic oligonucleotide
  Antisense strand to SEQ ID NO: 2442118
guguucacccgacacuuac

SEQ ID NO: 2442120 - RNA, 19 nt, Artificial Sequence
  Description of Artificial Sequence: Synthetic oligonucleotide
  Sense strand starting at position 3982 of SEQ ID NO: 1887010
cgacugugugaguggugau

SEQ ID NO: 2442121 - RNA, 19 nt, Artificial Sequence
  Description of Artificial Sequence: Synthetic oligonucleotide
  Antisense strand to SEQ ID NO: 2442120
aucaccacucacacagucg

SEQ ID NO: 2442122 - RNA, 19 nt, Artificial Sequence
  Description of Artificial Sequence: Synthetic oligonucleotide
  Sense strand starting at position 3983 of SEQ ID NO: 1887010
gacugugugaguggugaua

SEQ ID NO: 2442123 - RNA, 19 nt, Artificial Sequence
  Description of Artificial Sequence: Synthetic oligonucleotide
  Antisense strand to SEQ ID NO: 2442122
uaucaccacucacacaguc

SEQ ID NO: 2442124 - RNA, 19 nt, Artificial Sequence
  Description of Artificial Sequence: Synthetic oligonucleotide
  Sense strand starting at position 103 of SEQ ID NO: 1887011
uucucaguagguuguaauu

SEQ ID NO: 2442125 - RNA, 19 nt, Artificial Sequence
  Description of Artificial Sequence: Synthetic oligonucleotide
  Antisense strand to SEQ ID NO: 2442124
aauuacaaccuacugagaa

SEQ ID NO: 2442126 - RNA, 19 nt, Artificial Sequence
  Description of Artificial Sequence: Synthetic oligonucleotide
  Sense strand starting at position 610 of SEQ ID NO: 1887011
aaaucaguaucucugggau

SEQ ID NO: 2442127 - RNA, 19 nt, Artificial Sequence
  Description of Artificial Sequence: Synthetic oligonucleotide
  Antisense strand to SEQ ID NO: 2442126
aucccagagauacugauuu

SEQ ID NO: 2442128 - RNA, 19 nt, Artificial Sequence
  Description of Artificial Sequence: Synthetic oligonucleotide
  Sense strand starting at position 613 of SEQ ID NO: 1887011
ucaguaucucugggauagg

SEQ ID NO: 2442129 - RNA, 19 nt, Artificial Sequence
  Description of Artificial Sequence: Synthetic oligonucleotide
  Antisense strand to SEQ ID NO: 2442128
ccuaucccagagauacuga

SEQ ID NO: 2442130 - RNA, 19 nt, Artificial Sequence
  Description of Artificial Sequence: Synthetic oligonucleotide
  Sense strand starting at position 616 of SEQ ID NO: 1887011
guaucucugggauaggcua

SEQ ID NO: 2442131 - RNA, 19 nt, Artificial Sequence
  Description of Artificial Sequence: Synthetic oligonucleotide
  Antisense strand to SEQ ID NO: 2442130
uagccuaucccagagauac

SEQ ID NO: 2442132 - RNA, 19 nt, Artificial Sequence
  Description of Artificial Sequence: Synthetic oligonucleotide
  Sense strand starting at position 647 of SEQ ID NO: 1887011
guauuagguuaaccaaauc

SEQ ID NO: 2442133 - RNA, 19 nt, Artificial Sequence
  Description of Artificial Sequence: Synthetic oligonucleotide
  Antisense strand to SEQ ID NO: 2442132
gauuugguuaaccuaauac

SEQ ID NO: 2442134 - RNA, 19 nt, Artificial Sequence
  Description of Artificial Sequence: Synthetic oligonucleotide
  Sense strand starting at position 664 of SEQ ID NO: 1887011
uccaauugccaauauucga

SEQ ID NO: 2442135 - RNA, 19 nt, Artificial Sequence
  Description of Artificial Sequence: Synthetic oligonucleotide
  Antisense strand to SEQ ID NO: 2442134
ucgaauauuggcaauugga

SEQ ID NO: 2442136 - RNA, 19 nt, Artificial Sequence
  Description of Artificial Sequence: Synthetic oligonucleotide
  Sense strand starting at position 867 of SEQ ID NO: 1887011
ugaagacuugacugcaauc

SEQ ID NO: 2442137 - RNA, 19 nt, Artificial Sequence
  Description of Artificial Sequence: Synthetic oligonucleotide
  Antisense strand to SEQ ID NO: 2442136
gauugcagucaagucuuca

SEQ ID NO: 2442138 - RNA, 19 nt, Artificial Sequence
  Description of Artificial Sequence: Synthetic oligonucleotide
  Sense strand starting at position 1033 of SEQ ID NO: 1887011
ggagacauuucuuaacgaa

SEQ ID NO: 2442139 - RNA, 19 nt, Artificial Sequence
  Description of Artificial Sequence: Synthetic oligonucleotide
  Antisense strand to SEQ ID NO: 2442138
uucguuaagaaaugucucc

SEQ ID NO: 2442140 - RNA, 19 nt, Artificial Sequence
  Description of Artificial Sequence: Synthetic oligonucleotide
  Sense strand starting at position 1036 of SEQ ID NO: 1887011
gacauuucuuaacgaagga

SEQ ID NO: 2442141 - RNA, 19 nt, Artificial Sequence
  Description of Artificial Sequence: Synthetic oligonucleotide
  Antisense strand to SEQ ID NO: 2442140
uccuucguuaagaaauguc

SEQ ID NO: 2442142 - RNA, 19 nt, Artificial Sequence
  Description of Artificial Sequence: Synthetic oligonucleotide
  Sense strand starting at position 1040 of SEQ ID NO: 1887011
uuucuuaacgaaggaguuu

SEQ ID NO: 2442143 - RNA, 19 nt, Artificial Sequence
  Description of Artificial Sequence: Synthetic oligonucleotide
  Antisense strand to SEQ ID NO: 2442142
aaacuccuucguuaagaaa

SEQ ID NO: 2442144 - RNA, 19 nt, Artificial Sequence
  Description of Artificial Sequence: Synthetic oligonucleotide
  Sense strand starting at position 1087 of SEQ ID NO: 1887011
gcaguucuagguuaggacu

SEQ ID NO: 2442145 - RNA, 19 nt, Artificial Sequence
  Description of Artificial Sequence: Synthetic oligonucleotide
  Antisense strand to SEQ ID NO: 2442144
aguccuaaccuagaacugc

SEQ ID NO: 2442146 - RNA, 19 nt, Artificial Sequence
  Description of Artificial Sequence: Synthetic oligonucleotide
  Sense strand starting at position 1158 of SEQ ID NO: 1887011
acaugauaacguuacccua

SEQ ID NO: 2442147 - RNA, 19 nt, Artificial Sequence
  Description of Artificial Sequence: Synthetic oligonucleotide
  Antisense strand to SEQ ID NO: 2442146
uaggguaacguuaucaugu

SEQ ID NO: 2442148 - RNA, 19 nt, Artificial Sequence
  Description of Artificial Sequence: Synthetic oligonucleotide
  Sense strand starting at position 1160 of SEQ ID NO: 1887011
augauaacguuacccuaaa

SEQ ID NO: 2442149 - RNA, 19 nt, Artificial Sequence
  Description of Artificial Sequence: Synthetic oligonucleotide
  Antisense strand to SEQ ID NO: 2442148
uuuaggguaacguuaucau

SEQ ID NO: 2442150 - RNA, 19 nt, Artificial Sequence
  Description of Artificial Sequence: Synthetic oligonucleotide
  Sense strand starting at position 1214 of SEQ ID NO: 1887011
acgccaauuuccgugcauu

SEQ ID NO: 2442151 - RNA, 19 nt, Artificial Sequence
  Description of Artificial Sequence: Synthetic oligonucleotide
  Antisense strand to SEQ ID NO: 2442150
aaugcacggaaauuggcgu

SEQ ID NO: 2442152 - RNA, 19 nt, Artificial Sequence
  Description of Artificial Sequence: Synthetic oligonucleotide
  Sense strand starting at position 1215 of SEQ ID NO: 1887011
cgccaauuuccgugcauuc

SEQ ID NO: 2442153 - RNA, 19 nt, Artificial Sequence
  Description of Artificial Sequence: Synthetic oligonucleotide
  Antisense strand to SEQ ID NO: 2442152
gaaugcacggaaauuggcg

SEQ ID NO: 2442154 - RNA, 19 nt, Artificial Sequence
  Description of Artificial Sequence: Synthetic oligonucleotide
  Sense strand starting at position 1485 of SEQ ID NO: 1887011
ucgaauaagucuuccagua

SEQ ID NO: 2442155 - RNA, 19 nt, Artificial Sequence
  Description of Artificial Sequence: Synthetic oligonucleotide
  Antisense strand to SEQ ID NO: 2442154
uacuggaagacuuauucga

SEQ ID NO: 2442156 - RNA, 19 nt, Artificial Sequence
  Description of Artificial Sequence: Synthetic oligonucleotide
  Sense strand starting at position 2035 of SEQ ID NO: 1887011
ugggaacuuuccgccaagu

SEQ ID NO: 2442157 - RNA, 19 nt, Artificial Sequence
  Description of Artificial Sequence: Synthetic oligonucleotide
  Antisense strand to SEQ ID NO: 2442156
acuuggcggaaaguuccca

SEQ ID NO: 2442158 - RNA, 19 nt, Artificial Sequence
  Description of Artificial Sequence: Synthetic oligonucleotide
  Sense strand starting at position 2037 of SEQ ID NO: 1887011
ggaacuuuccgccaaguaa

SEQ ID NO: 2442159 - RNA, 19 nt, Artificial Sequence
  Description of Artificial Sequence: Synthetic oligonucleotide
  Antisense strand to SEQ ID NO: 2442158
uuacuuggcggaaaguucc

SEQ ID NO: 2442160 - RNA, 19 nt, Artificial Sequence
  Description of Artificial Sequence: Synthetic oligonucleotide
  Sense strand starting at position 2121 of SEQ ID NO: 1887011
ccgggaauucugggucaca

SEQ ID NO: 2442161 - RNA, 19 nt, Artificial Sequence
  Description of Artificial Sequence: Synthetic oligonucleotide
  Antisense strand to SEQ ID NO: 2442160
ugugacccagaauucccgg

SEQ ID NO: 2442162 - RNA, 19 nt, Artificial Sequence
  Description of Artificial Sequence: Synthetic oligonucleotide
  Sense strand starting at position 2122 of SEQ ID NO: 1887011
cgggaauucugggucacaa

SEQ ID NO: 2442163 - RNA, 19 nt, Artificial Sequence
  Description of Artificial Sequence: Synthetic oligonucleotide
  Antisense strand to SEQ ID NO: 2442162
uugugacccagaauucccg

SEQ ID NO: 2442164 - RNA, 19 nt, Artificial Sequence
  Description of Artificial Sequence: Synthetic oligonucleotide
  Sense strand starting at position 2305 of SEQ ID NO: 1887011
ugagaugacacacgugaaa

SEQ ID NO: 2442165 - RNA, 19 nt, Artificial Sequence
  Description of Artificial Sequence: Synthetic oligonucleotide
  Antisense strand to SEQ ID NO: 2442164
uuucacgugugucaucuca

SEQ ID NO: 2442166 - RNA, 19 nt, Artificial Sequence
  Description of Artificial Sequence: Synthetic oligonucleotide
  Sense strand starting at position 2317 of SEQ ID NO: 1887011
cgugaaagccuguagagcu

SEQ ID NO: 2442167 - RNA, 19 nt, Artificial Sequence
  Description of Artificial Sequence: Synthetic oligonucleotide
  Antisense strand to SEQ ID NO: 2442166
agcucuacaggcuuucacg

SEQ ID NO: 2442168 - RNA, 19 nt, Artificial Sequence
  Description of Artificial Sequence: Synthetic oligonucleotide
  Sense strand starting at position 2358 of SEQ ID NO: 1887011
ccuaguagcuccuccugaa

SEQ ID NO: 2442169 - RNA, 19 nt, Artificial Sequence
  Description of Artificial Sequence: Synthetic oligonucleotide
  Antisense strand to SEQ ID NO: 2442168
uucaggaggagcuacuagg

SEQ ID NO: 2442170 - RNA, 19 nt, Artificial Sequence
  Description of Artificial Sequence: Synthetic oligonucleotide
  Sense strand starting at position 2362 of SEQ ID NO: 1887011
guagcuccuccugaaucua

SEQ ID NO: 2442171 - RNA, 19 nt, Artificial Sequence
  Description of Artificial Sequence: Synthetic oligonucleotide
  Antisense strand to SEQ ID NO: 2442170
uagauucaggaggagcuac

SEQ ID NO: 2442172 - RNA, 19 nt, Artificial Sequence
  Description of Artificial Sequence: Synthetic oligonucleotide
  Sense strand starting at position 2371 of SEQ ID NO: 1887011
ccugaaucuauugagcguu

SEQ ID NO: 2442173 - RNA, 19 nt, Artificial Sequence
  Description of Artificial Sequence: Synthetic oligonucleotide
  Antisense strand to SEQ ID NO: 2442172
aacgcucaauagauucagg

SEQ ID NO: 2442174 - RNA, 19 nt, Artificial Sequence
  Description of Artificial Sequence: Synthetic oligonucleotide
  Sense strand starting at position 2495 of SEQ ID NO: 1887011
gcugacgucuuaucuagau

SEQ ID NO: 2442175 - RNA, 19 nt, Artificial Sequence
  Description of Artificial Sequence: Synthetic oligonucleotide
  Antisense strand to SEQ ID NO: 2442174
aucuagauaagacgucagc

SEQ ID NO: 2442176 - RNA, 19 nt, Artificial Sequence
  Description of Artificial Sequence: Synthetic oligonucleotide
  Sense strand starting at position 2714 of SEQ ID NO: 1887011
acguuauaccaagggaaag

SEQ ID NO: 2442177 - RNA, 19 nt, Artificial Sequence
  Description of Artificial Sequence: Synthetic oligonucleotide
  Antisense strand to SEQ ID NO: 2442176
cuuucccuugguauaacgu

SEQ ID NO: 2442178 - RNA, 19 nt, Artificial Sequence
  Description of Artificial Sequence: Synthetic oligonucleotide
  Sense strand starting at position 2715 of SEQ ID NO: 1887011
cguuauaccaagggaaaga

SEQ ID NO: 2442179 - RNA, 19 nt, Artificial Sequence
  Description of Artificial Sequence: Synthetic oligonucleotide
  Antisense strand to SEQ ID NO: 2442178
ucuuucccuugguauaacg

SEQ ID NO: 2442180 - RNA, 19 nt, Artificial Sequence
  Description of Artificial Sequence: Synthetic oligonucleotide
  Sense strand starting at position 2780 of SEQ ID NO: 1887011
uugagcuggccucagaaau

SEQ ID NO: 2442181 - RNA, 19 nt, Artificial Sequence
  Description of Artificial Sequence: Synthetic oligonucleotide
  Antisense strand to SEQ ID NO: 2442180
auuucugaggccagcucaa

SEQ ID NO: 2442182 - RNA, 19 nt, Artificial Sequence
  Description of Artificial Sequence: Synthetic oligonucleotide
  Sense strand starting at position 2792 of SEQ ID NO: 1887011
cagaaauaaguguaggguu

SEQ ID NO: 2442183 - RNA, 19 nt, Artificial Sequence
  Description of Artificial Sequence: Synthetic oligonucleotide
  Antisense strand to SEQ ID NO: 2442182
aacccuacacuuauuucug

SEQ ID NO: 2442184 - RNA, 19 nt, Artificial Sequence
  Description of Artificial Sequence: Synthetic oligonucleotide
  Sense strand starting at position 3414 of SEQ ID NO: 1887011
ggaggaggugucuggaacu

SEQ ID NO: 2442185 - RNA, 19 nt, Artificial Sequence
  Description of Artificial Sequence: Synthetic oligonucleotide
  Antisense strand to SEQ ID NO: 2442184
aguuccagacaccuccucc

SEQ ID NO: 2442186 - RNA, 19 nt, Artificial Sequence
  Description of Artificial Sequence: Synthetic oligonucleotide
  Sense strand starting at position 3459 of SEQ ID NO: 1887011
ggaugucagcuagggcauu

SEQ ID NO: 2442187 - RNA, 19 nt, Artificial Sequence
  Description of Artificial Sequence: Synthetic oligonucleotide
  Antisense strand to SEQ ID NO: 2442186
aaugcccuagcugacaucc

SEQ ID NO: 2442188 - RNA, 19 nt, Artificial Sequence
  Description of Artificial Sequence: Synthetic oligonucleotide
  Sense strand starting at position 3518 of SEQ ID NO: 1887011
agaggacauguuugucuua

SEQ ID NO: 2442189 - RNA, 19 nt, Artificial Sequence
  Description of Artificial Sequence: Synthetic oligonucleotide
  Antisense strand to SEQ ID NO: 2442188
uaagacaaacauguccucu

SEQ ID NO: 2442190 - RNA, 19 nt, Artificial Sequence
  Description of Artificial Sequence: Synthetic oligonucleotide
  Sense strand starting at position 3519 of SEQ ID NO: 1887011
gaggacauguuugucuuau

SEQ ID NO: 2442191 - RNA, 19 nt, Artificial Sequence
  Description of Artificial Sequence: Synthetic oligonucleotide
  Antisense strand to SEQ ID NO: 2442190
auaagacaaacauguccuc

SEQ ID NO: 2442192 - RNA, 19 nt, Artificial Sequence
  Description of Artificial Sequence: Synthetic oligonucleotide
  Sense strand starting at position 3520 of SEQ ID NO: 1887011
aggacauguuugucuuaug

SEQ ID NO: 2442193 - RNA, 19 nt, Artificial Sequence
  Description of Artificial Sequence: Synthetic oligonucleotide
  Antisense strand to SEQ ID NO: 2442192
cauaagacaaacauguccu

SEQ ID NO: 2442194 - RNA, 19 nt, Artificial Sequence
  Description of Artificial Sequence: Synthetic oligonucleotide
  Sense strand starting at position 3521 of SEQ ID NO: 1887011
ggacauguuugucuuaugu

SEQ ID NO: 2442195 - RNA, 19 nt, Artificial Sequence
  Description of Artificial Sequence: Synthetic oligonucleotide
  Antisense strand to SEQ ID NO: 2442194
acauaagacaaacaugucc

SEQ ID NO: 2442196 - RNA, 19 nt, Artificial Sequence
  Description of Artificial Sequence: Synthetic oligonucleotide
  Sense strand starting at position 3528 of SEQ ID NO: 1887011
uuugucuuaugucuuagga

SEQ ID NO: 2442197 - RNA, 19 nt, Artificial Sequence
  Description of Artificial Sequence: Synthetic oligonucleotide
  Antisense strand to SEQ ID NO: 2442196
uccuaagacauaagacaaa

SEQ ID NO: 2442198 - RNA, 19 nt, Artificial Sequence
  Description of Artificial Sequence: Synthetic oligonucleotide
  Sense strand starting at position 3691 of SEQ ID NO: 1887011
gggugucgugguggagaga

SEQ ID NO: 2442199 - RNA, 19 nt, Artificial Sequence
  Description of Artificial Sequence: Synthetic oligonucleotide
  Antisense strand to SEQ ID NO: 2442198
ucucuccaccacgacaccc

SEQ ID NO: 2442200 - RNA, 19 nt, Artificial Sequence
  Description of Artificial Sequence: Synthetic oligonucleotide
  Sense strand starting at position 3728 of SEQ ID NO: 1887011
gcccauguccaucaccaua

SEQ ID NO: 2442201 - RNA, 19 nt, Artificial Sequence
  Description of Artificial Sequence: Synthetic oligonucleotide
  Antisense strand to SEQ ID NO: 2442200
uauggugauggacaugggc

SEQ ID NO: 2442202 - RNA, 19 nt, Artificial Sequence
  Description of Artificial Sequence: Synthetic oligonucleotide
  Sense strand starting at position 3881 of SEQ ID NO: 1887011
ggagcaaccuagucccaua

SEQ ID NO: 2442203 - RNA, 19 nt, Artificial Sequence
  Description of Artificial Sequence: Synthetic oligonucleotide
  Antisense strand to SEQ ID NO: 2442202
uaugggacuagguugcucc

SEQ ID NO: 2442204 - RNA, 19 nt, Artificial Sequence
  Description of Artificial Sequence: Synthetic oligonucleotide
  Sense strand starting at position 423 of SEQ ID NO: 1887012
ucgauacucuuucuacaag

SEQ ID NO: 2442205 - RNA, 19 nt, Artificial Sequence
  Description of Artificial Sequence: Synthetic oligonucleotide
  Antisense strand to SEQ ID NO: 2442204
cuuguagaaagaguaucga

SEQ ID NO: 2442206 - RNA, 19 nt, Artificial Sequence
  Description of Artificial Sequence: Synthetic oligonucleotide
  Sense strand starting at position 556 of SEQ ID NO: 1887012
ugcccaucucuaugacagu

SEQ ID NO: 2442207 - RNA, 19 nt, Artificial Sequence
  Description of Artificial Sequence: Synthetic oligonucleotide
  Antisense strand to SEQ ID NO: 2442206
acugucauagagaugggca

SEQ ID NO: 2442208 - RNA, 19 nt, Artificial Sequence
  Description of Artificial Sequence: Synthetic oligonucleotide
  Sense strand starting at position 622 of SEQ ID NO: 1887012
cgcagugaggacgauucau

SEQ ID NO: 2442209 - RNA, 19 nt, Artificial Sequence
  Description of Artificial Sequence: Synthetic oligonucleotide
  Antisense strand to SEQ ID NO: 2442208
augaaucguccucacugcg

SEQ ID NO: 2442210 - RNA, 19 nt, Artificial Sequence
  Description of Artificial Sequence: Synthetic oligonucleotide
  Sense strand starting at position 2846 of SEQ ID NO: 1887012
gggagacuugcugagucau

SEQ ID NO: 2442211 - RNA, 19 nt, Artificial Sequence
  Description of Artificial Sequence: Synthetic oligonucleotide
  Antisense strand to SEQ ID NO: 2442210
augacucagcaagucuccc

SEQ ID NO: 2442212 - RNA, 19 nt, Artificial Sequence
  Description of Artificial Sequence: Synthetic oligonucleotide
  Sense strand starting at position 2848 of SEQ ID NO: 1887012
gagacuugcugagucauca

SEQ ID NO: 2442213 - RNA, 19 nt, Artificial Sequence
  Description of Artificial Sequence: Synthetic oligonucleotide
  Antisense strand to SEQ ID NO: 2442212
ugaugacucagcaagucuc

SEQ ID NO: 2442214 - RNA, 19 nt, Artificial Sequence
  Description of Artificial Sequence: Synthetic oligonucleotide
  Sense strand starting at position 2858 of SEQ ID NO: 1887012
gagucaucagcgugagguc

SEQ ID NO: 2442215 - RNA, 19 nt, Artificial Sequence
  Description of Artificial Sequence: Synthetic oligonucleotide
  Antisense strand to SEQ ID NO: 2442214
gaccucacgcugaugacuc

SEQ ID NO: 2442216 - RNA, 19 nt, Artificial Sequence
  Description of Artificial Sequence: Synthetic oligonucleotide
  Sense strand starting at position 2871 of SEQ ID NO: 1887012
gaggucacucggugcucaa

SEQ ID NO: 2442217 - RNA, 19 nt, Artificial Sequence
  Description of Artificial Sequence: Synthetic oligonucleotide
  Antisense strand to SEQ ID NO: 2442216
uugagcaccgagugaccuc

SEQ ID NO: 2442218 - RNA, 19 nt, Artificial Sequence
  Description of Artificial Sequence: Synthetic oligonucleotide
  Sense strand starting at position 3187 of SEQ ID NO: 1887012
gggaaauaguucccugagu

SEQ ID NO: 2442219 - RNA, 19 nt, Artificial Sequence
  Description of Artificial Sequence: Synthetic oligonucleotide
  Antisense strand to SEQ ID NO: 2442218
acucagggaacuauuuccc

SEQ ID NO: 2442220 - RNA, 19 nt, Artificial Sequence
  Description of Artificial Sequence: Synthetic oligonucleotide
  Sense strand starting at position 3188 of SEQ ID NO: 1887012
ggaaauaguucccugagug

SEQ ID NO: 2442221 - RNA, 19 nt, Artificial Sequence
  Description of Artificial Sequence: Synthetic oligonucleotide
  Antisense strand to SEQ ID NO: 2442220
cacucagggaacuauuucc

SEQ ID NO: 2442222 - RNA, 19 nt, Artificial Sequence
  Description of Artificial Sequence: Synthetic oligonucleotide
  Sense strand starting at position 3189 of SEQ ID NO: 1887012
gaaauaguucccugaguga

SEQ ID NO: 2442223 - RNA, 19 nt, Artificial Sequence
  Description of Artificial Sequence: Synthetic oligonucleotide
  Antisense strand to SEQ ID NO: 2442222
ucacucagggaacuauuuc

SEQ ID NO: 2442224 - RNA, 19 nt, Artificial Sequence
  Description of Artificial Sequence: Synthetic oligonucleotide
  Sense strand starting at position 3297 of SEQ ID NO: 1887012
gaucgagguccugggagaa

SEQ ID NO: 2442225 - RNA, 19 nt, Artificial Sequence
  Description of Artificial Sequence: Synthetic oligonucleotide
  Antisense strand to SEQ ID NO: 2442224
uucucccaggaccucgauc

SEQ ID NO: 2442226 - RNA, 19 nt, Artificial Sequence
  Description of Artificial Sequence: Synthetic oligonucleotide
  Sense strand starting at position 3434 of SEQ ID NO: 1887012
ccuggagucuggguugaga

SEQ ID NO: 2442227 - RNA, 19 nt, Artificial Sequence
  Description of Artificial Sequence: Synthetic oligonucleotide
  Antisense strand to SEQ ID NO: 2442226
ucucaacccagacuccagg

SEQ ID NO: 2442228 - RNA, 19 nt, Artificial Sequence
  Description of Artificial Sequence: Synthetic oligonucleotide
  Sense strand starting at position 3436 of SEQ ID NO: 1887012
uggagucuggguugagacu

SEQ ID NO: 2442229 - RNA, 19 nt, Artificial Sequence
  Description of Artificial Sequence: Synthetic oligonucleotide
  Antisense strand to SEQ ID NO: 2442228
agucucaacccagacucca

SEQ ID NO: 2442230 - RNA, 19 nt, Artificial Sequence
  Description of Artificial Sequence: Synthetic oligonucleotide
  Sense strand starting at position 3551 of SEQ ID NO: 1887012
uaaaguugucgcuaccuga

SEQ ID NO: 2442231 - RNA, 19 nt, Artificial Sequence
  Description of Artificial Sequence: Synthetic oligonucleotide
  Antisense strand to SEQ ID NO: 2442230
ucagguagcgacaacuuua

SEQ ID NO: 2442232 - RNA, 19 nt, Artificial Sequence
  Description of Artificial Sequence: Synthetic oligonucleotide
  Sense strand starting at position 3574 of SEQ ID NO: 1887012
gggucucagcguuguguga

SEQ ID NO: 2442233 - RNA, 19 nt, Artificial Sequence
  Description of Artificial Sequence: Synthetic oligonucleotide
  Antisense strand to SEQ ID NO: 2442232
ucacacaacgcugagaccc

SEQ ID NO: 2442234 - RNA, 19 nt, Artificial Sequence
  Description of Artificial Sequence: Synthetic oligonucleotide
  Sense strand starting at position 3575 of SEQ ID NO: 1887012
ggucucagcguugugugaa

SEQ ID NO: 2442235 - RNA, 19 nt, Artificial Sequence
  Description of Artificial Sequence: Synthetic oligonucleotide
  Antisense strand to SEQ ID NO: 2442234
uucacacaacgcugagacc

SEQ ID NO: 2442236 - RNA, 19 nt, Artificial Sequence
  Description of Artificial Sequence: Synthetic oligonucleotide
  Sense strand starting at position 3576 of SEQ ID NO: 1887012
gucucagcguugugugaag

SEQ ID NO: 2442237 - RNA, 19 nt, Artificial Sequence
  Description of Artificial Sequence: Synthetic oligonucleotide
  Antisense strand to SEQ ID NO: 2442236
cuucacacaacgcugagac

SEQ ID NO: 2442238 - RNA, 19 nt, Artificial Sequence
  Description of Artificial Sequence: Synthetic oligonucleotide
  Sense strand starting at position 3578 of SEQ ID NO: 1887012
cucagcguugugugaaguu

SEQ ID NO: 2442239 - RNA, 19 nt, Artificial Sequence
  Description of Artificial Sequence: Synthetic oligonucleotide
  Antisense strand to SEQ ID NO: 2442238
aacuucacacaacgcugag

SEQ ID NO: 2442240 - RNA, 19 nt, Artificial Sequence
  Description of Artificial Sequence: Synthetic oligonucleotide
  Sense strand starting at position 3681 of SEQ ID NO: 1887012
gccaccuuuccuuggguau

SEQ ID NO: 2442241 - RNA, 19 nt, Artificial Sequence
  Description of Artificial Sequence: Synthetic oligonucleotide
  Antisense strand to SEQ ID NO: 2442240
auacccaaggaaagguggc

SEQ ID NO: 2442242 - RNA, 19 nt, Artificial Sequence
  Description of Artificial Sequence: Synthetic oligonucleotide
  Sense strand starting at position 3699 of SEQ ID NO: 1887012
uguggagauucacgaaggu

SEQ ID NO: 2442243 - RNA, 19 nt, Artificial Sequence
  Description of Artificial Sequence: Synthetic oligonucleotide
  Antisense strand to SEQ ID NO: 2442242
accuucgugaaucuccaca

SEQ ID NO: 2442244 - RNA, 19 nt, Artificial Sequence
  Description of Artificial Sequence: Synthetic oligonucleotide
  Sense strand starting at position 3767 of SEQ ID NO: 1887012
gugguuugcccucagggau

SEQ ID NO: 2442245 - RNA, 19 nt, Artificial Sequence
  Description of Artificial Sequence: Synthetic oligonucleotide
  Antisense strand to SEQ ID NO: 2442244
aucccugagggcaaaccac

SEQ ID NO: 2442246 - RNA, 19 nt, Artificial Sequence
  Description of Artificial Sequence: Synthetic oligonucleotide
  Sense strand starting at position 3835 of SEQ ID NO: 1887012
guccauucucagugagcac

SEQ ID NO: 2442247 - RNA, 19 nt, Artificial Sequence
  Description of Artificial Sequence: Synthetic oligonucleotide
  Antisense strand to SEQ ID NO: 2442246
gugcucacugagaauggac

SEQ ID NO: 2442248 - RNA, 19 nt, Artificial Sequence
  Description of Artificial Sequence: Synthetic oligonucleotide
  Sense strand starting at position 3903 of SEQ ID NO: 1887012
gcuuauagauuccagaugu

SEQ ID NO: 2442249 - RNA, 19 nt, Artificial Sequence
  Description of Artificial Sequence: Synthetic oligonucleotide
  Antisense strand to SEQ ID NO: 2442248
acaucuggaaucuauaagc

SEQ ID NO: 2442250 - RNA, 19 nt, Artificial Sequence
  Description of Artificial Sequence: Synthetic oligonucleotide
  Sense strand starting at position 3937 of SEQ ID NO: 1887012
gaccguuggccuggaguuu

SEQ ID NO: 2442251 - RNA, 19 nt, Artificial Sequence
  Description of Artificial Sequence: Synthetic oligonucleotide
  Antisense strand to SEQ ID NO: 2442250
aaacuccaggccaacgguc

SEQ ID NO: 2442252 - RNA, 19 nt, Artificial Sequence
  Description of Artificial Sequence: Synthetic oligonucleotide
  Sense strand starting at position 3949 of SEQ ID NO: 1887012
ggaguuugaugcccuggga

SEQ ID NO: 2442253 - RNA, 19 nt, Artificial Sequence
  Description of Artificial Sequence: Synthetic oligonucleotide
  Antisense strand to SEQ ID NO: 2442252
ucccagggcaucaaacucc

SEQ ID NO: 2442254 - RNA, 19 nt, Artificial Sequence
  Description of Artificial Sequence: Synthetic oligonucleotide
  Sense strand starting at position 21 of SEQ ID NO: 1887013
augccagcucuggauaaga

SEQ ID NO: 2442255 - RNA, 19 nt, Artificial Sequence
  Description of Artificial Sequence: Synthetic oligonucleotide
  Antisense strand to SEQ ID NO: 2442254
ucuuauccagagcuggcau

SEQ ID NO: 2442256 - RNA, 19 nt, Artificial Sequence
  Description of Artificial Sequence: Synthetic oligonucleotide
  Sense strand starting at position 23 of SEQ ID NO: 1887013
gccagcucuggauaagauu

SEQ ID NO: 2442257 - RNA, 19 nt, Artificial Sequence
  Description of Artificial Sequence: Synthetic oligonucleotide
  Antisense strand to SEQ ID NO: 2442256
aaucuuauccagagcuggc

SEQ ID NO: 2442258 - RNA, 19 nt, Artificial Sequence
  Description of Artificial Sequence: Synthetic oligonucleotide
  Sense strand starting at position 471 of SEQ ID NO: 1887013
guucuuacauuaucuagau

SEQ ID NO: 2442259 - RNA, 19 nt, Artificial Sequence
  Description of Artificial Sequence: Synthetic oligonucleotide
  Antisense strand to SEQ ID NO: 2442258
aucuagauaauguaagaac

SEQ ID NO: 2442260 - RNA, 19 nt, Artificial Sequence
  Description of Artificial Sequence: Synthetic oligonucleotide
  Sense strand starting at position 484 of SEQ ID NO: 1887013
cuagauugauccuuguuac

SEQ ID NO: 2442261 - RNA, 19 nt, Artificial Sequence
  Description of Artificial Sequence: Synthetic oligonucleotide
  Antisense strand to SEQ ID NO: 2442260
guaacaaggaucaaucuag

SEQ ID NO: 2442262 - RNA, 19 nt, Artificial Sequence
  Description of Artificial Sequence: Synthetic oligonucleotide
  Sense strand starting at position 503 of SEQ ID NO: 1887013
uguguaaguaaguagaucu

SEQ ID NO: 2442263 - RNA, 19 nt, Artificial Sequence
  Description of Artificial Sequence: Synthetic oligonucleotide
  Antisense strand to SEQ ID NO: 2442262
agaucuacuuacuuacaca

SEQ ID NO: 2442264 - RNA, 19 nt, Artificial Sequence
  Description of Artificial Sequence: Synthetic oligonucleotide
  Sense strand starting at position 554 of SEQ ID NO: 1887013
ccaggagguuuauauauuu

SEQ ID NO: 2442265 - RNA, 19 nt, Artificial Sequence
  Description of Artificial Sequence: Synthetic oligonucleotide
  Antisense strand to SEQ ID NO: 2442264
aaauauauaaaccuccugg

SEQ ID NO: 2442266 - RNA, 19 nt, Artificial Sequence
  Description of Artificial Sequence: Synthetic oligonucleotide
  Sense strand starting at position 905 of SEQ ID NO: 1887013
gaccgcauuuccuuguuaa

SEQ ID NO: 2442267 - RNA, 19 nt, Artificial Sequence
  Description of Artificial Sequence: Synthetic oligonucleotide
  Antisense strand to SEQ ID NO: 2442266
uuaacaaggaaaugcgguc

SEQ ID NO: 2442268 - RNA, 19 nt, Artificial Sequence
  Description of Artificial Sequence: Synthetic oligonucleotide
  Sense strand starting at position 906 of SEQ ID NO: 1887013
accgcauuuccuuguuaau

SEQ ID NO: 2442269 - RNA, 19 nt, Artificial Sequence
  Description of Artificial Sequence: Synthetic oligonucleotide
  Antisense strand to SEQ ID NO: 2442268
auuaacaaggaaaugcggu

SEQ ID NO: 2442270 - RNA, 19 nt, Artificial Sequence
  Description of Artificial Sequence: Synthetic oligonucleotide
  Sense strand starting at position 908 of SEQ ID NO: 1887013
cgcauuuccuuguuaauau

SEQ ID NO: 2442271 - RNA, 19 nt, Artificial Sequence
  Description of Artificial Sequence: Synthetic oligonucleotide
  Antisense strand to SEQ ID NO: 2442270
auauuaacaaggaaaugcg

SEQ ID NO: 2442272 - RNA, 19 nt, Artificial Sequence
  Description of Artificial Sequence: Synthetic oligonucleotide
  Sense strand starting at position 928 of SEQ ID NO: 1887013
uauguagacccaugagaua

SEQ ID NO: 2442273 - RNA, 19 nt, Artificial Sequence
  Description of Artificial Sequence: Synthetic oligonucleotide
  Antisense strand to SEQ ID NO: 2442272
uaucucaugggucuacaua

SEQ ID NO: 2442274 - RNA, 19 nt, Artificial Sequence
  Description of Artificial Sequence: Synthetic oligonucleotide
  Sense strand starting at position 1325 of SEQ ID NO: 1887013
agguauucucuagaaguuu

SEQ ID NO: 2442275 - RNA, 19 nt, Artificial Sequence
  Description of Artificial Sequence: Synthetic oligonucleotide
  Antisense strand to SEQ ID NO: 2442274
aaacuucuagagaauaccu

SEQ ID NO: 2442276 - RNA, 19 nt, Artificial Sequence
  Description of Artificial Sequence: Synthetic oligonucleotide
  Sense strand starting at position 1487 of SEQ ID NO: 1887013
aguuuagauugguuuaauc

SEQ ID NO: 2442277 - RNA, 19 nt, Artificial Sequence
  Description of Artificial Sequence: Synthetic oligonucleotide
  Antisense strand to SEQ ID NO: 2442276
gauuaaaccaaucuaaacu

SEQ ID NO: 2442278 - RNA, 19 nt, Artificial Sequence
  Description of Artificial Sequence: Synthetic oligonucleotide
  Sense strand starting at position 1505 of SEQ ID NO: 1887013
cuugaaguguaauccagua

SEQ ID NO: 2442279 - RNA, 19 nt, Artificial Sequence
  Description of Artificial Sequence: Synthetic oligonucleotide
  Antisense strand to SEQ ID NO: 2442278
uacuggauuacacuucaag

SEQ ID NO: 2442280 - RNA, 19 nt, Artificial Sequence
  Description of Artificial Sequence: Synthetic oligonucleotide
  Sense strand starting at position 1507 of SEQ ID NO: 1887013
ugaaguguaauccaguaag

SEQ ID NO: 2442281 - RNA, 19 nt, Artificial Sequence
  Description of Artificial Sequence: Synthetic oligonucleotide
  Antisense strand to SEQ ID NO: 2442280
cuuacuggauuacacuuca

SEQ ID NO: 2442282 - RNA, 19 nt, Artificial Sequence
  Description of Artificial Sequence: Synthetic oligonucleotide
  Sense strand starting at position 1510 of SEQ ID NO: 1887013
aguguaauccaguaagacu

SEQ ID NO: 2442283 - RNA, 19 nt, Artificial Sequence
  Description of Artificial Sequence: Synthetic oligonucleotide
  Antisense strand to SEQ ID NO: 2442282
agucuuacuggauuacacu

SEQ ID NO: 2442284 - RNA, 19 nt, Artificial Sequence
  Description of Artificial Sequence: Synthetic oligonucleotide
  Sense strand starting at position 1546 of SEQ ID NO: 1887013
ggguccuggacaggauaau

SEQ ID NO: 2442285 - RNA, 19 nt, Artificial Sequence
  Description of Artificial Sequence: Synthetic oligonucleotide
  Antisense strand to SEQ ID NO: 2442284
auuauccuguccaggaccc

SEQ ID NO: 2442286 - RNA, 19 nt, Artificial Sequence
  Description of Artificial Sequence: Synthetic oligonucleotide
  Sense strand starting at position 1817 of SEQ ID NO: 1887013
ugcuguguuggcuuaucuu

SEQ ID NO: 2442287 - RNA, 19 nt, Artificial Sequence
  Description of Artificial Sequence: Synthetic oligonucleotide
  Antisense strand to SEQ ID NO: 2442286
aagauaagccaacacagca

SEQ ID NO: 2442288 - RNA, 19 nt, Artificial Sequence
  Description of Artificial Sequence: Synthetic oligonucleotide
  Sense strand starting at position 1897 of SEQ ID NO: 1887013
ccacguaguagcgcagaua

SEQ ID NO: 2442289 - RNA, 19 nt, Artificial Sequence
  Description of Artificial Sequence: Synthetic oligonucleotide
  Antisense strand to SEQ ID NO: 2442288
uaucugcgcuacuacgugg

SEQ ID NO: 2442290 - RNA, 19 nt, Artificial Sequence
  Description of Artificial Sequence: Synthetic oligonucleotide
  Sense strand starting at position 2189 of SEQ ID NO: 1887013
auagauccguuucuaaauu

SEQ ID NO: 2442291 - RNA, 19 nt, Artificial Sequence
  Description of Artificial Sequence: Synthetic oligonucleotide
  Antisense strand to SEQ ID NO: 2442290
aauuuagaaacggaucuau

SEQ ID NO: 2442292 - RNA, 19 nt, Artificial Sequence
  Description of Artificial Sequence: Synthetic oligonucleotide
  Sense strand starting at position 2338 of SEQ ID NO: 1887013
uagauuuauuccuacggag

SEQ ID NO: 2442293 - RNA, 19 nt, Artificial Sequence
  Description of Artificial Sequence: Synthetic oligonucleotide
  Antisense strand to SEQ ID NO: 2442292
cuccguaggaauaaaucua

SEQ ID NO: 2442294 - RNA, 19 nt, Artificial Sequence
  Description of Artificial Sequence: Synthetic oligonucleotide
  Sense strand starting at position 2407 of SEQ ID NO: 1887013
cuguuacuuccugacagaa

SEQ ID NO: 2442295 - RNA, 19 nt, Artificial Sequence
  Description of Artificial Sequence: Synthetic oligonucleotide
  Antisense strand to SEQ ID NO: 2442294
uucugucaggaaguaacag

SEQ ID NO: 2442296 - RNA, 19 nt, Artificial Sequence
  Description of Artificial Sequence: Synthetic oligonucleotide
  Sense strand starting at position 2446 of SEQ ID NO: 1887013
cugauccagugaucauaca

SEQ ID NO: 2442297 - RNA, 19 nt, Artificial Sequence
  Description of Artificial Sequence: Synthetic oligonucleotide
  Antisense strand to SEQ ID NO: 2442296
uguaugaucacuggaucag

SEQ ID NO: 2442298 - RNA, 19 nt, Artificial Sequence
  Description of Artificial Sequence: Synthetic oligonucleotide
  Sense strand starting at position 2635 of SEQ ID NO: 1887013
cauggcauugaguacaagu

SEQ ID NO: 2442299 - RNA, 19 nt, Artificial Sequence
  Description of Artificial Sequence: Synthetic oligonucleotide
  Antisense strand to SEQ ID NO: 2442298
acuuguacucaaugccaug

SEQ ID NO: 2442300 - RNA, 19 nt, Artificial Sequence
  Description of Artificial Sequence: Synthetic oligonucleotide
  Sense strand starting at position 2642 of SEQ ID NO: 1887013
uugaguacaaguggcaaua

SEQ ID NO: 2442301 - RNA, 19 nt, Artificial Sequence
  Description of Artificial Sequence: Synthetic oligonucleotide
  Antisense strand to SEQ ID NO: 2442300
uauugccacuuguacucaa

SEQ ID NO: 2442302 - RNA, 19 nt, Artificial Sequence
  Description of Artificial Sequence: Synthetic oligonucleotide
  Sense strand starting at position 2827 of SEQ ID NO: 1887013
ucuguauggcucuagaaga

SEQ ID NO: 2442303 - RNA, 19 nt, Artificial Sequence
  Description of Artificial Sequence: Synthetic oligonucleotide
  Antisense strand to SEQ ID NO: 2442302
ucuucuagagccauacaga

SEQ ID NO: 2442304 - RNA, 19 nt, Artificial Sequence
  Description of Artificial Sequence: Synthetic oligonucleotide
  Sense strand starting at position 2834 of SEQ ID NO: 1887013
ggcucuagaagauaguuua

SEQ ID NO: 2442305 - RNA, 19 nt, Artificial Sequence
  Description of Artificial Sequence: Synthetic oligonucleotide
  Antisense strand to SEQ ID NO: 2442304
uaaacuaucuucuagagcc

SEQ ID NO: 2442306 - RNA, 19 nt, Artificial Sequence
  Description of Artificial Sequence: Synthetic oligonucleotide
  Sense strand starting at position 2980 of SEQ ID NO: 1887013
uaauguguuguuuaggagu

SEQ ID NO: 2442307 - RNA, 19 nt, Artificial Sequence
  Description of Artificial Sequence: Synthetic oligonucleotide
  Antisense strand to SEQ ID NO: 2442306
acuccuaaacaacacauua

SEQ ID NO: 2442308 - RNA, 19 nt, Artificial Sequence
  Description of Artificial Sequence: Synthetic oligonucleotide
  Sense strand starting at position 3001 of SEQ ID NO: 1887013
uccaucuguggucaugagu

SEQ ID NO: 2442309 - RNA, 19 nt, Artificial Sequence
  Description of Artificial Sequence: Synthetic oligonucleotide
  Antisense strand to SEQ ID NO: 2442308
acucaugaccacagaugga

SEQ ID NO: 2442310 - RNA, 19 nt, Artificial Sequence
  Description of Artificial Sequence: Synthetic oligonucleotide
  Sense strand starting at position 3068 of SEQ ID NO: 1887013
gguuaccuguccucauaaa

SEQ ID NO: 2442311 - RNA, 19 nt, Artificial Sequence
  Description of Artificial Sequence: Synthetic oligonucleotide
  Antisense strand to SEQ ID NO: 2442310
uuuaugaggacagguaacc

SEQ ID NO: 2442312 - RNA, 19 nt, Artificial Sequence
  Description of Artificial Sequence: Synthetic oligonucleotide
  Sense strand starting at position 3112 of SEQ ID NO: 1887013
uucuguucucuggaaguau

SEQ ID NO: 2442313 - RNA, 19 nt, Artificial Sequence
  Description of Artificial Sequence: Synthetic oligonucleotide
  Antisense strand to SEQ ID NO: 2442312
auacuuccagagaacagaa

SEQ ID NO: 2442314 - RNA, 19 nt, Artificial Sequence
  Description of Artificial Sequence: Synthetic oligonucleotide
  Sense strand starting at position 3169 of SEQ ID NO: 1887013
uguagacaucuccagcuau

SEQ ID NO: 2442315 - RNA, 19 nt, Artificial Sequence
  Description of Artificial Sequence: Synthetic oligonucleotide
  Antisense strand to SEQ ID NO: 2442314
auagcuggagaugucuaca

SEQ ID NO: 2442316 - RNA, 19 nt, Artificial Sequence
  Description of Artificial Sequence: Synthetic oligonucleotide
  Sense strand starting at position 3188 of SEQ ID NO: 1887013
gccaucuaggucuagaguu

SEQ ID NO: 2442317 - RNA, 19 nt, Artificial Sequence
  Description of Artificial Sequence: Synthetic oligonucleotide
  Antisense strand to SEQ ID NO: 2442316
aacucuagaccuagauggc

SEQ ID NO: 2442318 - RNA, 19 nt, Artificial Sequence
  Description of Artificial Sequence: Synthetic oligonucleotide
  Sense strand starting at position 3557 of SEQ ID NO: 1887013
uuaauaguuaugggacugu

SEQ ID NO: 2442319 - RNA, 19 nt, Artificial Sequence
  Description of Artificial Sequence: Synthetic oligonucleotide
  Antisense strand to SEQ ID NO: 2442318
acagucccauaacuauuaa

SEQ ID NO: 2442320 - RNA, 19 nt, Artificial Sequence
  Description of Artificial Sequence: Synthetic oligonucleotide
  Sense strand starting at position 3573 of SEQ ID NO: 1887013
uguucugaguauuuauucu

SEQ ID NO: 2442321 - RNA, 19 nt, Artificial Sequence
  Description of Artificial Sequence: Synthetic oligonucleotide
  Antisense strand to SEQ ID NO: 2442320
agaauaaauacucagaaca

SEQ ID NO: 2442322 - RNA, 19 nt, Artificial Sequence
  Description of Artificial Sequence: Synthetic oligonucleotide
  Sense strand starting at position 3592 of SEQ ID NO: 1887013
uauguaaauguugguaaac

SEQ ID NO: 2442323 - RNA, 19 nt, Artificial Sequence
  Description of Artificial Sequence: Synthetic oligonucleotide
  Antisense strand to SEQ ID NO: 2442322
guuuaccaacauuuacaua

SEQ ID NO: 2442324 - RNA, 19 nt, Artificial Sequence
  Description of Artificial Sequence: Synthetic oligonucleotide
  Sense strand starting at position 3593 of SEQ ID NO: 1887013
auguaaauguugguaaacu

SEQ ID NO: 2442325 - RNA, 19 nt, Artificial Sequence
  Description of Artificial Sequence: Synthetic oligonucleotide
  Antisense strand to SEQ ID NO: 2442324
aguuuaccaacauuuacau

SEQ ID NO: 2442326 - RNA, 19 nt, Artificial Sequence
  Description of Artificial Sequence: Synthetic oligonucleotide
  Sense strand starting at position 3729 of SEQ ID NO: 1887013
ccugauauuuguuauuugu

SEQ ID NO: 2442327 - RNA, 19 nt, Artificial Sequence
  Description of Artificial Sequence: Synthetic oligonucleotide
  Antisense strand to SEQ ID NO: 2442326
acaaauaacaaauaucagg

SEQ ID NO: 2442328 - RNA, 19 nt, Artificial Sequence
  Description of Artificial Sequence: Synthetic oligonucleotide
  Sense strand starting at position 3777 of SEQ ID NO: 1887013
cuugucagggcuuaucaau

SEQ ID NO: 2442329 - RNA, 19 nt, Artificial Sequence
  Description of Artificial Sequence: Synthetic oligonucleotide
  Antisense strand to SEQ ID NO: 2442328
auugauaagcccugacaag

SEQ ID NO: 2442330 - RNA, 19 nt, Artificial Sequence
  Description of Artificial Sequence: Synthetic oligonucleotide
  Sense strand starting at position 3783 of SEQ ID NO: 1887013
agggcuuaucaauguuaua

SEQ ID NO: 2442331 - RNA, 19 nt, Artificial Sequence
  Description of Artificial Sequence: Synthetic oligonucleotide
  Antisense strand to SEQ ID NO: 2442330
uauaacauugauaagcccu

SEQ ID NO: 2442332 - RNA, 19 nt, Artificial Sequence
  Description of Artificial Sequence: Synthetic oligonucleotide
  Sense strand starting at position 3952 of SEQ ID NO: 1887013
ccuaacuuccuggaagcuu

SEQ ID NO: 2442333 - RNA, 19 nt, Artificial Sequence
  Description of Artificial Sequence: Synthetic oligonucleotide
  Antisense strand to SEQ ID NO: 2442332
aagcuuccaggaaguuagg

SEQ ID NO: 2442334 - RNA, 19 nt, Artificial Sequence
  Description of Artificial Sequence: Synthetic oligonucleotide
  Sense strand starting at position 11 of SEQ ID NO: 1887014
agaugugaccuuggacaug

SEQ ID NO: 2442335 - RNA, 19 nt, Artificial Sequence
  Description of Artificial Sequence: Synthetic oligonucleotide
  Antisense strand to SEQ ID NO: 2442334
cauguccaaggucacaucu

SEQ ID NO: 2442336 - RNA, 19 nt, Artificial Sequence
  Description of Artificial Sequence: Synthetic oligonucleotide
  Sense strand starting at position 16 of SEQ ID NO: 1887014
ugaccuuggacaugaguuu

SEQ ID NO: 2442337 - RNA, 19 nt, Artificial Sequence
  Description of Artificial Sequence: Synthetic oligonucleotide
  Antisense strand to SEQ ID NO: 2442336
aaacucauguccaagguca

SEQ ID NO: 2442338 - RNA, 19 nt, Artificial Sequence
  Description of Artificial Sequence: Synthetic oligonucleotide
  Sense strand starting at position 147 of SEQ ID NO: 1887014
ggagguugaugucuguaau

SEQ ID NO: 2442339 - RNA, 19 nt, Artificial Sequence
  Description of Artificial Sequence: Synthetic oligonucleotide
  Antisense strand to SEQ ID NO: 2442338
auuacagacaucaaccucc

SEQ ID NO: 2442340 - RNA, 19 nt, Artificial Sequence
  Description of Artificial Sequence: Synthetic oligonucleotide
  Sense strand starting at position 148 of SEQ ID NO: 1887014
gagguugaugucuguaauc

SEQ ID NO: 2442341 - RNA, 19 nt, Artificial Sequence
  Description of Artificial Sequence: Synthetic oligonucleotide
  Antisense strand to SEQ ID NO: 2442340
gauuacagacaucaaccuc

SEQ ID NO: 2442342 - RNA, 19 nt, Artificial Sequence
  Description of Artificial Sequence: Synthetic oligonucleotide
  Sense strand starting at position 484 of SEQ ID NO: 1887014
gucaguuccaccugaguua

SEQ ID NO: 2442343 - RNA, 19 nt, Artificial Sequence
  Description of Artificial Sequence: Synthetic oligonucleotide
  Antisense strand to SEQ ID NO: 2442342
uaacucagguggaacugac

SEQ ID NO: 2442344 - RNA, 19 nt, Artificial Sequence
  Description of Artificial Sequence: Synthetic oligonucleotide
  Sense strand starting at position 562 of SEQ ID NO: 1887014
cccucagccuuccaggaua

SEQ ID NO: 2442345 - RNA, 19 nt, Artificial Sequence
  Description of Artificial Sequence: Synthetic oligonucleotide
  Antisense strand to SEQ ID NO: 2442344
uauccuggaaggcugaggg

SEQ ID NO: 2442346 - RNA, 19 nt, Artificial Sequence
  Description of Artificial Sequence: Synthetic oligonucleotide
  Sense strand starting at position 1099 of SEQ ID NO: 1887014
cugggugucuucgaugaca

SEQ ID NO: 2442347 - RNA, 19 nt, Artificial Sequence
  Description of Artificial Sequence: Synthetic oligonucleotide
  Antisense strand to SEQ ID NO: 2442346
ugucaucgaagacacccag

SEQ ID NO: 2442348 - RNA, 19 nt, Artificial Sequence
  Description of Artificial Sequence: Synthetic oligonucleotide
  Sense strand starting at position 1101 of SEQ ID NO: 1887014
gggugucuucgaugacaac

SEQ ID NO: 2442349 - RNA, 19 nt, Artificial Sequence
  Description of Artificial Sequence: Synthetic oligonucleotide
  Antisense strand to SEQ ID NO: 2442348
guugucaucgaagacaccc

SEQ ID NO: 2442350 - RNA, 19 nt, Artificial Sequence
  Description of Artificial Sequence: Synthetic oligonucleotide
  Sense strand starting at position 1267 of SEQ ID NO: 1887014
cagacccuguucuuggaaa

SEQ ID NO: 2442351 - RNA, 19 nt, Artificial Sequence
  Description of Artificial Sequence: Synthetic oligonucleotide
  Antisense strand to SEQ ID NO: 2442350
uuuccaagaacagggucug

SEQ ID NO: 2442352 - RNA, 19 nt, Artificial Sequence
  Description of Artificial Sequence: Synthetic oligonucleotide
  Sense strand starting at position 1268 of SEQ ID NO: 1887014
agacccuguucuuggaaau

SEQ ID NO: 2442353 - RNA, 19 nt, Artificial Sequence
  Description of Artificial Sequence: Synthetic oligonucleotide
  Antisense strand to SEQ ID NO: 2442352
auuuccaagaacagggucu

SEQ ID NO: 2442354 - RNA, 19 nt, Artificial Sequence
  Description of Artificial Sequence: Synthetic oligonucleotide
  Sense strand starting at position 1269 of SEQ ID NO: 1887014
gacccuguucuuggaaaug

SEQ ID NO: 2442355 - RNA, 19 nt, Artificial Sequence
  Description of Artificial Sequence: Synthetic oligonucleotide
  Antisense strand to SEQ ID NO: 2442354
cauuuccaagaacaggguc

SEQ ID NO: 2442356 - RNA, 19 nt, Artificial Sequence
  Description of Artificial Sequence: Synthetic oligonucleotide
  Sense strand starting at position 1309 of SEQ ID NO: 1887014
ggcuuugugcccuccaagu

SEQ ID NO: 2442357 - RNA, 19 nt, Artificial Sequence
  Description of Artificial Sequence: Synthetic oligonucleotide
  Antisense strand to SEQ ID NO: 2442356
acuuggagggcacaaagcc

SEQ ID NO: 2442358 - RNA, 19 nt, Artificial Sequence
  Description of Artificial Sequence: Synthetic oligonucleotide
  Sense strand starting at position 1416 of SEQ ID NO: 1887014
ugauauuccugcccuagag

SEQ ID NO: 2442359 - RNA, 19 nt, Artificial Sequence
  Description of Artificial Sequence: Synthetic oligonucleotide
  Antisense strand to SEQ ID NO: 2442358
cucuagggcaggaauauca

SEQ ID NO: 2442360 - RNA, 19 nt, Artificial Sequence
  Description of Artificial Sequence: Synthetic oligonucleotide
  Sense strand starting at position 1443 of SEQ ID NO: 1887014
ccugaauucugagucuguu

SEQ ID NO: 2442361 - RNA, 19 nt, Artificial Sequence
  Description of Artificial Sequence: Synthetic oligonucleotide
  Antisense strand to SEQ ID NO: 2442360
aacagacucagaauucagg

SEQ ID NO: 2442362 - RNA, 19 nt, Artificial Sequence
  Description of Artificial Sequence: Synthetic oligonucleotide
  Sense strand starting at position 2238 of SEQ ID NO: 1887014
cacuuauggcgucacuaag

SEQ ID NO: 2442363 - RNA, 19 nt, Artificial Sequence
  Description of Artificial Sequence: Synthetic oligonucleotide
  Antisense strand to SEQ ID NO: 2442362
cuuagugacgccauaagug

SEQ ID NO: 2442364 - RNA, 19 nt, Artificial Sequence
  Description of Artificial Sequence: Synthetic oligonucleotide
  Sense strand starting at position 2463 of SEQ ID NO: 1887014
cgccaacucuagugaagaa

SEQ ID NO: 2442365 - RNA, 19 nt, Artificial Sequence
  Description of Artificial Sequence: Synthetic oligonucleotide
  Antisense strand to SEQ ID NO: 2442364
uucuucacuagaguuggcg

SEQ ID NO: 2442366 - RNA, 19 nt, Artificial Sequence
  Description of Artificial Sequence: Synthetic oligonucleotide
  Sense strand starting at position 2523 of SEQ ID NO: 1887014
cuaugaagagcuugugcaa

SEQ ID NO: 2442367 - RNA, 19 nt, Artificial Sequence
  Description of Artificial Sequence: Synthetic oligonucleotide
  Antisense strand to SEQ ID NO: 2442366
uugcacaagcucuucauag

SEQ ID NO: 2442368 - RNA, 19 nt, Artificial Sequence
  Description of Artificial Sequence: Synthetic oligonucleotide
  Sense strand starting at position 2526 of SEQ ID NO: 1887014
ugaagagcuugugcaagua

SEQ ID NO: 2442369 - RNA, 19 nt, Artificial Sequence
  Description of Artificial Sequence: Synthetic oligonucleotide
  Antisense strand to SEQ ID NO: 2442368
uacuugcacaagcucuuca

SEQ ID NO: 2442370 - RNA, 19 nt, Artificial Sequence
  Description of Artificial Sequence: Synthetic oligonucleotide
  Sense strand starting at position 2546 of SEQ ID NO: 1887014
agcguuugcugagcggaaa

SEQ ID NO: 2442371 - RNA, 19 nt, Artificial Sequence
  Description of Artificial Sequence: Synthetic oligonucleotide
  Antisense strand to SEQ ID NO: 2442370
uuuccgcucagcaaacgcu

SEQ ID NO: 2442372 - RNA, 19 nt, Artificial Sequence
  Description of Artificial Sequence: Synthetic oligonucleotide
  Sense strand starting at position 3148 of SEQ ID NO: 1887014
gacucagauugugugcaca

SEQ ID NO: 2442373 - RNA, 19 nt, Artificial Sequence
  Description of Artificial Sequence: Synthetic oligonucleotide
  Antisense strand to SEQ ID NO: 2442372
ugugcacacaaucugaguc

SEQ ID NO: 2442374 - RNA, 19 nt, Artificial Sequence
  Description of Artificial Sequence: Synthetic oligonucleotide
  Sense strand starting at position 3150 of SEQ ID NO: 1887014
cucagauugugugcacaug

SEQ ID NO: 2442375 - RNA, 19 nt, Artificial Sequence
  Description of Artificial Sequence: Synthetic oligonucleotide
  Antisense strand to SEQ ID NO: 2442374
caugugcacacaaucugag

SEQ ID NO: 2442376 - RNA, 19 nt, Artificial Sequence
  Description of Artificial Sequence: Synthetic oligonucleotide
  Sense strand starting at position 3177 of SEQ ID NO: 1887014
accguuuauguuugccaga

SEQ ID NO: 2442377 - RNA, 19 nt, Artificial Sequence
  Description of Artificial Sequence: Synthetic oligonucleotide
  Antisense strand to SEQ ID NO: 2442376
ucuggcaaacauaaacggu

SEQ ID NO: 2442378 - RNA, 19 nt, Artificial Sequence
  Description of Artificial Sequence: Synthetic oligonucleotide
  Sense strand starting at position 3307 of SEQ ID NO: 1887014
aggucaucuggguaccuga

SEQ ID NO: 2442379 - RNA, 19 nt, Artificial Sequence
  Description of Artificial Sequence: Synthetic oligonucleotide
  Antisense strand to SEQ ID NO: 2442378
ucagguacccagaugaccu

SEQ ID NO: 2442380 - RNA, 19 nt, Artificial Sequence
  Description of Artificial Sequence: Synthetic oligonucleotide
  Sense strand starting at position 3525 of SEQ ID NO: 1887014
agcgcauugggucagaaga

SEQ ID NO: 2442381 - RNA, 19 nt, Artificial Sequence
  Description of Artificial Sequence: Synthetic oligonucleotide
  Antisense strand to SEQ ID NO: 2442380
ucuucugacccaaugcgcu

SEQ ID NO: 2442382 - RNA, 19 nt, Artificial Sequence
  Description of Artificial Sequence: Synthetic oligonucleotide
  Sense strand starting at position 3527 of SEQ ID NO: 1887014
cgcauugggucagaagaaa

SEQ ID NO: 2442383 - RNA, 19 nt, Artificial Sequence
  Description of Artificial Sequence: Synthetic oligonucleotide
  Antisense strand to SEQ ID NO: 2442382
uuucuucugacccaaugcg

SEQ ID NO: 2442384 - RNA, 19 nt, Artificial Sequence
  Description of Artificial Sequence: Synthetic oligonucleotide
  Sense strand starting at position 3587 of SEQ ID NO: 1887014
agcccuuaccugugaugau

SEQ ID NO: 2442385 - RNA, 19 nt, Artificial Sequence
  Description of Artificial Sequence: Synthetic oligonucleotide
  Antisense strand to SEQ ID NO: 2442384
aucaucacagguaagggcu

SEQ ID NO: 2442386 - RNA, 19 nt, Artificial Sequence
  Description of Artificial Sequence: Synthetic oligonucleotide
  Sense strand starting at position 3588 of SEQ ID NO: 1887014
gcccuuaccugugaugaug

SEQ ID NO: 2442387 - RNA, 19 nt, Artificial Sequence
  Description of Artificial Sequence: Synthetic oligonucleotide
  Antisense strand to SEQ ID NO: 2442386
caucaucacagguaagggc

SEQ ID NO: 2442388 - RNA, 19 nt, Artificial Sequence
  Description of Artificial Sequence: Synthetic oligonucleotide
  Sense strand starting at position 3851 of SEQ ID NO: 1887014
agggucagucuguaacagu

SEQ ID NO: 2442389 - RNA, 19 nt, Artificial Sequence
  Description of Artificial Sequence: Synthetic oligonucleotide
  Antisense strand to SEQ ID NO: 2442388
acuguuacagacugacccu

SEQ ID NO: 2442390 - RNA, 19 nt, Artificial Sequence
  Description of Artificial Sequence: Synthetic oligonucleotide
  Sense strand starting at position 3852 of SEQ ID NO: 1887014
gggucagucuguaacagug

SEQ ID NO: 2442391 - RNA, 19 nt, Artificial Sequence
  Description of Artificial Sequence: Synthetic oligonucleotide
  Antisense strand to SEQ ID NO: 2442390
cacuguuacagacugaccc

SEQ ID NO: 2442392 - RNA, 19 nt, Artificial Sequence
  Description of Artificial Sequence: Synthetic oligonucleotide
  Sense strand starting at position 99 of SEQ ID NO: 1887015
gaccaaagaagguguguaa

SEQ ID NO: 2442393 - RNA, 19 nt, Artificial Sequence
  Description of Artificial Sequence: Synthetic oligonucleotide
  Antisense strand to SEQ ID NO: 2442392
uuacacaccuucuuugguc

SEQ ID NO: 2442394 - RNA, 19 nt, Artificial Sequence
  Description of Artificial Sequence: Synthetic oligonucleotide
  Sense strand starting at position 103 of SEQ ID NO: 1887015
aaagaagguguguaaguga

SEQ ID NO: 2442395 - RNA, 19 nt, Artificial Sequence
  Description of Artificial Sequence: Synthetic oligonucleotide
  Antisense strand to SEQ ID NO: 2442394
ucacuuacacaccuucuuu

SEQ ID NO: 2442396 - RNA, 19 nt, Artificial Sequence
  Description of Artificial Sequence: Synthetic oligonucleotide
  Sense strand starting at position 106 of SEQ ID NO: 1887015
gaagguguguaagugaagu

SEQ ID NO: 2442397 - RNA, 19 nt, Artificial Sequence
  Description of Artificial Sequence: Synthetic oligonucleotide
  Antisense strand to SEQ ID NO: 2442396
acuucacuuacacaccuuc

SEQ ID NO: 2442398 - RNA, 19 nt, Artificial Sequence
  Description of Artificial Sequence: Synthetic oligonucleotide
  Sense strand starting at position 299 of SEQ ID NO: 1887015
uggacaugaucagugcuaa

SEQ ID NO: 2442399 - RNA, 19 nt, Artificial Sequence
  Description of Artificial Sequence: Synthetic oligonucleotide
  Antisense strand to SEQ ID NO: 2442398
uuagcacugaucaugucca

SEQ ID NO: 2442400 - RNA, 19 nt, Artificial Sequence
  Description of Artificial Sequence: Synthetic oligonucleotide
  Sense strand starting at position 300 of SEQ ID NO: 1887015
ggacaugaucagugcuaag

SEQ ID NO: 2442401 - RNA, 19 nt, Artificial Sequence
  Description of Artificial Sequence: Synthetic oligonucleotide
  Antisense strand to SEQ ID NO: 2442400
cuuagcacugaucaugucc

SEQ ID NO: 2442402 - RNA, 19 nt, Artificial Sequence
  Description of Artificial Sequence: Synthetic oligonucleotide
  Sense strand starting at position 463 of SEQ ID NO: 1887015
cucugaugaccucaaagca

SEQ ID NO: 2442403 - RNA, 19 nt, Artificial Sequence
  Description of Artificial Sequence: Synthetic oligonucleotide
  Antisense strand to SEQ ID NO: 2442402
ugcuuugaggucaucagag

SEQ ID NO: 2442404 - RNA, 19 nt, Artificial Sequence
  Description of Artificial Sequence: Synthetic oligonucleotide
  Sense strand starting at position 571 of SEQ ID NO: 1887015
uugagcuguccacaugcau

SEQ ID NO: 2442405 - RNA, 19 nt, Artificial Sequence
  Description of Artificial Sequence: Synthetic oligonucleotide
  Antisense strand to SEQ ID NO: 2442404
augcauguggacagcucaa

SEQ ID NO: 2442406 - RNA, 19 nt, Artificial Sequence
  Description of Artificial Sequence: Synthetic oligonucleotide
  Sense strand starting at position 586 of SEQ ID NO: 1887015
gcaugugacuccucaaacc

SEQ ID NO: 2442407 - RNA, 19 nt, Artificial Sequence
  Description of Artificial Sequence: Synthetic oligonucleotide
  Antisense strand to SEQ ID NO: 2442406
gguuugaggagucacaugc

SEQ ID NO: 2442408 - RNA, 19 nt, Artificial Sequence
  Description of Artificial Sequence: Synthetic oligonucleotide
  Sense strand starting at position 611 of SEQ ID NO: 1887015
agauuucucuaagaauagc

SEQ ID NO: 2442409 - RNA, 19 nt, Artificial Sequence
  Description of Artificial Sequence: Synthetic oligonucleotide
  Antisense strand to SEQ ID NO: 2442408
gcuauucuuagagaaaucu

SEQ ID NO: 2442410 - RNA, 19 nt, Artificial Sequence
  Description of Artificial Sequence: Synthetic oligonucleotide
  Sense strand starting at position 679 of SEQ ID NO: 1887015
ucaggacucacguagcauu

SEQ ID NO: 2442411 - RNA, 19 nt, Artificial Sequence
  Description of Artificial Sequence: Synthetic oligonucleotide
  Antisense strand to SEQ ID NO: 2442410
aaugcuacgugaguccuga

SEQ ID NO: 2442412 - RNA, 19 nt, Artificial Sequence
  Description of Artificial Sequence: Synthetic oligonucleotide
  Sense strand starting at position 692 of SEQ ID NO: 1887015
agcauuaaaucagcuguga

SEQ ID NO: 2442413 - RNA, 19 nt, Artificial Sequence
  Description of Artificial Sequence: Synthetic oligonucleotide
  Antisense strand to SEQ ID NO: 2442412
ucacagcugauuuaaugcu

SEQ ID NO: 2442414 - RNA, 19 nt, Artificial Sequence
  Description of Artificial Sequence: Synthetic oligonucleotide
  Sense strand starting at position 758 of SEQ ID NO: 1887015
ccgagacuccgugggagaa

SEQ ID NO: 2442415 - RNA, 19 nt, Artificial Sequence
  Description of Artificial Sequence: Synthetic oligonucleotide
  Antisense strand to SEQ ID NO: 2442414
uucucccacggagucucgg

SEQ ID NO: 2442416 - RNA, 19 nt, Artificial Sequence
  Description of Artificial Sequence: Synthetic oligonucleotide
  Sense strand starting at position 907 of SEQ ID NO: 1887015
uagagaacucuuuguaagc

SEQ ID NO: 2442417 - RNA, 19 nt, Artificial Sequence
  Description of Artificial Sequence: Synthetic oligonucleotide
  Antisense strand to SEQ ID NO: 2442416
gcuuacaaagaguucucua

SEQ ID NO: 2442418 - RNA, 19 nt, Artificial Sequence
  Description of Artificial Sequence: Synthetic oligonucleotide
  Sense strand starting at position 908 of SEQ ID NO: 1887015
agagaacucuuuguaagca

SEQ ID NO: 2442419 - RNA, 19 nt, Artificial Sequence
  Description of Artificial Sequence: Synthetic oligonucleotide
  Antisense strand to SEQ ID NO: 2442418
ugcuuacaaagaguucucu

SEQ ID NO: 2442420 - RNA, 19 nt, Artificial Sequence
  Description of Artificial Sequence: Synthetic oligonucleotide
  Sense strand starting at position 916 of SEQ ID NO: 1887015
cuuuguaagcaauaaaguu

SEQ ID NO: 2442421 - RNA, 19 nt, Artificial Sequence
  Description of Artificial Sequence: Synthetic oligonucleotide
  Antisense strand to SEQ ID NO: 2442420
aacuuuauugcuuacaaag

SEQ ID NO: 2442422 - RNA, 19 nt, Artificial Sequence
  Description of Artificial Sequence: Synthetic oligonucleotide
  Sense strand starting at position 1026 of SEQ ID NO: 1887015
ugccuucuugcugagaucu

SEQ ID NO: 2442423 - RNA, 19 nt, Artificial Sequence
  Description of Artificial Sequence: Synthetic oligonucleotide
  Antisense strand to SEQ ID NO: 2442422
agaucucagcaagaaggca

SEQ ID NO: 2442424 - RNA, 19 nt, Artificial Sequence
  Description of Artificial Sequence: Synthetic oligonucleotide
  Sense strand starting at position 1192 of SEQ ID NO: 1887015
agggaagucccucgccaaa

SEQ ID NO: 2442425 - RNA, 19 nt, Artificial Sequence
  Description of Artificial Sequence: Synthetic oligonucleotide
  Antisense strand to SEQ ID NO: 2442424
uuuggcgagggacuucccu

SEQ ID NO: 2442426 - RNA, 19 nt, Artificial Sequence
  Description of Artificial Sequence: Synthetic oligonucleotide
  Sense strand starting at position 1532 of SEQ ID NO: 1887015
ugaguuccuuggucaugga

SEQ ID NO: 2442427 - RNA, 19 nt, Artificial Sequence
  Description of Artificial Sequence: Synthetic oligonucleotide
  Antisense strand to SEQ ID NO: 2442426
uccaugaccaaggaacuca

SEQ ID NO: 2442428 - RNA, 19 nt, Artificial Sequence
  Description of Artificial Sequence: Synthetic oligonucleotide
  Sense strand starting at position 2388 of SEQ ID NO: 1887015
uggccuugugcacaggaaa

SEQ ID NO: 2442429 - RNA, 19 nt, Artificial Sequence
  Description of Artificial Sequence: Synthetic oligonucleotide
  Antisense strand to SEQ ID NO: 2442428
uuuccugugcacaaggcca

SEQ ID NO: 2442430 - RNA, 19 nt, Artificial Sequence
  Description of Artificial Sequence: Synthetic oligonucleotide
  Sense strand starting at position 2525 of SEQ ID NO: 1887015
cguugaugccuuguacucu

SEQ ID NO: 2442431 - RNA, 19 nt, Artificial Sequence
  Description of Artificial Sequence: Synthetic oligonucleotide
  Antisense strand to SEQ ID NO: 2442430
agaguacaaggcaucaacg

SEQ ID NO: 2442432 - RNA, 19 nt, Artificial Sequence
  Description of Artificial Sequence: Synthetic oligonucleotide
  Sense strand starting at position 2621 of SEQ ID NO: 1887015
cugaaaugguggcuuucuu

SEQ ID NO: 2442433 - RNA, 19 nt, Artificial Sequence
  Description of Artificial Sequence: Synthetic oligonucleotide
  Antisense strand to SEQ ID NO: 2442432
aagaaagccaccauuucag

SEQ ID NO: 2442434 - RNA, 19 nt, Artificial Sequence
  Description of Artificial Sequence: Synthetic oligonucleotide
  Sense strand starting at position 2643 of SEQ ID NO: 1887015
gggauccucucucccagaa

SEQ ID NO: 2442435 - RNA, 19 nt, Artificial Sequence
  Description of Artificial Sequence: Synthetic oligonucleotide
  Antisense strand to SEQ ID NO: 2442434
uucugggagagaggauccc

SEQ ID NO: 2442436 - RNA, 19 nt, Artificial Sequence
  Description of Artificial Sequence: Synthetic oligonucleotide
  Sense strand starting at position 2800 of SEQ ID NO: 1887015
gagacuuuguccucuacag

SEQ ID NO: 2442437 - RNA, 19 nt, Artificial Sequence
  Description of Artificial Sequence: Synthetic oligonucleotide
  Antisense strand to SEQ ID NO: 2442436
cuguagaggacaaagucuc

SEQ ID NO: 2442438 - RNA, 19 nt, Artificial Sequence
  Description of Artificial Sequence: Synthetic oligonucleotide
  Sense strand starting at position 2802 of SEQ ID NO: 1887015
gacuuuguccucuacagga

SEQ ID NO: 2442439 - RNA, 19 nt, Artificial Sequence
  Description of Artificial Sequence: Synthetic oligonucleotide
  Antisense strand to SEQ ID NO: 2442438
uccuguagaggacaaaguc

SEQ ID NO: 2442440 - RNA, 19 nt, Artificial Sequence
  Description of Artificial Sequence: Synthetic oligonucleotide
  Sense strand starting at position 2804 of SEQ ID NO: 1887015
cuuuguccucuacaggaaa

SEQ ID NO: 2442441 - RNA, 19 nt, Artificial Sequence
  Description of Artificial Sequence: Synthetic oligonucleotide
  Antisense strand to SEQ ID NO: 2442440
uuuccuguagaggacaaag

SEQ ID NO: 2442442 - RNA, 19 nt, Artificial Sequence
  Description of Artificial Sequence: Synthetic oligonucleotide
  Sense strand starting at position 3044 of SEQ ID NO: 1887015
gucugucauggagaggauu

SEQ ID NO: 2442443 - RNA, 19 nt, Artificial Sequence
  Description of Artificial Sequence: Synthetic oligonucleotide
  Antisense strand to SEQ ID NO: 2442442
aauccucuccaugacagac

SEQ ID NO: 2442444 - RNA, 19 nt, Artificial Sequence
  Description of Artificial Sequence: Synthetic oligonucleotide
  Sense strand starting at position 3052 of SEQ ID NO: 1887015
uggagaggauuacacugau

SEQ ID NO: 2442445 - RNA, 19 nt, Artificial Sequence
  Description of Artificial Sequence: Synthetic oligonucleotide
  Antisense strand to SEQ ID NO: 2442444
aucaguguaauccucucca

SEQ ID NO: 2442446 - RNA, 19 nt, Artificial Sequence
  Description of Artificial Sequence: Synthetic oligonucleotide
  Sense strand starting at position 3094 of SEQ ID NO: 1887015
ugaguaggacuuugccaga

SEQ ID NO: 2442447 - RNA, 19 nt, Artificial Sequence
  Description of Artificial Sequence: Synthetic oligonucleotide
  Antisense strand to SEQ ID NO: 2442446
ucuggcaaaguccuacuca

SEQ ID NO: 2442448 - RNA, 19 nt, Artificial Sequence
  Description of Artificial Sequence: Synthetic oligonucleotide
  Sense strand starting at position 3111 of SEQ ID NO: 1887015
gaagaaggcuuuccaggua

SEQ ID NO: 2442449 - RNA, 19 nt, Artificial Sequence
  Description of Artificial Sequence: Synthetic oligonucleotide
  Antisense strand to SEQ ID NO: 2442448
uaccuggaaagccuucuuc

SEQ ID NO: 2442450 - RNA, 19 nt, Artificial Sequence
  Description of Artificial Sequence: Synthetic oligonucleotide
  Sense strand starting at position 3114 of SEQ ID NO: 1887015
gaaggcuuuccagguauaa

SEQ ID NO: 2442451 - RNA, 19 nt, Artificial Sequence
  Description of Artificial Sequence: Synthetic oligonucleotide
  Antisense strand to SEQ ID NO: 2442450
uuauaccuggaaagccuuc

SEQ ID NO: 2442452 - RNA, 19 nt, Artificial Sequence
  Description of Artificial Sequence: Synthetic oligonucleotide
  Sense strand starting at position 3116 of SEQ ID NO: 1887015
aggcuuuccagguauaaga

SEQ ID NO: 2442453 - RNA, 19 nt, Artificial Sequence
  Description of Artificial Sequence: Synthetic oligonucleotide
  Antisense strand to SEQ ID NO: 2442452
ucuuauaccuggaaagccu

SEQ ID NO: 2442454 - RNA, 19 nt, Artificial Sequence
  Description of Artificial Sequence: Synthetic oligonucleotide
  Sense strand starting at position 3118 of SEQ ID NO: 1887015
gcuuuccagguauaagaaa

SEQ ID NO: 2442455 - RNA, 19 nt, Artificial Sequence
  Description of Artificial Sequence: Synthetic oligonucleotide
  Antisense strand to SEQ ID NO: 2442454
uuucuuauaccuggaaagc

SEQ ID NO: 2442456 - RNA, 19 nt, Artificial Sequence
  Description of Artificial Sequence: Synthetic oligonucleotide
  Sense strand starting at position 3216 of SEQ ID NO: 1887015
gcuggaugccaagagauga

SEQ ID NO: 2442457 - RNA, 19 nt, Artificial Sequence
  Description of Artificial Sequence: Synthetic oligonucleotide
  Antisense strand to SEQ ID NO: 2442456
ucaucucuuggcauccagc

SEQ ID NO: 2442458 - RNA, 19 nt, Artificial Sequence
  Description of Artificial Sequence: Synthetic oligonucleotide
  Sense strand starting at position 3443 of SEQ ID NO: 1887015
ggucgugugcugcucuuaa

SEQ ID NO: 2442459 - RNA, 19 nt, Artificial Sequence
  Description of Artificial Sequence: Synthetic oligonucleotide
  Antisense strand to SEQ ID NO: 2442458
uuaagagcagcacacgacc

SEQ ID NO: 2442460 - RNA, 19 nt, Artificial Sequence
  Description of Artificial Sequence: Synthetic oligonucleotide
  Sense strand starting at position 3445 of SEQ ID NO: 1887015
ucgugugcugcucuuaaua

SEQ ID NO: 2442461 - RNA, 19 nt, Artificial Sequence
  Description of Artificial Sequence: Synthetic oligonucleotide
  Antisense strand to SEQ ID NO: 2442460
uauuaagagcagcacacga

SEQ ID NO: 2442462 - RNA, 19 nt, Artificial Sequence
  Description of Artificial Sequence: Synthetic oligonucleotide
  Sense strand starting at position 3530 of SEQ ID NO: 1887015
agguaugaagacugaaugu

SEQ ID NO: 2442463 - RNA, 19 nt, Artificial Sequence
  Description of Artificial Sequence: Synthetic oligonucleotide
  Antisense strand to SEQ ID NO: 2442462
acauucagucuucauaccu

SEQ ID NO: 2442464 - RNA, 19 nt, Artificial Sequence
  Description of Artificial Sequence: Synthetic oligonucleotide
  Sense strand starting at position 3592 of SEQ ID NO: 1887015
gugugugcuggcucuggua

SEQ ID NO: 2442465 - RNA, 19 nt, Artificial Sequence
  Description of Artificial Sequence: Synthetic oligonucleotide
  Antisense strand to SEQ ID NO: 2442464
uaccagagccagcacacac

SEQ ID NO: 2442466 - RNA, 19 nt, Artificial Sequence
  Description of Artificial Sequence: Synthetic oligonucleotide
  Sense strand starting at position 3798 of SEQ ID NO: 1887015
cacuuaagagucuggacau

SEQ ID NO: 2442467 - RNA, 19 nt, Artificial Sequence
  Description of Artificial Sequence: Synthetic oligonucleotide
  Antisense strand to SEQ ID NO: 2442466
auguccagacucuuaagug

SEQ ID NO: 2442468 - RNA, 19 nt, Artificial Sequence
  Description of Artificial Sequence: Synthetic oligonucleotide
  Sense strand starting at position 3820 of SEQ ID NO: 1887015
agauaugaauuugagguaa

SEQ ID NO: 2442469 - RNA, 19 nt, Artificial Sequence
  Description of Artificial Sequence: Synthetic oligonucleotide
  Antisense strand to SEQ ID NO: 2442468
uuaccucaaauucauaucu

SEQ ID NO: 2442470 - RNA, 19 nt, Artificial Sequence
  Description of Artificial Sequence: Synthetic oligonucleotide
  Sense strand starting at position 3822 of SEQ ID NO: 1887015
auaugaauuugagguaaga

SEQ ID NO: 2442471 - RNA, 19 nt, Artificial Sequence
  Description of Artificial Sequence: Synthetic oligonucleotide
  Antisense strand to SEQ ID NO: 2442470
ucuuaccucaaauucauau

SEQ ID NO: 2442472 - RNA, 19 nt, Artificial Sequence
  Description of Artificial Sequence: Synthetic oligonucleotide
  Sense strand starting at position 70 of SEQ ID NO: 1887016
cccacugcuugggcuuaaa

SEQ ID NO: 2442473 - RNA, 19 nt, Artificial Sequence
  Description of Artificial Sequence: Synthetic oligonucleotide
  Antisense strand to SEQ ID NO: 2442472
uuuaagcccaagcaguggg

SEQ ID NO: 2442474 - RNA, 19 nt, Artificial Sequence
  Description of Artificial Sequence: Synthetic oligonucleotide
  Sense strand starting at position 73 of SEQ ID NO: 1887016
acugcuugggcuuaaacuu

SEQ ID NO: 2442475 - RNA, 19 nt, Artificial Sequence
  Description of Artificial Sequence: Synthetic oligonucleotide
  Antisense strand to SEQ ID NO: 2442474
aaguuuaagcccaagcagu

SEQ ID NO: 2442476 - RNA, 19 nt, Artificial Sequence
  Description of Artificial Sequence: Synthetic oligonucleotide
  Sense strand starting at position 79 of SEQ ID NO: 1887016
ugggcuuaaacuugauguu

SEQ ID NO: 2442477 - RNA, 19 nt, Artificial Sequence
  Description of Artificial Sequence: Synthetic oligonucleotide
  Antisense strand to SEQ ID NO: 2442476
aacaucaaguuuaagccca

SEQ ID NO: 2442478 - RNA, 19 nt, Artificial Sequence
  Description of Artificial Sequence: Synthetic oligonucleotide
  Sense strand starting at position 207 of SEQ ID NO: 1887016
cuagcuggcccuuaaacau

SEQ ID NO: 2442479 - RNA, 19 nt, Artificial Sequence
  Description of Artificial Sequence: Synthetic oligonucleotide
  Antisense strand to SEQ ID NO: 2442478
auguuuaagggccagcuag

SEQ ID NO: 2442480 - RNA, 19 nt, Artificial Sequence
  Description of Artificial Sequence: Synthetic oligonucleotide
  Sense strand starting at position 284 of SEQ ID NO: 1887016
cugcaaaugcucugcgaug

SEQ ID NO: 2442481 - RNA, 19 nt, Artificial Sequence
  Description of Artificial Sequence: Synthetic oligonucleotide
  Antisense strand to SEQ ID NO: 2442480
caucgcagagcauuugcag

SEQ ID NO: 2442482 - RNA, 19 nt, Artificial Sequence
  Description of Artificial Sequence: Synthetic oligonucleotide
  Sense strand starting at position 285 of SEQ ID NO: 1887016
ugcaaaugcucugcgaugu

SEQ ID NO: 2442483 - RNA, 19 nt, Artificial Sequence
  Description of Artificial Sequence: Synthetic oligonucleotide
  Antisense strand to SEQ ID NO: 2442482
acaucgcagagcauuugca

SEQ ID NO: 2442484 - RNA, 19 nt, Artificial Sequence
  Description of Artificial Sequence: Synthetic oligonucleotide
  Sense strand starting at position 289 of SEQ ID NO: 1887016
aaugcucugcgauguguua

SEQ ID NO: 2442485 - RNA, 19 nt, Artificial Sequence
  Description of Artificial Sequence: Synthetic oligonucleotide
  Antisense strand to SEQ ID NO: 2442484
uaacacaucgcagagcauu

SEQ ID NO: 2442486 - RNA, 19 nt, Artificial Sequence
  Description of Artificial Sequence: Synthetic oligonucleotide
  Sense strand starting at position 290 of SEQ ID NO: 1887016
augcucugcgauguguuaa

SEQ ID NO: 2442487 - RNA, 19 nt, Artificial Sequence
  Description of Artificial Sequence: Synthetic oligonucleotide
  Antisense strand to SEQ ID NO: 2442486
uuaacacaucgcagagcau

SEQ ID NO: 2442488 - RNA, 19 nt, Artificial Sequence
  Description of Artificial Sequence: Synthetic oligonucleotide
  Sense strand starting at position 293 of SEQ ID NO: 1887016
cucugcgauguguuaagca

SEQ ID NO: 2442489 - RNA, 19 nt, Artificial Sequence
  Description of Artificial Sequence: Synthetic oligonucleotide
  Antisense strand to SEQ ID NO: 2442488
ugcuuaacacaucgcagag

SEQ ID NO: 2442490 - RNA, 19 nt, Artificial Sequence
  Description of Artificial Sequence: Synthetic oligonucleotide
  Sense strand starting at position 298 of SEQ ID NO: 1887016
cgauguguuaagcacuguu

SEQ ID NO: 2442491 - RNA, 19 nt, Artificial Sequence
  Description of Artificial Sequence: Synthetic oligonucleotide
  Antisense strand to SEQ ID NO: 2442490
aacagugcuuaacacaucg

SEQ ID NO: 2442492 - RNA, 19 nt, Artificial Sequence
  Description of Artificial Sequence: Synthetic oligonucleotide
  Sense strand starting at position 301 of SEQ ID NO: 1887016
uguguuaagcacuguuuga

SEQ ID NO: 2442493 - RNA, 19 nt, Artificial Sequence
  Description of Artificial Sequence: Synthetic oligonucleotide
  Antisense strand to SEQ ID NO: 2442492
ucaaacagugcuuaacaca

SEQ ID NO: 2442494 - RNA, 19 nt, Artificial Sequence
  Description of Artificial Sequence: Synthetic oligonucleotide
  Sense strand starting at position 305 of SEQ ID NO: 1887016
uuaagcacuguuugaaauu

SEQ ID NO: 2442495 - RNA, 19 nt, Artificial Sequence
  Description of Artificial Sequence: Synthetic oligonucleotide
  Antisense strand to SEQ ID NO: 2442494
aauuucaaacagugcuuaa

SEQ ID NO: 2442496 - RNA, 19 nt, Artificial Sequence
  Description of Artificial Sequence: Synthetic oligonucleotide
  Sense strand starting at position 314 of SEQ ID NO: 1887016
guuugaaauucgucuaauu

SEQ ID NO: 2442497 - RNA, 19 nt, Artificial Sequence
  Description of Artificial Sequence: Synthetic oligonucleotide
  Antisense strand to SEQ ID NO: 2442496
aauuagacgaauuucaaac

SEQ ID NO: 2442498 - RNA, 19 nt, Artificial Sequence
  Description of Artificial Sequence: Synthetic oligonucleotide
  Sense strand starting at position 348 of SEQ ID NO: 1887016
ugacguaacgguuagauuc

SEQ ID NO: 2442499 - RNA, 19 nt, Artificial Sequence
  Description of Artificial Sequence: Synthetic oligonucleotide
  Antisense strand to SEQ ID NO: 2442498
gaaucuaaccguuacguca

SEQ ID NO: 2442500 - RNA, 19 nt, Artificial Sequence
  Description of Artificial Sequence: Synthetic oligonucleotide
  Sense strand starting at position 356 of SEQ ID NO: 1887016
cgguuagauucacguuucu

SEQ ID NO: 2442501 - RNA, 19 nt, Artificial Sequence
  Description of Artificial Sequence: Synthetic oligonucleotide
  Antisense strand to SEQ ID NO: 2442500
agaaacgugaaucuaaccg

SEQ ID NO: 2442502 - RNA, 19 nt, Artificial Sequence
  Description of Artificial Sequence: Synthetic oligonucleotide
  Sense strand starting at position 387 of SEQ ID NO: 1887016
acaguucuacuguauugua

SEQ ID NO: 2442503 - RNA, 19 nt, Artificial Sequence
  Description of Artificial Sequence: Synthetic oligonucleotide
  Antisense strand to SEQ ID NO: 2442502
uacaauacaguagaacugu

SEQ ID NO: 2442504 - RNA, 19 nt, Artificial Sequence
  Description of Artificial Sequence: Synthetic oligonucleotide
  Sense strand starting at position 390 of SEQ ID NO: 1887016
guucuacuguauuguaacu

SEQ ID NO: 2442505 - RNA, 19 nt, Artificial Sequence
  Description of Artificial Sequence: Synthetic oligonucleotide
  Antisense strand to SEQ ID NO: 2442504
aguuacaauacaguagaac

SEQ ID NO: 2442506 - RNA, 19 nt, Artificial Sequence
  Description of Artificial Sequence: Synthetic oligonucleotide
  Sense strand starting at position 392 of SEQ ID NO: 1887016
ucuacuguauuguaacuga

SEQ ID NO: 2442507 - RNA, 19 nt, Artificial Sequence
  Description of Artificial Sequence: Synthetic oligonucleotide
  Antisense strand to SEQ ID NO: 2442506
ucaguuacaauacaguaga

SEQ ID NO: 2442508 - RNA, 19 nt, Artificial Sequence
  Description of Artificial Sequence: Synthetic oligonucleotide
  Sense strand starting at position 395 of SEQ ID NO: 1887016
acuguauuguaacugaguu

SEQ ID NO: 2442509 - RNA, 19 nt, Artificial Sequence
  Description of Artificial Sequence: Synthetic oligonucleotide
  Antisense strand to SEQ ID NO: 2442508
aacucaguuacaauacagu

SEQ ID NO: 2442510 - RNA, 19 nt, Artificial Sequence
  Description of Artificial Sequence: Synthetic oligonucleotide
  Sense strand starting at position 396 of SEQ ID NO: 1887016
cuguauuguaacugaguua

SEQ ID NO: 2442511 - RNA, 19 nt, Artificial Sequence
  Description of Artificial Sequence: Synthetic oligonucleotide
  Antisense strand to SEQ ID NO: 2442510
uaacucaguuacaauacag

SEQ ID NO: 2442512 - RNA, 19 nt, Artificial Sequence
  Description of Artificial Sequence: Synthetic oligonucleotide
  Sense strand starting at position 399 of SEQ ID NO: 1887016
uauuguaacugaguuagcu

SEQ ID NO: 2442513 - RNA, 19 nt, Artificial Sequence
  Description of Artificial Sequence: Synthetic oligonucleotide
  Antisense strand to SEQ ID NO: 2442512
agcuaacucaguuacaaua

SEQ ID NO: 2442514 - RNA, 19 nt, Artificial Sequence
  Description of Artificial Sequence: Synthetic oligonucleotide
  Sense strand starting at position 408 of SEQ ID NO: 1887016
ugaguuagcuugcuuuaag

SEQ ID NO: 2442515 - RNA, 19 nt, Artificial Sequence
  Description of Artificial Sequence: Synthetic oligonucleotide
  Antisense strand to SEQ ID NO: 2442514
cuuaaagcaagcuaacuca

SEQ ID NO: 2442516 - RNA, 19 nt, Artificial Sequence
  Description of Artificial Sequence: Synthetic oligonucleotide
  Sense strand starting at position 409 of SEQ ID NO: 1887016
gaguuagcuugcuuuaagc

SEQ ID NO: 2442517 - RNA, 19 nt, Artificial Sequence
  Description of Artificial Sequence: Synthetic oligonucleotide
  Antisense strand to SEQ ID NO: 2442516
gcuuaaagcaagcuaacuc

SEQ ID NO: 2442518 - RNA, 19 nt, Artificial Sequence
  Description of Artificial Sequence: Synthetic oligonucleotide
  Sense strand starting at position 448 of SEQ ID NO: 1887016
ucaccuuggucaguaacaa

SEQ ID NO: 2442519 - RNA, 19 nt, Artificial Sequence
  Description of Artificial Sequence: Synthetic oligonucleotide
  Antisense strand to SEQ ID NO: 2442518
uuguuacugaccaagguga

SEQ ID NO: 2442520 - RNA, 19 nt, Artificial Sequence
  Description of Artificial Sequence: Synthetic oligonucleotide
  Sense strand starting at position 598 of SEQ ID NO: 1887016
ggacuucuguaggagagga

SEQ ID NO: 2442521 - RNA, 19 nt, Artificial Sequence
  Description of Artificial Sequence: Synthetic oligonucleotide
  Antisense strand to SEQ ID NO: 2442520
uccucuccuacagaagucc

SEQ ID NO: 2442522 - RNA, 19 nt, Artificial Sequence
  Description of Artificial Sequence: Synthetic oligonucleotide
  Sense strand starting at position 1638 of SEQ ID NO: 1887016
cgccaucagcucuaagaaa

SEQ ID NO: 2442523 - RNA, 19 nt, Artificial Sequence
  Description of Artificial Sequence: Synthetic oligonucleotide
  Antisense strand to SEQ ID NO: 2442522
uuucuuagagcugauggcg

SEQ ID NO: 2442524 - RNA, 19 nt, Artificial Sequence
  Description of Artificial Sequence: Synthetic oligonucleotide
  Sense strand starting at position 2333 of SEQ ID NO: 1887017
gugggauccgcgcacuguu

SEQ ID NO: 2442525 - RNA, 19 nt, Artificial Sequence
  Description of Artificial Sequence: Synthetic oligonucleotide
  Antisense strand to SEQ ID NO: 2442524
aacagugcgcggaucccac

SEQ ID NO: 2442526 - RNA, 19 nt, Artificial Sequence
  Description of Artificial Sequence: Synthetic oligonucleotide
  Sense strand starting at position 2473 of SEQ ID NO: 1887017
acggguuucugaaggagga

SEQ ID NO: 2442527 - RNA, 19 nt, Artificial Sequence
  Description of Artificial Sequence: Synthetic oligonucleotide
  Antisense strand to SEQ ID NO: 2442526
uccuccuucagaaacccgu

SEQ ID NO: 2442528 - RNA, 19 nt, Artificial Sequence
  Description of Artificial Sequence: Synthetic oligonucleotide
  Sense strand starting at position 2474 of SEQ ID NO: 1887017
cggguuucugaaggaggaa

SEQ ID NO: 2442529 - RNA, 19 nt, Artificial Sequence
  Description of Artificial Sequence: Synthetic oligonucleotide
  Antisense strand to SEQ ID NO: 2442528
uuccuccuucagaaacccg

SEQ ID NO: 2442530 - RNA, 19 nt, Artificial Sequence
  Description of Artificial Sequence: Synthetic oligonucleotide
  Sense strand starting at position 2608 of SEQ ID NO: 1887017
ccacgucuuucuuagagcu

SEQ ID NO: 2442531 - RNA, 19 nt, Artificial Sequence
  Description of Artificial Sequence: Synthetic oligonucleotide
  Antisense strand to SEQ ID NO: 2442530
agcucuaagaaagacgugg

SEQ ID NO: 2442532 - RNA, 19 nt, Artificial Sequence
  Description of Artificial Sequence: Synthetic oligonucleotide
  Sense strand starting at position 2610 of SEQ ID NO: 1887017
acgucuuucuuagagcuga

SEQ ID NO: 2442533 - RNA, 19 nt, Artificial Sequence
  Description of Artificial Sequence: Synthetic oligonucleotide
  Antisense strand to SEQ ID NO: 2442532
ucagcucuaagaaagacgu

SEQ ID NO: 2442534 - RNA, 19 nt, Artificial Sequence
  Description of Artificial Sequence: Synthetic oligonucleotide
  Sense strand starting at position 2752 of SEQ ID NO: 1887017
ggcugcagucgagagugaa

SEQ ID NO: 2442535 - RNA, 19 nt, Artificial Sequence
  Description of Artificial Sequence: Synthetic oligonucleotide
  Antisense strand to SEQ ID NO: 2442534
uucacucucgacugcagcc

SEQ ID NO: 2442536 - RNA, 19 nt, Artificial Sequence
  Description of Artificial Sequence: Synthetic oligonucleotide
  Sense strand starting at position 2753 of SEQ ID NO: 1887017
gcugcagucgagagugaag

SEQ ID NO: 2442537 - RNA, 19 nt, Artificial Sequence
  Description of Artificial Sequence: Synthetic oligonucleotide
  Antisense strand to SEQ ID NO: 2442536
cuucacucucgacugcagc

SEQ ID NO: 2442538 - RNA, 19 nt, Artificial Sequence
  Description of Artificial Sequence: Synthetic oligonucleotide
  Sense strand starting at position 2840 of SEQ ID NO: 1887017
gcgcgaaucugguggugaa

SEQ ID NO: 2442539 - RNA, 19 nt, Artificial Sequence
  Description of Artificial Sequence: Synthetic oligonucleotide
  Antisense strand to SEQ ID NO: 2442538
uucaccaccagauucgcgc

SEQ ID NO: 2442540 - RNA, 19 nt, Artificial Sequence
  Description of Artificial Sequence: Synthetic oligonucleotide
  Sense strand starting at position 3090 of SEQ ID NO: 1887017
gcgcuuaccugauagucga

SEQ ID NO: 2442541 - RNA, 19 nt, Artificial Sequence
  Description of Artificial Sequence: Synthetic oligonucleotide
  Antisense strand to SEQ ID NO: 2442540
ucgacuaucagguaagcgc

SEQ ID NO: 2442542 - RNA, 19 nt, Artificial Sequence
  Description of Artificial Sequence: Synthetic oligonucleotide
  Sense strand starting at position 3651 of SEQ ID NO: 1887017
gguguccucuccuacagaa

SEQ ID NO: 2442543 - RNA, 19 nt, Artificial Sequence
  Description of Artificial Sequence: Synthetic oligonucleotide
  Antisense strand to SEQ ID NO: 2442542
uucuguaggagaggacacc

SEQ ID NO: 2442544 - RNA, 19 nt, Artificial Sequence
  Description of Artificial Sequence: Synthetic oligonucleotide
  Sense strand starting at position 3653 of SEQ ID NO: 1887017
uguccucuccuacagaagu

SEQ ID NO: 2442545 - RNA, 19 nt, Artificial Sequence
  Description of Artificial Sequence: Synthetic oligonucleotide
  Antisense strand to SEQ ID NO: 2442544
acuucuguaggagaggaca

SEQ ID NO: 2442546 - RNA, 19 nt, Artificial Sequence
  Description of Artificial Sequence: Synthetic oligonucleotide
  Sense strand starting at position 3807 of SEQ ID NO: 1887017
guuacugaccaaggugaau

SEQ ID NO: 2442547 - RNA, 19 nt, Artificial Sequence
  Description of Artificial Sequence: Synthetic oligonucleotide
  Antisense strand to SEQ ID NO: 2442546
auucaccuuggucaguaac

SEQ ID NO: 2442548 - RNA, 19 nt, Artificial Sequence
  Description of Artificial Sequence: Synthetic oligonucleotide
  Sense strand starting at position 3819 of SEQ ID NO: 1887017
ggugaauccuuuccuuaac

SEQ ID NO: 2442549 - RNA, 19 nt, Artificial Sequence
  Description of Artificial Sequence: Synthetic oligonucleotide
  Antisense strand to SEQ ID NO: 2442548
guuaaggaaaggauucacc

SEQ ID NO: 2442550 - RNA, 19 nt, Artificial Sequence
  Description of Artificial Sequence: Synthetic oligonucleotide
  Sense strand starting at position 3832 of SEQ ID NO: 1887017
cuuaacaaaucggcuuaaa

SEQ ID NO: 2442551 - RNA, 19 nt, Artificial Sequence
  Description of Artificial Sequence: Synthetic oligonucleotide
  Antisense strand to SEQ ID NO: 2442550
uuuaagccgauuuguuaag

SEQ ID NO: 2442552 - RNA, 19 nt, Artificial Sequence
  Description of Artificial Sequence: Synthetic oligonucleotide
  Sense strand starting at position 3901 of SEQ ID NO: 1887017
acgugaaucuaaccguuac

SEQ ID NO: 2442553 - RNA, 19 nt, Artificial Sequence
  Description of Artificial Sequence: Synthetic oligonucleotide
  Antisense strand to SEQ ID NO: 2442552
guaacgguuagauucacgu

SEQ ID NO: 2442554 - RNA, 19 nt, Artificial Sequence
  Description of Artificial Sequence: Synthetic oligonucleotide
  Sense strand starting at position 3905 of SEQ ID NO: 1887017
gaaucuaaccguuacguca

SEQ ID NO: 2442555 - RNA, 19 nt, Artificial Sequence
  Description of Artificial Sequence: Synthetic oligonucleotide
  Antisense strand to SEQ ID NO: 2442554
ugacguaacgguuagauuc

SEQ ID NO: 2442556 - RNA, 19 nt, Artificial Sequence
  Description of Artificial Sequence: Synthetic oligonucleotide
  Sense strand starting at position 287 of SEQ ID NO: 1887018
cccaaauuguguuuguuug

SEQ ID NO: 2442557 - RNA, 19 nt, Artificial Sequence
  Description of Artificial Sequence: Synthetic oligonucleotide
  Antisense strand to SEQ ID NO: 2442556
caaacaaacacaauuuggg

SEQ ID NO: 2442558 - RNA, 19 nt, Artificial Sequence
  Description of Artificial Sequence: Synthetic oligonucleotide
  Sense strand starting at position 289 of SEQ ID NO: 1887018
caaauuguguuuguuuguu

SEQ ID NO: 2442559 - RNA, 19 nt, Artificial Sequence
  Description of Artificial Sequence: Synthetic oligonucleotide
  Antisense strand to SEQ ID NO: 2442558
aacaaacaaacacaauuug

SEQ ID NO: 2442560 - RNA, 19 nt, Artificial Sequence
  Description of Artificial Sequence: Synthetic oligonucleotide
  Sense strand starting at position 301 of SEQ ID NO: 1887018
guuuguuucuuuccugaga

SEQ ID NO: 2442561 - RNA, 19 nt, Artificial Sequence
  Description of Artificial Sequence: Synthetic oligonucleotide
  Antisense strand to SEQ ID NO: 2442560
ucucaggaaagaaacaaac

SEQ ID NO: 2442562 - RNA, 19 nt, Artificial Sequence
  Description of Artificial Sequence: Synthetic oligonucleotide
  Sense strand starting at position 652 of SEQ ID NO: 1887018
ggaagcuuaccugggaacu

SEQ ID NO: 2442563 - RNA, 19 nt, Artificial Sequence
  Description of Artificial Sequence: Synthetic oligonucleotide
  Antisense strand to SEQ ID NO: 2442562
aguucccagguaagcuucc

SEQ ID NO: 2442564 - RNA, 19 nt, Artificial Sequence
  Description of Artificial Sequence: Synthetic oligonucleotide
  Sense strand starting at position 653 of SEQ ID NO: 1887018
gaagcuuaccugggaacua

SEQ ID NO: 2442565 - RNA, 19 nt, Artificial Sequence
  Description of Artificial Sequence: Synthetic oligonucleotide
  Antisense strand to SEQ ID NO: 2442564
uaguucccagguaagcuuc

SEQ ID NO: 2442566 - RNA, 19 nt, Artificial Sequence
  Description of Artificial Sequence: Synthetic oligonucleotide
  Sense strand starting at position 717 of SEQ ID NO: 1887018
ccaaucauggccugcucua

SEQ ID NO: 2442567 - RNA, 19 nt, Artificial Sequence
  Description of Artificial Sequence: Synthetic oligonucleotide
  Antisense strand to SEQ ID NO: 2442566
uagagcaggccaugauugg

SEQ ID NO: 2442568 - RNA, 19 nt, Artificial Sequence
  Description of Artificial Sequence: Synthetic oligonucleotide
  Sense strand starting at position 739 of SEQ ID NO: 1887018
acgcaucugcaagaggaau

SEQ ID NO: 2442569 - RNA, 19 nt, Artificial Sequence
  Description of Artificial Sequence: Synthetic oligonucleotide
  Antisense strand to SEQ ID NO: 2442568
auuccucuugcagaugcgu

SEQ ID NO: 2442570 - RNA, 19 nt, Artificial Sequence
  Description of Artificial Sequence: Synthetic oligonucleotide
  Sense strand starting at position 778 of SEQ ID NO: 1887018
uuacaacuucucuggguuu

SEQ ID NO: 2442571 - RNA, 19 nt, Artificial Sequence
  Description of Artificial Sequence: Synthetic oligonucleotide
  Antisense strand to SEQ ID NO: 2442570
aaacccagagaaguuguaa

SEQ ID NO: 2442572 - RNA, 19 nt, Artificial Sequence
  Description of Artificial Sequence: Synthetic oligonucleotide
  Sense strand starting at position 780 of SEQ ID NO: 1887018
acaacuucucuggguuuau

SEQ ID NO: 2442573 - RNA, 19 nt, Artificial Sequence
  Description of Artificial Sequence: Synthetic oligonucleotide
  Antisense strand to SEQ ID NO: 2442572
auaaacccagagaaguugu

SEQ ID NO: 2442574 - RNA, 19 nt, Artificial Sequence
  Description of Artificial Sequence: Synthetic oligonucleotide
  Sense strand starting at position 789 of SEQ ID NO: 1887018
cuggguuuaucccucccau

SEQ ID NO: 2442575 - RNA, 19 nt, Artificial Sequence
  Description of Artificial Sequence: Synthetic oligonucleotide
  Antisense strand to SEQ ID NO: 2442574
augggagggauaaacccag

SEQ ID NO: 2442576 - RNA, 19 nt, Artificial Sequence
  Description of Artificial Sequence: Synthetic oligonucleotide
  Sense strand starting at position 843 of SEQ ID NO: 1887018
gagaauaucccagguggcu

SEQ ID NO: 2442577 - RNA, 19 nt, Artificial Sequence
  Description of Artificial Sequence: Synthetic oligonucleotide
  Antisense strand to SEQ ID NO: 2442576
agccaccugggauauucuc

SEQ ID NO: 2442578 - RNA, 19 nt, Artificial Sequence
  Description of Artificial Sequence: Synthetic oligonucleotide
  Sense strand starting at position 852 of SEQ ID NO: 1887018
ccagguggcuccuuuagga

SEQ ID NO: 2442579 - RNA, 19 nt, Artificial Sequence
  Description of Artificial Sequence: Synthetic oligonucleotide
  Antisense strand to SEQ ID NO: 2442578
uccuaaaggagccaccugg

SEQ ID NO: 2442580 - RNA, 19 nt, Artificial Sequence
  Description of Artificial Sequence: Synthetic oligonucleotide
  Sense strand starting at position 886 of SEQ ID NO: 1887018
uugauugcccauugguagu

SEQ ID NO: 2442581 - RNA, 19 nt, Artificial Sequence
  Description of Artificial Sequence: Synthetic oligonucleotide
  Antisense strand to SEQ ID NO: 2442580
acuaccaaugggcaaucaa

SEQ ID NO: 2442582 - RNA, 19 nt, Artificial Sequence
  Description of Artificial Sequence: Synthetic oligonucleotide
  Sense strand starting at position 996 of SEQ ID NO: 1887018
ccagcuuugaggugaaaga

SEQ ID NO: 2442583 - RNA, 19 nt, Artificial Sequence
  Description of Artificial Sequence: Synthetic oligonucleotide
  Antisense strand to SEQ ID NO: 2442582
ucuuucaccucaaagcugg

SEQ ID NO: 2442584 - RNA, 19 nt, Artificial Sequence
  Description of Artificial Sequence: Synthetic oligonucleotide
  Sense strand starting at position 1547 of SEQ ID NO: 1887018
gcaucaaggaguuaaggca

SEQ ID NO: 2442585 - RNA, 19 nt, Artificial Sequence
  Description of Artificial Sequence: Synthetic oligonucleotide
  Antisense strand to SEQ ID NO: 2442584
ugccuuaacuccuugaugc

SEQ ID NO: 2442586 - RNA, 19 nt, Artificial Sequence
  Description of Artificial Sequence: Synthetic oligonucleotide
  Sense strand starting at position 1565 of SEQ ID NO: 1887018
aguccugguugccuaauua

SEQ ID NO: 2442587 - RNA, 19 nt, Artificial Sequence
  Description of Artificial Sequence: Synthetic oligonucleotide
  Antisense strand to SEQ ID NO: 2442586
uaauuaggcaaccaggacu

SEQ ID NO: 2442588 - RNA, 19 nt, Artificial Sequence
  Description of Artificial Sequence: Synthetic oligonucleotide
  Sense strand starting at position 1730 of SEQ ID NO: 1887018
aauccaguucuagguggua

SEQ ID NO: 2442589 - RNA, 19 nt, Artificial Sequence
  Description of Artificial Sequence: Synthetic oligonucleotide
  Antisense strand to SEQ ID NO: 2442588
uaccaccuagaacuggauu

SEQ ID NO: 2442590 - RNA, 19 nt, Artificial Sequence
  Description of Artificial Sequence: Synthetic oligonucleotide
  Sense strand starting at position 1784 of SEQ ID NO: 1887018
uuucuauuggcugggagua

SEQ ID NO: 2442591 - RNA, 19 nt, Artificial Sequence
  Description of Artificial Sequence: Synthetic oligonucleotide
  Antisense strand to SEQ ID NO: 2442590
uacucccagccaauagaaa

SEQ ID NO: 2442592 - RNA, 19 nt, Artificial Sequence
  Description of Artificial Sequence: Synthetic oligonucleotide
  Sense strand starting at position 1785 of SEQ ID NO: 1887018
uucuauuggcugggaguaa

SEQ ID NO: 2442593 - RNA, 19 nt, Artificial Sequence
  Description of Artificial Sequence: Synthetic oligonucleotide
  Antisense strand to SEQ ID NO: 2442592
uuacucccagccaauagaa

SEQ ID NO: 2442594 - RNA, 19 nt, Artificial Sequence
  Description of Artificial Sequence: Synthetic oligonucleotide
  Sense strand starting at position 1845 of SEQ ID NO: 1887018
gucuucugggaaugguagu

SEQ ID NO: 2442595 - RNA, 19 nt, Artificial Sequence
  Description of Artificial Sequence: Synthetic oligonucleotide
  Antisense strand to SEQ ID NO: 2442594
acuaccauucccagaagac

SEQ ID NO: 2442596 - RNA, 19 nt, Artificial Sequence
  Description of Artificial Sequence: Synthetic oligonucleotide
  Sense strand starting at position 1855 of SEQ ID NO: 1887018
aaugguaguuccuuggacu

SEQ ID NO: 2442597 - RNA, 19 nt, Artificial Sequence
  Description of Artificial Sequence: Synthetic oligonucleotide
  Antisense strand to SEQ ID NO: 2442596
aguccaaggaacuaccauu

SEQ ID NO: 2442598 - RNA, 19 nt, Artificial Sequence
  Description of Artificial Sequence: Synthetic oligonucleotide
  Sense strand starting at position 1934 of SEQ ID NO: 1887018
guucuucuccuuuaaggga

SEQ ID NO: 2442599 - RNA, 19 nt, Artificial Sequence
  Description of Artificial Sequence: Synthetic oligonucleotide
  Antisense strand to SEQ ID NO: 2442598
ucccuuaaaggagaagaac

SEQ ID NO: 2442600 - RNA, 19 nt, Artificial Sequence
  Description of Artificial Sequence: Synthetic oligonucleotide
  Sense strand starting at position 2051 of SEQ ID NO: 1887018
gggcuucuccaucauauuc

SEQ ID NO: 2442601 - RNA, 19 nt, Artificial Sequence
  Description of Artificial Sequence: Synthetic oligonucleotide
  Antisense strand to SEQ ID NO: 2442600
gaauaugauggagaagccc

SEQ ID NO: 2442602 - RNA, 19 nt, Artificial Sequence
  Description of Artificial Sequence: Synthetic oligonucleotide
  Sense strand starting at position 2147 of SEQ ID NO: 1887018
gcaauaaggucuuucuccu

SEQ ID NO: 2442603 - RNA, 19 nt, Artificial Sequence
  Description of Artificial Sequence: Synthetic oligonucleotide
  Antisense strand to SEQ ID NO: 2442602
aggagaaagaccuuauugc

SEQ ID NO: 2442604 - RNA, 19 nt, Artificial Sequence
  Description of Artificial Sequence: Synthetic oligonucleotide
  Sense strand starting at position 2172 of SEQ ID NO: 1887018
ggcucuuucuguucuccua

SEQ ID NO: 2442605 - RNA, 19 nt, Artificial Sequence
  Description of Artificial Sequence: Synthetic oligonucleotide
  Antisense strand to SEQ ID NO: 2442604
uaggagaacagaaagagcc

SEQ ID NO: 2442606 - RNA, 19 nt, Artificial Sequence
  Description of Artificial Sequence: Synthetic oligonucleotide
  Sense strand starting at position 2255 of SEQ ID NO: 1887018
gccuuaguugcacacauau

SEQ ID NO: 2442607 - RNA, 19 nt, Artificial Sequence
  Description of Artificial Sequence: Synthetic oligonucleotide
  Antisense strand to SEQ ID NO: 2442606
auaugugugcaacuaaggc

SEQ ID NO: 2442608 - RNA, 19 nt, Artificial Sequence
  Description of Artificial Sequence: Synthetic oligonucleotide
  Sense strand starting at position 2448 of SEQ ID NO: 1887018
ucugaaugcgaucauggaa

SEQ ID NO: 2442609 - RNA, 19 nt, Artificial Sequence
  Description of Artificial Sequence: Synthetic oligonucleotide
  Antisense strand to SEQ ID NO: 2442608
uuccaugaucgcauucaga

SEQ ID NO: 2442610 - RNA, 19 nt, Artificial Sequence
  Description of Artificial Sequence: Synthetic oligonucleotide
  Sense strand starting at position 2511 of SEQ ID NO: 1887018
gguggacuuuaauuaauaa

SEQ ID NO: 2442611 - RNA, 19 nt, Artificial Sequence
  Description of Artificial Sequence: Synthetic oligonucleotide
  Antisense strand to SEQ ID NO: 2442610
uuauuaauuaaaguccacc

SEQ ID NO: 2442612 - RNA, 19 nt, Artificial Sequence
  Description of Artificial Sequence: Synthetic oligonucleotide
  Sense strand starting at position 2828 of SEQ ID NO: 1887018
gucugagccuucuuaugca

SEQ ID NO: 2442613 - RNA, 19 nt, Artificial Sequence
  Description of Artificial Sequence: Synthetic oligonucleotide
  Antisense strand to SEQ ID NO: 2442612
ugcauaagaaggcucagac

SEQ ID NO: 2442614 - RNA, 19 nt, Artificial Sequence
  Description of Artificial Sequence: Synthetic oligonucleotide
  Sense strand starting at position 2870 of SEQ ID NO: 1887018
auggacuggucaucccuaa

SEQ ID NO: 2442615 - RNA, 19 nt, Artificial Sequence
  Description of Artificial Sequence: Synthetic oligonucleotide
  Antisense strand to SEQ ID NO: 2442614
uuagggaugaccaguccau

SEQ ID NO: 2442616 - RNA, 19 nt, Artificial Sequence
  Description of Artificial Sequence: Synthetic oligonucleotide
  Sense strand starting at position 3411 of SEQ ID NO: 1887018
ucacccuuugaguggcaaa

SEQ ID NO: 2442617 - RNA, 19 nt, Artificial Sequence
  Description of Artificial Sequence: Synthetic oligonucleotide
  Antisense strand to SEQ ID NO: 2442616
uuugccacucaaaggguga

SEQ ID NO: 2442618 - RNA, 19 nt, Artificial Sequence
  Description of Artificial Sequence: Synthetic oligonucleotide
  Sense strand starting at position 3428 of SEQ ID NO: 1887018
aaaucaguccucgggagga

SEQ ID NO: 2442619 - RNA, 19 nt, Artificial Sequence
  Description of Artificial Sequence: Synthetic oligonucleotide
  Antisense strand to SEQ ID NO: 2442618
uccucccgaggacugauuu

SEQ ID NO: 2442620 - RNA, 19 nt, Artificial Sequence
  Description of Artificial Sequence: Synthetic oligonucleotide
  Sense strand starting at position 3430 of SEQ ID NO: 1887018
aucaguccucgggaggaua

SEQ ID NO: 2442621 - RNA, 19 nt, Artificial Sequence
  Description of Artificial Sequence: Synthetic oligonucleotide
  Antisense strand to SEQ ID NO: 2442620
uauccucccgaggacugau

SEQ ID NO: 2442622 - RNA, 19 nt, Artificial Sequence
  Description of Artificial Sequence: Synthetic oligonucleotide
  Sense strand starting at position 3432 of SEQ ID NO: 1887018
caguccucgggaggauaaa

SEQ ID NO: 2442623 - RNA, 19 nt, Artificial Sequence
  Description of Artificial Sequence: Synthetic oligonucleotide
  Antisense strand to SEQ ID NO: 2442622
uuuauccucccgaggacug

SEQ ID NO: 2442624 - RNA, 19 nt, Artificial Sequence
  Description of Artificial Sequence: Synthetic oligonucleotide
  Sense strand starting at position 3442 of SEQ ID NO: 1887018
gaggauaaaucugggagag

SEQ ID NO: 2442625 - RNA, 19 nt, Artificial Sequence
  Description of Artificial Sequence: Synthetic oligonucleotide
  Antisense strand to SEQ ID NO: 2442624
cucucccagauuuauccuc

SEQ ID NO: 2442626 - RNA, 19 nt, Artificial Sequence
  Description of Artificial Sequence: Synthetic oligonucleotide
  Sense strand starting at position 3444 of SEQ ID NO: 1887018
ggauaaaucugggagagca

SEQ ID NO: 2442627 - RNA, 19 nt, Artificial Sequence
  Description of Artificial Sequence: Synthetic oligonucleotide
  Antisense strand to SEQ ID NO: 2442626
ugcucucccagauuuaucc

SEQ ID NO: 2442628 - RNA, 19 nt, Artificial Sequence
  Description of Artificial Sequence: Synthetic oligonucleotide
  Sense strand starting at position 3525 of SEQ ID NO: 1887018
gugucuggagaauggucua

SEQ ID NO: 2442629 - RNA, 19 nt, Artificial Sequence
  Description of Artificial Sequence: Synthetic oligonucleotide
  Antisense strand to SEQ ID NO: 2442628
uagaccauucuccagacac

SEQ ID NO: 2442630 - RNA, 19 nt, Artificial Sequence
  Description of Artificial Sequence: Synthetic oligonucleotide
  Sense strand starting at position 3528 of SEQ ID NO: 1887018
ucuggagaauggucuaaac

SEQ ID NO: 2442631 - RNA, 19 nt, Artificial Sequence
  Description of Artificial Sequence: Synthetic oligonucleotide
  Antisense strand to SEQ ID NO: 2442630
guuuagaccauucuccaga

SEQ ID NO: 2442632 - RNA, 19 nt, Artificial Sequence
  Description of Artificial Sequence: Synthetic oligonucleotide
  Sense strand starting at position 3710 of SEQ ID NO: 1887018
gggaauaguguguauacaa

SEQ ID NO: 2442633 - RNA, 19 nt, Artificial Sequence
  Description of Artificial Sequence: Synthetic oligonucleotide
  Antisense strand to SEQ ID NO: 2442632
uuguauacacacuauuccc

SEQ ID NO: 2442634 - RNA, 19 nt, Artificial Sequence
  Description of Artificial Sequence: Synthetic oligonucleotide
  Sense strand starting at position 3974 of SEQ ID NO: 1887018
gagccauuccuggaucauc

SEQ ID NO: 2442635 - RNA, 19 nt, Artificial Sequence
  Description of Artificial Sequence: Synthetic oligonucleotide
  Antisense strand to SEQ ID NO: 2442634
gaugauccaggaauggcuc

SEQ ID NO: 2442636 - RNA, 19 nt, Artificial Sequence
  Description of Artificial Sequence: Synthetic oligonucleotide
  Sense strand starting at position 2945 of SEQ ID NO: 1887019
gguugucaauaauaaacaa

SEQ ID NO: 2442637 - RNA, 19 nt, Artificial Sequence
  Description of Artificial Sequence: Synthetic oligonucleotide
  Antisense strand to SEQ ID NO: 2442636
uuguuuauuauugacaacc

SEQ ID NO: 2442638 - RNA, 19 nt, Artificial Sequence
  Description of Artificial Sequence: Synthetic oligonucleotide
  Sense strand starting at position 3519 of SEQ ID NO: 1887019
agcagaaguagauggucua

SEQ ID NO: 2442639 - RNA, 19 nt, Artificial Sequence
  Description of Artificial Sequence: Synthetic oligonucleotide
  Antisense strand to SEQ ID NO: 2442638
uagaccaucuacuucugcu

SEQ ID NO: 2442640 - RNA, 19 nt, Artificial Sequence
  Description of Artificial Sequence: Synthetic oligonucleotide
  Sense strand starting at position 3576 of SEQ ID NO: 1887019
agcuacuuugaugacuauu

SEQ ID NO: 2442641 - RNA, 19 nt, Artificial Sequence
  Description of Artificial Sequence: Synthetic oligonucleotide
  Antisense strand to SEQ ID NO: 2442640
aauagucaucaaaguagcu

SEQ ID NO: 2442642 - RNA, 19 nt, Artificial Sequence
  Description of Artificial Sequence: Synthetic oligonucleotide
  Sense strand starting at position 43 of SEQ ID NO: 1887020
agaggcuucuauucucaca

SEQ ID NO: 2442643 - RNA, 19 nt, Artificial Sequence
  Description of Artificial Sequence: Synthetic oligonucleotide
  Antisense strand to SEQ ID NO: 2442642
ugugagaauagaagccucu

SEQ ID NO: 2442644 - RNA, 19 nt, Artificial Sequence
  Description of Artificial Sequence: Synthetic oligonucleotide
  Sense strand starting at position 77 of SEQ ID NO: 1887020
cccuacauuuaggaagaaa

SEQ ID NO: 2442645 - RNA, 19 nt, Artificial Sequence
  Description of Artificial Sequence: Synthetic oligonucleotide
  Antisense strand to SEQ ID NO: 2442644
uuucuuccuaaauguaggg

SEQ ID NO: 2442646 - RNA, 19 nt, Artificial Sequence
  Description of Artificial Sequence: Synthetic oligonucleotide
  Sense strand starting at position 509 of SEQ ID NO: 1887020
ugagguugcaguuagcaaa

SEQ ID NO: 2442647 - RNA, 19 nt, Artificial Sequence
  Description of Artificial Sequence: Synthetic oligonucleotide
  Antisense strand to SEQ ID NO: 2442646
uuugcuaacugcaaccuca

SEQ ID NO: 2442648 - RNA, 19 nt, Artificial Sequence
  Description of Artificial Sequence: Synthetic oligonucleotide
  Sense strand starting at position 531 of SEQ ID NO: 1887020
aagugaagcuguuuggaaa

SEQ ID NO: 2442649 - RNA, 19 nt, Artificial Sequence
  Description of Artificial Sequence: Synthetic oligonucleotide
  Antisense strand to SEQ ID NO: 2442648
uuuccaaacagcuucacuu

SEQ ID NO: 2442650 - RNA, 19 nt, Artificial Sequence
  Description of Artificial Sequence: Synthetic oligonucleotide
  Sense strand starting at position 544 of SEQ ID NO: 1887020
uggaaacaaucagaaauag

SEQ ID NO: 2442651 - RNA, 19 nt, Artificial Sequence
  Description of Artificial Sequence: Synthetic oligonucleotide
  Antisense strand to SEQ ID NO: 2442650
cuauuucugauuguuucca

SEQ ID NO: 2442652 - RNA, 19 nt, Artificial Sequence
  Description of Artificial Sequence: Synthetic oligonucleotide
  Sense strand starting at position 752 of SEQ ID NO: 1887020
uuuguagagacguaguauc

SEQ ID NO: 2442653 - RNA, 19 nt, Artificial Sequence
  Description of Artificial Sequence: Synthetic oligonucleotide
  Antisense strand to SEQ ID NO: 2442652
gauacuacgucucuacaaa

SEQ ID NO: 2442654 - RNA, 19 nt, Artificial Sequence
  Description of Artificial Sequence: Synthetic oligonucleotide
  Sense strand starting at position 760 of SEQ ID NO: 1887020
gacguaguaucacuauauu

SEQ ID NO: 2442655 - RNA, 19 nt, Artificial Sequence
  Description of Artificial Sequence: Synthetic oligonucleotide
  Antisense strand to SEQ ID NO: 2442654
aauauagugauacuacguc

SEQ ID NO: 2442656 - RNA, 19 nt, Artificial Sequence
  Description of Artificial Sequence: Synthetic oligonucleotide
  Sense strand starting at position 853 of SEQ ID NO: 1887020
guuucuuuagcaugggaca

SEQ ID NO: 2442657 - RNA, 19 nt, Artificial Sequence
  Description of Artificial Sequence: Synthetic oligonucleotide
  Antisense strand to SEQ ID NO: 2442656
ugucccaugcuaaagaaac

SEQ ID NO: 2442658 - RNA, 19 nt, Artificial Sequence
  Description of Artificial Sequence: Synthetic oligonucleotide
  Sense strand starting at position 854 of SEQ ID NO: 1887020
uuucuuuagcaugggacau

SEQ ID NO: 2442659 - RNA, 19 nt, Artificial Sequence
  Description of Artificial Sequence: Synthetic oligonucleotide
  Antisense strand to SEQ ID NO: 2442658
augucccaugcuaaagaaa

SEQ ID NO: 2442660 - RNA, 19 nt, Artificial Sequence
  Description of Artificial Sequence: Synthetic oligonucleotide
  Sense strand starting at position 1266 of SEQ ID NO: 1887020
agaagcauuagaggucagu

SEQ ID NO: 2442661 - RNA, 19 nt, Artificial Sequence
  Description of Artificial Sequence: Synthetic oligonucleotide
  Antisense strand to SEQ ID NO: 2442660
acugaccucuaaugcuucu

SEQ ID NO: 2442662 - RNA, 19 nt, Artificial Sequence
  Description of Artificial Sequence: Synthetic oligonucleotide
  Sense strand starting at position 1269 of SEQ ID NO: 1887020
agcauuagaggucagucaa

SEQ ID NO: 2442663 - RNA, 19 nt, Artificial Sequence
  Description of Artificial Sequence: Synthetic oligonucleotide
  Antisense strand to SEQ ID NO: 2442662
uugacugaccucuaaugcu

SEQ ID NO: 2442664 - RNA, 19 nt, Artificial Sequence
  Description of Artificial Sequence: Synthetic oligonucleotide
  Sense strand starting at position 1279 of SEQ ID NO: 1887020
gucagucaagaaugucacu

SEQ ID NO: 2442665 - RNA, 19 nt, Artificial Sequence
  Description of Artificial Sequence: Synthetic oligonucleotide
  Antisense strand to SEQ ID NO: 2442664
agugacauucuugacugac

SEQ ID NO: 2442666 - RNA, 19 nt, Artificial Sequence
  Description of Artificial Sequence: Synthetic oligonucleotide
  Sense strand starting at position 1304 of SEQ ID NO: 1887020
gcaggaaagauucgaugug

SEQ ID NO: 2442667 - RNA, 19 nt, Artificial Sequence
  Description of Artificial Sequence: Synthetic oligonucleotide
  Antisense strand to SEQ ID NO: 2442666
cacaucgaaucuuuccugc

SEQ ID NO: 2442668 - RNA, 19 nt, Artificial Sequence
  Description of Artificial Sequence: Synthetic oligonucleotide
  Sense strand starting at position 1310 of SEQ ID NO: 1887020
aagauucgauguggagaaa

SEQ ID NO: 2442669 - RNA, 19 nt, Artificial Sequence
  Description of Artificial Sequence: Synthetic oligonucleotide
  Antisense strand to SEQ ID NO: 2442668
uuucuccacaucgaaucuu

SEQ ID NO: 2442670 - RNA, 19 nt, Artificial Sequence
  Description of Artificial Sequence: Synthetic oligonucleotide
  Sense strand starting at position 2866 of SEQ ID NO: 1887020
gagucaacuuccuucgguu

SEQ ID NO: 2442671 - RNA, 19 nt, Artificial Sequence
  Description of Artificial Sequence: Synthetic oligonucleotide
  Antisense strand to SEQ ID NO: 2442670
aaccgaaggaaguugacuc

SEQ ID NO: 2442672 - RNA, 19 nt, Artificial Sequence
  Description of Artificial Sequence: Synthetic oligonucleotide
  Sense strand starting at position 2873 of SEQ ID NO: 1887020
cuuccuucgguuugucauu

SEQ ID NO: 2442673 - RNA, 19 nt, Artificial Sequence
  Description of Artificial Sequence: Synthetic oligonucleotide
  Antisense strand to SEQ ID NO: 2442672
aaugacaaaccgaaggaag

SEQ ID NO: 2442674 - RNA, 19 nt, Artificial Sequence
  Description of Artificial Sequence: Synthetic oligonucleotide
  Sense strand starting at position 2874 of SEQ ID NO: 1887020
uuccuucgguuugucauua

SEQ ID NO: 2442675 - RNA, 19 nt, Artificial Sequence
  Description of Artificial Sequence: Synthetic oligonucleotide
  Antisense strand to SEQ ID NO: 2442674
uaaugacaaaccgaaggaa

SEQ ID NO: 2442676 - RNA, 19 nt, Artificial Sequence
  Description of Artificial Sequence: Synthetic oligonucleotide
  Sense strand starting at position 2879 of SEQ ID NO: 1887020
ucgguuugucauuaccagu

SEQ ID NO: 2442677 - RNA, 19 nt, Artificial Sequence
  Description of Artificial Sequence: Synthetic oligonucleotide
  Antisense strand to SEQ ID NO: 2442676
acugguaaugacaaaccga

SEQ ID NO: 2442678 - RNA, 19 nt, Artificial Sequence
  Description of Artificial Sequence: Synthetic oligonucleotide
  Sense strand starting at position 2999 of SEQ ID NO: 1887020
uuuacagcugucuguggaa

SEQ ID NO: 2442679 - RNA, 19 nt, Artificial Sequence
  Description of Artificial Sequence: Synthetic oligonucleotide
  Antisense strand to SEQ ID NO: 2442678
uuccacagacagcuguaaa

SEQ ID NO: 2442680 - RNA, 19 nt, Artificial Sequence
  Description of Artificial Sequence: Synthetic oligonucleotide
  Sense strand starting at position 3001 of SEQ ID NO: 1887020
uacagcugucuguggaaga

SEQ ID NO: 2442681 - RNA, 19 nt, Artificial Sequence
  Description of Artificial Sequence: Synthetic oligonucleotide
  Antisense strand to SEQ ID NO: 2442680
ucuuccacagacagcugua

SEQ ID NO: 2442682 - RNA, 19 nt, Artificial Sequence
  Description of Artificial Sequence: Synthetic oligonucleotide
  Sense strand starting at position 3023 of SEQ ID NO: 1887020
uguggagcgguaugaaaga

SEQ ID NO: 2442683 - RNA, 19 nt, Artificial Sequence
  Description of Artificial Sequence: Synthetic oligonucleotide
  Antisense strand to SEQ ID NO: 2442682
ucuuucauaccgcuccaca

SEQ ID NO: 2442684 - RNA, 19 nt, Artificial Sequence
  Description of Artificial Sequence: Synthetic oligonucleotide
  Sense strand starting at position 3028 of SEQ ID NO: 1887020
agcgguaugaaagaccuua

SEQ ID NO: 2442685 - RNA, 19 nt, Artificial Sequence
  Description of Artificial Sequence: Synthetic oligonucleotide
  Antisense strand to SEQ ID NO: 2442684
uaaggucuuucauaccgcu

SEQ ID NO: 2442686 - RNA, 19 nt, Artificial Sequence
  Description of Artificial Sequence: Synthetic oligonucleotide
  Sense strand starting at position 3079 of SEQ ID NO: 1887020
gcuggucugcgcaggagaa

SEQ ID NO: 2442687 - RNA, 19 nt, Artificial Sequence
  Description of Artificial Sequence: Synthetic oligonucleotide
  Antisense strand to SEQ ID NO: 2442686
uucuccugcgcagaccagc

SEQ ID NO: 2442688 - RNA, 19 nt, Artificial Sequence
  Description of Artificial Sequence: Synthetic oligonucleotide
  Sense strand starting at position 3080 of SEQ ID NO: 1887020
cuggucugcgcaggagaaa

SEQ ID NO: 2442689 - RNA, 19 nt, Artificial Sequence
  Description of Artificial Sequence: Synthetic oligonucleotide
  Antisense strand to SEQ ID NO: 2442688
uuucuccugcgcagaccag

SEQ ID NO: 2442690 - RNA, 19 nt, Artificial Sequence
  Description of Artificial Sequence: Synthetic oligonucleotide
  Sense strand starting at position 3081 of SEQ ID NO: 1887020
uggucugcgcaggagaaau

SEQ ID NO: 2442691 - RNA, 19 nt, Artificial Sequence
  Description of Artificial Sequence: Synthetic oligonucleotide
  Antisense strand to SEQ ID NO: 2442690
auuucuccugcgcagacca

SEQ ID NO: 2442692 - RNA, 19 nt, Artificial Sequence
  Description of Artificial Sequence: Synthetic oligonucleotide
  Sense strand starting at position 3146 of SEQ ID NO: 1887020
guguggugaggauaacgau

SEQ ID NO: 2442693 - RNA, 19 nt, Artificial Sequence
  Description of Artificial Sequence: Synthetic oligonucleotide
  Antisense strand to SEQ ID NO: 2442692
aucguuauccucaccacac

SEQ ID NO: 2442694 - RNA, 19 nt, Artificial Sequence
  Description of Artificial Sequence: Synthetic oligonucleotide
  Sense strand starting at position 3162 of SEQ ID NO: 1887020
gauggcuacucagugaaga

SEQ ID NO: 2442695 - RNA, 19 nt, Artificial Sequence
  Description of Artificial Sequence: Synthetic oligonucleotide
  Antisense strand to SEQ ID NO: 2442694
ucuucacugaguagccauc

SEQ ID NO: 2442696 - RNA, 19 nt, Artificial Sequence
  Description of Artificial Sequence: Synthetic oligonucleotide
  Sense strand starting at position 3163 of SEQ ID NO: 1887020
auggcuacucagugaagau

SEQ ID NO: 2442697 - RNA, 19 nt, Artificial Sequence
  Description of Artificial Sequence: Synthetic oligonucleotide
  Antisense strand to SEQ ID NO: 2442696
aucuucacugaguagccau

SEQ ID NO: 2442698 - RNA, 19 nt, Artificial Sequence
  Description of Artificial Sequence: Synthetic oligonucleotide
  Sense strand starting at position 3164 of SEQ ID NO: 1887020
uggcuacucagugaagaug

SEQ ID NO: 2442699 - RNA, 19 nt, Artificial Sequence
  Description of Artificial Sequence: Synthetic oligonucleotide
  Antisense strand to SEQ ID NO: 2442698
caucuucacugaguagcca

SEQ ID NO: 2442700 - RNA, 19 nt, Artificial Sequence
  Description of Artificial Sequence: Synthetic oligonucleotide
  Sense strand starting at position 3188 of SEQ ID NO: 1887020
gaaauacuacaucgaguac

SEQ ID NO: 2442701 - RNA, 19 nt, Artificial Sequence
  Description of Artificial Sequence: Synthetic oligonucleotide
  Antisense strand to SEQ ID NO: 2442700
guacucgauguaguauuuc

SEQ ID NO: 2442702 - RNA, 19 nt, Artificial Sequence
  Description of Artificial Sequence: Synthetic oligonucleotide
  Sense strand starting at position 3212 of SEQ ID NO: 1887020
gagcacucgagaugauagu

SEQ ID NO: 2442703 - RNA, 19 nt, Artificial Sequence
  Description of Artificial Sequence: Synthetic oligonucleotide
  Antisense strand to SEQ ID NO: 2442702
acuaucaucucgagugcuc

SEQ ID NO: 2442704 - RNA, 19 nt, Artificial Sequence
  Description of Artificial Sequence: Synthetic oligonucleotide
  Sense strand starting at position 3729 of SEQ ID NO: 1887020
agcauuugcucgcugaguu

SEQ ID NO: 2442705 - RNA, 19 nt, Artificial Sequence
  Description of Artificial Sequence: Synthetic oligonucleotide
  Antisense strand to SEQ ID NO: 2442704
aacucagcgagcaaaugcu

SEQ ID NO: 2442706 - RNA, 19 nt, Artificial Sequence
  Description of Artificial Sequence: Synthetic oligonucleotide
  Sense strand starting at position 3730 of SEQ ID NO: 1887020
gcauuugcucgcugaguuc

SEQ ID NO: 2442707 - RNA, 19 nt, Artificial Sequence
  Description of Artificial Sequence: Synthetic oligonucleotide
  Antisense strand to SEQ ID NO: 2442706
gaacucagcgagcaaaugc

SEQ ID NO: 2442708 - RNA, 19 nt, Artificial Sequence
  Description of Artificial Sequence: Synthetic oligonucleotide
  Sense strand starting at position 3739 of SEQ ID NO: 1887020
cgcugaguucaguugcuaa

SEQ ID NO: 2442709 - RNA, 19 nt, Artificial Sequence
  Description of Artificial Sequence: Synthetic oligonucleotide
  Antisense strand to SEQ ID NO: 2442708
uuagcaacugaacucagcg

SEQ ID NO: 2442710 - RNA, 19 nt, Artificial Sequence
  Description of Artificial Sequence: Synthetic oligonucleotide
  Sense strand starting at position 3775 of SEQ ID NO: 1887020
gaguacucccucggcugua

SEQ ID NO: 2442711 - RNA, 19 nt, Artificial Sequence
  Description of Artificial Sequence: Synthetic oligonucleotide
  Antisense strand to SEQ ID NO: 2442710
uacagccgagggaguacuc

SEQ ID NO: 2442712 - RNA, 19 nt, Artificial Sequence
  Description of Artificial Sequence: Synthetic oligonucleotide
  Sense strand starting at position 3847 of SEQ ID NO: 1887020
cugauuuaauucgggugau

SEQ ID NO: 2442713 - RNA, 19 nt, Artificial Sequence
  Description of Artificial Sequence: Synthetic oligonucleotide
  Antisense strand to SEQ ID NO: 2442712
aucacccgaauuaaaucag

SEQ ID NO: 2442714 - RNA, 19 nt, Artificial Sequence
  Description of Artificial Sequence: Synthetic oligonucleotide
  Sense strand starting at position 3848 of SEQ ID NO: 1887020
ugauuuaauucgggugaug

SEQ ID NO: 2442715 - RNA, 19 nt, Artificial Sequence
  Description of Artificial Sequence: Synthetic oligonucleotide
  Antisense strand to SEQ ID NO: 2442714
caucacccgaauuaaauca

SEQ ID NO: 2442716 - RNA, 19 nt, Artificial Sequence
  Description of Artificial Sequence: Synthetic oligonucleotide
  Sense strand starting at position 3864 of SEQ ID NO: 1887020
augccugcgcaucagaauu

SEQ ID NO: 2442717 - RNA, 19 nt, Artificial Sequence
  Description of Artificial Sequence: Synthetic oligonucleotide
  Antisense strand to SEQ ID NO: 2442716
aauucugaugcgcaggcau

SEQ ID NO: 2442718 - RNA, 19 nt, Artificial Sequence
  Description of Artificial Sequence: Synthetic oligonucleotide
  Sense strand starting at position 3874 of SEQ ID NO: 1887020
aucagaauuucugaaagcu

SEQ ID NO: 2442719 - RNA, 19 nt, Artificial Sequence
  Description of Artificial Sequence: Synthetic oligonucleotide
  Antisense strand to SEQ ID NO: 2442718
agcuuucagaaauucugau

SEQ ID NO: 2442720 - RNA, 19 nt, Artificial Sequence
  Description of Artificial Sequence: Synthetic oligonucleotide
  Sense strand starting at position 3920 of SEQ ID NO: 1887020
gguugaagcacugaucucu

SEQ ID NO: 2442721 - RNA, 19 nt, Artificial Sequence
  Description of Artificial Sequence: Synthetic oligonucleotide
  Antisense strand to SEQ ID NO: 2442720
agagaucagugcuucaacc

SEQ ID NO: 2442722 - RNA, 19 nt, Artificial Sequence
  Description of Artificial Sequence: Synthetic oligonucleotide
  Sense strand starting at position 1986 of SEQ ID NO: 1887021
gggagugguggugguagaa

SEQ ID NO: 2442723 - RNA, 19 nt, Artificial Sequence
  Description of Artificial Sequence: Synthetic oligonucleotide
  Antisense strand to SEQ ID NO: 2442722
uucuaccaccaccacuccc

SEQ ID NO: 2442724 - RNA, 19 nt, Artificial Sequence
  Description of Artificial Sequence: Synthetic oligonucleotide
  Sense strand starting at position 1988 of SEQ ID NO: 1887021
gagugguggugguagaagu

SEQ ID NO: 2442725 - RNA, 19 nt, Artificial Sequence
  Description of Artificial Sequence: Synthetic oligonucleotide
  Antisense strand to SEQ ID NO: 2442724
acuucuaccaccaccacuc

SEQ ID NO: 2442726 - RNA, 19 nt, Artificial Sequence
  Description of Artificial Sequence: Synthetic oligonucleotide
  Sense strand starting at position 1995 of SEQ ID NO: 1887021
ggugguagaagucauaaca

SEQ ID NO: 2442727 - RNA, 19 nt, Artificial Sequence
  Description of Artificial Sequence: Synthetic oligonucleotide
  Antisense strand to SEQ ID NO: 2442726
uguuaugacuucuaccacc

SEQ ID NO: 2442728 - RNA, 19 nt, Artificial Sequence
  Description of Artificial Sequence: Synthetic oligonucleotide
  Sense strand starting at position 2011 of SEQ ID NO: 1887021
acaauacaaucggugacaa

SEQ ID NO: 2442729 - RNA, 19 nt, Artificial Sequence
  Description of Artificial Sequence: Synthetic oligonucleotide
  Antisense strand to SEQ ID NO: 2442728
uugucaccgauuguauugu

SEQ ID NO: 2442730 - RNA, 19 nt, Artificial Sequence
  Description of Artificial Sequence: Synthetic oligonucleotide
  Sense strand starting at position 2022 of SEQ ID NO: 1887021
ggugacaauagcuaacgau

SEQ ID NO: 2442731 - RNA, 19 nt, Artificial Sequence
  Description of Artificial Sequence: Synthetic oligonucleotide
  Antisense strand to SEQ ID NO: 2442730
aucguuagcuauugucacc

SEQ ID NO: 2442732 - RNA, 19 nt, Artificial Sequence
  Description of Artificial Sequence: Synthetic oligonucleotide
  Sense strand starting at position 2211 of SEQ ID NO: 1887021
ccaccagugucccgagaau

SEQ ID NO: 2442733 - RNA, 19 nt, Artificial Sequence
  Description of Artificial Sequence: Synthetic oligonucleotide
  Antisense strand to SEQ ID NO: 2442732
auucucgggacacuggugg

SEQ ID NO: 2442734 - RNA, 19 nt, Artificial Sequence
  Description of Artificial Sequence: Synthetic oligonucleotide
  Sense strand starting at position 2254 of SEQ ID NO: 1887021
aaagaugacugucacgguu

SEQ ID NO: 2442735 - RNA, 19 nt, Artificial Sequence
  Description of Artificial Sequence: Synthetic oligonucleotide
  Antisense strand to SEQ ID NO: 2442734
aaccgugacagucaucuuu

SEQ ID NO: 2442736 - RNA, 19 nt, Artificial Sequence
  Description of Artificial Sequence: Synthetic oligonucleotide
  Sense strand starting at position 2260 of SEQ ID NO: 1887021
gacugucacgguuggcuaa

SEQ ID NO: 2442737 - RNA, 19 nt, Artificial Sequence
  Description of Artificial Sequence: Synthetic oligonucleotide
  Antisense strand to SEQ ID NO: 2442736
uuagccaaccgugacaguc

SEQ ID NO: 2442738 - RNA, 19 nt, Artificial Sequence
  Description of Artificial Sequence: Synthetic oligonucleotide
  Sense strand starting at position 2271 of SEQ ID NO: 1887021
uuggcuaaaccucgagacu

SEQ ID NO: 2442739 - RNA, 19 nt, Artificial Sequence
  Description of Artificial Sequence: Synthetic oligonucleotide
  Antisense strand to SEQ ID NO: 2442738
agucucgagguuuagccaa

SEQ ID NO: 2442740 - RNA, 19 nt, Artificial Sequence
  Description of Artificial Sequence: Synthetic oligonucleotide
  Sense strand starting at position 2272 of SEQ ID NO: 1887021
uggcuaaaccucgagacuu

SEQ ID NO: 2442741 - RNA, 19 nt, Artificial Sequence
  Description of Artificial Sequence: Synthetic oligonucleotide
  Antisense strand to SEQ ID NO: 2442740
aagucucgagguuuagcca

SEQ ID NO: 2442742 - RNA, 19 nt, Artificial Sequence
  Description of Artificial Sequence: Synthetic oligonucleotide
  Sense strand starting at position 2289 of SEQ ID NO: 1887021
uugggcaacuccugacaau

SEQ ID NO: 2442743 - RNA, 19 nt, Artificial Sequence
  Description of Artificial Sequence: Synthetic oligonucleotide
  Antisense strand to SEQ ID NO: 2442742
auugucaggaguugcccaa

SEQ ID NO: 2442744 - RNA, 19 nt, Artificial Sequence
  Description of Artificial Sequence: Synthetic oligonucleotide
  Sense strand starting at position 2292 of SEQ ID NO: 1887021
ggcaacuccugacaauaau

SEQ ID NO: 2442745 - RNA, 19 nt, Artificial Sequence
  Description of Artificial Sequence: Synthetic oligonucleotide
  Antisense strand to SEQ ID NO: 2442744
auuauugucaggaguugcc

SEQ ID NO: 2442746 - RNA, 19 nt, Artificial Sequence
  Description of Artificial Sequence: Synthetic oligonucleotide
  Sense strand starting at position 2591 of SEQ ID NO: 1887021
gucgaagacaguuaucgga

SEQ ID NO: 2442747 - RNA, 19 nt, Artificial Sequence
  Description of Artificial Sequence: Synthetic oligonucleotide
  Antisense strand to SEQ ID NO: 2442746
uccgauaacugucuucgac

SEQ ID NO: 2442748 - RNA, 19 nt, Artificial Sequence
  Description of Artificial Sequence: Synthetic oligonucleotide
  Sense strand starting at position 2598 of SEQ ID NO: 1887021
acaguuaucggaggccgaa

SEQ ID NO: 2442749 - RNA, 19 nt, Artificial Sequence
  Description of Artificial Sequence: Synthetic oligonucleotide
  Antisense strand to SEQ ID NO: 2442748
uucggccuccgauaacugu

SEQ ID NO: 2442750 - RNA, 19 nt, Artificial Sequence
  Description of Artificial Sequence: Synthetic oligonucleotide
  Sense strand starting at position 2833 of SEQ ID NO: 1887021
gaauauucuuugcuccgga

SEQ ID NO: 2442751 - RNA, 19 nt, Artificial Sequence
  Description of Artificial Sequence: Synthetic oligonucleotide
  Antisense strand to SEQ ID NO: 2442750
uccggagcaaagaauauuc

SEQ ID NO: 2442752 - RNA, 19 nt, Artificial Sequence
  Description of Artificial Sequence: Synthetic oligonucleotide
  Sense strand starting at position 2840 of SEQ ID NO: 1887021
cuuugcuccggacguguaa

SEQ ID NO: 2442753 - RNA, 19 nt, Artificial Sequence
  Description of Artificial Sequence: Synthetic oligonucleotide
  Antisense strand to SEQ ID NO: 2442752
uuacacguccggagcaaag

SEQ ID NO: 2442754 - RNA, 19 nt, Artificial Sequence
  Description of Artificial Sequence: Synthetic oligonucleotide
  Sense strand starting at position 3223 of SEQ ID NO: 1887021
agcagaagcugcucuagaa

SEQ ID NO: 2442755 - RNA, 19 nt, Artificial Sequence
  Description of Artificial Sequence: Synthetic oligonucleotide
  Antisense strand to SEQ ID NO: 2442754
uucuagagcagcuucugcu

SEQ ID NO: 2442756 - RNA, 19 nt, Artificial Sequence
  Description of Artificial Sequence: Synthetic oligonucleotide
  Sense strand starting at position 3416 of SEQ ID NO: 1887021
ggcgaggucgccugaugaa

SEQ ID NO: 2442757 - RNA, 19 nt, Artificial Sequence
  Description of Artificial Sequence: Synthetic oligonucleotide
  Antisense strand to SEQ ID NO: 2442756
uucaucaggcgaccucgcc

SEQ ID NO: 2442758 - RNA, 19 nt, Artificial Sequence
  Description of Artificial Sequence: Synthetic oligonucleotide
  Sense strand starting at position 3419 of SEQ ID NO: 1887021
gaggucgccugaugaauuc

SEQ ID NO: 2442759 - RNA, 19 nt, Artificial Sequence
  Description of Artificial Sequence: Synthetic oligonucleotide
  Antisense strand to SEQ ID NO: 2442758
gaauucaucaggcgaccuc

SEQ ID NO: 2442760 - RNA, 19 nt, Artificial Sequence
  Description of Artificial Sequence: Synthetic oligonucleotide
  Sense strand starting at position 3442 of SEQ ID NO: 1887021
gcaccagugcuccgcgaga

SEQ ID NO: 2442761 - RNA, 19 nt, Artificial Sequence
  Description of Artificial Sequence: Synthetic oligonucleotide
  Antisense strand to SEQ ID NO: 2442760
ucucgcggagcacuggugc

SEQ ID NO: 2442762 - RNA, 19 nt, Artificial Sequence
  Description of Artificial Sequence: Synthetic oligonucleotide
  Sense strand starting at position 3444 of SEQ ID NO: 1887021
accagugcuccgcgagaac

SEQ ID NO: 2442763 - RNA, 19 nt, Artificial Sequence
  Description of Artificial Sequence: Synthetic oligonucleotide
  Antisense strand to SEQ ID NO: 2442762
guucucgcggagcacuggu

SEQ ID NO: 2442764 - RNA, 19 nt, Artificial Sequence
  Description of Artificial Sequence: Synthetic oligonucleotide
  Sense strand starting at position 3447 of SEQ ID NO: 1887021
agugcuccgcgagaacuuu

SEQ ID NO: 2442765 - RNA, 19 nt, Artificial Sequence
  Description of Artificial Sequence: Synthetic oligonucleotide
  Antisense strand to SEQ ID NO: 2442764
aaaguucucgcggagcacu

SEQ ID NO: 2442766 - RNA, 19 nt, Artificial Sequence
  Description of Artificial Sequence: Synthetic oligonucleotide
  Sense strand starting at position 3455 of SEQ ID NO: 1887021
gcgagaacuuucugugggu

SEQ ID NO: 2442767 - RNA, 19 nt, Artificial Sequence
  Description of Artificial Sequence: Synthetic oligonucleotide
  Antisense strand to SEQ ID NO: 2442766
acccacagaaaguucucgc

SEQ ID NO: 2442768 - RNA, 19 nt, Artificial Sequence
  Description of Artificial Sequence: Synthetic oligonucleotide
  Sense strand starting at position 3456 of SEQ ID NO: 1887021
cgagaacuuucuguggguu

SEQ ID NO: 2442769 - RNA, 19 nt, Artificial Sequence
  Description of Artificial Sequence: Synthetic oligonucleotide
  Antisense strand to SEQ ID NO: 2442768
aacccacagaaaguucucg

SEQ ID NO: 2442770 - RNA, 19 nt, Artificial Sequence
  Description of Artificial Sequence: Synthetic oligonucleotide
  Sense strand starting at position 3527 of SEQ ID NO: 1887021
ugcgcaaucugccguaguu

SEQ ID NO: 2442771 - RNA, 19 nt, Artificial Sequence
  Description of Artificial Sequence: Synthetic oligonucleotide
  Antisense strand to SEQ ID NO: 2442770
aacuacggcagauugcgca

SEQ ID NO: 2442772 - RNA, 19 nt, Artificial Sequence
  Description of Artificial Sequence: Synthetic oligonucleotide
  Sense strand starting at position 3528 of SEQ ID NO: 1887021
gcgcaaucugccguaguuu

SEQ ID NO: 2442773 - RNA, 19 nt, Artificial Sequence
  Description of Artificial Sequence: Synthetic oligonucleotide
  Antisense strand to SEQ ID NO: 2442772
aaacuacggcagauugcgc

SEQ ID NO: 2442774 - RNA, 19 nt, Artificial Sequence
  Description of Artificial Sequence: Synthetic oligonucleotide
  Sense strand starting at position 68 of SEQ ID NO: 1887022
gcuagaauggucgcugucu

SEQ ID NO: 2442775 - RNA, 19 nt, Artificial Sequence
  Description of Artificial Sequence: Synthetic oligonucleotide
  Antisense strand to SEQ ID NO: 2442774
agacagcgaccauucuagc

SEQ ID NO: 2442776 - RNA, 19 nt, Artificial Sequence
  Description of Artificial Sequence: Synthetic oligonucleotide
  Sense strand starting at position 102 of SEQ ID NO: 1887022
ggcugacagguuuggauau

SEQ ID NO: 2442777 - RNA, 19 nt, Artificial Sequence
  Description of Artificial Sequence: Synthetic oligonucleotide
  Antisense strand to SEQ ID NO: 2442776
auauccaaaccugucagcc

SEQ ID NO: 2442778 - RNA, 19 nt, Artificial Sequence
  Description of Artificial Sequence: Synthetic oligonucleotide
  Sense strand starting at position 144 of SEQ ID NO: 1887022
uggagauagcccugaggga

SEQ ID NO: 2442779 - RNA, 19 nt, Artificial Sequence
  Description of Artificial Sequence: Synthetic oligonucleotide
  Antisense strand to SEQ ID NO: 2442778
ucccucagggcuaucucca

SEQ ID NO: 2442780 - RNA, 19 nt, Artificial Sequence
  Description of Artificial Sequence: Synthetic oligonucleotide
  Sense strand starting at position 236 of SEQ ID NO: 1887022
caaagucaguccucgguga

SEQ ID NO: 2442781 - RNA, 19 nt, Artificial Sequence
  Description of Artificial Sequence: Synthetic oligonucleotide
  Antisense strand to SEQ ID NO: 2442780
ucaccgaggacugacuuug

SEQ ID NO: 2442782 - RNA, 19 nt, Artificial Sequence
  Description of Artificial Sequence: Synthetic oligonucleotide
  Sense strand starting at position 509 of SEQ ID NO: 1887022
gccuuagucccugaucuca

SEQ ID NO: 2442783 - RNA, 19 nt, Artificial Sequence
  Description of Artificial Sequence: Synthetic oligonucleotide
  Antisense strand to SEQ ID NO: 2442782
ugagaucagggacuaaggc

SEQ ID NO: 2442784 - RNA, 19 nt, Artificial Sequence
  Description of Artificial Sequence: Synthetic oligonucleotide
  Sense strand starting at position 511 of SEQ ID NO: 1887022
cuuagucccugaucucaca

SEQ ID NO: 2442785 - RNA, 19 nt, Artificial Sequence
  Description of Artificial Sequence: Synthetic oligonucleotide
  Antisense strand to SEQ ID NO: 2442784
ugugagaucagggacuaag

SEQ ID NO: 2442786 - RNA, 19 nt, Artificial Sequence
  Description of Artificial Sequence: Synthetic oligonucleotide
  Sense strand starting at position 603 of SEQ ID NO: 1887022
gucacuguccuuugggaaa

SEQ ID NO: 2442787 - RNA, 19 nt, Artificial Sequence
  Description of Artificial Sequence: Synthetic oligonucleotide
  Antisense strand to SEQ ID NO: 2442786
uuucccaaaggacagugac

SEQ ID NO: 2442788 - RNA, 19 nt, Artificial Sequence
  Description of Artificial Sequence: Synthetic oligonucleotide
  Sense strand starting at position 606 of SEQ ID NO: 1887022
acuguccuuugggaaacaa

SEQ ID NO: 2442789 - RNA, 19 nt, Artificial Sequence
  Description of Artificial Sequence: Synthetic oligonucleotide
  Antisense strand to SEQ ID NO: 2442788
uuguuucccaaaggacagu

SEQ ID NO: 2442790 - RNA, 19 nt, Artificial Sequence
  Description of Artificial Sequence: Synthetic oligonucleotide
  Sense strand starting at position 692 of SEQ ID NO: 1887022
cgcuguuugcaggauacaa

SEQ ID NO: 2442791 - RNA, 19 nt, Artificial Sequence
  Description of Artificial Sequence: Synthetic oligonucleotide
  Antisense strand to SEQ ID NO: 2442790
uuguauccugcaaacagcg

SEQ ID NO: 2442792 - RNA, 19 nt, Artificial Sequence
  Description of Artificial Sequence: Synthetic oligonucleotide
  Sense strand starting at position 792 of SEQ ID NO: 1887022
cagagaacgugcucaagaa

SEQ ID NO: 2442793 - RNA, 19 nt, Artificial Sequence
  Description of Artificial Sequence: Synthetic oligonucleotide
  Antisense strand to SEQ ID NO: 2442792
uucuugagcacguucucug

SEQ ID NO: 2442794 - RNA, 19 nt, Artificial Sequence
  Description of Artificial Sequence: Synthetic oligonucleotide
  Sense strand starting at position 999 of SEQ ID NO: 1887022
cagccauauguguuugcga

SEQ ID NO: 2442795 - RNA, 19 nt, Artificial Sequence
  Description of Artificial Sequence: Synthetic oligonucleotide
  Antisense strand to SEQ ID NO: 2442794
ucgcaaacacauauggcug

SEQ ID NO: 2442796 - RNA, 19 nt, Artificial Sequence
  Description of Artificial Sequence: Synthetic oligonucleotide
  Sense strand starting at position 1263 of SEQ ID NO: 1887022
gcaguuugcgguuacagga

SEQ ID NO: 2442797 - RNA, 19 nt, Artificial Sequence
  Description of Artificial Sequence: Synthetic oligonucleotide
  Antisense strand to SEQ ID NO: 2442796
uccuguaaccgcaaacugc

SEQ ID NO: 2442798 - RNA, 19 nt, Artificial Sequence
  Description of Artificial Sequence: Synthetic oligonucleotide
  Sense strand starting at position 1399 of SEQ ID NO: 1887022
gcaucuucucgggucguca

SEQ ID NO: 2442799 - RNA, 19 nt, Artificial Sequence
  Description of Artificial Sequence: Synthetic oligonucleotide
  Antisense strand to SEQ ID NO: 2442798
ugacgacccgagaagaugc

SEQ ID NO: 2442800 - RNA, 19 nt, Artificial Sequence
  Description of Artificial Sequence: Synthetic oligonucleotide
  Sense strand starting at position 1465 of SEQ ID NO: 1887022
uuguuacaucaccgaugua

SEQ ID NO: 2442801 - RNA, 19 nt, Artificial Sequence
  Description of Artificial Sequence: Synthetic oligonucleotide
  Antisense strand to SEQ ID NO: 2442800
uacaucggugauguaacaa

SEQ ID NO: 2442802 - RNA, 19 nt, Artificial Sequence
  Description of Artificial Sequence: Synthetic oligonucleotide
  Sense strand starting at position 1468 of SEQ ID NO: 1887022
uuacaucaccgauguaaca

SEQ ID NO: 2442803 - RNA, 19 nt, Artificial Sequence
  Description of Artificial Sequence: Synthetic oligonucleotide
  Antisense strand to SEQ ID NO: 2442802
uguuacaucggugauguaa

SEQ ID NO: 2442804 - RNA, 19 nt, Artificial Sequence
  Description of Artificial Sequence: Synthetic oligonucleotide
  Sense strand starting at position 1481 of SEQ ID NO: 1887022
guaacagugccuggacgua

SEQ ID NO: 2442805 - RNA, 19 nt, Artificial Sequence
  Description of Artificial Sequence: Synthetic oligonucleotide
  Antisense strand to SEQ ID NO: 2442804
uacguccaggcacuguuac

SEQ ID NO: 2442806 - RNA, 19 nt, Artificial Sequence
  Description of Artificial Sequence: Synthetic oligonucleotide
  Sense strand starting at position 1522 of SEQ ID NO: 1887022
guugaaugcgcuucagucu

SEQ ID NO: 2442807 - RNA, 19 nt, Artificial Sequence
  Description of Artificial Sequence: Synthetic oligonucleotide
  Antisense strand to SEQ ID NO: 2442806
agacugaagcgcauucaac

SEQ ID NO: 2442808 - RNA, 19 nt, Artificial Sequence
  Description of Artificial Sequence: Synthetic oligonucleotide
  Sense strand starting at position 1839 of SEQ ID NO: 1887022
gaccgaguggcugaagauu

SEQ ID NO: 2442809 - RNA, 19 nt, Artificial Sequence
  Description of Artificial Sequence: Synthetic oligonucleotide
  Antisense strand to SEQ ID NO: 2442808
aaucuucagccacucgguc

SEQ ID NO: 2442810 - RNA, 19 nt, Artificial Sequence
  Description of Artificial Sequence: Synthetic oligonucleotide
  Sense strand starting at position 1871 of SEQ ID NO: 1887022
cccagucugucgguuacuu

SEQ ID NO: 2442811 - RNA, 19 nt, Artificial Sequence
  Description of Artificial Sequence: Synthetic oligonucleotide
  Antisense strand to SEQ ID NO: 2442810
aaguaaccgacagacuggg

SEQ ID NO: 2442812 - RNA, 19 nt, Artificial Sequence
  Description of Artificial Sequence: Synthetic oligonucleotide
  Sense strand starting at position 1882 of SEQ ID NO: 1887022
gguuacuuacccugugaca

SEQ ID NO: 2442813 - RNA, 19 nt, Artificial Sequence
  Description of Artificial Sequence: Synthetic oligonucleotide
  Antisense strand to SEQ ID NO: 2442812
ugucacaggguaaguaacc

SEQ ID NO: 2442814 - RNA, 19 nt, Artificial Sequence
  Description of Artificial Sequence: Synthetic oligonucleotide
  Sense strand starting at position 1884 of SEQ ID NO: 1887022
uuacuuacccugugacaag

SEQ ID NO: 2442815 - RNA, 19 nt, Artificial Sequence
  Description of Artificial Sequence: Synthetic oligonucleotide
  Antisense strand to SEQ ID NO: 2442814
cuugucacaggguaaguaa

SEQ ID NO: 2442816 - RNA, 19 nt, Artificial Sequence
  Description of Artificial Sequence: Synthetic oligonucleotide
  Sense strand starting at position 2026 of SEQ ID NO: 1887022
uagagacuucugggagcuu

SEQ ID NO: 2442817 - RNA, 19 nt, Artificial Sequence
  Description of Artificial Sequence: Synthetic oligonucleotide
  Antisense strand to SEQ ID NO: 2442816
aagcucccagaagucucua

SEQ ID NO: 2442818 - RNA, 19 nt, Artificial Sequence
  Description of Artificial Sequence: Synthetic oligonucleotide
  Sense strand starting at position 2832 of SEQ ID NO: 1887022
ggcugaguggccuaggaaa

SEQ ID NO: 2442819 - RNA, 19 nt, Artificial Sequence
  Description of Artificial Sequence: Synthetic oligonucleotide
  Antisense strand to SEQ ID NO: 2442818
uuuccuaggccacucagcc

SEQ ID NO: 2442820 - RNA, 19 nt, Artificial Sequence
  Description of Artificial Sequence: Synthetic oligonucleotide
  Sense strand starting at position 2844 of SEQ ID NO: 1887022
uaggaaaguuuggcagaaa

SEQ ID NO: 2442821 - RNA, 19 nt, Artificial Sequence
  Description of Artificial Sequence: Synthetic oligonucleotide
  Antisense strand to SEQ ID NO: 2442820
uuucugccaaacuuuccua

SEQ ID NO: 2442822 - RNA, 19 nt, Artificial Sequence
  Description of Artificial Sequence: Synthetic oligonucleotide
  Sense strand starting at position 2845 of SEQ ID NO: 1887022
aggaaaguuuggcagaaac

SEQ ID NO: 2442823 - RNA, 19 nt, Artificial Sequence
  Description of Artificial Sequence: Synthetic oligonucleotide
  Antisense strand to SEQ ID NO: 2442822
guuucugccaaacuuuccu

SEQ ID NO: 2442824 - RNA, 19 nt, Artificial Sequence
  Description of Artificial Sequence: Synthetic oligonucleotide
  Sense strand starting at position 2855 of SEQ ID NO: 1887022
ggcagaaacugaguagagu

SEQ ID NO: 2442825 - RNA, 19 nt, Artificial Sequence
  Description of Artificial Sequence: Synthetic oligonucleotide
  Antisense strand to SEQ ID NO: 2442824
acucuacucaguuucugcc

SEQ ID NO: 2442826 - RNA, 19 nt, Artificial Sequence
  Description of Artificial Sequence: Synthetic oligonucleotide
  Sense strand starting at position 2864 of SEQ ID NO: 1887022
ugaguagagucucccgagu

SEQ ID NO: 2442827 - RNA, 19 nt, Artificial Sequence
  Description of Artificial Sequence: Synthetic oligonucleotide
  Antisense strand to SEQ ID NO: 2442826
acucgggagacucuacuca

SEQ ID NO: 2442828 - RNA, 19 nt, Artificial Sequence
  Description of Artificial Sequence: Synthetic oligonucleotide
  Sense strand starting at position 2925 of SEQ ID NO: 1887022
gugggagucucagcuggaa

SEQ ID NO: 2442829 - RNA, 19 nt, Artificial Sequence
  Description of Artificial Sequence: Synthetic oligonucleotide
  Antisense strand to SEQ ID NO: 2442828
uuccagcugagacucccac

SEQ ID NO: 2442830 - RNA, 19 nt, Artificial Sequence
  Description of Artificial Sequence: Synthetic oligonucleotide
  Sense strand starting at position 3012 of SEQ ID NO: 1887022
gcuuguuccagggaaggaa

SEQ ID NO: 2442831 - RNA, 19 nt, Artificial Sequence
  Description of Artificial Sequence: Synthetic oligonucleotide
  Antisense strand to SEQ ID NO: 2442830
uuccuucccuggaacaagc

SEQ ID NO: 2442832 - RNA, 19 nt, Artificial Sequence
  Description of Artificial Sequence: Synthetic oligonucleotide
  Sense strand starting at position 3364 of SEQ ID NO: 1887022
uguaucaguuccuuguguu

SEQ ID NO: 2442833 - RNA, 19 nt, Artificial Sequence
  Description of Artificial Sequence: Synthetic oligonucleotide
  Antisense strand to SEQ ID NO: 2442832
aacacaaggaacugauaca

SEQ ID NO: 2442834 - RNA, 19 nt, Artificial Sequence
  Description of Artificial Sequence: Synthetic oligonucleotide
  Sense strand starting at position 3365 of SEQ ID NO: 1887022
guaucaguuccuuguguug

SEQ ID NO: 2442835 - RNA, 19 nt, Artificial Sequence
  Description of Artificial Sequence: Synthetic oligonucleotide
  Antisense strand to SEQ ID NO: 2442834
caacacaaggaacugauac

SEQ ID NO: 2442836 - RNA, 19 nt, Artificial Sequence
  Description of Artificial Sequence: Synthetic oligonucleotide
  Sense strand starting at position 3371 of SEQ ID NO: 1887022
guuccuuguguugggucaa

SEQ ID NO: 2442837 - RNA, 19 nt, Artificial Sequence
  Description of Artificial Sequence: Synthetic oligonucleotide
  Antisense strand to SEQ ID NO: 2442836
uugacccaacacaaggaac

SEQ ID NO: 2442838 - RNA, 19 nt, Artificial Sequence
  Description of Artificial Sequence: Synthetic oligonucleotide
  Sense strand starting at position 3478 of SEQ ID NO: 1887022
ugugucaaguucuccagau

SEQ ID NO: 2442839 - RNA, 19 nt, Artificial Sequence
  Description of Artificial Sequence: Synthetic oligonucleotide
  Antisense strand to SEQ ID NO: 2442838
aucuggagaacuugacaca

SEQ ID NO: 2442840 - RNA, 19 nt, Artificial Sequence
  Description of Artificial Sequence: Synthetic oligonucleotide
  Sense strand starting at position 3479 of SEQ ID NO: 1887022
gugucaaguucuccagaua

SEQ ID NO: 2442841 - RNA, 19 nt, Artificial Sequence
  Description of Artificial Sequence: Synthetic oligonucleotide
  Antisense strand to SEQ ID NO: 2442840
uaucuggagaacuugacac

SEQ ID NO: 2442842 - RNA, 19 nt, Artificial Sequence
  Description of Artificial Sequence: Synthetic oligonucleotide
  Sense strand starting at position 3480 of SEQ ID NO: 1887022
ugucaaguucuccagauau

SEQ ID NO: 2442843 - RNA, 19 nt, Artificial Sequence
  Description of Artificial Sequence: Synthetic oligonucleotide
  Antisense strand to SEQ ID NO: 2442842
auaucuggagaacuugaca

SEQ ID NO: 2442844 - RNA, 19 nt, Artificial Sequence
  Description of Artificial Sequence: Synthetic oligonucleotide
  Sense strand starting at position 3531 of SEQ ID NO: 1887022
agggaauccugauccagug

SEQ ID NO: 2442845 - RNA, 19 nt, Artificial Sequence
  Description of Artificial Sequence: Synthetic oligonucleotide
  Antisense strand to SEQ ID NO: 2442844
cacuggaucaggauucccu

SEQ ID NO: 2442846 - RNA, 19 nt, Artificial Sequence
  Description of Artificial Sequence: Synthetic oligonucleotide
  Sense strand starting at position 3744 of SEQ ID NO: 1887022
gggagucuguguucccuga

SEQ ID NO: 2442847 - RNA, 19 nt, Artificial Sequence
  Description of Artificial Sequence: Synthetic oligonucleotide
  Antisense strand to SEQ ID NO: 2442846
ucagggaacacagacuccc

SEQ ID NO: 2442848 - RNA, 19 nt, Artificial Sequence
  Description of Artificial Sequence: Synthetic oligonucleotide
  Sense strand starting at position 3748 of SEQ ID NO: 1887022
gucuguguucccugagaau

SEQ ID NO: 2442849 - RNA, 19 nt, Artificial Sequence
  Description of Artificial Sequence: Synthetic oligonucleotide
  Antisense strand to SEQ ID NO: 2442848
auucucagggaacacagac

SEQ ID NO: 2442850 - RNA, 19 nt, Artificial Sequence
  Description of Artificial Sequence: Synthetic oligonucleotide
  Sense strand starting at position 3778 of SEQ ID NO: 1887022
gggauagcuccagggaauc

SEQ ID NO: 2442851 - RNA, 19 nt, Artificial Sequence
  Description of Artificial Sequence: Synthetic oligonucleotide
  Antisense strand to SEQ ID NO: 2442850
gauucccuggagcuauccc

SEQ ID NO: 2442852 - RNA, 19 nt, Artificial Sequence
  Description of Artificial Sequence: Synthetic oligonucleotide
  Sense strand starting at position 3789 of SEQ ID NO: 1887022
agggaaucuuccucuccca

SEQ ID NO: 2442853 - RNA, 19 nt, Artificial Sequence
  Description of Artificial Sequence: Synthetic oligonucleotide
  Antisense strand to SEQ ID NO: 2442852
ugggagaggaagauucccu

SEQ ID NO: 2442854 - RNA, 19 nt, Artificial Sequence
  Description of Artificial Sequence: Synthetic oligonucleotide
  Sense strand starting at position 10 of SEQ ID NO: 1887023
cuauguaaguugccauaau

SEQ ID NO: 2442855 - RNA, 19 nt, Artificial Sequence
  Description of Artificial Sequence: Synthetic oligonucleotide
  Antisense strand to SEQ ID NO: 2442854
auuauggcaacuuacauag

SEQ ID NO: 2442856 - RNA, 19 nt, Artificial Sequence
  Description of Artificial Sequence: Synthetic oligonucleotide
  Sense strand starting at position 64 of SEQ ID NO: 1887023
ggaaguuaauuugagaacu

SEQ ID NO: 2442857 - RNA, 19 nt, Artificial Sequence
  Description of Artificial Sequence: Synthetic oligonucleotide
  Antisense strand to SEQ ID NO: 2442856
aguucucaaauuaacuucc

SEQ ID NO: 2442858 - RNA, 19 nt, Artificial Sequence
  Description of Artificial Sequence: Synthetic oligonucleotide
  Sense strand starting at position 253 of SEQ ID NO: 1887023
aaaugaggcugguaaugaa

SEQ ID NO: 2442859 - RNA, 19 nt, Artificial Sequence
  Description of Artificial Sequence: Synthetic oligonucleotide
  Antisense strand to SEQ ID NO: 2442858
uucauuaccagccucauuu

SEQ ID NO: 2442860 - RNA, 19 nt, Artificial Sequence
  Description of Artificial Sequence: Synthetic oligonucleotide
  Sense strand starting at position 411 of SEQ ID NO: 1887023
ucgagaagguaucugaaag

SEQ ID NO: 2442861 - RNA, 19 nt, Artificial Sequence
  Description of Artificial Sequence: Synthetic oligonucleotide
  Antisense strand to SEQ ID NO: 2442860
cuuucagauaccuucucga

SEQ ID NO: 2442862 - RNA, 19 nt, Artificial Sequence
  Description of Artificial Sequence: Synthetic oligonucleotide
  Sense strand starting at position 467 of SEQ ID NO: 1887023
augcaaauaguuuaagcua

SEQ ID NO: 2442863 - RNA, 19 nt, Artificial Sequence
  Description of Artificial Sequence: Synthetic oligonucleotide
  Antisense strand to SEQ ID NO: 2442862
uagcuuaaacuauuugcau

SEQ ID NO: 2442864 - RNA, 19 nt, Artificial Sequence
  Description of Artificial Sequence: Synthetic oligonucleotide
  Sense strand starting at position 562 of SEQ ID NO: 1887023
gggcaaaugugugucucca

SEQ ID NO: 2442865 - RNA, 19 nt, Artificial Sequence
  Description of Artificial Sequence: Synthetic oligonucleotide
  Antisense strand to SEQ ID NO: 2442864
uggagacacacauuugccc

SEQ ID NO: 2442866 - RNA, 19 nt, Artificial Sequence
  Description of Artificial Sequence: Synthetic oligonucleotide
  Sense strand starting at position 564 of SEQ ID NO: 1887023
gcaaaugugugucuccaua

SEQ ID NO: 2442867 - RNA, 19 nt, Artificial Sequence
  Description of Artificial Sequence: Synthetic oligonucleotide
  Antisense strand to SEQ ID NO: 2442866
uauggagacacacauuugc

SEQ ID NO: 2442868 - RNA, 19 nt, Artificial Sequence
  Description of Artificial Sequence: Synthetic oligonucleotide
  Sense strand starting at position 581 of SEQ ID NO: 1887023
uauauauguguguagaaac

SEQ ID NO: 2442869 - RNA, 19 nt, Artificial Sequence
  Description of Artificial Sequence: Synthetic oligonucleotide
  Antisense strand to SEQ ID NO: 2442868
guuucuacacacauauaua

SEQ ID NO: 2442870 - RNA, 19 nt, Artificial Sequence
  Description of Artificial Sequence: Synthetic oligonucleotide
  Sense strand starting at position 734 of SEQ ID NO: 1887023
uuuguuaauuaaccgucua

SEQ ID NO: 2442871 - RNA, 19 nt, Artificial Sequence
  Description of Artificial Sequence: Synthetic oligonucleotide
  Antisense strand to SEQ ID NO: 2442870
uagacgguuaauuaacaaa

SEQ ID NO: 2442872 - RNA, 19 nt, Artificial Sequence
  Description of Artificial Sequence: Synthetic oligonucleotide
  Sense strand starting at position 808 of SEQ ID NO: 1887023
ucccgacugucccaagauu

SEQ ID NO: 2442873 - RNA, 19 nt, Artificial Sequence
  Description of Artificial Sequence: Synthetic oligonucleotide
  Antisense strand to SEQ ID NO: 2442872
aaucuugggacagucggga

SEQ ID NO: 2442874 - RNA, 19 nt, Artificial Sequence
  Description of Artificial Sequence: Synthetic oligonucleotide
  Sense strand starting at position 819 of SEQ ID NO: 1887023
ccaagauuaugcuuaaguu

SEQ ID NO: 2442875 - RNA, 19 nt, Artificial Sequence
  Description of Artificial Sequence: Synthetic oligonucleotide
  Antisense strand to SEQ ID NO: 2442874
aacuuaagcauaaucuugg

SEQ ID NO: 2442876 - RNA, 19 nt, Artificial Sequence
  Description of Artificial Sequence: Synthetic oligonucleotide
  Sense strand starting at position 1010 of SEQ ID NO: 1887023
guaggauccucguucaagu

SEQ ID NO: 2442877 - RNA, 19 nt, Artificial Sequence
  Description of Artificial Sequence: Synthetic oligonucleotide
  Antisense strand to SEQ ID NO: 2442876
acuugaacgaggauccuac

SEQ ID NO: 2442878 - RNA, 19 nt, Artificial Sequence
  Description of Artificial Sequence: Synthetic oligonucleotide
  Sense strand starting at position 1057 of SEQ ID NO: 1887023
ccaguuacugcuucgcuua

SEQ ID NO: 2442879 - RNA, 19 nt, Artificial Sequence
  Description of Artificial Sequence: Synthetic oligonucleotide
  Antisense strand to SEQ ID NO: 2442878
uaagcgaagcaguaacugg

SEQ ID NO: 2442880 - RNA, 19 nt, Artificial Sequence
  Description of Artificial Sequence: Synthetic oligonucleotide
  Sense strand starting at position 1058 of SEQ ID NO: 1887023
caguuacugcuucgcuuaa

SEQ ID NO: 2442881 - RNA, 19 nt, Artificial Sequence
  Description of Artificial Sequence: Synthetic oligonucleotide
  Antisense strand to SEQ ID NO: 2442880
uuaagcgaagcaguaacug

SEQ ID NO: 2442882 - RNA, 19 nt, Artificial Sequence
  Description of Artificial Sequence: Synthetic oligonucleotide
  Sense strand starting at position 1059 of SEQ ID NO: 1887023
aguuacugcuucgcuuaaa

SEQ ID NO: 2442883 - RNA, 19 nt, Artificial Sequence
  Description of Artificial Sequence: Synthetic oligonucleotide
  Antisense strand to SEQ ID NO: 2442882
uuuaagcgaagcaguaacu

SEQ ID NO: 2442884 - RNA, 19 nt, Artificial Sequence
  Description of Artificial Sequence: Synthetic oligonucleotide
  Sense strand starting at position 2046 of SEQ ID NO: 1887023
gcgccauuggcugagcaau

SEQ ID NO: 2442885 - RNA, 19 nt, Artificial Sequence
  Description of Artificial Sequence: Synthetic oligonucleotide
  Antisense strand to SEQ ID NO: 2442884
auugcucagccaauggcgc

SEQ ID NO: 2442886 - RNA, 19 nt, Artificial Sequence
  Description of Artificial Sequence: Synthetic oligonucleotide
  Sense strand starting at position 2059 of SEQ ID NO: 1887023
agcaaugguguccgucaga

SEQ ID NO: 2442887 - RNA, 19 nt, Artificial Sequence
  Description of Artificial Sequence: Synthetic oligonucleotide
  Antisense strand to SEQ ID NO: 2442886
ucugacggacaccauugcu

SEQ ID NO: 2442888 - RNA, 19 nt, Artificial Sequence
  Description of Artificial Sequence: Synthetic oligonucleotide
  Sense strand starting at position 2520 of SEQ ID NO: 1887023
ugagauagagccgguagaa

SEQ ID NO: 2442889 - RNA, 19 nt, Artificial Sequence
  Description of Artificial Sequence: Synthetic oligonucleotide
  Antisense strand to SEQ ID NO: 2442888
uucuaccggcucuaucuca

SEQ ID NO: 2442890 - RNA, 19 nt, Artificial Sequence
  Description of Artificial Sequence: Synthetic oligonucleotide
  Sense strand starting at position 2620 of SEQ ID NO: 1887023
gcggaagacuuacauaucu

SEQ ID NO: 2442891 - RNA, 19 nt, Artificial Sequence
  Description of Artificial Sequence: Synthetic oligonucleotide
  Antisense strand to SEQ ID NO: 2442890
agauauguaagucuuccgc

SEQ ID NO: 2442892 - RNA, 19 nt, Artificial Sequence
  Description of Artificial Sequence: Synthetic oligonucleotide
  Sense strand starting at position 2628 of SEQ ID NO: 1887023
cuuacauaucucggcauau

SEQ ID NO: 2442893 - RNA, 19 nt, Artificial Sequence
  Description of Artificial Sequence: Synthetic oligonucleotide
  Antisense strand to SEQ ID NO: 2442892
auaugccgagauauguaag

SEQ ID NO: 2442894 - RNA, 19 nt, Artificial Sequence
  Description of Artificial Sequence: Synthetic oligonucleotide
  Sense strand starting at position 2629 of SEQ ID NO: 1887023
uuacauaucucggcauauc

SEQ ID NO: 2442895 - RNA, 19 nt, Artificial Sequence
  Description of Artificial Sequence: Synthetic oligonucleotide
  Antisense strand to SEQ ID NO: 2442894
gauaugccgagauauguaa

SEQ ID NO: 2442896 - RNA, 19 nt, Artificial Sequence
  Description of Artificial Sequence: Synthetic oligonucleotide
  Sense strand starting at position 2637 of SEQ ID NO: 1887023
cucggcauaucauuuguau

SEQ ID NO: 2442897 - RNA, 19 nt, Artificial Sequence
  Description of Artificial Sequence: Synthetic oligonucleotide
  Antisense strand to SEQ ID NO: 2442896
auacaaaugauaugccgag

SEQ ID NO: 2442898 - RNA, 19 nt, Artificial Sequence
  Description of Artificial Sequence: Synthetic oligonucleotide
  Sense strand starting at position 2641 of SEQ ID NO: 1887023
gcauaucauuuguauccau

SEQ ID NO: 2442899 - RNA, 19 nt, Artificial Sequence
  Description of Artificial Sequence: Synthetic oligonucleotide
  Antisense strand to SEQ ID NO: 2442898
auggauacaaaugauaugc

SEQ ID NO: 2442900 - RNA, 19 nt, Artificial Sequence
  Description of Artificial Sequence: Synthetic oligonucleotide
  Sense strand starting at position 2917 of SEQ ID NO: 1887023
aggguccucugccuaaaga

SEQ ID NO: 2442901 - RNA, 19 nt, Artificial Sequence
  Description of Artificial Sequence: Synthetic oligonucleotide
  Antisense strand to SEQ ID NO: 2442900
ucuuuaggcagaggacccu

SEQ ID NO: 2442902 - RNA, 19 nt, Artificial Sequence
  Description of Artificial Sequence: Synthetic oligonucleotide
  Sense strand starting at position 2918 of SEQ ID NO: 1887023
ggguccucugccuaaagau

SEQ ID NO: 2442903 - RNA, 19 nt, Artificial Sequence
  Description of Artificial Sequence: Synthetic oligonucleotide
  Antisense strand to SEQ ID NO: 2442902
aucuuuaggcagaggaccc

SEQ ID NO: 2442904 - RNA, 19 nt, Artificial Sequence
  Description of Artificial Sequence: Synthetic oligonucleotide
  Sense strand starting at position 2927 of SEQ ID NO: 1887023
gccuaaagauagugaucua

SEQ ID NO: 2442905 - RNA, 19 nt, Artificial Sequence
  Description of Artificial Sequence: Synthetic oligonucleotide
  Antisense strand to SEQ ID NO: 2442904
uagaucacuaucuuuaggc

SEQ ID NO: 2442906 - RNA, 19 nt, Artificial Sequence
  Description of Artificial Sequence: Synthetic oligonucleotide
  Sense strand starting at position 2934 of SEQ ID NO: 1887023
gauagugaucuaugacaug

SEQ ID NO: 2442907 - RNA, 19 nt, Artificial Sequence
  Description of Artificial Sequence: Synthetic oligonucleotide
  Antisense strand to SEQ ID NO: 2442906
caugucauagaucacuauc

SEQ ID NO: 2442908 - RNA, 19 nt, Artificial Sequence
  Description of Artificial Sequence: Synthetic oligonucleotide
  Sense strand starting at position 2937 of SEQ ID NO: 1887023
agugaucuaugacaugcua

SEQ ID NO: 2442909 - RNA, 19 nt, Artificial Sequence
  Description of Artificial Sequence: Synthetic oligonucleotide
  Antisense strand to SEQ ID NO: 2442908
uagcaugucauagaucacu

SEQ ID NO: 2442910 - RNA, 19 nt, Artificial Sequence
  Description of Artificial Sequence: Synthetic oligonucleotide
  Sense strand starting at position 2957 of SEQ ID NO: 1887023
aggauaaacucccaaagaa

SEQ ID NO: 2442911 - RNA, 19 nt, Artificial Sequence
  Description of Artificial Sequence: Synthetic oligonucleotide
  Antisense strand to SEQ ID NO: 2442910
uucuuugggaguuuauccu

SEQ ID NO: 2442912 - RNA, 19 nt, Artificial Sequence
  Description of Artificial Sequence: Synthetic oligonucleotide
  Sense strand starting at position 3015 of SEQ ID NO: 1887023
aaagaaugucagugaggua

SEQ ID NO: 2442913 - RNA, 19 nt, Artificial Sequence
  Description of Artificial Sequence: Synthetic oligonucleotide
  Antisense strand to SEQ ID NO: 2442912
uaccucacugacauucuuu

SEQ ID NO: 2442914 - RNA, 19 nt, Artificial Sequence
  Description of Artificial Sequence: Synthetic oligonucleotide
  Sense strand starting at position 3068 of SEQ ID NO: 1887023
ggaggaagggucuguggaa

SEQ ID NO: 2442915 - RNA, 19 nt, Artificial Sequence
  Description of Artificial Sequence: Synthetic oligonucleotide
  Antisense strand to SEQ ID NO: 2442914
uuccacagacccuuccucc

SEQ ID NO: 2442916 - RNA, 19 nt, Artificial Sequence
  Description of Artificial Sequence: Synthetic oligonucleotide
  Sense strand starting at position 3422 of SEQ ID NO: 1887023
cugugagagccucauaggu

SEQ ID NO: 2442917 - RNA, 19 nt, Artificial Sequence
  Description of Artificial Sequence: Synthetic oligonucleotide
  Antisense strand to SEQ ID NO: 2442916
accuaugaggcucucacag

SEQ ID NO: 2442918 - RNA, 19 nt, Artificial Sequence
  Description of Artificial Sequence: Synthetic oligonucleotide
  Sense strand starting at position 3424 of SEQ ID NO: 1887023
gugagagccucauaggucu

SEQ ID NO: 2442919 - RNA, 19 nt, Artificial Sequence
  Description of Artificial Sequence: Synthetic oligonucleotide
  Antisense strand to SEQ ID NO: 2442918
agaccuaugaggcucucac

SEQ ID NO: 2442920 - RNA, 19 nt, Artificial Sequence
  Description of Artificial Sequence: Synthetic oligonucleotide
  Sense strand starting at position 3464 of SEQ ID NO: 1887023
ucugguaaccaugggacaa

SEQ ID NO: 2442921 - RNA, 19 nt, Artificial Sequence
  Description of Artificial Sequence: Synthetic oligonucleotide
  Antisense strand to SEQ ID NO: 2442920
uugucccaugguuaccaga

SEQ ID NO: 2442922 - RNA, 19 nt, Artificial Sequence
  Description of Artificial Sequence: Synthetic oligonucleotide
  Sense strand starting at position 3465 of SEQ ID NO: 1887023
cugguaaccaugggacaau

SEQ ID NO: 2442923 - RNA, 19 nt, Artificial Sequence
  Description of Artificial Sequence: Synthetic oligonucleotide
  Antisense strand to SEQ ID NO: 2442922
auugucccaugguuaccag

SEQ ID NO: 2442924 - RNA, 19 nt, Artificial Sequence
  Description of Artificial Sequence: Synthetic oligonucleotide
  Sense strand starting at position 3466 of SEQ ID NO: 1887023
ugguaaccaugggacaaua

SEQ ID NO: 2442925 - RNA, 19 nt, Artificial Sequence
  Description of Artificial Sequence: Synthetic oligonucleotide
  Antisense strand to SEQ ID NO: 2442924
uauugucccaugguuacca

SEQ ID NO: 2442926 - RNA, 19 nt, Artificial Sequence
  Description of Artificial Sequence: Synthetic oligonucleotide
  Sense strand starting at position 3687 of SEQ ID NO: 1887023
guuccagugagccgauauc

SEQ ID NO: 2442927 - RNA, 19 nt, Artificial Sequence
  Description of Artificial Sequence: Synthetic oligonucleotide
  Antisense strand to SEQ ID NO: 2442926
gauaucggcucacuggaac

SEQ ID NO: 2442928 - RNA, 19 nt, Artificial Sequence
  Description of Artificial Sequence: Synthetic oligonucleotide
  Sense strand starting at position 3910 of SEQ ID NO: 1887023
guuccuacccuuuagaguu

SEQ ID NO: 2442929 - RNA, 19 nt, Artificial Sequence
  Description of Artificial Sequence: Synthetic oligonucleotide
  Antisense strand to SEQ ID NO: 2442928
aacucuaaaggguaggaac

SEQ ID NO: 2442930 - RNA, 19 nt, Artificial Sequence
  Description of Artificial Sequence: Synthetic oligonucleotide
  Sense strand starting at position 3918 of SEQ ID NO: 1887023
ccuuuagaguuguugugaa

SEQ ID NO: 2442931 - RNA, 19 nt, Artificial Sequence
  Description of Artificial Sequence: Synthetic oligonucleotide
  Antisense strand to SEQ ID NO: 2442930
uucacaacaacucuaaagg

SEQ ID NO: 2442932 - RNA, 19 nt, Artificial Sequence
  Description of Artificial Sequence: Synthetic oligonucleotide
  Sense strand starting at position 3947 of SEQ ID NO: 1887023
gugaauacauaugauggau

SEQ ID NO: 2442933 - RNA, 19 nt, Artificial Sequence
  Description of Artificial Sequence: Synthetic oligonucleotide
  Antisense strand to SEQ ID NO: 2442932
auccaucauauguauucac

SEQ ID NO: 2442934 - RNA, 19 nt, Artificial Sequence
  Description of Artificial Sequence: Synthetic oligonucleotide
  Sense strand starting at position 62 of SEQ ID NO: 1887024
cucugaaagagucauacgu

SEQ ID NO: 2442935 - RNA, 19 nt, Artificial Sequence
  Description of Artificial Sequence: Synthetic oligonucleotide
  Antisense strand to SEQ ID NO: 2442934
acguaugacucuuucagag

SEQ ID NO: 2442936 - RNA, 19 nt, Artificial Sequence
  Description of Artificial Sequence: Synthetic oligonucleotide
  Sense strand starting at position 66 of SEQ ID NO: 1887024
gaaagagucauacguguaa

SEQ ID NO: 2442937 - RNA, 19 nt, Artificial Sequence
  Description of Artificial Sequence: Synthetic oligonucleotide
  Antisense strand to SEQ ID NO: 2442936
uuacacguaugacucuuuc

SEQ ID NO: 2442938 - RNA, 19 nt, Artificial Sequence
  Description of Artificial Sequence: Synthetic oligonucleotide
  Sense strand starting at position 70 of SEQ ID NO: 1887024
gagucauacguguaaacca

SEQ ID NO: 2442939 - RNA, 19 nt, Artificial Sequence
  Description of Artificial Sequence: Synthetic oligonucleotide
  Antisense strand to SEQ ID NO: 2442938
ugguuuacacguaugacuc

SEQ ID NO: 2442940 - RNA, 19 nt, Artificial Sequence
  Description of Artificial Sequence: Synthetic oligonucleotide
  Sense strand starting at position 93 of SEQ ID NO: 1887024
gucuuagaaugcccuaaua

SEQ ID NO: 2442941 - RNA, 19 nt, Artificial Sequence
  Description of Artificial Sequence: Synthetic oligonucleotide
  Antisense strand to SEQ ID NO: 2442940
uauuagggcauucuaagac

SEQ ID NO: 2442942 - RNA, 19 nt, Artificial Sequence
  Description of Artificial Sequence: Synthetic oligonucleotide
  Sense strand starting at position 135 of SEQ ID NO: 1887024
acaaaugguuaaugacaca

SEQ ID NO: 2442943 - RNA, 19 nt, Artificial Sequence
  Description of Artificial Sequence: Synthetic oligonucleotide
  Antisense strand to SEQ ID NO: 2442942
ugugucauuaaccauuugu

SEQ ID NO: 2442944 - RNA, 19 nt, Artificial Sequence
  Description of Artificial Sequence: Synthetic oligonucleotide
  Sense strand starting at position 165 of SEQ ID NO: 1887024
acgugaaucagcuacugau

SEQ ID NO: 2442945 - RNA, 19 nt, Artificial Sequence
  Description of Artificial Sequence: Synthetic oligonucleotide
  Antisense strand to SEQ ID NO: 2442944
aucaguagcugauucacgu

SEQ ID NO: 2442946 - RNA, 19 nt, Artificial Sequence
  Description of Artificial Sequence: Synthetic oligonucleotide
  Sense strand starting at position 175 of SEQ ID NO: 1887024
gcuacugauuugcaagagu

SEQ ID NO: 2442947 - RNA, 19 nt, Artificial Sequence
  Description of Artificial Sequence: Synthetic oligonucleotide
  Antisense strand to SEQ ID NO: 2442946
acucuugcaaaucaguagc

SEQ ID NO: 2442948 - RNA, 19 nt, Artificial Sequence
  Description of Artificial Sequence: Synthetic oligonucleotide
  Sense strand starting at position 241 of SEQ ID NO: 1887024
ggaccuagauguuugaauu

SEQ ID NO: 2442949 - RNA, 19 nt, Artificial Sequence
  Description of Artificial Sequence: Synthetic oligonucleotide
  Antisense strand to SEQ ID NO: 2442948
aauucaaacaucuaggucc

SEQ ID NO: 2442950 - RNA, 19 nt, Artificial Sequence
  Description of Artificial Sequence: Synthetic oligonucleotide
  Sense strand starting at position 242 of SEQ ID NO: 1887024
gaccuagauguuugaauug

SEQ ID NO: 2442951 - RNA, 19 nt, Artificial Sequence
  Description of Artificial Sequence: Synthetic oligonucleotide
  Antisense strand to SEQ ID NO: 2442950
caauucaaacaucuagguc

SEQ ID NO: 2442952 - RNA, 19 nt, Artificial Sequence
  Description of Artificial Sequence: Synthetic oligonucleotide
  Sense strand starting at position 296 of SEQ ID NO: 1887024
cuauguaaguugccauaau

SEQ ID NO: 2442953 - RNA, 19 nt, Artificial Sequence
  Description of Artificial Sequence: Synthetic oligonucleotide
  Antisense strand to SEQ ID NO: 2442952
auuauggcaacuuacauag

SEQ ID NO: 2442954 - RNA, 19 nt, Artificial Sequence
  Description of Artificial Sequence: Synthetic oligonucleotide
  Sense strand starting at position 350 of SEQ ID NO: 1887024
ggaaguuaauuugagaacu

SEQ ID NO: 2442955 - RNA, 19 nt, Artificial Sequence
  Description of Artificial Sequence: Synthetic oligonucleotide
  Antisense strand to SEQ ID NO: 2442954
aguucucaaauuaacuucc

SEQ ID NO: 2442956 - RNA, 19 nt, Artificial Sequence
  Description of Artificial Sequence: Synthetic oligonucleotide
  Sense strand starting at position 539 of SEQ ID NO: 1887024
aaaugaggcugguaaugaa

SEQ ID NO: 2442957 - RNA, 19 nt, Artificial Sequence
  Description of Artificial Sequence: Synthetic oligonucleotide
  Antisense strand to SEQ ID NO: 2442956
uucauuaccagccucauuu

SEQ ID NO: 2442958 - RNA, 19 nt, Artificial Sequence
  Description of Artificial Sequence: Synthetic oligonucleotide
  Sense strand starting at position 697 of SEQ ID NO: 1887024
ucgagaagguaucugaaag

SEQ ID NO: 2442959 - RNA, 19 nt, Artificial Sequence
  Description of Artificial Sequence: Synthetic oligonucleotide
  Antisense strand to SEQ ID NO: 2442958
cuuucagauaccuucucga

SEQ ID NO: 2442960 - RNA, 19 nt, Artificial Sequence
  Description of Artificial Sequence: Synthetic oligonucleotide
  Sense strand starting at position 753 of SEQ ID NO: 1887024
augcaaauaguuuaagcua

SEQ ID NO: 2442961 - RNA, 19 nt, Artificial Sequence
  Description of Artificial Sequence: Synthetic oligonucleotide
  Antisense strand to SEQ ID NO: 2442960
uagcuuaaacuauuugcau

SEQ ID NO: 2442962 - RNA, 19 nt, Artificial Sequence
  Description of Artificial Sequence: Synthetic oligonucleotide
  Sense strand starting at position 848 of SEQ ID NO: 1887024
gggcaaaugugugucucca

SEQ ID NO: 2442963 - RNA, 19 nt, Artificial Sequence
  Description of Artificial Sequence: Synthetic oligonucleotide
  Antisense strand to SEQ ID NO: 2442962
uggagacacacauuugccc

SEQ ID NO: 2442964 - RNA, 19 nt, Artificial Sequence
  Description of Artificial Sequence: Synthetic oligonucleotide
  Sense strand starting at position 850 of SEQ ID NO: 1887024
gcaaaugugugucuccaua

SEQ ID NO: 2442965 - RNA, 19 nt, Artificial Sequence
  Description of Artificial Sequence: Synthetic oligonucleotide
  Antisense strand to SEQ ID NO: 2442964
uauggagacacacauuugc

SEQ ID NO: 2442966 - RNA, 19 nt, Artificial Sequence
  Description of Artificial Sequence: Synthetic oligonucleotide
  Sense strand starting at position 867 of SEQ ID NO: 1887024
uauauauguguguagaaac

SEQ ID NO: 2442967 - RNA, 19 nt, Artificial Sequence
  Description of Artificial Sequence: Synthetic oligonucleotide
  Antisense strand to SEQ ID NO: 2442966
guuucuacacacauauaua

SEQ ID NO: 2442968 - RNA, 19 nt, Artificial Sequence
  Description of Artificial Sequence: Synthetic oligonucleotide
  Sense strand starting at position 1020 of SEQ ID NO: 1887024
uuuguuaauuaaccgucua

SEQ ID NO: 2442969 - RNA, 19 nt, Artificial Sequence
  Description of Artificial Sequence: Synthetic oligonucleotide
  Antisense strand to SEQ ID NO: 2442968
uagacgguuaauuaacaaa

SEQ ID NO: 2442970 - RNA, 19 nt, Artificial Sequence
  Description of Artificial Sequence: Synthetic oligonucleotide
  Sense strand starting at position 1105 of SEQ ID NO: 1887024
ccaagauuaugcuuaaguu

SEQ ID NO: 2442971 - RNA, 19 nt, Artificial Sequence
  Description of Artificial Sequence: Synthetic oligonucleotide
  Antisense strand to SEQ ID NO: 2442970
aacuuaagcauaaucuugg

SEQ ID NO: 2442972 - RNA, 19 nt, Artificial Sequence
  Description of Artificial Sequence: Synthetic oligonucleotide
  Sense strand starting at position 1296 of SEQ ID NO: 1887024
guaggauccucguucaagu

SEQ ID NO: 2442973 - RNA, 19 nt, Artificial Sequence
  Description of Artificial Sequence: Synthetic oligonucleotide
  Antisense strand to SEQ ID NO: 2442972
acuugaacgaggauccuac

SEQ ID NO: 2442974 - RNA, 19 nt, Artificial Sequence
  Description of Artificial Sequence: Synthetic oligonucleotide
  Sense strand starting at position 1343 of SEQ ID NO: 1887024
ccaguuacugcuucgcuua

SEQ ID NO: 2442975 - RNA, 19 nt, Artificial Sequence
  Description of Artificial Sequence: Synthetic oligonucleotide
  Antisense strand to SEQ ID NO: 2442974
uaagcgaagcaguaacugg

SEQ ID NO: 2442976 - RNA, 19 nt, Artificial Sequence
  Description of Artificial Sequence: Synthetic oligonucleotide
  Sense strand starting at position 1345 of SEQ ID NO: 1887024
aguuacugcuucgcuuaaa

SEQ ID NO: 2442977 - RNA, 19 nt, Artificial Sequence
  Description of Artificial Sequence: Synthetic oligonucleotide
  Antisense strand to SEQ ID NO: 2442976
uuuaagcgaagcaguaacu

SEQ ID NO: 2442978 - RNA, 19 nt, Artificial Sequence
  Description of Artificial Sequence: Synthetic oligonucleotide
  Sense strand starting at position 2332 of SEQ ID NO: 1887024
gcgccauuggcugagcaau

SEQ ID NO: 2442979 - RNA, 19 nt, Artificial Sequence
  Description of Artificial Sequence: Synthetic oligonucleotide
  Antisense strand to SEQ ID NO: 2442978
auugcucagccaauggcgc

SEQ ID NO: 2442980 - RNA, 19 nt, Artificial Sequence
  Description of Artificial Sequence: Synthetic oligonucleotide
  Sense strand starting at position 2345 of SEQ ID NO: 1887024
agcaaugguguccgucaga

SEQ ID NO: 2442981 - RNA, 19 nt, Artificial Sequence
  Description of Artificial Sequence: Synthetic oligonucleotide
  Antisense strand to SEQ ID NO: 2442980
ucugacggacaccauugcu

SEQ ID NO: 2442982 - RNA, 19 nt, Artificial Sequence
  Description of Artificial Sequence: Synthetic oligonucleotide
  Sense strand starting at position 2806 of SEQ ID NO: 1887024
ugagauagagccgguagaa

SEQ ID NO: 2442983 - RNA, 19 nt, Artificial Sequence
  Description of Artificial Sequence: Synthetic oligonucleotide
  Antisense strand to SEQ ID NO: 2442982
uucuaccggcucuaucuca

SEQ ID NO: 2442984 - RNA, 19 nt, Artificial Sequence
  Description of Artificial Sequence: Synthetic oligonucleotide
  Sense strand starting at position 2914 of SEQ ID NO: 1887024
cuuacauaucucggcauau

SEQ ID NO: 2442985 - RNA, 19 nt, Artificial Sequence
  Description of Artificial Sequence: Synthetic oligonucleotide
  Antisense strand to SEQ ID NO: 2442984
auaugccgagauauguaag

SEQ ID NO: 2442986 - RNA, 19 nt, Artificial Sequence
  Description of Artificial Sequence: Synthetic oligonucleotide
  Sense strand starting at position 2915 of SEQ ID NO: 1887024
uuacauaucucggcauauc

SEQ ID NO: 2442987 - RNA, 19 nt, Artificial Sequence
  Description of Artificial Sequence: Synthetic oligonucleotide
  Antisense strand to SEQ ID NO: 2442986
gauaugccgagauauguaa

SEQ ID NO: 2442988 - RNA, 19 nt, Artificial Sequence
  Description of Artificial Sequence: Synthetic oligonucleotide
  Sense strand starting at position 2923 of SEQ ID NO: 1887024
cucggcauaucauuuguau

SEQ ID NO: 2442989 - RNA, 19 nt, Artificial Sequence
  Description of Artificial Sequence: Synthetic oligonucleotide
  Antisense strand to SEQ ID NO: 2442988
auacaaaugauaugccgag

SEQ ID NO: 2442990 - RNA, 19 nt, Artificial Sequence
  Description of Artificial Sequence: Synthetic oligonucleotide
  Sense strand starting at position 2927 of SEQ ID NO: 1887024
gcauaucauuuguauccau

SEQ ID NO: 2442991 - RNA, 19 nt, Artificial Sequence
  Description of Artificial Sequence: Synthetic oligonucleotide
  Antisense strand to SEQ ID NO: 2442990
auggauacaaaugauaugc

SEQ ID NO: 2442992 - RNA, 19 nt, Artificial Sequence
  Description of Artificial Sequence: Synthetic oligonucleotide
  Sense strand starting at position 3203 of SEQ ID NO: 1887024
aggguccucugccuaaaga

SEQ ID NO: 2442993 - RNA, 19 nt, Artificial Sequence
  Description of Artificial Sequence: Synthetic oligonucleotide
  Antisense strand to SEQ ID NO: 2442992
ucuuuaggcagaggacccu

SEQ ID NO: 2442994 - RNA, 19 nt, Artificial Sequence
  Description of Artificial Sequence: Synthetic oligonucleotide
  Sense strand starting at position 3204 of SEQ ID NO: 1887024
ggguccucugccuaaagau

SEQ ID NO: 2442995 - RNA, 19 nt, Artificial Sequence
  Description of Artificial Sequence: Synthetic oligonucleotide
  Antisense strand to SEQ ID NO: 2442994
aucuuuaggcagaggaccc

SEQ ID NO: 2442996 - RNA, 19 nt, Artificial Sequence
  Description of Artificial Sequence: Synthetic oligonucleotide
  Sense strand starting at position 3220 of SEQ ID NO: 1887024
gauagugaucuaugacaug

SEQ ID NO: 2442997 - RNA, 19 nt, Artificial Sequence
  Description of Artificial Sequence: Synthetic oligonucleotide
  Antisense strand to SEQ ID NO: 2442996
caugucauagaucacuauc

SEQ ID NO: 2442998 - RNA, 19 nt, Artificial Sequence
  Description of Artificial Sequence: Synthetic oligonucleotide
  Sense strand starting at position 3243 of SEQ ID NO: 1887024
aggauaaacucccaaagaa

SEQ ID NO: 2442999 - RNA, 19 nt, Artificial Sequence
  Description of Artificial Sequence: Synthetic oligonucleotide
  Antisense strand to SEQ ID NO: 2442998
uucuuugggaguuuauccu

SEQ ID NO: 2443000 - RNA, 19 nt, Artificial Sequence
  Description of Artificial Sequence: Synthetic oligonucleotide
  Sense strand starting at position 3301 of SEQ ID NO: 1887024
aaagaaugucagugaggua

SEQ ID NO: 2443001 - RNA, 19 nt, Artificial Sequence
  Description of Artificial Sequence: Synthetic oligonucleotide
  Antisense strand to SEQ ID NO: 2443000
uaccucacugacauucuuu

SEQ ID NO: 2443002 - RNA, 19 nt, Artificial Sequence
  Description of Artificial Sequence: Synthetic oligonucleotide
  Sense strand starting at position 3354 of SEQ ID NO: 1887024
ggaggaagggucuguggaa

SEQ ID NO: 2443003 - RNA, 19 nt, Artificial Sequence
  Description of Artificial Sequence: Synthetic oligonucleotide
  Antisense strand to SEQ ID NO: 2443002
uuccacagacccuuccucc

SEQ ID NO: 2443004 - RNA, 19 nt, Artificial Sequence
  Description of Artificial Sequence: Synthetic oligonucleotide
  Sense strand starting at position 3708 of SEQ ID NO: 1887024
cugugagagccucauaggu

SEQ ID NO: 2443005 - RNA, 19 nt, Artificial Sequence
  Description of Artificial Sequence: Synthetic oligonucleotide
  Antisense strand to SEQ ID NO: 2443004
accuaugaggcucucacag

SEQ ID NO: 2443006 - RNA, 19 nt, Artificial Sequence
  Description of Artificial Sequence: Synthetic oligonucleotide
  Sense strand starting at position 3750 of SEQ ID NO: 1887024
ucugguaaccaugggacaa

SEQ ID NO: 2443007 - RNA, 19 nt, Artificial Sequence
  Description of Artificial Sequence: Synthetic oligonucleotide
  Antisense strand to SEQ ID NO: 2443006
uugucccaugguuaccaga

SEQ ID NO: 2443008 - RNA, 19 nt, Artificial Sequence
  Description of Artificial Sequence: Synthetic oligonucleotide
  Sense strand starting at position 3751 of SEQ ID NO: 1887024
cugguaaccaugggacaau

SEQ ID NO: 2443009 - RNA, 19 nt, Artificial Sequence
  Description of Artificial Sequence: Synthetic oligonucleotide
  Antisense strand to SEQ ID NO: 2443008
auugucccaugguuaccag

SEQ ID NO: 2443010 - RNA, 19 nt, Artificial Sequence
  Description of Artificial Sequence: Synthetic oligonucleotide
  Sense strand starting at position 3752 of SEQ ID NO: 1887024
ugguaaccaugggacaaua

SEQ ID NO: 2443011 - RNA, 19 nt, Artificial Sequence
  Description of Artificial Sequence: Synthetic oligonucleotide
  Antisense strand to SEQ ID NO: 2443010
uauugucccaugguuacca

SEQ ID NO: 2443012 - RNA, 19 nt, Artificial Sequence
  Description of Artificial Sequence: Synthetic oligonucleotide
  Sense strand starting at position 3973 of SEQ ID NO: 1887024
guuccagugagccgauauc

SEQ ID NO: 2443013 - RNA, 19 nt, Artificial Sequence
  Description of Artificial Sequence: Synthetic oligonucleotide
  Antisense strand to SEQ ID NO: 2443012
gauaucggcucacuggaac

SEQ ID NO: 2443014 - RNA, 19 nt, Artificial Sequence
  Description of Artificial Sequence: Synthetic oligonucleotide
  Sense strand starting at position 334 of SEQ ID NO: 1887025
gacauaguuugaguugauc

SEQ ID NO: 2443015 - RNA, 19 nt, Artificial Sequence
  Description of Artificial Sequence: Synthetic oligonucleotide
  Antisense strand to SEQ ID NO: 2443014
gaucaacucaaacuauguc

SEQ ID NO: 2443016 - RNA, 19 nt, Artificial Sequence
  Description of Artificial Sequence: Synthetic oligonucleotide
  Sense strand starting at position 369 of SEQ ID NO: 1887025
ccauuaauuucugggaauu

SEQ ID NO: 2443017 - RNA, 19 nt, Artificial Sequence
  Description of Artificial Sequence: Synthetic oligonucleotide
  Antisense strand to SEQ ID NO: 2443016
aauucccagaaauuaaugg

SEQ ID NO: 2443018 - RNA, 19 nt, Artificial Sequence
  Description of Artificial Sequence: Synthetic oligonucleotide
  Sense strand starting at position 459 of SEQ ID NO: 1887025
cugucaagugaacaaaguu

SEQ ID NO: 2443019 - RNA, 19 nt, Artificial Sequence
  Description of Artificial Sequence: Synthetic oligonucleotide
  Antisense strand to SEQ ID NO: 2443018
aacuuuguucacuugacag

SEQ ID NO: 2443020 - RNA, 19 nt, Artificial Sequence
  Description of Artificial Sequence: Synthetic oligonucleotide
  Sense strand starting at position 517 of SEQ ID NO: 1887025
cugcgauucccggauaagg

SEQ ID NO: 2443021 - RNA, 19 nt, Artificial Sequence
  Description of Artificial Sequence: Synthetic oligonucleotide
  Antisense strand to SEQ ID NO: 2443020
ccuuauccgggaaucgcag

SEQ ID NO: 2443022 - RNA, 19 nt, Artificial Sequence
  Description of Artificial Sequence: Synthetic oligonucleotide
  Sense strand starting at position 519 of SEQ ID NO: 1887025
gcgauucccggauaaggaa

SEQ ID NO: 2443023 - RNA, 19 nt, Artificial Sequence
  Description of Artificial Sequence: Synthetic oligonucleotide
  Antisense strand to SEQ ID NO: 2443022
uuccuuauccgggaaucgc

SEQ ID NO: 2443024 - RNA, 19 nt, Artificial Sequence
  Description of Artificial Sequence: Synthetic oligonucleotide
  Sense strand starting at position 665 of SEQ ID NO: 1887025
cgcucucuccgggaucaga

SEQ ID NO: 2443025 - RNA, 19 nt, Artificial Sequence
  Description of Artificial Sequence: Synthetic oligonucleotide
  Antisense strand to SEQ ID NO: 2443024
ucugaucccggagagagcg

SEQ ID NO: 2443026 - RNA, 19 nt, Artificial Sequence
  Description of Artificial Sequence: Synthetic oligonucleotide
  Sense strand starting at position 1042 of SEQ ID NO: 1887025
cgcagagggacuugucaga

SEQ ID NO: 2443027 - RNA, 19 nt, Artificial Sequence
  Description of Artificial Sequence: Synthetic oligonucleotide
  Antisense strand to SEQ ID NO: 2443026
ucugacaagucccucugcg

SEQ ID NO: 2443028 - RNA, 19 nt, Artificial Sequence
  Description of Artificial Sequence: Synthetic oligonucleotide
  Sense strand starting at position 1075 of SEQ ID NO: 1887025
cgggcggaucgauaggaaa

SEQ ID NO: 2443029 - RNA, 19 nt, Artificial Sequence
  Description of Artificial Sequence: Synthetic oligonucleotide
  Antisense strand to SEQ ID NO: 2443028
uuuccuaucgauccgcccg

SEQ ID NO: 2443030 - RNA, 19 nt, Artificial Sequence
  Description of Artificial Sequence: Synthetic oligonucleotide
  Sense strand starting at position 1077 of SEQ ID NO: 1887025
ggcggaucgauaggaaauu

SEQ ID NO: 2443031 - RNA, 19 nt, Artificial Sequence
  Description of Artificial Sequence: Synthetic oligonucleotide
  Antisense strand to SEQ ID NO: 2443030
aauuuccuaucgauccgcc

SEQ ID NO: 2443032 - RNA, 19 nt, Artificial Sequence
  Description of Artificial Sequence: Synthetic oligonucleotide
  Sense strand starting at position 1227 of SEQ ID NO: 1887025
ggagaaacgacuugguuuc

SEQ ID NO: 2443033 - RNA, 19 nt, Artificial Sequence
  Description of Artificial Sequence: Synthetic oligonucleotide
  Antisense strand to SEQ ID NO: 2443032
gaaaccaagucguuucucc

SEQ ID NO: 2443034 - RNA, 19 nt, Artificial Sequence
  Description of Artificial Sequence: Synthetic oligonucleotide
  Sense strand starting at position 1237 of SEQ ID NO: 1887025
cuugguuucccacacuaua

SEQ ID NO: 2443035 - RNA, 19 nt, Artificial Sequence
  Description of Artificial Sequence: Synthetic oligonucleotide
  Antisense strand to SEQ ID NO: 2443034
uauagugugggaaaccaag

SEQ ID NO: 2443036 - RNA, 19 nt, Artificial Sequence
  Description of Artificial Sequence: Synthetic oligonucleotide
  Sense strand starting at position 1455 of SEQ ID NO: 1887025
acuccuugguaaucgagua

SEQ ID NO: 2443037 - RNA, 19 nt, Artificial Sequence
  Description of Artificial Sequence: Synthetic oligonucleotide
  Antisense strand to SEQ ID NO: 2443036
uacucgauuaccaaggagu

SEQ ID NO: 2443038 - RNA, 19 nt, Artificial Sequence
  Description of Artificial Sequence: Synthetic oligonucleotide
  Sense strand starting at position 1456 of SEQ ID NO: 1887025
cuccuugguaaucgaguau

SEQ ID NO: 2443039 - RNA, 19 nt, Artificial Sequence
  Description of Artificial Sequence: Synthetic oligonucleotide
  Antisense strand to SEQ ID NO: 2443038
auacucgauuaccaaggag

SEQ ID NO: 2443040 - RNA, 19 nt, Artificial Sequence
  Description of Artificial Sequence: Synthetic oligonucleotide
  Sense strand starting at position 1468 of SEQ ID NO: 1887025
cgaguauuuccaggucauc

SEQ ID NO: 2443041 - RNA, 19 nt, Artificial Sequence
  Description of Artificial Sequence: Synthetic oligonucleotide
  Antisense strand to SEQ ID NO: 2443040
gaugaccuggaaauacucg

SEQ ID NO: 2443042 - RNA, 19 nt, Artificial Sequence
  Description of Artificial Sequence: Synthetic oligonucleotide
  Sense strand starting at position 1478 of SEQ ID NO: 1887025
caggucaucuuguucugaa

SEQ ID NO: 2443043 - RNA, 19 nt, Artificial Sequence
  Description of Artificial Sequence: Synthetic oligonucleotide
  Antisense strand to SEQ ID NO: 2443042
uucagaacaagaugaccug

SEQ ID NO: 2443044 - RNA, 19 nt, Artificial Sequence
  Description of Artificial Sequence: Synthetic oligonucleotide
  Sense strand starting at position 1479 of SEQ ID NO: 1887025
aggucaucuuguucugaac

SEQ ID NO: 2443045 - RNA, 19 nt, Artificial Sequence
  Description of Artificial Sequence: Synthetic oligonucleotide
  Antisense strand to SEQ ID NO: 2443044
guucagaacaagaugaccu

SEQ ID NO: 2443046 - RNA, 19 nt, Artificial Sequence
  Description of Artificial Sequence: Synthetic oligonucleotide
  Sense strand starting at position 1547 of SEQ ID NO: 1887025
gccuucuucgcacacugaa

SEQ ID NO: 2443047 - RNA, 19 nt, Artificial Sequence
  Description of Artificial Sequence: Synthetic oligonucleotide
  Antisense strand to SEQ ID NO: 2443046
uucagugugcgaagaaggc

SEQ ID NO: 2443048 - RNA, 19 nt, Artificial Sequence
  Description of Artificial Sequence: Synthetic oligonucleotide
  Sense strand starting at position 1628 of SEQ ID NO: 1887025
ugcguuugggacgagaaga

SEQ ID NO: 2443049 - RNA, 19 nt, Artificial Sequence
  Description of Artificial Sequence: Synthetic oligonucleotide
  Antisense strand to SEQ ID NO: 2443048
ucuucucgucccaaacgca

SEQ ID NO: 2443050 - RNA, 19 nt, Artificial Sequence
  Description of Artificial Sequence: Synthetic oligonucleotide
  Sense strand starting at position 1820 of SEQ ID NO: 1887025
ucaccagacuguccucauu

SEQ ID NO: 2443051 - RNA, 19 nt, Artificial Sequence
  Description of Artificial Sequence: Synthetic oligonucleotide
  Antisense strand to SEQ ID NO: 2443050
aaugaggacagucugguga

SEQ ID NO: 2443052 - RNA, 19 nt, Artificial Sequence
  Description of Artificial Sequence: Synthetic oligonucleotide
  Sense strand starting at position 1888 of SEQ ID NO: 1887025
auaagagcggaguguuuau

SEQ ID NO: 2443053 - RNA, 19 nt, Artificial Sequence
  Description of Artificial Sequence: Synthetic oligonucleotide
  Antisense strand to SEQ ID NO: 2443052
auaaacacuccgcucuuau

SEQ ID NO: 2443054 - RNA, 19 nt, Artificial Sequence
  Description of Artificial Sequence: Synthetic oligonucleotide
  Sense strand starting at position 1928 of SEQ ID NO: 1887025
auacgaauuugugaccaca

SEQ ID NO: 2443055 - RNA, 19 nt, Artificial Sequence
  Description of Artificial Sequence: Synthetic oligonucleotide
  Antisense strand to SEQ ID NO: 2443054
uguggucacaaauucguau

SEQ ID NO: 2443056 - RNA, 19 nt, Artificial Sequence
  Description of Artificial Sequence: Synthetic oligonucleotide
  Sense strand starting at position 1963 of SEQ ID NO: 1887025
uucggaucuacaggguaua

SEQ ID NO: 2443057 - RNA, 19 nt, Artificial Sequence
  Description of Artificial Sequence: Synthetic oligonucleotide
  Antisense strand to SEQ ID NO: 2443056
uauacccuguagauccgaa

SEQ ID NO: 2443058 - RNA, 19 nt, Artificial Sequence
  Description of Artificial Sequence: Synthetic oligonucleotide
  Sense strand starting at position 1996 of SEQ ID NO: 1887025
agaucuucuuggcccagaa

SEQ ID NO: 2443059 - RNA, 19 nt, Artificial Sequence
  Description of Artificial Sequence: Synthetic oligonucleotide
  Antisense strand to SEQ ID NO: 2443058
uucugggccaagaagaucu

SEQ ID NO: 2443060 - RNA, 19 nt, Artificial Sequence
  Description of Artificial Sequence: Synthetic oligonucleotide
  Sense strand starting at position 1998 of SEQ ID NO: 1887025
aucuucuuggcccagaaau

SEQ ID NO: 2443061 - RNA, 19 nt, Artificial Sequence
  Description of Artificial Sequence: Synthetic oligonucleotide
  Antisense strand to SEQ ID NO: 2443060
auuucugggccaagaagau

SEQ ID NO: 2443062 - RNA, 19 nt, Artificial Sequence
  Description of Artificial Sequence: Synthetic oligonucleotide
  Sense strand starting at position 2243 of SEQ ID NO: 1887025
uggcgcaugaauuaugaga

SEQ ID NO: 2443063 - RNA, 19 nt, Artificial Sequence
  Description of Artificial Sequence: Synthetic oligonucleotide
  Antisense strand to SEQ ID NO: 2443062
ucucauaauucaugcgcca

SEQ ID NO: 2443064 - RNA, 19 nt, Artificial Sequence
  Description of Artificial Sequence: Synthetic oligonucleotide
  Sense strand starting at position 2436 of SEQ ID NO: 1887025
uuuaguuugugaucaaacg

SEQ ID NO: 2443065 - RNA, 19 nt, Artificial Sequence
  Description of Artificial Sequence: Synthetic oligonucleotide
  Antisense strand to SEQ ID NO: 2443064
cguuugaucacaaacuaaa

SEQ ID NO: 2443066 - RNA, 19 nt, Artificial Sequence
  Description of Artificial Sequence: Synthetic oligonucleotide
  Sense strand starting at position 2437 of SEQ ID NO: 1887025
uuaguuugugaucaaacga

SEQ ID NO: 2443067 - RNA, 19 nt, Artificial Sequence
  Description of Artificial Sequence: Synthetic oligonucleotide
  Antisense strand to SEQ ID NO: 2443066
ucguuugaucacaaacuaa

SEQ ID NO: 2443068 - RNA, 19 nt, Artificial Sequence
  Description of Artificial Sequence: Synthetic oligonucleotide
  Sense strand starting at position 2667 of SEQ ID NO: 1887025
ggcguuucauuuccgaaug

SEQ ID NO: 2443069 - RNA, 19 nt, Artificial Sequence
  Description of Artificial Sequence: Synthetic oligonucleotide
  Antisense strand to SEQ ID NO: 2443068
cauucggaaaugaaacgcc

SEQ ID NO: 2443070 - RNA, 19 nt, Artificial Sequence
  Description of Artificial Sequence: Synthetic oligonucleotide
  Sense strand starting at position 2830 of SEQ ID NO: 1887025
cggguccuuuccuucuaaa

SEQ ID NO: 2443071 - RNA, 19 nt, Artificial Sequence
  Description of Artificial Sequence: Synthetic oligonucleotide
  Antisense strand to SEQ ID NO: 2443070
uuuagaaggaaaggacccg

SEQ ID NO: 2443072 - RNA, 19 nt, Artificial Sequence
  Description of Artificial Sequence: Synthetic oligonucleotide
  Sense strand starting at position 2912 of SEQ ID NO: 1887025
ggguuuacgaaccaacuuu

SEQ ID NO: 2443073 - RNA, 19 nt, Artificial Sequence
  Description of Artificial Sequence: Synthetic oligonucleotide
  Antisense strand to SEQ ID NO: 2443072
aaaguugguucguaaaccc

SEQ ID NO: 2443074 - RNA, 19 nt, Artificial Sequence
  Description of Artificial Sequence: Synthetic oligonucleotide
  Sense strand starting at position 2997 of SEQ ID NO: 1887025
gacugugaaagcugugaca

SEQ ID NO: 2443075 - RNA, 19 nt, Artificial Sequence
  Description of Artificial Sequence: Synthetic oligonucleotide
  Antisense strand to SEQ ID NO: 2443074
ugucacagcuuucacaguc

SEQ ID NO: 2443076 - RNA, 19 nt, Artificial Sequence
  Description of Artificial Sequence: Synthetic oligonucleotide
  Sense strand starting at position 2999 of SEQ ID NO: 1887025
cugugaaagcugugacaga

SEQ ID NO: 2443077 - RNA, 19 nt, Artificial Sequence
  Description of Artificial Sequence: Synthetic oligonucleotide
  Antisense strand to SEQ ID NO: 2443076
ucugucacagcuuucacag

SEQ ID NO: 2443078 - RNA, 19 nt, Artificial Sequence
  Description of Artificial Sequence: Synthetic oligonucleotide
  Sense strand starting at position 3072 of SEQ ID NO: 1887025
acucccuaggucugagaaa

SEQ ID NO: 2443079 - RNA, 19 nt, Artificial Sequence
  Description of Artificial Sequence: Synthetic oligonucleotide
  Antisense strand to SEQ ID NO: 2443078
uuucucagaccuagggagu

SEQ ID NO: 2443080 - RNA, 19 nt, Artificial Sequence
  Description of Artificial Sequence: Synthetic oligonucleotide
  Sense strand starting at position 3090 of SEQ ID NO: 1887025
auacuugcaucuuuaguga

SEQ ID NO: 2443081 - RNA, 19 nt, Artificial Sequence
  Description of Artificial Sequence: Synthetic oligonucleotide
  Antisense strand to SEQ ID NO: 2443080
ucacuaaagaugcaaguau

SEQ ID NO: 2443082 - RNA, 19 nt, Artificial Sequence
  Description of Artificial Sequence: Synthetic oligonucleotide
  Sense strand starting at position 3093 of SEQ ID NO: 1887025
cuugcaucuuuagugagga

SEQ ID NO: 2443083 - RNA, 19 nt, Artificial Sequence
  Description of Artificial Sequence: Synthetic oligonucleotide
  Antisense strand to SEQ ID NO: 2443082
uccucacuaaagaugcaag

SEQ ID NO: 2443084 - RNA, 19 nt, Artificial Sequence
  Description of Artificial Sequence: Synthetic oligonucleotide
  Sense strand starting at position 3320 of SEQ ID NO: 1887025
gggccugauuucuaacauc

SEQ ID NO: 2443085 - RNA, 19 nt, Artificial Sequence
  Description of Artificial Sequence: Synthetic oligonucleotide
  Antisense strand to SEQ ID NO: 2443084
gauguuagaaaucaggccc

SEQ ID NO: 2443086 - RNA, 19 nt, Artificial Sequence
  Description of Artificial Sequence: Synthetic oligonucleotide
  Sense strand starting at position 3363 of SEQ ID NO: 1887025
ucacacauauuugggagaa

SEQ ID NO: 2443087 - RNA, 19 nt, Artificial Sequence
  Description of Artificial Sequence: Synthetic oligonucleotide
  Antisense strand to SEQ ID NO: 2443086
uucucccaaauauguguga

SEQ ID NO: 2443088 - RNA, 19 nt, Artificial Sequence
  Description of Artificial Sequence: Synthetic oligonucleotide
  Sense strand starting at position 3401 of SEQ ID NO: 1887025
augguugucuuugccaaga

SEQ ID NO: 2443089 - RNA, 19 nt, Artificial Sequence
  Description of Artificial Sequence: Synthetic oligonucleotide
  Antisense strand to SEQ ID NO: 2443088
ucuuggcaaagacaaccau

SEQ ID NO: 2443090 - RNA, 19 nt, Artificial Sequence
  Description of Artificial Sequence: Synthetic oligonucleotide
  Sense strand starting at position 3425 of SEQ ID NO: 1887025
uccaauagguaaucucaga

SEQ ID NO: 2443091 - RNA, 19 nt, Artificial Sequence
  Description of Artificial Sequence: Synthetic oligonucleotide
  Antisense strand to SEQ ID NO: 2443090
ucugagauuaccuauugga

SEQ ID NO: 2443092 - RNA, 19 nt, Artificial Sequence
  Description of Artificial Sequence: Synthetic oligonucleotide
  Sense strand starting at position 3800 of SEQ ID NO: 1887025
ggguuuggguauccuugau

SEQ ID NO: 2443093 - RNA, 19 nt, Artificial Sequence
  Description of Artificial Sequence: Synthetic oligonucleotide
  Antisense strand to SEQ ID NO: 2443092
aucaaggauacccaaaccc

SEQ ID NO: 2443094 - RNA, 19 nt, Artificial Sequence
  Description of Artificial Sequence: Synthetic oligonucleotide
  Sense strand starting at position 257 of SEQ ID NO: 1887026
aggguucuguccuugccaa

SEQ ID NO: 2443095 - RNA, 19 nt, Artificial Sequence
  Description of Artificial Sequence: Synthetic oligonucleotide
  Antisense strand to SEQ ID NO: 2443094
uuggcaaggacagaacccu

SEQ ID NO: 2443096 - RNA, 19 nt, Artificial Sequence
  Description of Artificial Sequence: Synthetic oligonucleotide
  Sense strand starting at position 299 of SEQ ID NO: 1887026
ggcugaacgggugauucua

SEQ ID NO: 2443097 - RNA, 19 nt, Artificial Sequence
  Description of Artificial Sequence: Synthetic oligonucleotide
  Antisense strand to SEQ ID NO: 2443096
uagaaucacccguucagcc

SEQ ID NO: 2443098 - RNA, 19 nt, Artificial Sequence
  Description of Artificial Sequence: Synthetic oligonucleotide
  Sense strand starting at position 307 of SEQ ID NO: 1887026
gggugauucuacuuaaccc

SEQ ID NO: 2443099 - RNA, 19 nt, Artificial Sequence
  Description of Artificial Sequence: Synthetic oligonucleotide
  Antisense strand to SEQ ID NO: 2443098
ggguuaaguagaaucaccc

SEQ ID NO: 2443100 - RNA, 19 nt, Artificial Sequence
  Description of Artificial Sequence: Synthetic oligonucleotide
  Sense strand starting at position 342 of SEQ ID NO: 1887026
gugccaugcccaguuaguu

SEQ ID NO: 2443101 - RNA, 19 nt, Artificial Sequence
  Description of Artificial Sequence: Synthetic oligonucleotide
  Antisense strand to SEQ ID NO: 2443100
aacuaacugggcauggcac

SEQ ID NO: 2443102 - RNA, 19 nt, Artificial Sequence
  Description of Artificial Sequence: Synthetic oligonucleotide
  Sense strand starting at position 395 of SEQ ID NO: 1887026
cacagcuuugaguggcaga

SEQ ID NO: 2443103 - RNA, 19 nt, Artificial Sequence
  Description of Artificial Sequence: Synthetic oligonucleotide
  Antisense strand to SEQ ID NO: 2443102
ucugccacucaaagcugug

SEQ ID NO: 2443104 - RNA, 19 nt, Artificial Sequence
  Description of Artificial Sequence: Synthetic oligonucleotide
  Sense strand starting at position 408 of SEQ ID NO: 1887026
ggcagaaccugguuauguc

SEQ ID NO: 2443105 - RNA, 19 nt, Artificial Sequence
  Description of Artificial Sequence: Synthetic oligonucleotide
  Antisense strand to SEQ ID NO: 2443104
gacauaaccagguucugcc

SEQ ID NO: 2443106 - RNA, 19 nt, Artificial Sequence
  Description of Artificial Sequence: Synthetic oligonucleotide
  Sense strand starting at position 409 of SEQ ID NO: 1887026
gcagaaccugguuauguca

SEQ ID NO: 2443107 - RNA, 19 nt, Artificial Sequence
  Description of Artificial Sequence: Synthetic oligonucleotide
  Antisense strand to SEQ ID NO: 2443106
ugacauaaccagguucugc

SEQ ID NO: 2443108 - RNA, 19 nt, Artificial Sequence
  Description of Artificial Sequence: Synthetic oligonucleotide
  Sense strand starting at position 688 of SEQ ID NO: 1887026
ggcugacuucgggaaggca

SEQ ID NO: 2443109 - RNA, 19 nt, Artificial Sequence
  Description of Artificial Sequence: Synthetic oligonucleotide
  Antisense strand to SEQ ID NO: 2443108
ugccuucccgaagucagcc

SEQ ID NO: 2443110 - RNA, 19 nt, Artificial Sequence
  Description of Artificial Sequence: Synthetic oligonucleotide
  Sense strand starting at position 857 of SEQ ID NO: 1887026
gugacaaagcccugagaac

SEQ ID NO: 2443111 - RNA, 19 nt, Artificial Sequence
  Description of Artificial Sequence: Synthetic oligonucleotide
  Antisense strand to SEQ ID NO: 2443110
guucucagggcuuugucac

SEQ ID NO: 2443112 - RNA, 19 nt, Artificial Sequence
  Description of Artificial Sequence: Synthetic oligonucleotide
  Sense strand starting at position 940 of SEQ ID NO: 1887026
cagguugaucugggaaucu

SEQ ID NO: 2443113 - RNA, 19 nt, Artificial Sequence
  Description of Artificial Sequence: Synthetic oligonucleotide
  Antisense strand to SEQ ID NO: 2443112
agauucccagaucaaccug

SEQ ID NO: 2443114 - RNA, 19 nt, Artificial Sequence
  Description of Artificial Sequence: Synthetic oligonucleotide
  Sense strand starting at position 1077 of SEQ ID NO: 1887026
ggcccucaucugggaacau

SEQ ID NO: 2443115 - RNA, 19 nt, Artificial Sequence
  Description of Artificial Sequence: Synthetic oligonucleotide
  Antisense strand to SEQ ID NO: 2443114
auguucccagaugagggcc

SEQ ID NO: 2443116 - RNA, 19 nt, Artificial Sequence
  Description of Artificial Sequence: Synthetic oligonucleotide
  Sense strand starting at position 1087 of SEQ ID NO: 1887026
ugggaacauuugugggcua

SEQ ID NO: 2443117 - RNA, 19 nt, Artificial Sequence
  Description of Artificial Sequence: Synthetic oligonucleotide
  Antisense strand to SEQ ID NO: 2443116
uagcccacaaauguuccca

SEQ ID NO: 2443118 - RNA, 19 nt, Artificial Sequence
  Description of Artificial Sequence: Synthetic oligonucleotide
  Sense strand starting at position 1324 of SEQ ID NO: 1887026
gggcauuccuggucuugga

SEQ ID NO: 2443119 - RNA, 19 nt, Artificial Sequence
  Description of Artificial Sequence: Synthetic oligonucleotide
  Antisense strand to SEQ ID NO: 2443118
uccaagaccaggaaugccc

SEQ ID NO: 2443120 - RNA, 19 nt, Artificial Sequence
  Description of Artificial Sequence: Synthetic oligonucleotide
  Sense strand starting at position 1356 of SEQ ID NO: 1887026
gggcucuccucgguucaga

SEQ ID NO: 2443121 - RNA, 19 nt, Artificial Sequence
  Description of Artificial Sequence: Synthetic oligonucleotide
  Antisense strand to SEQ ID NO: 2443120
ucugaaccgaggagagccc

SEQ ID NO: 2443122 - RNA, 19 nt, Artificial Sequence
  Description of Artificial Sequence: Synthetic oligonucleotide
  Sense strand starting at position 1564 of SEQ ID NO: 1887026
ggguuugguucacugggaa

SEQ ID NO: 2443123 - RNA, 19 nt, Artificial Sequence
  Description of Artificial Sequence: Synthetic oligonucleotide
  Antisense strand to SEQ ID NO: 2443122
uucccagugaaccaaaccc

SEQ ID NO: 2443124 - RNA, 19 nt, Artificial Sequence
  Description of Artificial Sequence: Synthetic oligonucleotide
  Sense strand starting at position 1567 of SEQ ID NO: 1887026
uuugguucacugggaauga

SEQ ID NO: 2443125 - RNA, 19 nt, Artificial Sequence
  Description of Artificial Sequence: Synthetic oligonucleotide
  Antisense strand to SEQ ID NO: 2443124
ucauucccagugaaccaaa

SEQ ID NO: 2443126 - RNA, 19 nt, Artificial Sequence
  Description of Artificial Sequence: Synthetic oligonucleotide
  Sense strand starting at position 2356 of SEQ ID NO: 1887026
cucaguuucuccuuuggga

SEQ ID NO: 2443127 - RNA, 19 nt, Artificial Sequence
  Description of Artificial Sequence: Synthetic oligonucleotide
  Antisense strand to SEQ ID NO: 2443126
ucccaaaggagaaacugag

SEQ ID NO: 2443128 - RNA, 19 nt, Artificial Sequence
  Description of Artificial Sequence: Synthetic oligonucleotide
  Sense strand starting at position 2358 of SEQ ID NO: 1887026
caguuucuccuuugggaga

SEQ ID NO: 2443129 - RNA, 19 nt, Artificial Sequence
  Description of Artificial Sequence: Synthetic oligonucleotide
  Antisense strand to SEQ ID NO: 2443128
ucucccaaaggagaaacug

SEQ ID NO: 2443130 - RNA, 19 nt, Artificial Sequence
  Description of Artificial Sequence: Synthetic oligonucleotide
  Sense strand starting at position 2399 of SEQ ID NO: 1887026
cucacaagaggcuauguau

SEQ ID NO: 2443131 - RNA, 19 nt, Artificial Sequence
  Description of Artificial Sequence: Synthetic oligonucleotide
  Antisense strand to SEQ ID NO: 2443130
auacauagccucuugugag

SEQ ID NO: 2443132 - RNA, 19 nt, Artificial Sequence
  Description of Artificial Sequence: Synthetic oligonucleotide
  Sense strand starting at position 2484 of SEQ ID NO: 1887026
ucccguucccacugaauuu

SEQ ID NO: 2443133 - RNA, 19 nt, Artificial Sequence
  Description of Artificial Sequence: Synthetic oligonucleotide
  Antisense strand to SEQ ID NO: 2443132
aaauucagugggaacggga

SEQ ID NO: 2443134 - RNA, 19 nt, Artificial Sequence
  Description of Artificial Sequence: Synthetic oligonucleotide
  Sense strand starting at position 2563 of SEQ ID NO: 1887026
gcuguucugggagagcauu

SEQ ID NO: 2443135 - RNA, 19 nt, Artificial Sequence
  Description of Artificial Sequence: Synthetic oligonucleotide
  Antisense strand to SEQ ID NO: 2443134
aaugcucucccagaacagc

SEQ ID NO: 2443136 - RNA, 19 nt, Artificial Sequence
  Description of Artificial Sequence: Synthetic oligonucleotide
  Sense strand starting at position 2692 of SEQ ID NO: 1887026
gcagcauucugguugaagu

SEQ ID NO: 2443137 - RNA, 19 nt, Artificial Sequence
  Description of Artificial Sequence: Synthetic oligonucleotide
  Antisense strand to SEQ ID NO: 2443136
acuucaaccagaaugcugc

SEQ ID NO: 2443138 - RNA, 19 nt, Artificial Sequence
  Description of Artificial Sequence: Synthetic oligonucleotide
  Sense strand starting at position 2693 of SEQ ID NO: 1887026
cagcauucugguugaaguu

SEQ ID NO: 2443139 - RNA, 19 nt, Artificial Sequence
  Description of Artificial Sequence: Synthetic oligonucleotide
  Antisense strand to SEQ ID NO: 2443138
aacuucaaccagaaugcug

SEQ ID NO: 2443140 - RNA, 19 nt, Artificial Sequence
  Description of Artificial Sequence: Synthetic oligonucleotide
  Sense strand starting at position 2783 of SEQ ID NO: 1887026
uugcuaugugaagacuaga

SEQ ID NO: 2443141 - RNA, 19 nt, Artificial Sequence
  Description of Artificial Sequence: Synthetic oligonucleotide
  Antisense strand to SEQ ID NO: 2443140
ucuagucuucacauagcaa

SEQ ID NO: 2443142 - RNA, 19 nt, Artificial Sequence
  Description of Artificial Sequence: Synthetic oligonucleotide
  Sense strand starting at position 2848 of SEQ ID NO: 1887026
gauccuaguccugggaaac

SEQ ID NO: 2443143 - RNA, 19 nt, Artificial Sequence
  Description of Artificial Sequence: Synthetic oligonucleotide
  Antisense strand to SEQ ID NO: 2443142
guuucccaggacuaggauc

SEQ ID NO: 2443144 - RNA, 19 nt, Artificial Sequence
  Description of Artificial Sequence: Synthetic oligonucleotide
  Sense strand starting at position 2875 of SEQ ID NO: 1887026
ugaccuuauugagaaacag

SEQ ID NO: 2443145 - RNA, 19 nt, Artificial Sequence
  Description of Artificial Sequence: Synthetic oligonucleotide
  Antisense strand to SEQ ID NO: 2443144
cuguuucucaauaagguca

SEQ ID NO: 2443146 - RNA, 19 nt, Artificial Sequence
  Description of Artificial Sequence: Synthetic oligonucleotide
  Sense strand starting at position 2900 of SEQ ID NO: 1887026
gugcacuuugcacagauau

SEQ ID NO: 2443147 - RNA, 19 nt, Artificial Sequence
  Description of Artificial Sequence: Synthetic oligonucleotide
  Antisense strand to SEQ ID NO: 2443146
auaucugugcaaagugcac

SEQ ID NO: 2443148 - RNA, 19 nt, Artificial Sequence
  Description of Artificial Sequence: Synthetic oligonucleotide
  Sense strand starting at position 2929 of SEQ ID NO: 1887026
aggaucuugaggcgacuau

SEQ ID NO: 2443149 - RNA, 19 nt, Artificial Sequence
  Description of Artificial Sequence: Synthetic oligonucleotide
  Antisense strand to SEQ ID NO: 2443148
auagucgccucaagauccu

SEQ ID NO: 2443150 - RNA, 19 nt, Artificial Sequence
  Description of Artificial Sequence: Synthetic oligonucleotide
  Sense strand starting at position 2966 of SEQ ID NO: 1887026
ccaggacucgagugaugag

SEQ ID NO: 2443151 - RNA, 19 nt, Artificial Sequence
  Description of Artificial Sequence: Synthetic oligonucleotide
  Antisense strand to SEQ ID NO: 2443150
cucaucacucgaguccugg

SEQ ID NO: 2443152 - RNA, 19 nt, Artificial Sequence
  Description of Artificial Sequence: Synthetic oligonucleotide
  Sense strand starting at position 3301 of SEQ ID NO: 1887026
ccuccauaucugggaagau

SEQ ID NO: 2443153 - RNA, 19 nt, Artificial Sequence
  Description of Artificial Sequence: Synthetic oligonucleotide
  Antisense strand to SEQ ID NO: 2443152
aucuucccagauauggagg

SEQ ID NO: 2443154 - RNA, 19 nt, Artificial Sequence
  Description of Artificial Sequence: Synthetic oligonucleotide
  Sense strand starting at position 3302 of SEQ ID NO: 1887026
cuccauaucugggaagauu

SEQ ID NO: 2443155 - RNA, 19 nt, Artificial Sequence
  Description of Artificial Sequence: Synthetic oligonucleotide
  Antisense strand to SEQ ID NO: 2443154
aaucuucccagauauggag

SEQ ID NO: 2443156 - RNA, 19 nt, Artificial Sequence
  Description of Artificial Sequence: Synthetic oligonucleotide
  Sense strand starting at position 3311 of SEQ ID NO: 1887026
ugggaagauucugccaauc

SEQ ID NO: 2443157 - RNA, 19 nt, Artificial Sequence
  Description of Artificial Sequence: Synthetic oligonucleotide
  Antisense strand to SEQ ID NO: 2443156
gauuggcagaaucuuccca

SEQ ID NO: 2443158 - RNA, 19 nt, Artificial Sequence
  Description of Artificial Sequence: Synthetic oligonucleotide
  Sense strand starting at position 3599 of SEQ ID NO: 1887026
gauugucaccuccagguga

SEQ ID NO: 2443159 - RNA, 19 nt, Artificial Sequence
  Description of Artificial Sequence: Synthetic oligonucleotide
  Antisense strand to SEQ ID NO: 2443158
ucaccuggaggugacaauc

SEQ ID NO: 2443160 - RNA, 19 nt, Artificial Sequence
  Description of Artificial Sequence: Synthetic oligonucleotide
  Sense strand starting at position 3601 of SEQ ID NO: 1887026
uugucaccuccaggugaua

SEQ ID NO: 2443161 - RNA, 19 nt, Artificial Sequence
  Description of Artificial Sequence: Synthetic oligonucleotide
  Antisense strand to SEQ ID NO: 2443160
uaucaccuggaggugacaa

SEQ ID NO: 2443162 - RNA, 19 nt, Artificial Sequence
  Description of Artificial Sequence: Synthetic oligonucleotide
  Sense strand starting at position 3626 of SEQ ID NO: 1887026
caggucaucugggaaagaa

SEQ ID NO: 2443163 - RNA, 19 nt, Artificial Sequence
  Description of Artificial Sequence: Synthetic oligonucleotide
  Antisense strand to SEQ ID NO: 2443162
uucuuucccagaugaccug

SEQ ID NO: 2443164 - RNA, 19 nt, Artificial Sequence
  Description of Artificial Sequence: Synthetic oligonucleotide
  Sense strand starting at position 3749 of SEQ ID NO: 1887026
gcucucagagcucagugaa

SEQ ID NO: 2443165 - RNA, 19 nt, Artificial Sequence
  Description of Artificial Sequence: Synthetic oligonucleotide
  Antisense strand to SEQ ID NO: 2443164
uucacugagcucugagagc

SEQ ID NO: 2443166 - RNA, 19 nt, Artificial Sequence
  Description of Artificial Sequence: Synthetic oligonucleotide
  Sense strand starting at position 3752 of SEQ ID NO: 1887026
cucagagcucagugaagca

SEQ ID NO: 2443167 - RNA, 19 nt, Artificial Sequence
  Description of Artificial Sequence: Synthetic oligonucleotide
  Antisense strand to SEQ ID NO: 2443166
ugcuucacugagcucugag

SEQ ID NO: 2443168 - RNA, 19 nt, Artificial Sequence
  Description of Artificial Sequence: Synthetic oligonucleotide
  Sense strand starting at position 3884 of SEQ ID NO: 1887026
cagggaguccuccauguuc

SEQ ID NO: 2443169 - RNA, 19 nt, Artificial Sequence
  Description of Artificial Sequence: Synthetic oligonucleotide
  Antisense strand to SEQ ID NO: 2443168
gaacauggaggacucccug

SEQ ID NO: 2443170 - RNA, 19 nt, Artificial Sequence
  Description of Artificial Sequence: Synthetic oligonucleotide
  Sense strand starting at position 3886 of SEQ ID NO: 1887026
gggaguccuccauguucca

SEQ ID NO: 2443171 - RNA, 19 nt, Artificial Sequence
  Description of Artificial Sequence: Synthetic oligonucleotide
  Antisense strand to SEQ ID NO: 2443170
uggaacauggaggacuccc

SEQ ID NO: 2443172 - RNA, 19 nt, Artificial Sequence
  Description of Artificial Sequence: Synthetic oligonucleotide
  Sense strand starting at position 3955 of SEQ ID NO: 1887026
gcgcuaaugguccucgagu

SEQ ID NO: 2443173 - RNA, 19 nt, Artificial Sequence
  Description of Artificial Sequence: Synthetic oligonucleotide
  Antisense strand to SEQ ID NO: 2443172
acucgaggaccauuagcgc

SEQ ID NO: 2443174 - RNA, 19 nt, Artificial Sequence
  Description of Artificial Sequence: Synthetic oligonucleotide
  Sense strand starting at position 82 of SEQ ID NO: 1887027
uggcucaguuuaccuuaaa

SEQ ID NO: 2443175 - RNA, 19 nt, Artificial Sequence
  Description of Artificial Sequence: Synthetic oligonucleotide
  Antisense strand to SEQ ID NO: 2443174
uuuaagguaaacugagcca

SEQ ID NO: 2443176 - RNA, 19 nt, Artificial Sequence
  Description of Artificial Sequence: Synthetic oligonucleotide
  Sense strand starting at position 83 of SEQ ID NO: 1887027
ggcucaguuuaccuuaaau

SEQ ID NO: 2443177 - RNA, 19 nt, Artificial Sequence
  Description of Artificial Sequence: Synthetic oligonucleotide
  Antisense strand to SEQ ID NO: 2443176
auuuaagguaaacugagcc

SEQ ID NO: 2443178 - RNA, 19 nt, Artificial Sequence
  Description of Artificial Sequence: Synthetic oligonucleotide
  Sense strand starting at position 184 of SEQ ID NO: 1887027
uucugaacagcucauguua

SEQ ID NO: 2443179 - RNA, 19 nt, Artificial Sequence
  Description of Artificial Sequence: Synthetic oligonucleotide
  Antisense strand to SEQ ID NO: 2443178
uaacaugagcuguucagaa

SEQ ID NO: 2443180 - RNA, 19 nt, Artificial Sequence
  Description of Artificial Sequence: Synthetic oligonucleotide
  Sense strand starting at position 928 of SEQ ID NO: 1887027
gaaagaauguucccuagug

SEQ ID NO: 2443181 - RNA, 19 nt, Artificial Sequence
  Description of Artificial Sequence: Synthetic oligonucleotide
  Antisense strand to SEQ ID NO: 2443180
cacuagggaacauucuuuc

SEQ ID NO: 2443182 - RNA, 19 nt, Artificial Sequence
  Description of Artificial Sequence: Synthetic oligonucleotide
  Sense strand starting at position 929 of SEQ ID NO: 1887027
aaagaauguucccuaguga

SEQ ID NO: 2443183 - RNA, 19 nt, Artificial Sequence
  Description of Artificial Sequence: Synthetic oligonucleotide
  Antisense strand to SEQ ID NO: 2443182
ucacuagggaacauucuuu

SEQ ID NO: 2443184 - RNA, 19 nt, Artificial Sequence
  Description of Artificial Sequence: Synthetic oligonucleotide
  Sense strand starting at position 992 of SEQ ID NO: 1887027
ggacuugugacuugucuua

SEQ ID NO: 2443185 - RNA, 19 nt, Artificial Sequence
  Description of Artificial Sequence: Synthetic oligonucleotide
  Antisense strand to SEQ ID NO: 2443184
uaagacaagucacaagucc

SEQ ID NO: 2443186 - RNA, 19 nt, Artificial Sequence
  Description of Artificial Sequence: Synthetic oligonucleotide
  Sense strand starting at position 994 of SEQ ID NO: 1887027
acuugugacuugucuuauc

SEQ ID NO: 2443187 - RNA, 19 nt, Artificial Sequence
  Description of Artificial Sequence: Synthetic oligonucleotide
  Antisense strand to SEQ ID NO: 2443186
gauaagacaagucacaagu

SEQ ID NO: 2443188 - RNA, 19 nt, Artificial Sequence
  Description of Artificial Sequence: Synthetic oligonucleotide
  Sense strand starting at position 1306 of SEQ ID NO: 1887027
gcugcauuccagggcaaca

SEQ ID NO: 2443189 - RNA, 19 nt, Artificial Sequence
  Description of Artificial Sequence: Synthetic oligonucleotide
  Antisense strand to SEQ ID NO: 2443188
uguugcccuggaaugcagc

SEQ ID NO: 2443190 - RNA, 19 nt, Artificial Sequence
  Description of Artificial Sequence: Synthetic oligonucleotide
  Sense strand starting at position 1394 of SEQ ID NO: 1887027
ggucuugcaaucugcagau

SEQ ID NO: 2443191 - RNA, 19 nt, Artificial Sequence
  Description of Artificial Sequence: Synthetic oligonucleotide
  Antisense strand to SEQ ID NO: 2443190
aucugcagauugcaagacc

SEQ ID NO: 2443192 - RNA, 19 nt, Artificial Sequence
  Description of Artificial Sequence: Synthetic oligonucleotide
  Sense strand starting at position 1396 of SEQ ID NO: 1887027
ucuugcaaucugcagauaa

SEQ ID NO: 2443193 - RNA, 19 nt, Artificial Sequence
  Description of Artificial Sequence: Synthetic oligonucleotide
  Antisense strand to SEQ ID NO: 2443192
uuaucugcagauugcaaga

SEQ ID NO: 2443194 - RNA, 19 nt, Artificial Sequence
  Description of Artificial Sequence: Synthetic oligonucleotide
  Sense strand starting at position 1571 of SEQ ID NO: 1887027
cacuguugauguuuggaau

SEQ ID NO: 2443195 - RNA, 19 nt, Artificial Sequence
  Description of Artificial Sequence: Synthetic oligonucleotide
  Antisense strand to SEQ ID NO: 2443194
auuccaaacaucaacagug

SEQ ID NO: 2443196 - RNA, 19 nt, Artificial Sequence
  Description of Artificial Sequence: Synthetic oligonucleotide
  Sense strand starting at position 1577 of SEQ ID NO: 1887027
ugauguuuggaaugucaga

SEQ ID NO: 2443197 - RNA, 19 nt, Artificial Sequence
  Description of Artificial Sequence: Synthetic oligonucleotide
  Antisense strand to SEQ ID NO: 2443196
ucugacauuccaaacauca

SEQ ID NO: 2443198 - RNA, 19 nt, Artificial Sequence
  Description of Artificial Sequence: Synthetic oligonucleotide
  Sense strand starting at position 1582 of SEQ ID NO: 1887027
uuuggaaugucagacagga

SEQ ID NO: 2443199 - RNA, 19 nt, Artificial Sequence
  Description of Artificial Sequence: Synthetic oligonucleotide
  Antisense strand to SEQ ID NO: 2443198
uccugucugacauuccaaa

SEQ ID NO: 2443200 - RNA, 19 nt, Artificial Sequence
  Description of Artificial Sequence: Synthetic oligonucleotide
  Sense strand starting at position 1700 of SEQ ID NO: 1887027
gccucaaugcugccgaguu

SEQ ID NO: 2443201 - RNA, 19 nt, Artificial Sequence
  Description of Artificial Sequence: Synthetic oligonucleotide
  Antisense strand to SEQ ID NO: 2443200
aacucggcagcauugaggc

SEQ ID NO: 2443202 - RNA, 19 nt, Artificial Sequence
  Description of Artificial Sequence: Synthetic oligonucleotide
  Sense strand starting at position 1714 of SEQ ID NO: 1887027
gaguuugcuucugugagau

SEQ ID NO: 2443203 - RNA, 19 nt, Artificial Sequence
  Description of Artificial Sequence: Synthetic oligonucleotide
  Antisense strand to SEQ ID NO: 2443202
aucucacagaagcaaacuc

SEQ ID NO: 2443204 - RNA, 19 nt, Artificial Sequence
  Description of Artificial Sequence: Synthetic oligonucleotide
  Sense strand starting at position 1728 of SEQ ID NO: 1887027
gagauuaauucugugaaau

SEQ ID NO: 2443205 - RNA, 19 nt, Artificial Sequence
  Description of Artificial Sequence: Synthetic oligonucleotide
  Antisense strand to SEQ ID NO: 2443204
auuucacagaauuaaucuc

SEQ ID NO: 2443206 - RNA, 19 nt, Artificial Sequence
  Description of Artificial Sequence: Synthetic oligonucleotide
  Sense strand starting at position 1742 of SEQ ID NO: 1887027
gaaauuaauugggacaaga

SEQ ID NO: 2443207 - RNA, 19 nt, Artificial Sequence
  Description of Artificial Sequence: Synthetic oligonucleotide
  Antisense strand to SEQ ID NO: 2443206
ucuugucccaauuaauuuc

SEQ ID NO: 2443208 - RNA, 19 nt, Artificial Sequence
  Description of Artificial Sequence: Synthetic oligonucleotide
  Sense strand starting at position 1889 of SEQ ID NO: 1887027
aggagccauugguuacgua

SEQ ID NO: 2443209 - RNA, 19 nt, Artificial Sequence
  Description of Artificial Sequence: Synthetic oligonucleotide
  Antisense strand to SEQ ID NO: 2443208
uacguaaccaauggcuccu

SEQ ID NO: 2443210 - RNA, 19 nt, Artificial Sequence
  Description of Artificial Sequence: Synthetic oligonucleotide
  Sense strand starting at position 1890 of SEQ ID NO: 1887027
ggagccauugguuacguau

SEQ ID NO: 2443211 - RNA, 19 nt, Artificial Sequence
  Description of Artificial Sequence: Synthetic oligonucleotide
  Antisense strand to SEQ ID NO: 2443210
auacguaaccaauggcucc

SEQ ID NO: 2443212 - RNA, 19 nt, Artificial Sequence
  Description of Artificial Sequence: Synthetic oligonucleotide
  Sense strand starting at position 2001 of SEQ ID NO: 1887027
agggaaguuuagucccuca

SEQ ID NO: 2443213 - RNA, 19 nt, Artificial Sequence
  Description of Artificial Sequence: Synthetic oligonucleotide
  Antisense strand to SEQ ID NO: 2443212
ugagggacuaaacuucccu

SEQ ID NO: 2443214 - RNA, 19 nt, Artificial Sequence
  Description of Artificial Sequence: Synthetic oligonucleotide
  Sense strand starting at position 2006 of SEQ ID NO: 1887027
aguuuagucccucaccaga

SEQ ID NO: 2443215 - RNA, 19 nt, Artificial Sequence
  Description of Artificial Sequence: Synthetic oligonucleotide
  Antisense strand to SEQ ID NO: 2443214
ucuggugagggacuaaacu

SEQ ID NO: 2443216 - RNA, 19 nt, Artificial Sequence
  Description of Artificial Sequence: Synthetic oligonucleotide
  Sense strand starting at position 2082 of SEQ ID NO: 1887027
acagaucugcuucguuauu

SEQ ID NO: 2443217 - RNA, 19 nt, Artificial Sequence
  Description of Artificial Sequence: Synthetic oligonucleotide
  Antisense strand to SEQ ID NO: 2443216
aauaacgaagcagaucugu

SEQ ID NO: 2443218 - RNA, 19 nt, Artificial Sequence
  Description of Artificial Sequence: Synthetic oligonucleotide
  Sense strand starting at position 2083 of SEQ ID NO: 1887027
cagaucugcuucguuauua

SEQ ID NO: 2443219 - RNA, 19 nt, Artificial Sequence
  Description of Artificial Sequence: Synthetic oligonucleotide
  Antisense strand to SEQ ID NO: 2443218
uaauaacgaagcagaucug

SEQ ID NO: 2443220 - RNA, 19 nt, Artificial Sequence
  Description of Artificial Sequence: Synthetic oligonucleotide
  Sense strand starting at position 2084 of SEQ ID NO: 1887027
agaucugcuucguuauuaa

SEQ ID NO: 2443221 - RNA, 19 nt, Artificial Sequence
  Description of Artificial Sequence: Synthetic oligonucleotide
  Antisense strand to SEQ ID NO: 2443220
uuaauaacgaagcagaucu

SEQ ID NO: 2443222 - RNA, 19 nt, Artificial Sequence
  Description of Artificial Sequence: Synthetic oligonucleotide
  Sense strand starting at position 2133 of SEQ ID NO: 1887027
auuggaacucagugaauua

SEQ ID NO: 2443223 - RNA, 19 nt, Artificial Sequence
  Description of Artificial Sequence: Synthetic oligonucleotide
  Antisense strand to SEQ ID NO: 2443222
uaauucacugaguuccaau

SEQ ID NO: 2443224 - RNA, 19 nt, Artificial Sequence
  Description of Artificial Sequence: Synthetic oligonucleotide
  Sense strand starting at position 2144 of SEQ ID NO: 1887027
gugaauuaagugggcauga

SEQ ID NO: 2443225 - RNA, 19 nt, Artificial Sequence
  Description of Artificial Sequence: Synthetic oligonucleotide
  Antisense strand to SEQ ID NO: 2443224
ucaugcccacuuaauucac

SEQ ID NO: 2443226 - RNA, 19 nt, Artificial Sequence
  Description of Artificial Sequence: Synthetic oligonucleotide
  Sense strand starting at position 2290 of SEQ ID NO: 1887027
guuugaauaaucugucagg

SEQ ID NO: 2443227 - RNA, 19 nt, Artificial Sequence
  Description of Artificial Sequence: Synthetic oligonucleotide
  Antisense strand to SEQ ID NO: 2443226
ccugacagauuauucaaac

SEQ ID NO: 2443228 - RNA, 19 nt, Artificial Sequence
  Description of Artificial Sequence: Synthetic oligonucleotide
  Sense strand starting at position 2296 of SEQ ID NO: 1887027
auaaucugucagggacgaa

SEQ ID NO: 2443229 - RNA, 19 nt, Artificial Sequence
  Description of Artificial Sequence: Synthetic oligonucleotide
  Antisense strand to SEQ ID NO: 2443228
uucgucccugacagauuau

SEQ ID NO: 2443230 - RNA, 19 nt, Artificial Sequence
  Description of Artificial Sequence: Synthetic oligonucleotide
  Sense strand starting at position 2377 of SEQ ID NO: 1887027
uuuguauccaagugagcga

SEQ ID NO: 2443231 - RNA, 19 nt, Artificial Sequence
  Description of Artificial Sequence: Synthetic oligonucleotide
  Antisense strand to SEQ ID NO: 2443230
ucgcucacuuggauacaaa

SEQ ID NO: 2443232 - RNA, 19 nt, Artificial Sequence
  Description of Artificial Sequence: Synthetic oligonucleotide
  Sense strand starting at position 2444 of SEQ ID NO: 1887027
guaugugcccaacacugau

SEQ ID NO: 2443233 - RNA, 19 nt, Artificial Sequence
  Description of Artificial Sequence: Synthetic oligonucleotide
  Antisense strand to SEQ ID NO: 2443232
aucaguguugggcacauac

SEQ ID NO: 2443234 - RNA, 19 nt, Artificial Sequence
  Description of Artificial Sequence: Synthetic oligonucleotide
  Sense strand starting at position 2602 of SEQ ID NO: 1887027
acugaagauuaucaggauu

SEQ ID NO: 2443235 - RNA, 19 nt, Artificial Sequence
  Description of Artificial Sequence: Synthetic oligonucleotide
  Antisense strand to SEQ ID NO: 2443234
aauccugauaaucuucagu

SEQ ID NO: 2443236 - RNA, 19 nt, Artificial Sequence
  Description of Artificial Sequence: Synthetic oligonucleotide
  Sense strand starting at position 2667 of SEQ ID NO: 1887027
cuuacuugcuucccugaga

SEQ ID NO: 2443237 - RNA, 19 nt, Artificial Sequence
  Description of Artificial Sequence: Synthetic oligonucleotide
  Antisense strand to SEQ ID NO: 2443236
ucucagggaagcaaguaag

SEQ ID NO: 2443238 - RNA, 19 nt, Artificial Sequence
  Description of Artificial Sequence: Synthetic oligonucleotide
  Sense strand starting at position 2668 of SEQ ID NO: 1887027
uuacuugcuucccugagaa

SEQ ID NO: 2443239 - RNA, 19 nt, Artificial Sequence
  Description of Artificial Sequence: Synthetic oligonucleotide
  Antisense strand to SEQ ID NO: 2443238
uucucagggaagcaaguaa

SEQ ID NO: 2443240 - RNA, 19 nt, Artificial Sequence
  Description of Artificial Sequence: Synthetic oligonucleotide
  Sense strand starting at position 2670 of SEQ ID NO: 1887027
acuugcuucccugagaaca

SEQ ID NO: 2443241 - RNA, 19 nt, Artificial Sequence
  Description of Artificial Sequence: Synthetic oligonucleotide
  Antisense strand to SEQ ID NO: 2443240
uguucucagggaagcaagu

SEQ ID NO: 2443242 - RNA, 19 nt, Artificial Sequence
  Description of Artificial Sequence: Synthetic oligonucleotide
  Sense strand starting at position 3696 of SEQ ID NO: 1887027
auagcucucuuucugugau

SEQ ID NO: 2443243 - RNA, 19 nt, Artificial Sequence
  Description of Artificial Sequence: Synthetic oligonucleotide
  Antisense strand to SEQ ID NO: 2443242
aucacagaaagagagcuau

SEQ ID NO: 2443244 - RNA, 19 nt, Artificial Sequence
  Description of Artificial Sequence: Synthetic oligonucleotide
  Sense strand starting at position 3698 of SEQ ID NO: 1887027
agcucucuuucugugauca

SEQ ID NO: 2443245 - RNA, 19 nt, Artificial Sequence
  Description of Artificial Sequence: Synthetic oligonucleotide
  Antisense strand to SEQ ID NO: 2443244
ugaucacagaaagagagcu

SEQ ID NO: 2443246 - RNA, 19 nt, Artificial Sequence
  Description of Artificial Sequence: Synthetic oligonucleotide
  Sense strand starting at position 3699 of SEQ ID NO: 1887027
gcucucuuucugugaucau

SEQ ID NO: 2443247 - RNA, 19 nt, Artificial Sequence
  Description of Artificial Sequence: Synthetic oligonucleotide
  Antisense strand to SEQ ID NO: 2443246
augaucacagaaagagagc

SEQ ID NO: 2443248 - RNA, 19 nt, Artificial Sequence
  Description of Artificial Sequence: Synthetic oligonucleotide
  Sense strand starting at position 3702 of SEQ ID NO: 1887027
cucuuucugugaucauucu

SEQ ID NO: 2443249 - RNA, 19 nt, Artificial Sequence
  Description of Artificial Sequence: Synthetic oligonucleotide
  Antisense strand to SEQ ID NO: 2443248
agaaugaucacagaaagag

SEQ ID NO: 2443250 - RNA, 19 nt, Artificial Sequence
  Description of Artificial Sequence: Synthetic oligonucleotide
  Sense strand starting at position 3703 of SEQ ID NO: 1887027
ucuuucugugaucauucuu

SEQ ID NO: 2443251 - RNA, 19 nt, Artificial Sequence
  Description of Artificial Sequence: Synthetic oligonucleotide
  Antisense strand to SEQ ID NO: 2443250
aagaaugaucacagaaaga

SEQ ID NO: 2443252 - RNA, 19 nt, Artificial Sequence
  Description of Artificial Sequence: Synthetic oligonucleotide
  Sense strand starting at position 3708 of SEQ ID NO: 1887027
cugugaucauucuugccca

SEQ ID NO: 2443253 - RNA, 19 nt, Artificial Sequence
  Description of Artificial Sequence: Synthetic oligonucleotide
  Antisense strand to SEQ ID NO: 2443252
ugggcaagaaugaucacag

SEQ ID NO: 2443254 - RNA, 19 nt, Artificial Sequence
  Description of Artificial Sequence: Synthetic oligonucleotide
  Sense strand starting at position 121 of SEQ ID NO: 1887028
aggcucaguuguuccauga

SEQ ID NO: 2443255 - RNA, 19 nt, Artificial Sequence
  Description of Artificial Sequence: Synthetic oligonucleotide
  Antisense strand to SEQ ID NO: 2443254
ucauggaacaacugagccu

SEQ ID NO: 2443256 - RNA, 19 nt, Artificial Sequence
  Description of Artificial Sequence: Synthetic oligonucleotide
  Sense strand starting at position 479 of SEQ ID NO: 1887028
cccacaguccugugggaga

SEQ ID NO: 2443257 - RNA, 19 nt, Artificial Sequence
  Description of Artificial Sequence: Synthetic oligonucleotide
  Antisense strand to SEQ ID NO: 2443256
ucucccacaggacuguggg

SEQ ID NO: 2443258 - RNA, 19 nt, Artificial Sequence
  Description of Artificial Sequence: Synthetic oligonucleotide
  Sense strand starting at position 531 of SEQ ID NO: 1887028
ggagcauuccuggaugucu

SEQ ID NO: 2443259 - RNA, 19 nt, Artificial Sequence
  Description of Artificial Sequence: Synthetic oligonucleotide
  Antisense strand to SEQ ID NO: 2443258
agacauccaggaaugcucc

SEQ ID NO: 2443260 - RNA, 19 nt, Artificial Sequence
  Description of Artificial Sequence: Synthetic oligonucleotide
  Sense strand starting at position 780 of SEQ ID NO: 1887028
gcacauuccugcgcugaga

SEQ ID NO: 2443261 - RNA, 19 nt, Artificial Sequence
  Description of Artificial Sequence: Synthetic oligonucleotide
  Antisense strand to SEQ ID NO: 2443260
ucucagcgcaggaaugugc

SEQ ID NO: 2443262 - RNA, 19 nt, Artificial Sequence
  Description of Artificial Sequence: Synthetic oligonucleotide
  Sense strand starting at position 797 of SEQ ID NO: 1887028
gagccaaagucuccaaagu

SEQ ID NO: 2443263 - RNA, 19 nt, Artificial Sequence
  Description of Artificial Sequence: Synthetic oligonucleotide
  Antisense strand to SEQ ID NO: 2443262
acuuuggagacuuuggcuc

SEQ ID NO: 2443264 - RNA, 19 nt, Artificial Sequence
  Description of Artificial Sequence: Synthetic oligonucleotide
  Sense strand starting at position 983 of SEQ ID NO: 1887028
gcuggugaguccgaggaca

SEQ ID NO: 2443265 - RNA, 19 nt, Artificial Sequence
  Description of Artificial Sequence: Synthetic oligonucleotide
  Antisense strand to SEQ ID NO: 2443264
uguccucggacucaccagc

SEQ ID NO: 2443266 - RNA, 19 nt, Artificial Sequence
  Description of Artificial Sequence: Synthetic oligonucleotide
  Sense strand starting at position 1374 of SEQ ID NO: 1887028
ugccgauacagcgugcaau

SEQ ID NO: 2443267 - RNA, 19 nt, Artificial Sequence
  Description of Artificial Sequence: Synthetic oligonucleotide
  Antisense strand to SEQ ID NO: 2443266
auugcacgcuguaucggca

SEQ ID NO: 2443268 - RNA, 19 nt, Artificial Sequence
  Description of Artificial Sequence: Synthetic oligonucleotide
  Sense strand starting at position 2021 of SEQ ID NO: 1887028
ggcccauucugcgucauga

SEQ ID NO: 2443269 - RNA, 19 nt, Artificial Sequence
  Description of Artificial Sequence: Synthetic oligonucleotide
  Antisense strand to SEQ ID NO: 2443268
ucaugacgcagaaugggcc

SEQ ID NO: 2443270 - RNA, 19 nt, Artificial Sequence
  Description of Artificial Sequence: Synthetic oligonucleotide
  Sense strand starting at position 2022 of SEQ ID NO: 1887028
gcccauucugcgucaugac

SEQ ID NO: 2443271 - RNA, 19 nt, Artificial Sequence
  Description of Artificial Sequence: Synthetic oligonucleotide
  Antisense strand to SEQ ID NO: 2443270
gucaugacgcagaaugggc

SEQ ID NO: 2443272 - RNA, 19 nt, Artificial Sequence
  Description of Artificial Sequence: Synthetic oligonucleotide
  Sense strand starting at position 2023 of SEQ ID NO: 1887028
cccauucugcgucaugaca

SEQ ID NO: 2443273 - RNA, 19 nt, Artificial Sequence
  Description of Artificial Sequence: Synthetic oligonucleotide
  Antisense strand to SEQ ID NO: 2443272
ugucaugacgcagaauggg

SEQ ID NO: 2443274 - RNA, 19 nt, Artificial Sequence
  Description of Artificial Sequence: Synthetic oligonucleotide
  Sense strand starting at position 2025 of SEQ ID NO: 1887028
cauucugcgucaugacaua

SEQ ID NO: 2443275 - RNA, 19 nt, Artificial Sequence
  Description of Artificial Sequence: Synthetic oligonucleotide
  Antisense strand to SEQ ID NO: 2443274
uaugucaugacgcagaaug

SEQ ID NO: 2443276 - RNA, 19 nt, Artificial Sequence
  Description of Artificial Sequence: Synthetic oligonucleotide
  Sense strand starting at position 2062 of SEQ ID NO: 1887028
cugggacugucucccaaau

SEQ ID NO: 2443277 - RNA, 19 nt, Artificial Sequence
  Description of Artificial Sequence: Synthetic oligonucleotide
  Antisense strand to SEQ ID NO: 2443276
auuugggagacagucccag

SEQ ID NO: 2443278 - RNA, 19 nt, Artificial Sequence
  Description of Artificial Sequence: Synthetic oligonucleotide
  Sense strand starting at position 2093 of SEQ ID NO: 1887028
agcugagucaugggucacu

SEQ ID NO: 2443279 - RNA, 19 nt, Artificial Sequence
  Description of Artificial Sequence: Synthetic oligonucleotide
  Antisense strand to SEQ ID NO: 2443278
agugacccaugacucagcu

SEQ ID NO: 2443280 - RNA, 19 nt, Artificial Sequence
  Description of Artificial Sequence: Synthetic oligonucleotide
  Sense strand starting at position 2098 of SEQ ID NO: 1887028
agucaugggucacuuagua

SEQ ID NO: 2443281 - RNA, 19 nt, Artificial Sequence
  Description of Artificial Sequence: Synthetic oligonucleotide
  Antisense strand to SEQ ID NO: 2443280
uacuaagugacccaugacu

SEQ ID NO: 2443282 - RNA, 19 nt, Artificial Sequence
  Description of Artificial Sequence: Synthetic oligonucleotide
  Sense strand starting at position 2102 of SEQ ID NO: 1887028
augggucacuuaguaggaa

SEQ ID NO: 2443283 - RNA, 19 nt, Artificial Sequence
  Description of Artificial Sequence: Synthetic oligonucleotide
  Antisense strand to SEQ ID NO: 2443282
uuccuacuaagugacccau

SEQ ID NO: 2443284 - RNA, 19 nt, Artificial Sequence
  Description of Artificial Sequence: Synthetic oligonucleotide
  Sense strand starting at position 2187 of SEQ ID NO: 1887028
ccugacuucuccuggcgua

SEQ ID NO: 2443285 - RNA, 19 nt, Artificial Sequence
  Description of Artificial Sequence: Synthetic oligonucleotide
  Antisense strand to SEQ ID NO: 2443284
uacgccaggagaagucagg

SEQ ID NO: 2443286 - RNA, 19 nt, Artificial Sequence
  Description of Artificial Sequence: Synthetic oligonucleotide
  Sense strand starting at position 2190 of SEQ ID NO: 1887028
gacuucuccuggcguagga

SEQ ID NO: 2443287 - RNA, 19 nt, Artificial Sequence
  Description of Artificial Sequence: Synthetic oligonucleotide
  Antisense strand to SEQ ID NO: 2443286
uccuacgccaggagaaguc

SEQ ID NO: 2443288 - RNA, 19 nt, Artificial Sequence
  Description of Artificial Sequence: Synthetic oligonucleotide
  Sense strand starting at position 2276 of SEQ ID NO: 1887028
gggugucauuugcucauca

SEQ ID NO: 2443289 - RNA, 19 nt, Artificial Sequence
  Description of Artificial Sequence: Synthetic oligonucleotide
  Antisense strand to SEQ ID NO: 2443288
ugaugagcaaaugacaccc

SEQ ID NO: 2443290 - RNA, 19 nt, Artificial Sequence
  Description of Artificial Sequence: Synthetic oligonucleotide
  Sense strand starting at position 2284 of SEQ ID NO: 1887028
uuugcucaucagcaggaau

SEQ ID NO: 2443291 - RNA, 19 nt, Artificial Sequence
  Description of Artificial Sequence: Synthetic oligonucleotide
  Antisense strand to SEQ ID NO: 2443290
auuccugcugaugagcaaa

SEQ ID NO: 2443292 - RNA, 19 nt, Artificial Sequence
  Description of Artificial Sequence: Synthetic oligonucleotide
  Sense strand starting at position 2782 of SEQ ID NO: 1887028
cgugagugcucgggcccaa

SEQ ID NO: 2443293 - RNA, 19 nt, Artificial Sequence
  Description of Artificial Sequence: Synthetic oligonucleotide
  Antisense strand to SEQ ID NO: 2443292
uugggcccgagcacucacg

SEQ ID NO: 2443294 - RNA, 19 nt, Artificial Sequence
  Description of Artificial Sequence: Synthetic oligonucleotide
  Sense strand starting at position 3572 of SEQ ID NO: 1887028
gaacauggacucugucaaa

SEQ ID NO: 2443295 - RNA, 19 nt, Artificial Sequence
  Description of Artificial Sequence: Synthetic oligonucleotide
  Antisense strand to SEQ ID NO: 2443294
uuugacagaguccauguuc

SEQ ID NO: 2443296 - RNA, 19 nt, Artificial Sequence
  Description of Artificial Sequence: Synthetic oligonucleotide
  Sense strand starting at position 3896 of SEQ ID NO: 1887028
cucccaacuucggaguauu

SEQ ID NO: 2443297 - RNA, 19 nt, Artificial Sequence
  Description of Artificial Sequence: Synthetic oligonucleotide
  Antisense strand to SEQ ID NO: 2443296
aauacuccgaaguugggag

SEQ ID NO: 2443298 - RNA, 19 nt, Artificial Sequence
  Description of Artificial Sequence: Synthetic oligonucleotide
  Sense strand starting at position 217 of SEQ ID NO: 1887029
uuaacaugucucugaugug

SEQ ID NO: 2443299 - RNA, 19 nt, Artificial Sequence
  Description of Artificial Sequence: Synthetic oligonucleotide
  Antisense strand to SEQ ID NO: 2443298
cacaucagagacauguuaa

SEQ ID NO: 2443300 - RNA, 19 nt, Artificial Sequence
  Description of Artificial Sequence: Synthetic oligonucleotide
  Sense strand starting at position 223 of SEQ ID NO: 1887029
ugucucugaugugucugaa

SEQ ID NO: 2443301 - RNA, 19 nt, Artificial Sequence
  Description of Artificial Sequence: Synthetic oligonucleotide
  Antisense strand to SEQ ID NO: 2443300
uucagacacaucagagaca

SEQ ID NO: 2443302 - RNA, 19 nt, Artificial Sequence
  Description of Artificial Sequence: Synthetic oligonucleotide
  Sense strand starting at position 226 of SEQ ID NO: 1887029
cucugaugugucugaaagu

SEQ ID NO: 2443303 - RNA, 19 nt, Artificial Sequence
  Description of Artificial Sequence: Synthetic oligonucleotide
  Antisense strand to SEQ ID NO: 2443302
acuuucagacacaucagag

SEQ ID NO: 2443304 - RNA, 19 nt, Artificial Sequence
  Description of Artificial Sequence: Synthetic oligonucleotide
  Sense strand starting at position 413 of SEQ ID NO: 1887029
uggagauucuggguaccca

SEQ ID NO: 2443305 - RNA, 19 nt, Artificial Sequence
  Description of Artificial Sequence: Synthetic oligonucleotide
  Antisense strand to SEQ ID NO: 2443304
uggguacccagaaucucca

SEQ ID NO: 2443306 - RNA, 19 nt, Artificial Sequence
  Description of Artificial Sequence: Synthetic oligonucleotide
  Sense strand starting at position 452 of SEQ ID NO: 1887029
ugacuuggcaagugggaaa

SEQ ID NO: 2443307 - RNA, 19 nt, Artificial Sequence
  Description of Artificial Sequence: Synthetic oligonucleotide
  Antisense strand to SEQ ID NO: 2443306
uuucccacuugccaaguca

SEQ ID NO: 2443308 - RNA, 19 nt, Artificial Sequence
  Description of Artificial Sequence: Synthetic oligonucleotide
  Sense strand starting at position 1086 of SEQ ID NO: 1887029
aacagauaucuuuguguug

SEQ ID NO: 2443309 - RNA, 19 nt, Artificial Sequence
  Description of Artificial Sequence: Synthetic oligonucleotide
  Antisense strand to SEQ ID NO: 2443308
caacacaaagauaucuguu

SEQ ID NO: 2443310 - RNA, 19 nt, Artificial Sequence
  Description of Artificial Sequence: Synthetic oligonucleotide
  Sense strand starting at position 1087 of SEQ ID NO: 1887029
acagauaucuuuguguugu

SEQ ID NO: 2443311 - RNA, 19 nt, Artificial Sequence
  Description of Artificial Sequence: Synthetic oligonucleotide
  Antisense strand to SEQ ID NO: 2443310
acaacacaaagauaucugu

SEQ ID NO: 2443312 - RNA, 19 nt, Artificial Sequence
  Description of Artificial Sequence: Synthetic oligonucleotide
  Sense strand starting at position 1137 of SEQ ID NO: 1887029
guucuuuaaguauguaugu

SEQ ID NO: 2443313 - RNA, 19 nt, Artificial Sequence
  Description of Artificial Sequence: Synthetic oligonucleotide
  Antisense strand to SEQ ID NO: 2443312
acauacauacuuaaagaac

SEQ ID NO: 2443314 - RNA, 19 nt, Artificial Sequence
  Description of Artificial Sequence: Synthetic oligonucleotide
  Sense strand starting at position 1166 of SEQ ID NO: 1887029
uaaggagaauguuagacuu

SEQ ID NO: 2443315 - RNA, 19 nt, Artificial Sequence
  Description of Artificial Sequence: Synthetic oligonucleotide
  Antisense strand to SEQ ID NO: 2443314
aagucuaacauucuccuua

SEQ ID NO: 2443316 - RNA, 19 nt, Artificial Sequence
  Description of Artificial Sequence: Synthetic oligonucleotide
  Sense strand starting at position 1168 of SEQ ID NO: 1887029
aggagaauguuagacuuau

SEQ ID NO: 2443317 - RNA, 19 nt, Artificial Sequence
  Description of Artificial Sequence: Synthetic oligonucleotide
  Antisense strand to SEQ ID NO: 2443316
auaagucuaacauucuccu

SEQ ID NO: 2443318 - RNA, 19 nt, Artificial Sequence
  Description of Artificial Sequence: Synthetic oligonucleotide
  Sense strand starting at position 1201 of SEQ ID NO: 1887029
uagucagcgcggguauauu

SEQ ID NO: 2443319 - RNA, 19 nt, Artificial Sequence
  Description of Artificial Sequence: Synthetic oligonucleotide
  Antisense strand to SEQ ID NO: 2443318
aauauacccgcgcugacua

SEQ ID NO: 2443320 - RNA, 19 nt, Artificial Sequence
  Description of Artificial Sequence: Synthetic oligonucleotide
  Sense strand starting at position 1228 of SEQ ID NO: 1887029
caagcauggcgauaaguga

SEQ ID NO: 2443321 - RNA, 19 nt, Artificial Sequence
  Description of Artificial Sequence: Synthetic oligonucleotide
  Antisense strand to SEQ ID NO: 2443320
ucacuuaucgccaugcuug

SEQ ID NO: 2443322 - RNA, 19 nt, Artificial Sequence
  Description of Artificial Sequence: Synthetic oligonucleotide
  Sense strand starting at position 1449 of SEQ ID NO: 1887029
ccaggagagucguuucaac

SEQ ID NO: 2443323 - RNA, 19 nt, Artificial Sequence
  Description of Artificial Sequence: Synthetic oligonucleotide
  Antisense strand to SEQ ID NO: 2443322
guugaaacgacucuccugg

SEQ ID NO: 2443324 - RNA, 19 nt, Artificial Sequence
  Description of Artificial Sequence: Synthetic oligonucleotide
  Sense strand starting at position 1558 of SEQ ID NO: 1887029
caauaugagguuuauguuu

SEQ ID NO: 2443325 - RNA, 19 nt, Artificial Sequence
  Description of Artificial Sequence: Synthetic oligonucleotide
  Antisense strand to SEQ ID NO: 2443324
aaacauaaaccucauauug

SEQ ID NO: 2443326 - RNA, 19 nt, Artificial Sequence
  Description of Artificial Sequence: Synthetic oligonucleotide
  Sense strand starting at position 1563 of SEQ ID NO: 1887029
ugagguuuauguuucuuag

SEQ ID NO: 2443327 - RNA, 19 nt, Artificial Sequence
  Description of Artificial Sequence: Synthetic oligonucleotide
  Antisense strand to SEQ ID NO: 2443326
cuaagaaacauaaaccuca

SEQ ID NO: 2443328 - RNA, 19 nt, Artificial Sequence
  Description of Artificial Sequence: Synthetic oligonucleotide
  Sense strand starting at position 1566 of SEQ ID NO: 1887029
gguuuauguuucuuaguca

SEQ ID NO: 2443329 - RNA, 19 nt, Artificial Sequence
  Description of Artificial Sequence: Synthetic oligonucleotide
  Antisense strand to SEQ ID NO: 2443328
ugacuaagaaacauaaacc

SEQ ID NO: 2443330 - RNA, 19 nt, Artificial Sequence
  Description of Artificial Sequence: Synthetic oligonucleotide
  Sense strand starting at position 1702 of SEQ ID NO: 1887029
uugguacuguucuuagcau

SEQ ID NO: 2443331 - RNA, 19 nt, Artificial Sequence
  Description of Artificial Sequence: Synthetic oligonucleotide
  Antisense strand to SEQ ID NO: 2443330
augcuaagaacaguaccaa

SEQ ID NO: 2443332 - RNA, 19 nt, Artificial Sequence
  Description of Artificial Sequence: Synthetic oligonucleotide
  Sense strand starting at position 1777 of SEQ ID NO: 1887029
auguauccacuuuaucgau

SEQ ID NO: 2443333 - RNA, 19 nt, Artificial Sequence
  Description of Artificial Sequence: Synthetic oligonucleotide
  Antisense strand to SEQ ID NO: 2443332
aucgauaaaguggauacau

SEQ ID NO: 2443334 - RNA, 19 nt, Artificial Sequence
  Description of Artificial Sequence: Synthetic oligonucleotide
  Sense strand starting at position 1779 of SEQ ID NO: 1887029
guauccacuuuaucgauga

SEQ ID NO: 2443335 - RNA, 19 nt, Artificial Sequence
  Description of Artificial Sequence: Synthetic oligonucleotide
  Antisense strand to SEQ ID NO: 2443334
ucaucgauaaaguggauac

SEQ ID NO: 2443336 - RNA, 19 nt, Artificial Sequence
  Description of Artificial Sequence: Synthetic oligonucleotide
  Sense strand starting at position 1783 of SEQ ID NO: 1887029
ccacuuuaucgaugaggag

SEQ ID NO: 2443337 - RNA, 19 nt, Artificial Sequence
  Description of Artificial Sequence: Synthetic oligonucleotide
  Antisense strand to SEQ ID NO: 2443336
cuccucaucgauaaagugg

SEQ ID NO: 2443338 - RNA, 19 nt, Artificial Sequence
  Description of Artificial Sequence: Synthetic oligonucleotide
  Sense strand starting at position 1817 of SEQ ID NO: 1887029
uaaaguaguuugcucagua

SEQ ID NO: 2443339 - RNA, 19 nt, Artificial Sequence
  Description of Artificial Sequence: Synthetic oligonucleotide
  Antisense strand to SEQ ID NO: 2443338
uacugagcaaacuacuuua

SEQ ID NO: 2443340 - RNA, 19 nt, Artificial Sequence
  Description of Artificial Sequence: Synthetic oligonucleotide
  Sense strand starting at position 1818 of SEQ ID NO: 1887029
aaaguaguuugcucaguau

SEQ ID NO: 2443341 - RNA, 19 nt, Artificial Sequence
  Description of Artificial Sequence: Synthetic oligonucleotide
  Antisense strand to SEQ ID NO: 2443340
auacugagcaaacuacuuu

SEQ ID NO: 2443342 - RNA, 19 nt, Artificial Sequence
  Description of Artificial Sequence: Synthetic oligonucleotide
  Sense strand starting at position 1821 of SEQ ID NO: 1887029
guaguuugcucaguaucug

SEQ ID NO: 2443343 - RNA, 19 nt, Artificial Sequence
  Description of Artificial Sequence: Synthetic oligonucleotide
  Antisense strand to SEQ ID NO: 2443342
cagauacugagcaaacuac

SEQ ID NO: 2443344 - RNA, 19 nt, Artificial Sequence
  Description of Artificial Sequence: Synthetic oligonucleotide
  Sense strand starting at position 1827 of SEQ ID NO: 1887029
ugcucaguaucugcaacua

SEQ ID NO: 2443345 - RNA, 19 nt, Artificial Sequence
  Description of Artificial Sequence: Synthetic oligonucleotide
  Antisense strand to SEQ ID NO: 2443344
uaguugcagauacugagca

SEQ ID NO: 2443346 - RNA, 19 nt, Artificial Sequence
  Description of Artificial Sequence: Synthetic oligonucleotide
  Sense strand starting at position 1888 of SEQ ID NO: 1887029
ggcguuuauggcuucucau

SEQ ID NO: 2443347 - RNA, 19 nt, Artificial Sequence
  Description of Artificial Sequence: Synthetic oligonucleotide
  Antisense strand to SEQ ID NO: 2443346
augagaagccauaaacgcc

SEQ ID NO: 2443348 - RNA, 19 nt, Artificial Sequence
  Description of Artificial Sequence: Synthetic oligonucleotide
  Sense strand starting at position 1889 of SEQ ID NO: 1887029
gcguuuauggcuucucaua

SEQ ID NO: 2443349 - RNA, 19 nt, Artificial Sequence
  Description of Artificial Sequence: Synthetic oligonucleotide
  Antisense strand to SEQ ID NO: 2443348
uaugagaagccauaaacgc

SEQ ID NO: 2443350 - RNA, 19 nt, Artificial Sequence
  Description of Artificial Sequence: Synthetic oligonucleotide
  Sense strand starting at position 1891 of SEQ ID NO: 1887029
guuuauggcuucucauaag

SEQ ID NO: 2443351 - RNA, 19 nt, Artificial Sequence
  Description of Artificial Sequence: Synthetic oligonucleotide
  Antisense strand to SEQ ID NO: 2443350
cuuaugagaagccauaaac

SEQ ID NO: 2443352 - RNA, 19 nt, Artificial Sequence
  Description of Artificial Sequence: Synthetic oligonucleotide
  Sense strand starting at position 1961 of SEQ ID NO: 1887029
ggcugaucuucuucucuuu

SEQ ID NO: 2443353 - RNA, 19 nt, Artificial Sequence
  Description of Artificial Sequence: Synthetic oligonucleotide
  Antisense strand to SEQ ID NO: 2443352
aaagagaagaagaucagcc

SEQ ID NO: 2443354 - RNA, 19 nt, Artificial Sequence
  Description of Artificial Sequence: Synthetic oligonucleotide
  Sense strand starting at position 2185 of SEQ ID NO: 1887029
caggcaauuuguuggaauc

SEQ ID NO: 2443355 - RNA, 19 nt, Artificial Sequence
  Description of Artificial Sequence: Synthetic oligonucleotide
  Antisense strand to SEQ ID NO: 2443354
gauuccaacaaauugccug

SEQ ID NO: 2443356 - RNA, 19 nt, Artificial Sequence
  Description of Artificial Sequence: Synthetic oligonucleotide
  Sense strand starting at position 2296 of SEQ ID NO: 1887029
cgugcaaagccauaagucu

SEQ ID NO: 2443357 - RNA, 19 nt, Artificial Sequence
  Description of Artificial Sequence: Synthetic oligonucleotide
  Antisense strand to SEQ ID NO: 2443356
agacuuauggcuuugcacg

SEQ ID NO: 2443358 - RNA, 19 nt, Artificial Sequence
  Description of Artificial Sequence: Synthetic oligonucleotide
  Sense strand starting at position 2311 of SEQ ID NO: 1887029
gucuucaucguguuugugu

SEQ ID NO: 2443359 - RNA, 19 nt, Artificial Sequence
  Description of Artificial Sequence: Synthetic oligonucleotide
  Antisense strand to SEQ ID NO: 2443358
acacaaacacgaugaagac

SEQ ID NO: 2443360 - RNA, 19 nt, Artificial Sequence
  Description of Artificial Sequence: Synthetic oligonucleotide
  Sense strand starting at position 2413 of SEQ ID NO: 1887029
aggcuuugucucugggaau

SEQ ID NO: 2443361 - RNA, 19 nt, Artificial Sequence
  Description of Artificial Sequence: Synthetic oligonucleotide
  Antisense strand to SEQ ID NO: 2443360
auucccagagacaaagccu

SEQ ID NO: 2443362 - RNA, 19 nt, Artificial Sequence
  Description of Artificial Sequence: Synthetic oligonucleotide
  Sense strand starting at position 2426 of SEQ ID NO: 1887029
gggaaucucuugcaaggaa

SEQ ID NO: 2443363 - RNA, 19 nt, Artificial Sequence
  Description of Artificial Sequence: Synthetic oligonucleotide
  Antisense strand to SEQ ID NO: 2443362
uuccuugcaagagauuccc

SEQ ID NO: 2443364 - RNA, 19 nt, Artificial Sequence
  Description of Artificial Sequence: Synthetic oligonucleotide
  Sense strand starting at position 2482 of SEQ ID NO: 1887029
gauugagucuuacugggaa

SEQ ID NO: 2443365 - RNA, 19 nt, Artificial Sequence
  Description of Artificial Sequence: Synthetic oligonucleotide
  Antisense strand to SEQ ID NO: 2443364
uucccaguaagacucaauc

SEQ ID NO: 2443366 - RNA, 19 nt, Artificial Sequence
  Description of Artificial Sequence: Synthetic oligonucleotide
  Sense strand starting at position 2484 of SEQ ID NO: 1887029
uugagucuuacugggaauc

SEQ ID NO: 2443367 - RNA, 19 nt, Artificial Sequence
  Description of Artificial Sequence: Synthetic oligonucleotide
  Antisense strand to SEQ ID NO: 2443366
gauucccaguaagacucaa

SEQ ID NO: 2443368 - RNA, 19 nt, Artificial Sequence
  Description of Artificial Sequence: Synthetic oligonucleotide
  Sense strand starting at position 2485 of SEQ ID NO: 1887029
ugagucuuacugggaauca

SEQ ID NO: 2443369 - RNA, 19 nt, Artificial Sequence
  Description of Artificial Sequence: Synthetic oligonucleotide
  Antisense strand to SEQ ID NO: 2443368
ugauucccaguaagacuca

SEQ ID NO: 2443370 - RNA, 19 nt, Artificial Sequence
  Description of Artificial Sequence: Synthetic oligonucleotide
  Sense strand starting at position 2486 of SEQ ID NO: 1887029
gagucuuacugggaaucac

SEQ ID NO: 2443371 - RNA, 19 nt, Artificial Sequence
  Description of Artificial Sequence: Synthetic oligonucleotide
  Antisense strand to SEQ ID NO: 2443370
gugauucccaguaagacuc

SEQ ID NO: 2443372 - RNA, 19 nt, Artificial Sequence
  Description of Artificial Sequence: Synthetic oligonucleotide
  Sense strand starting at position 2609 of SEQ ID NO: 1887029
gacaaaugucuaggacucu

SEQ ID NO: 2443373 - RNA, 19 nt, Artificial Sequence
  Description of Artificial Sequence: Synthetic oligonucleotide
  Antisense strand to SEQ ID NO: 2443372
agaguccuagacauuuguc

SEQ ID NO: 2443374 - RNA, 19 nt, Artificial Sequence
  Description of Artificial Sequence: Synthetic oligonucleotide
  Sense strand starting at position 2845 of SEQ ID NO: 1887029
cagguucugcccugauuau

SEQ ID NO: 2443375 - RNA, 19 nt, Artificial Sequence
  Description of Artificial Sequence: Synthetic oligonucleotide
  Antisense strand to SEQ ID NO: 2443374
auaaucagggcagaaccug

SEQ ID NO: 2443376 - RNA, 19 nt, Artificial Sequence
  Description of Artificial Sequence: Synthetic oligonucleotide
  Sense strand starting at position 2857 of SEQ ID NO: 1887029
ugauuaugccuccaauaug

SEQ ID NO: 2443377 - RNA, 19 nt, Artificial Sequence
  Description of Artificial Sequence: Synthetic oligonucleotide
  Antisense strand to SEQ ID NO: 2443376
cauauuggaggcauaauca

SEQ ID NO: 2443378 - RNA, 19 nt, Artificial Sequence
  Description of Artificial Sequence: Synthetic oligonucleotide
  Sense strand starting at position 157 of SEQ ID NO: 1887030
uguugugguuucuguauuu

SEQ ID NO: 2443379 - RNA, 19 nt, Artificial Sequence
  Description of Artificial Sequence: Synthetic oligonucleotide
  Antisense strand to SEQ ID NO: 2443378
aaauacagaaaccacaaca

SEQ ID NO: 2443380 - RNA, 19 nt, Artificial Sequence
  Description of Artificial Sequence: Synthetic oligonucleotide
  Sense strand starting at position 162 of SEQ ID NO: 1887030
ugguuucuguauuucuaca

SEQ ID NO: 2443381 - RNA, 19 nt, Artificial Sequence
  Description of Artificial Sequence: Synthetic oligonucleotide
  Antisense strand to SEQ ID NO: 2443380
uguagaaauacagaaacca

SEQ ID NO: 2443382 - RNA, 19 nt, Artificial Sequence
  Description of Artificial Sequence: Synthetic oligonucleotide
  Sense strand starting at position 193 of SEQ ID NO: 1887030
aaguaaggcugacucagaa

SEQ ID NO: 2443383 - RNA, 19 nt, Artificial Sequence
  Description of Artificial Sequence: Synthetic oligonucleotide
  Antisense strand to SEQ ID NO: 2443382
uucugagucagccuuacuu

SEQ ID NO: 2443384 - RNA, 19 nt, Artificial Sequence
  Description of Artificial Sequence: Synthetic oligonucleotide
  Sense strand starting at position 1321 of SEQ ID NO: 1887030
uccauauagggcuaugcaa

SEQ ID NO: 2443385 - RNA, 19 nt, Artificial Sequence
  Description of Artificial Sequence: Synthetic oligonucleotide
  Antisense strand to SEQ ID NO: 2443384
uugcauagcccuauaugga

SEQ ID NO: 2443386 - RNA, 19 nt, Artificial Sequence
  Description of Artificial Sequence: Synthetic oligonucleotide
  Sense strand starting at position 1486 of SEQ ID NO: 1887030
ugcuuuaugggucacccau

SEQ ID NO: 2443387 - RNA, 19 nt, Artificial Sequence
  Description of Artificial Sequence: Synthetic oligonucleotide
  Antisense strand to SEQ ID NO: 2443386
augggugacccauaaagca

SEQ ID NO: 2443388 - RNA, 19 nt, Artificial Sequence
  Description of Artificial Sequence: Synthetic oligonucleotide
  Sense strand starting at position 2529 of SEQ ID NO: 1887030
aguccaaagucaugauugu

SEQ ID NO: 2443389 - RNA, 19 nt, Artificial Sequence
  Description of Artificial Sequence: Synthetic oligonucleotide
  Antisense strand to SEQ ID NO: 2443388
acaaucaugacuuuggacu

SEQ ID NO: 2443390 - RNA, 19 nt, Artificial Sequence
  Description of Artificial Sequence: Synthetic oligonucleotide
  Sense strand starting at position 2812 of SEQ ID NO: 1887030
cgcuucuuucucugguuua

SEQ ID NO: 2443391 - RNA, 19 nt, Artificial Sequence
  Description of Artificial Sequence: Synthetic oligonucleotide
  Antisense strand to SEQ ID NO: 2443390
uaaaccagagaaagaagcg

SEQ ID NO: 2443392 - RNA, 19 nt, Artificial Sequence
  Description of Artificial Sequence: Synthetic oligonucleotide
  Sense strand starting at position 3286 of SEQ ID NO: 1887030
ugcuauuacuggccuggga

SEQ ID NO: 2443393 - RNA, 19 nt, Artificial Sequence
  Description of Artificial Sequence: Synthetic oligonucleotide
  Antisense strand to SEQ ID NO: 2443392
ucccaggccaguaauagca

SEQ ID NO: 2443394 - RNA, 19 nt, Artificial Sequence
  Description of Artificial Sequence: Synthetic oligonucleotide
  Sense strand starting at position 3288 of SEQ ID NO: 1887030
cuauuacuggccugggauc

SEQ ID NO: 2443395 - RNA, 19 nt, Artificial Sequence
  Description of Artificial Sequence: Synthetic oligonucleotide
  Antisense strand to SEQ ID NO: 2443394
gaucccaggccaguaauag

SEQ ID NO: 2443396 - RNA, 19 nt, Artificial Sequence
  Description of Artificial Sequence: Synthetic oligonucleotide
  Sense strand starting at position 3358 of SEQ ID NO: 1887030
gcaggaccucugugugagu

SEQ ID NO: 2443397 - RNA, 19 nt, Artificial Sequence
  Description of Artificial Sequence: Synthetic oligonucleotide
  Antisense strand to SEQ ID NO: 2443396
acucacacagagguccugc

SEQ ID NO: 2443398 - RNA, 19 nt, Artificial Sequence
  Description of Artificial Sequence: Synthetic oligonucleotide
  Sense strand starting at position 3369 of SEQ ID NO: 1887030
gugugaguggcauguucca

SEQ ID NO: 2443399 - RNA, 19 nt, Artificial Sequence
  Description of Artificial Sequence: Synthetic oligonucleotide
  Antisense strand to SEQ ID NO: 2443398
uggaacaugccacucacac

SEQ ID NO: 2443400 - RNA, 19 nt, Artificial Sequence
  Description of Artificial Sequence: Synthetic oligonucleotide
  Sense strand starting at position 3418 of SEQ ID NO: 1887030
acguuuaccugucguuuga

SEQ ID NO: 2443401 - RNA, 19 nt, Artificial Sequence
  Description of Artificial Sequence: Synthetic oligonucleotide
  Antisense strand to SEQ ID NO: 2443400
ucaaacgacagguaaacgu

SEQ ID NO: 2443402 - RNA, 19 nt, Artificial Sequence
  Description of Artificial Sequence: Synthetic oligonucleotide
  Sense strand starting at position 3576 of SEQ ID NO: 1887030
aucgguggccuaggagaau

SEQ ID NO: 2443403 - RNA, 19 nt, Artificial Sequence
  Description of Artificial Sequence: Synthetic oligonucleotide
  Antisense strand to SEQ ID NO: 2443402
auucuccuaggccaccgau

SEQ ID NO: 2443404 - RNA, 19 nt, Artificial Sequence
  Description of Artificial Sequence: Synthetic oligonucleotide
  Sense strand starting at position 3786 of SEQ ID NO: 1887030
gcagguguggcagagagau

SEQ ID NO: 2443405 - RNA, 19 nt, Artificial Sequence
  Description of Artificial Sequence: Synthetic oligonucleotide
  Antisense strand to SEQ ID NO: 2443404
aucucucugccacaccugc

SEQ ID NO: 2443406 - RNA, 19 nt, Artificial Sequence
  Description of Artificial Sequence: Synthetic oligonucleotide
  Sense strand starting at position 14 of SEQ ID NO: 1887031
uauauugugucaucuggga

SEQ ID NO: 2443407 - RNA, 19 nt, Artificial Sequence
  Description of Artificial Sequence: Synthetic oligonucleotide
  Antisense strand to SEQ ID NO: 2443406
ucccagaugacacaauaua

SEQ ID NO: 2443408 - RNA, 19 nt, Artificial Sequence
  Description of Artificial Sequence: Synthetic oligonucleotide
  Sense strand starting at position 16 of SEQ ID NO: 1887031
uauugugucaucugggaag

SEQ ID NO: 2443409 - RNA, 19 nt, Artificial Sequence
  Description of Artificial Sequence: Synthetic oligonucleotide
  Antisense strand to SEQ ID NO: 2443408
cuucccagaugacacaaua

SEQ ID NO: 2443410 - RNA, 19 nt, Artificial Sequence
  Description of Artificial Sequence: Synthetic oligonucleotide
  Sense strand starting at position 18 of SEQ ID NO: 1887031
uugugucaucugggaagau

SEQ ID NO: 2443411 - RNA, 19 nt, Artificial Sequence
  Description of Artificial Sequence: Synthetic oligonucleotide
  Antisense strand to SEQ ID NO: 2443410
aucuucccagaugacacaa

SEQ ID NO: 2443412 - RNA, 19 nt, Artificial Sequence
  Description of Artificial Sequence: Synthetic oligonucleotide
  Sense strand starting at position 36 of SEQ ID NO: 1887031
uggcaugacuuucuacuca

SEQ ID NO: 2443413 - RNA, 19 nt, Artificial Sequence
  Description of Artificial Sequence: Synthetic oligonucleotide
  Antisense strand to SEQ ID NO: 2443412
ugaguagaaagucaugcca

SEQ ID NO: 2443414 - RNA, 19 nt, Artificial Sequence
  Description of Artificial Sequence: Synthetic oligonucleotide
  Sense strand starting at position 60 of SEQ ID NO: 1887031
gucuucugucguuugcuca

SEQ ID NO: 2443415 - RNA, 19 nt, Artificial Sequence
  Description of Artificial Sequence: Synthetic oligonucleotide
  Antisense strand to SEQ ID NO: 2443414
ugagcaaacgacagaagac

SEQ ID NO: 2443416 - RNA, 19 nt, Artificial Sequence
  Description of Artificial Sequence: Synthetic oligonucleotide
  Sense strand starting at position 116 of SEQ ID NO: 1887031
uugucuauauauccaugua

SEQ ID NO: 2443417 - RNA, 19 nt, Artificial Sequence
  Description of Artificial Sequence: Synthetic oligonucleotide
  Antisense strand to SEQ ID NO: 2443416
uacauggauauauagacaa

SEQ ID NO: 2443418 - RNA, 19 nt, Artificial Sequence
  Description of Artificial Sequence: Synthetic oligonucleotide
  Sense strand starting at position 267 of SEQ ID NO: 1887031
gagauagaagcauguguuu

SEQ ID NO: 2443419 - RNA, 19 nt, Artificial Sequence
  Description of Artificial Sequence: Synthetic oligonucleotide
  Antisense strand to SEQ ID NO: 2443418
aaacacaugcuucuaucuc

SEQ ID NO: 2443420 - RNA, 19 nt, Artificial Sequence
  Description of Artificial Sequence: Synthetic oligonucleotide
  Sense strand starting at position 270 of SEQ ID NO: 1887031
auagaagcauguguuuaua

SEQ ID NO: 2443421 - RNA, 19 nt, Artificial Sequence
  Description of Artificial Sequence: Synthetic oligonucleotide
  Antisense strand to SEQ ID NO: 2443420
uauaaacacaugcuucuau

SEQ ID NO: 2443422 - RNA, 19 nt, Artificial Sequence
  Description of Artificial Sequence: Synthetic oligonucleotide
  Sense strand starting at position 287 of SEQ ID NO: 1887031
uaggcaugugugucuguuu

SEQ ID NO: 2443423 - RNA, 19 nt, Artificial Sequence
  Description of Artificial Sequence: Synthetic oligonucleotide
  Antisense strand to SEQ ID NO: 2443422
aaacagacacacaugccua

SEQ ID NO: 2443424 - RNA, 19 nt, Artificial Sequence
  Description of Artificial Sequence: Synthetic oligonucleotide
  Sense strand starting at position 816 of SEQ ID NO: 1887031
uggucaagauucccaaaua

SEQ ID NO: 2443425 - RNA, 19 nt, Artificial Sequence
  Description of Artificial Sequence: Synthetic oligonucleotide
  Antisense strand to SEQ ID NO: 2443424
uauuugggaaucuugacca

SEQ ID NO: 2443426 - RNA, 19 nt, Artificial Sequence
  Description of Artificial Sequence: Synthetic oligonucleotide
  Sense strand starting at position 883 of SEQ ID NO: 1887031
caggcauuccuagaaguaa

SEQ ID NO: 2443427 - RNA, 19 nt, Artificial Sequence
  Description of Artificial Sequence: Synthetic oligonucleotide
  Antisense strand to SEQ ID NO: 2443426
uuacuucuaggaaugccug

SEQ ID NO: 2443428 - RNA, 19 nt, Artificial Sequence
  Description of Artificial Sequence: Synthetic oligonucleotide
  Sense strand starting at position 1419 of SEQ ID NO: 1887031
ccuuaaugccuaugugaaa

SEQ ID NO: 2443429 - RNA, 19 nt, Artificial Sequence
  Description of Artificial Sequence: Synthetic oligonucleotide
  Antisense strand to SEQ ID NO: 2443428
uuucacauaggcauuaagg

SEQ ID NO: 2443430 - RNA, 19 nt, Artificial Sequence
  Description of Artificial Sequence: Synthetic oligonucleotide
  Sense strand starting at position 1461 of SEQ ID NO: 1887031
aaagcuucucacgggagau

SEQ ID NO: 2443431 - RNA, 19 nt, Artificial Sequence
  Description of Artificial Sequence: Synthetic oligonucleotide
  Antisense strand to SEQ ID NO: 2443430
aucucccgugagaagcuuu

SEQ ID NO: 2443432 - RNA, 19 nt, Artificial Sequence
  Description of Artificial Sequence: Synthetic oligonucleotide
  Sense strand starting at position 1539 of SEQ ID NO: 1887031
cuguuaauagauugagcau

SEQ ID NO: 2443433 - RNA, 19 nt, Artificial Sequence
  Description of Artificial Sequence: Synthetic oligonucleotide
  Antisense strand to SEQ ID NO: 2443432
augcucaaucuauuaacag

SEQ ID NO: 2443434 - RNA, 19 nt, Artificial Sequence
  Description of Artificial Sequence: Synthetic oligonucleotide
  Sense strand starting at position 1661 of SEQ ID NO: 1887031
agaugcucaaccgguaaau

SEQ ID NO: 2443435 - RNA, 19 nt, Artificial Sequence
  Description of Artificial Sequence: Synthetic oligonucleotide
  Antisense strand to SEQ ID NO: 2443434
auuuaccgguugagcaucu

SEQ ID NO: 2443436 - RNA, 19 nt, Artificial Sequence
  Description of Artificial Sequence: Synthetic oligonucleotide
  Sense strand starting at position 1663 of SEQ ID NO: 1887031
augcucaaccgguaaauau

SEQ ID NO: 2443437 - RNA, 19 nt, Artificial Sequence
  Description of Artificial Sequence: Synthetic oligonucleotide
  Antisense strand to SEQ ID NO: 2443436
auauuuaccgguugagcau

SEQ ID NO: 2443438 - RNA, 19 nt, Artificial Sequence
  Description of Artificial Sequence: Synthetic oligonucleotide
  Sense strand starting at position 1790 of SEQ ID NO: 1887031
ccuagaacucuguauuagu

SEQ ID NO: 2443439 - RNA, 19 nt, Artificial Sequence
  Description of Artificial Sequence: Synthetic oligonucleotide
  Antisense strand to SEQ ID NO: 2443438
acuaauacagaguucuagg

SEQ ID NO: 2443440 - RNA, 19 nt, Artificial Sequence
  Description of Artificial Sequence: Synthetic oligonucleotide
  Sense strand starting at position 2358 of SEQ ID NO: 1887031
gcagacucccuacaaugau

SEQ ID NO: 2443441 - RNA, 19 nt, Artificial Sequence
  Description of Artificial Sequence: Synthetic oligonucleotide
  Antisense strand to SEQ ID NO: 2443440
aucauuguagggagucugc

SEQ ID NO: 2443442 - RNA, 19 nt, Artificial Sequence
  Description of Artificial Sequence: Synthetic oligonucleotide
  Sense strand starting at position 2627 of SEQ ID NO: 1887031
ccgguaauuacuuauggac

SEQ ID NO: 2443443 - RNA, 19 nt, Artificial Sequence
  Description of Artificial Sequence: Synthetic oligonucleotide
  Antisense strand to SEQ ID NO: 2443442
guccauaaguaauuaccgg

SEQ ID NO: 2443444 - RNA, 19 nt, Artificial Sequence
  Description of Artificial Sequence: Synthetic oligonucleotide
  Sense strand starting at position 2672 of SEQ ID NO: 1887031
ggaugaaguucuuugggau

SEQ ID NO: 2443445 - RNA, 19 nt, Artificial Sequence
  Description of Artificial Sequence: Synthetic oligonucleotide
  Antisense strand to SEQ ID NO: 2443444
aucccaaagaacuucaucc

SEQ ID NO: 2443446 - RNA, 19 nt, Artificial Sequence
  Description of Artificial Sequence: Synthetic oligonucleotide
  Sense strand starting at position 2673 of SEQ ID NO: 1887031
gaugaaguucuuugggauu

SEQ ID NO: 2443447 - RNA, 19 nt, Artificial Sequence
  Description of Artificial Sequence: Synthetic oligonucleotide
  Antisense strand to SEQ ID NO: 2443446
aaucccaaagaacuucauc

SEQ ID NO: 2443448 - RNA, 19 nt, Artificial Sequence
  Description of Artificial Sequence: Synthetic oligonucleotide
  Sense strand starting at position 2933 of SEQ ID NO: 1887031
aguuguuacacgcagaaca

SEQ ID NO: 2443449 - RNA, 19 nt, Artificial Sequence
  Description of Artificial Sequence: Synthetic oligonucleotide
  Antisense strand to SEQ ID NO: 2443448
uguucugcguguaacaacu

SEQ ID NO: 2443450 - RNA, 19 nt, Artificial Sequence
  Description of Artificial Sequence: Synthetic oligonucleotide
  Sense strand starting at position 2935 of SEQ ID NO: 1887031
uuguuacacgcagaacauu

SEQ ID NO: 2443451 - RNA, 19 nt, Artificial Sequence
  Description of Artificial Sequence: Synthetic oligonucleotide
  Antisense strand to SEQ ID NO: 2443450
aauguucugcguguaacaa

SEQ ID NO: 2443452 - RNA, 19 nt, Artificial Sequence
  Description of Artificial Sequence: Synthetic oligonucleotide
  Sense strand starting at position 2999 of SEQ ID NO: 1887031
auuggauucuccucgaauu

SEQ ID NO: 2443453 - RNA, 19 nt, Artificial Sequence
  Description of Artificial Sequence: Synthetic oligonucleotide
  Antisense strand to SEQ ID NO: 2443452
aauucgaggagaauccaau

SEQ ID NO: 2443454 - RNA, 19 nt, Artificial Sequence
  Description of Artificial Sequence: Synthetic oligonucleotide
  Sense strand starting at position 3207 of SEQ ID NO: 1887031
agaacucguagccgagaaa

SEQ ID NO: 2443455 - RNA, 19 nt, Artificial Sequence
  Description of Artificial Sequence: Synthetic oligonucleotide
  Antisense strand to SEQ ID NO: 2443454
uuucucggcuacgaguucu

SEQ ID NO: 2443456 - RNA, 19 nt, Artificial Sequence
  Description of Artificial Sequence: Synthetic oligonucleotide
  Sense strand starting at position 3228 of SEQ ID NO: 1887031
ccaugauggcaauguuuau

SEQ ID NO: 2443457 - RNA, 19 nt, Artificial Sequence
  Description of Artificial Sequence: Synthetic oligonucleotide
  Antisense strand to SEQ ID NO: 2443456
auaaacauugccaucaugg

SEQ ID NO: 2443458 - RNA, 19 nt, Artificial Sequence
  Description of Artificial Sequence: Synthetic oligonucleotide
  Sense strand starting at position 3452 of SEQ ID NO: 1887031
aguaaagagggaugugguu

SEQ ID NO: 2443459 - RNA, 19 nt, Artificial Sequence
  Description of Artificial Sequence: Synthetic oligonucleotide
  Antisense strand to SEQ ID NO: 2443458
aaccacaucccucuuuacu

SEQ ID NO: 2443460 - RNA, 19 nt, Artificial Sequence
  Description of Artificial Sequence: Synthetic oligonucleotide
  Sense strand starting at position 3568 of SEQ ID NO: 1887031
gauggucuggcuugaugga

SEQ ID NO: 2443461 - RNA, 19 nt, Artificial Sequence
  Description of Artificial Sequence: Synthetic oligonucleotide
  Antisense strand to SEQ ID NO: 2443460
uccaucaagccagaccauc

SEQ ID NO: 2443462 - RNA, 19 nt, Artificial Sequence
  Description of Artificial Sequence: Synthetic oligonucleotide
  Sense strand starting at position 3615 of SEQ ID NO: 1887031
agcagaguuuagcucagga

SEQ ID NO: 2443463 - RNA, 19 nt, Artificial Sequence
  Description of Artificial Sequence: Synthetic oligonucleotide
  Antisense strand to SEQ ID NO: 2443462
uccugagcuaaacucugcu

SEQ ID NO: 2443464 - RNA, 19 nt, Artificial Sequence
  Description of Artificial Sequence: Synthetic oligonucleotide
  Sense strand starting at position 3650 of SEQ ID NO: 1887031
ucaucugauguuggucaaa

SEQ ID NO: 2443465 - RNA, 19 nt, Artificial Sequence
  Description of Artificial Sequence: Synthetic oligonucleotide
  Antisense strand to SEQ ID NO: 2443464
uuugaccaacaucagauga

SEQ ID NO: 2443466 - RNA, 19 nt, Artificial Sequence
  Description of Artificial Sequence: Synthetic oligonucleotide
  Sense strand starting at position 3670 of SEQ ID NO: 1887031
gguacaaagucucccuuaa

SEQ ID NO: 2443467 - RNA, 19 nt, Artificial Sequence
  Description of Artificial Sequence: Synthetic oligonucleotide
  Antisense strand to SEQ ID NO: 2443466
uuaagggagacuuuguacc

SEQ ID NO: 2443468 - RNA, 19 nt, Artificial Sequence
  Description of Artificial Sequence: Synthetic oligonucleotide
  Sense strand starting at position 3681 of SEQ ID NO: 1887031
ucccuuaagcaagaugagu

SEQ ID NO: 2443469 - RNA, 19 nt, Artificial Sequence
  Description of Artificial Sequence: Synthetic oligonucleotide
  Antisense strand to SEQ ID NO: 2443468
acucaucuugcuuaaggga

SEQ ID NO: 2443470 - RNA, 19 nt, Artificial Sequence
  Description of Artificial Sequence: Synthetic oligonucleotide
  Sense strand starting at position 3729 of SEQ ID NO: 1887031
ugugacgaugguuaaugau

SEQ ID NO: 2443471 - RNA, 19 nt, Artificial Sequence
  Description of Artificial Sequence: Synthetic oligonucleotide
  Antisense strand to SEQ ID NO: 2443470
aucauuaaccaucgucaca

SEQ ID NO: 2443472 - RNA, 19 nt, Artificial Sequence
  Description of Artificial Sequence: Synthetic oligonucleotide
  Sense strand starting at position 3747 of SEQ ID NO: 1887031
uacuguauuguagacuuga

SEQ ID NO: 2443473 - RNA, 19 nt, Artificial Sequence
  Description of Artificial Sequence: Synthetic oligonucleotide
  Antisense strand to SEQ ID NO: 2443472
ucaagucuacaauacagua

SEQ ID NO: 2443474 - RNA, 19 nt, Artificial Sequence
  Description of Artificial Sequence: Synthetic oligonucleotide
  Sense strand starting at position 3777 of SEQ ID NO: 1887031
aggauagaucuucagcgua

SEQ ID NO: 2443475 - RNA, 19 nt, Artificial Sequence
  Description of Artificial Sequence: Synthetic oligonucleotide
  Antisense strand to SEQ ID NO: 2443474
uacgcugaagaucuauccu

SEQ ID NO: 2443476 - RNA, 19 nt, Artificial Sequence
  Description of Artificial Sequence: Synthetic oligonucleotide
  Sense strand starting at position 3843 of SEQ ID NO: 1887031
guuaauuagccugagugua

SEQ ID NO: 2443477 - RNA, 19 nt, Artificial Sequence
  Description of Artificial Sequence: Synthetic oligonucleotide
  Antisense strand to SEQ ID NO: 2443476
uacacucaggcuaauuaac

SEQ ID NO: 2443478 - RNA, 19 nt, Artificial Sequence
  Description of Artificial Sequence: Synthetic oligonucleotide
  Sense strand starting at position 3848 of SEQ ID NO: 1887031
uuagccugaguguaguaau

SEQ ID NO: 2443479 - RNA, 19 nt, Artificial Sequence
  Description of Artificial Sequence: Synthetic oligonucleotide
  Antisense strand to SEQ ID NO: 2443478
auuacuacacucaggcuaa

SEQ ID NO: 2443480 - RNA, 19 nt, Artificial Sequence
  Description of Artificial Sequence: Synthetic oligonucleotide
  Sense strand starting at position 3871 of SEQ ID NO: 1887031
ucacaaugugugcauauga

SEQ ID NO: 2443481 - RNA, 19 nt, Artificial Sequence
  Description of Artificial Sequence: Synthetic oligonucleotide
  Antisense strand to SEQ ID NO: 2443480
ucauaugcacacauuguga

SEQ ID NO: 2443482 - RNA, 19 nt, Artificial Sequence
  Description of Artificial Sequence: Synthetic oligonucleotide
  Sense strand starting at position 3929 of SEQ ID NO: 1887031
uuaguuagaccucaguaac

SEQ ID NO: 2443483 - RNA, 19 nt, Artificial Sequence
  Description of Artificial Sequence: Synthetic oligonucleotide
  Antisense strand to SEQ ID NO: 2443482
guuacugaggucuaacuaa

SEQ ID NO: 2443484 - RNA, 19 nt, Artificial Sequence
  Description of Artificial Sequence: Synthetic oligonucleotide
  Sense strand starting at position 3932 of SEQ ID NO: 1887031
guuagaccucaguaacaca

SEQ ID NO: 2443485 - RNA, 19 nt, Artificial Sequence
  Description of Artificial Sequence: Synthetic oligonucleotide
  Antisense strand to SEQ ID NO: 2443484
uguguuacugaggucuaac

SEQ ID NO: 2443486 - RNA, 19 nt, Artificial Sequence
  Description of Artificial Sequence: Synthetic oligonucleotide
  Sense strand starting at position 129 of SEQ ID NO: 1887032
acucuccauguguaagauu

SEQ ID NO: 2443487 - RNA, 19 nt, Artificial Sequence
  Description of Artificial Sequence: Synthetic oligonucleotide
  Antisense strand to SEQ ID NO: 2443486
aaucuuacacauggagagu

SEQ ID NO: 2443488 - RNA, 19 nt, Artificial Sequence
  Description of Artificial Sequence: Synthetic oligonucleotide
  Sense strand starting at position 795 of SEQ ID NO: 1887032
aagaucagggcuugaggua

SEQ ID NO: 2443489 - RNA, 19 nt, Artificial Sequence
  Description of Artificial Sequence: Synthetic oligonucleotide
  Antisense strand to SEQ ID NO: 2443488
uaccucaagcccugaucuu

SEQ ID NO: 2443490 - RNA, 19 nt, Artificial Sequence
  Description of Artificial Sequence: Synthetic oligonucleotide
  Sense strand starting at position 796 of SEQ ID NO: 1887032
agaucagggcuugagguau

SEQ ID NO: 2443491 - RNA, 19 nt, Artificial Sequence
  Description of Artificial Sequence: Synthetic oligonucleotide
  Antisense strand to SEQ ID NO: 2443490
auaccucaagcccugaucu

SEQ ID NO: 2443492 - RNA, 19 nt, Artificial Sequence
  Description of Artificial Sequence: Synthetic oligonucleotide
  Sense strand starting at position 821 of SEQ ID NO: 1887032
gacccugcuccugauggau

SEQ ID NO: 2443493 - RNA, 19 nt, Artificial Sequence
  Description of Artificial Sequence: Synthetic oligonucleotide
  Antisense strand to SEQ ID NO: 2443492
auccaucaggagcaggguc

SEQ ID NO: 2443494 - RNA, 19 nt, Artificial Sequence
  Description of Artificial Sequence: Synthetic oligonucleotide
  Sense strand starting at position 1109 of SEQ ID NO: 1887032
aauaaaucggucugucuag

SEQ ID NO: 2443495 - RNA, 19 nt, Artificial Sequence
  Description of Artificial Sequence: Synthetic oligonucleotide
  Antisense strand to SEQ ID NO: 2443494
cuagacagaccgauuuauu

SEQ ID NO: 2443496 - RNA, 19 nt, Artificial Sequence
  Description of Artificial Sequence: Synthetic oligonucleotide
  Sense strand starting at position 1210 of SEQ ID NO: 1887032
uagauuuguuauuggaaag

SEQ ID NO: 2443497 - RNA, 19 nt, Artificial Sequence
  Description of Artificial Sequence: Synthetic oligonucleotide
  Antisense strand to SEQ ID NO: 2443496
cuuuccaauaacaaaucua

SEQ ID NO: 2443498 - RNA, 19 nt, Artificial Sequence
  Description of Artificial Sequence: Synthetic oligonucleotide
  Sense strand starting at position 1431 of SEQ ID NO: 1887032
uggauuacucaugagcuuu

SEQ ID NO: 2443499 - RNA, 19 nt, Artificial Sequence
  Description of Artificial Sequence: Synthetic oligonucleotide
  Antisense strand to SEQ ID NO: 2443498
aaagcucaugaguaaucca

SEQ ID NO: 2443500 - RNA, 19 nt, Artificial Sequence
  Description of Artificial Sequence: Synthetic oligonucleotide
  Sense strand starting at position 1727 of SEQ ID NO: 1887032
ucuguccugugacuaagaa

SEQ ID NO: 2443501 - RNA, 19 nt, Artificial Sequence
  Description of Artificial Sequence: Synthetic oligonucleotide
  Antisense strand to SEQ ID NO: 2443500
uucuuagucacaggacaga

SEQ ID NO: 2443502 - RNA, 19 nt, Artificial Sequence
  Description of Artificial Sequence: Synthetic oligonucleotide
  Sense strand starting at position 1728 of SEQ ID NO: 1887032
cuguccugugacuaagaau

SEQ ID NO: 2443503 - RNA, 19 nt, Artificial Sequence
  Description of Artificial Sequence: Synthetic oligonucleotide
  Antisense strand to SEQ ID NO: 2443502
auucuuagucacaggacag

SEQ ID NO: 2443504 - RNA, 19 nt, Artificial Sequence
  Description of Artificial Sequence: Synthetic oligonucleotide
  Sense strand starting at position 1822 of SEQ ID NO: 1887032
uucgaaugccucugaaaca

SEQ ID NO: 2443505 - RNA, 19 nt, Artificial Sequence
  Description of Artificial Sequence: Synthetic oligonucleotide
  Antisense strand to SEQ ID NO: 2443504
uguuucagaggcauucgaa

SEQ ID NO: 2443506 - RNA, 19 nt, Artificial Sequence
  Description of Artificial Sequence: Synthetic oligonucleotide
  Sense strand starting at position 2092 of SEQ ID NO: 1887032
ccaggacguuucuuuaauu

SEQ ID NO: 2443507 - RNA, 19 nt, Artificial Sequence
  Description of Artificial Sequence: Synthetic oligonucleotide
  Antisense strand to SEQ ID NO: 2443506
aauuaaagaaacguccugg

SEQ ID NO: 2443508 - RNA, 19 nt, Artificial Sequence
  Description of Artificial Sequence: Synthetic oligonucleotide
  Sense strand starting at position 2312 of SEQ ID NO: 1887032
cuaaguguuguagagcgau

SEQ ID NO: 2443509 - RNA, 19 nt, Artificial Sequence
  Description of Artificial Sequence: Synthetic oligonucleotide
  Antisense strand to SEQ ID NO: 2443508
aucgcucuacaacacuuag

SEQ ID NO: 2443510 - RNA, 19 nt, Artificial Sequence
  Description of Artificial Sequence: Synthetic oligonucleotide
  Sense strand starting at position 2318 of SEQ ID NO: 1887032
guuguagagcgaugaggau

SEQ ID NO: 2443511 - RNA, 19 nt, Artificial Sequence
  Description of Artificial Sequence: Synthetic oligonucleotide
  Antisense strand to SEQ ID NO: 2443510
auccucaucgcucuacaac

SEQ ID NO: 2443512 - RNA, 19 nt, Artificial Sequence
  Description of Artificial Sequence: Synthetic oligonucleotide
  Sense strand starting at position 2331 of SEQ ID NO: 1887032
gaggauccaucaucuguaa

SEQ ID NO: 2443513 - RNA, 19 nt, Artificial Sequence
  Description of Artificial Sequence: Synthetic oligonucleotide
  Antisense strand to SEQ ID NO: 2443512
uuacagaugauggauccuc

SEQ ID NO: 2443514 - RNA, 19 nt, Artificial Sequence
  Description of Artificial Sequence: Synthetic oligonucleotide
  Sense strand starting at position 2346 of SEQ ID NO: 1887032
guaauuucuuuaggagaaa

SEQ ID NO: 2443515 - RNA, 19 nt, Artificial Sequence
  Description of Artificial Sequence: Synthetic oligonucleotide
  Antisense strand to SEQ ID NO: 2443514
uuucuccuaaagaaauuac

SEQ ID NO: 2443516 - RNA, 19 nt, Artificial Sequence
  Description of Artificial Sequence: Synthetic oligonucleotide
  Sense strand starting at position 2389 of SEQ ID NO: 1887032
acuauuaguuucucuagua

SEQ ID NO: 2443517 - RNA, 19 nt, Artificial Sequence
  Description of Artificial Sequence: Synthetic oligonucleotide
  Antisense strand to SEQ ID NO: 2443516
uacuagagaaacuaauagu

SEQ ID NO: 2443518 - RNA, 19 nt, Artificial Sequence
  Description of Artificial Sequence: Synthetic oligonucleotide
  Sense strand starting at position 2390 of SEQ ID NO: 1887032
cuauuaguuucucuaguau

SEQ ID NO: 2443519 - RNA, 19 nt, Artificial Sequence
  Description of Artificial Sequence: Synthetic oligonucleotide
  Antisense strand to SEQ ID NO: 2443518
auacuagagaaacuaauag

SEQ ID NO: 2443520 - RNA, 19 nt, Artificial Sequence
  Description of Artificial Sequence: Synthetic oligonucleotide
  Sense strand starting at position 2401 of SEQ ID NO: 1887032
ucuaguauucaggguagag

SEQ ID NO: 2443521 - RNA, 19 nt, Artificial Sequence
  Description of Artificial Sequence: Synthetic oligonucleotide
  Antisense strand to SEQ ID NO: 2443520
cucuacccugaauacuaga

SEQ ID NO: 2443522 - RNA, 19 nt, Artificial Sequence
  Description of Artificial Sequence: Synthetic oligonucleotide
  Sense strand starting at position 2429 of SEQ ID NO: 1887032
aucagagagcauugguaug

SEQ ID NO: 2443523 - RNA, 19 nt, Artificial Sequence
  Description of Artificial Sequence: Synthetic oligonucleotide
  Antisense strand to SEQ ID NO: 2443522
cauaccaaugcucucugau

SEQ ID NO: 2443524 - RNA, 19 nt, Artificial Sequence
  Description of Artificial Sequence: Synthetic oligonucleotide
  Sense strand starting at position 2434 of SEQ ID NO: 1887032
agagcauugguauggucaa

SEQ ID NO: 2443525 - RNA, 19 nt, Artificial Sequence
  Description of Artificial Sequence: Synthetic oligonucleotide
  Antisense strand to SEQ ID NO: 2443524
uugaccauaccaaugcucu

SEQ ID NO: 2443526 - RNA, 19 nt, Artificial Sequence
  Description of Artificial Sequence: Synthetic oligonucleotide
  Sense strand starting at position 2441 of SEQ ID NO: 1887032
ugguauggucaaggccaau

SEQ ID NO: 2443527 - RNA, 19 nt, Artificial Sequence
  Description of Artificial Sequence: Synthetic oligonucleotide
  Antisense strand to SEQ ID NO: 2443526
auuggccuugaccauacca

SEQ ID NO: 2443528 - RNA, 19 nt, Artificial Sequence
  Description of Artificial Sequence: Synthetic oligonucleotide
  Sense strand starting at position 2482 of SEQ ID NO: 1887032
aggugauauuuagaagauu

SEQ ID NO: 2443529 - RNA, 19 nt, Artificial Sequence
  Description of Artificial Sequence: Synthetic oligonucleotide
  Antisense strand to SEQ ID NO: 2443528
aaucuucuaaauaucaccu

SEQ ID NO: 2443530 - RNA, 19 nt, Artificial Sequence
  Description of Artificial Sequence: Synthetic oligonucleotide
  Sense strand starting at position 2542 of SEQ ID NO: 1887032
uaaggaggcuuuccaugaa

SEQ ID NO: 2443531 - RNA, 19 nt, Artificial Sequence
  Description of Artificial Sequence: Synthetic oligonucleotide
  Antisense strand to SEQ ID NO: 2443530
uucauggaaagccuccuua

SEQ ID NO: 2443532 - RNA, 19 nt, Artificial Sequence
  Description of Artificial Sequence: Synthetic oligonucleotide
  Sense strand starting at position 2545 of SEQ ID NO: 1887032
ggaggcuuuccaugaacua

SEQ ID NO: 2443533 - RNA, 19 nt, Artificial Sequence
  Description of Artificial Sequence: Synthetic oligonucleotide
  Antisense strand to SEQ ID NO: 2443532
uaguucauggaaagccucc

SEQ ID NO: 2443534 - RNA, 19 nt, Artificial Sequence
  Description of Artificial Sequence: Synthetic oligonucleotide
  Sense strand starting at position 2607 of SEQ ID NO: 1887032
ccaucugucccagaauuag

SEQ ID NO: 2443535 - RNA, 19 nt, Artificial Sequence
  Description of Artificial Sequence: Synthetic oligonucleotide
  Antisense strand to SEQ ID NO: 2443534
cuaauucugggacagaugg

SEQ ID NO: 2443536 - RNA, 19 nt, Artificial Sequence
  Description of Artificial Sequence: Synthetic oligonucleotide
  Sense strand starting at position 2984 of SEQ ID NO: 1887032
ccagaaaucacugguuggu

SEQ ID NO: 2443537 - RNA, 19 nt, Artificial Sequence
  Description of Artificial Sequence: Synthetic oligonucleotide
  Antisense strand to SEQ ID NO: 2443536
accaaccagugauuucugg

SEQ ID NO: 2443538 - RNA, 19 nt, Artificial Sequence
  Description of Artificial Sequence: Synthetic oligonucleotide
  Sense strand starting at position 3012 of SEQ ID NO: 1887032
uaagcagggucaguuuaaa

SEQ ID NO: 2443539 - RNA, 19 nt, Artificial Sequence
  Description of Artificial Sequence: Synthetic oligonucleotide
  Antisense strand to SEQ ID NO: 2443538
uuuaaacugacccugcuua

SEQ ID NO: 2443540 - RNA, 19 nt, Artificial Sequence
  Description of Artificial Sequence: Synthetic oligonucleotide
  Sense strand starting at position 3096 of SEQ ID NO: 1887032
uuugcucaaugcuuauaga

SEQ ID NO: 2443541 - RNA, 19 nt, Artificial Sequence
  Description of Artificial Sequence: Synthetic oligonucleotide
  Antisense strand to SEQ ID NO: 2443540
ucuauaagcauugagcaaa

SEQ ID NO: 2443542 - RNA, 19 nt, Artificial Sequence
  Description of Artificial Sequence: Synthetic oligonucleotide
  Sense strand starting at position 3169 of SEQ ID NO: 1887032
uuugcaaaguuaucagaaa

SEQ ID NO: 2443543 - RNA, 19 nt, Artificial Sequence
  Description of Artificial Sequence: Synthetic oligonucleotide
  Antisense strand to SEQ ID NO: 2443542
uuucugauaacuuugcaaa

SEQ ID NO: 2443544 - RNA, 19 nt, Artificial Sequence
  Description of Artificial Sequence: Synthetic oligonucleotide
  Sense strand starting at position 3214 of SEQ ID NO: 1887032
uucuauagcugauuauaag

SEQ ID NO: 2443545 - RNA, 19 nt, Artificial Sequence
  Description of Artificial Sequence: Synthetic oligonucleotide
  Antisense strand to SEQ ID NO: 2443544
cuuauaaucagcuauagaa

SEQ ID NO: 2443546 - RNA, 19 nt, Artificial Sequence
  Description of Artificial Sequence: Synthetic oligonucleotide
  Sense strand starting at position 3256 of SEQ ID NO: 1887032
caagacaauugucuguaga

SEQ ID NO: 2443547 - RNA, 19 nt, Artificial Sequence
  Description of Artificial Sequence: Synthetic oligonucleotide
  Antisense strand to SEQ ID NO: 2443546
ucuacagacaauugucuug

SEQ ID NO: 2443548 - RNA, 19 nt, Artificial Sequence
  Description of Artificial Sequence: Synthetic oligonucleotide
  Sense strand starting at position 3257 of SEQ ID NO: 1887032
aagacaauugucuguagau

SEQ ID NO: 2443549 - RNA, 19 nt, Artificial Sequence
  Description of Artificial Sequence: Synthetic oligonucleotide
  Antisense strand to SEQ ID NO: 2443548
aucuacagacaauugucuu

SEQ ID NO: 2443550 - RNA, 19 nt, Artificial Sequence
  Description of Artificial Sequence: Synthetic oligonucleotide
  Sense strand starting at position 3258 of SEQ ID NO: 1887032
agacaauugucuguagaug

SEQ ID NO: 2443551 - RNA, 19 nt, Artificial Sequence
  Description of Artificial Sequence: Synthetic oligonucleotide
  Antisense strand to SEQ ID NO: 2443550
caucuacagacaauugucu

SEQ ID NO: 2443552 - RNA, 19 nt, Artificial Sequence
  Description of Artificial Sequence: Synthetic oligonucleotide
  Sense strand starting at position 3437 of SEQ ID NO: 1887032
aaguaaauuccuugugggu

SEQ ID NO: 2443553 - RNA, 19 nt, Artificial Sequence
  Description of Artificial Sequence: Synthetic oligonucleotide
  Antisense strand to SEQ ID NO: 2443552
acccacaaggaauuuacuu

SEQ ID NO: 2443554 - RNA, 19 nt, Artificial Sequence
  Description of Artificial Sequence: Synthetic oligonucleotide
  Sense strand starting at position 3471 of SEQ ID NO: 1887032
uuagaacauucuguugaau

SEQ ID NO: 2443555 - RNA, 19 nt, Artificial Sequence
  Description of Artificial Sequence: Synthetic oligonucleotide
  Antisense strand to SEQ ID NO: 2443554
auucaacagaauguucuaa

SEQ ID NO: 2443556 - RNA, 19 nt, Artificial Sequence
  Description of Artificial Sequence: Synthetic oligonucleotide
  Sense strand starting at position 3603 of SEQ ID NO: 1887032
ugcccuacuguuuacauua

SEQ ID NO: 2443557 - RNA, 19 nt, Artificial Sequence
  Description of Artificial Sequence: Synthetic oligonucleotide
  Antisense strand to SEQ ID NO: 2443556
uaauguaaacaguagggca

SEQ ID NO: 2443558 - RNA, 19 nt, Artificial Sequence
  Description of Artificial Sequence: Synthetic oligonucleotide
  Sense strand starting at position 3690 of SEQ ID NO: 1887032
uuauguaaacuguguauuc

SEQ ID NO: 2443559 - RNA, 19 nt, Artificial Sequence
  Description of Artificial Sequence: Synthetic oligonucleotide
  Antisense strand to SEQ ID NO: 2443558
gaauacacaguuuacauaa

SEQ ID NO: 2443560 - RNA, 19 nt, Artificial Sequence
  Description of Artificial Sequence: Synthetic oligonucleotide
  Sense strand starting at position 3708 of SEQ ID NO: 1887032
cagugaaaggcugagcaaa

SEQ ID NO: 2443561 - RNA, 19 nt, Artificial Sequence
  Description of Artificial Sequence: Synthetic oligonucleotide
  Antisense strand to SEQ ID NO: 2443560
uuugcucagccuuucacug

SEQ ID NO: 2443562 - RNA, 19 nt, Artificial Sequence
  Description of Artificial Sequence: Synthetic oligonucleotide
  Sense strand starting at position 3721 of SEQ ID NO: 1887032
agcaaagacucagaaagau

SEQ ID NO: 2443563 - RNA, 19 nt, Artificial Sequence
  Description of Artificial Sequence: Synthetic oligonucleotide
  Antisense strand to SEQ ID NO: 2443562
aucuuucugagucuuugcu

SEQ ID NO: 2443564 - RNA, 19 nt, Artificial Sequence
  Description of Artificial Sequence: Synthetic oligonucleotide
  Sense strand starting at position 3972 of SEQ ID NO: 1887032
cacaauugacuaggaguuu

SEQ ID NO: 2443565 - RNA, 19 nt, Artificial Sequence
  Description of Artificial Sequence: Synthetic oligonucleotide
  Antisense strand to SEQ ID NO: 2443564
aaacuccuagucaauugug

SEQ ID NO: 2443566 - RNA, 19 nt, Artificial Sequence
  Description of Artificial Sequence: Synthetic oligonucleotide
  Sense strand starting at position 94 of SEQ ID NO: 1887033
gcagaugcgggauguauuu

SEQ ID NO: 2443567 - RNA, 19 nt, Artificial Sequence
  Description of Artificial Sequence: Synthetic oligonucleotide
  Antisense strand to SEQ ID NO: 2443566
aaauacaucccgcaucugc

SEQ ID NO: 2443568 - RNA, 19 nt, Artificial Sequence
  Description of Artificial Sequence: Synthetic oligonucleotide
  Sense strand starting at position 156 of SEQ ID NO: 1887033
gagauaaggcuuuaagcuu

SEQ ID NO: 2443569 - RNA, 19 nt, Artificial Sequence
  Description of Artificial Sequence: Synthetic oligonucleotide
  Antisense strand to SEQ ID NO: 2443568
aagcuuaaagccuuaucuc

SEQ ID NO: 2443570 - RNA, 19 nt, Artificial Sequence
  Description of Artificial Sequence: Synthetic oligonucleotide
  Sense strand starting at position 167 of SEQ ID NO: 1887033
uuaagcuugaucgauggau

SEQ ID NO: 2443571 - RNA, 19 nt, Artificial Sequence
  Description of Artificial Sequence: Synthetic oligonucleotide
  Antisense strand to SEQ ID NO: 2443570
auccaucgaucaagcuuaa

SEQ ID NO: 2443572 - RNA, 19 nt, Artificial Sequence
  Description of Artificial Sequence: Synthetic oligonucleotide
  Sense strand starting at position 179 of SEQ ID NO: 1887033
gauggauucugauugaagu

SEQ ID NO: 2443573 - RNA, 19 nt, Artificial Sequence
  Description of Artificial Sequence: Synthetic oligonucleotide
  Antisense strand to SEQ ID NO: 2443572
acuucaaucagaauccauc

SEQ ID NO: 2443574 - RNA, 19 nt, Artificial Sequence
  Description of Artificial Sequence: Synthetic oligonucleotide
  Sense strand starting at position 180 of SEQ ID NO: 1887033
auggauucugauugaaguu

SEQ ID NO: 2443575 - RNA, 19 nt, Artificial Sequence
  Description of Artificial Sequence: Synthetic oligonucleotide
  Antisense strand to SEQ ID NO: 2443574
aacuucaaucagaauccau

SEQ ID NO: 2443576 - RNA, 19 nt, Artificial Sequence
  Description of Artificial Sequence: Synthetic oligonucleotide
  Sense strand starting at position 269 of SEQ ID NO: 1887033
uuuguauaaucggugauuu

SEQ ID NO: 2443577 - RNA, 19 nt, Artificial Sequence
  Description of Artificial Sequence: Synthetic oligonucleotide
  Antisense strand to SEQ ID NO: 2443576
aaaucaccgauuauacaaa

SEQ ID NO: 2443578 - RNA, 19 nt, Artificial Sequence
  Description of Artificial Sequence: Synthetic oligonucleotide
  Sense strand starting at position 1146 of SEQ ID NO: 1887033
guagacauugcuuacuauu

SEQ ID NO: 2443579 - RNA, 19 nt, Artificial Sequence
  Description of Artificial Sequence: Synthetic oligonucleotide
  Antisense strand to SEQ ID NO: 2443578
aauaguaagcaaugucuac

SEQ ID NO: 2443580 - RNA, 19 nt, Artificial Sequence
  Description of Artificial Sequence: Synthetic oligonucleotide
  Sense strand starting at position 1168 of SEQ ID NO: 1887033
ggcugcuggacccauaaua

SEQ ID NO: 2443581 - RNA, 19 nt, Artificial Sequence
  Description of Artificial Sequence: Synthetic oligonucleotide
  Antisense strand to SEQ ID NO: 2443580
uauuauggguccagcagcc

SEQ ID NO: 2443582 - RNA, 19 nt, Artificial Sequence
  Description of Artificial Sequence: Synthetic oligonucleotide
  Sense strand starting at position 1253 of SEQ ID NO: 1887033
aggauauauguaugagcug

SEQ ID NO: 2443583 - RNA, 19 nt, Artificial Sequence
  Description of Artificial Sequence: Synthetic oligonucleotide
  Antisense strand to SEQ ID NO: 2443582
cagcucauacauauauccu

SEQ ID NO: 2443584 - RNA, 19 nt, Artificial Sequence
  Description of Artificial Sequence: Synthetic oligonucleotide
  Sense strand starting at position 1306 of SEQ ID NO: 1887033
cacucuggauuccuugaga

SEQ ID NO: 2443585 - RNA, 19 nt, Artificial Sequence
  Description of Artificial Sequence: Synthetic oligonucleotide
  Antisense strand to SEQ ID NO: 2443584
ucucaaggaauccagagug

SEQ ID NO: 2443586 - RNA, 19 nt, Artificial Sequence
  Description of Artificial Sequence: Synthetic oligonucleotide
  Sense strand starting at position 1435 of SEQ ID NO: 1887033
uccuguuagccucagaaag

SEQ ID NO: 2443587 - RNA, 19 nt, Artificial Sequence
  Description of Artificial Sequence: Synthetic oligonucleotide
  Antisense strand to SEQ ID NO: 2443586
cuuucugaggcuaacagga

SEQ ID NO: 2443588 - RNA, 19 nt, Artificial Sequence
  Description of Artificial Sequence: Synthetic oligonucleotide
  Sense strand starting at position 1578 of SEQ ID NO: 1887033
uaguaacuagacuggugaa

SEQ ID NO: 2443589 - RNA, 19 nt, Artificial Sequence
  Description of Artificial Sequence: Synthetic oligonucleotide
  Antisense strand to SEQ ID NO: 2443588
uucaccagucuaguuacua

SEQ ID NO: 2443590 - RNA, 19 nt, Artificial Sequence
  Description of Artificial Sequence: Synthetic oligonucleotide
  Sense strand starting at position 1579 of SEQ ID NO: 1887033
aguaacuagacuggugaaa

SEQ ID NO: 2443591 - RNA, 19 nt, Artificial Sequence
  Description of Artificial Sequence: Synthetic oligonucleotide
  Antisense strand to SEQ ID NO: 2443590
uuucaccagucuaguuacu

SEQ ID NO: 2443592 - RNA, 19 nt, Artificial Sequence
  Description of Artificial Sequence: Synthetic oligonucleotide
  Sense strand starting at position 1832 of SEQ ID NO: 1887033
ggcaaagcugaaggaaauu

SEQ ID NO: 2443593 - RNA, 19 nt, Artificial Sequence
  Description of Artificial Sequence: Synthetic oligonucleotide
  Antisense strand to SEQ ID NO: 2443592
aauuuccuucagcuuugcc

SEQ ID NO: 2443594 - RNA, 19 nt, Artificial Sequence
  Description of Artificial Sequence: Synthetic oligonucleotide
  Sense strand starting at position 1841 of SEQ ID NO: 1887033
gaaggaaauuugggauaug

SEQ ID NO: 2443595 - RNA, 19 nt, Artificial Sequence
  Description of Artificial Sequence: Synthetic oligonucleotide
  Antisense strand to SEQ ID NO: 2443594
cauaucccaaauuuccuuc

SEQ ID NO: 2443596 - RNA, 19 nt, Artificial Sequence
  Description of Artificial Sequence: Synthetic oligonucleotide
  Sense strand starting at position 1842 of SEQ ID NO: 1887033
aaggaaauuugggauaugu

SEQ ID NO: 2443597 - RNA, 19 nt, Artificial Sequence
  Description of Artificial Sequence: Synthetic oligonucleotide
  Antisense strand to SEQ ID NO: 2443596
acauaucccaaauuuccuu

SEQ ID NO: 2443598 - RNA, 19 nt, Artificial Sequence
  Description of Artificial Sequence: Synthetic oligonucleotide
  Sense strand starting at position 1860 of SEQ ID NO: 1887033
ugcuaauucccaggaagac

SEQ ID NO: 2443599 - RNA, 19 nt, Artificial Sequence
  Description of Artificial Sequence: Synthetic oligonucleotide
  Antisense strand to SEQ ID NO: 2443598
gucuuccugggaauuagca

SEQ ID NO: 2443600 - RNA, 19 nt, Artificial Sequence
  Description of Artificial Sequence: Synthetic oligonucleotide
  Sense strand starting at position 1911 of SEQ ID NO: 1887033
ggugaauuauucucgaaag

SEQ ID NO: 2443601 - RNA, 19 nt, Artificial Sequence
  Description of Artificial Sequence: Synthetic oligonucleotide
  Antisense strand to SEQ ID NO: 2443600
cuuucgagaauaauucacc

SEQ ID NO: 2443602 - RNA, 19 nt, Artificial Sequence
  Description of Artificial Sequence: Synthetic oligonucleotide
  Sense strand starting at position 1913 of SEQ ID NO: 1887033
ugaauuauucucgaaaggc

SEQ ID NO: 2443603 - RNA, 19 nt, Artificial Sequence
  Description of Artificial Sequence: Synthetic oligonucleotide
  Antisense strand to SEQ ID NO: 2443602
gccuuucgagaauaauuca

SEQ ID NO: 2443604 - RNA, 19 nt, Artificial Sequence
  Description of Artificial Sequence: Synthetic oligonucleotide
  Sense strand starting at position 2185 of SEQ ID NO: 1887033
ggagacugaggccaguauu

SEQ ID NO: 2443605 - RNA, 19 nt, Artificial Sequence
  Description of Artificial Sequence: Synthetic oligonucleotide
  Antisense strand to SEQ ID NO: 2443604
aauacuggccucagucucc

SEQ ID NO: 2443606 - RNA, 19 nt, Artificial Sequence
  Description of Artificial Sequence: Synthetic oligonucleotide
  Sense strand starting at position 2198 of SEQ ID NO: 1887033
aguauuuccuccuugucau

SEQ ID NO: 2443607 - RNA, 19 nt, Artificial Sequence
  Description of Artificial Sequence: Synthetic oligonucleotide
  Antisense strand to SEQ ID NO: 2443606
augacaaggaggaaauacu

SEQ ID NO: 2443608 - RNA, 19 nt, Artificial Sequence
  Description of Artificial Sequence: Synthetic oligonucleotide
  Sense strand starting at position 2199 of SEQ ID NO: 1887033
guauuuccuccuugucaug

SEQ ID NO: 2443609 - RNA, 19 nt, Artificial Sequence
  Description of Artificial Sequence: Synthetic oligonucleotide
  Antisense strand to SEQ ID NO: 2443608
caugacaaggaggaaauac

SEQ ID NO: 2443610 - RNA, 19 nt, Artificial Sequence
  Description of Artificial Sequence: Synthetic oligonucleotide
  Sense strand starting at position 2205 of SEQ ID NO: 1887033
ccuccuugucauggaagau

SEQ ID NO: 2443611 - RNA, 19 nt, Artificial Sequence
  Description of Artificial Sequence: Synthetic oligonucleotide
  Antisense strand to SEQ ID NO: 2443610
aucuuccaugacaaggagg

SEQ ID NO: 2443612 - RNA, 19 nt, Artificial Sequence
  Description of Artificial Sequence: Synthetic oligonucleotide
  Sense strand starting at position 2441 of SEQ ID NO: 1887033
gguugaugcuauuugaugu

SEQ ID NO: 2443613 - RNA, 19 nt, Artificial Sequence
  Description of Artificial Sequence: Synthetic oligonucleotide
  Antisense strand to SEQ ID NO: 2443612
acaucaaauagcaucaacc

SEQ ID NO: 2443614 - RNA, 19 nt, Artificial Sequence
  Description of Artificial Sequence: Synthetic oligonucleotide
  Sense strand starting at position 2454 of SEQ ID NO: 1887033
ugaugugguuacuuaagaa

SEQ ID NO: 2443615 - RNA, 19 nt, Artificial Sequence
  Description of Artificial Sequence: Synthetic oligonucleotide
  Antisense strand to SEQ ID NO: 2443614
uucuuaaguaaccacauca

SEQ ID NO: 2443616 - RNA, 19 nt, Artificial Sequence
  Description of Artificial Sequence: Synthetic oligonucleotide
  Sense strand starting at position 2461 of SEQ ID NO: 1887033
guuacuuaagaauguagac

SEQ ID NO: 2443617 - RNA, 19 nt, Artificial Sequence
  Description of Artificial Sequence: Synthetic oligonucleotide
  Antisense strand to SEQ ID NO: 2443616
gucuacauucuuaaguaac

SEQ ID NO: 2443618 - RNA, 19 nt, Artificial Sequence
  Description of Artificial Sequence: Synthetic oligonucleotide
  Sense strand starting at position 2505 of SEQ ID NO: 1887033
agaagauagccuuaguuau

SEQ ID NO: 2443619 - RNA, 19 nt, Artificial Sequence
  Description of Artificial Sequence: Synthetic oligonucleotide
  Antisense strand to SEQ ID NO: 2443618
auaacuaaggcuaucuucu

SEQ ID NO: 2443620 - RNA, 19 nt, Artificial Sequence
  Description of Artificial Sequence: Synthetic oligonucleotide
  Sense strand starting at position 2531 of SEQ ID NO: 1887033
guugcaucuggcuuugcaa

SEQ ID NO: 2443621 - RNA, 19 nt, Artificial Sequence
  Description of Artificial Sequence: Synthetic oligonucleotide
  Antisense strand to SEQ ID NO: 2443620
uugcaaagccagaugcaac

SEQ ID NO: 2443622 - RNA, 19 nt, Artificial Sequence
  Description of Artificial Sequence: Synthetic oligonucleotide
  Sense strand starting at position 2552 of SEQ ID NO: 1887033
agcaaaugccuagacacau

SEQ ID NO: 2443623 - RNA, 19 nt, Artificial Sequence
  Description of Artificial Sequence: Synthetic oligonucleotide
  Antisense strand to SEQ ID NO: 2443622
augugucuaggcauuugcu

SEQ ID NO: 2443624 - RNA, 19 nt, Artificial Sequence
  Description of Artificial Sequence: Synthetic oligonucleotide
  Sense strand starting at position 2790 of SEQ ID NO: 1887033
uccacaaaucccugagagu

SEQ ID NO: 2443625 - RNA, 19 nt, Artificial Sequence
  Description of Artificial Sequence: Synthetic oligonucleotide
  Antisense strand to SEQ ID NO: 2443624
acucucagggauuugugga

SEQ ID NO: 2443626 - RNA, 19 nt, Artificial Sequence
  Description of Artificial Sequence: Synthetic oligonucleotide
  Sense strand starting at position 2956 of SEQ ID NO: 1887033
gcacaagagucuucucaaa

SEQ ID NO: 2443627 - RNA, 19 nt, Artificial Sequence
  Description of Artificial Sequence: Synthetic oligonucleotide
  Antisense strand to SEQ ID NO: 2443626
uuugagaagacucuugugc

SEQ ID NO: 2443628 - RNA, 19 nt, Artificial Sequence
  Description of Artificial Sequence: Synthetic oligonucleotide
  Sense strand starting at position 2958 of SEQ ID NO: 1887033
acaagagucuucucaaagu

SEQ ID NO: 2443629 - RNA, 19 nt, Artificial Sequence
  Description of Artificial Sequence: Synthetic oligonucleotide
  Antisense strand to SEQ ID NO: 2443628
acuuugagaagacucuugu

SEQ ID NO: 2443630 - RNA, 19 nt, Artificial Sequence
  Description of Artificial Sequence: Synthetic oligonucleotide
  Sense strand starting at position 2967 of SEQ ID NO: 1887033
uucucaaaguaagugagau

SEQ ID NO: 2443631 - RNA, 19 nt, Artificial Sequence
  Description of Artificial Sequence: Synthetic oligonucleotide
  Antisense strand to SEQ ID NO: 2443630
aucucacuuacuuugagaa

SEQ ID NO: 2443632 - RNA, 19 nt, Artificial Sequence
  Description of Artificial Sequence: Synthetic oligonucleotide
  Sense strand starting at position 3351 of SEQ ID NO: 1887033
auggauuccaggugauaac

SEQ ID NO: 2443633 - RNA, 19 nt, Artificial Sequence
  Description of Artificial Sequence: Synthetic oligonucleotide
  Antisense strand to SEQ ID NO: 2443632
guuaucaccuggaauccau

SEQ ID NO: 2443634 - RNA, 19 nt, Artificial Sequence
  Description of Artificial Sequence: Synthetic oligonucleotide
  Sense strand starting at position 3358 of SEQ ID NO: 1887033
ccaggugauaacuaugugu

SEQ ID NO: 2443635 - RNA, 19 nt, Artificial Sequence
  Description of Artificial Sequence: Synthetic oligonucleotide
  Antisense strand to SEQ ID NO: 2443634
acacauaguuaucaccugg

SEQ ID NO: 2443636 - RNA, 19 nt, Artificial Sequence
  Description of Artificial Sequence: Synthetic oligonucleotide
  Sense strand starting at position 3379 of SEQ ID NO: 1887033
aucaaugugggcuaaucaa

SEQ ID NO: 2443637 - RNA, 19 nt, Artificial Sequence
  Description of Artificial Sequence: Synthetic oligonucleotide
  Antisense strand to SEQ ID NO: 2443636
uugauuagcccacauugau

SEQ ID NO: 2443638 - RNA, 19 nt, Artificial Sequence
  Description of Artificial Sequence: Synthetic oligonucleotide
  Sense strand starting at position 3389 of SEQ ID NO: 1887033
gcuaaucaaguguaacaaa

SEQ ID NO: 2443639 - RNA, 19 nt, Artificial Sequence
  Description of Artificial Sequence: Synthetic oligonucleotide
  Antisense strand to SEQ ID NO: 2443638
uuuguuacacuugauuagc

SEQ ID NO: 2443640 - RNA, 19 nt, Artificial Sequence
  Description of Artificial Sequence: Synthetic oligonucleotide
  Sense strand starting at position 3688 of SEQ ID NO: 1887033
ggcaaucaaggcuaaucua

SEQ ID NO: 2443641 - RNA, 19 nt, Artificial Sequence
  Description of Artificial Sequence: Synthetic oligonucleotide
  Antisense strand to SEQ ID NO: 2443640
uagauuagccuugauugcc

SEQ ID NO: 2443642 - RNA, 19 nt, Artificial Sequence
  Description of Artificial Sequence: Synthetic oligonucleotide
  Sense strand starting at position 3814 of SEQ ID NO: 1887033
gcagauaaggccuagaauu

SEQ ID NO: 2443643 - RNA, 19 nt, Artificial Sequence
  Description of Artificial Sequence: Synthetic oligonucleotide
  Antisense strand to SEQ ID NO: 2443642
aauucuaggccuuaucugc

SEQ ID NO: 2443644 - RNA, 19 nt, Artificial Sequence
  Description of Artificial Sequence: Synthetic oligonucleotide
  Sense strand starting at position 3874 of SEQ ID NO: 1887033
cagggugaaccucaagcau

SEQ ID NO: 2443645 - RNA, 19 nt, Artificial Sequence
  Description of Artificial Sequence: Synthetic oligonucleotide
  Antisense strand to SEQ ID NO: 2443644
augcuugagguucacccug

SEQ ID NO: 2443646 - RNA, 19 nt, Artificial Sequence
  Description of Artificial Sequence: Synthetic oligonucleotide
  Sense strand starting at position 203 of SEQ ID NO: 1887034
cuaaaugauuucuaagaug

SEQ ID NO: 2443647 - RNA, 19 nt, Artificial Sequence
  Description of Artificial Sequence: Synthetic oligonucleotide
  Antisense strand to SEQ ID NO: 2443646
caucuuagaaaucauuuag

SEQ ID NO: 2443648 - RNA, 19 nt, Artificial Sequence
  Description of Artificial Sequence: Synthetic oligonucleotide
  Sense strand starting at position 240 of SEQ ID NO: 1887034
cggucaauccucugguucu

SEQ ID NO: 2443649 - RNA, 19 nt, Artificial Sequence
  Description of Artificial Sequence: Synthetic oligonucleotide
  Antisense strand to SEQ ID NO: 2443648
agaaccagaggauugaccg

SEQ ID NO: 2443650 - RNA, 19 nt, Artificial Sequence
  Description of Artificial Sequence: Synthetic oligonucleotide
  Sense strand starting at position 241 of SEQ ID NO: 1887034
ggucaauccucugguucuu

SEQ ID NO: 2443651 - RNA, 19 nt, Artificial Sequence
  Description of Artificial Sequence: Synthetic oligonucleotide
  Antisense strand to SEQ ID NO: 2443650
aagaaccagaggauugacc

SEQ ID NO: 2443652 - RNA, 19 nt, Artificial Sequence
  Description of Artificial Sequence: Synthetic oligonucleotide
  Sense strand starting at position 331 of SEQ ID NO: 1887034
cuuggauuccuagagcucu

SEQ ID NO: 2443653 - RNA, 19 nt, Artificial Sequence
  Description of Artificial Sequence: Synthetic oligonucleotide
  Antisense strand to SEQ ID NO: 2443652
agagcucuaggaauccaag

SEQ ID NO: 2443654 - RNA, 19 nt, Artificial Sequence
  Description of Artificial Sequence: Synthetic oligonucleotide
  Sense strand starting at position 470 of SEQ ID NO: 1887034
gcgagacugucucagaaga

SEQ ID NO: 2443655 - RNA, 19 nt, Artificial Sequence
  Description of Artificial Sequence: Synthetic oligonucleotide
  Antisense strand to SEQ ID NO: 2443654
ucuucugagacagucucgc

SEQ ID NO: 2443656 - RNA, 19 nt, Artificial Sequence
  Description of Artificial Sequence: Synthetic oligonucleotide
  Sense strand starting at position 656 of SEQ ID NO: 1887034
cauguaguagccuaacaga

SEQ ID NO: 2443657 - RNA, 19 nt, Artificial Sequence
  Description of Artificial Sequence: Synthetic oligonucleotide
  Antisense strand to SEQ ID NO: 2443656
ucuguuaggcuacuacaug

SEQ ID NO: 2443658 - RNA, 19 nt, Artificial Sequence
  Description of Artificial Sequence: Synthetic oligonucleotide
  Sense strand starting at position 659 of SEQ ID NO: 1887034
guaguagccuaacagaaua

SEQ ID NO: 2443659 - RNA, 19 nt, Artificial Sequence
  Description of Artificial Sequence: Synthetic oligonucleotide
  Antisense strand to SEQ ID NO: 2443658
uauucuguuaggcuacuac

SEQ ID NO: 2443660 - RNA, 19 nt, Artificial Sequence
  Description of Artificial Sequence: Synthetic oligonucleotide
  Sense strand starting at position 762 of SEQ ID NO: 1887034
aagagauuauuaucccguu

SEQ ID NO: 2443661 - RNA, 19 nt, Artificial Sequence
  Description of Artificial Sequence: Synthetic oligonucleotide
  Antisense strand to SEQ ID NO: 2443660
aacgggauaauaaucucuu

SEQ ID NO: 2443662 - RNA, 19 nt, Artificial Sequence
  Description of Artificial Sequence: Synthetic oligonucleotide
  Sense strand starting at position 763 of SEQ ID NO: 1887034
agagauuauuaucccguuu

SEQ ID NO: 2443663 - RNA, 19 nt, Artificial Sequence
  Description of Artificial Sequence: Synthetic oligonucleotide
  Antisense strand to SEQ ID NO: 2443662
aaacgggauaauaaucucu

SEQ ID NO: 2443664 - RNA, 19 nt, Artificial Sequence
  Description of Artificial Sequence: Synthetic oligonucleotide
  Sense strand starting at position 816 of SEQ ID NO: 1887034
accaccaguugcugauaau

SEQ ID NO: 2443665 - RNA, 19 nt, Artificial Sequence
  Description of Artificial Sequence: Synthetic oligonucleotide
  Antisense strand to SEQ ID NO: 2443664
auuaucagcaacugguggu

SEQ ID NO: 2443666 - RNA, 19 nt, Artificial Sequence
  Description of Artificial Sequence: Synthetic oligonucleotide
  Sense strand starting at position 827 of SEQ ID NO: 1887034
cugauaaugccagguugga

SEQ ID NO: 2443667 - RNA, 19 nt, Artificial Sequence
  Description of Artificial Sequence: Synthetic oligonucleotide
  Antisense strand to SEQ ID NO: 2443666
uccaaccuggcauuaucag

SEQ ID NO: 2443668 - RNA, 19 nt, Artificial Sequence
  Description of Artificial Sequence: Synthetic oligonucleotide
  Sense strand starting at position 970 of SEQ ID NO: 1887034
cuagcauguggguguugau

SEQ ID NO: 2443669 - RNA, 19 nt, Artificial Sequence
  Description of Artificial Sequence: Synthetic oligonucleotide
  Antisense strand to SEQ ID NO: 2443668
aucaacacccacaugcuag

SEQ ID NO: 2443670 - RNA, 19 nt, Artificial Sequence
  Description of Artificial Sequence: Synthetic oligonucleotide
  Sense strand starting at position 973 of SEQ ID NO: 1887034
gcauguggguguugauuaa

SEQ ID NO: 2443671 - RNA, 19 nt, Artificial Sequence
  Description of Artificial Sequence: Synthetic oligonucleotide
  Antisense strand to SEQ ID NO: 2443670
uuaaucaacacccacaugc

SEQ ID NO: 2443672 - RNA, 19 nt, Artificial Sequence
  Description of Artificial Sequence: Synthetic oligonucleotide
  Sense strand starting at position 980 of SEQ ID NO: 1887034
gguguugauuaacugggaa

SEQ ID NO: 2443673 - RNA, 19 nt, Artificial Sequence
  Description of Artificial Sequence: Synthetic oligonucleotide
  Antisense strand to SEQ ID NO: 2443672
uucccaguuaaucaacacc

SEQ ID NO: 2443674 - RNA, 19 nt, Artificial Sequence
  Description of Artificial Sequence: Synthetic oligonucleotide
  Sense strand starting at position 1001 of SEQ ID NO: 1887034
cggcacgagugucuuagaa

SEQ ID NO: 2443675 - RNA, 19 nt, Artificial Sequence
  Description of Artificial Sequence: Synthetic oligonucleotide
  Antisense strand to SEQ ID NO: 2443674
uucuaagacacucgugccg

SEQ ID NO: 2443676 - RNA, 19 nt, Artificial Sequence
  Description of Artificial Sequence: Synthetic oligonucleotide
  Sense strand starting at position 1003 of SEQ ID NO: 1887034
gcacgagugucuuagaagu

SEQ ID NO: 2443677 - RNA, 19 nt, Artificial Sequence
  Description of Artificial Sequence: Synthetic oligonucleotide
  Antisense strand to SEQ ID NO: 2443676
acuucuaagacacucgugc

SEQ ID NO: 2443678 - RNA, 19 nt, Artificial Sequence
  Description of Artificial Sequence: Synthetic oligonucleotide
  Sense strand starting at position 1005 of SEQ ID NO: 1887034
acgagugucuuagaaguac

SEQ ID NO: 2443679 - RNA, 19 nt, Artificial Sequence
  Description of Artificial Sequence: Synthetic oligonucleotide
  Antisense strand to SEQ ID NO: 2443678
guacuucuaagacacucgu

SEQ ID NO: 2443680 - RNA, 19 nt, Artificial Sequence
  Description of Artificial Sequence: Synthetic oligonucleotide
  Sense strand starting at position 1172 of SEQ ID NO: 1887034
cccuguagugggugauguu

SEQ ID NO: 2443681 - RNA, 19 nt, Artificial Sequence
  Description of Artificial Sequence: Synthetic oligonucleotide
  Antisense strand to SEQ ID NO: 2443680
aacaucacccacuacaggg

SEQ ID NO: 2443682 - RNA, 19 nt, Artificial Sequence
  Description of Artificial Sequence: Synthetic oligonucleotide
  Sense strand starting at position 1198 of SEQ ID NO: 1887034
gcaggcgacauauacaaua

SEQ ID NO: 2443683 - RNA, 19 nt, Artificial Sequence
  Description of Artificial Sequence: Synthetic oligonucleotide
  Antisense strand to SEQ ID NO: 2443682
uauuguauaugucgccugc

SEQ ID NO: 2443684 - RNA, 19 nt, Artificial Sequence
  Description of Artificial Sequence: Synthetic oligonucleotide
  Sense strand starting at position 1292 of SEQ ID NO: 1887034
gggcuaauuugagaaacug

SEQ ID NO: 2443685 - RNA, 19 nt, Artificial Sequence
  Description of Artificial Sequence: Synthetic oligonucleotide
  Antisense strand to SEQ ID NO: 2443684
caguuucucaaauuagccc

SEQ ID NO: 2443686 - RNA, 19 nt, Artificial Sequence
  Description of Artificial Sequence: Synthetic oligonucleotide
  Sense strand starting at position 1302 of SEQ ID NO: 1887034
gagaaacugucucagauug

SEQ ID NO: 2443687 - RNA, 19 nt, Artificial Sequence
  Description of Artificial Sequence: Synthetic oligonucleotide
  Antisense strand to SEQ ID NO: 2443686
caaucugagacaguuucuc

SEQ ID NO: 2443688 - RNA, 19 nt, Artificial Sequence
  Description of Artificial Sequence: Synthetic oligonucleotide
  Sense strand starting at position 1304 of SEQ ID NO: 1887034
gaaacugucucagauugga

SEQ ID NO: 2443689 - RNA, 19 nt, Artificial Sequence
  Description of Artificial Sequence: Synthetic oligonucleotide
  Antisense strand to SEQ ID NO: 2443688
uccaaucugagacaguuuc

SEQ ID NO: 2443690 - RNA, 19 nt, Artificial Sequence
  Description of Artificial Sequence: Synthetic oligonucleotide
  Sense strand starting at position 1352 of SEQ ID NO: 1887034
gcaggcugaucuguucaga

SEQ ID NO: 2443691 - RNA, 19 nt, Artificial Sequence
  Description of Artificial Sequence: Synthetic oligonucleotide
  Antisense strand to SEQ ID NO: 2443690
ucugaacagaucagccugc

SEQ ID NO: 2443692 - RNA, 19 nt, Artificial Sequence
  Description of Artificial Sequence: Synthetic oligonucleotide
  Sense strand starting at position 1462 of SEQ ID NO: 1887034
agaguuuacucuucgccca

SEQ ID NO: 2443693 - RNA, 19 nt, Artificial Sequence
  Description of Artificial Sequence: Synthetic oligonucleotide
  Antisense strand to SEQ ID NO: 2443692
ugggcgaagaguaaacucu

SEQ ID NO: 2443694 - RNA, 19 nt, Artificial Sequence
  Description of Artificial Sequence: Synthetic oligonucleotide
  Sense strand starting at position 1463 of SEQ ID NO: 1887034
gaguuuacucuucgcccaa

SEQ ID NO: 2443695 - RNA, 19 nt, Artificial Sequence
  Description of Artificial Sequence: Synthetic oligonucleotide
  Antisense strand to SEQ ID NO: 2443694
uugggcgaagaguaaacuc

SEQ ID NO: 2443696 - RNA, 19 nt, Artificial Sequence
  Description of Artificial Sequence: Synthetic oligonucleotide
  Sense strand starting at position 1464 of SEQ ID NO: 1887034
aguuuacucuucgcccaau

SEQ ID NO: 2443697 - RNA, 19 nt, Artificial Sequence
  Description of Artificial Sequence: Synthetic oligonucleotide
  Antisense strand to SEQ ID NO: 2443696
auugggcgaagaguaaacu

SEQ ID NO: 2443698 - RNA, 19 nt, Artificial Sequence
  Description of Artificial Sequence: Synthetic oligonucleotide
  Sense strand starting at position 1605 of SEQ ID NO: 1887034
gcuucccucucaccgaaau

SEQ ID NO: 2443699 - RNA, 19 nt, Artificial Sequence
  Description of Artificial Sequence: Synthetic oligonucleotide
  Antisense strand to SEQ ID NO: 2443698
auuucggugagagggaagc

SEQ ID NO: 2443700 - RNA, 19 nt, Artificial Sequence
  Description of Artificial Sequence: Synthetic oligonucleotide
  Sense strand starting at position 2480 of SEQ ID NO: 1887034
gggccgugacgucaaagau

SEQ ID NO: 2443701 - RNA, 19 nt, Artificial Sequence
  Description of Artificial Sequence: Synthetic oligonucleotide
  Antisense strand to SEQ ID NO: 2443700
aucuuugacgucacggccc

SEQ ID NO: 2443702 - RNA, 19 nt, Artificial Sequence
  Description of Artificial Sequence: Synthetic oligonucleotide
  Sense strand starting at position 2816 of SEQ ID NO: 1887034
gccucacuuuccugggaga

SEQ ID NO: 2443703 - RNA, 19 nt, Artificial Sequence
  Description of Artificial Sequence: Synthetic oligonucleotide
  Antisense strand to SEQ ID NO: 2443702
ucucccaggaaagugaggc

SEQ ID NO: 2443704 - RNA, 19 nt, Artificial Sequence
  Description of Artificial Sequence: Synthetic oligonucleotide
  Sense strand starting at position 2817 of SEQ ID NO: 1887034
ccucacuuuccugggagaa

SEQ ID NO: 2443705 - RNA, 19 nt, Artificial Sequence
  Description of Artificial Sequence: Synthetic oligonucleotide
  Antisense strand to SEQ ID NO: 2443704
uucucccaggaaagugagg

SEQ ID NO: 2443706 - RNA, 19 nt, Artificial Sequence
  Description of Artificial Sequence: Synthetic oligonucleotide
  Sense strand starting at position 2818 of SEQ ID NO: 1887034
cucacuuuccugggagaau

SEQ ID NO: 2443707 - RNA, 19 nt, Artificial Sequence
  Description of Artificial Sequence: Synthetic oligonucleotide
  Antisense strand to SEQ ID NO: 2443706
auucucccaggaaagugag

SEQ ID NO: 2443708 - RNA, 19 nt, Artificial Sequence
  Description of Artificial Sequence: Synthetic oligonucleotide
  Sense strand starting at position 2819 of SEQ ID NO: 1887034
ucacuuuccugggagaaug

SEQ ID NO: 2443709 - RNA, 19 nt, Artificial Sequence
  Description of Artificial Sequence: Synthetic oligonucleotide
  Antisense strand to SEQ ID NO: 2443708
cauucucccaggaaaguga

SEQ ID NO: 2443710 - RNA, 19 nt, Artificial Sequence
  Description of Artificial Sequence: Synthetic oligonucleotide
  Sense strand starting at position 2903 of SEQ ID NO: 1887034
gaaguagcugcguguccau

SEQ ID NO: 2443711 - RNA, 19 nt, Artificial Sequence
  Description of Artificial Sequence: Synthetic oligonucleotide
  Antisense strand to SEQ ID NO: 2443710
auggacacgcagcuacuuc

SEQ ID NO: 2443712 - RNA, 19 nt, Artificial Sequence
  Description of Artificial Sequence: Synthetic oligonucleotide
  Sense strand starting at position 3553 of SEQ ID NO: 1887034
ugacguuucugccgucaca

SEQ ID NO: 2443713 - RNA, 19 nt, Artificial Sequence
  Description of Artificial Sequence: Synthetic oligonucleotide
  Antisense strand to SEQ ID NO: 2443712
ugugacggcagaaacguca

SEQ ID NO: 2443714 - RNA, 19 nt, Artificial Sequence
  Description of Artificial Sequence: Synthetic oligonucleotide
  Sense strand starting at position 3719 of SEQ ID NO: 1887034
aggagucuuuagcggagga

SEQ ID NO: 2443715 - RNA, 19 nt, Artificial Sequence
  Description of Artificial Sequence: Synthetic oligonucleotide
  Antisense strand to SEQ ID NO: 2443714
uccuccgcuaaagacuccu

SEQ ID NO: 2443716 - RNA, 19 nt, Artificial Sequence
  Description of Artificial Sequence: Synthetic oligonucleotide
  Sense strand starting at position 3720 of SEQ ID NO: 1887034
ggagucuuuagcggaggaa

SEQ ID NO: 2443717 - RNA, 19 nt, Artificial Sequence
  Description of Artificial Sequence: Synthetic oligonucleotide
  Antisense strand to SEQ ID NO: 2443716
uuccuccgcuaaagacucc

SEQ ID NO: 2443718 - RNA, 19 nt, Artificial Sequence
  Description of Artificial Sequence: Synthetic oligonucleotide
  Sense strand starting at position 3721 of SEQ ID NO: 1887034
gagucuuuagcggaggaac

SEQ ID NO: 2443719 - RNA, 19 nt, Artificial Sequence
  Description of Artificial Sequence: Synthetic oligonucleotide
  Antisense strand to SEQ ID NO: 2443718
guuccuccgcuaaagacuc

SEQ ID NO: 2443720 - RNA, 19 nt, Artificial Sequence
  Description of Artificial Sequence: Synthetic oligonucleotide
  Sense strand starting at position 3856 of SEQ ID NO: 1887034
cgggauccucuaugaggga

SEQ ID NO: 2443721 - RNA, 19 nt, Artificial Sequence
  Description of Artificial Sequence: Synthetic oligonucleotide
  Antisense strand to SEQ ID NO: 2443720
ucccucauagaggaucccg

SEQ ID NO: 2443722 - RNA, 19 nt, Artificial Sequence
  Description of Artificial Sequence: Synthetic oligonucleotide
  Sense strand starting at position 18 of SEQ ID NO: 1887035
ucccgaauugccuggaagu

SEQ ID NO: 2443723 - RNA, 19 nt, Artificial Sequence
  Description of Artificial Sequence: Synthetic oligonucleotide
  Antisense strand to SEQ ID NO: 2443722
acuuccaggcaauucggga

SEQ ID NO: 2443724 - RNA, 19 nt, Artificial Sequence
  Description of Artificial Sequence: Synthetic oligonucleotide
  Sense strand starting at position 43 of SEQ ID NO: 1887035
ucugucuagccuuagaucu

SEQ ID NO: 2443725 - RNA, 19 nt, Artificial Sequence
  Description of Artificial Sequence: Synthetic oligonucleotide
  Antisense strand to SEQ ID NO: 2443724
agaucuaaggcuagacaga

SEQ ID NO: 2443726 - RNA, 19 nt, Artificial Sequence
  Description of Artificial Sequence: Synthetic oligonucleotide
  Sense strand starting at position 268 of SEQ ID NO: 1887035
acagaauagcagcggugau

SEQ ID NO: 2443727 - RNA, 19 nt, Artificial Sequence
  Description of Artificial Sequence: Synthetic oligonucleotide
  Antisense strand to SEQ ID NO: 2443726
aucaccgcugcuauucugu

SEQ ID NO: 2443728 - RNA, 19 nt, Artificial Sequence
  Description of Artificial Sequence: Synthetic oligonucleotide
  Sense strand starting at position 269 of SEQ ID NO: 1887035
cagaauagcagcggugaua

SEQ ID NO: 2443729 - RNA, 19 nt, Artificial Sequence
  Description of Artificial Sequence: Synthetic oligonucleotide
  Antisense strand to SEQ ID NO: 2443728
uaucaccgcugcuauucug

SEQ ID NO: 2443730 - RNA, 19 nt, Artificial Sequence
  Description of Artificial Sequence: Synthetic oligonucleotide
  Sense strand starting at position 420 of SEQ ID NO: 1887035
gcaugauguguugcuguuu

SEQ ID NO: 2443731 - RNA, 19 nt, Artificial Sequence
  Description of Artificial Sequence: Synthetic oligonucleotide
  Antisense strand to SEQ ID NO: 2443730
aaacagcaacacaucaugc

SEQ ID NO: 2443732 - RNA, 19 nt, Artificial Sequence
  Description of Artificial Sequence: Synthetic oligonucleotide
  Sense strand starting at position 431 of SEQ ID NO: 1887035
ugcuguuuaggucagagua

SEQ ID NO: 2443733 - RNA, 19 nt, Artificial Sequence
  Description of Artificial Sequence: Synthetic oligonucleotide
  Antisense strand to SEQ ID NO: 2443732
uacucugaccuaaacagca

SEQ ID NO: 2443734 - RNA, 19 nt, Artificial Sequence
  Description of Artificial Sequence: Synthetic oligonucleotide
  Sense strand starting at position 465 of SEQ ID NO: 1887035
augcgcaugcguguguaua

SEQ ID NO: 2443735 - RNA, 19 nt, Artificial Sequence
  Description of Artificial Sequence: Synthetic oligonucleotide
  Antisense strand to SEQ ID NO: 2443734
uauacacacgcaugcgcau

SEQ ID NO: 2443736 - RNA, 19 nt, Artificial Sequence
  Description of Artificial Sequence: Synthetic oligonucleotide
  Sense strand starting at position 469 of SEQ ID NO: 1887035
gcaugcguguguauaguau

SEQ ID NO: 2443737 - RNA, 19 nt, Artificial Sequence
  Description of Artificial Sequence: Synthetic oligonucleotide
  Antisense strand to SEQ ID NO: 2443736
auacuauacacacgcaugc

SEQ ID NO: 2443738 - RNA, 19 nt, Artificial Sequence
  Description of Artificial Sequence: Synthetic oligonucleotide
  Sense strand starting at position 477 of SEQ ID NO: 1887035
guguauaguaugcaucuau

SEQ ID NO: 2443739 - RNA, 19 nt, Artificial Sequence
  Description of Artificial Sequence: Synthetic oligonucleotide
  Antisense strand to SEQ ID NO: 2443738
auagaugcauacuauacac

SEQ ID NO: 2443740 - RNA, 19 nt, Artificial Sequence
  Description of Artificial Sequence: Synthetic oligonucleotide
  Sense strand starting at position 531 of SEQ ID NO: 1887035
ggccauuguguguauauau

SEQ ID NO: 2443741 - RNA, 19 nt, Artificial Sequence
  Description of Artificial Sequence: Synthetic oligonucleotide
  Antisense strand to SEQ ID NO: 2443740
auauauacacacaauggcc

SEQ ID NO: 2443742 - RNA, 19 nt, Artificial Sequence
  Description of Artificial Sequence: Synthetic oligonucleotide
  Sense strand starting at position 556 of SEQ ID NO: 1887035
gcuauuaugugucuaugag

SEQ ID NO: 2443743 - RNA, 19 nt, Artificial Sequence
  Description of Artificial Sequence: Synthetic oligonucleotide
  Antisense strand to SEQ ID NO: 2443742
cucauagacacauaauagc

SEQ ID NO: 2443744 - RNA, 19 nt, Artificial Sequence
  Description of Artificial Sequence: Synthetic oligonucleotide
  Sense strand starting at position 557 of SEQ ID NO: 1887035
cuauuaugugucuaugagu

SEQ ID NO: 2443745 - RNA, 19 nt, Artificial Sequence
  Description of Artificial Sequence: Synthetic oligonucleotide
  Antisense strand to SEQ ID NO: 2443744
acucauagacacauaauag

SEQ ID NO: 2443746 - RNA, 19 nt, Artificial Sequence
  Description of Artificial Sequence: Synthetic oligonucleotide
  Sense strand starting at position 562 of SEQ ID NO: 1887035
augugucuaugagucacau

SEQ ID NO: 2443747 - RNA, 19 nt, Artificial Sequence
  Description of Artificial Sequence: Synthetic oligonucleotide
  Antisense strand to SEQ ID NO: 2443746
augugacucauagacacau

SEQ ID NO: 2443748 - RNA, 19 nt, Artificial Sequence
  Description of Artificial Sequence: Synthetic oligonucleotide
  Sense strand starting at position 672 of SEQ ID NO: 1887035
ugcuguuaugugcauggga

SEQ ID NO: 2443749 - RNA, 19 nt, Artificial Sequence
  Description of Artificial Sequence: Synthetic oligonucleotide
  Antisense strand to SEQ ID NO: 2443748
ucccaugcacauaacagca

SEQ ID NO: 2443750 - RNA, 19 nt, Artificial Sequence
  Description of Artificial Sequence: Synthetic oligonucleotide
  Sense strand starting at position 688 of SEQ ID NO: 1887035
ggaggcuaucauugcauga

SEQ ID NO: 2443751 - RNA, 19 nt, Artificial Sequence
  Description of Artificial Sequence: Synthetic oligonucleotide
  Antisense strand to SEQ ID NO: 2443750
ucaugcaaugauagccucc

SEQ ID NO: 2443752 - RNA, 19 nt, Artificial Sequence
  Description of Artificial Sequence: Synthetic oligonucleotide
  Sense strand starting at position 693 of SEQ ID NO: 1887035
cuaucauugcaugaguuua

SEQ ID NO: 2443753 - RNA, 19 nt, Artificial Sequence
  Description of Artificial Sequence: Synthetic oligonucleotide
  Antisense strand to SEQ ID NO: 2443752
uaaacucaugcaaugauag

SEQ ID NO: 2443754 - RNA, 19 nt, Artificial Sequence
  Description of Artificial Sequence: Synthetic oligonucleotide
  Sense strand starting at position 695 of SEQ ID NO: 1887035
aucauugcaugaguuuaua

SEQ ID NO: 2443755 - RNA, 19 nt, Artificial Sequence
  Description of Artificial Sequence: Synthetic oligonucleotide
  Antisense strand to SEQ ID NO: 2443754
uauaaacucaugcaaugau

SEQ ID NO: 2443756 - RNA, 19 nt, Artificial Sequence
  Description of Artificial Sequence: Synthetic oligonucleotide
  Sense strand starting at position 736 of SEQ ID NO: 1887035
uauagauauggaugcuacu

SEQ ID NO: 2443757 - RNA, 19 nt, Artificial Sequence
  Description of Artificial Sequence: Synthetic oligonucleotide
  Antisense strand to SEQ ID NO: 2443756
aguagcauccauaucuaua

SEQ ID NO: 2443758 - RNA, 19 nt, Artificial Sequence
  Description of Artificial Sequence: Synthetic oligonucleotide
  Sense strand starting at position 766 of SEQ ID NO: 1887035
uguaguaauugauuacaca

SEQ ID NO: 2443759 - RNA, 19 nt, Artificial Sequence
  Description of Artificial Sequence: Synthetic oligonucleotide
  Antisense strand to SEQ ID NO: 2443758
uguguaaucaauuacuaca

SEQ ID NO: 2443760 - RNA, 19 nt, Artificial Sequence
  Description of Artificial Sequence: Synthetic oligonucleotide
  Sense strand starting at position 795 of SEQ ID NO: 1887035
ugcucauaucgucauguaa

SEQ ID NO: 2443761 - RNA, 19 nt, Artificial Sequence
  Description of Artificial Sequence: Synthetic oligonucleotide
  Antisense strand to SEQ ID NO: 2443760
uuacaugacgauaugagca

SEQ ID NO: 2443762 - RNA, 19 nt, Artificial Sequence
  Description of Artificial Sequence: Synthetic oligonucleotide
  Sense strand starting at position 809 of SEQ ID NO: 1887035
uguaaauaugcauaaugac

SEQ ID NO: 2443763 - RNA, 19 nt, Artificial Sequence
  Description of Artificial Sequence: Synthetic oligonucleotide
  Antisense strand to SEQ ID NO: 2443762
gucauuaugcauauuuaca

SEQ ID NO: 2443764 - RNA, 19 nt, Artificial Sequence
  Description of Artificial Sequence: Synthetic oligonucleotide
  Sense strand starting at position 823 of SEQ ID NO: 1887035
augacaugguuugauuuau

SEQ ID NO: 2443765 - RNA, 19 nt, Artificial Sequence
  Description of Artificial Sequence: Synthetic oligonucleotide
  Antisense strand to SEQ ID NO: 2443764
auaaaucaaaccaugucau

SEQ ID NO: 2443766 - RNA, 19 nt, Artificial Sequence
  Description of Artificial Sequence: Synthetic oligonucleotide
  Sense strand starting at position 893 of SEQ ID NO: 1887035
acaugucucuaucuaugua

SEQ ID NO: 2443767 - RNA, 19 nt, Artificial Sequence
  Description of Artificial Sequence: Synthetic oligonucleotide
  Antisense strand to SEQ ID NO: 2443766
uacauagauagagacaugu

SEQ ID NO: 2443768 - RNA, 19 nt, Artificial Sequence
  Description of Artificial Sequence: Synthetic oligonucleotide
  Sense strand starting at position 928 of SEQ ID NO: 1887035
guguuuauuaugcaaaugu

SEQ ID NO: 2443769 - RNA, 19 nt, Artificial Sequence
  Description of Artificial Sequence: Synthetic oligonucleotide
  Antisense strand to SEQ ID NO: 2443768
acauuugcauaauaaacac

SEQ ID NO: 2443770 - RNA, 19 nt, Artificial Sequence
  Description of Artificial Sequence: Synthetic oligonucleotide
  Sense strand starting at position 937 of SEQ ID NO: 1887035
augcaaaugucacuguaug

SEQ ID NO: 2443771 - RNA, 19 nt, Artificial Sequence
  Description of Artificial Sequence: Synthetic oligonucleotide
  Antisense strand to SEQ ID NO: 2443770
cauacagugacauuugcau

SEQ ID NO: 2443772 - RNA, 19 nt, Artificial Sequence
  Description of Artificial Sequence: Synthetic oligonucleotide
  Sense strand starting at position 962 of SEQ ID NO: 1887035
cucuucuauguguaagaca

SEQ ID NO: 2443773 - RNA, 19 nt, Artificial Sequence
  Description of Artificial Sequence: Synthetic oligonucleotide
  Antisense strand to SEQ ID NO: 2443772
ugucuuacacauagaagag

SEQ ID NO: 2443774 - RNA, 19 nt, Artificial Sequence
  Description of Artificial Sequence: Synthetic oligonucleotide
  Sense strand starting at position 1005 of SEQ ID NO: 1887035
guguguacuacugaauaug

SEQ ID NO: 2443775 - RNA, 19 nt, Artificial Sequence
  Description of Artificial Sequence: Synthetic oligonucleotide
  Antisense strand to SEQ ID NO: 2443774
cauauucaguaguacacac

SEQ ID NO: 2443776 - RNA, 19 nt, Artificial Sequence
  Description of Artificial Sequence: Synthetic oligonucleotide
  Sense strand starting at position 1008 of SEQ ID NO: 1887035
uguacuacugaauauguau

SEQ ID NO: 2443777 - RNA, 19 nt, Artificial Sequence
  Description of Artificial Sequence: Synthetic oligonucleotide
  Antisense strand to SEQ ID NO: 2443776
auacauauucaguaguaca

SEQ ID NO: 2443778 - RNA, 19 nt, Artificial Sequence
  Description of Artificial Sequence: Synthetic oligonucleotide
  Sense strand starting at position 1055 of SEQ ID NO: 1887035
gugucaugccagucauguc

SEQ ID NO: 2443779 - RNA, 19 nt, Artificial Sequence
  Description of Artificial Sequence: Synthetic oligonucleotide
  Antisense strand to SEQ ID NO: 2443778
gacaugacuggcaugacac

SEQ ID NO: 2443780 - RNA, 19 nt, Artificial Sequence
  Description of Artificial Sequence: Synthetic oligonucleotide
  Sense strand starting at position 1056 of SEQ ID NO: 1887035
ugucaugccagucauguca

SEQ ID NO: 2443781 - RNA, 19 nt, Artificial Sequence
  Description of Artificial Sequence: Synthetic oligonucleotide
  Antisense strand to SEQ ID NO: 2443780
ugacaugacuggcaugaca

SEQ ID NO: 2443782 - RNA, 19 nt, Artificial Sequence
  Description of Artificial Sequence: Synthetic oligonucleotide
  Sense strand starting at position 1090 of SEQ ID NO: 1887035
guguuacuggcacacugaa

SEQ ID NO: 2443783 - RNA, 19 nt, Artificial Sequence
  Description of Artificial Sequence: Synthetic oligonucleotide
  Antisense strand to SEQ ID NO: 2443782
uucagugugccaguaacac

SEQ ID NO: 2443784 - RNA, 19 nt, Artificial Sequence
  Description of Artificial Sequence: Synthetic oligonucleotide
  Sense strand starting at position 1162 of SEQ ID NO: 1887035
gugucugugcccuugucua

SEQ ID NO: 2443785 - RNA, 19 nt, Artificial Sequence
  Description of Artificial Sequence: Synthetic oligonucleotide
  Antisense strand to SEQ ID NO: 2443784
uagacaagggcacagacac

SEQ ID NO: 2443786 - RNA, 19 nt, Artificial Sequence
  Description of Artificial Sequence: Synthetic oligonucleotide
  Sense strand starting at position 1327 of SEQ ID NO: 1887035
gugagaggaugccuuacau

SEQ ID NO: 2443787 - RNA, 19 nt, Artificial Sequence
  Description of Artificial Sequence: Synthetic oligonucleotide
  Antisense strand to SEQ ID NO: 2443786
auguaaggcauccucucac

SEQ ID NO: 2443788 - RNA, 19 nt, Artificial Sequence
  Description of Artificial Sequence: Synthetic oligonucleotide
  Sense strand starting at position 1446 of SEQ ID NO: 1887035
guaucuucuggaggagcga

SEQ ID NO: 2443789 - RNA, 19 nt, Artificial Sequence
  Description of Artificial Sequence: Synthetic oligonucleotide
  Antisense strand to SEQ ID NO: 2443788
ucgcuccuccagaagauac

SEQ ID NO: 2443790 - RNA, 19 nt, Artificial Sequence
  Description of Artificial Sequence: Synthetic oligonucleotide
  Sense strand starting at position 2042 of SEQ ID NO: 1887035
ccugacuccugcuccaaga

SEQ ID NO: 2443791 - RNA, 19 nt, Artificial Sequence
  Description of Artificial Sequence: Synthetic oligonucleotide
  Antisense strand to SEQ ID NO: 2443790
ucuuggagcaggagucagg

SEQ ID NO: 2443792 - RNA, 19 nt, Artificial Sequence
  Description of Artificial Sequence: Synthetic oligonucleotide
  Sense strand starting at position 2074 of SEQ ID NO: 1887035
ccuuguggcuuccuaagau

SEQ ID NO: 2443793 - RNA, 19 nt, Artificial Sequence
  Description of Artificial Sequence: Synthetic oligonucleotide
  Antisense strand to SEQ ID NO: 2443792
aucuuaggaagccacaagg

SEQ ID NO: 2443794 - RNA, 19 nt, Artificial Sequence
  Description of Artificial Sequence: Synthetic oligonucleotide
  Sense strand starting at position 2559 of SEQ ID NO: 1887035
gcccaaggucuugaacaca

SEQ ID NO: 2443795 - RNA, 19 nt, Artificial Sequence
  Description of Artificial Sequence: Synthetic oligonucleotide
  Antisense strand to SEQ ID NO: 2443794
uguguucaagaccuugggc

SEQ ID NO: 2443796 - RNA, 19 nt, Artificial Sequence
  Description of Artificial Sequence: Synthetic oligonucleotide
  Sense strand starting at position 3131 of SEQ ID NO: 1887035
agugaagguccggauccuu

SEQ ID NO: 2443797 - RNA, 19 nt, Artificial Sequence
  Description of Artificial Sequence: Synthetic oligonucleotide
  Antisense strand to SEQ ID NO: 2443796
aaggauccggaccuucacu

SEQ ID NO: 2443798 - RNA, 19 nt, Artificial Sequence
  Description of Artificial Sequence: Synthetic oligonucleotide
  Sense strand starting at position 3814 of SEQ ID NO: 1887035
gacugauggcacuaggcua

SEQ ID NO: 2443799 - RNA, 19 nt, Artificial Sequence
  Description of Artificial Sequence: Synthetic oligonucleotide
  Antisense strand to SEQ ID NO: 2443798
uagccuagugccaucaguc

SEQ ID NO: 2443800 - RNA, 19 nt, Artificial Sequence
  Description of Artificial Sequence: Synthetic oligonucleotide
  Sense strand starting at position 3915 of SEQ ID NO: 1887035
aggugcuaugcggagagaa

SEQ ID NO: 2443801 - RNA, 19 nt, Artificial Sequence
  Description of Artificial Sequence: Synthetic oligonucleotide
  Antisense strand to SEQ ID NO: 2443800
uucucuccgcauagcaccu

SEQ ID NO: 2443802 - RNA, 19 nt, Artificial Sequence
  Description of Artificial Sequence: Synthetic oligonucleotide
  Sense strand starting at position 190 of SEQ ID NO: 1887036
gccugacuauccgcuaauu

SEQ ID NO: 2443803 - RNA, 19 nt, Artificial Sequence
  Description of Artificial Sequence: Synthetic oligonucleotide
  Antisense strand to SEQ ID NO: 2443802
aauuagcggauagucaggc

SEQ ID NO: 2443804 - RNA, 19 nt, Artificial Sequence
  Description of Artificial Sequence: Synthetic oligonucleotide
  Sense strand starting at position 309 of SEQ ID NO: 1887036
cugggauuaauaugcguga

SEQ ID NO: 2443805 - RNA, 19 nt, Artificial Sequence
  Description of Artificial Sequence: Synthetic oligonucleotide
  Antisense strand to SEQ ID NO: 2443804
ucacgcauauuaaucccag

SEQ ID NO: 2443806 - RNA, 19 nt, Artificial Sequence
  Description of Artificial Sequence: Synthetic oligonucleotide
  Sense strand starting at position 313 of SEQ ID NO: 1887036
gauuaauaugcgugagcca

SEQ ID NO: 2443807 - RNA, 19 nt, Artificial Sequence
  Description of Artificial Sequence: Synthetic oligonucleotide
  Antisense strand to SEQ ID NO: 2443806
uggcucacgcauauuaauc

SEQ ID NO: 2443808 - RNA, 19 nt, Artificial Sequence
  Description of Artificial Sequence: Synthetic oligonucleotide
  Sense strand starting at position 1429 of SEQ ID NO: 1887036
gcauucugguucucaucuu

SEQ ID NO: 2443809 - RNA, 19 nt, Artificial Sequence
  Description of Artificial Sequence: Synthetic oligonucleotide
  Antisense strand to SEQ ID NO: 2443808
aagaugagaaccagaaugc

SEQ ID NO: 2443810 - RNA, 19 nt, Artificial Sequence
  Description of Artificial Sequence: Synthetic oligonucleotide
  Sense strand starting at position 1592 of SEQ ID NO: 1887036
gugccuggcuuaucuuuau

SEQ ID NO: 2443811 - RNA, 19 nt, Artificial Sequence
  Description of Artificial Sequence: Synthetic oligonucleotide
  Antisense strand to SEQ ID NO: 2443810
auaaagauaagccaggcac

SEQ ID NO: 2443812 - RNA, 19 nt, Artificial Sequence
  Description of Artificial Sequence: Synthetic oligonucleotide
  Sense strand starting at position 1931 of SEQ ID NO: 1887036
guacaucaucuauacugua

SEQ ID NO: 2443813 - RNA, 19 nt, Artificial Sequence
  Description of Artificial Sequence: Synthetic oligonucleotide
  Antisense strand to SEQ ID NO: 2443812
uacaguauagaugauguac

SEQ ID NO: 2443814 - RNA, 19 nt, Artificial Sequence
  Description of Artificial Sequence: Synthetic oligonucleotide
  Sense strand starting at position 1946 of SEQ ID NO: 1887036
uguagugucucaucgcaaa

SEQ ID NO: 2443815 - RNA, 19 nt, Artificial Sequence
  Description of Artificial Sequence: Synthetic oligonucleotide
  Antisense strand to SEQ ID NO: 2443814
uuugcgaugagacacuaca

SEQ ID NO: 2443816 - RNA, 19 nt, Artificial Sequence
  Description of Artificial Sequence: Synthetic oligonucleotide
  Sense strand starting at position 1960 of SEQ ID NO: 1887036
gcaaacuuacaguauauga

SEQ ID NO: 2443817 - RNA, 19 nt, Artificial Sequence
  Description of Artificial Sequence: Synthetic oligonucleotide
  Antisense strand to SEQ ID NO: 2443816
ucauauacuguaaguuugc

SEQ ID NO: 2443818 - RNA, 19 nt, Artificial Sequence
  Description of Artificial Sequence: Synthetic oligonucleotide
  Sense strand starting at position 1965 of SEQ ID NO: 1887036
cuuacaguauaugaugaua

SEQ ID NO: 2443819 - RNA, 19 nt, Artificial Sequence
  Description of Artificial Sequence: Synthetic oligonucleotide
  Antisense strand to SEQ ID NO: 2443818
uaucaucauauacuguaag

SEQ ID NO: 2443820 - RNA, 19 nt, Artificial Sequence
  Description of Artificial Sequence: Synthetic oligonucleotide
  Sense strand starting at position 2010 of SEQ ID NO: 1887036
caggaagcauggcuugaaa

SEQ ID NO: 2443821 - RNA, 19 nt, Artificial Sequence
  Description of Artificial Sequence: Synthetic oligonucleotide
  Antisense strand to SEQ ID NO: 2443820
uuucaagccaugcuuccug

SEQ ID NO: 2443822 - RNA, 19 nt, Artificial Sequence
  Description of Artificial Sequence: Synthetic oligonucleotide
  Sense strand starting at position 2125 of SEQ ID NO: 1887036
cuccuugauucugugguca

SEQ ID NO: 2443823 - RNA, 19 nt, Artificial Sequence
  Description of Artificial Sequence: Synthetic oligonucleotide
  Antisense strand to SEQ ID NO: 2443822
ugaccacagaaucaaggag

SEQ ID NO: 2443824 - RNA, 19 nt, Artificial Sequence
  Description of Artificial Sequence: Synthetic oligonucleotide
  Sense strand starting at position 2177 of SEQ ID NO: 1887036
ggagcuagggucuguuaag

SEQ ID NO: 2443825 - RNA, 19 nt, Artificial Sequence
  Description of Artificial Sequence: Synthetic oligonucleotide
  Antisense strand to SEQ ID NO: 2443824
cuuaacagacccuagcucc

SEQ ID NO: 2443826 - RNA, 19 nt, Artificial Sequence
  Description of Artificial Sequence: Synthetic oligonucleotide
  Sense strand starting at position 2178 of SEQ ID NO: 1887036
gagcuagggucuguuaaga

SEQ ID NO: 2443827 - RNA, 19 nt, Artificial Sequence
  Description of Artificial Sequence: Synthetic oligonucleotide
  Antisense strand to SEQ ID NO: 2443826
ucuuaacagacccuagcuc

SEQ ID NO: 2443828 - RNA, 19 nt, Artificial Sequence
  Description of Artificial Sequence: Synthetic oligonucleotide
  Sense strand starting at position 2240 of SEQ ID NO: 1887036
cguaaugaugcagaagguu

SEQ ID NO: 2443829 - RNA, 19 nt, Artificial Sequence
  Description of Artificial Sequence: Synthetic oligonucleotide
  Antisense strand to SEQ ID NO: 2443828
aaccuucugcaucauuacg

SEQ ID NO: 2443830 - RNA, 19 nt, Artificial Sequence
  Description of Artificial Sequence: Synthetic oligonucleotide
  Sense strand starting at position 2249 of SEQ ID NO: 1887036
gcagaagguucccuuuggu

SEQ ID NO: 2443831 - RNA, 19 nt, Artificial Sequence
  Description of Artificial Sequence: Synthetic oligonucleotide
  Antisense strand to SEQ ID NO: 2443830
accaaagggaaccuucugc

SEQ ID NO: 2443832 - RNA, 19 nt, Artificial Sequence
  Description of Artificial Sequence: Synthetic oligonucleotide
  Sense strand starting at position 2613 of SEQ ID NO: 1887036
uuuaauugcuggucagauc

SEQ ID NO: 2443833 - RNA, 19 nt, Artificial Sequence
  Description of Artificial Sequence: Synthetic oligonucleotide
  Antisense strand to SEQ ID NO: 2443832
gaucugaccagcaauuaaa

SEQ ID NO: 2443834 - RNA, 19 nt, Artificial Sequence
  Description of Artificial Sequence: Synthetic oligonucleotide
  Sense strand starting at position 2622 of SEQ ID NO: 1887036
uggucagaucccuagugga

SEQ ID NO: 2443835 - RNA, 19 nt, Artificial Sequence
  Description of Artificial Sequence: Synthetic oligonucleotide
  Antisense strand to SEQ ID NO: 2443834
uccacuagggaucugacca

SEQ ID NO: 2443836 - RNA, 19 nt, Artificial Sequence
  Description of Artificial Sequence: Synthetic oligonucleotide
  Sense strand starting at position 2635 of SEQ ID NO: 1887036
aguggaagguuucucguuu

SEQ ID NO: 2443837 - RNA, 19 nt, Artificial Sequence
  Description of Artificial Sequence: Synthetic oligonucleotide
  Antisense strand to SEQ ID NO: 2443836
aaacgagaaaccuuccacu

SEQ ID NO: 2443838 - RNA, 19 nt, Artificial Sequence
  Description of Artificial Sequence: Synthetic oligonucleotide
  Sense strand starting at position 2687 of SEQ ID NO: 1887036
ggugguaggcaauguuagu

SEQ ID NO: 2443839 - RNA, 19 nt, Artificial Sequence
  Description of Artificial Sequence: Synthetic oligonucleotide
  Antisense strand to SEQ ID NO: 2443838
acuaacauugccuaccacc

SEQ ID NO: 2443840 - RNA, 19 nt, Artificial Sequence
  Description of Artificial Sequence: Synthetic oligonucleotide
  Sense strand starting at position 2692 of SEQ ID NO: 1887036
uaggcaauguuaguugaau

SEQ ID NO: 2443841 - RNA, 19 nt, Artificial Sequence
  Description of Artificial Sequence: Synthetic oligonucleotide
  Antisense strand to SEQ ID NO: 2443840
auucaacuaacauugccua

SEQ ID NO: 2443842 - RNA, 19 nt, Artificial Sequence
  Description of Artificial Sequence: Synthetic oligonucleotide
  Sense strand starting at position 2693 of SEQ ID NO: 1887036
aggcaauguuaguugaauc

SEQ ID NO: 2443843 - RNA, 19 nt, Artificial Sequence
  Description of Artificial Sequence: Synthetic oligonucleotide
  Antisense strand to SEQ ID NO: 2443842
gauucaacuaacauugccu

SEQ ID NO: 2443844 - RNA, 19 nt, Artificial Sequence
  Description of Artificial Sequence: Synthetic oligonucleotide
  Sense strand starting at position 2694 of SEQ ID NO: 1887036
ggcaauguuaguugaaucu

SEQ ID NO: 2443845 - RNA, 19 nt, Artificial Sequence
  Description of Artificial Sequence: Synthetic oligonucleotide
  Antisense strand to SEQ ID NO: 2443844
agauucaacuaacauugcc

SEQ ID NO: 2443846 - RNA, 19 nt, Artificial Sequence
  Description of Artificial Sequence: Synthetic oligonucleotide
  Sense strand starting at position 2701 of SEQ ID NO: 1887036
uuaguugaaucucucugua

SEQ ID NO: 2443847 - RNA, 19 nt, Artificial Sequence
  Description of Artificial Sequence: Synthetic oligonucleotide
  Antisense strand to SEQ ID NO: 2443846
uacagagagauucaacuaa

SEQ ID NO: 2443848 - RNA, 19 nt, Artificial Sequence
  Description of Artificial Sequence: Synthetic oligonucleotide
  Sense strand starting at position 2703 of SEQ ID NO: 1887036
aguugaaucucucuguaua

SEQ ID NO: 2443849 - RNA, 19 nt, Artificial Sequence
  Description of Artificial Sequence: Synthetic oligonucleotide
  Antisense strand to SEQ ID NO: 2443848
uauacagagagauucaacu

SEQ ID NO: 2443850 - RNA, 19 nt, Artificial Sequence
  Description of Artificial Sequence: Synthetic oligonucleotide
  Sense strand starting at position 2704 of SEQ ID NO: 1887036
guugaaucucucuguauag

SEQ ID NO: 2443851 - RNA, 19 nt, Artificial Sequence
  Description of Artificial Sequence: Synthetic oligonucleotide
  Antisense strand to SEQ ID NO: 2443850
cuauacagagagauucaac

SEQ ID NO: 2443852 - RNA, 19 nt, Artificial Sequence
  Description of Artificial Sequence: Synthetic oligonucleotide
  Sense strand starting at position 2739 of SEQ ID NO: 1887036
gcaacuggaucuccagaau

SEQ ID NO: 2443853 - RNA, 19 nt, Artificial Sequence
  Description of Artificial Sequence: Synthetic oligonucleotide
  Antisense strand to SEQ ID NO: 2443852
auucuggagauccaguugc

SEQ ID NO: 2443854 - RNA, 19 nt, Artificial Sequence
  Description of Artificial Sequence: Synthetic oligonucleotide
  Sense strand starting at position 2905 of SEQ ID NO: 1887036
guugcucuacuaggagauu

SEQ ID NO: 2443855 - RNA, 19 nt, Artificial Sequence
  Description of Artificial Sequence: Synthetic oligonucleotide
  Antisense strand to SEQ ID NO: 2443854
aaucuccuaguagagcaac

SEQ ID NO: 2443856 - RNA, 19 nt, Artificial Sequence
  Description of Artificial Sequence: Synthetic oligonucleotide
  Sense strand starting at position 2906 of SEQ ID NO: 1887036
uugcucuacuaggagauuu

SEQ ID NO: 2443857 - RNA, 19 nt, Artificial Sequence
  Description of Artificial Sequence: Synthetic oligonucleotide
  Antisense strand to SEQ ID NO: 2443856
aaaucuccuaguagagcaa

SEQ ID NO: 2443858 - RNA, 19 nt, Artificial Sequence
  Description of Artificial Sequence: Synthetic oligonucleotide
  Sense strand starting at position 3046 of SEQ ID NO: 1887036
ggccucugcuguuuagaau

SEQ ID NO: 2443859 - RNA, 19 nt, Artificial Sequence
  Description of Artificial Sequence: Synthetic oligonucleotide
  Antisense strand to SEQ ID NO: 2443858
auucuaaacagcagaggcc

SEQ ID NO: 2443860 - RNA, 19 nt, Artificial Sequence
  Description of Artificial Sequence: Synthetic oligonucleotide
  Sense strand starting at position 3047 of SEQ ID NO: 1887036
gccucugcuguuuagaauc

SEQ ID NO: 2443861 - RNA, 19 nt, Artificial Sequence
  Description of Artificial Sequence: Synthetic oligonucleotide
  Antisense strand to SEQ ID NO: 2443860
gauucuaaacagcagaggc

SEQ ID NO: 2443862 - RNA, 19 nt, Artificial Sequence
  Description of Artificial Sequence: Synthetic oligonucleotide
  Sense strand starting at position 3104 of SEQ ID NO: 1887036
uagacaaucuggucugugu

SEQ ID NO: 2443863 - RNA, 19 nt, Artificial Sequence
  Description of Artificial Sequence: Synthetic oligonucleotide
  Antisense strand to SEQ ID NO: 2443862
acacagaccagauugucua

SEQ ID NO: 2443864 - RNA, 19 nt, Artificial Sequence
  Description of Artificial Sequence: Synthetic oligonucleotide
  Sense strand starting at position 3124 of SEQ ID NO: 1887036
cuggaaggcaguuaauacu

SEQ ID NO: 2443865 - RNA, 19 nt, Artificial Sequence
  Description of Artificial Sequence: Synthetic oligonucleotide
  Antisense strand to SEQ ID NO: 2443864
aguauuaacugccuuccag

SEQ ID NO: 2443866 - RNA, 19 nt, Artificial Sequence
  Description of Artificial Sequence: Synthetic oligonucleotide
  Sense strand starting at position 3217 of SEQ ID NO: 1887036
guguucuauuuccugaggu

SEQ ID NO: 2443867 - RNA, 19 nt, Artificial Sequence
  Description of Artificial Sequence: Synthetic oligonucleotide
  Antisense strand to SEQ ID NO: 2443866
accucaggaaauagaacac

SEQ ID NO: 2443868 - RNA, 19 nt, Artificial Sequence
  Description of Artificial Sequence: Synthetic oligonucleotide
  Sense strand starting at position 3221 of SEQ ID NO: 1887036
ucuauuuccugaggucaca

SEQ ID NO: 2443869 - RNA, 19 nt, Artificial Sequence
  Description of Artificial Sequence: Synthetic oligonucleotide
  Antisense strand to SEQ ID NO: 2443868
ugugaccucaggaaauaga

SEQ ID NO: 2443870 - RNA, 19 nt, Artificial Sequence
  Description of Artificial Sequence: Synthetic oligonucleotide
  Sense strand starting at position 3283 of SEQ ID NO: 1887036
cuccuuucuugucuaguua

SEQ ID NO: 2443871 - RNA, 19 nt, Artificial Sequence
  Description of Artificial Sequence: Synthetic oligonucleotide
  Antisense strand to SEQ ID NO: 2443870
uaacuagacaagaaaggag

SEQ ID NO: 2443872 - RNA, 19 nt, Artificial Sequence
  Description of Artificial Sequence: Synthetic oligonucleotide
  Sense strand starting at position 3640 of SEQ ID NO: 1887036
aguguuacuucugcaggga

SEQ ID NO: 2443873 - RNA, 19 nt, Artificial Sequence
  Description of Artificial Sequence: Synthetic oligonucleotide
  Antisense strand to SEQ ID NO: 2443872
ucccugcagaaguaacacu

SEQ ID NO: 2443874 - RNA, 19 nt, Artificial Sequence
  Description of Artificial Sequence: Synthetic oligonucleotide
  Sense strand starting at position 3641 of SEQ ID NO: 1887036
guguuacuucugcagggaa

SEQ ID NO: 2443875 - RNA, 19 nt, Artificial Sequence
  Description of Artificial Sequence: Synthetic oligonucleotide
  Antisense strand to SEQ ID NO: 2443874
uucccugcagaaguaacac

SEQ ID NO: 2443876 - RNA, 19 nt, Artificial Sequence
  Description of Artificial Sequence: Synthetic oligonucleotide
  Sense strand starting at position 3643 of SEQ ID NO: 1887036
guuacuucugcagggaagu

SEQ ID NO: 2443877 - RNA, 19 nt, Artificial Sequence
  Description of Artificial Sequence: Synthetic oligonucleotide
  Antisense strand to SEQ ID NO: 2443876
acuucccugcagaaguaac

SEQ ID NO: 2443878 - RNA, 19 nt, Artificial Sequence
  Description of Artificial Sequence: Synthetic oligonucleotide
  Sense strand starting at position 3654 of SEQ ID NO: 1887036
agggaagucuucccagacu

SEQ ID NO: 2443879 - RNA, 19 nt, Artificial Sequence
  Description of Artificial Sequence: Synthetic oligonucleotide
  Antisense strand to SEQ ID NO: 2443878
agucugggaagacuucccu

SEQ ID NO: 2443880 - RNA, 19 nt, Artificial Sequence
  Description of Artificial Sequence: Synthetic oligonucleotide
  Sense strand starting at position 3733 of SEQ ID NO: 1887036
ucaugagggccuuguuuau

SEQ ID NO: 2443881 - RNA, 19 nt, Artificial Sequence
  Description of Artificial Sequence: Synthetic oligonucleotide
  Antisense strand to SEQ ID NO: 2443880
auaaacaaggcccucauga

SEQ ID NO: 2443882 - RNA, 19 nt, Artificial Sequence
  Description of Artificial Sequence: Synthetic oligonucleotide
  Sense strand starting at position 92 of SEQ ID NO: 1887037
ggccgcugcuuauuugaau

SEQ ID NO: 2443883 - RNA, 19 nt, Artificial Sequence
  Description of Artificial Sequence: Synthetic oligonucleotide
  Antisense strand to SEQ ID NO: 2443882
auucaaauaagcagcggcc

SEQ ID NO: 2443884 - RNA, 19 nt, Artificial Sequence
  Description of Artificial Sequence: Synthetic oligonucleotide
  Sense strand starting at position 93 of SEQ ID NO: 1887037
gccgcugcuuauuugaauu

SEQ ID NO: 2443885 - RNA, 19 nt, Artificial Sequence
  Description of Artificial Sequence: Synthetic oligonucleotide
  Antisense strand to SEQ ID NO: 2443884
aauucaaauaagcagcggc

SEQ ID NO: 2443886 - RNA, 19 nt, Artificial Sequence
  Description of Artificial Sequence: Synthetic oligonucleotide
  Sense strand starting at position 851 of SEQ ID NO: 1887037
acaauuaauuguguugaca

SEQ ID NO: 2443887 - RNA, 19 nt, Artificial Sequence
  Description of Artificial Sequence: Synthetic oligonucleotide
  Antisense strand to SEQ ID NO: 2443886
ugucaacacaauuaauugu

SEQ ID NO: 2443888 - RNA, 19 nt, Artificial Sequence
  Description of Artificial Sequence: Synthetic oligonucleotide
  Sense strand starting at position 859 of SEQ ID NO: 1887037
uuguguugacagcagaaau

SEQ ID NO: 2443889 - RNA, 19 nt, Artificial Sequence
  Description of Artificial Sequence: Synthetic oligonucleotide
  Antisense strand to SEQ ID NO: 2443888
auuucugcugucaacacaa

SEQ ID NO: 2443890 - RNA, 19 nt, Artificial Sequence
  Description of Artificial Sequence: Synthetic oligonucleotide
  Sense strand starting at position 910 of SEQ ID NO: 1887037
aggccauguuugcuaggau

SEQ ID NO: 2443891 - RNA, 19 nt, Artificial Sequence
  Description of Artificial Sequence: Synthetic oligonucleotide
  Antisense strand to SEQ ID NO: 2443890
auccuagcaaacauggccu

SEQ ID NO: 2443892 - RNA, 19 nt, Artificial Sequence
  Description of Artificial Sequence: Synthetic oligonucleotide
  Sense strand starting at position 913 of SEQ ID NO: 1887037
ccauguuugcuaggauaga

SEQ ID NO: 2443893 - RNA, 19 nt, Artificial Sequence
  Description of Artificial Sequence: Synthetic oligonucleotide
  Antisense strand to SEQ ID NO: 2443892
ucuauccuagcaaacaugg

SEQ ID NO: 2443894 - RNA, 19 nt, Artificial Sequence
  Description of Artificial Sequence: Synthetic oligonucleotide
  Sense strand starting at position 998 of SEQ ID NO: 1887037
gccugugaaaccugugaaa

SEQ ID NO: 2443895 - RNA, 19 nt, Artificial Sequence
  Description of Artificial Sequence: Synthetic oligonucleotide
  Antisense strand to SEQ ID NO: 2443894
uuucacagguuucacaggc

SEQ ID NO: 2443896 - RNA, 19 nt, Artificial Sequence
  Description of Artificial Sequence: Synthetic oligonucleotide
  Sense strand starting at position 1000 of SEQ ID NO: 1887037
cugugaaaccugugaaaug

SEQ ID NO: 2443897 - RNA, 19 nt, Artificial Sequence
  Description of Artificial Sequence: Synthetic oligonucleotide
  Antisense strand to SEQ ID NO: 2443896
cauuucacagguuucacag

SEQ ID NO: 2443898 - RNA, 19 nt, Artificial Sequence
  Description of Artificial Sequence: Synthetic oligonucleotide
  Sense strand starting at position 1059 of SEQ ID NO: 1887037
gaguuuggaucuguuagga

SEQ ID NO: 2443899 - RNA, 19 nt, Artificial Sequence
  Description of Artificial Sequence: Synthetic oligonucleotide
  Antisense strand to SEQ ID NO: 2443898
uccuaacagauccaaacuc

SEQ ID NO: 2443900 - RNA, 19 nt, Artificial Sequence
  Description of Artificial Sequence: Synthetic oligonucleotide
  Sense strand starting at position 1075 of SEQ ID NO: 1887037
ggauauuaauacuugugac

SEQ ID NO: 2443901 - RNA, 19 nt, Artificial Sequence
  Description of Artificial Sequence: Synthetic oligonucleotide
  Antisense strand to SEQ ID NO: 2443900
gucacaaguauuaauaucc

SEQ ID NO: 2443902 - RNA, 19 nt, Artificial Sequence
  Description of Artificial Sequence: Synthetic oligonucleotide
  Sense strand starting at position 1183 of SEQ ID NO: 1887037
gguucuaaauccuuagacu

SEQ ID NO: 2443903 - RNA, 19 nt, Artificial Sequence
  Description of Artificial Sequence: Synthetic oligonucleotide
  Antisense strand to SEQ ID NO: 2443902
agucuaaggauuuagaacc

SEQ ID NO: 2443904 - RNA, 19 nt, Artificial Sequence
  Description of Artificial Sequence: Synthetic oligonucleotide
  Sense strand starting at position 1205 of SEQ ID NO: 1887037
uagacuaaaucguuagugu

SEQ ID NO: 2443905 - RNA, 19 nt, Artificial Sequence
  Description of Artificial Sequence: Synthetic oligonucleotide
  Antisense strand to SEQ ID NO: 2443904
acacuaacgauuuagucua

SEQ ID NO: 2443906 - RNA, 19 nt, Artificial Sequence
  Description of Artificial Sequence: Synthetic oligonucleotide
  Sense strand starting at position 1206 of SEQ ID NO: 1887037
agacuaaaucguuaguguu

SEQ ID NO: 2443907 - RNA, 19 nt, Artificial Sequence
  Description of Artificial Sequence: Synthetic oligonucleotide
  Antisense strand to SEQ ID NO: 2443906
aacacuaacgauuuagucu

SEQ ID NO: 2443908 - RNA, 19 nt, Artificial Sequence
  Description of Artificial Sequence: Synthetic oligonucleotide
  Sense strand starting at position 1208 of SEQ ID NO: 1887037
acuaaaucguuaguguuua

SEQ ID NO: 2443909 - RNA, 19 nt, Artificial Sequence
  Description of Artificial Sequence: Synthetic oligonucleotide
  Antisense strand to SEQ ID NO: 2443908
uaaacacuaacgauuuagu

SEQ ID NO: 2443910 - RNA, 19 nt, Artificial Sequence
  Description of Artificial Sequence: Synthetic oligonucleotide
  Sense strand starting at position 1212 of SEQ ID NO: 1887037
aaucguuaguguuuaccaa

SEQ ID NO: 2443911 - RNA, 19 nt, Artificial Sequence
  Description of Artificial Sequence: Synthetic oligonucleotide
  Antisense strand to SEQ ID NO: 2443910
uugguaaacacuaacgauu

SEQ ID NO: 2443912 - RNA, 19 nt, Artificial Sequence
  Description of Artificial Sequence: Synthetic oligonucleotide
  Sense strand starting at position 1520 of SEQ ID NO: 1887037
cagagaucacaguggaguu

SEQ ID NO: 2443913 - RNA, 19 nt, Artificial Sequence
  Description of Artificial Sequence: Synthetic oligonucleotide
  Antisense strand to SEQ ID NO: 2443912
aacuccacugugaucucug

SEQ ID NO: 2443914 - RNA, 19 nt, Artificial Sequence
  Description of Artificial Sequence: Synthetic oligonucleotide
  Sense strand starting at position 1521 of SEQ ID NO: 1887037
agagaucacaguggaguuu

SEQ ID NO: 2443915 - RNA, 19 nt, Artificial Sequence
  Description of Artificial Sequence: Synthetic oligonucleotide
  Antisense strand to SEQ ID NO: 2443914
aaacuccacugugaucucu

SEQ ID NO: 2443916 - RNA, 19 nt, Artificial Sequence
  Description of Artificial Sequence: Synthetic oligonucleotide
  Sense strand starting at position 1530 of SEQ ID NO: 1887037
aguggaguuucuccugaga

SEQ ID NO: 2443917 - RNA, 19 nt, Artificial Sequence
  Description of Artificial Sequence: Synthetic oligonucleotide
  Antisense strand to SEQ ID NO: 2443916
ucucaggagaaacuccacu

SEQ ID NO: 2443918 - RNA, 19 nt, Artificial Sequence
  Description of Artificial Sequence: Synthetic oligonucleotide
  Sense strand starting at position 1548 of SEQ ID NO: 1887037
acaggagugucagcugagu

SEQ ID NO: 2443919 - RNA, 19 nt, Artificial Sequence
  Description of Artificial Sequence: Synthetic oligonucleotide
  Antisense strand to SEQ ID NO: 2443918
acucagcugacacuccugu

SEQ ID NO: 2443920 - RNA, 19 nt, Artificial Sequence
  Description of Artificial Sequence: Synthetic oligonucleotide
  Sense strand starting at position 1566 of SEQ ID NO: 1887037
ugggaacugugucccucau

SEQ ID NO: 2443921 - RNA, 19 nt, Artificial Sequence
  Description of Artificial Sequence: Synthetic oligonucleotide
  Antisense strand to SEQ ID NO: 2443920
augagggacacaguuccca

SEQ ID NO: 2443922 - RNA, 19 nt, Artificial Sequence
  Description of Artificial Sequence: Synthetic oligonucleotide
  Sense strand starting at position 1624 of SEQ ID NO: 1887037
cgucauuaucuaggaugaa

SEQ ID NO: 2443923 - RNA, 19 nt, Artificial Sequence
  Description of Artificial Sequence: Synthetic oligonucleotide
  Antisense strand to SEQ ID NO: 2443922
uucauccuagauaaugacg

SEQ ID NO: 2443924 - RNA, 19 nt, Artificial Sequence
  Description of Artificial Sequence: Synthetic oligonucleotide
  Sense strand starting at position 1743 of SEQ ID NO: 1887037
aucugcuggcccuaggaua

SEQ ID NO: 2443925 - RNA, 19 nt, Artificial Sequence
  Description of Artificial Sequence: Synthetic oligonucleotide
  Antisense strand to SEQ ID NO: 2443924
uauccuagggccagcagau

SEQ ID NO: 2443926 - RNA, 19 nt, Artificial Sequence
  Description of Artificial Sequence: Synthetic oligonucleotide
  Sense strand starting at position 2927 of SEQ ID NO: 1887037
ggacaaauacgucagguca

SEQ ID NO: 2443927 - RNA, 19 nt, Artificial Sequence
  Description of Artificial Sequence: Synthetic oligonucleotide
  Antisense strand to SEQ ID NO: 2443926
ugaccugacguauuugucc

SEQ ID NO: 2443928 - RNA, 19 nt, Artificial Sequence
  Description of Artificial Sequence: Synthetic oligonucleotide
  Sense strand starting at position 3015 of SEQ ID NO: 1887037
ugaagaggcuuucucauuc

SEQ ID NO: 2443929 - RNA, 19 nt, Artificial Sequence
  Description of Artificial Sequence: Synthetic oligonucleotide
  Antisense strand to SEQ ID NO: 2443928
gaaugagaaagccucuuca

SEQ ID NO: 2443930 - RNA, 19 nt, Artificial Sequence
  Description of Artificial Sequence: Synthetic oligonucleotide
  Sense strand starting at position 3183 of SEQ ID NO: 1887037
guuucuuuggucuaagucu

SEQ ID NO: 2443931 - RNA, 19 nt, Artificial Sequence
  Description of Artificial Sequence: Synthetic oligonucleotide
  Antisense strand to SEQ ID NO: 2443930
agacuuagaccaaagaaac

SEQ ID NO: 2443932 - RNA, 19 nt, Artificial Sequence
  Description of Artificial Sequence: Synthetic oligonucleotide
  Sense strand starting at position 3189 of SEQ ID NO: 1887037
uuggucuaagucuaacuaa

SEQ ID NO: 2443933 - RNA, 19 nt, Artificial Sequence
  Description of Artificial Sequence: Synthetic oligonucleotide
  Antisense strand to SEQ ID NO: 2443932
uuaguuagacuuagaccaa

SEQ ID NO: 2443934 - RNA, 19 nt, Artificial Sequence
  Description of Artificial Sequence: Synthetic oligonucleotide
  Sense strand starting at position 3192 of SEQ ID NO: 1887037
gucuaagucuaacuaagac

SEQ ID NO: 2443935 - RNA, 19 nt, Artificial Sequence
  Description of Artificial Sequence: Synthetic oligonucleotide
  Antisense strand to SEQ ID NO: 2443934
gucuuaguuagacuuagac

SEQ ID NO: 2443936 - RNA, 19 nt, Artificial Sequence
  Description of Artificial Sequence: Synthetic oligonucleotide
  Sense strand starting at position 3252 of SEQ ID NO: 1887037
aucccagugauauguuagu

SEQ ID NO: 2443937 - RNA, 19 nt, Artificial Sequence
  Description of Artificial Sequence: Synthetic oligonucleotide
  Antisense strand to SEQ ID NO: 2443936
acuaacauaucacugggau

SEQ ID NO: 2443938 - RNA, 19 nt, Artificial Sequence
  Description of Artificial Sequence: Synthetic oligonucleotide
  Sense strand starting at position 3268 of SEQ ID NO: 1887037
agugcuacguaugcauuua

SEQ ID NO: 2443939 - RNA, 19 nt, Artificial Sequence
  Description of Artificial Sequence: Synthetic oligonucleotide
  Antisense strand to SEQ ID NO: 2443938
uaaaugcauacguagcacu

SEQ ID NO: 2443940 - RNA, 19 nt, Artificial Sequence
  Description of Artificial Sequence: Synthetic oligonucleotide
  Sense strand starting at position 3294 of SEQ ID NO: 1887037
aaacacugugcguguauuu

SEQ ID NO: 2443941 - RNA, 19 nt, Artificial Sequence
  Description of Artificial Sequence: Synthetic oligonucleotide
  Antisense strand to SEQ ID NO: 2443940
aaauacacgcacaguguuu

SEQ ID NO: 2443942 - RNA, 19 nt, Artificial Sequence
  Description of Artificial Sequence: Synthetic oligonucleotide
  Sense strand starting at position 3347 of SEQ ID NO: 1887037
agcccacaccuguaagaua

SEQ ID NO: 2443943 - RNA, 19 nt, Artificial Sequence
  Description of Artificial Sequence: Synthetic oligonucleotide
  Antisense strand to SEQ ID NO: 2443942
uaucuuacaggugugggcu

SEQ ID NO: 2443944 - RNA, 19 nt, Artificial Sequence
  Description of Artificial Sequence: Synthetic oligonucleotide
  Sense strand starting at position 3355 of SEQ ID NO: 1887037
ccuguaagauaggcauaau

SEQ ID NO: 2443945 - RNA, 19 nt, Artificial Sequence
  Description of Artificial Sequence: Synthetic oligonucleotide
  Antisense strand to SEQ ID NO: 2443944
auuaugccuaucuuacagg

SEQ ID NO: 2443946 - RNA, 19 nt, Artificial Sequence
  Description of Artificial Sequence: Synthetic oligonucleotide
  Sense strand starting at position 3397 of SEQ ID NO: 1887037
agacucagagguuguguga

SEQ ID NO: 2443947 - RNA, 19 nt, Artificial Sequence
  Description of Artificial Sequence: Synthetic oligonucleotide
  Antisense strand to SEQ ID NO: 2443946
ucacacaaccucugagucu

SEQ ID NO: 2443948 - RNA, 19 nt, Artificial Sequence
  Description of Artificial Sequence: Synthetic oligonucleotide
  Sense strand starting at position 3523 of SEQ ID NO: 1887037
ucacuuacccuagaugguu

SEQ ID NO: 2443949 - RNA, 19 nt, Artificial Sequence
  Description of Artificial Sequence: Synthetic oligonucleotide
  Antisense strand to SEQ ID NO: 2443948
aaccaucuaggguaaguga

SEQ ID NO: 2443950 - RNA, 19 nt, Artificial Sequence
  Description of Artificial Sequence: Synthetic oligonucleotide
  Sense strand starting at position 3528 of SEQ ID NO: 1887037
uacccuagaugguuacaga

SEQ ID NO: 2443951 - RNA, 19 nt, Artificial Sequence
  Description of Artificial Sequence: Synthetic oligonucleotide
  Antisense strand to SEQ ID NO: 2443950
ucuguaaccaucuagggua

SEQ ID NO: 2443952 - RNA, 19 nt, Artificial Sequence
  Description of Artificial Sequence: Synthetic oligonucleotide
  Sense strand starting at position 3729 of SEQ ID NO: 1887037
acuaauauugcuuguuuga

SEQ ID NO: 2443953 - RNA, 19 nt, Artificial Sequence
  Description of Artificial Sequence: Synthetic oligonucleotide
  Antisense strand to SEQ ID NO: 2443952
ucaaacaagcaauauuagu

SEQ ID NO: 2443954 - RNA, 19 nt, Artificial Sequence
  Description of Artificial Sequence: Synthetic oligonucleotide
  Sense strand starting at position 3731 of SEQ ID NO: 1887037
uaauauugcuuguuugaga

SEQ ID NO: 2443955 - RNA, 19 nt, Artificial Sequence
  Description of Artificial Sequence: Synthetic oligonucleotide
  Antisense strand to SEQ ID NO: 2443954
ucucaaacaagcaauauua

SEQ ID NO: 2443956 - RNA, 19 nt, Artificial Sequence
  Description of Artificial Sequence: Synthetic oligonucleotide
  Sense strand starting at position 3732 of SEQ ID NO: 1887037
aauauugcuuguuugagac

SEQ ID NO: 2443957 - RNA, 19 nt, Artificial Sequence
  Description of Artificial Sequence: Synthetic oligonucleotide
  Antisense strand to SEQ ID NO: 2443956
gucucaaacaagcaauauu

SEQ ID NO: 2443958 - RNA, 19 nt, Artificial Sequence
  Description of Artificial Sequence: Synthetic oligonucleotide
  Sense strand starting at position 3935 of SEQ ID NO: 1887037
gucucaagucugggcucaa

SEQ ID NO: 2443959 - RNA, 19 nt, Artificial Sequence
  Description of Artificial Sequence: Synthetic oligonucleotide
  Antisense strand to SEQ ID NO: 2443958
uugagcccagacuugagac

SEQ ID NO: 2443960 - RNA, 19 nt, Artificial Sequence
  Description of Artificial Sequence: Synthetic oligonucleotide
  Sense strand starting at position 3936 of SEQ ID NO: 1887037
ucucaagucugggcucaau

SEQ ID NO: 2443961 - RNA, 19 nt, Artificial Sequence
  Description of Artificial Sequence: Synthetic oligonucleotide
  Antisense strand to SEQ ID NO: 2443960
auugagcccagacuugaga

SEQ ID NO: 2443962 - RNA, 19 nt, Artificial Sequence
  Description of Artificial Sequence: Synthetic oligonucleotide
  Sense strand starting at position 84 of SEQ ID NO: 1887038
gcauaaaucaguugcagga

SEQ ID NO: 2443963 - RNA, 19 nt, Artificial Sequence
  Description of Artificial Sequence: Synthetic oligonucleotide
  Antisense strand to SEQ ID NO: 2443962
uccugcaacugauuuaugc

SEQ ID NO: 2443964 - RNA, 19 nt, Artificial Sequence
  Description of Artificial Sequence: Synthetic oligonucleotide
  Sense strand starting at position 412 of SEQ ID NO: 1887038
agcccacuucugggauguu

SEQ ID NO: 2443965 - RNA, 19 nt, Artificial Sequence
  Description of Artificial Sequence: Synthetic oligonucleotide
  Antisense strand to SEQ ID NO: 2443964
aacaucccagaagugggcu

SEQ ID NO: 2443966 - RNA, 19 nt, Artificial Sequence
  Description of Artificial Sequence: Synthetic oligonucleotide
  Sense strand starting at position 438 of SEQ ID NO: 1887038
cacgcaauauucuggagau

SEQ ID NO: 2443967 - RNA, 19 nt, Artificial Sequence
  Description of Artificial Sequence: Synthetic oligonucleotide
  Antisense strand to SEQ ID NO: 2443966
aucuccagaauauugcgug

SEQ ID NO: 2443968 - RNA, 19 nt, Artificial Sequence
  Description of Artificial Sequence: Synthetic oligonucleotide
  Sense strand starting at position 439 of SEQ ID NO: 1887038
acgcaauauucuggagauu

SEQ ID NO: 2443969 - RNA, 19 nt, Artificial Sequence
  Description of Artificial Sequence: Synthetic oligonucleotide
  Antisense strand to SEQ ID NO: 2443968
aaucuccagaauauugcgu

SEQ ID NO: 2443970 - RNA, 19 nt, Artificial Sequence
  Description of Artificial Sequence: Synthetic oligonucleotide
  Sense strand starting at position 575 of SEQ ID NO: 1887038
gggcgaggucuccaguuga

SEQ ID NO: 2443971 - RNA, 19 nt, Artificial Sequence
  Description of Artificial Sequence: Synthetic oligonucleotide
  Antisense strand to SEQ ID NO: 2443970
ucaacuggagaccucgccc

SEQ ID NO: 2443972 - RNA, 19 nt, Artificial Sequence
  Description of Artificial Sequence: Synthetic oligonucleotide
  Sense strand starting at position 579 of SEQ ID NO: 1887038
gaggucuccaguugaagcu

SEQ ID NO: 2443973 - RNA, 19 nt, Artificial Sequence
  Description of Artificial Sequence: Synthetic oligonucleotide
  Antisense strand to SEQ ID NO: 2443972
agcuucaacuggagaccuc

SEQ ID NO: 2443974 - RNA, 19 nt, Artificial Sequence
  Description of Artificial Sequence: Synthetic oligonucleotide
  Sense strand starting at position 588 of SEQ ID NO: 1887038
aguugaagcucccaucagu

SEQ ID NO: 2443975 - RNA, 19 nt, Artificial Sequence
  Description of Artificial Sequence: Synthetic oligonucleotide
  Antisense strand to SEQ ID NO: 2443974
acugaugggagcuucaacu

SEQ ID NO: 2443976 - RNA, 19 nt, Artificial Sequence
  Description of Artificial Sequence: Synthetic oligonucleotide
  Sense strand starting at position 635 of SEQ ID NO: 1887038
cuaagaauuugucaagaug

SEQ ID NO: 2443977 - RNA, 19 nt, Artificial Sequence
  Description of Artificial Sequence: Synthetic oligonucleotide
  Antisense strand to SEQ ID NO: 2443976
caucuugacaaauucuuag

SEQ ID NO: 2443978 - RNA, 19 nt, Artificial Sequence
  Description of Artificial Sequence: Synthetic oligonucleotide
  Sense strand starting at position 697 of SEQ ID NO: 1887038
cugacaucugcauguucca

SEQ ID NO: 2443979 - RNA, 19 nt, Artificial Sequence
  Description of Artificial Sequence: Synthetic oligonucleotide
  Antisense strand to SEQ ID NO: 2443978
uggaacaugcagaugucag

SEQ ID NO: 2443980 - RNA, 19 nt, Artificial Sequence
  Description of Artificial Sequence: Synthetic oligonucleotide
  Sense strand starting at position 706 of SEQ ID NO: 1887038
gcauguuccacuggguaag

SEQ ID NO: 2443981 - RNA, 19 nt, Artificial Sequence
  Description of Artificial Sequence: Synthetic oligonucleotide
  Antisense strand to SEQ ID NO: 2443980
cuuacccaguggaacaugc

SEQ ID NO: 2443982 - RNA, 19 nt, Artificial Sequence
  Description of Artificial Sequence: Synthetic oligonucleotide
  Sense strand starting at position 1327 of SEQ ID NO: 1887038
aggagaguuuaaggaauuc

SEQ ID NO: 2443983 - RNA, 19 nt, Artificial Sequence
  Description of Artificial Sequence: Synthetic oligonucleotide
  Antisense strand to SEQ ID NO: 2443982
gaauuccuuaaacucuccu

SEQ ID NO: 2443984 - RNA, 19 nt, Artificial Sequence
  Description of Artificial Sequence: Synthetic oligonucleotide
  Sense strand starting at position 1386 of SEQ ID NO: 1887038
uguugcaucggucagggaa

SEQ ID NO: 2443985 - RNA, 19 nt, Artificial Sequence
  Description of Artificial Sequence: Synthetic oligonucleotide
  Antisense strand to SEQ ID NO: 2443984
uucccugaccgaugcaaca

SEQ ID NO: 2443986 - RNA, 19 nt, Artificial Sequence
  Description of Artificial Sequence: Synthetic oligonucleotide
  Sense strand starting at position 1451 of SEQ ID NO: 1887038
ugaaaugguguuugggaga

SEQ ID NO: 2443987 - RNA, 19 nt, Artificial Sequence
  Description of Artificial Sequence: Synthetic oligonucleotide
  Antisense strand to SEQ ID NO: 2443986
ucucccaaacaccauuuca

SEQ ID NO: 2443988 - RNA, 19 nt, Artificial Sequence
  Description of Artificial Sequence: Synthetic oligonucleotide
  Sense strand starting at position 1454 of SEQ ID NO: 1887038
aaugguguuugggagagga

SEQ ID NO: 2443989 - RNA, 19 nt, Artificial Sequence
  Description of Artificial Sequence: Synthetic oligonucleotide
  Antisense strand to SEQ ID NO: 2443988
uccucucccaaacaccauu

SEQ ID NO: 2443990 - RNA, 19 nt, Artificial Sequence
  Description of Artificial Sequence: Synthetic oligonucleotide
  Sense strand starting at position 1730 of SEQ ID NO: 1887038
uuccgagagcgucgcuauu

SEQ ID NO: 2443991 - RNA, 19 nt, Artificial Sequence
  Description of Artificial Sequence: Synthetic oligonucleotide
  Antisense strand to SEQ ID NO: 2443990
aauagcgacgcucucggaa

SEQ ID NO: 2443992 - RNA, 19 nt, Artificial Sequence
  Description of Artificial Sequence: Synthetic oligonucleotide
  Sense strand starting at position 1740 of SEQ ID NO: 1887038
gucgcuauuucuccagcga

SEQ ID NO: 2443993 - RNA, 19 nt, Artificial Sequence
  Description of Artificial Sequence: Synthetic oligonucleotide
  Antisense strand to SEQ ID NO: 2443992
ucgcuggagaaauagcgac

SEQ ID NO: 2443994 - RNA, 19 nt, Artificial Sequence
  Description of Artificial Sequence: Synthetic oligonucleotide
  Sense strand starting at position 1741 of SEQ ID NO: 1887038
ucgcuauuucuccagcgaa

SEQ ID NO: 2443995 - RNA, 19 nt, Artificial Sequence
  Description of Artificial Sequence: Synthetic oligonucleotide
  Antisense strand to SEQ ID NO: 2443994
uucgcuggagaaauagcga

SEQ ID NO: 2443996 - RNA, 19 nt, Artificial Sequence
  Description of Artificial Sequence: Synthetic oligonucleotide
  Sense strand starting at position 1744 of SEQ ID NO: 1887038
cuauuucuccagcgaagug

SEQ ID NO: 2443997 - RNA, 19 nt, Artificial Sequence
  Description of Artificial Sequence: Synthetic oligonucleotide
  Antisense strand to SEQ ID NO: 2443996
cacuucgcuggagaaauag

SEQ ID NO: 2443998 - RNA, 19 nt, Artificial Sequence
  Description of Artificial Sequence: Synthetic oligonucleotide
  Sense strand starting at position 2305 of SEQ ID NO: 1887038
agaguuaugcgccgagaaa

SEQ ID NO: 2443999 - RNA, 19 nt, Artificial Sequence
  Description of Artificial Sequence: Synthetic oligonucleotide
  Antisense strand to SEQ ID NO: 2443998
uuucucggcgcauaacucu

SEQ ID NO: 2444000 - RNA, 19 nt, Artificial Sequence
  Description of Artificial Sequence: Synthetic oligonucleotide
  Sense strand starting at position 2306 of SEQ ID NO: 1887038
gaguuaugcgccgagaaac

SEQ ID NO: 2444001 - RNA, 19 nt, Artificial Sequence
  Description of Artificial Sequence: Synthetic oligonucleotide
  Antisense strand to SEQ ID NO: 2444000
guuucucggcgcauaacuc

SEQ ID NO: 2444002 - RNA, 19 nt, Artificial Sequence
  Description of Artificial Sequence: Synthetic oligonucleotide
  Sense strand starting at position 2317 of SEQ ID NO: 1887038
cgagaaacuucgccacgcu

SEQ ID NO: 2444003 - RNA, 19 nt, Artificial Sequence
  Description of Artificial Sequence: Synthetic oligonucleotide
  Antisense strand to SEQ ID NO: 2444002
agcguggcgaaguuucucg

SEQ ID NO: 2444004 - RNA, 19 nt, Artificial Sequence
  Description of Artificial Sequence: Synthetic oligonucleotide
  Sense strand starting at position 3243 of SEQ ID NO: 1887038
gggcuuugguggcaaagau

SEQ ID NO: 2444005 - RNA, 19 nt, Artificial Sequence
  Description of Artificial Sequence: Synthetic oligonucleotide
  Antisense strand to SEQ ID NO: 2444004
aucuuugccaccaaagccc

SEQ ID NO: 2444006 - RNA, 19 nt, Artificial Sequence
  Description of Artificial Sequence: Synthetic oligonucleotide
  Sense strand starting at position 3247 of SEQ ID NO: 1887038
uuugguggcaaagauuaua

SEQ ID NO: 2444007 - RNA, 19 nt, Artificial Sequence
  Description of Artificial Sequence: Synthetic oligonucleotide
  Antisense strand to SEQ ID NO: 2444006
uauaaucuuugccaccaaa

SEQ ID NO: 2444008 - RNA, 19 nt, Artificial Sequence
  Description of Artificial Sequence: Synthetic oligonucleotide
  Sense strand starting at position 3292 of SEQ ID NO: 1887038
gcagcauacuuucuugaga

SEQ ID NO: 2444009 - RNA, 19 nt, Artificial Sequence
  Description of Artificial Sequence: Synthetic oligonucleotide
  Antisense strand to SEQ ID NO: 2444008
ucucaagaaaguaugcugc

SEQ ID NO: 2444010 - RNA, 19 nt, Artificial Sequence
  Description of Artificial Sequence: Synthetic oligonucleotide
  Sense strand starting at position 3294 of SEQ ID NO: 1887038
agcauacuuucuugagaug

SEQ ID NO: 2444011 - RNA, 19 nt, Artificial Sequence
  Description of Artificial Sequence: Synthetic oligonucleotide
  Antisense strand to SEQ ID NO: 2444010
caucucaagaaaguaugcu

SEQ ID NO: 2444012 - RNA, 19 nt, Artificial Sequence
  Description of Artificial Sequence: Synthetic oligonucleotide
  Sense strand starting at position 3295 of SEQ ID NO: 1887038
gcauacuuucuugagaugu

SEQ ID NO: 2444013 - RNA, 19 nt, Artificial Sequence
  Description of Artificial Sequence: Synthetic oligonucleotide
  Antisense strand to SEQ ID NO: 2444012
acaucucaagaaaguaugc

SEQ ID NO: 2444014 - RNA, 19 nt, Artificial Sequence
  Description of Artificial Sequence: Synthetic oligonucleotide
  Sense strand starting at position 3297 of SEQ ID NO: 1887038
auacuuucuugagauguua

SEQ ID NO: 2444015 - RNA, 19 nt, Artificial Sequence
  Description of Artificial Sequence: Synthetic oligonucleotide
  Antisense strand to SEQ ID NO: 2444014
uaacaucucaagaaaguau

SEQ ID NO: 2444016 - RNA, 19 nt, Artificial Sequence
  Description of Artificial Sequence: Synthetic oligonucleotide
  Sense strand starting at position 3433 of SEQ ID NO: 1887038
aagcuuugaggcugaguaa

SEQ ID NO: 2444017 - RNA, 19 nt, Artificial Sequence
  Description of Artificial Sequence: Synthetic oligonucleotide
  Antisense strand to SEQ ID NO: 2444016
uuacucagccucaaagcuu

SEQ ID NO: 2444018 - RNA, 19 nt, Artificial Sequence
  Description of Artificial Sequence: Synthetic oligonucleotide
  Sense strand starting at position 3444 of SEQ ID NO: 1887038
cugaguaagagcuguccca

SEQ ID NO: 2444019 - RNA, 19 nt, Artificial Sequence
  Description of Artificial Sequence: Synthetic oligonucleotide
  Antisense strand to SEQ ID NO: 2444018
ugggacagcucuuacucag

SEQ ID NO: 2444020 - RNA, 19 nt, Artificial Sequence
  Description of Artificial Sequence: Synthetic oligonucleotide
  Sense strand starting at position 3475 of SEQ ID NO: 1887038
ggugggaggucaguggaau

SEQ ID NO: 2444021 - RNA, 19 nt, Artificial Sequence
  Description of Artificial Sequence: Synthetic oligonucleotide
  Antisense strand to SEQ ID NO: 2444020
auuccacugaccucccacc

SEQ ID NO: 2444022 - RNA, 19 nt, Artificial Sequence
  Description of Artificial Sequence: Synthetic oligonucleotide
  Sense strand starting at position 3476 of SEQ ID NO: 1887038
gugggaggucaguggaauc

SEQ ID NO: 2444023 - RNA, 19 nt, Artificial Sequence
  Description of Artificial Sequence: Synthetic oligonucleotide
  Antisense strand to SEQ ID NO: 2444022
gauuccacugaccucccac

SEQ ID NO: 2444024 - RNA, 19 nt, Artificial Sequence
  Description of Artificial Sequence: Synthetic oligonucleotide
  Sense strand starting at position 3650 of SEQ ID NO: 1887038
ccaaauaaccacugagguu

SEQ ID NO: 2444025 - RNA, 19 nt, Artificial Sequence
  Description of Artificial Sequence: Synthetic oligonucleotide
  Antisense strand to SEQ ID NO: 2444024
aaccucagugguuauuugg

SEQ ID NO: 2444026 - RNA, 19 nt, Artificial Sequence
  Description of Artificial Sequence: Synthetic oligonucleotide
  Sense strand starting at position 3665 of SEQ ID NO: 1887038
gguugaguuucccaaccuc

SEQ ID NO: 2444027 - RNA, 19 nt, Artificial Sequence
  Description of Artificial Sequence: Synthetic oligonucleotide
  Antisense strand to SEQ ID NO: 2444026
gagguugggaaacucaacc

SEQ ID NO: 2444028 - RNA, 19 nt, Artificial Sequence
  Description of Artificial Sequence: Synthetic oligonucleotide
  Sense strand starting at position 3688 of SEQ ID NO: 1887038
ggucgagauuuggagccau

SEQ ID NO: 2444029 - RNA, 19 nt, Artificial Sequence
  Description of Artificial Sequence: Synthetic oligonucleotide
  Antisense strand to SEQ ID NO: 2444028
auggcuccaaaucucgacc

SEQ ID NO: 2444030 - RNA, 19 nt, Artificial Sequence
  Description of Artificial Sequence: Synthetic oligonucleotide
  Sense strand starting at position 3719 of SEQ ID NO: 1887038
acgugacauaucuguuugu

SEQ ID NO: 2444031 - RNA, 19 nt, Artificial Sequence
  Description of Artificial Sequence: Synthetic oligonucleotide
  Antisense strand to SEQ ID NO: 2444030
acaaacagauaugucacgu

SEQ ID NO: 2444032 - RNA, 19 nt, Artificial Sequence
  Description of Artificial Sequence: Synthetic oligonucleotide
  Sense strand starting at position 3722 of SEQ ID NO: 1887038
ugacauaucuguuuguguc

SEQ ID NO: 2444033 - RNA, 19 nt, Artificial Sequence
  Description of Artificial Sequence: Synthetic oligonucleotide
  Antisense strand to SEQ ID NO: 2444032
gacacaaacagauauguca

SEQ ID NO: 2444034 - RNA, 19 nt, Artificial Sequence
  Description of Artificial Sequence: Synthetic oligonucleotide
  Sense strand starting at position 3728 of SEQ ID NO: 1887038
aucuguuugugucccgaca

SEQ ID NO: 2444035 - RNA, 19 nt, Artificial Sequence
  Description of Artificial Sequence: Synthetic oligonucleotide
  Antisense strand to SEQ ID NO: 2444034
ugucgggacacaaacagau

SEQ ID NO: 2444036 - RNA, 19 nt, Artificial Sequence
  Description of Artificial Sequence: Synthetic oligonucleotide
  Sense strand starting at position 3735 of SEQ ID NO: 1887038
ugugucccgacauagauau

SEQ ID NO: 2444037 - RNA, 19 nt, Artificial Sequence
  Description of Artificial Sequence: Synthetic oligonucleotide
  Antisense strand to SEQ ID NO: 2444036
auaucuaugucgggacaca

SEQ ID NO: 2444038 - RNA, 19 nt, Artificial Sequence
  Description of Artificial Sequence: Synthetic oligonucleotide
  Sense strand starting at position 3742 of SEQ ID NO: 1887038
cgacauagauauuagcuau

SEQ ID NO: 2444039 - RNA, 19 nt, Artificial Sequence
  Description of Artificial Sequence: Synthetic oligonucleotide
  Antisense strand to SEQ ID NO: 2444038
auagcuaauaucuaugucg

SEQ ID NO: 2444040 - RNA, 19 nt, Artificial Sequence
  Description of Artificial Sequence: Synthetic oligonucleotide
  Sense strand starting at position 3748 of SEQ ID NO: 1887038
agauauuagcuauguuccu

SEQ ID NO: 2444041 - RNA, 19 nt, Artificial Sequence
  Description of Artificial Sequence: Synthetic oligonucleotide
  Antisense strand to SEQ ID NO: 2444040
aggaacauagcuaauaucu

SEQ ID NO: 2444042 - RNA, 19 nt, Artificial Sequence
  Description of Artificial Sequence: Synthetic oligonucleotide
  Sense strand starting at position 235 of SEQ ID NO: 1887039
guuccaucguccucagaac

SEQ ID NO: 2444043 - RNA, 19 nt, Artificial Sequence
  Description of Artificial Sequence: Synthetic oligonucleotide
  Antisense strand to SEQ ID NO: 2444042
guucugaggacgauggaac

SEQ ID NO: 2444044 - RNA, 19 nt, Artificial Sequence
  Description of Artificial Sequence: Synthetic oligonucleotide
  Sense strand starting at position 236 of SEQ ID NO: 1887039
uuccaucguccucagaacu

SEQ ID NO: 2444045 - RNA, 19 nt, Artificial Sequence
  Description of Artificial Sequence: Synthetic oligonucleotide
  Antisense strand to SEQ ID NO: 2444044
aguucugaggacgauggaa

SEQ ID NO: 2444046 - RNA, 19 nt, Artificial Sequence
  Description of Artificial Sequence: Synthetic oligonucleotide
  Sense strand starting at position 276 of SEQ ID NO: 1887039
ccuacuuugucacuaguuu

SEQ ID NO: 2444047 - RNA, 19 nt, Artificial Sequence
  Description of Artificial Sequence: Synthetic oligonucleotide
  Antisense strand to SEQ ID NO: 2444046
aaacuagugacaaaguagg

SEQ ID NO: 2444048 - RNA, 19 nt, Artificial Sequence
  Description of Artificial Sequence: Synthetic oligonucleotide
  Sense strand starting at position 319 of SEQ ID NO: 1887039
agaauagaauugucacagu

SEQ ID NO: 2444049 - RNA, 19 nt, Artificial Sequence
  Description of Artificial Sequence: Synthetic oligonucleotide
  Antisense strand to SEQ ID NO: 2444048
acugugacaauucuauucu

SEQ ID NO: 2444050 - RNA, 19 nt, Artificial Sequence
  Description of Artificial Sequence: Synthetic oligonucleotide
  Sense strand starting at position 330 of SEQ ID NO: 1887039
gucacaguuggucagaagu

SEQ ID NO: 2444051 - RNA, 19 nt, Artificial Sequence
  Description of Artificial Sequence: Synthetic oligonucleotide
  Antisense strand to SEQ ID NO: 2444050
acuucugaccaacugugac

SEQ ID NO: 2444052 - RNA, 19 nt, Artificial Sequence
  Description of Artificial Sequence: Synthetic oligonucleotide
  Sense strand starting at position 368 of SEQ ID NO: 1887039
uccuuccaagaaugugaau

SEQ ID NO: 2444053 - RNA, 19 nt, Artificial Sequence
  Description of Artificial Sequence: Synthetic oligonucleotide
  Antisense strand to SEQ ID NO: 2444052
auucacauucuuggaagga

SEQ ID NO: 2444054 - RNA, 19 nt, Artificial Sequence
  Description of Artificial Sequence: Synthetic oligonucleotide
  Sense strand starting at position 371 of SEQ ID NO: 1887039
uuccaagaaugugaauuua

SEQ ID NO: 2444055 - RNA, 19 nt, Artificial Sequence
  Description of Artificial Sequence: Synthetic oligonucleotide
  Antisense strand to SEQ ID NO: 2444054
uaaauucacauucuuggaa

SEQ ID NO: 2444056 - RNA, 19 nt, Artificial Sequence
  Description of Artificial Sequence: Synthetic oligonucleotide
  Sense strand starting at position 381 of SEQ ID NO: 1887039
gugaauuuagguugccuga

SEQ ID NO: 2444057 - RNA, 19 nt, Artificial Sequence
  Description of Artificial Sequence: Synthetic oligonucleotide
  Antisense strand to SEQ ID NO: 2444056
ucaggcaaccuaaauucac

SEQ ID NO: 2444058 - RNA, 19 nt, Artificial Sequence
  Description of Artificial Sequence: Synthetic oligonucleotide
  Sense strand starting at position 408 of SEQ ID NO: 1887039
uauuguauuugaugaugga

SEQ ID NO: 2444059 - RNA, 19 nt, Artificial Sequence
  Description of Artificial Sequence: Synthetic oligonucleotide
  Antisense strand to SEQ ID NO: 2444058
uccaucaucaaauacaaua

SEQ ID NO: 2444060 - RNA, 19 nt, Artificial Sequence
  Description of Artificial Sequence: Synthetic oligonucleotide
  Sense strand starting at position 442 of SEQ ID NO: 1887039
uauauaaauguuugaggac

SEQ ID NO: 2444061 - RNA, 19 nt, Artificial Sequence
  Description of Artificial Sequence: Synthetic oligonucleotide
  Antisense strand to SEQ ID NO: 2444060
guccucaaacauuuauaua

SEQ ID NO: 2444062 - RNA, 19 nt, Artificial Sequence
  Description of Artificial Sequence: Synthetic oligonucleotide
  Sense strand starting at position 468 of SEQ ID NO: 1887039
caguguuuccagggauaug

SEQ ID NO: 2444063 - RNA, 19 nt, Artificial Sequence
  Description of Artificial Sequence: Synthetic oligonucleotide
  Antisense strand to SEQ ID NO: 2444062
cauaucccuggaaacacug

SEQ ID NO: 2444064 - RNA, 19 nt, Artificial Sequence
  Description of Artificial Sequence: Synthetic oligonucleotide
  Sense strand starting at position 494 of SEQ ID NO: 1887039
ugaacuaguugaucaguaa

SEQ ID NO: 2444065 - RNA, 19 nt, Artificial Sequence
  Description of Artificial Sequence: Synthetic oligonucleotide
  Antisense strand to SEQ ID NO: 2444064
uuacugaucaacuaguuca

SEQ ID NO: 2444066 - RNA, 19 nt, Artificial Sequence
  Description of Artificial Sequence: Synthetic oligonucleotide
  Sense strand starting at position 497 of SEQ ID NO: 1887039
acuaguugaucaguaaauc

SEQ ID NO: 2444067 - RNA, 19 nt, Artificial Sequence
  Description of Artificial Sequence: Synthetic oligonucleotide
  Antisense strand to SEQ ID NO: 2444066
gauuuacugaucaacuagu

SEQ ID NO: 2444068 - RNA, 19 nt, Artificial Sequence
  Description of Artificial Sequence: Synthetic oligonucleotide
  Sense strand starting at position 498 of SEQ ID NO: 1887039
cuaguugaucaguaaaucu

SEQ ID NO: 2444069 - RNA, 19 nt, Artificial Sequence
  Description of Artificial Sequence: Synthetic oligonucleotide
  Antisense strand to SEQ ID NO: 2444068
agauuuacugaucaacuag

SEQ ID NO: 2444070 - RNA, 19 nt, Artificial Sequence
  Description of Artificial Sequence: Synthetic oligonucleotide
  Sense strand starting at position 545 of SEQ ID NO: 1887039
ccugaugucucucccagaa

SEQ ID NO: 2444071 - RNA, 19 nt, Artificial Sequence
  Description of Artificial Sequence: Synthetic oligonucleotide
  Antisense strand to SEQ ID NO: 2444070
uucugggagagacaucagg

SEQ ID NO: 2444072 - RNA, 19 nt, Artificial Sequence
  Description of Artificial Sequence: Synthetic oligonucleotide
  Sense strand starting at position 627 of SEQ ID NO: 1887039
cauccugagugaguguaaa

SEQ ID NO: 2444073 - RNA, 19 nt, Artificial Sequence
  Description of Artificial Sequence: Synthetic oligonucleotide
  Antisense strand to SEQ ID NO: 2444072
uuuacacucacucaggaug

SEQ ID NO: 2444074 - RNA, 19 nt, Artificial Sequence
  Description of Artificial Sequence: Synthetic oligonucleotide
  Sense strand starting at position 686 of SEQ ID NO: 1887039
cgaccuggauucuuaugaa

SEQ ID NO: 2444075 - RNA, 19 nt, Artificial Sequence
  Description of Artificial Sequence: Synthetic oligonucleotide
  Antisense strand to SEQ ID NO: 2444074
uucauaagaauccaggucg

SEQ ID NO: 2444076 - RNA, 19 nt, Artificial Sequence
  Description of Artificial Sequence: Synthetic oligonucleotide
  Sense strand starting at position 742 of SEQ ID NO: 1887039
cuguuagucucucugauga

SEQ ID NO: 2444077 - RNA, 19 nt, Artificial Sequence
  Description of Artificial Sequence: Synthetic oligonucleotide
  Antisense strand to SEQ ID NO: 2444076
ucaucagagagacuaacag

SEQ ID NO: 2444078 - RNA, 19 nt, Artificial Sequence
  Description of Artificial Sequence: Synthetic oligonucleotide
  Sense strand starting at position 1041 of SEQ ID NO: 1887039
gagaauugggccuggguca

SEQ ID NO: 2444079 - RNA, 19 nt, Artificial Sequence
  Description of Artificial Sequence: Synthetic oligonucleotide
  Antisense strand to SEQ ID NO: 2444078
ugacccaggcccaauucuc

SEQ ID NO: 2444080 - RNA, 19 nt, Artificial Sequence
  Description of Artificial Sequence: Synthetic oligonucleotide
  Sense strand starting at position 1042 of SEQ ID NO: 1887039
agaauugggccugggucaa

SEQ ID NO: 2444081 - RNA, 19 nt, Artificial Sequence
  Description of Artificial Sequence: Synthetic oligonucleotide
  Antisense strand to SEQ ID NO: 2444080
uugacccaggcccaauucu

SEQ ID NO: 2444082 - RNA, 19 nt, Artificial Sequence
  Description of Artificial Sequence: Synthetic oligonucleotide
  Sense strand starting at position 1423 of SEQ ID NO: 1887039
aagagaaggugcucucaua

SEQ ID NO: 2444083 - RNA, 19 nt, Artificial Sequence
  Description of Artificial Sequence: Synthetic oligonucleotide
  Antisense strand to SEQ ID NO: 2444082
uaugagagcaccuucucuu

SEQ ID NO: 2444084 - RNA, 19 nt, Artificial Sequence
  Description of Artificial Sequence: Synthetic oligonucleotide
  Sense strand starting at position 1452 of SEQ ID NO: 1887039
ggcauuggaucaguacgua

SEQ ID NO: 2444085 - RNA, 19 nt, Artificial Sequence
  Description of Artificial Sequence: Synthetic oligonucleotide
  Antisense strand to SEQ ID NO: 2444084
uacguacugauccaaugcc

SEQ ID NO: 2444086 - RNA, 19 nt, Artificial Sequence
  Description of Artificial Sequence: Synthetic oligonucleotide
  Sense strand starting at position 1823 of SEQ ID NO: 1887039
ucgugcugucugcuuaaca

SEQ ID NO: 2444087 - RNA, 19 nt, Artificial Sequence
  Description of Artificial Sequence: Synthetic oligonucleotide
  Antisense strand to SEQ ID NO: 2444086
uguuaagcagacagcacga

SEQ ID NO: 2444088 - RNA, 19 nt, Artificial Sequence
  Description of Artificial Sequence: Synthetic oligonucleotide
  Sense strand starting at position 2028 of SEQ ID NO: 1887039
guucucuugaggcagaacu

SEQ ID NO: 2444089 - RNA, 19 nt, Artificial Sequence
  Description of Artificial Sequence: Synthetic oligonucleotide
  Antisense strand to SEQ ID NO: 2444088
aguucugccucaagagaac

SEQ ID NO: 2444090 - RNA, 19 nt, Artificial Sequence
  Description of Artificial Sequence: Synthetic oligonucleotide
  Sense strand starting at position 2030 of SEQ ID NO: 1887039
ucucuugaggcagaacuua

SEQ ID NO: 2444091 - RNA, 19 nt, Artificial Sequence
  Description of Artificial Sequence: Synthetic oligonucleotide
  Antisense strand to SEQ ID NO: 2444090
uaaguucugccucaagaga

SEQ ID NO: 2444092 - RNA, 19 nt, Artificial Sequence
  Description of Artificial Sequence: Synthetic oligonucleotide
  Sense strand starting at position 2057 of SEQ ID NO: 1887039
gucucuggccaucaguauu

SEQ ID NO: 2444093 - RNA, 19 nt, Artificial Sequence
  Description of Artificial Sequence: Synthetic oligonucleotide
  Antisense strand to SEQ ID NO: 2444092
aauacugauggccagagac

SEQ ID NO: 2444094 - RNA, 19 nt, Artificial Sequence
  Description of Artificial Sequence: Synthetic oligonucleotide
  Sense strand starting at position 2077 of SEQ ID NO: 1887039
uugaaacugcccuggagau

SEQ ID NO: 2444095 - RNA, 19 nt, Artificial Sequence
  Description of Artificial Sequence: Synthetic oligonucleotide
  Antisense strand to SEQ ID NO: 2444094
aucuccagggcaguuucaa

SEQ ID NO: 2444096 - RNA, 19 nt, Artificial Sequence
  Description of Artificial Sequence: Synthetic oligonucleotide
  Sense strand starting at position 2078 of SEQ ID NO: 1887039
ugaaacugcccuggagauu

SEQ ID NO: 2444097 - RNA, 19 nt, Artificial Sequence
  Description of Artificial Sequence: Synthetic oligonucleotide
  Antisense strand to SEQ ID NO: 2444096
aaucuccagggcaguuuca

SEQ ID NO: 2444098 - RNA, 19 nt, Artificial Sequence
  Description of Artificial Sequence: Synthetic oligonucleotide
  Sense strand starting at position 2138 of SEQ ID NO: 1887039
uggcaagaaguuugucaca

SEQ ID NO: 2444099 - RNA, 19 nt, Artificial Sequence
  Description of Artificial Sequence: Synthetic oligonucleotide
  Antisense strand to SEQ ID NO: 2444098
ugugacaaacuucuugcca

SEQ ID NO: 2444100 - RNA, 19 nt, Artificial Sequence
  Description of Artificial Sequence: Synthetic oligonucleotide
  Sense strand starting at position 2140 of SEQ ID NO: 1887039
gcaagaaguuugucacaag

SEQ ID NO: 2444101 - RNA, 19 nt, Artificial Sequence
  Description of Artificial Sequence: Synthetic oligonucleotide
  Antisense strand to SEQ ID NO: 2444100
cuugugacaaacuucuugc

SEQ ID NO: 2444102 - RNA, 19 nt, Artificial Sequence
  Description of Artificial Sequence: Synthetic oligonucleotide
  Sense strand starting at position 2173 of SEQ ID NO: 1887039
uugugucacuucuccagga

SEQ ID NO: 2444103 - RNA, 19 nt, Artificial Sequence
  Description of Artificial Sequence: Synthetic oligonucleotide
  Antisense strand to SEQ ID NO: 2444102
uccuggagaagugacacaa

SEQ ID NO: 2444104 - RNA, 19 nt, Artificial Sequence
  Description of Artificial Sequence: Synthetic oligonucleotide
  Sense strand starting at position 2174 of SEQ ID NO: 1887039
ugugucacuucuccaggau

SEQ ID NO: 2444105 - RNA, 19 nt, Artificial Sequence
  Description of Artificial Sequence: Synthetic oligonucleotide
  Antisense strand to SEQ ID NO: 2444104
auccuggagaagugacaca

SEQ ID NO: 2444106 - RNA, 19 nt, Artificial Sequence
  Description of Artificial Sequence: Synthetic oligonucleotide
  Sense strand starting at position 2175 of SEQ ID NO: 1887039
gugucacuucuccaggaug

SEQ ID NO: 2444107 - RNA, 19 nt, Artificial Sequence
  Description of Artificial Sequence: Synthetic oligonucleotide
  Antisense strand to SEQ ID NO: 2444106
cauccuggagaagugacac

SEQ ID NO: 2444108 - RNA, 19 nt, Artificial Sequence
  Description of Artificial Sequence: Synthetic oligonucleotide
  Sense strand starting at position 2484 of SEQ ID NO: 1887039
augagcucacaguguagua

SEQ ID NO: 2444109 - RNA, 19 nt, Artificial Sequence
  Description of Artificial Sequence: Synthetic oligonucleotide
  Antisense strand to SEQ ID NO: 2444108
uacuacacugugagcucau

SEQ ID NO: 2444110 - RNA, 19 nt, Artificial Sequence
  Description of Artificial Sequence: Synthetic oligonucleotide
  Sense strand starting at position 2496 of SEQ ID NO: 1887039
uguaguaagauuggaccau

SEQ ID NO: 2444111 - RNA, 19 nt, Artificial Sequence
  Description of Artificial Sequence: Synthetic oligonucleotide
  Antisense strand to SEQ ID NO: 2444110
augguccaaucuuacuaca

SEQ ID NO: 2444112 - RNA, 19 nt, Artificial Sequence
  Description of Artificial Sequence: Synthetic oligonucleotide
  Sense strand starting at position 2508 of SEQ ID NO: 1887039
ggaccaucuucccucugua

SEQ ID NO: 2444113 - RNA, 19 nt, Artificial Sequence
  Description of Artificial Sequence: Synthetic oligonucleotide
  Antisense strand to SEQ ID NO: 2444112
uacagagggaagauggucc

SEQ ID NO: 2444114 - RNA, 19 nt, Artificial Sequence
  Description of Artificial Sequence: Synthetic oligonucleotide
  Sense strand starting at position 2511 of SEQ ID NO: 1887039
ccaucuucccucuguagga

SEQ ID NO: 2444115 - RNA, 19 nt, Artificial Sequence
  Description of Artificial Sequence: Synthetic oligonucleotide
  Antisense strand to SEQ ID NO: 2444114
uccuacagagggaagaugg

SEQ ID NO: 2444116 - RNA, 19 nt, Artificial Sequence
  Description of Artificial Sequence: Synthetic oligonucleotide
  Sense strand starting at position 3004 of SEQ ID NO: 1887039
cccagagagccacguuuaa

SEQ ID NO: 2444117 - RNA, 19 nt, Artificial Sequence
  Description of Artificial Sequence: Synthetic oligonucleotide
  Antisense strand to SEQ ID NO: 2444116
uuaaacguggcucucuggg

SEQ ID NO: 2444118 - RNA, 19 nt, Artificial Sequence
  Description of Artificial Sequence: Synthetic oligonucleotide
  Sense strand starting at position 3013 of SEQ ID NO: 1887039
ccacguuuaagcugagaca

SEQ ID NO: 2444119 - RNA, 19 nt, Artificial Sequence
  Description of Artificial Sequence: Synthetic oligonucleotide
  Antisense strand to SEQ ID NO: 2444118
ugucucagcuuaaacgugg

SEQ ID NO: 2444120 - RNA, 19 nt, Artificial Sequence
  Description of Artificial Sequence: Synthetic oligonucleotide
  Sense strand starting at position 3014 of SEQ ID NO: 1887039
cacguuuaagcugagacaa

SEQ ID NO: 2444121 - RNA, 19 nt, Artificial Sequence
  Description of Artificial Sequence: Synthetic oligonucleotide
  Antisense strand to SEQ ID NO: 2444120
uugucucagcuuaaacgug

SEQ ID NO: 2444122 - RNA, 19 nt, Artificial Sequence
  Description of Artificial Sequence: Synthetic oligonucleotide
  Sense strand starting at position 9 of SEQ ID NO: 1887040
aaagcacugcuguguacaa

SEQ ID NO: 2444123 - RNA, 19 nt, Artificial Sequence
  Description of Artificial Sequence: Synthetic oligonucleotide
  Antisense strand to SEQ ID NO: 2444122
uuguacacagcagugcuuu

SEQ ID NO: 2444124 - RNA, 19 nt, Artificial Sequence
  Description of Artificial Sequence: Synthetic oligonucleotide
  Sense strand starting at position 203 of SEQ ID NO: 1887040
cagguaucacaucgaaucu

SEQ ID NO: 2444125 - RNA, 19 nt, Artificial Sequence
  Description of Artificial Sequence: Synthetic oligonucleotide
  Antisense strand to SEQ ID NO: 2444124
agauucgaugugauaccug

SEQ ID NO: 2444126 - RNA, 19 nt, Artificial Sequence
  Description of Artificial Sequence: Synthetic oligonucleotide
  Sense strand starting at position 231 of SEQ ID NO: 1887040
gguucaaaucucggugcuu

SEQ ID NO: 2444127 - RNA, 19 nt, Artificial Sequence
  Description of Artificial Sequence: Synthetic oligonucleotide
  Antisense strand to SEQ ID NO: 2444126
aagcaccgagauuugaacc

SEQ ID NO: 2444128 - RNA, 19 nt, Artificial Sequence
  Description of Artificial Sequence: Synthetic oligonucleotide
  Sense strand starting at position 267 of SEQ ID NO: 1887040
ggaucuuaauugugaagua

SEQ ID NO: 2444129 - RNA, 19 nt, Artificial Sequence
  Description of Artificial Sequence: Synthetic oligonucleotide
  Antisense strand to SEQ ID NO: 2444128
uacuucacaauuaagaucc

SEQ ID NO: 2444130 - RNA, 19 nt, Artificial Sequence
  Description of Artificial Sequence: Synthetic oligonucleotide
  Sense strand starting at position 268 of SEQ ID NO: 1887040
gaucuuaauugugaaguaa

SEQ ID NO: 2444131 - RNA, 19 nt, Artificial Sequence
  Description of Artificial Sequence: Synthetic oligonucleotide
  Antisense strand to SEQ ID NO: 2444130
uuacuucacaauuaagauc

SEQ ID NO: 2444132 - RNA, 19 nt, Artificial Sequence
  Description of Artificial Sequence: Synthetic oligonucleotide
  Sense strand starting at position 313 of SEQ ID NO: 1887040
caggaugucagaggugaaa

SEQ ID NO: 2444133 - RNA, 19 nt, Artificial Sequence
  Description of Artificial Sequence: Synthetic oligonucleotide
  Antisense strand to SEQ ID NO: 2444132
uuucaccucugacauccug

SEQ ID NO: 2444134 - RNA, 19 nt, Artificial Sequence
  Description of Artificial Sequence: Synthetic oligonucleotide
  Sense strand starting at position 495 of SEQ ID NO: 1887040
gguagaagguuauuacgaa

SEQ ID NO: 2444135 - RNA, 19 nt, Artificial Sequence
  Description of Artificial Sequence: Synthetic oligonucleotide
  Antisense strand to SEQ ID NO: 2444134
uucguaauaaccuucuacc

SEQ ID NO: 2444136 - RNA, 19 nt, Artificial Sequence
  Description of Artificial Sequence: Synthetic oligonucleotide
  Sense strand starting at position 496 of SEQ ID NO: 1887040
guagaagguuauuacgaaa

SEQ ID NO: 2444137 - RNA, 19 nt, Artificial Sequence
  Description of Artificial Sequence: Synthetic oligonucleotide
  Antisense strand to SEQ ID NO: 2444136
uuucguaauaaccuucuac

SEQ ID NO: 2444138 - RNA, 19 nt, Artificial Sequence
  Description of Artificial Sequence: Synthetic oligonucleotide
  Sense strand starting at position 499 of SEQ ID NO: 1887040
gaagguuauuacgaaauug

SEQ ID NO: 2444139 - RNA, 19 nt, Artificial Sequence
  Description of Artificial Sequence: Synthetic oligonucleotide
  Antisense strand to SEQ ID NO: 2444138
caauuucguaauaaccuuc

SEQ ID NO: 2444140 - RNA, 19 nt, Artificial Sequence
  Description of Artificial Sequence: Synthetic oligonucleotide
  Sense strand starting at position 507 of SEQ ID NO: 1887040
uuacgaaauugcuuccaua

SEQ ID NO: 2444141 - RNA, 19 nt, Artificial Sequence
  Description of Artificial Sequence: Synthetic oligonucleotide
  Antisense strand to SEQ ID NO: 2444140
uauggaagcaauuucguaa

SEQ ID NO: 2444142 - RNA, 19 nt, Artificial Sequence
  Description of Artificial Sequence: Synthetic oligonucleotide
  Sense strand starting at position 757 of SEQ ID NO: 1887040
augagaaacugucaaggga

SEQ ID NO: 2444143 - RNA, 19 nt, Artificial Sequence
  Description of Artificial Sequence: Synthetic oligonucleotide
  Antisense strand to SEQ ID NO: 2444142
ucccuugacaguuucucau

SEQ ID NO: 2444144 - RNA, 19 nt, Artificial Sequence
  Description of Artificial Sequence: Synthetic oligonucleotide
  Sense strand starting at position 779 of SEQ ID NO: 1887040
aguuguuagccuuugcuua

SEQ ID NO: 2444145 - RNA, 19 nt, Artificial Sequence
  Description of Artificial Sequence: Synthetic oligonucleotide
  Antisense strand to SEQ ID NO: 2444144
uaagcaaaggcuaacaacu

SEQ ID NO: 2444146 - RNA, 19 nt, Artificial Sequence
  Description of Artificial Sequence: Synthetic oligonucleotide
  Sense strand starting at position 780 of SEQ ID NO: 1887040
guuguuagccuuugcuuau

SEQ ID NO: 2444147 - RNA, 19 nt, Artificial Sequence
  Description of Artificial Sequence: Synthetic oligonucleotide
  Antisense strand to SEQ ID NO: 2444146
auaagcaaaggcuaacaac

SEQ ID NO: 2444148 - RNA, 19 nt, Artificial Sequence
  Description of Artificial Sequence: Synthetic oligonucleotide
  Sense strand starting at position 1008 of SEQ ID NO: 1887040
guuagcuuaugcuuuggaa

SEQ ID NO: 2444149 - RNA, 19 nt, Artificial Sequence
  Description of Artificial Sequence: Synthetic oligonucleotide
  Antisense strand to SEQ ID NO: 2444148
uuccaaagcauaagcuaac

SEQ ID NO: 2444150 - RNA, 19 nt, Artificial Sequence
  Description of Artificial Sequence: Synthetic oligonucleotide
  Sense strand starting at position 1117 of SEQ ID NO: 1887040
agagucuugcccugcccaa

SEQ ID NO: 2444151 - RNA, 19 nt, Artificial Sequence
  Description of Artificial Sequence: Synthetic oligonucleotide
  Antisense strand to SEQ ID NO: 2444150
uugggcagggcaagacucu

SEQ ID NO: 2444152 - RNA, 19 nt, Artificial Sequence
  Description of Artificial Sequence: Synthetic oligonucleotide
  Sense strand starting at position 1171 of SEQ ID NO: 1887040
gguugaauuguccaacaac

SEQ ID NO: 2444153 - RNA, 19 nt, Artificial Sequence
  Description of Artificial Sequence: Synthetic oligonucleotide
  Antisense strand to SEQ ID NO: 2444152
guuguuggacaauucaacc

SEQ ID NO: 2444154 - RNA, 19 nt, Artificial Sequence
  Description of Artificial Sequence: Synthetic oligonucleotide
  Sense strand starting at position 1317 of SEQ ID NO: 1887040
aaagucaacugagggauua

SEQ ID NO: 2444155 - RNA, 19 nt, Artificial Sequence
  Description of Artificial Sequence: Synthetic oligonucleotide
  Antisense strand to SEQ ID NO: 2444154
uaaucccucaguugacuuu

SEQ ID NO: 2444156 - RNA, 19 nt, Artificial Sequence
  Description of Artificial Sequence: Synthetic oligonucleotide
  Sense strand starting at position 1406 of SEQ ID NO: 1887040
gggcuuuaggcugagauug

SEQ ID NO: 2444157 - RNA, 19 nt, Artificial Sequence
  Description of Artificial Sequence: Synthetic oligonucleotide
  Antisense strand to SEQ ID NO: 2444156
caaucucagccuaaagccc

SEQ ID NO: 2444158 - RNA, 19 nt, Artificial Sequence
  Description of Artificial Sequence: Synthetic oligonucleotide
  Sense strand starting at position 1584 of SEQ ID NO: 1887040
agaguuucucuggaaaguu

SEQ ID NO: 2444159 - RNA, 19 nt, Artificial Sequence
  Description of Artificial Sequence: Synthetic oligonucleotide
  Antisense strand to SEQ ID NO: 2444158
aacuuuccagagaaacucu

SEQ ID NO: 2444160 - RNA, 19 nt, Artificial Sequence
  Description of Artificial Sequence: Synthetic oligonucleotide
  Sense strand starting at position 1596 of SEQ ID NO: 1887040
gaaaguucuggauguaguu

SEQ ID NO: 2444161 - RNA, 19 nt, Artificial Sequence
  Description of Artificial Sequence: Synthetic oligonucleotide
  Antisense strand to SEQ ID NO: 2444160
aacuacauccagaacuuuc

SEQ ID NO: 2444162 - RNA, 19 nt, Artificial Sequence
  Description of Artificial Sequence: Synthetic oligonucleotide
  Sense strand starting at position 1710 of SEQ ID NO: 1887040
agaguugacugcuccucau

SEQ ID NO: 2444163 - RNA, 19 nt, Artificial Sequence
  Description of Artificial Sequence: Synthetic oligonucleotide
  Antisense strand to SEQ ID NO: 2444162
augaggagcagucaacucu

SEQ ID NO: 2444164 - RNA, 19 nt, Artificial Sequence
  Description of Artificial Sequence: Synthetic oligonucleotide
  Sense strand starting at position 1812 of SEQ ID NO: 1887040
cuuguugcuccuggaugaa

SEQ ID NO: 2444165 - RNA, 19 nt, Artificial Sequence
  Description of Artificial Sequence: Synthetic oligonucleotide
  Antisense strand to SEQ ID NO: 2444164
uucauccaggagcaacaag

SEQ ID NO: 2444166 - RNA, 19 nt, Artificial Sequence
  Description of Artificial Sequence: Synthetic oligonucleotide
  Sense strand starting at position 1928 of SEQ ID NO: 1887040
gccgugaaucgggugguuu

SEQ ID NO: 2444167 - RNA, 19 nt, Artificial Sequence
  Description of Artificial Sequence: Synthetic oligonucleotide
  Antisense strand to SEQ ID NO: 2444166
aaaccacccgauucacggc

SEQ ID NO: 2444168 - RNA, 19 nt, Artificial Sequence
  Description of Artificial Sequence: Synthetic oligonucleotide
  Sense strand starting at position 1929 of SEQ ID NO: 1887040
ccgugaaucgggugguuua

SEQ ID NO: 2444169 - RNA, 19 nt, Artificial Sequence
  Description of Artificial Sequence: Synthetic oligonucleotide
  Antisense strand to SEQ ID NO: 2444168
uaaaccacccgauucacgg

SEQ ID NO: 2444170 - RNA, 19 nt, Artificial Sequence
  Description of Artificial Sequence: Synthetic oligonucleotide
  Sense strand starting at position 1930 of SEQ ID NO: 1887040
cgugaaucgggugguuuaa

SEQ ID NO: 2444171 - RNA, 19 nt, Artificial Sequence
  Description of Artificial Sequence: Synthetic oligonucleotide
  Antisense strand to SEQ ID NO: 2444170
uuaaaccacccgauucacg

SEQ ID NO: 2444172 - RNA, 19 nt, Artificial Sequence
  Description of Artificial Sequence: Synthetic oligonucleotide
  Sense strand starting at position 1942 of SEQ ID NO: 1887040
gguuuaauguuguuguguu

SEQ ID NO: 2444173 - RNA, 19 nt, Artificial Sequence
  Description of Artificial Sequence: Synthetic oligonucleotide
  Antisense strand to SEQ ID NO: 2444172
aacacaacaacauuaaacc

SEQ ID NO: 2444174 - RNA, 19 nt, Artificial Sequence
  Description of Artificial Sequence: Synthetic oligonucleotide
  Sense strand starting at position 1949 of SEQ ID NO: 1887040
uguuguuguguucagaaac

SEQ ID NO: 2444175 - RNA, 19 nt, Artificial Sequence
  Description of Artificial Sequence: Synthetic oligonucleotide
  Antisense strand to SEQ ID NO: 2444174
guuucugaacacaacaaca

SEQ ID NO: 2444176 - RNA, 19 nt, Artificial Sequence
  Description of Artificial Sequence: Synthetic oligonucleotide
  Sense strand starting at position 2195 of SEQ ID NO: 1887040
ccugauagcucagauucca

SEQ ID NO: 2444177 - RNA, 19 nt, Artificial Sequence
  Description of Artificial Sequence: Synthetic oligonucleotide
  Antisense strand to SEQ ID NO: 2444176
uggaaucugagcuaucagg

SEQ ID NO: 2444178 - RNA, 19 nt, Artificial Sequence
  Description of Artificial Sequence: Synthetic oligonucleotide
  Sense strand starting at position 2284 of SEQ ID NO: 1887040
gggccucuuugauauaccu

SEQ ID NO: 2444179 - RNA, 19 nt, Artificial Sequence
  Description of Artificial Sequence: Synthetic oligonucleotide
  Antisense strand to SEQ ID NO: 2444178
agguauaucaaagaggccc

SEQ ID NO: 2444180 - RNA, 19 nt, Artificial Sequence
  Description of Artificial Sequence: Synthetic oligonucleotide
  Sense strand starting at position 2293 of SEQ ID NO: 1887040
ugauauaccugcucagucu

SEQ ID NO: 2444181 - RNA, 19 nt, Artificial Sequence
  Description of Artificial Sequence: Synthetic oligonucleotide
  Antisense strand to SEQ ID NO: 2444180
agacugagcagguauauca

SEQ ID NO: 2444182 - RNA, 19 nt, Artificial Sequence
  Description of Artificial Sequence: Synthetic oligonucleotide
  Sense strand starting at position 2327 of SEQ ID NO: 1887040
gcuggaggucuccacagau

SEQ ID NO: 2444183 - RNA, 19 nt, Artificial Sequence
  Description of Artificial Sequence: Synthetic oligonucleotide
  Antisense strand to SEQ ID NO: 2444182
aucuguggagaccuccagc

SEQ ID NO: 2444184 - RNA, 19 nt, Artificial Sequence
  Description of Artificial Sequence: Synthetic oligonucleotide
  Sense strand starting at position 2579 of SEQ ID NO: 1887040
cgggaauucuagggaacaa

SEQ ID NO: 2444185 - RNA, 19 nt, Artificial Sequence
  Description of Artificial Sequence: Synthetic oligonucleotide
  Antisense strand to SEQ ID NO: 2444184
uuguucccuagaauucccg

SEQ ID NO: 2444186 - RNA, 19 nt, Artificial Sequence
  Description of Artificial Sequence: Synthetic oligonucleotide
  Sense strand starting at position 2726 of SEQ ID NO: 1887040
uuccgaaucuucgcagaau

SEQ ID NO: 2444187 - RNA, 19 nt, Artificial Sequence
  Description of Artificial Sequence: Synthetic oligonucleotide
  Antisense strand to SEQ ID NO: 2444186
auucugcgaagauucggaa

SEQ ID NO: 2444188 - RNA, 19 nt, Artificial Sequence
  Description of Artificial Sequence: Synthetic oligonucleotide
  Sense strand starting at position 2729 of SEQ ID NO: 1887040
cgaaucuucgcagaauaag

SEQ ID NO: 2444189 - RNA, 19 nt, Artificial Sequence
  Description of Artificial Sequence: Synthetic oligonucleotide
  Antisense strand to SEQ ID NO: 2444188
cuuauucugcgaagauucg

SEQ ID NO: 2444190 - RNA, 19 nt, Artificial Sequence
  Description of Artificial Sequence: Synthetic oligonucleotide
  Sense strand starting at position 2754 of SEQ ID NO: 1887040
gaggcuaaggacugggauu

SEQ ID NO: 2444191 - RNA, 19 nt, Artificial Sequence
  Description of Artificial Sequence: Synthetic oligonucleotide
  Antisense strand to SEQ ID NO: 2444190
aaucccaguccuuagccuc

SEQ ID NO: 2444192 - RNA, 19 nt, Artificial Sequence
  Description of Artificial Sequence: Synthetic oligonucleotide
  Sense strand starting at position 3256 of SEQ ID NO: 1887040
caaauuuacgagcggcaga

SEQ ID NO: 2444193 - RNA, 19 nt, Artificial Sequence
  Description of Artificial Sequence: Synthetic oligonucleotide
  Antisense strand to SEQ ID NO: 2444192
ucugccgcucguaaauuug

SEQ ID NO: 2444194 - RNA, 19 nt, Artificial Sequence
  Description of Artificial Sequence: Synthetic oligonucleotide
  Sense strand starting at position 3309 of SEQ ID NO: 1887040
cuuuguccgcguggagaga

SEQ ID NO: 2444195 - RNA, 19 nt, Artificial Sequence
  Description of Artificial Sequence: Synthetic oligonucleotide
  Antisense strand to SEQ ID NO: 2444194
ucucuccacgcggacaaag

SEQ ID NO: 2444196 - RNA, 19 nt, Artificial Sequence
  Description of Artificial Sequence: Synthetic oligonucleotide
  Sense strand starting at position 3516 of SEQ ID NO: 1887040
ccugcuucucgcuagagca

SEQ ID NO: 2444197 - RNA, 19 nt, Artificial Sequence
  Description of Artificial Sequence: Synthetic oligonucleotide
  Antisense strand to SEQ ID NO: 2444196
ugcucuagcgagaagcagg

SEQ ID NO: 2444198 - RNA, 19 nt, Artificial Sequence
  Description of Artificial Sequence: Synthetic oligonucleotide
  Sense strand starting at position 3605 of SEQ ID NO: 1887040
uugcaucuuuccgcugaaa

SEQ ID NO: 2444199 - RNA, 19 nt, Artificial Sequence
  Description of Artificial Sequence: Synthetic oligonucleotide
  Antisense strand to SEQ ID NO: 2444198
uuucagcggaaagaugcaa

SEQ ID NO: 2444200 - RNA, 19 nt, Artificial Sequence
  Description of Artificial Sequence: Synthetic oligonucleotide
  Sense strand starting at position 3607 of SEQ ID NO: 1887040
gcaucuuuccgcugaaagc

SEQ ID NO: 2444201 - RNA, 19 nt, Artificial Sequence
  Description of Artificial Sequence: Synthetic oligonucleotide
  Antisense strand to SEQ ID NO: 2444200
gcuuucagcggaaagaugc

SEQ ID NO: 2444202 - RNA, 19 nt, Artificial Sequence
  Description of Artificial Sequence: Synthetic oligonucleotide
  Sense strand starting at position 436 of SEQ ID NO: 1887041
cuagcauucguagggaaug

SEQ ID NO: 2444203 - RNA, 19 nt, Artificial Sequence
  Description of Artificial Sequence: Synthetic oligonucleotide
  Antisense strand to SEQ ID NO: 2444202
cauucccuacgaaugcuag

SEQ ID NO: 2444204 - RNA, 19 nt, Artificial Sequence
  Description of Artificial Sequence: Synthetic oligonucleotide
  Sense strand starting at position 891 of SEQ ID NO: 1887041
ggagguauuccucagcucu

SEQ ID NO: 2444205 - RNA, 19 nt, Artificial Sequence
  Description of Artificial Sequence: Synthetic oligonucleotide
  Antisense strand to SEQ ID NO: 2444204
agagcugaggaauaccucc

SEQ ID NO: 2444206 - RNA, 19 nt, Artificial Sequence
  Description of Artificial Sequence: Synthetic oligonucleotide
  Sense strand starting at position 899 of SEQ ID NO: 1887041
uccucagcucuucggugau

SEQ ID NO: 2444207 - RNA, 19 nt, Artificial Sequence
  Description of Artificial Sequence: Synthetic oligonucleotide
  Antisense strand to SEQ ID NO: 2444206
aucaccgaagagcugagga

SEQ ID NO: 2444208 - RNA, 19 nt, Artificial Sequence
  Description of Artificial Sequence: Synthetic oligonucleotide
  Sense strand starting at position 901 of SEQ ID NO: 1887041
cucagcucuucggugauaa

SEQ ID NO: 2444209 - RNA, 19 nt, Artificial Sequence
  Description of Artificial Sequence: Synthetic oligonucleotide
  Antisense strand to SEQ ID NO: 2444208
uuaucaccgaagagcugag

SEQ ID NO: 2444210 - RNA, 19 nt, Artificial Sequence
  Description of Artificial Sequence: Synthetic oligonucleotide
  Sense strand starting at position 902 of SEQ ID NO: 1887041
ucagcucuucggugauaaa

SEQ ID NO: 2444211 - RNA, 19 nt, Artificial Sequence
  Description of Artificial Sequence: Synthetic oligonucleotide
  Antisense strand to SEQ ID NO: 2444210
uuuaucaccgaagagcuga

SEQ ID NO: 2444212 - RNA, 19 nt, Artificial Sequence
  Description of Artificial Sequence: Synthetic oligonucleotide
  Sense strand starting at position 903 of SEQ ID NO: 1887041
cagcucuucggugauaaac

SEQ ID NO: 2444213 - RNA, 19 nt, Artificial Sequence
  Description of Artificial Sequence: Synthetic oligonucleotide
  Antisense strand to SEQ ID NO: 2444212
guuuaucaccgaagagcug

SEQ ID NO: 2444214 - RNA, 19 nt, Artificial Sequence
  Description of Artificial Sequence: Synthetic oligonucleotide
  Sense strand starting at position 914 of SEQ ID NO: 1887041
ugauaaacugcugauguau

SEQ ID NO: 2444215 - RNA, 19 nt, Artificial Sequence
  Description of Artificial Sequence: Synthetic oligonucleotide
  Antisense strand to SEQ ID NO: 2444214
auacaucagcaguuuauca

SEQ ID NO: 2444216 - RNA, 19 nt, Artificial Sequence
  Description of Artificial Sequence: Synthetic oligonucleotide
  Sense strand starting at position 926 of SEQ ID NO: 1887041
gauguauugcacugccuga

SEQ ID NO: 2444217 - RNA, 19 nt, Artificial Sequence
  Description of Artificial Sequence: Synthetic oligonucleotide
  Antisense strand to SEQ ID NO: 2444216
ucaggcagugcaauacauc

SEQ ID NO: 2444218 - RNA, 19 nt, Artificial Sequence
  Description of Artificial Sequence: Synthetic oligonucleotide
  Sense strand starting at position 955 of SEQ ID NO: 1887041
guuggaacaugauaaauac

SEQ ID NO: 2444219 - RNA, 19 nt, Artificial Sequence
  Description of Artificial Sequence: Synthetic oligonucleotide
  Antisense strand to SEQ ID NO: 2444218
guauuuaucauguuccaac

SEQ ID NO: 2444220 - RNA, 19 nt, Artificial Sequence
  Description of Artificial Sequence: Synthetic oligonucleotide
  Sense strand starting at position 964 of SEQ ID NO: 1887041
ugauaaauacugcagaugu

SEQ ID NO: 2444221 - RNA, 19 nt, Artificial Sequence
  Description of Artificial Sequence: Synthetic oligonucleotide
  Antisense strand to SEQ ID NO: 2444220
acaucugcaguauuuauca

SEQ ID NO: 2444222 - RNA, 19 nt, Artificial Sequence
  Description of Artificial Sequence: Synthetic oligonucleotide
  Sense strand starting at position 1012 of SEQ ID NO: 1887041
uagagauggaaucgcaaga

SEQ ID NO: 2444223 - RNA, 19 nt, Artificial Sequence
  Description of Artificial Sequence: Synthetic oligonucleotide
  Antisense strand to SEQ ID NO: 2444222
ucuugcgauuccaucucua

SEQ ID NO: 2444224 - RNA, 19 nt, Artificial Sequence
  Description of Artificial Sequence: Synthetic oligonucleotide
  Sense strand starting at position 1135 of SEQ ID NO: 1887041
ucauguauuugucuccacu

SEQ ID NO: 2444225 - RNA, 19 nt, Artificial Sequence
  Description of Artificial Sequence: Synthetic oligonucleotide
  Antisense strand to SEQ ID NO: 2444224
aguggagacaaauacauga

SEQ ID NO: 2444226 - RNA, 19 nt, Artificial Sequence
  Description of Artificial Sequence: Synthetic oligonucleotide
  Sense strand starting at position 1137 of SEQ ID NO: 1887041
auguauuugucuccacuuu

SEQ ID NO: 2444227 - RNA, 19 nt, Artificial Sequence
  Description of Artificial Sequence: Synthetic oligonucleotide
  Antisense strand to SEQ ID NO: 2444226
aaaguggagacaaauacau

SEQ ID NO: 2444228 - RNA, 19 nt, Artificial Sequence
  Description of Artificial Sequence: Synthetic oligonucleotide
  Sense strand starting at position 1319 of SEQ ID NO: 1887041
gugcauaaauggucaucau

SEQ ID NO: 2444229 - RNA, 19 nt, Artificial Sequence
  Description of Artificial Sequence: Synthetic oligonucleotide
  Antisense strand to SEQ ID NO: 2444228
augaugaccauuuaugcac

SEQ ID NO: 2444230 - RNA, 19 nt, Artificial Sequence
  Description of Artificial Sequence: Synthetic oligonucleotide
  Sense strand starting at position 1320 of SEQ ID NO: 1887041
ugcauaaauggucaucaua

SEQ ID NO: 2444231 - RNA, 19 nt, Artificial Sequence
  Description of Artificial Sequence: Synthetic oligonucleotide
  Antisense strand to SEQ ID NO: 2444230
uaugaugaccauuuaugca

SEQ ID NO: 2444232 - RNA, 19 nt, Artificial Sequence
  Description of Artificial Sequence: Synthetic oligonucleotide
  Sense strand starting at position 2004 of SEQ ID NO: 1887041
gugguacagccauggagau

SEQ ID NO: 2444233 - RNA, 19 nt, Artificial Sequence
  Description of Artificial Sequence: Synthetic oligonucleotide
  Antisense strand to SEQ ID NO: 2444232
aucuccauggcuguaccac

SEQ ID NO: 2444234 - RNA, 19 nt, Artificial Sequence
  Description of Artificial Sequence: Synthetic oligonucleotide
  Sense strand starting at position 2016 of SEQ ID NO: 1887041
uggagaugucacgauggua

SEQ ID NO: 2444235 - RNA, 19 nt, Artificial Sequence
  Description of Artificial Sequence: Synthetic oligonucleotide
  Antisense strand to SEQ ID NO: 2444234
uaccaucgugacaucucca

SEQ ID NO: 2444236 - RNA, 19 nt, Artificial Sequence
  Description of Artificial Sequence: Synthetic oligonucleotide
  Sense strand starting at position 2104 of SEQ ID NO: 1887041
aggcauuucuggccuguua

SEQ ID NO: 2444237 - RNA, 19 nt, Artificial Sequence
  Description of Artificial Sequence: Synthetic oligonucleotide
  Antisense strand to SEQ ID NO: 2444236
uaacaggccagaaaugccu

SEQ ID NO: 2444238 - RNA, 19 nt, Artificial Sequence
  Description of Artificial Sequence: Synthetic oligonucleotide
  Sense strand starting at position 2106 of SEQ ID NO: 1887041
gcauuucuggccuguuaag

SEQ ID NO: 2444239 - RNA, 19 nt, Artificial Sequence
  Description of Artificial Sequence: Synthetic oligonucleotide
  Antisense strand to SEQ ID NO: 2444238
cuuaacaggccagaaaugc

SEQ ID NO: 2444240 - RNA, 19 nt, Artificial Sequence
  Description of Artificial Sequence: Synthetic oligonucleotide
  Sense strand starting at position 2320 of SEQ ID NO: 1887041
gucuguugaaaccagagua

SEQ ID NO: 2444241 - RNA, 19 nt, Artificial Sequence
  Description of Artificial Sequence: Synthetic oligonucleotide
  Antisense strand to SEQ ID NO: 2444240
uacucugguuucaacagac

SEQ ID NO: 2444242 - RNA, 19 nt, Artificial Sequence
  Description of Artificial Sequence: Synthetic oligonucleotide
  Sense strand starting at position 2419 of SEQ ID NO: 1887041
ucacuuguaugagauauuu

SEQ ID NO: 2444243 - RNA, 19 nt, Artificial Sequence
  Description of Artificial Sequence: Synthetic oligonucleotide
  Antisense strand to SEQ ID NO: 2444242
aaauaucucauacaaguga

SEQ ID NO: 2444244 - RNA, 19 nt, Artificial Sequence
  Description of Artificial Sequence: Synthetic oligonucleotide
  Sense strand starting at position 2579 of SEQ ID NO: 1887041
aagaaauucuuguuguagg

SEQ ID NO: 2444245 - RNA, 19 nt, Artificial Sequence
  Description of Artificial Sequence: Synthetic oligonucleotide
  Antisense strand to SEQ ID NO: 2444244
ccuacaacaagaauuucuu

SEQ ID NO: 2444246 - RNA, 19 nt, Artificial Sequence
  Description of Artificial Sequence: Synthetic oligonucleotide
  Sense strand starting at position 2586 of SEQ ID NO: 1887041
ucuuguuguagguggauua

SEQ ID NO: 2444247 - RNA, 19 nt, Artificial Sequence
  Description of Artificial Sequence: Synthetic oligonucleotide
  Antisense strand to SEQ ID NO: 2444246
uaauccaccuacaacaaga

SEQ ID NO: 2444248 - RNA, 19 nt, Artificial Sequence
  Description of Artificial Sequence: Synthetic oligonucleotide
  Sense strand starting at position 3567 of SEQ ID NO: 1887041
aucuauaaugcuugaagug

SEQ ID NO: 2444249 - RNA, 19 nt, Artificial Sequence
  Description of Artificial Sequence: Synthetic oligonucleotide
  Antisense strand to SEQ ID NO: 2444248
cacuucaagcauuauagau

SEQ ID NO: 2444250 - RNA, 19 nt, Artificial Sequence
  Description of Artificial Sequence: Synthetic oligonucleotide
  Sense strand starting at position 3568 of SEQ ID NO: 1887041
ucuauaaugcuugaagugu

SEQ ID NO: 2444251 - RNA, 19 nt, Artificial Sequence
  Description of Artificial Sequence: Synthetic oligonucleotide
  Antisense strand to SEQ ID NO: 2444250
acacuucaagcauuauaga

SEQ ID NO: 2444252 - RNA, 19 nt, Artificial Sequence
  Description of Artificial Sequence: Synthetic oligonucleotide
  Sense strand starting at position 3574 of SEQ ID NO: 1887041
augcuugaaguguguaacu

SEQ ID NO: 2444253 - RNA, 19 nt, Artificial Sequence
  Description of Artificial Sequence: Synthetic oligonucleotide
  Antisense strand to SEQ ID NO: 2444252
aguuacacacuucaagcau

SEQ ID NO: 2444254 - RNA, 19 nt, Artificial Sequence
  Description of Artificial Sequence: Synthetic oligonucleotide
  Sense strand starting at position 3576 of SEQ ID NO: 1887041
gcuugaaguguguaacuua

SEQ ID NO: 2444255 - RNA, 19 nt, Artificial Sequence
  Description of Artificial Sequence: Synthetic oligonucleotide
  Antisense strand to SEQ ID NO: 2444254
uaaguuacacacuucaagc

SEQ ID NO: 2444256 - RNA, 19 nt, Artificial Sequence
  Description of Artificial Sequence: Synthetic oligonucleotide
  Sense strand starting at position 3579 of SEQ ID NO: 1887041
ugaaguguguaacuuacaa

SEQ ID NO: 2444257 - RNA, 19 nt, Artificial Sequence
  Description of Artificial Sequence: Synthetic oligonucleotide
  Antisense strand to SEQ ID NO: 2444256
uuguaaguuacacacuuca

SEQ ID NO: 2444258 - RNA, 19 nt, Artificial Sequence
  Description of Artificial Sequence: Synthetic oligonucleotide
  Sense strand starting at position 3723 of SEQ ID NO: 1887041
aguuuagaaugggaugagu

SEQ ID NO: 2444259 - RNA, 19 nt, Artificial Sequence
  Description of Artificial Sequence: Synthetic oligonucleotide
  Antisense strand to SEQ ID NO: 2444258
acucaucccauucuaaacu

SEQ ID NO: 2444260 - RNA, 19 nt, Artificial Sequence
  Description of Artificial Sequence: Synthetic oligonucleotide
  Sense strand starting at position 3725 of SEQ ID NO: 1887041
uuuagaaugggaugagugu

SEQ ID NO: 2444261 - RNA, 19 nt, Artificial Sequence
  Description of Artificial Sequence: Synthetic oligonucleotide
  Antisense strand to SEQ ID NO: 2444260
acacucaucccauucuaaa

SEQ ID NO: 2444262 - RNA, 19 nt, Artificial Sequence
  Description of Artificial Sequence: Synthetic oligonucleotide
  Sense strand starting at position 3731 of SEQ ID NO: 1887041
augggaugagugugagguu

SEQ ID NO: 2444263 - RNA, 19 nt, Artificial Sequence
  Description of Artificial Sequence: Synthetic oligonucleotide
  Antisense strand to SEQ ID NO: 2444262
aaccucacacucaucccau

SEQ ID NO: 2444264 - RNA, 19 nt, Artificial Sequence
  Description of Artificial Sequence: Synthetic oligonucleotide
  Sense strand starting at position 3744 of SEQ ID NO: 1887041
gagguuagcucuucuacua

SEQ ID NO: 2444265 - RNA, 19 nt, Artificial Sequence
  Description of Artificial Sequence: Synthetic oligonucleotide
  Antisense strand to SEQ ID NO: 2444264
uaguagaagagcuaaccuc

SEQ ID NO: 2444266 - RNA, 19 nt, Artificial Sequence
  Description of Artificial Sequence: Synthetic oligonucleotide
  Sense strand starting at position 3811 of SEQ ID NO: 1887041
gcagauacucaugaguauu

SEQ ID NO: 2444267 - RNA, 19 nt, Artificial Sequence
  Description of Artificial Sequence: Synthetic oligonucleotide
  Antisense strand to SEQ ID NO: 2444266
aauacucaugaguaucugc

SEQ ID NO: 2444268 - RNA, 19 nt, Artificial Sequence
  Description of Artificial Sequence: Synthetic oligonucleotide
  Sense strand starting at position 3813 of SEQ ID NO: 1887041
agauacucaugaguauugu

SEQ ID NO: 2444269 - RNA, 19 nt, Artificial Sequence
  Description of Artificial Sequence: Synthetic oligonucleotide
  Antisense strand to SEQ ID NO: 2444268
acaauacucaugaguaucu

SEQ ID NO: 2444270 - RNA, 19 nt, Artificial Sequence
  Description of Artificial Sequence: Synthetic oligonucleotide
  Sense strand starting at position 3819 of SEQ ID NO: 1887041
ucaugaguauugucaagac

SEQ ID NO: 2444271 - RNA, 19 nt, Artificial Sequence
  Description of Artificial Sequence: Synthetic oligonucleotide
  Antisense strand to SEQ ID NO: 2444270
gucuugacaauacucauga

SEQ ID NO: 2444272 - RNA, 19 nt, Artificial Sequence
  Description of Artificial Sequence: Synthetic oligonucleotide
  Sense strand starting at position 3823 of SEQ ID NO: 1887041
gaguauugucaagacaguu

SEQ ID NO: 2444273 - RNA, 19 nt, Artificial Sequence
  Description of Artificial Sequence: Synthetic oligonucleotide
  Antisense strand to SEQ ID NO: 2444272
aacugucuugacaauacuc

SEQ ID NO: 2444274 - RNA, 19 nt, Artificial Sequence
  Description of Artificial Sequence: Synthetic oligonucleotide
  Sense strand starting at position 3900 of SEQ ID NO: 1887041
ugaugucauguuuggucaa

SEQ ID NO: 2444275 - RNA, 19 nt, Artificial Sequence
  Description of Artificial Sequence: Synthetic oligonucleotide
  Antisense strand to SEQ ID NO: 2444274
uugaccaaacaugacauca

SEQ ID NO: 2444276 - RNA, 19 nt, Artificial Sequence
  Description of Artificial Sequence: Synthetic oligonucleotide
  Sense strand starting at position 3902 of SEQ ID NO: 1887041
augucauguuuggucaacu

SEQ ID NO: 2444277 - RNA, 19 nt, Artificial Sequence
  Description of Artificial Sequence: Synthetic oligonucleotide
  Antisense strand to SEQ ID NO: 2444276
aguugaccaaacaugacau

SEQ ID NO: 2444278 - RNA, 19 nt, Artificial Sequence
  Description of Artificial Sequence: Synthetic oligonucleotide
  Sense strand starting at position 3903 of SEQ ID NO: 1887041
ugucauguuuggucaacug

SEQ ID NO: 2444279 - RNA, 19 nt, Artificial Sequence
  Description of Artificial Sequence: Synthetic oligonucleotide
  Antisense strand to SEQ ID NO: 2444278
caguugaccaaacaugaca

SEQ ID NO: 2444280 - RNA, 19 nt, Artificial Sequence
  Description of Artificial Sequence: Synthetic oligonucleotide
  Sense strand starting at position 3925 of SEQ ID NO: 1887041
gcagcaaagguccauaaga

SEQ ID NO: 2444281 - RNA, 19 nt, Artificial Sequence
  Description of Artificial Sequence: Synthetic oligonucleotide
  Antisense strand to SEQ ID NO: 2444280
ucuuauggaccuuugcugc

SEQ ID NO: 2444282 - RNA, 19 nt, Artificial Sequence
  Description of Artificial Sequence: Synthetic oligonucleotide
  Sense strand starting at position 95 of SEQ ID NO: 1887042
ucuggaauuacuggugaug

SEQ ID NO: 2444283 - RNA, 19 nt, Artificial Sequence
  Description of Artificial Sequence: Synthetic oligonucleotide
  Antisense strand to SEQ ID NO: 2444282
caucaccaguaauuccaga

SEQ ID NO: 2444284 - RNA, 19 nt, Artificial Sequence
  Description of Artificial Sequence: Synthetic oligonucleotide
  Sense strand starting at position 114 of SEQ ID NO: 1887042
guggcacaacuuuacaaau

SEQ ID NO: 2444285 - RNA, 19 nt, Artificial Sequence
  Description of Artificial Sequence: Synthetic oligonucleotide
  Antisense strand to SEQ ID NO: 2444284
auuuguaaaguugugccac

SEQ ID NO: 2444286 - RNA, 19 nt, Artificial Sequence
  Description of Artificial Sequence: Synthetic oligonucleotide
  Sense strand starting at position 165 of SEQ ID NO: 1887042
cuuguaaaucuaggucuga

SEQ ID NO: 2444287 - RNA, 19 nt, Artificial Sequence
  Description of Artificial Sequence: Synthetic oligonucleotide
  Antisense strand to SEQ ID NO: 2444286
ucagaccuagauuuacaag

SEQ ID NO: 2444288 - RNA, 19 nt, Artificial Sequence
  Description of Artificial Sequence: Synthetic oligonucleotide
  Sense strand starting at position 166 of SEQ ID NO: 1887042
uuguaaaucuaggucugaa

SEQ ID NO: 2444289 - RNA, 19 nt, Artificial Sequence
  Description of Artificial Sequence: Synthetic oligonucleotide
  Antisense strand to SEQ ID NO: 2444288
uucagaccuagauuuacaa

SEQ ID NO: 2444290 - RNA, 19 nt, Artificial Sequence
  Description of Artificial Sequence: Synthetic oligonucleotide
  Sense strand starting at position 1224 of SEQ ID NO: 1887042
gucaucuuugagcaagggu

SEQ ID NO: 2444291 - RNA, 19 nt, Artificial Sequence
  Description of Artificial Sequence: Synthetic oligonucleotide
  Antisense strand to SEQ ID NO: 2444290
acccuugcucaaagaugac

SEQ ID NO: 2444292 - RNA, 19 nt, Artificial Sequence
  Description of Artificial Sequence: Synthetic oligonucleotide
  Sense strand starting at position 1227 of SEQ ID NO: 1887042
aucuuugagcaagggucau

SEQ ID NO: 2444293 - RNA, 19 nt, Artificial Sequence
  Description of Artificial Sequence: Synthetic oligonucleotide
  Antisense strand to SEQ ID NO: 2444292
augacccuugcucaaagau

SEQ ID NO: 2444294 - RNA, 19 nt, Artificial Sequence
  Description of Artificial Sequence: Synthetic oligonucleotide
  Sense strand starting at position 1289 of SEQ ID NO: 1887042
ugaagugagcauugaauug

SEQ ID NO: 2444295 - RNA, 19 nt, Artificial Sequence
  Description of Artificial Sequence: Synthetic oligonucleotide
  Antisense strand to SEQ ID NO: 2444294
caauucaaugcucacuuca

SEQ ID NO: 2444296 - RNA, 19 nt, Artificial Sequence
  Description of Artificial Sequence: Synthetic oligonucleotide
  Sense strand starting at position 1330 of SEQ ID NO: 1887042
ugugguauacuauacuagu

SEQ ID NO: 2444297 - RNA, 19 nt, Artificial Sequence
  Description of Artificial Sequence: Synthetic oligonucleotide
  Antisense strand to SEQ ID NO: 2444296
acuaguauaguauaccaca

SEQ ID NO: 2444298 - RNA, 19 nt, Artificial Sequence
  Description of Artificial Sequence: Synthetic oligonucleotide
  Sense strand starting at position 1408 of SEQ ID NO: 1887042
aauguuacgguauaccaua

SEQ ID NO: 2444299 - RNA, 19 nt, Artificial Sequence
  Description of Artificial Sequence: Synthetic oligonucleotide
  Antisense strand to SEQ ID NO: 2444298
uaugguauaccguaacauu

SEQ ID NO: 2444300 - RNA, 19 nt, Artificial Sequence
  Description of Artificial Sequence: Synthetic oligonucleotide
  Sense strand starting at position 1431 of SEQ ID NO: 1887042
uaugguauacuuuauggua

SEQ ID NO: 2444301 - RNA, 19 nt, Artificial Sequence
  Description of Artificial Sequence: Synthetic oligonucleotide
  Antisense strand to SEQ ID NO: 2444300
uaccauaaaguauaccaua

SEQ ID NO: 2444302 - RNA, 19 nt, Artificial Sequence
  Description of Artificial Sequence: Synthetic oligonucleotide
  Sense strand starting at position 1454 of SEQ ID NO: 1887042
auuaaauuguacucaggca

SEQ ID NO: 2444303 - RNA, 19 nt, Artificial Sequence
  Description of Artificial Sequence: Synthetic oligonucleotide
  Antisense strand to SEQ ID NO: 2444302
ugccugaguacaauuuaau

SEQ ID NO: 2444304 - RNA, 19 nt, Artificial Sequence
  Description of Artificial Sequence: Synthetic oligonucleotide
  Sense strand starting at position 1462 of SEQ ID NO: 1887042
guacucaggcaguaugaaa

SEQ ID NO: 2444305 - RNA, 19 nt, Artificial Sequence
  Description of Artificial Sequence: Synthetic oligonucleotide
  Antisense strand to SEQ ID NO: 2444304
uuucauacugccugaguac

SEQ ID NO: 2444306 - RNA, 19 nt, Artificial Sequence
  Description of Artificial Sequence: Synthetic oligonucleotide
  Sense strand starting at position 1659 of SEQ ID NO: 1887042
guggguacauguccaggaa

SEQ ID NO: 2444307 - RNA, 19 nt, Artificial Sequence
  Description of Artificial Sequence: Synthetic oligonucleotide
  Antisense strand to SEQ ID NO: 2444306
uuccuggacauguacccac

SEQ ID NO: 2444308 - RNA, 19 nt, Artificial Sequence
  Description of Artificial Sequence: Synthetic oligonucleotide
  Sense strand starting at position 1662 of SEQ ID NO: 1887042
gguacauguccaggaacca

SEQ ID NO: 2444309 - RNA, 19 nt, Artificial Sequence
  Description of Artificial Sequence: Synthetic oligonucleotide
  Antisense strand to SEQ ID NO: 2444308
ugguuccuggacauguacc

SEQ ID NO: 2444310 - RNA, 19 nt, Artificial Sequence
  Description of Artificial Sequence: Synthetic oligonucleotide
  Sense strand starting at position 2038 of SEQ ID NO: 1887042
auaaacaugugguugauga

SEQ ID NO: 2444311 - RNA, 19 nt, Artificial Sequence
  Description of Artificial Sequence: Synthetic oligonucleotide
  Antisense strand to SEQ ID NO: 2444310
ucaucaaccacauguuuau

SEQ ID NO: 2444312 - RNA, 19 nt, Artificial Sequence
  Description of Artificial Sequence: Synthetic oligonucleotide
  Sense strand starting at position 2198 of SEQ ID NO: 1887042
cuguguucucaaugaacag

SEQ ID NO: 2444313 - RNA, 19 nt, Artificial Sequence
  Description of Artificial Sequence: Synthetic oligonucleotide
  Antisense strand to SEQ ID NO: 2444312
cuguucauugagaacacag

SEQ ID NO: 2444314 - RNA, 19 nt, Artificial Sequence
  Description of Artificial Sequence: Synthetic oligonucleotide
  Sense strand starting at position 2312 of SEQ ID NO: 1887042
agaagaccuccugguaaac

SEQ ID NO: 2444315 - RNA, 19 nt, Artificial Sequence
  Description of Artificial Sequence: Synthetic oligonucleotide
  Antisense strand to SEQ ID NO: 2444314
guuuaccaggaggucuucu

SEQ ID NO: 2444316 - RNA, 19 nt, Artificial Sequence
  Description of Artificial Sequence: Synthetic oligonucleotide
  Sense strand starting at position 2333 of SEQ ID NO: 1887042
agacaugagucacuaguaa

SEQ ID NO: 2444317 - RNA, 19 nt, Artificial Sequence
  Description of Artificial Sequence: Synthetic oligonucleotide
  Antisense strand to SEQ ID NO: 2444316
uuacuagugacucaugucu

SEQ ID NO: 2444318 - RNA, 19 nt, Artificial Sequence
  Description of Artificial Sequence: Synthetic oligonucleotide
  Sense strand starting at position 2404 of SEQ ID NO: 1887042
uggacugguccugauuguu

SEQ ID NO: 2444319 - RNA, 19 nt, Artificial Sequence
  Description of Artificial Sequence: Synthetic oligonucleotide
  Antisense strand to SEQ ID NO: 2444318
aacaaucaggaccagucca

SEQ ID NO: 2444320 - RNA, 19 nt, Artificial Sequence
  Description of Artificial Sequence: Synthetic oligonucleotide
  Sense strand starting at position 2485 of SEQ ID NO: 1887042
acaauuuguuguucgaauu

SEQ ID NO: 2444321 - RNA, 19 nt, Artificial Sequence
  Description of Artificial Sequence: Synthetic oligonucleotide
  Antisense strand to SEQ ID NO: 2444320
aauucgaacaacaaauugu

SEQ ID NO: 2444322 - RNA, 19 nt, Artificial Sequence
  Description of Artificial Sequence: Synthetic oligonucleotide
  Sense strand starting at position 2536 of SEQ ID NO: 1887042
uggcauuuaucgucuuucu

SEQ ID NO: 2444323 - RNA, 19 nt, Artificial Sequence
  Description of Artificial Sequence: Synthetic oligonucleotide
  Antisense strand to SEQ ID NO: 2444322
agaaagacgauaaaugcca

SEQ ID NO: 2444324 - RNA, 19 nt, Artificial Sequence
  Description of Artificial Sequence: Synthetic oligonucleotide
  Sense strand starting at position 2632 of SEQ ID NO: 1887042
uugucuuaguaauuaagac

SEQ ID NO: 2444325 - RNA, 19 nt, Artificial Sequence
  Description of Artificial Sequence: Synthetic oligonucleotide
  Antisense strand to SEQ ID NO: 2444324
gucuuaauuacuaagacaa

SEQ ID NO: 2444326 - RNA, 19 nt, Artificial Sequence
  Description of Artificial Sequence: Synthetic oligonucleotide
  Sense strand starting at position 2645 of SEQ ID NO: 1887042
uaagacuucugguuguaga

SEQ ID NO: 2444327 - RNA, 19 nt, Artificial Sequence
  Description of Artificial Sequence: Synthetic oligonucleotide
  Antisense strand to SEQ ID NO: 2444326
ucuacaaccagaagucuua

SEQ ID NO: 2444328 - RNA, 19 nt, Artificial Sequence
  Description of Artificial Sequence: Synthetic oligonucleotide
  Sense strand starting at position 2646 of SEQ ID NO: 1887042
aagacuucugguuguagau

SEQ ID NO: 2444329 - RNA, 19 nt, Artificial Sequence
  Description of Artificial Sequence: Synthetic oligonucleotide
  Antisense strand to SEQ ID NO: 2444328
aucuacaaccagaagucuu

SEQ ID NO: 2444330 - RNA, 19 nt, Artificial Sequence
  Description of Artificial Sequence: Synthetic oligonucleotide
  Sense strand starting at position 2774 of SEQ ID NO: 1887042
ggucuuuaucagggaguag

SEQ ID NO: 2444331 - RNA, 19 nt, Artificial Sequence
  Description of Artificial Sequence: Synthetic oligonucleotide
  Antisense strand to SEQ ID NO: 2444330
cuacucccugauaaagacc

SEQ ID NO: 2444332 - RNA, 19 nt, Artificial Sequence
  Description of Artificial Sequence: Synthetic oligonucleotide
  Sense strand starting at position 2775 of SEQ ID NO: 1887042
gucuuuaucagggaguaga

SEQ ID NO: 2444333 - RNA, 19 nt, Artificial Sequence
  Description of Artificial Sequence: Synthetic oligonucleotide
  Antisense strand to SEQ ID NO: 2444332
ucuacucccugauaaagac

SEQ ID NO: 2444334 - RNA, 19 nt, Artificial Sequence
  Description of Artificial Sequence: Synthetic oligonucleotide
  Sense strand starting at position 2869 of SEQ ID NO: 1887042
ugcuaugugcaggaacaua

SEQ ID NO: 2444335 - RNA, 19 nt, Artificial Sequence
  Description of Artificial Sequence: Synthetic oligonucleotide
  Antisense strand to SEQ ID NO: 2444334
uauguuccugcacauagca

SEQ ID NO: 2444336 - RNA, 19 nt, Artificial Sequence
  Description of Artificial Sequence: Synthetic oligonucleotide
  Sense strand starting at position 2907 of SEQ ID NO: 1887042
uuauguuaucaguaugagu

SEQ ID NO: 2444337 - RNA, 19 nt, Artificial Sequence
  Description of Artificial Sequence: Synthetic oligonucleotide
  Antisense strand to SEQ ID NO: 2444336
acucauacugauaacauaa

SEQ ID NO: 2444338 - RNA, 19 nt, Artificial Sequence
  Description of Artificial Sequence: Synthetic oligonucleotide
  Sense strand starting at position 3067 of SEQ ID NO: 1887042
ucaccugagccucagaguu

SEQ ID NO: 2444339 - RNA, 19 nt, Artificial Sequence
  Description of Artificial Sequence: Synthetic oligonucleotide
  Antisense strand to SEQ ID NO: 2444338
aacucugaggcucagguga

SEQ ID NO: 2444340 - RNA, 19 nt, Artificial Sequence
  Description of Artificial Sequence: Synthetic oligonucleotide
  Sense strand starting at position 3271 of SEQ ID NO: 1887042
ggagaaagacucggucuca

SEQ ID NO: 2444341 - RNA, 19 nt, Artificial Sequence
  Description of Artificial Sequence: Synthetic oligonucleotide
  Antisense strand to SEQ ID NO: 2444340
ugagaccgagucuuucucc

SEQ ID NO: 2444342 - RNA, 19 nt, Artificial Sequence
  Description of Artificial Sequence: Synthetic oligonucleotide
  Sense strand starting at position 3382 of SEQ ID NO: 1887042
ggugaaugguucccuuaag

SEQ ID NO: 2444343 - RNA, 19 nt, Artificial Sequence
  Description of Artificial Sequence: Synthetic oligonucleotide
  Antisense strand to SEQ ID NO: 2444342
cuuaagggaaccauucacc

SEQ ID NO: 2444344 - RNA, 19 nt, Artificial Sequence
  Description of Artificial Sequence: Synthetic oligonucleotide
  Sense strand starting at position 3383 of SEQ ID NO: 1887042
gugaaugguucccuuaaga

SEQ ID NO: 2444345 - RNA, 19 nt, Artificial Sequence
  Description of Artificial Sequence: Synthetic oligonucleotide
  Antisense strand to SEQ ID NO: 2444344
ucuuaagggaaccauucac

SEQ ID NO: 2444346 - RNA, 19 nt, Artificial Sequence
  Description of Artificial Sequence: Synthetic oligonucleotide
  Sense strand starting at position 3459 of SEQ ID NO: 1887042
caguguuucucaucagaga

SEQ ID NO: 2444347 - RNA, 19 nt, Artificial Sequence
  Description of Artificial Sequence: Synthetic oligonucleotide
  Antisense strand to SEQ ID NO: 2444346
ucucugaugagaaacacug

SEQ ID NO: 2444348 - RNA, 19 nt, Artificial Sequence
  Description of Artificial Sequence: Synthetic oligonucleotide
  Sense strand starting at position 3460 of SEQ ID NO: 1887042
aguguuucucaucagagac

SEQ ID NO: 2444349 - RNA, 19 nt, Artificial Sequence
  Description of Artificial Sequence: Synthetic oligonucleotide
  Antisense strand to SEQ ID NO: 2444348
gucucugaugagaaacacu

SEQ ID NO: 2444350 - RNA, 19 nt, Artificial Sequence
  Description of Artificial Sequence: Synthetic oligonucleotide
  Sense strand starting at position 3535 of SEQ ID NO: 1887042
uacuauaugugagugguaa

SEQ ID NO: 2444351 - RNA, 19 nt, Artificial Sequence
  Description of Artificial Sequence: Synthetic oligonucleotide
  Antisense strand to SEQ ID NO: 2444350
uuaccacucacauauagua

SEQ ID NO: 2444352 - RNA, 19 nt, Artificial Sequence
  Description of Artificial Sequence: Synthetic oligonucleotide
  Sense strand starting at position 3537 of SEQ ID NO: 1887042
cuauaugugagugguaaua

SEQ ID NO: 2444353 - RNA, 19 nt, Artificial Sequence
  Description of Artificial Sequence: Synthetic oligonucleotide
  Antisense strand to SEQ ID NO: 2444352
uauuaccacucacauauag

SEQ ID NO: 2444354 - RNA, 19 nt, Artificial Sequence
  Description of Artificial Sequence: Synthetic oligonucleotide
  Sense strand starting at position 3660 of SEQ ID NO: 1887042
guaucaaccucaguugaga

SEQ ID NO: 2444355 - RNA, 19 nt, Artificial Sequence
  Description of Artificial Sequence: Synthetic oligonucleotide
  Antisense strand to SEQ ID NO: 2444354
ucucaacugagguugauac

SEQ ID NO: 2444356 - RNA, 19 nt, Artificial Sequence
  Description of Artificial Sequence: Synthetic oligonucleotide
  Sense strand starting at position 3733 of SEQ ID NO: 1887042
cuugaugaccaguagcaau

SEQ ID NO: 2444357 - RNA, 19 nt, Artificial Sequence
  Description of Artificial Sequence: Synthetic oligonucleotide
  Antisense strand to SEQ ID NO: 2444356
auugcuacuggucaucaag

SEQ ID NO: 2444358 - RNA, 19 nt, Artificial Sequence
  Description of Artificial Sequence: Synthetic oligonucleotide
  Sense strand starting at position 3776 of SEQ ID NO: 1887042
guaguuggcccagacaacu

SEQ ID NO: 2444359 - RNA, 19 nt, Artificial Sequence
  Description of Artificial Sequence: Synthetic oligonucleotide
  Antisense strand to SEQ ID NO: 2444358
aguugucugggccaacuac

SEQ ID NO: 2444360 - RNA, 19 nt, Artificial Sequence
  Description of Artificial Sequence: Synthetic oligonucleotide
  Sense strand starting at position 3898 of SEQ ID NO: 1887042
acaugagucaugcauggua

SEQ ID NO: 2444361 - RNA, 19 nt, Artificial Sequence
  Description of Artificial Sequence: Synthetic oligonucleotide
  Antisense strand to SEQ ID NO: 2444360
uaccaugcaugacucaugu

SEQ ID NO: 2444362 - RNA, 19 nt, Artificial Sequence
  Description of Artificial Sequence: Synthetic oligonucleotide
  Sense strand starting at position 98 of SEQ ID NO: 1887043
gcgagacugucucagaaga

SEQ ID NO: 2444363 - RNA, 19 nt, Artificial Sequence
  Description of Artificial Sequence: Synthetic oligonucleotide
  Antisense strand to SEQ ID NO: 2444362
ucuucugagacagucucgc

SEQ ID NO: 2444364 - RNA, 19 nt, Artificial Sequence
  Description of Artificial Sequence: Synthetic oligonucleotide
  Sense strand starting at position 284 of SEQ ID NO: 1887043
cauguaguagccuaacaga

SEQ ID NO: 2444365 - RNA, 19 nt, Artificial Sequence
  Description of Artificial Sequence: Synthetic oligonucleotide
  Antisense strand to SEQ ID NO: 2444364
ucuguuaggcuacuacaug

SEQ ID NO: 2444366 - RNA, 19 nt, Artificial Sequence
  Description of Artificial Sequence: Synthetic oligonucleotide
  Sense strand starting at position 287 of SEQ ID NO: 1887043
guaguagccuaacagaaua

SEQ ID NO: 2444367 - RNA, 19 nt, Artificial Sequence
  Description of Artificial Sequence: Synthetic oligonucleotide
  Antisense strand to SEQ ID NO: 2444366
uauucuguuaggcuacuac

SEQ ID NO: 2444368 - RNA, 19 nt, Artificial Sequence
  Description of Artificial Sequence: Synthetic oligonucleotide
  Sense strand starting at position 390 of SEQ ID NO: 1887043
aagagauuauuaucccguu

SEQ ID NO: 2444369 - RNA, 19 nt, Artificial Sequence
  Description of Artificial Sequence: Synthetic oligonucleotide
  Antisense strand to SEQ ID NO: 2444368
aacgggauaauaaucucuu

SEQ ID NO: 2444370 - RNA, 19 nt, Artificial Sequence
  Description of Artificial Sequence: Synthetic oligonucleotide
  Sense strand starting at position 391 of SEQ ID NO: 1887043
agagauuauuaucccguuu

SEQ ID NO: 2444371 - RNA, 19 nt, Artificial Sequence
  Description of Artificial Sequence: Synthetic oligonucleotide
  Antisense strand to SEQ ID NO: 2444370
aaacgggauaauaaucucu

SEQ ID NO: 2444372 - RNA, 19 nt, Artificial Sequence
  Description of Artificial Sequence: Synthetic oligonucleotide
  Sense strand starting at position 444 of SEQ ID NO: 1887043
accaccaguugcugauaau

SEQ ID NO: 2444373 - RNA, 19 nt, Artificial Sequence
  Description of Artificial Sequence: Synthetic oligonucleotide
  Antisense strand to SEQ ID NO: 2444372
auuaucagcaacugguggu

SEQ ID NO: 2444374 - RNA, 19 nt, Artificial Sequence
  Description of Artificial Sequence: Synthetic oligonucleotide
  Sense strand starting at position 455 of SEQ ID NO: 1887043
cugauaaugccagguugga

SEQ ID NO: 2444375 - RNA, 19 nt, Artificial Sequence
  Description of Artificial Sequence: Synthetic oligonucleotide
  Antisense strand to SEQ ID NO: 2444374
uccaaccuggcauuaucag

SEQ ID NO: 2444376 - RNA, 19 nt, Artificial Sequence
  Description of Artificial Sequence: Synthetic oligonucleotide
  Sense strand starting at position 598 of SEQ ID NO: 1887043
cuagcauguggguguugau

SEQ ID NO: 2444377 - RNA, 19 nt, Artificial Sequence
  Description of Artificial Sequence: Synthetic oligonucleotide
  Antisense strand to SEQ ID NO: 2444376
aucaacacccacaugcuag

SEQ ID NO: 2444378 - RNA, 19 nt, Artificial Sequence
  Description of Artificial Sequence: Synthetic oligonucleotide
  Sense strand starting at position 608 of SEQ ID NO: 1887043
gguguugauuaacugggaa

SEQ ID NO: 2444379 - RNA, 19 nt, Artificial Sequence
  Description of Artificial Sequence: Synthetic oligonucleotide
  Antisense strand to SEQ ID NO: 2444378
uucccaguuaaucaacacc

SEQ ID NO: 2444380 - RNA, 19 nt, Artificial Sequence
  Description of Artificial Sequence: Synthetic oligonucleotide
  Sense strand starting at position 629 of SEQ ID NO: 1887043
cggcacgagugucuuagaa

SEQ ID NO: 2444381 - RNA, 19 nt, Artificial Sequence
  Description of Artificial Sequence: Synthetic oligonucleotide
  Antisense strand to SEQ ID NO: 2444380
uucuaagacacucgugccg

SEQ ID NO: 2444382 - RNA, 19 nt, Artificial Sequence
  Description of Artificial Sequence: Synthetic oligonucleotide
  Sense strand starting at position 631 of SEQ ID NO: 1887043
gcacgagugucuuagaagu

SEQ ID NO: 2444383 - RNA, 19 nt, Artificial Sequence
  Description of Artificial Sequence: Synthetic oligonucleotide
  Antisense strand to SEQ ID NO: 2444382
acuucuaagacacucgugc

SEQ ID NO: 2444384 - RNA, 19 nt, Artificial Sequence
  Description of Artificial Sequence: Synthetic oligonucleotide
  Sense strand starting at position 633 of SEQ ID NO: 1887043
acgagugucuuagaaguac

SEQ ID NO: 2444385 - RNA, 19 nt, Artificial Sequence
  Description of Artificial Sequence: Synthetic oligonucleotide
  Antisense strand to SEQ ID NO: 2444384
guacuucuaagacacucgu

SEQ ID NO: 2444386 - RNA, 19 nt, Artificial Sequence
  Description of Artificial Sequence: Synthetic oligonucleotide
  Sense strand starting at position 800 of SEQ ID NO: 1887043
cccuguagugggugauguu

SEQ ID NO: 2444387 - RNA, 19 nt, Artificial Sequence
  Description of Artificial Sequence: Synthetic oligonucleotide
  Antisense strand to SEQ ID NO: 2444386
aacaucacccacuacaggg

SEQ ID NO: 2444388 - RNA, 19 nt, Artificial Sequence
  Description of Artificial Sequence: Synthetic oligonucleotide
  Sense strand starting at position 826 of SEQ ID NO: 1887043
gcaggcgacauauacaaua

SEQ ID NO: 2444389 - RNA, 19 nt, Artificial Sequence
  Description of Artificial Sequence: Synthetic oligonucleotide
  Antisense strand to SEQ ID NO: 2444388
uauuguauaugucgccugc

SEQ ID NO: 2444390 - RNA, 19 nt, Artificial Sequence
  Description of Artificial Sequence: Synthetic oligonucleotide
  Sense strand starting at position 920 of SEQ ID NO: 1887043
gggcuaauuugagaaacug

SEQ ID NO: 2444391 - RNA, 19 nt, Artificial Sequence
  Description of Artificial Sequence: Synthetic oligonucleotide
  Antisense strand to SEQ ID NO: 2444390
caguuucucaaauuagccc

SEQ ID NO: 2444392 - RNA, 19 nt, Artificial Sequence
  Description of Artificial Sequence: Synthetic oligonucleotide
  Sense strand starting at position 930 of SEQ ID NO: 1887043
gagaaacugucucagauug

SEQ ID NO: 2444393 - RNA, 19 nt, Artificial Sequence
  Description of Artificial Sequence: Synthetic oligonucleotide
  Antisense strand to SEQ ID NO: 2444392
caaucugagacaguuucuc

SEQ ID NO: 2444394 - RNA, 19 nt, Artificial Sequence
  Description of Artificial Sequence: Synthetic oligonucleotide
  Sense strand starting at position 932 of SEQ ID NO: 1887043
gaaacugucucagauugga

SEQ ID NO: 2444395 - RNA, 19 nt, Artificial Sequence
  Description of Artificial Sequence: Synthetic oligonucleotide
  Antisense strand to SEQ ID NO: 2444394
uccaaucugagacaguuuc

SEQ ID NO: 2444396 - RNA, 19 nt, Artificial Sequence
  Description of Artificial Sequence: Synthetic oligonucleotide
  Sense strand starting at position 980 of SEQ ID NO: 1887043
gcaggcugaucuguucaga

SEQ ID NO: 2444397 - RNA, 19 nt, Artificial Sequence
  Description of Artificial Sequence: Synthetic oligonucleotide
  Antisense strand to SEQ ID NO: 2444396
ucugaacagaucagccugc

SEQ ID NO: 2444398 - RNA, 19 nt, Artificial Sequence
  Description of Artificial Sequence: Synthetic oligonucleotide
  Sense strand starting at position 1090 of SEQ ID NO: 1887043
agaguuuacucuucgccca

SEQ ID NO: 2444399 - RNA, 19 nt, Artificial Sequence
  Description of Artificial Sequence: Synthetic oligonucleotide
  Antisense strand to SEQ ID NO: 2444398
ugggcgaagaguaaacucu

SEQ ID NO: 2444400 - RNA, 19 nt, Artificial Sequence
  Description of Artificial Sequence: Synthetic oligonucleotide
  Sense strand starting at position 1091 of SEQ ID NO: 1887043
gaguuuacucuucgcccaa

SEQ ID NO: 2444401 - RNA, 19 nt, Artificial Sequence
  Description of Artificial Sequence: Synthetic oligonucleotide
  Antisense strand to SEQ ID NO: 2444400
uugggcgaagaguaaacuc

SEQ ID NO: 2444402 - RNA, 19 nt, Artificial Sequence
  Description of Artificial Sequence: Synthetic oligonucleotide
  Sense strand starting at position 1092 of SEQ ID NO: 1887043
aguuuacucuucgcccaau

SEQ ID NO: 2444403 - RNA, 19 nt, Artificial Sequence
  Description of Artificial Sequence: Synthetic oligonucleotide
  Antisense strand to SEQ ID NO: 2444402
auugggcgaagaguaaacu

SEQ ID NO: 2444404 - RNA, 19 nt, Artificial Sequence
  Description of Artificial Sequence: Synthetic oligonucleotide
  Sense strand starting at position 1233 of SEQ ID NO: 1887043
gcuucccucucaccgaaau

SEQ ID NO: 2444405 - RNA, 19 nt, Artificial Sequence
  Description of Artificial Sequence: Synthetic oligonucleotide
  Antisense strand to SEQ ID NO: 2444404
auuucggugagagggaagc

SEQ ID NO: 2444406 - RNA, 19 nt, Artificial Sequence
  Description of Artificial Sequence: Synthetic oligonucleotide
  Sense strand starting at position 2108 of SEQ ID NO: 1887043
gggccgugacgucaaagau

SEQ ID NO: 2444407 - RNA, 19 nt, Artificial Sequence
  Description of Artificial Sequence: Synthetic oligonucleotide
  Antisense strand to SEQ ID NO: 2444406
aucuuugacgucacggccc

SEQ ID NO: 2444408 - RNA, 19 nt, Artificial Sequence
  Description of Artificial Sequence: Synthetic oligonucleotide
  Sense strand starting at position 2444 of SEQ ID NO: 1887043
gccucacuuuccugggaga

SEQ ID NO: 2444409 - RNA, 19 nt, Artificial Sequence
  Description of Artificial Sequence: Synthetic oligonucleotide
  Antisense strand to SEQ ID NO: 2444408
ucucccaggaaagugaggc

SEQ ID NO: 2444410 - RNA, 19 nt, Artificial Sequence
  Description of Artificial Sequence: Synthetic oligonucleotide
  Sense strand starting at position 2445 of SEQ ID NO: 1887043
ccucacuuuccugggagaa

SEQ ID NO: 2444411 - RNA, 19 nt, Artificial Sequence
  Description of Artificial Sequence: Synthetic oligonucleotide
  Antisense strand to SEQ ID NO: 2444410
uucucccaggaaagugagg

SEQ ID NO: 2444412 - RNA, 19 nt, Artificial Sequence
  Description of Artificial Sequence: Synthetic oligonucleotide
  Sense strand starting at position 2446 of SEQ ID NO: 1887043
cucacuuuccugggagaau

SEQ ID NO: 2444413 - RNA, 19 nt, Artificial Sequence
  Description of Artificial Sequence: Synthetic oligonucleotide
  Antisense strand to SEQ ID NO: 2444412
auucucccaggaaagugag

SEQ ID NO: 2444414 - RNA, 19 nt, Artificial Sequence
  Description of Artificial Sequence: Synthetic oligonucleotide
  Sense strand starting at position 2447 of SEQ ID NO: 1887043
ucacuuuccugggagaaug

SEQ ID NO: 2444415 - RNA, 19 nt, Artificial Sequence
  Description of Artificial Sequence: Synthetic oligonucleotide
  Antisense strand to SEQ ID NO: 2444414
cauucucccaggaaaguga

SEQ ID NO: 2444416 - RNA, 19 nt, Artificial Sequence
  Description of Artificial Sequence: Synthetic oligonucleotide
  Sense strand starting at position 2531 of SEQ ID NO: 1887043
gaaguagcugcguguccau

SEQ ID NO: 2444417 - RNA, 19 nt, Artificial Sequence
  Description of Artificial Sequence: Synthetic oligonucleotide
  Antisense strand to SEQ ID NO: 2444416
auggacacgcagcuacuuc

SEQ ID NO: 2444418 - RNA, 19 nt, Artificial Sequence
  Description of Artificial Sequence: Synthetic oligonucleotide
  Sense strand starting at position 3347 of SEQ ID NO: 1887043
aggagucuuuagcggagga

SEQ ID NO: 2444419 - RNA, 19 nt, Artificial Sequence
  Description of Artificial Sequence: Synthetic oligonucleotide
  Antisense strand to SEQ ID NO: 2444418
uccuccgcuaaagacuccu

SEQ ID NO: 2444420 - RNA, 19 nt, Artificial Sequence
  Description of Artificial Sequence: Synthetic oligonucleotide
  Sense strand starting at position 3348 of SEQ ID NO: 1887043
ggagucuuuagcggaggaa

SEQ ID NO: 2444421 - RNA, 19 nt, Artificial Sequence
  Description of Artificial Sequence: Synthetic oligonucleotide
  Antisense strand to SEQ ID NO: 2444420
uuccuccgcuaaagacucc

SEQ ID NO: 2444422 - RNA, 19 nt, Artificial Sequence
  Description of Artificial Sequence: Synthetic oligonucleotide
  Sense strand starting at position 3349 of SEQ ID NO: 1887043
gagucuuuagcggaggaac

SEQ ID NO: 2444423 - RNA, 19 nt, Artificial Sequence
  Description of Artificial Sequence: Synthetic oligonucleotide
  Antisense strand to SEQ ID NO: 2444422
guuccuccgcuaaagacuc

SEQ ID NO: 2444424 - RNA, 19 nt, Artificial Sequence
  Description of Artificial Sequence: Synthetic oligonucleotide
  Sense strand starting at position 3484 of SEQ ID NO: 1887043
cgggauccucuaugaggga

SEQ ID NO: 2444425 - RNA, 19 nt, Artificial Sequence
  Description of Artificial Sequence: Synthetic oligonucleotide
  Antisense strand to SEQ ID NO: 2444424
ucccucauagaggaucccg

SEQ ID NO: 2444426 - RNA, 19 nt, Artificial Sequence
  Description of Artificial Sequence: Synthetic oligonucleotide
  Sense strand starting at position 3618 of SEQ ID NO: 1887043
ccauuuguggcacgaugga

SEQ ID NO: 2444427 - RNA, 19 nt, Artificial Sequence
  Description of Artificial Sequence: Synthetic oligonucleotide
  Antisense strand to SEQ ID NO: 2444426
uccaucgugccacaaaugg

SEQ ID NO: 2444428 - RNA, 19 nt, Artificial Sequence
  Description of Artificial Sequence: Synthetic oligonucleotide
  Sense strand starting at position 3719 of SEQ ID NO: 1887043
gacgguuuccuggagaagu

SEQ ID NO: 2444429 - RNA, 19 nt, Artificial Sequence
  Description of Artificial Sequence: Synthetic oligonucleotide
  Antisense strand to SEQ ID NO: 2444428
acuucuccaggaaaccguc

SEQ ID NO: 2444430 - RNA, 19 nt, Artificial Sequence
  Description of Artificial Sequence: Synthetic oligonucleotide
  Sense strand starting at position 3721 of SEQ ID NO: 1887043
cgguuuccuggagaaguua

SEQ ID NO: 2444431 - RNA, 19 nt, Artificial Sequence
  Description of Artificial Sequence: Synthetic oligonucleotide
  Antisense strand to SEQ ID NO: 2444430
uaacuucuccaggaaaccg

SEQ ID NO: 2444432 - RNA, 19 nt, Artificial Sequence
  Description of Artificial Sequence: Synthetic oligonucleotide
  Sense strand starting at position 3732 of SEQ ID NO: 1887043
agaaguuaauguucccgga

SEQ ID NO: 2444433 - RNA, 19 nt, Artificial Sequence
  Description of Artificial Sequence: Synthetic oligonucleotide
  Antisense strand to SEQ ID NO: 2444432
uccgggaacauuaacuucu

SEQ ID NO: 2444434 - RNA, 19 nt, Artificial Sequence
  Description of Artificial Sequence: Synthetic oligonucleotide
  Sense strand starting at position 3734 of SEQ ID NO: 1887043
aaguuaauguucccggaga

SEQ ID NO: 2444435 - RNA, 19 nt, Artificial Sequence
  Description of Artificial Sequence: Synthetic oligonucleotide
  Antisense strand to SEQ ID NO: 2444434
ucuccgggaacauuaacuu

SEQ ID NO: 2444436 - RNA, 19 nt, Artificial Sequence
  Description of Artificial Sequence: Synthetic oligonucleotide
  Sense strand starting at position 3735 of SEQ ID NO: 1887043
aguuaauguucccggagac

SEQ ID NO: 2444437 - RNA, 19 nt, Artificial Sequence
  Description of Artificial Sequence: Synthetic oligonucleotide
  Antisense strand to SEQ ID NO: 2444436
gucuccgggaacauuaacu

SEQ ID NO: 2444438 - RNA, 19 nt, Artificial Sequence
  Description of Artificial Sequence: Synthetic oligonucleotide
  Sense strand starting at position 3857 of SEQ ID NO: 1887043
gggucuaaaugagaggagu

SEQ ID NO: 2444439 - RNA, 19 nt, Artificial Sequence
  Description of Artificial Sequence: Synthetic oligonucleotide
  Antisense strand to SEQ ID NO: 2444438
acuccucucauuuagaccc

SEQ ID NO: 2444440 - RNA, 19 nt, Artificial Sequence
  Description of Artificial Sequence: Synthetic oligonucleotide
  Sense strand starting at position 3859 of SEQ ID NO: 1887043
gucuaaaugagaggagugu

SEQ ID NO: 2444441 - RNA, 19 nt, Artificial Sequence
  Description of Artificial Sequence: Synthetic oligonucleotide
  Antisense strand to SEQ ID NO: 2444440
acacuccucucauuuagac

SEQ ID NO: 2444442 - RNA, 19 nt, Artificial Sequence
  Description of Artificial Sequence: Synthetic oligonucleotide
  Sense strand starting at position 2 of SEQ ID NO: 1887044
auagaauucguaggucaaa

SEQ ID NO: 2444443 - RNA, 19 nt, Artificial Sequence
  Description of Artificial Sequence: Synthetic oligonucleotide
  Antisense strand to SEQ ID NO: 2444442
uuugaccuacgaauucuau

SEQ ID NO: 2444444 - RNA, 19 nt, Artificial Sequence
  Description of Artificial Sequence: Synthetic oligonucleotide
  Sense strand starting at position 3 of SEQ ID NO: 1887044
uagaauucguaggucaaau

SEQ ID NO: 2444445 - RNA, 19 nt, Artificial Sequence
  Description of Artificial Sequence: Synthetic oligonucleotide
  Antisense strand to SEQ ID NO: 2444444
auuugaccuacgaauucua

SEQ ID NO: 2444446 - RNA, 19 nt, Artificial Sequence
  Description of Artificial Sequence: Synthetic oligonucleotide
  Sense strand starting at position 5 of SEQ ID NO: 1887044
gaauucguaggucaaauga

SEQ ID NO: 2444447 - RNA, 19 nt, Artificial Sequence
  Description of Artificial Sequence: Synthetic oligonucleotide
  Antisense strand to SEQ ID NO: 2444446
ucauuugaccuacgaauuc

SEQ ID NO: 2444448 - RNA, 19 nt, Artificial Sequence
  Description of Artificial Sequence: Synthetic oligonucleotide
  Sense strand starting at position 87 of SEQ ID NO: 1887044
uguauacucccacacgcaa

SEQ ID NO: 2444449 - RNA, 19 nt, Artificial Sequence
  Description of Artificial Sequence: Synthetic oligonucleotide
  Antisense strand to SEQ ID NO: 2444448
uugcgugugggaguauaca

SEQ ID NO: 2444450 - RNA, 19 nt, Artificial Sequence
  Description of Artificial Sequence: Synthetic oligonucleotide
  Sense strand starting at position 98 of SEQ ID NO: 1887044
acacgcaauguaugggaau

SEQ ID NO: 2444451 - RNA, 19 nt, Artificial Sequence
  Description of Artificial Sequence: Synthetic oligonucleotide
  Antisense strand to SEQ ID NO: 2444450
auucccauacauugcgugu

SEQ ID NO: 2444452 - RNA, 19 nt, Artificial Sequence
  Description of Artificial Sequence: Synthetic oligonucleotide
  Sense strand starting at position 100 of SEQ ID NO: 1887044
acgcaauguaugggaaugu

SEQ ID NO: 2444453 - RNA, 19 nt, Artificial Sequence
  Description of Artificial Sequence: Synthetic oligonucleotide
  Antisense strand to SEQ ID NO: 2444452
acauucccauacauugcgu

SEQ ID NO: 2444454 - RNA, 19 nt, Artificial Sequence
  Description of Artificial Sequence: Synthetic oligonucleotide
  Sense strand starting at position 136 of SEQ ID NO: 1887044
ugccaauauugggucuuau

SEQ ID NO: 2444455 - RNA, 19 nt, Artificial Sequence
  Description of Artificial Sequence: Synthetic oligonucleotide
  Antisense strand to SEQ ID NO: 2444454
auaagacccaauauuggca

SEQ ID NO: 2444456 - RNA, 19 nt, Artificial Sequence
  Description of Artificial Sequence: Synthetic oligonucleotide
  Sense strand starting at position 308 of SEQ ID NO: 1887044
ccuugaggcugcuuauaua

SEQ ID NO: 2444457 - RNA, 19 nt, Artificial Sequence
  Description of Artificial Sequence: Synthetic oligonucleotide
  Antisense strand to SEQ ID NO: 2444456
uauauaagcagccucaagg

SEQ ID NO: 2444458 - RNA, 19 nt, Artificial Sequence
  Description of Artificial Sequence: Synthetic oligonucleotide
  Sense strand starting at position 606 of SEQ ID NO: 1887044
gcuccaugaugggugaaga

SEQ ID NO: 2444459 - RNA, 19 nt, Artificial Sequence
  Description of Artificial Sequence: Synthetic oligonucleotide
  Antisense strand to SEQ ID NO: 2444458
ucuucacccaucauggagc

SEQ ID NO: 2444460 - RNA, 19 nt, Artificial Sequence
  Description of Artificial Sequence: Synthetic oligonucleotide
  Sense strand starting at position 607 of SEQ ID NO: 1887044
cuccaugaugggugaagau

SEQ ID NO: 2444461 - RNA, 19 nt, Artificial Sequence
  Description of Artificial Sequence: Synthetic oligonucleotide
  Antisense strand to SEQ ID NO: 2444460
aucuucacccaucauggag

SEQ ID NO: 2444462 - RNA, 19 nt, Artificial Sequence
  Description of Artificial Sequence: Synthetic oligonucleotide
  Sense strand starting at position 692 of SEQ ID NO: 1887044
ggcaguguccagggacaga

SEQ ID NO: 2444463 - RNA, 19 nt, Artificial Sequence
  Description of Artificial Sequence: Synthetic oligonucleotide
  Antisense strand to SEQ ID NO: 2444462
ucugucccuggacacugcc

SEQ ID NO: 2444464 - RNA, 19 nt, Artificial Sequence
  Description of Artificial Sequence: Synthetic oligonucleotide
  Sense strand starting at position 811 of SEQ ID NO: 1887044
ggucuacucuucuccacau

SEQ ID NO: 2444465 - RNA, 19 nt, Artificial Sequence
  Description of Artificial Sequence: Synthetic oligonucleotide
  Antisense strand to SEQ ID NO: 2444464
auguggagaagaguagacc

SEQ ID NO: 2444466 - RNA, 19 nt, Artificial Sequence
  Description of Artificial Sequence: Synthetic oligonucleotide
  Sense strand starting at position 821 of SEQ ID NO: 1887044
ucuccacauccuugaguuu

SEQ ID NO: 2444467 - RNA, 19 nt, Artificial Sequence
  Description of Artificial Sequence: Synthetic oligonucleotide
  Antisense strand to SEQ ID NO: 2444466
aaacucaaggauguggaga

SEQ ID NO: 2444468 - RNA, 19 nt, Artificial Sequence
  Description of Artificial Sequence: Synthetic oligonucleotide
  Sense strand starting at position 1214 of SEQ ID NO: 1887044
cucgcauuggucuaacucu

SEQ ID NO: 2444469 - RNA, 19 nt, Artificial Sequence
  Description of Artificial Sequence: Synthetic oligonucleotide
  Antisense strand to SEQ ID NO: 2444468
agaguuagaccaaugcgag

SEQ ID NO: 2444470 - RNA, 19 nt, Artificial Sequence
  Description of Artificial Sequence: Synthetic oligonucleotide
  Sense strand starting at position 1457 of SEQ ID NO: 1887044
gucucagauacagguaagu

SEQ ID NO: 2444471 - RNA, 19 nt, Artificial Sequence
  Description of Artificial Sequence: Synthetic oligonucleotide
  Antisense strand to SEQ ID NO: 2444470
acuuaccuguaucugagac

SEQ ID NO: 2444472 - RNA, 19 nt, Artificial Sequence
  Description of Artificial Sequence: Synthetic oligonucleotide
  Sense strand starting at position 1467 of SEQ ID NO: 1887044
cagguaagugcccaggaau

SEQ ID NO: 2444473 - RNA, 19 nt, Artificial Sequence
  Description of Artificial Sequence: Synthetic oligonucleotide
  Antisense strand to SEQ ID NO: 2444472
auuccugggcacuuaccug

SEQ ID NO: 2444474 - RNA, 19 nt, Artificial Sequence
  Description of Artificial Sequence: Synthetic oligonucleotide
  Sense strand starting at position 1470 of SEQ ID NO: 1887044
guaagugcccaggaaucua

SEQ ID NO: 2444475 - RNA, 19 nt, Artificial Sequence
  Description of Artificial Sequence: Synthetic oligonucleotide
  Antisense strand to SEQ ID NO: 2444474
uagauuccugggcacuuac

SEQ ID NO: 2444476 - RNA, 19 nt, Artificial Sequence
  Description of Artificial Sequence: Synthetic oligonucleotide
  Sense strand starting at position 1572 of SEQ ID NO: 1887044
ccugaagagugagcuuacu

SEQ ID NO: 2444477 - RNA, 19 nt, Artificial Sequence
  Description of Artificial Sequence: Synthetic oligonucleotide
  Antisense strand to SEQ ID NO: 2444476
aguaagcucacucuucagg

SEQ ID NO: 2444478 - RNA, 19 nt, Artificial Sequence
  Description of Artificial Sequence: Synthetic oligonucleotide
  Sense strand starting at position 1665 of SEQ ID NO: 1887044
gacagaguguucucuccac

SEQ ID NO: 2444479 - RNA, 19 nt, Artificial Sequence
  Description of Artificial Sequence: Synthetic oligonucleotide
  Antisense strand to SEQ ID NO: 2444478
guggagagaacacucuguc

SEQ ID NO: 2444480 - RNA, 19 nt, Artificial Sequence
  Description of Artificial Sequence: Synthetic oligonucleotide
  Sense strand starting at position 1794 of SEQ ID NO: 1887044
ggcaaaggcucuccaacuu

SEQ ID NO: 2444481 - RNA, 19 nt, Artificial Sequence
  Description of Artificial Sequence: Synthetic oligonucleotide
  Antisense strand to SEQ ID NO: 2444480
aaguuggagagccuuugcc

SEQ ID NO: 2444482 - RNA, 19 nt, Artificial Sequence
  Description of Artificial Sequence: Synthetic oligonucleotide
  Sense strand starting at position 1960 of SEQ ID NO: 1887044
ggacauaaagcuugccacu

SEQ ID NO: 2444483 - RNA, 19 nt, Artificial Sequence
  Description of Artificial Sequence: Synthetic oligonucleotide
  Antisense strand to SEQ ID NO: 2444482
aguggcaagcuuuaugucc

SEQ ID NO: 2444484 - RNA, 19 nt, Artificial Sequence
  Description of Artificial Sequence: Synthetic oligonucleotide
  Sense strand starting at position 2116 of SEQ ID NO: 1887044
ccaguagaccucugagauu

SEQ ID NO: 2444485 - RNA, 19 nt, Artificial Sequence
  Description of Artificial Sequence: Synthetic oligonucleotide
  Antisense strand to SEQ ID NO: 2444484
aaucucagaggucuacugg

SEQ ID NO: 2444486 - RNA, 19 nt, Artificial Sequence
  Description of Artificial Sequence: Synthetic oligonucleotide
  Sense strand starting at position 2193 of SEQ ID NO: 1887044
gcaagagguggcuguaaac

SEQ ID NO: 2444487 - RNA, 19 nt, Artificial Sequence
  Description of Artificial Sequence: Synthetic oligonucleotide
  Antisense strand to SEQ ID NO: 2444486
guuuacagccaccucuugc

SEQ ID NO: 2444488 - RNA, 19 nt, Artificial Sequence
  Description of Artificial Sequence: Synthetic oligonucleotide
  Sense strand starting at position 2364 of SEQ ID NO: 1887044
agguacuagaaguguggua

SEQ ID NO: 2444489 - RNA, 19 nt, Artificial Sequence
  Description of Artificial Sequence: Synthetic oligonucleotide
  Antisense strand to SEQ ID NO: 2444488
uaccacacuucuaguaccu

SEQ ID NO: 2444490 - RNA, 19 nt, Artificial Sequence
  Description of Artificial Sequence: Synthetic oligonucleotide
  Sense strand starting at position 2380 of SEQ ID NO: 1887044
guaccucagguccagaaau

SEQ ID NO: 2444491 - RNA, 19 nt, Artificial Sequence
  Description of Artificial Sequence: Synthetic oligonucleotide
  Antisense strand to SEQ ID NO: 2444490
auuucuggaccugagguac

SEQ ID NO: 2444492 - RNA, 19 nt, Artificial Sequence
  Description of Artificial Sequence: Synthetic oligonucleotide
  Sense strand starting at position 2382 of SEQ ID NO: 1887044
accucagguccagaaaugu

SEQ ID NO: 2444493 - RNA, 19 nt, Artificial Sequence
  Description of Artificial Sequence: Synthetic oligonucleotide
  Antisense strand to SEQ ID NO: 2444492
acauuucuggaccugaggu

SEQ ID NO: 2444494 - RNA, 19 nt, Artificial Sequence
  Description of Artificial Sequence: Synthetic oligonucleotide
  Sense strand starting at position 2388 of SEQ ID NO: 1887044
gguccagaaaugugaguuc

SEQ ID NO: 2444495 - RNA, 19 nt, Artificial Sequence
  Description of Artificial Sequence: Synthetic oligonucleotide
  Antisense strand to SEQ ID NO: 2444494
gaacucacauuucuggacc

SEQ ID NO: 2444496 - RNA, 19 nt, Artificial Sequence
  Description of Artificial Sequence: Synthetic oligonucleotide
  Sense strand starting at position 2397 of SEQ ID NO: 1887044
augugaguucagugaucag

SEQ ID NO: 2444497 - RNA, 19 nt, Artificial Sequence
  Description of Artificial Sequence: Synthetic oligonucleotide
  Antisense strand to SEQ ID NO: 2444496
cugaucacugaacucacau

SEQ ID NO: 2444498 - RNA, 19 nt, Artificial Sequence
  Description of Artificial Sequence: Synthetic oligonucleotide
  Sense strand starting at position 2406 of SEQ ID NO: 1887044
cagugaucagcccaacuga

SEQ ID NO: 2444499 - RNA, 19 nt, Artificial Sequence
  Description of Artificial Sequence: Synthetic oligonucleotide
  Antisense strand to SEQ ID NO: 2444498
ucaguugggcugaucacug

SEQ ID NO: 2444500 - RNA, 19 nt, Artificial Sequence
  Description of Artificial Sequence: Synthetic oligonucleotide
  Sense strand starting at position 2435 of SEQ ID NO: 1887044
gggaguucagcuggaagga

SEQ ID NO: 2444501 - RNA, 19 nt, Artificial Sequence
  Description of Artificial Sequence: Synthetic oligonucleotide
  Antisense strand to SEQ ID NO: 2444500
uccuuccagcugaacuccc

SEQ ID NO: 2444502 - RNA, 19 nt, Artificial Sequence
  Description of Artificial Sequence: Synthetic oligonucleotide
  Sense strand starting at position 2714 of SEQ ID NO: 1887044
guacaucugguaugaauuc

SEQ ID NO: 2444503 - RNA, 19 nt, Artificial Sequence
  Description of Artificial Sequence: Synthetic oligonucleotide
  Antisense strand to SEQ ID NO: 2444502
gaauucauaccagauguac

SEQ ID NO: 2444504 - RNA, 19 nt, Artificial Sequence
  Description of Artificial Sequence: Synthetic oligonucleotide
  Sense strand starting at position 2757 of SEQ ID NO: 1887044
gucugaacuuuguuccaag

SEQ ID NO: 2444505 - RNA, 19 nt, Artificial Sequence
  Description of Artificial Sequence: Synthetic oligonucleotide
  Antisense strand to SEQ ID NO: 2444504
cuuggaacaaaguucagac

SEQ ID NO: 2444506 - RNA, 19 nt, Artificial Sequence
  Description of Artificial Sequence: Synthetic oligonucleotide
  Sense strand starting at position 2758 of SEQ ID NO: 1887044
ucugaacuuuguuccaagu

SEQ ID NO: 2444507 - RNA, 19 nt, Artificial Sequence
  Description of Artificial Sequence: Synthetic oligonucleotide
  Antisense strand to SEQ ID NO: 2444506
acuuggaacaaaguucaga

SEQ ID NO: 2444508 - RNA, 19 nt, Artificial Sequence
  Description of Artificial Sequence: Synthetic oligonucleotide
  Sense strand starting at position 2795 of SEQ ID NO: 1887044
aguuccaacgcaugaauca

SEQ ID NO: 2444509 - RNA, 19 nt, Artificial Sequence
  Description of Artificial Sequence: Synthetic oligonucleotide
  Antisense strand to SEQ ID NO: 2444508
ugauucaugcguuggaacu

SEQ ID NO: 2444510 - RNA, 19 nt, Artificial Sequence
  Description of Artificial Sequence: Synthetic oligonucleotide
  Sense strand starting at position 2955 of SEQ ID NO: 1887044
cggucuugccuuggaauuu

SEQ ID NO: 2444511 - RNA, 19 nt, Artificial Sequence
  Description of Artificial Sequence: Synthetic oligonucleotide
  Antisense strand to SEQ ID NO: 2444510
aaauuccaaggcaagaccg

SEQ ID NO: 2444512 - RNA, 19 nt, Artificial Sequence
  Description of Artificial Sequence: Synthetic oligonucleotide
  Sense strand starting at position 2973 of SEQ ID NO: 1887044
ucuauacucagaggguaag

SEQ ID NO: 2444513 - RNA, 19 nt, Artificial Sequence
  Description of Artificial Sequence: Synthetic oligonucleotide
  Antisense strand to SEQ ID NO: 2444512
cuuacccucugaguauaga

SEQ ID NO: 2444514 - RNA, 19 nt, Artificial Sequence
  Description of Artificial Sequence: Synthetic oligonucleotide
  Sense strand starting at position 3041 of SEQ ID NO: 1887044
aggcaugaacuuuguguau

SEQ ID NO: 2444515 - RNA, 19 nt, Artificial Sequence
  Description of Artificial Sequence: Synthetic oligonucleotide
  Antisense strand to SEQ ID NO: 2444514
auacacaaaguucaugccu

SEQ ID NO: 2444516 - RNA, 19 nt, Artificial Sequence
  Description of Artificial Sequence: Synthetic oligonucleotide
  Sense strand starting at position 3096 of SEQ ID NO: 1887044
accuuccucugucugagau

SEQ ID NO: 2444517 - RNA, 19 nt, Artificial Sequence
  Description of Artificial Sequence: Synthetic oligonucleotide
  Antisense strand to SEQ ID NO: 2444516
aucucagacagaggaaggu

SEQ ID NO: 2444518 - RNA, 19 nt, Artificial Sequence
  Description of Artificial Sequence: Synthetic oligonucleotide
  Sense strand starting at position 3097 of SEQ ID NO: 1887044
ccuuccucugucugagaua

SEQ ID NO: 2444519 - RNA, 19 nt, Artificial Sequence
  Description of Artificial Sequence: Synthetic oligonucleotide
  Antisense strand to SEQ ID NO: 2444518
uaucucagacagaggaagg

SEQ ID NO: 2444520 - RNA, 19 nt, Artificial Sequence
  Description of Artificial Sequence: Synthetic oligonucleotide
  Sense strand starting at position 3612 of SEQ ID NO: 1887044
uaaccuuuggguugcauaa

SEQ ID NO: 2444521 - RNA, 19 nt, Artificial Sequence
  Description of Artificial Sequence: Synthetic oligonucleotide
  Antisense strand to SEQ ID NO: 2444520
uuaugcaacccaaagguua

SEQ ID NO: 2444522 - RNA, 19 nt, Artificial Sequence
  Description of Artificial Sequence: Synthetic oligonucleotide
  Sense strand starting at position 79 of SEQ ID NO: 1887045
agguacuagaaguguggua

SEQ ID NO: 2444523 - RNA, 19 nt, Artificial Sequence
  Description of Artificial Sequence: Synthetic oligonucleotide
  Antisense strand to SEQ ID NO: 2444522
uaccacacuucuaguaccu

SEQ ID NO: 2444524 - RNA, 19 nt, Artificial Sequence
  Description of Artificial Sequence: Synthetic oligonucleotide
  Sense strand starting at position 95 of SEQ ID NO: 1887045
guaccucagguccagaaau

SEQ ID NO: 2444525 - RNA, 19 nt, Artificial Sequence
  Description of Artificial Sequence: Synthetic oligonucleotide
  Antisense strand to SEQ ID NO: 2444524
auuucuggaccugagguac

SEQ ID NO: 2444526 - RNA, 19 nt, Artificial Sequence
  Description of Artificial Sequence: Synthetic oligonucleotide
  Sense strand starting at position 97 of SEQ ID NO: 1887045
accucagguccagaaaugu

SEQ ID NO: 2444527 - RNA, 19 nt, Artificial Sequence
  Description of Artificial Sequence: Synthetic oligonucleotide
  Antisense strand to SEQ ID NO: 2444526
acauuucuggaccugaggu

SEQ ID NO: 2444528 - RNA, 19 nt, Artificial Sequence
  Description of Artificial Sequence: Synthetic oligonucleotide
  Sense strand starting at position 103 of SEQ ID NO: 1887045
gguccagaaaugugaguuc

SEQ ID NO: 2444529 - RNA, 19 nt, Artificial Sequence
  Description of Artificial Sequence: Synthetic oligonucleotide
  Antisense strand to SEQ ID NO: 2444528
gaacucacauuucuggacc

SEQ ID NO: 2444530 - RNA, 19 nt, Artificial Sequence
  Description of Artificial Sequence: Synthetic oligonucleotide
  Sense strand starting at position 112 of SEQ ID NO: 1887045
augugaguucagugaucag

SEQ ID NO: 2444531 - RNA, 19 nt, Artificial Sequence
  Description of Artificial Sequence: Synthetic oligonucleotide
  Antisense strand to SEQ ID NO: 2444530
cugaucacugaacucacau

SEQ ID NO: 2444532 - RNA, 19 nt, Artificial Sequence
  Description of Artificial Sequence: Synthetic oligonucleotide
  Sense strand starting at position 121 of SEQ ID NO: 1887045
cagugaucagcccaacuga

SEQ ID NO: 2444533 - RNA, 19 nt, Artificial Sequence
  Description of Artificial Sequence: Synthetic oligonucleotide
  Antisense strand to SEQ ID NO: 2444532
ucaguugggcugaucacug

SEQ ID NO: 2444534 - RNA, 19 nt, Artificial Sequence
  Description of Artificial Sequence: Synthetic oligonucleotide
  Sense strand starting at position 150 of SEQ ID NO: 1887045
gggaguucagcuggaagga

SEQ ID NO: 2444535 - RNA, 19 nt, Artificial Sequence
  Description of Artificial Sequence: Synthetic oligonucleotide
  Antisense strand to SEQ ID NO: 2444534
uccuuccagcugaacuccc

SEQ ID NO: 2444536 - RNA, 19 nt, Artificial Sequence
  Description of Artificial Sequence: Synthetic oligonucleotide
  Sense strand starting at position 211 of SEQ ID NO: 1887045
aggccuagcguuugaaaga

SEQ ID NO: 2444537 - RNA, 19 nt, Artificial Sequence
  Description of Artificial Sequence: Synthetic oligonucleotide
  Antisense strand to SEQ ID NO: 2444536
ucuuucaaacgcuaggccu

SEQ ID NO: 2444538 - RNA, 19 nt, Artificial Sequence
  Description of Artificial Sequence: Synthetic oligonucleotide
  Sense strand starting at position 429 of SEQ ID NO: 1887045
guacaucugguaugaauuc

SEQ ID NO: 2444539 - RNA, 19 nt, Artificial Sequence
  Description of Artificial Sequence: Synthetic oligonucleotide
  Antisense strand to SEQ ID NO: 2444538
gaauucauaccagauguac

SEQ ID NO: 2444540 - RNA, 19 nt, Artificial Sequence
  Description of Artificial Sequence: Synthetic oligonucleotide
  Sense strand starting at position 438 of SEQ ID NO: 1887045
guaugaauuccaggcuguc

SEQ ID NO: 2444541 - RNA, 19 nt, Artificial Sequence
  Description of Artificial Sequence: Synthetic oligonucleotide
  Antisense strand to SEQ ID NO: 2444540
gacagccuggaauucauac

SEQ ID NO: 2444542 - RNA, 19 nt, Artificial Sequence
  Description of Artificial Sequence: Synthetic oligonucleotide
  Sense strand starting at position 472 of SEQ ID NO: 1887045
gucugaacuuuguuccaag

SEQ ID NO: 2444543 - RNA, 19 nt, Artificial Sequence
  Description of Artificial Sequence: Synthetic oligonucleotide
  Antisense strand to SEQ ID NO: 2444542
cuuggaacaaaguucagac

SEQ ID NO: 2444544 - RNA, 19 nt, Artificial Sequence
  Description of Artificial Sequence: Synthetic oligonucleotide
  Sense strand starting at position 473 of SEQ ID NO: 1887045
ucugaacuuuguuccaagu

SEQ ID NO: 2444545 - RNA, 19 nt, Artificial Sequence
  Description of Artificial Sequence: Synthetic oligonucleotide
  Antisense strand to SEQ ID NO: 2444544
acuuggaacaaaguucaga

SEQ ID NO: 2444546 - RNA, 19 nt, Artificial Sequence
  Description of Artificial Sequence: Synthetic oligonucleotide
  Sense strand starting at position 510 of SEQ ID NO: 1887045
aguuccaacgcaugaauca

SEQ ID NO: 2444547 - RNA, 19 nt, Artificial Sequence
  Description of Artificial Sequence: Synthetic oligonucleotide
  Antisense strand to SEQ ID NO: 2444546
ugauucaugcguuggaacu

SEQ ID NO: 2444548 - RNA, 19 nt, Artificial Sequence
  Description of Artificial Sequence: Synthetic oligonucleotide
  Sense strand starting at position 670 of SEQ ID NO: 1887045
cggucuugccuuggaauuu

SEQ ID NO: 2444549 - RNA, 19 nt, Artificial Sequence
  Description of Artificial Sequence: Synthetic oligonucleotide
  Antisense strand to SEQ ID NO: 2444548
aaauuccaaggcaagaccg

SEQ ID NO: 2444550 - RNA, 19 nt, Artificial Sequence
  Description of Artificial Sequence: Synthetic oligonucleotide
  Sense strand starting at position 688 of SEQ ID NO: 1887045
ucuauacucagaggguaag

SEQ ID NO: 2444551 - RNA, 19 nt, Artificial Sequence
  Description of Artificial Sequence: Synthetic oligonucleotide
  Antisense strand to SEQ ID NO: 2444550
cuuacccucugaguauaga

SEQ ID NO: 2444552 - RNA, 19 nt, Artificial Sequence
  Description of Artificial Sequence: Synthetic oligonucleotide
  Sense strand starting at position 756 of SEQ ID NO: 1887045
aggcaugaacuuuguguau

SEQ ID NO: 2444553 - RNA, 19 nt, Artificial Sequence
  Description of Artificial Sequence: Synthetic oligonucleotide
  Antisense strand to SEQ ID NO: 2444552
auacacaaaguucaugccu

SEQ ID NO: 2444554 - RNA, 19 nt, Artificial Sequence
  Description of Artificial Sequence: Synthetic oligonucleotide
  Sense strand starting at position 811 of SEQ ID NO: 1887045
accuuccucugucugagau

SEQ ID NO: 2444555 - RNA, 19 nt, Artificial Sequence
  Description of Artificial Sequence: Synthetic oligonucleotide
  Antisense strand to SEQ ID NO: 2444554
aucucagacagaggaaggu

SEQ ID NO: 2444556 - RNA, 19 nt, Artificial Sequence
  Description of Artificial Sequence: Synthetic oligonucleotide
  Sense strand starting at position 812 of SEQ ID NO: 1887045
ccuuccucugucugagaua

SEQ ID NO: 2444557 - RNA, 19 nt, Artificial Sequence
  Description of Artificial Sequence: Synthetic oligonucleotide
  Antisense strand to SEQ ID NO: 2444556
uaucucagacagaggaagg

SEQ ID NO: 2444558 - RNA, 19 nt, Artificial Sequence
  Description of Artificial Sequence: Synthetic oligonucleotide
  Sense strand starting at position 860 of SEQ ID NO: 1887045
ugcugagagucugugccaa

SEQ ID NO: 2444559 - RNA, 19 nt, Artificial Sequence
  Description of Artificial Sequence: Synthetic oligonucleotide
  Antisense strand to SEQ ID NO: 2444558
uuggcacagacucucagca

SEQ ID NO: 2444560 - RNA, 19 nt, Artificial Sequence
  Description of Artificial Sequence: Synthetic oligonucleotide
  Sense strand starting at position 1327 of SEQ ID NO: 1887045
uaaccuuuggguugcauaa

SEQ ID NO: 2444561 - RNA, 19 nt, Artificial Sequence
  Description of Artificial Sequence: Synthetic oligonucleotide
  Antisense strand to SEQ ID NO: 2444560
uuaugcaacccaaagguua

SEQ ID NO: 2444562 - RNA, 19 nt, Artificial Sequence
  Description of Artificial Sequence: Synthetic oligonucleotide
  Sense strand starting at position 1666 of SEQ ID NO: 1887045
cccagacucuuuccucgua

SEQ ID NO: 2444563 - RNA, 19 nt, Artificial Sequence
  Description of Artificial Sequence: Synthetic oligonucleotide
  Antisense strand to SEQ ID NO: 2444562
uacgaggaaagagucuggg

SEQ ID NO: 2444564 - RNA, 19 nt, Artificial Sequence
  Description of Artificial Sequence: Synthetic oligonucleotide
  Sense strand starting at position 2434 of SEQ ID NO: 1887045
guuggagucgugagugcuu

SEQ ID NO: 2444565 - RNA, 19 nt, Artificial Sequence
  Description of Artificial Sequence: Synthetic oligonucleotide
  Antisense strand to SEQ ID NO: 2444564
aagcacucacgacuccaac

SEQ ID NO: 2444566 - RNA, 19 nt, Artificial Sequence
  Description of Artificial Sequence: Synthetic oligonucleotide
  Sense strand starting at position 2495 of SEQ ID NO: 1887045
cgcuauagcucuuuaagga

SEQ ID NO: 2444567 - RNA, 19 nt, Artificial Sequence
  Description of Artificial Sequence: Synthetic oligonucleotide
  Antisense strand to SEQ ID NO: 2444566
uccuuaaagagcuauagcg

SEQ ID NO: 2444568 - RNA, 19 nt, Artificial Sequence
  Description of Artificial Sequence: Synthetic oligonucleotide
  Sense strand starting at position 2496 of SEQ ID NO: 1887045
gcuauagcucuuuaaggaa

SEQ ID NO: 2444569 - RNA, 19 nt, Artificial Sequence
  Description of Artificial Sequence: Synthetic oligonucleotide
  Antisense strand to SEQ ID NO: 2444568
uuccuuaaagagcuauagc

SEQ ID NO: 2444570 - RNA, 19 nt, Artificial Sequence
  Description of Artificial Sequence: Synthetic oligonucleotide
  Sense strand starting at position 2581 of SEQ ID NO: 1887045
uggagagcucuccaggguu

SEQ ID NO: 2444571 - RNA, 19 nt, Artificial Sequence
  Description of Artificial Sequence: Synthetic oligonucleotide
  Antisense strand to SEQ ID NO: 2444570
aacccuggagagcucucca

SEQ ID NO: 2444572 - RNA, 19 nt, Artificial Sequence
  Description of Artificial Sequence: Synthetic oligonucleotide
  Sense strand starting at position 2678 of SEQ ID NO: 1887045
uuggaugucucuucccagu

SEQ ID NO: 2444573 - RNA, 19 nt, Artificial Sequence
  Description of Artificial Sequence: Synthetic oligonucleotide
  Antisense strand to SEQ ID NO: 2444572
acugggaagagacauccaa

SEQ ID NO: 2444574 - RNA, 19 nt, Artificial Sequence
  Description of Artificial Sequence: Synthetic oligonucleotide
  Sense strand starting at position 2723 of SEQ ID NO: 1887045
agagguagcuuucuaacaa

SEQ ID NO: 2444575 - RNA, 19 nt, Artificial Sequence
  Description of Artificial Sequence: Synthetic oligonucleotide
  Antisense strand to SEQ ID NO: 2444574
uuguuagaaagcuaccucu

SEQ ID NO: 2444576 - RNA, 19 nt, Artificial Sequence
  Description of Artificial Sequence: Synthetic oligonucleotide
  Sense strand starting at position 2778 of SEQ ID NO: 1887045
gagggcuucuggucagaaa

SEQ ID NO: 2444577 - RNA, 19 nt, Artificial Sequence
  Description of Artificial Sequence: Synthetic oligonucleotide
  Antisense strand to SEQ ID NO: 2444576
uuucugaccagaagcccuc

SEQ ID NO: 2444578 - RNA, 19 nt, Artificial Sequence
  Description of Artificial Sequence: Synthetic oligonucleotide
  Sense strand starting at position 2779 of SEQ ID NO: 1887045
agggcuucuggucagaaau

SEQ ID NO: 2444579 - RNA, 19 nt, Artificial Sequence
  Description of Artificial Sequence: Synthetic oligonucleotide
  Antisense strand to SEQ ID NO: 2444578
auuucugaccagaagcccu

SEQ ID NO: 2444580 - RNA, 19 nt, Artificial Sequence
  Description of Artificial Sequence: Synthetic oligonucleotide
  Sense strand starting at position 2832 of SEQ ID NO: 1887045
gcaaucgcauccucugauu

SEQ ID NO: 2444581 - RNA, 19 nt, Artificial Sequence
  Description of Artificial Sequence: Synthetic oligonucleotide
  Antisense strand to SEQ ID NO: 2444580
aaucagaggaugcgauugc

SEQ ID NO: 2444582 - RNA, 19 nt, Artificial Sequence
  Description of Artificial Sequence: Synthetic oligonucleotide
  Sense strand starting at position 3184 of SEQ ID NO: 1887045
gugagauccuuccuucugu

SEQ ID NO: 2444583 - RNA, 19 nt, Artificial Sequence
  Description of Artificial Sequence: Synthetic oligonucleotide
  Antisense strand to SEQ ID NO: 2444582
acagaaggaaggaucucac

SEQ ID NO: 2444584 - RNA, 19 nt, Artificial Sequence
  Description of Artificial Sequence: Synthetic oligonucleotide
  Sense strand starting at position 3185 of SEQ ID NO: 1887045
ugagauccuuccuucuguu

SEQ ID NO: 2444585 - RNA, 19 nt, Artificial Sequence
  Description of Artificial Sequence: Synthetic oligonucleotide
  Antisense strand to SEQ ID NO: 2444584
aacagaaggaaggaucuca

SEQ ID NO: 2444586 - RNA, 19 nt, Artificial Sequence
  Description of Artificial Sequence: Synthetic oligonucleotide
  Sense strand starting at position 3309 of SEQ ID NO: 1887045
ccaguaacagcugauuguu

SEQ ID NO: 2444587 - RNA, 19 nt, Artificial Sequence
  Description of Artificial Sequence: Synthetic oligonucleotide
  Antisense strand to SEQ ID NO: 2444586
aacaaucagcuguuacugg

SEQ ID NO: 2444588 - RNA, 19 nt, Artificial Sequence
  Description of Artificial Sequence: Synthetic oligonucleotide
  Sense strand starting at position 3314 of SEQ ID NO: 1887045
aacagcugauuguuggaaa

SEQ ID NO: 2444589 - RNA, 19 nt, Artificial Sequence
  Description of Artificial Sequence: Synthetic oligonucleotide
  Antisense strand to SEQ ID NO: 2444588
uuuccaacaaucagcuguu

SEQ ID NO: 2444590 - RNA, 19 nt, Artificial Sequence
  Description of Artificial Sequence: Synthetic oligonucleotide
  Sense strand starting at position 3346 of SEQ ID NO: 1887045
ggacgaaucagcuguuacc

SEQ ID NO: 2444591 - RNA, 19 nt, Artificial Sequence
  Description of Artificial Sequence: Synthetic oligonucleotide
  Antisense strand to SEQ ID NO: 2444590
gguaacagcugauucgucc

SEQ ID NO: 2444592 - RNA, 19 nt, Artificial Sequence
  Description of Artificial Sequence: Synthetic oligonucleotide
  Sense strand starting at position 3441 of SEQ ID NO: 1887045
gugauuguaugaucuuucu

SEQ ID NO: 2444593 - RNA, 19 nt, Artificial Sequence
  Description of Artificial Sequence: Synthetic oligonucleotide
  Antisense strand to SEQ ID NO: 2444592
agaaagaucauacaaucac

SEQ ID NO: 2444594 - RNA, 19 nt, Artificial Sequence
  Description of Artificial Sequence: Synthetic oligonucleotide
  Sense strand starting at position 3526 of SEQ ID NO: 1887045
ggcucugggcuuggaaaga

SEQ ID NO: 2444595 - RNA, 19 nt, Artificial Sequence
  Description of Artificial Sequence: Synthetic oligonucleotide
  Antisense strand to SEQ ID NO: 2444594
ucuuuccaagcccagagcc

SEQ ID NO: 2444596 - RNA, 19 nt, Artificial Sequence
  Description of Artificial Sequence: Synthetic oligonucleotide
  Sense strand starting at position 3547 of SEQ ID NO: 1887045
gguauuuccuguuagcaca

SEQ ID NO: 2444597 - RNA, 19 nt, Artificial Sequence
  Description of Artificial Sequence: Synthetic oligonucleotide
  Antisense strand to SEQ ID NO: 2444596
ugugcuaacaggaaauacc

SEQ ID NO: 2444598 - RNA, 19 nt, Artificial Sequence
  Description of Artificial Sequence: Synthetic oligonucleotide
  Sense strand starting at position 3768 of SEQ ID NO: 1887045
gcccuauuccuccauggac

SEQ ID NO: 2444599 - RNA, 19 nt, Artificial Sequence
  Description of Artificial Sequence: Synthetic oligonucleotide
  Antisense strand to SEQ ID NO: 2444598
guccauggaggaauagggc

SEQ ID NO: 2444600 - RNA, 19 nt, Artificial Sequence
  Description of Artificial Sequence: Synthetic oligonucleotide
  Sense strand starting at position 3782 of SEQ ID NO: 1887045
uggacaggugucugcugau

SEQ ID NO: 2444601 - RNA, 19 nt, Artificial Sequence
  Description of Artificial Sequence: Synthetic oligonucleotide
  Antisense strand to SEQ ID NO: 2444600
aucagcagacaccugucca

SEQ ID NO: 2444602 - RNA, 19 nt, Artificial Sequence
  Description of Artificial Sequence: Synthetic oligonucleotide
  Sense strand starting at position 294 of SEQ ID NO: 1887046
ccaucaacacuggguauua

SEQ ID NO: 2444603 - RNA, 19 nt, Artificial Sequence
  Description of Artificial Sequence: Synthetic oligonucleotide
  Antisense strand to SEQ ID NO: 2444602
uaauacccaguguugaugg

SEQ ID NO: 2444604 - RNA, 19 nt, Artificial Sequence
  Description of Artificial Sequence: Synthetic oligonucleotide
  Sense strand starting at position 549 of SEQ ID NO: 1887046
gcauuucuuugauuagguu

SEQ ID NO: 2444605 - RNA, 19 nt, Artificial Sequence
  Description of Artificial Sequence: Synthetic oligonucleotide
  Antisense strand to SEQ ID NO: 2444604
aaccuaaucaaagaaaugc

SEQ ID NO: 2444606 - RNA, 19 nt, Artificial Sequence
  Description of Artificial Sequence: Synthetic oligonucleotide
  Sense strand starting at position 553 of SEQ ID NO: 1887046
uucuuugauuagguugaaa

SEQ ID NO: 2444607 - RNA, 19 nt, Artificial Sequence
  Description of Artificial Sequence: Synthetic oligonucleotide
  Antisense strand to SEQ ID NO: 2444606
uuucaaccuaaucaaagaa

SEQ ID NO: 2444608 - RNA, 19 nt, Artificial Sequence
  Description of Artificial Sequence: Synthetic oligonucleotide
  Sense strand starting at position 555 of SEQ ID NO: 1887046
cuuugauuagguugaaagu

SEQ ID NO: 2444609 - RNA, 19 nt, Artificial Sequence
  Description of Artificial Sequence: Synthetic oligonucleotide
  Antisense strand to SEQ ID NO: 2444608
acuuucaaccuaaucaaag

SEQ ID NO: 2444610 - RNA, 19 nt, Artificial Sequence
  Description of Artificial Sequence: Synthetic oligonucleotide
  Sense strand starting at position 561 of SEQ ID NO: 1887046
uuagguugaaagugcuuau

SEQ ID NO: 2444611 - RNA, 19 nt, Artificial Sequence
  Description of Artificial Sequence: Synthetic oligonucleotide
  Antisense strand to SEQ ID NO: 2444610
auaagcacuuucaaccuaa

SEQ ID NO: 2444612 - RNA, 19 nt, Artificial Sequence
  Description of Artificial Sequence: Synthetic oligonucleotide
  Sense strand starting at position 565 of SEQ ID NO: 1887046
guugaaagugcuuaugguu

SEQ ID NO: 2444613 - RNA, 19 nt, Artificial Sequence
  Description of Artificial Sequence: Synthetic oligonucleotide
  Antisense strand to SEQ ID NO: 2444612
aaccauaagcacuuucaac

SEQ ID NO: 2444614 - RNA, 19 nt, Artificial Sequence
  Description of Artificial Sequence: Synthetic oligonucleotide
  Sense strand starting at position 933 of SEQ ID NO: 1887046
auaugcuguguccauuauu

SEQ ID NO: 2444615 - RNA, 19 nt, Artificial Sequence
  Description of Artificial Sequence: Synthetic oligonucleotide
  Antisense strand to SEQ ID NO: 2444614
aauaauggacacagcauau

SEQ ID NO: 2444616 - RNA, 19 nt, Artificial Sequence
  Description of Artificial Sequence: Synthetic oligonucleotide
  Sense strand starting at position 950 of SEQ ID NO: 1887046
uuguuauugggauauucuu

SEQ ID NO: 2444617 - RNA, 19 nt, Artificial Sequence
  Description of Artificial Sequence: Synthetic oligonucleotide
  Antisense strand to SEQ ID NO: 2444616
aagaauaucccaauaacaa

SEQ ID NO: 2444618 - RNA, 19 nt, Artificial Sequence
  Description of Artificial Sequence: Synthetic oligonucleotide
  Sense strand starting at position 958 of SEQ ID NO: 1887046
gggauauucuuagacauuu

SEQ ID NO: 2444619 - RNA, 19 nt, Artificial Sequence
  Description of Artificial Sequence: Synthetic oligonucleotide
  Antisense strand to SEQ ID NO: 2444618
aaaugucuaagaauauccc

SEQ ID NO: 2444620 - RNA, 19 nt, Artificial Sequence
  Description of Artificial Sequence: Synthetic oligonucleotide
  Sense strand starting at position 1089 of SEQ ID NO: 1887046
uguagucaggucuauuaau

SEQ ID NO: 2444621 - RNA, 19 nt, Artificial Sequence
  Description of Artificial Sequence: Synthetic oligonucleotide
  Antisense strand to SEQ ID NO: 2444620
auuaauagaccugacuaca

SEQ ID NO: 2444622 - RNA, 19 nt, Artificial Sequence
  Description of Artificial Sequence: Synthetic oligonucleotide
  Sense strand starting at position 1257 of SEQ ID NO: 1887046
guagcaugcagugauauug

SEQ ID NO: 2444623 - RNA, 19 nt, Artificial Sequence
  Description of Artificial Sequence: Synthetic oligonucleotide
  Antisense strand to SEQ ID NO: 2444622
caauaucacugcaugcuac

SEQ ID NO: 2444624 - RNA, 19 nt, Artificial Sequence
  Description of Artificial Sequence: Synthetic oligonucleotide
  Sense strand starting at position 1472 of SEQ ID NO: 1887046
gcuaguuccuauuuacugu

SEQ ID NO: 2444625 - RNA, 19 nt, Artificial Sequence
  Description of Artificial Sequence: Synthetic oligonucleotide
  Antisense strand to SEQ ID NO: 2444624
acaguaaauaggaacuagc

SEQ ID NO: 2444626 - RNA, 19 nt, Artificial Sequence
  Description of Artificial Sequence: Synthetic oligonucleotide
  Sense strand starting at position 1548 of SEQ ID NO: 1887046
gucucccuauccuuaggaa

SEQ ID NO: 2444627 - RNA, 19 nt, Artificial Sequence
  Description of Artificial Sequence: Synthetic oligonucleotide
  Antisense strand to SEQ ID NO: 2444626
uuccuaaggauagggagac

SEQ ID NO: 2444628 - RNA, 19 nt, Artificial Sequence
  Description of Artificial Sequence: Synthetic oligonucleotide
  Sense strand starting at position 1662 of SEQ ID NO: 1887046
gagaacaaugcugguaauu

SEQ ID NO: 2444629 - RNA, 19 nt, Artificial Sequence
  Description of Artificial Sequence: Synthetic oligonucleotide
  Antisense strand to SEQ ID NO: 2444628
aauuaccagcauuguucuc

SEQ ID NO: 2444630 - RNA, 19 nt, Artificial Sequence
  Description of Artificial Sequence: Synthetic oligonucleotide
  Sense strand starting at position 1667 of SEQ ID NO: 1887046
caaugcugguaauuaggaa

SEQ ID NO: 2444631 - RNA, 19 nt, Artificial Sequence
  Description of Artificial Sequence: Synthetic oligonucleotide
  Antisense strand to SEQ ID NO: 2444630
uuccuaauuaccagcauug

SEQ ID NO: 2444632 - RNA, 19 nt, Artificial Sequence
  Description of Artificial Sequence: Synthetic oligonucleotide
  Sense strand starting at position 1825 of SEQ ID NO: 1887046
aaguuugcugaagggaauu

SEQ ID NO: 2444633 - RNA, 19 nt, Artificial Sequence
  Description of Artificial Sequence: Synthetic oligonucleotide
  Antisense strand to SEQ ID NO: 2444632
aauucccuucagcaaacuu

SEQ ID NO: 2444634 - RNA, 19 nt, Artificial Sequence
  Description of Artificial Sequence: Synthetic oligonucleotide
  Sense strand starting at position 2195 of SEQ ID NO: 1887046
ggaguuaauauugguaaga

SEQ ID NO: 2444635 - RNA, 19 nt, Artificial Sequence
  Description of Artificial Sequence: Synthetic oligonucleotide
  Antisense strand to SEQ ID NO: 2444634
ucuuaccaauauuaacucc

SEQ ID NO: 2444636 - RNA, 19 nt, Artificial Sequence
  Description of Artificial Sequence: Synthetic oligonucleotide
  Sense strand starting at position 2274 of SEQ ID NO: 1887046
aaaguugauuucugaauga

SEQ ID NO: 2444637 - RNA, 19 nt, Artificial Sequence
  Description of Artificial Sequence: Synthetic oligonucleotide
  Antisense strand to SEQ ID NO: 2444636
ucauucagaaaucaacuuu

SEQ ID NO: 2444638 - RNA, 19 nt, Artificial Sequence
  Description of Artificial Sequence: Synthetic oligonucleotide
  Sense strand starting at position 2369 of SEQ ID NO: 1887046
ccuuaaaggguuugguuua

SEQ ID NO: 2444639 - RNA, 19 nt, Artificial Sequence
  Description of Artificial Sequence: Synthetic oligonucleotide
  Antisense strand to SEQ ID NO: 2444638
uaaaccaaacccuuuaagg

SEQ ID NO: 2444640 - RNA, 19 nt, Artificial Sequence
  Description of Artificial Sequence: Synthetic oligonucleotide
  Sense strand starting at position 2518 of SEQ ID NO: 1887046
uggccauaucuagacauuc

SEQ ID NO: 2444641 - RNA, 19 nt, Artificial Sequence
  Description of Artificial Sequence: Synthetic oligonucleotide
  Antisense strand to SEQ ID NO: 2444640
gaaugucuagauauggcca

SEQ ID NO: 2444642 - RNA, 19 nt, Artificial Sequence
  Description of Artificial Sequence: Synthetic oligonucleotide
  Sense strand starting at position 2555 of SEQ ID NO: 1887046
agcagauguggucacaaag

SEQ ID NO: 2444643 - RNA, 19 nt, Artificial Sequence
  Description of Artificial Sequence: Synthetic oligonucleotide
  Antisense strand to SEQ ID NO: 2444642
cuuugugaccacaucugcu

SEQ ID NO: 2444644 - RNA, 19 nt, Artificial Sequence
  Description of Artificial Sequence: Synthetic oligonucleotide
  Sense strand starting at position 2711 of SEQ ID NO: 1887046
ggcauuugguagcaaacaa

SEQ ID NO: 2444645 - RNA, 19 nt, Artificial Sequence
  Description of Artificial Sequence: Synthetic oligonucleotide
  Antisense strand to SEQ ID NO: 2444644
uuguuugcuaccaaaugcc

SEQ ID NO: 2444646 - RNA, 19 nt, Artificial Sequence
  Description of Artificial Sequence: Synthetic oligonucleotide
  Sense strand starting at position 2750 of SEQ ID NO: 1887046
uuauauguaguuugaggga

SEQ ID NO: 2444647 - RNA, 19 nt, Artificial Sequence
  Description of Artificial Sequence: Synthetic oligonucleotide
  Antisense strand to SEQ ID NO: 2444646
ucccucaaacuacauauaa

SEQ ID NO: 2444648 - RNA, 19 nt, Artificial Sequence
  Description of Artificial Sequence: Synthetic oligonucleotide
  Sense strand starting at position 2783 of SEQ ID NO: 1887046
accaccugugccuauguua

SEQ ID NO: 2444649 - RNA, 19 nt, Artificial Sequence
  Description of Artificial Sequence: Synthetic oligonucleotide
  Antisense strand to SEQ ID NO: 2444648
uaacauaggcacagguggu

SEQ ID NO: 2444650 - RNA, 19 nt, Artificial Sequence
  Description of Artificial Sequence: Synthetic oligonucleotide
  Sense strand starting at position 2893 of SEQ ID NO: 1887046
acaaucagugaauggcuaa

SEQ ID NO: 2444651 - RNA, 19 nt, Artificial Sequence
  Description of Artificial Sequence: Synthetic oligonucleotide
  Antisense strand to SEQ ID NO: 2444650
uuagccauucacugauugu

SEQ ID NO: 2444652 - RNA, 19 nt, Artificial Sequence
  Description of Artificial Sequence: Synthetic oligonucleotide
  Sense strand starting at position 2896 of SEQ ID NO: 1887046
aucagugaauggcuaaaua

SEQ ID NO: 2444653 - RNA, 19 nt, Artificial Sequence
  Description of Artificial Sequence: Synthetic oligonucleotide
  Antisense strand to SEQ ID NO: 2444652
uauuuagccauucacugau

SEQ ID NO: 2444654 - RNA, 19 nt, Artificial Sequence
  Description of Artificial Sequence: Synthetic oligonucleotide
  Sense strand starting at position 3141 of SEQ ID NO: 1887046
ugcugacaggucuagaaau

SEQ ID NO: 2444655 - RNA, 19 nt, Artificial Sequence
  Description of Artificial Sequence: Synthetic oligonucleotide
  Antisense strand to SEQ ID NO: 2444654
auuucuagaccugucagca

SEQ ID NO: 2444656 - RNA, 19 nt, Artificial Sequence
  Description of Artificial Sequence: Synthetic oligonucleotide
  Sense strand starting at position 3281 of SEQ ID NO: 1887046
agucuaagaugagcauuaa

SEQ ID NO: 2444657 - RNA, 19 nt, Artificial Sequence
  Description of Artificial Sequence: Synthetic oligonucleotide
  Antisense strand to SEQ ID NO: 2444656
uuaaugcucaucuuagacu

SEQ ID NO: 2444658 - RNA, 19 nt, Artificial Sequence
  Description of Artificial Sequence: Synthetic oligonucleotide
  Sense strand starting at position 3328 of SEQ ID NO: 1887046
guacucaaagauugacuga

SEQ ID NO: 2444659 - RNA, 19 nt, Artificial Sequence
  Description of Artificial Sequence: Synthetic oligonucleotide
  Antisense strand to SEQ ID NO: 2444658
ucagucaaucuuugaguac

SEQ ID NO: 2444660 - RNA, 19 nt, Artificial Sequence
  Description of Artificial Sequence: Synthetic oligonucleotide
  Sense strand starting at position 3384 of SEQ ID NO: 1887046
uuccacuaucugggacaau

SEQ ID NO: 2444661 - RNA, 19 nt, Artificial Sequence
  Description of Artificial Sequence: Synthetic oligonucleotide
  Antisense strand to SEQ ID NO: 2444660
auugucccagauaguggaa

SEQ ID NO: 2444662 - RNA, 19 nt, Artificial Sequence
  Description of Artificial Sequence: Synthetic oligonucleotide
  Sense strand starting at position 3561 of SEQ ID NO: 1887046
aaagguuaucccugaacgg

SEQ ID NO: 2444663 - RNA, 19 nt, Artificial Sequence
  Description of Artificial Sequence: Synthetic oligonucleotide
  Antisense strand to SEQ ID NO: 2444662
ccguucagggauaaccuuu

SEQ ID NO: 2444664 - RNA, 19 nt, Artificial Sequence
  Description of Artificial Sequence: Synthetic oligonucleotide
  Sense strand starting at position 3562 of SEQ ID NO: 1887046
aagguuaucccugaacggu

SEQ ID NO: 2444665 - RNA, 19 nt, Artificial Sequence
  Description of Artificial Sequence: Synthetic oligonucleotide
  Antisense strand to SEQ ID NO: 2444664
accguucagggauaaccuu

SEQ ID NO: 2444666 - RNA, 19 nt, Artificial Sequence
  Description of Artificial Sequence: Synthetic oligonucleotide
  Sense strand starting at position 3565 of SEQ ID NO: 1887046
guuaucccugaacgguaau

SEQ ID NO: 2444667 - RNA, 19 nt, Artificial Sequence
  Description of Artificial Sequence: Synthetic oligonucleotide
  Antisense strand to SEQ ID NO: 2444666
auuaccguucagggauaac

SEQ ID NO: 2444668 - RNA, 19 nt, Artificial Sequence
  Description of Artificial Sequence: Synthetic oligonucleotide
  Sense strand starting at position 3568 of SEQ ID NO: 1887046
aucccugaacgguaauauu

SEQ ID NO: 2444669 - RNA, 19 nt, Artificial Sequence
  Description of Artificial Sequence: Synthetic oligonucleotide
  Antisense strand to SEQ ID NO: 2444668
aauauuaccguucagggau

SEQ ID NO: 2444670 - RNA, 19 nt, Artificial Sequence
  Description of Artificial Sequence: Synthetic oligonucleotide
  Sense strand starting at position 3579 of SEQ ID NO: 1887046
guaauauuaugagcauaca

SEQ ID NO: 2444671 - RNA, 19 nt, Artificial Sequence
  Description of Artificial Sequence: Synthetic oligonucleotide
  Antisense strand to SEQ ID NO: 2444670
uguaugcucauaauauuac

SEQ ID NO: 2444672 - RNA, 19 nt, Artificial Sequence
  Description of Artificial Sequence: Synthetic oligonucleotide
  Sense strand starting at position 3604 of SEQ ID NO: 1887046
uucuguauuucucucguuu

SEQ ID NO: 2444673 - RNA, 19 nt, Artificial Sequence
  Description of Artificial Sequence: Synthetic oligonucleotide
  Antisense strand to SEQ ID NO: 2444672
aaacgagagaaauacagaa

SEQ ID NO: 2444674 - RNA, 19 nt, Artificial Sequence
  Description of Artificial Sequence: Synthetic oligonucleotide
  Sense strand starting at position 3906 of SEQ ID NO: 1887046
aguaauuaugagggugaag

SEQ ID NO: 2444675 - RNA, 19 nt, Artificial Sequence
  Description of Artificial Sequence: Synthetic oligonucleotide
  Antisense strand to SEQ ID NO: 2444674
cuucacccucauaauuacu

SEQ ID NO: 2444676 - RNA, 19 nt, Artificial Sequence
  Description of Artificial Sequence: Synthetic oligonucleotide
  Sense strand starting at position 3939 of SEQ ID NO: 1887046
cugcgaugccaaugacaaa

SEQ ID NO: 2444677 - RNA, 19 nt, Artificial Sequence
  Description of Artificial Sequence: Synthetic oligonucleotide
  Antisense strand to SEQ ID NO: 2444676
uuugucauuggcaucgcag

SEQ ID NO: 2444678 - RNA, 19 nt, Artificial Sequence
  Description of Artificial Sequence: Synthetic oligonucleotide
  Sense strand starting at position 3957 of SEQ ID NO: 1887046
augguuaacugauaagaag

SEQ ID NO: 2444679 - RNA, 19 nt, Artificial Sequence
  Description of Artificial Sequence: Synthetic oligonucleotide
  Antisense strand to SEQ ID NO: 2444678
cuucuuaucaguuaaccau

SEQ ID NO: 2444680 - RNA, 19 nt, Artificial Sequence
  Description of Artificial Sequence: Synthetic oligonucleotide
  Sense strand starting at position 3960 of SEQ ID NO: 1887046
guuaacugauaagaagaaa

SEQ ID NO: 2444681 - RNA, 19 nt, Artificial Sequence
  Description of Artificial Sequence: Synthetic oligonucleotide
  Antisense strand to SEQ ID NO: 2444680
uuucuucuuaucaguuaac

SEQ ID NO: 2444682 - RNA, 19 nt, Artificial Sequence
  Description of Artificial Sequence: Synthetic oligonucleotide
  Sense strand starting at position 415 of SEQ ID NO: 1887047
guggaaaugacccgauguc

SEQ ID NO: 2444683 - RNA, 19 nt, Artificial Sequence
  Description of Artificial Sequence: Synthetic oligonucleotide
  Antisense strand to SEQ ID NO: 2444682
gacaucgggucauuuccac

SEQ ID NO: 2444684 - RNA, 19 nt, Artificial Sequence
  Description of Artificial Sequence: Synthetic oligonucleotide
  Sense strand starting at position 416 of SEQ ID NO: 1887047
uggaaaugacccgaugucu

SEQ ID NO: 2444685 - RNA, 19 nt, Artificial Sequence
  Description of Artificial Sequence: Synthetic oligonucleotide
  Antisense strand to SEQ ID NO: 2444684
agacaucgggucauuucca

SEQ ID NO: 2444686 - RNA, 19 nt, Artificial Sequence
  Description of Artificial Sequence: Synthetic oligonucleotide
  Sense strand starting at position 422 of SEQ ID NO: 1887047
ugacccgaugucuauaagu

SEQ ID NO: 2444687 - RNA, 19 nt, Artificial Sequence
  Description of Artificial Sequence: Synthetic oligonucleotide
  Antisense strand to SEQ ID NO: 2444686
acuuauagacaucggguca

SEQ ID NO: 2444688 - RNA, 19 nt, Artificial Sequence
  Description of Artificial Sequence: Synthetic oligonucleotide
  Sense strand starting at position 424 of SEQ ID NO: 1887047
acccgaugucuauaaguug

SEQ ID NO: 2444689 - RNA, 19 nt, Artificial Sequence
  Description of Artificial Sequence: Synthetic oligonucleotide
  Antisense strand to SEQ ID NO: 2444688
caacuuauagacaucgggu

SEQ ID NO: 2444690 - RNA, 19 nt, Artificial Sequence
  Description of Artificial Sequence: Synthetic oligonucleotide
  Sense strand starting at position 431 of SEQ ID NO: 1887047
gucuauaaguugguggaua

SEQ ID NO: 2444691 - RNA, 19 nt, Artificial Sequence
  Description of Artificial Sequence: Synthetic oligonucleotide
  Antisense strand to SEQ ID NO: 2444690
uauccaccaacuuauagac

SEQ ID NO: 2444692 - RNA, 19 nt, Artificial Sequence
  Description of Artificial Sequence: Synthetic oligonucleotide
  Sense strand starting at position 433 of SEQ ID NO: 1887047
cuauaaguugguggauaaa

SEQ ID NO: 2444693 - RNA, 19 nt, Artificial Sequence
  Description of Artificial Sequence: Synthetic oligonucleotide
  Antisense strand to SEQ ID NO: 2444692
uuuauccaccaacuuauag

SEQ ID NO: 2444694 - RNA, 19 nt, Artificial Sequence
  Description of Artificial Sequence: Synthetic oligonucleotide
  Sense strand starting at position 445 of SEQ ID NO: 1887047
ggauaaagaguuugugaua

SEQ ID NO: 2444695 - RNA, 19 nt, Artificial Sequence
  Description of Artificial Sequence: Synthetic oligonucleotide
  Antisense strand to SEQ ID NO: 2444694
uaucacaaacucuuuaucc

SEQ ID NO: 2444696 - RNA, 19 nt, Artificial Sequence
  Description of Artificial Sequence: Synthetic oligonucleotide
  Sense strand starting at position 985 of SEQ ID NO: 1887047
augauugccucugugaaua

SEQ ID NO: 2444697 - RNA, 19 nt, Artificial Sequence
  Description of Artificial Sequence: Synthetic oligonucleotide
  Antisense strand to SEQ ID NO: 2444696
uauucacagaggcaaucau

SEQ ID NO: 2444698 - RNA, 19 nt, Artificial Sequence
  Description of Artificial Sequence: Synthetic oligonucleotide
  Sense strand starting at position 1031 of SEQ ID NO: 1887047
gcaagacuucggcuuugcu

SEQ ID NO: 2444699 - RNA, 19 nt, Artificial Sequence
  Description of Artificial Sequence: Synthetic oligonucleotide
  Antisense strand to SEQ ID NO: 2444698
agcaaagccgaagucuugc

SEQ ID NO: 2444700 - RNA, 19 nt, Artificial Sequence
  Description of Artificial Sequence: Synthetic oligonucleotide
  Sense strand starting at position 1506 of SEQ ID NO: 1887047
gaaagacucugucucugga

SEQ ID NO: 2444701 - RNA, 19 nt, Artificial Sequence
  Description of Artificial Sequence: Synthetic oligonucleotide
  Antisense strand to SEQ ID NO: 2444700
uccagagacagagucuuuc

SEQ ID NO: 2444702 - RNA, 19 nt, Artificial Sequence
  Description of Artificial Sequence: Synthetic oligonucleotide
  Sense strand starting at position 1569 of SEQ ID NO: 1887047
agcagaaauuguuuccauc

SEQ ID NO: 2444703 - RNA, 19 nt, Artificial Sequence
  Description of Artificial Sequence: Synthetic oligonucleotide
  Antisense strand to SEQ ID NO: 2444702
gauggaaacaauuucugcu

SEQ ID NO: 2444704 - RNA, 19 nt, Artificial Sequence
  Description of Artificial Sequence: Synthetic oligonucleotide
  Sense strand starting at position 1715 of SEQ ID NO: 1887047
aaauauucuccagacgugu

SEQ ID NO: 2444705 - RNA, 19 nt, Artificial Sequence
  Description of Artificial Sequence: Synthetic oligonucleotide
  Antisense strand to SEQ ID NO: 2444704
acacgucuggagaauauuu

SEQ ID NO: 2444706 - RNA, 19 nt, Artificial Sequence
  Description of Artificial Sequence: Synthetic oligonucleotide
  Sense strand starting at position 1858 of SEQ ID NO: 1887047
auuauuuacugauaccgaa

SEQ ID NO: 2444707 - RNA, 19 nt, Artificial Sequence
  Description of Artificial Sequence: Synthetic oligonucleotide
  Antisense strand to SEQ ID NO: 2444706
uucgguaucaguaaauaau

SEQ ID NO: 2444708 - RNA, 19 nt, Artificial Sequence
  Description of Artificial Sequence: Synthetic oligonucleotide
  Sense strand starting at position 1861 of SEQ ID NO: 1887047
auuuacugauaccgaagaa

SEQ ID NO: 2444709 - RNA, 19 nt, Artificial Sequence
  Description of Artificial Sequence: Synthetic oligonucleotide
  Antisense strand to SEQ ID NO: 2444708
uucuucgguaucaguaaau

SEQ ID NO: 2444710 - RNA, 19 nt, Artificial Sequence
  Description of Artificial Sequence: Synthetic oligonucleotide
  Sense strand starting at position 1961 of SEQ ID NO: 1887047
aguacaguagugcaauaaa

SEQ ID NO: 2444711 - RNA, 19 nt, Artificial Sequence
  Description of Artificial Sequence: Synthetic oligonucleotide
  Antisense strand to SEQ ID NO: 2444710
uuuauugcacuacuguacu

SEQ ID NO: 2444712 - RNA, 19 nt, Artificial Sequence
  Description of Artificial Sequence: Synthetic oligonucleotide
  Sense strand starting at position 1988 of SEQ ID NO: 1887047
auucguuagcaguaauaag

SEQ ID NO: 2444713 - RNA, 19 nt, Artificial Sequence
  Description of Artificial Sequence: Synthetic oligonucleotide
  Antisense strand to SEQ ID NO: 2444712
cuuauuacugcuaacgaau

SEQ ID NO: 2444714 - RNA, 19 nt, Artificial Sequence
  Description of Artificial Sequence: Synthetic oligonucleotide
  Sense strand starting at position 2038 of SEQ ID NO: 1887047
guugaagcuucagugagaa

SEQ ID NO: 2444715 - RNA, 19 nt, Artificial Sequence
  Description of Artificial Sequence: Synthetic oligonucleotide
  Antisense strand to SEQ ID NO: 2444714
uucucacugaagcuucaac

SEQ ID NO: 2444716 - RNA, 19 nt, Artificial Sequence
  Description of Artificial Sequence: Synthetic oligonucleotide
  Sense strand starting at position 2159 of SEQ ID NO: 1887047
agugauguugcuuauugau

SEQ ID NO: 2444717 - RNA, 19 nt, Artificial Sequence
  Description of Artificial Sequence: Synthetic oligonucleotide
  Antisense strand to SEQ ID NO: 2444716
aucaauaagcaacaucacu

SEQ ID NO: 2444718 - RNA, 19 nt, Artificial Sequence
  Description of Artificial Sequence: Synthetic oligonucleotide
  Sense strand starting at position 2166 of SEQ ID NO: 1887047
uugcuuauugaugacuaau

SEQ ID NO: 2444719 - RNA, 19 nt, Artificial Sequence
  Description of Artificial Sequence: Synthetic oligonucleotide
  Antisense strand to SEQ ID NO: 2444718
auuagucaucaauaagcaa

SEQ ID NO: 2444720 - RNA, 19 nt, Artificial Sequence
  Description of Artificial Sequence: Synthetic oligonucleotide
  Sense strand starting at position 2168 of SEQ ID NO: 1887047
gcuuauugaugacuaauau

SEQ ID NO: 2444721 - RNA, 19 nt, Artificial Sequence
  Description of Artificial Sequence: Synthetic oligonucleotide
  Antisense strand to SEQ ID NO: 2444720
auauuagucaucaauaagc

SEQ ID NO: 2444722 - RNA, 19 nt, Artificial Sequence
  Description of Artificial Sequence: Synthetic oligonucleotide
  Sense strand starting at position 2236 of SEQ ID NO: 1887047
guaaauaugcccuaagccu

SEQ ID NO: 2444723 - RNA, 19 nt, Artificial Sequence
  Description of Artificial Sequence: Synthetic oligonucleotide
  Antisense strand to SEQ ID NO: 2444722
aggcuuagggcauauuuac

SEQ ID NO: 2444724 - RNA, 19 nt, Artificial Sequence
  Description of Artificial Sequence: Synthetic oligonucleotide
  Sense strand starting at position 2258 of SEQ ID NO: 1887047
uaguaauuagaauggguau

SEQ ID NO: 2444725 - RNA, 19 nt, Artificial Sequence
  Description of Artificial Sequence: Synthetic oligonucleotide
  Antisense strand to SEQ ID NO: 2444724
auacccauucuaauuacua

SEQ ID NO: 2444726 - RNA, 19 nt, Artificial Sequence
  Description of Artificial Sequence: Synthetic oligonucleotide
  Sense strand starting at position 2259 of SEQ ID NO: 1887047
aguaauuagaauggguauu

SEQ ID NO: 2444727 - RNA, 19 nt, Artificial Sequence
  Description of Artificial Sequence: Synthetic oligonucleotide
  Antisense strand to SEQ ID NO: 2444726
aauacccauucuaauuacu

SEQ ID NO: 2444728 - RNA, 19 nt, Artificial Sequence
  Description of Artificial Sequence: Synthetic oligonucleotide
  Sense strand starting at position 2261 of SEQ ID NO: 1887047
uaauuagaauggguauugu

SEQ ID NO: 2444729 - RNA, 19 nt, Artificial Sequence
  Description of Artificial Sequence: Synthetic oligonucleotide
  Antisense strand to SEQ ID NO: 2444728
acaauacccauucuaauua

SEQ ID NO: 2444730 - RNA, 19 nt, Artificial Sequence
  Description of Artificial Sequence: Synthetic oligonucleotide
  Sense strand starting at position 2282 of SEQ ID NO: 1887047
auacuuuaggauugguauu

SEQ ID NO: 2444731 - RNA, 19 nt, Artificial Sequence
  Description of Artificial Sequence: Synthetic oligonucleotide
  Antisense strand to SEQ ID NO: 2444730
aauaccaauccuaaaguau

SEQ ID NO: 2444732 - RNA, 19 nt, Artificial Sequence
  Description of Artificial Sequence: Synthetic oligonucleotide
  Sense strand starting at position 2284 of SEQ ID NO: 1887047
acuuuaggauugguauuaa

SEQ ID NO: 2444733 - RNA, 19 nt, Artificial Sequence
  Description of Artificial Sequence: Synthetic oligonucleotide
  Antisense strand to SEQ ID NO: 2444732
uuaauaccaauccuaaagu

SEQ ID NO: 2444734 - RNA, 19 nt, Artificial Sequence
  Description of Artificial Sequence: Synthetic oligonucleotide
  Sense strand starting at position 2397 of SEQ ID NO: 1887047
cugauuaaacgccauguaa

SEQ ID NO: 2444735 - RNA, 19 nt, Artificial Sequence
  Description of Artificial Sequence: Synthetic oligonucleotide
  Antisense strand to SEQ ID NO: 2444734
uuacauggcguuuaaucag

SEQ ID NO: 2444736 - RNA, 19 nt, Artificial Sequence
  Description of Artificial Sequence: Synthetic oligonucleotide
  Sense strand starting at position 2562 of SEQ ID NO: 1887047
uuaucuugaguuuacuaag

SEQ ID NO: 2444737 - RNA, 19 nt, Artificial Sequence
  Description of Artificial Sequence: Synthetic oligonucleotide
  Antisense strand to SEQ ID NO: 2444736
cuuaguaaacucaagauaa

SEQ ID NO: 2444738 - RNA, 19 nt, Artificial Sequence
  Description of Artificial Sequence: Synthetic oligonucleotide
  Sense strand starting at position 2599 of SEQ ID NO: 1887047
agggaaucaaugugcucua

SEQ ID NO: 2444739 - RNA, 19 nt, Artificial Sequence
  Description of Artificial Sequence: Synthetic oligonucleotide
  Antisense strand to SEQ ID NO: 2444738
uagagcacauugauucccu

SEQ ID NO: 2444740 - RNA, 19 nt, Artificial Sequence
  Description of Artificial Sequence: Synthetic oligonucleotide
  Sense strand starting at position 2600 of SEQ ID NO: 1887047
gggaaucaaugugcucuaa

SEQ ID NO: 2444741 - RNA, 19 nt, Artificial Sequence
  Description of Artificial Sequence: Synthetic oligonucleotide
  Antisense strand to SEQ ID NO: 2444740
uuagagcacauugauuccc

SEQ ID NO: 2444742 - RNA, 19 nt, Artificial Sequence
  Description of Artificial Sequence: Synthetic oligonucleotide
  Sense strand starting at position 2604 of SEQ ID NO: 1887047
aucaaugugcucuaaacag

SEQ ID NO: 2444743 - RNA, 19 nt, Artificial Sequence
  Description of Artificial Sequence: Synthetic oligonucleotide
  Antisense strand to SEQ ID NO: 2444742
cuguuuagagcacauugau

SEQ ID NO: 2444744 - RNA, 19 nt, Artificial Sequence
  Description of Artificial Sequence: Synthetic oligonucleotide
  Sense strand starting at position 2797 of SEQ ID NO: 1887047
guuccaagcuaauugacau

SEQ ID NO: 2444745 - RNA, 19 nt, Artificial Sequence
  Description of Artificial Sequence: Synthetic oligonucleotide
  Antisense strand to SEQ ID NO: 2444744
augucaauuagcuuggaac

SEQ ID NO: 2444746 - RNA, 19 nt, Artificial Sequence
  Description of Artificial Sequence: Synthetic oligonucleotide
  Sense strand starting at position 2884 of SEQ ID NO: 1887047
auaguaucacacugcauua

SEQ ID NO: 2444747 - RNA, 19 nt, Artificial Sequence
  Description of Artificial Sequence: Synthetic oligonucleotide
  Antisense strand to SEQ ID NO: 2444746
uaaugcagugugauacuau

SEQ ID NO: 2444748 - RNA, 19 nt, Artificial Sequence
  Description of Artificial Sequence: Synthetic oligonucleotide
  Sense strand starting at position 2920 of SEQ ID NO: 1887047
cuaguaguaccacgaaaga

SEQ ID NO: 2444749 - RNA, 19 nt, Artificial Sequence
  Description of Artificial Sequence: Synthetic oligonucleotide
  Antisense strand to SEQ ID NO: 2444748
ucuuucgugguacuacuag

SEQ ID NO: 2444750 - RNA, 19 nt, Artificial Sequence
  Description of Artificial Sequence: Synthetic oligonucleotide
  Sense strand starting at position 3096 of SEQ ID NO: 1887047
ucaacuacuuagucggauu

SEQ ID NO: 2444751 - RNA, 19 nt, Artificial Sequence
  Description of Artificial Sequence: Synthetic oligonucleotide
  Antisense strand to SEQ ID NO: 2444750
aauccgacuaaguaguuga

SEQ ID NO: 2444752 - RNA, 19 nt, Artificial Sequence
  Description of Artificial Sequence: Synthetic oligonucleotide
  Sense strand starting at position 3098 of SEQ ID NO: 1887047
aacuacuuagucggauuga

SEQ ID NO: 2444753 - RNA, 19 nt, Artificial Sequence
  Description of Artificial Sequence: Synthetic oligonucleotide
  Antisense strand to SEQ ID NO: 2444752
ucaauccgacuaaguaguu

SEQ ID NO: 2444754 - RNA, 19 nt, Artificial Sequence
  Description of Artificial Sequence: Synthetic oligonucleotide
  Sense strand starting at position 3172 of SEQ ID NO: 1887047
gucaaauccugggccacau

SEQ ID NO: 2444755 - RNA, 19 nt, Artificial Sequence
  Description of Artificial Sequence: Synthetic oligonucleotide
  Antisense strand to SEQ ID NO: 2444754
auguggcccaggauuugac

SEQ ID NO: 2444756 - RNA, 19 nt, Artificial Sequence
  Description of Artificial Sequence: Synthetic oligonucleotide
  Sense strand starting at position 3474 of SEQ ID NO: 1887047
gguccacaaguauaacauu

SEQ ID NO: 2444757 - RNA, 19 nt, Artificial Sequence
  Description of Artificial Sequence: Synthetic oligonucleotide
  Antisense strand to SEQ ID NO: 2444756
aauguuauacuuguggacc

SEQ ID NO: 2444758 - RNA, 19 nt, Artificial Sequence
  Description of Artificial Sequence: Synthetic oligonucleotide
  Sense strand starting at position 3498 of SEQ ID NO: 1887047
cuagaagcacaugguaaau

SEQ ID NO: 2444759 - RNA, 19 nt, Artificial Sequence
  Description of Artificial Sequence: Synthetic oligonucleotide
  Antisense strand to SEQ ID NO: 2444758
auuuaccaugugcuucuag

SEQ ID NO: 2444760 - RNA, 19 nt, Artificial Sequence
  Description of Artificial Sequence: Synthetic oligonucleotide
  Sense strand starting at position 3658 of SEQ ID NO: 1887047
cuaauuuacuugcaaggau

SEQ ID NO: 2444761 - RNA, 19 nt, Artificial Sequence
  Description of Artificial Sequence: Synthetic oligonucleotide
  Antisense strand to SEQ ID NO: 2444760
auccuugcaaguaaauuag

SEQ ID NO: 2444762 - RNA, 19 nt, Artificial Sequence
  Description of Artificial Sequence: Synthetic oligonucleotide
  Sense strand starting at position 107 of SEQ ID NO: 1887048
gaccuuacaguuugaggau

SEQ ID NO: 2444763 - RNA, 19 nt, Artificial Sequence
  Description of Artificial Sequence: Synthetic oligonucleotide
  Antisense strand to SEQ ID NO: 2444762
auccucaaacuguaagguc

SEQ ID NO: 2444764 - RNA, 19 nt, Artificial Sequence
  Description of Artificial Sequence: Synthetic oligonucleotide
  Sense strand starting at position 116 of SEQ ID NO: 1887048
guuugaggaucucuagaau

SEQ ID NO: 2444765 - RNA, 19 nt, Artificial Sequence
  Description of Artificial Sequence: Synthetic oligonucleotide
  Antisense strand to SEQ ID NO: 2444764
auucuagagauccucaaac

SEQ ID NO: 2444766 - RNA, 19 nt, Artificial Sequence
  Description of Artificial Sequence: Synthetic oligonucleotide
  Sense strand starting at position 196 of SEQ ID NO: 1887048
gccugugaagacuagaauc

SEQ ID NO: 2444767 - RNA, 19 nt, Artificial Sequence
  Description of Artificial Sequence: Synthetic oligonucleotide
  Antisense strand to SEQ ID NO: 2444766
gauucuagucuucacaggc

SEQ ID NO: 2444768 - RNA, 19 nt, Artificial Sequence
  Description of Artificial Sequence: Synthetic oligonucleotide
  Sense strand starting at position 225 of SEQ ID NO: 1887048
cugcacuaagaacgaaauu

SEQ ID NO: 2444769 - RNA, 19 nt, Artificial Sequence
  Description of Artificial Sequence: Synthetic oligonucleotide
  Antisense strand to SEQ ID NO: 2444768
aauuucguucuuagugcag

SEQ ID NO: 2444770 - RNA, 19 nt, Artificial Sequence
  Description of Artificial Sequence: Synthetic oligonucleotide
  Sense strand starting at position 276 of SEQ ID NO: 1887048
aucuuaaagggcuaaugua

SEQ ID NO: 2444771 - RNA, 19 nt, Artificial Sequence
  Description of Artificial Sequence: Synthetic oligonucleotide
  Antisense strand to SEQ ID NO: 2444770
uacauuagcccuuuaagau

SEQ ID NO: 2444772 - RNA, 19 nt, Artificial Sequence
  Description of Artificial Sequence: Synthetic oligonucleotide
  Sense strand starting at position 338 of SEQ ID NO: 1887048
agccaagagcaugaguaua

SEQ ID NO: 2444773 - RNA, 19 nt, Artificial Sequence
  Description of Artificial Sequence: Synthetic oligonucleotide
  Antisense strand to SEQ ID NO: 2444772
uauacucaugcucuuggcu

SEQ ID NO: 2444774 - RNA, 19 nt, Artificial Sequence
  Description of Artificial Sequence: Synthetic oligonucleotide
  Sense strand starting at position 350 of SEQ ID NO: 1887048
gaguauaagucucuugaaa

SEQ ID NO: 2444775 - RNA, 19 nt, Artificial Sequence
  Description of Artificial Sequence: Synthetic oligonucleotide
  Antisense strand to SEQ ID NO: 2444774
uuucaagagacuuauacuc

SEQ ID NO: 2444776 - RNA, 19 nt, Artificial Sequence
  Description of Artificial Sequence: Synthetic oligonucleotide
  Sense strand starting at position 430 of SEQ ID NO: 1887048
cuauauagaugacuuugua

SEQ ID NO: 2444777 - RNA, 19 nt, Artificial Sequence
  Description of Artificial Sequence: Synthetic oligonucleotide
  Antisense strand to SEQ ID NO: 2444776
uacaaagucaucuauauag

SEQ ID NO: 2444778 - RNA, 19 nt, Artificial Sequence
  Description of Artificial Sequence: Synthetic oligonucleotide
  Sense strand starting at position 434 of SEQ ID NO: 1887048
auagaugacuuuguaucua

SEQ ID NO: 2444779 - RNA, 19 nt, Artificial Sequence
  Description of Artificial Sequence: Synthetic oligonucleotide
  Antisense strand to SEQ ID NO: 2444778
uagauacaaagucaucuau

SEQ ID NO: 2444780 - RNA, 19 nt, Artificial Sequence
  Description of Artificial Sequence: Synthetic oligonucleotide
  Sense strand starting at position 543 of SEQ ID NO: 1887048
ugcaauuuagccuguaacu

SEQ ID NO: 2444781 - RNA, 19 nt, Artificial Sequence
  Description of Artificial Sequence: Synthetic oligonucleotide
  Antisense strand to SEQ ID NO: 2444780
aguuacaggcuaaauugca

SEQ ID NO: 2444782 - RNA, 19 nt, Artificial Sequence
  Description of Artificial Sequence: Synthetic oligonucleotide
  Sense strand starting at position 585 of SEQ ID NO: 1887048
uucugacuccugcaauaug

SEQ ID NO: 2444783 - RNA, 19 nt, Artificial Sequence
  Description of Artificial Sequence: Synthetic oligonucleotide
  Antisense strand to SEQ ID NO: 2444782
cauauugcaggagucagaa

SEQ ID NO: 2444784 - RNA, 19 nt, Artificial Sequence
  Description of Artificial Sequence: Synthetic oligonucleotide
  Sense strand starting at position 588 of SEQ ID NO: 1887048
ugacuccugcaauaugaau

SEQ ID NO: 2444785 - RNA, 19 nt, Artificial Sequence
  Description of Artificial Sequence: Synthetic oligonucleotide
  Antisense strand to SEQ ID NO: 2444784
auucauauugcaggaguca

SEQ ID NO: 2444786 - RNA, 19 nt, Artificial Sequence
  Description of Artificial Sequence: Synthetic oligonucleotide
  Sense strand starting at position 594 of SEQ ID NO: 1887048
cugcaauaugaauagcuca

SEQ ID NO: 2444787 - RNA, 19 nt, Artificial Sequence
  Description of Artificial Sequence: Synthetic oligonucleotide
  Antisense strand to SEQ ID NO: 2444786
ugagcuauucauauugcag

SEQ ID NO: 2444788 - RNA, 19 nt, Artificial Sequence
  Description of Artificial Sequence: Synthetic oligonucleotide
  Sense strand starting at position 720 of SEQ ID NO: 1887048
agaccaucuuaagcaaagu

SEQ ID NO: 2444789 - RNA, 19 nt, Artificial Sequence
  Description of Artificial Sequence: Synthetic oligonucleotide
  Antisense strand to SEQ ID NO: 2444788
acuuugcuuaagauggucu

SEQ ID NO: 2444790 - RNA, 19 nt, Artificial Sequence
  Description of Artificial Sequence: Synthetic oligonucleotide
  Sense strand starting at position 976 of SEQ ID NO: 1887048
gcagucauuucugcaauuc

SEQ ID NO: 2444791 - RNA, 19 nt, Artificial Sequence
  Description of Artificial Sequence: Synthetic oligonucleotide
  Antisense strand to SEQ ID NO: 2444790
gaauugcagaaaugacugc

SEQ ID NO: 2444792 - RNA, 19 nt, Artificial Sequence
  Description of Artificial Sequence: Synthetic oligonucleotide
  Sense strand starting at position 1075 of SEQ ID NO: 1887048
ucuaaagucuuauugggaa

SEQ ID NO: 2444793 - RNA, 19 nt, Artificial Sequence
  Description of Artificial Sequence: Synthetic oligonucleotide
  Antisense strand to SEQ ID NO: 2444792
uucccaauaagacuuuaga

SEQ ID NO: 2444794 - RNA, 19 nt, Artificial Sequence
  Description of Artificial Sequence: Synthetic oligonucleotide
  Sense strand starting at position 1308 of SEQ ID NO: 1887048
uguaauuugcagcacugua

SEQ ID NO: 2444795 - RNA, 19 nt, Artificial Sequence
  Description of Artificial Sequence: Synthetic oligonucleotide
  Antisense strand to SEQ ID NO: 2444794
uacagugcugcaaauuaca

SEQ ID NO: 2444796 - RNA, 19 nt, Artificial Sequence
  Description of Artificial Sequence: Synthetic oligonucleotide
  Sense strand starting at position 1372 of SEQ ID NO: 1887048
agaguaaccucugucauaa

SEQ ID NO: 2444797 - RNA, 19 nt, Artificial Sequence
  Description of Artificial Sequence: Synthetic oligonucleotide
  Antisense strand to SEQ ID NO: 2444796
uuaugacagagguuacucu

SEQ ID NO: 2444798 - RNA, 19 nt, Artificial Sequence
  Description of Artificial Sequence: Synthetic oligonucleotide
  Sense strand starting at position 1695 of SEQ ID NO: 1887048
aucagucauccuuaccuga

SEQ ID NO: 2444799 - RNA, 19 nt, Artificial Sequence
  Description of Artificial Sequence: Synthetic oligonucleotide
  Antisense strand to SEQ ID NO: 2444798
ucagguaaggaugacugau

SEQ ID NO: 2444800 - RNA, 19 nt, Artificial Sequence
  Description of Artificial Sequence: Synthetic oligonucleotide
  Sense strand starting at position 1744 of SEQ ID NO: 1887048
gggauuaauugcuugauua

SEQ ID NO: 2444801 - RNA, 19 nt, Artificial Sequence
  Description of Artificial Sequence: Synthetic oligonucleotide
  Antisense strand to SEQ ID NO: 2444800
uaaucaagcaauuaauccc

SEQ ID NO: 2444802 - RNA, 19 nt, Artificial Sequence
  Description of Artificial Sequence: Synthetic oligonucleotide
  Sense strand starting at position 1745 of SEQ ID NO: 1887048
ggauuaauugcuugauuag

SEQ ID NO: 2444803 - RNA, 19 nt, Artificial Sequence
  Description of Artificial Sequence: Synthetic oligonucleotide
  Antisense strand to SEQ ID NO: 2444802
cuaaucaagcaauuaaucc

SEQ ID NO: 2444804 - RNA, 19 nt, Artificial Sequence
  Description of Artificial Sequence: Synthetic oligonucleotide
  Sense strand starting at position 1788 of SEQ ID NO: 1887048
cgcucacuugcuuuauguu

SEQ ID NO: 2444805 - RNA, 19 nt, Artificial Sequence
  Description of Artificial Sequence: Synthetic oligonucleotide
  Antisense strand to SEQ ID NO: 2444804
aacauaaagcaagugagcg

SEQ ID NO: 2444806 - RNA, 19 nt, Artificial Sequence
  Description of Artificial Sequence: Synthetic oligonucleotide
  Sense strand starting at position 1803 of SEQ ID NO: 1887048
uguuauuagguguaaagaa

SEQ ID NO: 2444807 - RNA, 19 nt, Artificial Sequence
  Description of Artificial Sequence: Synthetic oligonucleotide
  Antisense strand to SEQ ID NO: 2444806
uucuuuacaccuaauaaca

SEQ ID NO: 2444808 - RNA, 19 nt, Artificial Sequence
  Description of Artificial Sequence: Synthetic oligonucleotide
  Sense strand starting at position 1859 of SEQ ID NO: 1887048
cuuccaauucgaugaauau

SEQ ID NO: 2444809 - RNA, 19 nt, Artificial Sequence
  Description of Artificial Sequence: Synthetic oligonucleotide
  Antisense strand to SEQ ID NO: 2444808
auauucaucgaauuggaag

SEQ ID NO: 2444810 - RNA, 19 nt, Artificial Sequence
  Description of Artificial Sequence: Synthetic oligonucleotide
  Sense strand starting at position 2015 of SEQ ID NO: 1887048
agacaauuguauucccaag

SEQ ID NO: 2444811 - RNA, 19 nt, Artificial Sequence
  Description of Artificial Sequence: Synthetic oligonucleotide
  Antisense strand to SEQ ID NO: 2444810
cuugggaauacaauugucu

SEQ ID NO: 2444812 - RNA, 19 nt, Artificial Sequence
  Description of Artificial Sequence: Synthetic oligonucleotide
  Sense strand starting at position 2021 of SEQ ID NO: 1887048
uuguauucccaagaaggua

SEQ ID NO: 2444813 - RNA, 19 nt, Artificial Sequence
  Description of Artificial Sequence: Synthetic oligonucleotide
  Antisense strand to SEQ ID NO: 2444812
uaccuucuugggaauacaa

SEQ ID NO: 2444814 - RNA, 19 nt, Artificial Sequence
  Description of Artificial Sequence: Synthetic oligonucleotide
  Sense strand starting at position 2082 of SEQ ID NO: 1887048
uaggaauaccauugagguu

SEQ ID NO: 2444815 - RNA, 19 nt, Artificial Sequence
  Description of Artificial Sequence: Synthetic oligonucleotide
  Antisense strand to SEQ ID NO: 2444814
aaccucaaugguauuccua

SEQ ID NO: 2444816 - RNA, 19 nt, Artificial Sequence
  Description of Artificial Sequence: Synthetic oligonucleotide
  Sense strand starting at position 2119 of SEQ ID NO: 1887048
acaugucaucuguauaauu

SEQ ID NO: 2444817 - RNA, 19 nt, Artificial Sequence
  Description of Artificial Sequence: Synthetic oligonucleotide
  Antisense strand to SEQ ID NO: 2444816
aauuauacagaugacaugu

SEQ ID NO: 2444818 - RNA, 19 nt, Artificial Sequence
  Description of Artificial Sequence: Synthetic oligonucleotide
  Sense strand starting at position 2150 of SEQ ID NO: 1887048
agugacagacccugucaaa

SEQ ID NO: 2444819 - RNA, 19 nt, Artificial Sequence
  Description of Artificial Sequence: Synthetic oligonucleotide
  Antisense strand to SEQ ID NO: 2444818
uuugacagggucugucacu

SEQ ID NO: 2444820 - RNA, 19 nt, Artificial Sequence
  Description of Artificial Sequence: Synthetic oligonucleotide
  Sense strand starting at position 2578 of SEQ ID NO: 1887048
cacuuacuaugugugagaa

SEQ ID NO: 2444821 - RNA, 19 nt, Artificial Sequence
  Description of Artificial Sequence: Synthetic oligonucleotide
  Antisense strand to SEQ ID NO: 2444820
uucucacacauaguaagug

SEQ ID NO: 2444822 - RNA, 19 nt, Artificial Sequence
  Description of Artificial Sequence: Synthetic oligonucleotide
  Sense strand starting at position 2579 of SEQ ID NO: 1887048
acuuacuaugugugagaag

SEQ ID NO: 2444823 - RNA, 19 nt, Artificial Sequence
  Description of Artificial Sequence: Synthetic oligonucleotide
  Antisense strand to SEQ ID NO: 2444822
cuucucacacauaguaagu

SEQ ID NO: 2444824 - RNA, 19 nt, Artificial Sequence
  Description of Artificial Sequence: Synthetic oligonucleotide
  Sense strand starting at position 2716 of SEQ ID NO: 1887048
uggaacuacuucuucgaca

SEQ ID NO: 2444825 - RNA, 19 nt, Artificial Sequence
  Description of Artificial Sequence: Synthetic oligonucleotide
  Antisense strand to SEQ ID NO: 2444824
ugucgaagaaguaguucca

SEQ ID NO: 2444826 - RNA, 19 nt, Artificial Sequence
  Description of Artificial Sequence: Synthetic oligonucleotide
  Sense strand starting at position 2717 of SEQ ID NO: 1887048
ggaacuacuucuucgacau

SEQ ID NO: 2444827 - RNA, 19 nt, Artificial Sequence
  Description of Artificial Sequence: Synthetic oligonucleotide
  Antisense strand to SEQ ID NO: 2444826
augucgaagaaguaguucc

SEQ ID NO: 2444828 - RNA, 19 nt, Artificial Sequence
  Description of Artificial Sequence: Synthetic oligonucleotide
  Sense strand starting at position 2774 of SEQ ID NO: 1887048
cagugaacaguuugaaaca

SEQ ID NO: 2444829 - RNA, 19 nt, Artificial Sequence
  Description of Artificial Sequence: Synthetic oligonucleotide
  Antisense strand to SEQ ID NO: 2444828
uguuucaaacuguucacug

SEQ ID NO: 2444830 - RNA, 19 nt, Artificial Sequence
  Description of Artificial Sequence: Synthetic oligonucleotide
  Sense strand starting at position 3255 of SEQ ID NO: 1887048
ucaauuaucugagcagaau

SEQ ID NO: 2444831 - RNA, 19 nt, Artificial Sequence
  Description of Artificial Sequence: Synthetic oligonucleotide
  Antisense strand to SEQ ID NO: 2444830
auucugcucagauaauuga

SEQ ID NO: 2444832 - RNA, 19 nt, Artificial Sequence
  Description of Artificial Sequence: Synthetic oligonucleotide
  Sense strand starting at position 3349 of SEQ ID NO: 1887048
ugacucuugucaccaugga

SEQ ID NO: 2444833 - RNA, 19 nt, Artificial Sequence
  Description of Artificial Sequence: Synthetic oligonucleotide
  Antisense strand to SEQ ID NO: 2444832
uccauggugacaagaguca

SEQ ID NO: 2444834 - RNA, 19 nt, Artificial Sequence
  Description of Artificial Sequence: Synthetic oligonucleotide
  Sense strand starting at position 3350 of SEQ ID NO: 1887048
gacucuugucaccauggau

SEQ ID NO: 2444835 - RNA, 19 nt, Artificial Sequence
  Description of Artificial Sequence: Synthetic oligonucleotide
  Antisense strand to SEQ ID NO: 2444834
auccauggugacaagaguc

SEQ ID NO: 2444836 - RNA, 19 nt, Artificial Sequence
  Description of Artificial Sequence: Synthetic oligonucleotide
  Sense strand starting at position 3456 of SEQ ID NO: 1887048
ggucacagaucucuuuaau

SEQ ID NO: 2444837 - RNA, 19 nt, Artificial Sequence
  Description of Artificial Sequence: Synthetic oligonucleotide
  Antisense strand to SEQ ID NO: 2444836
auuaaagagaucugugacc

SEQ ID NO: 2444838 - RNA, 19 nt, Artificial Sequence
  Description of Artificial Sequence: Synthetic oligonucleotide
  Sense strand starting at position 3686 of SEQ ID NO: 1887048
gaucucuuccauuagacga

SEQ ID NO: 2444839 - RNA, 19 nt, Artificial Sequence
  Description of Artificial Sequence: Synthetic oligonucleotide
  Antisense strand to SEQ ID NO: 2444838
ucgucuaauggaagagauc

SEQ ID NO: 2444840 - RNA, 19 nt, Artificial Sequence
  Description of Artificial Sequence: Synthetic oligonucleotide
  Sense strand starting at position 3694 of SEQ ID NO: 1887048
ccauuagacgaauaagucu

SEQ ID NO: 2444841 - RNA, 19 nt, Artificial Sequence
  Description of Artificial Sequence: Synthetic oligonucleotide
  Antisense strand to SEQ ID NO: 2444840
agacuuauucgucuaaugg

SEQ ID NO: 2444842 - RNA, 19 nt, Artificial Sequence
  Description of Artificial Sequence: Synthetic oligonucleotide
  Sense strand starting at position 559 of SEQ ID NO: 1887049
gcuugugugcccugugguu

SEQ ID NO: 2444843 - RNA, 19 nt, Artificial Sequence
  Description of Artificial Sequence: Synthetic oligonucleotide
  Antisense strand to SEQ ID NO: 2444842
aaccacagggcacacaagc

SEQ ID NO: 2444844 - RNA, 19 nt, Artificial Sequence
  Description of Artificial Sequence: Synthetic oligonucleotide
  Sense strand starting at position 1433 of SEQ ID NO: 1887049
gcaacaauuucgugcacag

SEQ ID NO: 2444845 - RNA, 19 nt, Artificial Sequence
  Description of Artificial Sequence: Synthetic oligonucleotide
  Antisense strand to SEQ ID NO: 2444844
cugugcacgaaauuguugc

SEQ ID NO: 2444846 - RNA, 19 nt, Artificial Sequence
  Description of Artificial Sequence: Synthetic oligonucleotide
  Sense strand starting at position 1652 of SEQ ID NO: 1887049
gcagguuuagacgaagaga

SEQ ID NO: 2444847 - RNA, 19 nt, Artificial Sequence
  Description of Artificial Sequence: Synthetic oligonucleotide
  Antisense strand to SEQ ID NO: 2444846
ucucuucgucuaaaccugc

SEQ ID NO: 2444848 - RNA, 19 nt, Artificial Sequence
  Description of Artificial Sequence: Synthetic oligonucleotide
  Sense strand starting at position 1666 of SEQ ID NO: 1887049
agagaugcguacugucaag

SEQ ID NO: 2444849 - RNA, 19 nt, Artificial Sequence
  Description of Artificial Sequence: Synthetic oligonucleotide
  Antisense strand to SEQ ID NO: 2444848
cuugacaguacgcaucucu

SEQ ID NO: 2444850 - RNA, 19 nt, Artificial Sequence
  Description of Artificial Sequence: Synthetic oligonucleotide
  Sense strand starting at position 1921 of SEQ ID NO: 1887049
ggcuguccucuccaacaau

SEQ ID NO: 2444851 - RNA, 19 nt, Artificial Sequence
  Description of Artificial Sequence: Synthetic oligonucleotide
  Antisense strand to SEQ ID NO: 2444850
auuguuggagaggacagcc

SEQ ID NO: 2444852 - RNA, 19 nt, Artificial Sequence
  Description of Artificial Sequence: Synthetic oligonucleotide
  Sense strand starting at position 2194 of SEQ ID NO: 1887049
uacggcagcugugguaaua

SEQ ID NO: 2444853 - RNA, 19 nt, Artificial Sequence
  Description of Artificial Sequence: Synthetic oligonucleotide
  Antisense strand to SEQ ID NO: 2444852
uauuaccacagcugccgua

SEQ ID NO: 2444854 - RNA, 19 nt, Artificial Sequence
  Description of Artificial Sequence: Synthetic oligonucleotide
  Sense strand starting at position 2206 of SEQ ID NO: 1887049
gguaauaucuacccaguac

SEQ ID NO: 2444855 - RNA, 19 nt, Artificial Sequence
  Description of Artificial Sequence: Synthetic oligonucleotide
  Antisense strand to SEQ ID NO: 2444854
guacuggguagauauuacc

SEQ ID NO: 2444856 - RNA, 19 nt, Artificial Sequence
  Description of Artificial Sequence: Synthetic oligonucleotide
  Sense strand starting at position 2295 of SEQ ID NO: 1887049
ggagguagugccaggcgua

SEQ ID NO: 2444857 - RNA, 19 nt, Artificial Sequence
  Description of Artificial Sequence: Synthetic oligonucleotide
  Antisense strand to SEQ ID NO: 2444856
uacgccuggcacuaccucc

SEQ ID NO: 2444858 - RNA, 19 nt, Artificial Sequence
  Description of Artificial Sequence: Synthetic oligonucleotide
  Sense strand starting at position 2296 of SEQ ID NO: 1887049
gagguagugccaggcguaa

SEQ ID NO: 2444859 - RNA, 19 nt, Artificial Sequence
  Description of Artificial Sequence: Synthetic oligonucleotide
  Antisense strand to SEQ ID NO: 2444858
uuacgccuggcacuaccuc

SEQ ID NO: 2444860 - RNA, 19 nt, Artificial Sequence
  Description of Artificial Sequence: Synthetic oligonucleotide
  Sense strand starting at position 2307 of SEQ ID NO: 1887049
aggcguaaccugcauucuu

SEQ ID NO: 2444861 - RNA, 19 nt, Artificial Sequence
  Description of Artificial Sequence: Synthetic oligonucleotide
  Antisense strand to SEQ ID NO: 2444860
aagaaugcagguuacgccu

SEQ ID NO: 2444862 - RNA, 19 nt, Artificial Sequence
  Description of Artificial Sequence: Synthetic oligonucleotide
  Sense strand starting at position 2352 of SEQ ID NO: 1887049
agugguggcucaagugaga

SEQ ID NO: 2444863 - RNA, 19 nt, Artificial Sequence
  Description of Artificial Sequence: Synthetic oligonucleotide
  Antisense strand to SEQ ID NO: 2444862
ucucacuugagccaccacu

SEQ ID NO: 2444864 - RNA, 19 nt, Artificial Sequence
  Description of Artificial Sequence: Synthetic oligonucleotide
  Sense strand starting at position 2491 of SEQ ID NO: 1887049
agccgagagugauagugua

SEQ ID NO: 2444865 - RNA, 19 nt, Artificial Sequence
  Description of Artificial Sequence: Synthetic oligonucleotide
  Antisense strand to SEQ ID NO: 2444864
uacacuaucacucucggcu

SEQ ID NO: 2444866 - RNA, 19 nt, Artificial Sequence
  Description of Artificial Sequence: Synthetic oligonucleotide
  Sense strand starting at position 2499 of SEQ ID NO: 1887049
gugauaguguaguagagcu

SEQ ID NO: 2444867 - RNA, 19 nt, Artificial Sequence
  Description of Artificial Sequence: Synthetic oligonucleotide
  Antisense strand to SEQ ID NO: 2444866
agcucuacuacacuaucac

SEQ ID NO: 2444868 - RNA, 19 nt, Artificial Sequence
  Description of Artificial Sequence: Synthetic oligonucleotide
  Sense strand starting at position 2521 of SEQ ID NO: 1887049
aggagaggguccuggagaa

SEQ ID NO: 2444869 - RNA, 19 nt, Artificial Sequence
  Description of Artificial Sequence: Synthetic oligonucleotide
  Antisense strand to SEQ ID NO: 2444868
uucuccaggacccucuccu

SEQ ID NO: 2444870 - RNA, 19 nt, Artificial Sequence
  Description of Artificial Sequence: Synthetic oligonucleotide
  Sense strand starting at position 2719 of SEQ ID NO: 1887049
uggacugugagccauccaa

SEQ ID NO: 2444871 - RNA, 19 nt, Artificial Sequence
  Description of Artificial Sequence: Synthetic oligonucleotide
  Antisense strand to SEQ ID NO: 2444870
uuggauggcucacagucca

SEQ ID NO: 2444872 - RNA, 19 nt, Artificial Sequence
  Description of Artificial Sequence: Synthetic oligonucleotide
  Sense strand starting at position 2723 of SEQ ID NO: 1887049
cugugagccauccaagugu

SEQ ID NO: 2444873 - RNA, 19 nt, Artificial Sequence
  Description of Artificial Sequence: Synthetic oligonucleotide
  Antisense strand to SEQ ID NO: 2444872
acacuuggauggcucacag

SEQ ID NO: 2444874 - RNA, 19 nt, Artificial Sequence
  Description of Artificial Sequence: Synthetic oligonucleotide
  Sense strand starting at position 2730 of SEQ ID NO: 1887049
ccauccaaguguuggcaaa

SEQ ID NO: 2444875 - RNA, 19 nt, Artificial Sequence
  Description of Artificial Sequence: Synthetic oligonucleotide
  Antisense strand to SEQ ID NO: 2444874
uuugccaacacuuggaugg

SEQ ID NO: 2444876 - RNA, 19 nt, Artificial Sequence
  Description of Artificial Sequence: Synthetic oligonucleotide
  Sense strand starting at position 2896 of SEQ ID NO: 1887049
cugaccugacggugaagau

SEQ ID NO: 2444877 - RNA, 19 nt, Artificial Sequence
  Description of Artificial Sequence: Synthetic oligonucleotide
  Antisense strand to SEQ ID NO: 2444876
aucuucaccgucaggucag

SEQ ID NO: 2444878 - RNA, 19 nt, Artificial Sequence
  Description of Artificial Sequence: Synthetic oligonucleotide
  Sense strand starting at position 2897 of SEQ ID NO: 1887049
ugaccugacggugaagauu

SEQ ID NO: 2444879 - RNA, 19 nt, Artificial Sequence
  Description of Artificial Sequence: Synthetic oligonucleotide
  Antisense strand to SEQ ID NO: 2444878
aaucuucaccgucagguca

SEQ ID NO: 2444880 - RNA, 19 nt, Artificial Sequence
  Description of Artificial Sequence: Synthetic oligonucleotide
  Sense strand starting at position 2905 of SEQ ID NO: 1887049
cggugaagauuggugacua

SEQ ID NO: 2444881 - RNA, 19 nt, Artificial Sequence
  Description of Artificial Sequence: Synthetic oligonucleotide
  Antisense strand to SEQ ID NO: 2444880
uagucaccaaucuucaccg

SEQ ID NO: 2444882 - RNA, 19 nt, Artificial Sequence
  Description of Artificial Sequence: Synthetic oligonucleotide
  Sense strand starting at position 2906 of SEQ ID NO: 1887049
ggugaagauuggugacuau

SEQ ID NO: 2444883 - RNA, 19 nt, Artificial Sequence
  Description of Artificial Sequence: Synthetic oligonucleotide
  Antisense strand to SEQ ID NO: 2444882
auagucaccaaucuucacc

SEQ ID NO: 2444884 - RNA, 19 nt, Artificial Sequence
  Description of Artificial Sequence: Synthetic oligonucleotide
  Sense strand starting at position 3029 of SEQ ID NO: 1887049
ggaggacuacuucgugacu

SEQ ID NO: 2444885 - RNA, 19 nt, Artificial Sequence
  Description of Artificial Sequence: Synthetic oligonucleotide
  Antisense strand to SEQ ID NO: 2444884
agucacgaaguaguccucc

SEQ ID NO: 2444886 - RNA, 19 nt, Artificial Sequence
  Description of Artificial Sequence: Synthetic oligonucleotide
  Sense strand starting at position 3139 of SEQ ID NO: 1887049
gcgggaauguguggugagu

SEQ ID NO: 2444887 - RNA, 19 nt, Artificial Sequence
  Description of Artificial Sequence: Synthetic oligonucleotide
  Antisense strand to SEQ ID NO: 2444886
acucaccacacauucccgc

SEQ ID NO: 2444888 - RNA, 19 nt, Artificial Sequence
  Description of Artificial Sequence: Synthetic oligonucleotide
  Sense strand starting at position 3213 of SEQ ID NO: 1887049
ucaaaucauggccaugagu

SEQ ID NO: 2444889 - RNA, 19 nt, Artificial Sequence
  Description of Artificial Sequence: Synthetic oligonucleotide
  Antisense strand to SEQ ID NO: 2444888
acucauggccaugauuuga

SEQ ID NO: 2444890 - RNA, 19 nt, Artificial Sequence
  Description of Artificial Sequence: Synthetic oligonucleotide
  Sense strand starting at position 3215 of SEQ ID NO: 1887049
aaaucauggccaugaguag

SEQ ID NO: 2444891 - RNA, 19 nt, Artificial Sequence
  Description of Artificial Sequence: Synthetic oligonucleotide
  Antisense strand to SEQ ID NO: 2444890
cuacucauggccaugauuu

SEQ ID NO: 2444892 - RNA, 19 nt, Artificial Sequence
  Description of Artificial Sequence: Synthetic oligonucleotide
  Sense strand starting at position 3216 of SEQ ID NO: 1887049
aaucauggccaugaguagu

SEQ ID NO: 2444893 - RNA, 19 nt, Artificial Sequence
  Description of Artificial Sequence: Synthetic oligonucleotide
  Antisense strand to SEQ ID NO: 2444892
acuacucauggccaugauu

SEQ ID NO: 2444894 - RNA, 19 nt, Artificial Sequence
  Description of Artificial Sequence: Synthetic oligonucleotide
  Sense strand starting at position 3935 of SEQ ID NO: 1887049
ggugacgucuugccaaauc

SEQ ID NO: 2444895 - RNA, 19 nt, Artificial Sequence
  Description of Artificial Sequence: Synthetic oligonucleotide
  Antisense strand to SEQ ID NO: 2444894
gauuuggcaagacgucacc

SEQ ID NO: 2444896 - RNA, 19 nt, Artificial Sequence
  Description of Artificial Sequence: Synthetic oligonucleotide
  Sense strand starting at position 30 of SEQ ID NO: 1887050
cguggauucucugccaaga

SEQ ID NO: 2444897 - RNA, 19 nt, Artificial Sequence
  Description of Artificial Sequence: Synthetic oligonucleotide
  Antisense strand to SEQ ID NO: 2444896
ucuuggcagagaauccacg

SEQ ID NO: 2444898 - RNA, 19 nt, Artificial Sequence
  Description of Artificial Sequence: Synthetic oligonucleotide
  Sense strand starting at position 32 of SEQ ID NO: 1887050
uggauucucugccaagaau

SEQ ID NO: 2444899 - RNA, 19 nt, Artificial Sequence
  Description of Artificial Sequence: Synthetic oligonucleotide
  Antisense strand to SEQ ID NO: 2444898
auucuuggcagagaaucca

SEQ ID NO: 2444900 - RNA, 19 nt, Artificial Sequence
  Description of Artificial Sequence: Synthetic oligonucleotide
  Sense strand starting at position 201 of SEQ ID NO: 1887050
ggcugaguuucaggaacau

SEQ ID NO: 2444901 - RNA, 19 nt, Artificial Sequence
  Description of Artificial Sequence: Synthetic oligonucleotide
  Antisense strand to SEQ ID NO: 2444900
auguuccugaaacucagcc

SEQ ID NO: 2444902 - RNA, 19 nt, Artificial Sequence
  Description of Artificial Sequence: Synthetic oligonucleotide
  Sense strand starting at position 466 of SEQ ID NO: 1887050
aaggucuucggagaugguu

SEQ ID NO: 2444903 - RNA, 19 nt, Artificial Sequence
  Description of Artificial Sequence: Synthetic oligonucleotide
  Antisense strand to SEQ ID NO: 2444902
aaccaucuccgaagaccuu

SEQ ID NO: 2444904 - RNA, 19 nt, Artificial Sequence
  Description of Artificial Sequence: Synthetic oligonucleotide
  Sense strand starting at position 564 of SEQ ID NO: 1887050
gcaggugggacuuagaacu

SEQ ID NO: 2444905 - RNA, 19 nt, Artificial Sequence
  Description of Artificial Sequence: Synthetic oligonucleotide
  Antisense strand to SEQ ID NO: 2444904
aguucuaagucccaccugc

SEQ ID NO: 2444906 - RNA, 19 nt, Artificial Sequence
  Description of Artificial Sequence: Synthetic oligonucleotide
  Sense strand starting at position 1193 of SEQ ID NO: 1887050
cggaguugagauugugcca

SEQ ID NO: 2444907 - RNA, 19 nt, Artificial Sequence
  Description of Artificial Sequence: Synthetic oligonucleotide
  Antisense strand to SEQ ID NO: 2444906
uggcacaaucucaacuccg

SEQ ID NO: 2444908 - RNA, 19 nt, Artificial Sequence
  Description of Artificial Sequence: Synthetic oligonucleotide
  Sense strand starting at position 1258 of SEQ ID NO: 1887050
caacaaaggugguaaaucu

SEQ ID NO: 2444909 - RNA, 19 nt, Artificial Sequence
  Description of Artificial Sequence: Synthetic oligonucleotide
  Antisense strand to SEQ ID NO: 2444908
agauuuaccaccuuuguug

SEQ ID NO: 2444910 - RNA, 19 nt, Artificial Sequence
  Description of Artificial Sequence: Synthetic oligonucleotide
  Sense strand starting at position 1267 of SEQ ID NO: 1887050
ugguaaaucuguuccugag

SEQ ID NO: 2444911 - RNA, 19 nt, Artificial Sequence
  Description of Artificial Sequence: Synthetic oligonucleotide
  Antisense strand to SEQ ID NO: 2444910
cucaggaacagauuuacca

SEQ ID NO: 2444912 - RNA, 19 nt, Artificial Sequence
  Description of Artificial Sequence: Synthetic oligonucleotide
  Sense strand starting at position 1269 of SEQ ID NO: 1887050
guaaaucuguuccugagag

SEQ ID NO: 2444913 - RNA, 19 nt, Artificial Sequence
  Description of Artificial Sequence: Synthetic oligonucleotide
  Antisense strand to SEQ ID NO: 2444912
cucucaggaacagauuuac

SEQ ID NO: 2444914 - RNA, 19 nt, Artificial Sequence
  Description of Artificial Sequence: Synthetic oligonucleotide
  Sense strand starting at position 1270 of SEQ ID NO: 1887050
uaaaucuguuccugagagg

SEQ ID NO: 2444915 - RNA, 19 nt, Artificial Sequence
  Description of Artificial Sequence: Synthetic oligonucleotide
  Antisense strand to SEQ ID NO: 2444914
ccucucaggaacagauuua

SEQ ID NO: 2444916 - RNA, 19 nt, Artificial Sequence
  Description of Artificial Sequence: Synthetic oligonucleotide
  Sense strand starting at position 1271 of SEQ ID NO: 1887050
aaaucuguuccugagaggu

SEQ ID NO: 2444917 - RNA, 19 nt, Artificial Sequence
  Description of Artificial Sequence: Synthetic oligonucleotide
  Antisense strand to SEQ ID NO: 2444916
accucucaggaacagauuu

SEQ ID NO: 2444918 - RNA, 19 nt, Artificial Sequence
  Description of Artificial Sequence: Synthetic oligonucleotide
  Sense strand starting at position 1631 of SEQ ID NO: 1887050
ggagcugugugggcacauu

SEQ ID NO: 2444919 - RNA, 19 nt, Artificial Sequence
  Description of Artificial Sequence: Synthetic oligonucleotide
  Antisense strand to SEQ ID NO: 2444918
aaugugcccacacagcucc

SEQ ID NO: 2444920 - RNA, 19 nt, Artificial Sequence
  Description of Artificial Sequence: Synthetic oligonucleotide
  Sense strand starting at position 1946 of SEQ ID NO: 1887050
ggaggauuccgucaacgug

SEQ ID NO: 2444921 - RNA, 19 nt, Artificial Sequence
  Description of Artificial Sequence: Synthetic oligonucleotide
  Antisense strand to SEQ ID NO: 2444920
cacguugacggaauccucc

SEQ ID NO: 2444922 - RNA, 19 nt, Artificial Sequence
  Description of Artificial Sequence: Synthetic oligonucleotide
  Sense strand starting at position 1962 of SEQ ID NO: 1887050
gugacugcuccgagcgacu

SEQ ID NO: 2444923 - RNA, 19 nt, Artificial Sequence
  Description of Artificial Sequence: Synthetic oligonucleotide
  Antisense strand to SEQ ID NO: 2444922
agucgcucggagcagucac

SEQ ID NO: 2444924 - RNA, 19 nt, Artificial Sequence
  Description of Artificial Sequence: Synthetic oligonucleotide
  Sense strand starting at position 2181 of SEQ ID NO: 1887050
caagguguccugcagccaa

SEQ ID NO: 2444925 - RNA, 19 nt, Artificial Sequence
  Description of Artificial Sequence: Synthetic oligonucleotide
  Antisense strand to SEQ ID NO: 2444924
uuggcugcaggacaccuug

SEQ ID NO: 2444926 - RNA, 19 nt, Artificial Sequence
  Description of Artificial Sequence: Synthetic oligonucleotide
  Sense strand starting at position 2232 of SEQ ID NO: 1887050
cagauaggcucgggcugau

SEQ ID NO: 2444927 - RNA, 19 nt, Artificial Sequence
  Description of Artificial Sequence: Synthetic oligonucleotide
  Antisense strand to SEQ ID NO: 2444926
aucagcccgagccuaucug

SEQ ID NO: 2444928 - RNA, 19 nt, Artificial Sequence
  Description of Artificial Sequence: Synthetic oligonucleotide
  Sense strand starting at position 2288 of SEQ ID NO: 1887050
accagagaacuucgaaguu

SEQ ID NO: 2444929 - RNA, 19 nt, Artificial Sequence
  Description of Artificial Sequence: Synthetic oligonucleotide
  Antisense strand to SEQ ID NO: 2444928
aacuucgaaguucucuggu

SEQ ID NO: 2444930 - RNA, 19 nt, Artificial Sequence
  Description of Artificial Sequence: Synthetic oligonucleotide
  Sense strand starting at position 3108 of SEQ ID NO: 1887050
aggccaaggaccugucaga

SEQ ID NO: 2444931 - RNA, 19 nt, Artificial Sequence
  Description of Artificial Sequence: Synthetic oligonucleotide
  Antisense strand to SEQ ID NO: 2444930
ucugacagguccuuggccu

SEQ ID NO: 2444932 - RNA, 19 nt, Artificial Sequence
  Description of Artificial Sequence: Synthetic oligonucleotide
  Sense strand starting at position 3159 of SEQ ID NO: 1887050
uggagugguuaagaaacau

SEQ ID NO: 2444933 - RNA, 19 nt, Artificial Sequence
  Description of Artificial Sequence: Synthetic oligonucleotide
  Antisense strand to SEQ ID NO: 2444932
auguuucuuaaccacucca

SEQ ID NO: 2444934 - RNA, 19 nt, Artificial Sequence
  Description of Artificial Sequence: Synthetic oligonucleotide
  Sense strand starting at position 3661 of SEQ ID NO: 1887050
ucaguggcgucgucgagaa

SEQ ID NO: 2444935 - RNA, 19 nt, Artificial Sequence
  Description of Artificial Sequence: Synthetic oligonucleotide
  Antisense strand to SEQ ID NO: 2444934
uucucgacgacgccacuga

SEQ ID NO: 2444936 - RNA, 19 nt, Artificial Sequence
  Description of Artificial Sequence: Synthetic oligonucleotide
  Sense strand starting at position 67 of SEQ ID NO: 1887051
gucaacaagugauccaauu

SEQ ID NO: 2444937 - RNA, 19 nt, Artificial Sequence
  Description of Artificial Sequence: Synthetic oligonucleotide
  Antisense strand to SEQ ID NO: 2444936
aauuggaucacuuguugac

SEQ ID NO: 2444938 - RNA, 19 nt, Artificial Sequence
  Description of Artificial Sequence: Synthetic oligonucleotide
  Sense strand starting at position 218 of SEQ ID NO: 1887051
uucuuaaugcuauagaggu

SEQ ID NO: 2444939 - RNA, 19 nt, Artificial Sequence
  Description of Artificial Sequence: Synthetic oligonucleotide
  Antisense strand to SEQ ID NO: 2444938
accucuauagcauuaagaa

SEQ ID NO: 2444940 - RNA, 19 nt, Artificial Sequence
  Description of Artificial Sequence: Synthetic oligonucleotide
  Sense strand starting at position 225 of SEQ ID NO: 1887051
ugcuauagagguuaguaga

SEQ ID NO: 2444941 - RNA, 19 nt, Artificial Sequence
  Description of Artificial Sequence: Synthetic oligonucleotide
  Antisense strand to SEQ ID NO: 2444940
ucuacuaaccucuauagca

SEQ ID NO: 2444942 - RNA, 19 nt, Artificial Sequence
  Description of Artificial Sequence: Synthetic oligonucleotide
  Sense strand starting at position 232 of SEQ ID NO: 1887051
gagguuaguagagguuaau

SEQ ID NO: 2444943 - RNA, 19 nt, Artificial Sequence
  Description of Artificial Sequence: Synthetic oligonucleotide
  Antisense strand to SEQ ID NO: 2444942
auuaaccucuacuaaccuc

SEQ ID NO: 2444944 - RNA, 19 nt, Artificial Sequence
  Description of Artificial Sequence: Synthetic oligonucleotide
  Sense strand starting at position 235 of SEQ ID NO: 1887051
guuaguagagguuaaugca

SEQ ID NO: 2444945 - RNA, 19 nt, Artificial Sequence
  Description of Artificial Sequence: Synthetic oligonucleotide
  Antisense strand to SEQ ID NO: 2444944
ugcauuaaccucuacuaac

SEQ ID NO: 2444946 - RNA, 19 nt, Artificial Sequence
  Description of Artificial Sequence: Synthetic oligonucleotide
  Sense strand starting at position 245 of SEQ ID NO: 1887051
guuaaugcaagagaacgua

SEQ ID NO: 2444947 - RNA, 19 nt, Artificial Sequence
  Description of Artificial Sequence: Synthetic oligonucleotide
  Antisense strand to SEQ ID NO: 2444946
uacguucucuugcauuaac

SEQ ID NO: 2444948 - RNA, 19 nt, Artificial Sequence
  Description of Artificial Sequence: Synthetic oligonucleotide
  Sense strand starting at position 328 of SEQ ID NO: 1887051
agaagcaaauucgcaauua

SEQ ID NO: 2444949 - RNA, 19 nt, Artificial Sequence
  Description of Artificial Sequence: Synthetic oligonucleotide
  Antisense strand to SEQ ID NO: 2444948
uaauugcgaauuugcuucu

SEQ ID NO: 2444950 - RNA, 19 nt, Artificial Sequence
  Description of Artificial Sequence: Synthetic oligonucleotide
  Sense strand starting at position 338 of SEQ ID NO: 1887051
ucgcaauuauaguuggaga

SEQ ID NO: 2444951 - RNA, 19 nt, Artificial Sequence
  Description of Artificial Sequence: Synthetic oligonucleotide
  Antisense strand to SEQ ID NO: 2444950
ucuccaacuauaauugcga

SEQ ID NO: 2444952 - RNA, 19 nt, Artificial Sequence
  Description of Artificial Sequence: Synthetic oligonucleotide
  Sense strand starting at position 424 of SEQ ID NO: 1887051
agugaaugagugcacagau

SEQ ID NO: 2444953 - RNA, 19 nt, Artificial Sequence
  Description of Artificial Sequence: Synthetic oligonucleotide
  Antisense strand to SEQ ID NO: 2444952
aucugugcacucauucacu

SEQ ID NO: 2444954 - RNA, 19 nt, Artificial Sequence
  Description of Artificial Sequence: Synthetic oligonucleotide
  Sense strand starting at position 1165 of SEQ ID NO: 1887051
uuugguccuauguaaggua

SEQ ID NO: 2444955 - RNA, 19 nt, Artificial Sequence
  Description of Artificial Sequence: Synthetic oligonucleotide
  Antisense strand to SEQ ID NO: 2444954
uaccuuacauaggaccaaa

SEQ ID NO: 2444956 - RNA, 19 nt, Artificial Sequence
  Description of Artificial Sequence: Synthetic oligonucleotide
  Sense strand starting at position 1533 of SEQ ID NO: 1887051
uccgauucccaguaccaua

SEQ ID NO: 2444957 - RNA, 19 nt, Artificial Sequence
  Description of Artificial Sequence: Synthetic oligonucleotide
  Antisense strand to SEQ ID NO: 2444956
uaugguacugggaaucgga

SEQ ID NO: 2444958 - RNA, 19 nt, Artificial Sequence
  Description of Artificial Sequence: Synthetic oligonucleotide
  Sense strand starting at position 1538 of SEQ ID NO: 1887051
uucccaguaccauagaagu

SEQ ID NO: 2444959 - RNA, 19 nt, Artificial Sequence
  Description of Artificial Sequence: Synthetic oligonucleotide
  Antisense strand to SEQ ID NO: 2444958
acuucuaugguacugggaa

SEQ ID NO: 2444960 - RNA, 19 nt, Artificial Sequence
  Description of Artificial Sequence: Synthetic oligonucleotide
  Sense strand starting at position 1612 of SEQ ID NO: 1887051
gagaguuuacgugacgaca

SEQ ID NO: 2444961 - RNA, 19 nt, Artificial Sequence
  Description of Artificial Sequence: Synthetic oligonucleotide
  Antisense strand to SEQ ID NO: 2444960
ugucgucacguaaacucuc

SEQ ID NO: 2444962 - RNA, 19 nt, Artificial Sequence
  Description of Artificial Sequence: Synthetic oligonucleotide
  Sense strand starting at position 1705 of SEQ ID NO: 1887051
ugagugauccgggaguuag

SEQ ID NO: 2444963 - RNA, 19 nt, Artificial Sequence
  Description of Artificial Sequence: Synthetic oligonucleotide
  Antisense strand to SEQ ID NO: 2444962
cuaacucccggaucacuca

SEQ ID NO: 2444964 - RNA, 19 nt, Artificial Sequence
  Description of Artificial Sequence: Synthetic oligonucleotide
  Sense strand starting at position 2138 of SEQ ID NO: 1887051
uuaggaauauuguucugag

SEQ ID NO: 2444965 - RNA, 19 nt, Artificial Sequence
  Description of Artificial Sequence: Synthetic oligonucleotide
  Antisense strand to SEQ ID NO: 2444964
cucagaacaauauuccuaa

SEQ ID NO: 2444966 - RNA, 19 nt, Artificial Sequence
  Description of Artificial Sequence: Synthetic oligonucleotide
  Sense strand starting at position 2139 of SEQ ID NO: 1887051
uaggaauauuguucugaga

SEQ ID NO: 2444967 - RNA, 19 nt, Artificial Sequence
  Description of Artificial Sequence: Synthetic oligonucleotide
  Antisense strand to SEQ ID NO: 2444966
ucucagaacaauauuccua

SEQ ID NO: 2444968 - RNA, 19 nt, Artificial Sequence
  Description of Artificial Sequence: Synthetic oligonucleotide
  Sense strand starting at position 2336 of SEQ ID NO: 1887051
augggaugguucucucaga

SEQ ID NO: 2444969 - RNA, 19 nt, Artificial Sequence
  Description of Artificial Sequence: Synthetic oligonucleotide
  Antisense strand to SEQ ID NO: 2444968
ucugagagaaccaucccau

SEQ ID NO: 2444970 - RNA, 19 nt, Artificial Sequence
  Description of Artificial Sequence: Synthetic oligonucleotide
  Sense strand starting at position 2337 of SEQ ID NO: 1887051
ugggaugguucucucagau

SEQ ID NO: 2444971 - RNA, 19 nt, Artificial Sequence
  Description of Artificial Sequence: Synthetic oligonucleotide
  Antisense strand to SEQ ID NO: 2444970
aucugagagaaccauccca

SEQ ID NO: 2444972 - RNA, 19 nt, Artificial Sequence
  Description of Artificial Sequence: Synthetic oligonucleotide
  Sense strand starting at position 2363 of SEQ ID NO: 1887051
ggcaaagcacaugaucuua

SEQ ID NO: 2444973 - RNA, 19 nt, Artificial Sequence
  Description of Artificial Sequence: Synthetic oligonucleotide
  Antisense strand to SEQ ID NO: 2444972
uaagaucaugugcuuugcc

SEQ ID NO: 2444974 - RNA, 19 nt, Artificial Sequence
  Description of Artificial Sequence: Synthetic oligonucleotide
  Sense strand starting at position 2460 of SEQ ID NO: 1887051
uccagucaguucuuagaaa

SEQ ID NO: 2444975 - RNA, 19 nt, Artificial Sequence
  Description of Artificial Sequence: Synthetic oligonucleotide
  Antisense strand to SEQ ID NO: 2444974
uuucuaagaacugacugga

SEQ ID NO: 2444976 - RNA, 19 nt, Artificial Sequence
  Description of Artificial Sequence: Synthetic oligonucleotide
  Sense strand starting at position 2471 of SEQ ID NO: 1887051
cuuagaaacuguguaagua

SEQ ID NO: 2444977 - RNA, 19 nt, Artificial Sequence
  Description of Artificial Sequence: Synthetic oligonucleotide
  Antisense strand to SEQ ID NO: 2444976
uacuuacacaguuucuaag

SEQ ID NO: 2444978 - RNA, 19 nt, Artificial Sequence
  Description of Artificial Sequence: Synthetic oligonucleotide
  Sense strand starting at position 2742 of SEQ ID NO: 1887051
agaaucuuacggcauguua

SEQ ID NO: 2444979 - RNA, 19 nt, Artificial Sequence
  Description of Artificial Sequence: Synthetic oligonucleotide
  Antisense strand to SEQ ID NO: 2444978
uaacaugccguaagauucu

SEQ ID NO: 2444980 - RNA, 19 nt, Artificial Sequence
  Description of Artificial Sequence: Synthetic oligonucleotide
  Sense strand starting at position 3069 of SEQ ID NO: 1887051
uugaacuugugacucugau

SEQ ID NO: 2444981 - RNA, 19 nt, Artificial Sequence
  Description of Artificial Sequence: Synthetic oligonucleotide
  Antisense strand to SEQ ID NO: 2444980
aucagagucacaaguucaa

SEQ ID NO: 2444982 - RNA, 19 nt, Artificial Sequence
  Description of Artificial Sequence: Synthetic oligonucleotide
  Sense strand starting at position 3088 of SEQ ID NO: 1887051
accuuugccuuuguuauuu

SEQ ID NO: 2444983 - RNA, 19 nt, Artificial Sequence
  Description of Artificial Sequence: Synthetic oligonucleotide
  Antisense strand to SEQ ID NO: 2444982
aaauaacaaaggcaaaggu

SEQ ID NO: 2444984 - RNA, 19 nt, Artificial Sequence
  Description of Artificial Sequence: Synthetic oligonucleotide
  Sense strand starting at position 3092 of SEQ ID NO: 1887051
uugccuuuguuauuuguca

SEQ ID NO: 2444985 - RNA, 19 nt, Artificial Sequence
  Description of Artificial Sequence: Synthetic oligonucleotide
  Antisense strand to SEQ ID NO: 2444984
ugacaaauaacaaaggcaa

SEQ ID NO: 2444986 - RNA, 19 nt, Artificial Sequence
  Description of Artificial Sequence: Synthetic oligonucleotide
  Sense strand starting at position 3096 of SEQ ID NO: 1887051
cuuuguuauuugucaguac

SEQ ID NO: 2444987 - RNA, 19 nt, Artificial Sequence
  Description of Artificial Sequence: Synthetic oligonucleotide
  Antisense strand to SEQ ID NO: 2444986
guacugacaaauaacaaag

SEQ ID NO: 2444988 - RNA, 19 nt, Artificial Sequence
  Description of Artificial Sequence: Synthetic oligonucleotide
  Sense strand starting at position 3107 of SEQ ID NO: 1887051
gucaguacaguggaguaua

SEQ ID NO: 2444989 - RNA, 19 nt, Artificial Sequence
  Description of Artificial Sequence: Synthetic oligonucleotide
  Antisense strand to SEQ ID NO: 2444988
uauacuccacuguacugac

SEQ ID NO: 2444990 - RNA, 19 nt, Artificial Sequence
  Description of Artificial Sequence: Synthetic oligonucleotide
  Sense strand starting at position 3110 of SEQ ID NO: 1887051
aguacaguggaguauaauu

SEQ ID NO: 2444991 - RNA, 19 nt, Artificial Sequence
  Description of Artificial Sequence: Synthetic oligonucleotide
  Antisense strand to SEQ ID NO: 2444990
aauuauacuccacuguacu

SEQ ID NO: 2444992 - RNA, 19 nt, Artificial Sequence
  Description of Artificial Sequence: Synthetic oligonucleotide
  Sense strand starting at position 3274 of SEQ ID NO: 1887051
guguaaagaucccuaggua

SEQ ID NO: 2444993 - RNA, 19 nt, Artificial Sequence
  Description of Artificial Sequence: Synthetic oligonucleotide
  Antisense strand to SEQ ID NO: 2444992
uaccuagggaucuuuacac

SEQ ID NO: 2444994 - RNA, 19 nt, Artificial Sequence
  Description of Artificial Sequence: Synthetic oligonucleotide
  Sense strand starting at position 3275 of SEQ ID NO: 1887051
uguaaagaucccuagguau

SEQ ID NO: 2444995 - RNA, 19 nt, Artificial Sequence
  Description of Artificial Sequence: Synthetic oligonucleotide
  Antisense strand to SEQ ID NO: 2444994
auaccuagggaucuuuaca

SEQ ID NO: 2444996 - RNA, 19 nt, Artificial Sequence
  Description of Artificial Sequence: Synthetic oligonucleotide
  Sense strand starting at position 3277 of SEQ ID NO: 1887051
uaaagaucccuagguauga

SEQ ID NO: 2444997 - RNA, 19 nt, Artificial Sequence
  Description of Artificial Sequence: Synthetic oligonucleotide
  Antisense strand to SEQ ID NO: 2444996
ucauaccuagggaucuuua

SEQ ID NO: 2444998 - RNA, 19 nt, Artificial Sequence
  Description of Artificial Sequence: Synthetic oligonucleotide
  Sense strand starting at position 3281 of SEQ ID NO: 1887051
gaucccuagguaugaguua

SEQ ID NO: 2444999 - RNA, 19 nt, Artificial Sequence
  Description of Artificial Sequence: Synthetic oligonucleotide
  Antisense strand to SEQ ID NO: 2444998
uaacucauaccuagggauc

SEQ ID NO: 2445000 - RNA, 19 nt, Artificial Sequence
  Description of Artificial Sequence: Synthetic oligonucleotide
  Sense strand starting at position 3288 of SEQ ID NO: 1887051
agguaugaguuauuaagau

SEQ ID NO: 2445001 - RNA, 19 nt, Artificial Sequence
  Description of Artificial Sequence: Synthetic oligonucleotide
  Antisense strand to SEQ ID NO: 2445000
aucuuaauaacucauaccu

SEQ ID NO: 2445002 - RNA, 19 nt, Artificial Sequence
  Description of Artificial Sequence: Synthetic oligonucleotide
  Sense strand starting at position 3351 of SEQ ID NO: 1887051
uuuguuaaccaugagcuaa

SEQ ID NO: 2445003 - RNA, 19 nt, Artificial Sequence
  Description of Artificial Sequence: Synthetic oligonucleotide
  Antisense strand to SEQ ID NO: 2445002
uuagcucaugguuaacaaa

SEQ ID NO: 2445004 - RNA, 19 nt, Artificial Sequence
  Description of Artificial Sequence: Synthetic oligonucleotide
  Sense strand starting at position 3353 of SEQ ID NO: 1887051
uguuaaccaugagcuaaga

SEQ ID NO: 2445005 - RNA, 19 nt, Artificial Sequence
  Description of Artificial Sequence: Synthetic oligonucleotide
  Antisense strand to SEQ ID NO: 2445004
ucuuagcucaugguuaaca

SEQ ID NO: 2445006 - RNA, 19 nt, Artificial Sequence
  Description of Artificial Sequence: Synthetic oligonucleotide
  Sense strand starting at position 3447 of SEQ ID NO: 1887051
aaucgugguagugaauagu

SEQ ID NO: 2445007 - RNA, 19 nt, Artificial Sequence
  Description of Artificial Sequence: Synthetic oligonucleotide
  Antisense strand to SEQ ID NO: 2445006
acuauucacuaccacgauu

SEQ ID NO: 2445008 - RNA, 19 nt, Artificial Sequence
  Description of Artificial Sequence: Synthetic oligonucleotide
  Sense strand starting at position 3456 of SEQ ID NO: 1887051
agugaauaguuacucuuga

SEQ ID NO: 2445009 - RNA, 19 nt, Artificial Sequence
  Description of Artificial Sequence: Synthetic oligonucleotide
  Antisense strand to SEQ ID NO: 2445008
ucaagaguaacuauucacu

SEQ ID NO: 2445010 - RNA, 19 nt, Artificial Sequence
  Description of Artificial Sequence: Synthetic oligonucleotide
  Sense strand starting at position 3457 of SEQ ID NO: 1887051
gugaauaguuacucuugau

SEQ ID NO: 2445011 - RNA, 19 nt, Artificial Sequence
  Description of Artificial Sequence: Synthetic oligonucleotide
  Antisense strand to SEQ ID NO: 2445010
aucaagaguaacuauucac

SEQ ID NO: 2445012 - RNA, 19 nt, Artificial Sequence
  Description of Artificial Sequence: Synthetic oligonucleotide
  Sense strand starting at position 3461 of SEQ ID NO: 1887051
auaguuacucuugauagua

SEQ ID NO: 2445013 - RNA, 19 nt, Artificial Sequence
  Description of Artificial Sequence: Synthetic oligonucleotide
  Antisense strand to SEQ ID NO: 2445012
uacuaucaagaguaacuau

SEQ ID NO: 2445014 - RNA, 19 nt, Artificial Sequence
  Description of Artificial Sequence: Synthetic oligonucleotide
  Sense strand starting at position 3532 of SEQ ID NO: 1887051
cugugaaacccacaguuau

SEQ ID NO: 2445015 - RNA, 19 nt, Artificial Sequence
  Description of Artificial Sequence: Synthetic oligonucleotide
  Antisense strand to SEQ ID NO: 2445014
auaacuguggguuucacag

SEQ ID NO: 2445016 - RNA, 19 nt, Artificial Sequence
  Description of Artificial Sequence: Synthetic oligonucleotide
  Sense strand starting at position 505 of SEQ ID NO: 1887052
guggaauucuuucccucac

SEQ ID NO: 2445017 - RNA, 19 nt, Artificial Sequence
  Description of Artificial Sequence: Synthetic oligonucleotide
  Antisense strand to SEQ ID NO: 2445016
gugagggaaagaauuccac

SEQ ID NO: 2445018 - RNA, 19 nt, Artificial Sequence
  Description of Artificial Sequence: Synthetic oligonucleotide
  Sense strand starting at position 828 of SEQ ID NO: 1887052
gcaaguuuacgguaacgag

SEQ ID NO: 2445019 - RNA, 19 nt, Artificial Sequence
  Description of Artificial Sequence: Synthetic oligonucleotide
  Antisense strand to SEQ ID NO: 2445018
cucguuaccguaaacuugc

SEQ ID NO: 2445020 - RNA, 19 nt, Artificial Sequence
  Description of Artificial Sequence: Synthetic oligonucleotide
  Sense strand starting at position 837 of SEQ ID NO: 1887052
cgguaacgaguucaucuau

SEQ ID NO: 2445021 - RNA, 19 nt, Artificial Sequence
  Description of Artificial Sequence: Synthetic oligonucleotide
  Antisense strand to SEQ ID NO: 2445020
auagaugaacucguuaccg

SEQ ID NO: 2445022 - RNA, 19 nt, Artificial Sequence
  Description of Artificial Sequence: Synthetic oligonucleotide
  Sense strand starting at position 878 of SEQ ID NO: 1887052
ggauuucuauuagacagga

SEQ ID NO: 2445023 - RNA, 19 nt, Artificial Sequence
  Description of Artificial Sequence: Synthetic oligonucleotide
  Antisense strand to SEQ ID NO: 2445022
uccugucuaauagaaaucc

SEQ ID NO: 2445024 - RNA, 19 nt, Artificial Sequence
  Description of Artificial Sequence: Synthetic oligonucleotide
  Sense strand starting at position 1005 of SEQ ID NO: 1887052
ggaagagaaguuugcucua

SEQ ID NO: 2445025 - RNA, 19 nt, Artificial Sequence
  Description of Artificial Sequence: Synthetic oligonucleotide
  Antisense strand to SEQ ID NO: 2445024
uagagcaaacuucucuucc

SEQ ID NO: 2445026 - RNA, 19 nt, Artificial Sequence
  Description of Artificial Sequence: Synthetic oligonucleotide
  Sense strand starting at position 1008 of SEQ ID NO: 1887052
agagaaguuugcucuaggu

SEQ ID NO: 2445027 - RNA, 19 nt, Artificial Sequence
  Description of Artificial Sequence: Synthetic oligonucleotide
  Antisense strand to SEQ ID NO: 2445026
accuagagcaaacuucucu

SEQ ID NO: 2445028 - RNA, 19 nt, Artificial Sequence
  Description of Artificial Sequence: Synthetic oligonucleotide
  Sense strand starting at position 1010 of SEQ ID NO: 1887052
agaaguuugcucuagguug

SEQ ID NO: 2445029 - RNA, 19 nt, Artificial Sequence
  Description of Artificial Sequence: Synthetic oligonucleotide
  Antisense strand to SEQ ID NO: 2445028
caaccuagagcaaacuucu

SEQ ID NO: 2445030 - RNA, 19 nt, Artificial Sequence
  Description of Artificial Sequence: Synthetic oligonucleotide
  Sense strand starting at position 1042 of SEQ ID NO: 1887052
ggagcugcucccgagaacu

SEQ ID NO: 2445031 - RNA, 19 nt, Artificial Sequence
  Description of Artificial Sequence: Synthetic oligonucleotide
  Antisense strand to SEQ ID NO: 2445030
aguucucgggagcagcucc

SEQ ID NO: 2445032 - RNA, 19 nt, Artificial Sequence
  Description of Artificial Sequence: Synthetic oligonucleotide
  Sense strand starting at position 1360 of SEQ ID NO: 1887052
uugcuuuggaguuagaaau

SEQ ID NO: 2445033 - RNA, 19 nt, Artificial Sequence
  Description of Artificial Sequence: Synthetic oligonucleotide
  Antisense strand to SEQ ID NO: 2445032
auuucuaacuccaaagcaa

SEQ ID NO: 2445034 - RNA, 19 nt, Artificial Sequence
  Description of Artificial Sequence: Synthetic oligonucleotide
  Sense strand starting at position 1452 of SEQ ID NO: 1887052
ggaguuuggcucugaggga

SEQ ID NO: 2445035 - RNA, 19 nt, Artificial Sequence
  Description of Artificial Sequence: Synthetic oligonucleotide
  Antisense strand to SEQ ID NO: 2445034
ucccucagagccaaacucc

SEQ ID NO: 2445036 - RNA, 19 nt, Artificial Sequence
  Description of Artificial Sequence: Synthetic oligonucleotide
  Sense strand starting at position 1487 of SEQ ID NO: 1887052
ggcagcucaggguacaauu

SEQ ID NO: 2445037 - RNA, 19 nt, Artificial Sequence
  Description of Artificial Sequence: Synthetic oligonucleotide
  Antisense strand to SEQ ID NO: 2445036
aauuguacccugagcugcc

SEQ ID NO: 2445038 - RNA, 19 nt, Artificial Sequence
  Description of Artificial Sequence: Synthetic oligonucleotide
  Sense strand starting at position 1497 of SEQ ID NO: 1887052
gguacaauugcgccuuguu

SEQ ID NO: 2445039 - RNA, 19 nt, Artificial Sequence
  Description of Artificial Sequence: Synthetic oligonucleotide
  Antisense strand to SEQ ID NO: 2445038
aacaaggcgcaauuguacc

SEQ ID NO: 2445040 - RNA, 19 nt, Artificial Sequence
  Description of Artificial Sequence: Synthetic oligonucleotide
  Sense strand starting at position 1498 of SEQ ID NO: 1887052
guacaauugcgccuuguua

SEQ ID NO: 2445041 - RNA, 19 nt, Artificial Sequence
  Description of Artificial Sequence: Synthetic oligonucleotide
  Antisense strand to SEQ ID NO: 2445040
uaacaaggcgcaauuguac

SEQ ID NO: 2445042 - RNA, 19 nt, Artificial Sequence
  Description of Artificial Sequence: Synthetic oligonucleotide
  Sense strand starting at position 1564 of SEQ ID NO: 1887052
gcguuuauucgucugugag

SEQ ID NO: 2445043 - RNA, 19 nt, Artificial Sequence
  Description of Artificial Sequence: Synthetic oligonucleotide
  Antisense strand to SEQ ID NO: 2445042
cucacagacgaauaaacgc

SEQ ID NO: 2445044 - RNA, 19 nt, Artificial Sequence
  Description of Artificial Sequence: Synthetic oligonucleotide
  Sense strand starting at position 1686 of SEQ ID NO: 1887052
uaaauaucugcaggcgaau

SEQ ID NO: 2445045 - RNA, 19 nt, Artificial Sequence
  Description of Artificial Sequence: Synthetic oligonucleotide
  Antisense strand to SEQ ID NO: 2445044
auucgccugcagauauuua

SEQ ID NO: 2445046 - RNA, 19 nt, Artificial Sequence
  Description of Artificial Sequence: Synthetic oligonucleotide
  Sense strand starting at position 1689 of SEQ ID NO: 1887052
auaucugcaggcgaauaua

SEQ ID NO: 2445047 - RNA, 19 nt, Artificial Sequence
  Description of Artificial Sequence: Synthetic oligonucleotide
  Antisense strand to SEQ ID NO: 2445046
uauauucgccugcagauau

SEQ ID NO: 2445048 - RNA, 19 nt, Artificial Sequence
  Description of Artificial Sequence: Synthetic oligonucleotide
  Sense strand starting at position 1700 of SEQ ID NO: 1887052
cgaauauagguuuguagau

SEQ ID NO: 2445049 - RNA, 19 nt, Artificial Sequence
  Description of Artificial Sequence: Synthetic oligonucleotide
  Antisense strand to SEQ ID NO: 2445048
aucuacaaaccuauauucg

SEQ ID NO: 2445050 - RNA, 19 nt, Artificial Sequence
  Description of Artificial Sequence: Synthetic oligonucleotide
  Sense strand starting at position 1701 of SEQ ID NO: 1887052
gaauauagguuuguagauu

SEQ ID NO: 2445051 - RNA, 19 nt, Artificial Sequence
  Description of Artificial Sequence: Synthetic oligonucleotide
  Antisense strand to SEQ ID NO: 2445050
aaucuacaaaccuauauuc

SEQ ID NO: 2445052 - RNA, 19 nt, Artificial Sequence
  Description of Artificial Sequence: Synthetic oligonucleotide
  Sense strand starting at position 1736 of SEQ ID NO: 1887052
acaaauaagugagagauuu

SEQ ID NO: 2445053 - RNA, 19 nt, Artificial Sequence
  Description of Artificial Sequence: Synthetic oligonucleotide
  Antisense strand to SEQ ID NO: 2445052
aaaucucucacuuauuugu

SEQ ID NO: 2445054 - RNA, 19 nt, Artificial Sequence
  Description of Artificial Sequence: Synthetic oligonucleotide
  Sense strand starting at position 1797 of SEQ ID NO: 1887052
agggauucccaaugaaagc

SEQ ID NO: 2445055 - RNA, 19 nt, Artificial Sequence
  Description of Artificial Sequence: Synthetic oligonucleotide
  Antisense strand to SEQ ID NO: 2445054
gcuuucauugggaaucccu

SEQ ID NO: 2445056 - RNA, 19 nt, Artificial Sequence
  Description of Artificial Sequence: Synthetic oligonucleotide
  Sense strand starting at position 2336 of SEQ ID NO: 1887052
aaguuuaaguuucugauag

SEQ ID NO: 2445057 - RNA, 19 nt, Artificial Sequence
  Description of Artificial Sequence: Synthetic oligonucleotide
  Antisense strand to SEQ ID NO: 2445056
cuaucagaaacuuaaacuu

SEQ ID NO: 2445058 - RNA, 19 nt, Artificial Sequence
  Description of Artificial Sequence: Synthetic oligonucleotide
  Sense strand starting at position 2539 of SEQ ID NO: 1887052
cgcugaacucucgccaguu

SEQ ID NO: 2445059 - RNA, 19 nt, Artificial Sequence
  Description of Artificial Sequence: Synthetic oligonucleotide
  Antisense strand to SEQ ID NO: 2445058
aacuggcgagaguucagcg

SEQ ID NO: 2445060 - RNA, 19 nt, Artificial Sequence
  Description of Artificial Sequence: Synthetic oligonucleotide
  Sense strand starting at position 2600 of SEQ ID NO: 1887052
uggguuugagcuuauagag

SEQ ID NO: 2445061 - RNA, 19 nt, Artificial Sequence
  Description of Artificial Sequence: Synthetic oligonucleotide
  Antisense strand to SEQ ID NO: 2445060
cucuauaagcucaaaccca

SEQ ID NO: 2445062 - RNA, 19 nt, Artificial Sequence
  Description of Artificial Sequence: Synthetic oligonucleotide
  Sense strand starting at position 2624 of SEQ ID NO: 1887052
ggaguaagaaccugcgaua

SEQ ID NO: 2445063 - RNA, 19 nt, Artificial Sequence
  Description of Artificial Sequence: Synthetic oligonucleotide
  Antisense strand to SEQ ID NO: 2445062
uaucgcagguucuuacucc

SEQ ID NO: 2445064 - RNA, 19 nt, Artificial Sequence
  Description of Artificial Sequence: Synthetic oligonucleotide
  Sense strand starting at position 2863 of SEQ ID NO: 1887052
ggcuccucuuugguaaaua

SEQ ID NO: 2445065 - RNA, 19 nt, Artificial Sequence
  Description of Artificial Sequence: Synthetic oligonucleotide
  Antisense strand to SEQ ID NO: 2445064
uauuuaccaaagaggagcc

SEQ ID NO: 2445066 - RNA, 19 nt, Artificial Sequence
  Description of Artificial Sequence: Synthetic oligonucleotide
  Sense strand starting at position 2884 of SEQ ID NO: 1887052
uuuguaggugucuaaguca

SEQ ID NO: 2445067 - RNA, 19 nt, Artificial Sequence
  Description of Artificial Sequence: Synthetic oligonucleotide
  Antisense strand to SEQ ID NO: 2445066
ugacuuagacaccuacaaa

SEQ ID NO: 2445068 - RNA, 19 nt, Artificial Sequence
  Description of Artificial Sequence: Synthetic oligonucleotide
  Sense strand starting at position 3021 of SEQ ID NO: 1887052
agggaaauguccucgaggu

SEQ ID NO: 2445069 - RNA, 19 nt, Artificial Sequence
  Description of Artificial Sequence: Synthetic oligonucleotide
  Antisense strand to SEQ ID NO: 2445068
accucgaggacauuucccu

SEQ ID NO: 2445070 - RNA, 19 nt, Artificial Sequence
  Description of Artificial Sequence: Synthetic oligonucleotide
  Sense strand starting at position 3022 of SEQ ID NO: 1887052
gggaaauguccucgaggua

SEQ ID NO: 2445071 - RNA, 19 nt, Artificial Sequence
  Description of Artificial Sequence: Synthetic oligonucleotide
  Antisense strand to SEQ ID NO: 2445070
uaccucgaggacauuuccc

SEQ ID NO: 2445072 - RNA, 19 nt, Artificial Sequence
  Description of Artificial Sequence: Synthetic oligonucleotide
  Sense strand starting at position 3023 of SEQ ID NO: 1887052
ggaaauguccucgagguag

SEQ ID NO: 2445073 - RNA, 19 nt, Artificial Sequence
  Description of Artificial Sequence: Synthetic oligonucleotide
  Antisense strand to SEQ ID NO: 2445072
cuaccucgaggacauuucc

SEQ ID NO: 2445074 - RNA, 19 nt, Artificial Sequence
  Description of Artificial Sequence: Synthetic oligonucleotide
  Sense strand starting at position 3149 of SEQ ID NO: 1887052
cgcucaaucguggagaaug

SEQ ID NO: 2445075 - RNA, 19 nt, Artificial Sequence
  Description of Artificial Sequence: Synthetic oligonucleotide
  Antisense strand to SEQ ID NO: 2445074
cauucuccacgauugagcg

SEQ ID NO: 2445076 - RNA, 19 nt, Artificial Sequence
  Description of Artificial Sequence: Synthetic oligonucleotide
  Sense strand starting at position 3369 of SEQ ID NO: 1887052
agaauuccgcacugugaau

SEQ ID NO: 2445077 - RNA, 19 nt, Artificial Sequence
  Description of Artificial Sequence: Synthetic oligonucleotide
  Antisense strand to SEQ ID NO: 2445076
auucacagugcggaauucu

SEQ ID NO: 2445078 - RNA, 19 nt, Artificial Sequence
  Description of Artificial Sequence: Synthetic oligonucleotide
  Sense strand starting at position 3513 of SEQ ID NO: 1887052
ugaccugcuuuggucagaa

SEQ ID NO: 2445079 - RNA, 19 nt, Artificial Sequence
  Description of Artificial Sequence: Synthetic oligonucleotide
  Antisense strand to SEQ ID NO: 2445078
uucugaccaaagcagguca

SEQ ID NO: 2445080 - RNA, 19 nt, Artificial Sequence
  Description of Artificial Sequence: Synthetic oligonucleotide
  Sense strand starting at position 3536 of SEQ ID NO: 1887052
cagaaauauuaagggaaga

SEQ ID NO: 2445081 - RNA, 19 nt, Artificial Sequence
  Description of Artificial Sequence: Synthetic oligonucleotide
  Antisense strand to SEQ ID NO: 2445080
ucuucccuuaauauuucug

SEQ ID NO: 2445082 - RNA, 19 nt, Artificial Sequence
  Description of Artificial Sequence: Synthetic oligonucleotide
  Sense strand starting at position 3584 of SEQ ID NO: 1887052
gugaauuacccaggcacuu

SEQ ID NO: 2445083 - RNA, 19 nt, Artificial Sequence
  Description of Artificial Sequence: Synthetic oligonucleotide
  Antisense strand to SEQ ID NO: 2445082
aagugccuggguaauucac

SEQ ID NO: 2445084 - RNA, 19 nt, Artificial Sequence
  Description of Artificial Sequence: Synthetic oligonucleotide
  Sense strand starting at position 3685 of SEQ ID NO: 1887052
guauuaaggaugggugcuu

SEQ ID NO: 2445085 - RNA, 19 nt, Artificial Sequence
  Description of Artificial Sequence: Synthetic oligonucleotide
  Antisense strand to SEQ ID NO: 2445084
aagcacccauccuuaauac

SEQ ID NO: 2445086 - RNA, 19 nt, Artificial Sequence
  Description of Artificial Sequence: Synthetic oligonucleotide
  Sense strand starting at position 3696 of SEQ ID NO: 1887052
gggugcuuccaagaccagu

SEQ ID NO: 2445087 - RNA, 19 nt, Artificial Sequence
  Description of Artificial Sequence: Synthetic oligonucleotide
  Antisense strand to SEQ ID NO: 2445086
acuggucuuggaagcaccc

SEQ ID NO: 2445088 - RNA, 19 nt, Artificial Sequence
  Description of Artificial Sequence: Synthetic oligonucleotide
  Sense strand starting at position 3859 of SEQ ID NO: 1887052
ugcuguuaccagggugaga

SEQ ID NO: 2445089 - RNA, 19 nt, Artificial Sequence
  Description of Artificial Sequence: Synthetic oligonucleotide
  Antisense strand to SEQ ID NO: 2445088
ucucacccugguaacagca

SEQ ID NO: 2445090 - RNA, 19 nt, Artificial Sequence
  Description of Artificial Sequence: Synthetic oligonucleotide
  Sense strand starting at position 3868 of SEQ ID NO: 1887052
cagggugagagguguaaug

SEQ ID NO: 2445091 - RNA, 19 nt, Artificial Sequence
  Description of Artificial Sequence: Synthetic oligonucleotide
  Antisense strand to SEQ ID NO: 2445090
cauuacaccucucacccug

SEQ ID NO: 2445092 - RNA, 19 nt, Artificial Sequence
  Description of Artificial Sequence: Synthetic oligonucleotide
  Sense strand starting at position 3899 of SEQ ID NO: 1887052
agagaaagcuucccugcaa

SEQ ID NO: 2445093 - RNA, 19 nt, Artificial Sequence
  Description of Artificial Sequence: Synthetic oligonucleotide
  Antisense strand to SEQ ID NO: 2445092
uugcagggaagcuuucucu

SEQ ID NO: 2445094 - RNA, 19 nt, Artificial Sequence
  Description of Artificial Sequence: Synthetic oligonucleotide
  Sense strand starting at position 3970 of SEQ ID NO: 1887052
ucuaaagugcucuacagag

SEQ ID NO: 2445095 - RNA, 19 nt, Artificial Sequence
  Description of Artificial Sequence: Synthetic oligonucleotide
  Antisense strand to SEQ ID NO: 2445094
cucuguagagcacuuuaga

SEQ ID NO: 2445096 - RNA, 19 nt, Artificial Sequence
  Description of Artificial Sequence: Synthetic oligonucleotide
  Sense strand starting at position 161 of SEQ ID NO: 1887053
agagcugaucccuacaagu

SEQ ID NO: 2445097 - RNA, 19 nt, Artificial Sequence
  Description of Artificial Sequence: Synthetic oligonucleotide
  Antisense strand to SEQ ID NO: 2445096
acuuguagggaucagcucu

SEQ ID NO: 2445098 - RNA, 19 nt, Artificial Sequence
  Description of Artificial Sequence: Synthetic oligonucleotide
  Sense strand starting at position 163 of SEQ ID NO: 1887053
agcugaucccuacaagugu

SEQ ID NO: 2445099 - RNA, 19 nt, Artificial Sequence
  Description of Artificial Sequence: Synthetic oligonucleotide
  Antisense strand to SEQ ID NO: 2445098
acacuuguagggaucagcu

SEQ ID NO: 2445100 - RNA, 19 nt, Artificial Sequence
  Description of Artificial Sequence: Synthetic oligonucleotide
  Sense strand starting at position 197 of SEQ ID NO: 1887053
ugaaauuaauuaggagguu

SEQ ID NO: 2445101 - RNA, 19 nt, Artificial Sequence
  Description of Artificial Sequence: Synthetic oligonucleotide
  Antisense strand to SEQ ID NO: 2445100
aaccuccuaauuaauuuca

SEQ ID NO: 2445102 - RNA, 19 nt, Artificial Sequence
  Description of Artificial Sequence: Synthetic oligonucleotide
  Sense strand starting at position 312 of SEQ ID NO: 1887053
ggcagaaccaucuggguga

SEQ ID NO: 2445103 - RNA, 19 nt, Artificial Sequence
  Description of Artificial Sequence: Synthetic oligonucleotide
  Antisense strand to SEQ ID NO: 2445102
ucacccagaugguucugcc

SEQ ID NO: 2445104 - RNA, 19 nt, Artificial Sequence
  Description of Artificial Sequence: Synthetic oligonucleotide
  Sense strand starting at position 543 of SEQ ID NO: 1887053
gccugaguguucccuuggu

SEQ ID NO: 2445105 - RNA, 19 nt, Artificial Sequence
  Description of Artificial Sequence: Synthetic oligonucleotide
  Antisense strand to SEQ ID NO: 2445104
accaagggaacacucaggc

SEQ ID NO: 2445106 - RNA, 19 nt, Artificial Sequence
  Description of Artificial Sequence: Synthetic oligonucleotide
  Sense strand starting at position 623 of SEQ ID NO: 1887053
ccuccuggcuucuuaguaa

SEQ ID NO: 2445107 - RNA, 19 nt, Artificial Sequence
  Description of Artificial Sequence: Synthetic oligonucleotide
  Antisense strand to SEQ ID NO: 2445106
uuacuaagaagccaggagg

SEQ ID NO: 2445108 - RNA, 19 nt, Artificial Sequence
  Description of Artificial Sequence: Synthetic oligonucleotide
  Sense strand starting at position 626 of SEQ ID NO: 1887053
ccuggcuucuuaguaauga

SEQ ID NO: 2445109 - RNA, 19 nt, Artificial Sequence
  Description of Artificial Sequence: Synthetic oligonucleotide
  Antisense strand to SEQ ID NO: 2445108
ucauuacuaagaagccagg

SEQ ID NO: 2445110 - RNA, 19 nt, Artificial Sequence
  Description of Artificial Sequence: Synthetic oligonucleotide
  Sense strand starting at position 630 of SEQ ID NO: 1887053
gcuucuuaguaaugacuuc

SEQ ID NO: 2445111 - RNA, 19 nt, Artificial Sequence
  Description of Artificial Sequence: Synthetic oligonucleotide
  Antisense strand to SEQ ID NO: 2445110
gaagucauuacuaagaagc

SEQ ID NO: 2445112 - RNA, 19 nt, Artificial Sequence
  Description of Artificial Sequence: Synthetic oligonucleotide
  Sense strand starting at position 755 of SEQ ID NO: 1887053
gucagugccuuugguggaa

SEQ ID NO: 2445113 - RNA, 19 nt, Artificial Sequence
  Description of Artificial Sequence: Synthetic oligonucleotide
  Antisense strand to SEQ ID NO: 2445112
uuccaccaaaggcacugac

SEQ ID NO: 2445114 - RNA, 19 nt, Artificial Sequence
  Description of Artificial Sequence: Synthetic oligonucleotide
  Sense strand starting at position 802 of SEQ ID NO: 1887053
gcugauuugucccaucgug

SEQ ID NO: 2445115 - RNA, 19 nt, Artificial Sequence
  Description of Artificial Sequence: Synthetic oligonucleotide
  Antisense strand to SEQ ID NO: 2445114
cacgaugggacaaaucagc

SEQ ID NO: 2445116 - RNA, 19 nt, Artificial Sequence
  Description of Artificial Sequence: Synthetic oligonucleotide
  Sense strand starting at position 839 of SEQ ID NO: 1887053
uccugcuucuggcugagau

SEQ ID NO: 2445117 - RNA, 19 nt, Artificial Sequence
  Description of Artificial Sequence: Synthetic oligonucleotide
  Antisense strand to SEQ ID NO: 2445116
aucucagccagaagcagga

SEQ ID NO: 2445118 - RNA, 19 nt, Artificial Sequence
  Description of Artificial Sequence: Synthetic oligonucleotide
  Sense strand starting at position 840 of SEQ ID NO: 1887053
ccugcuucuggcugagaug

SEQ ID NO: 2445119 - RNA, 19 nt, Artificial Sequence
  Description of Artificial Sequence: Synthetic oligonucleotide
  Antisense strand to SEQ ID NO: 2445118
caucucagccagaagcagg

SEQ ID NO: 2445120 - RNA, 19 nt, Artificial Sequence
  Description of Artificial Sequence: Synthetic oligonucleotide
  Sense strand starting at position 841 of SEQ ID NO: 1887053
cugcuucuggcugagauga

SEQ ID NO: 2445121 - RNA, 19 nt, Artificial Sequence
  Description of Artificial Sequence: Synthetic oligonucleotide
  Antisense strand to SEQ ID NO: 2445120
ucaucucagccagaagcag

SEQ ID NO: 2445122 - RNA, 19 nt, Artificial Sequence
  Description of Artificial Sequence: Synthetic oligonucleotide
  Sense strand starting at position 852 of SEQ ID NO: 1887053
ugagaugagccauaucucu

SEQ ID NO: 2445123 - RNA, 19 nt, Artificial Sequence
  Description of Artificial Sequence: Synthetic oligonucleotide
  Antisense strand to SEQ ID NO: 2445122
agagauauggcucaucuca

SEQ ID NO: 2445124 - RNA, 19 nt, Artificial Sequence
  Description of Artificial Sequence: Synthetic oligonucleotide
  Sense strand starting at position 902 of SEQ ID NO: 1887053
gguucugaggcagagacua

SEQ ID NO: 2445125 - RNA, 19 nt, Artificial Sequence
  Description of Artificial Sequence: Synthetic oligonucleotide
  Antisense strand to SEQ ID NO: 2445124
uagucucugccucagaacc

SEQ ID NO: 2445126 - RNA, 19 nt, Artificial Sequence
  Description of Artificial Sequence: Synthetic oligonucleotide
  Sense strand starting at position 931 of SEQ ID NO: 1887053
gcucguugcugugagguua

SEQ ID NO: 2445127 - RNA, 19 nt, Artificial Sequence
  Description of Artificial Sequence: Synthetic oligonucleotide
  Antisense strand to SEQ ID NO: 2445126
uaaccucacagcaacgagc

SEQ ID NO: 2445128 - RNA, 19 nt, Artificial Sequence
  Description of Artificial Sequence: Synthetic oligonucleotide
  Sense strand starting at position 1077 of SEQ ID NO: 1887053
gcuggauguccuuguggga

SEQ ID NO: 2445129 - RNA, 19 nt, Artificial Sequence
  Description of Artificial Sequence: Synthetic oligonucleotide
  Antisense strand to SEQ ID NO: 2445128
ucccacaaggacauccagc

SEQ ID NO: 2445130 - RNA, 19 nt, Artificial Sequence
  Description of Artificial Sequence: Synthetic oligonucleotide
  Sense strand starting at position 1080 of SEQ ID NO: 1887053
ggauguccuugugggauca

SEQ ID NO: 2445131 - RNA, 19 nt, Artificial Sequence
  Description of Artificial Sequence: Synthetic oligonucleotide
  Antisense strand to SEQ ID NO: 2445130
ugaucccacaaggacaucc

SEQ ID NO: 2445132 - RNA, 19 nt, Artificial Sequence
  Description of Artificial Sequence: Synthetic oligonucleotide
  Sense strand starting at position 1508 of SEQ ID NO: 1887053
gguggcugcuccucugaga

SEQ ID NO: 2445133 - RNA, 19 nt, Artificial Sequence
  Description of Artificial Sequence: Synthetic oligonucleotide
  Antisense strand to SEQ ID NO: 2445132
ucucagaggagcagccacc

SEQ ID NO: 2445134 - RNA, 19 nt, Artificial Sequence
  Description of Artificial Sequence: Synthetic oligonucleotide
  Sense strand starting at position 1789 of SEQ ID NO: 1887053
cucuuuagguguccacaca

SEQ ID NO: 2445135 - RNA, 19 nt, Artificial Sequence
  Description of Artificial Sequence: Synthetic oligonucleotide
  Antisense strand to SEQ ID NO: 2445134
uguguggacaccuaaagag

SEQ ID NO: 2445136 - RNA, 19 nt, Artificial Sequence
  Description of Artificial Sequence: Synthetic oligonucleotide
  Sense strand starting at position 1932 of SEQ ID NO: 1887053
gccaucucuccgcgugacu

SEQ ID NO: 2445137 - RNA, 19 nt, Artificial Sequence
  Description of Artificial Sequence: Synthetic oligonucleotide
  Antisense strand to SEQ ID NO: 2445136
agucacgcggagagauggc

SEQ ID NO: 2445138 - RNA, 19 nt, Artificial Sequence
  Description of Artificial Sequence: Synthetic oligonucleotide
  Sense strand starting at position 1933 of SEQ ID NO: 1887053
ccaucucuccgcgugacuu

SEQ ID NO: 2445139 - RNA, 19 nt, Artificial Sequence
  Description of Artificial Sequence: Synthetic oligonucleotide
  Antisense strand to SEQ ID NO: 2445138
aagucacgcggagagaugg

SEQ ID NO: 2445140 - RNA, 19 nt, Artificial Sequence
  Description of Artificial Sequence: Synthetic oligonucleotide
  Sense strand starting at position 1934 of SEQ ID NO: 1887053
caucucuccgcgugacuuu

SEQ ID NO: 2445141 - RNA, 19 nt, Artificial Sequence
  Description of Artificial Sequence: Synthetic oligonucleotide
  Antisense strand to SEQ ID NO: 2445140
aaagucacgcggagagaug

SEQ ID NO: 2445142 - RNA, 19 nt, Artificial Sequence
  Description of Artificial Sequence: Synthetic oligonucleotide
  Sense strand starting at position 1946 of SEQ ID NO: 1887053
ugacuuugaacuugguuga

SEQ ID NO: 2445143 - RNA, 19 nt, Artificial Sequence
  Description of Artificial Sequence: Synthetic oligonucleotide
  Antisense strand to SEQ ID NO: 2445142
ucaaccaaguucaaaguca

SEQ ID NO: 2445144 - RNA, 19 nt, Artificial Sequence
  Description of Artificial Sequence: Synthetic oligonucleotide
  Sense strand starting at position 1947 of SEQ ID NO: 1887053
gacuuugaacuugguugaa

SEQ ID NO: 2445145 - RNA, 19 nt, Artificial Sequence
  Description of Artificial Sequence: Synthetic oligonucleotide
  Antisense strand to SEQ ID NO: 2445144
uucaaccaaguucaaaguc

SEQ ID NO: 2445146 - RNA, 19 nt, Artificial Sequence
  Description of Artificial Sequence: Synthetic oligonucleotide
  Sense strand starting at position 1996 of SEQ ID NO: 1887053
aggcuugagccacagcauu

SEQ ID NO: 2445147 - RNA, 19 nt, Artificial Sequence
  Description of Artificial Sequence: Synthetic oligonucleotide
  Antisense strand to SEQ ID NO: 2445146
aaugcuguggcucaagccu

SEQ ID NO: 2445148 - RNA, 19 nt, Artificial Sequence
  Description of Artificial Sequence: Synthetic oligonucleotide
  Sense strand starting at position 2153 of SEQ ID NO: 1887053
acaggcguuucuguuagaa

SEQ ID NO: 2445149 - RNA, 19 nt, Artificial Sequence
  Description of Artificial Sequence: Synthetic oligonucleotide
  Antisense strand to SEQ ID NO: 2445148
uucuaacagaaacgccugu

SEQ ID NO: 2445150 - RNA, 19 nt, Artificial Sequence
  Description of Artificial Sequence: Synthetic oligonucleotide
  Sense strand starting at position 2155 of SEQ ID NO: 1887053
aggcguuucuguuagaagc

SEQ ID NO: 2445151 - RNA, 19 nt, Artificial Sequence
  Description of Artificial Sequence: Synthetic oligonucleotide
  Antisense strand to SEQ ID NO: 2445150
gcuucuaacagaaacgccu

SEQ ID NO: 2445152 - RNA, 19 nt, Artificial Sequence
  Description of Artificial Sequence: Synthetic oligonucleotide
  Sense strand starting at position 2212 of SEQ ID NO: 1887053
ccugucuugcucugugaca

SEQ ID NO: 2445153 - RNA, 19 nt, Artificial Sequence
  Description of Artificial Sequence: Synthetic oligonucleotide
  Antisense strand to SEQ ID NO: 2445152
ugucacagagcaagacagg

SEQ ID NO: 2445154 - RNA, 19 nt, Artificial Sequence
  Description of Artificial Sequence: Synthetic oligonucleotide
  Sense strand starting at position 2431 of SEQ ID NO: 1887053
ggcagugugugcccaguua

SEQ ID NO: 2445155 - RNA, 19 nt, Artificial Sequence
  Description of Artificial Sequence: Synthetic oligonucleotide
  Antisense strand to SEQ ID NO: 2445154
uaacugggcacacacugcc

SEQ ID NO: 2445156 - RNA, 19 nt, Artificial Sequence
  Description of Artificial Sequence: Synthetic oligonucleotide
  Sense strand starting at position 3144 of SEQ ID NO: 1887053
ggaagagccgcuugucaga

SEQ ID NO: 2445157 - RNA, 19 nt, Artificial Sequence
  Description of Artificial Sequence: Synthetic oligonucleotide
  Antisense strand to SEQ ID NO: 2445156
ucugacaagcggcucuucc

SEQ ID NO: 2445158 - RNA, 19 nt, Artificial Sequence
  Description of Artificial Sequence: Synthetic oligonucleotide
  Sense strand starting at position 3804 of SEQ ID NO: 1887053
uuccuagaccaucgagagu

SEQ ID NO: 2445159 - RNA, 19 nt, Artificial Sequence
  Description of Artificial Sequence: Synthetic oligonucleotide
  Antisense strand to SEQ ID NO: 2445158
acucucgauggucuaggaa

SEQ ID NO: 2445160 - RNA, 19 nt, Artificial Sequence
  Description of Artificial Sequence: Synthetic oligonucleotide
  Sense strand starting at position 343 of SEQ ID NO: 1887054
cugggcuuggcacagauua

SEQ ID NO: 2445161 - RNA, 19 nt, Artificial Sequence
  Description of Artificial Sequence: Synthetic oligonucleotide
  Antisense strand to SEQ ID NO: 2445160
uaaucugugccaagcccag

SEQ ID NO: 2445162 - RNA, 19 nt, Artificial Sequence
  Description of Artificial Sequence: Synthetic oligonucleotide
  Sense strand starting at position 371 of SEQ ID NO: 1887054
gcacuuagauuaucagaug

SEQ ID NO: 2445163 - RNA, 19 nt, Artificial Sequence
  Description of Artificial Sequence: Synthetic oligonucleotide
  Antisense strand to SEQ ID NO: 2445162
caucugauaaucuaagugc

SEQ ID NO: 2445164 - RNA, 19 nt, Artificial Sequence
  Description of Artificial Sequence: Synthetic oligonucleotide
  Sense strand starting at position 374 of SEQ ID NO: 1887054
cuuagauuaucagauggcu

SEQ ID NO: 2445165 - RNA, 19 nt, Artificial Sequence
  Description of Artificial Sequence: Synthetic oligonucleotide
  Antisense strand to SEQ ID NO: 2445164
agccaucugauaaucuaag

SEQ ID NO: 2445166 - RNA, 19 nt, Artificial Sequence
  Description of Artificial Sequence: Synthetic oligonucleotide
  Sense strand starting at position 380 of SEQ ID NO: 1887054
uuaucagauggcugagcau

SEQ ID NO: 2445167 - RNA, 19 nt, Artificial Sequence
  Description of Artificial Sequence: Synthetic oligonucleotide
  Antisense strand to SEQ ID NO: 2445166
augcucagccaucugauaa

SEQ ID NO: 2445168 - RNA, 19 nt, Artificial Sequence
  Description of Artificial Sequence: Synthetic oligonucleotide
  Sense strand starting at position 461 of SEQ ID NO: 1887054
uggauacucccagguguua

SEQ ID NO: 2445169 - RNA, 19 nt, Artificial Sequence
  Description of Artificial Sequence: Synthetic oligonucleotide
  Antisense strand to SEQ ID NO: 2445168
uaacaccugggaguaucca

SEQ ID NO: 2445170 - RNA, 19 nt, Artificial Sequence
  Description of Artificial Sequence: Synthetic oligonucleotide
  Sense strand starting at position 525 of SEQ ID NO: 1887054
cuuugaagcucaucagaac

SEQ ID NO: 2445171 - RNA, 19 nt, Artificial Sequence
  Description of Artificial Sequence: Synthetic oligonucleotide
  Antisense strand to SEQ ID NO: 2445170
guucugaugagcuucaaag

SEQ ID NO: 2445172 - RNA, 19 nt, Artificial Sequence
  Description of Artificial Sequence: Synthetic oligonucleotide
  Sense strand starting at position 526 of SEQ ID NO: 1887054
uuugaagcucaucagaacu

SEQ ID NO: 2445173 - RNA, 19 nt, Artificial Sequence
  Description of Artificial Sequence: Synthetic oligonucleotide
  Antisense strand to SEQ ID NO: 2445172
aguucugaugagcuucaaa

SEQ ID NO: 2445174 - RNA, 19 nt, Artificial Sequence
  Description of Artificial Sequence: Synthetic oligonucleotide
  Sense strand starting at position 913 of SEQ ID NO: 1887054
ggcauuacccagugaguga

SEQ ID NO: 2445175 - RNA, 19 nt, Artificial Sequence
  Description of Artificial Sequence: Synthetic oligonucleotide
  Antisense strand to SEQ ID NO: 2445174
ucacucacuggguaaugcc

SEQ ID NO: 2445176 - RNA, 19 nt, Artificial Sequence
  Description of Artificial Sequence: Synthetic oligonucleotide
  Sense strand starting at position 914 of SEQ ID NO: 1887054
gcauuacccagugagugaa

SEQ ID NO: 2445177 - RNA, 19 nt, Artificial Sequence
  Description of Artificial Sequence: Synthetic oligonucleotide
  Antisense strand to SEQ ID NO: 2445176
uucacucacuggguaaugc

SEQ ID NO: 2445178 - RNA, 19 nt, Artificial Sequence
  Description of Artificial Sequence: Synthetic oligonucleotide
  Sense strand starting at position 980 of SEQ ID NO: 1887054
gcagauggcuguugcaagu

SEQ ID NO: 2445179 - RNA, 19 nt, Artificial Sequence
  Description of Artificial Sequence: Synthetic oligonucleotide
  Antisense strand to SEQ ID NO: 2445178
acuugcaacagccaucugc

SEQ ID NO: 2445180 - RNA, 19 nt, Artificial Sequence
  Description of Artificial Sequence: Synthetic oligonucleotide
  Sense strand starting at position 1038 of SEQ ID NO: 1887054
gaauguggccuuugggacu

SEQ ID NO: 2445181 - RNA, 19 nt, Artificial Sequence
  Description of Artificial Sequence: Synthetic oligonucleotide
  Antisense strand to SEQ ID NO: 2445180
agucccaaaggccacauuc

SEQ ID NO: 2445182 - RNA, 19 nt, Artificial Sequence
  Description of Artificial Sequence: Synthetic oligonucleotide
  Sense strand starting at position 1044 of SEQ ID NO: 1887054
ggccuuugggacuaauaug

SEQ ID NO: 2445183 - RNA, 19 nt, Artificial Sequence
  Description of Artificial Sequence: Synthetic oligonucleotide
  Antisense strand to SEQ ID NO: 2445182
cauauuagucccaaaggcc

SEQ ID NO: 2445184 - RNA, 19 nt, Artificial Sequence
  Description of Artificial Sequence: Synthetic oligonucleotide
  Sense strand starting at position 1162 of SEQ ID NO: 1887054
ggcuguagccucuaauagu

SEQ ID NO: 2445185 - RNA, 19 nt, Artificial Sequence
  Description of Artificial Sequence: Synthetic oligonucleotide
  Antisense strand to SEQ ID NO: 2445184
acuauuagaggcuacagcc

SEQ ID NO: 2445186 - RNA, 19 nt, Artificial Sequence
  Description of Artificial Sequence: Synthetic oligonucleotide
  Sense strand starting at position 1177 of SEQ ID NO: 1887054
uagucuaguggucgucauu

SEQ ID NO: 2445187 - RNA, 19 nt, Artificial Sequence
  Description of Artificial Sequence: Synthetic oligonucleotide
  Antisense strand to SEQ ID NO: 2445186
aaugacgaccacuagacua

SEQ ID NO: 2445188 - RNA, 19 nt, Artificial Sequence
  Description of Artificial Sequence: Synthetic oligonucleotide
  Sense strand starting at position 1543 of SEQ ID NO: 1887054
ugccaugugucccugauca

SEQ ID NO: 2445189 - RNA, 19 nt, Artificial Sequence
  Description of Artificial Sequence: Synthetic oligonucleotide
  Antisense strand to SEQ ID NO: 2445188
ugaucagggacacauggca

SEQ ID NO: 2445190 - RNA, 19 nt, Artificial Sequence
  Description of Artificial Sequence: Synthetic oligonucleotide
  Sense strand starting at position 1545 of SEQ ID NO: 1887054
ccaugugucccugaucacu

SEQ ID NO: 2445191 - RNA, 19 nt, Artificial Sequence
  Description of Artificial Sequence: Synthetic oligonucleotide
  Antisense strand to SEQ ID NO: 2445190
agugaucagggacacaugg

SEQ ID NO: 2445192 - RNA, 19 nt, Artificial Sequence
  Description of Artificial Sequence: Synthetic oligonucleotide
  Sense strand starting at position 1641 of SEQ ID NO: 1887054
acugaacucugguuguaug

SEQ ID NO: 2445193 - RNA, 19 nt, Artificial Sequence
  Description of Artificial Sequence: Synthetic oligonucleotide
  Antisense strand to SEQ ID NO: 2445192
cauacaaccagaguucagu

SEQ ID NO: 2445194 - RNA, 19 nt, Artificial Sequence
  Description of Artificial Sequence: Synthetic oligonucleotide
  Sense strand starting at position 1644 of SEQ ID NO: 1887054
gaacucugguuguaugcaa

SEQ ID NO: 2445195 - RNA, 19 nt, Artificial Sequence
  Description of Artificial Sequence: Synthetic oligonucleotide
  Antisense strand to SEQ ID NO: 2445194
uugcauacaaccagaguuc

SEQ ID NO: 2445196 - RNA, 19 nt, Artificial Sequence
  Description of Artificial Sequence: Synthetic oligonucleotide
  Sense strand starting at position 1741 of SEQ ID NO: 1887054
gacccucuuccagguagau

SEQ ID NO: 2445197 - RNA, 19 nt, Artificial Sequence
  Description of Artificial Sequence: Synthetic oligonucleotide
  Antisense strand to SEQ ID NO: 2445196
aucuaccuggaagaggguc

SEQ ID NO: 2445198 - RNA, 19 nt, Artificial Sequence
  Description of Artificial Sequence: Synthetic oligonucleotide
  Sense strand starting at position 2001 of SEQ ID NO: 1887054
cucagcuucugcgaagaga

SEQ ID NO: 2445199 - RNA, 19 nt, Artificial Sequence
  Description of Artificial Sequence: Synthetic oligonucleotide
  Antisense strand to SEQ ID NO: 2445198
ucucuucgcagaagcugag

SEQ ID NO: 2445200 - RNA, 19 nt, Artificial Sequence
  Description of Artificial Sequence: Synthetic oligonucleotide
  Sense strand starting at position 2016 of SEQ ID NO: 1887054
gagagacagcaaugauguu

SEQ ID NO: 2445201 - RNA, 19 nt, Artificial Sequence
  Description of Artificial Sequence: Synthetic oligonucleotide
  Antisense strand to SEQ ID NO: 2445200
aacaucauugcugucucuc

SEQ ID NO: 2445202 - RNA, 19 nt, Artificial Sequence
  Description of Artificial Sequence: Synthetic oligonucleotide
  Sense strand starting at position 2050 of SEQ ID NO: 1887054
ccagcaguaccagaaguua

SEQ ID NO: 2445203 - RNA, 19 nt, Artificial Sequence
  Description of Artificial Sequence: Synthetic oligonucleotide
  Antisense strand to SEQ ID NO: 2445202
uaacuucugguacugcugg

SEQ ID NO: 2445204 - RNA, 19 nt, Artificial Sequence
  Description of Artificial Sequence: Synthetic oligonucleotide
  Sense strand starting at position 2143 of SEQ ID NO: 1887054
acaaguaucugccugaccu

SEQ ID NO: 2445205 - RNA, 19 nt, Artificial Sequence
  Description of Artificial Sequence: Synthetic oligonucleotide
  Antisense strand to SEQ ID NO: 2445204
aggucaggcagauacuugu

SEQ ID NO: 2445206 - RNA, 19 nt, Artificial Sequence
  Description of Artificial Sequence: Synthetic oligonucleotide
  Sense strand starting at position 2174 of SEQ ID NO: 1887054
cagcccuuaucuuggagau

SEQ ID NO: 2445207 - RNA, 19 nt, Artificial Sequence
  Description of Artificial Sequence: Synthetic oligonucleotide
  Antisense strand to SEQ ID NO: 2445206
aucuccaagauaagggcug

SEQ ID NO: 2445208 - RNA, 19 nt, Artificial Sequence
  Description of Artificial Sequence: Synthetic oligonucleotide
  Sense strand starting at position 2175 of SEQ ID NO: 1887054
agcccuuaucuuggagauc

SEQ ID NO: 2445209 - RNA, 19 nt, Artificial Sequence
  Description of Artificial Sequence: Synthetic oligonucleotide
  Antisense strand to SEQ ID NO: 2445208
gaucuccaagauaagggcu

SEQ ID NO: 2445210 - RNA, 19 nt, Artificial Sequence
  Description of Artificial Sequence: Synthetic oligonucleotide
  Sense strand starting at position 2176 of SEQ ID NO: 1887054
gcccuuaucuuggagaucu

SEQ ID NO: 2445211 - RNA, 19 nt, Artificial Sequence
  Description of Artificial Sequence: Synthetic oligonucleotide
  Antisense strand to SEQ ID NO: 2445210
agaucuccaagauaagggc

SEQ ID NO: 2445212 - RNA, 19 nt, Artificial Sequence
  Description of Artificial Sequence: Synthetic oligonucleotide
  Sense strand starting at position 2195 of SEQ ID NO: 1887054
gggugaugaggccaagucu

SEQ ID NO: 2445213 - RNA, 19 nt, Artificial Sequence
  Description of Artificial Sequence: Synthetic oligonucleotide
  Antisense strand to SEQ ID NO: 2445212
agacuuggccucaucaccc

SEQ ID NO: 2445214 - RNA, 19 nt, Artificial Sequence
  Description of Artificial Sequence: Synthetic oligonucleotide
  Sense strand starting at position 2552 of SEQ ID NO: 1887054
ucagcacgggcauauaauu

SEQ ID NO: 2445215 - RNA, 19 nt, Artificial Sequence
  Description of Artificial Sequence: Synthetic oligonucleotide
  Antisense strand to SEQ ID NO: 2445214
aauuauaugcccgugcuga

SEQ ID NO: 2445216 - RNA, 19 nt, Artificial Sequence
  Description of Artificial Sequence: Synthetic oligonucleotide
  Sense strand starting at position 2680 of SEQ ID NO: 1887054
agggcuguaugguaagaca

SEQ ID NO: 2445217 - RNA, 19 nt, Artificial Sequence
  Description of Artificial Sequence: Synthetic oligonucleotide
  Antisense strand to SEQ ID NO: 2445216
ugucuuaccauacagcccu

SEQ ID NO: 2445218 - RNA, 19 nt, Artificial Sequence
  Description of Artificial Sequence: Synthetic oligonucleotide
  Sense strand starting at position 2897 of SEQ ID NO: 1887054
ggugguguauggcaacuaa

SEQ ID NO: 2445219 - RNA, 19 nt, Artificial Sequence
  Description of Artificial Sequence: Synthetic oligonucleotide
  Antisense strand to SEQ ID NO: 2445218
uuaguugccauacaccacc

SEQ ID NO: 2445220 - RNA, 19 nt, Artificial Sequence
  Description of Artificial Sequence: Synthetic oligonucleotide
  Sense strand starting at position 3174 of SEQ ID NO: 1887054
guaagugagcucuacacca

SEQ ID NO: 2445221 - RNA, 19 nt, Artificial Sequence
  Description of Artificial Sequence: Synthetic oligonucleotide
  Antisense strand to SEQ ID NO: 2445220
ugguguagagcucacuuac

SEQ ID NO: 2445222 - RNA, 19 nt, Artificial Sequence
  Description of Artificial Sequence: Synthetic oligonucleotide
  Sense strand starting at position 3321 of SEQ ID NO: 1887054
ggugguucucucgagguga

SEQ ID NO: 2445223 - RNA, 19 nt, Artificial Sequence
  Description of Artificial Sequence: Synthetic oligonucleotide
  Antisense strand to SEQ ID NO: 2445222
ucaccucgagagaaccacc

SEQ ID NO: 2445224 - RNA, 19 nt, Artificial Sequence
  Description of Artificial Sequence: Synthetic oligonucleotide
  Sense strand starting at position 3322 of SEQ ID NO: 1887054
gugguucucucgaggugag

SEQ ID NO: 2445225 - RNA, 19 nt, Artificial Sequence
  Description of Artificial Sequence: Synthetic oligonucleotide
  Antisense strand to SEQ ID NO: 2445224
cucaccucgagagaaccac

SEQ ID NO: 2445226 - RNA, 19 nt, Artificial Sequence
  Description of Artificial Sequence: Synthetic oligonucleotide
  Sense strand starting at position 3493 of SEQ ID NO: 1887054
cugguguaucgaggugaga

SEQ ID NO: 2445227 - RNA, 19 nt, Artificial Sequence
  Description of Artificial Sequence: Synthetic oligonucleotide
  Antisense strand to SEQ ID NO: 2445226
ucucaccucgauacaccag

SEQ ID NO: 2445228 - RNA, 19 nt, Artificial Sequence
  Description of Artificial Sequence: Synthetic oligonucleotide
  Sense strand starting at position 3495 of SEQ ID NO: 1887054
gguguaucgaggugagacu

SEQ ID NO: 2445229 - RNA, 19 nt, Artificial Sequence
  Description of Artificial Sequence: Synthetic oligonucleotide
  Antisense strand to SEQ ID NO: 2445228
agucucaccucgauacacc

SEQ ID NO: 2445230 - RNA, 19 nt, Artificial Sequence
  Description of Artificial Sequence: Synthetic oligonucleotide
  Sense strand starting at position 3887 of SEQ ID NO: 1887054
augcuuugcuccuguguga

SEQ ID NO: 2445231 - RNA, 19 nt, Artificial Sequence
  Description of Artificial Sequence: Synthetic oligonucleotide
  Antisense strand to SEQ ID NO: 2445230
ucacacaggagcaaagcau

SEQ ID NO: 2445232 - RNA, 19 nt, Artificial Sequence
  Description of Artificial Sequence: Synthetic oligonucleotide
  Sense strand starting at position 3962 of SEQ ID NO: 1887054
ggaguuugccucuauugcu

SEQ ID NO: 2445233 - RNA, 19 nt, Artificial Sequence
  Description of Artificial Sequence: Synthetic oligonucleotide
  Antisense strand to SEQ ID NO: 2445232
agcaauagaggcaaacucc

SEQ ID NO: 2445234 - RNA, 19 nt, Artificial Sequence
  Description of Artificial Sequence: Synthetic oligonucleotide
  Sense strand starting at position 3965 of SEQ ID NO: 1887054
guuugccucuauugcuuua

SEQ ID NO: 2445235 - RNA, 19 nt, Artificial Sequence
  Description of Artificial Sequence: Synthetic oligonucleotide
  Antisense strand to SEQ ID NO: 2445234
uaaagcaauagaggcaaac

SEQ ID NO: 2445236 - RNA, 19 nt, Artificial Sequence
  Description of Artificial Sequence: Synthetic oligonucleotide
  Sense strand starting at position 158 of SEQ ID NO: 1887055
gcccgugggaucugagagu

SEQ ID NO: 2445237 - RNA, 19 nt, Artificial Sequence
  Description of Artificial Sequence: Synthetic oligonucleotide
  Antisense strand to SEQ ID NO: 2445236
acucucagaucccacgggc

SEQ ID NO: 2445238 - RNA, 19 nt, Artificial Sequence
  Description of Artificial Sequence: Synthetic oligonucleotide
  Sense strand starting at position 314 of SEQ ID NO: 1887055
gucuacaccaggugugaau

SEQ ID NO: 2445239 - RNA, 19 nt, Artificial Sequence
  Description of Artificial Sequence: Synthetic oligonucleotide
  Antisense strand to SEQ ID NO: 2445238
auucacaccugguguagac

SEQ ID NO: 2445240 - RNA, 19 nt, Artificial Sequence
  Description of Artificial Sequence: Synthetic oligonucleotide
  Sense strand starting at position 342 of SEQ ID NO: 1887055
gggcuaggcacucaggaua

SEQ ID NO: 2445241 - RNA, 19 nt, Artificial Sequence
  Description of Artificial Sequence: Synthetic oligonucleotide
  Antisense strand to SEQ ID NO: 2445240
uauccugagugccuagccc

SEQ ID NO: 2445242 - RNA, 19 nt, Artificial Sequence
  Description of Artificial Sequence: Synthetic oligonucleotide
  Sense strand starting at position 695 of SEQ ID NO: 1887055
acuacucauggccaugauu

SEQ ID NO: 2445243 - RNA, 19 nt, Artificial Sequence
  Description of Artificial Sequence: Synthetic oligonucleotide
  Antisense strand to SEQ ID NO: 2445242
aaucauggccaugaguagu

SEQ ID NO: 2445244 - RNA, 19 nt, Artificial Sequence
  Description of Artificial Sequence: Synthetic oligonucleotide
  Sense strand starting at position 1001 of SEQ ID NO: 1887055
ggccauagucaccaaucuu

SEQ ID NO: 2445245 - RNA, 19 nt, Artificial Sequence
  Description of Artificial Sequence: Synthetic oligonucleotide
  Antisense strand to SEQ ID NO: 2445244
aagauuggugacuauggcc

SEQ ID NO: 2445246 - RNA, 19 nt, Artificial Sequence
  Description of Artificial Sequence: Synthetic oligonucleotide
  Sense strand starting at position 1301 of SEQ ID NO: 1887055
gugcgugggccucaaaugu

SEQ ID NO: 2445247 - RNA, 19 nt, Artificial Sequence
  Description of Artificial Sequence: Synthetic oligonucleotide
  Antisense strand to SEQ ID NO: 2445246
acauuugaggcccacgcac

SEQ ID NO: 2445248 - RNA, 19 nt, Artificial Sequence
  Description of Artificial Sequence: Synthetic oligonucleotide
  Sense strand starting at position 1589 of SEQ ID NO: 1887055
uggguagggucuggaaaga

SEQ ID NO: 2445249 - RNA, 19 nt, Artificial Sequence
  Description of Artificial Sequence: Synthetic oligonucleotide
  Antisense strand to SEQ ID NO: 2445248
ucuuuccagacccuaccca

SEQ ID NO: 2445250 - RNA, 19 nt, Artificial Sequence
  Description of Artificial Sequence: Synthetic oligonucleotide
  Sense strand starting at position 1711 of SEQ ID NO: 1887055
gguagauauuaccacagcu

SEQ ID NO: 2445251 - RNA, 19 nt, Artificial Sequence
  Description of Artificial Sequence: Synthetic oligonucleotide
  Antisense strand to SEQ ID NO: 2445250
agcugugguaauaucuacc

SEQ ID NO: 2445252 - RNA, 19 nt, Artificial Sequence
  Description of Artificial Sequence: Synthetic oligonucleotide
  Sense strand starting at position 1732 of SEQ ID NO: 1887055
cguauuacuucugugcuca

SEQ ID NO: 2445253 - RNA, 19 nt, Artificial Sequence
  Description of Artificial Sequence: Synthetic oligonucleotide
  Antisense strand to SEQ ID NO: 2445252
ugagcacagaaguaauacg

SEQ ID NO: 2445254 - RNA, 19 nt, Artificial Sequence
  Description of Artificial Sequence: Synthetic oligonucleotide
  Sense strand starting at position 2252 of SEQ ID NO: 1887055
guacgcaucucuucgucua

SEQ ID NO: 2445255 - RNA, 19 nt, Artificial Sequence
  Description of Artificial Sequence: Synthetic oligonucleotide
  Antisense strand to SEQ ID NO: 2445254
uagacgaagagaugcguac

SEQ ID NO: 2445256 - RNA, 19 nt, Artificial Sequence
  Description of Artificial Sequence: Synthetic oligonucleotide
  Sense strand starting at position 2253 of SEQ ID NO: 1887055
uacgcaucucuucgucuaa

SEQ ID NO: 2445257 - RNA, 19 nt, Artificial Sequence
  Description of Artificial Sequence: Synthetic oligonucleotide
  Antisense strand to SEQ ID NO: 2445256
uuagacgaagagaugcgua

SEQ ID NO: 2445258 - RNA, 19 nt, Artificial Sequence
  Description of Artificial Sequence: Synthetic oligonucleotide
  Sense strand starting at position 2254 of SEQ ID NO: 1887055
acgcaucucuucgucuaaa

SEQ ID NO: 2445259 - RNA, 19 nt, Artificial Sequence
  Description of Artificial Sequence: Synthetic oligonucleotide
  Antisense strand to SEQ ID NO: 2445258
uuuagacgaagagaugcgu

SEQ ID NO: 2445260 - RNA, 19 nt, Artificial Sequence
  Description of Artificial Sequence: Synthetic oligonucleotide
  Sense strand starting at position 2255 of SEQ ID NO: 1887055
cgcaucucuucgucuaaac

SEQ ID NO: 2445261 - RNA, 19 nt, Artificial Sequence
  Description of Artificial Sequence: Synthetic oligonucleotide
  Antisense strand to SEQ ID NO: 2445260
guuuagacgaagagaugcg

SEQ ID NO: 2445262 - RNA, 19 nt, Artificial Sequence
  Description of Artificial Sequence: Synthetic oligonucleotide
  Sense strand starting at position 2274 of SEQ ID NO: 1887055
cugcaaagugggugucaaa

SEQ ID NO: 2445263 - RNA, 19 nt, Artificial Sequence
  Description of Artificial Sequence: Synthetic oligonucleotide
  Antisense strand to SEQ ID NO: 2445262
uuugacacccacuuugcag

SEQ ID NO: 2445264 - RNA, 19 nt, Artificial Sequence
  Description of Artificial Sequence: Synthetic oligonucleotide
  Sense strand starting at position 2285 of SEQ ID NO: 1887055
gugucaaaccauugucuuc

SEQ ID NO: 2445265 - RNA, 19 nt, Artificial Sequence
  Description of Artificial Sequence: Synthetic oligonucleotide
  Antisense strand to SEQ ID NO: 2445264
gaagacaaugguuugacac

SEQ ID NO: 2445266 - RNA, 19 nt, Artificial Sequence
  Description of Artificial Sequence: Synthetic oligonucleotide
  Sense strand starting at position 2334 of SEQ ID NO: 1887055
cugcauagugguugucuga

SEQ ID NO: 2445267 - RNA, 19 nt, Artificial Sequence
  Description of Artificial Sequence: Synthetic oligonucleotide
  Antisense strand to SEQ ID NO: 2445266
ucagacaaccacuaugcag

SEQ ID NO: 2445268 - RNA, 19 nt, Artificial Sequence
  Description of Artificial Sequence: Synthetic oligonucleotide
  Sense strand starting at position 2341 of SEQ ID NO: 1887055
gugguugucugaugcugca

SEQ ID NO: 2445269 - RNA, 19 nt, Artificial Sequence
  Description of Artificial Sequence: Synthetic oligonucleotide
  Antisense strand to SEQ ID NO: 2445268
ugcagcaucagacaaccac

SEQ ID NO: 2445270 - RNA, 19 nt, Artificial Sequence
  Description of Artificial Sequence: Synthetic oligonucleotide
  Sense strand starting at position 2473 of SEQ ID NO: 1887055
cucaccugugcacgaaauu

SEQ ID NO: 2445271 - RNA, 19 nt, Artificial Sequence
  Description of Artificial Sequence: Synthetic oligonucleotide
  Antisense strand to SEQ ID NO: 2445270
aauuucgugcacaggugag

SEQ ID NO: 2445272 - RNA, 19 nt, Artificial Sequence
  Description of Artificial Sequence: Synthetic oligonucleotide
  Sense strand starting at position 2482 of SEQ ID NO: 1887055
gcacgaaauuguugcgaug

SEQ ID NO: 2445273 - RNA, 19 nt, Artificial Sequence
  Description of Artificial Sequence: Synthetic oligonucleotide
  Antisense strand to SEQ ID NO: 2445272
caucgcaacaauuucgugc

SEQ ID NO: 2445274 - RNA, 19 nt, Artificial Sequence
  Description of Artificial Sequence: Synthetic oligonucleotide
  Sense strand starting at position 2484 of SEQ ID NO: 1887055
acgaaauuguugcgaugaa

SEQ ID NO: 2445275 - RNA, 19 nt, Artificial Sequence
  Description of Artificial Sequence: Synthetic oligonucleotide
  Antisense strand to SEQ ID NO: 2445274
uucaucgcaacaauuucgu

SEQ ID NO: 2445276 - RNA, 19 nt, Artificial Sequence
  Description of Artificial Sequence: Synthetic oligonucleotide
  Sense strand starting at position 2485 of SEQ ID NO: 1887055
cgaaauuguugcgaugaag

SEQ ID NO: 2445277 - RNA, 19 nt, Artificial Sequence
  Description of Artificial Sequence: Synthetic oligonucleotide
  Antisense strand to SEQ ID NO: 2445276
cuucaucgcaacaauuucg

SEQ ID NO: 2445278 - RNA, 19 nt, Artificial Sequence
  Description of Artificial Sequence: Synthetic oligonucleotide
  Sense strand starting at position 2860 of SEQ ID NO: 1887055
ucccuuggccugugguaga

SEQ ID NO: 2445279 - RNA, 19 nt, Artificial Sequence
  Description of Artificial Sequence: Synthetic oligonucleotide
  Antisense strand to SEQ ID NO: 2445278
ucuaccacaggccaaggga

SEQ ID NO: 2445280 - RNA, 19 nt, Artificial Sequence
  Description of Artificial Sequence: Synthetic oligonucleotide
  Sense strand starting at position 2895 of SEQ ID NO: 1887055
ccaaguggaucugcuugau

SEQ ID NO: 2445281 - RNA, 19 nt, Artificial Sequence
  Description of Artificial Sequence: Synthetic oligonucleotide
  Antisense strand to SEQ ID NO: 2445280
aucaagcagauccacuugg

SEQ ID NO: 2445282 - RNA, 19 nt, Artificial Sequence
  Description of Artificial Sequence: Synthetic oligonucleotide
  Sense strand starting at position 2898 of SEQ ID NO: 1887055
aguggaucugcuugaugga

SEQ ID NO: 2445283 - RNA, 19 nt, Artificial Sequence
  Description of Artificial Sequence: Synthetic oligonucleotide
  Antisense strand to SEQ ID NO: 2445282
uccaucaagcagauccacu

SEQ ID NO: 2445284 - RNA, 19 nt, Artificial Sequence
  Description of Artificial Sequence: Synthetic oligonucleotide
  Sense strand starting at position 505 of SEQ ID NO: 1887056
cggucuuagggucaagauc

SEQ ID NO: 2445285 - RNA, 19 nt, Artificial Sequence
  Description of Artificial Sequence: Synthetic oligonucleotide
  Antisense strand to SEQ ID NO: 2445284
gaucuugacccuaagaccg

SEQ ID NO: 2445286 - RNA, 19 nt, Artificial Sequence
  Description of Artificial Sequence: Synthetic oligonucleotide
  Sense strand starting at position 929 of SEQ ID NO: 1887056
acgaggaugugucagggau

SEQ ID NO: 2445287 - RNA, 19 nt, Artificial Sequence
  Description of Artificial Sequence: Synthetic oligonucleotide
  Antisense strand to SEQ ID NO: 2445286
aucccugacacauccucgu

SEQ ID NO: 2445288 - RNA, 19 nt, Artificial Sequence
  Description of Artificial Sequence: Synthetic oligonucleotide
  Sense strand starting at position 933 of SEQ ID NO: 1887056
ggaugugucagggaugggu

SEQ ID NO: 2445289 - RNA, 19 nt, Artificial Sequence
  Description of Artificial Sequence: Synthetic oligonucleotide
  Antisense strand to SEQ ID NO: 2445288
acccaucccugacacaucc

SEQ ID NO: 2445290 - RNA, 19 nt, Artificial Sequence
  Description of Artificial Sequence: Synthetic oligonucleotide
  Sense strand starting at position 1111 of SEQ ID NO: 1887056
cgugcagucauguauccca

SEQ ID NO: 2445291 - RNA, 19 nt, Artificial Sequence
  Description of Artificial Sequence: Synthetic oligonucleotide
  Antisense strand to SEQ ID NO: 2445290
ugggauacaugacugcacg

SEQ ID NO: 2445292 - RNA, 19 nt, Artificial Sequence
  Description of Artificial Sequence: Synthetic oligonucleotide
  Sense strand starting at position 1114 of SEQ ID NO: 1887056
gcagucauguaucccacaa

SEQ ID NO: 2445293 - RNA, 19 nt, Artificial Sequence
  Description of Artificial Sequence: Synthetic oligonucleotide
  Antisense strand to SEQ ID NO: 2445292
uugugggauacaugacugc

SEQ ID NO: 2445294 - RNA, 19 nt, Artificial Sequence
  Description of Artificial Sequence: Synthetic oligonucleotide
  Sense strand starting at position 1116 of SEQ ID NO: 1887056
agucauguaucccacaaau

SEQ ID NO: 2445295 - RNA, 19 nt, Artificial Sequence
  Description of Artificial Sequence: Synthetic oligonucleotide
  Antisense strand to SEQ ID NO: 2445294
auuugugggauacaugacu

SEQ ID NO: 2445296 - RNA, 19 nt, Artificial Sequence
  Description of Artificial Sequence: Synthetic oligonucleotide
  Sense strand starting at position 1144 of SEQ ID NO: 1887056
cccacugauuccuugugaa

SEQ ID NO: 2445297 - RNA, 19 nt, Artificial Sequence
  Description of Artificial Sequence: Synthetic oligonucleotide
  Antisense strand to SEQ ID NO: 2445296
uucacaaggaaucaguggg

SEQ ID NO: 2445298 - RNA, 19 nt, Artificial Sequence
  Description of Artificial Sequence: Synthetic oligonucleotide
  Sense strand starting at position 1147 of SEQ ID NO: 1887056
acugauuccuugugaaagg

SEQ ID NO: 2445299 - RNA, 19 nt, Artificial Sequence
  Description of Artificial Sequence: Synthetic oligonucleotide
  Antisense strand to SEQ ID NO: 2445298
ccuuucacaaggaaucagu

SEQ ID NO: 2445300 - RNA, 19 nt, Artificial Sequence
  Description of Artificial Sequence: Synthetic oligonucleotide
  Sense strand starting at position 1148 of SEQ ID NO: 1887056
cugauuccuugugaaagga

SEQ ID NO: 2445301 - RNA, 19 nt, Artificial Sequence
  Description of Artificial Sequence: Synthetic oligonucleotide
  Antisense strand to SEQ ID NO: 2445300
uccuuucacaaggaaucag

SEQ ID NO: 2445302 - RNA, 19 nt, Artificial Sequence
  Description of Artificial Sequence: Synthetic oligonucleotide
  Sense strand starting at position 1157 of SEQ ID NO: 1887056
ugugaaaggaauugucauc

SEQ ID NO: 2445303 - RNA, 19 nt, Artificial Sequence
  Description of Artificial Sequence: Synthetic oligonucleotide
  Antisense strand to SEQ ID NO: 2445302
gaugacaauuccuuucaca

SEQ ID NO: 2445304 - RNA, 19 nt, Artificial Sequence
  Description of Artificial Sequence: Synthetic oligonucleotide
  Sense strand starting at position 1162 of SEQ ID NO: 1887056
aaggaauugucaucaggua

SEQ ID NO: 2445305 - RNA, 19 nt, Artificial Sequence
  Description of Artificial Sequence: Synthetic oligonucleotide
  Antisense strand to SEQ ID NO: 2445304
uaccugaugacaauuccuu

SEQ ID NO: 2445306 - RNA, 19 nt, Artificial Sequence
  Description of Artificial Sequence: Synthetic oligonucleotide
  Sense strand starting at position 1186 of SEQ ID NO: 1887056
caagaagaugcuuggucuu

SEQ ID NO: 2445307 - RNA, 19 nt, Artificial Sequence
  Description of Artificial Sequence: Synthetic oligonucleotide
  Antisense strand to SEQ ID NO: 2445306
aagaccaagcaucuucuug

SEQ ID NO: 2445308 - RNA, 19 nt, Artificial Sequence
  Description of Artificial Sequence: Synthetic oligonucleotide
  Sense strand starting at position 1331 of SEQ ID NO: 1887056
gucugucccgucugacaca

SEQ ID NO: 2445309 - RNA, 19 nt, Artificial Sequence
  Description of Artificial Sequence: Synthetic oligonucleotide
  Antisense strand to SEQ ID NO: 2445308
ugugucagacgggacagac

SEQ ID NO: 2445310 - RNA, 19 nt, Artificial Sequence
  Description of Artificial Sequence: Synthetic oligonucleotide
  Sense strand starting at position 2554 of SEQ ID NO: 1887056
gcucgaguucccugaggaa

SEQ ID NO: 2445311 - RNA, 19 nt, Artificial Sequence
  Description of Artificial Sequence: Synthetic oligonucleotide
  Antisense strand to SEQ ID NO: 2445310
uuccucagggaacucgagc

SEQ ID NO: 2445312 - RNA, 19 nt, Artificial Sequence
  Description of Artificial Sequence: Synthetic oligonucleotide
  Sense strand starting at position 3005 of SEQ ID NO: 1887056
gagaauucccuguggaagg

SEQ ID NO: 2445313 - RNA, 19 nt, Artificial Sequence
  Description of Artificial Sequence: Synthetic oligonucleotide
  Antisense strand to SEQ ID NO: 2445312
ccuuccacagggaauucuc

SEQ ID NO: 2445314 - RNA, 19 nt, Artificial Sequence
  Description of Artificial Sequence: Synthetic oligonucleotide
  Sense strand starting at position 3006 of SEQ ID NO: 1887056
agaauucccuguggaagga

SEQ ID NO: 2445315 - RNA, 19 nt, Artificial Sequence
  Description of Artificial Sequence: Synthetic oligonucleotide
  Antisense strand to SEQ ID NO: 2445314
uccuuccacagggaauucu

SEQ ID NO: 2445316 - RNA, 19 nt, Artificial Sequence
  Description of Artificial Sequence: Synthetic oligonucleotide
  Sense strand starting at position 3161 of SEQ ID NO: 1887056
agaggaaugaagcgugcau

SEQ ID NO: 2445317 - RNA, 19 nt, Artificial Sequence
  Description of Artificial Sequence: Synthetic oligonucleotide
  Antisense strand to SEQ ID NO: 2445316
augcacgcuucauuccucu

SEQ ID NO: 2445318 - RNA, 19 nt, Artificial Sequence
  Description of Artificial Sequence: Synthetic oligonucleotide
  Sense strand starting at position 3340 of SEQ ID NO: 1887056
cagugcucgcucuaagaga

SEQ ID NO: 2445319 - RNA, 19 nt, Artificial Sequence
  Description of Artificial Sequence: Synthetic oligonucleotide
  Antisense strand to SEQ ID NO: 2445318
ucucuuagagcgagcacug

SEQ ID NO: 2445320 - RNA, 19 nt, Artificial Sequence
  Description of Artificial Sequence: Synthetic oligonucleotide
  Sense strand starting at position 3353 of SEQ ID NO: 1887056
aagagauguucccggaaua

SEQ ID NO: 2445321 - RNA, 19 nt, Artificial Sequence
  Description of Artificial Sequence: Synthetic oligonucleotide
  Antisense strand to SEQ ID NO: 2445320
uauuccgggaacaucucuu

SEQ ID NO: 2445322 - RNA, 19 nt, Artificial Sequence
  Description of Artificial Sequence: Synthetic oligonucleotide
  Sense strand starting at position 3354 of SEQ ID NO: 1887056
agagauguucccggaauag

SEQ ID NO: 2445323 - RNA, 19 nt, Artificial Sequence
  Description of Artificial Sequence: Synthetic oligonucleotide
  Antisense strand to SEQ ID NO: 2445322
cuauuccgggaacaucucu

SEQ ID NO: 2445324 - RNA, 19 nt, Artificial Sequence
  Description of Artificial Sequence: Synthetic oligonucleotide
  Sense strand starting at position 3580 of SEQ ID NO: 1887056
cagccuuggccaggagaca

SEQ ID NO: 2445325 - RNA, 19 nt, Artificial Sequence
  Description of Artificial Sequence: Synthetic oligonucleotide
  Antisense strand to SEQ ID NO: 2445324
ugucuccuggccaaggcug

SEQ ID NO: 2445326 - RNA, 19 nt, Artificial Sequence
  Description of Artificial Sequence: Synthetic oligonucleotide
  Sense strand starting at position 3641 of SEQ ID NO: 1887056
uugagaagaugccauuguu

SEQ ID NO: 2445327 - RNA, 19 nt, Artificial Sequence
  Description of Artificial Sequence: Synthetic oligonucleotide
  Antisense strand to SEQ ID NO: 2445326
aacaauggcaucuucucaa

SEQ ID NO: 2445328 - RNA, 19 nt, Artificial Sequence
  Description of Artificial Sequence: Synthetic oligonucleotide
  Sense strand starting at position 3695 of SEQ ID NO: 1887056
gggucacuucuccaauuag

SEQ ID NO: 2445329 - RNA, 19 nt, Artificial Sequence
  Description of Artificial Sequence: Synthetic oligonucleotide
  Antisense strand to SEQ ID NO: 2445328
cuaauuggagaagugaccc

SEQ ID NO: 2445330 - RNA, 19 nt, Artificial Sequence
  Description of Artificial Sequence: Synthetic oligonucleotide
  Sense strand starting at position 3847 of SEQ ID NO: 1887056
gccagagauucaggcgaca

SEQ ID NO: 2445331 - RNA, 19 nt, Artificial Sequence
  Description of Artificial Sequence: Synthetic oligonucleotide
  Antisense strand to SEQ ID NO: 2445330
ugucgccugaaucucuggc

SEQ ID NO: 2445332 - RNA, 19 nt, Artificial Sequence
  Description of Artificial Sequence: Synthetic oligonucleotide
  Sense strand starting at position 260 of SEQ ID NO: 1887057
agggucuuaugcuucccua

SEQ ID NO: 2445333 - RNA, 19 nt, Artificial Sequence
  Description of Artificial Sequence: Synthetic oligonucleotide
  Antisense strand to SEQ ID NO: 2445332
uagggaagcauaagacccu

SEQ ID NO: 2445334 - RNA, 19 nt, Artificial Sequence
  Description of Artificial Sequence: Synthetic oligonucleotide
  Sense strand starting at position 554 of SEQ ID NO: 1887057
agggaugucuuuccuacaa

SEQ ID NO: 2445335 - RNA, 19 nt, Artificial Sequence
  Description of Artificial Sequence: Synthetic oligonucleotide
  Antisense strand to SEQ ID NO: 2445334
uuguaggaaagacaucccu

SEQ ID NO: 2445336 - RNA, 19 nt, Artificial Sequence
  Description of Artificial Sequence: Synthetic oligonucleotide
  Sense strand starting at position 661 of SEQ ID NO: 1887057
aggaauaucaaguguucug

SEQ ID NO: 2445337 - RNA, 19 nt, Artificial Sequence
  Description of Artificial Sequence: Synthetic oligonucleotide
  Antisense strand to SEQ ID NO: 2445336
cagaacacuugauauuccu

SEQ ID NO: 2445338 - RNA, 19 nt, Artificial Sequence
  Description of Artificial Sequence: Synthetic oligonucleotide
  Sense strand starting at position 686 of SEQ ID NO: 1887057
ccuagagugcccuagaguu

SEQ ID NO: 2445339 - RNA, 19 nt, Artificial Sequence
  Description of Artificial Sequence: Synthetic oligonucleotide
  Antisense strand to SEQ ID NO: 2445338
aacucuagggcacucuagg

SEQ ID NO: 2445340 - RNA, 19 nt, Artificial Sequence
  Description of Artificial Sequence: Synthetic oligonucleotide
  Sense strand starting at position 711 of SEQ ID NO: 1887057
cgaggccugagaugcauua

SEQ ID NO: 2445341 - RNA, 19 nt, Artificial Sequence
  Description of Artificial Sequence: Synthetic oligonucleotide
  Antisense strand to SEQ ID NO: 2445340
uaaugcaucucaggccucg

SEQ ID NO: 2445342 - RNA, 19 nt, Artificial Sequence
  Description of Artificial Sequence: Synthetic oligonucleotide
  Sense strand starting at position 713 of SEQ ID NO: 1887057
aggccugagaugcauuaca

SEQ ID NO: 2445343 - RNA, 19 nt, Artificial Sequence
  Description of Artificial Sequence: Synthetic oligonucleotide
  Antisense strand to SEQ ID NO: 2445342
uguaaugcaucucaggccu

SEQ ID NO: 2445344 - RNA, 19 nt, Artificial Sequence
  Description of Artificial Sequence: Synthetic oligonucleotide
  Sense strand starting at position 813 of SEQ ID NO: 1887057
ggagcucuccucuaagcaa

SEQ ID NO: 2445345 - RNA, 19 nt, Artificial Sequence
  Description of Artificial Sequence: Synthetic oligonucleotide
  Antisense strand to SEQ ID NO: 2445344
uugcuuagaggagagcucc

SEQ ID NO: 2445346 - RNA, 19 nt, Artificial Sequence
  Description of Artificial Sequence: Synthetic oligonucleotide
  Sense strand starting at position 888 of SEQ ID NO: 1887057
ugacaacauuaggcuauaa

SEQ ID NO: 2445347 - RNA, 19 nt, Artificial Sequence
  Description of Artificial Sequence: Synthetic oligonucleotide
  Antisense strand to SEQ ID NO: 2445346
uuauagccuaauguuguca

SEQ ID NO: 2445348 - RNA, 19 nt, Artificial Sequence
  Description of Artificial Sequence: Synthetic oligonucleotide
  Sense strand starting at position 947 of SEQ ID NO: 1887057
cuuaguggacuggguuauu

SEQ ID NO: 2445349 - RNA, 19 nt, Artificial Sequence
  Description of Artificial Sequence: Synthetic oligonucleotide
  Antisense strand to SEQ ID NO: 2445348
aauaacccaguccacuaag

SEQ ID NO: 2445350 - RNA, 19 nt, Artificial Sequence
  Description of Artificial Sequence: Synthetic oligonucleotide
  Sense strand starting at position 1037 of SEQ ID NO: 1887057
ugaucaaugugagcuuaua

SEQ ID NO: 2445351 - RNA, 19 nt, Artificial Sequence
  Description of Artificial Sequence: Synthetic oligonucleotide
  Antisense strand to SEQ ID NO: 2445350
uauaagcucacauugauca

SEQ ID NO: 2445352 - RNA, 19 nt, Artificial Sequence
  Description of Artificial Sequence: Synthetic oligonucleotide
  Sense strand starting at position 1142 of SEQ ID NO: 1887057
gccuguggccagggaugaa

SEQ ID NO: 2445353 - RNA, 19 nt, Artificial Sequence
  Description of Artificial Sequence: Synthetic oligonucleotide
  Antisense strand to SEQ ID NO: 2445352
uucaucccuggccacaggc

SEQ ID NO: 2445354 - RNA, 19 nt, Artificial Sequence
  Description of Artificial Sequence: Synthetic oligonucleotide
  Sense strand starting at position 1258 of SEQ ID NO: 1887057
auagccugucugcaugaua

SEQ ID NO: 2445355 - RNA, 19 nt, Artificial Sequence
  Description of Artificial Sequence: Synthetic oligonucleotide
  Antisense strand to SEQ ID NO: 2445354
uaucaugcagacaggcuau

SEQ ID NO: 2445356 - RNA, 19 nt, Artificial Sequence
  Description of Artificial Sequence: Synthetic oligonucleotide
  Sense strand starting at position 1338 of SEQ ID NO: 1887057
acugucauuccauauguca

SEQ ID NO: 2445357 - RNA, 19 nt, Artificial Sequence
  Description of Artificial Sequence: Synthetic oligonucleotide
  Antisense strand to SEQ ID NO: 2445356
ugacauauggaaugacagu

SEQ ID NO: 2445358 - RNA, 19 nt, Artificial Sequence
  Description of Artificial Sequence: Synthetic oligonucleotide
  Sense strand starting at position 1341 of SEQ ID NO: 1887057
gucauuccauaugucacaa

SEQ ID NO: 2445359 - RNA, 19 nt, Artificial Sequence
  Description of Artificial Sequence: Synthetic oligonucleotide
  Antisense strand to SEQ ID NO: 2445358
uugugacauauggaaugac

SEQ ID NO: 2445360 - RNA, 19 nt, Artificial Sequence
  Description of Artificial Sequence: Synthetic oligonucleotide
  Sense strand starting at position 1373 of SEQ ID NO: 1887057
ggcuaucaccgagaagagu

SEQ ID NO: 2445361 - RNA, 19 nt, Artificial Sequence
  Description of Artificial Sequence: Synthetic oligonucleotide
  Antisense strand to SEQ ID NO: 2445360
acucuucucggugauagcc

SEQ ID NO: 2445362 - RNA, 19 nt, Artificial Sequence
  Description of Artificial Sequence: Synthetic oligonucleotide
  Sense strand starting at position 1382 of SEQ ID NO: 1887057
cgagaagaguugucaguaa

SEQ ID NO: 2445363 - RNA, 19 nt, Artificial Sequence
  Description of Artificial Sequence: Synthetic oligonucleotide
  Antisense strand to SEQ ID NO: 2445362
uuacugacaacucuucucg

SEQ ID NO: 2445364 - RNA, 19 nt, Artificial Sequence
  Description of Artificial Sequence: Synthetic oligonucleotide
  Sense strand starting at position 1554 of SEQ ID NO: 1887057
ccaagaugcuucuuaugau

SEQ ID NO: 2445365 - RNA, 19 nt, Artificial Sequence
  Description of Artificial Sequence: Synthetic oligonucleotide
  Antisense strand to SEQ ID NO: 2445364
aucauaagaagcaucuugg

SEQ ID NO: 2445366 - RNA, 19 nt, Artificial Sequence
  Description of Artificial Sequence: Synthetic oligonucleotide
  Sense strand starting at position 1644 of SEQ ID NO: 1887057
gauuccaaucaugguuuga

SEQ ID NO: 2445367 - RNA, 19 nt, Artificial Sequence
  Description of Artificial Sequence: Synthetic oligonucleotide
  Antisense strand to SEQ ID NO: 2445366
ucaaaccaugauuggaauc

SEQ ID NO: 2445368 - RNA, 19 nt, Artificial Sequence
  Description of Artificial Sequence: Synthetic oligonucleotide
  Sense strand starting at position 1648 of SEQ ID NO: 1887057
ccaaucaugguuugaagcu

SEQ ID NO: 2445369 - RNA, 19 nt, Artificial Sequence
  Description of Artificial Sequence: Synthetic oligonucleotide
  Antisense strand to SEQ ID NO: 2445368
agcuucaaaccaugauugg

SEQ ID NO: 2445370 - RNA, 19 nt, Artificial Sequence
  Description of Artificial Sequence: Synthetic oligonucleotide
  Sense strand starting at position 1658 of SEQ ID NO: 1887057
uuugaagcuuuagcugaaa

SEQ ID NO: 2445371 - RNA, 19 nt, Artificial Sequence
  Description of Artificial Sequence: Synthetic oligonucleotide
  Antisense strand to SEQ ID NO: 2445370
uuucagcuaaagcuucaaa

SEQ ID NO: 2445372 - RNA, 19 nt, Artificial Sequence
  Description of Artificial Sequence: Synthetic oligonucleotide
  Sense strand starting at position 1761 of SEQ ID NO: 1887057
ggguaugccucuuuaggaa

SEQ ID NO: 2445373 - RNA, 19 nt, Artificial Sequence
  Description of Artificial Sequence: Synthetic oligonucleotide
  Antisense strand to SEQ ID NO: 2445372
uuccuaaagaggcauaccc

SEQ ID NO: 2445374 - RNA, 19 nt, Artificial Sequence
  Description of Artificial Sequence: Synthetic oligonucleotide
  Sense strand starting at position 1773 of SEQ ID NO: 1887057
uuaggaaacuguucugggu

SEQ ID NO: 2445375 - RNA, 19 nt, Artificial Sequence
  Description of Artificial Sequence: Synthetic oligonucleotide
  Antisense strand to SEQ ID NO: 2445374
acccagaacaguuuccuaa

SEQ ID NO: 2445376 - RNA, 19 nt, Artificial Sequence
  Description of Artificial Sequence: Synthetic oligonucleotide
  Sense strand starting at position 1777 of SEQ ID NO: 1887057
gaaacuguucuggguagag

SEQ ID NO: 2445377 - RNA, 19 nt, Artificial Sequence
  Description of Artificial Sequence: Synthetic oligonucleotide
  Antisense strand to SEQ ID NO: 2445376
cucuacccagaacaguuuc

SEQ ID NO: 2445378 - RNA, 19 nt, Artificial Sequence
  Description of Artificial Sequence: Synthetic oligonucleotide
  Sense strand starting at position 1779 of SEQ ID NO: 1887057
aacuguucuggguagagac

SEQ ID NO: 2445379 - RNA, 19 nt, Artificial Sequence
  Description of Artificial Sequence: Synthetic oligonucleotide
  Antisense strand to SEQ ID NO: 2445378
gucucuacccagaacaguu

SEQ ID NO: 2445380 - RNA, 19 nt, Artificial Sequence
  Description of Artificial Sequence: Synthetic oligonucleotide
  Sense strand starting at position 1856 of SEQ ID NO: 1887057
gguaauggaguuuauguaa

SEQ ID NO: 2445381 - RNA, 19 nt, Artificial Sequence
  Description of Artificial Sequence: Synthetic oligonucleotide
  Antisense strand to SEQ ID NO: 2445380
uuacauaaacuccauuacc

SEQ ID NO: 2445382 - RNA, 19 nt, Artificial Sequence
  Description of Artificial Sequence: Synthetic oligonucleotide
  Sense strand starting at position 1859 of SEQ ID NO: 1887057
aauggaguuuauguaacau

SEQ ID NO: 2445383 - RNA, 19 nt, Artificial Sequence
  Description of Artificial Sequence: Synthetic oligonucleotide
  Antisense strand to SEQ ID NO: 2445382
auguuacauaaacuccauu

SEQ ID NO: 2445384 - RNA, 19 nt, Artificial Sequence
  Description of Artificial Sequence: Synthetic oligonucleotide
  Sense strand starting at position 1882 of SEQ ID NO: 1887057
acucaaugacuuuggaacu

SEQ ID NO: 2445385 - RNA, 19 nt, Artificial Sequence
  Description of Artificial Sequence: Synthetic oligonucleotide
  Antisense strand to SEQ ID NO: 2445384
aguuccaaagucauugagu

SEQ ID NO: 2445386 - RNA, 19 nt, Artificial Sequence
  Description of Artificial Sequence: Synthetic oligonucleotide
  Sense strand starting at position 2271 of SEQ ID NO: 1887057
gaguucugccugcuguauu

SEQ ID NO: 2445387 - RNA, 19 nt, Artificial Sequence
  Description of Artificial Sequence: Synthetic oligonucleotide
  Antisense strand to SEQ ID NO: 2445386
aauacagcaggcagaacuc

SEQ ID NO: 2445388 - RNA, 19 nt, Artificial Sequence
  Description of Artificial Sequence: Synthetic oligonucleotide
  Sense strand starting at position 2401 of SEQ ID NO: 1887057
gguacaaagccucaguaaa

SEQ ID NO: 2445389 - RNA, 19 nt, Artificial Sequence
  Description of Artificial Sequence: Synthetic oligonucleotide
  Antisense strand to SEQ ID NO: 2445388
uuuacugaggcuuuguacc

SEQ ID NO: 2445390 - RNA, 19 nt, Artificial Sequence
  Description of Artificial Sequence: Synthetic oligonucleotide
  Sense strand starting at position 2482 of SEQ ID NO: 1887057
cguggucacaguugagaag

SEQ ID NO: 2445391 - RNA, 19 nt, Artificial Sequence
  Description of Artificial Sequence: Synthetic oligonucleotide
  Antisense strand to SEQ ID NO: 2445390
cuucucaacugugaccacg

SEQ ID NO: 2445392 - RNA, 19 nt, Artificial Sequence
  Description of Artificial Sequence: Synthetic oligonucleotide
  Sense strand starting at position 2543 of SEQ ID NO: 1887057
cacguuauugugccaggca

SEQ ID NO: 2445393 - RNA, 19 nt, Artificial Sequence
  Description of Artificial Sequence: Synthetic oligonucleotide
  Antisense strand to SEQ ID NO: 2445392
ugccuggcacaauaacgug

SEQ ID NO: 2445394 - RNA, 19 nt, Artificial Sequence
  Description of Artificial Sequence: Synthetic oligonucleotide
  Sense strand starting at position 2558 of SEQ ID NO: 1887057
ggcagagaucuugguguug

SEQ ID NO: 2445395 - RNA, 19 nt, Artificial Sequence
  Description of Artificial Sequence: Synthetic oligonucleotide
  Antisense strand to SEQ ID NO: 2445394
caacaccaagaucucugcc

SEQ ID NO: 2445396 - RNA, 19 nt, Artificial Sequence
  Description of Artificial Sequence: Synthetic oligonucleotide
  Sense strand starting at position 2736 of SEQ ID NO: 1887057
accugagagcaguauguga

SEQ ID NO: 2445397 - RNA, 19 nt, Artificial Sequence
  Description of Artificial Sequence: Synthetic oligonucleotide
  Antisense strand to SEQ ID NO: 2445396
ucacauacugcucucaggu

SEQ ID NO: 2445398 - RNA, 19 nt, Artificial Sequence
  Description of Artificial Sequence: Synthetic oligonucleotide
  Sense strand starting at position 2774 of SEQ ID NO: 1887057
guaguucugaggcaucuca

SEQ ID NO: 2445399 - RNA, 19 nt, Artificial Sequence
  Description of Artificial Sequence: Synthetic oligonucleotide
  Antisense strand to SEQ ID NO: 2445398
ugagaugccucagaacuac

SEQ ID NO: 2445400 - RNA, 19 nt, Artificial Sequence
  Description of Artificial Sequence: Synthetic oligonucleotide
  Sense strand starting at position 2807 of SEQ ID NO: 1887057
uguauagcacucugacaga

SEQ ID NO: 2445401 - RNA, 19 nt, Artificial Sequence
  Description of Artificial Sequence: Synthetic oligonucleotide
  Antisense strand to SEQ ID NO: 2445400
ucugucagagugcuauaca

SEQ ID NO: 2445402 - RNA, 19 nt, Artificial Sequence
  Description of Artificial Sequence: Synthetic oligonucleotide
  Sense strand starting at position 2846 of SEQ ID NO: 1887057
guuguaguccaggaugacu

SEQ ID NO: 2445403 - RNA, 19 nt, Artificial Sequence
  Description of Artificial Sequence: Synthetic oligonucleotide
  Antisense strand to SEQ ID NO: 2445402
agucauccuggacuacaac

SEQ ID NO: 2445404 - RNA, 19 nt, Artificial Sequence
  Description of Artificial Sequence: Synthetic oligonucleotide
  Sense strand starting at position 2851 of SEQ ID NO: 1887057
aguccaggaugacuuuaau

SEQ ID NO: 2445405 - RNA, 19 nt, Artificial Sequence
  Description of Artificial Sequence: Synthetic oligonucleotide
  Antisense strand to SEQ ID NO: 2445404
auuaaagucauccuggacu

SEQ ID NO: 2445406 - RNA, 19 nt, Artificial Sequence
  Description of Artificial Sequence: Synthetic oligonucleotide
  Sense strand starting at position 2926 of SEQ ID NO: 1887057
uuuagaccuuugccaaagu

SEQ ID NO: 2445407 - RNA, 19 nt, Artificial Sequence
  Description of Artificial Sequence: Synthetic oligonucleotide
  Antisense strand to SEQ ID NO: 2445406
acuuuggcaaaggucuaaa

SEQ ID NO: 2445408 - RNA, 19 nt, Artificial Sequence
  Description of Artificial Sequence: Synthetic oligonucleotide
  Sense strand starting at position 3042 of SEQ ID NO: 1887057
cuaucugucuauccaugua

SEQ ID NO: 2445409 - RNA, 19 nt, Artificial Sequence
  Description of Artificial Sequence: Synthetic oligonucleotide
  Antisense strand to SEQ ID NO: 2445408
uacauggauagacagauag

SEQ ID NO: 2445410 - RNA, 19 nt, Artificial Sequence
  Description of Artificial Sequence: Synthetic oligonucleotide
  Sense strand starting at position 3351 of SEQ ID NO: 1887057
aucagucauccguaugucu

SEQ ID NO: 2445411 - RNA, 19 nt, Artificial Sequence
  Description of Artificial Sequence: Synthetic oligonucleotide
  Antisense strand to SEQ ID NO: 2445410
agacauacggaugacugau

SEQ ID NO: 2445412 - RNA, 19 nt, Artificial Sequence
  Description of Artificial Sequence: Synthetic oligonucleotide
  Sense strand starting at position 617 of SEQ ID NO: 1887058
ucacauuccugagaaucgu

SEQ ID NO: 2445413 - RNA, 19 nt, Artificial Sequence
  Description of Artificial Sequence: Synthetic oligonucleotide
  Antisense strand to SEQ ID NO: 2445412
acgauucucaggaauguga

SEQ ID NO: 2445414 - RNA, 19 nt, Artificial Sequence
  Description of Artificial Sequence: Synthetic oligonucleotide
  Sense strand starting at position 632 of SEQ ID NO: 1887058
ucguaaauccucugaggug

SEQ ID NO: 2445415 - RNA, 19 nt, Artificial Sequence
  Description of Artificial Sequence: Synthetic oligonucleotide
  Antisense strand to SEQ ID NO: 2445414
caccucagaggauuuacga

SEQ ID NO: 2445416 - RNA, 19 nt, Artificial Sequence
  Description of Artificial Sequence: Synthetic oligonucleotide
  Sense strand starting at position 725 of SEQ ID NO: 1887058
ggcuuccucucccuuagaa

SEQ ID NO: 2445417 - RNA, 19 nt, Artificial Sequence
  Description of Artificial Sequence: Synthetic oligonucleotide
  Antisense strand to SEQ ID NO: 2445416
uucuaagggagaggaagcc

SEQ ID NO: 2445418 - RNA, 19 nt, Artificial Sequence
  Description of Artificial Sequence: Synthetic oligonucleotide
  Sense strand starting at position 2185 of SEQ ID NO: 1887058
ggaaguguuuguuaccgag

SEQ ID NO: 2445419 - RNA, 19 nt, Artificial Sequence
  Description of Artificial Sequence: Synthetic oligonucleotide
  Antisense strand to SEQ ID NO: 2445418
cucgguaacaaacacuucc

SEQ ID NO: 2445420 - RNA, 19 nt, Artificial Sequence
  Description of Artificial Sequence: Synthetic oligonucleotide
  Sense strand starting at position 2574 of SEQ ID NO: 1887058
ggugauccgcccugggauu

SEQ ID NO: 2445421 - RNA, 19 nt, Artificial Sequence
  Description of Artificial Sequence: Synthetic oligonucleotide
  Antisense strand to SEQ ID NO: 2445420
aaucccagggcggaucacc

SEQ ID NO: 2445422 - RNA, 19 nt, Artificial Sequence
  Description of Artificial Sequence: Synthetic oligonucleotide
  Sense strand starting at position 2575 of SEQ ID NO: 1887058
gugauccgcccugggauua

SEQ ID NO: 2445423 - RNA, 19 nt, Artificial Sequence
  Description of Artificial Sequence: Synthetic oligonucleotide
  Antisense strand to SEQ ID NO: 2445422
uaaucccagggcggaucac

SEQ ID NO: 2445424 - RNA, 19 nt, Artificial Sequence
  Description of Artificial Sequence: Synthetic oligonucleotide
  Sense strand starting at position 2715 of SEQ ID NO: 1887058
gccggucagucucgagaau

SEQ ID NO: 2445425 - RNA, 19 nt, Artificial Sequence
  Description of Artificial Sequence: Synthetic oligonucleotide
  Antisense strand to SEQ ID NO: 2445424
auucucgagacugaccggc

SEQ ID NO: 2445426 - RNA, 19 nt, Artificial Sequence
  Description of Artificial Sequence: Synthetic oligonucleotide
  Sense strand starting at position 2716 of SEQ ID NO: 1887058
ccggucagucucgagaauu

SEQ ID NO: 2445427 - RNA, 19 nt, Artificial Sequence
  Description of Artificial Sequence: Synthetic oligonucleotide
  Antisense strand to SEQ ID NO: 2445426
aauucucgagacugaccgg

SEQ ID NO: 2445428 - RNA, 19 nt, Artificial Sequence
  Description of Artificial Sequence: Synthetic oligonucleotide
  Sense strand starting at position 2759 of SEQ ID NO: 1887058
uacagaguuguuugaauaa

SEQ ID NO: 2445429 - RNA, 19 nt, Artificial Sequence
  Description of Artificial Sequence: Synthetic oligonucleotide
  Antisense strand to SEQ ID NO: 2445428
uuauucaaacaacucugua

SEQ ID NO: 2445430 - RNA, 19 nt, Artificial Sequence
  Description of Artificial Sequence: Synthetic oligonucleotide
  Sense strand starting at position 2992 of SEQ ID NO: 1887058
aggacagacucagguaauc

SEQ ID NO: 2445431 - RNA, 19 nt, Artificial Sequence
  Description of Artificial Sequence: Synthetic oligonucleotide
  Antisense strand to SEQ ID NO: 2445430
gauuaccugagucuguccu

SEQ ID NO: 2445432 - RNA, 19 nt, Artificial Sequence
  Description of Artificial Sequence: Synthetic oligonucleotide
  Sense strand starting at position 3206 of SEQ ID NO: 1887058
uuggcagugaaugacaauu

SEQ ID NO: 2445433 - RNA, 19 nt, Artificial Sequence
  Description of Artificial Sequence: Synthetic oligonucleotide
  Antisense strand to SEQ ID NO: 2445432
aauugucauucacugccaa

SEQ ID NO: 2445434 - RNA, 19 nt, Artificial Sequence
  Description of Artificial Sequence: Synthetic oligonucleotide
  Sense strand starting at position 192 of SEQ ID NO: 1887059
uauagugagcugugaugaa

SEQ ID NO: 2445435 - RNA, 19 nt, Artificial Sequence
  Description of Artificial Sequence: Synthetic oligonucleotide
  Antisense strand to SEQ ID NO: 2445434
uucaucacagcucacuaua

SEQ ID NO: 2445436 - RNA, 19 nt, Artificial Sequence
  Description of Artificial Sequence: Synthetic oligonucleotide
  Sense strand starting at position 196 of SEQ ID NO: 1887059
gugagcugugaugaagcua

SEQ ID NO: 2445437 - RNA, 19 nt, Artificial Sequence
  Description of Artificial Sequence: Synthetic oligonucleotide
  Antisense strand to SEQ ID NO: 2445436
uagcuucaucacagcucac

SEQ ID NO: 2445438 - RNA, 19 nt, Artificial Sequence
  Description of Artificial Sequence: Synthetic oligonucleotide
  Sense strand starting at position 486 of SEQ ID NO: 1887059
aggagaaucguuugaccug

SEQ ID NO: 2445439 - RNA, 19 nt, Artificial Sequence
  Description of Artificial Sequence: Synthetic oligonucleotide
  Antisense strand to SEQ ID NO: 2445438
caggucaaacgauucuccu

SEQ ID NO: 2445440 - RNA, 19 nt, Artificial Sequence
  Description of Artificial Sequence: Synthetic oligonucleotide
  Sense strand starting at position 491 of SEQ ID NO: 1887059
aaucguuugaccugggaug

SEQ ID NO: 2445441 - RNA, 19 nt, Artificial Sequence
  Description of Artificial Sequence: Synthetic oligonucleotide
  Antisense strand to SEQ ID NO: 2445440
caucccaggucaaacgauu

SEQ ID NO: 2445442 - RNA, 19 nt, Artificial Sequence
  Description of Artificial Sequence: Synthetic oligonucleotide
  Sense strand starting at position 652 of SEQ ID NO: 1887059
aaagccuuggcuggucaaa

SEQ ID NO: 2445443 - RNA, 19 nt, Artificial Sequence
  Description of Artificial Sequence: Synthetic oligonucleotide
  Antisense strand to SEQ ID NO: 2445442
uuugaccagccaaggcuuu

SEQ ID NO: 2445444 - RNA, 19 nt, Artificial Sequence
  Description of Artificial Sequence: Synthetic oligonucleotide
  Sense strand starting at position 705 of SEQ ID NO: 1887059
uccugagaaaggcauuguu

SEQ ID NO: 2445445 - RNA, 19 nt, Artificial Sequence
  Description of Artificial Sequence: Synthetic oligonucleotide
  Antisense strand to SEQ ID NO: 2445444
aacaaugccuuucucagga

SEQ ID NO: 2445446 - RNA, 19 nt, Artificial Sequence
  Description of Artificial Sequence: Synthetic oligonucleotide
  Sense strand starting at position 847 of SEQ ID NO: 1887059
gcacguuccuauccugaau

SEQ ID NO: 2445447 - RNA, 19 nt, Artificial Sequence
  Description of Artificial Sequence: Synthetic oligonucleotide
  Antisense strand to SEQ ID NO: 2445446
auucaggauaggaacgugc

SEQ ID NO: 2445448 - RNA, 19 nt, Artificial Sequence
  Description of Artificial Sequence: Synthetic oligonucleotide
  Sense strand starting at position 858 of SEQ ID NO: 1887059
uccugaaugcuguagacaa

SEQ ID NO: 2445449 - RNA, 19 nt, Artificial Sequence
  Description of Artificial Sequence: Synthetic oligonucleotide
  Antisense strand to SEQ ID NO: 2445448
uugucuacagcauucagga

SEQ ID NO: 2445450 - RNA, 19 nt, Artificial Sequence
  Description of Artificial Sequence: Synthetic oligonucleotide
  Sense strand starting at position 886 of SEQ ID NO: 1887059
aauggcaagcguuugugua

SEQ ID NO: 2445451 - RNA, 19 nt, Artificial Sequence
  Description of Artificial Sequence: Synthetic oligonucleotide
  Antisense strand to SEQ ID NO: 2445450
uacacaaacgcuugccauu

SEQ ID NO: 2445452 - RNA, 19 nt, Artificial Sequence
  Description of Artificial Sequence: Synthetic oligonucleotide
  Sense strand starting at position 898 of SEQ ID NO: 1887059
uuguguaccuaaccagaaa

SEQ ID NO: 2445453 - RNA, 19 nt, Artificial Sequence
  Description of Artificial Sequence: Synthetic oligonucleotide
  Antisense strand to SEQ ID NO: 2445452
uuucugguuagguacacaa

SEQ ID NO: 2445454 - RNA, 19 nt, Artificial Sequence
  Description of Artificial Sequence: Synthetic oligonucleotide
  Sense strand starting at position 944 of SEQ ID NO: 1887059
uuaugagaccacuguccua

SEQ ID NO: 2445455 - RNA, 19 nt, Artificial Sequence
  Description of Artificial Sequence: Synthetic oligonucleotide
  Antisense strand to SEQ ID NO: 2445454
uaggacaguggucucauaa

SEQ ID NO: 2445456 - RNA, 19 nt, Artificial Sequence
  Description of Artificial Sequence: Synthetic oligonucleotide
  Sense strand starting at position 1209 of SEQ ID NO: 1887059
uucugaggcuccuucuauu

SEQ ID NO: 2445457 - RNA, 19 nt, Artificial Sequence
  Description of Artificial Sequence: Synthetic oligonucleotide
  Antisense strand to SEQ ID NO: 2445456
aauagaaggagccucagaa

SEQ ID NO: 2445458 - RNA, 19 nt, Artificial Sequence
  Description of Artificial Sequence: Synthetic oligonucleotide
  Sense strand starting at position 1464 of SEQ ID NO: 1887059
gcaaguuccugcgcagaua

SEQ ID NO: 2445459 - RNA, 19 nt, Artificial Sequence
  Description of Artificial Sequence: Synthetic oligonucleotide
  Antisense strand to SEQ ID NO: 2445458
uaucugcgcaggaacuugc

SEQ ID NO: 2445460 - RNA, 19 nt, Artificial Sequence
  Description of Artificial Sequence: Synthetic oligonucleotide
  Sense strand starting at position 1467 of SEQ ID NO: 1887059
aguuccugcgcagauagau

SEQ ID NO: 2445461 - RNA, 19 nt, Artificial Sequence
  Description of Artificial Sequence: Synthetic oligonucleotide
  Antisense strand to SEQ ID NO: 2445460
aucuaucugcgcaggaacu

SEQ ID NO: 2445462 - RNA, 19 nt, Artificial Sequence
  Description of Artificial Sequence: Synthetic oligonucleotide
  Sense strand starting at position 1500 of SEQ ID NO: 1887059
ugccucaacuucucaggaa

SEQ ID NO: 2445463 - RNA, 19 nt, Artificial Sequence
  Description of Artificial Sequence: Synthetic oligonucleotide
  Antisense strand to SEQ ID NO: 2445462
uuccugagaaguugaggca

SEQ ID NO: 2445464 - RNA, 19 nt, Artificial Sequence
  Description of Artificial Sequence: Synthetic oligonucleotide
  Sense strand starting at position 1501 of SEQ ID NO: 1887059
gccucaacuucucaggaaa

SEQ ID NO: 2445465 - RNA, 19 nt, Artificial Sequence
  Description of Artificial Sequence: Synthetic oligonucleotide
  Antisense strand to SEQ ID NO: 2445464
uuuccugagaaguugaggc

SEQ ID NO: 2445466 - RNA, 19 nt, Artificial Sequence
  Description of Artificial Sequence: Synthetic oligonucleotide
  Sense strand starting at position 1562 of SEQ ID NO: 1887059
caucacugacccggaagau

SEQ ID NO: 2445467 - RNA, 19 nt, Artificial Sequence
  Description of Artificial Sequence: Synthetic oligonucleotide
  Antisense strand to SEQ ID NO: 2445466
aucuuccgggucagugaug

SEQ ID NO: 2445468 - RNA, 19 nt, Artificial Sequence
  Description of Artificial Sequence: Synthetic oligonucleotide
  Sense strand starting at position 1995 of SEQ ID NO: 1887059
acacucuccaggugaggaa

SEQ ID NO: 2445469 - RNA, 19 nt, Artificial Sequence
  Description of Artificial Sequence: Synthetic oligonucleotide
  Antisense strand to SEQ ID NO: 2445468
uuccucaccuggagagugu

SEQ ID NO: 2445470 - RNA, 19 nt, Artificial Sequence
  Description of Artificial Sequence: Synthetic oligonucleotide
  Sense strand starting at position 2247 of SEQ ID NO: 1887059
gccuucugccugcaggaaa

SEQ ID NO: 2445471 - RNA, 19 nt, Artificial Sequence
  Description of Artificial Sequence: Synthetic oligonucleotide
  Antisense strand to SEQ ID NO: 2445470
uuuccugcaggcagaaggc

SEQ ID NO: 2445472 - RNA, 19 nt, Artificial Sequence
  Description of Artificial Sequence: Synthetic oligonucleotide
  Sense strand starting at position 2325 of SEQ ID NO: 1887059
cguggcaagaacuauacua

SEQ ID NO: 2445473 - RNA, 19 nt, Artificial Sequence
  Description of Artificial Sequence: Synthetic oligonucleotide
  Antisense strand to SEQ ID NO: 2445472
uaguauaguucuugccacg

SEQ ID NO: 2445474 - RNA, 19 nt, Artificial Sequence
  Description of Artificial Sequence: Synthetic oligonucleotide
  Sense strand starting at position 2662 of SEQ ID NO: 1887059
cuugguuacucugccugua

SEQ ID NO: 2445475 - RNA, 19 nt, Artificial Sequence
  Description of Artificial Sequence: Synthetic oligonucleotide
  Antisense strand to SEQ ID NO: 2445474
uacaggcagaguaaccaag

SEQ ID NO: 2445476 - RNA, 19 nt, Artificial Sequence
  Description of Artificial Sequence: Synthetic oligonucleotide
  Sense strand starting at position 2664 of SEQ ID NO: 1887059
ugguuacucugccuguaaa

SEQ ID NO: 2445477 - RNA, 19 nt, Artificial Sequence
  Description of Artificial Sequence: Synthetic oligonucleotide
  Antisense strand to SEQ ID NO: 2445476
uuuacaggcagaguaacca

SEQ ID NO: 2445478 - RNA, 19 nt, Artificial Sequence
  Description of Artificial Sequence: Synthetic oligonucleotide
  Sense strand starting at position 2794 of SEQ ID NO: 1887059
ggcugcaaccugugagaaa

SEQ ID NO: 2445479 - RNA, 19 nt, Artificial Sequence
  Description of Artificial Sequence: Synthetic oligonucleotide
  Antisense strand to SEQ ID NO: 2445478
uuucucacagguugcagcc

SEQ ID NO: 2445480 - RNA, 19 nt, Artificial Sequence
  Description of Artificial Sequence: Synthetic oligonucleotide
  Sense strand starting at position 2854 of SEQ ID NO: 1887059
ccaccaauucucggccaua

SEQ ID NO: 2445481 - RNA, 19 nt, Artificial Sequence
  Description of Artificial Sequence: Synthetic oligonucleotide
  Antisense strand to SEQ ID NO: 2445480
uauggccgagaauuggugg

SEQ ID NO: 2445482 - RNA, 19 nt, Artificial Sequence
  Description of Artificial Sequence: Synthetic oligonucleotide
  Sense strand starting at position 2985 of SEQ ID NO: 1887059
ugugaagaccucuggaaug

SEQ ID NO: 2445483 - RNA, 19 nt, Artificial Sequence
  Description of Artificial Sequence: Synthetic oligonucleotide
  Antisense strand to SEQ ID NO: 2445482
cauuccagaggucuucaca

SEQ ID NO: 2445484 - RNA, 19 nt, Artificial Sequence
  Description of Artificial Sequence: Synthetic oligonucleotide
  Sense strand starting at position 2997 of SEQ ID NO: 1887059
uggaauguccuaggugguu

SEQ ID NO: 2445485 - RNA, 19 nt, Artificial Sequence
  Description of Artificial Sequence: Synthetic oligonucleotide
  Antisense strand to SEQ ID NO: 2445484
aaccaccuaggacauucca

SEQ ID NO: 2445486 - RNA, 19 nt, Artificial Sequence
  Description of Artificial Sequence: Synthetic oligonucleotide
  Sense strand starting at position 3009 of SEQ ID NO: 1887059
ggugguuucuggguucaaa

SEQ ID NO: 2445487 - RNA, 19 nt, Artificial Sequence
  Description of Artificial Sequence: Synthetic oligonucleotide
  Antisense strand to SEQ ID NO: 2445486
uuugaacccagaaaccacc

SEQ ID NO: 2445488 - RNA, 19 nt, Artificial Sequence
  Description of Artificial Sequence: Synthetic oligonucleotide
  Sense strand starting at position 3177 of SEQ ID NO: 1887059
gaaucagagacucguagag

SEQ ID NO: 2445489 - RNA, 19 nt, Artificial Sequence
  Description of Artificial Sequence: Synthetic oligonucleotide
  Antisense strand to SEQ ID NO: 2445488
cucuacgagucucugauuc

SEQ ID NO: 2445490 - RNA, 19 nt, Artificial Sequence
  Description of Artificial Sequence: Synthetic oligonucleotide
  Sense strand starting at position 3179 of SEQ ID NO: 1887059
aucagagacucguagagga

SEQ ID NO: 2445491 - RNA, 19 nt, Artificial Sequence
  Description of Artificial Sequence: Synthetic oligonucleotide
  Antisense strand to SEQ ID NO: 2445490
uccucuacgagucucugau

SEQ ID NO: 2445492 - RNA, 19 nt, Artificial Sequence
  Description of Artificial Sequence: Synthetic oligonucleotide
  Sense strand starting at position 3189 of SEQ ID NO: 1887059
cguagaggauucuccuuaa

SEQ ID NO: 2445493 - RNA, 19 nt, Artificial Sequence
  Description of Artificial Sequence: Synthetic oligonucleotide
  Antisense strand to SEQ ID NO: 2445492
uuaaggagaauccucuacg

SEQ ID NO: 2445494 - RNA, 19 nt, Artificial Sequence
  Description of Artificial Sequence: Synthetic oligonucleotide
  Sense strand starting at position 3359 of SEQ ID NO: 1887059
caggaaacgugucuccuga

SEQ ID NO: 2445495 - RNA, 19 nt, Artificial Sequence
  Description of Artificial Sequence: Synthetic oligonucleotide
  Antisense strand to SEQ ID NO: 2445494
ucaggagacacguuuccug

SEQ ID NO: 2445496 - RNA, 19 nt, Artificial Sequence
  Description of Artificial Sequence: Synthetic oligonucleotide
  Sense strand starting at position 3570 of SEQ ID NO: 1887059
augaccugacccuguguaa

SEQ ID NO: 2445497 - RNA, 19 nt, Artificial Sequence
  Description of Artificial Sequence: Synthetic oligonucleotide
  Antisense strand to SEQ ID NO: 2445496
uuacacagggucaggucau

SEQ ID NO: 2445498 - RNA, 19 nt, Artificial Sequence
  Description of Artificial Sequence: Synthetic oligonucleotide
  Sense strand starting at position 3573 of SEQ ID NO: 1887059
accugacccuguguaaauu

SEQ ID NO: 2445499 - RNA, 19 nt, Artificial Sequence
  Description of Artificial Sequence: Synthetic oligonucleotide
  Antisense strand to SEQ ID NO: 2445498
aauuuacacagggucaggu

SEQ ID NO: 2445500 - RNA, 19 nt, Artificial Sequence
  Description of Artificial Sequence: Synthetic oligonucleotide
  Sense strand starting at position 3574 of SEQ ID NO: 1887059
ccugacccuguguaaauua

SEQ ID NO: 2445501 - RNA, 19 nt, Artificial Sequence
  Description of Artificial Sequence: Synthetic oligonucleotide
  Antisense strand to SEQ ID NO: 2445500
uaauuuacacagggucagg

SEQ ID NO: 2445502 - RNA, 19 nt, Artificial Sequence
  Description of Artificial Sequence: Synthetic oligonucleotide
  Sense strand starting at position 3582 of SEQ ID NO: 1887059
uguguaaauuacucggcuu

SEQ ID NO: 2445503 - RNA, 19 nt, Artificial Sequence
  Description of Artificial Sequence: Synthetic oligonucleotide
  Antisense strand to SEQ ID NO: 2445502
aagccgaguaauuuacaca

SEQ ID NO: 2445504 - RNA, 19 nt, Artificial Sequence
  Description of Artificial Sequence: Synthetic oligonucleotide
  Sense strand starting at position 3583 of SEQ ID NO: 1887059
guguaaauuacucggcuuc

SEQ ID NO: 2445505 - RNA, 19 nt, Artificial Sequence
  Description of Artificial Sequence: Synthetic oligonucleotide
  Antisense strand to SEQ ID NO: 2445504
gaagccgaguaauuuacac

SEQ ID NO: 2445506 - RNA, 19 nt, Artificial Sequence
  Description of Artificial Sequence: Synthetic oligonucleotide
  Sense strand starting at position 3611 of SEQ ID NO: 1887059
gcucucuuaucuguaauag

SEQ ID NO: 2445507 - RNA, 19 nt, Artificial Sequence
  Description of Artificial Sequence: Synthetic oligonucleotide
  Antisense strand to SEQ ID NO: 2445506
cuauuacagauaagagagc

SEQ ID NO: 2445508 - RNA, 19 nt, Artificial Sequence
  Description of Artificial Sequence: Synthetic oligonucleotide
  Sense strand starting at position 3615 of SEQ ID NO: 1887059
ucuuaucuguaauaggaau

SEQ ID NO: 2445509 - RNA, 19 nt, Artificial Sequence
  Description of Artificial Sequence: Synthetic oligonucleotide
  Antisense strand to SEQ ID NO: 2445508
auuccuauuacagauaaga

SEQ ID NO: 2445510 - RNA, 19 nt, Artificial Sequence
  Description of Artificial Sequence: Synthetic oligonucleotide
  Sense strand starting at position 3651 of SEQ ID NO: 1887059
gggcaauguaaggaucgaa

SEQ ID NO: 2445511 - RNA, 19 nt, Artificial Sequence
  Description of Artificial Sequence: Synthetic oligonucleotide
  Antisense strand to SEQ ID NO: 2445510
uucgauccuuacauugccc

SEQ ID NO: 2445512 - RNA, 19 nt, Artificial Sequence
  Description of Artificial Sequence: Synthetic oligonucleotide
  Sense strand starting at position 3865 of SEQ ID NO: 1887059
gaggaagugugccugcuau

SEQ ID NO: 2445513 - RNA, 19 nt, Artificial Sequence
  Description of Artificial Sequence: Synthetic oligonucleotide
  Antisense strand to SEQ ID NO: 2445512
auagcaggcacacuuccuc

SEQ ID NO: 2445514 - RNA, 19 nt, Artificial Sequence
  Description of Artificial Sequence: Synthetic oligonucleotide
  Sense strand starting at position 132 of SEQ ID NO: 1887060
uuuggcuuccuuggguaaa

SEQ ID NO: 2445515 - RNA, 19 nt, Artificial Sequence
  Description of Artificial Sequence: Synthetic oligonucleotide
  Antisense strand to SEQ ID NO: 2445514
uuuacccaaggaagccaaa

SEQ ID NO: 2445516 - RNA, 19 nt, Artificial Sequence
  Description of Artificial Sequence: Synthetic oligonucleotide
  Sense strand starting at position 134 of SEQ ID NO: 1887060
uggcuuccuuggguaaauu

SEQ ID NO: 2445517 - RNA, 19 nt, Artificial Sequence
  Description of Artificial Sequence: Synthetic oligonucleotide
  Antisense strand to SEQ ID NO: 2445516
aauuuacccaaggaagcca

SEQ ID NO: 2445518 - RNA, 19 nt, Artificial Sequence
  Description of Artificial Sequence: Synthetic oligonucleotide
  Sense strand starting at position 135 of SEQ ID NO: 1887060
ggcuuccuuggguaaauua

SEQ ID NO: 2445519 - RNA, 19 nt, Artificial Sequence
  Description of Artificial Sequence: Synthetic oligonucleotide
  Antisense strand to SEQ ID NO: 2445518
uaauuuacccaaggaagcc

SEQ ID NO: 2445520 - RNA, 19 nt, Artificial Sequence
  Description of Artificial Sequence: Synthetic oligonucleotide
  Sense strand starting at position 215 of SEQ ID NO: 1887060
ggcgcuaugacuuaaguau

SEQ ID NO: 2445521 - RNA, 19 nt, Artificial Sequence
  Description of Artificial Sequence: Synthetic oligonucleotide
  Antisense strand to SEQ ID NO: 2445520
auacuuaagucauagcgcc

SEQ ID NO: 2445522 - RNA, 19 nt, Artificial Sequence
  Description of Artificial Sequence: Synthetic oligonucleotide
  Sense strand starting at position 221 of SEQ ID NO: 1887060
augacuuaaguaugcauca

SEQ ID NO: 2445523 - RNA, 19 nt, Artificial Sequence
  Description of Artificial Sequence: Synthetic oligonucleotide
  Antisense strand to SEQ ID NO: 2445522
ugaugcauacuuaagucau

SEQ ID NO: 2445524 - RNA, 19 nt, Artificial Sequence
  Description of Artificial Sequence: Synthetic oligonucleotide
  Sense strand starting at position 222 of SEQ ID NO: 1887060
ugacuuaaguaugcaucaa

SEQ ID NO: 2445525 - RNA, 19 nt, Artificial Sequence
  Description of Artificial Sequence: Synthetic oligonucleotide
  Antisense strand to SEQ ID NO: 2445524
uugaugcauacuuaaguca

SEQ ID NO: 2445526 - RNA, 19 nt, Artificial Sequence
  Description of Artificial Sequence: Synthetic oligonucleotide
  Sense strand starting at position 230 of SEQ ID NO: 1887060
guaugcaucaagugguaaa

SEQ ID NO: 2445527 - RNA, 19 nt, Artificial Sequence
  Description of Artificial Sequence: Synthetic oligonucleotide
  Antisense strand to SEQ ID NO: 2445526
uuuaccacuugaugcauac

SEQ ID NO: 2445528 - RNA, 19 nt, Artificial Sequence
  Description of Artificial Sequence: Synthetic oligonucleotide
  Sense strand starting at position 420 of SEQ ID NO: 1887060
gguugauggccaggagugu

SEQ ID NO: 2445529 - RNA, 19 nt, Artificial Sequence
  Description of Artificial Sequence: Synthetic oligonucleotide
  Antisense strand to SEQ ID NO: 2445528
acacuccuggccaucaacc

SEQ ID NO: 2445530 - RNA, 19 nt, Artificial Sequence
  Description of Artificial Sequence: Synthetic oligonucleotide
  Sense strand starting at position 1042 of SEQ ID NO: 1887060
ggcugauuccauuacucuu

SEQ ID NO: 2445531 - RNA, 19 nt, Artificial Sequence
  Description of Artificial Sequence: Synthetic oligonucleotide
  Antisense strand to SEQ ID NO: 2445530
aagaguaauggaaucagcc

SEQ ID NO: 2445532 - RNA, 19 nt, Artificial Sequence
  Description of Artificial Sequence: Synthetic oligonucleotide
  Sense strand starting at position 1108 of SEQ ID NO: 1887060
uugauuagcucagcaccaa

SEQ ID NO: 2445533 - RNA, 19 nt, Artificial Sequence
  Description of Artificial Sequence: Synthetic oligonucleotide
  Antisense strand to SEQ ID NO: 2445532
uuggugcugagcuaaucaa

SEQ ID NO: 2445534 - RNA, 19 nt, Artificial Sequence
  Description of Artificial Sequence: Synthetic oligonucleotide
  Sense strand starting at position 1188 of SEQ ID NO: 1887060
ugucuuacagauuaggcaa

SEQ ID NO: 2445535 - RNA, 19 nt, Artificial Sequence
  Description of Artificial Sequence: Synthetic oligonucleotide
  Antisense strand to SEQ ID NO: 2445534
uugccuaaucuguaagaca

SEQ ID NO: 2445536 - RNA, 19 nt, Artificial Sequence
  Description of Artificial Sequence: Synthetic oligonucleotide
  Sense strand starting at position 1281 of SEQ ID NO: 1887060
ggugaugcucaauaaauac

SEQ ID NO: 2445537 - RNA, 19 nt, Artificial Sequence
  Description of Artificial Sequence: Synthetic oligonucleotide
  Antisense strand to SEQ ID NO: 2445536
guauuuauugagcaucacc

SEQ ID NO: 2445538 - RNA, 19 nt, Artificial Sequence
  Description of Artificial Sequence: Synthetic oligonucleotide
  Sense strand starting at position 1352 of SEQ ID NO: 1887060
agaaucagaugcuugguua

SEQ ID NO: 2445539 - RNA, 19 nt, Artificial Sequence
  Description of Artificial Sequence: Synthetic oligonucleotide
  Antisense strand to SEQ ID NO: 2445538
uaaccaagcaucugauucu

SEQ ID NO: 2445540 - RNA, 19 nt, Artificial Sequence
  Description of Artificial Sequence: Synthetic oligonucleotide
  Sense strand starting at position 1353 of SEQ ID NO: 1887060
gaaucagaugcuugguuau

SEQ ID NO: 2445541 - RNA, 19 nt, Artificial Sequence
  Description of Artificial Sequence: Synthetic oligonucleotide
  Antisense strand to SEQ ID NO: 2445540
auaaccaagcaucugauuc

SEQ ID NO: 2445542 - RNA, 19 nt, Artificial Sequence
  Description of Artificial Sequence: Synthetic oligonucleotide
  Sense strand starting at position 1420 of SEQ ID NO: 1887060
agguguguuguguucuauc

SEQ ID NO: 2445543 - RNA, 19 nt, Artificial Sequence
  Description of Artificial Sequence: Synthetic oligonucleotide
  Antisense strand to SEQ ID NO: 2445542
gauagaacacaacacaccu

SEQ ID NO: 2445544 - RNA, 19 nt, Artificial Sequence
  Description of Artificial Sequence: Synthetic oligonucleotide
  Sense strand starting at position 1422 of SEQ ID NO: 1887060
guguguuguguucuauccu

SEQ ID NO: 2445545 - RNA, 19 nt, Artificial Sequence
  Description of Artificial Sequence: Synthetic oligonucleotide
  Antisense strand to SEQ ID NO: 2445544
aggauagaacacaacacac

SEQ ID NO: 2445546 - RNA, 19 nt, Artificial Sequence
  Description of Artificial Sequence: Synthetic oligonucleotide
  Sense strand starting at position 1428 of SEQ ID NO: 1887060
uguguucuauccuuuaauu

SEQ ID NO: 2445547 - RNA, 19 nt, Artificial Sequence
  Description of Artificial Sequence: Synthetic oligonucleotide
  Antisense strand to SEQ ID NO: 2445546
aauuaaaggauagaacaca

SEQ ID NO: 2445548 - RNA, 19 nt, Artificial Sequence
  Description of Artificial Sequence: Synthetic oligonucleotide
  Sense strand starting at position 1439 of SEQ ID NO: 1887060
cuuuaauuggaagagcuuu

SEQ ID NO: 2445549 - RNA, 19 nt, Artificial Sequence
  Description of Artificial Sequence: Synthetic oligonucleotide
  Antisense strand to SEQ ID NO: 2445548
aaagcucuuccaauuaaag

SEQ ID NO: 2445550 - RNA, 19 nt, Artificial Sequence
  Description of Artificial Sequence: Synthetic oligonucleotide
  Sense strand starting at position 1694 of SEQ ID NO: 1887060
cagacaucgccgcaucaca

SEQ ID NO: 2445551 - RNA, 19 nt, Artificial Sequence
  Description of Artificial Sequence: Synthetic oligonucleotide
  Antisense strand to SEQ ID NO: 2445550
ugugaugcggcgaugucug

SEQ ID NO: 2445552 - RNA, 19 nt, Artificial Sequence
  Description of Artificial Sequence: Synthetic oligonucleotide
  Sense strand starting at position 1703 of SEQ ID NO: 1887060
ccgcaucacaucugugaag

SEQ ID NO: 2445553 - RNA, 19 nt, Artificial Sequence
  Description of Artificial Sequence: Synthetic oligonucleotide
  Antisense strand to SEQ ID NO: 2445552
cuucacagaugugaugcgg

SEQ ID NO: 2445554 - RNA, 19 nt, Artificial Sequence
  Description of Artificial Sequence: Synthetic oligonucleotide
  Sense strand starting at position 1834 of SEQ ID NO: 1887060
cuuccuagaccgugaauuc

SEQ ID NO: 2445555 - RNA, 19 nt, Artificial Sequence
  Description of Artificial Sequence: Synthetic oligonucleotide
  Antisense strand to SEQ ID NO: 2445554
gaauucacggucuaggaag

SEQ ID NO: 2445556 - RNA, 19 nt, Artificial Sequence
  Description of Artificial Sequence: Synthetic oligonucleotide
  Sense strand starting at position 1850 of SEQ ID NO: 1887060
uuccuuaagggccaagauu

SEQ ID NO: 2445557 - RNA, 19 nt, Artificial Sequence
  Description of Artificial Sequence: Synthetic oligonucleotide
  Antisense strand to SEQ ID NO: 2445556
aaucuuggcccuuaaggaa

SEQ ID NO: 2445558 - RNA, 19 nt, Artificial Sequence
  Description of Artificial Sequence: Synthetic oligonucleotide
  Sense strand starting at position 1887 of SEQ ID NO: 1887060
caguguucggccuauauug

SEQ ID NO: 2445559 - RNA, 19 nt, Artificial Sequence
  Description of Artificial Sequence: Synthetic oligonucleotide
  Antisense strand to SEQ ID NO: 2445558
caauauaggccgaacacug

SEQ ID NO: 2445560 - RNA, 19 nt, Artificial Sequence
  Description of Artificial Sequence: Synthetic oligonucleotide
  Sense strand starting at position 1889 of SEQ ID NO: 1887060
guguucggccuauauugga

SEQ ID NO: 2445561 - RNA, 19 nt, Artificial Sequence
  Description of Artificial Sequence: Synthetic oligonucleotide
  Antisense strand to SEQ ID NO: 2445560
uccaauauaggccgaacac

SEQ ID NO: 2445562 - RNA, 19 nt, Artificial Sequence
  Description of Artificial Sequence: Synthetic oligonucleotide
  Sense strand starting at position 1893 of SEQ ID NO: 1887060
ucggccuauauuggagaau

SEQ ID NO: 2445563 - RNA, 19 nt, Artificial Sequence
  Description of Artificial Sequence: Synthetic oligonucleotide
  Antisense strand to SEQ ID NO: 2445562
auucuccaauauaggccga

SEQ ID NO: 2445564 - RNA, 19 nt, Artificial Sequence
  Description of Artificial Sequence: Synthetic oligonucleotide
  Sense strand starting at position 1906 of SEQ ID NO: 1887060
gagaauccgguccguacaa

SEQ ID NO: 2445565 - RNA, 19 nt, Artificial Sequence
  Description of Artificial Sequence: Synthetic oligonucleotide
  Antisense strand to SEQ ID NO: 2445564
uuguacggaccggauucuc

SEQ ID NO: 2445566 - RNA, 19 nt, Artificial Sequence
  Description of Artificial Sequence: Synthetic oligonucleotide
  Sense strand starting at position 1990 of SEQ ID NO: 1887060
cggaccggauucucaaaua

SEQ ID NO: 2445567 - RNA, 19 nt, Artificial Sequence
  Description of Artificial Sequence: Synthetic oligonucleotide
  Antisense strand to SEQ ID NO: 2445566
uauuugagaauccgguccg

SEQ ID NO: 2445568 - RNA, 19 nt, Artificial Sequence
  Description of Artificial Sequence: Synthetic oligonucleotide
  Sense strand starting at position 2031 of SEQ ID NO: 1887060
uggagugcuucauucugga

SEQ ID NO: 2445569 - RNA, 19 nt, Artificial Sequence
  Description of Artificial Sequence: Synthetic oligonucleotide
  Antisense strand to SEQ ID NO: 2445568
uccagaaugaagcacucca

SEQ ID NO: 2445570 - RNA, 19 nt, Artificial Sequence
  Description of Artificial Sequence: Synthetic oligonucleotide
  Sense strand starting at position 3226 of SEQ ID NO: 1887060
gauuguaagccacacauga

SEQ ID NO: 2445571 - RNA, 19 nt, Artificial Sequence
  Description of Artificial Sequence: Synthetic oligonucleotide
  Antisense strand to SEQ ID NO: 2445570
ucauguguggcuuacaauc

SEQ ID NO: 2445572 - RNA, 19 nt, Artificial Sequence
  Description of Artificial Sequence: Synthetic oligonucleotide
  Sense strand starting at position 3244 of SEQ ID NO: 1887060
aguuauggcuuguuuagaa

SEQ ID NO: 2445573 - RNA, 19 nt, Artificial Sequence
  Description of Artificial Sequence: Synthetic oligonucleotide
  Antisense strand to SEQ ID NO: 2445572
uucuaaacaagccauaacu

SEQ ID NO: 2445574 - RNA, 19 nt, Artificial Sequence
  Description of Artificial Sequence: Synthetic oligonucleotide
  Sense strand starting at position 3366 of SEQ ID NO: 1887060
ucagacacaugagagaaau

SEQ ID NO: 2445575 - RNA, 19 nt, Artificial Sequence
  Description of Artificial Sequence: Synthetic oligonucleotide
  Antisense strand to SEQ ID NO: 2445574
auuucucucaugugucuga

SEQ ID NO: 2445576 - RNA, 19 nt, Artificial Sequence
  Description of Artificial Sequence: Synthetic oligonucleotide
  Sense strand starting at position 3379 of SEQ ID NO: 1887060
agaaauuagcauuagucua

SEQ ID NO: 2445577 - RNA, 19 nt, Artificial Sequence
  Description of Artificial Sequence: Synthetic oligonucleotide
  Antisense strand to SEQ ID NO: 2445576
uagacuaaugcuaauuucu

SEQ ID NO: 2445578 - RNA, 19 nt, Artificial Sequence
  Description of Artificial Sequence: Synthetic oligonucleotide
  Sense strand starting at position 3471 of SEQ ID NO: 1887060
acacgaaaugcuuguguaa

SEQ ID NO: 2445579 - RNA, 19 nt, Artificial Sequence
  Description of Artificial Sequence: Synthetic oligonucleotide
  Antisense strand to SEQ ID NO: 2445578
uuacacaagcauuucgugu

SEQ ID NO: 2445580 - RNA, 19 nt, Artificial Sequence
  Description of Artificial Sequence: Synthetic oligonucleotide
  Sense strand starting at position 3647 of SEQ ID NO: 1887060
ggaagagacucucuuuccu

SEQ ID NO: 2445581 - RNA, 19 nt, Artificial Sequence
  Description of Artificial Sequence: Synthetic oligonucleotide
  Antisense strand to SEQ ID NO: 2445580
aggaaagagagucucuucc

SEQ ID NO: 2445582 - RNA, 19 nt, Artificial Sequence
  Description of Artificial Sequence: Synthetic oligonucleotide
  Sense strand starting at position 3663 of SEQ ID NO: 1887060
ccuugcuuucguuccuuua

SEQ ID NO: 2445583 - RNA, 19 nt, Artificial Sequence
  Description of Artificial Sequence: Synthetic oligonucleotide
  Antisense strand to SEQ ID NO: 2445582
uaaaggaacgaaagcaagg

SEQ ID NO: 2445584 - RNA, 19 nt, Artificial Sequence
  Description of Artificial Sequence: Synthetic oligonucleotide
  Sense strand starting at position 3667 of SEQ ID NO: 1887060
gcuuucguuccuuuacuuu

SEQ ID NO: 2445585 - RNA, 19 nt, Artificial Sequence
  Description of Artificial Sequence: Synthetic oligonucleotide
  Antisense strand to SEQ ID NO: 2445584
aaaguaaaggaacgaaagc

SEQ ID NO: 2445586 - RNA, 19 nt, Artificial Sequence
  Description of Artificial Sequence: Synthetic oligonucleotide
  Sense strand starting at position 3715 of SEQ ID NO: 1887060
ccagaaggguugcuagaga

SEQ ID NO: 2445587 - RNA, 19 nt, Artificial Sequence
  Description of Artificial Sequence: Synthetic oligonucleotide
  Antisense strand to SEQ ID NO: 2445586
ucucuagcaacccuucugg

SEQ ID NO: 2445588 - RNA, 19 nt, Artificial Sequence
  Description of Artificial Sequence: Synthetic oligonucleotide
  Sense strand starting at position 3902 of SEQ ID NO: 1887060
cuucuaguaugucuuuaua

SEQ ID NO: 2445589 - RNA, 19 nt, Artificial Sequence
  Description of Artificial Sequence: Synthetic oligonucleotide
  Antisense strand to SEQ ID NO: 2445588
uauaaagacauacuagaag

SEQ ID NO: 2445590 - RNA, 19 nt, Artificial Sequence
  Description of Artificial Sequence: Synthetic oligonucleotide
  Sense strand starting at position 3924 of SEQ ID NO: 1887060
ggaagauugggucagcuca

SEQ ID NO: 2445591 - RNA, 19 nt, Artificial Sequence
  Description of Artificial Sequence: Synthetic oligonucleotide
  Antisense strand to SEQ ID NO: 2445590
ugagcugacccaaucuucc

SEQ ID NO: 2445592 - RNA, 19 nt, Artificial Sequence
  Description of Artificial Sequence: Synthetic oligonucleotide
  Sense strand starting at position 3932 of SEQ ID NO: 1887060
gggucagcucagugacuuu

SEQ ID NO: 2445593 - RNA, 19 nt, Artificial Sequence
  Description of Artificial Sequence: Synthetic oligonucleotide
  Antisense strand to SEQ ID NO: 2445592
aaagucacugagcugaccc

SEQ ID NO: 2445594 - RNA, 19 nt, Artificial Sequence
  Description of Artificial Sequence: Synthetic oligonucleotide
  Sense strand starting at position 11 of SEQ ID NO: 1887061
cuguucugacucuagaaca

SEQ ID NO: 2445595 - RNA, 19 nt, Artificial Sequence
  Description of Artificial Sequence: Synthetic oligonucleotide
  Antisense strand to SEQ ID NO: 2445594
uguucuagagucagaacag

SEQ ID NO: 2445596 - RNA, 19 nt, Artificial Sequence
  Description of Artificial Sequence: Synthetic oligonucleotide
  Sense strand starting at position 104 of SEQ ID NO: 1887061
ugugguaguacugauaaca

SEQ ID NO: 2445597 - RNA, 19 nt, Artificial Sequence
  Description of Artificial Sequence: Synthetic oligonucleotide
  Antisense strand to SEQ ID NO: 2445596
uguuaucaguacuaccaca

SEQ ID NO: 2445598 - RNA, 19 nt, Artificial Sequence
  Description of Artificial Sequence: Synthetic oligonucleotide
  Sense strand starting at position 143 of SEQ ID NO: 1887061
cagucuuacguauaugaag

SEQ ID NO: 2445599 - RNA, 19 nt, Artificial Sequence
  Description of Artificial Sequence: Synthetic oligonucleotide
  Antisense strand to SEQ ID NO: 2445598
cuucauauacguaagacug

SEQ ID NO: 2445600 - RNA, 19 nt, Artificial Sequence
  Description of Artificial Sequence: Synthetic oligonucleotide
  Sense strand starting at position 457 of SEQ ID NO: 1887061
agcugaucaugaucuugua

SEQ ID NO: 2445601 - RNA, 19 nt, Artificial Sequence
  Description of Artificial Sequence: Synthetic oligonucleotide
  Antisense strand to SEQ ID NO: 2445600
uacaagaucaugaucagcu

SEQ ID NO: 2445602 - RNA, 19 nt, Artificial Sequence
  Description of Artificial Sequence: Synthetic oligonucleotide
  Sense strand starting at position 481 of SEQ ID NO: 1887061
uuaugacagcacuaaggua

SEQ ID NO: 2445603 - RNA, 19 nt, Artificial Sequence
  Description of Artificial Sequence: Synthetic oligonucleotide
  Antisense strand to SEQ ID NO: 2445602
uaccuuagugcugucauaa

SEQ ID NO: 2445604 - RNA, 19 nt, Artificial Sequence
  Description of Artificial Sequence: Synthetic oligonucleotide
  Sense strand starting at position 860 of SEQ ID NO: 1887061
agaaguaucucucuggauu

SEQ ID NO: 2445605 - RNA, 19 nt, Artificial Sequence
  Description of Artificial Sequence: Synthetic oligonucleotide
  Antisense strand to SEQ ID NO: 2445604
aauccagagagauacuucu

SEQ ID NO: 2445606 - RNA, 19 nt, Artificial Sequence
  Description of Artificial Sequence: Synthetic oligonucleotide
  Sense strand starting at position 861 of SEQ ID NO: 1887061
gaaguaucucucuggauuc

SEQ ID NO: 2445607 - RNA, 19 nt, Artificial Sequence
  Description of Artificial Sequence: Synthetic oligonucleotide
  Antisense strand to SEQ ID NO: 2445606
gaauccagagagauacuuc

SEQ ID NO: 2445608 - RNA, 19 nt, Artificial Sequence
  Description of Artificial Sequence: Synthetic oligonucleotide
  Sense strand starting at position 886 of SEQ ID NO: 1887061
cagaaaugucaaugaaugu

SEQ ID NO: 2445609 - RNA, 19 nt, Artificial Sequence
  Description of Artificial Sequence: Synthetic oligonucleotide
  Antisense strand to SEQ ID NO: 2445608
acauucauugacauuucug

SEQ ID NO: 2445610 - RNA, 19 nt, Artificial Sequence
  Description of Artificial Sequence: Synthetic oligonucleotide
  Sense strand starting at position 954 of SEQ ID NO: 1887061
cagcuugugccuguaaucu

SEQ ID NO: 2445611 - RNA, 19 nt, Artificial Sequence
  Description of Artificial Sequence: Synthetic oligonucleotide
  Antisense strand to SEQ ID NO: 2445610
agauuacaggcacaagcug

SEQ ID NO: 2445612 - RNA, 19 nt, Artificial Sequence
  Description of Artificial Sequence: Synthetic oligonucleotide
  Sense strand starting at position 1093 of SEQ ID NO: 1887061
cugacuugauaguuuagga

SEQ ID NO: 2445613 - RNA, 19 nt, Artificial Sequence
  Description of Artificial Sequence: Synthetic oligonucleotide
  Antisense strand to SEQ ID NO: 2445612
uccuaaacuaucaagucag

SEQ ID NO: 2445614 - RNA, 19 nt, Artificial Sequence
  Description of Artificial Sequence: Synthetic oligonucleotide
  Sense strand starting at position 1150 of SEQ ID NO: 1887061
aaauguuugguacagguga

SEQ ID NO: 2445615 - RNA, 19 nt, Artificial Sequence
  Description of Artificial Sequence: Synthetic oligonucleotide
  Antisense strand to SEQ ID NO: 2445614
ucaccuguaccaaacauuu

SEQ ID NO: 2445616 - RNA, 19 nt, Artificial Sequence
  Description of Artificial Sequence: Synthetic oligonucleotide
  Sense strand starting at position 1158 of SEQ ID NO: 1887061
gguacaggugacuguaaga

SEQ ID NO: 2445617 - RNA, 19 nt, Artificial Sequence
  Description of Artificial Sequence: Synthetic oligonucleotide
  Antisense strand to SEQ ID NO: 2445616
ucuuacagucaccuguacc

SEQ ID NO: 2445618 - RNA, 19 nt, Artificial Sequence
  Description of Artificial Sequence: Synthetic oligonucleotide
  Sense strand starting at position 1222 of SEQ ID NO: 1887061
uuacauuucugggacagua

SEQ ID NO: 2445619 - RNA, 19 nt, Artificial Sequence
  Description of Artificial Sequence: Synthetic oligonucleotide
  Antisense strand to SEQ ID NO: 2445618
uacugucccagaaauguaa

SEQ ID NO: 2445620 - RNA, 19 nt, Artificial Sequence
  Description of Artificial Sequence: Synthetic oligonucleotide
  Sense strand starting at position 1404 of SEQ ID NO: 1887061
ugaaaccuacuguguauca

SEQ ID NO: 2445621 - RNA, 19 nt, Artificial Sequence
  Description of Artificial Sequence: Synthetic oligonucleotide
  Antisense strand to SEQ ID NO: 2445620
ugauacacaguagguuuca

SEQ ID NO: 2445622 - RNA, 19 nt, Artificial Sequence
  Description of Artificial Sequence: Synthetic oligonucleotide
  Sense strand starting at position 1522 of SEQ ID NO: 1887061
acauuacuacaugguauga

SEQ ID NO: 2445623 - RNA, 19 nt, Artificial Sequence
  Description of Artificial Sequence: Synthetic oligonucleotide
  Antisense strand to SEQ ID NO: 2445622
ucauaccauguaguaaugu

SEQ ID NO: 2445624 - RNA, 19 nt, Artificial Sequence
  Description of Artificial Sequence: Synthetic oligonucleotide
  Sense strand starting at position 1597 of SEQ ID NO: 1887061
gcuagaaacgguuacuaag

SEQ ID NO: 2445625 - RNA, 19 nt, Artificial Sequence
  Description of Artificial Sequence: Synthetic oligonucleotide
  Antisense strand to SEQ ID NO: 2445624
cuuaguaaccguuucuagc

SEQ ID NO: 2445626 - RNA, 19 nt, Artificial Sequence
  Description of Artificial Sequence: Synthetic oligonucleotide
  Sense strand starting at position 1675 of SEQ ID NO: 1887061
uuauccuccguuuacagau

SEQ ID NO: 2445627 - RNA, 19 nt, Artificial Sequence
  Description of Artificial Sequence: Synthetic oligonucleotide
  Antisense strand to SEQ ID NO: 2445626
aucuguaaacggaggauaa

SEQ ID NO: 2445628 - RNA, 19 nt, Artificial Sequence
  Description of Artificial Sequence: Synthetic oligonucleotide
  Sense strand starting at position 1727 of SEQ ID NO: 1887061
agucaucacucacugguaa

SEQ ID NO: 2445629 - RNA, 19 nt, Artificial Sequence
  Description of Artificial Sequence: Synthetic oligonucleotide
  Antisense strand to SEQ ID NO: 2445628
uuaccagugagugaugacu

SEQ ID NO: 2445630 - RNA, 19 nt, Artificial Sequence
  Description of Artificial Sequence: Synthetic oligonucleotide
  Sense strand starting at position 1738 of SEQ ID NO: 1887061
acugguaauccauguuaga

SEQ ID NO: 2445631 - RNA, 19 nt, Artificial Sequence
  Description of Artificial Sequence: Synthetic oligonucleotide
  Antisense strand to SEQ ID NO: 2445630
ucuaacauggauuaccagu

SEQ ID NO: 2445632 - RNA, 19 nt, Artificial Sequence
  Description of Artificial Sequence: Synthetic oligonucleotide
  Sense strand starting at position 1759 of SEQ ID NO: 1887061
cgaauccuaucagucugau

SEQ ID NO: 2445633 - RNA, 19 nt, Artificial Sequence
  Description of Artificial Sequence: Synthetic oligonucleotide
  Antisense strand to SEQ ID NO: 2445632
aucagacugauaggauucg

SEQ ID NO: 2445634 - RNA, 19 nt, Artificial Sequence
  Description of Artificial Sequence: Synthetic oligonucleotide
  Sense strand starting at position 1765 of SEQ ID NO: 1887061
cuaucagucugauccuaua

SEQ ID NO: 2445635 - RNA, 19 nt, Artificial Sequence
  Description of Artificial Sequence: Synthetic oligonucleotide
  Antisense strand to SEQ ID NO: 2445634
uauaggaucagacugauag

SEQ ID NO: 2445636 - RNA, 19 nt, Artificial Sequence
  Description of Artificial Sequence: Synthetic oligonucleotide
  Sense strand starting at position 1775 of SEQ ID NO: 1887061
gauccuauagccuagugaa

SEQ ID NO: 2445637 - RNA, 19 nt, Artificial Sequence
  Description of Artificial Sequence: Synthetic oligonucleotide
  Antisense strand to SEQ ID NO: 2445636
uucacuaggcuauaggauc

SEQ ID NO: 2445638 - RNA, 19 nt, Artificial Sequence
  Description of Artificial Sequence: Synthetic oligonucleotide
  Sense strand starting at position 1782 of SEQ ID NO: 1887061
uagccuagugaagguugaa

SEQ ID NO: 2445639 - RNA, 19 nt, Artificial Sequence
  Description of Artificial Sequence: Synthetic oligonucleotide
  Antisense strand to SEQ ID NO: 2445638
uucaaccuucacuaggcua

SEQ ID NO: 2445640 - RNA, 19 nt, Artificial Sequence
  Description of Artificial Sequence: Synthetic oligonucleotide
  Sense strand starting at position 1785 of SEQ ID NO: 1887061
ccuagugaagguugaaugu

SEQ ID NO: 2445641 - RNA, 19 nt, Artificial Sequence
  Description of Artificial Sequence: Synthetic oligonucleotide
  Antisense strand to SEQ ID NO: 2445640
acauucaaccuucacuagg

SEQ ID NO: 2445642 - RNA, 19 nt, Artificial Sequence
  Description of Artificial Sequence: Synthetic oligonucleotide
  Sense strand starting at position 1794 of SEQ ID NO: 1887061
gguugaaugucauuaacua

SEQ ID NO: 2445643 - RNA, 19 nt, Artificial Sequence
  Description of Artificial Sequence: Synthetic oligonucleotide
  Antisense strand to SEQ ID NO: 2445642
uaguuaaugacauucaacc

SEQ ID NO: 2445644 - RNA, 19 nt, Artificial Sequence
  Description of Artificial Sequence: Synthetic oligonucleotide
  Sense strand starting at position 1795 of SEQ ID NO: 1887061
guugaaugucauuaacuaa

SEQ ID NO: 2445645 - RNA, 19 nt, Artificial Sequence
  Description of Artificial Sequence: Synthetic oligonucleotide
  Antisense strand to SEQ ID NO: 2445644
uuaguuaaugacauucaac

SEQ ID NO: 2445646 - RNA, 19 nt, Artificial Sequence
  Description of Artificial Sequence: Synthetic oligonucleotide
  Sense strand starting at position 1802 of SEQ ID NO: 1887061
gucauuaacuaagugguaa

SEQ ID NO: 2445647 - RNA, 19 nt, Artificial Sequence
  Description of Artificial Sequence: Synthetic oligonucleotide
  Antisense strand to SEQ ID NO: 2445646
uuaccacuuaguuaaugac

SEQ ID NO: 2445648 - RNA, 19 nt, Artificial Sequence
  Description of Artificial Sequence: Synthetic oligonucleotide
  Sense strand starting at position 1886 of SEQ ID NO: 1887061
aguucuuugguguauauua

SEQ ID NO: 2445649 - RNA, 19 nt, Artificial Sequence
  Description of Artificial Sequence: Synthetic oligonucleotide
  Antisense strand to SEQ ID NO: 2445648
uaauauacaccaaagaacu

SEQ ID NO: 2445650 - RNA, 19 nt, Artificial Sequence
  Description of Artificial Sequence: Synthetic oligonucleotide
  Sense strand starting at position 1894 of SEQ ID NO: 1887061
gguguauauuaacucauau

SEQ ID NO: 2445651 - RNA, 19 nt, Artificial Sequence
  Description of Artificial Sequence: Synthetic oligonucleotide
  Antisense strand to SEQ ID NO: 2445650
auaugaguuaauauacacc

SEQ ID NO: 2445652 - RNA, 19 nt, Artificial Sequence
  Description of Artificial Sequence: Synthetic oligonucleotide
  Sense strand starting at position 2100 of SEQ ID NO: 1887061
gagcgaucagcacagaaau

SEQ ID NO: 2445653 - RNA, 19 nt, Artificial Sequence
  Description of Artificial Sequence: Synthetic oligonucleotide
  Antisense strand to SEQ ID NO: 2445652
auuucugugcugaucgcuc

SEQ ID NO: 2445654 - RNA, 19 nt, Artificial Sequence
  Description of Artificial Sequence: Synthetic oligonucleotide
  Sense strand starting at position 2102 of SEQ ID NO: 1887061
gcgaucagcacagaaauau

SEQ ID NO: 2445655 - RNA, 19 nt, Artificial Sequence
  Description of Artificial Sequence: Synthetic oligonucleotide
  Antisense strand to SEQ ID NO: 2445654
auauuucugugcugaucgc

SEQ ID NO: 2445656 - RNA, 19 nt, Artificial Sequence
  Description of Artificial Sequence: Synthetic oligonucleotide
  Sense strand starting at position 2114 of SEQ ID NO: 1887061
gaaauaugagcugagccua

SEQ ID NO: 2445657 - RNA, 19 nt, Artificial Sequence
  Description of Artificial Sequence: Synthetic oligonucleotide
  Antisense strand to SEQ ID NO: 2445656
uaggcucagcucauauuuc

SEQ ID NO: 2445658 - RNA, 19 nt, Artificial Sequence
  Description of Artificial Sequence: Synthetic oligonucleotide
  Sense strand starting at position 2291 of SEQ ID NO: 1887061
ugacaagauuuauaucaag

SEQ ID NO: 2445659 - RNA, 19 nt, Artificial Sequence
  Description of Artificial Sequence: Synthetic oligonucleotide
  Antisense strand to SEQ ID NO: 2445658
cuugauauaaaucuuguca

SEQ ID NO: 2445660 - RNA, 19 nt, Artificial Sequence
  Description of Artificial Sequence: Synthetic oligonucleotide
  Sense strand starting at position 3122 of SEQ ID NO: 1887061
auuuguuaucuuggcuuua

SEQ ID NO: 2445661 - RNA, 19 nt, Artificial Sequence
  Description of Artificial Sequence: Synthetic oligonucleotide
  Antisense strand to SEQ ID NO: 2445660
uaaagccaagauaacaaau

SEQ ID NO: 2445662 - RNA, 19 nt, Artificial Sequence
  Description of Artificial Sequence: Synthetic oligonucleotide
  Sense strand starting at position 3217 of SEQ ID NO: 1887061
cagauuaggugaccaaagu

SEQ ID NO: 2445663 - RNA, 19 nt, Artificial Sequence
  Description of Artificial Sequence: Synthetic oligonucleotide
  Antisense strand to SEQ ID NO: 2445662
acuuuggucaccuaaucug

SEQ ID NO: 2445664 - RNA, 19 nt, Artificial Sequence
  Description of Artificial Sequence: Synthetic oligonucleotide
  Sense strand starting at position 3260 of SEQ ID NO: 1887061
ccaauccacuggucuaagu

SEQ ID NO: 2445665 - RNA, 19 nt, Artificial Sequence
  Description of Artificial Sequence: Synthetic oligonucleotide
  Antisense strand to SEQ ID NO: 2445664
acuuagaccaguggauugg

SEQ ID NO: 2445666 - RNA, 19 nt, Artificial Sequence
  Description of Artificial Sequence: Synthetic oligonucleotide
  Sense strand starting at position 3635 of SEQ ID NO: 1887061
aaguaaaugugauugugaa

SEQ ID NO: 2445667 - RNA, 19 nt, Artificial Sequence
  Description of Artificial Sequence: Synthetic oligonucleotide
  Antisense strand to SEQ ID NO: 2445666
uucacaaucacauuuacuu

SEQ ID NO: 2445668 - RNA, 19 nt, Artificial Sequence
  Description of Artificial Sequence: Synthetic oligonucleotide
  Sense strand starting at position 3636 of SEQ ID NO: 1887061
aguaaaugugauugugaag

SEQ ID NO: 2445669 - RNA, 19 nt, Artificial Sequence
  Description of Artificial Sequence: Synthetic oligonucleotide
  Antisense strand to SEQ ID NO: 2445668
cuucacaaucacauuuacu

SEQ ID NO: 2445670 - RNA, 19 nt, Artificial Sequence
  Description of Artificial Sequence: Synthetic oligonucleotide
  Sense strand starting at position 3945 of SEQ ID NO: 1887061
aguucuacuuuguugaaac

SEQ ID NO: 2445671 - RNA, 19 nt, Artificial Sequence
  Description of Artificial Sequence: Synthetic oligonucleotide
  Antisense strand to SEQ ID NO: 2445670
guuucaacaaaguagaacu

SEQ ID NO: 2445672 - RNA, 19 nt, Artificial Sequence
  Description of Artificial Sequence: Synthetic oligonucleotide
  Sense strand starting at position 3956 of SEQ ID NO: 1887061
guugaaacuucuguaacca

SEQ ID NO: 2445673 - RNA, 19 nt, Artificial Sequence
  Description of Artificial Sequence: Synthetic oligonucleotide
  Antisense strand to SEQ ID NO: 2445672
ugguuacagaaguuucaac

SEQ ID NO: 2445674 - RNA, 19 nt, Artificial Sequence
  Description of Artificial Sequence: Synthetic oligonucleotide
  Sense strand starting at position 351 of SEQ ID NO: 1887062
uugggauuguuucugauau

SEQ ID NO: 2445675 - RNA, 19 nt, Artificial Sequence
  Description of Artificial Sequence: Synthetic oligonucleotide
  Antisense strand to SEQ ID NO: 2445674
auaucagaaacaaucccaa

SEQ ID NO: 2445676 - RNA, 19 nt, Artificial Sequence
  Description of Artificial Sequence: Synthetic oligonucleotide
  Sense strand starting at position 363 of SEQ ID NO: 1887062
cugauauauaacugugggu

SEQ ID NO: 2445677 - RNA, 19 nt, Artificial Sequence
  Description of Artificial Sequence: Synthetic oligonucleotide
  Antisense strand to SEQ ID NO: 2445676
acccacaguuauauaucag

SEQ ID NO: 2445678 - RNA, 19 nt, Artificial Sequence
  Description of Artificial Sequence: Synthetic oligonucleotide
  Sense strand starting at position 365 of SEQ ID NO: 1887062
gauauauaacuguggguuu

SEQ ID NO: 2445679 - RNA, 19 nt, Artificial Sequence
  Description of Artificial Sequence: Synthetic oligonucleotide
  Antisense strand to SEQ ID NO: 2445678
aaacccacaguuauauauc

SEQ ID NO: 2445680 - RNA, 19 nt, Artificial Sequence
  Description of Artificial Sequence: Synthetic oligonucleotide
  Sense strand starting at position 466 of SEQ ID NO: 1887062
ccacgauuauaacugagca

SEQ ID NO: 2445681 - RNA, 19 nt, Artificial Sequence
  Description of Artificial Sequence: Synthetic oligonucleotide
  Antisense strand to SEQ ID NO: 2445680
ugcucaguuauaaucgugg

SEQ ID NO: 2445682 - RNA, 19 nt, Artificial Sequence
  Description of Artificial Sequence: Synthetic oligonucleotide
  Sense strand starting at position 545 of SEQ ID NO: 1887062
gugaucuuagcucaugguu

SEQ ID NO: 2445683 - RNA, 19 nt, Artificial Sequence
  Description of Artificial Sequence: Synthetic oligonucleotide
  Antisense strand to SEQ ID NO: 2445682
aaccaugagcuaagaucac

SEQ ID NO: 2445684 - RNA, 19 nt, Artificial Sequence
  Description of Artificial Sequence: Synthetic oligonucleotide
  Sense strand starting at position 548 of SEQ ID NO: 1887062
aucuuagcucaugguuaac

SEQ ID NO: 2445685 - RNA, 19 nt, Artificial Sequence
  Description of Artificial Sequence: Synthetic oligonucleotide
  Antisense strand to SEQ ID NO: 2445684
guuaaccaugagcuaagau

SEQ ID NO: 2445686 - RNA, 19 nt, Artificial Sequence
  Description of Artificial Sequence: Synthetic oligonucleotide
  Sense strand starting at position 550 of SEQ ID NO: 1887062
cuuagcucaugguuaacaa

SEQ ID NO: 2445687 - RNA, 19 nt, Artificial Sequence
  Description of Artificial Sequence: Synthetic oligonucleotide
  Antisense strand to SEQ ID NO: 2445686
uuguuaaccaugagcuaag

SEQ ID NO: 2445688 - RNA, 19 nt, Artificial Sequence
  Description of Artificial Sequence: Synthetic oligonucleotide
  Sense strand starting at position 551 of SEQ ID NO: 1887062
uuagcucaugguuaacaaa

SEQ ID NO: 2445689 - RNA, 19 nt, Artificial Sequence
  Description of Artificial Sequence: Synthetic oligonucleotide
  Antisense strand to SEQ ID NO: 2445688
uuuguuaaccaugagcuaa

SEQ ID NO: 2445690 - RNA, 19 nt, Artificial Sequence
  Description of Artificial Sequence: Synthetic oligonucleotide
  Sense strand starting at position 684 of SEQ ID NO: 1887062
gaccguguauuuguuuaaa

SEQ ID NO: 2445691 - RNA, 19 nt, Artificial Sequence
  Description of Artificial Sequence: Synthetic oligonucleotide
  Antisense strand to SEQ ID NO: 2445690
uuuaaacaaauacacgguc

SEQ ID NO: 2445692 - RNA, 19 nt, Artificial Sequence
  Description of Artificial Sequence: Synthetic oligonucleotide
  Sense strand starting at position 686 of SEQ ID NO: 1887062
ccguguauuuguuuaaagg

SEQ ID NO: 2445693 - RNA, 19 nt, Artificial Sequence
  Description of Artificial Sequence: Synthetic oligonucleotide
  Antisense strand to SEQ ID NO: 2445692
ccuuuaaacaaauacacgg

SEQ ID NO: 2445694 - RNA, 19 nt, Artificial Sequence
  Description of Artificial Sequence: Synthetic oligonucleotide
  Sense strand starting at position 687 of SEQ ID NO: 1887062
cguguauuuguuuaaaggu

SEQ ID NO: 2445695 - RNA, 19 nt, Artificial Sequence
  Description of Artificial Sequence: Synthetic oligonucleotide
  Antisense strand to SEQ ID NO: 2445694
accuuuaaacaaauacacg

SEQ ID NO: 2445696 - RNA, 19 nt, Artificial Sequence
  Description of Artificial Sequence: Synthetic oligonucleotide
  Sense strand starting at position 829 of SEQ ID NO: 1887062
agguaucagagucacaagu

SEQ ID NO: 2445697 - RNA, 19 nt, Artificial Sequence
  Description of Artificial Sequence: Synthetic oligonucleotide
  Antisense strand to SEQ ID NO: 2445696
acuugugacucugauaccu

SEQ ID NO: 2445698 - RNA, 19 nt, Artificial Sequence
  Description of Artificial Sequence: Synthetic oligonucleotide
  Sense strand starting at position 1100 of SEQ ID NO: 1887062
ugucauaagcuuuaugaac

SEQ ID NO: 2445699 - RNA, 19 nt, Artificial Sequence
  Description of Artificial Sequence: Synthetic oligonucleotide
  Antisense strand to SEQ ID NO: 2445698
guucauaaagcuuaugaca

SEQ ID NO: 2445700 - RNA, 19 nt, Artificial Sequence
  Description of Artificial Sequence: Synthetic oligonucleotide
  Sense strand starting at position 1137 of SEQ ID NO: 1887062
gcuucucagugaucucaaa

SEQ ID NO: 2445701 - RNA, 19 nt, Artificial Sequence
  Description of Artificial Sequence: Synthetic oligonucleotide
  Antisense strand to SEQ ID NO: 2445700
uuugagaucacugagaagc

SEQ ID NO: 2445702 - RNA, 19 nt, Artificial Sequence
  Description of Artificial Sequence: Synthetic oligonucleotide
  Sense strand starting at position 1158 of SEQ ID NO: 1887062
ucuaacaugccguaagauu

SEQ ID NO: 2445703 - RNA, 19 nt, Artificial Sequence
  Description of Artificial Sequence: Synthetic oligonucleotide
  Antisense strand to SEQ ID NO: 2445702
aaucuuacggcauguuaga

SEQ ID NO: 2445704 - RNA, 19 nt, Artificial Sequence
  Description of Artificial Sequence: Synthetic oligonucleotide
  Sense strand starting at position 1215 of SEQ ID NO: 1887062
gccaaacucgaauaccauu

SEQ ID NO: 2445705 - RNA, 19 nt, Artificial Sequence
  Description of Artificial Sequence: Synthetic oligonucleotide
  Antisense strand to SEQ ID NO: 2445704
aaugguauucgaguuuggc

SEQ ID NO: 2445706 - RNA, 19 nt, Artificial Sequence
  Description of Artificial Sequence: Synthetic oligonucleotide
  Sense strand starting at position 1320 of SEQ ID NO: 1887062
acauguguaguggaaaguu

SEQ ID NO: 2445707 - RNA, 19 nt, Artificial Sequence
  Description of Artificial Sequence: Synthetic oligonucleotide
  Antisense strand to SEQ ID NO: 2445706
aacuuuccacuacacaugu

SEQ ID NO: 2445708 - RNA, 19 nt, Artificial Sequence
  Description of Artificial Sequence: Synthetic oligonucleotide
  Sense strand starting at position 1329 of SEQ ID NO: 1887062
guggaaaguuuaguucaug

SEQ ID NO: 2445709 - RNA, 19 nt, Artificial Sequence
  Description of Artificial Sequence: Synthetic oligonucleotide
  Antisense strand to SEQ ID NO: 2445708
caugaacuaaacuuuccac

SEQ ID NO: 2445710 - RNA, 19 nt, Artificial Sequence
  Description of Artificial Sequence: Synthetic oligonucleotide
  Sense strand starting at position 1376 of SEQ ID NO: 1887062
cuauccuuguggucuaaac

SEQ ID NO: 2445711 - RNA, 19 nt, Artificial Sequence
  Description of Artificial Sequence: Synthetic oligonucleotide
  Antisense strand to SEQ ID NO: 2445710
guuuagaccacaaggauag

SEQ ID NO: 2445712 - RNA, 19 nt, Artificial Sequence
  Description of Artificial Sequence: Synthetic oligonucleotide
  Sense strand starting at position 1422 of SEQ ID NO: 1887062
ccuacuguguacuuacaca

SEQ ID NO: 2445713 - RNA, 19 nt, Artificial Sequence
  Description of Artificial Sequence: Synthetic oligonucleotide
  Antisense strand to SEQ ID NO: 2445712
uguguaaguacacaguagg

SEQ ID NO: 2445714 - RNA, 19 nt, Artificial Sequence
  Description of Artificial Sequence: Synthetic oligonucleotide
  Sense strand starting at position 1524 of SEQ ID NO: 1887062
cgcauuacacuuuauuaag

SEQ ID NO: 2445715 - RNA, 19 nt, Artificial Sequence
  Description of Artificial Sequence: Synthetic oligonucleotide
  Antisense strand to SEQ ID NO: 2445714
cuuaauaaaguguaaugcg

SEQ ID NO: 2445716 - RNA, 19 nt, Artificial Sequence
  Description of Artificial Sequence: Synthetic oligonucleotide
  Sense strand starting at position 1617 of SEQ ID NO: 1887062
gccuuuaagaugcggagau

SEQ ID NO: 2445717 - RNA, 19 nt, Artificial Sequence
  Description of Artificial Sequence: Synthetic oligonucleotide
  Antisense strand to SEQ ID NO: 2445716
aucuccgcaucuuaaaggc

SEQ ID NO: 2445718 - RNA, 19 nt, Artificial Sequence
  Description of Artificial Sequence: Synthetic oligonucleotide
  Sense strand starting at position 1759 of SEQ ID NO: 1887062
ggcuucucagaacaauauu

SEQ ID NO: 2445719 - RNA, 19 nt, Artificial Sequence
  Description of Artificial Sequence: Synthetic oligonucleotide
  Antisense strand to SEQ ID NO: 2445718
aauauuguucugagaagcc

SEQ ID NO: 2445720 - RNA, 19 nt, Artificial Sequence
  Description of Artificial Sequence: Synthetic oligonucleotide
  Sense strand starting at position 1800 of SEQ ID NO: 1887062
ggaaucaggacuugagcuu

SEQ ID NO: 2445721 - RNA, 19 nt, Artificial Sequence
  Description of Artificial Sequence: Synthetic oligonucleotide
  Antisense strand to SEQ ID NO: 2445720
aagcucaaguccugauucc

SEQ ID NO: 2445722 - RNA, 19 nt, Artificial Sequence
  Description of Artificial Sequence: Synthetic oligonucleotide
  Sense strand starting at position 2065 of SEQ ID NO: 1887062
aucuauguuccucaggacu

SEQ ID NO: 2445723 - RNA, 19 nt, Artificial Sequence
  Description of Artificial Sequence: Synthetic oligonucleotide
  Antisense strand to SEQ ID NO: 2445722
aguccugaggaacauagau

SEQ ID NO: 2445724 - RNA, 19 nt, Artificial Sequence
  Description of Artificial Sequence: Synthetic oligonucleotide
  Sense strand starting at position 2159 of SEQ ID NO: 1887062
gauacagucgccguaguuu

SEQ ID NO: 2445725 - RNA, 19 nt, Artificial Sequence
  Description of Artificial Sequence: Synthetic oligonucleotide
  Antisense strand to SEQ ID NO: 2445724
aaacuacggcgacuguauc

SEQ ID NO: 2445726 - RNA, 19 nt, Artificial Sequence
  Description of Artificial Sequence: Synthetic oligonucleotide
  Sense strand starting at position 2287 of SEQ ID NO: 1887062
cgaugucgucacguaaacu

SEQ ID NO: 2445727 - RNA, 19 nt, Artificial Sequence
  Description of Artificial Sequence: Synthetic oligonucleotide
  Antisense strand to SEQ ID NO: 2445726
aguuuacgugacgacaucg

SEQ ID NO: 2445728 - RNA, 19 nt, Artificial Sequence
  Description of Artificial Sequence: Synthetic oligonucleotide
  Sense strand starting at position 2351 of SEQ ID NO: 1887062
gcugguuugagucacuucu

SEQ ID NO: 2445729 - RNA, 19 nt, Artificial Sequence
  Description of Artificial Sequence: Synthetic oligonucleotide
  Antisense strand to SEQ ID NO: 2445728
agaagugacucaaaccagc

SEQ ID NO: 2445730 - RNA, 19 nt, Artificial Sequence
  Description of Artificial Sequence: Synthetic oligonucleotide
  Sense strand starting at position 2353 of SEQ ID NO: 1887062
ugguuugagucacuucuau

SEQ ID NO: 2445731 - RNA, 19 nt, Artificial Sequence
  Description of Artificial Sequence: Synthetic oligonucleotide
  Antisense strand to SEQ ID NO: 2445730
auagaagugacucaaacca

SEQ ID NO: 2445732 - RNA, 19 nt, Artificial Sequence
  Description of Artificial Sequence: Synthetic oligonucleotide
  Sense strand starting at position 2359 of SEQ ID NO: 1887062
gagucacuucuaugguacu

SEQ ID NO: 2445733 - RNA, 19 nt, Artificial Sequence
  Description of Artificial Sequence: Synthetic oligonucleotide
  Antisense strand to SEQ ID NO: 2445732
aguaccauagaagugacuc

SEQ ID NO: 2445734 - RNA, 19 nt, Artificial Sequence
  Description of Artificial Sequence: Synthetic oligonucleotide
  Sense strand starting at position 2445 of SEQ ID NO: 1887062
aaggaaugacaacguucua

SEQ ID NO: 2445735 - RNA, 19 nt, Artificial Sequence
  Description of Artificial Sequence: Synthetic oligonucleotide
  Antisense strand to SEQ ID NO: 2445734
uagaacguugucauuccuu

SEQ ID NO: 2445736 - RNA, 19 nt, Artificial Sequence
  Description of Artificial Sequence: Synthetic oligonucleotide
  Sense strand starting at position 2580 of SEQ ID NO: 1887062
agugaagcgaguuaucuga

SEQ ID NO: 2445737 - RNA, 19 nt, Artificial Sequence
  Description of Artificial Sequence: Synthetic oligonucleotide
  Antisense strand to SEQ ID NO: 2445736
ucagauaacucgcuucacu

SEQ ID NO: 2445738 - RNA, 19 nt, Artificial Sequence
  Description of Artificial Sequence: Synthetic oligonucleotide
  Sense strand starting at position 2582 of SEQ ID NO: 1887062
ugaagcgaguuaucugaau

SEQ ID NO: 2445739 - RNA, 19 nt, Artificial Sequence
  Description of Artificial Sequence: Synthetic oligonucleotide
  Antisense strand to SEQ ID NO: 2445738
auucagauaacucgcuuca

SEQ ID NO: 2445740 - RNA, 19 nt, Artificial Sequence
  Description of Artificial Sequence: Synthetic oligonucleotide
  Sense strand starting at position 3099 of SEQ ID NO: 1887062
ggccauuggguauaggaau

SEQ ID NO: 2445741 - RNA, 19 nt, Artificial Sequence
  Description of Artificial Sequence: Synthetic oligonucleotide
  Antisense strand to SEQ ID NO: 2445740
auuccuauacccaauggcc

SEQ ID NO: 2445742 - RNA, 19 nt, Artificial Sequence
  Description of Artificial Sequence: Synthetic oligonucleotide
  Sense strand starting at position 3435 of SEQ ID NO: 1887062
gugccuggcccauauauga

SEQ ID NO: 2445743 - RNA, 19 nt, Artificial Sequence
  Description of Artificial Sequence: Synthetic oligonucleotide
  Antisense strand to SEQ ID NO: 2445742
ucauauaugggccaggcac

SEQ ID NO: 2445744 - RNA, 19 nt, Artificial Sequence
  Description of Artificial Sequence: Synthetic oligonucleotide
  Sense strand starting at position 3606 of SEQ ID NO: 1887062
ucaguuugugucguguauu

SEQ ID NO: 2445745 - RNA, 19 nt, Artificial Sequence
  Description of Artificial Sequence: Synthetic oligonucleotide
  Antisense strand to SEQ ID NO: 2445744
aauacacgacacaaacuga

SEQ ID NO: 2445746 - RNA, 19 nt, Artificial Sequence
  Description of Artificial Sequence: Synthetic oligonucleotide
  Sense strand starting at position 3639 of SEQ ID NO: 1887062
guaaacauuuaggauuguu

SEQ ID NO: 2445747 - RNA, 19 nt, Artificial Sequence
  Description of Artificial Sequence: Synthetic oligonucleotide
  Antisense strand to SEQ ID NO: 2445746
aacaauccuaaauguuuac

SEQ ID NO: 2445748 - RNA, 19 nt, Artificial Sequence
  Description of Artificial Sequence: Synthetic oligonucleotide
  Sense strand starting at position 3644 of SEQ ID NO: 1887062
cauuuaggauuguuacguu

SEQ ID NO: 2445749 - RNA, 19 nt, Artificial Sequence
  Description of Artificial Sequence: Synthetic oligonucleotide
  Antisense strand to SEQ ID NO: 2445748
aacguaacaauccuaaaug

SEQ ID NO: 2445750 - RNA, 19 nt, Artificial Sequence
  Description of Artificial Sequence: Synthetic oligonucleotide
  Sense strand starting at position 3654 of SEQ ID NO: 1887062
uguuacguucucuugcauu

SEQ ID NO: 2445751 - RNA, 19 nt, Artificial Sequence
  Description of Artificial Sequence: Synthetic oligonucleotide
  Antisense strand to SEQ ID NO: 2445750
aaugcaagagaacguaaca

SEQ ID NO: 2445752 - RNA, 19 nt, Artificial Sequence
  Description of Artificial Sequence: Synthetic oligonucleotide
  Sense strand starting at position 3928 of SEQ ID NO: 1887062
ucauuaaagugacuaugau

SEQ ID NO: 2445753 - RNA, 19 nt, Artificial Sequence
  Description of Artificial Sequence: Synthetic oligonucleotide
  Antisense strand to SEQ ID NO: 2445752
aucauagucacuuuaauga

SEQ ID NO: 2445754 - RNA, 19 nt, Artificial Sequence
  Description of Artificial Sequence: Synthetic oligonucleotide
  Sense strand starting at position 32 of SEQ ID NO: 1887063
cuuugaucgcauuguauuu

SEQ ID NO: 2445755 - RNA, 19 nt, Artificial Sequence
  Description of Artificial Sequence: Synthetic oligonucleotide
  Antisense strand to SEQ ID NO: 2445754
aaauacaaugcgaucaaag

SEQ ID NO: 2445756 - RNA, 19 nt, Artificial Sequence
  Description of Artificial Sequence: Synthetic oligonucleotide
  Sense strand starting at position 95 of SEQ ID NO: 1887063
gugucuguugaugaaugaa

SEQ ID NO: 2445757 - RNA, 19 nt, Artificial Sequence
  Description of Artificial Sequence: Synthetic oligonucleotide
  Antisense strand to SEQ ID NO: 2445756
uucauucaucaacagacac

SEQ ID NO: 2445758 - RNA, 19 nt, Artificial Sequence
  Description of Artificial Sequence: Synthetic oligonucleotide
  Sense strand starting at position 463 of SEQ ID NO: 1887063
gaaugaccuuccuucgaug

SEQ ID NO: 2445759 - RNA, 19 nt, Artificial Sequence
  Description of Artificial Sequence: Synthetic oligonucleotide
  Antisense strand to SEQ ID NO: 2445758
caucgaaggaaggucauuc

SEQ ID NO: 2445760 - RNA, 19 nt, Artificial Sequence
  Description of Artificial Sequence: Synthetic oligonucleotide
  Sense strand starting at position 519 of SEQ ID NO: 1887063
augcuuccugguugacaga

SEQ ID NO: 2445761 - RNA, 19 nt, Artificial Sequence
  Description of Artificial Sequence: Synthetic oligonucleotide
  Antisense strand to SEQ ID NO: 2445760
ucugucaaccaggaagcau

SEQ ID NO: 2445762 - RNA, 19 nt, Artificial Sequence
  Description of Artificial Sequence: Synthetic oligonucleotide
  Sense strand starting at position 540 of SEQ ID NO: 1887063
cugcuccucggaggugaaa

SEQ ID NO: 2445763 - RNA, 19 nt, Artificial Sequence
  Description of Artificial Sequence: Synthetic oligonucleotide
  Antisense strand to SEQ ID NO: 2445762
uuucaccuccgaggagcag

SEQ ID NO: 2445764 - RNA, 19 nt, Artificial Sequence
  Description of Artificial Sequence: Synthetic oligonucleotide
  Sense strand starting at position 629 of SEQ ID NO: 1887063
ccuaucuuuggagagucua

SEQ ID NO: 2445765 - RNA, 19 nt, Artificial Sequence
  Description of Artificial Sequence: Synthetic oligonucleotide
  Antisense strand to SEQ ID NO: 2445764
uagacucuccaaagauagg

SEQ ID NO: 2445766 - RNA, 19 nt, Artificial Sequence
  Description of Artificial Sequence: Synthetic oligonucleotide
  Sense strand starting at position 708 of SEQ ID NO: 1887063
cucugacuucugugauucu

SEQ ID NO: 2445767 - RNA, 19 nt, Artificial Sequence
  Description of Artificial Sequence: Synthetic oligonucleotide
  Antisense strand to SEQ ID NO: 2445766
agaaucacagaagucagag

SEQ ID NO: 2445768 - RNA, 19 nt, Artificial Sequence
  Description of Artificial Sequence: Synthetic oligonucleotide
  Sense strand starting at position 711 of SEQ ID NO: 1887063
ugacuucugugauucuauc

SEQ ID NO: 2445769 - RNA, 19 nt, Artificial Sequence
  Description of Artificial Sequence: Synthetic oligonucleotide
  Antisense strand to SEQ ID NO: 2445768
gauagaaucacagaaguca

SEQ ID NO: 2445770 - RNA, 19 nt, Artificial Sequence
  Description of Artificial Sequence: Synthetic oligonucleotide
  Sense strand starting at position 719 of SEQ ID NO: 1887063
gugauucuaucagcaacua

SEQ ID NO: 2445771 - RNA, 19 nt, Artificial Sequence
  Description of Artificial Sequence: Synthetic oligonucleotide
  Antisense strand to SEQ ID NO: 2445770
uaguugcugauagaaucac

SEQ ID NO: 2445772 - RNA, 19 nt, Artificial Sequence
  Description of Artificial Sequence: Synthetic oligonucleotide
  Sense strand starting at position 798 of SEQ ID NO: 1887063
gugaacaaauucuuguuua

SEQ ID NO: 2445773 - RNA, 19 nt, Artificial Sequence
  Description of Artificial Sequence: Synthetic oligonucleotide
  Antisense strand to SEQ ID NO: 2445772
uaaacaagaauuuguucac

SEQ ID NO: 2445774 - RNA, 19 nt, Artificial Sequence
  Description of Artificial Sequence: Synthetic oligonucleotide
  Sense strand starting at position 802 of SEQ ID NO: 1887063
acaaauucuuguuuacugu

SEQ ID NO: 2445775 - RNA, 19 nt, Artificial Sequence
  Description of Artificial Sequence: Synthetic oligonucleotide
  Antisense strand to SEQ ID NO: 2445774
acaguaaacaagaauuugu

SEQ ID NO: 2445776 - RNA, 19 nt, Artificial Sequence
  Description of Artificial Sequence: Synthetic oligonucleotide
  Sense strand starting at position 837 of SEQ ID NO: 1887063
ccagcuauuccguaagcuc

SEQ ID NO: 2445777 - RNA, 19 nt, Artificial Sequence
  Description of Artificial Sequence: Synthetic oligonucleotide
  Antisense strand to SEQ ID NO: 2445776
gagcuuacggaauagcugg

SEQ ID NO: 2445778 - RNA, 19 nt, Artificial Sequence
  Description of Artificial Sequence: Synthetic oligonucleotide
  Sense strand starting at position 844 of SEQ ID NO: 1887063
uuccguaagcuccauguau

SEQ ID NO: 2445779 - RNA, 19 nt, Artificial Sequence
  Description of Artificial Sequence: Synthetic oligonucleotide
  Antisense strand to SEQ ID NO: 2445778
auacauggagcuuacggaa

SEQ ID NO: 2445780 - RNA, 19 nt, Artificial Sequence
  Description of Artificial Sequence: Synthetic oligonucleotide
  Sense strand starting at position 846 of SEQ ID NO: 1887063
ccguaagcuccauguaugu

SEQ ID NO: 2445781 - RNA, 19 nt, Artificial Sequence
  Description of Artificial Sequence: Synthetic oligonucleotide
  Antisense strand to SEQ ID NO: 2445780
acauacauggagcuuacgg

SEQ ID NO: 2445782 - RNA, 19 nt, Artificial Sequence
  Description of Artificial Sequence: Synthetic oligonucleotide
  Sense strand starting at position 848 of SEQ ID NO: 1887063
guaagcuccauguauguuu

SEQ ID NO: 2445783 - RNA, 19 nt, Artificial Sequence
  Description of Artificial Sequence: Synthetic oligonucleotide
  Antisense strand to SEQ ID NO: 2445782
aaacauacauggagcuuac

SEQ ID NO: 2445784 - RNA, 19 nt, Artificial Sequence
  Description of Artificial Sequence: Synthetic oligonucleotide
  Sense strand starting at position 916 of SEQ ID NO: 1887063
cuacauaucugagggagga

SEQ ID NO: 2445785 - RNA, 19 nt, Artificial Sequence
  Description of Artificial Sequence: Synthetic oligonucleotide
  Antisense strand to SEQ ID NO: 2445784
uccucccucagauauguag

SEQ ID NO: 2445786 - RNA, 19 nt, Artificial Sequence
  Description of Artificial Sequence: Synthetic oligonucleotide
  Sense strand starting at position 1025 of SEQ ID NO: 1887063
gaggguauguacuuuauga

SEQ ID NO: 2445787 - RNA, 19 nt, Artificial Sequence
  Description of Artificial Sequence: Synthetic oligonucleotide
  Antisense strand to SEQ ID NO: 2445786
ucauaaaguacauacccuc

SEQ ID NO: 2445788 - RNA, 19 nt, Artificial Sequence
  Description of Artificial Sequence: Synthetic oligonucleotide
  Sense strand starting at position 1153 of SEQ ID NO: 1887063
accaguagagguugucuga

SEQ ID NO: 2445789 - RNA, 19 nt, Artificial Sequence
  Description of Artificial Sequence: Synthetic oligonucleotide
  Antisense strand to SEQ ID NO: 2445788
ucagacaaccucuacuggu

SEQ ID NO: 2445790 - RNA, 19 nt, Artificial Sequence
  Description of Artificial Sequence: Synthetic oligonucleotide
  Sense strand starting at position 1156 of SEQ ID NO: 1887063
aguagagguugucugagaa

SEQ ID NO: 2445791 - RNA, 19 nt, Artificial Sequence
  Description of Artificial Sequence: Synthetic oligonucleotide
  Antisense strand to SEQ ID NO: 2445790
uucucagacaaccucuacu

SEQ ID NO: 2445792 - RNA, 19 nt, Artificial Sequence
  Description of Artificial Sequence: Synthetic oligonucleotide
  Sense strand starting at position 1166 of SEQ ID NO: 1887063
gucugagaauugcucaguu

SEQ ID NO: 2445793 - RNA, 19 nt, Artificial Sequence
  Description of Artificial Sequence: Synthetic oligonucleotide
  Antisense strand to SEQ ID NO: 2445792
aacugagcaauucucagac

SEQ ID NO: 2445794 - RNA, 19 nt, Artificial Sequence
  Description of Artificial Sequence: Synthetic oligonucleotide
  Sense strand starting at position 1193 of SEQ ID NO: 1887063
ucuggaaguuccuaucaau

SEQ ID NO: 2445795 - RNA, 19 nt, Artificial Sequence
  Description of Artificial Sequence: Synthetic oligonucleotide
  Antisense strand to SEQ ID NO: 2445794
auugauaggaacuuccaga

SEQ ID NO: 2445796 - RNA, 19 nt, Artificial Sequence
  Description of Artificial Sequence: Synthetic oligonucleotide
  Sense strand starting at position 1196 of SEQ ID NO: 1887063
ggaaguuccuaucaaugga

SEQ ID NO: 2445797 - RNA, 19 nt, Artificial Sequence
  Description of Artificial Sequence: Synthetic oligonucleotide
  Antisense strand to SEQ ID NO: 2445796
uccauugauaggaacuucc

SEQ ID NO: 2445798 - RNA, 19 nt, Artificial Sequence
  Description of Artificial Sequence: Synthetic oligonucleotide
  Sense strand starting at position 1199 of SEQ ID NO: 1887063
aguuccuaucaauggauaa

SEQ ID NO: 2445799 - RNA, 19 nt, Artificial Sequence
  Description of Artificial Sequence: Synthetic oligonucleotide
  Antisense strand to SEQ ID NO: 2445798
uuauccauugauaggaacu

SEQ ID NO: 2445800 - RNA, 19 nt, Artificial Sequence
  Description of Artificial Sequence: Synthetic oligonucleotide
  Sense strand starting at position 1254 of SEQ ID NO: 1887063
ucaguaucaucuuugugag

SEQ ID NO: 2445801 - RNA, 19 nt, Artificial Sequence
  Description of Artificial Sequence: Synthetic oligonucleotide
  Antisense strand to SEQ ID NO: 2445800
cucacaaagaugauacuga

SEQ ID NO: 2445802 - RNA, 19 nt, Artificial Sequence
  Description of Artificial Sequence: Synthetic oligonucleotide
  Sense strand starting at position 1255 of SEQ ID NO: 1887063
caguaucaucuuugugaga

SEQ ID NO: 2445803 - RNA, 19 nt, Artificial Sequence
  Description of Artificial Sequence: Synthetic oligonucleotide
  Antisense strand to SEQ ID NO: 2445802
ucucacaaagaugauacug

SEQ ID NO: 2445804 - RNA, 19 nt, Artificial Sequence
  Description of Artificial Sequence: Synthetic oligonucleotide
  Sense strand starting at position 1256 of SEQ ID NO: 1887063
aguaucaucuuugugagac

SEQ ID NO: 2445805 - RNA, 19 nt, Artificial Sequence
  Description of Artificial Sequence: Synthetic oligonucleotide
  Antisense strand to SEQ ID NO: 2445804
gucucacaaagaugauacu

SEQ ID NO: 2445806 - RNA, 19 nt, Artificial Sequence
  Description of Artificial Sequence: Synthetic oligonucleotide
  Sense strand starting at position 1266 of SEQ ID NO: 1887063
uugugagacucauccgcau

SEQ ID NO: 2445807 - RNA, 19 nt, Artificial Sequence
  Description of Artificial Sequence: Synthetic oligonucleotide
  Antisense strand to SEQ ID NO: 2445806
augcggaugagucucacaa

SEQ ID NO: 2445808 - RNA, 19 nt, Artificial Sequence
  Description of Artificial Sequence: Synthetic oligonucleotide
  Sense strand starting at position 1268 of SEQ ID NO: 1887063
gugagacucauccgcauug

SEQ ID NO: 2445809 - RNA, 19 nt, Artificial Sequence
  Description of Artificial Sequence: Synthetic oligonucleotide
  Antisense strand to SEQ ID NO: 2445808
caaugcggaugagucucac

SEQ ID NO: 2445810 - RNA, 19 nt, Artificial Sequence
  Description of Artificial Sequence: Synthetic oligonucleotide
  Sense strand starting at position 1270 of SEQ ID NO: 1887063
gagacucauccgcauugca

SEQ ID NO: 2445811 - RNA, 19 nt, Artificial Sequence
  Description of Artificial Sequence: Synthetic oligonucleotide
  Antisense strand to SEQ ID NO: 2445810
ugcaaugcggaugagucuc

SEQ ID NO: 2445812 - RNA, 19 nt, Artificial Sequence
  Description of Artificial Sequence: Synthetic oligonucleotide
  Sense strand starting at position 1299 of SEQ ID NO: 1887063
uuuauuccuggguagaauu

SEQ ID NO: 2445813 - RNA, 19 nt, Artificial Sequence
  Description of Artificial Sequence: Synthetic oligonucleotide
  Antisense strand to SEQ ID NO: 2445812
aauucuacccaggaauaaa

SEQ ID NO: 2445814 - RNA, 19 nt, Artificial Sequence
  Description of Artificial Sequence: Synthetic oligonucleotide
  Sense strand starting at position 1709 of SEQ ID NO: 1887063
ucugucuucuaauuuaguu

SEQ ID NO: 2445815 - RNA, 19 nt, Artificial Sequence
  Description of Artificial Sequence: Synthetic oligonucleotide
  Antisense strand to SEQ ID NO: 2445814
aacuaaauuagaagacaga

SEQ ID NO: 2445816 - RNA, 19 nt, Artificial Sequence
  Description of Artificial Sequence: Synthetic oligonucleotide
  Sense strand starting at position 2155 of SEQ ID NO: 1887063
aggagcuuauuagucugau

SEQ ID NO: 2445817 - RNA, 19 nt, Artificial Sequence
  Description of Artificial Sequence: Synthetic oligonucleotide
  Antisense strand to SEQ ID NO: 2445816
aucagacuaauaagcuccu

SEQ ID NO: 2445818 - RNA, 19 nt, Artificial Sequence
  Description of Artificial Sequence: Synthetic oligonucleotide
  Sense strand starting at position 2156 of SEQ ID NO: 1887063
ggagcuuauuagucugaua

SEQ ID NO: 2445819 - RNA, 19 nt, Artificial Sequence
  Description of Artificial Sequence: Synthetic oligonucleotide
  Antisense strand to SEQ ID NO: 2445818
uaucagacuaauaagcucc

SEQ ID NO: 2445820 - RNA, 19 nt, Artificial Sequence
  Description of Artificial Sequence: Synthetic oligonucleotide
  Sense strand starting at position 2158 of SEQ ID NO: 1887063
agcuuauuagucugauaaa

SEQ ID NO: 2445821 - RNA, 19 nt, Artificial Sequence
  Description of Artificial Sequence: Synthetic oligonucleotide
  Antisense strand to SEQ ID NO: 2445820
uuuaucagacuaauaagcu

SEQ ID NO: 2445822 - RNA, 19 nt, Artificial Sequence
  Description of Artificial Sequence: Synthetic oligonucleotide
  Sense strand starting at position 2650 of SEQ ID NO: 1887063
cgaccucuugucgggaaca

SEQ ID NO: 2445823 - RNA, 19 nt, Artificial Sequence
  Description of Artificial Sequence: Synthetic oligonucleotide
  Antisense strand to SEQ ID NO: 2445822
uguucccgacaagaggucg

SEQ ID NO: 2445824 - RNA, 19 nt, Artificial Sequence
  Description of Artificial Sequence: Synthetic oligonucleotide
  Sense strand starting at position 3291 of SEQ ID NO: 1887063
acuggauucucugugacuu

SEQ ID NO: 2445825 - RNA, 19 nt, Artificial Sequence
  Description of Artificial Sequence: Synthetic oligonucleotide
  Antisense strand to SEQ ID NO: 2445824
aagucacagagaauccagu

SEQ ID NO: 2445826 - RNA, 19 nt, Artificial Sequence
  Description of Artificial Sequence: Synthetic oligonucleotide
  Sense strand starting at position 3292 of SEQ ID NO: 1887063
cuggauucucugugacuua

SEQ ID NO: 2445827 - RNA, 19 nt, Artificial Sequence
  Description of Artificial Sequence: Synthetic oligonucleotide
  Antisense strand to SEQ ID NO: 2445826
uaagucacagagaauccag

SEQ ID NO: 2445828 - RNA, 19 nt, Artificial Sequence
  Description of Artificial Sequence: Synthetic oligonucleotide
  Sense strand starting at position 3620 of SEQ ID NO: 1887063
cuacauagcccuggguaga

SEQ ID NO: 2445829 - RNA, 19 nt, Artificial Sequence
  Description of Artificial Sequence: Synthetic oligonucleotide
  Antisense strand to SEQ ID NO: 2445828
ucuacccagggcuauguag

SEQ ID NO: 2445830 - RNA, 19 nt, Artificial Sequence
  Description of Artificial Sequence: Synthetic oligonucleotide
  Sense strand starting at position 3872 of SEQ ID NO: 1887063
gggugagcucaucaucauc

SEQ ID NO: 2445831 - RNA, 19 nt, Artificial Sequence
  Description of Artificial Sequence: Synthetic oligonucleotide
  Antisense strand to SEQ ID NO: 2445830
gaugaugaugagcucaccc

SEQ ID NO: 2445832 - RNA, 19 nt, Artificial Sequence
  Description of Artificial Sequence: Synthetic oligonucleotide
  Sense strand starting at position 3941 of SEQ ID NO: 1887063
caacuaugugcagaucugu

SEQ ID NO: 2445833 - RNA, 19 nt, Artificial Sequence
  Description of Artificial Sequence: Synthetic oligonucleotide
  Antisense strand to SEQ ID NO: 2445832
acagaucugcacauaguug

SEQ ID NO: 2445834 - RNA, 19 nt, Artificial Sequence
  Description of Artificial Sequence: Synthetic oligonucleotide
  Sense strand starting at position 13 of SEQ ID NO: 1887064
ugaagaagcucugaaauga

SEQ ID NO: 2445835 - RNA, 19 nt, Artificial Sequence
  Description of Artificial Sequence: Synthetic oligonucleotide
  Antisense strand to SEQ ID NO: 2445834
ucauuucagagcuucuuca

SEQ ID NO: 2445836 - RNA, 19 nt, Artificial Sequence
  Description of Artificial Sequence: Synthetic oligonucleotide
  Sense strand starting at position 346 of SEQ ID NO: 1887064
aucucuugccuuugugauc

SEQ ID NO: 2445837 - RNA, 19 nt, Artificial Sequence
  Description of Artificial Sequence: Synthetic oligonucleotide
  Antisense strand to SEQ ID NO: 2445836
gaucacaaaggcaagagau

SEQ ID NO: 2445838 - RNA, 19 nt, Artificial Sequence
  Description of Artificial Sequence: Synthetic oligonucleotide
  Sense strand starting at position 478 of SEQ ID NO: 1887064
acaggaaauuauuaugguu

SEQ ID NO: 2445839 - RNA, 19 nt, Artificial Sequence
  Description of Artificial Sequence: Synthetic oligonucleotide
  Antisense strand to SEQ ID NO: 2445838
aaccauaauaauuuccugu

SEQ ID NO: 2445840 - RNA, 19 nt, Artificial Sequence
  Description of Artificial Sequence: Synthetic oligonucleotide
  Sense strand starting at position 1113 of SEQ ID NO: 1887064
caucuauuuguuggacguu

SEQ ID NO: 2445841 - RNA, 19 nt, Artificial Sequence
  Description of Artificial Sequence: Synthetic oligonucleotide
  Antisense strand to SEQ ID NO: 2445840
aacguccaacaaauagaug

SEQ ID NO: 2445842 - RNA, 19 nt, Artificial Sequence
  Description of Artificial Sequence: Synthetic oligonucleotide
  Sense strand starting at position 1677 of SEQ ID NO: 1887064
cggucugaguccucagcau

SEQ ID NO: 2445843 - RNA, 19 nt, Artificial Sequence
  Description of Artificial Sequence: Synthetic oligonucleotide
  Antisense strand to SEQ ID NO: 2445842
augcugaggacucagaccg

SEQ ID NO: 2445844 - RNA, 19 nt, Artificial Sequence
  Description of Artificial Sequence: Synthetic oligonucleotide
  Sense strand starting at position 1709 of SEQ ID NO: 1887064
gucugagucacaggacaug

SEQ ID NO: 2445845 - RNA, 19 nt, Artificial Sequence
  Description of Artificial Sequence: Synthetic oligonucleotide
  Antisense strand to SEQ ID NO: 2445844
cauguccugugacucagac

SEQ ID NO: 2445846 - RNA, 19 nt, Artificial Sequence
  Description of Artificial Sequence: Synthetic oligonucleotide
  Sense strand starting at position 2137 of SEQ ID NO: 1887064
gcugguaguacucaugcaa

SEQ ID NO: 2445847 - RNA, 19 nt, Artificial Sequence
  Description of Artificial Sequence: Synthetic oligonucleotide
  Antisense strand to SEQ ID NO: 2445846
uugcaugaguacuaccagc

SEQ ID NO: 2445848 - RNA, 19 nt, Artificial Sequence
  Description of Artificial Sequence: Synthetic oligonucleotide
  Sense strand starting at position 2242 of SEQ ID NO: 1887064
ccacauccguguugacaaa

SEQ ID NO: 2445849 - RNA, 19 nt, Artificial Sequence
  Description of Artificial Sequence: Synthetic oligonucleotide
  Antisense strand to SEQ ID NO: 2445848
uuugucaacacggaugugg

SEQ ID NO: 2445850 - RNA, 19 nt, Artificial Sequence
  Description of Artificial Sequence: Synthetic oligonucleotide
  Sense strand starting at position 2652 of SEQ ID NO: 1887064
gucacagugagcggagauu

SEQ ID NO: 2445851 - RNA, 19 nt, Artificial Sequence
  Description of Artificial Sequence: Synthetic oligonucleotide
  Antisense strand to SEQ ID NO: 2445850
aaucuccgcucacugugac

SEQ ID NO: 2445852 - RNA, 19 nt, Artificial Sequence
  Description of Artificial Sequence: Synthetic oligonucleotide
  Sense strand starting at position 2883 of SEQ ID NO: 1887064
gugcaaaguccuuggagca

SEQ ID NO: 2445853 - RNA, 19 nt, Artificial Sequence
  Description of Artificial Sequence: Synthetic oligonucleotide
  Antisense strand to SEQ ID NO: 2445852
ugcuccaaggacuuugcac

SEQ ID NO: 2445854 - RNA, 19 nt, Artificial Sequence
  Description of Artificial Sequence: Synthetic oligonucleotide
  Sense strand starting at position 2884 of SEQ ID NO: 1887064
ugcaaaguccuuggagcaa

SEQ ID NO: 2445855 - RNA, 19 nt, Artificial Sequence
  Description of Artificial Sequence: Synthetic oligonucleotide
  Antisense strand to SEQ ID NO: 2445854
uugcuccaaggacuuugca

SEQ ID NO: 2445856 - RNA, 19 nt, Artificial Sequence
  Description of Artificial Sequence: Synthetic oligonucleotide
  Sense strand starting at position 2963 of SEQ ID NO: 1887064
gcauaaaguguaggaaauc

SEQ ID NO: 2445857 - RNA, 19 nt, Artificial Sequence
  Description of Artificial Sequence: Synthetic oligonucleotide
  Antisense strand to SEQ ID NO: 2445856
gauuuccuacacuuuaugc

SEQ ID NO: 2445858 - RNA, 19 nt, Artificial Sequence
  Description of Artificial Sequence: Synthetic oligonucleotide
  Sense strand starting at position 2964 of SEQ ID NO: 1887064
cauaaaguguaggaaauca

SEQ ID NO: 2445859 - RNA, 19 nt, Artificial Sequence
  Description of Artificial Sequence: Synthetic oligonucleotide
  Antisense strand to SEQ ID NO: 2445858
ugauuuccuacacuuuaug

SEQ ID NO: 2445860 - RNA, 19 nt, Artificial Sequence
  Description of Artificial Sequence: Synthetic oligonucleotide
  Sense strand starting at position 3400 of SEQ ID NO: 1887064
gaauguagaccgcacucua

SEQ ID NO: 2445861 - RNA, 19 nt, Artificial Sequence
  Description of Artificial Sequence: Synthetic oligonucleotide
  Antisense strand to SEQ ID NO: 2445860
uagagugcggucuacauuc

SEQ ID NO: 2445862 - RNA, 19 nt, Artificial Sequence
  Description of Artificial Sequence: Synthetic oligonucleotide
  Sense strand starting at position 3690 of SEQ ID NO: 1887064
agauaagugucucagggug

SEQ ID NO: 2445863 - RNA, 19 nt, Artificial Sequence
  Description of Artificial Sequence: Synthetic oligonucleotide
  Antisense strand to SEQ ID NO: 2445862
cacccugagacacuuaucu

SEQ ID NO: 2445864 - RNA, 19 nt, Artificial Sequence
  Description of Artificial Sequence: Synthetic oligonucleotide
  Sense strand starting at position 3692 of SEQ ID NO: 1887064
auaagugucucagggugaa

SEQ ID NO: 2445865 - RNA, 19 nt, Artificial Sequence
  Description of Artificial Sequence: Synthetic oligonucleotide
  Antisense strand to SEQ ID NO: 2445864
uucacccugagacacuuau

SEQ ID NO: 2445866 - RNA, 19 nt, Artificial Sequence
  Description of Artificial Sequence: Synthetic oligonucleotide
  Sense strand starting at position 3695 of SEQ ID NO: 1887064
agugucucagggugaauau

SEQ ID NO: 2445867 - RNA, 19 nt, Artificial Sequence
  Description of Artificial Sequence: Synthetic oligonucleotide
  Antisense strand to SEQ ID NO: 2445866
auauucacccugagacacu

SEQ ID NO: 2445868 - RNA, 19 nt, Artificial Sequence
  Description of Artificial Sequence: Synthetic oligonucleotide
  Sense strand starting at position 3696 of SEQ ID NO: 1887064
gugucucagggugaauauu

SEQ ID NO: 2445869 - RNA, 19 nt, Artificial Sequence
  Description of Artificial Sequence: Synthetic oligonucleotide
  Antisense strand to SEQ ID NO: 2445868
aauauucacccugagacac

SEQ ID NO: 2445870 - RNA, 19 nt, Artificial Sequence
  Description of Artificial Sequence: Synthetic oligonucleotide
  Sense strand starting at position 464 of SEQ ID NO: 1887065
ggaaauugauuauuauggu

SEQ ID NO: 2445871 - RNA, 19 nt, Artificial Sequence
  Description of Artificial Sequence: Synthetic oligonucleotide
  Antisense strand to SEQ ID NO: 2445870
accauaauaaucaauuucc

SEQ ID NO: 2445872 - RNA, 19 nt, Artificial Sequence
  Description of Artificial Sequence: Synthetic oligonucleotide
  Sense strand starting at position 1067 of SEQ ID NO: 1887065
cgggagguauucugugaag

SEQ ID NO: 2445873 - RNA, 19 nt, Artificial Sequence
  Description of Artificial Sequence: Synthetic oligonucleotide
  Antisense strand to SEQ ID NO: 2445872
cuucacagaauaccucccg

SEQ ID NO: 2445874 - RNA, 19 nt, Artificial Sequence
  Description of Artificial Sequence: Synthetic oligonucleotide
  Sense strand starting at position 1108 of SEQ ID NO: 1887065
ucaucuauuuguuggaagu

SEQ ID NO: 2445875 - RNA, 19 nt, Artificial Sequence
  Description of Artificial Sequence: Synthetic oligonucleotide
  Antisense strand to SEQ ID NO: 2445874
acuuccaacaaauagauga

SEQ ID NO: 2445876 - RNA, 19 nt, Artificial Sequence
  Description of Artificial Sequence: Synthetic oligonucleotide
  Sense strand starting at position 1110 of SEQ ID NO: 1887065
aucuauuuguuggaaguuu

SEQ ID NO: 2445877 - RNA, 19 nt, Artificial Sequence
  Description of Artificial Sequence: Synthetic oligonucleotide
  Antisense strand to SEQ ID NO: 2445876
aaacuuccaacaaauagau

SEQ ID NO: 2445878 - RNA, 19 nt, Artificial Sequence
  Description of Artificial Sequence: Synthetic oligonucleotide
  Sense strand starting at position 1668 of SEQ ID NO: 1887065
ugcagagacuggucugagu

SEQ ID NO: 2445879 - RNA, 19 nt, Artificial Sequence
  Description of Artificial Sequence: Synthetic oligonucleotide
  Antisense strand to SEQ ID NO: 2445878
acucagaccagucucugca

SEQ ID NO: 2445880 - RNA, 19 nt, Artificial Sequence
  Description of Artificial Sequence: Synthetic oligonucleotide
  Sense strand starting at position 1677 of SEQ ID NO: 1887065
uggucugaguccucagcau

SEQ ID NO: 2445881 - RNA, 19 nt, Artificial Sequence
  Description of Artificial Sequence: Synthetic oligonucleotide
  Antisense strand to SEQ ID NO: 2445880
augcugaggacucagacca

SEQ ID NO: 2445882 - RNA, 19 nt, Artificial Sequence
  Description of Artificial Sequence: Synthetic oligonucleotide
  Sense strand starting at position 1705 of SEQ ID NO: 1887065
ccaggucugagucauagga

SEQ ID NO: 2445883 - RNA, 19 nt, Artificial Sequence
  Description of Artificial Sequence: Synthetic oligonucleotide
  Antisense strand to SEQ ID NO: 2445882
uccuaugacucagaccugg

SEQ ID NO: 2445884 - RNA, 19 nt, Artificial Sequence
  Description of Artificial Sequence: Synthetic oligonucleotide
  Sense strand starting at position 1707 of SEQ ID NO: 1887065
aggucugagucauaggaca

SEQ ID NO: 2445885 - RNA, 19 nt, Artificial Sequence
  Description of Artificial Sequence: Synthetic oligonucleotide
  Antisense strand to SEQ ID NO: 2445884
uguccuaugacucagaccu

SEQ ID NO: 2445886 - RNA, 19 nt, Artificial Sequence
  Description of Artificial Sequence: Synthetic oligonucleotide
  Sense strand starting at position 1709 of SEQ ID NO: 1887065
gucugagucauaggacaug

SEQ ID NO: 2445887 - RNA, 19 nt, Artificial Sequence
  Description of Artificial Sequence: Synthetic oligonucleotide
  Antisense strand to SEQ ID NO: 2445886
cauguccuaugacucagac

SEQ ID NO: 2445888 - RNA, 19 nt, Artificial Sequence
  Description of Artificial Sequence: Synthetic oligonucleotide
  Sense strand starting at position 2137 of SEQ ID NO: 1887065
gcugguaguacucacgcaa

SEQ ID NO: 2445889 - RNA, 19 nt, Artificial Sequence
  Description of Artificial Sequence: Synthetic oligonucleotide
  Antisense strand to SEQ ID NO: 2445888
uugcgugaguacuaccagc

SEQ ID NO: 2445890 - RNA, 19 nt, Artificial Sequence
  Description of Artificial Sequence: Synthetic oligonucleotide
  Sense strand starting at position 2373 of SEQ ID NO: 1887065
aggaguaacuacugcaaau

SEQ ID NO: 2445891 - RNA, 19 nt, Artificial Sequence
  Description of Artificial Sequence: Synthetic oligonucleotide
  Antisense strand to SEQ ID NO: 2445890
auuugcaguaguuacuccu

SEQ ID NO: 2445892 - RNA, 19 nt, Artificial Sequence
  Description of Artificial Sequence: Synthetic oligonucleotide
  Sense strand starting at position 2530 of SEQ ID NO: 1887065
ggacgaaacucugucuuua

SEQ ID NO: 2445893 - RNA, 19 nt, Artificial Sequence
  Description of Artificial Sequence: Synthetic oligonucleotide
  Antisense strand to SEQ ID NO: 2445892
uaaagacagaguuucgucc

SEQ ID NO: 2445894 - RNA, 19 nt, Artificial Sequence
  Description of Artificial Sequence: Synthetic oligonucleotide
  Sense strand starting at position 2532 of SEQ ID NO: 1887065
acgaaacucugucuuuaca

SEQ ID NO: 2445895 - RNA, 19 nt, Artificial Sequence
  Description of Artificial Sequence: Synthetic oligonucleotide
  Antisense strand to SEQ ID NO: 2445894
uguaaagacagaguuucgu

SEQ ID NO: 2445896 - RNA, 19 nt, Artificial Sequence
  Description of Artificial Sequence: Synthetic oligonucleotide
  Sense strand starting at position 3688 of SEQ ID NO: 1887065
auaagugucuccgggugaa

SEQ ID NO: 2445897 - RNA, 19 nt, Artificial Sequence
  Description of Artificial Sequence: Synthetic oligonucleotide
  Antisense strand to SEQ ID NO: 2445896
uucacccggagacacuuau

SEQ ID NO: 2445898 - RNA, 19 nt, Artificial Sequence
  Description of Artificial Sequence: Synthetic oligonucleotide
  Sense strand starting at position 3691 of SEQ ID NO: 1887065
agugucuccgggugaauau

SEQ ID NO: 2445899 - RNA, 19 nt, Artificial Sequence
  Description of Artificial Sequence: Synthetic oligonucleotide
  Antisense strand to SEQ ID NO: 2445898
auauucacccggagacacu

SEQ ID NO: 2445900 - RNA, 19 nt, Artificial Sequence
  Description of Artificial Sequence: Synthetic oligonucleotide
  Sense strand starting at position 3692 of SEQ ID NO: 1887065
gugucuccgggugaauauu

SEQ ID NO: 2445901 - RNA, 19 nt, Artificial Sequence
  Description of Artificial Sequence: Synthetic oligonucleotide
  Antisense strand to SEQ ID NO: 2445900
aauauucacccggagacac

SEQ ID NO: 2445902 - RNA, 19 nt, Artificial Sequence
  Description of Artificial Sequence: Synthetic oligonucleotide
  Sense strand starting at position 3698 of SEQ ID NO: 1887065
ccgggugaauauucauaug

SEQ ID NO: 2445903 - RNA, 19 nt, Artificial Sequence
  Description of Artificial Sequence: Synthetic oligonucleotide
  Antisense strand to SEQ ID NO: 2445902
cauaugaauauucacccgg

SEQ ID NO: 2445904 - RNA, 19 nt, Artificial Sequence
  Description of Artificial Sequence: Synthetic oligonucleotide
  Sense strand starting at position 13 of SEQ ID NO: 1887066
ugaagaagcucugaaauga

SEQ ID NO: 2445905 - RNA, 19 nt, Artificial Sequence
  Description of Artificial Sequence: Synthetic oligonucleotide
  Antisense strand to SEQ ID NO: 2445904
ucauuucagagcuucuuca

SEQ ID NO: 2445906 - RNA, 19 nt, Artificial Sequence
  Description of Artificial Sequence: Synthetic oligonucleotide
  Sense strand starting at position 346 of SEQ ID NO: 1887066
aucucuugccuuugugauc

SEQ ID NO: 2445907 - RNA, 19 nt, Artificial Sequence
  Description of Artificial Sequence: Synthetic oligonucleotide
  Antisense strand to SEQ ID NO: 2445906
gaucacaaaggcaagagau

SEQ ID NO: 2445908 - RNA, 19 nt, Artificial Sequence
  Description of Artificial Sequence: Synthetic oligonucleotide
  Sense strand starting at position 478 of SEQ ID NO: 1887066
acaggaaauuauuaugguu

SEQ ID NO: 2445909 - RNA, 19 nt, Artificial Sequence
  Description of Artificial Sequence: Synthetic oligonucleotide
  Antisense strand to SEQ ID NO: 2445908
aaccauaauaauuuccugu

SEQ ID NO: 2445910 - RNA, 19 nt, Artificial Sequence
  Description of Artificial Sequence: Synthetic oligonucleotide
  Sense strand starting at position 1113 of SEQ ID NO: 1887066
caucuauuuguuggacguu

SEQ ID NO: 2445911 - RNA, 19 nt, Artificial Sequence
  Description of Artificial Sequence: Synthetic oligonucleotide
  Antisense strand to SEQ ID NO: 2445910
aacguccaacaaauagaug

SEQ ID NO: 2445912 - RNA, 19 nt, Artificial Sequence
  Description of Artificial Sequence: Synthetic oligonucleotide
  Sense strand starting at position 1677 of SEQ ID NO: 1887066
cggucugaguccucagcau

SEQ ID NO: 2445913 - RNA, 19 nt, Artificial Sequence
  Description of Artificial Sequence: Synthetic oligonucleotide
  Antisense strand to SEQ ID NO: 2445912
augcugaggacucagaccg

SEQ ID NO: 2445914 - RNA, 19 nt, Artificial Sequence
  Description of Artificial Sequence: Synthetic oligonucleotide
  Sense strand starting at position 1709 of SEQ ID NO: 1887066
gucugagucacaggacaug

SEQ ID NO: 2445915 - RNA, 19 nt, Artificial Sequence
  Description of Artificial Sequence: Synthetic oligonucleotide
  Antisense strand to SEQ ID NO: 2445914
cauguccugugacucagac

SEQ ID NO: 2445916 - RNA, 19 nt, Artificial Sequence
  Description of Artificial Sequence: Synthetic oligonucleotide
  Sense strand starting at position 2137 of SEQ ID NO: 1887066
gcugguaguacucaugcaa

SEQ ID NO: 2445917 - RNA, 19 nt, Artificial Sequence
  Description of Artificial Sequence: Synthetic oligonucleotide
  Antisense strand to SEQ ID NO: 2445916
uugcaugaguacuaccagc

SEQ ID NO: 2445918 - RNA, 19 nt, Artificial Sequence
  Description of Artificial Sequence: Synthetic oligonucleotide
  Sense strand starting at position 2242 of SEQ ID NO: 1887066
ccacauccguguugacaaa

SEQ ID NO: 2445919 - RNA, 19 nt, Artificial Sequence
  Description of Artificial Sequence: Synthetic oligonucleotide
  Antisense strand to SEQ ID NO: 2445918
uuugucaacacggaugugg

SEQ ID NO: 2445920 - RNA, 19 nt, Artificial Sequence
  Description of Artificial Sequence: Synthetic oligonucleotide
  Sense strand starting at position 2652 of SEQ ID NO: 1887066
gucacagugagcggagauu

SEQ ID NO: 2445921 - RNA, 19 nt, Artificial Sequence
  Description of Artificial Sequence: Synthetic oligonucleotide
  Antisense strand to SEQ ID NO: 2445920
aaucuccgcucacugugac

SEQ ID NO: 2445922 - RNA, 19 nt, Artificial Sequence
  Description of Artificial Sequence: Synthetic oligonucleotide
  Sense strand starting at position 2883 of SEQ ID NO: 1887066
gugcaaaguccuuggagca

SEQ ID NO: 2445923 - RNA, 19 nt, Artificial Sequence
  Description of Artificial Sequence: Synthetic oligonucleotide
  Antisense strand to SEQ ID NO: 2445922
ugcuccaaggacuuugcac

SEQ ID NO: 2445924 - RNA, 19 nt, Artificial Sequence
  Description of Artificial Sequence: Synthetic oligonucleotide
  Sense strand starting at position 2884 of SEQ ID NO: 1887066
ugcaaaguccuuggagcaa

SEQ ID NO: 2445925 - RNA, 19 nt, Artificial Sequence
  Description of Artificial Sequence: Synthetic oligonucleotide
  Antisense strand to SEQ ID NO: 2445924
uugcuccaaggacuuugca

SEQ ID NO: 2445926 - RNA, 19 nt, Artificial Sequence
  Description of Artificial Sequence: Synthetic oligonucleotide
  Sense strand starting at position 2963 of SEQ ID NO: 1887066
gcauaaaguguaggaaauc

SEQ ID NO: 2445927 - RNA, 19 nt, Artificial Sequence
  Description of Artificial Sequence: Synthetic oligonucleotide
  Antisense strand to SEQ ID NO: 2445926
gauuuccuacacuuuaugc

SEQ ID NO: 2445928 - RNA, 19 nt, Artificial Sequence
  Description of Artificial Sequence: Synthetic oligonucleotide
  Sense strand starting at position 2964 of SEQ ID NO: 1887066
cauaaaguguaggaaauca

SEQ ID NO: 2445929 - RNA, 19 nt, Artificial Sequence
  Description of Artificial Sequence: Synthetic oligonucleotide
  Antisense strand to SEQ ID NO: 2445928
ugauuuccuacacuuuaug

SEQ ID NO: 2445930 - RNA, 19 nt, Artificial Sequence
  Description of Artificial Sequence: Synthetic oligonucleotide
  Sense strand starting at position 3400 of SEQ ID NO: 1887066
gaauguagaccgcacucua

SEQ ID NO: 2445931 - RNA, 19 nt, Artificial Sequence
  Description of Artificial Sequence: Synthetic oligonucleotide
  Antisense strand to SEQ ID NO: 2445930
uagagugcggucuacauuc

SEQ ID NO: 2445932 - RNA, 19 nt, Artificial Sequence
  Description of Artificial Sequence: Synthetic oligonucleotide
  Sense strand starting at position 3690 of SEQ ID NO: 1887066
agauaagugucucagggug

SEQ ID NO: 2445933 - RNA, 19 nt, Artificial Sequence
  Description of Artificial Sequence: Synthetic oligonucleotide
  Antisense strand to SEQ ID NO: 2445932
cacccugagacacuuaucu

SEQ ID NO: 2445934 - RNA, 19 nt, Artificial Sequence
  Description of Artificial Sequence: Synthetic oligonucleotide
  Sense strand starting at position 3692 of SEQ ID NO: 1887066
auaagugucucagggugaa

SEQ ID NO: 2445935 - RNA, 19 nt, Artificial Sequence
  Description of Artificial Sequence: Synthetic oligonucleotide
  Antisense strand to SEQ ID NO: 2445934
uucacccugagacacuuau

SEQ ID NO: 2445936 - RNA, 19 nt, Artificial Sequence
  Description of Artificial Sequence: Synthetic oligonucleotide
  Sense strand starting at position 3695 of SEQ ID NO: 1887066
agugucucagggugaauau

SEQ ID NO: 2445937 - RNA, 19 nt, Artificial Sequence
  Description of Artificial Sequence: Synthetic oligonucleotide
  Antisense strand to SEQ ID NO: 2445936
auauucacccugagacacu

SEQ ID NO: 2445938 - RNA, 19 nt, Artificial Sequence
  Description of Artificial Sequence: Synthetic oligonucleotide
  Sense strand starting at position 3696 of SEQ ID NO: 1887066
gugucucagggugaauauu

SEQ ID NO: 2445939 - RNA, 19 nt, Artificial Sequence
  Description of Artificial Sequence: Synthetic oligonucleotide
  Antisense strand to SEQ ID NO: 2445938
aauauucacccugagacac

SEQ ID NO: 2445940 - RNA, 19 nt, Artificial Sequence
  Description of Artificial Sequence: Synthetic oligonucleotide
  Sense strand starting at position 464 of SEQ ID NO: 1887067
ggaaauugauuauuauggu

SEQ ID NO: 2445941 - RNA, 19 nt, Artificial Sequence
  Description of Artificial Sequence: Synthetic oligonucleotide
  Antisense strand to SEQ ID NO: 2445940
accauaauaaucaauuucc

SEQ ID NO: 2445942 - RNA, 19 nt, Artificial Sequence
  Description of Artificial Sequence: Synthetic oligonucleotide
  Sense strand starting at position 1067 of SEQ ID NO: 1887067
cgggagguauucugugaag

SEQ ID NO: 2445943 - RNA, 19 nt, Artificial Sequence
  Description of Artificial Sequence: Synthetic oligonucleotide
  Antisense strand to SEQ ID NO: 2445942
cuucacagaauaccucccg

SEQ ID NO: 2445944 - RNA, 19 nt, Artificial Sequence
  Description of Artificial Sequence: Synthetic oligonucleotide
  Sense strand starting at position 1108 of SEQ ID NO: 1887067
ucaucuauuuguuggaagu

SEQ ID NO: 2445945 - RNA, 19 nt, Artificial Sequence
  Description of Artificial Sequence: Synthetic oligonucleotide
  Antisense strand to SEQ ID NO: 2445944
acuuccaacaaauagauga

SEQ ID NO: 2445946 - RNA, 19 nt, Artificial Sequence
  Description of Artificial Sequence: Synthetic oligonucleotide
  Sense strand starting at position 1110 of SEQ ID NO: 1887067
aucuauuuguuggaaguuu

SEQ ID NO: 2445947 - RNA, 19 nt, Artificial Sequence
  Description of Artificial Sequence: Synthetic oligonucleotide
  Antisense strand to SEQ ID NO: 2445946
aaacuuccaacaaauagau

SEQ ID NO: 2445948 - RNA, 19 nt, Artificial Sequence
  Description of Artificial Sequence: Synthetic oligonucleotide
  Sense strand starting at position 1668 of SEQ ID NO: 1887067
ugcagagacuggucugagu

SEQ ID NO: 2445949 - RNA, 19 nt, Artificial Sequence
  Description of Artificial Sequence: Synthetic oligonucleotide
  Antisense strand to SEQ ID NO: 2445948
acucagaccagucucugca

SEQ ID NO: 2445950 - RNA, 19 nt, Artificial Sequence
  Description of Artificial Sequence: Synthetic oligonucleotide
  Sense strand starting at position 1677 of SEQ ID NO: 1887067
uggucugaguccucagcau

SEQ ID NO: 2445951 - RNA, 19 nt, Artificial Sequence
  Description of Artificial Sequence: Synthetic oligonucleotide
  Antisense strand to SEQ ID NO: 2445950
augcugaggacucagacca

SEQ ID NO: 2445952 - RNA, 19 nt, Artificial Sequence
  Description of Artificial Sequence: Synthetic oligonucleotide
  Sense strand starting at position 1705 of SEQ ID NO: 1887067
ccaggucugagucauagga

SEQ ID NO: 2445953 - RNA, 19 nt, Artificial Sequence
  Description of Artificial Sequence: Synthetic oligonucleotide
  Antisense strand to SEQ ID NO: 2445952
uccuaugacucagaccugg

SEQ ID NO: 2445954 - RNA, 19 nt, Artificial Sequence
  Description of Artificial Sequence: Synthetic oligonucleotide
  Sense strand starting at position 1707 of SEQ ID NO: 1887067
aggucugagucauaggaca

SEQ ID NO: 2445955 - RNA, 19 nt, Artificial Sequence
  Description of Artificial Sequence: Synthetic oligonucleotide
  Antisense strand to SEQ ID NO: 2445954
uguccuaugacucagaccu

SEQ ID NO: 2445956 - RNA, 19 nt, Artificial Sequence
  Description of Artificial Sequence: Synthetic oligonucleotide
  Sense strand starting at position 1709 of SEQ ID NO: 1887067
gucugagucauaggacaug

SEQ ID NO: 2445957 - RNA, 19 nt, Artificial Sequence
  Description of Artificial Sequence: Synthetic oligonucleotide
  Antisense strand to SEQ ID NO: 2445956
cauguccuaugacucagac

SEQ ID NO: 2445958 - RNA, 19 nt, Artificial Sequence
  Description of Artificial Sequence: Synthetic oligonucleotide
  Sense strand starting at position 2137 of SEQ ID NO: 1887067
gcugguaguacucacgcaa

SEQ ID NO: 2445959 - RNA, 19 nt, Artificial Sequence
  Description of Artificial Sequence: Synthetic oligonucleotide
  Antisense strand to SEQ ID NO: 2445958
uugcgugaguacuaccagc

SEQ ID NO: 2445960 - RNA, 19 nt, Artificial Sequence
  Description of Artificial Sequence: Synthetic oligonucleotide
  Sense strand starting at position 2373 of SEQ ID NO: 1887067
aggaguaacuacugcaaau

SEQ ID NO: 2445961 - RNA, 19 nt, Artificial Sequence
  Description of Artificial Sequence: Synthetic oligonucleotide
  Antisense strand to SEQ ID NO: 2445960
auuugcaguaguuacuccu

SEQ ID NO: 2445962 - RNA, 19 nt, Artificial Sequence
  Description of Artificial Sequence: Synthetic oligonucleotide
  Sense strand starting at position 2530 of SEQ ID NO: 1887067
ggacgaaacucugucuuua

SEQ ID NO: 2445963 - RNA, 19 nt, Artificial Sequence
  Description of Artificial Sequence: Synthetic oligonucleotide
  Antisense strand to SEQ ID NO: 2445962
uaaagacagaguuucgucc

SEQ ID NO: 2445964 - RNA, 19 nt, Artificial Sequence
  Description of Artificial Sequence: Synthetic oligonucleotide
  Sense strand starting at position 2532 of SEQ ID NO: 1887067
acgaaacucugucuuuaca

SEQ ID NO: 2445965 - RNA, 19 nt, Artificial Sequence
  Description of Artificial Sequence: Synthetic oligonucleotide
  Antisense strand to SEQ ID NO: 2445964
uguaaagacagaguuucgu

SEQ ID NO: 2445966 - RNA, 19 nt, Artificial Sequence
  Description of Artificial Sequence: Synthetic oligonucleotide
  Sense strand starting at position 3688 of SEQ ID NO: 1887067
auaagugucuccgggugaa

SEQ ID NO: 2445967 - RNA, 19 nt, Artificial Sequence
  Description of Artificial Sequence: Synthetic oligonucleotide
  Antisense strand to SEQ ID NO: 2445966
uucacccggagacacuuau

SEQ ID NO: 2445968 - RNA, 19 nt, Artificial Sequence
  Description of Artificial Sequence: Synthetic oligonucleotide
  Sense strand starting at position 3691 of SEQ ID NO: 1887067
agugucuccgggugaauau

SEQ ID NO: 2445969 - RNA, 19 nt, Artificial Sequence
  Description of Artificial Sequence: Synthetic oligonucleotide
  Antisense strand to SEQ ID NO: 2445968
auauucacccggagacacu

SEQ ID NO: 2445970 - RNA, 19 nt, Artificial Sequence
  Description of Artificial Sequence: Synthetic oligonucleotide
  Sense strand starting at position 3692 of SEQ ID NO: 1887067
gugucuccgggugaauauu

SEQ ID NO: 2445971 - RNA, 19 nt, Artificial Sequence
  Description of Artificial Sequence: Synthetic oligonucleotide
  Antisense strand to SEQ ID NO: 2445970
aauauucacccggagacac

SEQ ID NO: 2445972 - RNA, 19 nt, Artificial Sequence
  Description of Artificial Sequence: Synthetic oligonucleotide
  Sense strand starting at position 3698 of SEQ ID NO: 1887067
ccgggugaauauucauaug

SEQ ID NO: 2445973 - RNA, 19 nt, Artificial Sequence
  Description of Artificial Sequence: Synthetic oligonucleotide
  Antisense strand to SEQ ID NO: 2445972
cauaugaauauucacccgg

SEQ ID NO: 2445974 - RNA, 19 nt, Artificial Sequence
  Description of Artificial Sequence: Synthetic oligonucleotide
  Sense strand starting at position 599 of SEQ ID NO: 1887068
ccauccagagaucguuauu

SEQ ID NO: 2445975 - RNA, 19 nt, Artificial Sequence
  Description of Artificial Sequence: Synthetic oligonucleotide
  Antisense strand to SEQ ID NO: 2445974
aauaacgaucucuggaugg

SEQ ID NO: 2445976 - RNA, 19 nt, Artificial Sequence
  Description of Artificial Sequence: Synthetic oligonucleotide
  Sense strand starting at position 654 of SEQ ID NO: 1887068
ugcacauguguguaugaaa

SEQ ID NO: 2445977 - RNA, 19 nt, Artificial Sequence
  Description of Artificial Sequence: Synthetic oligonucleotide
  Antisense strand to SEQ ID NO: 2445976
uuucauacacacaugugca

SEQ ID NO: 2445978 - RNA, 19 nt, Artificial Sequence
  Description of Artificial Sequence: Synthetic oligonucleotide
  Sense strand starting at position 661 of SEQ ID NO: 1887068
guguguaugaaauggaauu

SEQ ID NO: 2445979 - RNA, 19 nt, Artificial Sequence
  Description of Artificial Sequence: Synthetic oligonucleotide
  Antisense strand to SEQ ID NO: 2445978
aauuccauuucauacacac

SEQ ID NO: 2445980 - RNA, 19 nt, Artificial Sequence
  Description of Artificial Sequence: Synthetic oligonucleotide
  Sense strand starting at position 662 of SEQ ID NO: 1887068
uguguaugaaauggaauua

SEQ ID NO: 2445981 - RNA, 19 nt, Artificial Sequence
  Description of Artificial Sequence: Synthetic oligonucleotide
  Antisense strand to SEQ ID NO: 2445980
uaauuccauuucauacaca

SEQ ID NO: 2445982 - RNA, 19 nt, Artificial Sequence
  Description of Artificial Sequence: Synthetic oligonucleotide
  Sense strand starting at position 675 of SEQ ID NO: 1887068
gaauuaggaucuuuguaua

SEQ ID NO: 2445983 - RNA, 19 nt, Artificial Sequence
  Description of Artificial Sequence: Synthetic oligonucleotide
  Antisense strand to SEQ ID NO: 2445982
uauacaaagauccuaauuc

SEQ ID NO: 2445984 - RNA, 19 nt, Artificial Sequence
  Description of Artificial Sequence: Synthetic oligonucleotide
  Sense strand starting at position 717 of SEQ ID NO: 1887068
cuuaauauucucggcauuu

SEQ ID NO: 2445985 - RNA, 19 nt, Artificial Sequence
  Description of Artificial Sequence: Synthetic oligonucleotide
  Antisense strand to SEQ ID NO: 2445984
aaaugccgagaauauuaag

SEQ ID NO: 2445986 - RNA, 19 nt, Artificial Sequence
  Description of Artificial Sequence: Synthetic oligonucleotide
  Sense strand starting at position 718 of SEQ ID NO: 1887068
uuaauauucucggcauuuc

SEQ ID NO: 2445987 - RNA, 19 nt, Artificial Sequence
  Description of Artificial Sequence: Synthetic oligonucleotide
  Antisense strand to SEQ ID NO: 2445986
gaaaugccgagaauauuaa

SEQ ID NO: 2445988 - RNA, 19 nt, Artificial Sequence
  Description of Artificial Sequence: Synthetic oligonucleotide
  Sense strand starting at position 765 of SEQ ID NO: 1887068
ggugcaggccuuugacaua

SEQ ID NO: 2445989 - RNA, 19 nt, Artificial Sequence
  Description of Artificial Sequence: Synthetic oligonucleotide
  Antisense strand to SEQ ID NO: 2445988
uaugucaaaggccugcacc

SEQ ID NO: 2445990 - RNA, 19 nt, Artificial Sequence
  Description of Artificial Sequence: Synthetic oligonucleotide
  Sense strand starting at position 770 of SEQ ID NO: 1887068
aggccuuugacauaugggu

SEQ ID NO: 2445991 - RNA, 19 nt, Artificial Sequence
  Description of Artificial Sequence: Synthetic oligonucleotide
  Antisense strand to SEQ ID NO: 2445990
acccauaugucaaaggccu

SEQ ID NO: 2445992 - RNA, 19 nt, Artificial Sequence
  Description of Artificial Sequence: Synthetic oligonucleotide
  Sense strand starting at position 772 of SEQ ID NO: 1887068
gccuuugacauauggguuu

SEQ ID NO: 2445993 - RNA, 19 nt, Artificial Sequence
  Description of Artificial Sequence: Synthetic oligonucleotide
  Antisense strand to SEQ ID NO: 2445992
aaacccauaugucaaaggc

SEQ ID NO: 2445994 - RNA, 19 nt, Artificial Sequence
  Description of Artificial Sequence: Synthetic oligonucleotide
  Sense strand starting at position 775 of SEQ ID NO: 1887068
uuugacauauggguuuaga

SEQ ID NO: 2445995 - RNA, 19 nt, Artificial Sequence
  Description of Artificial Sequence: Synthetic oligonucleotide
  Antisense strand to SEQ ID NO: 2445994
ucuaaacccauaugucaaa

SEQ ID NO: 2445996 - RNA, 19 nt, Artificial Sequence
  Description of Artificial Sequence: Synthetic oligonucleotide
  Sense strand starting at position 830 of SEQ ID NO: 1887068
caguuuaaugcugaugcaa

SEQ ID NO: 2445997 - RNA, 19 nt, Artificial Sequence
  Description of Artificial Sequence: Synthetic oligonucleotide
  Antisense strand to SEQ ID NO: 2445996
uugcaucagcauuaaacug

SEQ ID NO: 2445998 - RNA, 19 nt, Artificial Sequence
  Description of Artificial Sequence: Synthetic oligonucleotide
  Sense strand starting at position 845 of SEQ ID NO: 1887068
gcaaauguccucguacgua

SEQ ID NO: 2445999 - RNA, 19 nt, Artificial Sequence
  Description of Artificial Sequence: Synthetic oligonucleotide
  Antisense strand to SEQ ID NO: 2445998
uacguacgaggacauuugc

SEQ ID NO: 2446000 - RNA, 19 nt, Artificial Sequence
  Description of Artificial Sequence: Synthetic oligonucleotide
  Sense strand starting at position 859 of SEQ ID NO: 1887068
acguaaaucuuucuguacu

SEQ ID NO: 2446001 - RNA, 19 nt, Artificial Sequence
  Description of Artificial Sequence: Synthetic oligonucleotide
  Antisense strand to SEQ ID NO: 2446000
aguacagaaagauuuacgu

SEQ ID NO: 2446002 - RNA, 19 nt, Artificial Sequence
  Description of Artificial Sequence: Synthetic oligonucleotide
  Sense strand starting at position 996 of SEQ ID NO: 1887068
gggagcuugcgagauugga

SEQ ID NO: 2446003 - RNA, 19 nt, Artificial Sequence
  Description of Artificial Sequence: Synthetic oligonucleotide
  Antisense strand to SEQ ID NO: 2446002
uccaaucucgcaagcuccc

SEQ ID NO: 2446004 - RNA, 19 nt, Artificial Sequence
  Description of Artificial Sequence: Synthetic oligonucleotide
  Sense strand starting at position 1046 of SEQ ID NO: 1887068
gaaggagauggcuggcaaa

SEQ ID NO: 2446005 - RNA, 19 nt, Artificial Sequence
  Description of Artificial Sequence: Synthetic oligonucleotide
  Antisense strand to SEQ ID NO: 2446004
uuugccagccaucuccuuc

SEQ ID NO: 2446006 - RNA, 19 nt, Artificial Sequence
  Description of Artificial Sequence: Synthetic oligonucleotide
  Sense strand starting at position 1226 of SEQ ID NO: 1887068
ugcauuaacuccuugcaga

SEQ ID NO: 2446007 - RNA, 19 nt, Artificial Sequence
  Description of Artificial Sequence: Synthetic oligonucleotide
  Antisense strand to SEQ ID NO: 2446006
ucugcaaggaguuaaugca

SEQ ID NO: 2446008 - RNA, 19 nt, Artificial Sequence
  Description of Artificial Sequence: Synthetic oligonucleotide
  Sense strand starting at position 1227 of SEQ ID NO: 1887068
gcauuaacuccuugcagac

SEQ ID NO: 2446009 - RNA, 19 nt, Artificial Sequence
  Description of Artificial Sequence: Synthetic oligonucleotide
  Antisense strand to SEQ ID NO: 2446008
gucugcaaggaguuaaugc

SEQ ID NO: 2446010 - RNA, 19 nt, Artificial Sequence
  Description of Artificial Sequence: Synthetic oligonucleotide
  Sense strand starting at position 1426 of SEQ ID NO: 1887068
ggaagauggagacguguaa

SEQ ID NO: 2446011 - RNA, 19 nt, Artificial Sequence
  Description of Artificial Sequence: Synthetic oligonucleotide
  Antisense strand to SEQ ID NO: 2446010
uuacacgucuccaucuucc

SEQ ID NO: 2446012 - RNA, 19 nt, Artificial Sequence
  Description of Artificial Sequence: Synthetic oligonucleotide
  Sense strand starting at position 1430 of SEQ ID NO: 1887068
gauggagacguguaaagug

SEQ ID NO: 2446013 - RNA, 19 nt, Artificial Sequence
  Description of Artificial Sequence: Synthetic oligonucleotide
  Antisense strand to SEQ ID NO: 2446012
cacuuuacacgucuccauc

SEQ ID NO: 2446014 - RNA, 19 nt, Artificial Sequence
  Description of Artificial Sequence: Synthetic oligonucleotide
  Sense strand starting at position 1480 of SEQ ID NO: 1887068
ccgguuccacugugaggau

SEQ ID NO: 2446015 - RNA, 19 nt, Artificial Sequence
  Description of Artificial Sequence: Synthetic oligonucleotide
  Antisense strand to SEQ ID NO: 2446014
auccucacaguggaaccgg

SEQ ID NO: 2446016 - RNA, 19 nt, Artificial Sequence
  Description of Artificial Sequence: Synthetic oligonucleotide
  Sense strand starting at position 1693 of SEQ ID NO: 1887068
ggcaauugcccaugaggca

SEQ ID NO: 2446017 - RNA, 19 nt, Artificial Sequence
  Description of Artificial Sequence: Synthetic oligonucleotide
  Antisense strand to SEQ ID NO: 2446016
ugccucaugggcaauugcc

SEQ ID NO: 2446018 - RNA, 19 nt, Artificial Sequence
  Description of Artificial Sequence: Synthetic oligonucleotide
  Sense strand starting at position 1694 of SEQ ID NO: 1887068
gcaauugcccaugaggcau

SEQ ID NO: 2446019 - RNA, 19 nt, Artificial Sequence
  Description of Artificial Sequence: Synthetic oligonucleotide
  Antisense strand to SEQ ID NO: 2446018
augccucaugggcaauugc

SEQ ID NO: 2446020 - RNA, 19 nt, Artificial Sequence
  Description of Artificial Sequence: Synthetic oligonucleotide
  Sense strand starting at position 1775 of SEQ ID NO: 1887068
ugaugugauuccuccgaug

SEQ ID NO: 2446021 - RNA, 19 nt, Artificial Sequence
  Description of Artificial Sequence: Synthetic oligonucleotide
  Antisense strand to SEQ ID NO: 2446020
caucggaggaaucacauca

SEQ ID NO: 2446022 - RNA, 19 nt, Artificial Sequence
  Description of Artificial Sequence: Synthetic oligonucleotide
  Sense strand starting at position 1777 of SEQ ID NO: 1887068
augugauuccuccgaugac

SEQ ID NO: 2446023 - RNA, 19 nt, Artificial Sequence
  Description of Artificial Sequence: Synthetic oligonucleotide
  Antisense strand to SEQ ID NO: 2446022
gucaucggaggaaucacau

SEQ ID NO: 2446024 - RNA, 19 nt, Artificial Sequence
  Description of Artificial Sequence: Synthetic oligonucleotide
  Sense strand starting at position 1780 of SEQ ID NO: 1887068
ugauuccuccgaugacuuc

SEQ ID NO: 2446025 - RNA, 19 nt, Artificial Sequence
  Description of Artificial Sequence: Synthetic oligonucleotide
  Antisense strand to SEQ ID NO: 2446024
gaagucaucggaggaauca

SEQ ID NO: 2446026 - RNA, 19 nt, Artificial Sequence
  Description of Artificial Sequence: Synthetic oligonucleotide
  Sense strand starting at position 1789 of SEQ ID NO: 1887068
cgaugacuucuccaaccau

SEQ ID NO: 2446027 - RNA, 19 nt, Artificial Sequence
  Description of Artificial Sequence: Synthetic oligonucleotide
  Antisense strand to SEQ ID NO: 2446026
augguuggagaagucaucg

SEQ ID NO: 2446028 - RNA, 19 nt, Artificial Sequence
  Description of Artificial Sequence: Synthetic oligonucleotide
  Sense strand starting at position 1917 of SEQ ID NO: 1887068
ccauuugucgaaugugguu

SEQ ID NO: 2446029 - RNA, 19 nt, Artificial Sequence
  Description of Artificial Sequence: Synthetic oligonucleotide
  Antisense strand to SEQ ID NO: 2446028
aaccacauucgacaaaugg

SEQ ID NO: 2446030 - RNA, 19 nt, Artificial Sequence
  Description of Artificial Sequence: Synthetic oligonucleotide
  Sense strand starting at position 2058 of SEQ ID NO: 1887068
ggaacaaauuacuggaaac

SEQ ID NO: 2446031 - RNA, 19 nt, Artificial Sequence
  Description of Artificial Sequence: Synthetic oligonucleotide
  Antisense strand to SEQ ID NO: 2446030
guuuccaguaauuuguucc

SEQ ID NO: 2446032 - RNA, 19 nt, Artificial Sequence
  Description of Artificial Sequence: Synthetic oligonucleotide
  Sense strand starting at position 2090 of SEQ ID NO: 1887068
aaagauugauucgcucaug

SEQ ID NO: 2446033 - RNA, 19 nt, Artificial Sequence
  Description of Artificial Sequence: Synthetic oligonucleotide
  Antisense strand to SEQ ID NO: 2446032
caugagcgaaucaaucuuu

SEQ ID NO: 2446034 - RNA, 19 nt, Artificial Sequence
  Description of Artificial Sequence: Synthetic oligonucleotide
  Sense strand starting at position 2093 of SEQ ID NO: 1887068
gauugauucgcucaugguu

SEQ ID NO: 2446035 - RNA, 19 nt, Artificial Sequence
  Description of Artificial Sequence: Synthetic oligonucleotide
  Antisense strand to SEQ ID NO: 2446034
aaccaugagcgaaucaauc

SEQ ID NO: 2446036 - RNA, 19 nt, Artificial Sequence
  Description of Artificial Sequence: Synthetic oligonucleotide
  Sense strand starting at position 2125 of SEQ ID NO: 1887068
guuugacaucaagguauug

SEQ ID NO: 2446037 - RNA, 19 nt, Artificial Sequence
  Description of Artificial Sequence: Synthetic oligonucleotide
  Antisense strand to SEQ ID NO: 2446036
caauaccuugaugucaaac

SEQ ID NO: 2446038 - RNA, 19 nt, Artificial Sequence
  Description of Artificial Sequence: Synthetic oligonucleotide
  Sense strand starting at position 2347 of SEQ ID NO: 1887068
aucccaaauccaggauagu

SEQ ID NO: 2446039 - RNA, 19 nt, Artificial Sequence
  Description of Artificial Sequence: Synthetic oligonucleotide
  Antisense strand to SEQ ID NO: 2446038
acuauccuggauuugggau

SEQ ID NO: 2446040 - RNA, 19 nt, Artificial Sequence
  Description of Artificial Sequence: Synthetic oligonucleotide
  Sense strand starting at position 2373 of SEQ ID NO: 1887068
cgggaucccuaaucacauc

SEQ ID NO: 2446041 - RNA, 19 nt, Artificial Sequence
  Description of Artificial Sequence: Synthetic oligonucleotide
  Antisense strand to SEQ ID NO: 2446040
gaugugauuagggaucccg

SEQ ID NO: 2446042 - RNA, 19 nt, Artificial Sequence
  Description of Artificial Sequence: Synthetic oligonucleotide
  Sense strand starting at position 3259 of SEQ ID NO: 1887068
cauggugucauggaguaga

SEQ ID NO: 2446043 - RNA, 19 nt, Artificial Sequence
  Description of Artificial Sequence: Synthetic oligonucleotide
  Antisense strand to SEQ ID NO: 2446042
ucuacuccaugacaccaug

SEQ ID NO: 2446044 - RNA, 19 nt, Artificial Sequence
  Description of Artificial Sequence: Synthetic oligonucleotide
  Sense strand starting at position 3421 of SEQ ID NO: 1887068
cuuggcuuugaggaggauu

SEQ ID NO: 2446045 - RNA, 19 nt, Artificial Sequence
  Description of Artificial Sequence: Synthetic oligonucleotide
  Antisense strand to SEQ ID NO: 2446044
aauccuccucaaagccaag

SEQ ID NO: 2446046 - RNA, 19 nt, Artificial Sequence
  Description of Artificial Sequence: Synthetic oligonucleotide
  Sense strand starting at position 3515 of SEQ ID NO: 1887068
ggugucaccuucuugacau

SEQ ID NO: 2446047 - RNA, 19 nt, Artificial Sequence
  Description of Artificial Sequence: Synthetic oligonucleotide
  Antisense strand to SEQ ID NO: 2446046
augucaagaaggugacacc

SEQ ID NO: 2446048 - RNA, 19 nt, Artificial Sequence
  Description of Artificial Sequence: Synthetic oligonucleotide
  Sense strand starting at position 3684 of SEQ ID NO: 1887068
gagaucuccuggcuguuau

SEQ ID NO: 2446049 - RNA, 19 nt, Artificial Sequence
  Description of Artificial Sequence: Synthetic oligonucleotide
  Antisense strand to SEQ ID NO: 2446048
auaacagccaggagaucuc

SEQ ID NO: 2446050 - RNA, 19 nt, Artificial Sequence
  Description of Artificial Sequence: Synthetic oligonucleotide
  Sense strand starting at position 3694 of SEQ ID NO: 1887068
ggcuguuaucuagaacaaa

SEQ ID NO: 2446051 - RNA, 19 nt, Artificial Sequence
  Description of Artificial Sequence: Synthetic oligonucleotide
  Antisense strand to SEQ ID NO: 2446050
uuuguucuagauaacagcc

SEQ ID NO: 2446052 - RNA, 19 nt, Artificial Sequence
  Description of Artificial Sequence: Synthetic oligonucleotide
  Sense strand starting at position 3705 of SEQ ID NO: 1887068
agaacaaacucgccuuuga

SEQ ID NO: 2446053 - RNA, 19 nt, Artificial Sequence
  Description of Artificial Sequence: Synthetic oligonucleotide
  Antisense strand to SEQ ID NO: 2446052
ucaaaggcgaguuuguucu

SEQ ID NO: 2446054 - RNA, 19 nt, Artificial Sequence
  Description of Artificial Sequence: Synthetic oligonucleotide
  Sense strand starting at position 368 of SEQ ID NO: 1887069
gccugacuauccgcuaauu

SEQ ID NO: 2446055 - RNA, 19 nt, Artificial Sequence
  Description of Artificial Sequence: Synthetic oligonucleotide
  Antisense strand to SEQ ID NO: 2446054
aauuagcggauagucaggc

SEQ ID NO: 2446056 - RNA, 19 nt, Artificial Sequence
  Description of Artificial Sequence: Synthetic oligonucleotide
  Sense strand starting at position 487 of SEQ ID NO: 1887069
cugggauuaauaugcguga

SEQ ID NO: 2446057 - RNA, 19 nt, Artificial Sequence
  Description of Artificial Sequence: Synthetic oligonucleotide
  Antisense strand to SEQ ID NO: 2446056
ucacgcauauuaaucccag

SEQ ID NO: 2446058 - RNA, 19 nt, Artificial Sequence
  Description of Artificial Sequence: Synthetic oligonucleotide
  Sense strand starting at position 491 of SEQ ID NO: 1887069
gauuaauaugcgugagcca

SEQ ID NO: 2446059 - RNA, 19 nt, Artificial Sequence
  Description of Artificial Sequence: Synthetic oligonucleotide
  Antisense strand to SEQ ID NO: 2446058
uggcucacgcauauuaauc

SEQ ID NO: 2446060 - RNA, 19 nt, Artificial Sequence
  Description of Artificial Sequence: Synthetic oligonucleotide
  Sense strand starting at position 1607 of SEQ ID NO: 1887069
gcauucugguucucaucuu

SEQ ID NO: 2446061 - RNA, 19 nt, Artificial Sequence
  Description of Artificial Sequence: Synthetic oligonucleotide
  Antisense strand to SEQ ID NO: 2446060
aagaugagaaccagaaugc

SEQ ID NO: 2446062 - RNA, 19 nt, Artificial Sequence
  Description of Artificial Sequence: Synthetic oligonucleotide
  Sense strand starting at position 1770 of SEQ ID NO: 1887069
gugccuggcuuaucuuuau

SEQ ID NO: 2446063 - RNA, 19 nt, Artificial Sequence
  Description of Artificial Sequence: Synthetic oligonucleotide
  Antisense strand to SEQ ID NO: 2446062
auaaagauaagccaggcac

SEQ ID NO: 2446064 - RNA, 19 nt, Artificial Sequence
  Description of Artificial Sequence: Synthetic oligonucleotide
  Sense strand starting at position 2109 of SEQ ID NO: 1887069
guacaucaucuauacugua

SEQ ID NO: 2446065 - RNA, 19 nt, Artificial Sequence
  Description of Artificial Sequence: Synthetic oligonucleotide
  Antisense strand to SEQ ID NO: 2446064
uacaguauagaugauguac

SEQ ID NO: 2446066 - RNA, 19 nt, Artificial Sequence
  Description of Artificial Sequence: Synthetic oligonucleotide
  Sense strand starting at position 2124 of SEQ ID NO: 1887069
uguagugucucaucgcaaa

SEQ ID NO: 2446067 - RNA, 19 nt, Artificial Sequence
  Description of Artificial Sequence: Synthetic oligonucleotide
  Antisense strand to SEQ ID NO: 2446066
uuugcgaugagacacuaca

SEQ ID NO: 2446068 - RNA, 19 nt, Artificial Sequence
  Description of Artificial Sequence: Synthetic oligonucleotide
  Sense strand starting at position 2138 of SEQ ID NO: 1887069
gcaaacuuacaguauauga

SEQ ID NO: 2446069 - RNA, 19 nt, Artificial Sequence
  Description of Artificial Sequence: Synthetic oligonucleotide
  Antisense strand to SEQ ID NO: 2446068
ucauauacuguaaguuugc

SEQ ID NO: 2446070 - RNA, 19 nt, Artificial Sequence
  Description of Artificial Sequence: Synthetic oligonucleotide
  Sense strand starting at position 2143 of SEQ ID NO: 1887069
cuuacaguauaugaugaua

SEQ ID NO: 2446071 - RNA, 19 nt, Artificial Sequence
  Description of Artificial Sequence: Synthetic oligonucleotide
  Antisense strand to SEQ ID NO: 2446070
uaucaucauauacuguaag

SEQ ID NO: 2446072 - RNA, 19 nt, Artificial Sequence
  Description of Artificial Sequence: Synthetic oligonucleotide
  Sense strand starting at position 2188 of SEQ ID NO: 1887069
caggaagcauggcuugaaa

SEQ ID NO: 2446073 - RNA, 19 nt, Artificial Sequence
  Description of Artificial Sequence: Synthetic oligonucleotide
  Antisense strand to SEQ ID NO: 2446072
uuucaagccaugcuuccug

SEQ ID NO: 2446074 - RNA, 19 nt, Artificial Sequence
  Description of Artificial Sequence: Synthetic oligonucleotide
  Sense strand starting at position 2303 of SEQ ID NO: 1887069
cuccuugauucugugguca

SEQ ID NO: 2446075 - RNA, 19 nt, Artificial Sequence
  Description of Artificial Sequence: Synthetic oligonucleotide
  Antisense strand to SEQ ID NO: 2446074
ugaccacagaaucaaggag

SEQ ID NO: 2446076 - RNA, 19 nt, Artificial Sequence
  Description of Artificial Sequence: Synthetic oligonucleotide
  Sense strand starting at position 2355 of SEQ ID NO: 1887069
ggagcuagggucuguuaag

SEQ ID NO: 2446077 - RNA, 19 nt, Artificial Sequence
  Description of Artificial Sequence: Synthetic oligonucleotide
  Antisense strand to SEQ ID NO: 2446076
cuuaacagacccuagcucc

SEQ ID NO: 2446078 - RNA, 19 nt, Artificial Sequence
  Description of Artificial Sequence: Synthetic oligonucleotide
  Sense strand starting at position 2356 of SEQ ID NO: 1887069
gagcuagggucuguuaaga

SEQ ID NO: 2446079 - RNA, 19 nt, Artificial Sequence
  Description of Artificial Sequence: Synthetic oligonucleotide
  Antisense strand to SEQ ID NO: 2446078
ucuuaacagacccuagcuc

SEQ ID NO: 2446080 - RNA, 19 nt, Artificial Sequence
  Description of Artificial Sequence: Synthetic oligonucleotide
  Sense strand starting at position 2418 of SEQ ID NO: 1887069
cguaaugaugcagaagguu

SEQ ID NO: 2446081 - RNA, 19 nt, Artificial Sequence
  Description of Artificial Sequence: Synthetic oligonucleotide
  Antisense strand to SEQ ID NO: 2446080
aaccuucugcaucauuacg

SEQ ID NO: 2446082 - RNA, 19 nt, Artificial Sequence
  Description of Artificial Sequence: Synthetic oligonucleotide
  Sense strand starting at position 2427 of SEQ ID NO: 1887069
gcagaagguucccuuuggu

SEQ ID NO: 2446083 - RNA, 19 nt, Artificial Sequence
  Description of Artificial Sequence: Synthetic oligonucleotide
  Antisense strand to SEQ ID NO: 2446082
accaaagggaaccuucugc

SEQ ID NO: 2446084 - RNA, 19 nt, Artificial Sequence
  Description of Artificial Sequence: Synthetic oligonucleotide
  Sense strand starting at position 2791 of SEQ ID NO: 1887069
uuuaauugcuggucagauc

SEQ ID NO: 2446085 - RNA, 19 nt, Artificial Sequence
  Description of Artificial Sequence: Synthetic oligonucleotide
  Antisense strand to SEQ ID NO: 2446084
gaucugaccagcaauuaaa

SEQ ID NO: 2446086 - RNA, 19 nt, Artificial Sequence
  Description of Artificial Sequence: Synthetic oligonucleotide
  Sense strand starting at position 2800 of SEQ ID NO: 1887069
uggucagaucccuagugga

SEQ ID NO: 2446087 - RNA, 19 nt, Artificial Sequence
  Description of Artificial Sequence: Synthetic oligonucleotide
  Antisense strand to SEQ ID NO: 2446086
uccacuagggaucugacca

SEQ ID NO: 2446088 - RNA, 19 nt, Artificial Sequence
  Description of Artificial Sequence: Synthetic oligonucleotide
  Sense strand starting at position 2813 of SEQ ID NO: 1887069
aguggaagguuucucguuu

SEQ ID NO: 2446089 - RNA, 19 nt, Artificial Sequence
  Description of Artificial Sequence: Synthetic oligonucleotide
  Antisense strand to SEQ ID NO: 2446088
aaacgagaaaccuuccacu

SEQ ID NO: 2446090 - RNA, 19 nt, Artificial Sequence
  Description of Artificial Sequence: Synthetic oligonucleotide
  Sense strand starting at position 2865 of SEQ ID NO: 1887069
ggugguaggcaauguuagu

SEQ ID NO: 2446091 - RNA, 19 nt, Artificial Sequence
  Description of Artificial Sequence: Synthetic oligonucleotide
  Antisense strand to SEQ ID NO: 2446090
acuaacauugccuaccacc

SEQ ID NO: 2446092 - RNA, 19 nt, Artificial Sequence
  Description of Artificial Sequence: Synthetic oligonucleotide
  Sense strand starting at position 2870 of SEQ ID NO: 1887069
uaggcaauguuaguugaau

SEQ ID NO: 2446093 - RNA, 19 nt, Artificial Sequence
  Description of Artificial Sequence: Synthetic oligonucleotide
  Antisense strand to SEQ ID NO: 2446092
auucaacuaacauugccua

SEQ ID NO: 2446094 - RNA, 19 nt, Artificial Sequence
  Description of Artificial Sequence: Synthetic oligonucleotide
  Sense strand starting at position 2871 of SEQ ID NO: 1887069
aggcaauguuaguugaauc

SEQ ID NO: 2446095 - RNA, 19 nt, Artificial Sequence
  Description of Artificial Sequence: Synthetic oligonucleotide
  Antisense strand to SEQ ID NO: 2446094
gauucaacuaacauugccu

SEQ ID NO: 2446096 - RNA, 19 nt, Artificial Sequence
  Description of Artificial Sequence: Synthetic oligonucleotide
  Sense strand starting at position 2872 of SEQ ID NO: 1887069
ggcaauguuaguugaaucu

SEQ ID NO: 2446097 - RNA, 19 nt, Artificial Sequence
  Description of Artificial Sequence: Synthetic oligonucleotide
  Antisense strand to SEQ ID NO: 2446096
agauucaacuaacauugcc

SEQ ID NO: 2446098 - RNA, 19 nt, Artificial Sequence
  Description of Artificial Sequence: Synthetic oligonucleotide
  Sense strand starting at position 2879 of SEQ ID NO: 1887069
uuaguugaaucucucugua

SEQ ID NO: 2446099 - RNA, 19 nt, Artificial Sequence
  Description of Artificial Sequence: Synthetic oligonucleotide
  Antisense strand to SEQ ID NO: 2446098
uacagagagauucaacuaa

SEQ ID NO: 2446100 - RNA, 19 nt, Artificial Sequence
  Description of Artificial Sequence: Synthetic oligonucleotide
  Sense strand starting at position 2881 of SEQ ID NO: 1887069
aguugaaucucucuguaua

SEQ ID NO: 2446101 - RNA, 19 nt, Artificial Sequence
  Description of Artificial Sequence: Synthetic oligonucleotide
  Antisense strand to SEQ ID NO: 2446100
uauacagagagauucaacu

SEQ ID NO: 2446102 - RNA, 19 nt, Artificial Sequence
  Description of Artificial Sequence: Synthetic oligonucleotide
  Sense strand starting at position 2882 of SEQ ID NO: 1887069
guugaaucucucuguauag

SEQ ID NO: 2446103 - RNA, 19 nt, Artificial Sequence
  Description of Artificial Sequence: Synthetic oligonucleotide
  Antisense strand to SEQ ID NO: 2446102
cuauacagagagauucaac

SEQ ID NO: 2446104 - RNA, 19 nt, Artificial Sequence
  Description of Artificial Sequence: Synthetic oligonucleotide
  Sense strand starting at position 2917 of SEQ ID NO: 1887069
gcaacuggaucuccagaau

SEQ ID NO: 2446105 - RNA, 19 nt, Artificial Sequence
  Description of Artificial Sequence: Synthetic oligonucleotide
  Antisense strand to SEQ ID NO: 2446104
auucuggagauccaguugc

SEQ ID NO: 2446106 - RNA, 19 nt, Artificial Sequence
  Description of Artificial Sequence: Synthetic oligonucleotide
  Sense strand starting at position 3083 of SEQ ID NO: 1887069
guugcucuacuaggagauu

SEQ ID NO: 2446107 - RNA, 19 nt, Artificial Sequence
  Description of Artificial Sequence: Synthetic oligonucleotide
  Antisense strand to SEQ ID NO: 2446106
aaucuccuaguagagcaac

SEQ ID NO: 2446108 - RNA, 19 nt, Artificial Sequence
  Description of Artificial Sequence: Synthetic oligonucleotide
  Sense strand starting at position 3084 of SEQ ID NO: 1887069
uugcucuacuaggagauuu

SEQ ID NO: 2446109 - RNA, 19 nt, Artificial Sequence
  Description of Artificial Sequence: Synthetic oligonucleotide
  Antisense strand to SEQ ID NO: 2446108
aaaucuccuaguagagcaa

SEQ ID NO: 2446110 - RNA, 19 nt, Artificial Sequence
  Description of Artificial Sequence: Synthetic oligonucleotide
  Sense strand starting at position 3224 of SEQ ID NO: 1887069
ggccucugcuguuuagaau

SEQ ID NO: 2446111 - RNA, 19 nt, Artificial Sequence
  Description of Artificial Sequence: Synthetic oligonucleotide
  Antisense strand to SEQ ID NO: 2446110
auucuaaacagcagaggcc

SEQ ID NO: 2446112 - RNA, 19 nt, Artificial Sequence
  Description of Artificial Sequence: Synthetic oligonucleotide
  Sense strand starting at position 3225 of SEQ ID NO: 1887069
gccucugcuguuuagaauc

SEQ ID NO: 2446113 - RNA, 19 nt, Artificial Sequence
  Description of Artificial Sequence: Synthetic oligonucleotide
  Antisense strand to SEQ ID NO: 2446112
gauucuaaacagcagaggc

SEQ ID NO: 2446114 - RNA, 19 nt, Artificial Sequence
  Description of Artificial Sequence: Synthetic oligonucleotide
  Sense strand starting at position 3282 of SEQ ID NO: 1887069
uagacaaucuggucugugu

SEQ ID NO: 2446115 - RNA, 19 nt, Artificial Sequence
  Description of Artificial Sequence: Synthetic oligonucleotide
  Antisense strand to SEQ ID NO: 2446114
acacagaccagauugucua

SEQ ID NO: 2446116 - RNA, 19 nt, Artificial Sequence
  Description of Artificial Sequence: Synthetic oligonucleotide
  Sense strand starting at position 3302 of SEQ ID NO: 1887069
cuggaaggcaguuaauacu

SEQ ID NO: 2446117 - RNA, 19 nt, Artificial Sequence
  Description of Artificial Sequence: Synthetic oligonucleotide
  Antisense strand to SEQ ID NO: 2446116
aguauuaacugccuuccag

SEQ ID NO: 2446118 - RNA, 19 nt, Artificial Sequence
  Description of Artificial Sequence: Synthetic oligonucleotide
  Sense strand starting at position 3395 of SEQ ID NO: 1887069
guguucuauuuccugaggu

SEQ ID NO: 2446119 - RNA, 19 nt, Artificial Sequence
  Description of Artificial Sequence: Synthetic oligonucleotide
  Antisense strand to SEQ ID NO: 2446118
accucaggaaauagaacac

SEQ ID NO: 2446120 - RNA, 19 nt, Artificial Sequence
  Description of Artificial Sequence: Synthetic oligonucleotide
  Sense strand starting at position 3399 of SEQ ID NO: 1887069
ucuauuuccugaggucaca

SEQ ID NO: 2446121 - RNA, 19 nt, Artificial Sequence
  Description of Artificial Sequence: Synthetic oligonucleotide
  Antisense strand to SEQ ID NO: 2446120
ugugaccucaggaaauaga

SEQ ID NO: 2446122 - RNA, 19 nt, Artificial Sequence
  Description of Artificial Sequence: Synthetic oligonucleotide
  Sense strand starting at position 3461 of SEQ ID NO: 1887069
cuccuuucuugucuaguua

SEQ ID NO: 2446123 - RNA, 19 nt, Artificial Sequence
  Description of Artificial Sequence: Synthetic oligonucleotide
  Antisense strand to SEQ ID NO: 2446122
uaacuagacaagaaaggag

SEQ ID NO: 2446124 - RNA, 19 nt, Artificial Sequence
  Description of Artificial Sequence: Synthetic oligonucleotide
  Sense strand starting at position 3818 of SEQ ID NO: 1887069
aguguuacuucugcaggga

SEQ ID NO: 2446125 - RNA, 19 nt, Artificial Sequence
  Description of Artificial Sequence: Synthetic oligonucleotide
  Antisense strand to SEQ ID NO: 2446124
ucccugcagaaguaacacu

SEQ ID NO: 2446126 - RNA, 19 nt, Artificial Sequence
  Description of Artificial Sequence: Synthetic oligonucleotide
  Sense strand starting at position 3819 of SEQ ID NO: 1887069
guguuacuucugcagggaa

SEQ ID NO: 2446127 - RNA, 19 nt, Artificial Sequence
  Description of Artificial Sequence: Synthetic oligonucleotide
  Antisense strand to SEQ ID NO: 2446126
uucccugcagaaguaacac

SEQ ID NO: 2446128 - RNA, 19 nt, Artificial Sequence
  Description of Artificial Sequence: Synthetic oligonucleotide
  Sense strand starting at position 3821 of SEQ ID NO: 1887069
guuacuucugcagggaagu

SEQ ID NO: 2446129 - RNA, 19 nt, Artificial Sequence
  Description of Artificial Sequence: Synthetic oligonucleotide
  Antisense strand to SEQ ID NO: 2446128
acuucccugcagaaguaac

SEQ ID NO: 2446130 - RNA, 19 nt, Artificial Sequence
  Description of Artificial Sequence: Synthetic oligonucleotide
  Sense strand starting at position 3832 of SEQ ID NO: 1887069
agggaagucuucccagacu

SEQ ID NO: 2446131 - RNA, 19 nt, Artificial Sequence
  Description of Artificial Sequence: Synthetic oligonucleotide
  Antisense strand to SEQ ID NO: 2446130
agucugggaagacuucccu

SEQ ID NO: 2446132 - RNA, 19 nt, Artificial Sequence
  Description of Artificial Sequence: Synthetic oligonucleotide
  Sense strand starting at position 3911 of SEQ ID NO: 1887069
ucaugagggccuuguuuau

SEQ ID NO: 2446133 - RNA, 19 nt, Artificial Sequence
  Description of Artificial Sequence: Synthetic oligonucleotide
  Antisense strand to SEQ ID NO: 2446132
auaaacaaggcccucauga

SEQ ID NO: 2446134 - RNA, 19 nt, Artificial Sequence
  Description of Artificial Sequence: Synthetic oligonucleotide
  Sense strand starting at position 75 of SEQ ID NO: 1887070
cuuaaauagucugggaaga

SEQ ID NO: 2446135 - RNA, 19 nt, Artificial Sequence
  Description of Artificial Sequence: Synthetic oligonucleotide
  Antisense strand to SEQ ID NO: 2446134
ucuucccagacuauuuaag

SEQ ID NO: 2446136 - RNA, 19 nt, Artificial Sequence
  Description of Artificial Sequence: Synthetic oligonucleotide
  Sense strand starting at position 88 of SEQ ID NO: 1887070
ggaagacuucccugcagaa

SEQ ID NO: 2446137 - RNA, 19 nt, Artificial Sequence
  Description of Artificial Sequence: Synthetic oligonucleotide
  Antisense strand to SEQ ID NO: 2446136
uucugcagggaagucuucc

SEQ ID NO: 2446138 - RNA, 19 nt, Artificial Sequence
  Description of Artificial Sequence: Synthetic oligonucleotide
  Sense strand starting at position 90 of SEQ ID NO: 1887070
aagacuucccugcagaagu

SEQ ID NO: 2446139 - RNA, 19 nt, Artificial Sequence
  Description of Artificial Sequence: Synthetic oligonucleotide
  Antisense strand to SEQ ID NO: 2446138
acuucugcagggaagucuu

SEQ ID NO: 2446140 - RNA, 19 nt, Artificial Sequence
  Description of Artificial Sequence: Synthetic oligonucleotide
  Sense strand starting at position 92 of SEQ ID NO: 1887070
gacuucccugcagaaguaa

SEQ ID NO: 2446141 - RNA, 19 nt, Artificial Sequence
  Description of Artificial Sequence: Synthetic oligonucleotide
  Antisense strand to SEQ ID NO: 2446140
uuacuucugcagggaaguc

SEQ ID NO: 2446142 - RNA, 19 nt, Artificial Sequence
  Description of Artificial Sequence: Synthetic oligonucleotide
  Sense strand starting at position 105 of SEQ ID NO: 1887070
aaguaacacuuagagaugu

SEQ ID NO: 2446143 - RNA, 19 nt, Artificial Sequence
  Description of Artificial Sequence: Synthetic oligonucleotide
  Antisense strand to SEQ ID NO: 2446142
acaucucuaaguguuacuu

SEQ ID NO: 2446144 - RNA, 19 nt, Artificial Sequence
  Description of Artificial Sequence: Synthetic oligonucleotide
  Sense strand starting at position 390 of SEQ ID NO: 1887070
agaguuaaauugucucaaa

SEQ ID NO: 2446145 - RNA, 19 nt, Artificial Sequence
  Description of Artificial Sequence: Synthetic oligonucleotide
  Antisense strand to SEQ ID NO: 2446144
uuugagacaauuuaacucu

SEQ ID NO: 2446146 - RNA, 19 nt, Artificial Sequence
  Description of Artificial Sequence: Synthetic oligonucleotide
  Sense strand starting at position 636 of SEQ ID NO: 1887070
agaccagauugucuaggau

SEQ ID NO: 2446147 - RNA, 19 nt, Artificial Sequence
  Description of Artificial Sequence: Synthetic oligonucleotide
  Antisense strand to SEQ ID NO: 2446146
auccuagacaaucuggucu

SEQ ID NO: 2446148 - RNA, 19 nt, Artificial Sequence
  Description of Artificial Sequence: Synthetic oligonucleotide
  Sense strand starting at position 777 of SEQ ID NO: 1887070
ugccuugagcuuugaagag

SEQ ID NO: 2446149 - RNA, 19 nt, Artificial Sequence
  Description of Artificial Sequence: Synthetic oligonucleotide
  Antisense strand to SEQ ID NO: 2446148
cucuucaaagcucaaggca

SEQ ID NO: 2446150 - RNA, 19 nt, Artificial Sequence
  Description of Artificial Sequence: Synthetic oligonucleotide
  Sense strand starting at position 910 of SEQ ID NO: 1887070
ccuccuugggcucaucaua

SEQ ID NO: 2446151 - RNA, 19 nt, Artificial Sequence
  Description of Artificial Sequence: Synthetic oligonucleotide
  Antisense strand to SEQ ID NO: 2446150
uaugaugagcccaaggagg

SEQ ID NO: 2446152 - RNA, 19 nt, Artificial Sequence
  Description of Artificial Sequence: Synthetic oligonucleotide
  Sense strand starting at position 1133 of SEQ ID NO: 1887070
gcaauuaaaugcuggugga

SEQ ID NO: 2446153 - RNA, 19 nt, Artificial Sequence
  Description of Artificial Sequence: Synthetic oligonucleotide
  Antisense strand to SEQ ID NO: 2446152
uccaccagcauuuaauugc

SEQ ID NO: 2446154 - RNA, 19 nt, Artificial Sequence
  Description of Artificial Sequence: Synthetic oligonucleotide
  Sense strand starting at position 1134 of SEQ ID NO: 1887070
caauuaaaugcugguggau

SEQ ID NO: 2446155 - RNA, 19 nt, Artificial Sequence
  Description of Artificial Sequence: Synthetic oligonucleotide
  Antisense strand to SEQ ID NO: 2446154
auccaccagcauuuaauug

SEQ ID NO: 2446156 - RNA, 19 nt, Artificial Sequence
  Description of Artificial Sequence: Synthetic oligonucleotide
  Sense strand starting at position 1154 of SEQ ID NO: 1887070
ggaugaggcuguucuuucu

SEQ ID NO: 2446157 - RNA, 19 nt, Artificial Sequence
  Description of Artificial Sequence: Synthetic oligonucleotide
  Antisense strand to SEQ ID NO: 2446156
agaaagaacagccucaucc

SEQ ID NO: 2446158 - RNA, 19 nt, Artificial Sequence
  Description of Artificial Sequence: Synthetic oligonucleotide
  Sense strand starting at position 1193 of SEQ ID NO: 1887070
ugaugagcuucuuggagau

SEQ ID NO: 2446159 - RNA, 19 nt, Artificial Sequence
  Description of Artificial Sequence: Synthetic oligonucleotide
  Antisense strand to SEQ ID NO: 2446158
aucuccaagaagcucauca

SEQ ID NO: 2446160 - RNA, 19 nt, Artificial Sequence
  Description of Artificial Sequence: Synthetic oligonucleotide
  Sense strand starting at position 1221 of SEQ ID NO: 1887070
gggugaauaugguccauga

SEQ ID NO: 2446161 - RNA, 19 nt, Artificial Sequence
  Description of Artificial Sequence: Synthetic oligonucleotide
  Antisense strand to SEQ ID NO: 2446160
ucauggaccauauucaccc

SEQ ID NO: 2446162 - RNA, 19 nt, Artificial Sequence
  Description of Artificial Sequence: Synthetic oligonucleotide
  Sense strand starting at position 1228 of SEQ ID NO: 1887070
uaugguccaugagagagua

SEQ ID NO: 2446163 - RNA, 19 nt, Artificial Sequence
  Description of Artificial Sequence: Synthetic oligonucleotide
  Antisense strand to SEQ ID NO: 2446162
uacucucucauggaccaua

SEQ ID NO: 2446164 - RNA, 19 nt, Artificial Sequence
  Description of Artificial Sequence: Synthetic oligonucleotide
  Sense strand starting at position 1275 of SEQ ID NO: 1887070
gccagugacccuugucaug

SEQ ID NO: 2446165 - RNA, 19 nt, Artificial Sequence
  Description of Artificial Sequence: Synthetic oligonucleotide
  Antisense strand to SEQ ID NO: 2446164
caugacaagggucacuggc

SEQ ID NO: 2446166 - RNA, 19 nt, Artificial Sequence
  Description of Artificial Sequence: Synthetic oligonucleotide
  Sense strand starting at position 1277 of SEQ ID NO: 1887070
cagugacccuugucaugga

SEQ ID NO: 2446167 - RNA, 19 nt, Artificial Sequence
  Description of Artificial Sequence: Synthetic oligonucleotide
  Antisense strand to SEQ ID NO: 2446166
uccaugacaagggucacug

SEQ ID NO: 2446168 - RNA, 19 nt, Artificial Sequence
  Description of Artificial Sequence: Synthetic oligonucleotide
  Sense strand starting at position 1350 of SEQ ID NO: 1887070
gagggaccgguaugauaaa

SEQ ID NO: 2446169 - RNA, 19 nt, Artificial Sequence
  Description of Artificial Sequence: Synthetic oligonucleotide
  Antisense strand to SEQ ID NO: 2446168
uuuaucauaccggucccuc

SEQ ID NO: 2446170 - RNA, 19 nt, Artificial Sequence
  Description of Artificial Sequence: Synthetic oligonucleotide
  Sense strand starting at position 1474 of SEQ ID NO: 1887070
gcuuguuagugugaccaaa

SEQ ID NO: 2446171 - RNA, 19 nt, Artificial Sequence
  Description of Artificial Sequence: Synthetic oligonucleotide
  Antisense strand to SEQ ID NO: 2446170
uuuggucacacuaacaagc

SEQ ID NO: 2446172 - RNA, 19 nt, Artificial Sequence
  Description of Artificial Sequence: Synthetic oligonucleotide
  Sense strand starting at position 1492 of SEQ ID NO: 1887070
agggaaccuucugcaucau

SEQ ID NO: 2446173 - RNA, 19 nt, Artificial Sequence
  Description of Artificial Sequence: Synthetic oligonucleotide
  Antisense strand to SEQ ID NO: 2446172
augaugcagaagguucccu

SEQ ID NO: 2446174 - RNA, 19 nt, Artificial Sequence
  Description of Artificial Sequence: Synthetic oligonucleotide
  Sense strand starting at position 1493 of SEQ ID NO: 1887070
gggaaccuucugcaucauu

SEQ ID NO: 2446175 - RNA, 19 nt, Artificial Sequence
  Description of Artificial Sequence: Synthetic oligonucleotide
  Antisense strand to SEQ ID NO: 2446174
aaugaugcagaagguuccc

SEQ ID NO: 2446176 - RNA, 19 nt, Artificial Sequence
  Description of Artificial Sequence: Synthetic oligonucleotide
  Sense strand starting at position 1504 of SEQ ID NO: 1887070
gcaucauuacgccaucucu

SEQ ID NO: 2446177 - RNA, 19 nt, Artificial Sequence
  Description of Artificial Sequence: Synthetic oligonucleotide
  Antisense strand to SEQ ID NO: 2446176
agagauggcguaaugaugc

SEQ ID NO: 2446178 - RNA, 19 nt, Artificial Sequence
  Description of Artificial Sequence: Synthetic oligonucleotide
  Sense strand starting at position 1515 of SEQ ID NO: 1887070
ccaucucuggcuuguuuaa

SEQ ID NO: 2446179 - RNA, 19 nt, Artificial Sequence
  Description of Artificial Sequence: Synthetic oligonucleotide
  Antisense strand to SEQ ID NO: 2446178
uuaaacaagccagagaugg

SEQ ID NO: 2446180 - RNA, 19 nt, Artificial Sequence
  Description of Artificial Sequence: Synthetic oligonucleotide
  Sense strand starting at position 1517 of SEQ ID NO: 1887070
aucucuggcuuguuuaaca

SEQ ID NO: 2446181 - RNA, 19 nt, Artificial Sequence
  Description of Artificial Sequence: Synthetic oligonucleotide
  Antisense strand to SEQ ID NO: 2446180
uguuaaacaagccagagau

SEQ ID NO: 2446182 - RNA, 19 nt, Artificial Sequence
  Description of Artificial Sequence: Synthetic oligonucleotide
  Sense strand starting at position 1544 of SEQ ID NO: 1887070
gggucccuaugagaucuua

SEQ ID NO: 2446183 - RNA, 19 nt, Artificial Sequence
  Description of Artificial Sequence: Synthetic oligonucleotide
  Antisense strand to SEQ ID NO: 2446182
uaagaucucauagggaccc

SEQ ID NO: 2446184 - RNA, 19 nt, Artificial Sequence
  Description of Artificial Sequence: Synthetic oligonucleotide
  Sense strand starting at position 1767 of SEQ ID NO: 1887070
gggauaucaucauauacug

SEQ ID NO: 2446185 - RNA, 19 nt, Artificial Sequence
  Description of Artificial Sequence: Synthetic oligonucleotide
  Antisense strand to SEQ ID NO: 2446184
caguauaugaugauauccc

SEQ ID NO: 2446186 - RNA, 19 nt, Artificial Sequence
  Description of Artificial Sequence: Synthetic oligonucleotide
  Sense strand starting at position 1781 of SEQ ID NO: 1887070
uacuguaaguuugcgauga

SEQ ID NO: 2446187 - RNA, 19 nt, Artificial Sequence
  Description of Artificial Sequence: Synthetic oligonucleotide
  Antisense strand to SEQ ID NO: 2446186
ucaucgcaaacuuacagua

SEQ ID NO: 2446188 - RNA, 19 nt, Artificial Sequence
  Description of Artificial Sequence: Synthetic oligonucleotide
  Sense strand starting at position 1783 of SEQ ID NO: 1887070
cuguaaguuugcgaugaga

SEQ ID NO: 2446189 - RNA, 19 nt, Artificial Sequence
  Description of Artificial Sequence: Synthetic oligonucleotide
  Antisense strand to SEQ ID NO: 2446188
ucucaucgcaaacuuacag

SEQ ID NO: 2446190 - RNA, 19 nt, Artificial Sequence
  Description of Artificial Sequence: Synthetic oligonucleotide
  Sense strand starting at position 1785 of SEQ ID NO: 1887070
guaaguuugcgaugagaca

SEQ ID NO: 2446191 - RNA, 19 nt, Artificial Sequence
  Description of Artificial Sequence: Synthetic oligonucleotide
  Antisense strand to SEQ ID NO: 2446190
ugucucaucgcaaacuuac

SEQ ID NO: 2446192 - RNA, 19 nt, Artificial Sequence
  Description of Artificial Sequence: Synthetic oligonucleotide
  Sense strand starting at position 1807 of SEQ ID NO: 1887070
caguauagaugauguacua

SEQ ID NO: 2446193 - RNA, 19 nt, Artificial Sequence
  Description of Artificial Sequence: Synthetic oligonucleotide
  Antisense strand to SEQ ID NO: 2446192
uaguacaucaucuauacug

SEQ ID NO: 2446194 - RNA, 19 nt, Artificial Sequence
  Description of Artificial Sequence: Synthetic oligonucleotide
  Sense strand starting at position 1883 of SEQ ID NO: 1887070
ccaagaagcucucugcuca

SEQ ID NO: 2446195 - RNA, 19 nt, Artificial Sequence
  Description of Artificial Sequence: Synthetic oligonucleotide
  Antisense strand to SEQ ID NO: 2446194
ugagcagagagcuucuugg

SEQ ID NO: 2446196 - RNA, 19 nt, Artificial Sequence
  Description of Artificial Sequence: Synthetic oligonucleotide
  Sense strand starting at position 2125 of SEQ ID NO: 1887070
ucuuuccuguuguaaagaa

SEQ ID NO: 2446197 - RNA, 19 nt, Artificial Sequence
  Description of Artificial Sequence: Synthetic oligonucleotide
  Antisense strand to SEQ ID NO: 2446196
uucuuuacaacaggaaaga

SEQ ID NO: 2446198 - RNA, 19 nt, Artificial Sequence
  Description of Artificial Sequence: Synthetic oligonucleotide
  Sense strand starting at position 2252 of SEQ ID NO: 1887070
uagugagacucagucccua

SEQ ID NO: 2446199 - RNA, 19 nt, Artificial Sequence
  Description of Artificial Sequence: Synthetic oligonucleotide
  Antisense strand to SEQ ID NO: 2446198
uagggacugagucucacua

SEQ ID NO: 2446200 - RNA, 19 nt, Artificial Sequence
  Description of Artificial Sequence: Synthetic oligonucleotide
  Sense strand starting at position 2311 of SEQ ID NO: 1887070
ugagaaccagaaugcuuau

SEQ ID NO: 2446201 - RNA, 19 nt, Artificial Sequence
  Description of Artificial Sequence: Synthetic oligonucleotide
  Antisense strand to SEQ ID NO: 2446200
auaagcauucugguucuca

SEQ ID NO: 2446202 - RNA, 19 nt, Artificial Sequence
  Description of Artificial Sequence: Synthetic oligonucleotide
  Sense strand starting at position 2932 of SEQ ID NO: 1887070
ucaggaguuucugagggua

SEQ ID NO: 2446203 - RNA, 19 nt, Artificial Sequence
  Description of Artificial Sequence: Synthetic oligonucleotide
  Antisense strand to SEQ ID NO: 2446202
uacccucagaaacuccuga

SEQ ID NO: 2446204 - RNA, 19 nt, Artificial Sequence
  Description of Artificial Sequence: Synthetic oligonucleotide
  Sense strand starting at position 2934 of SEQ ID NO: 1887070
aggaguuucugaggguaug

SEQ ID NO: 2446205 - RNA, 19 nt, Artificial Sequence
  Description of Artificial Sequence: Synthetic oligonucleotide
  Antisense strand to SEQ ID NO: 2446204
cauacccucagaaacuccu

SEQ ID NO: 2446206 - RNA, 19 nt, Artificial Sequence
  Description of Artificial Sequence: Synthetic oligonucleotide
  Sense strand starting at position 2935 of SEQ ID NO: 1887070
ggaguuucugaggguaugu

SEQ ID NO: 2446207 - RNA, 19 nt, Artificial Sequence
  Description of Artificial Sequence: Synthetic oligonucleotide
  Antisense strand to SEQ ID NO: 2446206
acauacccucagaaacucc

SEQ ID NO: 2446208 - RNA, 19 nt, Artificial Sequence
  Description of Artificial Sequence: Synthetic oligonucleotide
  Sense strand starting at position 3020 of SEQ ID NO: 1887070
agaagauccuuugagcaca

SEQ ID NO: 2446209 - RNA, 19 nt, Artificial Sequence
  Description of Artificial Sequence: Synthetic oligonucleotide
  Antisense strand to SEQ ID NO: 2446208
ugugcucaaaggaucuucu

SEQ ID NO: 2446210 - RNA, 19 nt, Artificial Sequence
  Description of Artificial Sequence: Synthetic oligonucleotide
  Sense strand starting at position 3422 of SEQ ID NO: 1887070
guggcucacgcauauuaau

SEQ ID NO: 2446211 - RNA, 19 nt, Artificial Sequence
  Description of Artificial Sequence: Synthetic oligonucleotide
  Antisense strand to SEQ ID NO: 2446210
auuaauaugcgugagccac

SEQ ID NO: 2446212 - RNA, 19 nt, Artificial Sequence
  Description of Artificial Sequence: Synthetic oligonucleotide
  Sense strand starting at position 3589 of SEQ ID NO: 1887070
cggacaauuugaggucaag

SEQ ID NO: 2446213 - RNA, 19 nt, Artificial Sequence
  Description of Artificial Sequence: Synthetic oligonucleotide
  Antisense strand to SEQ ID NO: 2446212
cuugaccucaaauuguccg

SEQ ID NO: 2446214 - RNA, 19 nt, Artificial Sequence
  Description of Artificial Sequence: Synthetic oligonucleotide
  Sense strand starting at position 6 of SEQ ID NO: 1887071
aggccuugcugauuaguua

SEQ ID NO: 2446215 - RNA, 19 nt, Artificial Sequence
  Description of Artificial Sequence: Synthetic oligonucleotide
  Antisense strand to SEQ ID NO: 2446214
uaacuaaucagcaaggccu

SEQ ID NO: 2446216 - RNA, 19 nt, Artificial Sequence
  Description of Artificial Sequence: Synthetic oligonucleotide
  Sense strand starting at position 7 of SEQ ID NO: 1887071
ggccuugcugauuaguuaa

SEQ ID NO: 2446217 - RNA, 19 nt, Artificial Sequence
  Description of Artificial Sequence: Synthetic oligonucleotide
  Antisense strand to SEQ ID NO: 2446216
uuaacuaaucagcaaggcc

SEQ ID NO: 2446218 - RNA, 19 nt, Artificial Sequence
  Description of Artificial Sequence: Synthetic oligonucleotide
  Sense strand starting at position 9 of SEQ ID NO: 1887071
ccuugcugauuaguuaaca

SEQ ID NO: 2446219 - RNA, 19 nt, Artificial Sequence
  Description of Artificial Sequence: Synthetic oligonucleotide
  Antisense strand to SEQ ID NO: 2446218
uguuaacuaaucagcaagg

SEQ ID NO: 2446220 - RNA, 19 nt, Artificial Sequence
  Description of Artificial Sequence: Synthetic oligonucleotide
  Sense strand starting at position 10 of SEQ ID NO: 1887071
cuugcugauuaguuaacau

SEQ ID NO: 2446221 - RNA, 19 nt, Artificial Sequence
  Description of Artificial Sequence: Synthetic oligonucleotide
  Antisense strand to SEQ ID NO: 2446220
auguuaacuaaucagcaag

SEQ ID NO: 2446222 - RNA, 19 nt, Artificial Sequence
  Description of Artificial Sequence: Synthetic oligonucleotide
  Sense strand starting at position 21 of SEQ ID NO: 1887071
guuaacauguaaucugaga

SEQ ID NO: 2446223 - RNA, 19 nt, Artificial Sequence
  Description of Artificial Sequence: Synthetic oligonucleotide
  Antisense strand to SEQ ID NO: 2446222
ucucagauuacauguuaac

SEQ ID NO: 2446224 - RNA, 19 nt, Artificial Sequence
  Description of Artificial Sequence: Synthetic oligonucleotide
  Sense strand starting at position 28 of SEQ ID NO: 1887071
uguaaucugagauaugugu

SEQ ID NO: 2446225 - RNA, 19 nt, Artificial Sequence
  Description of Artificial Sequence: Synthetic oligonucleotide
  Antisense strand to SEQ ID NO: 2446224
acacauaucucagauuaca

SEQ ID NO: 2446226 - RNA, 19 nt, Artificial Sequence
  Description of Artificial Sequence: Synthetic oligonucleotide
  Sense strand starting at position 32 of SEQ ID NO: 1887071
aucugagauaugugugaau

SEQ ID NO: 2446227 - RNA, 19 nt, Artificial Sequence
  Description of Artificial Sequence: Synthetic oligonucleotide
  Antisense strand to SEQ ID NO: 2446226
auucacacauaucucagau

SEQ ID NO: 2446228 - RNA, 19 nt, Artificial Sequence
  Description of Artificial Sequence: Synthetic oligonucleotide
  Sense strand starting at position 34 of SEQ ID NO: 1887071
cugagauaugugugaauga

SEQ ID NO: 2446229 - RNA, 19 nt, Artificial Sequence
  Description of Artificial Sequence: Synthetic oligonucleotide
  Antisense strand to SEQ ID NO: 2446228
ucauucacacauaucucag

SEQ ID NO: 2446230 - RNA, 19 nt, Artificial Sequence
  Description of Artificial Sequence: Synthetic oligonucleotide
  Sense strand starting at position 39 of SEQ ID NO: 1887071
auaugugugaaugaacagu

SEQ ID NO: 2446231 - RNA, 19 nt, Artificial Sequence
  Description of Artificial Sequence: Synthetic oligonucleotide
  Antisense strand to SEQ ID NO: 2446230
acuguucauucacacauau

SEQ ID NO: 2446232 - RNA, 19 nt, Artificial Sequence
  Description of Artificial Sequence: Synthetic oligonucleotide
  Sense strand starting at position 68 of SEQ ID NO: 1887071
aggugcauucuaggcagaa

SEQ ID NO: 2446233 - RNA, 19 nt, Artificial Sequence
  Description of Artificial Sequence: Synthetic oligonucleotide
  Antisense strand to SEQ ID NO: 2446232
uucugccuagaaugcaccu

SEQ ID NO: 2446234 - RNA, 19 nt, Artificial Sequence
  Description of Artificial Sequence: Synthetic oligonucleotide
  Sense strand starting at position 69 of SEQ ID NO: 1887071
ggugcauucuaggcagaag

SEQ ID NO: 2446235 - RNA, 19 nt, Artificial Sequence
  Description of Artificial Sequence: Synthetic oligonucleotide
  Antisense strand to SEQ ID NO: 2446234
cuucugccuagaaugcacc

SEQ ID NO: 2446236 - RNA, 19 nt, Artificial Sequence
  Description of Artificial Sequence: Synthetic oligonucleotide
  Sense strand starting at position 70 of SEQ ID NO: 1887071
gugcauucuaggcagaaga

SEQ ID NO: 2446237 - RNA, 19 nt, Artificial Sequence
  Description of Artificial Sequence: Synthetic oligonucleotide
  Antisense strand to SEQ ID NO: 2446236
ucuucugccuagaaugcac

SEQ ID NO: 2446238 - RNA, 19 nt, Artificial Sequence
  Description of Artificial Sequence: Synthetic oligonucleotide
  Sense strand starting at position 359 of SEQ ID NO: 1887071
ggcuucuguguguagaaug

SEQ ID NO: 2446239 - RNA, 19 nt, Artificial Sequence
  Description of Artificial Sequence: Synthetic oligonucleotide
  Antisense strand to SEQ ID NO: 2446238
cauucuacacacagaagcc

SEQ ID NO: 2446240 - RNA, 19 nt, Artificial Sequence
  Description of Artificial Sequence: Synthetic oligonucleotide
  Sense strand starting at position 385 of SEQ ID NO: 1887071
gugguucucaacuaagugu

SEQ ID NO: 2446241 - RNA, 19 nt, Artificial Sequence
  Description of Artificial Sequence: Synthetic oligonucleotide
  Antisense strand to SEQ ID NO: 2446240
acacuuaguugagaaccac

SEQ ID NO: 2446242 - RNA, 19 nt, Artificial Sequence
  Description of Artificial Sequence: Synthetic oligonucleotide
  Sense strand starting at position 388 of SEQ ID NO: 1887071
guucucaacuaagugugau

SEQ ID NO: 2446243 - RNA, 19 nt, Artificial Sequence
  Description of Artificial Sequence: Synthetic oligonucleotide
  Antisense strand to SEQ ID NO: 2446242
aucacacuuaguugagaac

SEQ ID NO: 2446244 - RNA, 19 nt, Artificial Sequence
  Description of Artificial Sequence: Synthetic oligonucleotide
  Sense strand starting at position 902 of SEQ ID NO: 1887071
cgugcugaaucaguuaaga

SEQ ID NO: 2446245 - RNA, 19 nt, Artificial Sequence
  Description of Artificial Sequence: Synthetic oligonucleotide
  Antisense strand to SEQ ID NO: 2446244
ucuuaacugauucagcacg

SEQ ID NO: 2446246 - RNA, 19 nt, Artificial Sequence
  Description of Artificial Sequence: Synthetic oligonucleotide
  Sense strand starting at position 1017 of SEQ ID NO: 1887071
caggucuggcgacgauauu

SEQ ID NO: 2446247 - RNA, 19 nt, Artificial Sequence
  Description of Artificial Sequence: Synthetic oligonucleotide
  Antisense strand to SEQ ID NO: 2446246
aauaucgucgccagaccug

SEQ ID NO: 2446248 - RNA, 19 nt, Artificial Sequence
  Description of Artificial Sequence: Synthetic oligonucleotide
  Sense strand starting at position 1176 of SEQ ID NO: 1887071
agcaaaggugugcgaacaa

SEQ ID NO: 2446249 - RNA, 19 nt, Artificial Sequence
  Description of Artificial Sequence: Synthetic oligonucleotide
  Antisense strand to SEQ ID NO: 2446248
uuguucgcacaccuuugcu

SEQ ID NO: 2446250 - RNA, 19 nt, Artificial Sequence
  Description of Artificial Sequence: Synthetic oligonucleotide
  Sense strand starting at position 1338 of SEQ ID NO: 1887071
gagaguucuaucugcgaag

SEQ ID NO: 2446251 - RNA, 19 nt, Artificial Sequence
  Description of Artificial Sequence: Synthetic oligonucleotide
  Antisense strand to SEQ ID NO: 2446250
cuucgcagauagaacucuc

SEQ ID NO: 2446252 - RNA, 19 nt, Artificial Sequence
  Description of Artificial Sequence: Synthetic oligonucleotide
  Sense strand starting at position 1339 of SEQ ID NO: 1887071
agaguucuaucugcgaaga

SEQ ID NO: 2446253 - RNA, 19 nt, Artificial Sequence
  Description of Artificial Sequence: Synthetic oligonucleotide
  Antisense strand to SEQ ID NO: 2446252
ucuucgcagauagaacucu

SEQ ID NO: 2446254 - RNA, 19 nt, Artificial Sequence
  Description of Artificial Sequence: Synthetic oligonucleotide
  Sense strand starting at position 1340 of SEQ ID NO: 1887071
gaguucuaucugcgaagac

SEQ ID NO: 2446255 - RNA, 19 nt, Artificial Sequence
  Description of Artificial Sequence: Synthetic oligonucleotide
  Antisense strand to SEQ ID NO: 2446254
gucuucgcagauagaacuc

SEQ ID NO: 2446256 - RNA, 19 nt, Artificial Sequence
  Description of Artificial Sequence: Synthetic oligonucleotide
  Sense strand starting at position 1686 of SEQ ID NO: 1887071
aagacaagugugcaaaguu

SEQ ID NO: 2446257 - RNA, 19 nt, Artificial Sequence
  Description of Artificial Sequence: Synthetic oligonucleotide
  Antisense strand to SEQ ID NO: 2446256
aacuuugcacacuugucuu

SEQ ID NO: 2446258 - RNA, 19 nt, Artificial Sequence
  Description of Artificial Sequence: Synthetic oligonucleotide
  Sense strand starting at position 1694 of SEQ ID NO: 1887071
ugugcaaaguugguggaau

SEQ ID NO: 2446259 - RNA, 19 nt, Artificial Sequence
  Description of Artificial Sequence: Synthetic oligonucleotide
  Antisense strand to SEQ ID NO: 2446258
auuccaccaacuuugcaca

SEQ ID NO: 2446260 - RNA, 19 nt, Artificial Sequence
  Description of Artificial Sequence: Synthetic oligonucleotide
  Sense strand starting at position 1696 of SEQ ID NO: 1887071
ugcaaaguugguggaauga

SEQ ID NO: 2446261 - RNA, 19 nt, Artificial Sequence
  Description of Artificial Sequence: Synthetic oligonucleotide
  Antisense strand to SEQ ID NO: 2446260
ucauuccaccaacuuugca

SEQ ID NO: 2446262 - RNA, 19 nt, Artificial Sequence
  Description of Artificial Sequence: Synthetic oligonucleotide
  Sense strand starting at position 1709 of SEQ ID NO: 1887071
gaaugaauucgguggccua

SEQ ID NO: 2446263 - RNA, 19 nt, Artificial Sequence
  Description of Artificial Sequence: Synthetic oligonucleotide
  Antisense strand to SEQ ID NO: 2446262
uaggccaccgaauucauuc

SEQ ID NO: 2446264 - RNA, 19 nt, Artificial Sequence
  Description of Artificial Sequence: Synthetic oligonucleotide
  Sense strand starting at position 1710 of SEQ ID NO: 1887071
aaugaauucgguggccuaa

SEQ ID NO: 2446265 - RNA, 19 nt, Artificial Sequence
  Description of Artificial Sequence: Synthetic oligonucleotide
  Antisense strand to SEQ ID NO: 2446264
uuaggccaccgaauucauu

SEQ ID NO: 2446266 - RNA, 19 nt, Artificial Sequence
  Description of Artificial Sequence: Synthetic oligonucleotide
  Sense strand starting at position 1712 of SEQ ID NO: 1887071
ugaauucgguggccuaaau

SEQ ID NO: 2446267 - RNA, 19 nt, Artificial Sequence
  Description of Artificial Sequence: Synthetic oligonucleotide
  Antisense strand to SEQ ID NO: 2446266
auuuaggccaccgaauuca

SEQ ID NO: 2446268 - RNA, 19 nt, Artificial Sequence
  Description of Artificial Sequence: Synthetic oligonucleotide
  Sense strand starting at position 1999 of SEQ ID NO: 1887071
acaguaagcgcuuaauaaa

SEQ ID NO: 2446269 - RNA, 19 nt, Artificial Sequence
  Description of Artificial Sequence: Synthetic oligonucleotide
  Antisense strand to SEQ ID NO: 2446268
uuuauuaagcgcuuacugu

SEQ ID NO: 2446270 - RNA, 19 nt, Artificial Sequence
  Description of Artificial Sequence: Synthetic oligonucleotide
  Sense strand starting at position 2079 of SEQ ID NO: 1887071
agagcucccuugucuggaa

SEQ ID NO: 2446271 - RNA, 19 nt, Artificial Sequence
  Description of Artificial Sequence: Synthetic oligonucleotide
  Antisense strand to SEQ ID NO: 2446270
uuccagacaagggagcucu

SEQ ID NO: 2446272 - RNA, 19 nt, Artificial Sequence
  Description of Artificial Sequence: Synthetic oligonucleotide
  Sense strand starting at position 2080 of SEQ ID NO: 1887071
gagcucccuugucuggaaa

SEQ ID NO: 2446273 - RNA, 19 nt, Artificial Sequence
  Description of Artificial Sequence: Synthetic oligonucleotide
  Antisense strand to SEQ ID NO: 2446272
uuuccagacaagggagcuc

SEQ ID NO: 2446274 - RNA, 19 nt, Artificial Sequence
  Description of Artificial Sequence: Synthetic oligonucleotide
  Sense strand starting at position 2297 of SEQ ID NO: 1887071
auaucuaccggguguucua

SEQ ID NO: 2446275 - RNA, 19 nt, Artificial Sequence
  Description of Artificial Sequence: Synthetic oligonucleotide
  Antisense strand to SEQ ID NO: 2446274
uagaacacccgguagauau

SEQ ID NO: 2446276 - RNA, 19 nt, Artificial Sequence
  Description of Artificial Sequence: Synthetic oligonucleotide
  Sense strand starting at position 2536 of SEQ ID NO: 1887071
cggcgcagucaguucuaga

SEQ ID NO: 2446277 - RNA, 19 nt, Artificial Sequence
  Description of Artificial Sequence: Synthetic oligonucleotide
  Antisense strand to SEQ ID NO: 2446276
ucuagaacugacugcgccg

SEQ ID NO: 2446278 - RNA, 19 nt, Artificial Sequence
  Description of Artificial Sequence: Synthetic oligonucleotide
  Sense strand starting at position 2546 of SEQ ID NO: 1887071
aguucuagacccugagcau

SEQ ID NO: 2446279 - RNA, 19 nt, Artificial Sequence
  Description of Artificial Sequence: Synthetic oligonucleotide
  Antisense strand to SEQ ID NO: 2446278
augcucagggucuagaacu

SEQ ID NO: 2446280 - RNA, 19 nt, Artificial Sequence
  Description of Artificial Sequence: Synthetic oligonucleotide
  Sense strand starting at position 2809 of SEQ ID NO: 1887071
guuggugacacacaguaaa

SEQ ID NO: 2446281 - RNA, 19 nt, Artificial Sequence
  Description of Artificial Sequence: Synthetic oligonucleotide
  Antisense strand to SEQ ID NO: 2446280
uuuacugugugucaccaac

SEQ ID NO: 2446282 - RNA, 19 nt, Artificial Sequence
  Description of Artificial Sequence: Synthetic oligonucleotide
  Sense strand starting at position 2820 of SEQ ID NO: 1887071
acaguaaacgcucaauaaa

SEQ ID NO: 2446283 - RNA, 19 nt, Artificial Sequence
  Description of Artificial Sequence: Synthetic oligonucleotide
  Antisense strand to SEQ ID NO: 2446282
uuuauugagcguuuacugu

SEQ ID NO: 2446284 - RNA, 19 nt, Artificial Sequence
  Description of Artificial Sequence: Synthetic oligonucleotide
  Sense strand starting at position 2836 of SEQ ID NO: 1887071
aaauguuuccgcuacucga

SEQ ID NO: 2446285 - RNA, 19 nt, Artificial Sequence
  Description of Artificial Sequence: Synthetic oligonucleotide
  Antisense strand to SEQ ID NO: 2446284
ucgaguagcggaaacauuu

SEQ ID NO: 2446286 - RNA, 19 nt, Artificial Sequence
  Description of Artificial Sequence: Synthetic oligonucleotide
  Sense strand starting at position 2849 of SEQ ID NO: 1887071
acucgaucuccuuggaauu

SEQ ID NO: 2446287 - RNA, 19 nt, Artificial Sequence
  Description of Artificial Sequence: Synthetic oligonucleotide
  Antisense strand to SEQ ID NO: 2446286
aauuccaaggagaucgagu

SEQ ID NO: 2446288 - RNA, 19 nt, Artificial Sequence
  Description of Artificial Sequence: Synthetic oligonucleotide
  Sense strand starting at position 2850 of SEQ ID NO: 1887071
cucgaucuccuuggaauua

SEQ ID NO: 2446289 - RNA, 19 nt, Artificial Sequence
  Description of Artificial Sequence: Synthetic oligonucleotide
  Antisense strand to SEQ ID NO: 2446288
uaauuccaaggagaucgag

SEQ ID NO: 2446290 - RNA, 19 nt, Artificial Sequence
  Description of Artificial Sequence: Synthetic oligonucleotide
  Sense strand starting at position 3088 of SEQ ID NO: 1887071
gcuuguucucgggaccaaa

SEQ ID NO: 2446291 - RNA, 19 nt, Artificial Sequence
  Description of Artificial Sequence: Synthetic oligonucleotide
  Antisense strand to SEQ ID NO: 2446290
uuuggucccgagaacaagc

SEQ ID NO: 2446292 - RNA, 19 nt, Artificial Sequence
  Description of Artificial Sequence: Synthetic oligonucleotide
  Sense strand starting at position 3283 of SEQ ID NO: 1887071
ccaggucuccgggaagguu

SEQ ID NO: 2446293 - RNA, 19 nt, Artificial Sequence
  Description of Artificial Sequence: Synthetic oligonucleotide
  Antisense strand to SEQ ID NO: 2446292
aaccuucccggagaccugg

SEQ ID NO: 2446294 - RNA, 19 nt, Artificial Sequence
  Description of Artificial Sequence: Synthetic oligonucleotide
  Sense strand starting at position 136 of SEQ ID NO: 1887072
cggagauccagcugcagaa

SEQ ID NO: 2446295 - RNA, 19 nt, Artificial Sequence
  Description of Artificial Sequence: Synthetic oligonucleotide
  Antisense strand to SEQ ID NO: 2446294
uucugcagcuggaucuccg

SEQ ID NO: 2446296 - RNA, 19 nt, Artificial Sequence
  Description of Artificial Sequence: Synthetic oligonucleotide
  Sense strand starting at position 857 of SEQ ID NO: 1887072
agccguucgaauguguuaa

SEQ ID NO: 2446297 - RNA, 19 nt, Artificial Sequence
  Description of Artificial Sequence: Synthetic oligonucleotide
  Antisense strand to SEQ ID NO: 2446296
uuaacacauucgaacggcu

SEQ ID NO: 2446298 - RNA, 19 nt, Artificial Sequence
  Description of Artificial Sequence: Synthetic oligonucleotide
  Sense strand starting at position 956 of SEQ ID NO: 1887072
ggagguuugaaauggcuuu

SEQ ID NO: 2446299 - RNA, 19 nt, Artificial Sequence
  Description of Artificial Sequence: Synthetic oligonucleotide
  Antisense strand to SEQ ID NO: 2446298
aaagccauuucaaaccucc

SEQ ID NO: 2446300 - RNA, 19 nt, Artificial Sequence
  Description of Artificial Sequence: Synthetic oligonucleotide
  Sense strand starting at position 1018 of SEQ ID NO: 1887072
gcaguuuccaggcaccaga

SEQ ID NO: 2446301 - RNA, 19 nt, Artificial Sequence
  Description of Artificial Sequence: Synthetic oligonucleotide
  Antisense strand to SEQ ID NO: 2446300
ucuggugccuggaaacugc

SEQ ID NO: 2446302 - RNA, 19 nt, Artificial Sequence
  Description of Artificial Sequence: Synthetic oligonucleotide
  Sense strand starting at position 1070 of SEQ ID NO: 1887072
ccuuaauuccaaggagauc

SEQ ID NO: 2446303 - RNA, 19 nt, Artificial Sequence
  Description of Artificial Sequence: Synthetic oligonucleotide
  Antisense strand to SEQ ID NO: 2446302
gaucuccuuggaauuaagg

SEQ ID NO: 2446304 - RNA, 19 nt, Artificial Sequence
  Description of Artificial Sequence: Synthetic oligonucleotide
  Sense strand starting at position 1085 of SEQ ID NO: 1887072
gaucgaguagcggaaacau

SEQ ID NO: 2446305 - RNA, 19 nt, Artificial Sequence
  Description of Artificial Sequence: Synthetic oligonucleotide
  Antisense strand to SEQ ID NO: 2446304
auguuuccgcuacucgauc

SEQ ID NO: 2446306 - RNA, 19 nt, Artificial Sequence
  Description of Artificial Sequence: Synthetic oligonucleotide
  Sense strand starting at position 1402 of SEQ ID NO: 1887072
gccggauucuuguuuagag

SEQ ID NO: 2446307 - RNA, 19 nt, Artificial Sequence
  Description of Artificial Sequence: Synthetic oligonucleotide
  Antisense strand to SEQ ID NO: 2446306
cucuaaacaagaauccggc

SEQ ID NO: 2446308 - RNA, 19 nt, Artificial Sequence
  Description of Artificial Sequence: Synthetic oligonucleotide
  Sense strand starting at position 1520 of SEQ ID NO: 1887072
uuugacguucccugagaca

SEQ ID NO: 2446309 - RNA, 19 nt, Artificial Sequence
  Description of Artificial Sequence: Synthetic oligonucleotide
  Antisense strand to SEQ ID NO: 2446308
ugucucagggaacgucaaa

SEQ ID NO: 2446310 - RNA, 19 nt, Artificial Sequence
  Description of Artificial Sequence: Synthetic oligonucleotide
  Sense strand starting at position 1570 of SEQ ID NO: 1887072
uagagcagugaugggaauu

SEQ ID NO: 2446311 - RNA, 19 nt, Artificial Sequence
  Description of Artificial Sequence: Synthetic oligonucleotide
  Antisense strand to SEQ ID NO: 2446310
aauucccaucacugcucua

SEQ ID NO: 2446312 - RNA, 19 nt, Artificial Sequence
  Description of Artificial Sequence: Synthetic oligonucleotide
  Sense strand starting at position 1589 of SEQ ID NO: 1887072
ugggcuuucgcggaagaaa

SEQ ID NO: 2446313 - RNA, 19 nt, Artificial Sequence
  Description of Artificial Sequence: Synthetic oligonucleotide
  Antisense strand to SEQ ID NO: 2446312
uuucuuccgcgaaagccca

SEQ ID NO: 2446314 - RNA, 19 nt, Artificial Sequence
  Description of Artificial Sequence: Synthetic oligonucleotide
  Sense strand starting at position 1624 of SEQ ID NO: 1887072
gguagaacacccgguagau

SEQ ID NO: 2446315 - RNA, 19 nt, Artificial Sequence
  Description of Artificial Sequence: Synthetic oligonucleotide
  Antisense strand to SEQ ID NO: 2446314
aucuaccggguguucuacc

SEQ ID NO: 2446316 - RNA, 19 nt, Artificial Sequence
  Description of Artificial Sequence: Synthetic oligonucleotide
  Sense strand starting at position 1660 of SEQ ID NO: 1887072
gggaggugggucgggaaau

SEQ ID NO: 2446317 - RNA, 19 nt, Artificial Sequence
  Description of Artificial Sequence: Synthetic oligonucleotide
  Antisense strand to SEQ ID NO: 2446316
auuucccgacccaccuccc

SEQ ID NO: 2446318 - RNA, 19 nt, Artificial Sequence
  Description of Artificial Sequence: Synthetic oligonucleotide
  Sense strand starting at position 1670 of SEQ ID NO: 1887072
ucgggaaaucgagagcguu

SEQ ID NO: 2446319 - RNA, 19 nt, Artificial Sequence
  Description of Artificial Sequence: Synthetic oligonucleotide
  Antisense strand to SEQ ID NO: 2446318
aacgcucucgauuucccga

SEQ ID NO: 2446320 - RNA, 19 nt, Artificial Sequence
  Description of Artificial Sequence: Synthetic oligonucleotide
  Sense strand starting at position 1740 of SEQ ID NO: 1887072
gugauaaagccugaaaggu

SEQ ID NO: 2446321 - RNA, 19 nt, Artificial Sequence
  Description of Artificial Sequence: Synthetic oligonucleotide
  Antisense strand to SEQ ID NO: 2446320
accuuucaggcuuuaucac

SEQ ID NO: 2446322 - RNA, 19 nt, Artificial Sequence
  Description of Artificial Sequence: Synthetic oligonucleotide
  Sense strand starting at position 1834 of SEQ ID NO: 1887072
acugcugaguuuccagaca

SEQ ID NO: 2446323 - RNA, 19 nt, Artificial Sequence
  Description of Artificial Sequence: Synthetic oligonucleotide
  Antisense strand to SEQ ID NO: 2446322
ugucuggaaacucagcagu

SEQ ID NO: 2446324 - RNA, 19 nt, Artificial Sequence
  Description of Artificial Sequence: Synthetic oligonucleotide
  Sense strand starting at position 1852 of SEQ ID NO: 1887072
aagggagcucugugcaaug

SEQ ID NO: 2446325 - RNA, 19 nt, Artificial Sequence
  Description of Artificial Sequence: Synthetic oligonucleotide
  Antisense strand to SEQ ID NO: 2446324
cauugcacagagcucccuu

SEQ ID NO: 2446326 - RNA, 19 nt, Artificial Sequence
  Description of Artificial Sequence: Synthetic oligonucleotide
  Sense strand starting at position 2187 of SEQ ID NO: 1887072
agccguggcauuugaggaa

SEQ ID NO: 2446327 - RNA, 19 nt, Artificial Sequence
  Description of Artificial Sequence: Synthetic oligonucleotide
  Antisense strand to SEQ ID NO: 2446326
uuccucaaaugccacggcu

SEQ ID NO: 2446328 - RNA, 19 nt, Artificial Sequence
  Description of Artificial Sequence: Synthetic oligonucleotide
  Sense strand starting at position 2577 of SEQ ID NO: 1887072
ccuggagucuucgcagaua

SEQ ID NO: 2446329 - RNA, 19 nt, Artificial Sequence
  Description of Artificial Sequence: Synthetic oligonucleotide
  Antisense strand to SEQ ID NO: 2446328
uaucugcgaagacuccagg

SEQ ID NO: 2446330 - RNA, 19 nt, Artificial Sequence
  Description of Artificial Sequence: Synthetic oligonucleotide
  Sense strand starting at position 2580 of SEQ ID NO: 1887072
ggagucuucgcagauagaa

SEQ ID NO: 2446331 - RNA, 19 nt, Artificial Sequence
  Description of Artificial Sequence: Synthetic oligonucleotide
  Antisense strand to SEQ ID NO: 2446330
uucuaucugcgaagacucc

SEQ ID NO: 2446332 - RNA, 19 nt, Artificial Sequence
  Description of Artificial Sequence: Synthetic oligonucleotide
  Sense strand starting at position 2582 of SEQ ID NO: 1887072
agucuucgcagauagaacu

SEQ ID NO: 2446333 - RNA, 19 nt, Artificial Sequence
  Description of Artificial Sequence: Synthetic oligonucleotide
  Antisense strand to SEQ ID NO: 2446332
aguucuaucugcgaagacu

SEQ ID NO: 2446334 - RNA, 19 nt, Artificial Sequence
  Description of Artificial Sequence: Synthetic oligonucleotide
  Sense strand starting at position 2694 of SEQ ID NO: 1887072
gcucuugcagcgucuagaa

SEQ ID NO: 2446335 - RNA, 19 nt, Artificial Sequence
  Description of Artificial Sequence: Synthetic oligonucleotide
  Antisense strand to SEQ ID NO: 2446334
uucuagacgcugcaagagc

SEQ ID NO: 2446336 - RNA, 19 nt, Artificial Sequence
  Description of Artificial Sequence: Synthetic oligonucleotide
  Sense strand starting at position 2814 of SEQ ID NO: 1887072
gaggacuugugucuuaaag

SEQ ID NO: 2446337 - RNA, 19 nt, Artificial Sequence
  Description of Artificial Sequence: Synthetic oligonucleotide
  Antisense strand to SEQ ID NO: 2446336
cuuuaagacacaaguccuc

SEQ ID NO: 2446338 - RNA, 19 nt, Artificial Sequence
  Description of Artificial Sequence: Synthetic oligonucleotide
  Sense strand starting at position 2891 of SEQ ID NO: 1887072
cuugcauacguuugaaaua

SEQ ID NO: 2446339 - RNA, 19 nt, Artificial Sequence
  Description of Artificial Sequence: Synthetic oligonucleotide
  Antisense strand to SEQ ID NO: 2446338
uauuucaaacguaugcaag

SEQ ID NO: 2446340 - RNA, 19 nt, Artificial Sequence
  Description of Artificial Sequence: Synthetic oligonucleotide
  Sense strand starting at position 2904 of SEQ ID NO: 1887072
gaaauaucgucgccagacc

SEQ ID NO: 2446341 - RNA, 19 nt, Artificial Sequence
  Description of Artificial Sequence: Synthetic oligonucleotide
  Antisense strand to SEQ ID NO: 2446340
ggucuggcgacgauauuuc

SEQ ID NO: 2446342 - RNA, 19 nt, Artificial Sequence
  Description of Artificial Sequence: Synthetic oligonucleotide
  Sense strand starting at position 2915 of SEQ ID NO: 1887072
gccagaccuguguaucauu

SEQ ID NO: 2446343 - RNA, 19 nt, Artificial Sequence
  Description of Artificial Sequence: Synthetic oligonucleotide
  Antisense strand to SEQ ID NO: 2446342
aaugauacacaggucuggc

SEQ ID NO: 2446344 - RNA, 19 nt, Artificial Sequence
  Description of Artificial Sequence: Synthetic oligonucleotide
  Sense strand starting at position 2928 of SEQ ID NO: 1887072
aucauuguguuacuuguga

SEQ ID NO: 2446345 - RNA, 19 nt, Artificial Sequence
  Description of Artificial Sequence: Synthetic oligonucleotide
  Antisense strand to SEQ ID NO: 2446344
ucacaaguaacacaaugau

SEQ ID NO: 2446346 - RNA, 19 nt, Artificial Sequence
  Description of Artificial Sequence: Synthetic oligonucleotide
  Sense strand starting at position 2935 of SEQ ID NO: 1887072
uguuacuugugauucuuau

SEQ ID NO: 2446347 - RNA, 19 nt, Artificial Sequence
  Description of Artificial Sequence: Synthetic oligonucleotide
  Antisense strand to SEQ ID NO: 2446346
auaagaaucacaaguaaca

SEQ ID NO: 2446348 - RNA, 19 nt, Artificial Sequence
  Description of Artificial Sequence: Synthetic oligonucleotide
  Sense strand starting at position 3122 of SEQ ID NO: 1887072
cuuagagaucacuguuaaa

SEQ ID NO: 2446349 - RNA, 19 nt, Artificial Sequence
  Description of Artificial Sequence: Synthetic oligonucleotide
  Antisense strand to SEQ ID NO: 2446348
uuuaacagugaucucuaag

SEQ ID NO: 2446350 - RNA, 19 nt, Artificial Sequence
  Description of Artificial Sequence: Synthetic oligonucleotide
  Sense strand starting at position 3157 of SEQ ID NO: 1887072
ccaugagugguagguauug

SEQ ID NO: 2446351 - RNA, 19 nt, Artificial Sequence
  Description of Artificial Sequence: Synthetic oligonucleotide
  Antisense strand to SEQ ID NO: 2446350
caauaccuaccacucaugg

SEQ ID NO: 2446352 - RNA, 19 nt, Artificial Sequence
  Description of Artificial Sequence: Synthetic oligonucleotide
  Sense strand starting at position 3167 of SEQ ID NO: 1887072
uagguauugugucucauuu

SEQ ID NO: 2446353 - RNA, 19 nt, Artificial Sequence
  Description of Artificial Sequence: Synthetic oligonucleotide
  Antisense strand to SEQ ID NO: 2446352
aaaugagacacaauaccua

SEQ ID NO: 2446354 - RNA, 19 nt, Artificial Sequence
  Description of Artificial Sequence: Synthetic oligonucleotide
  Sense strand starting at position 3171 of SEQ ID NO: 1887072
uauugugucucauuugugu

SEQ ID NO: 2446355 - RNA, 19 nt, Artificial Sequence
  Description of Artificial Sequence: Synthetic oligonucleotide
  Antisense strand to SEQ ID NO: 2446354
acacaaaugagacacaaua

SEQ ID NO: 2446356 - RNA, 19 nt, Artificial Sequence
  Description of Artificial Sequence: Synthetic oligonucleotide
  Sense strand starting at position 3240 of SEQ ID NO: 1887072
augacuguuccuuaaagug

SEQ ID NO: 2446357 - RNA, 19 nt, Artificial Sequence
  Description of Artificial Sequence: Synthetic oligonucleotide
  Antisense strand to SEQ ID NO: 2446356
cacuuuaaggaacagucau

SEQ ID NO: 2446358 - RNA, 19 nt, Artificial Sequence
  Description of Artificial Sequence: Synthetic oligonucleotide
  Sense strand starting at position 3300 of SEQ ID NO: 1887072
cuagaacugucaguguuuc

SEQ ID NO: 2446359 - RNA, 19 nt, Artificial Sequence
  Description of Artificial Sequence: Synthetic oligonucleotide
  Antisense strand to SEQ ID NO: 2446358
gaaacacugacaguucuag

SEQ ID NO: 2446360 - RNA, 19 nt, Artificial Sequence
  Description of Artificial Sequence: Synthetic oligonucleotide
  Sense strand starting at position 3301 of SEQ ID NO: 1887072
uagaacugucaguguuucu

SEQ ID NO: 2446361 - RNA, 19 nt, Artificial Sequence
  Description of Artificial Sequence: Synthetic oligonucleotide
  Antisense strand to SEQ ID NO: 2446360
agaaacacugacaguucua

SEQ ID NO: 2446362 - RNA, 19 nt, Artificial Sequence
  Description of Artificial Sequence: Synthetic oligonucleotide
  Sense strand starting at position 3498 of SEQ ID NO: 1887072
gucucuagagguugccaua

SEQ ID NO: 2446363 - RNA, 19 nt, Artificial Sequence
  Description of Artificial Sequence: Synthetic oligonucleotide
  Antisense strand to SEQ ID NO: 2446362
uauggcaaccucuagagac

SEQ ID NO: 2446364 - RNA, 19 nt, Artificial Sequence
  Description of Artificial Sequence: Synthetic oligonucleotide
  Sense strand starting at position 3678 of SEQ ID NO: 1887072
cuuacuguggcuuagaaga

SEQ ID NO: 2446365 - RNA, 19 nt, Artificial Sequence
  Description of Artificial Sequence: Synthetic oligonucleotide
  Antisense strand to SEQ ID NO: 2446364
ucuucuaagccacaguaag

SEQ ID NO: 2446366 - RNA, 19 nt, Artificial Sequence
  Description of Artificial Sequence: Synthetic oligonucleotide
  Sense strand starting at position 3849 of SEQ ID NO: 1887072
cuguucuucugccuagaau

SEQ ID NO: 2446367 - RNA, 19 nt, Artificial Sequence
  Description of Artificial Sequence: Synthetic oligonucleotide
  Antisense strand to SEQ ID NO: 2446366
auucuaggcagaagaacag

SEQ ID NO: 2446368 - RNA, 19 nt, Artificial Sequence
  Description of Artificial Sequence: Synthetic oligonucleotide
  Sense strand starting at position 3850 of SEQ ID NO: 1887072
uguucuucugccuagaaug

SEQ ID NO: 2446369 - RNA, 19 nt, Artificial Sequence
  Description of Artificial Sequence: Synthetic oligonucleotide
  Antisense strand to SEQ ID NO: 2446368
cauucuaggcagaagaaca

SEQ ID NO: 2446370 - RNA, 19 nt, Artificial Sequence
  Description of Artificial Sequence: Synthetic oligonucleotide
  Sense strand starting at position 3864 of SEQ ID NO: 1887072
gaaugcaccuguuccagau

SEQ ID NO: 2446371 - RNA, 19 nt, Artificial Sequence
  Description of Artificial Sequence: Synthetic oligonucleotide
  Antisense strand to SEQ ID NO: 2446370
aucuggaacaggugcauuc

SEQ ID NO: 2446372 - RNA, 19 nt, Artificial Sequence
  Description of Artificial Sequence: Synthetic oligonucleotide
  Sense strand starting at position 3868 of SEQ ID NO: 1887072
gcaccuguuccagaucacu

SEQ ID NO: 2446373 - RNA, 19 nt, Artificial Sequence
  Description of Artificial Sequence: Synthetic oligonucleotide
  Antisense strand to SEQ ID NO: 2446372
agugaucuggaacaggugc

SEQ ID NO: 2446374 - RNA, 19 nt, Artificial Sequence
  Description of Artificial Sequence: Synthetic oligonucleotide
  Sense strand starting at position 88 of SEQ ID NO: 1887073
gauguugcucugcuuguau

SEQ ID NO: 2446375 - RNA, 19 nt, Artificial Sequence
  Description of Artificial Sequence: Synthetic oligonucleotide
  Antisense strand to SEQ ID NO: 2446374
auacaagcagagcaacauc

SEQ ID NO: 2446376 - RNA, 19 nt, Artificial Sequence
  Description of Artificial Sequence: Synthetic oligonucleotide
  Sense strand starting at position 182 of SEQ ID NO: 1887073
ggcuuuaggucugcuugaa

SEQ ID NO: 2446377 - RNA, 19 nt, Artificial Sequence
  Description of Artificial Sequence: Synthetic oligonucleotide
  Antisense strand to SEQ ID NO: 2446376
uucaagcagaccuaaagcc

SEQ ID NO: 2446378 - RNA, 19 nt, Artificial Sequence
  Description of Artificial Sequence: Synthetic oligonucleotide
  Sense strand starting at position 208 of SEQ ID NO: 1887073
acgugacucccacauguaa

SEQ ID NO: 2446379 - RNA, 19 nt, Artificial Sequence
  Description of Artificial Sequence: Synthetic oligonucleotide
  Antisense strand to SEQ ID NO: 2446378
uuacaugugggagucacgu

SEQ ID NO: 2446380 - RNA, 19 nt, Artificial Sequence
  Description of Artificial Sequence: Synthetic oligonucleotide
  Sense strand starting at position 624 of SEQ ID NO: 1887073
gguugcagugauuaauaag

SEQ ID NO: 2446381 - RNA, 19 nt, Artificial Sequence
  Description of Artificial Sequence: Synthetic oligonucleotide
  Antisense strand to SEQ ID NO: 2446380
cuuauuaaucacugcaacc

SEQ ID NO: 2446382 - RNA, 19 nt, Artificial Sequence
  Description of Artificial Sequence: Synthetic oligonucleotide
  Sense strand starting at position 743 of SEQ ID NO: 1887073
aagauaugguucuugcucu

SEQ ID NO: 2446383 - RNA, 19 nt, Artificial Sequence
  Description of Artificial Sequence: Synthetic oligonucleotide
  Antisense strand to SEQ ID NO: 2446382
agagcaagaaccauaucuu

SEQ ID NO: 2446384 - RNA, 19 nt, Artificial Sequence
  Description of Artificial Sequence: Synthetic oligonucleotide
  Sense strand starting at position 747 of SEQ ID NO: 1887073
uaugguucuugcucuuaag

SEQ ID NO: 2446385 - RNA, 19 nt, Artificial Sequence
  Description of Artificial Sequence: Synthetic oligonucleotide
  Antisense strand to SEQ ID NO: 2446384
cuuaagagcaagaaccaua

SEQ ID NO: 2446386 - RNA, 19 nt, Artificial Sequence
  Description of Artificial Sequence: Synthetic oligonucleotide
  Sense strand starting at position 870 of SEQ ID NO: 1887073
aagaaauugucuucucagg

SEQ ID NO: 2446387 - RNA, 19 nt, Artificial Sequence
  Description of Artificial Sequence: Synthetic oligonucleotide
  Antisense strand to SEQ ID NO: 2446386
ccugagaagacaauuucuu

SEQ ID NO: 2446388 - RNA, 19 nt, Artificial Sequence
  Description of Artificial Sequence: Synthetic oligonucleotide
  Sense strand starting at position 872 of SEQ ID NO: 1887073
gaaauugucuucucagguc

SEQ ID NO: 2446389 - RNA, 19 nt, Artificial Sequence
  Description of Artificial Sequence: Synthetic oligonucleotide
  Antisense strand to SEQ ID NO: 2446388
gaccugagaagacaauuuc

SEQ ID NO: 2446390 - RNA, 19 nt, Artificial Sequence
  Description of Artificial Sequence: Synthetic oligonucleotide
  Sense strand starting at position 880 of SEQ ID NO: 1887073
cuucucagguccucaugaa

SEQ ID NO: 2446391 - RNA, 19 nt, Artificial Sequence
  Description of Artificial Sequence: Synthetic oligonucleotide
  Antisense strand to SEQ ID NO: 2446390
uucaugaggaccugagaag

SEQ ID NO: 2446392 - RNA, 19 nt, Artificial Sequence
  Description of Artificial Sequence: Synthetic oligonucleotide
  Sense strand starting at position 881 of SEQ ID NO: 1887073
uucucagguccucaugaau

SEQ ID NO: 2446393 - RNA, 19 nt, Artificial Sequence
  Description of Artificial Sequence: Synthetic oligonucleotide
  Antisense strand to SEQ ID NO: 2446392
auucaugaggaccugagaa

SEQ ID NO: 2446394 - RNA, 19 nt, Artificial Sequence
  Description of Artificial Sequence: Synthetic oligonucleotide
  Sense strand starting at position 1071 of SEQ ID NO: 1887073
cauauauuguggccauaag

SEQ ID NO: 2446395 - RNA, 19 nt, Artificial Sequence
  Description of Artificial Sequence: Synthetic oligonucleotide
  Antisense strand to SEQ ID NO: 2446394
cuuauggccacaauauaug

SEQ ID NO: 2446396 - RNA, 19 nt, Artificial Sequence
  Description of Artificial Sequence: Synthetic oligonucleotide
  Sense strand starting at position 1072 of SEQ ID NO: 1887073
auauauuguggccauaaga

SEQ ID NO: 2446397 - RNA, 19 nt, Artificial Sequence
  Description of Artificial Sequence: Synthetic oligonucleotide
  Antisense strand to SEQ ID NO: 2446396
ucuuauggccacaauauau

SEQ ID NO: 2446398 - RNA, 19 nt, Artificial Sequence
  Description of Artificial Sequence: Synthetic oligonucleotide
  Sense strand starting at position 1079 of SEQ ID NO: 1887073
guggccauaagauguagaa

SEQ ID NO: 2446399 - RNA, 19 nt, Artificial Sequence
  Description of Artificial Sequence: Synthetic oligonucleotide
  Antisense strand to SEQ ID NO: 2446398
uucuacaucuuauggccac

SEQ ID NO: 2446400 - RNA, 19 nt, Artificial Sequence
  Description of Artificial Sequence: Synthetic oligonucleotide
  Sense strand starting at position 1221 of SEQ ID NO: 1887073
agacguuacuuggcucuaa

SEQ ID NO: 2446401 - RNA, 19 nt, Artificial Sequence
  Description of Artificial Sequence: Synthetic oligonucleotide
  Antisense strand to SEQ ID NO: 2446400
uuagagccaaguaacgucu

SEQ ID NO: 2446402 - RNA, 19 nt, Artificial Sequence
  Description of Artificial Sequence: Synthetic oligonucleotide
  Sense strand starting at position 1222 of SEQ ID NO: 1887073
gacguuacuuggcucuaaa

SEQ ID NO: 2446403 - RNA, 19 nt, Artificial Sequence
  Description of Artificial Sequence: Synthetic oligonucleotide
  Antisense strand to SEQ ID NO: 2446402
uuuagagccaaguaacguc

SEQ ID NO: 2446404 - RNA, 19 nt, Artificial Sequence
  Description of Artificial Sequence: Synthetic oligonucleotide
  Sense strand starting at position 1249 of SEQ ID NO: 1887073
caguaaucguacuuucgaa

SEQ ID NO: 2446405 - RNA, 19 nt, Artificial Sequence
  Description of Artificial Sequence: Synthetic oligonucleotide
  Antisense strand to SEQ ID NO: 2446404
uucgaaaguacgauuacug

SEQ ID NO: 2446406 - RNA, 19 nt, Artificial Sequence
  Description of Artificial Sequence: Synthetic oligonucleotide
  Sense strand starting at position 1429 of SEQ ID NO: 1887073
gugggacugcuuuaugaga

SEQ ID NO: 2446407 - RNA, 19 nt, Artificial Sequence
  Description of Artificial Sequence: Synthetic oligonucleotide
  Antisense strand to SEQ ID NO: 2446406
ucucauaaagcagucccac

SEQ ID NO: 2446408 - RNA, 19 nt, Artificial Sequence
  Description of Artificial Sequence: Synthetic oligonucleotide
  Sense strand starting at position 1517 of SEQ ID NO: 1887073
agaugaugcgacuggugua

SEQ ID NO: 2446409 - RNA, 19 nt, Artificial Sequence
  Description of Artificial Sequence: Synthetic oligonucleotide
  Antisense strand to SEQ ID NO: 2446408
uacaccagucgcaucaucu

SEQ ID NO: 2446410 - RNA, 19 nt, Artificial Sequence
  Description of Artificial Sequence: Synthetic oligonucleotide
  Sense strand starting at position 1518 of SEQ ID NO: 1887073
gaugaugcgacugguguaa

SEQ ID NO: 2446411 - RNA, 19 nt, Artificial Sequence
  Description of Artificial Sequence: Synthetic oligonucleotide
  Antisense strand to SEQ ID NO: 2446410
uuacaccagucgcaucauc

SEQ ID NO: 2446412 - RNA, 19 nt, Artificial Sequence
  Description of Artificial Sequence: Synthetic oligonucleotide
  Sense strand starting at position 1612 of SEQ ID NO: 1887073
gauagauggguacgugagu

SEQ ID NO: 2446413 - RNA, 19 nt, Artificial Sequence
  Description of Artificial Sequence: Synthetic oligonucleotide
  Antisense strand to SEQ ID NO: 2446412
acucacguacccaucuauc

SEQ ID NO: 2446414 - RNA, 19 nt, Artificial Sequence
  Description of Artificial Sequence: Synthetic oligonucleotide
  Sense strand starting at position 1625 of SEQ ID NO: 1887073
gugaguaaaccauguagga

SEQ ID NO: 2446415 - RNA, 19 nt, Artificial Sequence
  Description of Artificial Sequence: Synthetic oligonucleotide
  Antisense strand to SEQ ID NO: 2446414
uccuacaugguuuacucac

SEQ ID NO: 2446416 - RNA, 19 nt, Artificial Sequence
  Description of Artificial Sequence: Synthetic oligonucleotide
  Sense strand starting at position 1648 of SEQ ID NO: 1887073
aguuaugaguuucugcaac

SEQ ID NO: 2446417 - RNA, 19 nt, Artificial Sequence
  Description of Artificial Sequence: Synthetic oligonucleotide
  Antisense strand to SEQ ID NO: 2446416
guugcagaaacucauaacu

SEQ ID NO: 2446418 - RNA, 19 nt, Artificial Sequence
  Description of Artificial Sequence: Synthetic oligonucleotide
  Sense strand starting at position 1650 of SEQ ID NO: 1887073
uuaugaguuucugcaacug

SEQ ID NO: 2446419 - RNA, 19 nt, Artificial Sequence
  Description of Artificial Sequence: Synthetic oligonucleotide
  Antisense strand to SEQ ID NO: 2446418
caguugcagaaacucauaa

SEQ ID NO: 2446420 - RNA, 19 nt, Artificial Sequence
  Description of Artificial Sequence: Synthetic oligonucleotide
  Sense strand starting at position 1666 of SEQ ID NO: 1887073
cuguccucacaauguuuaa

SEQ ID NO: 2446421 - RNA, 19 nt, Artificial Sequence
  Description of Artificial Sequence: Synthetic oligonucleotide
  Antisense strand to SEQ ID NO: 2446420
uuaaacauugugaggacag

SEQ ID NO: 2446422 - RNA, 19 nt, Artificial Sequence
  Description of Artificial Sequence: Synthetic oligonucleotide
  Sense strand starting at position 1894 of SEQ ID NO: 1887073
gauggaugcagcugggaaa

SEQ ID NO: 2446423 - RNA, 19 nt, Artificial Sequence
  Description of Artificial Sequence: Synthetic oligonucleotide
  Antisense strand to SEQ ID NO: 2446422
uuucccagcugcauccauc

SEQ ID NO: 2446424 - RNA, 19 nt, Artificial Sequence
  Description of Artificial Sequence: Synthetic oligonucleotide
  Sense strand starting at position 2114 of SEQ ID NO: 1887073
gcaucucacuucucuggaa

SEQ ID NO: 2446425 - RNA, 19 nt, Artificial Sequence
  Description of Artificial Sequence: Synthetic oligonucleotide
  Antisense strand to SEQ ID NO: 2446424
uuccagagaagugagaugc

SEQ ID NO: 2446426 - RNA, 19 nt, Artificial Sequence
  Description of Artificial Sequence: Synthetic oligonucleotide
  Sense strand starting at position 2165 of SEQ ID NO: 1887073
ucgugaaggcugcacauuu

SEQ ID NO: 2446427 - RNA, 19 nt, Artificial Sequence
  Description of Artificial Sequence: Synthetic oligonucleotide
  Antisense strand to SEQ ID NO: 2446426
aaaugugcagccuucacga

SEQ ID NO: 2446428 - RNA, 19 nt, Artificial Sequence
  Description of Artificial Sequence: Synthetic oligonucleotide
  Sense strand starting at position 2270 of SEQ ID NO: 1887073
ugcugagaggucuagaacu

SEQ ID NO: 2446429 - RNA, 19 nt, Artificial Sequence
  Description of Artificial Sequence: Synthetic oligonucleotide
  Antisense strand to SEQ ID NO: 2446428
aguucuagaccucucagca

SEQ ID NO: 2446430 - RNA, 19 nt, Artificial Sequence
  Description of Artificial Sequence: Synthetic oligonucleotide
  Sense strand starting at position 2305 of SEQ ID NO: 1887073
ccgcguuauccgcccagaa

SEQ ID NO: 2446431 - RNA, 19 nt, Artificial Sequence
  Description of Artificial Sequence: Synthetic oligonucleotide
  Antisense strand to SEQ ID NO: 2446430
uucugggcggauaacgcgg

SEQ ID NO: 2446432 - RNA, 19 nt, Artificial Sequence
  Description of Artificial Sequence: Synthetic oligonucleotide
  Sense strand starting at position 2306 of SEQ ID NO: 1887073
cgcguuauccgcccagaau

SEQ ID NO: 2446433 - RNA, 19 nt, Artificial Sequence
  Description of Artificial Sequence: Synthetic oligonucleotide
  Antisense strand to SEQ ID NO: 2446432
auucugggcggauaacgcg

SEQ ID NO: 2446434 - RNA, 19 nt, Artificial Sequence
  Description of Artificial Sequence: Synthetic oligonucleotide
  Sense strand starting at position 2458 of SEQ ID NO: 1887073
gaagcucgaccguaguuua

SEQ ID NO: 2446435 - RNA, 19 nt, Artificial Sequence
  Description of Artificial Sequence: Synthetic oligonucleotide
  Antisense strand to SEQ ID NO: 2446434
uaaacuacggucgagcuuc

SEQ ID NO: 2446436 - RNA, 19 nt, Artificial Sequence
  Description of Artificial Sequence: Synthetic oligonucleotide
  Sense strand starting at position 2645 of SEQ ID NO: 1887073
gggucaugaaucgaggcau

SEQ ID NO: 2446437 - RNA, 19 nt, Artificial Sequence
  Description of Artificial Sequence: Synthetic oligonucleotide
  Antisense strand to SEQ ID NO: 2446436
augccucgauucaugaccc

SEQ ID NO: 2446438 - RNA, 19 nt, Artificial Sequence
  Description of Artificial Sequence: Synthetic oligonucleotide
  Sense strand starting at position 2646 of SEQ ID NO: 1887073
ggucaugaaucgaggcaug

SEQ ID NO: 2446439 - RNA, 19 nt, Artificial Sequence
  Description of Artificial Sequence: Synthetic oligonucleotide
  Antisense strand to SEQ ID NO: 2446438
caugccucgauucaugacc

SEQ ID NO: 2446440 - RNA, 19 nt, Artificial Sequence
  Description of Artificial Sequence: Synthetic oligonucleotide
  Sense strand starting at position 3072 of SEQ ID NO: 1887073
uucggagauucugauuuaa

SEQ ID NO: 2446441 - RNA, 19 nt, Artificial Sequence
  Description of Artificial Sequence: Synthetic oligonucleotide
  Antisense strand to SEQ ID NO: 2446440
uuaaaucagaaucuccgaa

SEQ ID NO: 2446442 - RNA, 19 nt, Artificial Sequence
  Description of Artificial Sequence: Synthetic oligonucleotide
  Sense strand starting at position 3098 of SEQ ID NO: 1887073
agggaagagcucugagauc

SEQ ID NO: 2446443 - RNA, 19 nt, Artificial Sequence
  Description of Artificial Sequence: Synthetic oligonucleotide
  Antisense strand to SEQ ID NO: 2446442
gaucucagagcucuucccu

SEQ ID NO: 2446444 - RNA, 19 nt, Artificial Sequence
  Description of Artificial Sequence: Synthetic oligonucleotide
  Sense strand starting at position 3105 of SEQ ID NO: 1887073
agcucugagaucgguaugu

SEQ ID NO: 2446445 - RNA, 19 nt, Artificial Sequence
  Description of Artificial Sequence: Synthetic oligonucleotide
  Antisense strand to SEQ ID NO: 2446444
acauaccgaucucagagcu

SEQ ID NO: 2446446 - RNA, 19 nt, Artificial Sequence
  Description of Artificial Sequence: Synthetic oligonucleotide
  Sense strand starting at position 3107 of SEQ ID NO: 1887073
cucugagaucgguauguaa

SEQ ID NO: 2446447 - RNA, 19 nt, Artificial Sequence
  Description of Artificial Sequence: Synthetic oligonucleotide
  Antisense strand to SEQ ID NO: 2446446
uuacauaccgaucucagag

SEQ ID NO: 2446448 - RNA, 19 nt, Artificial Sequence
  Description of Artificial Sequence: Synthetic oligonucleotide
  Sense strand starting at position 3313 of SEQ ID NO: 1887073
agaggcaaucucuguucua

SEQ ID NO: 2446449 - RNA, 19 nt, Artificial Sequence
  Description of Artificial Sequence: Synthetic oligonucleotide
  Antisense strand to SEQ ID NO: 2446448
uagaacagagauugccucu

SEQ ID NO: 2446450 - RNA, 19 nt, Artificial Sequence
  Description of Artificial Sequence: Synthetic oligonucleotide
  Sense strand starting at position 3314 of SEQ ID NO: 1887073
gaggcaaucucuguucuaa

SEQ ID NO: 2446451 - RNA, 19 nt, Artificial Sequence
  Description of Artificial Sequence: Synthetic oligonucleotide
  Antisense strand to SEQ ID NO: 2446450
uuagaacagagauugccuc

SEQ ID NO: 2446452 - RNA, 19 nt, Artificial Sequence
  Description of Artificial Sequence: Synthetic oligonucleotide
  Sense strand starting at position 3316 of SEQ ID NO: 1887073
ggcaaucucuguucuaauu

SEQ ID NO: 2446453 - RNA, 19 nt, Artificial Sequence
  Description of Artificial Sequence: Synthetic oligonucleotide
  Antisense strand to SEQ ID NO: 2446452
aauuagaacagagauugcc

SEQ ID NO: 2446454 - RNA, 19 nt, Artificial Sequence
  Description of Artificial Sequence: Synthetic oligonucleotide
  Sense strand starting at position 14 of SEQ ID NO: 1887074
agaauuaacucagacugau

SEQ ID NO: 2446455 - RNA, 19 nt, Artificial Sequence
  Description of Artificial Sequence: Synthetic oligonucleotide
  Antisense strand to SEQ ID NO: 2446454
aucagucugaguuaauucu

SEQ ID NO: 2446456 - RNA, 19 nt, Artificial Sequence
  Description of Artificial Sequence: Synthetic oligonucleotide
  Sense strand starting at position 26 of SEQ ID NO: 1887074
gacugauaugaauguuggu

SEQ ID NO: 2446457 - RNA, 19 nt, Artificial Sequence
  Description of Artificial Sequence: Synthetic oligonucleotide
  Antisense strand to SEQ ID NO: 2446456
accaacauucauaucaguc

SEQ ID NO: 2446458 - RNA, 19 nt, Artificial Sequence
  Description of Artificial Sequence: Synthetic oligonucleotide
  Sense strand starting at position 31 of SEQ ID NO: 1887074
auaugaauguugguacaug

SEQ ID NO: 2446459 - RNA, 19 nt, Artificial Sequence
  Description of Artificial Sequence: Synthetic oligonucleotide
  Antisense strand to SEQ ID NO: 2446458
cauguaccaacauucauau

SEQ ID NO: 2446460 - RNA, 19 nt, Artificial Sequence
  Description of Artificial Sequence: Synthetic oligonucleotide
  Sense strand starting at position 43 of SEQ ID NO: 1887074
guacaugagcuacaagacu

SEQ ID NO: 2446461 - RNA, 19 nt, Artificial Sequence
  Description of Artificial Sequence: Synthetic oligonucleotide
  Antisense strand to SEQ ID NO: 2446460
agucuuguagcucauguac

SEQ ID NO: 2446462 - RNA, 19 nt, Artificial Sequence
  Description of Artificial Sequence: Synthetic oligonucleotide
  Sense strand starting at position 123 of SEQ ID NO: 1887074
cagagugaguccucaagau

SEQ ID NO: 2446463 - RNA, 19 nt, Artificial Sequence
  Description of Artificial Sequence: Synthetic oligonucleotide
  Antisense strand to SEQ ID NO: 2446462
aucuugaggacucacucug

SEQ ID NO: 2446464 - RNA, 19 nt, Artificial Sequence
  Description of Artificial Sequence: Synthetic oligonucleotide
  Sense strand starting at position 135 of SEQ ID NO: 1887074
ucaagauaucguugacuga

SEQ ID NO: 2446465 - RNA, 19 nt, Artificial Sequence
  Description of Artificial Sequence: Synthetic oligonucleotide
  Antisense strand to SEQ ID NO: 2446464
ucagucaacgauaucuuga

SEQ ID NO: 2446466 - RNA, 19 nt, Artificial Sequence
  Description of Artificial Sequence: Synthetic oligonucleotide
  Sense strand starting at position 139 of SEQ ID NO: 1887074
gauaucguugacugaagcu

SEQ ID NO: 2446467 - RNA, 19 nt, Artificial Sequence
  Description of Artificial Sequence: Synthetic oligonucleotide
  Antisense strand to SEQ ID NO: 2446466
agcuucagucaacgauauc

SEQ ID NO: 2446468 - RNA, 19 nt, Artificial Sequence
  Description of Artificial Sequence: Synthetic oligonucleotide
  Sense strand starting at position 897 of SEQ ID NO: 1887074
guguuaucauuugagaucu

SEQ ID NO: 2446469 - RNA, 19 nt, Artificial Sequence
  Description of Artificial Sequence: Synthetic oligonucleotide
  Antisense strand to SEQ ID NO: 2446468
agaucucaaaugauaacac

SEQ ID NO: 2446470 - RNA, 19 nt, Artificial Sequence
  Description of Artificial Sequence: Synthetic oligonucleotide
  Sense strand starting at position 899 of SEQ ID NO: 1887074
guuaucauuugagaucucu

SEQ ID NO: 2446471 - RNA, 19 nt, Artificial Sequence
  Description of Artificial Sequence: Synthetic oligonucleotide
  Antisense strand to SEQ ID NO: 2446470
agagaucucaaaugauaac

SEQ ID NO: 2446472 - RNA, 19 nt, Artificial Sequence
  Description of Artificial Sequence: Synthetic oligonucleotide
  Sense strand starting at position 1080 of SEQ ID NO: 1887074
gucacaugccuguacaaau

SEQ ID NO: 2446473 - RNA, 19 nt, Artificial Sequence
  Description of Artificial Sequence: Synthetic oligonucleotide
  Antisense strand to SEQ ID NO: 2446472
auuuguacaggcaugugac

SEQ ID NO: 2446474 - RNA, 19 nt, Artificial Sequence
  Description of Artificial Sequence: Synthetic oligonucleotide
  Sense strand starting at position 1356 of SEQ ID NO: 1887074
augcaaauacgucaucugu

SEQ ID NO: 2446475 - RNA, 19 nt, Artificial Sequence
  Description of Artificial Sequence: Synthetic oligonucleotide
  Antisense strand to SEQ ID NO: 2446474
acagaugacguauuugcau

SEQ ID NO: 2446476 - RNA, 19 nt, Artificial Sequence
  Description of Artificial Sequence: Synthetic oligonucleotide
  Sense strand starting at position 1365 of SEQ ID NO: 1887074
cgucaucugugaccgggaa

SEQ ID NO: 2446477 - RNA, 19 nt, Artificial Sequence
  Description of Artificial Sequence: Synthetic oligonucleotide
  Antisense strand to SEQ ID NO: 2446476
uucccggucacagaugacg

SEQ ID NO: 2446478 - RNA, 19 nt, Artificial Sequence
  Description of Artificial Sequence: Synthetic oligonucleotide
  Sense strand starting at position 1398 of SEQ ID NO: 1887074
agcagauacugacacauuu

SEQ ID NO: 2446479 - RNA, 19 nt, Artificial Sequence
  Description of Artificial Sequence: Synthetic oligonucleotide
  Antisense strand to SEQ ID NO: 2446478
aaaugugucaguaucugcu

SEQ ID NO: 2446480 - RNA, 19 nt, Artificial Sequence
  Description of Artificial Sequence: Synthetic oligonucleotide
  Sense strand starting at position 1419 of SEQ ID NO: 1887074
cagucugauguguggacaa

SEQ ID NO: 2446481 - RNA, 19 nt, Artificial Sequence
  Description of Artificial Sequence: Synthetic oligonucleotide
  Antisense strand to SEQ ID NO: 2446480
uuguccacacaucagacug

SEQ ID NO: 2446482 - RNA, 19 nt, Artificial Sequence
  Description of Artificial Sequence: Synthetic oligonucleotide
  Sense strand starting at position 1421 of SEQ ID NO: 1887074
gucugauguguggacaacu

SEQ ID NO: 2446483 - RNA, 19 nt, Artificial Sequence
  Description of Artificial Sequence: Synthetic oligonucleotide
  Antisense strand to SEQ ID NO: 2446482
aguuguccacacaucagac

SEQ ID NO: 2446484 - RNA, 19 nt, Artificial Sequence
  Description of Artificial Sequence: Synthetic oligonucleotide
  Sense strand starting at position 1478 of SEQ ID NO: 1887074
ggccaauucugagcugaca

SEQ ID NO: 2446485 - RNA, 19 nt, Artificial Sequence
  Description of Artificial Sequence: Synthetic oligonucleotide
  Antisense strand to SEQ ID NO: 2446484
ugucagcucagaauuggcc

SEQ ID NO: 2446486 - RNA, 19 nt, Artificial Sequence
  Description of Artificial Sequence: Synthetic oligonucleotide
  Sense strand starting at position 1530 of SEQ ID NO: 1887074
ccaucuuggccaggacaaa

SEQ ID NO: 2446487 - RNA, 19 nt, Artificial Sequence
  Description of Artificial Sequence: Synthetic oligonucleotide
  Antisense strand to SEQ ID NO: 2446486
uuuguccuggccaagaugg

SEQ ID NO: 2446488 - RNA, 19 nt, Artificial Sequence
  Description of Artificial Sequence: Synthetic oligonucleotide
  Sense strand starting at position 1670 of SEQ ID NO: 1887074
ggugcacaacgauguuaau

SEQ ID NO: 2446489 - RNA, 19 nt, Artificial Sequence
  Description of Artificial Sequence: Synthetic oligonucleotide
  Antisense strand to SEQ ID NO: 2446488
auuaacaucguugugcacc

SEQ ID NO: 2446490 - RNA, 19 nt, Artificial Sequence
  Description of Artificial Sequence: Synthetic oligonucleotide
  Sense strand starting at position 1816 of SEQ ID NO: 1887074
ugcaaucuuuaagcuagga

SEQ ID NO: 2446491 - RNA, 19 nt, Artificial Sequence
  Description of Artificial Sequence: Synthetic oligonucleotide
  Antisense strand to SEQ ID NO: 2446490
uccuagcuuaaagauugca

SEQ ID NO: 2446492 - RNA, 19 nt, Artificial Sequence
  Description of Artificial Sequence: Synthetic oligonucleotide
  Sense strand starting at position 2803 of SEQ ID NO: 1887074
aguaaacuuguggguugua

SEQ ID NO: 2446493 - RNA, 19 nt, Artificial Sequence
  Description of Artificial Sequence: Synthetic oligonucleotide
  Antisense strand to SEQ ID NO: 2446492
uacaacccacaaguuuacu

SEQ ID NO: 2446494 - RNA, 19 nt, Artificial Sequence
  Description of Artificial Sequence: Synthetic oligonucleotide
  Sense strand starting at position 2804 of SEQ ID NO: 1887074
guaaacuuguggguuguaa

SEQ ID NO: 2446495 - RNA, 19 nt, Artificial Sequence
  Description of Artificial Sequence: Synthetic oligonucleotide
  Antisense strand to SEQ ID NO: 2446494
uuacaacccacaaguuuac

SEQ ID NO: 2446496 - RNA, 19 nt, Artificial Sequence
  Description of Artificial Sequence: Synthetic oligonucleotide
  Sense strand starting at position 2815 of SEQ ID NO: 1887074
gguuguaagcgguaaugaa

SEQ ID NO: 2446497 - RNA, 19 nt, Artificial Sequence
  Description of Artificial Sequence: Synthetic oligonucleotide
  Antisense strand to SEQ ID NO: 2446496
uucauuaccgcuuacaacc

SEQ ID NO: 2446498 - RNA, 19 nt, Artificial Sequence
  Description of Artificial Sequence: Synthetic oligonucleotide
  Sense strand starting at position 3111 of SEQ ID NO: 1887074
gcaauuaguguugaagguu

SEQ ID NO: 2446499 - RNA, 19 nt, Artificial Sequence
  Description of Artificial Sequence: Synthetic oligonucleotide
  Antisense strand to SEQ ID NO: 2446498
aaccuucaacacuaauugc

SEQ ID NO: 2446500 - RNA, 19 nt, Artificial Sequence
  Description of Artificial Sequence: Synthetic oligonucleotide
  Sense strand starting at position 3157 of SEQ ID NO: 1887074
guggaaagcacgucgcauu

SEQ ID NO: 2446501 - RNA, 19 nt, Artificial Sequence
  Description of Artificial Sequence: Synthetic oligonucleotide
  Antisense strand to SEQ ID NO: 2446500
aaugcgacgugcuuuccac

SEQ ID NO: 2446502 - RNA, 19 nt, Artificial Sequence
  Description of Artificial Sequence: Synthetic oligonucleotide
  Sense strand starting at position 3234 of SEQ ID NO: 1887074
gcuguacauuggcugauaa

SEQ ID NO: 2446503 - RNA, 19 nt, Artificial Sequence
  Description of Artificial Sequence: Synthetic oligonucleotide
  Antisense strand to SEQ ID NO: 2446502
uuaucagccaauguacagc

SEQ ID NO: 2446504 - RNA, 19 nt, Artificial Sequence
  Description of Artificial Sequence: Synthetic oligonucleotide
  Sense strand starting at position 3236 of SEQ ID NO: 1887074
uguacauuggcugauaaca

SEQ ID NO: 2446505 - RNA, 19 nt, Artificial Sequence
  Description of Artificial Sequence: Synthetic oligonucleotide
  Antisense strand to SEQ ID NO: 2446504
uguuaucagccaauguaca

SEQ ID NO: 2446506 - RNA, 19 nt, Artificial Sequence
  Description of Artificial Sequence: Synthetic oligonucleotide
  Sense strand starting at position 3266 of SEQ ID NO: 1887074
cugaucuuacugugugaag

SEQ ID NO: 2446507 - RNA, 19 nt, Artificial Sequence
  Description of Artificial Sequence: Synthetic oligonucleotide
  Antisense strand to SEQ ID NO: 2446506
cuucacacaguaagaucag

SEQ ID NO: 2446508 - RNA, 19 nt, Artificial Sequence
  Description of Artificial Sequence: Synthetic oligonucleotide
  Sense strand starting at position 3267 of SEQ ID NO: 1887074
ugaucuuacugugugaagu

SEQ ID NO: 2446509 - RNA, 19 nt, Artificial Sequence
  Description of Artificial Sequence: Synthetic oligonucleotide
  Antisense strand to SEQ ID NO: 2446508
acuucacacaguaagauca

SEQ ID NO: 2446510 - RNA, 19 nt, Artificial Sequence
  Description of Artificial Sequence: Synthetic oligonucleotide
  Sense strand starting at position 3268 of SEQ ID NO: 1887074
gaucuuacugugugaagua

SEQ ID NO: 2446511 - RNA, 19 nt, Artificial Sequence
  Description of Artificial Sequence: Synthetic oligonucleotide
  Antisense strand to SEQ ID NO: 2446510
uacuucacacaguaagauc

SEQ ID NO: 2446512 - RNA, 19 nt, Artificial Sequence
  Description of Artificial Sequence: Synthetic oligonucleotide
  Sense strand starting at position 3325 of SEQ ID NO: 1887074
uuuccuacucuugaaguga

SEQ ID NO: 2446513 - RNA, 19 nt, Artificial Sequence
  Description of Artificial Sequence: Synthetic oligonucleotide
  Antisense strand to SEQ ID NO: 2446512
ucacuucaagaguaggaaa

SEQ ID NO: 2446514 - RNA, 19 nt, Artificial Sequence
  Description of Artificial Sequence: Synthetic oligonucleotide
  Sense strand starting at position 3369 of SEQ ID NO: 1887074
aggaguuauuucuagagaa

SEQ ID NO: 2446515 - RNA, 19 nt, Artificial Sequence
  Description of Artificial Sequence: Synthetic oligonucleotide
  Antisense strand to SEQ ID NO: 2446514
uucucuagaaauaacuccu

SEQ ID NO: 2446516 - RNA, 19 nt, Artificial Sequence
  Description of Artificial Sequence: Synthetic oligonucleotide
  Sense strand starting at position 3422 of SEQ ID NO: 1887074
uuuguaugugggugaauuu

SEQ ID NO: 2446517 - RNA, 19 nt, Artificial Sequence
  Description of Artificial Sequence: Synthetic oligonucleotide
  Antisense strand to SEQ ID NO: 2446516
aaauucacccacauacaaa

SEQ ID NO: 2446518 - RNA, 19 nt, Artificial Sequence
  Description of Artificial Sequence: Synthetic oligonucleotide
  Sense strand starting at position 3479 of SEQ ID NO: 1887074
uguugucuuagggaugauu

SEQ ID NO: 2446519 - RNA, 19 nt, Artificial Sequence
  Description of Artificial Sequence: Synthetic oligonucleotide
  Antisense strand to SEQ ID NO: 2446518
aaucaucccuaagacaaca

SEQ ID NO: 2446520 - RNA, 19 nt, Artificial Sequence
  Description of Artificial Sequence: Synthetic oligonucleotide
  Sense strand starting at position 3481 of SEQ ID NO: 1887074
uugucuuagggaugauuga

SEQ ID NO: 2446521 - RNA, 19 nt, Artificial Sequence
  Description of Artificial Sequence: Synthetic oligonucleotide
  Antisense strand to SEQ ID NO: 2446520
ucaaucaucccuaagacaa

SEQ ID NO: 2446522 - RNA, 19 nt, Artificial Sequence
  Description of Artificial Sequence: Synthetic oligonucleotide
  Sense strand starting at position 3492 of SEQ ID NO: 1887074
augauugauuaggaaggga

SEQ ID NO: 2446523 - RNA, 19 nt, Artificial Sequence
  Description of Artificial Sequence: Synthetic oligonucleotide
  Antisense strand to SEQ ID NO: 2446522
ucccuuccuaaucaaucau

SEQ ID NO: 2446524 - RNA, 19 nt, Artificial Sequence
  Description of Artificial Sequence: Synthetic oligonucleotide
  Sense strand starting at position 3734 of SEQ ID NO: 1887074
uuuaguacaccauaauguu

SEQ ID NO: 2446525 - RNA, 19 nt, Artificial Sequence
  Description of Artificial Sequence: Synthetic oligonucleotide
  Antisense strand to SEQ ID NO: 2446524
aacauuaugguguacuaaa

SEQ ID NO: 2446526 - RNA, 19 nt, Artificial Sequence
  Description of Artificial Sequence: Synthetic oligonucleotide
  Sense strand starting at position 3746 of SEQ ID NO: 1887074
uaauguuauagacgaguga

SEQ ID NO: 2446527 - RNA, 19 nt, Artificial Sequence
  Description of Artificial Sequence: Synthetic oligonucleotide
  Antisense strand to SEQ ID NO: 2446526
ucacucgucuauaacauua

SEQ ID NO: 2446528 - RNA, 19 nt, Artificial Sequence
  Description of Artificial Sequence: Synthetic oligonucleotide
  Sense strand starting at position 3747 of SEQ ID NO: 1887074
aauguuauagacgagugau

SEQ ID NO: 2446529 - RNA, 19 nt, Artificial Sequence
  Description of Artificial Sequence: Synthetic oligonucleotide
  Antisense strand to SEQ ID NO: 2446528
aucacucgucuauaacauu

SEQ ID NO: 2446530 - RNA, 19 nt, Artificial Sequence
  Description of Artificial Sequence: Synthetic oligonucleotide
  Sense strand starting at position 3750 of SEQ ID NO: 1887074
guuauagacgagugaucug

SEQ ID NO: 2446531 - RNA, 19 nt, Artificial Sequence
  Description of Artificial Sequence: Synthetic oligonucleotide
  Antisense strand to SEQ ID NO: 2446530
cagaucacucgucuauaac

SEQ ID NO: 2446532 - RNA, 19 nt, Artificial Sequence
  Description of Artificial Sequence: Synthetic oligonucleotide
  Sense strand starting at position 3755 of SEQ ID NO: 1887074
agacgagugaucugccuuu

SEQ ID NO: 2446533 - RNA, 19 nt, Artificial Sequence
  Description of Artificial Sequence: Synthetic oligonucleotide
  Antisense strand to SEQ ID NO: 2446532
aaaggcagaucacucgucu

SEQ ID NO: 2446534 - RNA, 19 nt, Artificial Sequence
  Description of Artificial Sequence: Synthetic oligonucleotide
  Sense strand starting at position 296 of SEQ ID NO: 1887075
gcagaaagguuuguaaccu

SEQ ID NO: 2446535 - RNA, 19 nt, Artificial Sequence
  Description of Artificial Sequence: Synthetic oligonucleotide
  Antisense strand to SEQ ID NO: 2446534
agguuacaaaccuuucugc

SEQ ID NO: 2446536 - RNA, 19 nt, Artificial Sequence
  Description of Artificial Sequence: Synthetic oligonucleotide
  Sense strand starting at position 385 of SEQ ID NO: 1887075
ggagaaaugcccugaauca

SEQ ID NO: 2446537 - RNA, 19 nt, Artificial Sequence
  Description of Artificial Sequence: Synthetic oligonucleotide
  Antisense strand to SEQ ID NO: 2446536
ugauucagggcauuucucc

SEQ ID NO: 2446538 - RNA, 19 nt, Artificial Sequence
  Description of Artificial Sequence: Synthetic oligonucleotide
  Sense strand starting at position 405 of SEQ ID NO: 1887075
acaggcugucuguauguaa

SEQ ID NO: 2446539 - RNA, 19 nt, Artificial Sequence
  Description of Artificial Sequence: Synthetic oligonucleotide
  Antisense strand to SEQ ID NO: 2446538
uuacauacagacagccugu

SEQ ID NO: 2446540 - RNA, 19 nt, Artificial Sequence
  Description of Artificial Sequence: Synthetic oligonucleotide
  Sense strand starting at position 408 of SEQ ID NO: 1887075
ggcugucuguauguaauaa

SEQ ID NO: 2446541 - RNA, 19 nt, Artificial Sequence
  Description of Artificial Sequence: Synthetic oligonucleotide
  Antisense strand to SEQ ID NO: 2446540
uuauuacauacagacagcc

SEQ ID NO: 2446542 - RNA, 19 nt, Artificial Sequence
  Description of Artificial Sequence: Synthetic oligonucleotide
  Sense strand starting at position 987 of SEQ ID NO: 1887075
acgauacugucgucgauuu

SEQ ID NO: 2446543 - RNA, 19 nt, Artificial Sequence
  Description of Artificial Sequence: Synthetic oligonucleotide
  Antisense strand to SEQ ID NO: 2446542
aaaucgacgacaguaucgu

SEQ ID NO: 2446544 - RNA, 19 nt, Artificial Sequence
  Description of Artificial Sequence: Synthetic oligonucleotide
  Sense strand starting at position 988 of SEQ ID NO: 1887075
cgauacugucgucgauuua

SEQ ID NO: 2446545 - RNA, 19 nt, Artificial Sequence
  Description of Artificial Sequence: Synthetic oligonucleotide
  Antisense strand to SEQ ID NO: 2446544
uaaaucgacgacaguaucg

SEQ ID NO: 2446546 - RNA, 19 nt, Artificial Sequence
  Description of Artificial Sequence: Synthetic oligonucleotide
  Sense strand starting at position 1070 of SEQ ID NO: 1887075
cucccuucuguguauacau

SEQ ID NO: 2446547 - RNA, 19 nt, Artificial Sequence
  Description of Artificial Sequence: Synthetic oligonucleotide
  Antisense strand to SEQ ID NO: 2446546
auguauacacagaagggag

SEQ ID NO: 2446548 - RNA, 19 nt, Artificial Sequence
  Description of Artificial Sequence: Synthetic oligonucleotide
  Sense strand starting at position 1088 of SEQ ID NO: 1887075
ugggucuguguaugaagaa

SEQ ID NO: 2446549 - RNA, 19 nt, Artificial Sequence
  Description of Artificial Sequence: Synthetic oligonucleotide
  Antisense strand to SEQ ID NO: 2446548
uucuucauacacagaccca

SEQ ID NO: 2446550 - RNA, 19 nt, Artificial Sequence
  Description of Artificial Sequence: Synthetic oligonucleotide
  Sense strand starting at position 1112 of SEQ ID NO: 1887075
cuuggacuucugcagcauu

SEQ ID NO: 2446551 - RNA, 19 nt, Artificial Sequence
  Description of Artificial Sequence: Synthetic oligonucleotide
  Antisense strand to SEQ ID NO: 2446550
aaugcugcagaaguccaag

SEQ ID NO: 2446552 - RNA, 19 nt, Artificial Sequence
  Description of Artificial Sequence: Synthetic oligonucleotide
  Sense strand starting at position 1115 of SEQ ID NO: 1887075
ggacuucugcagcauugca

SEQ ID NO: 2446553 - RNA, 19 nt, Artificial Sequence
  Description of Artificial Sequence: Synthetic oligonucleotide
  Antisense strand to SEQ ID NO: 2446552
ugcaaugcugcagaagucc

SEQ ID NO: 2446554 - RNA, 19 nt, Artificial Sequence
  Description of Artificial Sequence: Synthetic oligonucleotide
  Sense strand starting at position 1123 of SEQ ID NO: 1887075
gcagcauugcaguagacua

SEQ ID NO: 2446555 - RNA, 19 nt, Artificial Sequence
  Description of Artificial Sequence: Synthetic oligonucleotide
  Antisense strand to SEQ ID NO: 2446554
uagucuacugcaaugcugc

SEQ ID NO: 2446556 - RNA, 19 nt, Artificial Sequence
  Description of Artificial Sequence: Synthetic oligonucleotide
  Sense strand starting at position 1204 of SEQ ID NO: 1887075
gguauagauuuccugugcu

SEQ ID NO: 2446557 - RNA, 19 nt, Artificial Sequence
  Description of Artificial Sequence: Synthetic oligonucleotide
  Antisense strand to SEQ ID NO: 2446556
agcacaggaaaucuauacc

SEQ ID NO: 2446558 - RNA, 19 nt, Artificial Sequence
  Description of Artificial Sequence: Synthetic oligonucleotide
  Sense strand starting at position 1417 of SEQ ID NO: 1887075
uccggugacccucaggaaa

SEQ ID NO: 2446559 - RNA, 19 nt, Artificial Sequence
  Description of Artificial Sequence: Synthetic oligonucleotide
  Antisense strand to SEQ ID NO: 2446558
uuuccugagggucaccgga

SEQ ID NO: 2446560 - RNA, 19 nt, Artificial Sequence
  Description of Artificial Sequence: Synthetic oligonucleotide
  Sense strand starting at position 1572 of SEQ ID NO: 1887075
gcccgagugggccgaauuu

SEQ ID NO: 2446561 - RNA, 19 nt, Artificial Sequence
  Description of Artificial Sequence: Synthetic oligonucleotide
  Antisense strand to SEQ ID NO: 2446560
aaauucggcccacucgggc

SEQ ID NO: 2446562 - RNA, 19 nt, Artificial Sequence
  Description of Artificial Sequence: Synthetic oligonucleotide
  Sense strand starting at position 1872 of SEQ ID NO: 1887075
cagcgcuugggcucaguua

SEQ ID NO: 2446563 - RNA, 19 nt, Artificial Sequence
  Description of Artificial Sequence: Synthetic oligonucleotide
  Antisense strand to SEQ ID NO: 2446562
uaacugagcccaagcgcug

SEQ ID NO: 2446564 - RNA, 19 nt, Artificial Sequence
  Description of Artificial Sequence: Synthetic oligonucleotide
  Sense strand starting at position 1874 of SEQ ID NO: 1887075
gcgcuugggcucaguuaag

SEQ ID NO: 2446565 - RNA, 19 nt, Artificial Sequence
  Description of Artificial Sequence: Synthetic oligonucleotide
  Antisense strand to SEQ ID NO: 2446564
cuuaacugagcccaagcgc

SEQ ID NO: 2446566 - RNA, 19 nt, Artificial Sequence
  Description of Artificial Sequence: Synthetic oligonucleotide
  Sense strand starting at position 2143 of SEQ ID NO: 1887075
agauguucgcgagugccua

SEQ ID NO: 2446567 - RNA, 19 nt, Artificial Sequence
  Description of Artificial Sequence: Synthetic oligonucleotide
  Antisense strand to SEQ ID NO: 2446566
uaggcacucgcgaacaucu

SEQ ID NO: 2446568 - RNA, 19 nt, Artificial Sequence
  Description of Artificial Sequence: Synthetic oligonucleotide
  Sense strand starting at position 2161 of SEQ ID NO: 1887075
agugcuuucggcccgcgaa

SEQ ID NO: 2446569 - RNA, 19 nt, Artificial Sequence
  Description of Artificial Sequence: Synthetic oligonucleotide
  Antisense strand to SEQ ID NO: 2446568
uucgcgggccgaaagcacu

SEQ ID NO: 2446570 - RNA, 19 nt, Artificial Sequence
  Description of Artificial Sequence: Synthetic oligonucleotide
  Sense strand starting at position 2356 of SEQ ID NO: 1887075
cuccgaucucgcgagauuu

SEQ ID NO: 2446571 - RNA, 19 nt, Artificial Sequence
  Description of Artificial Sequence: Synthetic oligonucleotide
  Antisense strand to SEQ ID NO: 2446570
aaaucucgcgagaucggag

SEQ ID NO: 2446572 - RNA, 19 nt, Artificial Sequence
  Description of Artificial Sequence: Synthetic oligonucleotide
  Sense strand starting at position 2638 of SEQ ID NO: 1887075
ugauccugcgaauaaguuu

SEQ ID NO: 2446573 - RNA, 19 nt, Artificial Sequence
  Description of Artificial Sequence: Synthetic oligonucleotide
  Antisense strand to SEQ ID NO: 2446572
aaacuuauucgcaggauca

SEQ ID NO: 2446574 - RNA, 19 nt, Artificial Sequence
  Description of Artificial Sequence: Synthetic oligonucleotide
  Sense strand starting at position 2645 of SEQ ID NO: 1887075
gcgaauaaguuugcccuga

SEQ ID NO: 2446575 - RNA, 19 nt, Artificial Sequence
  Description of Artificial Sequence: Synthetic oligonucleotide
  Antisense strand to SEQ ID NO: 2446574
ucagggcaaacuuauucgc

SEQ ID NO: 2446576 - RNA, 19 nt, Artificial Sequence
  Description of Artificial Sequence: Synthetic oligonucleotide
  Sense strand starting at position 2646 of SEQ ID NO: 1887075
cgaauaaguuugcccugaa

SEQ ID NO: 2446577 - RNA, 19 nt, Artificial Sequence
  Description of Artificial Sequence: Synthetic oligonucleotide
  Antisense strand to SEQ ID NO: 2446576
uucagggcaaacuuauucg

SEQ ID NO: 2446578 - RNA, 19 nt, Artificial Sequence
  Description of Artificial Sequence: Synthetic oligonucleotide
  Sense strand starting at position 2647 of SEQ ID NO: 1887075
gaauaaguuugcccugaag

SEQ ID NO: 2446579 - RNA, 19 nt, Artificial Sequence
  Description of Artificial Sequence: Synthetic oligonucleotide
  Antisense strand to SEQ ID NO: 2446578
cuucagggcaaacuuauuc

SEQ ID NO: 2446580 - RNA, 19 nt, Artificial Sequence
  Description of Artificial Sequence: Synthetic oligonucleotide
  Sense strand starting at position 2649 of SEQ ID NO: 1887075
auaaguuugcccugaagug

SEQ ID NO: 2446581 - RNA, 19 nt, Artificial Sequence
  Description of Artificial Sequence: Synthetic oligonucleotide
  Antisense strand to SEQ ID NO: 2446580
cacuucagggcaaacuuau

SEQ ID NO: 2446582 - RNA, 19 nt, Artificial Sequence
  Description of Artificial Sequence: Synthetic oligonucleotide
  Sense strand starting at position 2650 of SEQ ID NO: 1887075
uaaguuugcccugaagugu

SEQ ID NO: 2446583 - RNA, 19 nt, Artificial Sequence
  Description of Artificial Sequence: Synthetic oligonucleotide
  Antisense strand to SEQ ID NO: 2446582
acacuucagggcaaacuua

SEQ ID NO: 2446584 - RNA, 19 nt, Artificial Sequence
  Description of Artificial Sequence: Synthetic oligonucleotide
  Sense strand starting at position 2656 of SEQ ID NO: 1887075
ugcccugaaguguggaaua

SEQ ID NO: 2446585 - RNA, 19 nt, Artificial Sequence
  Description of Artificial Sequence: Synthetic oligonucleotide
  Antisense strand to SEQ ID NO: 2446584
uauuccacacuucagggca

SEQ ID NO: 2446586 - RNA, 19 nt, Artificial Sequence
  Description of Artificial Sequence: Synthetic oligonucleotide
  Sense strand starting at position 2658 of SEQ ID NO: 1887075
cccugaaguguggaauauc

SEQ ID NO: 2446587 - RNA, 19 nt, Artificial Sequence
  Description of Artificial Sequence: Synthetic oligonucleotide
  Antisense strand to SEQ ID NO: 2446586
gauauuccacacuucaggg

SEQ ID NO: 2446588 - RNA, 19 nt, Artificial Sequence
  Description of Artificial Sequence: Synthetic oligonucleotide
  Sense strand starting at position 2745 of SEQ ID NO: 1887075
ucaguaugcaguugaguuu

SEQ ID NO: 2446589 - RNA, 19 nt, Artificial Sequence
  Description of Artificial Sequence: Synthetic oligonucleotide
  Antisense strand to SEQ ID NO: 2446588
aaacucaacugcauacuga

SEQ ID NO: 2446590 - RNA, 19 nt, Artificial Sequence
  Description of Artificial Sequence: Synthetic oligonucleotide
  Sense strand starting at position 2782 of SEQ ID NO: 1887075
auacuaauucuuggaacga

SEQ ID NO: 2446591 - RNA, 19 nt, Artificial Sequence
  Description of Artificial Sequence: Synthetic oligonucleotide
  Antisense strand to SEQ ID NO: 2446590
ucguuccaagaauuaguau

SEQ ID NO: 2446592 - RNA, 19 nt, Artificial Sequence
  Description of Artificial Sequence: Synthetic oligonucleotide
  Sense strand starting at position 2786 of SEQ ID NO: 1887075
uaauucuuggaacgacagu

SEQ ID NO: 2446593 - RNA, 19 nt, Artificial Sequence
  Description of Artificial Sequence: Synthetic oligonucleotide
  Antisense strand to SEQ ID NO: 2446592
acugucguuccaagaauua

SEQ ID NO: 2446594 - RNA, 19 nt, Artificial Sequence
  Description of Artificial Sequence: Synthetic oligonucleotide
  Sense strand starting at position 2801 of SEQ ID NO: 1887075
caguaagacuuggaaauac

SEQ ID NO: 2446595 - RNA, 19 nt, Artificial Sequence
  Description of Artificial Sequence: Synthetic oligonucleotide
  Antisense strand to SEQ ID NO: 2446594
guauuuccaagucuuacug

SEQ ID NO: 2446596 - RNA, 19 nt, Artificial Sequence
  Description of Artificial Sequence: Synthetic oligonucleotide
  Sense strand starting at position 2834 of SEQ ID NO: 1887075
cuauauauuggugauguag

SEQ ID NO: 2446597 - RNA, 19 nt, Artificial Sequence
  Description of Artificial Sequence: Synthetic oligonucleotide
  Antisense strand to SEQ ID NO: 2446596
cuacaucaccaauauauag

SEQ ID NO: 2446598 - RNA, 19 nt, Artificial Sequence
  Description of Artificial Sequence: Synthetic oligonucleotide
  Sense strand starting at position 2884 of SEQ ID NO: 1887075
gguuuaguagguugaguaa

SEQ ID NO: 2446599 - RNA, 19 nt, Artificial Sequence
  Description of Artificial Sequence: Synthetic oligonucleotide
  Antisense strand to SEQ ID NO: 2446598
uuacucaaccuacuaaacc

SEQ ID NO: 2446600 - RNA, 19 nt, Artificial Sequence
  Description of Artificial Sequence: Synthetic oligonucleotide
  Sense strand starting at position 2887 of SEQ ID NO: 1887075
uuaguagguugaguaauga

SEQ ID NO: 2446601 - RNA, 19 nt, Artificial Sequence
  Description of Artificial Sequence: Synthetic oligonucleotide
  Antisense strand to SEQ ID NO: 2446600
ucauuacucaaccuacuaa

SEQ ID NO: 2446602 - RNA, 19 nt, Artificial Sequence
  Description of Artificial Sequence: Synthetic oligonucleotide
  Sense strand starting at position 3566 of SEQ ID NO: 1887075
auaguagaucugugcucca

SEQ ID NO: 2446603 - RNA, 19 nt, Artificial Sequence
  Description of Artificial Sequence: Synthetic oligonucleotide
  Antisense strand to SEQ ID NO: 2446602
uggagcacagaucuacuau

SEQ ID NO: 2446604 - RNA, 19 nt, Artificial Sequence
  Description of Artificial Sequence: Synthetic oligonucleotide
  Sense strand starting at position 3571 of SEQ ID NO: 1887075
agaucugugcuccaaggaa

SEQ ID NO: 2446605 - RNA, 19 nt, Artificial Sequence
  Description of Artificial Sequence: Synthetic oligonucleotide
  Antisense strand to SEQ ID NO: 2446604
uuccuuggagcacagaucu

SEQ ID NO: 2446606 - RNA, 19 nt, Artificial Sequence
  Description of Artificial Sequence: Synthetic oligonucleotide
  Sense strand starting at position 3608 of SEQ ID NO: 1887075
cuaagcaauccguguauac

SEQ ID NO: 2446607 - RNA, 19 nt, Artificial Sequence
  Description of Artificial Sequence: Synthetic oligonucleotide
  Antisense strand to SEQ ID NO: 2446606
guauacacggauugcuuag

SEQ ID NO: 2446608 - RNA, 19 nt, Artificial Sequence
  Description of Artificial Sequence: Synthetic oligonucleotide
  Sense strand starting at position 3610 of SEQ ID NO: 1887075
aagcaauccguguauacag

SEQ ID NO: 2446609 - RNA, 19 nt, Artificial Sequence
  Description of Artificial Sequence: Synthetic oligonucleotide
  Antisense strand to SEQ ID NO: 2446608
cuguauacacggauugcuu

SEQ ID NO: 2446610 - RNA, 19 nt, Artificial Sequence
  Description of Artificial Sequence: Synthetic oligonucleotide
  Sense strand starting at position 3621 of SEQ ID NO: 1887075
guauacaguguauguauga

SEQ ID NO: 2446611 - RNA, 19 nt, Artificial Sequence
  Description of Artificial Sequence: Synthetic oligonucleotide
  Antisense strand to SEQ ID NO: 2446610
ucauacauacacuguauac

SEQ ID NO: 2446612 - RNA, 19 nt, Artificial Sequence
  Description of Artificial Sequence: Synthetic oligonucleotide
  Sense strand starting at position 3778 of SEQ ID NO: 1887075
auggaauccagugguguga

SEQ ID NO: 2446613 - RNA, 19 nt, Artificial Sequence
  Description of Artificial Sequence: Synthetic oligonucleotide
  Antisense strand to SEQ ID NO: 2446612
ucacaccacuggauuccau

SEQ ID NO: 2446614 - RNA, 19 nt, Artificial Sequence
  Description of Artificial Sequence: Synthetic oligonucleotide
  Sense strand starting at position 3 of SEQ ID NO: 1887076
ugggaaauaauguggucaa

SEQ ID NO: 2446615 - RNA, 19 nt, Artificial Sequence
  Description of Artificial Sequence: Synthetic oligonucleotide
  Antisense strand to SEQ ID NO: 2446614
uugaccacauuauuuccca

SEQ ID NO: 2446616 - RNA, 19 nt, Artificial Sequence
  Description of Artificial Sequence: Synthetic oligonucleotide
  Sense strand starting at position 47 of SEQ ID NO: 1887076
gguuuagacuaauuggagu

SEQ ID NO: 2446617 - RNA, 19 nt, Artificial Sequence
  Description of Artificial Sequence: Synthetic oligonucleotide
  Antisense strand to SEQ ID NO: 2446616
acuccaauuagucuaaacc

SEQ ID NO: 2446618 - RNA, 19 nt, Artificial Sequence
  Description of Artificial Sequence: Synthetic oligonucleotide
  Sense strand starting at position 410 of SEQ ID NO: 1887076
gguagcuuaaacuagugaa

SEQ ID NO: 2446619 - RNA, 19 nt, Artificial Sequence
  Description of Artificial Sequence: Synthetic oligonucleotide
  Antisense strand to SEQ ID NO: 2446618
uucacuaguuuaagcuacc

SEQ ID NO: 2446620 - RNA, 19 nt, Artificial Sequence
  Description of Artificial Sequence: Synthetic oligonucleotide
  Sense strand starting at position 628 of SEQ ID NO: 1887076
aagcaagcucucgaagaga

SEQ ID NO: 2446621 - RNA, 19 nt, Artificial Sequence
  Description of Artificial Sequence: Synthetic oligonucleotide
  Antisense strand to SEQ ID NO: 2446620
ucucuucgagagcuugcuu

SEQ ID NO: 2446622 - RNA, 19 nt, Artificial Sequence
  Description of Artificial Sequence: Synthetic oligonucleotide
  Sense strand starting at position 631 of SEQ ID NO: 1887076
caagcucucgaagagauac

SEQ ID NO: 2446623 - RNA, 19 nt, Artificial Sequence
  Description of Artificial Sequence: Synthetic oligonucleotide
  Antisense strand to SEQ ID NO: 2446622
guaucucuucgagagcuug

SEQ ID NO: 2446624 - RNA, 19 nt, Artificial Sequence
  Description of Artificial Sequence: Synthetic oligonucleotide
  Sense strand starting at position 1142 of SEQ ID NO: 1887076
acauaauaggaugguuauu

SEQ ID NO: 2446625 - RNA, 19 nt, Artificial Sequence
  Description of Artificial Sequence: Synthetic oligonucleotide
  Antisense strand to SEQ ID NO: 2446624
aauaaccauccuauuaugu

SEQ ID NO: 2446626 - RNA, 19 nt, Artificial Sequence
  Description of Artificial Sequence: Synthetic oligonucleotide
  Sense strand starting at position 1220 of SEQ ID NO: 1887076
caaaguucuggagaugcau

SEQ ID NO: 2446627 - RNA, 19 nt, Artificial Sequence
  Description of Artificial Sequence: Synthetic oligonucleotide
  Antisense strand to SEQ ID NO: 2446626
augcaucuccagaacuuug

SEQ ID NO: 2446628 - RNA, 19 nt, Artificial Sequence
  Description of Artificial Sequence: Synthetic oligonucleotide
  Sense strand starting at position 1435 of SEQ ID NO: 1887076
ggguggauguguucugaag

SEQ ID NO: 2446629 - RNA, 19 nt, Artificial Sequence
  Description of Artificial Sequence: Synthetic oligonucleotide
  Antisense strand to SEQ ID NO: 2446628
cuucagaacacauccaccc

SEQ ID NO: 2446630 - RNA, 19 nt, Artificial Sequence
  Description of Artificial Sequence: Synthetic oligonucleotide
  Sense strand starting at position 1442 of SEQ ID NO: 1887076
uguguucugaagcacagaa

SEQ ID NO: 2446631 - RNA, 19 nt, Artificial Sequence
  Description of Artificial Sequence: Synthetic oligonucleotide
  Antisense strand to SEQ ID NO: 2446630
uucugugcuucagaacaca

SEQ ID NO: 2446632 - RNA, 19 nt, Artificial Sequence
  Description of Artificial Sequence: Synthetic oligonucleotide
  Sense strand starting at position 1664 of SEQ ID NO: 1887076
gagggcuaugucuauaaau

SEQ ID NO: 2446633 - RNA, 19 nt, Artificial Sequence
  Description of Artificial Sequence: Synthetic oligonucleotide
  Antisense strand to SEQ ID NO: 2446632
auuuauagacauagcccuc

SEQ ID NO: 2446634 - RNA, 19 nt, Artificial Sequence
  Description of Artificial Sequence: Synthetic oligonucleotide
  Sense strand starting at position 1666 of SEQ ID NO: 1887076
gggcuaugucuauaaauuc

SEQ ID NO: 2446635 - RNA, 19 nt, Artificial Sequence
  Description of Artificial Sequence: Synthetic oligonucleotide
  Antisense strand to SEQ ID NO: 2446634
gaauuuauagacauagccc

SEQ ID NO: 2446636 - RNA, 19 nt, Artificial Sequence
  Description of Artificial Sequence: Synthetic oligonucleotide
  Sense strand starting at position 1751 of SEQ ID NO: 1887076
uuucuaauagaguagcuau

SEQ ID NO: 2446637 - RNA, 19 nt, Artificial Sequence
  Description of Artificial Sequence: Synthetic oligonucleotide
  Antisense strand to SEQ ID NO: 2446636
auagcuacucuauuagaaa

SEQ ID NO: 2446638 - RNA, 19 nt, Artificial Sequence
  Description of Artificial Sequence: Synthetic oligonucleotide
  Sense strand starting at position 2009 of SEQ ID NO: 1887076
aaggguaaucacugucucu

SEQ ID NO: 2446639 - RNA, 19 nt, Artificial Sequence
  Description of Artificial Sequence: Synthetic oligonucleotide
  Antisense strand to SEQ ID NO: 2446638
agagacagugauuacccuu

SEQ ID NO: 2446640 - RNA, 19 nt, Artificial Sequence
  Description of Artificial Sequence: Synthetic oligonucleotide
  Sense strand starting at position 2098 of SEQ ID NO: 1887076
gcagcagaccuguuuacgu

SEQ ID NO: 2446641 - RNA, 19 nt, Artificial Sequence
  Description of Artificial Sequence: Synthetic oligonucleotide
  Antisense strand to SEQ ID NO: 2446640
acguaaacaggucugcugc

SEQ ID NO: 2446642 - RNA, 19 nt, Artificial Sequence
  Description of Artificial Sequence: Synthetic oligonucleotide
  Sense strand starting at position 2131 of SEQ ID NO: 1887076
acucaacucacggagguau

SEQ ID NO: 2446643 - RNA, 19 nt, Artificial Sequence
  Description of Artificial Sequence: Synthetic oligonucleotide
  Antisense strand to SEQ ID NO: 2446642
auaccuccgugaguugagu

SEQ ID NO: 2446644 - RNA, 19 nt, Artificial Sequence
  Description of Artificial Sequence: Synthetic oligonucleotide
  Sense strand starting at position 2195 of SEQ ID NO: 1887076
guucccauggcuuacagaa

SEQ ID NO: 2446645 - RNA, 19 nt, Artificial Sequence
  Description of Artificial Sequence: Synthetic oligonucleotide
  Antisense strand to SEQ ID NO: 2446644
uucuguaagccaugggaac

SEQ ID NO: 2446646 - RNA, 19 nt, Artificial Sequence
  Description of Artificial Sequence: Synthetic oligonucleotide
  Sense strand starting at position 2340 of SEQ ID NO: 1887076
agacuucuggugugaaaca

SEQ ID NO: 2446647 - RNA, 19 nt, Artificial Sequence
  Description of Artificial Sequence: Synthetic oligonucleotide
  Antisense strand to SEQ ID NO: 2446646
uguuucacaccagaagucu

SEQ ID NO: 2446648 - RNA, 19 nt, Artificial Sequence
  Description of Artificial Sequence: Synthetic oligonucleotide
  Sense strand starting at position 2361 of SEQ ID NO: 1887076
uggagucagcuuugagaca

SEQ ID NO: 2446649 - RNA, 19 nt, Artificial Sequence
  Description of Artificial Sequence: Synthetic oligonucleotide
  Antisense strand to SEQ ID NO: 2446648
ugucucaaagcugacucca

SEQ ID NO: 2446650 - RNA, 19 nt, Artificial Sequence
  Description of Artificial Sequence: Synthetic oligonucleotide
  Sense strand starting at position 2437 of SEQ ID NO: 1887076
gagugcaauuccuuaugac

SEQ ID NO: 2446651 - RNA, 19 nt, Artificial Sequence
  Description of Artificial Sequence: Synthetic oligonucleotide
  Antisense strand to SEQ ID NO: 2446650
gucauaaggaauugcacuc

SEQ ID NO: 2446652 - RNA, 19 nt, Artificial Sequence
  Description of Artificial Sequence: Synthetic oligonucleotide
  Sense strand starting at position 2438 of SEQ ID NO: 1887076
agugcaauuccuuaugaca

SEQ ID NO: 2446653 - RNA, 19 nt, Artificial Sequence
  Description of Artificial Sequence: Synthetic oligonucleotide
  Antisense strand to SEQ ID NO: 2446652
ugucauaaggaauugcacu

SEQ ID NO: 2446654 - RNA, 19 nt, Artificial Sequence
  Description of Artificial Sequence: Synthetic oligonucleotide
  Sense strand starting at position 2497 of SEQ ID NO: 1887076
ugagaagcaagcuauuguu

SEQ ID NO: 2446655 - RNA, 19 nt, Artificial Sequence
  Description of Artificial Sequence: Synthetic oligonucleotide
  Antisense strand to SEQ ID NO: 2446654
aacaauagcuugcuucuca

SEQ ID NO: 2446656 - RNA, 19 nt, Artificial Sequence
  Description of Artificial Sequence: Synthetic oligonucleotide
  Sense strand starting at position 2672 of SEQ ID NO: 1887076
guauuaggcucccucacaa

SEQ ID NO: 2446657 - RNA, 19 nt, Artificial Sequence
  Description of Artificial Sequence: Synthetic oligonucleotide
  Antisense strand to SEQ ID NO: 2446656
uugugagggagccuaauac

SEQ ID NO: 2446658 - RNA, 19 nt, Artificial Sequence
  Description of Artificial Sequence: Synthetic oligonucleotide
  Sense strand starting at position 2698 of SEQ ID NO: 1887076
caacuaugaguaggugaau

SEQ ID NO: 2446659 - RNA, 19 nt, Artificial Sequence
  Description of Artificial Sequence: Synthetic oligonucleotide
  Antisense strand to SEQ ID NO: 2446658
auucaccuacucauaguug

SEQ ID NO: 2446660 - RNA, 19 nt, Artificial Sequence
  Description of Artificial Sequence: Synthetic oligonucleotide
  Sense strand starting at position 2699 of SEQ ID NO: 1887076
aacuaugaguaggugaaua

SEQ ID NO: 2446661 - RNA, 19 nt, Artificial Sequence
  Description of Artificial Sequence: Synthetic oligonucleotide
  Antisense strand to SEQ ID NO: 2446660
uauucaccuacucauaguu

SEQ ID NO: 2446662 - RNA, 19 nt, Artificial Sequence
  Description of Artificial Sequence: Synthetic oligonucleotide
  Sense strand starting at position 2760 of SEQ ID NO: 1887076
auauuagucugucuacuac

SEQ ID NO: 2446663 - RNA, 19 nt, Artificial Sequence
  Description of Artificial Sequence: Synthetic oligonucleotide
  Antisense strand to SEQ ID NO: 2446662
guaguagacagacuaauau

SEQ ID NO: 2446664 - RNA, 19 nt, Artificial Sequence
  Description of Artificial Sequence: Synthetic oligonucleotide
  Sense strand starting at position 2794 of SEQ ID NO: 1887076
aggguccacuaacuaauua

SEQ ID NO: 2446665 - RNA, 19 nt, Artificial Sequence
  Description of Artificial Sequence: Synthetic oligonucleotide
  Antisense strand to SEQ ID NO: 2446664
uaauuaguuaguggacccu

SEQ ID NO: 2446666 - RNA, 19 nt, Artificial Sequence
  Description of Artificial Sequence: Synthetic oligonucleotide
  Sense strand starting at position 2823 of SEQ ID NO: 1887076
auauguaaccaggguuaca

SEQ ID NO: 2446667 - RNA, 19 nt, Artificial Sequence
  Description of Artificial Sequence: Synthetic oligonucleotide
  Antisense strand to SEQ ID NO: 2446666
uguaacccugguuacauau

SEQ ID NO: 2446668 - RNA, 19 nt, Artificial Sequence
  Description of Artificial Sequence: Synthetic oligonucleotide
  Sense strand starting at position 2835 of SEQ ID NO: 1887076
gguuacaaguucuccugau

SEQ ID NO: 2446669 - RNA, 19 nt, Artificial Sequence
  Description of Artificial Sequence: Synthetic oligonucleotide
  Antisense strand to SEQ ID NO: 2446668
aucaggagaacuuguaacc

SEQ ID NO: 2446670 - RNA, 19 nt, Artificial Sequence
  Description of Artificial Sequence: Synthetic oligonucleotide
  Sense strand starting at position 2836 of SEQ ID NO: 1887076
guuacaaguucuccugauu

SEQ ID NO: 2446671 - RNA, 19 nt, Artificial Sequence
  Description of Artificial Sequence: Synthetic oligonucleotide
  Antisense strand to SEQ ID NO: 2446670
aaucaggagaacuuguaac

SEQ ID NO: 2446672 - RNA, 19 nt, Artificial Sequence
  Description of Artificial Sequence: Synthetic oligonucleotide
  Sense strand starting at position 2934 of SEQ ID NO: 1887076
ugccuagaagacugacaaa

SEQ ID NO: 2446673 - RNA, 19 nt, Artificial Sequence
  Description of Artificial Sequence: Synthetic oligonucleotide
  Antisense strand to SEQ ID NO: 2446672
uuugucagucuucuaggca

SEQ ID NO: 2446674 - RNA, 19 nt, Artificial Sequence
  Description of Artificial Sequence: Synthetic oligonucleotide
  Sense strand starting at position 2963 of SEQ ID NO: 1887076
guauucccucacgauaauu

SEQ ID NO: 2446675 - RNA, 19 nt, Artificial Sequence
  Description of Artificial Sequence: Synthetic oligonucleotide
  Antisense strand to SEQ ID NO: 2446674
aauuaucgugagggaauac

SEQ ID NO: 2446676 - RNA, 19 nt, Artificial Sequence
  Description of Artificial Sequence: Synthetic oligonucleotide
  Sense strand starting at position 2971 of SEQ ID NO: 1887076
ucacgauaauuaucugaua

SEQ ID NO: 2446677 - RNA, 19 nt, Artificial Sequence
  Description of Artificial Sequence: Synthetic oligonucleotide
  Antisense strand to SEQ ID NO: 2446676
uaucagauaauuaucguga

SEQ ID NO: 2446678 - RNA, 19 nt, Artificial Sequence
  Description of Artificial Sequence: Synthetic oligonucleotide
  Sense strand starting at position 2983 of SEQ ID NO: 1887076
ucugauaacuuggcaggaa

SEQ ID NO: 2446679 - RNA, 19 nt, Artificial Sequence
  Description of Artificial Sequence: Synthetic oligonucleotide
  Antisense strand to SEQ ID NO: 2446678
uuccugccaaguuaucaga

SEQ ID NO: 2446680 - RNA, 19 nt, Artificial Sequence
  Description of Artificial Sequence: Synthetic oligonucleotide
  Sense strand starting at position 3136 of SEQ ID NO: 1887076
uguuuagacucaguaaauc

SEQ ID NO: 2446681 - RNA, 19 nt, Artificial Sequence
  Description of Artificial Sequence: Synthetic oligonucleotide
  Antisense strand to SEQ ID NO: 2446680
gauuuacugagucuaaaca

SEQ ID NO: 2446682 - RNA, 19 nt, Artificial Sequence
  Description of Artificial Sequence: Synthetic oligonucleotide
  Sense strand starting at position 3168 of SEQ ID NO: 1887076
aggaaaugggcuugacuca

SEQ ID NO: 2446683 - RNA, 19 nt, Artificial Sequence
  Description of Artificial Sequence: Synthetic oligonucleotide
  Antisense strand to SEQ ID NO: 2446682
ugagucaagcccauuuccu

SEQ ID NO: 2446684 - RNA, 19 nt, Artificial Sequence
  Description of Artificial Sequence: Synthetic oligonucleotide
  Sense strand starting at position 3182 of SEQ ID NO: 1887076
acucaauucgaauauguug

SEQ ID NO: 2446685 - RNA, 19 nt, Artificial Sequence
  Description of Artificial Sequence: Synthetic oligonucleotide
  Antisense strand to SEQ ID NO: 2446684
caacauauucgaauugagu

SEQ ID NO: 2446686 - RNA, 19 nt, Artificial Sequence
  Description of Artificial Sequence: Synthetic oligonucleotide
  Sense strand starting at position 3352 of SEQ ID NO: 1887076
aaaggcaagguuuauguau

SEQ ID NO: 2446687 - RNA, 19 nt, Artificial Sequence
  Description of Artificial Sequence: Synthetic oligonucleotide
  Antisense strand to SEQ ID NO: 2446686
auacauaaaccuugccuuu

SEQ ID NO: 2446688 - RNA, 19 nt, Artificial Sequence
  Description of Artificial Sequence: Synthetic oligonucleotide
  Sense strand starting at position 3463 of SEQ ID NO: 1887076
aauacuaaauggguuguua

SEQ ID NO: 2446689 - RNA, 19 nt, Artificial Sequence
  Description of Artificial Sequence: Synthetic oligonucleotide
  Antisense strand to SEQ ID NO: 2446688
uaacaacccauuuaguauu

SEQ ID NO: 2446690 - RNA, 19 nt, Artificial Sequence
  Description of Artificial Sequence: Synthetic oligonucleotide
  Sense strand starting at position 3465 of SEQ ID NO: 1887076
uacuaaauggguuguuaua

SEQ ID NO: 2446691 - RNA, 19 nt, Artificial Sequence
  Description of Artificial Sequence: Synthetic oligonucleotide
  Antisense strand to SEQ ID NO: 2446690
uauaacaacccauuuagua

SEQ ID NO: 2446692 - RNA, 19 nt, Artificial Sequence
  Description of Artificial Sequence: Synthetic oligonucleotide
  Sense strand starting at position 3477 of SEQ ID NO: 1887076
uguuauagggcuuaaauga

SEQ ID NO: 2446693 - RNA, 19 nt, Artificial Sequence
  Description of Artificial Sequence: Synthetic oligonucleotide
  Antisense strand to SEQ ID NO: 2446692
ucauuuaagcccuauaaca

SEQ ID NO: 2446694 - RNA, 19 nt, Artificial Sequence
  Description of Artificial Sequence: Synthetic oligonucleotide
  Sense strand starting at position 263 of SEQ ID NO: 1887077
ucuccuugucagggagacu

SEQ ID NO: 2446695 - RNA, 19 nt, Artificial Sequence
  Description of Artificial Sequence: Synthetic oligonucleotide
  Antisense strand to SEQ ID NO: 2446694
agucucccugacaaggaga

SEQ ID NO: 2446696 - RNA, 19 nt, Artificial Sequence
  Description of Artificial Sequence: Synthetic oligonucleotide
  Sense strand starting at position 264 of SEQ ID NO: 1887077
cuccuugucagggagacuu

SEQ ID NO: 2446697 - RNA, 19 nt, Artificial Sequence
  Description of Artificial Sequence: Synthetic oligonucleotide
  Antisense strand to SEQ ID NO: 2446696
aagucucccugacaaggag

SEQ ID NO: 2446698 - RNA, 19 nt, Artificial Sequence
  Description of Artificial Sequence: Synthetic oligonucleotide
  Sense strand starting at position 391 of SEQ ID NO: 1887077
gagcuuaauguacaugaau

SEQ ID NO: 2446699 - RNA, 19 nt, Artificial Sequence
  Description of Artificial Sequence: Synthetic oligonucleotide
  Antisense strand to SEQ ID NO: 2446698
auucauguacauuaagcuc

SEQ ID NO: 2446700 - RNA, 19 nt, Artificial Sequence
  Description of Artificial Sequence: Synthetic oligonucleotide
  Sense strand starting at position 402 of SEQ ID NO: 1887077
acaugaauagagugucauu

SEQ ID NO: 2446701 - RNA, 19 nt, Artificial Sequence
  Description of Artificial Sequence: Synthetic oligonucleotide
  Antisense strand to SEQ ID NO: 2446700
aaugacacucuauucaugu

SEQ ID NO: 2446702 - RNA, 19 nt, Artificial Sequence
  Description of Artificial Sequence: Synthetic oligonucleotide
  Sense strand starting at position 405 of SEQ ID NO: 1887077
ugaauagagugucauuuaa

SEQ ID NO: 2446703 - RNA, 19 nt, Artificial Sequence
  Description of Artificial Sequence: Synthetic oligonucleotide
  Antisense strand to SEQ ID NO: 2446702
uuaaaugacacucuauuca

SEQ ID NO: 2446704 - RNA, 19 nt, Artificial Sequence
  Description of Artificial Sequence: Synthetic oligonucleotide
  Sense strand starting at position 554 of SEQ ID NO: 1887077
gccuuuguucuuuaagaau

SEQ ID NO: 2446705 - RNA, 19 nt, Artificial Sequence
  Description of Artificial Sequence: Synthetic oligonucleotide
  Antisense strand to SEQ ID NO: 2446704
auucuuaaagaacaaaggc

SEQ ID NO: 2446706 - RNA, 19 nt, Artificial Sequence
  Description of Artificial Sequence: Synthetic oligonucleotide
  Sense strand starting at position 786 of SEQ ID NO: 1887077
ggacaaauagccuauguuu

SEQ ID NO: 2446707 - RNA, 19 nt, Artificial Sequence
  Description of Artificial Sequence: Synthetic oligonucleotide
  Antisense strand to SEQ ID NO: 2446706
aaacauaggcuauuugucc

SEQ ID NO: 2446708 - RNA, 19 nt, Artificial Sequence
  Description of Artificial Sequence: Synthetic oligonucleotide
  Sense strand starting at position 826 of SEQ ID NO: 1887077
uccauaagugauuguuaag

SEQ ID NO: 2446709 - RNA, 19 nt, Artificial Sequence
  Description of Artificial Sequence: Synthetic oligonucleotide
  Antisense strand to SEQ ID NO: 2446708
cuuaacaaucacuuaugga

SEQ ID NO: 2446710 - RNA, 19 nt, Artificial Sequence
  Description of Artificial Sequence: Synthetic oligonucleotide
  Sense strand starting at position 912 of SEQ ID NO: 1887077
ccugccaaguuaucagaua

SEQ ID NO: 2446711 - RNA, 19 nt, Artificial Sequence
  Description of Artificial Sequence: Synthetic oligonucleotide
  Antisense strand to SEQ ID NO: 2446710
uaucugauaacuuggcagg

SEQ ID NO: 2446712 - RNA, 19 nt, Artificial Sequence
  Description of Artificial Sequence: Synthetic oligonucleotide
  Sense strand starting at position 993 of SEQ ID NO: 1887077
guacauacuugauugugga

SEQ ID NO: 2446713 - RNA, 19 nt, Artificial Sequence
  Description of Artificial Sequence: Synthetic oligonucleotide
  Antisense strand to SEQ ID NO: 2446712
uccacaaucaaguauguac

SEQ ID NO: 2446714 - RNA, 19 nt, Artificial Sequence
  Description of Artificial Sequence: Synthetic oligonucleotide
  Sense strand starting at position 994 of SEQ ID NO: 1887077
uacauacuugauuguggaa

SEQ ID NO: 2446715 - RNA, 19 nt, Artificial Sequence
  Description of Artificial Sequence: Synthetic oligonucleotide
  Antisense strand to SEQ ID NO: 2446714
uuccacaaucaaguaugua

SEQ ID NO: 2446716 - RNA, 19 nt, Artificial Sequence
  Description of Artificial Sequence: Synthetic oligonucleotide
  Sense strand starting at position 1006 of SEQ ID NO: 1887077
uguggaaguguaugagaaa

SEQ ID NO: 2446717 - RNA, 19 nt, Artificial Sequence
  Description of Artificial Sequence: Synthetic oligonucleotide
  Antisense strand to SEQ ID NO: 2446716
uuucucauacacuuccaca

SEQ ID NO: 2446718 - RNA, 19 nt, Artificial Sequence
  Description of Artificial Sequence: Synthetic oligonucleotide
  Sense strand starting at position 1120 of SEQ ID NO: 1887077
auugacuaaauguguagua

SEQ ID NO: 2446719 - RNA, 19 nt, Artificial Sequence
  Description of Artificial Sequence: Synthetic oligonucleotide
  Antisense strand to SEQ ID NO: 2446718
uacuacacauuuagucaau

SEQ ID NO: 2446720 - RNA, 19 nt, Artificial Sequence
  Description of Artificial Sequence: Synthetic oligonucleotide
  Sense strand starting at position 1122 of SEQ ID NO: 1887077
ugacuaaauguguaguaga

SEQ ID NO: 2446721 - RNA, 19 nt, Artificial Sequence
  Description of Artificial Sequence: Synthetic oligonucleotide
  Antisense strand to SEQ ID NO: 2446720
ucuacuacacauuuaguca

SEQ ID NO: 2446722 - RNA, 19 nt, Artificial Sequence
  Description of Artificial Sequence: Synthetic oligonucleotide
  Sense strand starting at position 1129 of SEQ ID NO: 1887077
auguguaguagacagacua

SEQ ID NO: 2446723 - RNA, 19 nt, Artificial Sequence
  Description of Artificial Sequence: Synthetic oligonucleotide
  Antisense strand to SEQ ID NO: 2446722
uagucugucuacuacacau

SEQ ID NO: 2446724 - RNA, 19 nt, Artificial Sequence
  Description of Artificial Sequence: Synthetic oligonucleotide
  Sense strand starting at position 1152 of SEQ ID NO: 1887077
gaaggagaaucugccaguu

SEQ ID NO: 2446725 - RNA, 19 nt, Artificial Sequence
  Description of Artificial Sequence: Synthetic oligonucleotide
  Antisense strand to SEQ ID NO: 2446724
aacuggcagauucuccuuc

SEQ ID NO: 2446726 - RNA, 19 nt, Artificial Sequence
  Description of Artificial Sequence: Synthetic oligonucleotide
  Sense strand starting at position 1699 of SEQ ID NO: 1887077
ucuguaagccaugggaaca

SEQ ID NO: 2446727 - RNA, 19 nt, Artificial Sequence
  Description of Artificial Sequence: Synthetic oligonucleotide
  Antisense strand to SEQ ID NO: 2446726
uguucccauggcuuacaga

SEQ ID NO: 2446728 - RNA, 19 nt, Artificial Sequence
  Description of Artificial Sequence: Synthetic oligonucleotide
  Sense strand starting at position 1700 of SEQ ID NO: 1887077
cuguaagccaugggaacaa

SEQ ID NO: 2446729 - RNA, 19 nt, Artificial Sequence
  Description of Artificial Sequence: Synthetic oligonucleotide
  Antisense strand to SEQ ID NO: 2446728
uuguucccauggcuuacag

SEQ ID NO: 2446730 - RNA, 19 nt, Artificial Sequence
  Description of Artificial Sequence: Synthetic oligonucleotide
  Sense strand starting at position 1741 of SEQ ID NO: 1887077
ugagauguucgugacagac

SEQ ID NO: 2446731 - RNA, 19 nt, Artificial Sequence
  Description of Artificial Sequence: Synthetic oligonucleotide
  Antisense strand to SEQ ID NO: 2446730
gucugucacgaacaucuca

SEQ ID NO: 2446732 - RNA, 19 nt, Artificial Sequence
  Description of Artificial Sequence: Synthetic oligonucleotide
  Sense strand starting at position 1745 of SEQ ID NO: 1887077
auguucgugacagacacau

SEQ ID NO: 2446733 - RNA, 19 nt, Artificial Sequence
  Description of Artificial Sequence: Synthetic oligonucleotide
  Antisense strand to SEQ ID NO: 2446732
augugucugucacgaacau

SEQ ID NO: 2446734 - RNA, 19 nt, Artificial Sequence
  Description of Artificial Sequence: Synthetic oligonucleotide
  Sense strand starting at position 1775 of SEQ ID NO: 1887077
uugaguaugaccgacugau

SEQ ID NO: 2446735 - RNA, 19 nt, Artificial Sequence
  Description of Artificial Sequence: Synthetic oligonucleotide
  Antisense strand to SEQ ID NO: 2446734
aucagucggucauacucaa

SEQ ID NO: 2446736 - RNA, 19 nt, Artificial Sequence
  Description of Artificial Sequence: Synthetic oligonucleotide
  Sense strand starting at position 2040 of SEQ ID NO: 1887077
cugcucaggccugaauuau

SEQ ID NO: 2446737 - RNA, 19 nt, Artificial Sequence
  Description of Artificial Sequence: Synthetic oligonucleotide
  Antisense strand to SEQ ID NO: 2446736
auaauucaggccugagcag

SEQ ID NO: 2446738 - RNA, 19 nt, Artificial Sequence
  Description of Artificial Sequence: Synthetic oligonucleotide
  Sense strand starting at position 2109 of SEQ ID NO: 1887077
guguuugcucaggaucaaa

SEQ ID NO: 2446739 - RNA, 19 nt, Artificial Sequence
  Description of Artificial Sequence: Synthetic oligonucleotide
  Antisense strand to SEQ ID NO: 2446738
uuugauccugagcaaacac

SEQ ID NO: 2446740 - RNA, 19 nt, Artificial Sequence
  Description of Artificial Sequence: Synthetic oligonucleotide
  Sense strand starting at position 2309 of SEQ ID NO: 1887077
cuguaauuauauccaugag

SEQ ID NO: 2446741 - RNA, 19 nt, Artificial Sequence
  Description of Artificial Sequence: Synthetic oligonucleotide
  Antisense strand to SEQ ID NO: 2446740
cucauggauauaauuacag

SEQ ID NO: 2446742 - RNA, 19 nt, Artificial Sequence
  Description of Artificial Sequence: Synthetic oligonucleotide
  Sense strand starting at position 2312 of SEQ ID NO: 1887077
uaauuauauccaugaggug

SEQ ID NO: 2446743 - RNA, 19 nt, Artificial Sequence
  Description of Artificial Sequence: Synthetic oligonucleotide
  Antisense strand to SEQ ID NO: 2446742
caccucauggauauaauua

SEQ ID NO: 2446744 - RNA, 19 nt, Artificial Sequence
  Description of Artificial Sequence: Synthetic oligonucleotide
  Sense strand starting at position 2403 of SEQ ID NO: 1887077
guuccuuucccugaaguua

SEQ ID NO: 2446745 - RNA, 19 nt, Artificial Sequence
  Description of Artificial Sequence: Synthetic oligonucleotide
  Antisense strand to SEQ ID NO: 2446744
uaacuucagggaaaggaac

SEQ ID NO: 2446746 - RNA, 19 nt, Artificial Sequence
  Description of Artificial Sequence: Synthetic oligonucleotide
  Sense strand starting at position 2520 of SEQ ID NO: 1887077
cuacucaggccugaauuau

SEQ ID NO: 2446747 - RNA, 19 nt, Artificial Sequence
  Description of Artificial Sequence: Synthetic oligonucleotide
  Antisense strand to SEQ ID NO: 2446746
auaauucaggccugaguag

SEQ ID NO: 2446748 - RNA, 19 nt, Artificial Sequence
  Description of Artificial Sequence: Synthetic oligonucleotide
  Sense strand starting at position 2704 of SEQ ID NO: 1887077
auugaaacucgaugccaau

SEQ ID NO: 2446749 - RNA, 19 nt, Artificial Sequence
  Description of Artificial Sequence: Synthetic oligonucleotide
  Antisense strand to SEQ ID NO: 2446748
auuggcaucgaguuucaau

SEQ ID NO: 2446750 - RNA, 19 nt, Artificial Sequence
  Description of Artificial Sequence: Synthetic oligonucleotide
  Sense strand starting at position 3230 of SEQ ID NO: 1887077
ugaguauuguugguaugaa

SEQ ID NO: 2446751 - RNA, 19 nt, Artificial Sequence
  Description of Artificial Sequence: Synthetic oligonucleotide
  Antisense strand to SEQ ID NO: 2446750
uucauaccaacaauacuca

SEQ ID NO: 2446752 - RNA, 19 nt, Artificial Sequence
  Description of Artificial Sequence: Synthetic oligonucleotide
  Sense strand starting at position 3239 of SEQ ID NO: 1887077
uugguaugaauaugaaugu

SEQ ID NO: 2446753 - RNA, 19 nt, Artificial Sequence
  Description of Artificial Sequence: Synthetic oligonucleotide
  Antisense strand to SEQ ID NO: 2446752
acauucauauucauaccaa

SEQ ID NO: 2446754 - RNA, 19 nt, Artificial Sequence
  Description of Artificial Sequence: Synthetic oligonucleotide
  Sense strand starting at position 3245 of SEQ ID NO: 1887077
ugaauaugaaugugagggu

SEQ ID NO: 2446755 - RNA, 19 nt, Artificial Sequence
  Description of Artificial Sequence: Synthetic oligonucleotide
  Antisense strand to SEQ ID NO: 2446754
acccucacauucauauuca

SEQ ID NO: 2446756 - RNA, 19 nt, Artificial Sequence
  Description of Artificial Sequence: Synthetic oligonucleotide
  Sense strand starting at position 3258 of SEQ ID NO: 1887077
gaggguaucucuucgagag

SEQ ID NO: 2446757 - RNA, 19 nt, Artificial Sequence
  Description of Artificial Sequence: Synthetic oligonucleotide
  Antisense strand to SEQ ID NO: 2446756
cucucgaagagauacccuc

SEQ ID NO: 2446758 - RNA, 19 nt, Artificial Sequence
  Description of Artificial Sequence: Synthetic oligonucleotide
  Sense strand starting at position 3341 of SEQ ID NO: 1887077
uguucuuugaguugaagau

SEQ ID NO: 2446759 - RNA, 19 nt, Artificial Sequence
  Description of Artificial Sequence: Synthetic oligonucleotide
  Antisense strand to SEQ ID NO: 2446758
aucuucaacucaaagaaca

SEQ ID NO: 2446760 - RNA, 19 nt, Artificial Sequence
  Description of Artificial Sequence: Synthetic oligonucleotide
  Sense strand starting at position 3342 of SEQ ID NO: 1887077
guucuuugaguugaagauc

SEQ ID NO: 2446761 - RNA, 19 nt, Artificial Sequence
  Description of Artificial Sequence: Synthetic oligonucleotide
  Antisense strand to SEQ ID NO: 2446760
gaucuucaacucaaagaac

SEQ ID NO: 2446762 - RNA, 19 nt, Artificial Sequence
  Description of Artificial Sequence: Synthetic oligonucleotide
  Sense strand starting at position 3395 of SEQ ID NO: 1887077
gguaaugagcuacaccuuu

SEQ ID NO: 2446763 - RNA, 19 nt, Artificial Sequence
  Description of Artificial Sequence: Synthetic oligonucleotide
  Antisense strand to SEQ ID NO: 2446762
aaagguguagcucauuacc

SEQ ID NO: 2446764 - RNA, 19 nt, Artificial Sequence
  Description of Artificial Sequence: Synthetic oligonucleotide
  Sense strand starting at position 3576 of SEQ ID NO: 1887077
uguagcauuucuccuuaua

SEQ ID NO: 2446765 - RNA, 19 nt, Artificial Sequence
  Description of Artificial Sequence: Synthetic oligonucleotide
  Antisense strand to SEQ ID NO: 2446764
uauaaggagaaaugcuaca

SEQ ID NO: 2446766 - RNA, 19 nt, Artificial Sequence
  Description of Artificial Sequence: Synthetic oligonucleotide
  Sense strand starting at position 3603 of SEQ ID NO: 1887077
ggcagcaucagugauuaca

SEQ ID NO: 2446767 - RNA, 19 nt, Artificial Sequence
  Description of Artificial Sequence: Synthetic oligonucleotide
  Antisense strand to SEQ ID NO: 2446766
uguaaucacugaugcugcc

SEQ ID NO: 2446768 - RNA, 19 nt, Artificial Sequence
  Description of Artificial Sequence: Synthetic oligonucleotide
  Sense strand starting at position 3605 of SEQ ID NO: 1887077
cagcaucagugauuacaag

SEQ ID NO: 2446769 - RNA, 19 nt, Artificial Sequence
  Description of Artificial Sequence: Synthetic oligonucleotide
  Antisense strand to SEQ ID NO: 2446768
cuuguaaucacugaugcug

SEQ ID NO: 2446770 - RNA, 19 nt, Artificial Sequence
  Description of Artificial Sequence: Synthetic oligonucleotide
  Sense strand starting at position 3611 of SEQ ID NO: 1887077
cagugauuacaagguaaga

SEQ ID NO: 2446771 - RNA, 19 nt, Artificial Sequence
  Description of Artificial Sequence: Synthetic oligonucleotide
  Antisense strand to SEQ ID NO: 2446770
ucuuaccuuguaaucacug

SEQ ID NO: 2446772 - RNA, 19 nt, Artificial Sequence
  Description of Artificial Sequence: Synthetic oligonucleotide
  Sense strand starting at position 3944 of SEQ ID NO: 1887077
ggccaaauuuaagacuuga

SEQ ID NO: 2446773 - RNA, 19 nt, Artificial Sequence
  Description of Artificial Sequence: Synthetic oligonucleotide
  Antisense strand to SEQ ID NO: 2446772
ucaagucuuaaauuuggcc

SEQ ID NO: 2446774 - RNA, 19 nt, Artificial Sequence
  Description of Artificial Sequence: Synthetic oligonucleotide
  Sense strand starting at position 297 of SEQ ID NO: 1887078
guguucugcuucuuuagga

SEQ ID NO: 2446775 - RNA, 19 nt, Artificial Sequence
  Description of Artificial Sequence: Synthetic oligonucleotide
  Antisense strand to SEQ ID NO: 2446774
uccuaaagaagcagaacac

SEQ ID NO: 2446776 - RNA, 19 nt, Artificial Sequence
  Description of Artificial Sequence: Synthetic oligonucleotide
  Sense strand starting at position 298 of SEQ ID NO: 1887078
uguucugcuucuuuaggaa

SEQ ID NO: 2446777 - RNA, 19 nt, Artificial Sequence
  Description of Artificial Sequence: Synthetic oligonucleotide
  Antisense strand to SEQ ID NO: 2446776
uuccuaaagaagcagaaca

SEQ ID NO: 2446778 - RNA, 19 nt, Artificial Sequence
  Description of Artificial Sequence: Synthetic oligonucleotide
  Sense strand starting at position 302 of SEQ ID NO: 1887078
cugcuucuuuaggaaacau

SEQ ID NO: 2446779 - RNA, 19 nt, Artificial Sequence
  Description of Artificial Sequence: Synthetic oligonucleotide
  Antisense strand to SEQ ID NO: 2446778
auguuuccuaaagaagcag

SEQ ID NO: 2446780 - RNA, 19 nt, Artificial Sequence
  Description of Artificial Sequence: Synthetic oligonucleotide
  Sense strand starting at position 311 of SEQ ID NO: 1887078
uaggaaacaucuccugugu

SEQ ID NO: 2446781 - RNA, 19 nt, Artificial Sequence
  Description of Artificial Sequence: Synthetic oligonucleotide
  Antisense strand to SEQ ID NO: 2446780
acacaggagauguuuccua

SEQ ID NO: 2446782 - RNA, 19 nt, Artificial Sequence
  Description of Artificial Sequence: Synthetic oligonucleotide
  Sense strand starting at position 351 of SEQ ID NO: 1887078
gagcaccaggucugucauu

SEQ ID NO: 2446783 - RNA, 19 nt, Artificial Sequence
  Description of Artificial Sequence: Synthetic oligonucleotide
  Antisense strand to SEQ ID NO: 2446782
aaugacagaccuggugcuc

SEQ ID NO: 2446784 - RNA, 19 nt, Artificial Sequence
  Description of Artificial Sequence: Synthetic oligonucleotide
  Sense strand starting at position 356 of SEQ ID NO: 1887078
ccaggucugucauugagaa

SEQ ID NO: 2446785 - RNA, 19 nt, Artificial Sequence
  Description of Artificial Sequence: Synthetic oligonucleotide
  Antisense strand to SEQ ID NO: 2446784
uucucaaugacagaccugg

SEQ ID NO: 2446786 - RNA, 19 nt, Artificial Sequence
  Description of Artificial Sequence: Synthetic oligonucleotide
  Sense strand starting at position 357 of SEQ ID NO: 1887078
caggucugucauugagaac

SEQ ID NO: 2446787 - RNA, 19 nt, Artificial Sequence
  Description of Artificial Sequence: Synthetic oligonucleotide
  Antisense strand to SEQ ID NO: 2446786
guucucaaugacagaccug

SEQ ID NO: 2446788 - RNA, 19 nt, Artificial Sequence
  Description of Artificial Sequence: Synthetic oligonucleotide
  Sense strand starting at position 360 of SEQ ID NO: 1887078
gucugucauugagaacaug

SEQ ID NO: 2446789 - RNA, 19 nt, Artificial Sequence
  Description of Artificial Sequence: Synthetic oligonucleotide
  Antisense strand to SEQ ID NO: 2446788
cauguucucaaugacagac

SEQ ID NO: 2446790 - RNA, 19 nt, Artificial Sequence
  Description of Artificial Sequence: Synthetic oligonucleotide
  Sense strand starting at position 381 of SEQ ID NO: 1887078
aagagaggguuugaguuaa

SEQ ID NO: 2446791 - RNA, 19 nt, Artificial Sequence
  Description of Artificial Sequence: Synthetic oligonucleotide
  Antisense strand to SEQ ID NO: 2446790
uuaacucaaacccucucuu

SEQ ID NO: 2446792 - RNA, 19 nt, Artificial Sequence
  Description of Artificial Sequence: Synthetic oligonucleotide
  Sense strand starting at position 444 of SEQ ID NO: 1887078
gguacaaugacacguacaa

SEQ ID NO: 2446793 - RNA, 19 nt, Artificial Sequence
  Description of Artificial Sequence: Synthetic oligonucleotide
  Antisense strand to SEQ ID NO: 2446792
uuguacgugucauuguacc

SEQ ID NO: 2446794 - RNA, 19 nt, Artificial Sequence
  Description of Artificial Sequence: Synthetic oligonucleotide
  Sense strand starting at position 477 of SEQ ID NO: 1887078
acugcuuaguaacaagaca

SEQ ID NO: 2446795 - RNA, 19 nt, Artificial Sequence
  Description of Artificial Sequence: Synthetic oligonucleotide
  Antisense strand to SEQ ID NO: 2446794
ugucuuguuacuaagcagu

SEQ ID NO: 2446796 - RNA, 19 nt, Artificial Sequence
  Description of Artificial Sequence: Synthetic oligonucleotide
  Sense strand starting at position 538 of SEQ ID NO: 1887078
ggauuuacuugacaguauc

SEQ ID NO: 2446797 - RNA, 19 nt, Artificial Sequence
  Description of Artificial Sequence: Synthetic oligonucleotide
  Antisense strand to SEQ ID NO: 2446796
gauacugucaaguaaaucc

SEQ ID NO: 2446798 - RNA, 19 nt, Artificial Sequence
  Description of Artificial Sequence: Synthetic oligonucleotide
  Sense strand starting at position 546 of SEQ ID NO: 1887078
uugacaguaucucucaaag

SEQ ID NO: 2446799 - RNA, 19 nt, Artificial Sequence
  Description of Artificial Sequence: Synthetic oligonucleotide
  Antisense strand to SEQ ID NO: 2446798
cuuugagagauacugucaa

SEQ ID NO: 2446800 - RNA, 19 nt, Artificial Sequence
  Description of Artificial Sequence: Synthetic oligonucleotide
  Sense strand starting at position 601 of SEQ ID NO: 1887078
ucggcugugaucggauguu

SEQ ID NO: 2446801 - RNA, 19 nt, Artificial Sequence
  Description of Artificial Sequence: Synthetic oligonucleotide
  Antisense strand to SEQ ID NO: 2446800
aacauccgaucacagccga

SEQ ID NO: 2446802 - RNA, 19 nt, Artificial Sequence
  Description of Artificial Sequence: Synthetic oligonucleotide
  Sense strand starting at position 604 of SEQ ID NO: 1887078
gcugugaucggauguugag

SEQ ID NO: 2446803 - RNA, 19 nt, Artificial Sequence
  Description of Artificial Sequence: Synthetic oligonucleotide
  Antisense strand to SEQ ID NO: 2446802
cucaacauccgaucacagc

SEQ ID NO: 2446804 - RNA, 19 nt, Artificial Sequence
  Description of Artificial Sequence: Synthetic oligonucleotide
  Sense strand starting at position 614 of SEQ ID NO: 1887078
gauguugagugcuuugaca

SEQ ID NO: 2446805 - RNA, 19 nt, Artificial Sequence
  Description of Artificial Sequence: Synthetic oligonucleotide
  Antisense strand to SEQ ID NO: 2446804
ugucaaagcacucaacauc

SEQ ID NO: 2446806 - RNA, 19 nt, Artificial Sequence
  Description of Artificial Sequence: Synthetic oligonucleotide
  Sense strand starting at position 616 of SEQ ID NO: 1887078
uguugagugcuuugacaag

SEQ ID NO: 2446807 - RNA, 19 nt, Artificial Sequence
  Description of Artificial Sequence: Synthetic oligonucleotide
  Antisense strand to SEQ ID NO: 2446806
cuugucaaagcacucaaca

SEQ ID NO: 2446808 - RNA, 19 nt, Artificial Sequence
  Description of Artificial Sequence: Synthetic oligonucleotide
  Sense strand starting at position 628 of SEQ ID NO: 1887078
ugacaaguauggcugaaua

SEQ ID NO: 2446809 - RNA, 19 nt, Artificial Sequence
  Description of Artificial Sequence: Synthetic oligonucleotide
  Antisense strand to SEQ ID NO: 2446808
uauucagccauacuuguca

SEQ ID NO: 2446810 - RNA, 19 nt, Artificial Sequence
  Description of Artificial Sequence: Synthetic oligonucleotide
  Sense strand starting at position 771 of SEQ ID NO: 1887078
cagagaagcccacgaugua

SEQ ID NO: 2446811 - RNA, 19 nt, Artificial Sequence
  Description of Artificial Sequence: Synthetic oligonucleotide
  Antisense strand to SEQ ID NO: 2446810
uacaucgugggcuucucug

SEQ ID NO: 2446812 - RNA, 19 nt, Artificial Sequence
  Description of Artificial Sequence: Synthetic oligonucleotide
  Sense strand starting at position 790 of SEQ ID NO: 1887078
gccagugagugcccagaaa

SEQ ID NO: 2446813 - RNA, 19 nt, Artificial Sequence
  Description of Artificial Sequence: Synthetic oligonucleotide
  Antisense strand to SEQ ID NO: 2446812
uuucugggcacucacuggc

SEQ ID NO: 2446814 - RNA, 19 nt, Artificial Sequence
  Description of Artificial Sequence: Synthetic oligonucleotide
  Sense strand starting at position 1405 of SEQ ID NO: 1887078
gucagaggagagugauuca

SEQ ID NO: 2446815 - RNA, 19 nt, Artificial Sequence
  Description of Artificial Sequence: Synthetic oligonucleotide
  Antisense strand to SEQ ID NO: 2446814
ugaaucacucuccucugac

SEQ ID NO: 2446816 - RNA, 19 nt, Artificial Sequence
  Description of Artificial Sequence: Synthetic oligonucleotide
  Sense strand starting at position 1691 of SEQ ID NO: 1887078
gcugaauuauuguccugca

SEQ ID NO: 2446817 - RNA, 19 nt, Artificial Sequence
  Description of Artificial Sequence: Synthetic oligonucleotide
  Antisense strand to SEQ ID NO: 2446816
ugcaggacaauaauucagc

SEQ ID NO: 2446818 - RNA, 19 nt, Artificial Sequence
  Description of Artificial Sequence: Synthetic oligonucleotide
  Sense strand starting at position 1692 of SEQ ID NO: 1887078
cugaauuauuguccugcau

SEQ ID NO: 2446819 - RNA, 19 nt, Artificial Sequence
  Description of Artificial Sequence: Synthetic oligonucleotide
  Antisense strand to SEQ ID NO: 2446818
augcaggacaauaauucag

SEQ ID NO: 2446820 - RNA, 19 nt, Artificial Sequence
  Description of Artificial Sequence: Synthetic oligonucleotide
  Sense strand starting at position 3278 of SEQ ID NO: 1887078
ggagacugcagucaacuau

SEQ ID NO: 2446821 - RNA, 19 nt, Artificial Sequence
  Description of Artificial Sequence: Synthetic oligonucleotide
  Antisense strand to SEQ ID NO: 2446820
auaguugacugcagucucc

SEQ ID NO: 2446822 - RNA, 19 nt, Artificial Sequence
  Description of Artificial Sequence: Synthetic oligonucleotide
  Sense strand starting at position 3435 of SEQ ID NO: 1887078
cugugaaauuacgcuuuga

SEQ ID NO: 2446823 - RNA, 19 nt, Artificial Sequence
  Description of Artificial Sequence: Synthetic oligonucleotide
  Antisense strand to SEQ ID NO: 2446822
ucaaagcguaauuucacag

SEQ ID NO: 2446824 - RNA, 19 nt, Artificial Sequence
  Description of Artificial Sequence: Synthetic oligonucleotide
  Sense strand starting at position 3439 of SEQ ID NO: 1887078
gaaauuacgcuuugagcga

SEQ ID NO: 2446825 - RNA, 19 nt, Artificial Sequence
  Description of Artificial Sequence: Synthetic oligonucleotide
  Antisense strand to SEQ ID NO: 2446824
ucgcucaaagcguaauuuc

SEQ ID NO: 2446826 - RNA, 19 nt, Artificial Sequence
  Description of Artificial Sequence: Synthetic oligonucleotide
  Sense strand starting at position 3673 of SEQ ID NO: 1887078
cgaauacacuugggaaucu

SEQ ID NO: 2446827 - RNA, 19 nt, Artificial Sequence
  Description of Artificial Sequence: Synthetic oligonucleotide
  Antisense strand to SEQ ID NO: 2446826
agauucccaaguguauucg

SEQ ID NO: 2446828 - RNA, 19 nt, Artificial Sequence
  Description of Artificial Sequence: Synthetic oligonucleotide
  Sense strand starting at position 3695 of SEQ ID NO: 1887078
uucgaaugcggagauaacu

SEQ ID NO: 2446829 - RNA, 19 nt, Artificial Sequence
  Description of Artificial Sequence: Synthetic oligonucleotide
  Antisense strand to SEQ ID NO: 2446828
aguuaucuccgcauucgaa

SEQ ID NO: 2446830 - RNA, 19 nt, Artificial Sequence
  Description of Artificial Sequence: Synthetic oligonucleotide
  Sense strand starting at position 3703 of SEQ ID NO: 1887078
cggagauaacuccagcuuu

SEQ ID NO: 2446831 - RNA, 19 nt, Artificial Sequence
  Description of Artificial Sequence: Synthetic oligonucleotide
  Antisense strand to SEQ ID NO: 2446830
aaagcuggaguuaucuccg

SEQ ID NO: 2446832 - RNA, 19 nt, Artificial Sequence
  Description of Artificial Sequence: Synthetic oligonucleotide
  Sense strand starting at position 3719 of SEQ ID NO: 1887078
uuugauaugucugucucca

SEQ ID NO: 2446833 - RNA, 19 nt, Artificial Sequence
  Description of Artificial Sequence: Synthetic oligonucleotide
  Antisense strand to SEQ ID NO: 2446832
uggagacagacauaucaaa

SEQ ID NO: 2446834 - RNA, 19 nt, Artificial Sequence
  Description of Artificial Sequence: Synthetic oligonucleotide
  Sense strand starting at position 3721 of SEQ ID NO: 1887078
ugauaugucugucuccaga

SEQ ID NO: 2446835 - RNA, 19 nt, Artificial Sequence
  Description of Artificial Sequence: Synthetic oligonucleotide
  Antisense strand to SEQ ID NO: 2446834
ucuggagacagacauauca

SEQ ID NO: 2446836 - RNA, 19 nt, Artificial Sequence
  Description of Artificial Sequence: Synthetic oligonucleotide
  Sense strand starting at position 3764 of SEQ ID NO: 1887078
cugagaggcucauauuugu

SEQ ID NO: 2446837 - RNA, 19 nt, Artificial Sequence
  Description of Artificial Sequence: Synthetic oligonucleotide
  Antisense strand to SEQ ID NO: 2446836
acaaauaugagccucucag

SEQ ID NO: 2446838 - RNA, 19 nt, Artificial Sequence
  Description of Artificial Sequence: Synthetic oligonucleotide
  Sense strand starting at position 3773 of SEQ ID NO: 1887078
ucauauuugucuuuccgga

SEQ ID NO: 2446839 - RNA, 19 nt, Artificial Sequence
  Description of Artificial Sequence: Synthetic oligonucleotide
  Antisense strand to SEQ ID NO: 2446838
uccggaaagacaaauauga

SEQ ID NO: 2446840 - RNA, 19 nt, Artificial Sequence
  Description of Artificial Sequence: Synthetic oligonucleotide
  Sense strand starting at position 3777 of SEQ ID NO: 1887078
auuugucuuuccggagauu

SEQ ID NO: 2446841 - RNA, 19 nt, Artificial Sequence
  Description of Artificial Sequence: Synthetic oligonucleotide
  Antisense strand to SEQ ID NO: 2446840
aaucuccggaaagacaaau

SEQ ID NO: 2446842 - RNA, 19 nt, Artificial Sequence
  Description of Artificial Sequence: Synthetic oligonucleotide
  Sense strand starting at position 3778 of SEQ ID NO: 1887078
uuugucuuuccggagauua

SEQ ID NO: 2446843 - RNA, 19 nt, Artificial Sequence
  Description of Artificial Sequence: Synthetic oligonucleotide
  Antisense strand to SEQ ID NO: 2446842
uaaucuccggaaagacaaa

SEQ ID NO: 2446844 - RNA, 19 nt, Artificial Sequence
  Description of Artificial Sequence: Synthetic oligonucleotide
  Sense strand starting at position 3780 of SEQ ID NO: 1887078
ugucuuuccggagauuaau

SEQ ID NO: 2446845 - RNA, 19 nt, Artificial Sequence
  Description of Artificial Sequence: Synthetic oligonucleotide
  Antisense strand to SEQ ID NO: 2446844
auuaaucuccggaaagaca

SEQ ID NO: 2446846 - RNA, 19 nt, Artificial Sequence
  Description of Artificial Sequence: Synthetic oligonucleotide
  Sense strand starting at position 3791 of SEQ ID NO: 1887078
agauuaauccacugccuga

SEQ ID NO: 2446847 - RNA, 19 nt, Artificial Sequence
  Description of Artificial Sequence: Synthetic oligonucleotide
  Antisense strand to SEQ ID NO: 2446846
ucaggcaguggauuaaucu

SEQ ID NO: 2446848 - RNA, 19 nt, Artificial Sequence
  Description of Artificial Sequence: Synthetic oligonucleotide
  Sense strand starting at position 3817 of SEQ ID NO: 1887078
uggguccucugacuuagaa

SEQ ID NO: 2446849 - RNA, 19 nt, Artificial Sequence
  Description of Artificial Sequence: Synthetic oligonucleotide
  Antisense strand to SEQ ID NO: 2446848
uucuaagucagaggaccca

SEQ ID NO: 2446850 - RNA, 19 nt, Artificial Sequence
  Description of Artificial Sequence: Synthetic oligonucleotide
  Sense strand starting at position 3821 of SEQ ID NO: 1887078
uccucugacuuagaaagua

SEQ ID NO: 2446851 - RNA, 19 nt, Artificial Sequence
  Description of Artificial Sequence: Synthetic oligonucleotide
  Antisense strand to SEQ ID NO: 2446850
uacuuucuaagucagagga

SEQ ID NO: 2446852 - RNA, 19 nt, Artificial Sequence
  Description of Artificial Sequence: Synthetic oligonucleotide
  Sense strand starting at position 3852 of SEQ ID NO: 1887078
guccuugagggccaacaau

SEQ ID NO: 2446853 - RNA, 19 nt, Artificial Sequence
  Description of Artificial Sequence: Synthetic oligonucleotide
  Antisense strand to SEQ ID NO: 2446852
auuguuggcccucaaggac

SEQ ID NO: 2446854 - RNA, 19 nt, Artificial Sequence
  Description of Artificial Sequence: Synthetic oligonucleotide
  Sense strand starting at position 53 of SEQ ID NO: 1887079
agucccaguuacuuaaaga

SEQ ID NO: 2446855 - RNA, 19 nt, Artificial Sequence
  Description of Artificial Sequence: Synthetic oligonucleotide
  Antisense strand to SEQ ID NO: 2446854
ucuuuaaguaacugggacu

SEQ ID NO: 2446856 - RNA, 19 nt, Artificial Sequence
  Description of Artificial Sequence: Synthetic oligonucleotide
  Sense strand starting at position 107 of SEQ ID NO: 1887079
aaggcugcaguguauuaua

SEQ ID NO: 2446857 - RNA, 19 nt, Artificial Sequence
  Description of Artificial Sequence: Synthetic oligonucleotide
  Antisense strand to SEQ ID NO: 2446856
uauaauacacugcagccuu

SEQ ID NO: 2446858 - RNA, 19 nt, Artificial Sequence
  Description of Artificial Sequence: Synthetic oligonucleotide
  Sense strand starting at position 118 of SEQ ID NO: 1887079
guauuauaaucucuccugu

SEQ ID NO: 2446859 - RNA, 19 nt, Artificial Sequence
  Description of Artificial Sequence: Synthetic oligonucleotide
  Antisense strand to SEQ ID NO: 2446858
acaggagagauuauaauac

SEQ ID NO: 2446860 - RNA, 19 nt, Artificial Sequence
  Description of Artificial Sequence: Synthetic oligonucleotide
  Sense strand starting at position 215 of SEQ ID NO: 1887079
aacagcuuguggguagaau

SEQ ID NO: 2446861 - RNA, 19 nt, Artificial Sequence
  Description of Artificial Sequence: Synthetic oligonucleotide
  Antisense strand to SEQ ID NO: 2446860
auucuacccacaagcuguu

SEQ ID NO: 2446862 - RNA, 19 nt, Artificial Sequence
  Description of Artificial Sequence: Synthetic oligonucleotide
  Sense strand starting at position 226 of SEQ ID NO: 1887079
gguagaauguuauccucug

SEQ ID NO: 2446863 - RNA, 19 nt, Artificial Sequence
  Description of Artificial Sequence: Synthetic oligonucleotide
  Antisense strand to SEQ ID NO: 2446862
cagaggauaacauucuacc

SEQ ID NO: 2446864 - RNA, 19 nt, Artificial Sequence
  Description of Artificial Sequence: Synthetic oligonucleotide
  Sense strand starting at position 231 of SEQ ID NO: 1887079
aauguuauccucuguggaa

SEQ ID NO: 2446865 - RNA, 19 nt, Artificial Sequence
  Description of Artificial Sequence: Synthetic oligonucleotide
  Antisense strand to SEQ ID NO: 2446864
uuccacagaggauaacauu

SEQ ID NO: 2446866 - RNA, 19 nt, Artificial Sequence
  Description of Artificial Sequence: Synthetic oligonucleotide
  Sense strand starting at position 232 of SEQ ID NO: 1887079
auguuauccucuguggaaa

SEQ ID NO: 2446867 - RNA, 19 nt, Artificial Sequence
  Description of Artificial Sequence: Synthetic oligonucleotide
  Antisense strand to SEQ ID NO: 2446866
uuuccacagaggauaacau

SEQ ID NO: 2446868 - RNA, 19 nt, Artificial Sequence
  Description of Artificial Sequence: Synthetic oligonucleotide
  Sense strand starting at position 250 of SEQ ID NO: 1887079
aauuguauagaacgucuaa

SEQ ID NO: 2446869 - RNA, 19 nt, Artificial Sequence
  Description of Artificial Sequence: Synthetic oligonucleotide
  Antisense strand to SEQ ID NO: 2446868
uuagacguucuauacaauu

SEQ ID NO: 2446870 - RNA, 19 nt, Artificial Sequence
  Description of Artificial Sequence: Synthetic oligonucleotide
  Sense strand starting at position 590 of SEQ ID NO: 1887079
ccaguacuggcuuauuagu

SEQ ID NO: 2446871 - RNA, 19 nt, Artificial Sequence
  Description of Artificial Sequence: Synthetic oligonucleotide
  Antisense strand to SEQ ID NO: 2446870
acuaauaagccaguacugg

SEQ ID NO: 2446872 - RNA, 19 nt, Artificial Sequence
  Description of Artificial Sequence: Synthetic oligonucleotide
  Sense strand starting at position 592 of SEQ ID NO: 1887079
aguacuggcuuauuaguga

SEQ ID NO: 2446873 - RNA, 19 nt, Artificial Sequence
  Description of Artificial Sequence: Synthetic oligonucleotide
  Antisense strand to SEQ ID NO: 2446872
ucacuaauaagccaguacu

SEQ ID NO: 2446874 - RNA, 19 nt, Artificial Sequence
  Description of Artificial Sequence: Synthetic oligonucleotide
  Sense strand starting at position 595 of SEQ ID NO: 1887079
acuggcuuauuagugaagu

SEQ ID NO: 2446875 - RNA, 19 nt, Artificial Sequence
  Description of Artificial Sequence: Synthetic oligonucleotide
  Antisense strand to SEQ ID NO: 2446874
acuucacuaauaagccagu

SEQ ID NO: 2446876 - RNA, 19 nt, Artificial Sequence
  Description of Artificial Sequence: Synthetic oligonucleotide
  Sense strand starting at position 597 of SEQ ID NO: 1887079
uggcuuauuagugaaguca

SEQ ID NO: 2446877 - RNA, 19 nt, Artificial Sequence
  Description of Artificial Sequence: Synthetic oligonucleotide
  Antisense strand to SEQ ID NO: 2446876
ugacuucacuaauaagcca

SEQ ID NO: 2446878 - RNA, 19 nt, Artificial Sequence
  Description of Artificial Sequence: Synthetic oligonucleotide
  Sense strand starting at position 612 of SEQ ID NO: 1887079
gucagugggcuagggaaua

SEQ ID NO: 2446879 - RNA, 19 nt, Artificial Sequence
  Description of Artificial Sequence: Synthetic oligonucleotide
  Antisense strand to SEQ ID NO: 2446878
uauucccuagcccacugac

SEQ ID NO: 2446880 - RNA, 19 nt, Artificial Sequence
  Description of Artificial Sequence: Synthetic oligonucleotide
  Sense strand starting at position 986 of SEQ ID NO: 1887079
uuaaaugucugcucugaac

SEQ ID NO: 2446881 - RNA, 19 nt, Artificial Sequence
  Description of Artificial Sequence: Synthetic oligonucleotide
  Antisense strand to SEQ ID NO: 2446880
guucagagcagacauuuaa

SEQ ID NO: 2446882 - RNA, 19 nt, Artificial Sequence
  Description of Artificial Sequence: Synthetic oligonucleotide
  Sense strand starting at position 1068 of SEQ ID NO: 1887079
uuucuuauguaguuagaca

SEQ ID NO: 2446883 - RNA, 19 nt, Artificial Sequence
  Description of Artificial Sequence: Synthetic oligonucleotide
  Antisense strand to SEQ ID NO: 2446882
ugucuaacuacauaagaaa

SEQ ID NO: 2446884 - RNA, 19 nt, Artificial Sequence
  Description of Artificial Sequence: Synthetic oligonucleotide
  Sense strand starting at position 1665 of SEQ ID NO: 1887079
ccuaucaaaugaguuggaa

SEQ ID NO: 2446885 - RNA, 19 nt, Artificial Sequence
  Description of Artificial Sequence: Synthetic oligonucleotide
  Antisense strand to SEQ ID NO: 2446884
uuccaacucauuugauagg

SEQ ID NO: 2446886 - RNA, 19 nt, Artificial Sequence
  Description of Artificial Sequence: Synthetic oligonucleotide
  Sense strand starting at position 1668 of SEQ ID NO: 1887079
aucaaaugaguuggaaucu

SEQ ID NO: 2446887 - RNA, 19 nt, Artificial Sequence
  Description of Artificial Sequence: Synthetic oligonucleotide
  Antisense strand to SEQ ID NO: 2446886
agauuccaacucauuugau

SEQ ID NO: 2446888 - RNA, 19 nt, Artificial Sequence
  Description of Artificial Sequence: Synthetic oligonucleotide
  Sense strand starting at position 1816 of SEQ ID NO: 1887079
agugaaaucuaguuccuug

SEQ ID NO: 2446889 - RNA, 19 nt, Artificial Sequence
  Description of Artificial Sequence: Synthetic oligonucleotide
  Antisense strand to SEQ ID NO: 2446888
caaggaacuagauuucacu

SEQ ID NO: 2446890 - RNA, 19 nt, Artificial Sequence
  Description of Artificial Sequence: Synthetic oligonucleotide
  Sense strand starting at position 1860 of SEQ ID NO: 1887079
uuguuucugcuacauacuu

SEQ ID NO: 2446891 - RNA, 19 nt, Artificial Sequence
  Description of Artificial Sequence: Synthetic oligonucleotide
  Antisense strand to SEQ ID NO: 2446890
aaguauguagcagaaacaa

SEQ ID NO: 2446892 - RNA, 19 nt, Artificial Sequence
  Description of Artificial Sequence: Synthetic oligonucleotide
  Sense strand starting at position 1924 of SEQ ID NO: 1887079
gcaauauugcacuacucag

SEQ ID NO: 2446893 - RNA, 19 nt, Artificial Sequence
  Description of Artificial Sequence: Synthetic oligonucleotide
  Antisense strand to SEQ ID NO: 2446892
cugaguagugcaauauugc

SEQ ID NO: 2446894 - RNA, 19 nt, Artificial Sequence
  Description of Artificial Sequence: Synthetic oligonucleotide
  Sense strand starting at position 1975 of SEQ ID NO: 1887079
gguucuaggaucuggugau

SEQ ID NO: 2446895 - RNA, 19 nt, Artificial Sequence
  Description of Artificial Sequence: Synthetic oligonucleotide
  Antisense strand to SEQ ID NO: 2446894
aucaccagauccuagaacc

SEQ ID NO: 2446896 - RNA, 19 nt, Artificial Sequence
  Description of Artificial Sequence: Synthetic oligonucleotide
  Sense strand starting at position 2053 of SEQ ID NO: 1887079
acucauuagugucugauaa

SEQ ID NO: 2446897 - RNA, 19 nt, Artificial Sequence
  Description of Artificial Sequence: Synthetic oligonucleotide
  Antisense strand to SEQ ID NO: 2446896
uuaucagacacuaaugagu

SEQ ID NO: 2446898 - RNA, 19 nt, Artificial Sequence
  Description of Artificial Sequence: Synthetic oligonucleotide
  Sense strand starting at position 2054 of SEQ ID NO: 1887079
cucauuagugucugauaaa

SEQ ID NO: 2446899 - RNA, 19 nt, Artificial Sequence
  Description of Artificial Sequence: Synthetic oligonucleotide
  Antisense strand to SEQ ID NO: 2446898
uuuaucagacacuaaugag

SEQ ID NO: 2446900 - RNA, 19 nt, Artificial Sequence
  Description of Artificial Sequence: Synthetic oligonucleotide
  Sense strand starting at position 2075 of SEQ ID NO: 1887079
gcgcaaauuugauucugau

SEQ ID NO: 2446901 - RNA, 19 nt, Artificial Sequence
  Description of Artificial Sequence: Synthetic oligonucleotide
  Antisense strand to SEQ ID NO: 2446900
aucagaaucaaauuugcgc

SEQ ID NO: 2446902 - RNA, 19 nt, Artificial Sequence
  Description of Artificial Sequence: Synthetic oligonucleotide
  Sense strand starting at position 2132 of SEQ ID NO: 1887079
ccuggaagccuuggaaauc

SEQ ID NO: 2446903 - RNA, 19 nt, Artificial Sequence
  Description of Artificial Sequence: Synthetic oligonucleotide
  Antisense strand to SEQ ID NO: 2446902
gauuuccaaggcuuccagg

SEQ ID NO: 2446904 - RNA, 19 nt, Artificial Sequence
  Description of Artificial Sequence: Synthetic oligonucleotide
  Sense strand starting at position 2141 of SEQ ID NO: 1887079
cuuggaaaucagugagguu

SEQ ID NO: 2446905 - RNA, 19 nt, Artificial Sequence
  Description of Artificial Sequence: Synthetic oligonucleotide
  Antisense strand to SEQ ID NO: 2446904
aaccucacugauuuccaag

SEQ ID NO: 2446906 - RNA, 19 nt, Artificial Sequence
  Description of Artificial Sequence: Synthetic oligonucleotide
  Sense strand starting at position 2153 of SEQ ID NO: 1887079
ugagguuauuguuuaacuu

SEQ ID NO: 2446907 - RNA, 19 nt, Artificial Sequence
  Description of Artificial Sequence: Synthetic oligonucleotide
  Antisense strand to SEQ ID NO: 2446906
aaguuaaacaauaaccuca

SEQ ID NO: 2446908 - RNA, 19 nt, Artificial Sequence
  Description of Artificial Sequence: Synthetic oligonucleotide
  Sense strand starting at position 2154 of SEQ ID NO: 1887079
gagguuauuguuuaacuuu

SEQ ID NO: 2446909 - RNA, 19 nt, Artificial Sequence
  Description of Artificial Sequence: Synthetic oligonucleotide
  Antisense strand to SEQ ID NO: 2446908
aaaguuaaacaauaaccuc

SEQ ID NO: 2446910 - RNA, 19 nt, Artificial Sequence
  Description of Artificial Sequence: Synthetic oligonucleotide
  Sense strand starting at position 2436 of SEQ ID NO: 1887079
aauaauuacugguugagca

SEQ ID NO: 2446911 - RNA, 19 nt, Artificial Sequence
  Description of Artificial Sequence: Synthetic oligonucleotide
  Antisense strand to SEQ ID NO: 2446910
ugcucaaccaguaauuauu

SEQ ID NO: 2446912 - RNA, 19 nt, Artificial Sequence
  Description of Artificial Sequence: Synthetic oligonucleotide
  Sense strand starting at position 2437 of SEQ ID NO: 1887079
auaauuacugguugagcau

SEQ ID NO: 2446913 - RNA, 19 nt, Artificial Sequence
  Description of Artificial Sequence: Synthetic oligonucleotide
  Antisense strand to SEQ ID NO: 2446912
augcucaaccaguaauuau

SEQ ID NO: 2446914 - RNA, 19 nt, Artificial Sequence
  Description of Artificial Sequence: Synthetic oligonucleotide
  Sense strand starting at position 2857 of SEQ ID NO: 1887079
gccuguucuagucuaguuu

SEQ ID NO: 2446915 - RNA, 19 nt, Artificial Sequence
  Description of Artificial Sequence: Synthetic oligonucleotide
  Antisense strand to SEQ ID NO: 2446914
aaacuagacuagaacaggc

SEQ ID NO: 2446916 - RNA, 19 nt, Artificial Sequence
  Description of Artificial Sequence: Synthetic oligonucleotide
  Sense strand starting at position 2887 of SEQ ID NO: 1887079
aguuuaaggcuuuaaguaa

SEQ ID NO: 2446917 - RNA, 19 nt, Artificial Sequence
  Description of Artificial Sequence: Synthetic oligonucleotide
  Antisense strand to SEQ ID NO: 2446916
uuacuuaaagccuuaaacu

SEQ ID NO: 2446918 - RNA, 19 nt, Artificial Sequence
  Description of Artificial Sequence: Synthetic oligonucleotide
  Sense strand starting at position 3168 of SEQ ID NO: 1887079
gugggcuaggcauagagaa

SEQ ID NO: 2446919 - RNA, 19 nt, Artificial Sequence
  Description of Artificial Sequence: Synthetic oligonucleotide
  Antisense strand to SEQ ID NO: 2446918
uucucuaugccuagcccac

SEQ ID NO: 2446920 - RNA, 19 nt, Artificial Sequence
  Description of Artificial Sequence: Synthetic oligonucleotide
  Sense strand starting at position 3199 of SEQ ID NO: 1887079
agguguguucuggacuuac

SEQ ID NO: 2446921 - RNA, 19 nt, Artificial Sequence
  Description of Artificial Sequence: Synthetic oligonucleotide
  Antisense strand to SEQ ID NO: 2446920
guaaguccagaacacaccu

SEQ ID NO: 2446922 - RNA, 19 nt, Artificial Sequence
  Description of Artificial Sequence: Synthetic oligonucleotide
  Sense strand starting at position 3597 of SEQ ID NO: 1887079
ggaacuaguuuggcuauaa

SEQ ID NO: 2446923 - RNA, 19 nt, Artificial Sequence
  Description of Artificial Sequence: Synthetic oligonucleotide
  Antisense strand to SEQ ID NO: 2446922
uuauagccaaacuaguucc

SEQ ID NO: 2446924 - RNA, 19 nt, Artificial Sequence
  Description of Artificial Sequence: Synthetic oligonucleotide
  Sense strand starting at position 3598 of SEQ ID NO: 1887079
gaacuaguuuggcuauaau

SEQ ID NO: 2446925 - RNA, 19 nt, Artificial Sequence
  Description of Artificial Sequence: Synthetic oligonucleotide
  Antisense strand to SEQ ID NO: 2446924
auuauagccaaacuaguuc

SEQ ID NO: 2446926 - RNA, 19 nt, Artificial Sequence
  Description of Artificial Sequence: Synthetic oligonucleotide
  Sense strand starting at position 3601 of SEQ ID NO: 1887079
cuaguuuggcuauaaucaa

SEQ ID NO: 2446927 - RNA, 19 nt, Artificial Sequence
  Description of Artificial Sequence: Synthetic oligonucleotide
  Antisense strand to SEQ ID NO: 2446926
uugauuauagccaaacuag

SEQ ID NO: 2446928 - RNA, 19 nt, Artificial Sequence
  Description of Artificial Sequence: Synthetic oligonucleotide
  Sense strand starting at position 3661 of SEQ ID NO: 1887079
ugagaugagugcucacuau

SEQ ID NO: 2446929 - RNA, 19 nt, Artificial Sequence
  Description of Artificial Sequence: Synthetic oligonucleotide
  Antisense strand to SEQ ID NO: 2446928
auagugagcacucaucuca

SEQ ID NO: 2446930 - RNA, 19 nt, Artificial Sequence
  Description of Artificial Sequence: Synthetic oligonucleotide
  Sense strand starting at position 3665 of SEQ ID NO: 1887079
augagugcucacuauguug

SEQ ID NO: 2446931 - RNA, 19 nt, Artificial Sequence
  Description of Artificial Sequence: Synthetic oligonucleotide
  Antisense strand to SEQ ID NO: 2446930
caacauagugagcacucau

SEQ ID NO: 2446932 - RNA, 19 nt, Artificial Sequence
  Description of Artificial Sequence: Synthetic oligonucleotide
  Sense strand starting at position 3895 of SEQ ID NO: 1887079
cuauguuuacaugguaaug

SEQ ID NO: 2446933 - RNA, 19 nt, Artificial Sequence
  Description of Artificial Sequence: Synthetic oligonucleotide
  Antisense strand to SEQ ID NO: 2446932
cauuaccauguaaacauag

SEQ ID NO: 2446934 - RNA, 19 nt, Artificial Sequence
  Description of Artificial Sequence: Synthetic oligonucleotide
  Sense strand starting at position 300 of SEQ ID NO: 1887080
uuauauagcucagguuacu

SEQ ID NO: 2446935 - RNA, 19 nt, Artificial Sequence
  Description of Artificial Sequence: Synthetic oligonucleotide
  Antisense strand to SEQ ID NO: 2446934
aguaaccugagcuauauaa

SEQ ID NO: 2446936 - RNA, 19 nt, Artificial Sequence
  Description of Artificial Sequence: Synthetic oligonucleotide
  Sense strand starting at position 402 of SEQ ID NO: 1887080
ggaaguguccacugaguga

SEQ ID NO: 2446937 - RNA, 19 nt, Artificial Sequence
  Description of Artificial Sequence: Synthetic oligonucleotide
  Antisense strand to SEQ ID NO: 2446936
ucacucaguggacacuucc

SEQ ID NO: 2446938 - RNA, 19 nt, Artificial Sequence
  Description of Artificial Sequence: Synthetic oligonucleotide
  Sense strand starting at position 406 of SEQ ID NO: 1887080
guguccacugagugaauga

SEQ ID NO: 2446939 - RNA, 19 nt, Artificial Sequence
  Description of Artificial Sequence: Synthetic oligonucleotide
  Antisense strand to SEQ ID NO: 2446938
ucauucacucaguggacac

SEQ ID NO: 2446940 - RNA, 19 nt, Artificial Sequence
  Description of Artificial Sequence: Synthetic oligonucleotide
  Sense strand starting at position 413 of SEQ ID NO: 1887080
cugagugaaugaguauaua

SEQ ID NO: 2446941 - RNA, 19 nt, Artificial Sequence
  Description of Artificial Sequence: Synthetic oligonucleotide
  Antisense strand to SEQ ID NO: 2446940
uauauacucauucacucag

SEQ ID NO: 2446942 - RNA, 19 nt, Artificial Sequence
  Description of Artificial Sequence: Synthetic oligonucleotide
  Sense strand starting at position 525 of SEQ ID NO: 1887080
ccugaacaguuagaacuau

SEQ ID NO: 2446943 - RNA, 19 nt, Artificial Sequence
  Description of Artificial Sequence: Synthetic oligonucleotide
  Antisense strand to SEQ ID NO: 2446942
auaguucuaacuguucagg

SEQ ID NO: 2446944 - RNA, 19 nt, Artificial Sequence
  Description of Artificial Sequence: Synthetic oligonucleotide
  Sense strand starting at position 541 of SEQ ID NO: 1887080
uauggaaaucgcuaugcuu

SEQ ID NO: 2446945 - RNA, 19 nt, Artificial Sequence
  Description of Artificial Sequence: Synthetic oligonucleotide
  Antisense strand to SEQ ID NO: 2446944
aagcauagcgauuuccaua

SEQ ID NO: 2446946 - RNA, 19 nt, Artificial Sequence
  Description of Artificial Sequence: Synthetic oligonucleotide
  Sense strand starting at position 543 of SEQ ID NO: 1887080
uggaaaucgcuaugcuuug

SEQ ID NO: 2446947 - RNA, 19 nt, Artificial Sequence
  Description of Artificial Sequence: Synthetic oligonucleotide
  Antisense strand to SEQ ID NO: 2446946
caaagcauagcgauuucca

SEQ ID NO: 2446948 - RNA, 19 nt, Artificial Sequence
  Description of Artificial Sequence: Synthetic oligonucleotide
  Sense strand starting at position 560 of SEQ ID NO: 1887080
uguguugucacaggaguua

SEQ ID NO: 2446949 - RNA, 19 nt, Artificial Sequence
  Description of Artificial Sequence: Synthetic oligonucleotide
  Antisense strand to SEQ ID NO: 2446948
uaacuccugugacaacaca

SEQ ID NO: 2446950 - RNA, 19 nt, Artificial Sequence
  Description of Artificial Sequence: Synthetic oligonucleotide
  Sense strand starting at position 1559 of SEQ ID NO: 1887080
caacuuuaaugaggaugga

SEQ ID NO: 2446951 - RNA, 19 nt, Artificial Sequence
  Description of Artificial Sequence: Synthetic oligonucleotide
  Antisense strand to SEQ ID NO: 2446950
uccauccucauuaaaguug

SEQ ID NO: 2446952 - RNA, 19 nt, Artificial Sequence
  Description of Artificial Sequence: Synthetic oligonucleotide
  Sense strand starting at position 1665 of SEQ ID NO: 1887080
gcuggaaagcucuaaugcu

SEQ ID NO: 2446953 - RNA, 19 nt, Artificial Sequence
  Description of Artificial Sequence: Synthetic oligonucleotide
  Antisense strand to SEQ ID NO: 2446952
agcauuagagcuuuccagc

SEQ ID NO: 2446954 - RNA, 19 nt, Artificial Sequence
  Description of Artificial Sequence: Synthetic oligonucleotide
  Sense strand starting at position 1738 of SEQ ID NO: 1887080
ucacauacguccucccuua

SEQ ID NO: 2446955 - RNA, 19 nt, Artificial Sequence
  Description of Artificial Sequence: Synthetic oligonucleotide
  Antisense strand to SEQ ID NO: 2446954
uaagggaggacguauguga

SEQ ID NO: 2446956 - RNA, 19 nt, Artificial Sequence
  Description of Artificial Sequence: Synthetic oligonucleotide
  Sense strand starting at position 2016 of SEQ ID NO: 1887080
caacaagccugagugucau

SEQ ID NO: 2446957 - RNA, 19 nt, Artificial Sequence
  Description of Artificial Sequence: Synthetic oligonucleotide
  Antisense strand to SEQ ID NO: 2446956
augacacucaggcuuguug

SEQ ID NO: 2446958 - RNA, 19 nt, Artificial Sequence
  Description of Artificial Sequence: Synthetic oligonucleotide
  Sense strand starting at position 2056 of SEQ ID NO: 1887080
uuagaagccugaucuccua

SEQ ID NO: 2446959 - RNA, 19 nt, Artificial Sequence
  Description of Artificial Sequence: Synthetic oligonucleotide
  Antisense strand to SEQ ID NO: 2446958
uaggagaucaggcuucuaa

SEQ ID NO: 2446960 - RNA, 19 nt, Artificial Sequence
  Description of Artificial Sequence: Synthetic oligonucleotide
  Sense strand starting at position 2059 of SEQ ID NO: 1887080
gaagccugaucuccuagua

SEQ ID NO: 2446961 - RNA, 19 nt, Artificial Sequence
  Description of Artificial Sequence: Synthetic oligonucleotide
  Antisense strand to SEQ ID NO: 2446960
uacuaggagaucaggcuuc

SEQ ID NO: 2446962 - RNA, 19 nt, Artificial Sequence
  Description of Artificial Sequence: Synthetic oligonucleotide
  Sense strand starting at position 2116 of SEQ ID NO: 1887080
ugucuuguauccugggaaa

SEQ ID NO: 2446963 - RNA, 19 nt, Artificial Sequence
  Description of Artificial Sequence: Synthetic oligonucleotide
  Antisense strand to SEQ ID NO: 2446962
uuucccaggauacaagaca

SEQ ID NO: 2446964 - RNA, 19 nt, Artificial Sequence
  Description of Artificial Sequence: Synthetic oligonucleotide
  Sense strand starting at position 2171 of SEQ ID NO: 1887080
gagagcauccauugacagu

SEQ ID NO: 2446965 - RNA, 19 nt, Artificial Sequence
  Description of Artificial Sequence: Synthetic oligonucleotide
  Antisense strand to SEQ ID NO: 2446964
acugucaauggaugcucuc

SEQ ID NO: 2446966 - RNA, 19 nt, Artificial Sequence
  Description of Artificial Sequence: Synthetic oligonucleotide
  Sense strand starting at position 2346 of SEQ ID NO: 1887080
aggagcaugccauagagua

SEQ ID NO: 2446967 - RNA, 19 nt, Artificial Sequence
  Description of Artificial Sequence: Synthetic oligonucleotide
  Antisense strand to SEQ ID NO: 2446966
uacucuauggcaugcuccu

SEQ ID NO: 2446968 - RNA, 19 nt, Artificial Sequence
  Description of Artificial Sequence: Synthetic oligonucleotide
  Sense strand starting at position 2348 of SEQ ID NO: 1887080
gagcaugccauagaguagu

SEQ ID NO: 2446969 - RNA, 19 nt, Artificial Sequence
  Description of Artificial Sequence: Synthetic oligonucleotide
  Antisense strand to SEQ ID NO: 2446968
acuacucuauggcaugcuc

SEQ ID NO: 2446970 - RNA, 19 nt, Artificial Sequence
  Description of Artificial Sequence: Synthetic oligonucleotide
  Sense strand starting at position 2369 of SEQ ID NO: 1887080
ggagcccugucagaagaaa

SEQ ID NO: 2446971 - RNA, 19 nt, Artificial Sequence
  Description of Artificial Sequence: Synthetic oligonucleotide
  Antisense strand to SEQ ID NO: 2446970
uuucuucugacagggcucc

SEQ ID NO: 2446972 - RNA, 19 nt, Artificial Sequence
  Description of Artificial Sequence: Synthetic oligonucleotide
  Sense strand starting at position 2450 of SEQ ID NO: 1887080
ggaggaucaccuugaggcu

SEQ ID NO: 2446973 - RNA, 19 nt, Artificial Sequence
  Description of Artificial Sequence: Synthetic oligonucleotide
  Antisense strand to SEQ ID NO: 2446972
agccucaaggugauccucc

SEQ ID NO: 2446974 - RNA, 19 nt, Artificial Sequence
  Description of Artificial Sequence: Synthetic oligonucleotide
  Sense strand starting at position 3037 of SEQ ID NO: 1887080
ccacuucuaugacguuuaa

SEQ ID NO: 2446975 - RNA, 19 nt, Artificial Sequence
  Description of Artificial Sequence: Synthetic oligonucleotide
  Antisense strand to SEQ ID NO: 2446974
uuaaacgucauagaagugg

SEQ ID NO: 2446976 - RNA, 19 nt, Artificial Sequence
  Description of Artificial Sequence: Synthetic oligonucleotide
  Sense strand starting at position 3073 of SEQ ID NO: 1887080
agcccagagucucagugaa

SEQ ID NO: 2446977 - RNA, 19 nt, Artificial Sequence
  Description of Artificial Sequence: Synthetic oligonucleotide
  Antisense strand to SEQ ID NO: 2446976
uucacugagacucugggcu

SEQ ID NO: 2446978 - RNA, 19 nt, Artificial Sequence
  Description of Artificial Sequence: Synthetic oligonucleotide
  Sense strand starting at position 3075 of SEQ ID NO: 1887080
cccagagucucagugaaug

SEQ ID NO: 2446979 - RNA, 19 nt, Artificial Sequence
  Description of Artificial Sequence: Synthetic oligonucleotide
  Antisense strand to SEQ ID NO: 2446978
cauucacugagacucuggg

SEQ ID NO: 2446980 - RNA, 19 nt, Artificial Sequence
  Description of Artificial Sequence: Synthetic oligonucleotide
  Sense strand starting at position 3099 of SEQ ID NO: 1887080
ggaacuguguuguuuguau

SEQ ID NO: 2446981 - RNA, 19 nt, Artificial Sequence
  Description of Artificial Sequence: Synthetic oligonucleotide
  Antisense strand to SEQ ID NO: 2446980
auacaaacaacacaguucc

SEQ ID NO: 2446982 - RNA, 19 nt, Artificial Sequence
  Description of Artificial Sequence: Synthetic oligonucleotide
  Sense strand starting at position 3106 of SEQ ID NO: 1887080
uguuguuuguaugcagacu

SEQ ID NO: 2446983 - RNA, 19 nt, Artificial Sequence
  Description of Artificial Sequence: Synthetic oligonucleotide
  Antisense strand to SEQ ID NO: 2446982
agucugcauacaaacaaca

SEQ ID NO: 2446984 - RNA, 19 nt, Artificial Sequence
  Description of Artificial Sequence: Synthetic oligonucleotide
  Sense strand starting at position 3107 of SEQ ID NO: 1887080
guuguuuguaugcagacuu

SEQ ID NO: 2446985 - RNA, 19 nt, Artificial Sequence
  Description of Artificial Sequence: Synthetic oligonucleotide
  Antisense strand to SEQ ID NO: 2446984
aagucugcauacaaacaac

SEQ ID NO: 2446986 - RNA, 19 nt, Artificial Sequence
  Description of Artificial Sequence: Synthetic oligonucleotide
  Sense strand starting at position 3124 of SEQ ID NO: 1887080
uuccuauggucccugaaca

SEQ ID NO: 2446987 - RNA, 19 nt, Artificial Sequence
  Description of Artificial Sequence: Synthetic oligonucleotide
  Antisense strand to SEQ ID NO: 2446986
uguucagggaccauaggaa

SEQ ID NO: 2446988 - RNA, 19 nt, Artificial Sequence
  Description of Artificial Sequence: Synthetic oligonucleotide
  Sense strand starting at position 3236 of SEQ ID NO: 1887080
agagcauguccuuaccuga

SEQ ID NO: 2446989 - RNA, 19 nt, Artificial Sequence
  Description of Artificial Sequence: Synthetic oligonucleotide
  Antisense strand to SEQ ID NO: 2446988
ucagguaaggacaugcucu

SEQ ID NO: 2446990 - RNA, 19 nt, Artificial Sequence
  Description of Artificial Sequence: Synthetic oligonucleotide
  Sense strand starting at position 3239 of SEQ ID NO: 1887080
gcauguccuuaccugacaa

SEQ ID NO: 2446991 - RNA, 19 nt, Artificial Sequence
  Description of Artificial Sequence: Synthetic oligonucleotide
  Antisense strand to SEQ ID NO: 2446990
uugucagguaaggacaugc

SEQ ID NO: 2446992 - RNA, 19 nt, Artificial Sequence
  Description of Artificial Sequence: Synthetic oligonucleotide
  Sense strand starting at position 3241 of SEQ ID NO: 1887080
auguccuuaccugacaagu

SEQ ID NO: 2446993 - RNA, 19 nt, Artificial Sequence
  Description of Artificial Sequence: Synthetic oligonucleotide
  Antisense strand to SEQ ID NO: 2446992
acuugucagguaaggacau

SEQ ID NO: 2446994 - RNA, 19 nt, Artificial Sequence
  Description of Artificial Sequence: Synthetic oligonucleotide
  Sense strand starting at position 3243 of SEQ ID NO: 1887080
guccuuaccugacaaguga

SEQ ID NO: 2446995 - RNA, 19 nt, Artificial Sequence
  Description of Artificial Sequence: Synthetic oligonucleotide
  Antisense strand to SEQ ID NO: 2446994
ucacuugucagguaaggac

SEQ ID NO: 2446996 - RNA, 19 nt, Artificial Sequence
  Description of Artificial Sequence: Synthetic oligonucleotide
  Sense strand starting at position 3373 of SEQ ID NO: 1887080
auucccagcuuguuagaaa

SEQ ID NO: 2446997 - RNA, 19 nt, Artificial Sequence
  Description of Artificial Sequence: Synthetic oligonucleotide
  Antisense strand to SEQ ID NO: 2446996
uuucuaacaagcugggaau

SEQ ID NO: 2446998 - RNA, 19 nt, Artificial Sequence
  Description of Artificial Sequence: Synthetic oligonucleotide
  Sense strand starting at position 3427 of SEQ ID NO: 1887080
ugcuaaagguaucaggaga

SEQ ID NO: 2446999 - RNA, 19 nt, Artificial Sequence
  Description of Artificial Sequence: Synthetic oligonucleotide
  Antisense strand to SEQ ID NO: 2446998
ucuccugauaccuuuagca

SEQ ID NO: 2447000 - RNA, 19 nt, Artificial Sequence
  Description of Artificial Sequence: Synthetic oligonucleotide
  Sense strand starting at position 3457 of SEQ ID NO: 1887080
gucguaacuccagugcuuu

SEQ ID NO: 2447001 - RNA, 19 nt, Artificial Sequence
  Description of Artificial Sequence: Synthetic oligonucleotide
  Antisense strand to SEQ ID NO: 2447000
aaagcacuggaguuacgac

SEQ ID NO: 2447002 - RNA, 19 nt, Artificial Sequence
  Description of Artificial Sequence: Synthetic oligonucleotide
  Sense strand starting at position 3463 of SEQ ID NO: 1887080
acuccagugcuuugaaacu

SEQ ID NO: 2447003 - RNA, 19 nt, Artificial Sequence
  Description of Artificial Sequence: Synthetic oligonucleotide
  Antisense strand to SEQ ID NO: 2447002
aguuucaaagcacuggagu

SEQ ID NO: 2447004 - RNA, 19 nt, Artificial Sequence
  Description of Artificial Sequence: Synthetic oligonucleotide
  Sense strand starting at position 3732 of SEQ ID NO: 1887080
uuuggaaucugagaagaaa

SEQ ID NO: 2447005 - RNA, 19 nt, Artificial Sequence
  Description of Artificial Sequence: Synthetic oligonucleotide
  Antisense strand to SEQ ID NO: 2447004
uuucuucucagauuccaaa

SEQ ID NO: 2447006 - RNA, 19 nt, Artificial Sequence
  Description of Artificial Sequence: Synthetic oligonucleotide
  Sense strand starting at position 3839 of SEQ ID NO: 1887080
gggccaucucuacauuaau

SEQ ID NO: 2447007 - RNA, 19 nt, Artificial Sequence
  Description of Artificial Sequence: Synthetic oligonucleotide
  Antisense strand to SEQ ID NO: 2447006
auuaauguagagauggccc

SEQ ID NO: 2447008 - RNA, 19 nt, Artificial Sequence
  Description of Artificial Sequence: Synthetic oligonucleotide
  Sense strand starting at position 3893 of SEQ ID NO: 1887080
uggauaauuccauguaggu

SEQ ID NO: 2447009 - RNA, 19 nt, Artificial Sequence
  Description of Artificial Sequence: Synthetic oligonucleotide
  Antisense strand to SEQ ID NO: 2447008
accuacauggaauuaucca

SEQ ID NO: 2447010 - RNA, 19 nt, Artificial Sequence
  Description of Artificial Sequence: Synthetic oligonucleotide
  Sense strand starting at position 3955 of SEQ ID NO: 1887080
uuauccugccaguguuaua

SEQ ID NO: 2447011 - RNA, 19 nt, Artificial Sequence
  Description of Artificial Sequence: Synthetic oligonucleotide
  Antisense strand to SEQ ID NO: 2447010
uauaacacuggcaggauaa

SEQ ID NO: 2447012 - RNA, 19 nt, Artificial Sequence
  Description of Artificial Sequence: Synthetic oligonucleotide
  Sense strand starting at position 3960 of SEQ ID NO: 1887080
cugccaguguuauaacuaa

SEQ ID NO: 2447013 - RNA, 19 nt, Artificial Sequence
  Description of Artificial Sequence: Synthetic oligonucleotide
  Antisense strand to SEQ ID NO: 2447012
uuaguuauaacacuggcag

SEQ ID NO: 2447014 - RNA, 19 nt, Artificial Sequence
  Description of Artificial Sequence: Synthetic oligonucleotide
  Sense strand starting at position 50 of SEQ ID NO: 1887082
uauagugagcugugaugaa

SEQ ID NO: 2447015 - RNA, 19 nt, Artificial Sequence
  Description of Artificial Sequence: Synthetic oligonucleotide
  Antisense strand to SEQ ID NO: 2447014
uucaucacagcucacuaua

SEQ ID NO: 2447016 - RNA, 19 nt, Artificial Sequence
  Description of Artificial Sequence: Synthetic oligonucleotide
  Sense strand starting at position 54 of SEQ ID NO: 1887082
gugagcugugaugaagcua

SEQ ID NO: 2447017 - RNA, 19 nt, Artificial Sequence
  Description of Artificial Sequence: Synthetic oligonucleotide
  Antisense strand to SEQ ID NO: 2447016
uagcuucaucacagcucac

SEQ ID NO: 2447018 - RNA, 19 nt, Artificial Sequence
  Description of Artificial Sequence: Synthetic oligonucleotide
  Sense strand starting at position 344 of SEQ ID NO: 1887082
aggagaaucguuugaccug

SEQ ID NO: 2447019 - RNA, 19 nt, Artificial Sequence
  Description of Artificial Sequence: Synthetic oligonucleotide
  Antisense strand to SEQ ID NO: 2447018
caggucaaacgauucuccu

SEQ ID NO: 2447020 - RNA, 19 nt, Artificial Sequence
  Description of Artificial Sequence: Synthetic oligonucleotide
  Sense strand starting at position 349 of SEQ ID NO: 1887082
aaucguuugaccugggaug

SEQ ID NO: 2447021 - RNA, 19 nt, Artificial Sequence
  Description of Artificial Sequence: Synthetic oligonucleotide
  Antisense strand to SEQ ID NO: 2447020
caucccaggucaaacgauu

SEQ ID NO: 2447022 - RNA, 19 nt, Artificial Sequence
  Description of Artificial Sequence: Synthetic oligonucleotide
  Sense strand starting at position 510 of SEQ ID NO: 1887082
aaagccuuggcuggucaaa

SEQ ID NO: 2447023 - RNA, 19 nt, Artificial Sequence
  Description of Artificial Sequence: Synthetic oligonucleotide
  Antisense strand to SEQ ID NO: 2447022
uuugaccagccaaggcuuu

SEQ ID NO: 2447024 - RNA, 19 nt, Artificial Sequence
  Description of Artificial Sequence: Synthetic oligonucleotide
  Sense strand starting at position 563 of SEQ ID NO: 1887082
uccugagaaaggcauuguu

SEQ ID NO: 2447025 - RNA, 19 nt, Artificial Sequence
  Description of Artificial Sequence: Synthetic oligonucleotide
  Antisense strand to SEQ ID NO: 2447024
aacaaugccuuucucagga

SEQ ID NO: 2447026 - RNA, 19 nt, Artificial Sequence
  Description of Artificial Sequence: Synthetic oligonucleotide
  Sense strand starting at position 705 of SEQ ID NO: 1887082
gcacguuccuauccugaau

SEQ ID NO: 2447027 - RNA, 19 nt, Artificial Sequence
  Description of Artificial Sequence: Synthetic oligonucleotide
  Antisense strand to SEQ ID NO: 2447026
auucaggauaggaacgugc

SEQ ID NO: 2447028 - RNA, 19 nt, Artificial Sequence
  Description of Artificial Sequence: Synthetic oligonucleotide
  Sense strand starting at position 716 of SEQ ID NO: 1887082
uccugaaugcuguagacaa

SEQ ID NO: 2447029 - RNA, 19 nt, Artificial Sequence
  Description of Artificial Sequence: Synthetic oligonucleotide
  Antisense strand to SEQ ID NO: 2447028
uugucuacagcauucagga

SEQ ID NO: 2447030 - RNA, 19 nt, Artificial Sequence
  Description of Artificial Sequence: Synthetic oligonucleotide
  Sense strand starting at position 744 of SEQ ID NO: 1887082
aauggcaagcguuugugua

SEQ ID NO: 2447031 - RNA, 19 nt, Artificial Sequence
  Description of Artificial Sequence: Synthetic oligonucleotide
  Antisense strand to SEQ ID NO: 2447030
uacacaaacgcuugccauu

SEQ ID NO: 2447032 - RNA, 19 nt, Artificial Sequence
  Description of Artificial Sequence: Synthetic oligonucleotide
  Sense strand starting at position 756 of SEQ ID NO: 1887082
uuguguaccuaaccagaaa

SEQ ID NO: 2447033 - RNA, 19 nt, Artificial Sequence
  Description of Artificial Sequence: Synthetic oligonucleotide
  Antisense strand to SEQ ID NO: 2447032
uuucugguuagguacacaa

SEQ ID NO: 2447034 - RNA, 19 nt, Artificial Sequence
  Description of Artificial Sequence: Synthetic oligonucleotide
  Sense strand starting at position 802 of SEQ ID NO: 1887082
uuaugagaccacuguccua

SEQ ID NO: 2447035 - RNA, 19 nt, Artificial Sequence
  Description of Artificial Sequence: Synthetic oligonucleotide
  Antisense strand to SEQ ID NO: 2447034
uaggacaguggucucauaa

SEQ ID NO: 2447036 - RNA, 19 nt, Artificial Sequence
  Description of Artificial Sequence: Synthetic oligonucleotide
  Sense strand starting at position 1067 of SEQ ID NO: 1887082
uucugaggcuccuucuauu

SEQ ID NO: 2447037 - RNA, 19 nt, Artificial Sequence
  Description of Artificial Sequence: Synthetic oligonucleotide
  Antisense strand to SEQ ID NO: 2447036
aauagaaggagccucagaa

SEQ ID NO: 2447038 - RNA, 19 nt, Artificial Sequence
  Description of Artificial Sequence: Synthetic oligonucleotide
  Sense strand starting at position 1325 of SEQ ID NO: 1887082
aguuccugcgcagauagau

SEQ ID NO: 2447039 - RNA, 19 nt, Artificial Sequence
  Description of Artificial Sequence: Synthetic oligonucleotide
  Antisense strand to SEQ ID NO: 2447038
aucuaucugcgcaggaacu

SEQ ID NO: 2447040 - RNA, 19 nt, Artificial Sequence
  Description of Artificial Sequence: Synthetic oligonucleotide
  Sense strand starting at position 1358 of SEQ ID NO: 1887082
ugccucaacuucucaggaa

SEQ ID NO: 2447041 - RNA, 19 nt, Artificial Sequence
  Description of Artificial Sequence: Synthetic oligonucleotide
  Antisense strand to SEQ ID NO: 2447040
uuccugagaaguugaggca

SEQ ID NO: 2447042 - RNA, 19 nt, Artificial Sequence
  Description of Artificial Sequence: Synthetic oligonucleotide
  Sense strand starting at position 1359 of SEQ ID NO: 1887082
gccucaacuucucaggaaa

SEQ ID NO: 2447043 - RNA, 19 nt, Artificial Sequence
  Description of Artificial Sequence: Synthetic oligonucleotide
  Antisense strand to SEQ ID NO: 2447042
uuuccugagaaguugaggc

SEQ ID NO: 2447044 - RNA, 19 nt, Artificial Sequence
  Description of Artificial Sequence: Synthetic oligonucleotide
  Sense strand starting at position 1420 of SEQ ID NO: 1887082
caucacugacccggaagau

SEQ ID NO: 2447045 - RNA, 19 nt, Artificial Sequence
  Description of Artificial Sequence: Synthetic oligonucleotide
  Antisense strand to SEQ ID NO: 2447044
aucuuccgggucagugaug

SEQ ID NO: 2447046 - RNA, 19 nt, Artificial Sequence
  Description of Artificial Sequence: Synthetic oligonucleotide
  Sense strand starting at position 1853 of SEQ ID NO: 1887082
acacucuccaggugaggaa

SEQ ID NO: 2447047 - RNA, 19 nt, Artificial Sequence
  Description of Artificial Sequence: Synthetic oligonucleotide
  Antisense strand to SEQ ID NO: 2447046
uuccucaccuggagagugu

SEQ ID NO: 2447048 - RNA, 19 nt, Artificial Sequence
  Description of Artificial Sequence: Synthetic oligonucleotide
  Sense strand starting at position 2105 of SEQ ID NO: 1887082
gccuucugccugcaggaaa

SEQ ID NO: 2447049 - RNA, 19 nt, Artificial Sequence
  Description of Artificial Sequence: Synthetic oligonucleotide
  Antisense strand to SEQ ID NO: 2447048
uuuccugcaggcagaaggc

SEQ ID NO: 2447050 - RNA, 19 nt, Artificial Sequence
  Description of Artificial Sequence: Synthetic oligonucleotide
  Sense strand starting at position 2183 of SEQ ID NO: 1887082
cguggcaagaacuauacua

SEQ ID NO: 2447051 - RNA, 19 nt, Artificial Sequence
  Description of Artificial Sequence: Synthetic oligonucleotide
  Antisense strand to SEQ ID NO: 2447050
uaguauaguucuugccacg

SEQ ID NO: 2447052 - RNA, 19 nt, Artificial Sequence
  Description of Artificial Sequence: Synthetic oligonucleotide
  Sense strand starting at position 2520 of SEQ ID NO: 1887082
cuugguuacucugccugua

SEQ ID NO: 2447053 - RNA, 19 nt, Artificial Sequence
  Description of Artificial Sequence: Synthetic oligonucleotide
  Antisense strand to SEQ ID NO: 2447052
uacaggcagaguaaccaag

SEQ ID NO: 2447054 - RNA, 19 nt, Artificial Sequence
  Description of Artificial Sequence: Synthetic oligonucleotide
  Sense strand starting at position 2522 of SEQ ID NO: 1887082
ugguuacucugccuguaaa

SEQ ID NO: 2447055 - RNA, 19 nt, Artificial Sequence
  Description of Artificial Sequence: Synthetic oligonucleotide
  Antisense strand to SEQ ID NO: 2447054
uuuacaggcagaguaacca

SEQ ID NO: 2447056 - RNA, 19 nt, Artificial Sequence
  Description of Artificial Sequence: Synthetic oligonucleotide
  Sense strand starting at position 2652 of SEQ ID NO: 1887082
ggcugcaaccugugagaaa

SEQ ID NO: 2447057 - RNA, 19 nt, Artificial Sequence
  Description of Artificial Sequence: Synthetic oligonucleotide
  Antisense strand to SEQ ID NO: 2447056
uuucucacagguugcagcc

SEQ ID NO: 2447058 - RNA, 19 nt, Artificial Sequence
  Description of Artificial Sequence: Synthetic oligonucleotide
  Sense strand starting at position 2712 of SEQ ID NO: 1887082
ccaccaauucucggccaua

SEQ ID NO: 2447059 - RNA, 19 nt, Artificial Sequence
  Description of Artificial Sequence: Synthetic oligonucleotide
  Antisense strand to SEQ ID NO: 2447058
uauggccgagaauuggugg

SEQ ID NO: 2447060 - RNA, 19 nt, Artificial Sequence
  Description of Artificial Sequence: Synthetic oligonucleotide
  Sense strand starting at position 2843 of SEQ ID NO: 1887082
ugugaagaccucuggaaug

SEQ ID NO: 2447061 - RNA, 19 nt, Artificial Sequence
  Description of Artificial Sequence: Synthetic oligonucleotide
  Antisense strand to SEQ ID NO: 2447060
cauuccagaggucuucaca

SEQ ID NO: 2447062 - RNA, 19 nt, Artificial Sequence
  Description of Artificial Sequence: Synthetic oligonucleotide
  Sense strand starting at position 2855 of SEQ ID NO: 1887082
uggaauguccuaggugguu

SEQ ID NO: 2447063 - RNA, 19 nt, Artificial Sequence
  Description of Artificial Sequence: Synthetic oligonucleotide
  Antisense strand to SEQ ID NO: 2447062
aaccaccuaggacauucca

SEQ ID NO: 2447064 - RNA, 19 nt, Artificial Sequence
  Description of Artificial Sequence: Synthetic oligonucleotide
  Sense strand starting at position 2867 of SEQ ID NO: 1887082
ggugguuucuggguucaaa

SEQ ID NO: 2447065 - RNA, 19 nt, Artificial Sequence
  Description of Artificial Sequence: Synthetic oligonucleotide
  Antisense strand to SEQ ID NO: 2447064
uuugaacccagaaaccacc

SEQ ID NO: 2447066 - RNA, 19 nt, Artificial Sequence
  Description of Artificial Sequence: Synthetic oligonucleotide
  Sense strand starting at position 3035 of SEQ ID NO: 1887082
gaaucagagacucguagag

SEQ ID NO: 2447067 - RNA, 19 nt, Artificial Sequence
  Description of Artificial Sequence: Synthetic oligonucleotide
  Antisense strand to SEQ ID NO: 2447066
cucuacgagucucugauuc

SEQ ID NO: 2447068 - RNA, 19 nt, Artificial Sequence
  Description of Artificial Sequence: Synthetic oligonucleotide
  Sense strand starting at position 3037 of SEQ ID NO: 1887082
aucagagacucguagagga

SEQ ID NO: 2447069 - RNA, 19 nt, Artificial Sequence
  Description of Artificial Sequence: Synthetic oligonucleotide
  Antisense strand to SEQ ID NO: 2447068
uccucuacgagucucugau

SEQ ID NO: 2447070 - RNA, 19 nt, Artificial Sequence
  Description of Artificial Sequence: Synthetic oligonucleotide
  Sense strand starting at position 3047 of SEQ ID NO: 1887082
cguagaggauucuccuuaa

SEQ ID NO: 2447071 - RNA, 19 nt, Artificial Sequence
  Description of Artificial Sequence: Synthetic oligonucleotide
  Antisense strand to SEQ ID NO: 2447070
uuaaggagaauccucuacg

SEQ ID NO: 2447072 - RNA, 19 nt, Artificial Sequence
  Description of Artificial Sequence: Synthetic oligonucleotide
  Sense strand starting at position 3217 of SEQ ID NO: 1887082
caggaaacgugucuccuga

SEQ ID NO: 2447073 - RNA, 19 nt, Artificial Sequence
  Description of Artificial Sequence: Synthetic oligonucleotide
  Antisense strand to SEQ ID NO: 2447072
ucaggagacacguuuccug

SEQ ID NO: 2447074 - RNA, 19 nt, Artificial Sequence
  Description of Artificial Sequence: Synthetic oligonucleotide
  Sense strand starting at position 3428 of SEQ ID NO: 1887082
augaccugacccuguguaa

SEQ ID NO: 2447075 - RNA, 19 nt, Artificial Sequence
  Description of Artificial Sequence: Synthetic oligonucleotide
  Antisense strand to SEQ ID NO: 2447074
uuacacagggucaggucau

SEQ ID NO: 2447076 - RNA, 19 nt, Artificial Sequence
  Description of Artificial Sequence: Synthetic oligonucleotide
  Sense strand starting at position 3431 of SEQ ID NO: 1887082
accugacccuguguaaauu

SEQ ID NO: 2447077 - RNA, 19 nt, Artificial Sequence
  Description of Artificial Sequence: Synthetic oligonucleotide
  Antisense strand to SEQ ID NO: 2447076
aauuuacacagggucaggu

SEQ ID NO: 2447078 - RNA, 19 nt, Artificial Sequence
  Description of Artificial Sequence: Synthetic oligonucleotide
  Sense strand starting at position 3432 of SEQ ID NO: 1887082
ccugacccuguguaaauua

SEQ ID NO: 2447079 - RNA, 19 nt, Artificial Sequence
  Description of Artificial Sequence: Synthetic oligonucleotide
  Antisense strand to SEQ ID NO: 2447078
uaauuuacacagggucagg

SEQ ID NO: 2447080 - RNA, 19 nt, Artificial Sequence
  Description of Artificial Sequence: Synthetic oligonucleotide
  Sense strand starting at position 3440 of SEQ ID NO: 1887082
uguguaaauuacucggcuu

SEQ ID NO: 2447081 - RNA, 19 nt, Artificial Sequence
  Description of Artificial Sequence: Synthetic oligonucleotide
  Antisense strand to SEQ ID NO: 2447080
aagccgaguaauuuacaca

SEQ ID NO: 2447082 - RNA, 19 nt, Artificial Sequence
  Description of Artificial Sequence: Synthetic oligonucleotide
  Sense strand starting at position 3441 of SEQ ID NO: 1887082
guguaaauuacucggcuuc

SEQ ID NO: 2447083 - RNA, 19 nt, Artificial Sequence
  Description of Artificial Sequence: Synthetic oligonucleotide
  Antisense strand to SEQ ID NO: 2447082
gaagccgaguaauuuacac

SEQ ID NO: 2447084 - RNA, 19 nt, Artificial Sequence
  Description of Artificial Sequence: Synthetic oligonucleotide
  Sense strand starting at position 3469 of SEQ ID NO: 1887082
gcucucuuaucuguaauag

SEQ ID NO: 2447085 - RNA, 19 nt, Artificial Sequence
  Description of Artificial Sequence: Synthetic oligonucleotide
  Antisense strand to SEQ ID NO: 2447084
cuauuacagauaagagagc

SEQ ID NO: 2447086 - RNA, 19 nt, Artificial Sequence
  Description of Artificial Sequence: Synthetic oligonucleotide
  Sense strand starting at position 3473 of SEQ ID NO: 1887082
ucuuaucuguaauaggaau

SEQ ID NO: 2447087 - RNA, 19 nt, Artificial Sequence
  Description of Artificial Sequence: Synthetic oligonucleotide
  Antisense strand to SEQ ID NO: 2447086
auuccuauuacagauaaga

SEQ ID NO: 2447088 - RNA, 19 nt, Artificial Sequence
  Description of Artificial Sequence: Synthetic oligonucleotide
  Sense strand starting at position 3509 of SEQ ID NO: 1887082
gggcaauguaaggaucgaa

SEQ ID NO: 2447089 - RNA, 19 nt, Artificial Sequence
  Description of Artificial Sequence: Synthetic oligonucleotide
  Antisense strand to SEQ ID NO: 2447088
uucgauccuuacauugccc

SEQ ID NO: 2447090 - RNA, 19 nt, Artificial Sequence
  Description of Artificial Sequence: Synthetic oligonucleotide
  Sense strand starting at position 3723 of SEQ ID NO: 1887082
gaggaagugugccugcuau

SEQ ID NO: 2447091 - RNA, 19 nt, Artificial Sequence
  Description of Artificial Sequence: Synthetic oligonucleotide
  Antisense strand to SEQ ID NO: 2447090
auagcaggcacacuuccuc

SEQ ID NO: 2447092 - RNA, 19 nt, Artificial Sequence
  Description of Artificial Sequence: Synthetic oligonucleotide
  Sense strand starting at position 3875 of SEQ ID NO: 1887082
acacuagguucugcaucau

SEQ ID NO: 2447093 - RNA, 19 nt, Artificial Sequence
  Description of Artificial Sequence: Synthetic oligonucleotide
  Antisense strand to SEQ ID NO: 2447092
augaugcagaaccuagugu

SEQ ID NO: 2447094 - RNA, 19 nt, Artificial Sequence
  Description of Artificial Sequence: Synthetic oligonucleotide
  Sense strand starting at position 94 of SEQ ID NO: 1887083
gagggcuugaccugugcua

SEQ ID NO: 2447095 - RNA, 19 nt, Artificial Sequence
  Description of Artificial Sequence: Synthetic oligonucleotide
  Antisense strand to SEQ ID NO: 2447094
uagcacaggucaagcccuc

SEQ ID NO: 2447096 - RNA, 19 nt, Artificial Sequence
  Description of Artificial Sequence: Synthetic oligonucleotide
  Sense strand starting at position 133 of SEQ ID NO: 1887083
gggugaagccauugauucu

SEQ ID NO: 2447097 - RNA, 19 nt, Artificial Sequence
  Description of Artificial Sequence: Synthetic oligonucleotide
  Antisense strand to SEQ ID NO: 2447096
agaaucaauggcuucaccc

SEQ ID NO: 2447098 - RNA, 19 nt, Artificial Sequence
  Description of Artificial Sequence: Synthetic oligonucleotide
  Sense strand starting at position 134 of SEQ ID NO: 1887083
ggugaagccauugauucuu

SEQ ID NO: 2447099 - RNA, 19 nt, Artificial Sequence
  Description of Artificial Sequence: Synthetic oligonucleotide
  Antisense strand to SEQ ID NO: 2447098
aagaaucaauggcuucacc

SEQ ID NO: 2447100 - RNA, 19 nt, Artificial Sequence
  Description of Artificial Sequence: Synthetic oligonucleotide
  Sense strand starting at position 139 of SEQ ID NO: 1887083
agccauugauucuugcaca

SEQ ID NO: 2447101 - RNA, 19 nt, Artificial Sequence
  Description of Artificial Sequence: Synthetic oligonucleotide
  Antisense strand to SEQ ID NO: 2447100
ugugcaagaaucaauggcu

SEQ ID NO: 2447102 - RNA, 19 nt, Artificial Sequence
  Description of Artificial Sequence: Synthetic oligonucleotide
  Sense strand starting at position 144 of SEQ ID NO: 1887083
uugauucuugcacagguua

SEQ ID NO: 2447103 - RNA, 19 nt, Artificial Sequence
  Description of Artificial Sequence: Synthetic oligonucleotide
  Antisense strand to SEQ ID NO: 2447102
uaaccugugcaagaaucaa

SEQ ID NO: 2447104 - RNA, 19 nt, Artificial Sequence
  Description of Artificial Sequence: Synthetic oligonucleotide
  Sense strand starting at position 265 of SEQ ID NO: 1887083
uuaguuuacucacucguaa

SEQ ID NO: 2447105 - RNA, 19 nt, Artificial Sequence
  Description of Artificial Sequence: Synthetic oligonucleotide
  Antisense strand to SEQ ID NO: 2447104
uuacgagugaguaaacuaa

SEQ ID NO: 2447106 - RNA, 19 nt, Artificial Sequence
  Description of Artificial Sequence: Synthetic oligonucleotide
  Sense strand starting at position 301 of SEQ ID NO: 1887083
guaccuauuccauaggcuu

SEQ ID NO: 2447107 - RNA, 19 nt, Artificial Sequence
  Description of Artificial Sequence: Synthetic oligonucleotide
  Antisense strand to SEQ ID NO: 2447106
aagccuauggaauagguac

SEQ ID NO: 2447108 - RNA, 19 nt, Artificial Sequence
  Description of Artificial Sequence: Synthetic oligonucleotide
  Sense strand starting at position 309 of SEQ ID NO: 1887083
uccauaggcuuacuaugaa

SEQ ID NO: 2447109 - RNA, 19 nt, Artificial Sequence
  Description of Artificial Sequence: Synthetic oligonucleotide
  Antisense strand to SEQ ID NO: 2447108
uucauaguaagccuaugga

SEQ ID NO: 2447110 - RNA, 19 nt, Artificial Sequence
  Description of Artificial Sequence: Synthetic oligonucleotide
  Sense strand starting at position 327 of SEQ ID NO: 1887083
agacuaaaugaaugcuuua

SEQ ID NO: 2447111 - RNA, 19 nt, Artificial Sequence
  Description of Artificial Sequence: Synthetic oligonucleotide
  Antisense strand to SEQ ID NO: 2447110
uaaagcauucauuuagucu

SEQ ID NO: 2447112 - RNA, 19 nt, Artificial Sequence
  Description of Artificial Sequence: Synthetic oligonucleotide
  Sense strand starting at position 354 of SEQ ID NO: 1887083
uugcauagggcaugacaaa

SEQ ID NO: 2447113 - RNA, 19 nt, Artificial Sequence
  Description of Artificial Sequence: Synthetic oligonucleotide
  Antisense strand to SEQ ID NO: 2447112
uuugucaugcccuaugcaa

SEQ ID NO: 2447114 - RNA, 19 nt, Artificial Sequence
  Description of Artificial Sequence: Synthetic oligonucleotide
  Sense strand starting at position 372 of SEQ ID NO: 1887083
agggcaagugugcaauuaa

SEQ ID NO: 2447115 - RNA, 19 nt, Artificial Sequence
  Description of Artificial Sequence: Synthetic oligonucleotide
  Antisense strand to SEQ ID NO: 2447114
uuaauugcacacuugcccu

SEQ ID NO: 2447116 - RNA, 19 nt, Artificial Sequence
  Description of Artificial Sequence: Synthetic oligonucleotide
  Sense strand starting at position 383 of SEQ ID NO: 1887083
gcaauuaaugcugguuauu

SEQ ID NO: 2447117 - RNA, 19 nt, Artificial Sequence
  Description of Artificial Sequence: Synthetic oligonucleotide
  Antisense strand to SEQ ID NO: 2447116
aauaaccagcauuaauugc

SEQ ID NO: 2447118 - RNA, 19 nt, Artificial Sequence
  Description of Artificial Sequence: Synthetic oligonucleotide
  Sense strand starting at position 468 of SEQ ID NO: 1887083
guuggauuccaguaauaac

SEQ ID NO: 2447119 - RNA, 19 nt, Artificial Sequence
  Description of Artificial Sequence: Synthetic oligonucleotide
  Antisense strand to SEQ ID NO: 2447118
guuauuacuggaauccaac

SEQ ID NO: 2447120 - RNA, 19 nt, Artificial Sequence
  Description of Artificial Sequence: Synthetic oligonucleotide
  Sense strand starting at position 681 of SEQ ID NO: 1887083
guuugugauuacuccuucu

SEQ ID NO: 2447121 - RNA, 19 nt, Artificial Sequence
  Description of Artificial Sequence: Synthetic oligonucleotide
  Antisense strand to SEQ ID NO: 2447120
agaaggaguaaucacaaac

SEQ ID NO: 2447122 - RNA, 19 nt, Artificial Sequence
  Description of Artificial Sequence: Synthetic oligonucleotide
  Sense strand starting at position 684 of SEQ ID NO: 1887083
ugugauuacuccuucuuug

SEQ ID NO: 2447123 - RNA, 19 nt, Artificial Sequence
  Description of Artificial Sequence: Synthetic oligonucleotide
  Antisense strand to SEQ ID NO: 2447122
caaagaaggaguaaucaca

SEQ ID NO: 2447124 - RNA, 19 nt, Artificial Sequence
  Description of Artificial Sequence: Synthetic oligonucleotide
  Sense strand starting at position 742 of SEQ ID NO: 1887083
uuugcucacugauugcuua

SEQ ID NO: 2447125 - RNA, 19 nt, Artificial Sequence
  Description of Artificial Sequence: Synthetic oligonucleotide
  Antisense strand to SEQ ID NO: 2447124
uaagcaaucagugagcaaa

SEQ ID NO: 2447126 - RNA, 19 nt, Artificial Sequence
  Description of Artificial Sequence: Synthetic oligonucleotide
  Sense strand starting at position 890 of SEQ ID NO: 1887083
ccaggagagccuugagucu

SEQ ID NO: 2447127 - RNA, 19 nt, Artificial Sequence
  Description of Artificial Sequence: Synthetic oligonucleotide
  Antisense strand to SEQ ID NO: 2447126
agacucaaggcucuccugg

SEQ ID NO: 2447128 - RNA, 19 nt, Artificial Sequence
  Description of Artificial Sequence: Synthetic oligonucleotide
  Sense strand starting at position 1556 of SEQ ID NO: 1887083
cggaaguugcgguuuggua

SEQ ID NO: 2447129 - RNA, 19 nt, Artificial Sequence
  Description of Artificial Sequence: Synthetic oligonucleotide
  Antisense strand to SEQ ID NO: 2447128
uaccaaaccgcaacuuccg

SEQ ID NO: 2447130 - RNA, 19 nt, Artificial Sequence
  Description of Artificial Sequence: Synthetic oligonucleotide
  Sense strand starting at position 2434 of SEQ ID NO: 1887083
ccaauuccuuuccugggau

SEQ ID NO: 2447131 - RNA, 19 nt, Artificial Sequence
  Description of Artificial Sequence: Synthetic oligonucleotide
  Antisense strand to SEQ ID NO: 2447130
aucccaggaaaggaauugg

SEQ ID NO: 2447132 - RNA, 19 nt, Artificial Sequence
  Description of Artificial Sequence: Synthetic oligonucleotide
  Sense strand starting at position 2437 of SEQ ID NO: 1887083
auuccuuuccugggaucuu

SEQ ID NO: 2447133 - RNA, 19 nt, Artificial Sequence
  Description of Artificial Sequence: Synthetic oligonucleotide
  Antisense strand to SEQ ID NO: 2447132
aagaucccaggaaaggaau

SEQ ID NO: 2447134 - RNA, 19 nt, Artificial Sequence
  Description of Artificial Sequence: Synthetic oligonucleotide
  Sense strand starting at position 2463 of SEQ ID NO: 1887083
auagaaauuugaggucaag

SEQ ID NO: 2447135 - RNA, 19 nt, Artificial Sequence
  Description of Artificial Sequence: Synthetic oligonucleotide
  Antisense strand to SEQ ID NO: 2447134
cuugaccucaaauuucuau

SEQ ID NO: 2447136 - RNA, 19 nt, Artificial Sequence
  Description of Artificial Sequence: Synthetic oligonucleotide
  Sense strand starting at position 2545 of SEQ ID NO: 1887083
cuccgaagugacuguuauu

SEQ ID NO: 2447137 - RNA, 19 nt, Artificial Sequence
  Description of Artificial Sequence: Synthetic oligonucleotide
  Antisense strand to SEQ ID NO: 2447136
aauaacagucacuucggag

SEQ ID NO: 2447138 - RNA, 19 nt, Artificial Sequence
  Description of Artificial Sequence: Synthetic oligonucleotide
  Sense strand starting at position 2576 of SEQ ID NO: 1887083
agguaauaaaugugaagug

SEQ ID NO: 2447139 - RNA, 19 nt, Artificial Sequence
  Description of Artificial Sequence: Synthetic oligonucleotide
  Antisense strand to SEQ ID NO: 2447138
cacuucacauuuauuaccu

SEQ ID NO: 2447140 - RNA, 19 nt, Artificial Sequence
  Description of Artificial Sequence: Synthetic oligonucleotide
  Sense strand starting at position 2585 of SEQ ID NO: 1887083
augugaaguguuuaccuga

SEQ ID NO: 2447141 - RNA, 19 nt, Artificial Sequence
  Description of Artificial Sequence: Synthetic oligonucleotide
  Antisense strand to SEQ ID NO: 2447140
ucagguaaacacuucacau

SEQ ID NO: 2447142 - RNA, 19 nt, Artificial Sequence
  Description of Artificial Sequence: Synthetic oligonucleotide
  Sense strand starting at position 2590 of SEQ ID NO: 1887083
aaguguuuaccugaagggu

SEQ ID NO: 2447143 - RNA, 19 nt, Artificial Sequence
  Description of Artificial Sequence: Synthetic oligonucleotide
  Antisense strand to SEQ ID NO: 2447142
acccuucagguaaacacuu

SEQ ID NO: 2447144 - RNA, 19 nt, Artificial Sequence
  Description of Artificial Sequence: Synthetic oligonucleotide
  Sense strand starting at position 2593 of SEQ ID NO: 1887083
uguuuaccugaaggguuua

SEQ ID NO: 2447145 - RNA, 19 nt, Artificial Sequence
  Description of Artificial Sequence: Synthetic oligonucleotide
  Antisense strand to SEQ ID NO: 2447144
uaaacccuucagguaaaca

SEQ ID NO: 2447146 - RNA, 19 nt, Artificial Sequence
  Description of Artificial Sequence: Synthetic oligonucleotide
  Sense strand starting at position 2629 of SEQ ID NO: 1887083
ccuuaaugacugcagcuau

SEQ ID NO: 2447147 - RNA, 19 nt, Artificial Sequence
  Description of Artificial Sequence: Synthetic oligonucleotide
  Antisense strand to SEQ ID NO: 2447146
auagcugcagucauuaagg

SEQ ID NO: 2447148 - RNA, 19 nt, Artificial Sequence
  Description of Artificial Sequence: Synthetic oligonucleotide
  Sense strand starting at position 2652 of SEQ ID NO: 1887083
auaauuagcucuguaugac

SEQ ID NO: 2447149 - RNA, 19 nt, Artificial Sequence
  Description of Artificial Sequence: Synthetic oligonucleotide
  Antisense strand to SEQ ID NO: 2447148
gucauacagagcuaauuau

SEQ ID NO: 2447150 - RNA, 19 nt, Artificial Sequence
  Description of Artificial Sequence: Synthetic oligonucleotide
  Sense strand starting at position 2728 of SEQ ID NO: 1887083
acagaauccugaucugagu

SEQ ID NO: 2447151 - RNA, 19 nt, Artificial Sequence
  Description of Artificial Sequence: Synthetic oligonucleotide
  Antisense strand to SEQ ID NO: 2447150
acucagaucaggauucugu

SEQ ID NO: 2447152 - RNA, 19 nt, Artificial Sequence
  Description of Artificial Sequence: Synthetic oligonucleotide
  Sense strand starting at position 2764 of SEQ ID NO: 1887083
ccuacucugucguucuuaa

SEQ ID NO: 2447153 - RNA, 19 nt, Artificial Sequence
  Description of Artificial Sequence: Synthetic oligonucleotide
  Antisense strand to SEQ ID NO: 2447152
uuaagaacgacagaguagg

SEQ ID NO: 2447154 - RNA, 19 nt, Artificial Sequence
  Description of Artificial Sequence: Synthetic oligonucleotide
  Sense strand starting at position 2774 of SEQ ID NO: 1887083
cguucuuaaacguggaauc

SEQ ID NO: 2447155 - RNA, 19 nt, Artificial Sequence
  Description of Artificial Sequence: Synthetic oligonucleotide
  Antisense strand to SEQ ID NO: 2447154
gauuccacguuuaagaacg

SEQ ID NO: 2447156 - RNA, 19 nt, Artificial Sequence
  Description of Artificial Sequence: Synthetic oligonucleotide
  Sense strand starting at position 2775 of SEQ ID NO: 1887083
guucuuaaacguggaauca

SEQ ID NO: 2447157 - RNA, 19 nt, Artificial Sequence
  Description of Artificial Sequence: Synthetic oligonucleotide
  Antisense strand to SEQ ID NO: 2447156
ugauuccacguuuaagaac

SEQ ID NO: 2447158 - RNA, 19 nt, Artificial Sequence
  Description of Artificial Sequence: Synthetic oligonucleotide
  Sense strand starting at position 2776 of SEQ ID NO: 1887083
uucuuaaacguggaaucau

SEQ ID NO: 2447159 - RNA, 19 nt, Artificial Sequence
  Description of Artificial Sequence: Synthetic oligonucleotide
  Antisense strand to SEQ ID NO: 2447158
augauuccacguuuaagaa

SEQ ID NO: 2447160 - RNA, 19 nt, Artificial Sequence
  Description of Artificial Sequence: Synthetic oligonucleotide
  Sense strand starting at position 2802 of SEQ ID NO: 1887083
cccuuuaaggcuuaccuga

SEQ ID NO: 2447161 - RNA, 19 nt, Artificial Sequence
  Description of Artificial Sequence: Synthetic oligonucleotide
  Antisense strand to SEQ ID NO: 2447160
ucagguaagccuuaaaggg

SEQ ID NO: 2447162 - RNA, 19 nt, Artificial Sequence
  Description of Artificial Sequence: Synthetic oligonucleotide
  Sense strand starting at position 2862 of SEQ ID NO: 1887083
guggucucccugcaccaau

SEQ ID NO: 2447163 - RNA, 19 nt, Artificial Sequence
  Description of Artificial Sequence: Synthetic oligonucleotide
  Antisense strand to SEQ ID NO: 2447162
auuggugcagggagaccac

SEQ ID NO: 2447164 - RNA, 19 nt, Artificial Sequence
  Description of Artificial Sequence: Synthetic oligonucleotide
  Sense strand starting at position 2948 of SEQ ID NO: 1887083
cguaaauacccggagaggu

SEQ ID NO: 2447165 - RNA, 19 nt, Artificial Sequence
  Description of Artificial Sequence: Synthetic oligonucleotide
  Antisense strand to SEQ ID NO: 2447164
accucuccggguauuuacg

SEQ ID NO: 2447166 - RNA, 19 nt, Artificial Sequence
  Description of Artificial Sequence: Synthetic oligonucleotide
  Sense strand starting at position 3069 of SEQ ID NO: 1887083
gagcuuuaggucugccauu

SEQ ID NO: 2447167 - RNA, 19 nt, Artificial Sequence
  Description of Artificial Sequence: Synthetic oligonucleotide
  Antisense strand to SEQ ID NO: 2447166
aauggcagaccuaaagcuc

SEQ ID NO: 2447168 - RNA, 19 nt, Artificial Sequence
  Description of Artificial Sequence: Synthetic oligonucleotide
  Sense strand starting at position 3070 of SEQ ID NO: 1887083
agcuuuaggucugccauuu

SEQ ID NO: 2447169 - RNA, 19 nt, Artificial Sequence
  Description of Artificial Sequence: Synthetic oligonucleotide
  Antisense strand to SEQ ID NO: 2447168
aaauggcagaccuaaagcu

SEQ ID NO: 2447170 - RNA, 19 nt, Artificial Sequence
  Description of Artificial Sequence: Synthetic oligonucleotide
  Sense strand starting at position 3169 of SEQ ID NO: 1887083
ggguucuaacuugaaagug

SEQ ID NO: 2447171 - RNA, 19 nt, Artificial Sequence
  Description of Artificial Sequence: Synthetic oligonucleotide
  Antisense strand to SEQ ID NO: 2447170
cacuuucaaguuagaaccc

SEQ ID NO: 2447172 - RNA, 19 nt, Artificial Sequence
  Description of Artificial Sequence: Synthetic oligonucleotide
  Sense strand starting at position 3874 of SEQ ID NO: 1887083
gcgguuauucuuggaucua

SEQ ID NO: 2447173 - RNA, 19 nt, Artificial Sequence
  Description of Artificial Sequence: Synthetic oligonucleotide
  Antisense strand to SEQ ID NO: 2447172
uagauccaagaauaaccgc

SEQ ID NO: 2447174 - RNA, 19 nt, Artificial Sequence
  Description of Artificial Sequence: Synthetic oligonucleotide
  Sense strand starting at position 968 of SEQ ID NO: 1887084
auagaagguuacuauacaa

SEQ ID NO: 2447175 - RNA, 19 nt, Artificial Sequence
  Description of Artificial Sequence: Synthetic oligonucleotide
  Antisense strand to SEQ ID NO: 2447174
uuguauaguaaccuucuau

SEQ ID NO: 2447176 - RNA, 19 nt, Artificial Sequence
  Description of Artificial Sequence: Synthetic oligonucleotide
  Sense strand starting at position 989 of SEQ ID NO: 1887084
gcacguucuuaucuauuag

SEQ ID NO: 2447177 - RNA, 19 nt, Artificial Sequence
  Description of Artificial Sequence: Synthetic oligonucleotide
  Antisense strand to SEQ ID NO: 2447176
cuaauagauaagaacgugc

SEQ ID NO: 2447178 - RNA, 19 nt, Artificial Sequence
  Description of Artificial Sequence: Synthetic oligonucleotide
  Sense strand starting at position 1320 of SEQ ID NO: 1887084
agauuccgucucgaaauaa

SEQ ID NO: 2447179 - RNA, 19 nt, Artificial Sequence
  Description of Artificial Sequence: Synthetic oligonucleotide
  Antisense strand to SEQ ID NO: 2447178
uuauuucgagacggaaucu

SEQ ID NO: 2447180 - RNA, 19 nt, Artificial Sequence
  Description of Artificial Sequence: Synthetic oligonucleotide
  Sense strand starting at position 1552 of SEQ ID NO: 1887084
gagacaagccuggguaaga

SEQ ID NO: 2447181 - RNA, 19 nt, Artificial Sequence
  Description of Artificial Sequence: Synthetic oligonucleotide
  Antisense strand to SEQ ID NO: 2447180
ucuuacccaggcuugucuc

SEQ ID NO: 2447182 - RNA, 19 nt, Artificial Sequence
  Description of Artificial Sequence: Synthetic oligonucleotide
  Sense strand starting at position 1662 of SEQ ID NO: 1887084
aucacuugaggucgaaauu

SEQ ID NO: 2447183 - RNA, 19 nt, Artificial Sequence
  Description of Artificial Sequence: Synthetic oligonucleotide
  Antisense strand to SEQ ID NO: 2447182
aauuucgaccucaagugau

SEQ ID NO: 2447184 - RNA, 19 nt, Artificial Sequence
  Description of Artificial Sequence: Synthetic oligonucleotide
  Sense strand starting at position 2030 of SEQ ID NO: 1887084
gaauuucgauuugaugguu

SEQ ID NO: 2447185 - RNA, 19 nt, Artificial Sequence
  Description of Artificial Sequence: Synthetic oligonucleotide
  Antisense strand to SEQ ID NO: 2447184
aaccaucaaaucgaaauuc

SEQ ID NO: 2447186 - RNA, 19 nt, Artificial Sequence
  Description of Artificial Sequence: Synthetic oligonucleotide
  Sense strand starting at position 2042 of SEQ ID NO: 1887084
gaugguuucuauuuagcuu

SEQ ID NO: 2447187 - RNA, 19 nt, Artificial Sequence
  Description of Artificial Sequence: Synthetic oligonucleotide
  Antisense strand to SEQ ID NO: 2447186
aagcuaaauagaaaccauc

SEQ ID NO: 2447188 - RNA, 19 nt, Artificial Sequence
  Description of Artificial Sequence: Synthetic oligonucleotide
  Sense strand starting at position 2046 of SEQ ID NO: 1887084
guuucuauuuagcuucgua

SEQ ID NO: 2447189 - RNA, 19 nt, Artificial Sequence
  Description of Artificial Sequence: Synthetic oligonucleotide
  Antisense strand to SEQ ID NO: 2447188
uacgaagcuaaauagaaac

SEQ ID NO: 2447190 - RNA, 19 nt, Artificial Sequence
  Description of Artificial Sequence: Synthetic oligonucleotide
  Sense strand starting at position 2083 of SEQ ID NO: 1887084
gggauuugcugugagucaa

SEQ ID NO: 2447191 - RNA, 19 nt, Artificial Sequence
  Description of Artificial Sequence: Synthetic oligonucleotide
  Antisense strand to SEQ ID NO: 2447190
uugacucacagcaaauccc

SEQ ID NO: 2447192 - RNA, 19 nt, Artificial Sequence
  Description of Artificial Sequence: Synthetic oligonucleotide
  Sense strand starting at position 2094 of SEQ ID NO: 1887084
ugagucaaggucugaggaa

SEQ ID NO: 2447193 - RNA, 19 nt, Artificial Sequence
  Description of Artificial Sequence: Synthetic oligonucleotide
  Antisense strand to SEQ ID NO: 2447192
uuccucagaccuugacuca

SEQ ID NO: 2447194 - RNA, 19 nt, Artificial Sequence
  Description of Artificial Sequence: Synthetic oligonucleotide
  Sense strand starting at position 2095 of SEQ ID NO: 1887084
gagucaaggucugaggaaa

SEQ ID NO: 2447195 - RNA, 19 nt, Artificial Sequence
  Description of Artificial Sequence: Synthetic oligonucleotide
  Antisense strand to SEQ ID NO: 2447194
uuuccucagaccuugacuc

SEQ ID NO: 2447196 - RNA, 19 nt, Artificial Sequence
  Description of Artificial Sequence: Synthetic oligonucleotide
  Sense strand starting at position 2192 of SEQ ID NO: 1887084
ccaccuuaggucuagcaga

SEQ ID NO: 2447197 - RNA, 19 nt, Artificial Sequence
  Description of Artificial Sequence: Synthetic oligonucleotide
  Antisense strand to SEQ ID NO: 2447196
ucugcuagaccuaaggugg

SEQ ID NO: 2447198 - RNA, 19 nt, Artificial Sequence
  Description of Artificial Sequence: Synthetic oligonucleotide
  Sense strand starting at position 2197 of SEQ ID NO: 1887084
uuaggucuagcagagacua

SEQ ID NO: 2447199 - RNA, 19 nt, Artificial Sequence
  Description of Artificial Sequence: Synthetic oligonucleotide
  Antisense strand to SEQ ID NO: 2447198
uagucucugcuagaccuaa

SEQ ID NO: 2447200 - RNA, 19 nt, Artificial Sequence
  Description of Artificial Sequence: Synthetic oligonucleotide
  Sense strand starting at position 2513 of SEQ ID NO: 1887084
ccucuagagcgguggugaa

SEQ ID NO: 2447201 - RNA, 19 nt, Artificial Sequence
  Description of Artificial Sequence: Synthetic oligonucleotide
  Antisense strand to SEQ ID NO: 2447200
uucaccaccgcucuagagg

SEQ ID NO: 2447202 - RNA, 19 nt, Artificial Sequence
  Description of Artificial Sequence: Synthetic oligonucleotide
  Sense strand starting at position 2578 of SEQ ID NO: 1887084
cgaacuauuucucuacguu

SEQ ID NO: 2447203 - RNA, 19 nt, Artificial Sequence
  Description of Artificial Sequence: Synthetic oligonucleotide
  Antisense strand to SEQ ID NO: 2447202
aacguagagaaauaguucg

SEQ ID NO: 2447204 - RNA, 19 nt, Artificial Sequence
  Description of Artificial Sequence: Synthetic oligonucleotide
  Sense strand starting at position 2597 of SEQ ID NO: 1887084
uucucuugauccucccgaa

SEQ ID NO: 2447205 - RNA, 19 nt, Artificial Sequence
  Description of Artificial Sequence: Synthetic oligonucleotide
  Antisense strand to SEQ ID NO: 2447204
uucgggaggaucaagagaa

SEQ ID NO: 2447206 - RNA, 19 nt, Artificial Sequence
  Description of Artificial Sequence: Synthetic oligonucleotide
  Sense strand starting at position 2601 of SEQ ID NO: 1887084
cuugauccucccgaaaucu

SEQ ID NO: 2447207 - RNA, 19 nt, Artificial Sequence
  Description of Artificial Sequence: Synthetic oligonucleotide
  Antisense strand to SEQ ID NO: 2447206
agauuucgggaggaucaag

SEQ ID NO: 2447208 - RNA, 19 nt, Artificial Sequence
  Description of Artificial Sequence: Synthetic oligonucleotide
  Sense strand starting at position 2636 of SEQ ID NO: 1887084
gaggaaucgucuccaccgu

SEQ ID NO: 2447209 - RNA, 19 nt, Artificial Sequence
  Description of Artificial Sequence: Synthetic oligonucleotide
  Antisense strand to SEQ ID NO: 2447208
acgguggagacgauuccuc

SEQ ID NO: 2447210 - RNA, 19 nt, Artificial Sequence
  Description of Artificial Sequence: Synthetic oligonucleotide
  Sense strand starting at position 2842 of SEQ ID NO: 1887084
gacugagauuugggaaagu

SEQ ID NO: 2447211 - RNA, 19 nt, Artificial Sequence
  Description of Artificial Sequence: Synthetic oligonucleotide
  Antisense strand to SEQ ID NO: 2447210
acuuucccaaaucucaguc

SEQ ID NO: 2447212 - RNA, 19 nt, Artificial Sequence
  Description of Artificial Sequence: Synthetic oligonucleotide
  Sense strand starting at position 2853 of SEQ ID NO: 1887084
gggaaaguccgaggugugu

SEQ ID NO: 2447213 - RNA, 19 nt, Artificial Sequence
  Description of Artificial Sequence: Synthetic oligonucleotide
  Antisense strand to SEQ ID NO: 2447212
acacaccucggacuuuccc

SEQ ID NO: 2447214 - RNA, 19 nt, Artificial Sequence
  Description of Artificial Sequence: Synthetic oligonucleotide
  Sense strand starting at position 2859 of SEQ ID NO: 1887084
guccgaggugugucgcgaa

SEQ ID NO: 2447215 - RNA, 19 nt, Artificial Sequence
  Description of Artificial Sequence: Synthetic oligonucleotide
  Antisense strand to SEQ ID NO: 2447214
uucgcgacacaccucggac

SEQ ID NO: 2447216 - RNA, 19 nt, Artificial Sequence
  Description of Artificial Sequence: Synthetic oligonucleotide
  Sense strand starting at position 2861 of SEQ ID NO: 1887084
ccgaggugugucgcgaaca

SEQ ID NO: 2447217 - RNA, 19 nt, Artificial Sequence
  Description of Artificial Sequence: Synthetic oligonucleotide
  Antisense strand to SEQ ID NO: 2447216
uguucgcgacacaccucgg

SEQ ID NO: 2447218 - RNA, 19 nt, Artificial Sequence
  Description of Artificial Sequence: Synthetic oligonucleotide
  Sense strand starting at position 2864 of SEQ ID NO: 1887084
aggugugucgcgaacagug

SEQ ID NO: 2447219 - RNA, 19 nt, Artificial Sequence
  Description of Artificial Sequence: Synthetic oligonucleotide
  Antisense strand to SEQ ID NO: 2447218
cacuguucgcgacacaccu

SEQ ID NO: 2447220 - RNA, 19 nt, Artificial Sequence
  Description of Artificial Sequence: Synthetic oligonucleotide
  Sense strand starting at position 2888 of SEQ ID NO: 1887084
ugguguuugcguguuuguu

SEQ ID NO: 2447221 - RNA, 19 nt, Artificial Sequence
  Description of Artificial Sequence: Synthetic oligonucleotide
  Antisense strand to SEQ ID NO: 2447220
aacaaacacgcaaacacca

SEQ ID NO: 2447222 - RNA, 19 nt, Artificial Sequence
  Description of Artificial Sequence: Synthetic oligonucleotide
  Sense strand starting at position 2912 of SEQ ID NO: 1887084
cggcucuaccggcuguaaa

SEQ ID NO: 2447223 - RNA, 19 nt, Artificial Sequence
  Description of Artificial Sequence: Synthetic oligonucleotide
  Antisense strand to SEQ ID NO: 2447222
uuuacagccgguagagccg

SEQ ID NO: 2447224 - RNA, 19 nt, Artificial Sequence
  Description of Artificial Sequence: Synthetic oligonucleotide
  Sense strand starting at position 2924 of SEQ ID NO: 1887084
cuguaaauucugggaagac

SEQ ID NO: 2447225 - RNA, 19 nt, Artificial Sequence
  Description of Artificial Sequence: Synthetic oligonucleotide
  Antisense strand to SEQ ID NO: 2447224
gucuucccagaauuuacag

SEQ ID NO: 2447226 - RNA, 19 nt, Artificial Sequence
  Description of Artificial Sequence: Synthetic oligonucleotide
  Sense strand starting at position 3063 of SEQ ID NO: 1887084
gagucauguccuggacuga

SEQ ID NO: 2447227 - RNA, 19 nt, Artificial Sequence
  Description of Artificial Sequence: Synthetic oligonucleotide
  Antisense strand to SEQ ID NO: 2447226
ucaguccaggacaugacuc

SEQ ID NO: 2447228 - RNA, 19 nt, Artificial Sequence
  Description of Artificial Sequence: Synthetic oligonucleotide
  Sense strand starting at position 3064 of SEQ ID NO: 1887084
agucauguccuggacugaa

SEQ ID NO: 2447229 - RNA, 19 nt, Artificial Sequence
  Description of Artificial Sequence: Synthetic oligonucleotide
  Antisense strand to SEQ ID NO: 2447228
uucaguccaggacaugacu

SEQ ID NO: 2447230 - RNA, 19 nt, Artificial Sequence
  Description of Artificial Sequence: Synthetic oligonucleotide
  Sense strand starting at position 3459 of SEQ ID NO: 1887084
ggaucuuccuguccaucuu

SEQ ID NO: 2447231 - RNA, 19 nt, Artificial Sequence
  Description of Artificial Sequence: Synthetic oligonucleotide
  Antisense strand to SEQ ID NO: 2447230
aagauggacaggaagaucc

SEQ ID NO: 2447232 - RNA, 19 nt, Artificial Sequence
  Description of Artificial Sequence: Synthetic oligonucleotide
  Sense strand starting at position 3502 of SEQ ID NO: 1887084
gcuggauucugaucuguag

SEQ ID NO: 2447233 - RNA, 19 nt, Artificial Sequence
  Description of Artificial Sequence: Synthetic oligonucleotide
  Antisense strand to SEQ ID NO: 2447232
cuacagaucagaauccagc

SEQ ID NO: 2447234 - RNA, 19 nt, Artificial Sequence
  Description of Artificial Sequence: Synthetic oligonucleotide
  Sense strand starting at position 3553 of SEQ ID NO: 1887084
aauauaaguuauguggcaa

SEQ ID NO: 2447235 - RNA, 19 nt, Artificial Sequence
  Description of Artificial Sequence: Synthetic oligonucleotide
  Antisense strand to SEQ ID NO: 2447234
uugccacauaacuuauauu

SEQ ID NO: 2447236 - RNA, 19 nt, Artificial Sequence
  Description of Artificial Sequence: Synthetic oligonucleotide
  Sense strand starting at position 3565 of SEQ ID NO: 1887084
guggcaaugucucuuaaac

SEQ ID NO: 2447237 - RNA, 19 nt, Artificial Sequence
  Description of Artificial Sequence: Synthetic oligonucleotide
  Antisense strand to SEQ ID NO: 2447236
guuuaagagacauugccac

SEQ ID NO: 2447238 - RNA, 19 nt, Artificial Sequence
  Description of Artificial Sequence: Synthetic oligonucleotide
  Sense strand starting at position 3621 of SEQ ID NO: 1887084
ggguaaauguacccacaag

SEQ ID NO: 2447239 - RNA, 19 nt, Artificial Sequence
  Description of Artificial Sequence: Synthetic oligonucleotide
  Antisense strand to SEQ ID NO: 2447238
cuuguggguacauuuaccc

SEQ ID NO: 2447240 - RNA, 19 nt, Artificial Sequence
  Description of Artificial Sequence: Synthetic oligonucleotide
  Sense strand starting at position 3730 of SEQ ID NO: 1887084
accuauuaguuugucaugu

SEQ ID NO: 2447241 - RNA, 19 nt, Artificial Sequence
  Description of Artificial Sequence: Synthetic oligonucleotide
  Antisense strand to SEQ ID NO: 2447240
acaugacaaacuaauaggu

SEQ ID NO: 2447242 - RNA, 19 nt, Artificial Sequence
  Description of Artificial Sequence: Synthetic oligonucleotide
  Sense strand starting at position 3739 of SEQ ID NO: 1887084
uuugucauguguucucaau

SEQ ID NO: 2447243 - RNA, 19 nt, Artificial Sequence
  Description of Artificial Sequence: Synthetic oligonucleotide
  Antisense strand to SEQ ID NO: 2447242
auugagaacacaugacaaa

SEQ ID NO: 2447244 - RNA, 19 nt, Artificial Sequence
  Description of Artificial Sequence: Synthetic oligonucleotide
  Sense strand starting at position 3741 of SEQ ID NO: 1887084
ugucauguguucucaauca

SEQ ID NO: 2447245 - RNA, 19 nt, Artificial Sequence
  Description of Artificial Sequence: Synthetic oligonucleotide
  Antisense strand to SEQ ID NO: 2447244
ugauugagaacacaugaca

SEQ ID NO: 2447246 - RNA, 19 nt, Artificial Sequence
  Description of Artificial Sequence: Synthetic oligonucleotide
  Sense strand starting at position 3836 of SEQ ID NO: 1887084
gcucuaauccaggguuucu

SEQ ID NO: 2447247 - RNA, 19 nt, Artificial Sequence
  Description of Artificial Sequence: Synthetic oligonucleotide
  Antisense strand to SEQ ID NO: 2447246
agaaacccuggauuagagc

SEQ ID NO: 2447248 - RNA, 19 nt, Artificial Sequence
  Description of Artificial Sequence: Synthetic oligonucleotide
  Sense strand starting at position 3869 of SEQ ID NO: 1887084
uugacaguuuggccuagau

SEQ ID NO: 2447249 - RNA, 19 nt, Artificial Sequence
  Description of Artificial Sequence: Synthetic oligonucleotide
  Antisense strand to SEQ ID NO: 2447248
aucuaggccaaacugucaa

SEQ ID NO: 2447250 - RNA, 19 nt, Artificial Sequence
  Description of Artificial Sequence: Synthetic oligonucleotide
  Sense strand starting at position 3871 of SEQ ID NO: 1887084
gacaguuuggccuagauaa

SEQ ID NO: 2447251 - RNA, 19 nt, Artificial Sequence
  Description of Artificial Sequence: Synthetic oligonucleotide
  Antisense strand to SEQ ID NO: 2447250
uuaucuaggccaaacuguc

SEQ ID NO: 2447252 - RNA, 19 nt, Artificial Sequence
  Description of Artificial Sequence: Synthetic oligonucleotide
  Sense strand starting at position 3873 of SEQ ID NO: 1887084
caguuuggccuagauaauu

SEQ ID NO: 2447253 - RNA, 19 nt, Artificial Sequence
  Description of Artificial Sequence: Synthetic oligonucleotide
  Antisense strand to SEQ ID NO: 2447252
aauuaucuaggccaaacug

SEQ ID NO: 2447254 - RNA, 19 nt, Artificial Sequence
  Description of Artificial Sequence: Synthetic oligonucleotide
  Sense strand starting at position 915 of SEQ ID NO: 1887085
ccaucagucucucugcuua

SEQ ID NO: 2447255 - RNA, 19 nt, Artificial Sequence
  Description of Artificial Sequence: Synthetic oligonucleotide
  Antisense strand to SEQ ID NO: 2447254
uaagcagagagacugaugg

SEQ ID NO: 2447256 - RNA, 19 nt, Artificial Sequence
  Description of Artificial Sequence: Synthetic oligonucleotide
  Sense strand starting at position 917 of SEQ ID NO: 1887085
aucagucucucugcuuaga

SEQ ID NO: 2447257 - RNA, 19 nt, Artificial Sequence
  Description of Artificial Sequence: Synthetic oligonucleotide
  Antisense strand to SEQ ID NO: 2447256
ucuaagcagagagacugau

SEQ ID NO: 2447258 - RNA, 19 nt, Artificial Sequence
  Description of Artificial Sequence: Synthetic oligonucleotide
  Sense strand starting at position 1347 of SEQ ID NO: 1887085
guuggaaggcaguaagaau

SEQ ID NO: 2447259 - RNA, 19 nt, Artificial Sequence
  Description of Artificial Sequence: Synthetic oligonucleotide
  Antisense strand to SEQ ID NO: 2447258
auucuuacugccuuccaac

SEQ ID NO: 2447260 - RNA, 19 nt, Artificial Sequence
  Description of Artificial Sequence: Synthetic oligonucleotide
  Sense strand starting at position 1385 of SEQ ID NO: 1887085
guuuccuugagaggugaca

SEQ ID NO: 2447261 - RNA, 19 nt, Artificial Sequence
  Description of Artificial Sequence: Synthetic oligonucleotide
  Antisense strand to SEQ ID NO: 2447260
ugucaccucucaaggaaac

SEQ ID NO: 2447262 - RNA, 19 nt, Artificial Sequence
  Description of Artificial Sequence: Synthetic oligonucleotide
  Sense strand starting at position 1387 of SEQ ID NO: 1887085
uuccuugagaggugacagu

SEQ ID NO: 2447263 - RNA, 19 nt, Artificial Sequence
  Description of Artificial Sequence: Synthetic oligonucleotide
  Antisense strand to SEQ ID NO: 2447262
acugucaccucucaaggaa

SEQ ID NO: 2447264 - RNA, 19 nt, Artificial Sequence
  Description of Artificial Sequence: Synthetic oligonucleotide
  Sense strand starting at position 1398 of SEQ ID NO: 1887085
gugacaguugagggaacau

SEQ ID NO: 2447265 - RNA, 19 nt, Artificial Sequence
  Description of Artificial Sequence: Synthetic oligonucleotide
  Antisense strand to SEQ ID NO: 2447264
auguucccucaacugucac

SEQ ID NO: 2447266 - RNA, 19 nt, Artificial Sequence
  Description of Artificial Sequence: Synthetic oligonucleotide
  Sense strand starting at position 1484 of SEQ ID NO: 1887085
ggcacugacccugguagau

SEQ ID NO: 2447267 - RNA, 19 nt, Artificial Sequence
  Description of Artificial Sequence: Synthetic oligonucleotide
  Antisense strand to SEQ ID NO: 2447266
aucuaccagggucagugcc

SEQ ID NO: 2447268 - RNA, 19 nt, Artificial Sequence
  Description of Artificial Sequence: Synthetic oligonucleotide
  Sense strand starting at position 1673 of SEQ ID NO: 1887085
guccucauucuguggagga

SEQ ID NO: 2447269 - RNA, 19 nt, Artificial Sequence
  Description of Artificial Sequence: Synthetic oligonucleotide
  Antisense strand to SEQ ID NO: 2447268
uccuccacagaaugaggac

SEQ ID NO: 2447270 - RNA, 19 nt, Artificial Sequence
  Description of Artificial Sequence: Synthetic oligonucleotide
  Sense strand starting at position 2090 of SEQ ID NO: 1887085
gccagaaccuuuggcaucu

SEQ ID NO: 2447271 - RNA, 19 nt, Artificial Sequence
  Description of Artificial Sequence: Synthetic oligonucleotide
  Antisense strand to SEQ ID NO: 2447270
agaugccaaagguucuggc

SEQ ID NO: 2447272 - RNA, 19 nt, Artificial Sequence
  Description of Artificial Sequence: Synthetic oligonucleotide
  Sense strand starting at position 2099 of SEQ ID NO: 1887085
uuuggcaucucuucuaguu

SEQ ID NO: 2447273 - RNA, 19 nt, Artificial Sequence
  Description of Artificial Sequence: Synthetic oligonucleotide
  Antisense strand to SEQ ID NO: 2447272
aacuagaagagaugccaaa

SEQ ID NO: 2447274 - RNA, 19 nt, Artificial Sequence
  Description of Artificial Sequence: Synthetic oligonucleotide
  Sense strand starting at position 2452 of SEQ ID NO: 1887085
guacaagaguguuccucaa

SEQ ID NO: 2447275 - RNA, 19 nt, Artificial Sequence
  Description of Artificial Sequence: Synthetic oligonucleotide
  Antisense strand to SEQ ID NO: 2447274
uugaggaacacucuuguac

SEQ ID NO: 2447276 - RNA, 19 nt, Artificial Sequence
  Description of Artificial Sequence: Synthetic oligonucleotide
  Sense strand starting at position 2454 of SEQ ID NO: 1887085
acaagaguguuccucaaga

SEQ ID NO: 2447277 - RNA, 19 nt, Artificial Sequence
  Description of Artificial Sequence: Synthetic oligonucleotide
  Antisense strand to SEQ ID NO: 2447276
ucuugaggaacacucuugu

SEQ ID NO: 2447278 - RNA, 19 nt, Artificial Sequence
  Description of Artificial Sequence: Synthetic oligonucleotide
  Sense strand starting at position 2456 of SEQ ID NO: 1887085
aagaguguuccucaagagu

SEQ ID NO: 2447279 - RNA, 19 nt, Artificial Sequence
  Description of Artificial Sequence: Synthetic oligonucleotide
  Antisense strand to SEQ ID NO: 2447278
acucuugaggaacacucuu

SEQ ID NO: 2447280 - RNA, 19 nt, Artificial Sequence
  Description of Artificial Sequence: Synthetic oligonucleotide
  Sense strand starting at position 2478 of SEQ ID NO: 1887085
uuuggacuuugacuguaaa

SEQ ID NO: 2447281 - RNA, 19 nt, Artificial Sequence
  Description of Artificial Sequence: Synthetic oligonucleotide
  Antisense strand to SEQ ID NO: 2447280
uuuacagucaaaguccaaa

SEQ ID NO: 2447282 - RNA, 19 nt, Artificial Sequence
  Description of Artificial Sequence: Synthetic oligonucleotide
  Sense strand starting at position 2825 of SEQ ID NO: 1887085
gagggagcuuuaguguacu

SEQ ID NO: 2447283 - RNA, 19 nt, Artificial Sequence
  Description of Artificial Sequence: Synthetic oligonucleotide
  Antisense strand to SEQ ID NO: 2447282
aguacacuaaagcucccuc

SEQ ID NO: 2447284 - RNA, 19 nt, Artificial Sequence
  Description of Artificial Sequence: Synthetic oligonucleotide
  Sense strand starting at position 2831 of SEQ ID NO: 1887085
gcuuuaguguacugagcca

SEQ ID NO: 2447285 - RNA, 19 nt, Artificial Sequence
  Description of Artificial Sequence: Synthetic oligonucleotide
  Antisense strand to SEQ ID NO: 2447284
uggcucaguacacuaaagc

SEQ ID NO: 2447286 - RNA, 19 nt, Artificial Sequence
  Description of Artificial Sequence: Synthetic oligonucleotide
  Sense strand starting at position 2849 of SEQ ID NO: 1887085
agagguucugcucaggagu

SEQ ID NO: 2447287 - RNA, 19 nt, Artificial Sequence
  Description of Artificial Sequence: Synthetic oligonucleotide
  Antisense strand to SEQ ID NO: 2447286
acuccugagcagaaccucu

SEQ ID NO: 2447288 - RNA, 19 nt, Artificial Sequence
  Description of Artificial Sequence: Synthetic oligonucleotide
  Sense strand starting at position 2852 of SEQ ID NO: 1887085
gguucugcucaggagucua

SEQ ID NO: 2447289 - RNA, 19 nt, Artificial Sequence
  Description of Artificial Sequence: Synthetic oligonucleotide
  Antisense strand to SEQ ID NO: 2447288
uagacuccugagcagaacc

SEQ ID NO: 2447290 - RNA, 19 nt, Artificial Sequence
  Description of Artificial Sequence: Synthetic oligonucleotide
  Sense strand starting at position 2860 of SEQ ID NO: 1887085
ucaggagucuagcaucaug

SEQ ID NO: 2447291 - RNA, 19 nt, Artificial Sequence
  Description of Artificial Sequence: Synthetic oligonucleotide
  Antisense strand to SEQ ID NO: 2447290
caugaugcuagacuccuga

SEQ ID NO: 2447292 - RNA, 19 nt, Artificial Sequence
  Description of Artificial Sequence: Synthetic oligonucleotide
  Sense strand starting at position 2929 of SEQ ID NO: 1887085
uucccuaauccugggaagu

SEQ ID NO: 2447293 - RNA, 19 nt, Artificial Sequence
  Description of Artificial Sequence: Synthetic oligonucleotide
  Antisense strand to SEQ ID NO: 2447292
acuucccaggauuagggaa

SEQ ID NO: 2447294 - RNA, 19 nt, Artificial Sequence
  Description of Artificial Sequence: Synthetic oligonucleotide
  Sense strand starting at position 2930 of SEQ ID NO: 1887085
ucccuaauccugggaagug

SEQ ID NO: 2447295 - RNA, 19 nt, Artificial Sequence
  Description of Artificial Sequence: Synthetic oligonucleotide
  Antisense strand to SEQ ID NO: 2447294
cacuucccaggauuaggga

SEQ ID NO: 2447296 - RNA, 19 nt, Artificial Sequence
  Description of Artificial Sequence: Synthetic oligonucleotide
  Sense strand starting at position 3184 of SEQ ID NO: 1887085
gaggaaguccuccaacugu

SEQ ID NO: 2447297 - RNA, 19 nt, Artificial Sequence
  Description of Artificial Sequence: Synthetic oligonucleotide
  Antisense strand to SEQ ID NO: 2447296
acaguuggaggacuuccuc

SEQ ID NO: 2447298 - RNA, 19 nt, Artificial Sequence
  Description of Artificial Sequence: Synthetic oligonucleotide
  Sense strand starting at position 3226 of SEQ ID NO: 1887085
agaguucucccaugggcua

SEQ ID NO: 2447299 - RNA, 19 nt, Artificial Sequence
  Description of Artificial Sequence: Synthetic oligonucleotide
  Antisense strand to SEQ ID NO: 2447298
uagcccaugggagaacucu

SEQ ID NO: 2447300 - RNA, 19 nt, Artificial Sequence
  Description of Artificial Sequence: Synthetic oligonucleotide
  Sense strand starting at position 3543 of SEQ ID NO: 1887085
ggguuugcuccggagagac

SEQ ID NO: 2447301 - RNA, 19 nt, Artificial Sequence
  Description of Artificial Sequence: Synthetic oligonucleotide
  Antisense strand to SEQ ID NO: 2447300
gucucuccggagcaaaccc

SEQ ID NO: 2447302 - RNA, 19 nt, Artificial Sequence
  Description of Artificial Sequence: Synthetic oligonucleotide
  Sense strand starting at position 3575 of SEQ ID NO: 1887085
aggugcauaccuuggcaau

SEQ ID NO: 2447303 - RNA, 19 nt, Artificial Sequence
  Description of Artificial Sequence: Synthetic oligonucleotide
  Antisense strand to SEQ ID NO: 2447302
auugccaagguaugcaccu

SEQ ID NO: 2447304 - RNA, 19 nt, Artificial Sequence
  Description of Artificial Sequence: Synthetic oligonucleotide
  Sense strand starting at position 58 of SEQ ID NO: 1887086
uuaauauaugcagggugau

SEQ ID NO: 2447305 - RNA, 19 nt, Artificial Sequence
  Description of Artificial Sequence: Synthetic oligonucleotide
  Antisense strand to SEQ ID NO: 2447304
aucacccugcauauauuaa

SEQ ID NO: 2447306 - RNA, 19 nt, Artificial Sequence
  Description of Artificial Sequence: Synthetic oligonucleotide
  Sense strand starting at position 215 of SEQ ID NO: 1887086
uucccauuacagugaugac

SEQ ID NO: 2447307 - RNA, 19 nt, Artificial Sequence
  Description of Artificial Sequence: Synthetic oligonucleotide
  Antisense strand to SEQ ID NO: 2447306
gucaucacuguaaugggaa

SEQ ID NO: 2447308 - RNA, 19 nt, Artificial Sequence
  Description of Artificial Sequence: Synthetic oligonucleotide
  Sense strand starting at position 224 of SEQ ID NO: 1887086
cagugaugacacuguagga

SEQ ID NO: 2447309 - RNA, 19 nt, Artificial Sequence
  Description of Artificial Sequence: Synthetic oligonucleotide
  Antisense strand to SEQ ID NO: 2447308
uccuacagugucaucacug

SEQ ID NO: 2447310 - RNA, 19 nt, Artificial Sequence
  Description of Artificial Sequence: Synthetic oligonucleotide
  Sense strand starting at position 258 of SEQ ID NO: 1887086
cuggcuugaucaccuugua

SEQ ID NO: 2447311 - RNA, 19 nt, Artificial Sequence
  Description of Artificial Sequence: Synthetic oligonucleotide
  Antisense strand to SEQ ID NO: 2447310
uacaaggugaucaagccag

SEQ ID NO: 2447312 - RNA, 19 nt, Artificial Sequence
  Description of Artificial Sequence: Synthetic oligonucleotide
  Sense strand starting at position 261 of SEQ ID NO: 1887086
gcuugaucaccuuguaacc

SEQ ID NO: 2447313 - RNA, 19 nt, Artificial Sequence
  Description of Artificial Sequence: Synthetic oligonucleotide
  Antisense strand to SEQ ID NO: 2447312
gguuacaaggugaucaagc

SEQ ID NO: 2447314 - RNA, 19 nt, Artificial Sequence
  Description of Artificial Sequence: Synthetic oligonucleotide
  Sense strand starting at position 316 of SEQ ID NO: 1887086
ugaagucuggccuauggaa

SEQ ID NO: 2447315 - RNA, 19 nt, Artificial Sequence
  Description of Artificial Sequence: Synthetic oligonucleotide
  Antisense strand to SEQ ID NO: 2447314
uuccauaggccagacuuca

SEQ ID NO: 2447316 - RNA, 19 nt, Artificial Sequence
  Description of Artificial Sequence: Synthetic oligonucleotide
  Sense strand starting at position 318 of SEQ ID NO: 1887086
aagucuggccuauggaaua

SEQ ID NO: 2447317 - RNA, 19 nt, Artificial Sequence
  Description of Artificial Sequence: Synthetic oligonucleotide
  Antisense strand to SEQ ID NO: 2447316
uauuccauaggccagacuu

SEQ ID NO: 2447318 - RNA, 19 nt, Artificial Sequence
  Description of Artificial Sequence: Synthetic oligonucleotide
  Sense strand starting at position 334 of SEQ ID NO: 1887086
auagaauucucaccagggu

SEQ ID NO: 2447319 - RNA, 19 nt, Artificial Sequence
  Description of Artificial Sequence: Synthetic oligonucleotide
  Antisense strand to SEQ ID NO: 2447318
acccuggugagaauucuau

SEQ ID NO: 2447320 - RNA, 19 nt, Artificial Sequence
  Description of Artificial Sequence: Synthetic oligonucleotide
  Sense strand starting at position 411 of SEQ ID NO: 1887086
ccaccaugcugguuugaga

SEQ ID NO: 2447321 - RNA, 19 nt, Artificial Sequence
  Description of Artificial Sequence: Synthetic oligonucleotide
  Antisense strand to SEQ ID NO: 2447320
ucucaaaccagcauggugg

SEQ ID NO: 2447322 - RNA, 19 nt, Artificial Sequence
  Description of Artificial Sequence: Synthetic oligonucleotide
  Sense strand starting at position 422 of SEQ ID NO: 1887086
guuugagauuccucuugaa

SEQ ID NO: 2447323 - RNA, 19 nt, Artificial Sequence
  Description of Artificial Sequence: Synthetic oligonucleotide
  Antisense strand to SEQ ID NO: 2447322
uucaagaggaaucucaaac

SEQ ID NO: 2447324 - RNA, 19 nt, Artificial Sequence
  Description of Artificial Sequence: Synthetic oligonucleotide
  Sense strand starting at position 490 of SEQ ID NO: 1887086
ucaucuuaccuaggguuaa

SEQ ID NO: 2447325 - RNA, 19 nt, Artificial Sequence
  Description of Artificial Sequence: Synthetic oligonucleotide
  Antisense strand to SEQ ID NO: 2447324
uuaacccuagguaagauga

SEQ ID NO: 2447326 - RNA, 19 nt, Artificial Sequence
  Description of Artificial Sequence: Synthetic oligonucleotide
  Sense strand starting at position 494 of SEQ ID NO: 1887086
cuuaccuaggguuaaguaa

SEQ ID NO: 2447327 - RNA, 19 nt, Artificial Sequence
  Description of Artificial Sequence: Synthetic oligonucleotide
  Antisense strand to SEQ ID NO: 2447326
uuacuuaacccuagguaag

SEQ ID NO: 2447328 - RNA, 19 nt, Artificial Sequence
  Description of Artificial Sequence: Synthetic oligonucleotide
  Sense strand starting at position 653 of SEQ ID NO: 1887086
cuaucuggccuuuauagaa

SEQ ID NO: 2447329 - RNA, 19 nt, Artificial Sequence
  Description of Artificial Sequence: Synthetic oligonucleotide
  Antisense strand to SEQ ID NO: 2447328
uucuauaaaggccagauag

SEQ ID NO: 2447330 - RNA, 19 nt, Artificial Sequence
  Description of Artificial Sequence: Synthetic oligonucleotide
  Sense strand starting at position 1049 of SEQ ID NO: 1887086
cuagauuugucagaccuua

SEQ ID NO: 2447331 - RNA, 19 nt, Artificial Sequence
  Description of Artificial Sequence: Synthetic oligonucleotide
  Antisense strand to SEQ ID NO: 2447330
uaaggucugacaaaucuag

SEQ ID NO: 2447332 - RNA, 19 nt, Artificial Sequence
  Description of Artificial Sequence: Synthetic oligonucleotide
  Sense strand starting at position 1054 of SEQ ID NO: 1887086
uuugucagaccuuaucuua

SEQ ID NO: 2447333 - RNA, 19 nt, Artificial Sequence
  Description of Artificial Sequence: Synthetic oligonucleotide
  Antisense strand to SEQ ID NO: 2447332
uaagauaaggucugacaaa

SEQ ID NO: 2447334 - RNA, 19 nt, Artificial Sequence
  Description of Artificial Sequence: Synthetic oligonucleotide
  Sense strand starting at position 1080 of SEQ ID NO: 1887086
uccuuucucguguauuuac

SEQ ID NO: 2447335 - RNA, 19 nt, Artificial Sequence
  Description of Artificial Sequence: Synthetic oligonucleotide
  Antisense strand to SEQ ID NO: 2447334
guaaauacacgagaaagga

SEQ ID NO: 2447336 - RNA, 19 nt, Artificial Sequence
  Description of Artificial Sequence: Synthetic oligonucleotide
  Sense strand starting at position 1303 of SEQ ID NO: 1887086
ucaggcuuccuaggugaau

SEQ ID NO: 2447337 - RNA, 19 nt, Artificial Sequence
  Description of Artificial Sequence: Synthetic oligonucleotide
  Antisense strand to SEQ ID NO: 2447336
auucaccuaggaagccuga

SEQ ID NO: 2447338 - RNA, 19 nt, Artificial Sequence
  Description of Artificial Sequence: Synthetic oligonucleotide
  Sense strand starting at position 1304 of SEQ ID NO: 1887086
caggcuuccuaggugaaug

SEQ ID NO: 2447339 - RNA, 19 nt, Artificial Sequence
  Description of Artificial Sequence: Synthetic oligonucleotide
  Antisense strand to SEQ ID NO: 2447338
cauucaccuaggaagccug

SEQ ID NO: 2447340 - RNA, 19 nt, Artificial Sequence
  Description of Artificial Sequence: Synthetic oligonucleotide
  Sense strand starting at position 1305 of SEQ ID NO: 1887086
aggcuuccuaggugaaugu

SEQ ID NO: 2447341 - RNA, 19 nt, Artificial Sequence
  Description of Artificial Sequence: Synthetic oligonucleotide
  Antisense strand to SEQ ID NO: 2447340
acauucaccuaggaagccu

SEQ ID NO: 2447342 - RNA, 19 nt, Artificial Sequence
  Description of Artificial Sequence: Synthetic oligonucleotide
  Sense strand starting at position 1314 of SEQ ID NO: 1887086
aggugaauguuucuggcau

SEQ ID NO: 2447343 - RNA, 19 nt, Artificial Sequence
  Description of Artificial Sequence: Synthetic oligonucleotide
  Antisense strand to SEQ ID NO: 2447342
augccagaaacauucaccu

SEQ ID NO: 2447344 - RNA, 19 nt, Artificial Sequence
  Description of Artificial Sequence: Synthetic oligonucleotide
  Sense strand starting at position 1370 of SEQ ID NO: 1887086
uggaacauuuggcaucuga

SEQ ID NO: 2447345 - RNA, 19 nt, Artificial Sequence
  Description of Artificial Sequence: Synthetic oligonucleotide
  Antisense strand to SEQ ID NO: 2447344
ucagaugccaaauguucca

SEQ ID NO: 2447346 - RNA, 19 nt, Artificial Sequence
  Description of Artificial Sequence: Synthetic oligonucleotide
  Sense strand starting at position 1472 of SEQ ID NO: 1887086
aggccugguccugagaaua

SEQ ID NO: 2447347 - RNA, 19 nt, Artificial Sequence
  Description of Artificial Sequence: Synthetic oligonucleotide
  Antisense strand to SEQ ID NO: 2447346
uauucucaggaccaggccu

SEQ ID NO: 2447348 - RNA, 19 nt, Artificial Sequence
  Description of Artificial Sequence: Synthetic oligonucleotide
  Sense strand starting at position 1699 of SEQ ID NO: 1887086
gaaggagauccuuguugcu

SEQ ID NO: 2447349 - RNA, 19 nt, Artificial Sequence
  Description of Artificial Sequence: Synthetic oligonucleotide
  Antisense strand to SEQ ID NO: 2447348
agcaacaaggaucuccuuc

SEQ ID NO: 2447350 - RNA, 19 nt, Artificial Sequence
  Description of Artificial Sequence: Synthetic oligonucleotide
  Sense strand starting at position 1772 of SEQ ID NO: 1887086
gugugacaggcucagugaa

SEQ ID NO: 2447351 - RNA, 19 nt, Artificial Sequence
  Description of Artificial Sequence: Synthetic oligonucleotide
  Antisense strand to SEQ ID NO: 2447350
uucacugagccugucacac

SEQ ID NO: 2447352 - RNA, 19 nt, Artificial Sequence
  Description of Artificial Sequence: Synthetic oligonucleotide
  Sense strand starting at position 1815 of SEQ ID NO: 1887086
cuguaauucccagggucua

SEQ ID NO: 2447353 - RNA, 19 nt, Artificial Sequence
  Description of Artificial Sequence: Synthetic oligonucleotide
  Antisense strand to SEQ ID NO: 2447352
uagacccugggaauuacag

SEQ ID NO: 2447354 - RNA, 19 nt, Artificial Sequence
  Description of Artificial Sequence: Synthetic oligonucleotide
  Sense strand starting at position 1816 of SEQ ID NO: 1887086
uguaauucccagggucuaa

SEQ ID NO: 2447355 - RNA, 19 nt, Artificial Sequence
  Description of Artificial Sequence: Synthetic oligonucleotide
  Antisense strand to SEQ ID NO: 2447354
uuagacccugggaauuaca

SEQ ID NO: 2447356 - RNA, 19 nt, Artificial Sequence
  Description of Artificial Sequence: Synthetic oligonucleotide
  Sense strand starting at position 2193 of SEQ ID NO: 1887086
gaguuuauggacugauuag

SEQ ID NO: 2447357 - RNA, 19 nt, Artificial Sequence
  Description of Artificial Sequence: Synthetic oligonucleotide
  Antisense strand to SEQ ID NO: 2447356
cuaaucaguccauaaacuc

SEQ ID NO: 2447358 - RNA, 19 nt, Artificial Sequence
  Description of Artificial Sequence: Synthetic oligonucleotide
  Sense strand starting at position 2361 of SEQ ID NO: 1887086
cagagauaauacucugggu

SEQ ID NO: 2447359 - RNA, 19 nt, Artificial Sequence
  Description of Artificial Sequence: Synthetic oligonucleotide
  Antisense strand to SEQ ID NO: 2447358
acccagaguauuaucucug

SEQ ID NO: 2447360 - RNA, 19 nt, Artificial Sequence
  Description of Artificial Sequence: Synthetic oligonucleotide
  Sense strand starting at position 2363 of SEQ ID NO: 1887086
gagauaauacucuggguca

SEQ ID NO: 2447361 - RNA, 19 nt, Artificial Sequence
  Description of Artificial Sequence: Synthetic oligonucleotide
  Antisense strand to SEQ ID NO: 2447360
ugacccagaguauuaucuc

SEQ ID NO: 2447362 - RNA, 19 nt, Artificial Sequence
  Description of Artificial Sequence: Synthetic oligonucleotide
  Sense strand starting at position 2410 of SEQ ID NO: 1887086
ugcugagugcuuuggaaac

SEQ ID NO: 2447363 - RNA, 19 nt, Artificial Sequence
  Description of Artificial Sequence: Synthetic oligonucleotide
  Antisense strand to SEQ ID NO: 2447362
guuuccaaagcacucagca

SEQ ID NO: 2447364 - RNA, 19 nt, Artificial Sequence
  Description of Artificial Sequence: Synthetic oligonucleotide
  Sense strand starting at position 2426 of SEQ ID NO: 1887086
aacaaagguuaucagagau

SEQ ID NO: 2447365 - RNA, 19 nt, Artificial Sequence
  Description of Artificial Sequence: Synthetic oligonucleotide
  Antisense strand to SEQ ID NO: 2447364
aucucugauaaccuuuguu

SEQ ID NO: 2447366 - RNA, 19 nt, Artificial Sequence
  Description of Artificial Sequence: Synthetic oligonucleotide
  Sense strand starting at position 2693 of SEQ ID NO: 1887086
ccauuuacauucuagagag

SEQ ID NO: 2447367 - RNA, 19 nt, Artificial Sequence
  Description of Artificial Sequence: Synthetic oligonucleotide
  Antisense strand to SEQ ID NO: 2447366
cucucuagaauguaaaugg

SEQ ID NO: 2447368 - RNA, 19 nt, Artificial Sequence
  Description of Artificial Sequence: Synthetic oligonucleotide
  Sense strand starting at position 2738 of SEQ ID NO: 1887086
cccagaaagcuguggugga

SEQ ID NO: 2447369 - RNA, 19 nt, Artificial Sequence
  Description of Artificial Sequence: Synthetic oligonucleotide
  Antisense strand to SEQ ID NO: 2447368
uccaccacagcuuucuggg

SEQ ID NO: 2447370 - RNA, 19 nt, Artificial Sequence
  Description of Artificial Sequence: Synthetic oligonucleotide
  Sense strand starting at position 3508 of SEQ ID NO: 1887086
augaauaagccaggugguu

SEQ ID NO: 2447371 - RNA, 19 nt, Artificial Sequence
  Description of Artificial Sequence: Synthetic oligonucleotide
  Antisense strand to SEQ ID NO: 2447370
aaccaccuggcuuauucau

SEQ ID NO: 2447372 - RNA, 19 nt, Artificial Sequence
  Description of Artificial Sequence: Synthetic oligonucleotide
  Sense strand starting at position 3533 of SEQ ID NO: 1887086
ggaguuauaccacgagcug

SEQ ID NO: 2447373 - RNA, 19 nt, Artificial Sequence
  Description of Artificial Sequence: Synthetic oligonucleotide
  Antisense strand to SEQ ID NO: 2447372
cagcucgugguauaacucc

SEQ ID NO: 2447374 - RNA, 19 nt, Artificial Sequence
  Description of Artificial Sequence: Synthetic oligonucleotide
  Sense strand starting at position 3556 of SEQ ID NO: 1887086
guuauauggccucauauca

SEQ ID NO: 2447375 - RNA, 19 nt, Artificial Sequence
  Description of Artificial Sequence: Synthetic oligonucleotide
  Antisense strand to SEQ ID NO: 2447374
ugauaugaggccauauaac

SEQ ID NO: 2447376 - RNA, 19 nt, Artificial Sequence
  Description of Artificial Sequence: Synthetic oligonucleotide
  Sense strand starting at position 3648 of SEQ ID NO: 1887086
ugcacucauuuggauaaau

SEQ ID NO: 2447377 - RNA, 19 nt, Artificial Sequence
  Description of Artificial Sequence: Synthetic oligonucleotide
  Antisense strand to SEQ ID NO: 2447376
auuuauccaaaugagugca

SEQ ID NO: 2447378 - RNA, 19 nt, Artificial Sequence
  Description of Artificial Sequence: Synthetic oligonucleotide
  Sense strand starting at position 3691 of SEQ ID NO: 1887086
ugaacagucuugcccaaga

SEQ ID NO: 2447379 - RNA, 19 nt, Artificial Sequence
  Description of Artificial Sequence: Synthetic oligonucleotide
  Antisense strand to SEQ ID NO: 2447378
ucuugggcaagacuguuca

SEQ ID NO: 2447380 - RNA, 19 nt, Artificial Sequence
  Description of Artificial Sequence: Synthetic oligonucleotide
  Sense strand starting at position 3727 of SEQ ID NO: 1887086
gucaaucuuccagaugcca

SEQ ID NO: 2447381 - RNA, 19 nt, Artificial Sequence
  Description of Artificial Sequence: Synthetic oligonucleotide
  Antisense strand to SEQ ID NO: 2447380
uggcaucuggaagauugac

SEQ ID NO: 2447382 - RNA, 19 nt, Artificial Sequence
  Description of Artificial Sequence: Synthetic oligonucleotide
  Sense strand starting at position 3944 of SEQ ID NO: 1887086
uugagaaucuuguuaggaa

SEQ ID NO: 2447383 - RNA, 19 nt, Artificial Sequence
  Description of Artificial Sequence: Synthetic oligonucleotide
  Antisense strand to SEQ ID NO: 2447382
uuccuaacaagauucucaa

SEQ ID NO: 2447384 - RNA, 19 nt, Artificial Sequence
  Description of Artificial Sequence: Synthetic oligonucleotide
  Sense strand starting at position 32 of SEQ ID NO: 1887087
auaggaggauucccuggua

SEQ ID NO: 2447385 - RNA, 19 nt, Artificial Sequence
  Description of Artificial Sequence: Synthetic oligonucleotide
  Antisense strand to SEQ ID NO: 2447384
uaccagggaauccuccuau

SEQ ID NO: 2447386 - RNA, 19 nt, Artificial Sequence
  Description of Artificial Sequence: Synthetic oligonucleotide
  Sense strand starting at position 35 of SEQ ID NO: 1887087
ggaggauucccugguaucu

SEQ ID NO: 2447387 - RNA, 19 nt, Artificial Sequence
  Description of Artificial Sequence: Synthetic oligonucleotide
  Antisense strand to SEQ ID NO: 2447386
agauaccagggaauccucc

SEQ ID NO: 2447388 - RNA, 19 nt, Artificial Sequence
  Description of Artificial Sequence: Synthetic oligonucleotide
  Sense strand starting at position 206 of SEQ ID NO: 1887087
ccuggaaucuaguccauag

SEQ ID NO: 2447389 - RNA, 19 nt, Artificial Sequence
  Description of Artificial Sequence: Synthetic oligonucleotide
  Antisense strand to SEQ ID NO: 2447388
cuauggacuagauuccagg

SEQ ID NO: 2447390 - RNA, 19 nt, Artificial Sequence
  Description of Artificial Sequence: Synthetic oligonucleotide
  Sense strand starting at position 361 of SEQ ID NO: 1887087
gugucuccuccuuugugua

SEQ ID NO: 2447391 - RNA, 19 nt, Artificial Sequence
  Description of Artificial Sequence: Synthetic oligonucleotide
  Antisense strand to SEQ ID NO: 2447390
uacacaaaggaggagacac

SEQ ID NO: 2447392 - RNA, 19 nt, Artificial Sequence
  Description of Artificial Sequence: Synthetic oligonucleotide
  Sense strand starting at position 366 of SEQ ID NO: 1887087
uccuccuuuguguauugaa

SEQ ID NO: 2447393 - RNA, 19 nt, Artificial Sequence
  Description of Artificial Sequence: Synthetic oligonucleotide
  Antisense strand to SEQ ID NO: 2447392
uucaauacacaaaggagga

SEQ ID NO: 2447394 - RNA, 19 nt, Artificial Sequence
  Description of Artificial Sequence: Synthetic oligonucleotide
  Sense strand starting at position 662 of SEQ ID NO: 1887087
ugcaguuuagagcacaaca

SEQ ID NO: 2447395 - RNA, 19 nt, Artificial Sequence
  Description of Artificial Sequence: Synthetic oligonucleotide
  Antisense strand to SEQ ID NO: 2447394
uguugugcucuaaacugca

SEQ ID NO: 2447396 - RNA, 19 nt, Artificial Sequence
  Description of Artificial Sequence: Synthetic oligonucleotide
  Sense strand starting at position 728 of SEQ ID NO: 1887087
ccuuaaugugaagacguuu

SEQ ID NO: 2447397 - RNA, 19 nt, Artificial Sequence
  Description of Artificial Sequence: Synthetic oligonucleotide
  Antisense strand to SEQ ID NO: 2447396
aaacgucuucacauuaagg

SEQ ID NO: 2447398 - RNA, 19 nt, Artificial Sequence
  Description of Artificial Sequence: Synthetic oligonucleotide
  Sense strand starting at position 806 of SEQ ID NO: 1887087
cccaaaucucuuggugaca

SEQ ID NO: 2447399 - RNA, 19 nt, Artificial Sequence
  Description of Artificial Sequence: Synthetic oligonucleotide
  Antisense strand to SEQ ID NO: 2447398
ugucaccaagagauuuggg

SEQ ID NO: 2447400 - RNA, 19 nt, Artificial Sequence
  Description of Artificial Sequence: Synthetic oligonucleotide
  Sense strand starting at position 901 of SEQ ID NO: 1887087
uguauuagcacagaggguu

SEQ ID NO: 2447401 - RNA, 19 nt, Artificial Sequence
  Description of Artificial Sequence: Synthetic oligonucleotide
  Antisense strand to SEQ ID NO: 2447400
aacccucugugcuaauaca

SEQ ID NO: 2447402 - RNA, 19 nt, Artificial Sequence
  Description of Artificial Sequence: Synthetic oligonucleotide
  Sense strand starting at position 1192 of SEQ ID NO: 1887087
ugacuaugauguguaauca

SEQ ID NO: 2447403 - RNA, 19 nt, Artificial Sequence
  Description of Artificial Sequence: Synthetic oligonucleotide
  Antisense strand to SEQ ID NO: 2447402
ugauuacacaucauaguca

SEQ ID NO: 2447404 - RNA, 19 nt, Artificial Sequence
  Description of Artificial Sequence: Synthetic oligonucleotide
  Sense strand starting at position 1200 of SEQ ID NO: 1887087
auguguaaucaguaugaua

SEQ ID NO: 2447405 - RNA, 19 nt, Artificial Sequence
  Description of Artificial Sequence: Synthetic oligonucleotide
  Antisense strand to SEQ ID NO: 2447404
uaucauacugauuacacau

SEQ ID NO: 2447406 - RNA, 19 nt, Artificial Sequence
  Description of Artificial Sequence: Synthetic oligonucleotide
  Sense strand starting at position 1202 of SEQ ID NO: 1887087
guguaaucaguaugauaau

SEQ ID NO: 2447407 - RNA, 19 nt, Artificial Sequence
  Description of Artificial Sequence: Synthetic oligonucleotide
  Antisense strand to SEQ ID NO: 2447406
auuaucauacugauuacac

SEQ ID NO: 2447408 - RNA, 19 nt, Artificial Sequence
  Description of Artificial Sequence: Synthetic oligonucleotide
  Sense strand starting at position 1232 of SEQ ID NO: 1887087
uguggaggagaaugucauu

SEQ ID NO: 2447409 - RNA, 19 nt, Artificial Sequence
  Description of Artificial Sequence: Synthetic oligonucleotide
  Antisense strand to SEQ ID NO: 2447408
aaugacauucuccuccaca

SEQ ID NO: 2447410 - RNA, 19 nt, Artificial Sequence
  Description of Artificial Sequence: Synthetic oligonucleotide
  Sense strand starting at position 1237 of SEQ ID NO: 1887087
aggagaaugucauucucag

SEQ ID NO: 2447411 - RNA, 19 nt, Artificial Sequence
  Description of Artificial Sequence: Synthetic oligonucleotide
  Antisense strand to SEQ ID NO: 2447410
cugagaaugacauucuccu

SEQ ID NO: 2447412 - RNA, 19 nt, Artificial Sequence
  Description of Artificial Sequence: Synthetic oligonucleotide
  Sense strand starting at position 1340 of SEQ ID NO: 1887087
gagaauauuccagagcagc

SEQ ID NO: 2447413 - RNA, 19 nt, Artificial Sequence
  Description of Artificial Sequence: Synthetic oligonucleotide
  Antisense strand to SEQ ID NO: 2447412
gcugcucuggaauauucuc

SEQ ID NO: 2447414 - RNA, 19 nt, Artificial Sequence
  Description of Artificial Sequence: Synthetic oligonucleotide
  Sense strand starting at position 1587 of SEQ ID NO: 1887087
caguuaggucuagggacuu

SEQ ID NO: 2447415 - RNA, 19 nt, Artificial Sequence
  Description of Artificial Sequence: Synthetic oligonucleotide
  Antisense strand to SEQ ID NO: 2447414
aagucccuagaccuaacug

SEQ ID NO: 2447416 - RNA, 19 nt, Artificial Sequence
  Description of Artificial Sequence: Synthetic oligonucleotide
  Sense strand starting at position 1690 of SEQ ID NO: 1887087
gccacugaccagugaagaa

SEQ ID NO: 2447417 - RNA, 19 nt, Artificial Sequence
  Description of Artificial Sequence: Synthetic oligonucleotide
  Antisense strand to SEQ ID NO: 2447416
uucuucacuggucaguggc

SEQ ID NO: 2447418 - RNA, 19 nt, Artificial Sequence
  Description of Artificial Sequence: Synthetic oligonucleotide
  Sense strand starting at position 1732 of SEQ ID NO: 1887087
gggacaguguggucaagga

SEQ ID NO: 2447419 - RNA, 19 nt, Artificial Sequence
  Description of Artificial Sequence: Synthetic oligonucleotide
  Antisense strand to SEQ ID NO: 2447418
uccuugaccacacuguccc

SEQ ID NO: 2447420 - RNA, 19 nt, Artificial Sequence
  Description of Artificial Sequence: Synthetic oligonucleotide
  Sense strand starting at position 1830 of SEQ ID NO: 1887087
agaacugaucgaugggagu

SEQ ID NO: 2447421 - RNA, 19 nt, Artificial Sequence
  Description of Artificial Sequence: Synthetic oligonucleotide
  Antisense strand to SEQ ID NO: 2447420
acucccaucgaucaguucu

SEQ ID NO: 2447422 - RNA, 19 nt, Artificial Sequence
  Description of Artificial Sequence: Synthetic oligonucleotide
  Sense strand starting at position 1832 of SEQ ID NO: 1887087
aacugaucgaugggaguca

SEQ ID NO: 2447423 - RNA, 19 nt, Artificial Sequence
  Description of Artificial Sequence: Synthetic oligonucleotide
  Antisense strand to SEQ ID NO: 2447422
ugacucccaucgaucaguu

SEQ ID NO: 2447424 - RNA, 19 nt, Artificial Sequence
  Description of Artificial Sequence: Synthetic oligonucleotide
  Sense strand starting at position 2172 of SEQ ID NO: 1887087
uaugcuauacucugggaga

SEQ ID NO: 2447425 - RNA, 19 nt, Artificial Sequence
  Description of Artificial Sequence: Synthetic oligonucleotide
  Antisense strand to SEQ ID NO: 2447424
ucucccagaguauagcaua

SEQ ID NO: 2447426 - RNA, 19 nt, Artificial Sequence
  Description of Artificial Sequence: Synthetic oligonucleotide
  Sense strand starting at position 2541 of SEQ ID NO: 1887087
cuaacagguuuacugagau

SEQ ID NO: 2447427 - RNA, 19 nt, Artificial Sequence
  Description of Artificial Sequence: Synthetic oligonucleotide
  Antisense strand to SEQ ID NO: 2447426
aucucaguaaaccuguuag

SEQ ID NO: 2447428 - RNA, 19 nt, Artificial Sequence
  Description of Artificial Sequence: Synthetic oligonucleotide
  Sense strand starting at position 2620 of SEQ ID NO: 1887087
uacagaguugugcaauauc

SEQ ID NO: 2447429 - RNA, 19 nt, Artificial Sequence
  Description of Artificial Sequence: Synthetic oligonucleotide
  Antisense strand to SEQ ID NO: 2447428
gauauugcacaacucugua

SEQ ID NO: 2447430 - RNA, 19 nt, Artificial Sequence
  Description of Artificial Sequence: Synthetic oligonucleotide
  Sense strand starting at position 2623 of SEQ ID NO: 1887087
agaguugugcaauaucacu

SEQ ID NO: 2447431 - RNA, 19 nt, Artificial Sequence
  Description of Artificial Sequence: Synthetic oligonucleotide
  Antisense strand to SEQ ID NO: 2447430
agugauauugcacaacucu

SEQ ID NO: 2447432 - RNA, 19 nt, Artificial Sequence
  Description of Artificial Sequence: Synthetic oligonucleotide
  Sense strand starting at position 2786 of SEQ ID NO: 1887087
aacacacuucugggugauu

SEQ ID NO: 2447433 - RNA, 19 nt, Artificial Sequence
  Description of Artificial Sequence: Synthetic oligonucleotide
  Antisense strand to SEQ ID NO: 2447432
aaucacccagaaguguguu

SEQ ID NO: 2447434 - RNA, 19 nt, Artificial Sequence
  Description of Artificial Sequence: Synthetic oligonucleotide
  Sense strand starting at position 2788 of SEQ ID NO: 1887087
cacacuucugggugauucu

SEQ ID NO: 2447435 - RNA, 19 nt, Artificial Sequence
  Description of Artificial Sequence: Synthetic oligonucleotide
  Antisense strand to SEQ ID NO: 2447434
agaaucacccagaagugug

SEQ ID NO: 2447436 - RNA, 19 nt, Artificial Sequence
  Description of Artificial Sequence: Synthetic oligonucleotide
  Sense strand starting at position 2845 of SEQ ID NO: 1887087
ggaccagacuguuccaaga

SEQ ID NO: 2447437 - RNA, 19 nt, Artificial Sequence
  Description of Artificial Sequence: Synthetic oligonucleotide
  Antisense strand to SEQ ID NO: 2447436
ucuuggaacagucuggucc

SEQ ID NO: 2447438 - RNA, 19 nt, Artificial Sequence
  Description of Artificial Sequence: Synthetic oligonucleotide
  Sense strand starting at position 2897 of SEQ ID NO: 1887087
aaugaauaccgacgaagua

SEQ ID NO: 2447439 - RNA, 19 nt, Artificial Sequence
  Description of Artificial Sequence: Synthetic oligonucleotide
  Antisense strand to SEQ ID NO: 2447438
uacuucgucgguauucauu

SEQ ID NO: 2447440 - RNA, 19 nt, Artificial Sequence
  Description of Artificial Sequence: Synthetic oligonucleotide
  Sense strand starting at position 2976 of SEQ ID NO: 1887087
accuacagucagugggaaa

SEQ ID NO: 2447441 - RNA, 19 nt, Artificial Sequence
  Description of Artificial Sequence: Synthetic oligonucleotide
  Antisense strand to SEQ ID NO: 2447440
uuucccacugacuguaggu

SEQ ID NO: 2447442 - RNA, 19 nt, Artificial Sequence
  Description of Artificial Sequence: Synthetic oligonucleotide
  Sense strand starting at position 3082 of SEQ ID NO: 1887087
ggugauuaauuugcagcca

SEQ ID NO: 2447443 - RNA, 19 nt, Artificial Sequence
  Description of Artificial Sequence: Synthetic oligonucleotide
  Antisense strand to SEQ ID NO: 2447442
uggcugcaaauuaaucacc

SEQ ID NO: 2447444 - RNA, 19 nt, Artificial Sequence
  Description of Artificial Sequence: Synthetic oligonucleotide
  Sense strand starting at position 3118 of SEQ ID NO: 1887087
aagggaaugcuguguuaac

SEQ ID NO: 2447445 - RNA, 19 nt, Artificial Sequence
  Description of Artificial Sequence: Synthetic oligonucleotide
  Antisense strand to SEQ ID NO: 2447444
guuaacacagcauucccuu

SEQ ID NO: 2447446 - RNA, 19 nt, Artificial Sequence
  Description of Artificial Sequence: Synthetic oligonucleotide
  Sense strand starting at position 3152 of SEQ ID NO: 1887087
ucauguacugcucaucaca

SEQ ID NO: 2447447 - RNA, 19 nt, Artificial Sequence
  Description of Artificial Sequence: Synthetic oligonucleotide
  Antisense strand to SEQ ID NO: 2447446
ugugaugagcaguacauga

SEQ ID NO: 2447448 - RNA, 19 nt, Artificial Sequence
  Description of Artificial Sequence: Synthetic oligonucleotide
  Sense strand starting at position 3168 of SEQ ID NO: 1887087
acaauucugugagcuggau

SEQ ID NO: 2447449 - RNA, 19 nt, Artificial Sequence
  Description of Artificial Sequence: Synthetic oligonucleotide
  Antisense strand to SEQ ID NO: 2447448
auccagcucacagaauugu

SEQ ID NO: 2447450 - RNA, 19 nt, Artificial Sequence
  Description of Artificial Sequence: Synthetic oligonucleotide
  Sense strand starting at position 3172 of SEQ ID NO: 1887087
uucugugagcuggauauua

SEQ ID NO: 2447451 - RNA, 19 nt, Artificial Sequence
  Description of Artificial Sequence: Synthetic oligonucleotide
  Antisense strand to SEQ ID NO: 2447450
uaauauccagcucacagaa

SEQ ID NO: 2447452 - RNA, 19 nt, Artificial Sequence
  Description of Artificial Sequence: Synthetic oligonucleotide
  Sense strand starting at position 3174 of SEQ ID NO: 1887087
cugugagcuggauauuaau

SEQ ID NO: 2447453 - RNA, 19 nt, Artificial Sequence
  Description of Artificial Sequence: Synthetic oligonucleotide
  Antisense strand to SEQ ID NO: 2447452
auuaauauccagcucacag

SEQ ID NO: 2447454 - RNA, 19 nt, Artificial Sequence
  Description of Artificial Sequence: Synthetic oligonucleotide
  Sense strand starting at position 3569 of SEQ ID NO: 1887087
cacguaucucuugaaggaa

SEQ ID NO: 2447455 - RNA, 19 nt, Artificial Sequence
  Description of Artificial Sequence: Synthetic oligonucleotide
  Antisense strand to SEQ ID NO: 2447454
uuccuucaagagauacgug

SEQ ID NO: 2447456 - RNA, 19 nt, Artificial Sequence
  Description of Artificial Sequence: Synthetic oligonucleotide
  Sense strand starting at position 3648 of SEQ ID NO: 1887087
uggaguuuauauuccagua

SEQ ID NO: 2447457 - RNA, 19 nt, Artificial Sequence
  Description of Artificial Sequence: Synthetic oligonucleotide
  Antisense strand to SEQ ID NO: 2447456
uacuggaauauaaacucca

SEQ ID NO: 2447458 - RNA, 19 nt, Artificial Sequence
  Description of Artificial Sequence: Synthetic oligonucleotide
  Sense strand starting at position 3681 of SEQ ID NO: 1887087
guuccaucccagcaagaca

SEQ ID NO: 2447459 - RNA, 19 nt, Artificial Sequence
  Description of Artificial Sequence: Synthetic oligonucleotide
  Antisense strand to SEQ ID NO: 2447458
ugucuugcugggauggaac

SEQ ID NO: 2447460 - RNA, 19 nt, Artificial Sequence
  Description of Artificial Sequence: Synthetic oligonucleotide
  Sense strand starting at position 3769 of SEQ ID NO: 1887087
cccauaggugaugguauua

SEQ ID NO: 2447461 - RNA, 19 nt, Artificial Sequence
  Description of Artificial Sequence: Synthetic oligonucleotide
  Antisense strand to SEQ ID NO: 2447460
uaauaccaucaccuauggg

SEQ ID NO: 2447462 - RNA, 19 nt, Artificial Sequence
  Description of Artificial Sequence: Synthetic oligonucleotide
  Sense strand starting at position 3812 of SEQ ID NO: 1887087
aguggaucaccaugugaga

SEQ ID NO: 2447463 - RNA, 19 nt, Artificial Sequence
  Description of Artificial Sequence: Synthetic oligonucleotide
  Antisense strand to SEQ ID NO: 2447462
ucucacauggugauccacu

SEQ ID NO: 2447464 - RNA, 19 nt, Artificial Sequence
  Description of Artificial Sequence: Synthetic oligonucleotide
  Sense strand starting at position 38 of SEQ ID NO: 1887088
agagucaucguguagagga

SEQ ID NO: 2447465 - RNA, 19 nt, Artificial Sequence
  Description of Artificial Sequence: Synthetic oligonucleotide
  Antisense strand to SEQ ID NO: 2447464
uccucuacacgaugacucu

SEQ ID NO: 2447466 - RNA, 19 nt, Artificial Sequence
  Description of Artificial Sequence: Synthetic oligonucleotide
  Sense strand starting at position 153 of SEQ ID NO: 1887088
gcacaucaggcaugaauga

SEQ ID NO: 2447467 - RNA, 19 nt, Artificial Sequence
  Description of Artificial Sequence: Synthetic oligonucleotide
  Antisense strand to SEQ ID NO: 2447466
ucauucaugccugaugugc

SEQ ID NO: 2447468 - RNA, 19 nt, Artificial Sequence
  Description of Artificial Sequence: Synthetic oligonucleotide
  Sense strand starting at position 204 of SEQ ID NO: 1887088
caguguuggguuuaacaag

SEQ ID NO: 2447469 - RNA, 19 nt, Artificial Sequence
  Description of Artificial Sequence: Synthetic oligonucleotide
  Antisense strand to SEQ ID NO: 2447468
cuuguuaaacccaacacug

SEQ ID NO: 2447470 - RNA, 19 nt, Artificial Sequence
  Description of Artificial Sequence: Synthetic oligonucleotide
  Sense strand starting at position 210 of SEQ ID NO: 1887088
uggguuuaacaagguaauu

SEQ ID NO: 2447471 - RNA, 19 nt, Artificial Sequence
  Description of Artificial Sequence: Synthetic oligonucleotide
  Antisense strand to SEQ ID NO: 2447470
aauuaccuuguuaaaccca

SEQ ID NO: 2447472 - RNA, 19 nt, Artificial Sequence
  Description of Artificial Sequence: Synthetic oligonucleotide
  Sense strand starting at position 715 of SEQ ID NO: 1887088
gaauacccuucgguauaga

SEQ ID NO: 2447473 - RNA, 19 nt, Artificial Sequence
  Description of Artificial Sequence: Synthetic oligonucleotide
  Antisense strand to SEQ ID NO: 2447472
ucuauaccgaaggguauuc

SEQ ID NO: 2447474 - RNA, 19 nt, Artificial Sequence
  Description of Artificial Sequence: Synthetic oligonucleotide
  Sense strand starting at position 811 of SEQ ID NO: 1887088
gaccucucugauggucaaa

SEQ ID NO: 2447475 - RNA, 19 nt, Artificial Sequence
  Description of Artificial Sequence: Synthetic oligonucleotide
  Antisense strand to SEQ ID NO: 2447474
uuugaccaucagagagguc

SEQ ID NO: 2447476 - RNA, 19 nt, Artificial Sequence
  Description of Artificial Sequence: Synthetic oligonucleotide
  Sense strand starting at position 933 of SEQ ID NO: 1887088
aacguagagucaucuagaa

SEQ ID NO: 2447477 - RNA, 19 nt, Artificial Sequence
  Description of Artificial Sequence: Synthetic oligonucleotide
  Antisense strand to SEQ ID NO: 2447476
uucuagaugacucuacguu

SEQ ID NO: 2447478 - RNA, 19 nt, Artificial Sequence
  Description of Artificial Sequence: Synthetic oligonucleotide
  Sense strand starting at position 935 of SEQ ID NO: 1887088
cguagagucaucuagaauc

SEQ ID NO: 2447479 - RNA, 19 nt, Artificial Sequence
  Description of Artificial Sequence: Synthetic oligonucleotide
  Antisense strand to SEQ ID NO: 2447478
gauucuagaugacucuacg

SEQ ID NO: 2447480 - RNA, 19 nt, Artificial Sequence
  Description of Artificial Sequence: Synthetic oligonucleotide
  Sense strand starting at position 1106 of SEQ ID NO: 1887088
uuacgugagcuguuuguau

SEQ ID NO: 2447481 - RNA, 19 nt, Artificial Sequence
  Description of Artificial Sequence: Synthetic oligonucleotide
  Antisense strand to SEQ ID NO: 2447480
auacaaacagcucacguaa

SEQ ID NO: 2447482 - RNA, 19 nt, Artificial Sequence
  Description of Artificial Sequence: Synthetic oligonucleotide
  Sense strand starting at position 1330 of SEQ ID NO: 1887088
uguccuucucaguaccaca

SEQ ID NO: 2447483 - RNA, 19 nt, Artificial Sequence
  Description of Artificial Sequence: Synthetic oligonucleotide
  Antisense strand to SEQ ID NO: 2447482
ugugguacugagaaggaca

SEQ ID NO: 2447484 - RNA, 19 nt, Artificial Sequence
  Description of Artificial Sequence: Synthetic oligonucleotide
  Sense strand starting at position 1547 of SEQ ID NO: 1887088
agcucauuccuccagugau

SEQ ID NO: 2447485 - RNA, 19 nt, Artificial Sequence
  Description of Artificial Sequence: Synthetic oligonucleotide
  Antisense strand to SEQ ID NO: 2447484
aucacuggaggaaugagcu

SEQ ID NO: 2447486 - RNA, 19 nt, Artificial Sequence
  Description of Artificial Sequence: Synthetic oligonucleotide
  Sense strand starting at position 1550 of SEQ ID NO: 1887088
ucauuccuccagugaugac

SEQ ID NO: 2447487 - RNA, 19 nt, Artificial Sequence
  Description of Artificial Sequence: Synthetic oligonucleotide
  Antisense strand to SEQ ID NO: 2447486
gucaucacuggaggaauga

SEQ ID NO: 2447488 - RNA, 19 nt, Artificial Sequence
  Description of Artificial Sequence: Synthetic oligonucleotide
  Sense strand starting at position 1564 of SEQ ID NO: 1887088
augacuuuccauuggauca

SEQ ID NO: 2447489 - RNA, 19 nt, Artificial Sequence
  Description of Artificial Sequence: Synthetic oligonucleotide
  Antisense strand to SEQ ID NO: 2447488
ugauccaauggaaagucau

SEQ ID NO: 2447490 - RNA, 19 nt, Artificial Sequence
  Description of Artificial Sequence: Synthetic oligonucleotide
  Sense strand starting at position 1608 of SEQ ID NO: 1887088
uuccacuacccauagugau

SEQ ID NO: 2447491 - RNA, 19 nt, Artificial Sequence
  Description of Artificial Sequence: Synthetic oligonucleotide
  Antisense strand to SEQ ID NO: 2447490
aucacuauggguaguggaa

SEQ ID NO: 2447492 - RNA, 19 nt, Artificial Sequence
  Description of Artificial Sequence: Synthetic oligonucleotide
  Sense strand starting at position 1750 of SEQ ID NO: 1887088
gcucaauagaguugaagaa

SEQ ID NO: 2447493 - RNA, 19 nt, Artificial Sequence
  Description of Artificial Sequence: Synthetic oligonucleotide
  Antisense strand to SEQ ID NO: 2447492
uucuucaacucuauugagc

SEQ ID NO: 2447494 - RNA, 19 nt, Artificial Sequence
  Description of Artificial Sequence: Synthetic oligonucleotide
  Sense strand starting at position 1808 of SEQ ID NO: 1887088
agaggcucucuugaaggua

SEQ ID NO: 2447495 - RNA, 19 nt, Artificial Sequence
  Description of Artificial Sequence: Synthetic oligonucleotide
  Antisense strand to SEQ ID NO: 2447494
uaccuucaagagagccucu

SEQ ID NO: 2447496 - RNA, 19 nt, Artificial Sequence
  Description of Artificial Sequence: Synthetic oligonucleotide
  Sense strand starting at position 1811 of SEQ ID NO: 1887088
ggcucucuugaagguaaua

SEQ ID NO: 2447497 - RNA, 19 nt, Artificial Sequence
  Description of Artificial Sequence: Synthetic oligonucleotide
  Antisense strand to SEQ ID NO: 2447496
uauuaccuucaagagagcc

SEQ ID NO: 2447498 - RNA, 19 nt, Artificial Sequence
  Description of Artificial Sequence: Synthetic oligonucleotide
  Sense strand starting at position 1836 of SEQ ID NO: 1887088
ccaucagugguaggaugaa

SEQ ID NO: 2447499 - RNA, 19 nt, Artificial Sequence
  Description of Artificial Sequence: Synthetic oligonucleotide
  Antisense strand to SEQ ID NO: 2447498
uucauccuaccacugaugg

SEQ ID NO: 2447500 - RNA, 19 nt, Artificial Sequence
  Description of Artificial Sequence: Synthetic oligonucleotide
  Sense strand starting at position 1852 of SEQ ID NO: 1887088
gaacaugugguaggcauau

SEQ ID NO: 2447501 - RNA, 19 nt, Artificial Sequence
  Description of Artificial Sequence: Synthetic oligonucleotide
  Antisense strand to SEQ ID NO: 2447500
auaugccuaccacauguuc

SEQ ID NO: 2447502 - RNA, 19 nt, Artificial Sequence
  Description of Artificial Sequence: Synthetic oligonucleotide
  Sense strand starting at position 1880 of SEQ ID NO: 1887088
gucuguggcucgaugggau

SEQ ID NO: 2447503 - RNA, 19 nt, Artificial Sequence
  Description of Artificial Sequence: Synthetic oligonucleotide
  Antisense strand to SEQ ID NO: 2447502
aucccaucgagccacagac

SEQ ID NO: 2447504 - RNA, 19 nt, Artificial Sequence
  Description of Artificial Sequence: Synthetic oligonucleotide
  Sense strand starting at position 2101 of SEQ ID NO: 1887088
cugaaaugcaagggauguu

SEQ ID NO: 2447505 - RNA, 19 nt, Artificial Sequence
  Description of Artificial Sequence: Synthetic oligonucleotide
  Antisense strand to SEQ ID NO: 2447504
aacaucccuugcauuucag

SEQ ID NO: 2447506 - RNA, 19 nt, Artificial Sequence
  Description of Artificial Sequence: Synthetic oligonucleotide
  Sense strand starting at position 2225 of SEQ ID NO: 1887088
auacuaauuccuggguauu

SEQ ID NO: 2447507 - RNA, 19 nt, Artificial Sequence
  Description of Artificial Sequence: Synthetic oligonucleotide
  Antisense strand to SEQ ID NO: 2447506
aauacccaggaauuaguau

SEQ ID NO: 2447508 - RNA, 19 nt, Artificial Sequence
  Description of Artificial Sequence: Synthetic oligonucleotide
  Sense strand starting at position 2226 of SEQ ID NO: 1887088
uacuaauuccuggguauug

SEQ ID NO: 2447509 - RNA, 19 nt, Artificial Sequence
  Description of Artificial Sequence: Synthetic oligonucleotide
  Antisense strand to SEQ ID NO: 2447508
caauacccaggaauuagua

SEQ ID NO: 2447510 - RNA, 19 nt, Artificial Sequence
  Description of Artificial Sequence: Synthetic oligonucleotide
  Sense strand starting at position 2361 of SEQ ID NO: 1887088
gccauuccuuggguagaga

SEQ ID NO: 2447511 - RNA, 19 nt, Artificial Sequence
  Description of Artificial Sequence: Synthetic oligonucleotide
  Antisense strand to SEQ ID NO: 2447510
ucucuacccaaggaauggc

SEQ ID NO: 2447512 - RNA, 19 nt, Artificial Sequence
  Description of Artificial Sequence: Synthetic oligonucleotide
  Sense strand starting at position 2376 of SEQ ID NO: 1887088
gagauuauggguuggcuga

SEQ ID NO: 2447513 - RNA, 19 nt, Artificial Sequence
  Description of Artificial Sequence: Synthetic oligonucleotide
  Antisense strand to SEQ ID NO: 2447512
ucagccaacccauaaucuc

SEQ ID NO: 2447514 - RNA, 19 nt, Artificial Sequence
  Description of Artificial Sequence: Synthetic oligonucleotide
  Sense strand starting at position 2490 of SEQ ID NO: 1887088
caaggaaauugucuggugu

SEQ ID NO: 2447515 - RNA, 19 nt, Artificial Sequence
  Description of Artificial Sequence: Synthetic oligonucleotide
  Antisense strand to SEQ ID NO: 2447514
acaccagacaauuuccuug

SEQ ID NO: 2447516 - RNA, 19 nt, Artificial Sequence
  Description of Artificial Sequence: Synthetic oligonucleotide
  Sense strand starting at position 2519 of SEQ ID NO: 1887088
augacagugucaccaaauu

SEQ ID NO: 2447517 - RNA, 19 nt, Artificial Sequence
  Description of Artificial Sequence: Synthetic oligonucleotide
  Antisense strand to SEQ ID NO: 2447516
aauuuggugacacugucau

SEQ ID NO: 2447518 - RNA, 19 nt, Artificial Sequence
  Description of Artificial Sequence: Synthetic oligonucleotide
  Sense strand starting at position 2824 of SEQ ID NO: 1887088
accuguugucacugggaaa

SEQ ID NO: 2447519 - RNA, 19 nt, Artificial Sequence
  Description of Artificial Sequence: Synthetic oligonucleotide
  Antisense strand to SEQ ID NO: 2447518
uuucccagugacaacaggu

SEQ ID NO: 2447520 - RNA, 19 nt, Artificial Sequence
  Description of Artificial Sequence: Synthetic oligonucleotide
  Sense strand starting at position 2825 of SEQ ID NO: 1887088
ccuguugucacugggaaau

SEQ ID NO: 2447521 - RNA, 19 nt, Artificial Sequence
  Description of Artificial Sequence: Synthetic oligonucleotide
  Antisense strand to SEQ ID NO: 2447520
auuucccagugacaacagg

SEQ ID NO: 2447522 - RNA, 19 nt, Artificial Sequence
  Description of Artificial Sequence: Synthetic oligonucleotide
  Sense strand starting at position 2854 of SEQ ID NO: 1887088
agguacugcccuuagacaa

SEQ ID NO: 2447523 - RNA, 19 nt, Artificial Sequence
  Description of Artificial Sequence: Synthetic oligonucleotide
  Antisense strand to SEQ ID NO: 2447522
uugucuaagggcaguaccu

SEQ ID NO: 2447524 - RNA, 19 nt, Artificial Sequence
  Description of Artificial Sequence: Synthetic oligonucleotide
  Sense strand starting at position 3056 of SEQ ID NO: 1887088
aggacuuugugagcaggga

SEQ ID NO: 2447525 - RNA, 19 nt, Artificial Sequence
  Description of Artificial Sequence: Synthetic oligonucleotide
  Antisense strand to SEQ ID NO: 2447524
ucccugcucacaaaguccu

SEQ ID NO: 2447526 - RNA, 19 nt, Artificial Sequence
  Description of Artificial Sequence: Synthetic oligonucleotide
  Sense strand starting at position 3213 of SEQ ID NO: 1887088
gcuuaauuccaguauucug

SEQ ID NO: 2447527 - RNA, 19 nt, Artificial Sequence
  Description of Artificial Sequence: Synthetic oligonucleotide
  Antisense strand to SEQ ID NO: 2447526
cagaauacuggaauuaagc

SEQ ID NO: 2447528 - RNA, 19 nt, Artificial Sequence
  Description of Artificial Sequence: Synthetic oligonucleotide
  Sense strand starting at position 3221 of SEQ ID NO: 1887088
ccaguauucugacccauuc

SEQ ID NO: 2447529 - RNA, 19 nt, Artificial Sequence
  Description of Artificial Sequence: Synthetic oligonucleotide
  Antisense strand to SEQ ID NO: 2447528
gaaugggucagaauacugg

SEQ ID NO: 2447530 - RNA, 19 nt, Artificial Sequence
  Description of Artificial Sequence: Synthetic oligonucleotide
  Sense strand starting at position 3246 of SEQ ID NO: 1887088
acgucagguccacacaaau

SEQ ID NO: 2447531 - RNA, 19 nt, Artificial Sequence
  Description of Artificial Sequence: Synthetic oligonucleotide
  Antisense strand to SEQ ID NO: 2447530
auuuguguggaccugacgu

SEQ ID NO: 2447532 - RNA, 19 nt, Artificial Sequence
  Description of Artificial Sequence: Synthetic oligonucleotide
  Sense strand starting at position 3306 of SEQ ID NO: 1887088
auauuuggaucuuggagac

SEQ ID NO: 2447533 - RNA, 19 nt, Artificial Sequence
  Description of Artificial Sequence: Synthetic oligonucleotide
  Antisense strand to SEQ ID NO: 2447532
gucuccaagauccaaauau

SEQ ID NO: 2447534 - RNA, 19 nt, Artificial Sequence
  Description of Artificial Sequence: Synthetic oligonucleotide
  Sense strand starting at position 3375 of SEQ ID NO: 1887088
ugaauccuuugggucagua

SEQ ID NO: 2447535 - RNA, 19 nt, Artificial Sequence
  Description of Artificial Sequence: Synthetic oligonucleotide
  Antisense strand to SEQ ID NO: 2447534
uacugacccaaaggauuca

SEQ ID NO: 2447536 - RNA, 19 nt, Artificial Sequence
  Description of Artificial Sequence: Synthetic oligonucleotide
  Sense strand starting at position 3377 of SEQ ID NO: 1887088
aauccuuugggucaguaga

SEQ ID NO: 2447537 - RNA, 19 nt, Artificial Sequence
  Description of Artificial Sequence: Synthetic oligonucleotide
  Antisense strand to SEQ ID NO: 2447536
ucuacugacccaaaggauu

SEQ ID NO: 2447538 - RNA, 19 nt, Artificial Sequence
  Description of Artificial Sequence: Synthetic oligonucleotide
  Sense strand starting at position 3453 of SEQ ID NO: 1887088
cagagccuuccagauugua

SEQ ID NO: 2447539 - RNA, 19 nt, Artificial Sequence
  Description of Artificial Sequence: Synthetic oligonucleotide
  Antisense strand to SEQ ID NO: 2447538
uacaaucuggaaggcucug

SEQ ID NO: 2447540 - RNA, 19 nt, Artificial Sequence
  Description of Artificial Sequence: Synthetic oligonucleotide
  Sense strand starting at position 3832 of SEQ ID NO: 1887088
cugagaaacccguggaaga

SEQ ID NO: 2447541 - RNA, 19 nt, Artificial Sequence
  Description of Artificial Sequence: Synthetic oligonucleotide
  Antisense strand to SEQ ID NO: 2447540
ucuuccacggguuucucag

SEQ ID NO: 2447542 - RNA, 19 nt, Artificial Sequence
  Description of Artificial Sequence: Synthetic oligonucleotide
  Sense strand starting at position 3932 of SEQ ID NO: 1887088
uugagauggucugugauuc

SEQ ID NO: 2447543 - RNA, 19 nt, Artificial Sequence
  Description of Artificial Sequence: Synthetic oligonucleotide
  Antisense strand to SEQ ID NO: 2447542
gaaucacagaccaucucaa

SEQ ID NO: 2447544 - RNA, 19 nt, Artificial Sequence
  Description of Artificial Sequence: Synthetic oligonucleotide
  Sense strand starting at position 78 of SEQ ID NO: 1887089
gccugacuauccgcuaauu

SEQ ID NO: 2447545 - RNA, 19 nt, Artificial Sequence
  Description of Artificial Sequence: Synthetic oligonucleotide
  Antisense strand to SEQ ID NO: 2447544
aauuagcggauagucaggc

SEQ ID NO: 2447546 - RNA, 19 nt, Artificial Sequence
  Description of Artificial Sequence: Synthetic oligonucleotide
  Sense strand starting at position 197 of SEQ ID NO: 1887089
cugggauuaauaugcguga

SEQ ID NO: 2447547 - RNA, 19 nt, Artificial Sequence
  Description of Artificial Sequence: Synthetic oligonucleotide
  Antisense strand to SEQ ID NO: 2447546
ucacgcauauuaaucccag

SEQ ID NO: 2447548 - RNA, 19 nt, Artificial Sequence
  Description of Artificial Sequence: Synthetic oligonucleotide
  Sense strand starting at position 201 of SEQ ID NO: 1887089
gauuaauaugcgugagcca

SEQ ID NO: 2447549 - RNA, 19 nt, Artificial Sequence
  Description of Artificial Sequence: Synthetic oligonucleotide
  Antisense strand to SEQ ID NO: 2447548
uggcucacgcauauuaauc

SEQ ID NO: 2447550 - RNA, 19 nt, Artificial Sequence
  Description of Artificial Sequence: Synthetic oligonucleotide
  Sense strand starting at position 1317 of SEQ ID NO: 1887089
gcauucugguucucaucuu

SEQ ID NO: 2447551 - RNA, 19 nt, Artificial Sequence
  Description of Artificial Sequence: Synthetic oligonucleotide
  Antisense strand to SEQ ID NO: 2447550
aagaugagaaccagaaugc

SEQ ID NO: 2447552 - RNA, 19 nt, Artificial Sequence
  Description of Artificial Sequence: Synthetic oligonucleotide
  Sense strand starting at position 1480 of SEQ ID NO: 1887089
gugccuggcuuaucuuuau

SEQ ID NO: 2447553 - RNA, 19 nt, Artificial Sequence
  Description of Artificial Sequence: Synthetic oligonucleotide
  Antisense strand to SEQ ID NO: 2447552
auaaagauaagccaggcac

SEQ ID NO: 2447554 - RNA, 19 nt, Artificial Sequence
  Description of Artificial Sequence: Synthetic oligonucleotide
  Sense strand starting at position 1819 of SEQ ID NO: 1887089
guacaucaucuauacugua

SEQ ID NO: 2447555 - RNA, 19 nt, Artificial Sequence
  Description of Artificial Sequence: Synthetic oligonucleotide
  Antisense strand to SEQ ID NO: 2447554
uacaguauagaugauguac

SEQ ID NO: 2447556 - RNA, 19 nt, Artificial Sequence
  Description of Artificial Sequence: Synthetic oligonucleotide
  Sense strand starting at position 1834 of SEQ ID NO: 1887089
uguagugucucaucgcaaa

SEQ ID NO: 2447557 - RNA, 19 nt, Artificial Sequence
  Description of Artificial Sequence: Synthetic oligonucleotide
  Antisense strand to SEQ ID NO: 2447556
uuugcgaugagacacuaca

SEQ ID NO: 2447558 - RNA, 19 nt, Artificial Sequence
  Description of Artificial Sequence: Synthetic oligonucleotide
  Sense strand starting at position 1848 of SEQ ID NO: 1887089
gcaaacuuacaguauauga

SEQ ID NO: 2447559 - RNA, 19 nt, Artificial Sequence
  Description of Artificial Sequence: Synthetic oligonucleotide
  Antisense strand to SEQ ID NO: 2447558
ucauauacuguaaguuugc

SEQ ID NO: 2447560 - RNA, 19 nt, Artificial Sequence
  Description of Artificial Sequence: Synthetic oligonucleotide
  Sense strand starting at position 1853 of SEQ ID NO: 1887089
cuuacaguauaugaugaua

SEQ ID NO: 2447561 - RNA, 19 nt, Artificial Sequence
  Description of Artificial Sequence: Synthetic oligonucleotide
  Antisense strand to SEQ ID NO: 2447560
uaucaucauauacuguaag

SEQ ID NO: 2447562 - RNA, 19 nt, Artificial Sequence
  Description of Artificial Sequence: Synthetic oligonucleotide
  Sense strand starting at position 1898 of SEQ ID NO: 1887089
caggaagcauggcuugaaa

SEQ ID NO: 2447563 - RNA, 19 nt, Artificial Sequence
  Description of Artificial Sequence: Synthetic oligonucleotide
  Antisense strand to SEQ ID NO: 2447562
uuucaagccaugcuuccug

SEQ ID NO: 2447564 - RNA, 19 nt, Artificial Sequence
  Description of Artificial Sequence: Synthetic oligonucleotide
  Sense strand starting at position 2013 of SEQ ID NO: 1887089
cuccuugauucugugguca

SEQ ID NO: 2447565 - RNA, 19 nt, Artificial Sequence
  Description of Artificial Sequence: Synthetic oligonucleotide
  Antisense strand to SEQ ID NO: 2447564
ugaccacagaaucaaggag

SEQ ID NO: 2447566 - RNA, 19 nt, Artificial Sequence
  Description of Artificial Sequence: Synthetic oligonucleotide
  Sense strand starting at position 2065 of SEQ ID NO: 1887089
ggagcuagggucuguuaag

SEQ ID NO: 2447567 - RNA, 19 nt, Artificial Sequence
  Description of Artificial Sequence: Synthetic oligonucleotide
  Antisense strand to SEQ ID NO: 2447566
cuuaacagacccuagcucc

SEQ ID NO: 2447568 - RNA, 19 nt, Artificial Sequence
  Description of Artificial Sequence: Synthetic oligonucleotide
  Sense strand starting at position 2066 of SEQ ID NO: 1887089
gagcuagggucuguuaaga

SEQ ID NO: 2447569 - RNA, 19 nt, Artificial Sequence
  Description of Artificial Sequence: Synthetic oligonucleotide
  Antisense strand to SEQ ID NO: 2447568
ucuuaacagacccuagcuc

SEQ ID NO: 2447570 - RNA, 19 nt, Artificial Sequence
  Description of Artificial Sequence: Synthetic oligonucleotide
  Sense strand starting at position 2128 of SEQ ID NO: 1887089
cguaaugaugcagaagguu

SEQ ID NO: 2447571 - RNA, 19 nt, Artificial Sequence
  Description of Artificial Sequence: Synthetic oligonucleotide
  Antisense strand to SEQ ID NO: 2447570
aaccuucugcaucauuacg

SEQ ID NO: 2447572 - RNA, 19 nt, Artificial Sequence
  Description of Artificial Sequence: Synthetic oligonucleotide
  Sense strand starting at position 2137 of SEQ ID NO: 1887089
gcagaagguucccuuuggu

SEQ ID NO: 2447573 - RNA, 19 nt, Artificial Sequence
  Description of Artificial Sequence: Synthetic oligonucleotide
  Antisense strand to SEQ ID NO: 2447572
accaaagggaaccuucugc

SEQ ID NO: 2447574 - RNA, 19 nt, Artificial Sequence
  Description of Artificial Sequence: Synthetic oligonucleotide
  Sense strand starting at position 2501 of SEQ ID NO: 1887089
uuuaauugcuggucagauc

SEQ ID NO: 2447575 - RNA, 19 nt, Artificial Sequence
  Description of Artificial Sequence: Synthetic oligonucleotide
  Antisense strand to SEQ ID NO: 2447574
gaucugaccagcaauuaaa

SEQ ID NO: 2447576 - RNA, 19 nt, Artificial Sequence
  Description of Artificial Sequence: Synthetic oligonucleotide
  Sense strand starting at position 2510 of SEQ ID NO: 1887089
uggucagaucccuagugga

SEQ ID NO: 2447577 - RNA, 19 nt, Artificial Sequence
  Description of Artificial Sequence: Synthetic oligonucleotide
  Antisense strand to SEQ ID NO: 2447576
uccacuagggaucugacca

SEQ ID NO: 2447578 - RNA, 19 nt, Artificial Sequence
  Description of Artificial Sequence: Synthetic oligonucleotide
  Sense strand starting at position 2523 of SEQ ID NO: 1887089
aguggaagguuucucguuu

SEQ ID NO: 2447579 - RNA, 19 nt, Artificial Sequence
  Description of Artificial Sequence: Synthetic oligonucleotide
  Antisense strand to SEQ ID NO: 2447578
aaacgagaaaccuuccacu

SEQ ID NO: 2447580 - RNA, 19 nt, Artificial Sequence
  Description of Artificial Sequence: Synthetic oligonucleotide
  Sense strand starting at position 2575 of SEQ ID NO: 1887089
ggugguaggcaauguuagu

SEQ ID NO: 2447581 - RNA, 19 nt, Artificial Sequence
  Description of Artificial Sequence: Synthetic oligonucleotide
  Antisense strand to SEQ ID NO: 2447580
acuaacauugccuaccacc

SEQ ID NO: 2447582 - RNA, 19 nt, Artificial Sequence
  Description of Artificial Sequence: Synthetic oligonucleotide
  Sense strand starting at position 2580 of SEQ ID NO: 1887089
uaggcaauguuaguugaau

SEQ ID NO: 2447583 - RNA, 19 nt, Artificial Sequence
  Description of Artificial Sequence: Synthetic oligonucleotide
  Antisense strand to SEQ ID NO: 2447582
auucaacuaacauugccua

SEQ ID NO: 2447584 - RNA, 19 nt, Artificial Sequence
  Description of Artificial Sequence: Synthetic oligonucleotide
  Sense strand starting at position 2581 of SEQ ID NO: 1887089
aggcaauguuaguugaauc

SEQ ID NO: 2447585 - RNA, 19 nt, Artificial Sequence
  Description of Artificial Sequence: Synthetic oligonucleotide
  Antisense strand to SEQ ID NO: 2447584
gauucaacuaacauugccu

SEQ ID NO: 2447586 - RNA, 19 nt, Artificial Sequence
  Description of Artificial Sequence: Synthetic oligonucleotide
  Sense strand starting at position 2582 of SEQ ID NO: 1887089
ggcaauguuaguugaaucu

SEQ ID NO: 2447587 - RNA, 19 nt, Artificial Sequence
  Description of Artificial Sequence: Synthetic oligonucleotide
  Antisense strand to SEQ ID NO: 2447586
agauucaacuaacauugcc

SEQ ID NO: 2447588 - RNA, 19 nt, Artificial Sequence
  Description of Artificial Sequence: Synthetic oligonucleotide
  Sense strand starting at position 2589 of SEQ ID NO: 1887089
uuaguugaaucucucugua

SEQ ID NO: 2447589 - RNA, 19 nt, Artificial Sequence
  Description of Artificial Sequence: Synthetic oligonucleotide
  Antisense strand to SEQ ID NO: 2447588
uacagagagauucaacuaa

SEQ ID NO: 2447590 - RNA, 19 nt, Artificial Sequence
  Description of Artificial Sequence: Synthetic oligonucleotide
  Sense strand starting at position 2591 of SEQ ID NO: 1887089
aguugaaucucucuguaua

SEQ ID NO: 2447591 - RNA, 19 nt, Artificial Sequence
  Description of Artificial Sequence: Synthetic oligonucleotide
  Antisense strand to SEQ ID NO: 2447590
uauacagagagauucaacu

SEQ ID NO: 2447592 - RNA, 19 nt, Artificial Sequence
  Description of Artificial Sequence: Synthetic oligonucleotide
  Sense strand starting at position 2592 of SEQ ID NO: 1887089
guugaaucucucuguauag

SEQ ID NO: 2447593 - RNA, 19 nt, Artificial Sequence
  Description of Artificial Sequence: Synthetic oligonucleotide
  Antisense strand to SEQ ID NO: 2447592
cuauacagagagauucaac

SEQ ID NO: 2447594 - RNA, 19 nt, Artificial Sequence
  Description of Artificial Sequence: Synthetic oligonucleotide
  Sense strand starting at position 2627 of SEQ ID NO: 1887089
gcaacuggaucuccagaau

SEQ ID NO: 2447595 - RNA, 19 nt, Artificial Sequence
  Description of Artificial Sequence: Synthetic oligonucleotide
  Antisense strand to SEQ ID NO: 2447594
auucuggagauccaguugc

SEQ ID NO: 2447596 - RNA, 19 nt, Artificial Sequence
  Description of Artificial Sequence: Synthetic oligonucleotide
  Sense strand starting at position 2793 of SEQ ID NO: 1887089
guugcucuacuaggagauu

SEQ ID NO: 2447597 - RNA, 19 nt, Artificial Sequence
  Description of Artificial Sequence: Synthetic oligonucleotide
  Antisense strand to SEQ ID NO: 2447596
aaucuccuaguagagcaac

SEQ ID NO: 2447598 - RNA, 19 nt, Artificial Sequence
  Description of Artificial Sequence: Synthetic oligonucleotide
  Sense strand starting at position 2794 of SEQ ID NO: 1887089
uugcucuacuaggagauuu

SEQ ID NO: 2447599 - RNA, 19 nt, Artificial Sequence
  Description of Artificial Sequence: Synthetic oligonucleotide
  Antisense strand to SEQ ID NO: 2447598
aaaucuccuaguagagcaa

SEQ ID NO: 2447600 - RNA, 19 nt, Artificial Sequence
  Description of Artificial Sequence: Synthetic oligonucleotide
  Sense strand starting at position 2934 of SEQ ID NO: 1887089
ggccucugcuguuuagaau

SEQ ID NO: 2447601 - RNA, 19 nt, Artificial Sequence
  Description of Artificial Sequence: Synthetic oligonucleotide
  Antisense strand to SEQ ID NO: 2447600
auucuaaacagcagaggcc

SEQ ID NO: 2447602 - RNA, 19 nt, Artificial Sequence
  Description of Artificial Sequence: Synthetic oligonucleotide
  Sense strand starting at position 2935 of SEQ ID NO: 1887089
gccucugcuguuuagaauc

SEQ ID NO: 2447603 - RNA, 19 nt, Artificial Sequence
  Description of Artificial Sequence: Synthetic oligonucleotide
  Antisense strand to SEQ ID NO: 2447602
gauucuaaacagcagaggc

SEQ ID NO: 2447604 - RNA, 19 nt, Artificial Sequence
  Description of Artificial Sequence: Synthetic oligonucleotide
  Sense strand starting at position 2992 of SEQ ID NO: 1887089
uagacaaucuggucugugu

SEQ ID NO: 2447605 - RNA, 19 nt, Artificial Sequence
  Description of Artificial Sequence: Synthetic oligonucleotide
  Antisense strand to SEQ ID NO: 2447604
acacagaccagauugucua

SEQ ID NO: 2447606 - RNA, 19 nt, Artificial Sequence
  Description of Artificial Sequence: Synthetic oligonucleotide
  Sense strand starting at position 3012 of SEQ ID NO: 1887089
cuggaaggcaguuaauacu

SEQ ID NO: 2447607 - RNA, 19 nt, Artificial Sequence
  Description of Artificial Sequence: Synthetic oligonucleotide
  Antisense strand to SEQ ID NO: 2447606
aguauuaacugccuuccag

SEQ ID NO: 2447608 - RNA, 19 nt, Artificial Sequence
  Description of Artificial Sequence: Synthetic oligonucleotide
  Sense strand starting at position 3105 of SEQ ID NO: 1887089
guguucuauuuccugaggu

SEQ ID NO: 2447609 - RNA, 19 nt, Artificial Sequence
  Description of Artificial Sequence: Synthetic oligonucleotide
  Antisense strand to SEQ ID NO: 2447608
accucaggaaauagaacac

SEQ ID NO: 2447610 - RNA, 19 nt, Artificial Sequence
  Description of Artificial Sequence: Synthetic oligonucleotide
  Sense strand starting at position 3109 of SEQ ID NO: 1887089
ucuauuuccugaggucaca

SEQ ID NO: 2447611 - RNA, 19 nt, Artificial Sequence
  Description of Artificial Sequence: Synthetic oligonucleotide
  Antisense strand to SEQ ID NO: 2447610
ugugaccucaggaaauaga

SEQ ID NO: 2447612 - RNA, 19 nt, Artificial Sequence
  Description of Artificial Sequence: Synthetic oligonucleotide
  Sense strand starting at position 3171 of SEQ ID NO: 1887089
cuccuuucuugucuaguua

SEQ ID NO: 2447613 - RNA, 19 nt, Artificial Sequence
  Description of Artificial Sequence: Synthetic oligonucleotide
  Antisense strand to SEQ ID NO: 2447612
uaacuagacaagaaaggag

SEQ ID NO: 2447614 - RNA, 19 nt, Artificial Sequence
  Description of Artificial Sequence: Synthetic oligonucleotide
  Sense strand starting at position 3528 of SEQ ID NO: 1887089
aguguuacuucugcaggga

SEQ ID NO: 2447615 - RNA, 19 nt, Artificial Sequence
  Description of Artificial Sequence: Synthetic oligonucleotide
  Antisense strand to SEQ ID NO: 2447614
ucccugcagaaguaacacu

SEQ ID NO: 2447616 - RNA, 19 nt, Artificial Sequence
  Description of Artificial Sequence: Synthetic oligonucleotide
  Sense strand starting at position 3529 of SEQ ID NO: 1887089
guguuacuucugcagggaa

SEQ ID NO: 2447617 - RNA, 19 nt, Artificial Sequence
  Description of Artificial Sequence: Synthetic oligonucleotide
  Antisense strand to SEQ ID NO: 2447616
uucccugcagaaguaacac

SEQ ID NO: 2447618 - RNA, 19 nt, Artificial Sequence
  Description of Artificial Sequence: Synthetic oligonucleotide
  Sense strand starting at position 3531 of SEQ ID NO: 1887089
guuacuucugcagggaagu

SEQ ID NO: 2447619 - RNA, 19 nt, Artificial Sequence
  Description of Artificial Sequence: Synthetic oligonucleotide
  Antisense strand to SEQ ID NO: 2447618
acuucccugcagaaguaac

SEQ ID NO: 2447620 - RNA, 19 nt, Artificial Sequence
  Description of Artificial Sequence: Synthetic oligonucleotide
  Sense strand starting at position 3542 of SEQ ID NO: 1887089
agggaagucuucccagacu

SEQ ID NO: 2447621 - RNA, 19 nt, Artificial Sequence
  Description of Artificial Sequence: Synthetic oligonucleotide
  Antisense strand to SEQ ID NO: 2447620
agucugggaagacuucccu

SEQ ID NO: 2447622 - RNA, 19 nt, Artificial Sequence
  Description of Artificial Sequence: Synthetic oligonucleotide
  Sense strand starting at position 3621 of SEQ ID NO: 1887089
ucaugagggccuuguuuau

SEQ ID NO: 2447623 - RNA, 19 nt, Artificial Sequence
  Description of Artificial Sequence: Synthetic oligonucleotide
  Antisense strand to SEQ ID NO: 2447622
auaaacaaggcccucauga

SEQ ID NO: 2447624 - RNA, 19 nt, Artificial Sequence
  Description of Artificial Sequence: Synthetic oligonucleotide
  Sense strand starting at position 19 of SEQ ID NO: 1887090
cuggcaggagcuugaguaa

SEQ ID NO: 2447625 - RNA, 19 nt, Artificial Sequence
  Description of Artificial Sequence: Synthetic oligonucleotide
  Antisense strand to SEQ ID NO: 2447624
uuacucaagcuccugccag

SEQ ID NO: 2447626 - RNA, 19 nt, Artificial Sequence
  Description of Artificial Sequence: Synthetic oligonucleotide
  Sense strand starting at position 62 of SEQ ID NO: 1887090
ccugaaguuugggugucuu

SEQ ID NO: 2447627 - RNA, 19 nt, Artificial Sequence
  Description of Artificial Sequence: Synthetic oligonucleotide
  Antisense strand to SEQ ID NO: 2447626
aagacacccaaacuucagg

SEQ ID NO: 2447628 - RNA, 19 nt, Artificial Sequence
  Description of Artificial Sequence: Synthetic oligonucleotide
  Sense strand starting at position 70 of SEQ ID NO: 1887090
uugggugucuuaccacaga

SEQ ID NO: 2447629 - RNA, 19 nt, Artificial Sequence
  Description of Artificial Sequence: Synthetic oligonucleotide
  Antisense strand to SEQ ID NO: 2447628
ucugugguaagacacccaa

SEQ ID NO: 2447630 - RNA, 19 nt, Artificial Sequence
  Description of Artificial Sequence: Synthetic oligonucleotide
  Sense strand starting at position 219 of SEQ ID NO: 1887090
ggaagaagaucagggagau

SEQ ID NO: 2447631 - RNA, 19 nt, Artificial Sequence
  Description of Artificial Sequence: Synthetic oligonucleotide
  Antisense strand to SEQ ID NO: 2447630
aucucccugaucuucuucc

SEQ ID NO: 2447632 - RNA, 19 nt, Artificial Sequence
  Description of Artificial Sequence: Synthetic oligonucleotide
  Sense strand starting at position 310 of SEQ ID NO: 1887090
aggucauaggucugaaguu

SEQ ID NO: 2447633 - RNA, 19 nt, Artificial Sequence
  Description of Artificial Sequence: Synthetic oligonucleotide
  Antisense strand to SEQ ID NO: 2447632
aacuucagaccuaugaccu

SEQ ID NO: 2447634 - RNA, 19 nt, Artificial Sequence
  Description of Artificial Sequence: Synthetic oligonucleotide
  Sense strand starting at position 441 of SEQ ID NO: 1887090
uucuuuccagcauagucau

SEQ ID NO: 2447635 - RNA, 19 nt, Artificial Sequence
  Description of Artificial Sequence: Synthetic oligonucleotide
  Antisense strand to SEQ ID NO: 2447634
augacuaugcuggaaagaa

SEQ ID NO: 2447636 - RNA, 19 nt, Artificial Sequence
  Description of Artificial Sequence: Synthetic oligonucleotide
  Sense strand starting at position 447 of SEQ ID NO: 1887090
ccagcauagucaucauucu

SEQ ID NO: 2447637 - RNA, 19 nt, Artificial Sequence
  Description of Artificial Sequence: Synthetic oligonucleotide
  Antisense strand to SEQ ID NO: 2447636
agaaugaugacuaugcugg

SEQ ID NO: 2447638 - RNA, 19 nt, Artificial Sequence
  Description of Artificial Sequence: Synthetic oligonucleotide
  Sense strand starting at position 479 of SEQ ID NO: 1887090
agaaauuaguaucugcauu

SEQ ID NO: 2447639 - RNA, 19 nt, Artificial Sequence
  Description of Artificial Sequence: Synthetic oligonucleotide
  Antisense strand to SEQ ID NO: 2447638
aaugcagauacuaauuucu

SEQ ID NO: 2447640 - RNA, 19 nt, Artificial Sequence
  Description of Artificial Sequence: Synthetic oligonucleotide
  Sense strand starting at position 492 of SEQ ID NO: 1887090
ugcauugcauccuuaaaga

SEQ ID NO: 2447641 - RNA, 19 nt, Artificial Sequence
  Description of Artificial Sequence: Synthetic oligonucleotide
  Antisense strand to SEQ ID NO: 2447640
ucuuuaaggaugcaaugca

SEQ ID NO: 2447642 - RNA, 19 nt, Artificial Sequence
  Description of Artificial Sequence: Synthetic oligonucleotide
  Sense strand starting at position 542 of SEQ ID NO: 1887090
gucuguucuaguggaauaa

SEQ ID NO: 2447643 - RNA, 19 nt, Artificial Sequence
  Description of Artificial Sequence: Synthetic oligonucleotide
  Antisense strand to SEQ ID NO: 2447642
uuauuccacuagaacagac

SEQ ID NO: 2447644 - RNA, 19 nt, Artificial Sequence
  Description of Artificial Sequence: Synthetic oligonucleotide
  Sense strand starting at position 543 of SEQ ID NO: 1887090
ucuguucuaguggaauaaa

SEQ ID NO: 2447645 - RNA, 19 nt, Artificial Sequence
  Description of Artificial Sequence: Synthetic oligonucleotide
  Antisense strand to SEQ ID NO: 2447644
uuuauuccacuagaacaga

SEQ ID NO: 2447646 - RNA, 19 nt, Artificial Sequence
  Description of Artificial Sequence: Synthetic oligonucleotide
  Sense strand starting at position 719 of SEQ ID NO: 1887090
uggcuuaacuggcugauua

SEQ ID NO: 2447647 - RNA, 19 nt, Artificial Sequence
  Description of Artificial Sequence: Synthetic oligonucleotide
  Antisense strand to SEQ ID NO: 2447646
uaaucagccaguuaagcca

SEQ ID NO: 2447648 - RNA, 19 nt, Artificial Sequence
  Description of Artificial Sequence: Synthetic oligonucleotide
  Sense strand starting at position 720 of SEQ ID NO: 1887090
ggcuuaacuggcugauuag

SEQ ID NO: 2447649 - RNA, 19 nt, Artificial Sequence
  Description of Artificial Sequence: Synthetic oligonucleotide
  Antisense strand to SEQ ID NO: 2447648
cuaaucagccaguuaagcc

SEQ ID NO: 2447650 - RNA, 19 nt, Artificial Sequence
  Description of Artificial Sequence: Synthetic oligonucleotide
  Sense strand starting at position 1011 of SEQ ID NO: 1887090
uggagugagcuaugauuga

SEQ ID NO: 2447651 - RNA, 19 nt, Artificial Sequence
  Description of Artificial Sequence: Synthetic oligonucleotide
  Antisense strand to SEQ ID NO: 2447650
ucaaucauagcucacucca

SEQ ID NO: 2447652 - RNA, 19 nt, Artificial Sequence
  Description of Artificial Sequence: Synthetic oligonucleotide
  Sense strand starting at position 1053 of SEQ ID NO: 1887090
gucagaccuugucucugaa

SEQ ID NO: 2447653 - RNA, 19 nt, Artificial Sequence
  Description of Artificial Sequence: Synthetic oligonucleotide
  Antisense strand to SEQ ID NO: 2447652
uucagagacaaggucugac

SEQ ID NO: 2447654 - RNA, 19 nt, Artificial Sequence
  Description of Artificial Sequence: Synthetic oligonucleotide
  Sense strand starting at position 1441 of SEQ ID NO: 1887090
uccaaaguccaaugucaga

SEQ ID NO: 2447655 - RNA, 19 nt, Artificial Sequence
  Description of Artificial Sequence: Synthetic oligonucleotide
  Antisense strand to SEQ ID NO: 2447654
ucugacauuggacuuugga

SEQ ID NO: 2447656 - RNA, 19 nt, Artificial Sequence
  Description of Artificial Sequence: Synthetic oligonucleotide
  Sense strand starting at position 1482 of SEQ ID NO: 1887090
auguaauccucuuccugga

SEQ ID NO: 2447657 - RNA, 19 nt, Artificial Sequence
  Description of Artificial Sequence: Synthetic oligonucleotide
  Antisense strand to SEQ ID NO: 2447656
uccaggaagaggauuacau

SEQ ID NO: 2447658 - RNA, 19 nt, Artificial Sequence
  Description of Artificial Sequence: Synthetic oligonucleotide
  Sense strand starting at position 1484 of SEQ ID NO: 1887090
guaauccucuuccuggaaa

SEQ ID NO: 2447659 - RNA, 19 nt, Artificial Sequence
  Description of Artificial Sequence: Synthetic oligonucleotide
  Antisense strand to SEQ ID NO: 2447658
uuuccaggaagaggauuac

SEQ ID NO: 2447660 - RNA, 19 nt, Artificial Sequence
  Description of Artificial Sequence: Synthetic oligonucleotide
  Sense strand starting at position 1584 of SEQ ID NO: 1887090
auagucuaccucuauuguu

SEQ ID NO: 2447661 - RNA, 19 nt, Artificial Sequence
  Description of Artificial Sequence: Synthetic oligonucleotide
  Antisense strand to SEQ ID NO: 2447660
aacaauagagguagacuau

SEQ ID NO: 2447662 - RNA, 19 nt, Artificial Sequence
  Description of Artificial Sequence: Synthetic oligonucleotide
  Sense strand starting at position 1594 of SEQ ID NO: 1887090
ucuauuguucuaggaguua

SEQ ID NO: 2447663 - RNA, 19 nt, Artificial Sequence
  Description of Artificial Sequence: Synthetic oligonucleotide
  Antisense strand to SEQ ID NO: 2447662
uaacuccuagaacaauaga

SEQ ID NO: 2447664 - RNA, 19 nt, Artificial Sequence
  Description of Artificial Sequence: Synthetic oligonucleotide
  Sense strand starting at position 1606 of SEQ ID NO: 1887090
ggaguuaaaccacguuggu

SEQ ID NO: 2447665 - RNA, 19 nt, Artificial Sequence
  Description of Artificial Sequence: Synthetic oligonucleotide
  Antisense strand to SEQ ID NO: 2447664
accaacgugguuuaacucc

SEQ ID NO: 2447666 - RNA, 19 nt, Artificial Sequence
  Description of Artificial Sequence: Synthetic oligonucleotide
  Sense strand starting at position 1662 of SEQ ID NO: 1887090
gggcaaaucaaaggucuga

SEQ ID NO: 2447667 - RNA, 19 nt, Artificial Sequence
  Description of Artificial Sequence: Synthetic oligonucleotide
  Antisense strand to SEQ ID NO: 2447666
ucagaccuuugauuugccc

SEQ ID NO: 2447668 - RNA, 19 nt, Artificial Sequence
  Description of Artificial Sequence: Synthetic oligonucleotide
  Sense strand starting at position 1845 of SEQ ID NO: 1887090
gguggugaaacuugaaucu

SEQ ID NO: 2447669 - RNA, 19 nt, Artificial Sequence
  Description of Artificial Sequence: Synthetic oligonucleotide
  Antisense strand to SEQ ID NO: 2447668
agauucaaguuucaccacc

SEQ ID NO: 2447670 - RNA, 19 nt, Artificial Sequence
  Description of Artificial Sequence: Synthetic oligonucleotide
  Sense strand starting at position 1865 of SEQ ID NO: 1887090
ucaucaacugugcaauagu

SEQ ID NO: 2447671 - RNA, 19 nt, Artificial Sequence
  Description of Artificial Sequence: Synthetic oligonucleotide
  Antisense strand to SEQ ID NO: 2447670
acuauugcacaguugauga

SEQ ID NO: 2447672 - RNA, 19 nt, Artificial Sequence
  Description of Artificial Sequence: Synthetic oligonucleotide
  Sense strand starting at position 1868 of SEQ ID NO: 1887090
ucaacugugcaauaguuau

SEQ ID NO: 2447673 - RNA, 19 nt, Artificial Sequence
  Description of Artificial Sequence: Synthetic oligonucleotide
  Antisense strand to SEQ ID NO: 2447672
auaacuauugcacaguuga

SEQ ID NO: 2447674 - RNA, 19 nt, Artificial Sequence
  Description of Artificial Sequence: Synthetic oligonucleotide
  Sense strand starting at position 1892 of SEQ ID NO: 1887090
cuuggauggcuaugaguuu

SEQ ID NO: 2447675 - RNA, 19 nt, Artificial Sequence
  Description of Artificial Sequence: Synthetic oligonucleotide
  Antisense strand to SEQ ID NO: 2447674
aaacucauagccauccaag

SEQ ID NO: 2447676 - RNA, 19 nt, Artificial Sequence
  Description of Artificial Sequence: Synthetic oligonucleotide
  Sense strand starting at position 1914 of SEQ ID NO: 1887090
agaggaaagcugggcuuaa

SEQ ID NO: 2447677 - RNA, 19 nt, Artificial Sequence
  Description of Artificial Sequence: Synthetic oligonucleotide
  Antisense strand to SEQ ID NO: 2447676
uuaagcccagcuuuccucu

SEQ ID NO: 2447678 - RNA, 19 nt, Artificial Sequence
  Description of Artificial Sequence: Synthetic oligonucleotide
  Sense strand starting at position 1915 of SEQ ID NO: 1887090
gaggaaagcugggcuuaaa

SEQ ID NO: 2447679 - RNA, 19 nt, Artificial Sequence
  Description of Artificial Sequence: Synthetic oligonucleotide
  Antisense strand to SEQ ID NO: 2447678
uuuaagcccagcuuuccuc

SEQ ID NO: 2447680 - RNA, 19 nt, Artificial Sequence
  Description of Artificial Sequence: Synthetic oligonucleotide
  Sense strand starting at position 2044 of SEQ ID NO: 1887090
uuuguuucucagcagucua

SEQ ID NO: 2447681 - RNA, 19 nt, Artificial Sequence
  Description of Artificial Sequence: Synthetic oligonucleotide
  Antisense strand to SEQ ID NO: 2447680
uagacugcugagaaacaaa

SEQ ID NO: 2447682 - RNA, 19 nt, Artificial Sequence
  Description of Artificial Sequence: Synthetic oligonucleotide
  Sense strand starting at position 2089 of SEQ ID NO: 1887090
gaggucguguaccuuauuu

SEQ ID NO: 2447683 - RNA, 19 nt, Artificial Sequence
  Description of Artificial Sequence: Synthetic oligonucleotide
  Antisense strand to SEQ ID NO: 2447682
aaauaagguacacgaccuc

SEQ ID NO: 2447684 - RNA, 19 nt, Artificial Sequence
  Description of Artificial Sequence: Synthetic oligonucleotide
  Sense strand starting at position 2111 of SEQ ID NO: 1887090
cugagagcuuaagcugaga

SEQ ID NO: 2447685 - RNA, 19 nt, Artificial Sequence
  Description of Artificial Sequence: Synthetic oligonucleotide
  Antisense strand to SEQ ID NO: 2447684
ucucagcuuaagcucucag

SEQ ID NO: 2447686 - RNA, 19 nt, Artificial Sequence
  Description of Artificial Sequence: Synthetic oligonucleotide
  Sense strand starting at position 2144 of SEQ ID NO: 1887090
ggagauuagcggcagagau

SEQ ID NO: 2447687 - RNA, 19 nt, Artificial Sequence
  Description of Artificial Sequence: Synthetic oligonucleotide
  Antisense strand to SEQ ID NO: 2447686
aucucugccgcuaaucucc

SEQ ID NO: 2447688 - RNA, 19 nt, Artificial Sequence
  Description of Artificial Sequence: Synthetic oligonucleotide
  Sense strand starting at position 2203 of SEQ ID NO: 1887090
uuccaacuccgggagcaau

SEQ ID NO: 2447689 - RNA, 19 nt, Artificial Sequence
  Description of Artificial Sequence: Synthetic oligonucleotide
  Antisense strand to SEQ ID NO: 2447688
auugcucccggaguuggaa

SEQ ID NO: 2447690 - RNA, 19 nt, Artificial Sequence
  Description of Artificial Sequence: Synthetic oligonucleotide
  Sense strand starting at position 3273 of SEQ ID NO: 1887090
gcgcgccaucuggauuuaa

SEQ ID NO: 2447691 - RNA, 19 nt, Artificial Sequence
  Description of Artificial Sequence: Synthetic oligonucleotide
  Antisense strand to SEQ ID NO: 2447690
uuaaauccagauggcgcgc

SEQ ID NO: 2447692 - RNA, 19 nt, Artificial Sequence
  Description of Artificial Sequence: Synthetic oligonucleotide
  Sense strand starting at position 3654 of SEQ ID NO: 1887090
uggaaaccgugguucugaa

SEQ ID NO: 2447693 - RNA, 19 nt, Artificial Sequence
  Description of Artificial Sequence: Synthetic oligonucleotide
  Antisense strand to SEQ ID NO: 2447692
uucagaaccacgguuucca

SEQ ID NO: 2447694 - RNA, 19 nt, Artificial Sequence
  Description of Artificial Sequence: Synthetic oligonucleotide
  Sense strand starting at position 3745 of SEQ ID NO: 1887090
ugaugcauucucgagugag

SEQ ID NO: 2447695 - RNA, 19 nt, Artificial Sequence
  Description of Artificial Sequence: Synthetic oligonucleotide
  Antisense strand to SEQ ID NO: 2447694
cucacucgagaaugcauca

SEQ ID NO: 2447696 - RNA, 19 nt, Artificial Sequence
  Description of Artificial Sequence: Synthetic oligonucleotide
  Sense strand starting at position 3748 of SEQ ID NO: 1887090
ugcauucucgagugagaau

SEQ ID NO: 2447697 - RNA, 19 nt, Artificial Sequence
  Description of Artificial Sequence: Synthetic oligonucleotide
  Antisense strand to SEQ ID NO: 2447696
auucucacucgagaaugca

SEQ ID NO: 2447698 - RNA, 19 nt, Artificial Sequence
  Description of Artificial Sequence: Synthetic oligonucleotide
  Sense strand starting at position 3749 of SEQ ID NO: 1887090
gcauucucgagugagaaug

SEQ ID NO: 2447699 - RNA, 19 nt, Artificial Sequence
  Description of Artificial Sequence: Synthetic oligonucleotide
  Antisense strand to SEQ ID NO: 2447698
cauucucacucgagaaugc

SEQ ID NO: 2447700 - RNA, 19 nt, Artificial Sequence
  Description of Artificial Sequence: Synthetic oligonucleotide
  Sense strand starting at position 3801 of SEQ ID NO: 1887090
gugagaaacugcuucagag

SEQ ID NO: 2447701 - RNA, 19 nt, Artificial Sequence
  Description of Artificial Sequence: Synthetic oligonucleotide
  Antisense strand to SEQ ID NO: 2447700
cucugaagcaguuucucac

SEQ ID NO: 2447702 - RNA, 19 nt, Artificial Sequence
  Description of Artificial Sequence: Synthetic oligonucleotide
  Sense strand starting at position 3897 of SEQ ID NO: 1887090
acucucuccugguugacaa

SEQ ID NO: 2447703 - RNA, 19 nt, Artificial Sequence
  Description of Artificial Sequence: Synthetic oligonucleotide
  Antisense strand to SEQ ID NO: 2447702
uugucaaccaggagagagu

SEQ ID NO: 2447704 - RNA, 19 nt, Artificial Sequence
  Description of Artificial Sequence: Synthetic oligonucleotide
  Sense strand starting at position 81 of SEQ ID NO: 1887091
aguuaauaauucccuaugu

SEQ ID NO: 2447705 - RNA, 19 nt, Artificial Sequence
  Description of Artificial Sequence: Synthetic oligonucleotide
  Antisense strand to SEQ ID NO: 2447704
acauagggaauuauuaacu

SEQ ID NO: 2447706 - RNA, 19 nt, Artificial Sequence
  Description of Artificial Sequence: Synthetic oligonucleotide
  Sense strand starting at position 82 of SEQ ID NO: 1887091
guuaauaauucccuauguc

SEQ ID NO: 2447707 - RNA, 19 nt, Artificial Sequence
  Description of Artificial Sequence: Synthetic oligonucleotide
  Antisense strand to SEQ ID NO: 2447706
gacauagggaauuauuaac

SEQ ID NO: 2447708 - RNA, 19 nt, Artificial Sequence
  Description of Artificial Sequence: Synthetic oligonucleotide
  Sense strand starting at position 108 of SEQ ID NO: 1887091
ccuacuagcuaucugugua

SEQ ID NO: 2447709 - RNA, 19 nt, Artificial Sequence
  Description of Artificial Sequence: Synthetic oligonucleotide
  Antisense strand to SEQ ID NO: 2447708
uacacagauagcuaguagg

SEQ ID NO: 2447710 - RNA, 19 nt, Artificial Sequence
  Description of Artificial Sequence: Synthetic oligonucleotide
  Sense strand starting at position 112 of SEQ ID NO: 1887091
cuagcuaucuguguaccua

SEQ ID NO: 2447711 - RNA, 19 nt, Artificial Sequence
  Description of Artificial Sequence: Synthetic oligonucleotide
  Antisense strand to SEQ ID NO: 2447710
uagguacacagauagcuag

SEQ ID NO: 2447712 - RNA, 19 nt, Artificial Sequence
  Description of Artificial Sequence: Synthetic oligonucleotide
  Sense strand starting at position 139 of SEQ ID NO: 1887091
cuccauguaucuguuaaua

SEQ ID NO: 2447713 - RNA, 19 nt, Artificial Sequence
  Description of Artificial Sequence: Synthetic oligonucleotide
  Antisense strand to SEQ ID NO: 2447712
uauuaacagauacauggag

SEQ ID NO: 2447714 - RNA, 19 nt, Artificial Sequence
  Description of Artificial Sequence: Synthetic oligonucleotide
  Sense strand starting at position 150 of SEQ ID NO: 1887091
uguuaauacuuuccuaugu

SEQ ID NO: 2447715 - RNA, 19 nt, Artificial Sequence
  Description of Artificial Sequence: Synthetic oligonucleotide
  Antisense strand to SEQ ID NO: 2447714
acauaggaaaguauuaaca

SEQ ID NO: 2447716 - RNA, 19 nt, Artificial Sequence
  Description of Artificial Sequence: Synthetic oligonucleotide
  Sense strand starting at position 222 of SEQ ID NO: 1887091
cagugagugucugcugaaa

SEQ ID NO: 2447717 - RNA, 19 nt, Artificial Sequence
  Description of Artificial Sequence: Synthetic oligonucleotide
  Antisense strand to SEQ ID NO: 2447716
uuucagcagacacucacug

SEQ ID NO: 2447718 - RNA, 19 nt, Artificial Sequence
  Description of Artificial Sequence: Synthetic oligonucleotide
  Sense strand starting at position 263 of SEQ ID NO: 1887091
aacuucuguccugauggua

SEQ ID NO: 2447719 - RNA, 19 nt, Artificial Sequence
  Description of Artificial Sequence: Synthetic oligonucleotide
  Antisense strand to SEQ ID NO: 2447718
uaccaucaggacagaaguu

SEQ ID NO: 2447720 - RNA, 19 nt, Artificial Sequence
  Description of Artificial Sequence: Synthetic oligonucleotide
  Sense strand starting at position 271 of SEQ ID NO: 1887091
uccugaugguaaguauaag

SEQ ID NO: 2447721 - RNA, 19 nt, Artificial Sequence
  Description of Artificial Sequence: Synthetic oligonucleotide
  Antisense strand to SEQ ID NO: 2447720
cuuauacuuaccaucagga

SEQ ID NO: 2447722 - RNA, 19 nt, Artificial Sequence
  Description of Artificial Sequence: Synthetic oligonucleotide
  Sense strand starting at position 296 of SEQ ID NO: 1887091
gaugaagauuaggcuguaa

SEQ ID NO: 2447723 - RNA, 19 nt, Artificial Sequence
  Description of Artificial Sequence: Synthetic oligonucleotide
  Antisense strand to SEQ ID NO: 2447722
uuacagccuaaucuucauc

SEQ ID NO: 2447724 - RNA, 19 nt, Artificial Sequence
  Description of Artificial Sequence: Synthetic oligonucleotide
  Sense strand starting at position 676 of SEQ ID NO: 1887091
agucaacugucauugcuua

SEQ ID NO: 2447725 - RNA, 19 nt, Artificial Sequence
  Description of Artificial Sequence: Synthetic oligonucleotide
  Antisense strand to SEQ ID NO: 2447724
uaagcaaugacaguugacu

SEQ ID NO: 2447726 - RNA, 19 nt, Artificial Sequence
  Description of Artificial Sequence: Synthetic oligonucleotide
  Sense strand starting at position 684 of SEQ ID NO: 1887091
gucauugcuuacccuggaa

SEQ ID NO: 2447727 - RNA, 19 nt, Artificial Sequence
  Description of Artificial Sequence: Synthetic oligonucleotide
  Antisense strand to SEQ ID NO: 2447726
uuccaggguaagcaaugac

SEQ ID NO: 2447728 - RNA, 19 nt, Artificial Sequence
  Description of Artificial Sequence: Synthetic oligonucleotide
  Sense strand starting at position 687 of SEQ ID NO: 1887091
auugcuuacccuggaaauu

SEQ ID NO: 2447729 - RNA, 19 nt, Artificial Sequence
  Description of Artificial Sequence: Synthetic oligonucleotide
  Antisense strand to SEQ ID NO: 2447728
aauuuccaggguaagcaau

SEQ ID NO: 2447730 - RNA, 19 nt, Artificial Sequence
  Description of Artificial Sequence: Synthetic oligonucleotide
  Sense strand starting at position 864 of SEQ ID NO: 1887091
aaaguuugggcagaugcua

SEQ ID NO: 2447731 - RNA, 19 nt, Artificial Sequence
  Description of Artificial Sequence: Synthetic oligonucleotide
  Antisense strand to SEQ ID NO: 2447730
uagcaucugcccaaacuuu

SEQ ID NO: 2447732 - RNA, 19 nt, Artificial Sequence
  Description of Artificial Sequence: Synthetic oligonucleotide
  Sense strand starting at position 1113 of SEQ ID NO: 1887091
aagauuugauauugaguac

SEQ ID NO: 2447733 - RNA, 19 nt, Artificial Sequence
  Description of Artificial Sequence: Synthetic oligonucleotide
  Antisense strand to SEQ ID NO: 2447732
guacucaauaucaaaucuu

SEQ ID NO: 2447734 - RNA, 19 nt, Artificial Sequence
  Description of Artificial Sequence: Synthetic oligonucleotide
  Sense strand starting at position 1133 of SEQ ID NO: 1887091
guguuccuccuguagaaag

SEQ ID NO: 2447735 - RNA, 19 nt, Artificial Sequence
  Description of Artificial Sequence: Synthetic oligonucleotide
  Antisense strand to SEQ ID NO: 2447734
cuuucuacaggaggaacac

SEQ ID NO: 2447736 - RNA, 19 nt, Artificial Sequence
  Description of Artificial Sequence: Synthetic oligonucleotide
  Sense strand starting at position 1216 of SEQ ID NO: 1887091
uccuaaugucagggaaauc

SEQ ID NO: 2447737 - RNA, 19 nt, Artificial Sequence
  Description of Artificial Sequence: Synthetic oligonucleotide
  Antisense strand to SEQ ID NO: 2447736
gauuucccugacauuagga

SEQ ID NO: 2447738 - RNA, 19 nt, Artificial Sequence
  Description of Artificial Sequence: Synthetic oligonucleotide
  Sense strand starting at position 1285 of SEQ ID NO: 1887091
cagggugucugacuuagga

SEQ ID NO: 2447739 - RNA, 19 nt, Artificial Sequence
  Description of Artificial Sequence: Synthetic oligonucleotide
  Antisense strand to SEQ ID NO: 2447738
uccuaagucagacacccug

SEQ ID NO: 2447740 - RNA, 19 nt, Artificial Sequence
  Description of Artificial Sequence: Synthetic oligonucleotide
  Sense strand starting at position 1424 of SEQ ID NO: 1887091
ucacaucagcccuaagguu

SEQ ID NO: 2447741 - RNA, 19 nt, Artificial Sequence
  Description of Artificial Sequence: Synthetic oligonucleotide
  Antisense strand to SEQ ID NO: 2447740
aaccuuagggcugauguga

SEQ ID NO: 2447742 - RNA, 19 nt, Artificial Sequence
  Description of Artificial Sequence: Synthetic oligonucleotide
  Sense strand starting at position 1538 of SEQ ID NO: 1887091
uuagguuugccugacucca

SEQ ID NO: 2447743 - RNA, 19 nt, Artificial Sequence
  Description of Artificial Sequence: Synthetic oligonucleotide
  Antisense strand to SEQ ID NO: 2447742
uggagucaggcaaaccuaa

SEQ ID NO: 2447744 - RNA, 19 nt, Artificial Sequence
  Description of Artificial Sequence: Synthetic oligonucleotide
  Sense strand starting at position 1591 of SEQ ID NO: 1887091
ugaagccuuucgcugacua

SEQ ID NO: 2447745 - RNA, 19 nt, Artificial Sequence
  Description of Artificial Sequence: Synthetic oligonucleotide
  Antisense strand to SEQ ID NO: 2447744
uagucagcgaaaggcuuca

SEQ ID NO: 2447746 - RNA, 19 nt, Artificial Sequence
  Description of Artificial Sequence: Synthetic oligonucleotide
  Sense strand starting at position 1593 of SEQ ID NO: 1887091
aagccuuucgcugacuaga

SEQ ID NO: 2447747 - RNA, 19 nt, Artificial Sequence
  Description of Artificial Sequence: Synthetic oligonucleotide
  Antisense strand to SEQ ID NO: 2447746
ucuagucagcgaaaggcuu

SEQ ID NO: 2447748 - RNA, 19 nt, Artificial Sequence
  Description of Artificial Sequence: Synthetic oligonucleotide
  Sense strand starting at position 1596 of SEQ ID NO: 1887091
ccuuucgcugacuagauua

SEQ ID NO: 2447749 - RNA, 19 nt, Artificial Sequence
  Description of Artificial Sequence: Synthetic oligonucleotide
  Antisense strand to SEQ ID NO: 2447748
uaaucuagucagcgaaagg

SEQ ID NO: 2447750 - RNA, 19 nt, Artificial Sequence
  Description of Artificial Sequence: Synthetic oligonucleotide
  Sense strand starting at position 1746 of SEQ ID NO: 1887091
gagccugggucugucuaau

SEQ ID NO: 2447751 - RNA, 19 nt, Artificial Sequence
  Description of Artificial Sequence: Synthetic oligonucleotide
  Antisense strand to SEQ ID NO: 2447750
auuagacagacccaggcuc

SEQ ID NO: 2447752 - RNA, 19 nt, Artificial Sequence
  Description of Artificial Sequence: Synthetic oligonucleotide
  Sense strand starting at position 1889 of SEQ ID NO: 1887091
ccaggcuucgcggaaacuu

SEQ ID NO: 2447753 - RNA, 19 nt, Artificial Sequence
  Description of Artificial Sequence: Synthetic oligonucleotide
  Antisense strand to SEQ ID NO: 2447752
aaguuuccgcgaagccugg

SEQ ID NO: 2447754 - RNA, 19 nt, Artificial Sequence
  Description of Artificial Sequence: Synthetic oligonucleotide
  Sense strand starting at position 2443 of SEQ ID NO: 1887091
gggagagcgcgaugaacuu

SEQ ID NO: 2447755 - RNA, 19 nt, Artificial Sequence
  Description of Artificial Sequence: Synthetic oligonucleotide
  Antisense strand to SEQ ID NO: 2447754
aaguucaucgcgcucuccc

SEQ ID NO: 2447756 - RNA, 19 nt, Artificial Sequence
  Description of Artificial Sequence: Synthetic oligonucleotide
  Sense strand starting at position 2449 of SEQ ID NO: 1887091
gcgcgaugaacuugaacca

SEQ ID NO: 2447757 - RNA, 19 nt, Artificial Sequence
  Description of Artificial Sequence: Synthetic oligonucleotide
  Antisense strand to SEQ ID NO: 2447756
ugguucaaguucaucgcgc

SEQ ID NO: 2447758 - RNA, 19 nt, Artificial Sequence
  Description of Artificial Sequence: Synthetic oligonucleotide
  Sense strand starting at position 2763 of SEQ ID NO: 1887091
ccgauuucagccugaguga

SEQ ID NO: 2447759 - RNA, 19 nt, Artificial Sequence
  Description of Artificial Sequence: Synthetic oligonucleotide
  Antisense strand to SEQ ID NO: 2447758
ucacucaggcugaaaucgg

SEQ ID NO: 2447760 - RNA, 19 nt, Artificial Sequence
  Description of Artificial Sequence: Synthetic oligonucleotide
  Sense strand starting at position 2777 of SEQ ID NO: 1887091
agugacuuugagcgaguca

SEQ ID NO: 2447761 - RNA, 19 nt, Artificial Sequence
  Description of Artificial Sequence: Synthetic oligonucleotide
  Antisense strand to SEQ ID NO: 2447760
ugacucgcucaaagucacu

SEQ ID NO: 2447762 - RNA, 19 nt, Artificial Sequence
  Description of Artificial Sequence: Synthetic oligonucleotide
  Sense strand starting at position 3111 of SEQ ID NO: 1887091
cugaaacucgugcaugauu

SEQ ID NO: 2447763 - RNA, 19 nt, Artificial Sequence
  Description of Artificial Sequence: Synthetic oligonucleotide
  Antisense strand to SEQ ID NO: 2447762
aaucaugcacgaguuucag

SEQ ID NO: 2447764 - RNA, 19 nt, Artificial Sequence
  Description of Artificial Sequence: Synthetic oligonucleotide
  Sense strand starting at position 3120 of SEQ ID NO: 1887091
gugcaugauuuaggacuga

SEQ ID NO: 2447765 - RNA, 19 nt, Artificial Sequence
  Description of Artificial Sequence: Synthetic oligonucleotide
  Antisense strand to SEQ ID NO: 2447764
ucaguccuaaaucaugcac

SEQ ID NO: 2447766 - RNA, 19 nt, Artificial Sequence
  Description of Artificial Sequence: Synthetic oligonucleotide
  Sense strand starting at position 3177 of SEQ ID NO: 1887091
uaguaaagguaauucguua

SEQ ID NO: 2447767 - RNA, 19 nt, Artificial Sequence
  Description of Artificial Sequence: Synthetic oligonucleotide
  Antisense strand to SEQ ID NO: 2447766
uaacgaauuaccuuuacua

SEQ ID NO: 2447768 - RNA, 19 nt, Artificial Sequence
  Description of Artificial Sequence: Synthetic oligonucleotide
  Sense strand starting at position 3181 of SEQ ID NO: 1887091
aaagguaauucguuagaaa

SEQ ID NO: 2447769 - RNA, 19 nt, Artificial Sequence
  Description of Artificial Sequence: Synthetic oligonucleotide
  Antisense strand to SEQ ID NO: 2447768
uuucuaacgaauuaccuuu

SEQ ID NO: 2447770 - RNA, 19 nt, Artificial Sequence
  Description of Artificial Sequence: Synthetic oligonucleotide
  Sense strand starting at position 3182 of SEQ ID NO: 1887091
aagguaauucguuagaaac

SEQ ID NO: 2447771 - RNA, 19 nt, Artificial Sequence
  Description of Artificial Sequence: Synthetic oligonucleotide
  Antisense strand to SEQ ID NO: 2447770
guuucuaacgaauuaccuu

SEQ ID NO: 2447772 - RNA, 19 nt, Artificial Sequence
  Description of Artificial Sequence: Synthetic oligonucleotide
  Sense strand starting at position 3221 of SEQ ID NO: 1887091
cugugucuuguuuaacuuu

SEQ ID NO: 2447773 - RNA, 19 nt, Artificial Sequence
  Description of Artificial Sequence: Synthetic oligonucleotide
  Antisense strand to SEQ ID NO: 2447772
aaaguuaaacaagacacag

SEQ ID NO: 2447774 - RNA, 19 nt, Artificial Sequence
  Description of Artificial Sequence: Synthetic oligonucleotide
  Sense strand starting at position 3418 of SEQ ID NO: 1887091
cgagauucccuguguccac

SEQ ID NO: 2447775 - RNA, 19 nt, Artificial Sequence
  Description of Artificial Sequence: Synthetic oligonucleotide
  Antisense strand to SEQ ID NO: 2447774
guggacacagggaaucucg

SEQ ID NO: 2447776 - RNA, 19 nt, Artificial Sequence
  Description of Artificial Sequence: Synthetic oligonucleotide
  Sense strand starting at position 3519 of SEQ ID NO: 1887091
gaguaaaucccugacgcca

SEQ ID NO: 2447777 - RNA, 19 nt, Artificial Sequence
  Description of Artificial Sequence: Synthetic oligonucleotide
  Antisense strand to SEQ ID NO: 2447776
uggcgucagggauuuacuc

SEQ ID NO: 2447778 - RNA, 19 nt, Artificial Sequence
  Description of Artificial Sequence: Synthetic oligonucleotide
  Sense strand starting at position 3597 of SEQ ID NO: 1887091
aucucccuuccggaugaaa

SEQ ID NO: 2447779 - RNA, 19 nt, Artificial Sequence
  Description of Artificial Sequence: Synthetic oligonucleotide
  Antisense strand to SEQ ID NO: 2447778
uuucauccggaagggagau

SEQ ID NO: 2447780 - RNA, 19 nt, Artificial Sequence
  Description of Artificial Sequence: Synthetic oligonucleotide
  Sense strand starting at position 3660 of SEQ ID NO: 1887091
ugauguuccgguugaacag

SEQ ID NO: 2447781 - RNA, 19 nt, Artificial Sequence
  Description of Artificial Sequence: Synthetic oligonucleotide
  Antisense strand to SEQ ID NO: 2447780
cuguucaaccggaacauca

SEQ ID NO: 2447782 - RNA, 19 nt, Artificial Sequence
  Description of Artificial Sequence: Synthetic oligonucleotide
  Sense strand starting at position 3672 of SEQ ID NO: 1887091
ugaacaggugcuggugaaa

SEQ ID NO: 2447783 - RNA, 19 nt, Artificial Sequence
  Description of Artificial Sequence: Synthetic oligonucleotide
  Antisense strand to SEQ ID NO: 2447782
uuucaccagcaccuguuca

SEQ ID NO: 2447784 - RNA, 19 nt, Artificial Sequence
  Description of Artificial Sequence: Synthetic oligonucleotide
  Sense strand starting at position 129 of SEQ ID NO: 1887092
gcgagucagagcugagguu

SEQ ID NO: 2447785 - RNA, 19 nt, Artificial Sequence
  Description of Artificial Sequence: Synthetic oligonucleotide
  Antisense strand to SEQ ID NO: 2447784
aaccucagcucugacucgc

SEQ ID NO: 2447786 - RNA, 19 nt, Artificial Sequence
  Description of Artificial Sequence: Synthetic oligonucleotide
  Sense strand starting at position 228 of SEQ ID NO: 1887092
guugucuugugacaacaga

SEQ ID NO: 2447787 - RNA, 19 nt, Artificial Sequence
  Description of Artificial Sequence: Synthetic oligonucleotide
  Antisense strand to SEQ ID NO: 2447786
ucuguugucacaagacaac

SEQ ID NO: 2447788 - RNA, 19 nt, Artificial Sequence
  Description of Artificial Sequence: Synthetic oligonucleotide
  Sense strand starting at position 340 of SEQ ID NO: 1887092
ggcccagcuucucugucaa

SEQ ID NO: 2447789 - RNA, 19 nt, Artificial Sequence
  Description of Artificial Sequence: Synthetic oligonucleotide
  Antisense strand to SEQ ID NO: 2447788
uugacagagaagcugggcc

SEQ ID NO: 2447790 - RNA, 19 nt, Artificial Sequence
  Description of Artificial Sequence: Synthetic oligonucleotide
  Sense strand starting at position 583 of SEQ ID NO: 1887092
aagaaacuuugugagaaug

SEQ ID NO: 2447791 - RNA, 19 nt, Artificial Sequence
  Description of Artificial Sequence: Synthetic oligonucleotide
  Antisense strand to SEQ ID NO: 2447790
cauucucacaaaguuucuu

SEQ ID NO: 2447792 - RNA, 19 nt, Artificial Sequence
  Description of Artificial Sequence: Synthetic oligonucleotide
  Sense strand starting at position 591 of SEQ ID NO: 1887092
uugugagaauggcuaggau

SEQ ID NO: 2447793 - RNA, 19 nt, Artificial Sequence
  Description of Artificial Sequence: Synthetic oligonucleotide
  Antisense strand to SEQ ID NO: 2447792
auccuagccauucucacaa

SEQ ID NO: 2447794 - RNA, 19 nt, Artificial Sequence
  Description of Artificial Sequence: Synthetic oligonucleotide
  Sense strand starting at position 595 of SEQ ID NO: 1887092
gagaauggcuaggauacau

SEQ ID NO: 2447795 - RNA, 19 nt, Artificial Sequence
  Description of Artificial Sequence: Synthetic oligonucleotide
  Antisense strand to SEQ ID NO: 2447794
auguauccuagccauucuc

SEQ ID NO: 2447796 - RNA, 19 nt, Artificial Sequence
  Description of Artificial Sequence: Synthetic oligonucleotide
  Sense strand starting at position 971 of SEQ ID NO: 1887092
auaaguaccucugugagag

SEQ ID NO: 2447797 - RNA, 19 nt, Artificial Sequence
  Description of Artificial Sequence: Synthetic oligonucleotide
  Antisense strand to SEQ ID NO: 2447796
cucucacagagguacuuau

SEQ ID NO: 2447798 - RNA, 19 nt, Artificial Sequence
  Description of Artificial Sequence: Synthetic oligonucleotide
  Sense strand starting at position 972 of SEQ ID NO: 1887092
uaaguaccucugugagagu

SEQ ID NO: 2447799 - RNA, 19 nt, Artificial Sequence
  Description of Artificial Sequence: Synthetic oligonucleotide
  Antisense strand to SEQ ID NO: 2447798
acucucacagagguacuua

SEQ ID NO: 2447800 - RNA, 19 nt, Artificial Sequence
  Description of Artificial Sequence: Synthetic oligonucleotide
  Sense strand starting at position 1060 of SEQ ID NO: 1887092
ccuugaugucuuuguggag

SEQ ID NO: 2447801 - RNA, 19 nt, Artificial Sequence
  Description of Artificial Sequence: Synthetic oligonucleotide
  Antisense strand to SEQ ID NO: 2447800
cuccacaaagacaucaagg

SEQ ID NO: 2447802 - RNA, 19 nt, Artificial Sequence
  Description of Artificial Sequence: Synthetic oligonucleotide
  Sense strand starting at position 1061 of SEQ ID NO: 1887092
cuugaugucuuuguggaga

SEQ ID NO: 2447803 - RNA, 19 nt, Artificial Sequence
  Description of Artificial Sequence: Synthetic oligonucleotide
  Antisense strand to SEQ ID NO: 2447802
ucuccacaaagacaucaag

SEQ ID NO: 2447804 - RNA, 19 nt, Artificial Sequence
  Description of Artificial Sequence: Synthetic oligonucleotide
  Sense strand starting at position 1218 of SEQ ID NO: 1887092
gauucuugcucagaggaag

SEQ ID NO: 2447805 - RNA, 19 nt, Artificial Sequence
  Description of Artificial Sequence: Synthetic oligonucleotide
  Antisense strand to SEQ ID NO: 2447804
cuuccucugagcaagaauc

SEQ ID NO: 2447806 - RNA, 19 nt, Artificial Sequence
  Description of Artificial Sequence: Synthetic oligonucleotide
  Sense strand starting at position 1503 of SEQ ID NO: 1887092
gugucuuguacccaaagca

SEQ ID NO: 2447807 - RNA, 19 nt, Artificial Sequence
  Description of Artificial Sequence: Synthetic oligonucleotide
  Antisense strand to SEQ ID NO: 2447806
ugcuuuggguacaagacac

SEQ ID NO: 2447808 - RNA, 19 nt, Artificial Sequence
  Description of Artificial Sequence: Synthetic oligonucleotide
  Sense strand starting at position 1564 of SEQ ID NO: 1887092
ucuagugagcacugaaucu

SEQ ID NO: 2447809 - RNA, 19 nt, Artificial Sequence
  Description of Artificial Sequence: Synthetic oligonucleotide
  Antisense strand to SEQ ID NO: 2447808
agauucagugcucacuaga

SEQ ID NO: 2447810 - RNA, 19 nt, Artificial Sequence
  Description of Artificial Sequence: Synthetic oligonucleotide
  Sense strand starting at position 1573 of SEQ ID NO: 1887092
cacugaaucugagggugaa

SEQ ID NO: 2447811 - RNA, 19 nt, Artificial Sequence
  Description of Artificial Sequence: Synthetic oligonucleotide
  Antisense strand to SEQ ID NO: 2447810
uucacccucagauucagug

SEQ ID NO: 2447812 - RNA, 19 nt, Artificial Sequence
  Description of Artificial Sequence: Synthetic oligonucleotide
  Sense strand starting at position 1576 of SEQ ID NO: 1887092
ugaaucugagggugaagua

SEQ ID NO: 2447813 - RNA, 19 nt, Artificial Sequence
  Description of Artificial Sequence: Synthetic oligonucleotide
  Antisense strand to SEQ ID NO: 2447812
uacuucacccucagauuca

SEQ ID NO: 2447814 - RNA, 19 nt, Artificial Sequence
  Description of Artificial Sequence: Synthetic oligonucleotide
  Sense strand starting at position 1701 of SEQ ID NO: 1887092
accuuagagucacaggagu

SEQ ID NO: 2447815 - RNA, 19 nt, Artificial Sequence
  Description of Artificial Sequence: Synthetic oligonucleotide
  Antisense strand to SEQ ID NO: 2447814
acuccugugacucuaaggu

SEQ ID NO: 2447816 - RNA, 19 nt, Artificial Sequence
  Description of Artificial Sequence: Synthetic oligonucleotide
  Sense strand starting at position 1824 of SEQ ID NO: 1887092
gccuaaugccuguaaggag

SEQ ID NO: 2447817 - RNA, 19 nt, Artificial Sequence
  Description of Artificial Sequence: Synthetic oligonucleotide
  Antisense strand to SEQ ID NO: 2447816
cuccuuacaggcauuaggc

SEQ ID NO: 2447818 - RNA, 19 nt, Artificial Sequence
  Description of Artificial Sequence: Synthetic oligonucleotide
  Sense strand starting at position 1875 of SEQ ID NO: 1887092
gcucauuguccgcacauga

SEQ ID NO: 2447819 - RNA, 19 nt, Artificial Sequence
  Description of Artificial Sequence: Synthetic oligonucleotide
  Antisense strand to SEQ ID NO: 2447818
ucaugugcggacaaugagc

SEQ ID NO: 2447820 - RNA, 19 nt, Artificial Sequence
  Description of Artificial Sequence: Synthetic oligonucleotide
  Sense strand starting at position 2159 of SEQ ID NO: 1887092
gcaaauuggagucaauagu

SEQ ID NO: 2447821 - RNA, 19 nt, Artificial Sequence
  Description of Artificial Sequence: Synthetic oligonucleotide
  Antisense strand to SEQ ID NO: 2447820
acuauugacuccaauuugc

SEQ ID NO: 2447822 - RNA, 19 nt, Artificial Sequence
  Description of Artificial Sequence: Synthetic oligonucleotide
  Sense strand starting at position 2165 of SEQ ID NO: 1887092
uggagucaauagucccaaa

SEQ ID NO: 2447823 - RNA, 19 nt, Artificial Sequence
  Description of Artificial Sequence: Synthetic oligonucleotide
  Antisense strand to SEQ ID NO: 2447822
uuugggacuauugacucca

SEQ ID NO: 2447824 - RNA, 19 nt, Artificial Sequence
  Description of Artificial Sequence: Synthetic oligonucleotide
  Sense strand starting at position 2168 of SEQ ID NO: 1887092
agucaauagucccaaaugu

SEQ ID NO: 2447825 - RNA, 19 nt, Artificial Sequence
  Description of Artificial Sequence: Synthetic oligonucleotide
  Antisense strand to SEQ ID NO: 2447824
acauuugggacuauugacu

SEQ ID NO: 2447826 - RNA, 19 nt, Artificial Sequence
  Description of Artificial Sequence: Synthetic oligonucleotide
  Sense strand starting at position 2242 of SEQ ID NO: 1887092
aggcaagugccuuaagaac

SEQ ID NO: 2447827 - RNA, 19 nt, Artificial Sequence
  Description of Artificial Sequence: Synthetic oligonucleotide
  Antisense strand to SEQ ID NO: 2447826
guucuuaaggcacuugccu

SEQ ID NO: 2447828 - RNA, 19 nt, Artificial Sequence
  Description of Artificial Sequence: Synthetic oligonucleotide
  Sense strand starting at position 2301 of SEQ ID NO: 1887092
cucagaagaucugucucau

SEQ ID NO: 2447829 - RNA, 19 nt, Artificial Sequence
  Description of Artificial Sequence: Synthetic oligonucleotide
  Antisense strand to SEQ ID NO: 2447828
augagacagaucuucugag

SEQ ID NO: 2447830 - RNA, 19 nt, Artificial Sequence
  Description of Artificial Sequence: Synthetic oligonucleotide
  Sense strand starting at position 2307 of SEQ ID NO: 1887092
agaucugucucaucucaga

SEQ ID NO: 2447831 - RNA, 19 nt, Artificial Sequence
  Description of Artificial Sequence: Synthetic oligonucleotide
  Antisense strand to SEQ ID NO: 2447830
ucugagaugagacagaucu

SEQ ID NO: 2447832 - RNA, 19 nt, Artificial Sequence
  Description of Artificial Sequence: Synthetic oligonucleotide
  Sense strand starting at position 2445 of SEQ ID NO: 1887092
gcucuacucugucuggcaa

SEQ ID NO: 2447833 - RNA, 19 nt, Artificial Sequence
  Description of Artificial Sequence: Synthetic oligonucleotide
  Antisense strand to SEQ ID NO: 2447832
uugccagacagaguagagc

SEQ ID NO: 2447834 - RNA, 19 nt, Artificial Sequence
  Description of Artificial Sequence: Synthetic oligonucleotide
  Sense strand starting at position 2528 of SEQ ID NO: 1887092
cucagaucuccugggauca

SEQ ID NO: 2447835 - RNA, 19 nt, Artificial Sequence
  Description of Artificial Sequence: Synthetic oligonucleotide
  Antisense strand to SEQ ID NO: 2447834
ugaucccaggagaucugag

SEQ ID NO: 2447836 - RNA, 19 nt, Artificial Sequence
  Description of Artificial Sequence: Synthetic oligonucleotide
  Sense strand starting at position 2530 of SEQ ID NO: 1887092
cagaucuccugggaucaua

SEQ ID NO: 2447837 - RNA, 19 nt, Artificial Sequence
  Description of Artificial Sequence: Synthetic oligonucleotide
  Antisense strand to SEQ ID NO: 2447836
uaugaucccaggagaucug

SEQ ID NO: 2447838 - RNA, 19 nt, Artificial Sequence
  Description of Artificial Sequence: Synthetic oligonucleotide
  Sense strand starting at position 2670 of SEQ ID NO: 1887092
uuggguucuuuccacaaca

SEQ ID NO: 2447839 - RNA, 19 nt, Artificial Sequence
  Description of Artificial Sequence: Synthetic oligonucleotide
  Antisense strand to SEQ ID NO: 2447838
uguuguggaaagaacccaa

SEQ ID NO: 2447840 - RNA, 19 nt, Artificial Sequence
  Description of Artificial Sequence: Synthetic oligonucleotide
  Sense strand starting at position 2672 of SEQ ID NO: 1887092
ggguucuuuccacaacauc

SEQ ID NO: 2447841 - RNA, 19 nt, Artificial Sequence
  Description of Artificial Sequence: Synthetic oligonucleotide
  Antisense strand to SEQ ID NO: 2447840
gauguuguggaaagaaccc

SEQ ID NO: 2447842 - RNA, 19 nt, Artificial Sequence
  Description of Artificial Sequence: Synthetic oligonucleotide
  Sense strand starting at position 2759 of SEQ ID NO: 1887092
ugugggaguggccgugaaa

SEQ ID NO: 2447843 - RNA, 19 nt, Artificial Sequence
  Description of Artificial Sequence: Synthetic oligonucleotide
  Antisense strand to SEQ ID NO: 2447842
uuucacggccacucccaca

SEQ ID NO: 2447844 - RNA, 19 nt, Artificial Sequence
  Description of Artificial Sequence: Synthetic oligonucleotide
  Sense strand starting at position 2781 of SEQ ID NO: 1887092
gaagcuuucuccucuggga

SEQ ID NO: 2447845 - RNA, 19 nt, Artificial Sequence
  Description of Artificial Sequence: Synthetic oligonucleotide
  Antisense strand to SEQ ID NO: 2447844
ucccagaggagaaagcuuc

SEQ ID NO: 2447846 - RNA, 19 nt, Artificial Sequence
  Description of Artificial Sequence: Synthetic oligonucleotide
  Sense strand starting at position 2823 of SEQ ID NO: 1887092
gaugaaagcucccucugga

SEQ ID NO: 2447847 - RNA, 19 nt, Artificial Sequence
  Description of Artificial Sequence: Synthetic oligonucleotide
  Antisense strand to SEQ ID NO: 2447846
uccagagggagcuuucauc

SEQ ID NO: 2447848 - RNA, 19 nt, Artificial Sequence
  Description of Artificial Sequence: Synthetic oligonucleotide
  Sense strand starting at position 3069 of SEQ ID NO: 1887092
auccucacccugugauuau

SEQ ID NO: 2447849 - RNA, 19 nt, Artificial Sequence
  Description of Artificial Sequence: Synthetic oligonucleotide
  Antisense strand to SEQ ID NO: 2447848
auaaucacagggugaggau

SEQ ID NO: 2447850 - RNA, 19 nt, Artificial Sequence
  Description of Artificial Sequence: Synthetic oligonucleotide
  Sense strand starting at position 3079 of SEQ ID NO: 1887092
ugugauuauuuaugguaca

SEQ ID NO: 2447851 - RNA, 19 nt, Artificial Sequence
  Description of Artificial Sequence: Synthetic oligonucleotide
  Antisense strand to SEQ ID NO: 2447850
uguaccauaaauaaucaca

SEQ ID NO: 2447852 - RNA, 19 nt, Artificial Sequence
  Description of Artificial Sequence: Synthetic oligonucleotide
  Sense strand starting at position 3080 of SEQ ID NO: 1887092
gugauuauuuaugguacaa

SEQ ID NO: 2447853 - RNA, 19 nt, Artificial Sequence
  Description of Artificial Sequence: Synthetic oligonucleotide
  Antisense strand to SEQ ID NO: 2447852
uuguaccauaaauaaucac

SEQ ID NO: 2447854 - RNA, 19 nt, Artificial Sequence
  Description of Artificial Sequence: Synthetic oligonucleotide
  Sense strand starting at position 3092 of SEQ ID NO: 1887092
gguacaauucugggccagu

SEQ ID NO: 2447855 - RNA, 19 nt, Artificial Sequence
  Description of Artificial Sequence: Synthetic oligonucleotide
  Antisense strand to SEQ ID NO: 2447854
acuggcccagaauuguacc

SEQ ID NO: 2447856 - RNA, 19 nt, Artificial Sequence
  Description of Artificial Sequence: Synthetic oligonucleotide
  Sense strand starting at position 3693 of SEQ ID NO: 1887092
ccggaaacucagcgagguu

SEQ ID NO: 2447857 - RNA, 19 nt, Artificial Sequence
  Description of Artificial Sequence: Synthetic oligonucleotide
  Antisense strand to SEQ ID NO: 2447856
aaccucgcugaguuuccgg

SEQ ID NO: 2447858 - RNA, 19 nt, Artificial Sequence
  Description of Artificial Sequence: Synthetic oligonucleotide
  Sense strand starting at position 3694 of SEQ ID NO: 1887092
cggaaacucagcgagguua

SEQ ID NO: 2447859 - RNA, 19 nt, Artificial Sequence
  Description of Artificial Sequence: Synthetic oligonucleotide
  Antisense strand to SEQ ID NO: 2447858
uaaccucgcugaguuuccg

SEQ ID NO: 2447860 - RNA, 19 nt, Artificial Sequence
  Description of Artificial Sequence: Synthetic oligonucleotide
  Sense strand starting at position 3782 of SEQ ID NO: 1887092
aagaacaggucuucuguga

SEQ ID NO: 2447861 - RNA, 19 nt, Artificial Sequence
  Description of Artificial Sequence: Synthetic oligonucleotide
  Antisense strand to SEQ ID NO: 2447860
ucacagaagaccuguucuu

SEQ ID NO: 2447862 - RNA, 19 nt, Artificial Sequence
  Description of Artificial Sequence: Synthetic oligonucleotide
  Sense strand starting at position 3786 of SEQ ID NO: 1887092
acaggucuucugugaagac

SEQ ID NO: 2447863 - RNA, 19 nt, Artificial Sequence
  Description of Artificial Sequence: Synthetic oligonucleotide
  Antisense strand to SEQ ID NO: 2447862
gucuucacagaagaccugu

SEQ ID NO: 2447864 - RNA, 19 nt, Artificial Sequence
  Description of Artificial Sequence: Synthetic oligonucleotide
  Sense strand starting at position 27 of SEQ ID NO: 1887093
cccacaaugcugcagagaa

SEQ ID NO: 2447865 - RNA, 19 nt, Artificial Sequence
  Description of Artificial Sequence: Synthetic oligonucleotide
  Antisense strand to SEQ ID NO: 2447864
uucucugcagcauuguggg

SEQ ID NO: 2447866 - RNA, 19 nt, Artificial Sequence
  Description of Artificial Sequence: Synthetic oligonucleotide
  Sense strand starting at position 45 of SEQ ID NO: 1887093
agagaaucagcauacuguu

SEQ ID NO: 2447867 - RNA, 19 nt, Artificial Sequence
  Description of Artificial Sequence: Synthetic oligonucleotide
  Antisense strand to SEQ ID NO: 2447866
aacaguaugcugauucucu

SEQ ID NO: 2447868 - RNA, 19 nt, Artificial Sequence
  Description of Artificial Sequence: Synthetic oligonucleotide
  Sense strand starting at position 91 of SEQ ID NO: 1887093
gaaguuucuagaggugcua

SEQ ID NO: 2447869 - RNA, 19 nt, Artificial Sequence
  Description of Artificial Sequence: Synthetic oligonucleotide
  Antisense strand to SEQ ID NO: 2447868
uagcaccucuagaaacuuc

SEQ ID NO: 2447870 - RNA, 19 nt, Artificial Sequence
  Description of Artificial Sequence: Synthetic oligonucleotide
  Sense strand starting at position 529 of SEQ ID NO: 1887093
gugcuugcagucuuaauuc

SEQ ID NO: 2447871 - RNA, 19 nt, Artificial Sequence
  Description of Artificial Sequence: Synthetic oligonucleotide
  Antisense strand to SEQ ID NO: 2447870
gaauuaagacugcaagcac

SEQ ID NO: 2447872 - RNA, 19 nt, Artificial Sequence
  Description of Artificial Sequence: Synthetic oligonucleotide
  Sense strand starting at position 537 of SEQ ID NO: 1887093
agucuuaauucuguggaca

SEQ ID NO: 2447873 - RNA, 19 nt, Artificial Sequence
  Description of Artificial Sequence: Synthetic oligonucleotide
  Antisense strand to SEQ ID NO: 2447872
uguccacagaauuaagacu

SEQ ID NO: 2447874 - RNA, 19 nt, Artificial Sequence
  Description of Artificial Sequence: Synthetic oligonucleotide
  Sense strand starting at position 538 of SEQ ID NO: 1887093
gucuuaauucuguggacac

SEQ ID NO: 2447875 - RNA, 19 nt, Artificial Sequence
  Description of Artificial Sequence: Synthetic oligonucleotide
  Antisense strand to SEQ ID NO: 2447874
guguccacagaauuaagac

SEQ ID NO: 2447876 - RNA, 19 nt, Artificial Sequence
  Description of Artificial Sequence: Synthetic oligonucleotide
  Sense strand starting at position 545 of SEQ ID NO: 1887093
uucuguggacacugauauu

SEQ ID NO: 2447877 - RNA, 19 nt, Artificial Sequence
  Description of Artificial Sequence: Synthetic oligonucleotide
  Antisense strand to SEQ ID NO: 2447876
aauaucaguguccacagaa

SEQ ID NO: 2447878 - RNA, 19 nt, Artificial Sequence
  Description of Artificial Sequence: Synthetic oligonucleotide
  Sense strand starting at position 1081 of SEQ ID NO: 1887093
guagguagaagucaauguu

SEQ ID NO: 2447879 - RNA, 19 nt, Artificial Sequence
  Description of Artificial Sequence: Synthetic oligonucleotide
  Antisense strand to SEQ ID NO: 2447878
aacauugacuucuaccuac

SEQ ID NO: 2447880 - RNA, 19 nt, Artificial Sequence
  Description of Artificial Sequence: Synthetic oligonucleotide
  Sense strand starting at position 1084 of SEQ ID NO: 1887093
gguagaagucaauguugua

SEQ ID NO: 2447881 - RNA, 19 nt, Artificial Sequence
  Description of Artificial Sequence: Synthetic oligonucleotide
  Antisense strand to SEQ ID NO: 2447880
uacaacauugacuucuacc

SEQ ID NO: 2447882 - RNA, 19 nt, Artificial Sequence
  Description of Artificial Sequence: Synthetic oligonucleotide
  Sense strand starting at position 1094 of SEQ ID NO: 1887093
aauguuguagccuagguua

SEQ ID NO: 2447883 - RNA, 19 nt, Artificial Sequence
  Description of Artificial Sequence: Synthetic oligonucleotide
  Antisense strand to SEQ ID NO: 2447882
uaaccuaggcuacaacauu

SEQ ID NO: 2447884 - RNA, 19 nt, Artificial Sequence
  Description of Artificial Sequence: Synthetic oligonucleotide
  Sense strand starting at position 1129 of SEQ ID NO: 1887093
gggaguuaacucugguuau

SEQ ID NO: 2447885 - RNA, 19 nt, Artificial Sequence
  Description of Artificial Sequence: Synthetic oligonucleotide
  Antisense strand to SEQ ID NO: 2447884
auaaccagaguuaacuccc

SEQ ID NO: 2447886 - RNA, 19 nt, Artificial Sequence
  Description of Artificial Sequence: Synthetic oligonucleotide
  Sense strand starting at position 1133 of SEQ ID NO: 1887093
guuaacucugguuauugga

SEQ ID NO: 2447887 - RNA, 19 nt, Artificial Sequence
  Description of Artificial Sequence: Synthetic oligonucleotide
  Antisense strand to SEQ ID NO: 2447886
uccaauaaccagaguuaac

SEQ ID NO: 2447888 - RNA, 19 nt, Artificial Sequence
  Description of Artificial Sequence: Synthetic oligonucleotide
  Sense strand starting at position 1135 of SEQ ID NO: 1887093
uaacucugguuauuggauu

SEQ ID NO: 2447889 - RNA, 19 nt, Artificial Sequence
  Description of Artificial Sequence: Synthetic oligonucleotide
  Antisense strand to SEQ ID NO: 2447888
aauccaauaaccagaguua

SEQ ID NO: 2447890 - RNA, 19 nt, Artificial Sequence
  Description of Artificial Sequence: Synthetic oligonucleotide
  Sense strand starting at position 2038 of SEQ ID NO: 1887093
ugcagcuugcuagaaauac

SEQ ID NO: 2447891 - RNA, 19 nt, Artificial Sequence
  Description of Artificial Sequence: Synthetic oligonucleotide
  Antisense strand to SEQ ID NO: 2447890
guauuucuagcaagcugca

SEQ ID NO: 2447892 - RNA, 19 nt, Artificial Sequence
  Description of Artificial Sequence: Synthetic oligonucleotide
  Sense strand starting at position 2196 of SEQ ID NO: 1887093
cugcuuggccuguauuaca

SEQ ID NO: 2447893 - RNA, 19 nt, Artificial Sequence
  Description of Artificial Sequence: Synthetic oligonucleotide
  Antisense strand to SEQ ID NO: 2447892
uguaauacaggccaagcag

SEQ ID NO: 2447894 - RNA, 19 nt, Artificial Sequence
  Description of Artificial Sequence: Synthetic oligonucleotide
  Sense strand starting at position 2300 of SEQ ID NO: 1887093
gguugagcccucugugaaa

SEQ ID NO: 2447895 - RNA, 19 nt, Artificial Sequence
  Description of Artificial Sequence: Synthetic oligonucleotide
  Antisense strand to SEQ ID NO: 2447894
uuucacagagggcucaacc

SEQ ID NO: 2447896 - RNA, 19 nt, Artificial Sequence
  Description of Artificial Sequence: Synthetic oligonucleotide
  Sense strand starting at position 2351 of SEQ ID NO: 1887093
uagugaacggauuguuucu

SEQ ID NO: 2447897 - RNA, 19 nt, Artificial Sequence
  Description of Artificial Sequence: Synthetic oligonucleotide
  Antisense strand to SEQ ID NO: 2447896
agaaacaauccguucacua

SEQ ID NO: 2447898 - RNA, 19 nt, Artificial Sequence
  Description of Artificial Sequence: Synthetic oligonucleotide
  Sense strand starting at position 2426 of SEQ ID NO: 1887093
gccuucgacaucuagaaag

SEQ ID NO: 2447899 - RNA, 19 nt, Artificial Sequence
  Description of Artificial Sequence: Synthetic oligonucleotide
  Antisense strand to SEQ ID NO: 2447898
cuuucuagaugucgaaggc

SEQ ID NO: 2447900 - RNA, 19 nt, Artificial Sequence
  Description of Artificial Sequence: Synthetic oligonucleotide
  Sense strand starting at position 2428 of SEQ ID NO: 1887093
cuucgacaucuagaaagua

SEQ ID NO: 2447901 - RNA, 19 nt, Artificial Sequence
  Description of Artificial Sequence: Synthetic oligonucleotide
  Antisense strand to SEQ ID NO: 2447900
uacuuucuagaugucgaag

SEQ ID NO: 2447902 - RNA, 19 nt, Artificial Sequence
  Description of Artificial Sequence: Synthetic oligonucleotide
  Sense strand starting at position 2440 of SEQ ID NO: 1887093
gaaaguauggugggaucuu

SEQ ID NO: 2447903 - RNA, 19 nt, Artificial Sequence
  Description of Artificial Sequence: Synthetic oligonucleotide
  Antisense strand to SEQ ID NO: 2447902
aagaucccaccauacuuuc

SEQ ID NO: 2447904 - RNA, 19 nt, Artificial Sequence
  Description of Artificial Sequence: Synthetic oligonucleotide
  Sense strand starting at position 2486 of SEQ ID NO: 1887093
ccuugugauccagaugagu

SEQ ID NO: 2447905 - RNA, 19 nt, Artificial Sequence
  Description of Artificial Sequence: Synthetic oligonucleotide
  Antisense strand to SEQ ID NO: 2447904
acucaucuggaucacaagg

SEQ ID NO: 2447906 - RNA, 19 nt, Artificial Sequence
  Description of Artificial Sequence: Synthetic oligonucleotide
  Sense strand starting at position 2488 of SEQ ID NO: 1887093
uugugauccagaugaguca

SEQ ID NO: 2447907 - RNA, 19 nt, Artificial Sequence
  Description of Artificial Sequence: Synthetic oligonucleotide
  Antisense strand to SEQ ID NO: 2447906
ugacucaucuggaucacaa

SEQ ID NO: 2447908 - RNA, 19 nt, Artificial Sequence
  Description of Artificial Sequence: Synthetic oligonucleotide
  Sense strand starting at position 2514 of SEQ ID NO: 1887093
cggccaggaucucuucuaa

SEQ ID NO: 2447909 - RNA, 19 nt, Artificial Sequence
  Description of Artificial Sequence: Synthetic oligonucleotide
  Antisense strand to SEQ ID NO: 2447908
uuagaagagauccuggccg

SEQ ID NO: 2447910 - RNA, 19 nt, Artificial Sequence
  Description of Artificial Sequence: Synthetic oligonucleotide
  Sense strand starting at position 2757 of SEQ ID NO: 1887093
ccaagcucaagaggugaau

SEQ ID NO: 2447911 - RNA, 19 nt, Artificial Sequence
  Description of Artificial Sequence: Synthetic oligonucleotide
  Antisense strand to SEQ ID NO: 2447910
auucaccucuugagcuugg

SEQ ID NO: 2447912 - RNA, 19 nt, Artificial Sequence
  Description of Artificial Sequence: Synthetic oligonucleotide
  Sense strand starting at position 2771 of SEQ ID NO: 1887093
ugaaucagugccuggcaga

SEQ ID NO: 2447913 - RNA, 19 nt, Artificial Sequence
  Description of Artificial Sequence: Synthetic oligonucleotide
  Antisense strand to SEQ ID NO: 2447912
ucugccaggcacugauuca

SEQ ID NO: 2447914 - RNA, 19 nt, Artificial Sequence
  Description of Artificial Sequence: Synthetic oligonucleotide
  Sense strand starting at position 2772 of SEQ ID NO: 1887093
gaaucagugccuggcagau

SEQ ID NO: 2447915 - RNA, 19 nt, Artificial Sequence
  Description of Artificial Sequence: Synthetic oligonucleotide
  Antisense strand to SEQ ID NO: 2447914
aucugccaggcacugauuc

SEQ ID NO: 2447916 - RNA, 19 nt, Artificial Sequence
  Description of Artificial Sequence: Synthetic oligonucleotide
  Sense strand starting at position 2804 of SEQ ID NO: 1887093
cugacacaguacuugaauu

SEQ ID NO: 2447917 - RNA, 19 nt, Artificial Sequence
  Description of Artificial Sequence: Synthetic oligonucleotide
  Antisense strand to SEQ ID NO: 2447916
aauucaaguacugugucag

SEQ ID NO: 2447918 - RNA, 19 nt, Artificial Sequence
  Description of Artificial Sequence: Synthetic oligonucleotide
  Sense strand starting at position 2851 of SEQ ID NO: 1887093
cuguaaagcggugaccaau

SEQ ID NO: 2447919 - RNA, 19 nt, Artificial Sequence
  Description of Artificial Sequence: Synthetic oligonucleotide
  Antisense strand to SEQ ID NO: 2447918
auuggucaccgcuuuacag

SEQ ID NO: 2447920 - RNA, 19 nt, Artificial Sequence
  Description of Artificial Sequence: Synthetic oligonucleotide
  Sense strand starting at position 2971 of SEQ ID NO: 1887093
gcaugaugucacgaccgau

SEQ ID NO: 2447921 - RNA, 19 nt, Artificial Sequence
  Description of Artificial Sequence: Synthetic oligonucleotide
  Antisense strand to SEQ ID NO: 2447920
aucggucgugacaucaugc

SEQ ID NO: 2447922 - RNA, 19 nt, Artificial Sequence
  Description of Artificial Sequence: Synthetic oligonucleotide
  Sense strand starting at position 3193 of SEQ ID NO: 1887093
guaggauccuagguaagug

SEQ ID NO: 2447923 - RNA, 19 nt, Artificial Sequence
  Description of Artificial Sequence: Synthetic oligonucleotide
  Antisense strand to SEQ ID NO: 2447922
cacuuaccuaggauccuac

SEQ ID NO: 2447924 - RNA, 19 nt, Artificial Sequence
  Description of Artificial Sequence: Synthetic oligonucleotide
  Sense strand starting at position 3291 of SEQ ID NO: 1887093
agccuuuggugacucagaa

SEQ ID NO: 2447925 - RNA, 19 nt, Artificial Sequence
  Description of Artificial Sequence: Synthetic oligonucleotide
  Antisense strand to SEQ ID NO: 2447924
uucugagucaccaaaggcu

SEQ ID NO: 2447926 - RNA, 19 nt, Artificial Sequence
  Description of Artificial Sequence: Synthetic oligonucleotide
  Sense strand starting at position 3326 of SEQ ID NO: 1887093
ggaggauucugucccguug

SEQ ID NO: 2447927 - RNA, 19 nt, Artificial Sequence
  Description of Artificial Sequence: Synthetic oligonucleotide
  Antisense strand to SEQ ID NO: 2447926
caacgggacagaauccucc

SEQ ID NO: 2447928 - RNA, 19 nt, Artificial Sequence
  Description of Artificial Sequence: Synthetic oligonucleotide
  Sense strand starting at position 3562 of SEQ ID NO: 1887093
accuguaggcccuaggaaa

SEQ ID NO: 2447929 - RNA, 19 nt, Artificial Sequence
  Description of Artificial Sequence: Synthetic oligonucleotide
  Antisense strand to SEQ ID NO: 2447928
uuuccuagggccuacaggu

SEQ ID NO: 2447930 - RNA, 19 nt, Artificial Sequence
  Description of Artificial Sequence: Synthetic oligonucleotide
  Sense strand starting at position 3630 of SEQ ID NO: 1887093
ggguguccuuacucaagau

SEQ ID NO: 2447931 - RNA, 19 nt, Artificial Sequence
  Description of Artificial Sequence: Synthetic oligonucleotide
  Antisense strand to SEQ ID NO: 2447930
aucuugaguaaggacaccc

SEQ ID NO: 2447932 - RNA, 19 nt, Artificial Sequence
  Description of Artificial Sequence: Synthetic oligonucleotide
  Sense strand starting at position 3631 of SEQ ID NO: 1887093
gguguccuuacucaagaug

SEQ ID NO: 2447933 - RNA, 19 nt, Artificial Sequence
  Description of Artificial Sequence: Synthetic oligonucleotide
  Antisense strand to SEQ ID NO: 2447932
caucuugaguaaggacacc

SEQ ID NO: 2447934 - RNA, 19 nt, Artificial Sequence
  Description of Artificial Sequence: Synthetic oligonucleotide
  Sense strand starting at position 3634 of SEQ ID NO: 1887093
guccuuacucaagaugggu

SEQ ID NO: 2447935 - RNA, 19 nt, Artificial Sequence
  Description of Artificial Sequence: Synthetic oligonucleotide
  Antisense strand to SEQ ID NO: 2447934
acccaucuugaguaaggac

SEQ ID NO: 2447936 - RNA, 19 nt, Artificial Sequence
  Description of Artificial Sequence: Synthetic oligonucleotide
  Sense strand starting at position 3775 of SEQ ID NO: 1887093
cugcuagagcuaugagaca

SEQ ID NO: 2447937 - RNA, 19 nt, Artificial Sequence
  Description of Artificial Sequence: Synthetic oligonucleotide
  Antisense strand to SEQ ID NO: 2447936
ugucucauagcucuagcag

SEQ ID NO: 2447938 - RNA, 19 nt, Artificial Sequence
  Description of Artificial Sequence: Synthetic oligonucleotide
  Sense strand starting at position 3809 of SEQ ID NO: 1887093
gucagaguccuuuaucagu

SEQ ID NO: 2447939 - RNA, 19 nt, Artificial Sequence
  Description of Artificial Sequence: Synthetic oligonucleotide
  Antisense strand to SEQ ID NO: 2447938
acugauaaaggacucugac

SEQ ID NO: 2447940 - RNA, 19 nt, Artificial Sequence
  Description of Artificial Sequence: Synthetic oligonucleotide
  Sense strand starting at position 3814 of SEQ ID NO: 1887093
aguccuuuaucaguuucua

SEQ ID NO: 2447941 - RNA, 19 nt, Artificial Sequence
  Description of Artificial Sequence: Synthetic oligonucleotide
  Antisense strand to SEQ ID NO: 2447940
uagaaacugauaaaggacu

SEQ ID NO: 2447942 - RNA, 19 nt, Artificial Sequence
  Description of Artificial Sequence: Synthetic oligonucleotide
  Sense strand starting at position 3924 of SEQ ID NO: 1887093
ccaagucaugcagguaaac

SEQ ID NO: 2447943 - RNA, 19 nt, Artificial Sequence
  Description of Artificial Sequence: Synthetic oligonucleotide
  Antisense strand to SEQ ID NO: 2447942
guuuaccugcaugacuugg

SEQ ID NO: 2447944 - RNA, 19 nt, Artificial Sequence
  Description of Artificial Sequence: Synthetic oligonucleotide
  Sense strand starting at position 18 of SEQ ID NO: 1887094
agcuuugcugauuauuaga

SEQ ID NO: 2447945 - RNA, 19 nt, Artificial Sequence
  Description of Artificial Sequence: Synthetic oligonucleotide
  Antisense strand to SEQ ID NO: 2447944
ucuaauaaucagcaaagcu

SEQ ID NO: 2447946 - RNA, 19 nt, Artificial Sequence
  Description of Artificial Sequence: Synthetic oligonucleotide
  Sense strand starting at position 20 of SEQ ID NO: 1887094
cuuugcugauuauuagaaa

SEQ ID NO: 2447947 - RNA, 19 nt, Artificial Sequence
  Description of Artificial Sequence: Synthetic oligonucleotide
  Antisense strand to SEQ ID NO: 2447946
uuucuaauaaucagcaaag

SEQ ID NO: 2447948 - RNA, 19 nt, Artificial Sequence
  Description of Artificial Sequence: Synthetic oligonucleotide
  Sense strand starting at position 85 of SEQ ID NO: 1887094
uaaguaugauucguggaaa

SEQ ID NO: 2447949 - RNA, 19 nt, Artificial Sequence
  Description of Artificial Sequence: Synthetic oligonucleotide
  Antisense strand to SEQ ID NO: 2447948
uuuccacgaaucauacuua

SEQ ID NO: 2447950 - RNA, 19 nt, Artificial Sequence
  Description of Artificial Sequence: Synthetic oligonucleotide
  Sense strand starting at position 88 of SEQ ID NO: 1887094
guaugauucguggaaacag

SEQ ID NO: 2447951 - RNA, 19 nt, Artificial Sequence
  Description of Artificial Sequence: Synthetic oligonucleotide
  Antisense strand to SEQ ID NO: 2447950
cuguuuccacgaaucauac

SEQ ID NO: 2447952 - RNA, 19 nt, Artificial Sequence
  Description of Artificial Sequence: Synthetic oligonucleotide
  Sense strand starting at position 686 of SEQ ID NO: 1887094
agcaguuuggaugauauca

SEQ ID NO: 2447953 - RNA, 19 nt, Artificial Sequence
  Description of Artificial Sequence: Synthetic oligonucleotide
  Antisense strand to SEQ ID NO: 2447952
ugauaucauccaaacugcu

SEQ ID NO: 2447954 - RNA, 19 nt, Artificial Sequence
  Description of Artificial Sequence: Synthetic oligonucleotide
  Sense strand starting at position 928 of SEQ ID NO: 1887094
aacgauuuagccuguuuag

SEQ ID NO: 2447955 - RNA, 19 nt, Artificial Sequence
  Description of Artificial Sequence: Synthetic oligonucleotide
  Antisense strand to SEQ ID NO: 2447954
cuaaacaggcuaaaucguu

SEQ ID NO: 2447956 - RNA, 19 nt, Artificial Sequence
  Description of Artificial Sequence: Synthetic oligonucleotide
  Sense strand starting at position 979 of SEQ ID NO: 1887094
uucugaugugagggaacuu

SEQ ID NO: 2447957 - RNA, 19 nt, Artificial Sequence
  Description of Artificial Sequence: Synthetic oligonucleotide
  Antisense strand to SEQ ID NO: 2447956
aaguucccucacaucagaa

SEQ ID NO: 2447958 - RNA, 19 nt, Artificial Sequence
  Description of Artificial Sequence: Synthetic oligonucleotide
  Sense strand starting at position 1073 of SEQ ID NO: 1887094
gguuauuuggaauguguuu

SEQ ID NO: 2447959 - RNA, 19 nt, Artificial Sequence
  Description of Artificial Sequence: Synthetic oligonucleotide
  Antisense strand to SEQ ID NO: 2447958
aaacacauuccaaauaacc

SEQ ID NO: 2447960 - RNA, 19 nt, Artificial Sequence
  Description of Artificial Sequence: Synthetic oligonucleotide
  Sense strand starting at position 1186 of SEQ ID NO: 1887094
auuaaaugacaacgguuaa

SEQ ID NO: 2447961 - RNA, 19 nt, Artificial Sequence
  Description of Artificial Sequence: Synthetic oligonucleotide
  Antisense strand to SEQ ID NO: 2447960
uuaaccguugucauuuaau

SEQ ID NO: 2447962 - RNA, 19 nt, Artificial Sequence
  Description of Artificial Sequence: Synthetic oligonucleotide
  Sense strand starting at position 1236 of SEQ ID NO: 1887094
gaaacaaaugccuaggucu

SEQ ID NO: 2447963 - RNA, 19 nt, Artificial Sequence
  Description of Artificial Sequence: Synthetic oligonucleotide
  Antisense strand to SEQ ID NO: 2447962
agaccuaggcauuuguuuc

SEQ ID NO: 2447964 - RNA, 19 nt, Artificial Sequence
  Description of Artificial Sequence: Synthetic oligonucleotide
  Sense strand starting at position 1278 of SEQ ID NO: 1887094
agugaagaacuuugcuuga

SEQ ID NO: 2447965 - RNA, 19 nt, Artificial Sequence
  Description of Artificial Sequence: Synthetic oligonucleotide
  Antisense strand to SEQ ID NO: 2447964
ucaagcaaaguucuucacu

SEQ ID NO: 2447966 - RNA, 19 nt, Artificial Sequence
  Description of Artificial Sequence: Synthetic oligonucleotide
  Sense strand starting at position 1280 of SEQ ID NO: 1887094
ugaagaacuuugcuugacu

SEQ ID NO: 2447967 - RNA, 19 nt, Artificial Sequence
  Description of Artificial Sequence: Synthetic oligonucleotide
  Antisense strand to SEQ ID NO: 2447966
agucaagcaaaguucuuca

SEQ ID NO: 2447968 - RNA, 19 nt, Artificial Sequence
  Description of Artificial Sequence: Synthetic oligonucleotide
  Sense strand starting at position 1281 of SEQ ID NO: 1887094
gaagaacuuugcuugacug

SEQ ID NO: 2447969 - RNA, 19 nt, Artificial Sequence
  Description of Artificial Sequence: Synthetic oligonucleotide
  Antisense strand to SEQ ID NO: 2447968
cagucaagcaaaguucuuc

SEQ ID NO: 2447970 - RNA, 19 nt, Artificial Sequence
  Description of Artificial Sequence: Synthetic oligonucleotide
  Sense strand starting at position 1317 of SEQ ID NO: 1887094
gaaagauaaugucccaagu

SEQ ID NO: 2447971 - RNA, 19 nt, Artificial Sequence
  Description of Artificial Sequence: Synthetic oligonucleotide
  Antisense strand to SEQ ID NO: 2447970
acuugggacauuaucuuuc

SEQ ID NO: 2447972 - RNA, 19 nt, Artificial Sequence
  Description of Artificial Sequence: Synthetic oligonucleotide
  Sense strand starting at position 1462 of SEQ ID NO: 1887094
agacuauucuaggcggaga

SEQ ID NO: 2447973 - RNA, 19 nt, Artificial Sequence
  Description of Artificial Sequence: Synthetic oligonucleotide
  Antisense strand to SEQ ID NO: 2447972
ucuccgccuagaauagucu

SEQ ID NO: 2447974 - RNA, 19 nt, Artificial Sequence
  Description of Artificial Sequence: Synthetic oligonucleotide
  Sense strand starting at position 1465 of SEQ ID NO: 1887094
cuauucuaggcggagauua

SEQ ID NO: 2447975 - RNA, 19 nt, Artificial Sequence
  Description of Artificial Sequence: Synthetic oligonucleotide
  Antisense strand to SEQ ID NO: 2447974
uaaucuccgccuagaauag

SEQ ID NO: 2447976 - RNA, 19 nt, Artificial Sequence
  Description of Artificial Sequence: Synthetic oligonucleotide
  Sense strand starting at position 1831 of SEQ ID NO: 1887094
aggcaaaguaguuaugaca

SEQ ID NO: 2447977 - RNA, 19 nt, Artificial Sequence
  Description of Artificial Sequence: Synthetic oligonucleotide
  Antisense strand to SEQ ID NO: 2447976
ugucauaacuacuuugccu

SEQ ID NO: 2447978 - RNA, 19 nt, Artificial Sequence
  Description of Artificial Sequence: Synthetic oligonucleotide
  Sense strand starting at position 1849 of SEQ ID NO: 1887094
acuguuggcagugaaauua

SEQ ID NO: 2447979 - RNA, 19 nt, Artificial Sequence
  Description of Artificial Sequence: Synthetic oligonucleotide
  Antisense strand to SEQ ID NO: 2447978
uaauuucacugccaacagu

SEQ ID NO: 2447980 - RNA, 19 nt, Artificial Sequence
  Description of Artificial Sequence: Synthetic oligonucleotide
  Sense strand starting at position 1859 of SEQ ID NO: 1887094
gugaaauuauacuuggaac

SEQ ID NO: 2447981 - RNA, 19 nt, Artificial Sequence
  Description of Artificial Sequence: Synthetic oligonucleotide
  Antisense strand to SEQ ID NO: 2447980
guuccaaguauaauuucac

SEQ ID NO: 2447982 - RNA, 19 nt, Artificial Sequence
  Description of Artificial Sequence: Synthetic oligonucleotide
  Sense strand starting at position 2055 of SEQ ID NO: 1887094
caaggaucccuggguauug

SEQ ID NO: 2447983 - RNA, 19 nt, Artificial Sequence
  Description of Artificial Sequence: Synthetic oligonucleotide
  Antisense strand to SEQ ID NO: 2447982
caauacccagggauccuug

SEQ ID NO: 2447984 - RNA, 19 nt, Artificial Sequence
  Description of Artificial Sequence: Synthetic oligonucleotide
  Sense strand starting at position 2770 of SEQ ID NO: 1887094
uaugaaugaugauuaacgu

SEQ ID NO: 2447985 - RNA, 19 nt, Artificial Sequence
  Description of Artificial Sequence: Synthetic oligonucleotide
  Antisense strand to SEQ ID NO: 2447984
acguuaaucaucauucaua

SEQ ID NO: 2447986 - RNA, 19 nt, Artificial Sequence
  Description of Artificial Sequence: Synthetic oligonucleotide
  Sense strand starting at position 2888 of SEQ ID NO: 1887094
agucgacguagauaaacau

SEQ ID NO: 2447987 - RNA, 19 nt, Artificial Sequence
  Description of Artificial Sequence: Synthetic oligonucleotide
  Antisense strand to SEQ ID NO: 2447986
auguuuaucuacgucgacu

SEQ ID NO: 2447988 - RNA, 19 nt, Artificial Sequence
  Description of Artificial Sequence: Synthetic oligonucleotide
  Sense strand starting at position 3150 of SEQ ID NO: 1887094
uuaagcauucccuagaguu

SEQ ID NO: 2447989 - RNA, 19 nt, Artificial Sequence
  Description of Artificial Sequence: Synthetic oligonucleotide
  Antisense strand to SEQ ID NO: 2447988
aacucuagggaaugcuuaa

SEQ ID NO: 2447990 - RNA, 19 nt, Artificial Sequence
  Description of Artificial Sequence: Synthetic oligonucleotide
  Sense strand starting at position 3152 of SEQ ID NO: 1887094
aagcauucccuagaguuag

SEQ ID NO: 2447991 - RNA, 19 nt, Artificial Sequence
  Description of Artificial Sequence: Synthetic oligonucleotide
  Antisense strand to SEQ ID NO: 2447990
cuaacucuagggaaugcuu

SEQ ID NO: 2447992 - RNA, 19 nt, Artificial Sequence
  Description of Artificial Sequence: Synthetic oligonucleotide
  Sense strand starting at position 3167 of SEQ ID NO: 1887094
uuaggugaugugggagaaa

SEQ ID NO: 2447993 - RNA, 19 nt, Artificial Sequence
  Description of Artificial Sequence: Synthetic oligonucleotide
  Antisense strand to SEQ ID NO: 2447992
uuucucccacaucaccuaa

SEQ ID NO: 2447994 - RNA, 19 nt, Artificial Sequence
  Description of Artificial Sequence: Synthetic oligonucleotide
  Sense strand starting at position 3352 of SEQ ID NO: 1887094
uuguucagugaacgaagaa

SEQ ID NO: 2447995 - RNA, 19 nt, Artificial Sequence
  Description of Artificial Sequence: Synthetic oligonucleotide
  Antisense strand to SEQ ID NO: 2447994
uucuucguucacugaacaa

SEQ ID NO: 2447996 - RNA, 19 nt, Artificial Sequence
  Description of Artificial Sequence: Synthetic oligonucleotide
  Sense strand starting at position 3373 of SEQ ID NO: 1887094
gaaucaucuguuggaguag

SEQ ID NO: 2447997 - RNA, 19 nt, Artificial Sequence
  Description of Artificial Sequence: Synthetic oligonucleotide
  Antisense strand to SEQ ID NO: 2447996
cuacuccaacagaugauuc

SEQ ID NO: 2447998 - RNA, 19 nt, Artificial Sequence
  Description of Artificial Sequence: Synthetic oligonucleotide
  Sense strand starting at position 3412 of SEQ ID NO: 1887094
gaggaacucuuguuauaga

SEQ ID NO: 2447999 - RNA, 19 nt, Artificial Sequence
  Description of Artificial Sequence: Synthetic oligonucleotide
  Antisense strand to SEQ ID NO: 2447998
ucuauaacaagaguuccuc

SEQ ID NO: 2448000 - RNA, 19 nt, Artificial Sequence
  Description of Artificial Sequence: Synthetic oligonucleotide
  Sense strand starting at position 3590 of SEQ ID NO: 1887094
gguccuuucuuacuggaga

SEQ ID NO: 2448001 - RNA, 19 nt, Artificial Sequence
  Description of Artificial Sequence: Synthetic oligonucleotide
  Antisense strand to SEQ ID NO: 2448000
ucuccaguaagaaaggacc

SEQ ID NO: 2448002 - RNA, 19 nt, Artificial Sequence
  Description of Artificial Sequence: Synthetic oligonucleotide
  Sense strand starting at position 3593 of SEQ ID NO: 1887094
ccuuucuuacuggagaucu

SEQ ID NO: 2448003 - RNA, 19 nt, Artificial Sequence
  Description of Artificial Sequence: Synthetic oligonucleotide
  Antisense strand to SEQ ID NO: 2448002
agaucuccaguaagaaagg

SEQ ID NO: 2448004 - RNA, 19 nt, Artificial Sequence
  Description of Artificial Sequence: Synthetic oligonucleotide
  Sense strand starting at position 3595 of SEQ ID NO: 1887094
uuucuuacuggagaucuuu

SEQ ID NO: 2448005 - RNA, 19 nt, Artificial Sequence
  Description of Artificial Sequence: Synthetic oligonucleotide
  Antisense strand to SEQ ID NO: 2448004
aaagaucuccaguaagaaa

SEQ ID NO: 2448006 - RNA, 19 nt, Artificial Sequence
  Description of Artificial Sequence: Synthetic oligonucleotide
  Sense strand starting at position 3657 of SEQ ID NO: 1887094
gacuacugaugaguugaau

SEQ ID NO: 2448007 - RNA, 19 nt, Artificial Sequence
  Description of Artificial Sequence: Synthetic oligonucleotide
  Antisense strand to SEQ ID NO: 2448006
auucaacucaucaguaguc

SEQ ID NO: 2448008 - RNA, 19 nt, Artificial Sequence
  Description of Artificial Sequence: Synthetic oligonucleotide
  Sense strand starting at position 3812 of SEQ ID NO: 1887094
uucuguguuguguugucau

SEQ ID NO: 2448009 - RNA, 19 nt, Artificial Sequence
  Description of Artificial Sequence: Synthetic oligonucleotide
  Antisense strand to SEQ ID NO: 2448008
augacaacacaacacagaa

SEQ ID NO: 2448010 - RNA, 19 nt, Artificial Sequence
  Description of Artificial Sequence: Synthetic oligonucleotide
  Sense strand starting at position 3825 of SEQ ID NO: 1887094
ugucauugagcauacuaug

SEQ ID NO: 2448011 - RNA, 19 nt, Artificial Sequence
  Description of Artificial Sequence: Synthetic oligonucleotide
  Antisense strand to SEQ ID NO: 2448010
cauaguaugcucaaugaca

SEQ ID NO: 2448012 - RNA, 19 nt, Artificial Sequence
  Description of Artificial Sequence: Synthetic oligonucleotide
  Sense strand starting at position 3894 of SEQ ID NO: 1887094
gugaacagcugauuaaaug

SEQ ID NO: 2448013 - RNA, 19 nt, Artificial Sequence
  Description of Artificial Sequence: Synthetic oligonucleotide
  Antisense strand to SEQ ID NO: 2448012
cauuuaaucagcuguucac

SEQ ID NO: 2448014 - RNA, 19 nt, Artificial Sequence
  Description of Artificial Sequence: Synthetic oligonucleotide
  Sense strand starting at position 3895 of SEQ ID NO: 1887094
ugaacagcugauuaaaugu

SEQ ID NO: 2448015 - RNA, 19 nt, Artificial Sequence
  Description of Artificial Sequence: Synthetic oligonucleotide
  Antisense strand to SEQ ID NO: 2448014
acauuuaaucagcuguuca

SEQ ID NO: 2448016 - RNA, 19 nt, Artificial Sequence
  Description of Artificial Sequence: Synthetic oligonucleotide
  Sense strand starting at position 3904 of SEQ ID NO: 1887094
gauuaaaugucaguaucug

SEQ ID NO: 2448017 - RNA, 19 nt, Artificial Sequence
  Description of Artificial Sequence: Synthetic oligonucleotide
  Antisense strand to SEQ ID NO: 2448016
cagauacugacauuuaauc

SEQ ID NO: 2448018 - RNA, 19 nt, Artificial Sequence
  Description of Artificial Sequence: Synthetic oligonucleotide
  Sense strand starting at position 3905 of SEQ ID NO: 1887094
auuaaaugucaguaucuga

SEQ ID NO: 2448019 - RNA, 19 nt, Artificial Sequence
  Description of Artificial Sequence: Synthetic oligonucleotide
  Antisense strand to SEQ ID NO: 2448018
ucagauacugacauuuaau

SEQ ID NO: 2448020 - RNA, 19 nt, Artificial Sequence
  Description of Artificial Sequence: Synthetic oligonucleotide
  Sense strand starting at position 3934 of SEQ ID NO: 1887094
ucuugaugcucauuuguuu

SEQ ID NO: 2448021 - RNA, 19 nt, Artificial Sequence
  Description of Artificial Sequence: Synthetic oligonucleotide
  Antisense strand to SEQ ID NO: 2448020
aaacaaaugagcaucaaga

SEQ ID NO: 2448022 - RNA, 19 nt, Artificial Sequence
  Description of Artificial Sequence: Synthetic oligonucleotide
  Sense strand starting at position 3979 of SEQ ID NO: 1887094
guagcucucacgccuguaa

SEQ ID NO: 2448023 - RNA, 19 nt, Artificial Sequence
  Description of Artificial Sequence: Synthetic oligonucleotide
  Antisense strand to SEQ ID NO: 2448022
uuacaggcgugagagcuac

SEQ ID NO: 2448024 - RNA, 19 nt, Artificial Sequence
  Description of Artificial Sequence: Synthetic oligonucleotide
  Sense strand starting at position 249 of SEQ ID NO: 1887095
agggcuuugacccagugaa

SEQ ID NO: 2448025 - RNA, 19 nt, Artificial Sequence
  Description of Artificial Sequence: Synthetic oligonucleotide
  Antisense strand to SEQ ID NO: 2448024
uucacugggucaaagcccu

SEQ ID NO: 2448026 - RNA, 19 nt, Artificial Sequence
  Description of Artificial Sequence: Synthetic oligonucleotide
  Sense strand starting at position 340 of SEQ ID NO: 1887095
cggugagugacuuacccaa

SEQ ID NO: 2448027 - RNA, 19 nt, Artificial Sequence
  Description of Artificial Sequence: Synthetic oligonucleotide
  Antisense strand to SEQ ID NO: 2448026
uuggguaagucacucaccg

SEQ ID NO: 2448028 - RNA, 19 nt, Artificial Sequence
  Description of Artificial Sequence: Synthetic oligonucleotide
  Sense strand starting at position 678 of SEQ ID NO: 1887095
gcgucugcuccugugacuu

SEQ ID NO: 2448029 - RNA, 19 nt, Artificial Sequence
  Description of Artificial Sequence: Synthetic oligonucleotide
  Antisense strand to SEQ ID NO: 2448028
aagucacaggagcagacgc

SEQ ID NO: 2448030 - RNA, 19 nt, Artificial Sequence
  Description of Artificial Sequence: Synthetic oligonucleotide
  Sense strand starting at position 684 of SEQ ID NO: 1887095
gcuccugugacuugaggaa

SEQ ID NO: 2448031 - RNA, 19 nt, Artificial Sequence
  Description of Artificial Sequence: Synthetic oligonucleotide
  Antisense strand to SEQ ID NO: 2448030
uuccucaagucacaggagc

SEQ ID NO: 2448032 - RNA, 19 nt, Artificial Sequence
  Description of Artificial Sequence: Synthetic oligonucleotide
  Sense strand starting at position 746 of SEQ ID NO: 1887095
gcgugacuuccgagccugu

SEQ ID NO: 2448033 - RNA, 19 nt, Artificial Sequence
  Description of Artificial Sequence: Synthetic oligonucleotide
  Antisense strand to SEQ ID NO: 2448032
acaggcucggaagucacgc

SEQ ID NO: 2448034 - RNA, 19 nt, Artificial Sequence
  Description of Artificial Sequence: Synthetic oligonucleotide
  Sense strand starting at position 878 of SEQ ID NO: 1887095
uuggauuagcaucaucaac

SEQ ID NO: 2448035 - RNA, 19 nt, Artificial Sequence
  Description of Artificial Sequence: Synthetic oligonucleotide
  Antisense strand to SEQ ID NO: 2448034
guugaugaugcuaauccaa

SEQ ID NO: 2448036 - RNA, 19 nt, Artificial Sequence
  Description of Artificial Sequence: Synthetic oligonucleotide
  Sense strand starting at position 880 of SEQ ID NO: 1887095
ggauuagcaucaucaacac

SEQ ID NO: 2448037 - RNA, 19 nt, Artificial Sequence
  Description of Artificial Sequence: Synthetic oligonucleotide
  Antisense strand to SEQ ID NO: 2448036
guguugaugaugcuaaucc

SEQ ID NO: 2448038 - RNA, 19 nt, Artificial Sequence
  Description of Artificial Sequence: Synthetic oligonucleotide
  Sense strand starting at position 1250 of SEQ ID NO: 1887095
agcgcaaacacgugacuaa

SEQ ID NO: 2448039 - RNA, 19 nt, Artificial Sequence
  Description of Artificial Sequence: Synthetic oligonucleotide
  Antisense strand to SEQ ID NO: 2448038
uuagucacguguuugcgcu

SEQ ID NO: 2448040 - RNA, 19 nt, Artificial Sequence
  Description of Artificial Sequence: Synthetic oligonucleotide
  Sense strand starting at position 1899 of SEQ ID NO: 1887095
ccagcugucucaugaugag

SEQ ID NO: 2448041 - RNA, 19 nt, Artificial Sequence
  Description of Artificial Sequence: Synthetic oligonucleotide
  Antisense strand to SEQ ID NO: 2448040
cucaucaugagacagcugg

SEQ ID NO: 2448042 - RNA, 19 nt, Artificial Sequence
  Description of Artificial Sequence: Synthetic oligonucleotide
  Sense strand starting at position 1902 of SEQ ID NO: 1887095
gcugucucaugaugagaug

SEQ ID NO: 2448043 - RNA, 19 nt, Artificial Sequence
  Description of Artificial Sequence: Synthetic oligonucleotide
  Antisense strand to SEQ ID NO: 2448042
caucucaucaugagacagc

SEQ ID NO: 2448044 - RNA, 19 nt, Artificial Sequence
  Description of Artificial Sequence: Synthetic oligonucleotide
  Sense strand starting at position 2487 of SEQ ID NO: 1887095
cacugugaggccugaggau

SEQ ID NO: 2448045 - RNA, 19 nt, Artificial Sequence
  Description of Artificial Sequence: Synthetic oligonucleotide
  Antisense strand to SEQ ID NO: 2448044
auccucaggccucacagug

SEQ ID NO: 2448046 - RNA, 19 nt, Artificial Sequence
  Description of Artificial Sequence: Synthetic oligonucleotide
  Sense strand starting at position 2513 of SEQ ID NO: 1887095
ggcagcucucccuggcuua

SEQ ID NO: 2448047 - RNA, 19 nt, Artificial Sequence
  Description of Artificial Sequence: Synthetic oligonucleotide
  Antisense strand to SEQ ID NO: 2448046
uaagccagggagagcugcc

SEQ ID NO: 2448048 - RNA, 19 nt, Artificial Sequence
  Description of Artificial Sequence: Synthetic oligonucleotide
  Sense strand starting at position 2514 of SEQ ID NO: 1887095
gcagcucucccuggcuuau

SEQ ID NO: 2448049 - RNA, 19 nt, Artificial Sequence
  Description of Artificial Sequence: Synthetic oligonucleotide
  Antisense strand to SEQ ID NO: 2448048
auaagccagggagagcugc

SEQ ID NO: 2448050 - RNA, 19 nt, Artificial Sequence
  Description of Artificial Sequence: Synthetic oligonucleotide
  Sense strand starting at position 2518 of SEQ ID NO: 1887095
cucucccuggcuuaugaaa

SEQ ID NO: 2448051 - RNA, 19 nt, Artificial Sequence
  Description of Artificial Sequence: Synthetic oligonucleotide
  Antisense strand to SEQ ID NO: 2448050
uuucauaagccagggagag

SEQ ID NO: 2448052 - RNA, 19 nt, Artificial Sequence
  Description of Artificial Sequence: Synthetic oligonucleotide
  Sense strand starting at position 2586 of SEQ ID NO: 1887095
gggucaggagcaugacuuu

SEQ ID NO: 2448053 - RNA, 19 nt, Artificial Sequence
  Description of Artificial Sequence: Synthetic oligonucleotide
  Antisense strand to SEQ ID NO: 2448052
aaagucaugcuccugaccc

SEQ ID NO: 2448054 - RNA, 19 nt, Artificial Sequence
  Description of Artificial Sequence: Synthetic oligonucleotide
  Sense strand starting at position 2593 of SEQ ID NO: 1887095
gagcaugacuuugguguca

SEQ ID NO: 2448055 - RNA, 19 nt, Artificial Sequence
  Description of Artificial Sequence: Synthetic oligonucleotide
  Antisense strand to SEQ ID NO: 2448054
ugacaccaaagucaugcuc

SEQ ID NO: 2448056 - RNA, 19 nt, Artificial Sequence
  Description of Artificial Sequence: Synthetic oligonucleotide
  Sense strand starting at position 2598 of SEQ ID NO: 1887095
ugacuuuggugucaggaga

SEQ ID NO: 2448057 - RNA, 19 nt, Artificial Sequence
  Description of Artificial Sequence: Synthetic oligonucleotide
  Antisense strand to SEQ ID NO: 2448056
ucuccugacaccaaaguca

SEQ ID NO: 2448058 - RNA, 19 nt, Artificial Sequence
  Description of Artificial Sequence: Synthetic oligonucleotide
  Sense strand starting at position 199 of SEQ ID NO: 1887096
gcuuaauuagcaugguuau

SEQ ID NO: 2448059 - RNA, 19 nt, Artificial Sequence
  Description of Artificial Sequence: Synthetic oligonucleotide
  Antisense strand to SEQ ID NO: 2448058
auaaccaugcuaauuaagc

SEQ ID NO: 2448060 - RNA, 19 nt, Artificial Sequence
  Description of Artificial Sequence: Synthetic oligonucleotide
  Sense strand starting at position 200 of SEQ ID NO: 1887096
cuuaauuagcaugguuauu

SEQ ID NO: 2448061 - RNA, 19 nt, Artificial Sequence
  Description of Artificial Sequence: Synthetic oligonucleotide
  Antisense strand to SEQ ID NO: 2448060
aauaaccaugcuaauuaag

SEQ ID NO: 2448062 - RNA, 19 nt, Artificial Sequence
  Description of Artificial Sequence: Synthetic oligonucleotide
  Sense strand starting at position 206 of SEQ ID NO: 1887096
uagcaugguuauucgguua

SEQ ID NO: 2448063 - RNA, 19 nt, Artificial Sequence
  Description of Artificial Sequence: Synthetic oligonucleotide
  Antisense strand to SEQ ID NO: 2448062
uaaccgaauaaccaugcua

SEQ ID NO: 2448064 - RNA, 19 nt, Artificial Sequence
  Description of Artificial Sequence: Synthetic oligonucleotide
  Sense strand starting at position 1374 of SEQ ID NO: 1887096
cccggagccggcugaaauu

SEQ ID NO: 2448065 - RNA, 19 nt, Artificial Sequence
  Description of Artificial Sequence: Synthetic oligonucleotide
  Antisense strand to SEQ ID NO: 2448064
aauuucagccggcuccggg

SEQ ID NO: 2448066 - RNA, 19 nt, Artificial Sequence
  Description of Artificial Sequence: Synthetic oligonucleotide
  Sense strand starting at position 1436 of SEQ ID NO: 1887096
agaucuaaauuccacggaa

SEQ ID NO: 2448067 - RNA, 19 nt, Artificial Sequence
  Description of Artificial Sequence: Synthetic oligonucleotide
  Antisense strand to SEQ ID NO: 2448066
uuccguggaauuuagaucu

SEQ ID NO: 2448068 - RNA, 19 nt, Artificial Sequence
  Description of Artificial Sequence: Synthetic oligonucleotide
  Sense strand starting at position 1438 of SEQ ID NO: 1887096
aucuaaauuccacggaaac

SEQ ID NO: 2448069 - RNA, 19 nt, Artificial Sequence
  Description of Artificial Sequence: Synthetic oligonucleotide
  Antisense strand to SEQ ID NO: 2448068
guuuccguggaauuuagau

SEQ ID NO: 2448070 - RNA, 19 nt, Artificial Sequence
  Description of Artificial Sequence: Synthetic oligonucleotide
  Sense strand starting at position 1514 of SEQ ID NO: 1887096
gcgcuuucugcggaaacaa

SEQ ID NO: 2448071 - RNA, 19 nt, Artificial Sequence
  Description of Artificial Sequence: Synthetic oligonucleotide
  Antisense strand to SEQ ID NO: 2448070
uuguuuccgcagaaagcgc

SEQ ID NO: 2448072 - RNA, 19 nt, Artificial Sequence
  Description of Artificial Sequence: Synthetic oligonucleotide
  Sense strand starting at position 1685 of SEQ ID NO: 1887096
uggguuugcagggaugcau

SEQ ID NO: 2448073 - RNA, 19 nt, Artificial Sequence
  Description of Artificial Sequence: Synthetic oligonucleotide
  Antisense strand to SEQ ID NO: 2448072
augcaucccugcaaaccca

SEQ ID NO: 2448074 - RNA, 19 nt, Artificial Sequence
  Description of Artificial Sequence: Synthetic oligonucleotide
  Sense strand starting at position 1985 of SEQ ID NO: 1887096
aggaucaguccuuggcaga

SEQ ID NO: 2448075 - RNA, 19 nt, Artificial Sequence
  Description of Artificial Sequence: Synthetic oligonucleotide
  Antisense strand to SEQ ID NO: 2448074
ucugccaaggacugauccu

SEQ ID NO: 2448076 - RNA, 19 nt, Artificial Sequence
  Description of Artificial Sequence: Synthetic oligonucleotide
  Sense strand starting at position 1986 of SEQ ID NO: 1887096
ggaucaguccuuggcagag

SEQ ID NO: 2448077 - RNA, 19 nt, Artificial Sequence
  Description of Artificial Sequence: Synthetic oligonucleotide
  Antisense strand to SEQ ID NO: 2448076
cucugccaaggacugaucc

SEQ ID NO: 2448078 - RNA, 19 nt, Artificial Sequence
  Description of Artificial Sequence: Synthetic oligonucleotide
  Sense strand starting at position 2038 of SEQ ID NO: 1887096
guggcuuugauaugagugu

SEQ ID NO: 2448079 - RNA, 19 nt, Artificial Sequence
  Description of Artificial Sequence: Synthetic oligonucleotide
  Antisense strand to SEQ ID NO: 2448078
acacucauaucaaagccac

SEQ ID NO: 2448080 - RNA, 19 nt, Artificial Sequence
  Description of Artificial Sequence: Synthetic oligonucleotide
  Sense strand starting at position 2042 of SEQ ID NO: 1887096
cuuugauaugagugucgag

SEQ ID NO: 2448081 - RNA, 19 nt, Artificial Sequence
  Description of Artificial Sequence: Synthetic oligonucleotide
  Antisense strand to SEQ ID NO: 2448080
cucgacacucauaucaaag

SEQ ID NO: 2448082 - RNA, 19 nt, Artificial Sequence
  Description of Artificial Sequence: Synthetic oligonucleotide
  Sense strand starting at position 2191 of SEQ ID NO: 1887096
uguuuacaguuuguucuaa

SEQ ID NO: 2448083 - RNA, 19 nt, Artificial Sequence
  Description of Artificial Sequence: Synthetic oligonucleotide
  Antisense strand to SEQ ID NO: 2448082
uuagaacaaacuguaaaca

SEQ ID NO: 2448084 - RNA, 19 nt, Artificial Sequence
  Description of Artificial Sequence: Synthetic oligonucleotide
  Sense strand starting at position 2192 of SEQ ID NO: 1887096
guuuacaguuuguucuaaa

SEQ ID NO: 2448085 - RNA, 19 nt, Artificial Sequence
  Description of Artificial Sequence: Synthetic oligonucleotide
  Antisense strand to SEQ ID NO: 2448084
uuuagaacaaacuguaaac

SEQ ID NO: 2448086 - RNA, 19 nt, Artificial Sequence
  Description of Artificial Sequence: Synthetic oligonucleotide
  Sense strand starting at position 2193 of SEQ ID NO: 1887096
uuuacaguuuguucuaaac

SEQ ID NO: 2448087 - RNA, 19 nt, Artificial Sequence
  Description of Artificial Sequence: Synthetic oligonucleotide
  Antisense strand to SEQ ID NO: 2448086
guuuagaacaaacuguaaa

SEQ ID NO: 2448088 - RNA, 19 nt, Artificial Sequence
  Description of Artificial Sequence: Synthetic oligonucleotide
  Sense strand starting at position 2212 of SEQ ID NO: 1887096
aucagaaauguuugucgcu

SEQ ID NO: 2448089 - RNA, 19 nt, Artificial Sequence
  Description of Artificial Sequence: Synthetic oligonucleotide
  Antisense strand to SEQ ID NO: 2448088
agcgacaaacauuucugau

SEQ ID NO: 2448090 - RNA, 19 nt, Artificial Sequence
  Description of Artificial Sequence: Synthetic oligonucleotide
  Sense strand starting at position 2213 of SEQ ID NO: 1887096
ucagaaauguuugucgcuu

SEQ ID NO: 2448091 - RNA, 19 nt, Artificial Sequence
  Description of Artificial Sequence: Synthetic oligonucleotide
  Antisense strand to SEQ ID NO: 2448090
aagcgacaaacauuucuga

SEQ ID NO: 2448092 - RNA, 19 nt, Artificial Sequence
  Description of Artificial Sequence: Synthetic oligonucleotide
  Sense strand starting at position 2214 of SEQ ID NO: 1887096
cagaaauguuugucgcuuu

SEQ ID NO: 2448093 - RNA, 19 nt, Artificial Sequence
  Description of Artificial Sequence: Synthetic oligonucleotide
  Antisense strand to SEQ ID NO: 2448092
aaagcgacaaacauuucug

SEQ ID NO: 2448094 - RNA, 19 nt, Artificial Sequence
  Description of Artificial Sequence: Synthetic oligonucleotide
  Sense strand starting at position 2254 of SEQ ID NO: 1887096
caguuauuauugguagcuu

SEQ ID NO: 2448095 - RNA, 19 nt, Artificial Sequence
  Description of Artificial Sequence: Synthetic oligonucleotide
  Antisense strand to SEQ ID NO: 2448094
aagcuaccaauaauaacug

SEQ ID NO: 2448096 - RNA, 19 nt, Artificial Sequence
  Description of Artificial Sequence: Synthetic oligonucleotide
  Sense strand starting at position 2270 of SEQ ID NO: 1887096
cuugaugaacugugaauac

SEQ ID NO: 2448097 - RNA, 19 nt, Artificial Sequence
  Description of Artificial Sequence: Synthetic oligonucleotide
  Antisense strand to SEQ ID NO: 2448096
guauucacaguucaucaag

SEQ ID NO: 2448098 - RNA, 19 nt, Artificial Sequence
  Description of Artificial Sequence: Synthetic oligonucleotide
  Sense strand starting at position 2317 of SEQ ID NO: 1887096
uuacaauuaguguguggau

SEQ ID NO: 2448099 - RNA, 19 nt, Artificial Sequence
  Description of Artificial Sequence: Synthetic oligonucleotide
  Antisense strand to SEQ ID NO: 2448098
auccacacacuaauuguaa

SEQ ID NO: 2448100 - RNA, 19 nt, Artificial Sequence
  Description of Artificial Sequence: Synthetic oligonucleotide
  Sense strand starting at position 2318 of SEQ ID NO: 1887096
uacaauuaguguguggauu

SEQ ID NO: 2448101 - RNA, 19 nt, Artificial Sequence
  Description of Artificial Sequence: Synthetic oligonucleotide
  Antisense strand to SEQ ID NO: 2448100
aauccacacacuaauugua

SEQ ID NO: 2448102 - RNA, 19 nt, Artificial Sequence
  Description of Artificial Sequence: Synthetic oligonucleotide
  Sense strand starting at position 2319 of SEQ ID NO: 1887096
acaauuaguguguggauua

SEQ ID NO: 2448103 - RNA, 19 nt, Artificial Sequence
  Description of Artificial Sequence: Synthetic oligonucleotide
  Antisense strand to SEQ ID NO: 2448102
uaauccacacacuaauugu

SEQ ID NO: 2448104 - RNA, 19 nt, Artificial Sequence
  Description of Artificial Sequence: Synthetic oligonucleotide
  Sense strand starting at position 2428 of SEQ ID NO: 1887096
acuugaaauugcuuaauug

SEQ ID NO: 2448105 - RNA, 19 nt, Artificial Sequence
  Description of Artificial Sequence: Synthetic oligonucleotide
  Antisense strand to SEQ ID NO: 2448104
caauuaagcaauuucaagu

SEQ ID NO: 2448106 - RNA, 19 nt, Artificial Sequence
  Description of Artificial Sequence: Synthetic oligonucleotide
  Sense strand starting at position 2669 of SEQ ID NO: 1887096
gccugagcgaugggugauu

SEQ ID NO: 2448107 - RNA, 19 nt, Artificial Sequence
  Description of Artificial Sequence: Synthetic oligonucleotide
  Antisense strand to SEQ ID NO: 2448106
aaucacccaucgcucaggc

SEQ ID NO: 2448108 - RNA, 19 nt, Artificial Sequence
  Description of Artificial Sequence: Synthetic oligonucleotide
  Sense strand starting at position 2701 of SEQ ID NO: 1887096
ucugcugucccugugguua

SEQ ID NO: 2448109 - RNA, 19 nt, Artificial Sequence
  Description of Artificial Sequence: Synthetic oligonucleotide
  Antisense strand to SEQ ID NO: 2448108
uaaccacagggacagcaga

SEQ ID NO: 2448110 - RNA, 19 nt, Artificial Sequence
  Description of Artificial Sequence: Synthetic oligonucleotide
  Sense strand starting at position 2705 of SEQ ID NO: 1887096
cugucccugugguuaucaa

SEQ ID NO: 2448111 - RNA, 19 nt, Artificial Sequence
  Description of Artificial Sequence: Synthetic oligonucleotide
  Antisense strand to SEQ ID NO: 2448110
uugauaaccacagggacag

SEQ ID NO: 2448112 - RNA, 19 nt, Artificial Sequence
  Description of Artificial Sequence: Synthetic oligonucleotide
  Sense strand starting at position 3175 of SEQ ID NO: 1887096
gcccuuugucuugcucauu

SEQ ID NO: 2448113 - RNA, 19 nt, Artificial Sequence
  Description of Artificial Sequence: Synthetic oligonucleotide
  Antisense strand to SEQ ID NO: 2448112
aaugagcaagacaaagggc

SEQ ID NO: 2448114 - RNA, 19 nt, Artificial Sequence
  Description of Artificial Sequence: Synthetic oligonucleotide
  Sense strand starting at position 3178 of SEQ ID NO: 1887096
cuuugucuugcucauucua

SEQ ID NO: 2448115 - RNA, 19 nt, Artificial Sequence
  Description of Artificial Sequence: Synthetic oligonucleotide
  Antisense strand to SEQ ID NO: 2448114
uagaaugagcaagacaaag

SEQ ID NO: 2448116 - RNA, 19 nt, Artificial Sequence
  Description of Artificial Sequence: Synthetic oligonucleotide
  Sense strand starting at position 3180 of SEQ ID NO: 1887096
uugucuugcucauucuaag

SEQ ID NO: 2448117 - RNA, 19 nt, Artificial Sequence
  Description of Artificial Sequence: Synthetic oligonucleotide
  Antisense strand to SEQ ID NO: 2448116
cuuagaaugagcaagacaa

SEQ ID NO: 2448118 - RNA, 19 nt, Artificial Sequence
  Description of Artificial Sequence: Synthetic oligonucleotide
  Sense strand starting at position 3228 of SEQ ID NO: 1887096
cccggagggcugugagaaa

SEQ ID NO: 2448119 - RNA, 19 nt, Artificial Sequence
  Description of Artificial Sequence: Synthetic oligonucleotide
  Antisense strand to SEQ ID NO: 2448118
uuucucacagcccuccggg

SEQ ID NO: 2448120 - RNA, 19 nt, Artificial Sequence
  Description of Artificial Sequence: Synthetic oligonucleotide
  Sense strand starting at position 3439 of SEQ ID NO: 1887096
gcuugugcucggagauguu

SEQ ID NO: 2448121 - RNA, 19 nt, Artificial Sequence
  Description of Artificial Sequence: Synthetic oligonucleotide
  Antisense strand to SEQ ID NO: 2448120
aacaucuccgagcacaagc

SEQ ID NO: 2448122 - RNA, 19 nt, Artificial Sequence
  Description of Artificial Sequence: Synthetic oligonucleotide
  Sense strand starting at position 3505 of SEQ ID NO: 1887096
agcaucuguagcugaaaga

SEQ ID NO: 2448123 - RNA, 19 nt, Artificial Sequence
  Description of Artificial Sequence: Synthetic oligonucleotide
  Antisense strand to SEQ ID NO: 2448122
ucuuucagcuacagaugcu

SEQ ID NO: 2448124 - RNA, 19 nt, Artificial Sequence
  Description of Artificial Sequence: Synthetic oligonucleotide
  Sense strand starting at position 3506 of SEQ ID NO: 1887096
gcaucuguagcugaaagaa

SEQ ID NO: 2448125 - RNA, 19 nt, Artificial Sequence
  Description of Artificial Sequence: Synthetic oligonucleotide
  Antisense strand to SEQ ID NO: 2448124
uucuuucagcuacagaugc

SEQ ID NO: 2448126 - RNA, 19 nt, Artificial Sequence
  Description of Artificial Sequence: Synthetic oligonucleotide
  Sense strand starting at position 3538 of SEQ ID NO: 1887096
uguuaagagccagaauauu

SEQ ID NO: 2448127 - RNA, 19 nt, Artificial Sequence
  Description of Artificial Sequence: Synthetic oligonucleotide
  Antisense strand to SEQ ID NO: 2448126
aauauucuggcucuuaaca

SEQ ID NO: 2448128 - RNA, 19 nt, Artificial Sequence
  Description of Artificial Sequence: Synthetic oligonucleotide
  Sense strand starting at position 3625 of SEQ ID NO: 1887096
uuuggucugugucuauaua

SEQ ID NO: 2448129 - RNA, 19 nt, Artificial Sequence
  Description of Artificial Sequence: Synthetic oligonucleotide
  Antisense strand to SEQ ID NO: 2448128
uauauagacacagaccaaa

SEQ ID NO: 2448130 - RNA, 19 nt, Artificial Sequence
  Description of Artificial Sequence: Synthetic oligonucleotide
  Sense strand starting at position 3626 of SEQ ID NO: 1887096
uuggucugugucuauauau

SEQ ID NO: 2448131 - RNA, 19 nt, Artificial Sequence
  Description of Artificial Sequence: Synthetic oligonucleotide
  Antisense strand to SEQ ID NO: 2448130
auauauagacacagaccaa

SEQ ID NO: 2448132 - RNA, 19 nt, Artificial Sequence
  Description of Artificial Sequence: Synthetic oligonucleotide
  Sense strand starting at position 3635 of SEQ ID NO: 1887096
gucuauauaugaucuaguu

SEQ ID NO: 2448133 - RNA, 19 nt, Artificial Sequence
  Description of Artificial Sequence: Synthetic oligonucleotide
  Antisense strand to SEQ ID NO: 2448132
aacuagaucauauauagac

SEQ ID NO: 2448134 - RNA, 19 nt, Artificial Sequence
  Description of Artificial Sequence: Synthetic oligonucleotide
  Sense strand starting at position 3644 of SEQ ID NO: 1887096
ugaucuaguuuagagagaa

SEQ ID NO: 2448135 - RNA, 19 nt, Artificial Sequence
  Description of Artificial Sequence: Synthetic oligonucleotide
  Antisense strand to SEQ ID NO: 2448134
uucucucuaaacuagauca

SEQ ID NO: 2448136 - RNA, 19 nt, Artificial Sequence
  Description of Artificial Sequence: Synthetic oligonucleotide
  Sense strand starting at position 3667 of SEQ ID NO: 1887096
gcauaauuacguuaaacaa

SEQ ID NO: 2448137 - RNA, 19 nt, Artificial Sequence
  Description of Artificial Sequence: Synthetic oligonucleotide
  Antisense strand to SEQ ID NO: 2448136
uuguuuaacguaauuaugc

SEQ ID NO: 2448138 - RNA, 19 nt, Artificial Sequence
  Description of Artificial Sequence: Synthetic oligonucleotide
  Sense strand starting at position 9 of SEQ ID NO: 1887097
gucacaguuggucagaagu

SEQ ID NO: 2448139 - RNA, 19 nt, Artificial Sequence
  Description of Artificial Sequence: Synthetic oligonucleotide
  Antisense strand to SEQ ID NO: 2448138
acuucugaccaacugugac

SEQ ID NO: 2448140 - RNA, 19 nt, Artificial Sequence
  Description of Artificial Sequence: Synthetic oligonucleotide
  Sense strand starting at position 47 of SEQ ID NO: 1887097
uccuuccaagaaugugaau

SEQ ID NO: 2448141 - RNA, 19 nt, Artificial Sequence
  Description of Artificial Sequence: Synthetic oligonucleotide
  Antisense strand to SEQ ID NO: 2448140
auucacauucuuggaagga

SEQ ID NO: 2448142 - RNA, 19 nt, Artificial Sequence
  Description of Artificial Sequence: Synthetic oligonucleotide
  Sense strand starting at position 50 of SEQ ID NO: 1887097
uuccaagaaugugaauuua

SEQ ID NO: 2448143 - RNA, 19 nt, Artificial Sequence
  Description of Artificial Sequence: Synthetic oligonucleotide
  Antisense strand to SEQ ID NO: 2448142
uaaauucacauucuuggaa

SEQ ID NO: 2448144 - RNA, 19 nt, Artificial Sequence
  Description of Artificial Sequence: Synthetic oligonucleotide
  Sense strand starting at position 60 of SEQ ID NO: 1887097
gugaauuuagguugccuga

SEQ ID NO: 2448145 - RNA, 19 nt, Artificial Sequence
  Description of Artificial Sequence: Synthetic oligonucleotide
  Antisense strand to SEQ ID NO: 2448144
ucaggcaaccuaaauucac

SEQ ID NO: 2448146 - RNA, 19 nt, Artificial Sequence
  Description of Artificial Sequence: Synthetic oligonucleotide
  Sense strand starting at position 87 of SEQ ID NO: 1887097
uauuguauuugaugaugga

SEQ ID NO: 2448147 - RNA, 19 nt, Artificial Sequence
  Description of Artificial Sequence: Synthetic oligonucleotide
  Antisense strand to SEQ ID NO: 2448146
uccaucaucaaauacaaua

SEQ ID NO: 2448148 - RNA, 19 nt, Artificial Sequence
  Description of Artificial Sequence: Synthetic oligonucleotide
  Sense strand starting at position 90 of SEQ ID NO: 1887097
uguauuugaugauggaagu

SEQ ID NO: 2448149 - RNA, 19 nt, Artificial Sequence
  Description of Artificial Sequence: Synthetic oligonucleotide
  Antisense strand to SEQ ID NO: 2448148
acuuccaucaucaaauaca

SEQ ID NO: 2448150 - RNA, 19 nt, Artificial Sequence
  Description of Artificial Sequence: Synthetic oligonucleotide
  Sense strand starting at position 121 of SEQ ID NO: 1887097
uauauaaauguuugaggac

SEQ ID NO: 2448151 - RNA, 19 nt, Artificial Sequence
  Description of Artificial Sequence: Synthetic oligonucleotide
  Antisense strand to SEQ ID NO: 2448150
guccucaaacauuuauaua

SEQ ID NO: 2448152 - RNA, 19 nt, Artificial Sequence
  Description of Artificial Sequence: Synthetic oligonucleotide
  Sense strand starting at position 147 of SEQ ID NO: 1887097
caguguuuccagggauaug

SEQ ID NO: 2448153 - RNA, 19 nt, Artificial Sequence
  Description of Artificial Sequence: Synthetic oligonucleotide
  Antisense strand to SEQ ID NO: 2448152
cauaucccuggaaacacug

SEQ ID NO: 2448154 - RNA, 19 nt, Artificial Sequence
  Description of Artificial Sequence: Synthetic oligonucleotide
  Sense strand starting at position 173 of SEQ ID NO: 1887097
ugaacuaguugaucaguaa

SEQ ID NO: 2448155 - RNA, 19 nt, Artificial Sequence
  Description of Artificial Sequence: Synthetic oligonucleotide
  Antisense strand to SEQ ID NO: 2448154
uuacugaucaacuaguuca

SEQ ID NO: 2448156 - RNA, 19 nt, Artificial Sequence
  Description of Artificial Sequence: Synthetic oligonucleotide
  Sense strand starting at position 176 of SEQ ID NO: 1887097
acuaguugaucaguaaauc

SEQ ID NO: 2448157 - RNA, 19 nt, Artificial Sequence
  Description of Artificial Sequence: Synthetic oligonucleotide
  Antisense strand to SEQ ID NO: 2448156
gauuuacugaucaacuagu

SEQ ID NO: 2448158 - RNA, 19 nt, Artificial Sequence
  Description of Artificial Sequence: Synthetic oligonucleotide
  Sense strand starting at position 177 of SEQ ID NO: 1887097
cuaguugaucaguaaaucu

SEQ ID NO: 2448159 - RNA, 19 nt, Artificial Sequence
  Description of Artificial Sequence: Synthetic oligonucleotide
  Antisense strand to SEQ ID NO: 2448158
agauuuacugaucaacuag

SEQ ID NO: 2448160 - RNA, 19 nt, Artificial Sequence
  Description of Artificial Sequence: Synthetic oligonucleotide
  Sense strand starting at position 224 of SEQ ID NO: 1887097
ccugaugucucucccagaa

SEQ ID NO: 2448161 - RNA, 19 nt, Artificial Sequence
  Description of Artificial Sequence: Synthetic oligonucleotide
  Antisense strand to SEQ ID NO: 2448160
uucugggagagacaucagg

SEQ ID NO: 2448162 - RNA, 19 nt, Artificial Sequence
  Description of Artificial Sequence: Synthetic oligonucleotide
  Sense strand starting at position 306 of SEQ ID NO: 1887097
cauccugagugaguguaaa

SEQ ID NO: 2448163 - RNA, 19 nt, Artificial Sequence
  Description of Artificial Sequence: Synthetic oligonucleotide
  Antisense strand to SEQ ID NO: 2448162
uuuacacucacucaggaug

SEQ ID NO: 2448164 - RNA, 19 nt, Artificial Sequence
  Description of Artificial Sequence: Synthetic oligonucleotide
  Sense strand starting at position 365 of SEQ ID NO: 1887097
cgaccuggauucuuaugaa

SEQ ID NO: 2448165 - RNA, 19 nt, Artificial Sequence
  Description of Artificial Sequence: Synthetic oligonucleotide
  Antisense strand to SEQ ID NO: 2448164
uucauaagaauccaggucg

SEQ ID NO: 2448166 - RNA, 19 nt, Artificial Sequence
  Description of Artificial Sequence: Synthetic oligonucleotide
  Sense strand starting at position 369 of SEQ ID NO: 1887097
cuggauucuuaugaaggga

SEQ ID NO: 2448167 - RNA, 19 nt, Artificial Sequence
  Description of Artificial Sequence: Synthetic oligonucleotide
  Antisense strand to SEQ ID NO: 2448166
ucccuucauaagaauccag

SEQ ID NO: 2448168 - RNA, 19 nt, Artificial Sequence
  Description of Artificial Sequence: Synthetic oligonucleotide
  Sense strand starting at position 419 of SEQ ID NO: 1887097
uucuguuagucucucugau

SEQ ID NO: 2448169 - RNA, 19 nt, Artificial Sequence
  Description of Artificial Sequence: Synthetic oligonucleotide
  Antisense strand to SEQ ID NO: 2448168
aucagagagacuaacagaa

SEQ ID NO: 2448170 - RNA, 19 nt, Artificial Sequence
  Description of Artificial Sequence: Synthetic oligonucleotide
  Sense strand starting at position 421 of SEQ ID NO: 1887097
cuguuagucucucugauga

SEQ ID NO: 2448171 - RNA, 19 nt, Artificial Sequence
  Description of Artificial Sequence: Synthetic oligonucleotide
  Antisense strand to SEQ ID NO: 2448170
ucaucagagagacuaacag

SEQ ID NO: 2448172 - RNA, 19 nt, Artificial Sequence
  Description of Artificial Sequence: Synthetic oligonucleotide
  Sense strand starting at position 720 of SEQ ID NO: 1887097
gagaauugggccuggguca

SEQ ID NO: 2448173 - RNA, 19 nt, Artificial Sequence
  Description of Artificial Sequence: Synthetic oligonucleotide
  Antisense strand to SEQ ID NO: 2448172
ugacccaggcccaauucuc

SEQ ID NO: 2448174 - RNA, 19 nt, Artificial Sequence
  Description of Artificial Sequence: Synthetic oligonucleotide
  Sense strand starting at position 721 of SEQ ID NO: 1887097
agaauugggccugggucaa

SEQ ID NO: 2448175 - RNA, 19 nt, Artificial Sequence
  Description of Artificial Sequence: Synthetic oligonucleotide
  Antisense strand to SEQ ID NO: 2448174
uugacccaggcccaauucu

SEQ ID NO: 2448176 - RNA, 19 nt, Artificial Sequence
  Description of Artificial Sequence: Synthetic oligonucleotide
  Sense strand starting at position 1102 of SEQ ID NO: 1887097
aagagaaggugcucucaua

SEQ ID NO: 2448177 - RNA, 19 nt, Artificial Sequence
  Description of Artificial Sequence: Synthetic oligonucleotide
  Antisense strand to SEQ ID NO: 2448176
uaugagagcaccuucucuu

SEQ ID NO: 2448178 - RNA, 19 nt, Artificial Sequence
  Description of Artificial Sequence: Synthetic oligonucleotide
  Sense strand starting at position 1131 of SEQ ID NO: 1887097
ggcauuggaucaguacgua

SEQ ID NO: 2448179 - RNA, 19 nt, Artificial Sequence
  Description of Artificial Sequence: Synthetic oligonucleotide
  Antisense strand to SEQ ID NO: 2448178
uacguacugauccaaugcc

SEQ ID NO: 2448180 - RNA, 19 nt, Artificial Sequence
  Description of Artificial Sequence: Synthetic oligonucleotide
  Sense strand starting at position 1502 of SEQ ID NO: 1887097
ucgugcugucugcuuaaca

SEQ ID NO: 2448181 - RNA, 19 nt, Artificial Sequence
  Description of Artificial Sequence: Synthetic oligonucleotide
  Antisense strand to SEQ ID NO: 2448180
uguuaagcagacagcacga

SEQ ID NO: 2448182 - RNA, 19 nt, Artificial Sequence
  Description of Artificial Sequence: Synthetic oligonucleotide
  Sense strand starting at position 1707 of SEQ ID NO: 1887097
guucucuugaggcagaacu

SEQ ID NO: 2448183 - RNA, 19 nt, Artificial Sequence
  Description of Artificial Sequence: Synthetic oligonucleotide
  Antisense strand to SEQ ID NO: 2448182
aguucugccucaagagaac

SEQ ID NO: 2448184 - RNA, 19 nt, Artificial Sequence
  Description of Artificial Sequence: Synthetic oligonucleotide
  Sense strand starting at position 1709 of SEQ ID NO: 1887097
ucucuugaggcagaacuua

SEQ ID NO: 2448185 - RNA, 19 nt, Artificial Sequence
  Description of Artificial Sequence: Synthetic oligonucleotide
  Antisense strand to SEQ ID NO: 2448184
uaaguucugccucaagaga

SEQ ID NO: 2448186 - RNA, 19 nt, Artificial Sequence
  Description of Artificial Sequence: Synthetic oligonucleotide
  Sense strand starting at position 1736 of SEQ ID NO: 1887097
gucucuggccaucaguauu

SEQ ID NO: 2448187 - RNA, 19 nt, Artificial Sequence
  Description of Artificial Sequence: Synthetic oligonucleotide
  Antisense strand to SEQ ID NO: 2448186
aauacugauggccagagac

SEQ ID NO: 2448188 - RNA, 19 nt, Artificial Sequence
  Description of Artificial Sequence: Synthetic oligonucleotide
  Sense strand starting at position 1756 of SEQ ID NO: 1887097
uugaaacugcccuggagau

SEQ ID NO: 2448189 - RNA, 19 nt, Artificial Sequence
  Description of Artificial Sequence: Synthetic oligonucleotide
  Antisense strand to SEQ ID NO: 2448188
aucuccagggcaguuucaa

SEQ ID NO: 2448190 - RNA, 19 nt, Artificial Sequence
  Description of Artificial Sequence: Synthetic oligonucleotide
  Sense strand starting at position 1757 of SEQ ID NO: 1887097
ugaaacugcccuggagauu

SEQ ID NO: 2448191 - RNA, 19 nt, Artificial Sequence
  Description of Artificial Sequence: Synthetic oligonucleotide
  Antisense strand to SEQ ID NO: 2448190
aaucuccagggcaguuuca

SEQ ID NO: 2448192 - RNA, 19 nt, Artificial Sequence
  Description of Artificial Sequence: Synthetic oligonucleotide
  Sense strand starting at position 1817 of SEQ ID NO: 1887097
uggcaagaaguuugucaca

SEQ ID NO: 2448193 - RNA, 19 nt, Artificial Sequence
  Description of Artificial Sequence: Synthetic oligonucleotide
  Antisense strand to SEQ ID NO: 2448192
ugugacaaacuucuugcca

SEQ ID NO: 2448194 - RNA, 19 nt, Artificial Sequence
  Description of Artificial Sequence: Synthetic oligonucleotide
  Sense strand starting at position 1819 of SEQ ID NO: 1887097
gcaagaaguuugucacaag

SEQ ID NO: 2448195 - RNA, 19 nt, Artificial Sequence
  Description of Artificial Sequence: Synthetic oligonucleotide
  Antisense strand to SEQ ID NO: 2448194
cuugugacaaacuucuugc

SEQ ID NO: 2448196 - RNA, 19 nt, Artificial Sequence
  Description of Artificial Sequence: Synthetic oligonucleotide
  Sense strand starting at position 1852 of SEQ ID NO: 1887097
uugugucacuucuccagga

SEQ ID NO: 2448197 - RNA, 19 nt, Artificial Sequence
  Description of Artificial Sequence: Synthetic oligonucleotide
  Antisense strand to SEQ ID NO: 2448196
uccuggagaagugacacaa

SEQ ID NO: 2448198 - RNA, 19 nt, Artificial Sequence
  Description of Artificial Sequence: Synthetic oligonucleotide
  Sense strand starting at position 1853 of SEQ ID NO: 1887097
ugugucacuucuccaggau

SEQ ID NO: 2448199 - RNA, 19 nt, Artificial Sequence
  Description of Artificial Sequence: Synthetic oligonucleotide
  Antisense strand to SEQ ID NO: 2448198
auccuggagaagugacaca

SEQ ID NO: 2448200 - RNA, 19 nt, Artificial Sequence
  Description of Artificial Sequence: Synthetic oligonucleotide
  Sense strand starting at position 1854 of SEQ ID NO: 1887097
gugucacuucuccaggaug

SEQ ID NO: 2448201 - RNA, 19 nt, Artificial Sequence
  Description of Artificial Sequence: Synthetic oligonucleotide
  Antisense strand to SEQ ID NO: 2448200
cauccuggagaagugacac

SEQ ID NO: 2448202 - RNA, 19 nt, Artificial Sequence
  Description of Artificial Sequence: Synthetic oligonucleotide
  Sense strand starting at position 2163 of SEQ ID NO: 1887097
augagcucacaguguagua

SEQ ID NO: 2448203 - RNA, 19 nt, Artificial Sequence
  Description of Artificial Sequence: Synthetic oligonucleotide
  Antisense strand to SEQ ID NO: 2448202
uacuacacugugagcucau

SEQ ID NO: 2448204 - RNA, 19 nt, Artificial Sequence
  Description of Artificial Sequence: Synthetic oligonucleotide
  Sense strand starting at position 2175 of SEQ ID NO: 1887097
uguaguaagauuggaccau

SEQ ID NO: 2448205 - RNA, 19 nt, Artificial Sequence
  Description of Artificial Sequence: Synthetic oligonucleotide
  Antisense strand to SEQ ID NO: 2448204
augguccaaucuuacuaca

SEQ ID NO: 2448206 - RNA, 19 nt, Artificial Sequence
  Description of Artificial Sequence: Synthetic oligonucleotide
  Sense strand starting at position 2187 of SEQ ID NO: 1887097
ggaccaucuucccucugua

SEQ ID NO: 2448207 - RNA, 19 nt, Artificial Sequence
  Description of Artificial Sequence: Synthetic oligonucleotide
  Antisense strand to SEQ ID NO: 2448206
uacagagggaagauggucc

SEQ ID NO: 2448208 - RNA, 19 nt, Artificial Sequence
  Description of Artificial Sequence: Synthetic oligonucleotide
  Sense strand starting at position 2190 of SEQ ID NO: 1887097
ccaucuucccucuguagga

SEQ ID NO: 2448209 - RNA, 19 nt, Artificial Sequence
  Description of Artificial Sequence: Synthetic oligonucleotide
  Antisense strand to SEQ ID NO: 2448208
uccuacagagggaagaugg

SEQ ID NO: 2448210 - RNA, 19 nt, Artificial Sequence
  Description of Artificial Sequence: Synthetic oligonucleotide
  Sense strand starting at position 2683 of SEQ ID NO: 1887097
cccagagagccacguuuaa

SEQ ID NO: 2448211 - RNA, 19 nt, Artificial Sequence
  Description of Artificial Sequence: Synthetic oligonucleotide
  Antisense strand to SEQ ID NO: 2448210
uuaaacguggcucucuggg

SEQ ID NO: 2448212 - RNA, 19 nt, Artificial Sequence
  Description of Artificial Sequence: Synthetic oligonucleotide
  Sense strand starting at position 2692 of SEQ ID NO: 1887097
ccacguuuaagcugagaca

SEQ ID NO: 2448213 - RNA, 19 nt, Artificial Sequence
  Description of Artificial Sequence: Synthetic oligonucleotide
  Antisense strand to SEQ ID NO: 2448212
ugucucagcuuaaacgugg

SEQ ID NO: 2448214 - RNA, 19 nt, Artificial Sequence
  Description of Artificial Sequence: Synthetic oligonucleotide
  Sense strand starting at position 2693 of SEQ ID NO: 1887097
cacguuuaagcugagacaa

SEQ ID NO: 2448215 - RNA, 19 nt, Artificial Sequence
  Description of Artificial Sequence: Synthetic oligonucleotide
  Antisense strand to SEQ ID NO: 2448214
uugucucagcuuaaacgug

SEQ ID NO: 2448216 - RNA, 19 nt, Artificial Sequence
  Description of Artificial Sequence: Synthetic oligonucleotide
  Sense strand starting at position 2950 of SEQ ID NO: 1887097
gguguauguaagcagucuu

SEQ ID NO: 2448217 - RNA, 19 nt, Artificial Sequence
  Description of Artificial Sequence: Synthetic oligonucleotide
  Antisense strand to SEQ ID NO: 2448216
aagacugcuuacauacacc

SEQ ID NO: 2448218 - RNA, 19 nt, Artificial Sequence
  Description of Artificial Sequence: Synthetic oligonucleotide
  Sense strand starting at position 1 of SEQ ID NO: 1887098
ucgcuucccugugccaaua

SEQ ID NO: 2448219 - RNA, 19 nt, Artificial Sequence
  Description of Artificial Sequence: Synthetic oligonucleotide
  Antisense strand to SEQ ID NO: 2448218
uauuggcacagggaagcga

SEQ ID NO: 2448220 - RNA, 19 nt, Artificial Sequence
  Description of Artificial Sequence: Synthetic oligonucleotide
  Sense strand starting at position 17 of SEQ ID NO: 1887098
auauuucugugcugcuaga

SEQ ID NO: 2448221 - RNA, 19 nt, Artificial Sequence
  Description of Artificial Sequence: Synthetic oligonucleotide
  Antisense strand to SEQ ID NO: 2448220
ucuagcagcacagaaauau

SEQ ID NO: 2448222 - RNA, 19 nt, Artificial Sequence
  Description of Artificial Sequence: Synthetic oligonucleotide
  Sense strand starting at position 75 of SEQ ID NO: 1887098
guucucuugaggcagaacu

SEQ ID NO: 2448223 - RNA, 19 nt, Artificial Sequence
  Description of Artificial Sequence: Synthetic oligonucleotide
  Antisense strand to SEQ ID NO: 2448222
aguucugccucaagagaac

SEQ ID NO: 2448224 - RNA, 19 nt, Artificial Sequence
  Description of Artificial Sequence: Synthetic oligonucleotide
  Sense strand starting at position 77 of SEQ ID NO: 1887098
ucucuugaggcagaacuua

SEQ ID NO: 2448225 - RNA, 19 nt, Artificial Sequence
  Description of Artificial Sequence: Synthetic oligonucleotide
  Antisense strand to SEQ ID NO: 2448224
uaaguucugccucaagaga

SEQ ID NO: 2448226 - RNA, 19 nt, Artificial Sequence
  Description of Artificial Sequence: Synthetic oligonucleotide
  Sense strand starting at position 104 of SEQ ID NO: 1887098
gucucuggccaucaguauu

SEQ ID NO: 2448227 - RNA, 19 nt, Artificial Sequence
  Description of Artificial Sequence: Synthetic oligonucleotide
  Antisense strand to SEQ ID NO: 2448226
aauacugauggccagagac

SEQ ID NO: 2448228 - RNA, 19 nt, Artificial Sequence
  Description of Artificial Sequence: Synthetic oligonucleotide
  Sense strand starting at position 124 of SEQ ID NO: 1887098
uugaaacugcccuggagau

SEQ ID NO: 2448229 - RNA, 19 nt, Artificial Sequence
  Description of Artificial Sequence: Synthetic oligonucleotide
  Antisense strand to SEQ ID NO: 2448228
aucuccagggcaguuucaa

SEQ ID NO: 2448230 - RNA, 19 nt, Artificial Sequence
  Description of Artificial Sequence: Synthetic oligonucleotide
  Sense strand starting at position 125 of SEQ ID NO: 1887098
ugaaacugcccuggagauu

SEQ ID NO: 2448231 - RNA, 19 nt, Artificial Sequence
  Description of Artificial Sequence: Synthetic oligonucleotide
  Antisense strand to SEQ ID NO: 2448230
aaucuccagggcaguuuca

SEQ ID NO: 2448232 - RNA, 19 nt, Artificial Sequence
  Description of Artificial Sequence: Synthetic oligonucleotide
  Sense strand starting at position 185 of SEQ ID NO: 1887098
uggcaagaaguuugucaca

SEQ ID NO: 2448233 - RNA, 19 nt, Artificial Sequence
  Description of Artificial Sequence: Synthetic oligonucleotide
  Antisense strand to SEQ ID NO: 2448232
ugugacaaacuucuugcca

SEQ ID NO: 2448234 - RNA, 19 nt, Artificial Sequence
  Description of Artificial Sequence: Synthetic oligonucleotide
  Sense strand starting at position 187 of SEQ ID NO: 1887098
gcaagaaguuugucacaag

SEQ ID NO: 2448235 - RNA, 19 nt, Artificial Sequence
  Description of Artificial Sequence: Synthetic oligonucleotide
  Antisense strand to SEQ ID NO: 2448234
cuugugacaaacuucuugc

SEQ ID NO: 2448236 - RNA, 19 nt, Artificial Sequence
  Description of Artificial Sequence: Synthetic oligonucleotide
  Sense strand starting at position 220 of SEQ ID NO: 1887098
uugugucacuucuccagga

SEQ ID NO: 2448237 - RNA, 19 nt, Artificial Sequence
  Description of Artificial Sequence: Synthetic oligonucleotide
  Antisense strand to SEQ ID NO: 2448236
uccuggagaagugacacaa

SEQ ID NO: 2448238 - RNA, 19 nt, Artificial Sequence
  Description of Artificial Sequence: Synthetic oligonucleotide
  Sense strand starting at position 221 of SEQ ID NO: 1887098
ugugucacuucuccaggau

SEQ ID NO: 2448239 - RNA, 19 nt, Artificial Sequence
  Description of Artificial Sequence: Synthetic oligonucleotide
  Antisense strand to SEQ ID NO: 2448238
auccuggagaagugacaca

SEQ ID NO: 2448240 - RNA, 19 nt, Artificial Sequence
  Description of Artificial Sequence: Synthetic oligonucleotide
  Sense strand starting at position 222 of SEQ ID NO: 1887098
gugucacuucuccaggaug

SEQ ID NO: 2448241 - RNA, 19 nt, Artificial Sequence
  Description of Artificial Sequence: Synthetic oligonucleotide
  Antisense strand to SEQ ID NO: 2448240
cauccuggagaagugacac

SEQ ID NO: 2448242 - RNA, 19 nt, Artificial Sequence
  Description of Artificial Sequence: Synthetic oligonucleotide
  Sense strand starting at position 531 of SEQ ID NO: 1887098
augagcucacaguguagua

SEQ ID NO: 2448243 - RNA, 19 nt, Artificial Sequence
  Description of Artificial Sequence: Synthetic oligonucleotide
  Antisense strand to SEQ ID NO: 2448242
uacuacacugugagcucau

SEQ ID NO: 2448244 - RNA, 19 nt, Artificial Sequence
  Description of Artificial Sequence: Synthetic oligonucleotide
  Sense strand starting at position 536 of SEQ ID NO: 1887098
cucacaguguaguaagauu

SEQ ID NO: 2448245 - RNA, 19 nt, Artificial Sequence
  Description of Artificial Sequence: Synthetic oligonucleotide
  Antisense strand to SEQ ID NO: 2448244
aaucuuacuacacugugag

SEQ ID NO: 2448246 - RNA, 19 nt, Artificial Sequence
  Description of Artificial Sequence: Synthetic oligonucleotide
  Sense strand starting at position 543 of SEQ ID NO: 1887098
uguaguaagauuggaccau

SEQ ID NO: 2448247 - RNA, 19 nt, Artificial Sequence
  Description of Artificial Sequence: Synthetic oligonucleotide
  Antisense strand to SEQ ID NO: 2448246
augguccaaucuuacuaca

SEQ ID NO: 2448248 - RNA, 19 nt, Artificial Sequence
  Description of Artificial Sequence: Synthetic oligonucleotide
  Sense strand starting at position 555 of SEQ ID NO: 1887098
ggaccaucuucccucugua

SEQ ID NO: 2448249 - RNA, 19 nt, Artificial Sequence
  Description of Artificial Sequence: Synthetic oligonucleotide
  Antisense strand to SEQ ID NO: 2448248
uacagagggaagauggucc

SEQ ID NO: 2448250 - RNA, 19 nt, Artificial Sequence
  Description of Artificial Sequence: Synthetic oligonucleotide
  Sense strand starting at position 558 of SEQ ID NO: 1887098
ccaucuucccucuguagga

SEQ ID NO: 2448251 - RNA, 19 nt, Artificial Sequence
  Description of Artificial Sequence: Synthetic oligonucleotide
  Antisense strand to SEQ ID NO: 2448250
uccuacagagggaagaugg

SEQ ID NO: 2448252 - RNA, 19 nt, Artificial Sequence
  Description of Artificial Sequence: Synthetic oligonucleotide
  Sense strand starting at position 1051 of SEQ ID NO: 1887098
cccagagagccacguuuaa

SEQ ID NO: 2448253 - RNA, 19 nt, Artificial Sequence
  Description of Artificial Sequence: Synthetic oligonucleotide
  Antisense strand to SEQ ID NO: 2448252
uuaaacguggcucucuggg

SEQ ID NO: 2448254 - RNA, 19 nt, Artificial Sequence
  Description of Artificial Sequence: Synthetic oligonucleotide
  Sense strand starting at position 1060 of SEQ ID NO: 1887098
ccacguuuaagcugagaca

SEQ ID NO: 2448255 - RNA, 19 nt, Artificial Sequence
  Description of Artificial Sequence: Synthetic oligonucleotide
  Antisense strand to SEQ ID NO: 2448254
ugucucagcuuaaacgugg

SEQ ID NO: 2448256 - RNA, 19 nt, Artificial Sequence
  Description of Artificial Sequence: Synthetic oligonucleotide
  Sense strand starting at position 1061 of SEQ ID NO: 1887098
cacguuuaagcugagacaa

SEQ ID NO: 2448257 - RNA, 19 nt, Artificial Sequence
  Description of Artificial Sequence: Synthetic oligonucleotide
  Antisense strand to SEQ ID NO: 2448256
uugucucagcuuaaacgug

SEQ ID NO: 2448258 - RNA, 19 nt, Artificial Sequence
  Description of Artificial Sequence: Synthetic oligonucleotide
  Sense strand starting at position 1318 of SEQ ID NO: 1887098
gguguauguaagcagucuu

SEQ ID NO: 2448259 - RNA, 19 nt, Artificial Sequence
  Description of Artificial Sequence: Synthetic oligonucleotide
  Antisense strand to SEQ ID NO: 2448258
aagacugcuuacauacacc

SEQ ID NO: 2448260 - RNA, 19 nt, Artificial Sequence
  Description of Artificial Sequence: Synthetic oligonucleotide
  Sense strand starting at position 1678 of SEQ ID NO: 1887098
cgccacgucucuccugaaa

SEQ ID NO: 2448261 - RNA, 19 nt, Artificial Sequence
  Description of Artificial Sequence: Synthetic oligonucleotide
  Antisense strand to SEQ ID NO: 2448260
uuucaggagagacguggcg

SEQ ID NO: 2448262 - RNA, 19 nt, Artificial Sequence
  Description of Artificial Sequence: Synthetic oligonucleotide
  Sense strand starting at position 2440 of SEQ ID NO: 1887098
aggauuggaaucugccauu

SEQ ID NO: 2448263 - RNA, 19 nt, Artificial Sequence
  Description of Artificial Sequence: Synthetic oligonucleotide
  Antisense strand to SEQ ID NO: 2448262
aauggcagauuccaauccu

SEQ ID NO: 2448264 - RNA, 19 nt, Artificial Sequence
  Description of Artificial Sequence: Synthetic oligonucleotide
  Sense strand starting at position 2446 of SEQ ID NO: 1887098
ggaaucugccauugcuguu

SEQ ID NO: 2448265 - RNA, 19 nt, Artificial Sequence
  Description of Artificial Sequence: Synthetic oligonucleotide
  Antisense strand to SEQ ID NO: 2448264
aacagcaauggcagauucc

SEQ ID NO: 2448266 - RNA, 19 nt, Artificial Sequence
  Description of Artificial Sequence: Synthetic oligonucleotide
  Sense strand starting at position 2451 of SEQ ID NO: 1887098
cugccauugcuguugcaca

SEQ ID NO: 2448267 - RNA, 19 nt, Artificial Sequence
  Description of Artificial Sequence: Synthetic oligonucleotide
  Antisense strand to SEQ ID NO: 2448266
ugugcaacagcaauggcag

SEQ ID NO: 2448268 - RNA, 19 nt, Artificial Sequence
  Description of Artificial Sequence: Synthetic oligonucleotide
  Sense strand starting at position 2675 of SEQ ID NO: 1887098
gugcaagaaucaccuccuu

SEQ ID NO: 2448269 - RNA, 19 nt, Artificial Sequence
  Description of Artificial Sequence: Synthetic oligonucleotide
  Antisense strand to SEQ ID NO: 2448268
aaggaggugauucuugcac

SEQ ID NO: 2448270 - RNA, 19 nt, Artificial Sequence
  Description of Artificial Sequence: Synthetic oligonucleotide
  Sense strand starting at position 3010 of SEQ ID NO: 1887098
gguccaaauuaagugaacu

SEQ ID NO: 2448271 - RNA, 19 nt, Artificial Sequence
  Description of Artificial Sequence: Synthetic oligonucleotide
  Antisense strand to SEQ ID NO: 2448270
aguucacuuaauuuggacc

SEQ ID NO: 2448272 - RNA, 19 nt, Artificial Sequence
  Description of Artificial Sequence: Synthetic oligonucleotide
  Sense strand starting at position 3035 of SEQ ID NO: 1887098
ucagucucaccuuaugauu

SEQ ID NO: 2448273 - RNA, 19 nt, Artificial Sequence
  Description of Artificial Sequence: Synthetic oligonucleotide
  Antisense strand to SEQ ID NO: 2448272
aaucauaaggugagacuga

SEQ ID NO: 2448274 - RNA, 19 nt, Artificial Sequence
  Description of Artificial Sequence: Synthetic oligonucleotide
  Sense strand starting at position 3037 of SEQ ID NO: 1887098
agucucaccuuaugauuau

SEQ ID NO: 2448275 - RNA, 19 nt, Artificial Sequence
  Description of Artificial Sequence: Synthetic oligonucleotide
  Antisense strand to SEQ ID NO: 2448274
auaaucauaaggugagacu

SEQ ID NO: 2448276 - RNA, 19 nt, Artificial Sequence
  Description of Artificial Sequence: Synthetic oligonucleotide
  Sense strand starting at position 3176 of SEQ ID NO: 1887098
uuggguauccauggauaca

SEQ ID NO: 2448277 - RNA, 19 nt, Artificial Sequence
  Description of Artificial Sequence: Synthetic oligonucleotide
  Antisense strand to SEQ ID NO: 2448276
uguauccauggauacccaa

SEQ ID NO: 2448278 - RNA, 19 nt, Artificial Sequence
  Description of Artificial Sequence: Synthetic oligonucleotide
  Sense strand starting at position 3387 of SEQ ID NO: 1887098
ccuugaaacuuagauggca

SEQ ID NO: 2448279 - RNA, 19 nt, Artificial Sequence
  Description of Artificial Sequence: Synthetic oligonucleotide
  Antisense strand to SEQ ID NO: 2448278
ugccaucuaaguuucaagg

SEQ ID NO: 2448280 - RNA, 19 nt, Artificial Sequence
  Description of Artificial Sequence: Synthetic oligonucleotide
  Sense strand starting at position 3425 of SEQ ID NO: 1887098
cccaaaucagcaugaguac

SEQ ID NO: 2448281 - RNA, 19 nt, Artificial Sequence
  Description of Artificial Sequence: Synthetic oligonucleotide
  Antisense strand to SEQ ID NO: 2448280
guacucaugcugauuuggg

SEQ ID NO: 2448282 - RNA, 19 nt, Artificial Sequence
  Description of Artificial Sequence: Synthetic oligonucleotide
  Sense strand starting at position 3426 of SEQ ID NO: 1887098
ccaaaucagcaugaguacu

SEQ ID NO: 2448283 - RNA, 19 nt, Artificial Sequence
  Description of Artificial Sequence: Synthetic oligonucleotide
  Antisense strand to SEQ ID NO: 2448282
aguacucaugcugauuugg

SEQ ID NO: 2448284 - RNA, 19 nt, Artificial Sequence
  Description of Artificial Sequence: Synthetic oligonucleotide
  Sense strand starting at position 3432 of SEQ ID NO: 1887098
cagcaugaguacuuugguu

SEQ ID NO: 2448285 - RNA, 19 nt, Artificial Sequence
  Description of Artificial Sequence: Synthetic oligonucleotide
  Antisense strand to SEQ ID NO: 2448284
aaccaaaguacucaugcug

SEQ ID NO: 2448286 - RNA, 19 nt, Artificial Sequence
  Description of Artificial Sequence: Synthetic oligonucleotide
  Sense strand starting at position 3434 of SEQ ID NO: 1887098
gcaugaguacuuugguucu

SEQ ID NO: 2448287 - RNA, 19 nt, Artificial Sequence
  Description of Artificial Sequence: Synthetic oligonucleotide
  Antisense strand to SEQ ID NO: 2448286
agaaccaaaguacucaugc

SEQ ID NO: 2448288 - RNA, 19 nt, Artificial Sequence
  Description of Artificial Sequence: Synthetic oligonucleotide
  Sense strand starting at position 3441 of SEQ ID NO: 1887098
uacuuugguucugcugaua

SEQ ID NO: 2448289 - RNA, 19 nt, Artificial Sequence
  Description of Artificial Sequence: Synthetic oligonucleotide
  Antisense strand to SEQ ID NO: 2448288
uaucagcagaaccaaagua

SEQ ID NO: 2448290 - RNA, 19 nt, Artificial Sequence
  Description of Artificial Sequence: Synthetic oligonucleotide
  Sense strand starting at position 3487 of SEQ ID NO: 1887098
cuccaaauuguggguguca

SEQ ID NO: 2448291 - RNA, 19 nt, Artificial Sequence
  Description of Artificial Sequence: Synthetic oligonucleotide
  Antisense strand to SEQ ID NO: 2448290
ugacacccacaauuuggag

SEQ ID NO: 2448292 - RNA, 19 nt, Artificial Sequence
  Description of Artificial Sequence: Synthetic oligonucleotide
  Sense strand starting at position 3489 of SEQ ID NO: 1887098
ccaaauugugggugucaga

SEQ ID NO: 2448293 - RNA, 19 nt, Artificial Sequence
  Description of Artificial Sequence: Synthetic oligonucleotide
  Antisense strand to SEQ ID NO: 2448292
ucugacacccacaauuugg

SEQ ID NO: 2448294 - RNA, 19 nt, Artificial Sequence
  Description of Artificial Sequence: Synthetic oligonucleotide
  Sense strand starting at position 3741 of SEQ ID NO: 1887098
accucaucguccugaauuu

SEQ ID NO: 2448295 - RNA, 19 nt, Artificial Sequence
  Description of Artificial Sequence: Synthetic oligonucleotide
  Antisense strand to SEQ ID NO: 2448294
aaauucaggacgaugaggu

SEQ ID NO: 2448296 - RNA, 19 nt, Artificial Sequence
  Description of Artificial Sequence: Synthetic oligonucleotide
  Sense strand starting at position 3978 of SEQ ID NO: 1887098
cccgcaaugucucccgaaa

SEQ ID NO: 2448297 - RNA, 19 nt, Artificial Sequence
  Description of Artificial Sequence: Synthetic oligonucleotide
  Antisense strand to SEQ ID NO: 2448296
uuucgggagacauugcggg

SEQ ID NO: 2448298 - RNA, 19 nt, Artificial Sequence
  Description of Artificial Sequence: Synthetic oligonucleotide
  Sense strand starting at position 46 of SEQ ID NO: 1887099
cucuucuggccuugagauc

SEQ ID NO: 2448299 - RNA, 19 nt, Artificial Sequence
  Description of Artificial Sequence: Synthetic oligonucleotide
  Antisense strand to SEQ ID NO: 2448298
gaucucaaggccagaagag

SEQ ID NO: 2448300 - RNA, 19 nt, Artificial Sequence
  Description of Artificial Sequence: Synthetic oligonucleotide
  Sense strand starting at position 47 of SEQ ID NO: 1887099
ucuucuggccuugagauca

SEQ ID NO: 2448301 - RNA, 19 nt, Artificial Sequence
  Description of Artificial Sequence: Synthetic oligonucleotide
  Antisense strand to SEQ ID NO: 2448300
ugaucucaaggccagaaga

SEQ ID NO: 2448302 - RNA, 19 nt, Artificial Sequence
  Description of Artificial Sequence: Synthetic oligonucleotide
  Sense strand starting at position 137 of SEQ ID NO: 1887099
acaggagaagugugugagu

SEQ ID NO: 2448303 - RNA, 19 nt, Artificial Sequence
  Description of Artificial Sequence: Synthetic oligonucleotide
  Antisense strand to SEQ ID NO: 2448302
acucacacacuucuccugu

SEQ ID NO: 2448304 - RNA, 19 nt, Artificial Sequence
  Description of Artificial Sequence: Synthetic oligonucleotide
  Sense strand starting at position 256 of SEQ ID NO: 1887099
aguggagucugagguggaa

SEQ ID NO: 2448305 - RNA, 19 nt, Artificial Sequence
  Description of Artificial Sequence: Synthetic oligonucleotide
  Antisense strand to SEQ ID NO: 2448304
uuccaccucagacuccacu

SEQ ID NO: 2448306 - RNA, 19 nt, Artificial Sequence
  Description of Artificial Sequence: Synthetic oligonucleotide
  Sense strand starting at position 322 of SEQ ID NO: 1887099
ccaugcacauuugggaaau

SEQ ID NO: 2448307 - RNA, 19 nt, Artificial Sequence
  Description of Artificial Sequence: Synthetic oligonucleotide
  Antisense strand to SEQ ID NO: 2448306
auuucccaaaugugcaugg

SEQ ID NO: 2448308 - RNA, 19 nt, Artificial Sequence
  Description of Artificial Sequence: Synthetic oligonucleotide
  Sense strand starting at position 362 of SEQ ID NO: 1887099
uguuguuuaugugaaauac

SEQ ID NO: 2448309 - RNA, 19 nt, Artificial Sequence
  Description of Artificial Sequence: Synthetic oligonucleotide
  Antisense strand to SEQ ID NO: 2448308
guauuucacauaaacaaca

SEQ ID NO: 2448310 - RNA, 19 nt, Artificial Sequence
  Description of Artificial Sequence: Synthetic oligonucleotide
  Sense strand starting at position 1385 of SEQ ID NO: 1887099
aguuacacaucagagagaa

SEQ ID NO: 2448311 - RNA, 19 nt, Artificial Sequence
  Description of Artificial Sequence: Synthetic oligonucleotide
  Antisense strand to SEQ ID NO: 2448310
uucucucugauguguaacu

SEQ ID NO: 2448312 - RNA, 19 nt, Artificial Sequence
  Description of Artificial Sequence: Synthetic oligonucleotide
  Sense strand starting at position 1555 of SEQ ID NO: 1887099
uuccgaaacucuguggcaa

SEQ ID NO: 2448313 - RNA, 19 nt, Artificial Sequence
  Description of Artificial Sequence: Synthetic oligonucleotide
  Antisense strand to SEQ ID NO: 2448312
uugccacagaguuucggaa

SEQ ID NO: 2448314 - RNA, 19 nt, Artificial Sequence
  Description of Artificial Sequence: Synthetic oligonucleotide
  Sense strand starting at position 1556 of SEQ ID NO: 1887099
uccgaaacucuguggcaau

SEQ ID NO: 2448315 - RNA, 19 nt, Artificial Sequence
  Description of Artificial Sequence: Synthetic oligonucleotide
  Antisense strand to SEQ ID NO: 2448314
auugccacagaguuucgga

SEQ ID NO: 2448316 - RNA, 19 nt, Artificial Sequence
  Description of Artificial Sequence: Synthetic oligonucleotide
  Sense strand starting at position 2321 of SEQ ID NO: 1887099
aagucaaacugucguggga

SEQ ID NO: 2448317 - RNA, 19 nt, Artificial Sequence
  Description of Artificial Sequence: Synthetic oligonucleotide
  Antisense strand to SEQ ID NO: 2448316
ucccacgacaguuugacuu

SEQ ID NO: 2448318 - RNA, 19 nt, Artificial Sequence
  Description of Artificial Sequence: Synthetic oligonucleotide
  Sense strand starting at position 2376 of SEQ ID NO: 1887099
cgugcaggcauucugaguu

SEQ ID NO: 2448319 - RNA, 19 nt, Artificial Sequence
  Description of Artificial Sequence: Synthetic oligonucleotide
  Antisense strand to SEQ ID NO: 2448318
aacucagaaugccugcacg

SEQ ID NO: 2448320 - RNA, 19 nt, Artificial Sequence
  Description of Artificial Sequence: Synthetic oligonucleotide
  Sense strand starting at position 2498 of SEQ ID NO: 1887099
gguggugauuucggcaaug

SEQ ID NO: 2448321 - RNA, 19 nt, Artificial Sequence
  Description of Artificial Sequence: Synthetic oligonucleotide
  Antisense strand to SEQ ID NO: 2448320
cauugccgaaaucaccacc

SEQ ID NO: 2448322 - RNA, 19 nt, Artificial Sequence
  Description of Artificial Sequence: Synthetic oligonucleotide
  Sense strand starting at position 2643 of SEQ ID NO: 1887099
gggcucugugcucaagaga

SEQ ID NO: 2448323 - RNA, 19 nt, Artificial Sequence
  Description of Artificial Sequence: Synthetic oligonucleotide
  Antisense strand to SEQ ID NO: 2448322
ucucuugagcacagagccc

SEQ ID NO: 2448324 - RNA, 19 nt, Artificial Sequence
  Description of Artificial Sequence: Synthetic oligonucleotide
  Sense strand starting at position 2646 of SEQ ID NO: 1887099
cucugugcucaagagagga

SEQ ID NO: 2448325 - RNA, 19 nt, Artificial Sequence
  Description of Artificial Sequence: Synthetic oligonucleotide
  Antisense strand to SEQ ID NO: 2448324
uccucucuugagcacagag

SEQ ID NO: 2448326 - RNA, 19 nt, Artificial Sequence
  Description of Artificial Sequence: Synthetic oligonucleotide
  Sense strand starting at position 2662 of SEQ ID NO: 1887099
ggagugugugcugaguuga

SEQ ID NO: 2448327 - RNA, 19 nt, Artificial Sequence
  Description of Artificial Sequence: Synthetic oligonucleotide
  Antisense strand to SEQ ID NO: 2448326
ucaacucagcacacacucc

SEQ ID NO: 2448328 - RNA, 19 nt, Artificial Sequence
  Description of Artificial Sequence: Synthetic oligonucleotide
  Sense strand starting at position 2680 of SEQ ID NO: 1887099
acggcacucuguugagaaa

SEQ ID NO: 2448329 - RNA, 19 nt, Artificial Sequence
  Description of Artificial Sequence: Synthetic oligonucleotide
  Antisense strand to SEQ ID NO: 2448328
uuucucaacagagugccgu

SEQ ID NO: 2448330 - RNA, 19 nt, Artificial Sequence
  Description of Artificial Sequence: Synthetic oligonucleotide
  Sense strand starting at position 2789 of SEQ ID NO: 1887099
cggacacuguccugagaag

SEQ ID NO: 2448331 - RNA, 19 nt, Artificial Sequence
  Description of Artificial Sequence: Synthetic oligonucleotide
  Antisense strand to SEQ ID NO: 2448330
cuucucaggacaguguccg

SEQ ID NO: 2448332 - RNA, 19 nt, Artificial Sequence
  Description of Artificial Sequence: Synthetic oligonucleotide
  Sense strand starting at position 2891 of SEQ ID NO: 1887099
aagagauuacacggugaau

SEQ ID NO: 2448333 - RNA, 19 nt, Artificial Sequence
  Description of Artificial Sequence: Synthetic oligonucleotide
  Antisense strand to SEQ ID NO: 2448332
auucaccguguaaucucuu

SEQ ID NO: 2448334 - RNA, 19 nt, Artificial Sequence
  Description of Artificial Sequence: Synthetic oligonucleotide
  Sense strand starting at position 2945 of SEQ ID NO: 1887099
gggaaauccugacaaaguu

SEQ ID NO: 2448335 - RNA, 19 nt, Artificial Sequence
  Description of Artificial Sequence: Synthetic oligonucleotide
  Antisense strand to SEQ ID NO: 2448334
aacuuugucaggauuuccc

SEQ ID NO: 2448336 - RNA, 19 nt, Artificial Sequence
  Description of Artificial Sequence: Synthetic oligonucleotide
  Sense strand starting at position 2994 of SEQ ID NO: 1887099
agcauaucuguuuggguua

SEQ ID NO: 2448337 - RNA, 19 nt, Artificial Sequence
  Description of Artificial Sequence: Synthetic oligonucleotide
  Antisense strand to SEQ ID NO: 2448336
uaacccaaacagauaugcu

SEQ ID NO: 2448338 - RNA, 19 nt, Artificial Sequence
  Description of Artificial Sequence: Synthetic oligonucleotide
  Sense strand starting at position 2995 of SEQ ID NO: 1887099
gcauaucuguuuggguuaa

SEQ ID NO: 2448339 - RNA, 19 nt, Artificial Sequence
  Description of Artificial Sequence: Synthetic oligonucleotide
  Antisense strand to SEQ ID NO: 2448338
uuaacccaaacagauaugc

SEQ ID NO: 2448340 - RNA, 19 nt, Artificial Sequence
  Description of Artificial Sequence: Synthetic oligonucleotide
  Sense strand starting at position 2997 of SEQ ID NO: 1887099
auaucuguuuggguuaaga

SEQ ID NO: 2448341 - RNA, 19 nt, Artificial Sequence
  Description of Artificial Sequence: Synthetic oligonucleotide
  Antisense strand to SEQ ID NO: 2448340
ucuuaacccaaacagauau

SEQ ID NO: 2448342 - RNA, 19 nt, Artificial Sequence
  Description of Artificial Sequence: Synthetic oligonucleotide
  Sense strand starting at position 2999 of SEQ ID NO: 1887099
aucuguuuggguuaagacu

SEQ ID NO: 2448343 - RNA, 19 nt, Artificial Sequence
  Description of Artificial Sequence: Synthetic oligonucleotide
  Antisense strand to SEQ ID NO: 2448342
agucuuaacccaaacagau

SEQ ID NO: 2448344 - RNA, 19 nt, Artificial Sequence
  Description of Artificial Sequence: Synthetic oligonucleotide
  Sense strand starting at position 3125 of SEQ ID NO: 1887099
ggaacaagcucuugggagu

SEQ ID NO: 2448345 - RNA, 19 nt, Artificial Sequence
  Description of Artificial Sequence: Synthetic oligonucleotide
  Antisense strand to SEQ ID NO: 2448344
acucccaagagcuuguucc

SEQ ID NO: 2448346 - RNA, 19 nt, Artificial Sequence
  Description of Artificial Sequence: Synthetic oligonucleotide
  Sense strand starting at position 3128 of SEQ ID NO: 1887099
acaagcucuugggagugaa

SEQ ID NO: 2448347 - RNA, 19 nt, Artificial Sequence
  Description of Artificial Sequence: Synthetic oligonucleotide
  Antisense strand to SEQ ID NO: 2448346
uucacucccaagagcuugu

SEQ ID NO: 2448348 - RNA, 19 nt, Artificial Sequence
  Description of Artificial Sequence: Synthetic oligonucleotide
  Sense strand starting at position 3131 of SEQ ID NO: 1887099
agcucuugggagugaacuu

SEQ ID NO: 2448349 - RNA, 19 nt, Artificial Sequence
  Description of Artificial Sequence: Synthetic oligonucleotide
  Antisense strand to SEQ ID NO: 2448348
aaguucacucccaagagcu

SEQ ID NO: 2448350 - RNA, 19 nt, Artificial Sequence
  Description of Artificial Sequence: Synthetic oligonucleotide
  Sense strand starting at position 3132 of SEQ ID NO: 1887099
gcucuugggagugaacuuu

SEQ ID NO: 2448351 - RNA, 19 nt, Artificial Sequence
  Description of Artificial Sequence: Synthetic oligonucleotide
  Antisense strand to SEQ ID NO: 2448350
aaaguucacucccaagagc

SEQ ID NO: 2448352 - RNA, 19 nt, Artificial Sequence
  Description of Artificial Sequence: Synthetic oligonucleotide
  Sense strand starting at position 3189 of SEQ ID NO: 1887099
uucugaauuugguauauuc

SEQ ID NO: 2448353 - RNA, 19 nt, Artificial Sequence
  Description of Artificial Sequence: Synthetic oligonucleotide
  Antisense strand to SEQ ID NO: 2448352
gaauauaccaaauucagaa

SEQ ID NO: 2448354 - RNA, 19 nt, Artificial Sequence
  Description of Artificial Sequence: Synthetic oligonucleotide
  Sense strand starting at position 3301 of SEQ ID NO: 1887099
accagaaucuucugagcuu

SEQ ID NO: 2448355 - RNA, 19 nt, Artificial Sequence
  Description of Artificial Sequence: Synthetic oligonucleotide
  Antisense strand to SEQ ID NO: 2448354
aagcucagaagauucuggu

SEQ ID NO: 2448356 - RNA, 19 nt, Artificial Sequence
  Description of Artificial Sequence: Synthetic oligonucleotide
  Sense strand starting at position 3302 of SEQ ID NO: 1887099
ccagaaucuucugagcuuu

SEQ ID NO: 2448357 - RNA, 19 nt, Artificial Sequence
  Description of Artificial Sequence: Synthetic oligonucleotide
  Antisense strand to SEQ ID NO: 2448356
aaagcucagaagauucugg

SEQ ID NO: 2448358 - RNA, 19 nt, Artificial Sequence
  Description of Artificial Sequence: Synthetic oligonucleotide
  Sense strand starting at position 3434 of SEQ ID NO: 1887099
cagaaaugccuugggaaau

SEQ ID NO: 2448359 - RNA, 19 nt, Artificial Sequence
  Description of Artificial Sequence: Synthetic oligonucleotide
  Antisense strand to SEQ ID NO: 2448358
auuucccaaggcauuucug

SEQ ID NO: 2448360 - RNA, 19 nt, Artificial Sequence
  Description of Artificial Sequence: Synthetic oligonucleotide
  Sense strand starting at position 3435 of SEQ ID NO: 1887099
agaaaugccuugggaaauc

SEQ ID NO: 2448361 - RNA, 19 nt, Artificial Sequence
  Description of Artificial Sequence: Synthetic oligonucleotide
  Antisense strand to SEQ ID NO: 2448360
gauuucccaaggcauuucu

SEQ ID NO: 2448362 - RNA, 19 nt, Artificial Sequence
  Description of Artificial Sequence: Synthetic oligonucleotide
  Sense strand starting at position 3447 of SEQ ID NO: 1887099
ggaaaucacugagaacaug

SEQ ID NO: 2448363 - RNA, 19 nt, Artificial Sequence
  Description of Artificial Sequence: Synthetic oligonucleotide
  Antisense strand to SEQ ID NO: 2448362
cauguucucagugauuucc

SEQ ID NO: 2448364 - RNA, 19 nt, Artificial Sequence
  Description of Artificial Sequence: Synthetic oligonucleotide
  Sense strand starting at position 3672 of SEQ ID NO: 1887099
auccuaguucccugaguuc

SEQ ID NO: 2448365 - RNA, 19 nt, Artificial Sequence
  Description of Artificial Sequence: Synthetic oligonucleotide
  Antisense strand to SEQ ID NO: 2448364
gaacucagggaacuaggau

SEQ ID NO: 2448366 - RNA, 19 nt, Artificial Sequence
  Description of Artificial Sequence: Synthetic oligonucleotide
  Sense strand starting at position 3873 of SEQ ID NO: 1887099
ucaaguuucucccaccgaa

SEQ ID NO: 2448367 - RNA, 19 nt, Artificial Sequence
  Description of Artificial Sequence: Synthetic oligonucleotide
  Antisense strand to SEQ ID NO: 2448366
uucggugggagaaacuuga

SEQ ID NO: 2448368 - RNA, 19 nt, Artificial Sequence
  Description of Artificial Sequence: Synthetic oligonucleotide
  Sense strand starting at position 3876 of SEQ ID NO: 1887099
aguuucucccaccgaauaa

SEQ ID NO: 2448369 - RNA, 19 nt, Artificial Sequence
  Description of Artificial Sequence: Synthetic oligonucleotide
  Antisense strand to SEQ ID NO: 2448368
uuauucggugggagaaacu

SEQ ID NO: 2448370 - RNA, 19 nt, Artificial Sequence
  Description of Artificial Sequence: Synthetic oligonucleotide
  Sense strand starting at position 3970 of SEQ ID NO: 1887099
guguucucaggagaagcaa

SEQ ID NO: 2448371 - RNA, 19 nt, Artificial Sequence
  Description of Artificial Sequence: Synthetic oligonucleotide
  Antisense strand to SEQ ID NO: 2448370
uugcuucuccugagaacac

SEQ ID NO: 2448372 - RNA, 19 nt, Artificial Sequence
  Description of Artificial Sequence: Synthetic oligonucleotide
  Sense strand starting at position 69 of SEQ ID NO: 1887100
ugcaauuuagccuguaacu

SEQ ID NO: 2448373 - RNA, 19 nt, Artificial Sequence
  Description of Artificial Sequence: Synthetic oligonucleotide
  Antisense strand to SEQ ID NO: 2448372
aguuacaggcuaaauugca

SEQ ID NO: 2448374 - RNA, 19 nt, Artificial Sequence
  Description of Artificial Sequence: Synthetic oligonucleotide
  Sense strand starting at position 111 of SEQ ID NO: 1887100
uucugacuccugcaauaug

SEQ ID NO: 2448375 - RNA, 19 nt, Artificial Sequence
  Description of Artificial Sequence: Synthetic oligonucleotide
  Antisense strand to SEQ ID NO: 2448374
cauauugcaggagucagaa

SEQ ID NO: 2448376 - RNA, 19 nt, Artificial Sequence
  Description of Artificial Sequence: Synthetic oligonucleotide
  Sense strand starting at position 114 of SEQ ID NO: 1887100
ugacuccugcaauaugaau

SEQ ID NO: 2448377 - RNA, 19 nt, Artificial Sequence
  Description of Artificial Sequence: Synthetic oligonucleotide
  Antisense strand to SEQ ID NO: 2448376
auucauauugcaggaguca

SEQ ID NO: 2448378 - RNA, 19 nt, Artificial Sequence
  Description of Artificial Sequence: Synthetic oligonucleotide
  Sense strand starting at position 120 of SEQ ID NO: 1887100
cugcaauaugaauagcuca

SEQ ID NO: 2448379 - RNA, 19 nt, Artificial Sequence
  Description of Artificial Sequence: Synthetic oligonucleotide
  Antisense strand to SEQ ID NO: 2448378
ugagcuauucauauugcag

SEQ ID NO: 2448380 - RNA, 19 nt, Artificial Sequence
  Description of Artificial Sequence: Synthetic oligonucleotide
  Sense strand starting at position 246 of SEQ ID NO: 1887100
agaccaucuuaagcaaagu

SEQ ID NO: 2448381 - RNA, 19 nt, Artificial Sequence
  Description of Artificial Sequence: Synthetic oligonucleotide
  Antisense strand to SEQ ID NO: 2448380
acuuugcuuaagauggucu

SEQ ID NO: 2448382 - RNA, 19 nt, Artificial Sequence
  Description of Artificial Sequence: Synthetic oligonucleotide
  Sense strand starting at position 502 of SEQ ID NO: 1887100
gcagucauuucugcaauuc

SEQ ID NO: 2448383 - RNA, 19 nt, Artificial Sequence
  Description of Artificial Sequence: Synthetic oligonucleotide
  Antisense strand to SEQ ID NO: 2448382
gaauugcagaaaugacugc

SEQ ID NO: 2448384 - RNA, 19 nt, Artificial Sequence
  Description of Artificial Sequence: Synthetic oligonucleotide
  Sense strand starting at position 601 of SEQ ID NO: 1887100
ucuaaagucuuauugggaa

SEQ ID NO: 2448385 - RNA, 19 nt, Artificial Sequence
  Description of Artificial Sequence: Synthetic oligonucleotide
  Antisense strand to SEQ ID NO: 2448384
uucccaauaagacuuuaga

SEQ ID NO: 2448386 - RNA, 19 nt, Artificial Sequence
  Description of Artificial Sequence: Synthetic oligonucleotide
  Sense strand starting at position 834 of SEQ ID NO: 1887100
uguaauuugcagcacugua

SEQ ID NO: 2448387 - RNA, 19 nt, Artificial Sequence
  Description of Artificial Sequence: Synthetic oligonucleotide
  Antisense strand to SEQ ID NO: 2448386
uacagugcugcaaauuaca

SEQ ID NO: 2448388 - RNA, 19 nt, Artificial Sequence
  Description of Artificial Sequence: Synthetic oligonucleotide
  Sense strand starting at position 898 of SEQ ID NO: 1887100
agaguaaccucugucauaa

SEQ ID NO: 2448389 - RNA, 19 nt, Artificial Sequence
  Description of Artificial Sequence: Synthetic oligonucleotide
  Antisense strand to SEQ ID NO: 2448388
uuaugacagagguuacucu

SEQ ID NO: 2448390 - RNA, 19 nt, Artificial Sequence
  Description of Artificial Sequence: Synthetic oligonucleotide
  Sense strand starting at position 1221 of SEQ ID NO: 1887100
aucagucauccuuaccuga

SEQ ID NO: 2448391 - RNA, 19 nt, Artificial Sequence
  Description of Artificial Sequence: Synthetic oligonucleotide
  Antisense strand to SEQ ID NO: 2448390
ucagguaaggaugacugau

SEQ ID NO: 2448392 - RNA, 19 nt, Artificial Sequence
  Description of Artificial Sequence: Synthetic oligonucleotide
  Sense strand starting at position 1269 of SEQ ID NO: 1887100
ugggauuaauugcuugauu

SEQ ID NO: 2448393 - RNA, 19 nt, Artificial Sequence
  Description of Artificial Sequence: Synthetic oligonucleotide
  Antisense strand to SEQ ID NO: 2448392
aaucaagcaauuaauccca

SEQ ID NO: 2448394 - RNA, 19 nt, Artificial Sequence
  Description of Artificial Sequence: Synthetic oligonucleotide
  Sense strand starting at position 1270 of SEQ ID NO: 1887100
gggauuaauugcuugauua

SEQ ID NO: 2448395 - RNA, 19 nt, Artificial Sequence
  Description of Artificial Sequence: Synthetic oligonucleotide
  Antisense strand to SEQ ID NO: 2448394
uaaucaagcaauuaauccc

SEQ ID NO: 2448396 - RNA, 19 nt, Artificial Sequence
  Description of Artificial Sequence: Synthetic oligonucleotide
  Sense strand starting at position 1271 of SEQ ID NO: 1887100
ggauuaauugcuugauuag

SEQ ID NO: 2448397 - RNA, 19 nt, Artificial Sequence
  Description of Artificial Sequence: Synthetic oligonucleotide
  Antisense strand to SEQ ID NO: 2448396
cuaaucaagcaauuaaucc

SEQ ID NO: 2448398 - RNA, 19 nt, Artificial Sequence
  Description of Artificial Sequence: Synthetic oligonucleotide
  Sense strand starting at position 1314 of SEQ ID NO: 1887100
cgcucacuugcuuuauguu

SEQ ID NO: 2448399 - RNA, 19 nt, Artificial Sequence
  Description of Artificial Sequence: Synthetic oligonucleotide
  Antisense strand to SEQ ID NO: 2448398
aacauaaagcaagugagcg

SEQ ID NO: 2448400 - RNA, 19 nt, Artificial Sequence
  Description of Artificial Sequence: Synthetic oligonucleotide
  Sense strand starting at position 1329 of SEQ ID NO: 1887100
uguuauuagguguaaagaa

SEQ ID NO: 2448401 - RNA, 19 nt, Artificial Sequence
  Description of Artificial Sequence: Synthetic oligonucleotide
  Antisense strand to SEQ ID NO: 2448400
uucuuuacaccuaauaaca

SEQ ID NO: 2448402 - RNA, 19 nt, Artificial Sequence
  Description of Artificial Sequence: Synthetic oligonucleotide
  Sense strand starting at position 1385 of SEQ ID NO: 1887100
cuuccaauucgaugaauau

SEQ ID NO: 2448403 - RNA, 19 nt, Artificial Sequence
  Description of Artificial Sequence: Synthetic oligonucleotide
  Antisense strand to SEQ ID NO: 2448402
auauucaucgaauuggaag

SEQ ID NO: 2448404 - RNA, 19 nt, Artificial Sequence
  Description of Artificial Sequence: Synthetic oligonucleotide
  Sense strand starting at position 1415 of SEQ ID NO: 1887100
gaguuaggguagucauaau

SEQ ID NO: 2448405 - RNA, 19 nt, Artificial Sequence
  Description of Artificial Sequence: Synthetic oligonucleotide
  Antisense strand to SEQ ID NO: 2448404
auuaugacuacccuaacuc

SEQ ID NO: 2448406 - RNA, 19 nt, Artificial Sequence
  Description of Artificial Sequence: Synthetic oligonucleotide
  Sense strand starting at position 1541 of SEQ ID NO: 1887100
agacaauuguauucccaag

SEQ ID NO: 2448407 - RNA, 19 nt, Artificial Sequence
  Description of Artificial Sequence: Synthetic oligonucleotide
  Antisense strand to SEQ ID NO: 2448406
cuugggaauacaauugucu

SEQ ID NO: 2448408 - RNA, 19 nt, Artificial Sequence
  Description of Artificial Sequence: Synthetic oligonucleotide
  Sense strand starting at position 1547 of SEQ ID NO: 1887100
uuguauucccaagaaggua

SEQ ID NO: 2448409 - RNA, 19 nt, Artificial Sequence
  Description of Artificial Sequence: Synthetic oligonucleotide
  Antisense strand to SEQ ID NO: 2448408
uaccuucuugggaauacaa

SEQ ID NO: 2448410 - RNA, 19 nt, Artificial Sequence
  Description of Artificial Sequence: Synthetic oligonucleotide
  Sense strand starting at position 1608 of SEQ ID NO: 1887100
uaggaauaccauugagguu

SEQ ID NO: 2448411 - RNA, 19 nt, Artificial Sequence
  Description of Artificial Sequence: Synthetic oligonucleotide
  Antisense strand to SEQ ID NO: 2448410
aaccucaaugguauuccua

SEQ ID NO: 2448412 - RNA, 19 nt, Artificial Sequence
  Description of Artificial Sequence: Synthetic oligonucleotide
  Sense strand starting at position 1645 of SEQ ID NO: 1887100
acaugucaucuguauaauu

SEQ ID NO: 2448413 - RNA, 19 nt, Artificial Sequence
  Description of Artificial Sequence: Synthetic oligonucleotide
  Antisense strand to SEQ ID NO: 2448412
aauuauacagaugacaugu

SEQ ID NO: 2448414 - RNA, 19 nt, Artificial Sequence
  Description of Artificial Sequence: Synthetic oligonucleotide
  Sense strand starting at position 1676 of SEQ ID NO: 1887100
agugacagacccugucaaa

SEQ ID NO: 2448415 - RNA, 19 nt, Artificial Sequence
  Description of Artificial Sequence: Synthetic oligonucleotide
  Antisense strand to SEQ ID NO: 2448414
uuugacagggucugucacu

SEQ ID NO: 2448416 - RNA, 19 nt, Artificial Sequence
  Description of Artificial Sequence: Synthetic oligonucleotide
  Sense strand starting at position 2104 of SEQ ID NO: 1887100
cacuuacuaugugugagaa

SEQ ID NO: 2448417 - RNA, 19 nt, Artificial Sequence
  Description of Artificial Sequence: Synthetic oligonucleotide
  Antisense strand to SEQ ID NO: 2448416
uucucacacauaguaagug

SEQ ID NO: 2448418 - RNA, 19 nt, Artificial Sequence
  Description of Artificial Sequence: Synthetic oligonucleotide
  Sense strand starting at position 2105 of SEQ ID NO: 1887100
acuuacuaugugugagaag

SEQ ID NO: 2448419 - RNA, 19 nt, Artificial Sequence
  Description of Artificial Sequence: Synthetic oligonucleotide
  Antisense strand to SEQ ID NO: 2448418
cuucucacacauaguaagu

SEQ ID NO: 2448420 - RNA, 19 nt, Artificial Sequence
  Description of Artificial Sequence: Synthetic oligonucleotide
  Sense strand starting at position 2242 of SEQ ID NO: 1887100
uggaacuacuucuucgaca

SEQ ID NO: 2448421 - RNA, 19 nt, Artificial Sequence
  Description of Artificial Sequence: Synthetic oligonucleotide
  Antisense strand to SEQ ID NO: 2448420
ugucgaagaaguaguucca

SEQ ID NO: 2448422 - RNA, 19 nt, Artificial Sequence
  Description of Artificial Sequence: Synthetic oligonucleotide
  Sense strand starting at position 2243 of SEQ ID NO: 1887100
ggaacuacuucuucgacau

SEQ ID NO: 2448423 - RNA, 19 nt, Artificial Sequence
  Description of Artificial Sequence: Synthetic oligonucleotide
  Antisense strand to SEQ ID NO: 2448422
augucgaagaaguaguucc

SEQ ID NO: 2448424 - RNA, 19 nt, Artificial Sequence
  Description of Artificial Sequence: Synthetic oligonucleotide
  Sense strand starting at position 2300 of SEQ ID NO: 1887100
cagugaacaguuugaaaca

SEQ ID NO: 2448425 - RNA, 19 nt, Artificial Sequence
  Description of Artificial Sequence: Synthetic oligonucleotide
  Antisense strand to SEQ ID NO: 2448424
uguuucaaacuguucacug

SEQ ID NO: 2448426 - RNA, 19 nt, Artificial Sequence
  Description of Artificial Sequence: Synthetic oligonucleotide
  Sense strand starting at position 2355 of SEQ ID NO: 1887100
gaagaaauaccacggcagu

SEQ ID NO: 2448427 - RNA, 19 nt, Artificial Sequence
  Description of Artificial Sequence: Synthetic oligonucleotide
  Antisense strand to SEQ ID NO: 2448426
acugccgugguauuucuuc

SEQ ID NO: 2448428 - RNA, 19 nt, Artificial Sequence
  Description of Artificial Sequence: Synthetic oligonucleotide
  Sense strand starting at position 2781 of SEQ ID NO: 1887100
ucaauuaucugagcagaau

SEQ ID NO: 2448429 - RNA, 19 nt, Artificial Sequence
  Description of Artificial Sequence: Synthetic oligonucleotide
  Antisense strand to SEQ ID NO: 2448428
auucugcucagauaauuga

SEQ ID NO: 2448430 - RNA, 19 nt, Artificial Sequence
  Description of Artificial Sequence: Synthetic oligonucleotide
  Sense strand starting at position 2796 of SEQ ID NO: 1887100
gaauucuagcuagguuaag

SEQ ID NO: 2448431 - RNA, 19 nt, Artificial Sequence
  Description of Artificial Sequence: Synthetic oligonucleotide
  Antisense strand to SEQ ID NO: 2448430
cuuaaccuagcuagaauuc

SEQ ID NO: 2448432 - RNA, 19 nt, Artificial Sequence
  Description of Artificial Sequence: Synthetic oligonucleotide
  Sense strand starting at position 2875 of SEQ ID NO: 1887100
ugacucuugucaccaugga

SEQ ID NO: 2448433 - RNA, 19 nt, Artificial Sequence
  Description of Artificial Sequence: Synthetic oligonucleotide
  Antisense strand to SEQ ID NO: 2448432
uccauggugacaagaguca

SEQ ID NO: 2448434 - RNA, 19 nt, Artificial Sequence
  Description of Artificial Sequence: Synthetic oligonucleotide
  Sense strand starting at position 2876 of SEQ ID NO: 1887100
gacucuugucaccauggau

SEQ ID NO: 2448435 - RNA, 19 nt, Artificial Sequence
  Description of Artificial Sequence: Synthetic oligonucleotide
  Antisense strand to SEQ ID NO: 2448434
auccauggugacaagaguc

SEQ ID NO: 2448436 - RNA, 19 nt, Artificial Sequence
  Description of Artificial Sequence: Synthetic oligonucleotide
  Sense strand starting at position 2920 of SEQ ID NO: 1887100
aagacaaguuguguuauua

SEQ ID NO: 2448437 - RNA, 19 nt, Artificial Sequence
  Description of Artificial Sequence: Synthetic oligonucleotide
  Antisense strand to SEQ ID NO: 2448436
uaauaacacaacuugucuu

SEQ ID NO: 2448438 - RNA, 19 nt, Artificial Sequence
  Description of Artificial Sequence: Synthetic oligonucleotide
  Sense strand starting at position 2982 of SEQ ID NO: 1887100
ggucacagaucucuuuaau

SEQ ID NO: 2448439 - RNA, 19 nt, Artificial Sequence
  Description of Artificial Sequence: Synthetic oligonucleotide
  Antisense strand to SEQ ID NO: 2448438
auuaaagagaucugugacc

SEQ ID NO: 2448440 - RNA, 19 nt, Artificial Sequence
  Description of Artificial Sequence: Synthetic oligonucleotide
  Sense strand starting at position 3212 of SEQ ID NO: 1887100
gaucucuuccauuagacga

SEQ ID NO: 2448441 - RNA, 19 nt, Artificial Sequence
  Description of Artificial Sequence: Synthetic oligonucleotide
  Antisense strand to SEQ ID NO: 2448440
ucgucuaauggaagagauc

SEQ ID NO: 2448442 - RNA, 19 nt, Artificial Sequence
  Description of Artificial Sequence: Synthetic oligonucleotide
  Sense strand starting at position 3220 of SEQ ID NO: 1887100
ccauuagacgaauaagucu

SEQ ID NO: 2448443 - RNA, 19 nt, Artificial Sequence
  Description of Artificial Sequence: Synthetic oligonucleotide
  Antisense strand to SEQ ID NO: 2448442
agacuuauucgucuaaugg

SEQ ID NO: 2448444 - RNA, 19 nt, Artificial Sequence
  Description of Artificial Sequence: Synthetic oligonucleotide
  Sense strand starting at position 3386 of SEQ ID NO: 1887100
acccuugguccuuaaguca

SEQ ID NO: 2448445 - RNA, 19 nt, Artificial Sequence
  Description of Artificial Sequence: Synthetic oligonucleotide
  Antisense strand to SEQ ID NO: 2448444
ugacuuaaggaccaagggu

SEQ ID NO: 2448446 - RNA, 19 nt, Artificial Sequence
  Description of Artificial Sequence: Synthetic oligonucleotide
  Sense strand starting at position 3483 of SEQ ID NO: 1887100
caggauuaguaggcuaacu

SEQ ID NO: 2448447 - RNA, 19 nt, Artificial Sequence
  Description of Artificial Sequence: Synthetic oligonucleotide
  Antisense strand to SEQ ID NO: 2448446
aguuagccuacuaauccug

SEQ ID NO: 2448448 - RNA, 19 nt, Artificial Sequence
  Description of Artificial Sequence: Synthetic oligonucleotide
  Sense strand starting at position 3565 of SEQ ID NO: 1887100
acagcaaaguuguuaggaa

SEQ ID NO: 2448449 - RNA, 19 nt, Artificial Sequence
  Description of Artificial Sequence: Synthetic oligonucleotide
  Antisense strand to SEQ ID NO: 2448448
uuccuaacaacuuugcugu

SEQ ID NO: 2448450 - RNA, 19 nt, Artificial Sequence
  Description of Artificial Sequence: Synthetic oligonucleotide
  Sense strand starting at position 3573 of SEQ ID NO: 1887100
guuguuaggaagcaaauau

SEQ ID NO: 2448451 - RNA, 19 nt, Artificial Sequence
  Description of Artificial Sequence: Synthetic oligonucleotide
  Antisense strand to SEQ ID NO: 2448450
auauuugcuuccuaacaac

SEQ ID NO: 2448452 - RNA, 19 nt, Artificial Sequence
  Description of Artificial Sequence: Synthetic oligonucleotide
  Sense strand starting at position 99 of SEQ ID NO: 1887101
aguagcgaaugccuaauau

SEQ ID NO: 2448453 - RNA, 19 nt, Artificial Sequence
  Description of Artificial Sequence: Synthetic oligonucleotide
  Antisense strand to SEQ ID NO: 2448452
auauuaggcauucgcuacu

SEQ ID NO: 2448454 - RNA, 19 nt, Artificial Sequence
  Description of Artificial Sequence: Synthetic oligonucleotide
  Sense strand starting at position 131 of SEQ ID NO: 1887101
cuuccacucccucgaagaa

SEQ ID NO: 2448455 - RNA, 19 nt, Artificial Sequence
  Description of Artificial Sequence: Synthetic oligonucleotide
  Antisense strand to SEQ ID NO: 2448454
uucuucgagggaguggaag

SEQ ID NO: 2448456 - RNA, 19 nt, Artificial Sequence
  Description of Artificial Sequence: Synthetic oligonucleotide
  Sense strand starting at position 607 of SEQ ID NO: 1887101
agcagaugcuccucuaauu

SEQ ID NO: 2448457 - RNA, 19 nt, Artificial Sequence
  Description of Artificial Sequence: Synthetic oligonucleotide
  Antisense strand to SEQ ID NO: 2448456
aauuagaggagcaucugcu

SEQ ID NO: 2448458 - RNA, 19 nt, Artificial Sequence
  Description of Artificial Sequence: Synthetic oligonucleotide
  Sense strand starting at position 647 of SEQ ID NO: 1887101
uuaagauucuguuuacuga

SEQ ID NO: 2448459 - RNA, 19 nt, Artificial Sequence
  Description of Artificial Sequence: Synthetic oligonucleotide
  Antisense strand to SEQ ID NO: 2448458
ucaguaaacagaaucuuaa

SEQ ID NO: 2448460 - RNA, 19 nt, Artificial Sequence
  Description of Artificial Sequence: Synthetic oligonucleotide
  Sense strand starting at position 702 of SEQ ID NO: 1887101
guaaaucuccugugggcua

SEQ ID NO: 2448461 - RNA, 19 nt, Artificial Sequence
  Description of Artificial Sequence: Synthetic oligonucleotide
  Antisense strand to SEQ ID NO: 2448460
uagcccacaggagauuuac

SEQ ID NO: 2448462 - RNA, 19 nt, Artificial Sequence
  Description of Artificial Sequence: Synthetic oligonucleotide
  Sense strand starting at position 983 of SEQ ID NO: 1887101
uuacuugucuaagccaagu

SEQ ID NO: 2448463 - RNA, 19 nt, Artificial Sequence
  Description of Artificial Sequence: Synthetic oligonucleotide
  Antisense strand to SEQ ID NO: 2448462
acuuggcuuagacaaguaa

SEQ ID NO: 2448464 - RNA, 19 nt, Artificial Sequence
  Description of Artificial Sequence: Synthetic oligonucleotide
  Sense strand starting at position 1072 of SEQ ID NO: 1887101
gaaagaagccuugagcuuu

SEQ ID NO: 2448465 - RNA, 19 nt, Artificial Sequence
  Description of Artificial Sequence: Synthetic oligonucleotide
  Antisense strand to SEQ ID NO: 2448464
aaagcucaaggcuucuuuc

SEQ ID NO: 2448466 - RNA, 19 nt, Artificial Sequence
  Description of Artificial Sequence: Synthetic oligonucleotide
  Sense strand starting at position 1251 of SEQ ID NO: 1887101
guaguaucucuugagugca

SEQ ID NO: 2448467 - RNA, 19 nt, Artificial Sequence
  Description of Artificial Sequence: Synthetic oligonucleotide
  Antisense strand to SEQ ID NO: 2448466
ugcacucaagagauacuac

SEQ ID NO: 2448468 - RNA, 19 nt, Artificial Sequence
  Description of Artificial Sequence: Synthetic oligonucleotide
  Sense strand starting at position 1253 of SEQ ID NO: 1887101
aguaucucuugagugcaga

SEQ ID NO: 2448469 - RNA, 19 nt, Artificial Sequence
  Description of Artificial Sequence: Synthetic oligonucleotide
  Antisense strand to SEQ ID NO: 2448468
ucugcacucaagagauacu

SEQ ID NO: 2448470 - RNA, 19 nt, Artificial Sequence
  Description of Artificial Sequence: Synthetic oligonucleotide
  Sense strand starting at position 1254 of SEQ ID NO: 1887101
guaucucuugagugcagau

SEQ ID NO: 2448471 - RNA, 19 nt, Artificial Sequence
  Description of Artificial Sequence: Synthetic oligonucleotide
  Antisense strand to SEQ ID NO: 2448470
aucugcacucaagagauac

SEQ ID NO: 2448472 - RNA, 19 nt, Artificial Sequence
  Description of Artificial Sequence: Synthetic oligonucleotide
  Sense strand starting at position 1263 of SEQ ID NO: 1887101
gagugcagauucuugucaa

SEQ ID NO: 2448473 - RNA, 19 nt, Artificial Sequence
  Description of Artificial Sequence: Synthetic oligonucleotide
  Antisense strand to SEQ ID NO: 2448472
uugacaagaaucugcacuc

SEQ ID NO: 2448474 - RNA, 19 nt, Artificial Sequence
  Description of Artificial Sequence: Synthetic oligonucleotide
  Sense strand starting at position 1270 of SEQ ID NO: 1887101
gauucuugucaagaaagca

SEQ ID NO: 2448475 - RNA, 19 nt, Artificial Sequence
  Description of Artificial Sequence: Synthetic oligonucleotide
  Antisense strand to SEQ ID NO: 2448474
ugcuuucuugacaagaauc

SEQ ID NO: 2448476 - RNA, 19 nt, Artificial Sequence
  Description of Artificial Sequence: Synthetic oligonucleotide
  Sense strand starting at position 1742 of SEQ ID NO: 1887101
gucauaugagauugucauc

SEQ ID NO: 2448477 - RNA, 19 nt, Artificial Sequence
  Description of Artificial Sequence: Synthetic oligonucleotide
  Antisense strand to SEQ ID NO: 2448476
gaugacaaucucauaugac

SEQ ID NO: 2448478 - RNA, 19 nt, Artificial Sequence
  Description of Artificial Sequence: Synthetic oligonucleotide
  Sense strand starting at position 1747 of SEQ ID NO: 1887101
augagauugucaucugguu

SEQ ID NO: 2448479 - RNA, 19 nt, Artificial Sequence
  Description of Artificial Sequence: Synthetic oligonucleotide
  Antisense strand to SEQ ID NO: 2448478
aaccagaugacaaucucau

SEQ ID NO: 2448480 - RNA, 19 nt, Artificial Sequence
  Description of Artificial Sequence: Synthetic oligonucleotide
  Sense strand starting at position 1749 of SEQ ID NO: 1887101
gagauugucaucugguugu

SEQ ID NO: 2448481 - RNA, 19 nt, Artificial Sequence
  Description of Artificial Sequence: Synthetic oligonucleotide
  Antisense strand to SEQ ID NO: 2448480
acaaccagaugacaaucuc

SEQ ID NO: 2448482 - RNA, 19 nt, Artificial Sequence
  Description of Artificial Sequence: Synthetic oligonucleotide
  Sense strand starting at position 1771 of SEQ ID NO: 1887101
guuagauaaugggcucaag

SEQ ID NO: 2448483 - RNA, 19 nt, Artificial Sequence
  Description of Artificial Sequence: Synthetic oligonucleotide
  Antisense strand to SEQ ID NO: 2448482
cuugagcccauuaucuaac

SEQ ID NO: 2448484 - RNA, 19 nt, Artificial Sequence
  Description of Artificial Sequence: Synthetic oligonucleotide
  Sense strand starting at position 1868 of SEQ ID NO: 1887101
aagguauacguguacacau

SEQ ID NO: 2448485 - RNA, 19 nt, Artificial Sequence
  Description of Artificial Sequence: Synthetic oligonucleotide
  Antisense strand to SEQ ID NO: 2448484
auguguacacguauaccuu

SEQ ID NO: 2448486 - RNA, 19 nt, Artificial Sequence
  Description of Artificial Sequence: Synthetic oligonucleotide
  Sense strand starting at position 2024 of SEQ ID NO: 1887101
ggcuaaguuagagggaaua

SEQ ID NO: 2448487 - RNA, 19 nt, Artificial Sequence
  Description of Artificial Sequence: Synthetic oligonucleotide
  Antisense strand to SEQ ID NO: 2448486
uauucccucuaacuuagcc

SEQ ID NO: 2448488 - RNA, 19 nt, Artificial Sequence
  Description of Artificial Sequence: Synthetic oligonucleotide
  Sense strand starting at position 2123 of SEQ ID NO: 1887101
gucuuaugucgcucuccua

SEQ ID NO: 2448489 - RNA, 19 nt, Artificial Sequence
  Description of Artificial Sequence: Synthetic oligonucleotide
  Antisense strand to SEQ ID NO: 2448488
uaggagagcgacauaagac

SEQ ID NO: 2448490 - RNA, 19 nt, Artificial Sequence
  Description of Artificial Sequence: Synthetic oligonucleotide
  Sense strand starting at position 2201 of SEQ ID NO: 1887101
cuaauaauaugacugcaga

SEQ ID NO: 2448491 - RNA, 19 nt, Artificial Sequence
  Description of Artificial Sequence: Synthetic oligonucleotide
  Antisense strand to SEQ ID NO: 2448490
ucugcagucauauuauuag

SEQ ID NO: 2448492 - RNA, 19 nt, Artificial Sequence
  Description of Artificial Sequence: Synthetic oligonucleotide
  Sense strand starting at position 2405 of SEQ ID NO: 1887101
guauguugacagcaaugca

SEQ ID NO: 2448493 - RNA, 19 nt, Artificial Sequence
  Description of Artificial Sequence: Synthetic oligonucleotide
  Antisense strand to SEQ ID NO: 2448492
ugcauugcugucaacauac

SEQ ID NO: 2448494 - RNA, 19 nt, Artificial Sequence
  Description of Artificial Sequence: Synthetic oligonucleotide
  Sense strand starting at position 2643 of SEQ ID NO: 1887101
agggacuucuucccacuau

SEQ ID NO: 2448495 - RNA, 19 nt, Artificial Sequence
  Description of Artificial Sequence: Synthetic oligonucleotide
  Antisense strand to SEQ ID NO: 2448494
auagugggaagaagucccu

SEQ ID NO: 2448496 - RNA, 19 nt, Artificial Sequence
  Description of Artificial Sequence: Synthetic oligonucleotide
  Sense strand starting at position 2845 of SEQ ID NO: 1887101
aggguucugucagcacaca

SEQ ID NO: 2448497 - RNA, 19 nt, Artificial Sequence
  Description of Artificial Sequence: Synthetic oligonucleotide
  Antisense strand to SEQ ID NO: 2448496
ugugugcugacagaacccu

SEQ ID NO: 2448498 - RNA, 19 nt, Artificial Sequence
  Description of Artificial Sequence: Synthetic oligonucleotide
  Sense strand starting at position 2942 of SEQ ID NO: 1887101
caacacugagggugauuau

SEQ ID NO: 2448499 - RNA, 19 nt, Artificial Sequence
  Description of Artificial Sequence: Synthetic oligonucleotide
  Antisense strand to SEQ ID NO: 2448498
auaaucacccucaguguug

SEQ ID NO: 2448500 - RNA, 19 nt, Artificial Sequence
  Description of Artificial Sequence: Synthetic oligonucleotide
  Sense strand starting at position 2951 of SEQ ID NO: 1887101
gggugauuaugguugagac

SEQ ID NO: 2448501 - RNA, 19 nt, Artificial Sequence
  Description of Artificial Sequence: Synthetic oligonucleotide
  Antisense strand to SEQ ID NO: 2448500
gucucaaccauaaucaccc

SEQ ID NO: 2448502 - RNA, 19 nt, Artificial Sequence
  Description of Artificial Sequence: Synthetic oligonucleotide
  Sense strand starting at position 2952 of SEQ ID NO: 1887101
ggugauuaugguugagaca

SEQ ID NO: 2448503 - RNA, 19 nt, Artificial Sequence
  Description of Artificial Sequence: Synthetic oligonucleotide
  Antisense strand to SEQ ID NO: 2448502
ugucucaaccauaaucacc

SEQ ID NO: 2448504 - RNA, 19 nt, Artificial Sequence
  Description of Artificial Sequence: Synthetic oligonucleotide
  Sense strand starting at position 2965 of SEQ ID NO: 1887101
gagacaguucccugucuug

SEQ ID NO: 2448505 - RNA, 19 nt, Artificial Sequence
  Description of Artificial Sequence: Synthetic oligonucleotide
  Antisense strand to SEQ ID NO: 2448504
caagacagggaacugucuc

SEQ ID NO: 2448506 - RNA, 19 nt, Artificial Sequence
  Description of Artificial Sequence: Synthetic oligonucleotide
  Sense strand starting at position 3145 of SEQ ID NO: 1887101
acagguguggcccagaaca

SEQ ID NO: 2448507 - RNA, 19 nt, Artificial Sequence
  Description of Artificial Sequence: Synthetic oligonucleotide
  Antisense strand to SEQ ID NO: 2448506
uguucugggccacaccugu

SEQ ID NO: 2448508 - RNA, 19 nt, Artificial Sequence
  Description of Artificial Sequence: Synthetic oligonucleotide
  Sense strand starting at position 3191 of SEQ ID NO: 1887101
acacauguuagauggguga

SEQ ID NO: 2448509 - RNA, 19 nt, Artificial Sequence
  Description of Artificial Sequence: Synthetic oligonucleotide
  Antisense strand to SEQ ID NO: 2448508
ucacccaucuaacaugugu

SEQ ID NO: 2448510 - RNA, 19 nt, Artificial Sequence
  Description of Artificial Sequence: Synthetic oligonucleotide
  Sense strand starting at position 3193 of SEQ ID NO: 1887101
acauguuagaugggugagu

SEQ ID NO: 2448511 - RNA, 19 nt, Artificial Sequence
  Description of Artificial Sequence: Synthetic oligonucleotide
  Antisense strand to SEQ ID NO: 2448510
acucacccaucuaacaugu

SEQ ID NO: 2448512 - RNA, 19 nt, Artificial Sequence
  Description of Artificial Sequence: Synthetic oligonucleotide
  Sense strand starting at position 3243 of SEQ ID NO: 1887101
gagcuugaggcgugagaga

SEQ ID NO: 2448513 - RNA, 19 nt, Artificial Sequence
  Description of Artificial Sequence: Synthetic oligonucleotide
  Antisense strand to SEQ ID NO: 2448512
ucucucacgccucaagcuc

SEQ ID NO: 2448514 - RNA, 19 nt, Artificial Sequence
  Description of Artificial Sequence: Synthetic oligonucleotide
  Sense strand starting at position 3257 of SEQ ID NO: 1887101
agagacaagucuuugauac

SEQ ID NO: 2448515 - RNA, 19 nt, Artificial Sequence
  Description of Artificial Sequence: Synthetic oligonucleotide
  Antisense strand to SEQ ID NO: 2448514
guaucaaagacuugucucu

SEQ ID NO: 2448516 - RNA, 19 nt, Artificial Sequence
  Description of Artificial Sequence: Synthetic oligonucleotide
  Sense strand starting at position 3258 of SEQ ID NO: 1887101
gagacaagucuuugauaca

SEQ ID NO: 2448517 - RNA, 19 nt, Artificial Sequence
  Description of Artificial Sequence: Synthetic oligonucleotide
  Antisense strand to SEQ ID NO: 2448516
uguaucaaagacuugucuc

SEQ ID NO: 2448518 - RNA, 19 nt, Artificial Sequence
  Description of Artificial Sequence: Synthetic oligonucleotide
  Sense strand starting at position 3307 of SEQ ID NO: 1887101
acuuuccagucaucagaga

SEQ ID NO: 2448519 - RNA, 19 nt, Artificial Sequence
  Description of Artificial Sequence: Synthetic oligonucleotide
  Antisense strand to SEQ ID NO: 2448518
ucucugaugacuggaaagu

SEQ ID NO: 2448520 - RNA, 19 nt, Artificial Sequence
  Description of Artificial Sequence: Synthetic oligonucleotide
  Sense strand starting at position 3356 of SEQ ID NO: 1887101
ucaucuguaaagugaggua

SEQ ID NO: 2448521 - RNA, 19 nt, Artificial Sequence
  Description of Artificial Sequence: Synthetic oligonucleotide
  Antisense strand to SEQ ID NO: 2448520
uaccucacuuuacagauga

SEQ ID NO: 2448522 - RNA, 19 nt, Artificial Sequence
  Description of Artificial Sequence: Synthetic oligonucleotide
  Sense strand starting at position 3361 of SEQ ID NO: 1887101
uguaaagugagguacucua

SEQ ID NO: 2448523 - RNA, 19 nt, Artificial Sequence
  Description of Artificial Sequence: Synthetic oligonucleotide
  Antisense strand to SEQ ID NO: 2448522
uagaguaccucacuuuaca

SEQ ID NO: 2448524 - RNA, 19 nt, Artificial Sequence
  Description of Artificial Sequence: Synthetic oligonucleotide
  Sense strand starting at position 3386 of SEQ ID NO: 1887101
cucucuaggugguuggaaa

SEQ ID NO: 2448525 - RNA, 19 nt, Artificial Sequence
  Description of Artificial Sequence: Synthetic oligonucleotide
  Antisense strand to SEQ ID NO: 2448524
uuuccaaccaccuagagag

SEQ ID NO: 2448526 - RNA, 19 nt, Artificial Sequence
  Description of Artificial Sequence: Synthetic oligonucleotide
  Sense strand starting at position 3592 of SEQ ID NO: 1887101
ccuugacuaucagcucaga

SEQ ID NO: 2448527 - RNA, 19 nt, Artificial Sequence
  Description of Artificial Sequence: Synthetic oligonucleotide
  Antisense strand to SEQ ID NO: 2448526
ucugagcugauagucaagg

SEQ ID NO: 2448528 - RNA, 19 nt, Artificial Sequence
  Description of Artificial Sequence: Synthetic oligonucleotide
  Sense strand starting at position 3626 of SEQ ID NO: 1887101
cauggaguguguccuuauu

SEQ ID NO: 2448529 - RNA, 19 nt, Artificial Sequence
  Description of Artificial Sequence: Synthetic oligonucleotide
  Antisense strand to SEQ ID NO: 2448528
aauaaggacacacuccaug

SEQ ID NO: 2448530 - RNA, 19 nt, Artificial Sequence
  Description of Artificial Sequence: Synthetic oligonucleotide
  Sense strand starting at position 3628 of SEQ ID NO: 1887101
uggaguguguccuuauuau

SEQ ID NO: 2448531 - RNA, 19 nt, Artificial Sequence
  Description of Artificial Sequence: Synthetic oligonucleotide
  Antisense strand to SEQ ID NO: 2448530
auaauaaggacacacucca

SEQ ID NO: 2448532 - RNA, 19 nt, Artificial Sequence
  Description of Artificial Sequence: Synthetic oligonucleotide
  Sense strand starting at position 431 of SEQ ID NO: 1887102
guuguuucgcuggcuggaa

SEQ ID NO: 2448533 - RNA, 19 nt, Artificial Sequence
  Description of Artificial Sequence: Synthetic oligonucleotide
  Antisense strand to SEQ ID NO: 2448532
uuccagccagcgaaacaac

SEQ ID NO: 2448534 - RNA, 19 nt, Artificial Sequence
  Description of Artificial Sequence: Synthetic oligonucleotide
  Sense strand starting at position 695 of SEQ ID NO: 1887102
ucuuuaaccuauguuagag

SEQ ID NO: 2448535 - RNA, 19 nt, Artificial Sequence
  Description of Artificial Sequence: Synthetic oligonucleotide
  Antisense strand to SEQ ID NO: 2448534
cucuaacauagguuaaaga

SEQ ID NO: 2448536 - RNA, 19 nt, Artificial Sequence
  Description of Artificial Sequence: Synthetic oligonucleotide
  Sense strand starting at position 705 of SEQ ID NO: 1887102
auguuagaggucuggaaag

SEQ ID NO: 2448537 - RNA, 19 nt, Artificial Sequence
  Description of Artificial Sequence: Synthetic oligonucleotide
  Antisense strand to SEQ ID NO: 2448536
cuuuccagaccucuaacau

SEQ ID NO: 2448538 - RNA, 19 nt, Artificial Sequence
  Description of Artificial Sequence: Synthetic oligonucleotide
  Sense strand starting at position 707 of SEQ ID NO: 1887102
guuagaggucuggaaaguc

SEQ ID NO: 2448539 - RNA, 19 nt, Artificial Sequence
  Description of Artificial Sequence: Synthetic oligonucleotide
  Antisense strand to SEQ ID NO: 2448538
gacuuuccagaccucuaac

SEQ ID NO: 2448540 - RNA, 19 nt, Artificial Sequence
  Description of Artificial Sequence: Synthetic oligonucleotide
  Sense strand starting at position 833 of SEQ ID NO: 1887102
ucuaucagauucucgaaca

SEQ ID NO: 2448541 - RNA, 19 nt, Artificial Sequence
  Description of Artificial Sequence: Synthetic oligonucleotide
  Antisense strand to SEQ ID NO: 2448540
uguucgagaaucugauaga

SEQ ID NO: 2448542 - RNA, 19 nt, Artificial Sequence
  Description of Artificial Sequence: Synthetic oligonucleotide
  Sense strand starting at position 1060 of SEQ ID NO: 1887102
guuuguagauccuuaaaga

SEQ ID NO: 2448543 - RNA, 19 nt, Artificial Sequence
  Description of Artificial Sequence: Synthetic oligonucleotide
  Antisense strand to SEQ ID NO: 2448542
ucuuuaaggaucuacaaac

SEQ ID NO: 2448544 - RNA, 19 nt, Artificial Sequence
  Description of Artificial Sequence: Synthetic oligonucleotide
  Sense strand starting at position 1115 of SEQ ID NO: 1887102
cgaaacugauaggcaaaua

SEQ ID NO: 2448545 - RNA, 19 nt, Artificial Sequence
  Description of Artificial Sequence: Synthetic oligonucleotide
  Antisense strand to SEQ ID NO: 2448544
uauuugccuaucaguuucg

SEQ ID NO: 2448546 - RNA, 19 nt, Artificial Sequence
  Description of Artificial Sequence: Synthetic oligonucleotide
  Sense strand starting at position 1194 of SEQ ID NO: 1887102
cugcuaagucauuaagaga

SEQ ID NO: 2448547 - RNA, 19 nt, Artificial Sequence
  Description of Artificial Sequence: Synthetic oligonucleotide
  Antisense strand to SEQ ID NO: 2448546
ucucuuaaugacuuagcag

SEQ ID NO: 2448548 - RNA, 19 nt, Artificial Sequence
  Description of Artificial Sequence: Synthetic oligonucleotide
  Sense strand starting at position 1305 of SEQ ID NO: 1887102
aggguuacccagugaauca

SEQ ID NO: 2448549 - RNA, 19 nt, Artificial Sequence
  Description of Artificial Sequence: Synthetic oligonucleotide
  Antisense strand to SEQ ID NO: 2448548
ugauucacuggguaacccu

SEQ ID NO: 2448550 - RNA, 19 nt, Artificial Sequence
  Description of Artificial Sequence: Synthetic oligonucleotide
  Sense strand starting at position 1306 of SEQ ID NO: 1887102
ggguuacccagugaaucau

SEQ ID NO: 2448551 - RNA, 19 nt, Artificial Sequence
  Description of Artificial Sequence: Synthetic oligonucleotide
  Antisense strand to SEQ ID NO: 2448550
augauucacuggguaaccc

SEQ ID NO: 2448552 - RNA, 19 nt, Artificial Sequence
  Description of Artificial Sequence: Synthetic oligonucleotide
  Sense strand starting at position 1312 of SEQ ID NO: 1887102
cccagugaaucauuaguaa

SEQ ID NO: 2448553 - RNA, 19 nt, Artificial Sequence
  Description of Artificial Sequence: Synthetic oligonucleotide
  Antisense strand to SEQ ID NO: 2448552
uuacuaaugauucacuggg

SEQ ID NO: 2448554 - RNA, 19 nt, Artificial Sequence
  Description of Artificial Sequence: Synthetic oligonucleotide
  Sense strand starting at position 1458 of SEQ ID NO: 1887102
ugguuuacuccacacagca

SEQ ID NO: 2448555 - RNA, 19 nt, Artificial Sequence
  Description of Artificial Sequence: Synthetic oligonucleotide
  Antisense strand to SEQ ID NO: 2448554
ugcuguguggaguaaacca

SEQ ID NO: 2448556 - RNA, 19 nt, Artificial Sequence
  Description of Artificial Sequence: Synthetic oligonucleotide
  Sense strand starting at position 1788 of SEQ ID NO: 1887102
ccuguacauggccagaauu

SEQ ID NO: 2448557 - RNA, 19 nt, Artificial Sequence
  Description of Artificial Sequence: Synthetic oligonucleotide
  Antisense strand to SEQ ID NO: 2448556
aauucuggccauguacagg

SEQ ID NO: 2448558 - RNA, 19 nt, Artificial Sequence
  Description of Artificial Sequence: Synthetic oligonucleotide
  Sense strand starting at position 2179 of SEQ ID NO: 1887102
agucauauuaguuagugaa

SEQ ID NO: 2448559 - RNA, 19 nt, Artificial Sequence
  Description of Artificial Sequence: Synthetic oligonucleotide
  Antisense strand to SEQ ID NO: 2448558
uucacuaacuaauaugacu

SEQ ID NO: 2448560 - RNA, 19 nt, Artificial Sequence
  Description of Artificial Sequence: Synthetic oligonucleotide
  Sense strand starting at position 2181 of SEQ ID NO: 1887102
ucauauuaguuagugaaag

SEQ ID NO: 2448561 - RNA, 19 nt, Artificial Sequence
  Description of Artificial Sequence: Synthetic oligonucleotide
  Antisense strand to SEQ ID NO: 2448560
cuuucacuaacuaauauga

SEQ ID NO: 2448562 - RNA, 19 nt, Artificial Sequence
  Description of Artificial Sequence: Synthetic oligonucleotide
  Sense strand starting at position 2272 of SEQ ID NO: 1887102
ugaaguaguagugggaaga

SEQ ID NO: 2448563 - RNA, 19 nt, Artificial Sequence
  Description of Artificial Sequence: Synthetic oligonucleotide
  Antisense strand to SEQ ID NO: 2448562
ucuucccacuacuacuuca

SEQ ID NO: 2448564 - RNA, 19 nt, Artificial Sequence
  Description of Artificial Sequence: Synthetic oligonucleotide
  Sense strand starting at position 2273 of SEQ ID NO: 1887102
gaaguaguagugggaagaa

SEQ ID NO: 2448565 - RNA, 19 nt, Artificial Sequence
  Description of Artificial Sequence: Synthetic oligonucleotide
  Antisense strand to SEQ ID NO: 2448564
uucuucccacuacuacuuc

SEQ ID NO: 2448566 - RNA, 19 nt, Artificial Sequence
  Description of Artificial Sequence: Synthetic oligonucleotide
  Sense strand starting at position 2387 of SEQ ID NO: 1887102
auagaacuuuauguagagu

SEQ ID NO: 2448567 - RNA, 19 nt, Artificial Sequence
  Description of Artificial Sequence: Synthetic oligonucleotide
  Antisense strand to SEQ ID NO: 2448566
acucuacauaaaguucuau

SEQ ID NO: 2448568 - RNA, 19 nt, Artificial Sequence
  Description of Artificial Sequence: Synthetic oligonucleotide
  Sense strand starting at position 2442 of SEQ ID NO: 1887102
ugaggugugguccagaaau

SEQ ID NO: 2448569 - RNA, 19 nt, Artificial Sequence
  Description of Artificial Sequence: Synthetic oligonucleotide
  Antisense strand to SEQ ID NO: 2448568
auuucuggaccacaccuca

SEQ ID NO: 2448570 - RNA, 19 nt, Artificial Sequence
  Description of Artificial Sequence: Synthetic oligonucleotide
  Sense strand starting at position 2444 of SEQ ID NO: 1887102
aggugugguccagaaauca

SEQ ID NO: 2448571 - RNA, 19 nt, Artificial Sequence
  Description of Artificial Sequence: Synthetic oligonucleotide
  Antisense strand to SEQ ID NO: 2448570
ugauuucuggaccacaccu

SEQ ID NO: 2448572 - RNA, 19 nt, Artificial Sequence
  Description of Artificial Sequence: Synthetic oligonucleotide
  Sense strand starting at position 2559 of SEQ ID NO: 1887102
gcucuuaaagaguauguag

SEQ ID NO: 2448573 - RNA, 19 nt, Artificial Sequence
  Description of Artificial Sequence: Synthetic oligonucleotide
  Antisense strand to SEQ ID NO: 2448572
cuacauacucuuuaagagc

SEQ ID NO: 2448574 - RNA, 19 nt, Artificial Sequence
  Description of Artificial Sequence: Synthetic oligonucleotide
  Sense strand starting at position 2574 of SEQ ID NO: 1887102
guaguugugguggaagaga

SEQ ID NO: 2448575 - RNA, 19 nt, Artificial Sequence
  Description of Artificial Sequence: Synthetic oligonucleotide
  Antisense strand to SEQ ID NO: 2448574
ucucuuccaccacaacuac

SEQ ID NO: 2448576 - RNA, 19 nt, Artificial Sequence
  Description of Artificial Sequence: Synthetic oligonucleotide
  Sense strand starting at position 2613 of SEQ ID NO: 1887102
auaagauauggugaguguu

SEQ ID NO: 2448577 - RNA, 19 nt, Artificial Sequence
  Description of Artificial Sequence: Synthetic oligonucleotide
  Antisense strand to SEQ ID NO: 2448576
aacacucaccauaucuuau

SEQ ID NO: 2448578 - RNA, 19 nt, Artificial Sequence
  Description of Artificial Sequence: Synthetic oligonucleotide
  Sense strand starting at position 2615 of SEQ ID NO: 1887102
aagauauggugaguguuaa

SEQ ID NO: 2448579 - RNA, 19 nt, Artificial Sequence
  Description of Artificial Sequence: Synthetic oligonucleotide
  Antisense strand to SEQ ID NO: 2448578
uuaacacucaccauaucuu

SEQ ID NO: 2448580 - RNA, 19 nt, Artificial Sequence
  Description of Artificial Sequence: Synthetic oligonucleotide
  Sense strand starting at position 2730 of SEQ ID NO: 1887102
ggugaauggugaaagcaga

SEQ ID NO: 2448581 - RNA, 19 nt, Artificial Sequence
  Description of Artificial Sequence: Synthetic oligonucleotide
  Antisense strand to SEQ ID NO: 2448580
ucugcuuucaccauucacc

SEQ ID NO: 2448582 - RNA, 19 nt, Artificial Sequence
  Description of Artificial Sequence: Synthetic oligonucleotide
  Sense strand starting at position 2737 of SEQ ID NO: 1887102
ggugaaagcagauaguguu

SEQ ID NO: 2448583 - RNA, 19 nt, Artificial Sequence
  Description of Artificial Sequence: Synthetic oligonucleotide
  Antisense strand to SEQ ID NO: 2448582
aacacuaucugcuuucacc

SEQ ID NO: 2448584 - RNA, 19 nt, Artificial Sequence
  Description of Artificial Sequence: Synthetic oligonucleotide
  Sense strand starting at position 2747 of SEQ ID NO: 1887102
gauaguguuacaggaggua

SEQ ID NO: 2448585 - RNA, 19 nt, Artificial Sequence
  Description of Artificial Sequence: Synthetic oligonucleotide
  Antisense strand to SEQ ID NO: 2448584
uaccuccuguaacacuauc

SEQ ID NO: 2448586 - RNA, 19 nt, Artificial Sequence
  Description of Artificial Sequence: Synthetic oligonucleotide
  Sense strand starting at position 2840 of SEQ ID NO: 1887102
ugguguauuagggauacac

SEQ ID NO: 2448587 - RNA, 19 nt, Artificial Sequence
  Description of Artificial Sequence: Synthetic oligonucleotide
  Antisense strand to SEQ ID NO: 2448586
guguaucccuaauacacca

SEQ ID NO: 2448588 - RNA, 19 nt, Artificial Sequence
  Description of Artificial Sequence: Synthetic oligonucleotide
  Sense strand starting at position 2889 of SEQ ID NO: 1887102
gcaucagugguuuaaacau

SEQ ID NO: 2448589 - RNA, 19 nt, Artificial Sequence
  Description of Artificial Sequence: Synthetic oligonucleotide
  Antisense strand to SEQ ID NO: 2448588
auguuuaaaccacugaugc

SEQ ID NO: 2448590 - RNA, 19 nt, Artificial Sequence
  Description of Artificial Sequence: Synthetic oligonucleotide
  Sense strand starting at position 2942 of SEQ ID NO: 1887102
uaggcaguccaagauugau

SEQ ID NO: 2448591 - RNA, 19 nt, Artificial Sequence
  Description of Artificial Sequence: Synthetic oligonucleotide
  Antisense strand to SEQ ID NO: 2448590
aucaaucuuggacugccua

SEQ ID NO: 2448592 - RNA, 19 nt, Artificial Sequence
  Description of Artificial Sequence: Synthetic oligonucleotide
  Sense strand starting at position 3241 of SEQ ID NO: 1887102
agggcuuaauuauugagga

SEQ ID NO: 2448593 - RNA, 19 nt, Artificial Sequence
  Description of Artificial Sequence: Synthetic oligonucleotide
  Antisense strand to SEQ ID NO: 2448592
uccucaauaauuaagcccu

SEQ ID NO: 2448594 - RNA, 19 nt, Artificial Sequence
  Description of Artificial Sequence: Synthetic oligonucleotide
  Sense strand starting at position 3275 of SEQ ID NO: 1887102
uugaguuauauuuggcagu

SEQ ID NO: 2448595 - RNA, 19 nt, Artificial Sequence
  Description of Artificial Sequence: Synthetic oligonucleotide
  Antisense strand to SEQ ID NO: 2448594
acugccaaauauaacucaa

SEQ ID NO: 2448596 - RNA, 19 nt, Artificial Sequence
  Description of Artificial Sequence: Synthetic oligonucleotide
  Sense strand starting at position 3277 of SEQ ID NO: 1887102
gaguuauauuuggcagucu

SEQ ID NO: 2448597 - RNA, 19 nt, Artificial Sequence
  Description of Artificial Sequence: Synthetic oligonucleotide
  Antisense strand to SEQ ID NO: 2448596
agacugccaaauauaacuc

SEQ ID NO: 2448598 - RNA, 19 nt, Artificial Sequence
  Description of Artificial Sequence: Synthetic oligonucleotide
  Sense strand starting at position 3417 of SEQ ID NO: 1887102
gucuguaagaacuaguaag

SEQ ID NO: 2448599 - RNA, 19 nt, Artificial Sequence
  Description of Artificial Sequence: Synthetic oligonucleotide
  Antisense strand to SEQ ID NO: 2448598
cuuacuaguucuuacagac

SEQ ID NO: 2448600 - RNA, 19 nt, Artificial Sequence
  Description of Artificial Sequence: Synthetic oligonucleotide
  Sense strand starting at position 3431 of SEQ ID NO: 1887102
guaaguuaggacuagccaa

SEQ ID NO: 2448601 - RNA, 19 nt, Artificial Sequence
  Description of Artificial Sequence: Synthetic oligonucleotide
  Antisense strand to SEQ ID NO: 2448600
uuggcuaguccuaacuuac

SEQ ID NO: 2448602 - RNA, 19 nt, Artificial Sequence
  Description of Artificial Sequence: Synthetic oligonucleotide
  Sense strand starting at position 3472 of SEQ ID NO: 1887102
auuugauucugugcuuuaa

SEQ ID NO: 2448603 - RNA, 19 nt, Artificial Sequence
  Description of Artificial Sequence: Synthetic oligonucleotide
  Antisense strand to SEQ ID NO: 2448602
uuaaagcacagaaucaaau

SEQ ID NO: 2448604 - RNA, 19 nt, Artificial Sequence
  Description of Artificial Sequence: Synthetic oligonucleotide
  Sense strand starting at position 3476 of SEQ ID NO: 1887102
gauucugugcuuuaagaau

SEQ ID NO: 2448605 - RNA, 19 nt, Artificial Sequence
  Description of Artificial Sequence: Synthetic oligonucleotide
  Antisense strand to SEQ ID NO: 2448604
auucuuaaagcacagaauc

SEQ ID NO: 2448606 - RNA, 19 nt, Artificial Sequence
  Description of Artificial Sequence: Synthetic oligonucleotide
  Sense strand starting at position 3544 of SEQ ID NO: 1887102
guuaauucugcguuguuaa

SEQ ID NO: 2448607 - RNA, 19 nt, Artificial Sequence
  Description of Artificial Sequence: Synthetic oligonucleotide
  Antisense strand to SEQ ID NO: 2448606
uuaacaacgcagaauuaac

SEQ ID NO: 2448608 - RNA, 19 nt, Artificial Sequence
  Description of Artificial Sequence: Synthetic oligonucleotide
  Sense strand starting at position 3607 of SEQ ID NO: 1887102
agaugaagggcuugugaag

SEQ ID NO: 2448609 - RNA, 19 nt, Artificial Sequence
  Description of Artificial Sequence: Synthetic oligonucleotide
  Antisense strand to SEQ ID NO: 2448608
cuucacaagcccuucaucu

SEQ ID NO: 2448610 - RNA, 19 nt, Artificial Sequence
  Description of Artificial Sequence: Synthetic oligonucleotide
  Sense strand starting at position 3726 of SEQ ID NO: 1887102
uauuauaaugcugagaguu

SEQ ID NO: 2448611 - RNA, 19 nt, Artificial Sequence
  Description of Artificial Sequence: Synthetic oligonucleotide
  Antisense strand to SEQ ID NO: 2448610
aacucucagcauuauaaua

SEQ ID NO: 2448612 - RNA, 19 nt, Artificial Sequence
  Description of Artificial Sequence: Synthetic oligonucleotide
  Sense strand starting at position 716 of SEQ ID NO: 1887103
augaauagacgguaagcuu

SEQ ID NO: 2448613 - RNA, 19 nt, Artificial Sequence
  Description of Artificial Sequence: Synthetic oligonucleotide
  Antisense strand to SEQ ID NO: 2448612
aagcuuaccgucuauucau

SEQ ID NO: 2448614 - RNA, 19 nt, Artificial Sequence
  Description of Artificial Sequence: Synthetic oligonucleotide
  Sense strand starting at position 802 of SEQ ID NO: 1887103
uuaugauauuuaugcacag

SEQ ID NO: 2448615 - RNA, 19 nt, Artificial Sequence
  Description of Artificial Sequence: Synthetic oligonucleotide
  Antisense strand to SEQ ID NO: 2448614
cugugcauaaauaucauaa

SEQ ID NO: 2448616 - RNA, 19 nt, Artificial Sequence
  Description of Artificial Sequence: Synthetic oligonucleotide
  Sense strand starting at position 1168 of SEQ ID NO: 1887103
cugucauaguguuaaugau

SEQ ID NO: 2448617 - RNA, 19 nt, Artificial Sequence
  Description of Artificial Sequence: Synthetic oligonucleotide
  Antisense strand to SEQ ID NO: 2448616
aucauuaacacuaugacag

SEQ ID NO: 2448618 - RNA, 19 nt, Artificial Sequence
  Description of Artificial Sequence: Synthetic oligonucleotide
  Sense strand starting at position 1274 of SEQ ID NO: 1887103
aagggaaauuagcagcuua

SEQ ID NO: 2448619 - RNA, 19 nt, Artificial Sequence
  Description of Artificial Sequence: Synthetic oligonucleotide
  Antisense strand to SEQ ID NO: 2448618
uaagcugcuaauuucccuu

SEQ ID NO: 2448620 - RNA, 19 nt, Artificial Sequence
  Description of Artificial Sequence: Synthetic oligonucleotide
  Sense strand starting at position 1295 of SEQ ID NO: 1887103
guggguaacucugguagac

SEQ ID NO: 2448621 - RNA, 19 nt, Artificial Sequence
  Description of Artificial Sequence: Synthetic oligonucleotide
  Antisense strand to SEQ ID NO: 2448620
gucuaccagaguuacccac

SEQ ID NO: 2448622 - RNA, 19 nt, Artificial Sequence
  Description of Artificial Sequence: Synthetic oligonucleotide
  Sense strand starting at position 1297 of SEQ ID NO: 1887103
ggguaacucugguagacaa

SEQ ID NO: 2448623 - RNA, 19 nt, Artificial Sequence
  Description of Artificial Sequence: Synthetic oligonucleotide
  Antisense strand to SEQ ID NO: 2448622
uugucuaccagaguuaccc

SEQ ID NO: 2448624 - RNA, 19 nt, Artificial Sequence
  Description of Artificial Sequence: Synthetic oligonucleotide
  Sense strand starting at position 1378 of SEQ ID NO: 1887103
cccuaauauuaugugauga

SEQ ID NO: 2448625 - RNA, 19 nt, Artificial Sequence
  Description of Artificial Sequence: Synthetic oligonucleotide
  Antisense strand to SEQ ID NO: 2448624
ucaucacauaauauuaggg

SEQ ID NO: 2448626 - RNA, 19 nt, Artificial Sequence
  Description of Artificial Sequence: Synthetic oligonucleotide
  Sense strand starting at position 1380 of SEQ ID NO: 1887103
cuaauauuaugugaugaga

SEQ ID NO: 2448627 - RNA, 19 nt, Artificial Sequence
  Description of Artificial Sequence: Synthetic oligonucleotide
  Antisense strand to SEQ ID NO: 2448626
ucucaucacauaauauuag

SEQ ID NO: 2448628 - RNA, 19 nt, Artificial Sequence
  Description of Artificial Sequence: Synthetic oligonucleotide
  Sense strand starting at position 1382 of SEQ ID NO: 1887103
aauauuaugugaugagaag

SEQ ID NO: 2448629 - RNA, 19 nt, Artificial Sequence
  Description of Artificial Sequence: Synthetic oligonucleotide
  Antisense strand to SEQ ID NO: 2448628
cuucucaucacauaauauu

SEQ ID NO: 2448630 - RNA, 19 nt, Artificial Sequence
  Description of Artificial Sequence: Synthetic oligonucleotide
  Sense strand starting at position 1388 of SEQ ID NO: 1887103
augugaugagaaggccauu

SEQ ID NO: 2448631 - RNA, 19 nt, Artificial Sequence
  Description of Artificial Sequence: Synthetic oligonucleotide
  Antisense strand to SEQ ID NO: 2448630
aauggccuucucaucacau

SEQ ID NO: 2448632 - RNA, 19 nt, Artificial Sequence
  Description of Artificial Sequence: Synthetic oligonucleotide
  Sense strand starting at position 1436 of SEQ ID NO: 1887103
ccaacugcagucuaaugau

SEQ ID NO: 2448633 - RNA, 19 nt, Artificial Sequence
  Description of Artificial Sequence: Synthetic oligonucleotide
  Antisense strand to SEQ ID NO: 2448632
aucauuagacugcaguugg

SEQ ID NO: 2448634 - RNA, 19 nt, Artificial Sequence
  Description of Artificial Sequence: Synthetic oligonucleotide
  Sense strand starting at position 1442 of SEQ ID NO: 1887103
gcagucuaaugaucagaaa

SEQ ID NO: 2448635 - RNA, 19 nt, Artificial Sequence
  Description of Artificial Sequence: Synthetic oligonucleotide
  Antisense strand to SEQ ID NO: 2448634
uuucugaucauuagacugc

SEQ ID NO: 2448636 - RNA, 19 nt, Artificial Sequence
  Description of Artificial Sequence: Synthetic oligonucleotide
  Sense strand starting at position 1568 of SEQ ID NO: 1887103
gauugaaagugacuauuau

SEQ ID NO: 2448637 - RNA, 19 nt, Artificial Sequence
  Description of Artificial Sequence: Synthetic oligonucleotide
  Antisense strand to SEQ ID NO: 2448636
auaauagucacuuucaauc

SEQ ID NO: 2448638 - RNA, 19 nt, Artificial Sequence
  Description of Artificial Sequence: Synthetic oligonucleotide
  Sense strand starting at position 1572 of SEQ ID NO: 1887103
gaaagugacuauuaugaua

SEQ ID NO: 2448639 - RNA, 19 nt, Artificial Sequence
  Description of Artificial Sequence: Synthetic oligonucleotide
  Antisense strand to SEQ ID NO: 2448638
uaucauaauagucacuuuc

SEQ ID NO: 2448640 - RNA, 19 nt, Artificial Sequence
  Description of Artificial Sequence: Synthetic oligonucleotide
  Sense strand starting at position 1616 of SEQ ID NO: 1887103
cugauuaaauccuggaaca

SEQ ID NO: 2448641 - RNA, 19 nt, Artificial Sequence
  Description of Artificial Sequence: Synthetic oligonucleotide
  Antisense strand to SEQ ID NO: 2448640
uguuccaggauuuaaucag

SEQ ID NO: 2448642 - RNA, 19 nt, Artificial Sequence
  Description of Artificial Sequence: Synthetic oligonucleotide
  Sense strand starting at position 1670 of SEQ ID NO: 1887103
ugaagaaagucgggaguuu

SEQ ID NO: 2448643 - RNA, 19 nt, Artificial Sequence
  Description of Artificial Sequence: Synthetic oligonucleotide
  Antisense strand to SEQ ID NO: 2448642
aaacucccgacuuucuuca

SEQ ID NO: 2448644 - RNA, 19 nt, Artificial Sequence
  Description of Artificial Sequence: Synthetic oligonucleotide
  Sense strand starting at position 1679 of SEQ ID NO: 1887103
ucgggaguuuaguuaauac

SEQ ID NO: 2448645 - RNA, 19 nt, Artificial Sequence
  Description of Artificial Sequence: Synthetic oligonucleotide
  Antisense strand to SEQ ID NO: 2448644
guauuaacuaaacucccga

SEQ ID NO: 2448646 - RNA, 19 nt, Artificial Sequence
  Description of Artificial Sequence: Synthetic oligonucleotide
  Sense strand starting at position 1734 of SEQ ID NO: 1887103
guaucauaauuaguacgau

SEQ ID NO: 2448647 - RNA, 19 nt, Artificial Sequence
  Description of Artificial Sequence: Synthetic oligonucleotide
  Antisense strand to SEQ ID NO: 2448646
aucguacuaauuaugauac

SEQ ID NO: 2448648 - RNA, 19 nt, Artificial Sequence
  Description of Artificial Sequence: Synthetic oligonucleotide
  Sense strand starting at position 1861 of SEQ ID NO: 1887103
agcuaaaguuaacuuuaga

SEQ ID NO: 2448649 - RNA, 19 nt, Artificial Sequence
  Description of Artificial Sequence: Synthetic oligonucleotide
  Antisense strand to SEQ ID NO: 2448648
ucuaaaguuaacuuuagcu

SEQ ID NO: 2448650 - RNA, 19 nt, Artificial Sequence
  Description of Artificial Sequence: Synthetic oligonucleotide
  Sense strand starting at position 2052 of SEQ ID NO: 1887103
caaggacuuguaugugaau

SEQ ID NO: 2448651 - RNA, 19 nt, Artificial Sequence
  Description of Artificial Sequence: Synthetic oligonucleotide
  Antisense strand to SEQ ID NO: 2448650
auucacauacaaguccuug

SEQ ID NO: 2448652 - RNA, 19 nt, Artificial Sequence
  Description of Artificial Sequence: Synthetic oligonucleotide
  Sense strand starting at position 2054 of SEQ ID NO: 1887103
aggacuuguaugugaaugu

SEQ ID NO: 2448653 - RNA, 19 nt, Artificial Sequence
  Description of Artificial Sequence: Synthetic oligonucleotide
  Antisense strand to SEQ ID NO: 2448652
acauucacauacaaguccu

SEQ ID NO: 2448654 - RNA, 19 nt, Artificial Sequence
  Description of Artificial Sequence: Synthetic oligonucleotide
  Sense strand starting at position 2055 of SEQ ID NO: 1887103
ggacuuguaugugaauguu

SEQ ID NO: 2448655 - RNA, 19 nt, Artificial Sequence
  Description of Artificial Sequence: Synthetic oligonucleotide
  Antisense strand to SEQ ID NO: 2448654
aacauucacauacaagucc

SEQ ID NO: 2448656 - RNA, 19 nt, Artificial Sequence
  Description of Artificial Sequence: Synthetic oligonucleotide
  Sense strand starting at position 2141 of SEQ ID NO: 1887103
auaaacagacugugguaua

SEQ ID NO: 2448657 - RNA, 19 nt, Artificial Sequence
  Description of Artificial Sequence: Synthetic oligonucleotide
  Antisense strand to SEQ ID NO: 2448656
uauaccacagucuguuuau

SEQ ID NO: 2448658 - RNA, 19 nt, Artificial Sequence
  Description of Artificial Sequence: Synthetic oligonucleotide
  Sense strand starting at position 2985 of SEQ ID NO: 1887103
gagacuacaucuguaugac

SEQ ID NO: 2448659 - RNA, 19 nt, Artificial Sequence
  Description of Artificial Sequence: Synthetic oligonucleotide
  Antisense strand to SEQ ID NO: 2448658
gucauacagauguagucuc

SEQ ID NO: 2448660 - RNA, 19 nt, Artificial Sequence
  Description of Artificial Sequence: Synthetic oligonucleotide
  Sense strand starting at position 2994 of SEQ ID NO: 1887103
ucuguaugacugcaucuau

SEQ ID NO: 2448661 - RNA, 19 nt, Artificial Sequence
  Description of Artificial Sequence: Synthetic oligonucleotide
  Antisense strand to SEQ ID NO: 2448660
auagaugcagucauacaga

SEQ ID NO: 2448662 - RNA, 19 nt, Artificial Sequence
  Description of Artificial Sequence: Synthetic oligonucleotide
  Sense strand starting at position 3003 of SEQ ID NO: 1887103
cugcaucuauaggaaacuu

SEQ ID NO: 2448663 - RNA, 19 nt, Artificial Sequence
  Description of Artificial Sequence: Synthetic oligonucleotide
  Antisense strand to SEQ ID NO: 2448662
aaguuuccuauagaugcag

SEQ ID NO: 2448664 - RNA, 19 nt, Artificial Sequence
  Description of Artificial Sequence: Synthetic oligonucleotide
  Sense strand starting at position 3049 of SEQ ID NO: 1887103
gcagaucagugcuuguuag

SEQ ID NO: 2448665 - RNA, 19 nt, Artificial Sequence
  Description of Artificial Sequence: Synthetic oligonucleotide
  Antisense strand to SEQ ID NO: 2448664
cuaacaagcacugaucugc

SEQ ID NO: 2448666 - RNA, 19 nt, Artificial Sequence
  Description of Artificial Sequence: Synthetic oligonucleotide
  Sense strand starting at position 3098 of SEQ ID NO: 1887103
agaaguaauugacagcuaa

SEQ ID NO: 2448667 - RNA, 19 nt, Artificial Sequence
  Description of Artificial Sequence: Synthetic oligonucleotide
  Antisense strand to SEQ ID NO: 2448666
uuagcugucaauuacuucu

SEQ ID NO: 2448668 - RNA, 19 nt, Artificial Sequence
  Description of Artificial Sequence: Synthetic oligonucleotide
  Sense strand starting at position 3234 of SEQ ID NO: 1887103
ugaguucuauucuauguua

SEQ ID NO: 2448669 - RNA, 19 nt, Artificial Sequence
  Description of Artificial Sequence: Synthetic oligonucleotide
  Antisense strand to SEQ ID NO: 2448668
uaacauagaauagaacuca

SEQ ID NO: 2448670 - RNA, 19 nt, Artificial Sequence
  Description of Artificial Sequence: Synthetic oligonucleotide
  Sense strand starting at position 3237 of SEQ ID NO: 1887103
guucuauucuauguuagcu

SEQ ID NO: 2448671 - RNA, 19 nt, Artificial Sequence
  Description of Artificial Sequence: Synthetic oligonucleotide
  Antisense strand to SEQ ID NO: 2448670
agcuaacauagaauagaac

SEQ ID NO: 2448672 - RNA, 19 nt, Artificial Sequence
  Description of Artificial Sequence: Synthetic oligonucleotide
  Sense strand starting at position 3239 of SEQ ID NO: 1887103
ucuauucuauguuagcuau

SEQ ID NO: 2448673 - RNA, 19 nt, Artificial Sequence
  Description of Artificial Sequence: Synthetic oligonucleotide
  Antisense strand to SEQ ID NO: 2448672
auagcuaacauagaauaga

SEQ ID NO: 2448674 - RNA, 19 nt, Artificial Sequence
  Description of Artificial Sequence: Synthetic oligonucleotide
  Sense strand starting at position 3242 of SEQ ID NO: 1887103
auucuauguuagcuauauc

SEQ ID NO: 2448675 - RNA, 19 nt, Artificial Sequence
  Description of Artificial Sequence: Synthetic oligonucleotide
  Antisense strand to SEQ ID NO: 2448674
gauauagcuaacauagaau

SEQ ID NO: 2448676 - RNA, 19 nt, Artificial Sequence
  Description of Artificial Sequence: Synthetic oligonucleotide
  Sense strand starting at position 3245 of SEQ ID NO: 1887103
cuauguuagcuauaucaca

SEQ ID NO: 2448677 - RNA, 19 nt, Artificial Sequence
  Description of Artificial Sequence: Synthetic oligonucleotide
  Antisense strand to SEQ ID NO: 2448676
ugugauauagcuaacauag

SEQ ID NO: 2448678 - RNA, 19 nt, Artificial Sequence
  Description of Artificial Sequence: Synthetic oligonucleotide
  Sense strand starting at position 3810 of SEQ ID NO: 1887103
aguggaaucucugagcuga

SEQ ID NO: 2448679 - RNA, 19 nt, Artificial Sequence
  Description of Artificial Sequence: Synthetic oligonucleotide
  Antisense strand to SEQ ID NO: 2448678
ucagcucagagauuccacu

SEQ ID NO: 2448680 - RNA, 19 nt, Artificial Sequence
  Description of Artificial Sequence: Synthetic oligonucleotide
  Sense strand starting at position 3814 of SEQ ID NO: 1887103
gaaucucugagcugaggga

SEQ ID NO: 2448681 - RNA, 19 nt, Artificial Sequence
  Description of Artificial Sequence: Synthetic oligonucleotide
  Antisense strand to SEQ ID NO: 2448680
ucccucagcucagagauuc

SEQ ID NO: 2448682 - RNA, 19 nt, Artificial Sequence
  Description of Artificial Sequence: Synthetic oligonucleotide
  Sense strand starting at position 3927 of SEQ ID NO: 1887103
gucugagugugcuggcgau

SEQ ID NO: 2448683 - RNA, 19 nt, Artificial Sequence
  Description of Artificial Sequence: Synthetic oligonucleotide
  Antisense strand to SEQ ID NO: 2448682
aucgccagcacacucagac

SEQ ID NO: 2448684 - RNA, 19 nt, Artificial Sequence
  Description of Artificial Sequence: Synthetic oligonucleotide
  Sense strand starting at position 206 of SEQ ID NO: 1887104
ucgcccagccuguauuauu

SEQ ID NO: 2448685 - RNA, 19 nt, Artificial Sequence
  Description of Artificial Sequence: Synthetic oligonucleotide
  Antisense strand to SEQ ID NO: 2448684
aauaauacaggcugggcga

SEQ ID NO: 2448686 - RNA, 19 nt, Artificial Sequence
  Description of Artificial Sequence: Synthetic oligonucleotide
  Sense strand starting at position 243 of SEQ ID NO: 1887104
ucagaugcccuguauuaca

SEQ ID NO: 2448687 - RNA, 19 nt, Artificial Sequence
  Description of Artificial Sequence: Synthetic oligonucleotide
  Antisense strand to SEQ ID NO: 2448686
uguaauacagggcaucuga

SEQ ID NO: 2448688 - RNA, 19 nt, Artificial Sequence
  Description of Artificial Sequence: Synthetic oligonucleotide
  Sense strand starting at position 344 of SEQ ID NO: 1887104
uuaauucucggauaaguuu

SEQ ID NO: 2448689 - RNA, 19 nt, Artificial Sequence
  Description of Artificial Sequence: Synthetic oligonucleotide
  Antisense strand to SEQ ID NO: 2448688
aaacuuauccgagaauuaa

SEQ ID NO: 2448690 - RNA, 19 nt, Artificial Sequence
  Description of Artificial Sequence: Synthetic oligonucleotide
  Sense strand starting at position 505 of SEQ ID NO: 1887104
ucaaucuucccagagucga

SEQ ID NO: 2448691 - RNA, 19 nt, Artificial Sequence
  Description of Artificial Sequence: Synthetic oligonucleotide
  Antisense strand to SEQ ID NO: 2448690
ucgacucugggaagauuga

SEQ ID NO: 2448692 - RNA, 19 nt, Artificial Sequence
  Description of Artificial Sequence: Synthetic oligonucleotide
  Sense strand starting at position 510 of SEQ ID NO: 1887104
cuucccagagucgauauua

SEQ ID NO: 2448693 - RNA, 19 nt, Artificial Sequence
  Description of Artificial Sequence: Synthetic oligonucleotide
  Antisense strand to SEQ ID NO: 2448692
uaauaucgacucugggaag

SEQ ID NO: 2448694 - RNA, 19 nt, Artificial Sequence
  Description of Artificial Sequence: Synthetic oligonucleotide
  Sense strand starting at position 515 of SEQ ID NO: 1887104
cagagucgauauuauuaac

SEQ ID NO: 2448695 - RNA, 19 nt, Artificial Sequence
  Description of Artificial Sequence: Synthetic oligonucleotide
  Antisense strand to SEQ ID NO: 2448694
guuaauaauaucgacucug

SEQ ID NO: 2448696 - RNA, 19 nt, Artificial Sequence
  Description of Artificial Sequence: Synthetic oligonucleotide
  Sense strand starting at position 587 of SEQ ID NO: 1887104
ggucucuuauggcuuagaa

SEQ ID NO: 2448697 - RNA, 19 nt, Artificial Sequence
  Description of Artificial Sequence: Synthetic oligonucleotide
  Antisense strand to SEQ ID NO: 2448696
uucuaagccauaagagacc

SEQ ID NO: 2448698 - RNA, 19 nt, Artificial Sequence
  Description of Artificial Sequence: Synthetic oligonucleotide
  Sense strand starting at position 589 of SEQ ID NO: 1887104
ucucuuauggcuuagaagu

SEQ ID NO: 2448699 - RNA, 19 nt, Artificial Sequence
  Description of Artificial Sequence: Synthetic oligonucleotide
  Antisense strand to SEQ ID NO: 2448698
acuucuaagccauaagaga

SEQ ID NO: 2448700 - RNA, 19 nt, Artificial Sequence
  Description of Artificial Sequence: Synthetic oligonucleotide
  Sense strand starting at position 600 of SEQ ID NO: 1887104
uuagaaguccucugaauac

SEQ ID NO: 2448701 - RNA, 19 nt, Artificial Sequence
  Description of Artificial Sequence: Synthetic oligonucleotide
  Antisense strand to SEQ ID NO: 2448700
guauucagaggacuucuaa

SEQ ID NO: 2448702 - RNA, 19 nt, Artificial Sequence
  Description of Artificial Sequence: Synthetic oligonucleotide
  Sense strand starting at position 957 of SEQ ID NO: 1887104
agugaaagcccacauaacu

SEQ ID NO: 2448703 - RNA, 19 nt, Artificial Sequence
  Description of Artificial Sequence: Synthetic oligonucleotide
  Antisense strand to SEQ ID NO: 2448702
aguuaugugggcuuucacu

SEQ ID NO: 2448704 - RNA, 19 nt, Artificial Sequence
  Description of Artificial Sequence: Synthetic oligonucleotide
  Sense strand starting at position 1000 of SEQ ID NO: 1887104
gcuucaggguuaguguuaa

SEQ ID NO: 2448705 - RNA, 19 nt, Artificial Sequence
  Description of Artificial Sequence: Synthetic oligonucleotide
  Antisense strand to SEQ ID NO: 2448704
uuaacacuaacccugaagc

SEQ ID NO: 2448706 - RNA, 19 nt, Artificial Sequence
  Description of Artificial Sequence: Synthetic oligonucleotide
  Sense strand starting at position 1048 of SEQ ID NO: 1887104
guccucuuacuggaucaau

SEQ ID NO: 2448707 - RNA, 19 nt, Artificial Sequence
  Description of Artificial Sequence: Synthetic oligonucleotide
  Antisense strand to SEQ ID NO: 2448706
auugauccaguaagaggac

SEQ ID NO: 2448708 - RNA, 19 nt, Artificial Sequence
  Description of Artificial Sequence: Synthetic oligonucleotide
  Sense strand starting at position 1411 of SEQ ID NO: 1887104
aucuuaguuccuggauacu

SEQ ID NO: 2448709 - RNA, 19 nt, Artificial Sequence
  Description of Artificial Sequence: Synthetic oligonucleotide
  Antisense strand to SEQ ID NO: 2448708
aguauccaggaacuaagau

SEQ ID NO: 2448710 - RNA, 19 nt, Artificial Sequence
  Description of Artificial Sequence: Synthetic oligonucleotide
  Sense strand starting at position 1420 of SEQ ID NO: 1887104
ccuggauacuugcugaaca

SEQ ID NO: 2448711 - RNA, 19 nt, Artificial Sequence
  Description of Artificial Sequence: Synthetic oligonucleotide
  Antisense strand to SEQ ID NO: 2448710
uguucagcaaguauccagg

SEQ ID NO: 2448712 - RNA, 19 nt, Artificial Sequence
  Description of Artificial Sequence: Synthetic oligonucleotide
  Sense strand starting at position 1454 of SEQ ID NO: 1887104
cacaguguggagcaugaau

SEQ ID NO: 2448713 - RNA, 19 nt, Artificial Sequence
  Description of Artificial Sequence: Synthetic oligonucleotide
  Antisense strand to SEQ ID NO: 2448712
auucaugcuccacacugug

SEQ ID NO: 2448714 - RNA, 19 nt, Artificial Sequence
  Description of Artificial Sequence: Synthetic oligonucleotide
  Sense strand starting at position 1456 of SEQ ID NO: 1887104
caguguggagcaugaauga

SEQ ID NO: 2448715 - RNA, 19 nt, Artificial Sequence
  Description of Artificial Sequence: Synthetic oligonucleotide
  Antisense strand to SEQ ID NO: 2448714
ucauucaugcuccacacug

SEQ ID NO: 2448716 - RNA, 19 nt, Artificial Sequence
  Description of Artificial Sequence: Synthetic oligonucleotide
  Sense strand starting at position 1509 of SEQ ID NO: 1887104
guuuaccacuugucuuaaa

SEQ ID NO: 2448717 - RNA, 19 nt, Artificial Sequence
  Description of Artificial Sequence: Synthetic oligonucleotide
  Antisense strand to SEQ ID NO: 2448716
uuuaagacaagugguaaac

SEQ ID NO: 2448718 - RNA, 19 nt, Artificial Sequence
  Description of Artificial Sequence: Synthetic oligonucleotide
  Sense strand starting at position 1577 of SEQ ID NO: 1887104
gcaacuuacguccaauuau

SEQ ID NO: 2448719 - RNA, 19 nt, Artificial Sequence
  Description of Artificial Sequence: Synthetic oligonucleotide
  Antisense strand to SEQ ID NO: 2448718
auaauuggacguaaguugc

SEQ ID NO: 2448720 - RNA, 19 nt, Artificial Sequence
  Description of Artificial Sequence: Synthetic oligonucleotide
  Sense strand starting at position 1730 of SEQ ID NO: 1887104
gugcuaaacaucugggaac

SEQ ID NO: 2448721 - RNA, 19 nt, Artificial Sequence
  Description of Artificial Sequence: Synthetic oligonucleotide
  Antisense strand to SEQ ID NO: 2448720
guucccagauguuuagcac

SEQ ID NO: 2448722 - RNA, 19 nt, Artificial Sequence
  Description of Artificial Sequence: Synthetic oligonucleotide
  Sense strand starting at position 1759 of SEQ ID NO: 1887104
aaguaaugagaauguacuc

SEQ ID NO: 2448723 - RNA, 19 nt, Artificial Sequence
  Description of Artificial Sequence: Synthetic oligonucleotide
  Antisense strand to SEQ ID NO: 2448722
gaguacauucucauuacuu

SEQ ID NO: 2448724 - RNA, 19 nt, Artificial Sequence
  Description of Artificial Sequence: Synthetic oligonucleotide
  Sense strand starting at position 1881 of SEQ ID NO: 1887104
auacaaugcuaaugagaca

SEQ ID NO: 2448725 - RNA, 19 nt, Artificial Sequence
  Description of Artificial Sequence: Synthetic oligonucleotide
  Antisense strand to SEQ ID NO: 2448724
ugucucauuagcauuguau

SEQ ID NO: 2448726 - RNA, 19 nt, Artificial Sequence
  Description of Artificial Sequence: Synthetic oligonucleotide
  Sense strand starting at position 2239 of SEQ ID NO: 1887104
cauaaugaaugcuugggaa

SEQ ID NO: 2448727 - RNA, 19 nt, Artificial Sequence
  Description of Artificial Sequence: Synthetic oligonucleotide
  Antisense strand to SEQ ID NO: 2448726
uucccaagcauucauuaug

SEQ ID NO: 2448728 - RNA, 19 nt, Artificial Sequence
  Description of Artificial Sequence: Synthetic oligonucleotide
  Sense strand starting at position 2241 of SEQ ID NO: 1887104
uaaugaaugcuugggaaau

SEQ ID NO: 2448729 - RNA, 19 nt, Artificial Sequence
  Description of Artificial Sequence: Synthetic oligonucleotide
  Antisense strand to SEQ ID NO: 2448728
auuucccaagcauucauua

SEQ ID NO: 2448730 - RNA, 19 nt, Artificial Sequence
  Description of Artificial Sequence: Synthetic oligonucleotide
  Sense strand starting at position 2243 of SEQ ID NO: 1887104
augaaugcuugggaaauua

SEQ ID NO: 2448731 - RNA, 19 nt, Artificial Sequence
  Description of Artificial Sequence: Synthetic oligonucleotide
  Antisense strand to SEQ ID NO: 2448730
uaauuucccaagcauucau

SEQ ID NO: 2448732 - RNA, 19 nt, Artificial Sequence
  Description of Artificial Sequence: Synthetic oligonucleotide
  Sense strand starting at position 2734 of SEQ ID NO: 1887104
cgacucugaccucaaguga

SEQ ID NO: 2448733 - RNA, 19 nt, Artificial Sequence
  Description of Artificial Sequence: Synthetic oligonucleotide
  Antisense strand to SEQ ID NO: 2448732
ucacuugaggucagagucg

SEQ ID NO: 2448734 - RNA, 19 nt, Artificial Sequence
  Description of Artificial Sequence: Synthetic oligonucleotide
  Sense strand starting at position 2826 of SEQ ID NO: 1887104
agaucaauauaaggugacu

SEQ ID NO: 2448735 - RNA, 19 nt, Artificial Sequence
  Description of Artificial Sequence: Synthetic oligonucleotide
  Antisense strand to SEQ ID NO: 2448734
agucaccuuauauugaucu

SEQ ID NO: 2448736 - RNA, 19 nt, Artificial Sequence
  Description of Artificial Sequence: Synthetic oligonucleotide
  Sense strand starting at position 3183 of SEQ ID NO: 1887104
acuuguggccuugagcaau

SEQ ID NO: 2448737 - RNA, 19 nt, Artificial Sequence
  Description of Artificial Sequence: Synthetic oligonucleotide
  Antisense strand to SEQ ID NO: 2448736
auugcucaaggccacaagu

SEQ ID NO: 2448738 - RNA, 19 nt, Artificial Sequence
  Description of Artificial Sequence: Synthetic oligonucleotide
  Sense strand starting at position 3215 of SEQ ID NO: 1887104
ccuccugaauauccgagau

SEQ ID NO: 2448739 - RNA, 19 nt, Artificial Sequence
  Description of Artificial Sequence: Synthetic oligonucleotide
  Antisense strand to SEQ ID NO: 2448738
aucucggauauucaggagg

SEQ ID NO: 2448740 - RNA, 19 nt, Artificial Sequence
  Description of Artificial Sequence: Synthetic oligonucleotide
  Sense strand starting at position 3317 of SEQ ID NO: 1887104
auugguuuguucucugacu

SEQ ID NO: 2448741 - RNA, 19 nt, Artificial Sequence
  Description of Artificial Sequence: Synthetic oligonucleotide
  Antisense strand to SEQ ID NO: 2448740
agucagagaacaaaccaau

SEQ ID NO: 2448742 - RNA, 19 nt, Artificial Sequence
  Description of Artificial Sequence: Synthetic oligonucleotide
  Sense strand starting at position 3319 of SEQ ID NO: 1887104
ugguuuguucucugacucu

SEQ ID NO: 2448743 - RNA, 19 nt, Artificial Sequence
  Description of Artificial Sequence: Synthetic oligonucleotide
  Antisense strand to SEQ ID NO: 2448742
agagucagagaacaaacca

SEQ ID NO: 2448744 - RNA, 19 nt, Artificial Sequence
  Description of Artificial Sequence: Synthetic oligonucleotide
  Sense strand starting at position 3462 of SEQ ID NO: 1887104
gcaguucuuccauagggcu

SEQ ID NO: 2448745 - RNA, 19 nt, Artificial Sequence
  Description of Artificial Sequence: Synthetic oligonucleotide
  Antisense strand to SEQ ID NO: 2448744
agcccuauggaagaacugc

SEQ ID NO: 2448746 - RNA, 19 nt, Artificial Sequence
  Description of Artificial Sequence: Synthetic oligonucleotide
  Sense strand starting at position 3525 of SEQ ID NO: 1887104
cuccaaauauaggagaaau

SEQ ID NO: 2448747 - RNA, 19 nt, Artificial Sequence
  Description of Artificial Sequence: Synthetic oligonucleotide
  Antisense strand to SEQ ID NO: 2448746
auuucuccuauauuuggag

SEQ ID NO: 2448748 - RNA, 19 nt, Artificial Sequence
  Description of Artificial Sequence: Synthetic oligonucleotide
  Sense strand starting at position 3533 of SEQ ID NO: 1887104
auaggagaaaucuguguug

SEQ ID NO: 2448749 - RNA, 19 nt, Artificial Sequence
  Description of Artificial Sequence: Synthetic oligonucleotide
  Antisense strand to SEQ ID NO: 2448748
caacacagauuucuccuau

SEQ ID NO: 2448750 - RNA, 19 nt, Artificial Sequence
  Description of Artificial Sequence: Synthetic oligonucleotide
  Sense strand starting at position 3535 of SEQ ID NO: 1887104
aggagaaaucuguguugua

SEQ ID NO: 2448751 - RNA, 19 nt, Artificial Sequence
  Description of Artificial Sequence: Synthetic oligonucleotide
  Antisense strand to SEQ ID NO: 2448750
uacaacacagauuucuccu

SEQ ID NO: 2448752 - RNA, 19 nt, Artificial Sequence
  Description of Artificial Sequence: Synthetic oligonucleotide
  Sense strand starting at position 3536 of SEQ ID NO: 1887104
ggagaaaucuguguuguac

SEQ ID NO: 2448753 - RNA, 19 nt, Artificial Sequence
  Description of Artificial Sequence: Synthetic oligonucleotide
  Antisense strand to SEQ ID NO: 2448752
guacaacacagauuucucc

SEQ ID NO: 2448754 - RNA, 19 nt, Artificial Sequence
  Description of Artificial Sequence: Synthetic oligonucleotide
  Sense strand starting at position 3544 of SEQ ID NO: 1887104
cuguguuguaccuaaagug

SEQ ID NO: 2448755 - RNA, 19 nt, Artificial Sequence
  Description of Artificial Sequence: Synthetic oligonucleotide
  Antisense strand to SEQ ID NO: 2448754
cacuuuagguacaacacag

SEQ ID NO: 2448756 - RNA, 19 nt, Artificial Sequence
  Description of Artificial Sequence: Synthetic oligonucleotide
  Sense strand starting at position 3562 of SEQ ID NO: 1887104
ggccaauacuugcuacauu

SEQ ID NO: 2448757 - RNA, 19 nt, Artificial Sequence
  Description of Artificial Sequence: Synthetic oligonucleotide
  Antisense strand to SEQ ID NO: 2448756
aauguagcaaguauuggcc

SEQ ID NO: 2448758 - RNA, 19 nt, Artificial Sequence
  Description of Artificial Sequence: Synthetic oligonucleotide
  Sense strand starting at position 3584 of SEQ ID NO: 1887104
ucugucuaaccuuggaaca

SEQ ID NO: 2448759 - RNA, 19 nt, Artificial Sequence
  Description of Artificial Sequence: Synthetic oligonucleotide
  Antisense strand to SEQ ID NO: 2448758
uguuccaagguuagacaga

SEQ ID NO: 2448760 - RNA, 19 nt, Artificial Sequence
  Description of Artificial Sequence: Synthetic oligonucleotide
  Sense strand starting at position 3634 of SEQ ID NO: 1887104
ucagacaucuuagaagaaa

SEQ ID NO: 2448761 - RNA, 19 nt, Artificial Sequence
  Description of Artificial Sequence: Synthetic oligonucleotide
  Antisense strand to SEQ ID NO: 2448760
uuucuucuaagaugucuga

SEQ ID NO: 2448762 - RNA, 19 nt, Artificial Sequence
  Description of Artificial Sequence: Synthetic oligonucleotide
  Sense strand starting at position 3688 of SEQ ID NO: 1887104
uagagaaguccagguguuu

SEQ ID NO: 2448763 - RNA, 19 nt, Artificial Sequence
  Description of Artificial Sequence: Synthetic oligonucleotide
  Antisense strand to SEQ ID NO: 2448762
aaacaccuggacuucucua

SEQ ID NO: 2448764 - RNA, 19 nt, Artificial Sequence
  Description of Artificial Sequence: Synthetic oligonucleotide
  Sense strand starting at position 71 of SEQ ID NO: 1887105
ggucccucagcucagagau

SEQ ID NO: 2448765 - RNA, 19 nt, Artificial Sequence
  Description of Artificial Sequence: Synthetic oligonucleotide
  Antisense strand to SEQ ID NO: 2448764
aucucugagcugagggacc

SEQ ID NO: 2448766 - RNA, 19 nt, Artificial Sequence
  Description of Artificial Sequence: Synthetic oligonucleotide
  Sense strand starting at position 84 of SEQ ID NO: 1887105
agagauuccacuugagugu

SEQ ID NO: 2448767 - RNA, 19 nt, Artificial Sequence
  Description of Artificial Sequence: Synthetic oligonucleotide
  Antisense strand to SEQ ID NO: 2448766
acacucaaguggaaucucu

SEQ ID NO: 2448768 - RNA, 19 nt, Artificial Sequence
  Description of Artificial Sequence: Synthetic oligonucleotide
  Sense strand starting at position 85 of SEQ ID NO: 1887105
gagauuccacuugagugua

SEQ ID NO: 2448769 - RNA, 19 nt, Artificial Sequence
  Description of Artificial Sequence: Synthetic oligonucleotide
  Antisense strand to SEQ ID NO: 2448768
uacacucaaguggaaucuc

SEQ ID NO: 2448770 - RNA, 19 nt, Artificial Sequence
  Description of Artificial Sequence: Synthetic oligonucleotide
  Sense strand starting at position 129 of SEQ ID NO: 1887105
gugcccucuuugcacuaau

SEQ ID NO: 2448771 - RNA, 19 nt, Artificial Sequence
  Description of Artificial Sequence: Synthetic oligonucleotide
  Antisense strand to SEQ ID NO: 2448770
auuagugcaaagagggcac

SEQ ID NO: 2448772 - RNA, 19 nt, Artificial Sequence
  Description of Artificial Sequence: Synthetic oligonucleotide
  Sense strand starting at position 142 of SEQ ID NO: 1887105
acuaauguuuagggaccua

SEQ ID NO: 2448773 - RNA, 19 nt, Artificial Sequence
  Description of Artificial Sequence: Synthetic oligonucleotide
  Antisense strand to SEQ ID NO: 2448772
uaggucccuaaacauuagu

SEQ ID NO: 2448774 - RNA, 19 nt, Artificial Sequence
  Description of Artificial Sequence: Synthetic oligonucleotide
  Sense strand starting at position 220 of SEQ ID NO: 1887105
gugccauagcuauagagag

SEQ ID NO: 2448775 - RNA, 19 nt, Artificial Sequence
  Description of Artificial Sequence: Synthetic oligonucleotide
  Antisense strand to SEQ ID NO: 2448774
cucucuauagcuauggcac

SEQ ID NO: 2448776 - RNA, 19 nt, Artificial Sequence
  Description of Artificial Sequence: Synthetic oligonucleotide
  Sense strand starting at position 292 of SEQ ID NO: 1887105
ucagcuuuacugugauaua

SEQ ID NO: 2448777 - RNA, 19 nt, Artificial Sequence
  Description of Artificial Sequence: Synthetic oligonucleotide
  Antisense strand to SEQ ID NO: 2448776
uauaucacaguaaagcuga

SEQ ID NO: 2448778 - RNA, 19 nt, Artificial Sequence
  Description of Artificial Sequence: Synthetic oligonucleotide
  Sense strand starting at position 295 of SEQ ID NO: 1887105
gcuuuacugugauauauaa

SEQ ID NO: 2448779 - RNA, 19 nt, Artificial Sequence
  Description of Artificial Sequence: Synthetic oligonucleotide
  Antisense strand to SEQ ID NO: 2448778
uuauauaucacaguaaagc

SEQ ID NO: 2448780 - RNA, 19 nt, Artificial Sequence
  Description of Artificial Sequence: Synthetic oligonucleotide
  Sense strand starting at position 469 of SEQ ID NO: 1887105
ccaggauuauaggcacaca

SEQ ID NO: 2448781 - RNA, 19 nt, Artificial Sequence
  Description of Artificial Sequence: Synthetic oligonucleotide
  Antisense strand to SEQ ID NO: 2448780
ugugugccuauaauccugg

SEQ ID NO: 2448782 - RNA, 19 nt, Artificial Sequence
  Description of Artificial Sequence: Synthetic oligonucleotide
  Sense strand starting at position 632 of SEQ ID NO: 1887105
cuggccauauugugauaua

SEQ ID NO: 2448783 - RNA, 19 nt, Artificial Sequence
  Description of Artificial Sequence: Synthetic oligonucleotide
  Antisense strand to SEQ ID NO: 2448782
uauaucacaauauggccag

SEQ ID NO: 2448784 - RNA, 19 nt, Artificial Sequence
  Description of Artificial Sequence: Synthetic oligonucleotide
  Sense strand starting at position 633 of SEQ ID NO: 1887105
uggccauauugugauauag

SEQ ID NO: 2448785 - RNA, 19 nt, Artificial Sequence
  Description of Artificial Sequence: Synthetic oligonucleotide
  Antisense strand to SEQ ID NO: 2448784
cuauaucacaauauggcca

SEQ ID NO: 2448786 - RNA, 19 nt, Artificial Sequence
  Description of Artificial Sequence: Synthetic oligonucleotide
  Sense strand starting at position 635 of SEQ ID NO: 1887105
gccauauugugauauagcu

SEQ ID NO: 2448787 - RNA, 19 nt, Artificial Sequence
  Description of Artificial Sequence: Synthetic oligonucleotide
  Antisense strand to SEQ ID NO: 2448786
agcuauaucacaauauggc

SEQ ID NO: 2448788 - RNA, 19 nt, Artificial Sequence
  Description of Artificial Sequence: Synthetic oligonucleotide
  Sense strand starting at position 644 of SEQ ID NO: 1887105
ugauauagcuaacauagaa

SEQ ID NO: 2448789 - RNA, 19 nt, Artificial Sequence
  Description of Artificial Sequence: Synthetic oligonucleotide
  Antisense strand to SEQ ID NO: 2448788
uucuauguuagcuauauca

SEQ ID NO: 2448790 - RNA, 19 nt, Artificial Sequence
  Description of Artificial Sequence: Synthetic oligonucleotide
  Sense strand starting at position 711 of SEQ ID NO: 1887105
cacacacuguagucaugua

SEQ ID NO: 2448791 - RNA, 19 nt, Artificial Sequence
  Description of Artificial Sequence: Synthetic oligonucleotide
  Antisense strand to SEQ ID NO: 2448790
uacaugacuacagugugug

SEQ ID NO: 2448792 - RNA, 19 nt, Artificial Sequence
  Description of Artificial Sequence: Synthetic oligonucleotide
  Sense strand starting at position 767 of SEQ ID NO: 1887105
ccuagaacuucccuuguga

SEQ ID NO: 2448793 - RNA, 19 nt, Artificial Sequence
  Description of Artificial Sequence: Synthetic oligonucleotide
  Antisense strand to SEQ ID NO: 2448792
ucacaagggaaguucuagg

SEQ ID NO: 2448794 - RNA, 19 nt, Artificial Sequence
  Description of Artificial Sequence: Synthetic oligonucleotide
  Sense strand starting at position 868 of SEQ ID NO: 1887105
agucuugccuuucuuaaag

SEQ ID NO: 2448795 - RNA, 19 nt, Artificial Sequence
  Description of Artificial Sequence: Synthetic oligonucleotide
  Antisense strand to SEQ ID NO: 2448794
cuuuaagaaaggcaagacu

SEQ ID NO: 2448796 - RNA, 19 nt, Artificial Sequence
  Description of Artificial Sequence: Synthetic oligonucleotide
  Sense strand starting at position 919 of SEQ ID NO: 1887105
ucuugugucucacuucuuu

SEQ ID NO: 2448797 - RNA, 19 nt, Artificial Sequence
  Description of Artificial Sequence: Synthetic oligonucleotide
  Antisense strand to SEQ ID NO: 2448796
aaagaagugagacacaaga

SEQ ID NO: 2448798 - RNA, 19 nt, Artificial Sequence
  Description of Artificial Sequence: Synthetic oligonucleotide
  Sense strand starting at position 1680 of SEQ ID NO: 1887105
uccauauuauuggauguau

SEQ ID NO: 2448799 - RNA, 19 nt, Artificial Sequence
  Description of Artificial Sequence: Synthetic oligonucleotide
  Antisense strand to SEQ ID NO: 2448798
auacauccaauaauaugga

SEQ ID NO: 2448800 - RNA, 19 nt, Artificial Sequence
  Description of Artificial Sequence: Synthetic oligonucleotide
  Sense strand starting at position 1815 of SEQ ID NO: 1887105
ugaguaaaguugcaaugaa

SEQ ID NO: 2448801 - RNA, 19 nt, Artificial Sequence
  Description of Artificial Sequence: Synthetic oligonucleotide
  Antisense strand to SEQ ID NO: 2448800
uucauugcaacuuuacuca

SEQ ID NO: 2448802 - RNA, 19 nt, Artificial Sequence
  Description of Artificial Sequence: Synthetic oligonucleotide
  Sense strand starting at position 2042 of SEQ ID NO: 1887105
gcuaaaucagguugacauc

SEQ ID NO: 2448803 - RNA, 19 nt, Artificial Sequence
  Description of Artificial Sequence: Synthetic oligonucleotide
  Antisense strand to SEQ ID NO: 2448802
gaugucaaccugauuuagc

SEQ ID NO: 2448804 - RNA, 19 nt, Artificial Sequence
  Description of Artificial Sequence: Synthetic oligonucleotide
  Sense strand starting at position 2154 of SEQ ID NO: 1887105
ucguacuaauuaugauaca

SEQ ID NO: 2448805 - RNA, 19 nt, Artificial Sequence
  Description of Artificial Sequence: Synthetic oligonucleotide
  Antisense strand to SEQ ID NO: 2448804
uguaucauaauuaguacga

SEQ ID NO: 2448806 - RNA, 19 nt, Artificial Sequence
  Description of Artificial Sequence: Synthetic oligonucleotide
  Sense strand starting at position 2155 of SEQ ID NO: 1887105
cguacuaauuaugauacau

SEQ ID NO: 2448807 - RNA, 19 nt, Artificial Sequence
  Description of Artificial Sequence: Synthetic oligonucleotide
  Antisense strand to SEQ ID NO: 2448806
auguaucauaauuaguacg

SEQ ID NO: 2448808 - RNA, 19 nt, Artificial Sequence
  Description of Artificial Sequence: Synthetic oligonucleotide
  Sense strand starting at position 2277 of SEQ ID NO: 1887105
aggauuuaaucaggauaua

SEQ ID NO: 2448809 - RNA, 19 nt, Artificial Sequence
  Description of Artificial Sequence: Synthetic oligonucleotide
  Antisense strand to SEQ ID NO: 2448808
uauauccugauuaaauccu

SEQ ID NO: 2448810 - RNA, 19 nt, Artificial Sequence
  Description of Artificial Sequence: Synthetic oligonucleotide
  Sense strand starting at position 2288 of SEQ ID NO: 1887105
aggauauaauguugcacuu

SEQ ID NO: 2448811 - RNA, 19 nt, Artificial Sequence
  Description of Artificial Sequence: Synthetic oligonucleotide
  Antisense strand to SEQ ID NO: 2448810
aagugcaacauuauauccu

SEQ ID NO: 2448812 - RNA, 19 nt, Artificial Sequence
  Description of Artificial Sequence: Synthetic oligonucleotide
  Sense strand starting at position 2340 of SEQ ID NO: 1887105
ugucaauuucucugucucu

SEQ ID NO: 2448813 - RNA, 19 nt, Artificial Sequence
  Description of Artificial Sequence: Synthetic oligonucleotide
  Antisense strand to SEQ ID NO: 2448812
agagacagagaaauugaca

SEQ ID NO: 2448814 - RNA, 19 nt, Artificial Sequence
  Description of Artificial Sequence: Synthetic oligonucleotide
  Sense strand starting at position 2375 of SEQ ID NO: 1887105
cuuugacauuuaugaagug

SEQ ID NO: 2448815 - RNA, 19 nt, Artificial Sequence
  Description of Artificial Sequence: Synthetic oligonucleotide
  Antisense strand to SEQ ID NO: 2448814
cacuucauaaaugucaaag

SEQ ID NO: 2448816 - RNA, 19 nt, Artificial Sequence
  Description of Artificial Sequence: Synthetic oligonucleotide
  Sense strand starting at position 2449 of SEQ ID NO: 1887105
ugaucauuagacugcaguu

SEQ ID NO: 2448817 - RNA, 19 nt, Artificial Sequence
  Description of Artificial Sequence: Synthetic oligonucleotide
  Antisense strand to SEQ ID NO: 2448816
aacugcagucuaaugauca

SEQ ID NO: 2448818 - RNA, 19 nt, Artificial Sequence
  Description of Artificial Sequence: Synthetic oligonucleotide
  Sense strand starting at position 2534 of SEQ ID NO: 1887105
ugauaucuaccugauugcu

SEQ ID NO: 2448819 - RNA, 19 nt, Artificial Sequence
  Description of Artificial Sequence: Synthetic oligonucleotide
  Antisense strand to SEQ ID NO: 2448818
agcaaucagguagauauca

SEQ ID NO: 2448820 - RNA, 19 nt, Artificial Sequence
  Description of Artificial Sequence: Synthetic oligonucleotide
  Sense strand starting at position 2543 of SEQ ID NO: 1887105
ccugauugcucacugguga

SEQ ID NO: 2448821 - RNA, 19 nt, Artificial Sequence
  Description of Artificial Sequence: Synthetic oligonucleotide
  Antisense strand to SEQ ID NO: 2448820
ucaccagugagcaaucagg

SEQ ID NO: 2448822 - RNA, 19 nt, Artificial Sequence
  Description of Artificial Sequence: Synthetic oligonucleotide
  Sense strand starting at position 2544 of SEQ ID NO: 1887105
cugauugcucacuggugaa

SEQ ID NO: 2448823 - RNA, 19 nt, Artificial Sequence
  Description of Artificial Sequence: Synthetic oligonucleotide
  Antisense strand to SEQ ID NO: 2448822
uucaccagugagcaaucag

SEQ ID NO: 2448824 - RNA, 19 nt, Artificial Sequence
  Description of Artificial Sequence: Synthetic oligonucleotide
  Sense strand starting at position 2547 of SEQ ID NO: 1887105
auugcucacuggugaaguu

SEQ ID NO: 2448825 - RNA, 19 nt, Artificial Sequence
  Description of Artificial Sequence: Synthetic oligonucleotide
  Antisense strand to SEQ ID NO: 2448824
aacuucaccagugagcaau

SEQ ID NO: 2448826 - RNA, 19 nt, Artificial Sequence
  Description of Artificial Sequence: Synthetic oligonucleotide
  Sense strand starting at position 2548 of SEQ ID NO: 1887105
uugcucacuggugaaguua

SEQ ID NO: 2448827 - RNA, 19 nt, Artificial Sequence
  Description of Artificial Sequence: Synthetic oligonucleotide
  Antisense strand to SEQ ID NO: 2448826
uaacuucaccagugagcaa

SEQ ID NO: 2448828 - RNA, 19 nt, Artificial Sequence
  Description of Artificial Sequence: Synthetic oligonucleotide
  Sense strand starting at position 2556 of SEQ ID NO: 1887105
uggugaaguuaaccuugau

SEQ ID NO: 2448829 - RNA, 19 nt, Artificial Sequence
  Description of Artificial Sequence: Synthetic oligonucleotide
  Antisense strand to SEQ ID NO: 2448828
aucaagguuaacuucacca

SEQ ID NO: 2448830 - RNA, 19 nt, Artificial Sequence
  Description of Artificial Sequence: Synthetic oligonucleotide
  Sense strand starting at position 2579 of SEQ ID NO: 1887105
ugguuaaggcguugucuac

SEQ ID NO: 2448831 - RNA, 19 nt, Artificial Sequence
  Description of Artificial Sequence: Synthetic oligonucleotide
  Antisense strand to SEQ ID NO: 2448830
guagacaacgccuuaacca

SEQ ID NO: 2448832 - RNA, 19 nt, Artificial Sequence
  Description of Artificial Sequence: Synthetic oligonucleotide
  Sense strand starting at position 2583 of SEQ ID NO: 1887105
uaaggcguugucuaccaga

SEQ ID NO: 2448833 - RNA, 19 nt, Artificial Sequence
  Description of Artificial Sequence: Synthetic oligonucleotide
  Antisense strand to SEQ ID NO: 2448832
ucugguagacaacgccuua

SEQ ID NO: 2448834 - RNA, 19 nt, Artificial Sequence
  Description of Artificial Sequence: Synthetic oligonucleotide
  Sense strand starting at position 2588 of SEQ ID NO: 1887105
cguugucuaccagaguuac

SEQ ID NO: 2448835 - RNA, 19 nt, Artificial Sequence
  Description of Artificial Sequence: Synthetic oligonucleotide
  Antisense strand to SEQ ID NO: 2448834
guaacucugguagacaacg

SEQ ID NO: 2448836 - RNA, 19 nt, Artificial Sequence
  Description of Artificial Sequence: Synthetic oligonucleotide
  Sense strand starting at position 2975 of SEQ ID NO: 1887105
uggugugaauccaggagga

SEQ ID NO: 2448837 - RNA, 19 nt, Artificial Sequence
  Description of Artificial Sequence: Synthetic oligonucleotide
  Antisense strand to SEQ ID NO: 2448836
uccuccuggauucacacca

SEQ ID NO: 2448838 - RNA, 19 nt, Artificial Sequence
  Description of Artificial Sequence: Synthetic oligonucleotide
  Sense strand starting at position 3080 of SEQ ID NO: 1887105
aaggucugugcauaaauau

SEQ ID NO: 2448839 - RNA, 19 nt, Artificial Sequence
  Description of Artificial Sequence: Synthetic oligonucleotide
  Antisense strand to SEQ ID NO: 2448838
auauuuaugcacagaccuu

SEQ ID NO: 2448840 - RNA, 19 nt, Artificial Sequence
  Description of Artificial Sequence: Synthetic oligonucleotide
  Sense strand starting at position 3087 of SEQ ID NO: 1887105
gugcauaaauaucauaaug

SEQ ID NO: 2448841 - RNA, 19 nt, Artificial Sequence
  Description of Artificial Sequence: Synthetic oligonucleotide
  Antisense strand to SEQ ID NO: 2448840
cauuaugauauuuaugcac

SEQ ID NO: 2448842 - RNA, 19 nt, Artificial Sequence
  Description of Artificial Sequence: Synthetic oligonucleotide
  Sense strand starting at position 3167 of SEQ ID NO: 1887105
ggacaagcuuaccgucuau

SEQ ID NO: 2448843 - RNA, 19 nt, Artificial Sequence
  Description of Artificial Sequence: Synthetic oligonucleotide
  Antisense strand to SEQ ID NO: 2448842
auagacgguaagcuugucc

SEQ ID NO: 2448844 - RNA, 19 nt, Artificial Sequence
  Description of Artificial Sequence: Synthetic oligonucleotide
  Sense strand starting at position 125 of SEQ ID NO: 1887106
ggcacaaaucuugaaggcu

SEQ ID NO: 2448845 - RNA, 19 nt, Artificial Sequence
  Description of Artificial Sequence: Synthetic oligonucleotide
  Antisense strand to SEQ ID NO: 2448844
agccuucaagauuugugcc

SEQ ID NO: 2448846 - RNA, 19 nt, Artificial Sequence
  Description of Artificial Sequence: Synthetic oligonucleotide
  Sense strand starting at position 134 of SEQ ID NO: 1887106
cuugaaggcuacuugaaga

SEQ ID NO: 2448847 - RNA, 19 nt, Artificial Sequence
  Description of Artificial Sequence: Synthetic oligonucleotide
  Antisense strand to SEQ ID NO: 2448846
ucuucaaguagccuucaag

SEQ ID NO: 2448848 - RNA, 19 nt, Artificial Sequence
  Description of Artificial Sequence: Synthetic oligonucleotide
  Sense strand starting at position 367 of SEQ ID NO: 1887106
ggcauuaaaggagguuauu

SEQ ID NO: 2448849 - RNA, 19 nt, Artificial Sequence
  Description of Artificial Sequence: Synthetic oligonucleotide
  Antisense strand to SEQ ID NO: 2448848
aauaaccuccuuuaaugcc

SEQ ID NO: 2448850 - RNA, 19 nt, Artificial Sequence
  Description of Artificial Sequence: Synthetic oligonucleotide
  Sense strand starting at position 720 of SEQ ID NO: 1887106
agaguagaucccugaucca

SEQ ID NO: 2448851 - RNA, 19 nt, Artificial Sequence
  Description of Artificial Sequence: Synthetic oligonucleotide
  Antisense strand to SEQ ID NO: 2448850
uggaucagggaucuacucu

SEQ ID NO: 2448852 - RNA, 19 nt, Artificial Sequence
  Description of Artificial Sequence: Synthetic oligonucleotide
  Sense strand starting at position 723 of SEQ ID NO: 1887106
guagaucccugauccaaca

SEQ ID NO: 2448853 - RNA, 19 nt, Artificial Sequence
  Description of Artificial Sequence: Synthetic oligonucleotide
  Antisense strand to SEQ ID NO: 2448852
uguuggaucagggaucuac

SEQ ID NO: 2448854 - RNA, 19 nt, Artificial Sequence
  Description of Artificial Sequence: Synthetic oligonucleotide
  Sense strand starting at position 740 of SEQ ID NO: 1887106
cagaauugguguucuuaaa

SEQ ID NO: 2448855 - RNA, 19 nt, Artificial Sequence
  Description of Artificial Sequence: Synthetic oligonucleotide
  Antisense strand to SEQ ID NO: 2448854
uuuaagaacaccaauucug

SEQ ID NO: 2448856 - RNA, 19 nt, Artificial Sequence
  Description of Artificial Sequence: Synthetic oligonucleotide
  Sense strand starting at position 778 of SEQ ID NO: 1887106
ggaguaugucugcacagag

SEQ ID NO: 2448857 - RNA, 19 nt, Artificial Sequence
  Description of Artificial Sequence: Synthetic oligonucleotide
  Antisense strand to SEQ ID NO: 2448856
cucugugcagacauacucc

SEQ ID NO: 2448858 - RNA, 19 nt, Artificial Sequence
  Description of Artificial Sequence: Synthetic oligonucleotide
  Sense strand starting at position 795 of SEQ ID NO: 1887106
aggaaagguugugugaaga

SEQ ID NO: 2448859 - RNA, 19 nt, Artificial Sequence
  Description of Artificial Sequence: Synthetic oligonucleotide
  Antisense strand to SEQ ID NO: 2448858
ucuucacacaaccuuuccu

SEQ ID NO: 2448860 - RNA, 19 nt, Artificial Sequence
  Description of Artificial Sequence: Synthetic oligonucleotide
  Sense strand starting at position 1005 of SEQ ID NO: 1887106
gauauuuggucuuccuguu

SEQ ID NO: 2448861 - RNA, 19 nt, Artificial Sequence
  Description of Artificial Sequence: Synthetic oligonucleotide
  Antisense strand to SEQ ID NO: 2448860
aacaggaagaccaaauauc

SEQ ID NO: 2448862 - RNA, 19 nt, Artificial Sequence
  Description of Artificial Sequence: Synthetic oligonucleotide
  Sense strand starting at position 1152 of SEQ ID NO: 1887106
uuguaauuagaggguugaa

SEQ ID NO: 2448863 - RNA, 19 nt, Artificial Sequence
  Description of Artificial Sequence: Synthetic oligonucleotide
  Antisense strand to SEQ ID NO: 2448862
uucaacccucuaauuacaa

SEQ ID NO: 2448864 - RNA, 19 nt, Artificial Sequence
  Description of Artificial Sequence: Synthetic oligonucleotide
  Sense strand starting at position 1458 of SEQ ID NO: 1887106
uguaauaagugggucaaca

SEQ ID NO: 2448865 - RNA, 19 nt, Artificial Sequence
  Description of Artificial Sequence: Synthetic oligonucleotide
  Antisense strand to SEQ ID NO: 2448864
uguugacccacuuauuaca

SEQ ID NO: 2448866 - RNA, 19 nt, Artificial Sequence
  Description of Artificial Sequence: Synthetic oligonucleotide
  Sense strand starting at position 1703 of SEQ ID NO: 1887106
ugaugugugcuggagaaug

SEQ ID NO: 2448867 - RNA, 19 nt, Artificial Sequence
  Description of Artificial Sequence: Synthetic oligonucleotide
  Antisense strand to SEQ ID NO: 2448866
cauucuccagcacacauca

SEQ ID NO: 2448868 - RNA, 19 nt, Artificial Sequence
  Description of Artificial Sequence: Synthetic oligonucleotide
  Sense strand starting at position 1733 of SEQ ID NO: 1887106
guguuauaucgagagaugu

SEQ ID NO: 2448869 - RNA, 19 nt, Artificial Sequence
  Description of Artificial Sequence: Synthetic oligonucleotide
  Antisense strand to SEQ ID NO: 2448868
acaucucucgauauaacac

SEQ ID NO: 2448870 - RNA, 19 nt, Artificial Sequence
  Description of Artificial Sequence: Synthetic oligonucleotide
  Sense strand starting at position 1735 of SEQ ID NO: 1887106
guuauaucgagagaugugu

SEQ ID NO: 2448871 - RNA, 19 nt, Artificial Sequence
  Description of Artificial Sequence: Synthetic oligonucleotide
  Antisense strand to SEQ ID NO: 2448870
acacaucucucgauauaac

SEQ ID NO: 2448872 - RNA, 19 nt, Artificial Sequence
  Description of Artificial Sequence: Synthetic oligonucleotide
  Sense strand starting at position 1739 of SEQ ID NO: 1887106
uaucgagagauguguggaa

SEQ ID NO: 2448873 - RNA, 19 nt, Artificial Sequence
  Description of Artificial Sequence: Synthetic oligonucleotide
  Antisense strand to SEQ ID NO: 2448872
uuccacacaucucucgaua

SEQ ID NO: 2448874 - RNA, 19 nt, Artificial Sequence
  Description of Artificial Sequence: Synthetic oligonucleotide
  Sense strand starting at position 1744 of SEQ ID NO: 1887106
agagauguguggaaguaga

SEQ ID NO: 2448875 - RNA, 19 nt, Artificial Sequence
  Description of Artificial Sequence: Synthetic oligonucleotide
  Antisense strand to SEQ ID NO: 2448874
ucuacuuccacacaucucu

SEQ ID NO: 2448876 - RNA, 19 nt, Artificial Sequence
  Description of Artificial Sequence: Synthetic oligonucleotide
  Sense strand starting at position 1799 of SEQ ID NO: 1887106
agacuaauacagugccaca

SEQ ID NO: 2448877 - RNA, 19 nt, Artificial Sequence
  Description of Artificial Sequence: Synthetic oligonucleotide
  Antisense strand to SEQ ID NO: 2448876
uguggcacuguauuagucu

SEQ ID NO: 2448878 - RNA, 19 nt, Artificial Sequence
  Description of Artificial Sequence: Synthetic oligonucleotide
  Sense strand starting at position 1887 of SEQ ID NO: 1887106
ugaagacagugacuacuuu

SEQ ID NO: 2448879 - RNA, 19 nt, Artificial Sequence
  Description of Artificial Sequence: Synthetic oligonucleotide
  Antisense strand to SEQ ID NO: 2448878
aaaguagucacugucuuca

SEQ ID NO: 2448880 - RNA, 19 nt, Artificial Sequence
  Description of Artificial Sequence: Synthetic oligonucleotide
  Sense strand starting at position 2000 of SEQ ID NO: 1887106
auuuguucucugugaaucu

SEQ ID NO: 2448881 - RNA, 19 nt, Artificial Sequence
  Description of Artificial Sequence: Synthetic oligonucleotide
  Antisense strand to SEQ ID NO: 2448880
agauucacagagaacaaau

SEQ ID NO: 2448882 - RNA, 19 nt, Artificial Sequence
  Description of Artificial Sequence: Synthetic oligonucleotide
  Sense strand starting at position 2028 of SEQ ID NO: 1887106
ucuagaacugguuggaaau

SEQ ID NO: 2448883 - RNA, 19 nt, Artificial Sequence
  Description of Artificial Sequence: Synthetic oligonucleotide
  Antisense strand to SEQ ID NO: 2448882
auuuccaaccaguucuaga

SEQ ID NO: 2448884 - RNA, 19 nt, Artificial Sequence
  Description of Artificial Sequence: Synthetic oligonucleotide
  Sense strand starting at position 2060 of SEQ ID NO: 1887106
aggaauuugucucaaugau

SEQ ID NO: 2448885 - RNA, 19 nt, Artificial Sequence
  Description of Artificial Sequence: Synthetic oligonucleotide
  Antisense strand to SEQ ID NO: 2448884
aucauugagacaaauuccu

SEQ ID NO: 2448886 - RNA, 19 nt, Artificial Sequence
  Description of Artificial Sequence: Synthetic oligonucleotide
  Sense strand starting at position 2612 of SEQ ID NO: 1887106
ggaaguuugccuuacauca

SEQ ID NO: 2448887 - RNA, 19 nt, Artificial Sequence
  Description of Artificial Sequence: Synthetic oligonucleotide
  Antisense strand to SEQ ID NO: 2448886
ugauguaaggcaaacuucc

SEQ ID NO: 2448888 - RNA, 19 nt, Artificial Sequence
  Description of Artificial Sequence: Synthetic oligonucleotide
  Sense strand starting at position 2801 of SEQ ID NO: 1887106
ugagucacccuuugaagga

SEQ ID NO: 2448889 - RNA, 19 nt, Artificial Sequence
  Description of Artificial Sequence: Synthetic oligonucleotide
  Antisense strand to SEQ ID NO: 2448888
uccuucaaagggugacuca

SEQ ID NO: 2448890 - RNA, 19 nt, Artificial Sequence
  Description of Artificial Sequence: Synthetic oligonucleotide
  Sense strand starting at position 2929 of SEQ ID NO: 1887106
cucucauugcugcagagaa

SEQ ID NO: 2448891 - RNA, 19 nt, Artificial Sequence
  Description of Artificial Sequence: Synthetic oligonucleotide
  Antisense strand to SEQ ID NO: 2448890
uucucugcagcaaugagag

SEQ ID NO: 2448892 - RNA, 19 nt, Artificial Sequence
  Description of Artificial Sequence: Synthetic oligonucleotide
  Sense strand starting at position 2965 of SEQ ID NO: 1887106
ugacucaggugagcaauaa

SEQ ID NO: 2448893 - RNA, 19 nt, Artificial Sequence
  Description of Artificial Sequence: Synthetic oligonucleotide
  Antisense strand to SEQ ID NO: 2448892
uuauugcucaccugaguca

SEQ ID NO: 2448894 - RNA, 19 nt, Artificial Sequence
  Description of Artificial Sequence: Synthetic oligonucleotide
  Sense strand starting at position 3193 of SEQ ID NO: 1887106
ggaacauggugcucacuca

SEQ ID NO: 2448895 - RNA, 19 nt, Artificial Sequence
  Description of Artificial Sequence: Synthetic oligonucleotide
  Antisense strand to SEQ ID NO: 2448894
ugagugagcaccauguucc

SEQ ID NO: 2448896 - RNA, 19 nt, Artificial Sequence
  Description of Artificial Sequence: Synthetic oligonucleotide
  Sense strand starting at position 3194 of SEQ ID NO: 1887106
gaacauggugcucacucaa

SEQ ID NO: 2448897 - RNA, 19 nt, Artificial Sequence
  Description of Artificial Sequence: Synthetic oligonucleotide
  Antisense strand to SEQ ID NO: 2448896
uugagugagcaccauguuc

SEQ ID NO: 2448898 - RNA, 19 nt, Artificial Sequence
  Description of Artificial Sequence: Synthetic oligonucleotide
  Sense strand starting at position 3215 of SEQ ID NO: 1887106
gggcguugugcuaaucuga

SEQ ID NO: 2448899 - RNA, 19 nt, Artificial Sequence
  Description of Artificial Sequence: Synthetic oligonucleotide
  Antisense strand to SEQ ID NO: 2448898
ucagauuagcacaacgccc

SEQ ID NO: 2448900 - RNA, 19 nt, Artificial Sequence
  Description of Artificial Sequence: Synthetic oligonucleotide
  Sense strand starting at position 3222 of SEQ ID NO: 1887106
gugcuaaucugauuaauga

SEQ ID NO: 2448901 - RNA, 19 nt, Artificial Sequence
  Description of Artificial Sequence: Synthetic oligonucleotide
  Antisense strand to SEQ ID NO: 2448900
ucauuaaucagauuagcac

SEQ ID NO: 2448902 - RNA, 19 nt, Artificial Sequence
  Description of Artificial Sequence: Synthetic oligonucleotide
  Sense strand starting at position 3237 of SEQ ID NO: 1887106
augaaaugacgaugcuaag

SEQ ID NO: 2448903 - RNA, 19 nt, Artificial Sequence
  Description of Artificial Sequence: Synthetic oligonucleotide
  Antisense strand to SEQ ID NO: 2448902
cuuagcaucgucauuucau

SEQ ID NO: 2448904 - RNA, 19 nt, Artificial Sequence
  Description of Artificial Sequence: Synthetic oligonucleotide
  Sense strand starting at position 3335 of SEQ ID NO: 1887106
ucagauaacuguuuaugaa

SEQ ID NO: 2448905 - RNA, 19 nt, Artificial Sequence
  Description of Artificial Sequence: Synthetic oligonucleotide
  Antisense strand to SEQ ID NO: 2448904
uucauaaacaguuaucuga

SEQ ID NO: 2448906 - RNA, 19 nt, Artificial Sequence
  Description of Artificial Sequence: Synthetic oligonucleotide
  Sense strand starting at position 3398 of SEQ ID NO: 1887106
uguguuguuaaugauugaa

SEQ ID NO: 2448907 - RNA, 19 nt, Artificial Sequence
  Description of Artificial Sequence: Synthetic oligonucleotide
  Antisense strand to SEQ ID NO: 2448906
uucaaucauuaacaacaca

SEQ ID NO: 2448908 - RNA, 19 nt, Artificial Sequence
  Description of Artificial Sequence: Synthetic oligonucleotide
  Sense strand starting at position 3412 of SEQ ID NO: 1887106
uugaaauaaucaguuuggu

SEQ ID NO: 2448909 - RNA, 19 nt, Artificial Sequence
  Description of Artificial Sequence: Synthetic oligonucleotide
  Antisense strand to SEQ ID NO: 2448908
accaaacugauuauuucaa

SEQ ID NO: 2448910 - RNA, 19 nt, Artificial Sequence
  Description of Artificial Sequence: Synthetic oligonucleotide
  Sense strand starting at position 3417 of SEQ ID NO: 1887106
auaaucaguuugguaguaa

SEQ ID NO: 2448911 - RNA, 19 nt, Artificial Sequence
  Description of Artificial Sequence: Synthetic oligonucleotide
  Antisense strand to SEQ ID NO: 2448910
uuacuaccaaacugauuau

SEQ ID NO: 2448912 - RNA, 19 nt, Artificial Sequence
  Description of Artificial Sequence: Synthetic oligonucleotide
  Sense strand starting at position 3437 of SEQ ID NO: 1887106
uggcaugugcgcuugucaa

SEQ ID NO: 2448913 - RNA, 19 nt, Artificial Sequence
  Description of Artificial Sequence: Synthetic oligonucleotide
  Antisense strand to SEQ ID NO: 2448912
uugacaagcgcacaugcca

SEQ ID NO: 2448914 - RNA, 19 nt, Artificial Sequence
  Description of Artificial Sequence: Synthetic oligonucleotide
  Sense strand starting at position 3439 of SEQ ID NO: 1887106
gcaugugcgcuugucaaau

SEQ ID NO: 2448915 - RNA, 19 nt, Artificial Sequence
  Description of Artificial Sequence: Synthetic oligonucleotide
  Antisense strand to SEQ ID NO: 2448914
auuugacaagcgcacaugc

SEQ ID NO: 2448916 - RNA, 19 nt, Artificial Sequence
  Description of Artificial Sequence: Synthetic oligonucleotide
  Sense strand starting at position 3473 of SEQ ID NO: 1887106
auuagcauuccucaggcau

SEQ ID NO: 2448917 - RNA, 19 nt, Artificial Sequence
  Description of Artificial Sequence: Synthetic oligonucleotide
  Antisense strand to SEQ ID NO: 2448916
augccugaggaaugcuaau

SEQ ID NO: 2448918 - RNA, 19 nt, Artificial Sequence
  Description of Artificial Sequence: Synthetic oligonucleotide
  Sense strand starting at position 3638 of SEQ ID NO: 1887106
uaaugaaagcagugugaga

SEQ ID NO: 2448919 - RNA, 19 nt, Artificial Sequence
  Description of Artificial Sequence: Synthetic oligonucleotide
  Antisense strand to SEQ ID NO: 2448918
ucucacacugcuuucauua

SEQ ID NO: 2448920 - RNA, 19 nt, Artificial Sequence
  Description of Artificial Sequence: Synthetic oligonucleotide
  Sense strand starting at position 3824 of SEQ ID NO: 1887106
agcuauaccggagagcuau

SEQ ID NO: 2448921 - RNA, 19 nt, Artificial Sequence
  Description of Artificial Sequence: Synthetic oligonucleotide
  Antisense strand to SEQ ID NO: 2448920
auagcucuccgguauagcu

SEQ ID NO: 2448922 - RNA, 19 nt, Artificial Sequence
  Description of Artificial Sequence: Synthetic oligonucleotide
  Sense strand starting at position 3855 of SEQ ID NO: 1887106
auggaagagguuuguguau

SEQ ID NO: 2448923 - RNA, 19 nt, Artificial Sequence
  Description of Artificial Sequence: Synthetic oligonucleotide
  Antisense strand to SEQ ID NO: 2448922
auacacaaaccucuuccau

SEQ ID NO: 2448924 - RNA, 19 nt, Artificial Sequence
  Description of Artificial Sequence: Synthetic oligonucleotide
  Sense strand starting at position 39 of SEQ ID NO: 1887107
auagcugauauauggugua

SEQ ID NO: 2448925 - RNA, 19 nt, Artificial Sequence
  Description of Artificial Sequence: Synthetic oligonucleotide
  Antisense strand to SEQ ID NO: 2448924
uacaccauauaucagcuau

SEQ ID NO: 2448926 - RNA, 19 nt, Artificial Sequence
  Description of Artificial Sequence: Synthetic oligonucleotide
  Sense strand starting at position 81 of SEQ ID NO: 1887107
cuuaguggaucucauuuaa

SEQ ID NO: 2448927 - RNA, 19 nt, Artificial Sequence
  Description of Artificial Sequence: Synthetic oligonucleotide
  Antisense strand to SEQ ID NO: 2448926
uuaaaugagauccacuaag

SEQ ID NO: 2448928 - RNA, 19 nt, Artificial Sequence
  Description of Artificial Sequence: Synthetic oligonucleotide
  Sense strand starting at position 117 of SEQ ID NO: 1887107
ugaaguggguguuacuauu

SEQ ID NO: 2448929 - RNA, 19 nt, Artificial Sequence
  Description of Artificial Sequence: Synthetic oligonucleotide
  Antisense strand to SEQ ID NO: 2448928
aauaguaacacccacuuca

SEQ ID NO: 2448930 - RNA, 19 nt, Artificial Sequence
  Description of Artificial Sequence: Synthetic oligonucleotide
  Sense strand starting at position 123 of SEQ ID NO: 1887107
ggguguuacuauugauagg

SEQ ID NO: 2448931 - RNA, 19 nt, Artificial Sequence
  Description of Artificial Sequence: Synthetic oligonucleotide
  Antisense strand to SEQ ID NO: 2448930
ccuaucaauaguaacaccc

SEQ ID NO: 2448932 - RNA, 19 nt, Artificial Sequence
  Description of Artificial Sequence: Synthetic oligonucleotide
  Sense strand starting at position 124 of SEQ ID NO: 1887107
gguguuacuauugauagga

SEQ ID NO: 2448933 - RNA, 19 nt, Artificial Sequence
  Description of Artificial Sequence: Synthetic oligonucleotide
  Antisense strand to SEQ ID NO: 2448932
uccuaucaauaguaacacc

SEQ ID NO: 2448934 - RNA, 19 nt, Artificial Sequence
  Description of Artificial Sequence: Synthetic oligonucleotide
  Sense strand starting at position 126 of SEQ ID NO: 1887107
uguuacuauugauaggaaa

SEQ ID NO: 2448935 - RNA, 19 nt, Artificial Sequence
  Description of Artificial Sequence: Synthetic oligonucleotide
  Antisense strand to SEQ ID NO: 2448934
uuuccuaucaauaguaaca

SEQ ID NO: 2448936 - RNA, 19 nt, Artificial Sequence
  Description of Artificial Sequence: Synthetic oligonucleotide
  Sense strand starting at position 148 of SEQ ID NO: 1887107
agcugagcugcagagauaa

SEQ ID NO: 2448937 - RNA, 19 nt, Artificial Sequence
  Description of Artificial Sequence: Synthetic oligonucleotide
  Antisense strand to SEQ ID NO: 2448936
uuaucucugcagcucagcu

SEQ ID NO: 2448938 - RNA, 19 nt, Artificial Sequence
  Description of Artificial Sequence: Synthetic oligonucleotide
  Sense strand starting at position 307 of SEQ ID NO: 1887107
gagagaagauuccuccagu

SEQ ID NO: 2448939 - RNA, 19 nt, Artificial Sequence
  Description of Artificial Sequence: Synthetic oligonucleotide
  Antisense strand to SEQ ID NO: 2448938
acuggaggaaucuucucuc

SEQ ID NO: 2448940 - RNA, 19 nt, Artificial Sequence
  Description of Artificial Sequence: Synthetic oligonucleotide
  Sense strand starting at position 308 of SEQ ID NO: 1887107
agagaagauuccuccaguc

SEQ ID NO: 2448941 - RNA, 19 nt, Artificial Sequence
  Description of Artificial Sequence: Synthetic oligonucleotide
  Antisense strand to SEQ ID NO: 2448940
gacuggaggaaucuucucu

SEQ ID NO: 2448942 - RNA, 19 nt, Artificial Sequence
  Description of Artificial Sequence: Synthetic oligonucleotide
  Sense strand starting at position 422 of SEQ ID NO: 1887107
cacugagauucucagagga

SEQ ID NO: 2448943 - RNA, 19 nt, Artificial Sequence
  Description of Artificial Sequence: Synthetic oligonucleotide
  Antisense strand to SEQ ID NO: 2448942
uccucugagaaucucagug

SEQ ID NO: 2448944 - RNA, 19 nt, Artificial Sequence
  Description of Artificial Sequence: Synthetic oligonucleotide
  Sense strand starting at position 424 of SEQ ID NO: 1887107
cugagauucucagaggaag

SEQ ID NO: 2448945 - RNA, 19 nt, Artificial Sequence
  Description of Artificial Sequence: Synthetic oligonucleotide
  Antisense strand to SEQ ID NO: 2448944
cuuccucugagaaucucag

SEQ ID NO: 2448946 - RNA, 19 nt, Artificial Sequence
  Description of Artificial Sequence: Synthetic oligonucleotide
  Sense strand starting at position 504 of SEQ ID NO: 1887107
gaacgaguguggccagauu

SEQ ID NO: 2448947 - RNA, 19 nt, Artificial Sequence
  Description of Artificial Sequence: Synthetic oligonucleotide
  Antisense strand to SEQ ID NO: 2448946
aaucuggccacacucguuc

SEQ ID NO: 2448948 - RNA, 19 nt, Artificial Sequence
  Description of Artificial Sequence: Synthetic oligonucleotide
  Sense strand starting at position 588 of SEQ ID NO: 1887107
ggcuucucuucgucccaga

SEQ ID NO: 2448949 - RNA, 19 nt, Artificial Sequence
  Description of Artificial Sequence: Synthetic oligonucleotide
  Antisense strand to SEQ ID NO: 2448948
ucugggacgaagagaagcc

SEQ ID NO: 2448950 - RNA, 19 nt, Artificial Sequence
  Description of Artificial Sequence: Synthetic oligonucleotide
  Sense strand starting at position 766 of SEQ ID NO: 1887107
ggcagauaauucccaaaca

SEQ ID NO: 2448951 - RNA, 19 nt, Artificial Sequence
  Description of Artificial Sequence: Synthetic oligonucleotide
  Antisense strand to SEQ ID NO: 2448950
uguuugggaauuaucugcc

SEQ ID NO: 2448952 - RNA, 19 nt, Artificial Sequence
  Description of Artificial Sequence: Synthetic oligonucleotide
  Sense strand starting at position 767 of SEQ ID NO: 1887107
gcagauaauucccaaacag

SEQ ID NO: 2448953 - RNA, 19 nt, Artificial Sequence
  Description of Artificial Sequence: Synthetic oligonucleotide
  Antisense strand to SEQ ID NO: 2448952
cuguuugggaauuaucugc

SEQ ID NO: 2448954 - RNA, 19 nt, Artificial Sequence
  Description of Artificial Sequence: Synthetic oligonucleotide
  Sense strand starting at position 920 of SEQ ID NO: 1887107
aggcaaucuggccaggaga

SEQ ID NO: 2448955 - RNA, 19 nt, Artificial Sequence
  Description of Artificial Sequence: Synthetic oligonucleotide
  Antisense strand to SEQ ID NO: 2448954
ucuccuggccagauugccu

SEQ ID NO: 2448956 - RNA, 19 nt, Artificial Sequence
  Description of Artificial Sequence: Synthetic oligonucleotide
  Sense strand starting at position 1187 of SEQ ID NO: 1887107
cggugccucacugguuaua

SEQ ID NO: 2448957 - RNA, 19 nt, Artificial Sequence
  Description of Artificial Sequence: Synthetic oligonucleotide
  Antisense strand to SEQ ID NO: 2448956
uauaaccagugaggcaccg

SEQ ID NO: 2448958 - RNA, 19 nt, Artificial Sequence
  Description of Artificial Sequence: Synthetic oligonucleotide
  Sense strand starting at position 1189 of SEQ ID NO: 1887107
gugccucacugguuauagu

SEQ ID NO: 2448959 - RNA, 19 nt, Artificial Sequence
  Description of Artificial Sequence: Synthetic oligonucleotide
  Antisense strand to SEQ ID NO: 2448958
acuauaaccagugaggcac

SEQ ID NO: 2448960 - RNA, 19 nt, Artificial Sequence
  Description of Artificial Sequence: Synthetic oligonucleotide
  Sense strand starting at position 1198 of SEQ ID NO: 1887107
ugguuauagugcuauacag

SEQ ID NO: 2448961 - RNA, 19 nt, Artificial Sequence
  Description of Artificial Sequence: Synthetic oligonucleotide
  Antisense strand to SEQ ID NO: 2448960
cuguauagcacuauaacca

SEQ ID NO: 2448962 - RNA, 19 nt, Artificial Sequence
  Description of Artificial Sequence: Synthetic oligonucleotide
  Sense strand starting at position 1200 of SEQ ID NO: 1887107
guuauagugcuauacagga

SEQ ID NO: 2448963 - RNA, 19 nt, Artificial Sequence
  Description of Artificial Sequence: Synthetic oligonucleotide
  Antisense strand to SEQ ID NO: 2448962
uccuguauagcacuauaac

SEQ ID NO: 2448964 - RNA, 19 nt, Artificial Sequence
  Description of Artificial Sequence: Synthetic oligonucleotide
  Sense strand starting at position 1705 of SEQ ID NO: 1887107
cucuguguucccgcagguu

SEQ ID NO: 2448965 - RNA, 19 nt, Artificial Sequence
  Description of Artificial Sequence: Synthetic oligonucleotide
  Antisense strand to SEQ ID NO: 2448964
aaccugcgggaacacagag

SEQ ID NO: 2448966 - RNA, 19 nt, Artificial Sequence
  Description of Artificial Sequence: Synthetic oligonucleotide
  Sense strand starting at position 1798 of SEQ ID NO: 1887107
ggaaucccucucggaguuu

SEQ ID NO: 2448967 - RNA, 19 nt, Artificial Sequence
  Description of Artificial Sequence: Synthetic oligonucleotide
  Antisense strand to SEQ ID NO: 2448966
aaacuccgagagggauucc

SEQ ID NO: 2448968 - RNA, 19 nt, Artificial Sequence
  Description of Artificial Sequence: Synthetic oligonucleotide
  Sense strand starting at position 1828 of SEQ ID NO: 1887107
gccggguugcuccgggaaa

SEQ ID NO: 2448969 - RNA, 19 nt, Artificial Sequence
  Description of Artificial Sequence: Synthetic oligonucleotide
  Antisense strand to SEQ ID NO: 2448968
uuucccggagcaacccggc

SEQ ID NO: 2448970 - RNA, 19 nt, Artificial Sequence
  Description of Artificial Sequence: Synthetic oligonucleotide
  Sense strand starting at position 1913 of SEQ ID NO: 1887107
ggugauucagggugccaau

SEQ ID NO: 2448971 - RNA, 19 nt, Artificial Sequence
  Description of Artificial Sequence: Synthetic oligonucleotide
  Antisense strand to SEQ ID NO: 2448970
auuggcacccugaaucacc

SEQ ID NO: 2448972 - RNA, 19 nt, Artificial Sequence
  Description of Artificial Sequence: Synthetic oligonucleotide
  Sense strand starting at position 2296 of SEQ ID NO: 1887107
cuccgauuccgcgaaaccu

SEQ ID NO: 2448973 - RNA, 19 nt, Artificial Sequence
  Description of Artificial Sequence: Synthetic oligonucleotide
  Antisense strand to SEQ ID NO: 2448972
agguuucgcggaaucggag

SEQ ID NO: 2448974 - RNA, 19 nt, Artificial Sequence
  Description of Artificial Sequence: Synthetic oligonucleotide
  Sense strand starting at position 2513 of SEQ ID NO: 1887107
ggcccagugugcuuaguga

SEQ ID NO: 2448975 - RNA, 19 nt, Artificial Sequence
  Description of Artificial Sequence: Synthetic oligonucleotide
  Antisense strand to SEQ ID NO: 2448974
ucacuaagcacacugggcc

SEQ ID NO: 2448976 - RNA, 19 nt, Artificial Sequence
  Description of Artificial Sequence: Synthetic oligonucleotide
  Sense strand starting at position 2520 of SEQ ID NO: 1887107
ugugcuuagugacucaagu

SEQ ID NO: 2448977 - RNA, 19 nt, Artificial Sequence
  Description of Artificial Sequence: Synthetic oligonucleotide
  Antisense strand to SEQ ID NO: 2448976
acuugagucacuaagcaca

SEQ ID NO: 2448978 - RNA, 19 nt, Artificial Sequence
  Description of Artificial Sequence: Synthetic oligonucleotide
  Sense strand starting at position 2522 of SEQ ID NO: 1887107
ugcuuagugacucaagugu

SEQ ID NO: 2448979 - RNA, 19 nt, Artificial Sequence
  Description of Artificial Sequence: Synthetic oligonucleotide
  Antisense strand to SEQ ID NO: 2448978
acacuugagucacuaagca

SEQ ID NO: 2448980 - RNA, 19 nt, Artificial Sequence
  Description of Artificial Sequence: Synthetic oligonucleotide
  Sense strand starting at position 2543 of SEQ ID NO: 1887107
acccuuuccuagucgagga

SEQ ID NO: 2448981 - RNA, 19 nt, Artificial Sequence
  Description of Artificial Sequence: Synthetic oligonucleotide
  Antisense strand to SEQ ID NO: 2448980
uccucgacuaggaaagggu

SEQ ID NO: 2448982 - RNA, 19 nt, Artificial Sequence
  Description of Artificial Sequence: Synthetic oligonucleotide
  Sense strand starting at position 2544 of SEQ ID NO: 1887107
cccuuuccuagucgaggaa

SEQ ID NO: 2448983 - RNA, 19 nt, Artificial Sequence
  Description of Artificial Sequence: Synthetic oligonucleotide
  Antisense strand to SEQ ID NO: 2448982
uuccucgacuaggaaaggg

SEQ ID NO: 2448984 - RNA, 19 nt, Artificial Sequence
  Description of Artificial Sequence: Synthetic oligonucleotide
  Sense strand starting at position 2688 of SEQ ID NO: 1887107
agauguggucaguguggga

SEQ ID NO: 2448985 - RNA, 19 nt, Artificial Sequence
  Description of Artificial Sequence: Synthetic oligonucleotide
  Antisense strand to SEQ ID NO: 2448984
ucccacacugaccacaucu

SEQ ID NO: 2448986 - RNA, 19 nt, Artificial Sequence
  Description of Artificial Sequence: Synthetic oligonucleotide
  Sense strand starting at position 2719 of SEQ ID NO: 1887107
caugcacuuccggagaaga

SEQ ID NO: 2448987 - RNA, 19 nt, Artificial Sequence
  Description of Artificial Sequence: Synthetic oligonucleotide
  Antisense strand to SEQ ID NO: 2448986
ucuucuccggaagugcaug

SEQ ID NO: 2448988 - RNA, 19 nt, Artificial Sequence
  Description of Artificial Sequence: Synthetic oligonucleotide
  Sense strand starting at position 3019 of SEQ ID NO: 1887107
ggcucacgucugcguugaa

SEQ ID NO: 2448989 - RNA, 19 nt, Artificial Sequence
  Description of Artificial Sequence: Synthetic oligonucleotide
  Antisense strand to SEQ ID NO: 2448988
uucaacgcagacgugagcc

SEQ ID NO: 2448990 - RNA, 19 nt, Artificial Sequence
  Description of Artificial Sequence: Synthetic oligonucleotide
  Sense strand starting at position 3277 of SEQ ID NO: 1887107
ccacuugacugacgggaaa

SEQ ID NO: 2448991 - RNA, 19 nt, Artificial Sequence
  Description of Artificial Sequence: Synthetic oligonucleotide
  Antisense strand to SEQ ID NO: 2448990
uuucccgucagucaagugg

SEQ ID NO: 2448992 - RNA, 19 nt, Artificial Sequence
  Description of Artificial Sequence: Synthetic oligonucleotide
  Sense strand starting at position 3438 of SEQ ID NO: 1887107
gcugaaaucuuagaaucaa

SEQ ID NO: 2448993 - RNA, 19 nt, Artificial Sequence
  Description of Artificial Sequence: Synthetic oligonucleotide
  Antisense strand to SEQ ID NO: 2448992
uugauucuaagauuucagc

SEQ ID NO: 2448994 - RNA, 19 nt, Artificial Sequence
  Description of Artificial Sequence: Synthetic oligonucleotide
  Sense strand starting at position 3464 of SEQ ID NO: 1887107
gaaugaagagguuguccua

SEQ ID NO: 2448995 - RNA, 19 nt, Artificial Sequence
  Description of Artificial Sequence: Synthetic oligonucleotide
  Antisense strand to SEQ ID NO: 2448994
uaggacaaccucuucauuc

SEQ ID NO: 2448996 - RNA, 19 nt, Artificial Sequence
  Description of Artificial Sequence: Synthetic oligonucleotide
  Sense strand starting at position 3467 of SEQ ID NO: 1887107
ugaagagguuguccuaauu

SEQ ID NO: 2448997 - RNA, 19 nt, Artificial Sequence
  Description of Artificial Sequence: Synthetic oligonucleotide
  Antisense strand to SEQ ID NO: 2448996
aauuaggacaaccucuuca

SEQ ID NO: 2448998 - RNA, 19 nt, Artificial Sequence
  Description of Artificial Sequence: Synthetic oligonucleotide
  Sense strand starting at position 3506 of SEQ ID NO: 1887107
ggaagccuugcaugugauu

SEQ ID NO: 2448999 - RNA, 19 nt, Artificial Sequence
  Description of Artificial Sequence: Synthetic oligonucleotide
  Antisense strand to SEQ ID NO: 2448998
aaucacaugcaaggcuucc

SEQ ID NO: 2449000 - RNA, 19 nt, Artificial Sequence
  Description of Artificial Sequence: Synthetic oligonucleotide
  Sense strand starting at position 3612 of SEQ ID NO: 1887107
ccucgagugcugggcuauu

SEQ ID NO: 2449001 - RNA, 19 nt, Artificial Sequence
  Description of Artificial Sequence: Synthetic oligonucleotide
  Antisense strand to SEQ ID NO: 2449000
aauagcccagcacucgagg

SEQ ID NO: 2449002 - RNA, 19 nt, Artificial Sequence
  Description of Artificial Sequence: Synthetic oligonucleotide
  Sense strand starting at position 3666 of SEQ ID NO: 1887107
ccuuguugccugcaggaaa

SEQ ID NO: 2449003 - RNA, 19 nt, Artificial Sequence
  Description of Artificial Sequence: Synthetic oligonucleotide
  Antisense strand to SEQ ID NO: 2449002
uuuccugcaggcaacaagg

SEQ ID NO: 2449004 - RNA, 19 nt, Artificial Sequence
  Description of Artificial Sequence: Synthetic oligonucleotide
  Sense strand starting at position 35 of SEQ ID NO: 1887108
ccaagucuguuuguauaau

SEQ ID NO: 2449005 - RNA, 19 nt, Artificial Sequence
  Description of Artificial Sequence: Synthetic oligonucleotide
  Antisense strand to SEQ ID NO: 2449004
auuauacaaacagacuugg

SEQ ID NO: 2449006 - RNA, 19 nt, Artificial Sequence
  Description of Artificial Sequence: Synthetic oligonucleotide
  Sense strand starting at position 93 of SEQ ID NO: 1887108
auuguauuuguuugaaguc

SEQ ID NO: 2449007 - RNA, 19 nt, Artificial Sequence
  Description of Artificial Sequence: Synthetic oligonucleotide
  Antisense strand to SEQ ID NO: 2449006
gacuucaaacaaauacaau

SEQ ID NO: 2449008 - RNA, 19 nt, Artificial Sequence
  Description of Artificial Sequence: Synthetic oligonucleotide
  Sense strand starting at position 845 of SEQ ID NO: 1887108
cuggucucaccugaacuuu

SEQ ID NO: 2449009 - RNA, 19 nt, Artificial Sequence
  Description of Artificial Sequence: Synthetic oligonucleotide
  Antisense strand to SEQ ID NO: 2449008
aaaguucaggugagaccag

SEQ ID NO: 2449010 - RNA, 19 nt, Artificial Sequence
  Description of Artificial Sequence: Synthetic oligonucleotide
  Sense strand starting at position 1153 of SEQ ID NO: 1887108
ugcauuuaccuguggguca

SEQ ID NO: 2449011 - RNA, 19 nt, Artificial Sequence
  Description of Artificial Sequence: Synthetic oligonucleotide
  Antisense strand to SEQ ID NO: 2449010
ugacccacagguaaaugca

SEQ ID NO: 2449012 - RNA, 19 nt, Artificial Sequence
  Description of Artificial Sequence: Synthetic oligonucleotide
  Sense strand starting at position 1229 of SEQ ID NO: 1887108
ugggaacucuugucucgau

SEQ ID NO: 2449013 - RNA, 19 nt, Artificial Sequence
  Description of Artificial Sequence: Synthetic oligonucleotide
  Antisense strand to SEQ ID NO: 2449012
aucgagacaagaguuccca

SEQ ID NO: 2449014 - RNA, 19 nt, Artificial Sequence
  Description of Artificial Sequence: Synthetic oligonucleotide
  Sense strand starting at position 1230 of SEQ ID NO: 1887108
gggaacucuugucucgaua

SEQ ID NO: 2449015 - RNA, 19 nt, Artificial Sequence
  Description of Artificial Sequence: Synthetic oligonucleotide
  Antisense strand to SEQ ID NO: 2449014
uaucgagacaagaguuccc

SEQ ID NO: 2449016 - RNA, 19 nt, Artificial Sequence
  Description of Artificial Sequence: Synthetic oligonucleotide
  Sense strand starting at position 1710 of SEQ ID NO: 1887108
auauguauugaguagcaaa

SEQ ID NO: 2449017 - RNA, 19 nt, Artificial Sequence
  Description of Artificial Sequence: Synthetic oligonucleotide
  Antisense strand to SEQ ID NO: 2449016
uuugcuacucaauacauau

SEQ ID NO: 2449018 - RNA, 19 nt, Artificial Sequence
  Description of Artificial Sequence: Synthetic oligonucleotide
  Sense strand starting at position 1756 of SEQ ID NO: 1887108
gggucauggugaaaguuug

SEQ ID NO: 2449019 - RNA, 19 nt, Artificial Sequence
  Description of Artificial Sequence: Synthetic oligonucleotide
  Antisense strand to SEQ ID NO: 2449018
caaacuuucaccaugaccc

SEQ ID NO: 2449020 - RNA, 19 nt, Artificial Sequence
  Description of Artificial Sequence: Synthetic oligonucleotide
  Sense strand starting at position 1790 of SEQ ID NO: 1887108
uauauacucaggugggagu

SEQ ID NO: 2449021 - RNA, 19 nt, Artificial Sequence
  Description of Artificial Sequence: Synthetic oligonucleotide
  Antisense strand to SEQ ID NO: 2449020
acucccaccugaguauaua

SEQ ID NO: 2449022 - RNA, 19 nt, Artificial Sequence
  Description of Artificial Sequence: Synthetic oligonucleotide
  Sense strand starting at position 1807 of SEQ ID NO: 1887108
gugauuaccuacccuguau

SEQ ID NO: 2449023 - RNA, 19 nt, Artificial Sequence
  Description of Artificial Sequence: Synthetic oligonucleotide
  Antisense strand to SEQ ID NO: 2449022
auacaggguagguaaucac

SEQ ID NO: 2449024 - RNA, 19 nt, Artificial Sequence
  Description of Artificial Sequence: Synthetic oligonucleotide
  Sense strand starting at position 1847 of SEQ ID NO: 1887108
aucuacaucuaguuagaga

SEQ ID NO: 2449025 - RNA, 19 nt, Artificial Sequence
  Description of Artificial Sequence: Synthetic oligonucleotide
  Antisense strand to SEQ ID NO: 2449024
ucucuaacuagauguagau

SEQ ID NO: 2449026 - RNA, 19 nt, Artificial Sequence
  Description of Artificial Sequence: Synthetic oligonucleotide
  Sense strand starting at position 1931 of SEQ ID NO: 1887108
aagggaaacuuggacaaua

SEQ ID NO: 2449027 - RNA, 19 nt, Artificial Sequence
  Description of Artificial Sequence: Synthetic oligonucleotide
  Antisense strand to SEQ ID NO: 2449026
uauuguccaaguuucccuu

SEQ ID NO: 2449028 - RNA, 19 nt, Artificial Sequence
  Description of Artificial Sequence: Synthetic oligonucleotide
  Sense strand starting at position 1981 of SEQ ID NO: 1887108
cuggaauccuuagaaggaa

SEQ ID NO: 2449029 - RNA, 19 nt, Artificial Sequence
  Description of Artificial Sequence: Synthetic oligonucleotide
  Antisense strand to SEQ ID NO: 2449028
uuccuucuaaggauuccag

SEQ ID NO: 2449030 - RNA, 19 nt, Artificial Sequence
  Description of Artificial Sequence: Synthetic oligonucleotide
  Sense strand starting at position 2022 of SEQ ID NO: 1887108
ugggaaggcuuauuaugac

SEQ ID NO: 2449031 - RNA, 19 nt, Artificial Sequence
  Description of Artificial Sequence: Synthetic oligonucleotide
  Antisense strand to SEQ ID NO: 2449030
gucauaauaagccuuccca

SEQ ID NO: 2449032 - RNA, 19 nt, Artificial Sequence
  Description of Artificial Sequence: Synthetic oligonucleotide
  Sense strand starting at position 2038 of SEQ ID NO: 1887108
gacagaagcuaguugaucu

SEQ ID NO: 2449033 - RNA, 19 nt, Artificial Sequence
  Description of Artificial Sequence: Synthetic oligonucleotide
  Antisense strand to SEQ ID NO: 2449032
agaucaacuagcuucuguc

SEQ ID NO: 2449034 - RNA, 19 nt, Artificial Sequence
  Description of Artificial Sequence: Synthetic oligonucleotide
  Sense strand starting at position 2138 of SEQ ID NO: 1887108
auuuguuuauugucagggu

SEQ ID NO: 2449035 - RNA, 19 nt, Artificial Sequence
  Description of Artificial Sequence: Synthetic oligonucleotide
  Antisense strand to SEQ ID NO: 2449034
acccugacaauaaacaaau

SEQ ID NO: 2449036 - RNA, 19 nt, Artificial Sequence
  Description of Artificial Sequence: Synthetic oligonucleotide
  Sense strand starting at position 2182 of SEQ ID NO: 1887108
gagaguagagccugucuuu

SEQ ID NO: 2449037 - RNA, 19 nt, Artificial Sequence
  Description of Artificial Sequence: Synthetic oligonucleotide
  Antisense strand to SEQ ID NO: 2449036
aaagacaggcucuacucuc

SEQ ID NO: 2449038 - RNA, 19 nt, Artificial Sequence
  Description of Artificial Sequence: Synthetic oligonucleotide
  Sense strand starting at position 2238 of SEQ ID NO: 1887108
gcacguauuaggcaucuaa

SEQ ID NO: 2449039 - RNA, 19 nt, Artificial Sequence
  Description of Artificial Sequence: Synthetic oligonucleotide
  Antisense strand to SEQ ID NO: 2449038
uuagaugccuaauacgugc

SEQ ID NO: 2449040 - RNA, 19 nt, Artificial Sequence
  Description of Artificial Sequence: Synthetic oligonucleotide
  Sense strand starting at position 2371 of SEQ ID NO: 1887108
agcuguuuccaucuguguu

SEQ ID NO: 2449041 - RNA, 19 nt, Artificial Sequence
  Description of Artificial Sequence: Synthetic oligonucleotide
  Antisense strand to SEQ ID NO: 2449040
aacacagauggaaacagcu

SEQ ID NO: 2449042 - RNA, 19 nt, Artificial Sequence
  Description of Artificial Sequence: Synthetic oligonucleotide
  Sense strand starting at position 2461 of SEQ ID NO: 1887108
agauuauugcucggcugaa

SEQ ID NO: 2449043 - RNA, 19 nt, Artificial Sequence
  Description of Artificial Sequence: Synthetic oligonucleotide
  Antisense strand to SEQ ID NO: 2449042
uucagccgagcaauaaucu

SEQ ID NO: 2449044 - RNA, 19 nt, Artificial Sequence
  Description of Artificial Sequence: Synthetic oligonucleotide
  Sense strand starting at position 2465 of SEQ ID NO: 1887108
uauugcucggcugaacaaa

SEQ ID NO: 2449045 - RNA, 19 nt, Artificial Sequence
  Description of Artificial Sequence: Synthetic oligonucleotide
  Antisense strand to SEQ ID NO: 2449044
uuuguucagccgagcaaua

SEQ ID NO: 2449046 - RNA, 19 nt, Artificial Sequence
  Description of Artificial Sequence: Synthetic oligonucleotide
  Sense strand starting at position 2582 of SEQ ID NO: 1887108
caggguuugagguagguca

SEQ ID NO: 2449047 - RNA, 19 nt, Artificial Sequence
  Description of Artificial Sequence: Synthetic oligonucleotide
  Antisense strand to SEQ ID NO: 2449046
ugaccuaccucaaacccug

SEQ ID NO: 2449048 - RNA, 19 nt, Artificial Sequence
  Description of Artificial Sequence: Synthetic oligonucleotide
  Sense strand starting at position 2589 of SEQ ID NO: 1887108
ugagguaggucagccuauu

SEQ ID NO: 2449049 - RNA, 19 nt, Artificial Sequence
  Description of Artificial Sequence: Synthetic oligonucleotide
  Antisense strand to SEQ ID NO: 2449048
aauaggcugaccuaccuca

SEQ ID NO: 2449050 - RNA, 19 nt, Artificial Sequence
  Description of Artificial Sequence: Synthetic oligonucleotide
  Sense strand starting at position 2702 of SEQ ID NO: 1887108
aauguugucaccugagggu

SEQ ID NO: 2449051 - RNA, 19 nt, Artificial Sequence
  Description of Artificial Sequence: Synthetic oligonucleotide
  Antisense strand to SEQ ID NO: 2449050
acccucaggugacaacauu

SEQ ID NO: 2449052 - RNA, 19 nt, Artificial Sequence
  Description of Artificial Sequence: Synthetic oligonucleotide
  Sense strand starting at position 2783 of SEQ ID NO: 1887108
gaacauuagcauuaaguug

SEQ ID NO: 2449053 - RNA, 19 nt, Artificial Sequence
  Description of Artificial Sequence: Synthetic oligonucleotide
  Antisense strand to SEQ ID NO: 2449052
caacuuaaugcuaauguuc

SEQ ID NO: 2449054 - RNA, 19 nt, Artificial Sequence
  Description of Artificial Sequence: Synthetic oligonucleotide
  Sense strand starting at position 2792 of SEQ ID NO: 1887108
cauuaaguugguuaccgua

SEQ ID NO: 2449055 - RNA, 19 nt, Artificial Sequence
  Description of Artificial Sequence: Synthetic oligonucleotide
  Antisense strand to SEQ ID NO: 2449054
uacgguaaccaacuuaaug

SEQ ID NO: 2449056 - RNA, 19 nt, Artificial Sequence
  Description of Artificial Sequence: Synthetic oligonucleotide
  Sense strand starting at position 2890 of SEQ ID NO: 1887108
augcuacauugagugguua

SEQ ID NO: 2449057 - RNA, 19 nt, Artificial Sequence
  Description of Artificial Sequence: Synthetic oligonucleotide
  Antisense strand to SEQ ID NO: 2449056
uaaccacucaauguagcau

SEQ ID NO: 2449058 - RNA, 19 nt, Artificial Sequence
  Description of Artificial Sequence: Synthetic oligonucleotide
  Sense strand starting at position 2891 of SEQ ID NO: 1887108
ugcuacauugagugguuaa

SEQ ID NO: 2449059 - RNA, 19 nt, Artificial Sequence
  Description of Artificial Sequence: Synthetic oligonucleotide
  Antisense strand to SEQ ID NO: 2449058
uuaaccacucaauguagca

SEQ ID NO: 2449060 - RNA, 19 nt, Artificial Sequence
  Description of Artificial Sequence: Synthetic oligonucleotide
  Sense strand starting at position 2892 of SEQ ID NO: 1887108
gcuacauugagugguuaaa

SEQ ID NO: 2449061 - RNA, 19 nt, Artificial Sequence
  Description of Artificial Sequence: Synthetic oligonucleotide
  Antisense strand to SEQ ID NO: 2449060
uuuaaccacucaauguagc

SEQ ID NO: 2449062 - RNA, 19 nt, Artificial Sequence
  Description of Artificial Sequence: Synthetic oligonucleotide
  Sense strand starting at position 3251 of SEQ ID NO: 1887108
acuucuuugcagcaugaca

SEQ ID NO: 2449063 - RNA, 19 nt, Artificial Sequence
  Description of Artificial Sequence: Synthetic oligonucleotide
  Antisense strand to SEQ ID NO: 2449062
ugucaugcugcaaagaagu

SEQ ID NO: 2449064 - RNA, 19 nt, Artificial Sequence
  Description of Artificial Sequence: Synthetic oligonucleotide
  Sense strand starting at position 3308 of SEQ ID NO: 1887108
gcgucuccgcagagaggua

SEQ ID NO: 2449065 - RNA, 19 nt, Artificial Sequence
  Description of Artificial Sequence: Synthetic oligonucleotide
  Antisense strand to SEQ ID NO: 2449064
uaccucucugcggagacgc

SEQ ID NO: 2449066 - RNA, 19 nt, Artificial Sequence
  Description of Artificial Sequence: Synthetic oligonucleotide
  Sense strand starting at position 3433 of SEQ ID NO: 1887108
gucaaacuccuuuggacaa

SEQ ID NO: 2449067 - RNA, 19 nt, Artificial Sequence
  Description of Artificial Sequence: Synthetic oligonucleotide
  Antisense strand to SEQ ID NO: 2449066
uuguccaaaggaguuugac

SEQ ID NO: 2449068 - RNA, 19 nt, Artificial Sequence
  Description of Artificial Sequence: Synthetic oligonucleotide
  Sense strand starting at position 3538 of SEQ ID NO: 1887108
aagugcaagugaucucagu

SEQ ID NO: 2449069 - RNA, 19 nt, Artificial Sequence
  Description of Artificial Sequence: Synthetic oligonucleotide
  Antisense strand to SEQ ID NO: 2449068
acugagaucacuugcacuu

SEQ ID NO: 2449070 - RNA, 19 nt, Artificial Sequence
  Description of Artificial Sequence: Synthetic oligonucleotide
  Sense strand starting at position 3544 of SEQ ID NO: 1887108
aagugaucucaguacuguu

SEQ ID NO: 2449071 - RNA, 19 nt, Artificial Sequence
  Description of Artificial Sequence: Synthetic oligonucleotide
  Antisense strand to SEQ ID NO: 2449070
aacaguacugagaucacuu

SEQ ID NO: 2449072 - RNA, 19 nt, Artificial Sequence
  Description of Artificial Sequence: Synthetic oligonucleotide
  Sense strand starting at position 3743 of SEQ ID NO: 1887108
aaggccauuccagguguaa

SEQ ID NO: 2449073 - RNA, 19 nt, Artificial Sequence
  Description of Artificial Sequence: Synthetic oligonucleotide
  Antisense strand to SEQ ID NO: 2449072
uuacaccuggaauggccuu

SEQ ID NO: 2449074 - RNA, 19 nt, Artificial Sequence
  Description of Artificial Sequence: Synthetic oligonucleotide
  Sense strand starting at position 3745 of SEQ ID NO: 1887108
ggccauuccagguguaaau

SEQ ID NO: 2449075 - RNA, 19 nt, Artificial Sequence
  Description of Artificial Sequence: Synthetic oligonucleotide
  Antisense strand to SEQ ID NO: 2449074
auuuacaccuggaauggcc

SEQ ID NO: 2449076 - RNA, 19 nt, Artificial Sequence
  Description of Artificial Sequence: Synthetic oligonucleotide
  Sense strand starting at position 3782 of SEQ ID NO: 1887108
ggguaauauuuacugucgu

SEQ ID NO: 2449077 - RNA, 19 nt, Artificial Sequence
  Description of Artificial Sequence: Synthetic oligonucleotide
  Antisense strand to SEQ ID NO: 2449076
acgacaguaaauauuaccc

SEQ ID NO: 2449078 - RNA, 19 nt, Artificial Sequence
  Description of Artificial Sequence: Synthetic oligonucleotide
  Sense strand starting at position 3816 of SEQ ID NO: 1887108
guugauuacugaccuguuu

SEQ ID NO: 2449079 - RNA, 19 nt, Artificial Sequence
  Description of Artificial Sequence: Synthetic oligonucleotide
  Antisense strand to SEQ ID NO: 2449078
aaacaggucaguaaucaac

SEQ ID NO: 2449080 - RNA, 19 nt, Artificial Sequence
  Description of Artificial Sequence: Synthetic oligonucleotide
  Sense strand starting at position 3824 of SEQ ID NO: 1887108
cugaccuguuuguugugaa

SEQ ID NO: 2449081 - RNA, 19 nt, Artificial Sequence
  Description of Artificial Sequence: Synthetic oligonucleotide
  Antisense strand to SEQ ID NO: 2449080
uucacaacaaacaggucag

SEQ ID NO: 2449082 - RNA, 19 nt, Artificial Sequence
  Description of Artificial Sequence: Synthetic oligonucleotide
  Sense strand starting at position 3977 of SEQ ID NO: 1887108
ggaggaagugccugaccua

SEQ ID NO: 2449083 - RNA, 19 nt, Artificial Sequence
  Description of Artificial Sequence: Synthetic oligonucleotide
  Antisense strand to SEQ ID NO: 2449082
uaggucaggcacuuccucc

SEQ ID NO: 2449084 - RNA, 19 nt, Artificial Sequence
  Description of Artificial Sequence: Synthetic oligonucleotide
  Sense strand starting at position 349 of SEQ ID NO: 1887109
gcaauuaaucauggcagag

SEQ ID NO: 2449085 - RNA, 19 nt, Artificial Sequence
  Description of Artificial Sequence: Synthetic oligonucleotide
  Antisense strand to SEQ ID NO: 2449084
cucugccaugauuaauugc

SEQ ID NO: 2449086 - RNA, 19 nt, Artificial Sequence
  Description of Artificial Sequence: Synthetic oligonucleotide
  Sense strand starting at position 351 of SEQ ID NO: 1887109
aauuaaucauggcagagga

SEQ ID NO: 2449087 - RNA, 19 nt, Artificial Sequence
  Description of Artificial Sequence: Synthetic oligonucleotide
  Antisense strand to SEQ ID NO: 2449086
uccucugccaugauuaauu

SEQ ID NO: 2449088 - RNA, 19 nt, Artificial Sequence
  Description of Artificial Sequence: Synthetic oligonucleotide
  Sense strand starting at position 419 of SEQ ID NO: 1887109
ugggcuaugggccacuaau

SEQ ID NO: 2449089 - RNA, 19 nt, Artificial Sequence
  Description of Artificial Sequence: Synthetic oligonucleotide
  Antisense strand to SEQ ID NO: 2449088
auuaguggcccauagccca

SEQ ID NO: 2449090 - RNA, 19 nt, Artificial Sequence
  Description of Artificial Sequence: Synthetic oligonucleotide
  Sense strand starting at position 494 of SEQ ID NO: 1887109
agcuacuuugggcaauaau

SEQ ID NO: 2449091 - RNA, 19 nt, Artificial Sequence
  Description of Artificial Sequence: Synthetic oligonucleotide
  Antisense strand to SEQ ID NO: 2449090
auuauugcccaaaguagcu

SEQ ID NO: 2449092 - RNA, 19 nt, Artificial Sequence
  Description of Artificial Sequence: Synthetic oligonucleotide
  Sense strand starting at position 526 of SEQ ID NO: 1887109
ggacaauuagcuugaugag

SEQ ID NO: 2449093 - RNA, 19 nt, Artificial Sequence
  Description of Artificial Sequence: Synthetic oligonucleotide
  Antisense strand to SEQ ID NO: 2449092
cucaucaagcuaauugucc

SEQ ID NO: 2449094 - RNA, 19 nt, Artificial Sequence
  Description of Artificial Sequence: Synthetic oligonucleotide
  Sense strand starting at position 527 of SEQ ID NO: 1887109
gacaauuagcuugaugagu

SEQ ID NO: 2449095 - RNA, 19 nt, Artificial Sequence
  Description of Artificial Sequence: Synthetic oligonucleotide
  Antisense strand to SEQ ID NO: 2449094
acucaucaagcuaauuguc

SEQ ID NO: 2449096 - RNA, 19 nt, Artificial Sequence
  Description of Artificial Sequence: Synthetic oligonucleotide
  Sense strand starting at position 583 of SEQ ID NO: 1887109
gucguuccucuagagagga

SEQ ID NO: 2449097 - RNA, 19 nt, Artificial Sequence
  Description of Artificial Sequence: Synthetic oligonucleotide
  Antisense strand to SEQ ID NO: 2449096
uccucucuagaggaacgac

SEQ ID NO: 2449098 - RNA, 19 nt, Artificial Sequence
  Description of Artificial Sequence: Synthetic oligonucleotide
  Sense strand starting at position 682 of SEQ ID NO: 1887109
caguccuuccuggagucua

SEQ ID NO: 2449099 - RNA, 19 nt, Artificial Sequence
  Description of Artificial Sequence: Synthetic oligonucleotide
  Antisense strand to SEQ ID NO: 2449098
uagacuccaggaaggacug

SEQ ID NO: 2449100 - RNA, 19 nt, Artificial Sequence
  Description of Artificial Sequence: Synthetic oligonucleotide
  Sense strand starting at position 687 of SEQ ID NO: 1887109
cuuccuggagucuaaucuu

SEQ ID NO: 2449101 - RNA, 19 nt, Artificial Sequence
  Description of Artificial Sequence: Synthetic oligonucleotide
  Antisense strand to SEQ ID NO: 2449100
aagauuagacuccaggaag

SEQ ID NO: 2449102 - RNA, 19 nt, Artificial Sequence
  Description of Artificial Sequence: Synthetic oligonucleotide
  Sense strand starting at position 690 of SEQ ID NO: 1887109
ccuggagucuaaucuuaau

SEQ ID NO: 2449103 - RNA, 19 nt, Artificial Sequence
  Description of Artificial Sequence: Synthetic oligonucleotide
  Antisense strand to SEQ ID NO: 2449102
auuaagauuagacuccagg

SEQ ID NO: 2449104 - RNA, 19 nt, Artificial Sequence
  Description of Artificial Sequence: Synthetic oligonucleotide
  Sense strand starting at position 1135 of SEQ ID NO: 1887109
caguaaauguuccuggaau

SEQ ID NO: 2449105 - RNA, 19 nt, Artificial Sequence
  Description of Artificial Sequence: Synthetic oligonucleotide
  Antisense strand to SEQ ID NO: 2449104
auuccaggaacauuuacug

SEQ ID NO: 2449106 - RNA, 19 nt, Artificial Sequence
  Description of Artificial Sequence: Synthetic oligonucleotide
  Sense strand starting at position 1137 of SEQ ID NO: 1887109
guaaauguuccuggaauga

SEQ ID NO: 2449107 - RNA, 19 nt, Artificial Sequence
  Description of Artificial Sequence: Synthetic oligonucleotide
  Antisense strand to SEQ ID NO: 2449106
ucauuccaggaacauuuac

SEQ ID NO: 2449108 - RNA, 19 nt, Artificial Sequence
  Description of Artificial Sequence: Synthetic oligonucleotide
  Sense strand starting at position 1222 of SEQ ID NO: 1887109
acaugugggcagugacaua

SEQ ID NO: 2449109 - RNA, 19 nt, Artificial Sequence
  Description of Artificial Sequence: Synthetic oligonucleotide
  Antisense strand to SEQ ID NO: 2449108
uaugucacugcccacaugu

SEQ ID NO: 2449110 - RNA, 19 nt, Artificial Sequence
  Description of Artificial Sequence: Synthetic oligonucleotide
  Sense strand starting at position 1347 of SEQ ID NO: 1887109
acuauugaaugagugguua

SEQ ID NO: 2449111 - RNA, 19 nt, Artificial Sequence
  Description of Artificial Sequence: Synthetic oligonucleotide
  Antisense strand to SEQ ID NO: 2449110
uaaccacucauucaauagu

SEQ ID NO: 2449112 - RNA, 19 nt, Artificial Sequence
  Description of Artificial Sequence: Synthetic oligonucleotide
  Sense strand starting at position 1351 of SEQ ID NO: 1887109
uugaaugagugguuacaaa

SEQ ID NO: 2449113 - RNA, 19 nt, Artificial Sequence
  Description of Artificial Sequence: Synthetic oligonucleotide
  Antisense strand to SEQ ID NO: 2449112
uuuguaaccacucauucaa

SEQ ID NO: 2449114 - RNA, 19 nt, Artificial Sequence
  Description of Artificial Sequence: Synthetic oligonucleotide
  Sense strand starting at position 1361 of SEQ ID NO: 1887109
gguuacaaaugaucagcua

SEQ ID NO: 2449115 - RNA, 19 nt, Artificial Sequence
  Description of Artificial Sequence: Synthetic oligonucleotide
  Antisense strand to SEQ ID NO: 2449114
uagcugaucauuuguaacc

SEQ ID NO: 2449116 - RNA, 19 nt, Artificial Sequence
  Description of Artificial Sequence: Synthetic oligonucleotide
  Sense strand starting at position 1362 of SEQ ID NO: 1887109
guuacaaaugaucagcuaa

SEQ ID NO: 2449117 - RNA, 19 nt, Artificial Sequence
  Description of Artificial Sequence: Synthetic oligonucleotide
  Antisense strand to SEQ ID NO: 2449116
uuagcugaucauuuguaac

SEQ ID NO: 2449118 - RNA, 19 nt, Artificial Sequence
  Description of Artificial Sequence: Synthetic oligonucleotide
  Sense strand starting at position 1382 of SEQ ID NO: 1887109
cuacauuccugaggaaagg

SEQ ID NO: 2449119 - RNA, 19 nt, Artificial Sequence
  Description of Artificial Sequence: Synthetic oligonucleotide
  Antisense strand to SEQ ID NO: 2449118
ccuuuccucaggaauguag

SEQ ID NO: 2449120 - RNA, 19 nt, Artificial Sequence
  Description of Artificial Sequence: Synthetic oligonucleotide
  Sense strand starting at position 1426 of SEQ ID NO: 1887109
aaguaagcuguagaauaug

SEQ ID NO: 2449121 - RNA, 19 nt, Artificial Sequence
  Description of Artificial Sequence: Synthetic oligonucleotide
  Antisense strand to SEQ ID NO: 2449120
cauauucuacagcuuacuu

SEQ ID NO: 2449122 - RNA, 19 nt, Artificial Sequence
  Description of Artificial Sequence: Synthetic oligonucleotide
  Sense strand starting at position 1432 of SEQ ID NO: 1887109
gcuguagaauauguacaau

SEQ ID NO: 2449123 - RNA, 19 nt, Artificial Sequence
  Description of Artificial Sequence: Synthetic oligonucleotide
  Antisense strand to SEQ ID NO: 2449122
auuguacauauucuacagc

SEQ ID NO: 2449124 - RNA, 19 nt, Artificial Sequence
  Description of Artificial Sequence: Synthetic oligonucleotide
  Sense strand starting at position 1443 of SEQ ID NO: 1887109
uguacaaugugaucucacu

SEQ ID NO: 2449125 - RNA, 19 nt, Artificial Sequence
  Description of Artificial Sequence: Synthetic oligonucleotide
  Antisense strand to SEQ ID NO: 2449124
agugagaucacauuguaca

SEQ ID NO: 2449126 - RNA, 19 nt, Artificial Sequence
  Description of Artificial Sequence: Synthetic oligonucleotide
  Sense strand starting at position 1630 of SEQ ID NO: 1887109
gaaagauauuggucuuguu

SEQ ID NO: 2449127 - RNA, 19 nt, Artificial Sequence
  Description of Artificial Sequence: Synthetic oligonucleotide
  Antisense strand to SEQ ID NO: 2449126
aacaagaccaauaucuuuc

SEQ ID NO: 2449128 - RNA, 19 nt, Artificial Sequence
  Description of Artificial Sequence: Synthetic oligonucleotide
  Sense strand starting at position 1657 of SEQ ID NO: 1887109
ccuaaacacggauguguua

SEQ ID NO: 2449129 - RNA, 19 nt, Artificial Sequence
  Description of Artificial Sequence: Synthetic oligonucleotide
  Antisense strand to SEQ ID NO: 2449128
uaacacauccguguuuagg

SEQ ID NO: 2449130 - RNA, 19 nt, Artificial Sequence
  Description of Artificial Sequence: Synthetic oligonucleotide
  Sense strand starting at position 1664 of SEQ ID NO: 1887109
acggauguguuacuuugau

SEQ ID NO: 2449131 - RNA, 19 nt, Artificial Sequence
  Description of Artificial Sequence: Synthetic oligonucleotide
  Antisense strand to SEQ ID NO: 2449130
aucaaaguaacacauccgu

SEQ ID NO: 2449132 - RNA, 19 nt, Artificial Sequence
  Description of Artificial Sequence: Synthetic oligonucleotide
  Sense strand starting at position 1786 of SEQ ID NO: 1887109
cagcauucccagugugaca

SEQ ID NO: 2449133 - RNA, 19 nt, Artificial Sequence
  Description of Artificial Sequence: Synthetic oligonucleotide
  Antisense strand to SEQ ID NO: 2449132
ugucacacugggaaugcug

SEQ ID NO: 2449134 - RNA, 19 nt, Artificial Sequence
  Description of Artificial Sequence: Synthetic oligonucleotide
  Sense strand starting at position 2019 of SEQ ID NO: 1887109
gcagaugaugagugaggau

SEQ ID NO: 2449135 - RNA, 19 nt, Artificial Sequence
  Description of Artificial Sequence: Synthetic oligonucleotide
  Antisense strand to SEQ ID NO: 2449134
auccucacucaucaucugc

SEQ ID NO: 2449136 - RNA, 19 nt, Artificial Sequence
  Description of Artificial Sequence: Synthetic oligonucleotide
  Sense strand starting at position 2091 of SEQ ID NO: 1887109
acagcaaagucuuccuuga

SEQ ID NO: 2449137 - RNA, 19 nt, Artificial Sequence
  Description of Artificial Sequence: Synthetic oligonucleotide
  Antisense strand to SEQ ID NO: 2449136
ucaaggaagacuuugcugu

SEQ ID NO: 2449138 - RNA, 19 nt, Artificial Sequence
  Description of Artificial Sequence: Synthetic oligonucleotide
  Sense strand starting at position 2101 of SEQ ID NO: 1887109
cuuccuugagggcaaacau

SEQ ID NO: 2449139 - RNA, 19 nt, Artificial Sequence
  Description of Artificial Sequence: Synthetic oligonucleotide
  Antisense strand to SEQ ID NO: 2449138
auguuugcccucaaggaag

SEQ ID NO: 2449140 - RNA, 19 nt, Artificial Sequence
  Description of Artificial Sequence: Synthetic oligonucleotide
  Sense strand starting at position 2513 of SEQ ID NO: 1887109
ucuugugcccagcuguuau

SEQ ID NO: 2449141 - RNA, 19 nt, Artificial Sequence
  Description of Artificial Sequence: Synthetic oligonucleotide
  Antisense strand to SEQ ID NO: 2449140
auaacagcugggcacaaga

SEQ ID NO: 2449142 - RNA, 19 nt, Artificial Sequence
  Description of Artificial Sequence: Synthetic oligonucleotide
  Sense strand starting at position 2540 of SEQ ID NO: 1887109
gggauugcgugcaugaugu

SEQ ID NO: 2449143 - RNA, 19 nt, Artificial Sequence
  Description of Artificial Sequence: Synthetic oligonucleotide
  Antisense strand to SEQ ID NO: 2449142
acaucaugcacgcaauccc

SEQ ID NO: 2449144 - RNA, 19 nt, Artificial Sequence
  Description of Artificial Sequence: Synthetic oligonucleotide
  Sense strand starting at position 2550 of SEQ ID NO: 1887109
gcaugaugucaugaugcua

SEQ ID NO: 2449145 - RNA, 19 nt, Artificial Sequence
  Description of Artificial Sequence: Synthetic oligonucleotide
  Antisense strand to SEQ ID NO: 2449144
uagcaucaugacaucaugc

SEQ ID NO: 2449146 - RNA, 19 nt, Artificial Sequence
  Description of Artificial Sequence: Synthetic oligonucleotide
  Sense strand starting at position 2731 of SEQ ID NO: 1887109
ggcuaugguccuggaauuc

SEQ ID NO: 2449147 - RNA, 19 nt, Artificial Sequence
  Description of Artificial Sequence: Synthetic oligonucleotide
  Antisense strand to SEQ ID NO: 2449146
gaauuccaggaccauagcc

SEQ ID NO: 2449148 - RNA, 19 nt, Artificial Sequence
  Description of Artificial Sequence: Synthetic oligonucleotide
  Sense strand starting at position 2831 of SEQ ID NO: 1887109
ggagucacucugggaaaug

SEQ ID NO: 2449149 - RNA, 19 nt, Artificial Sequence
  Description of Artificial Sequence: Synthetic oligonucleotide
  Antisense strand to SEQ ID NO: 2449148
cauuucccagagugacucc

SEQ ID NO: 2449150 - RNA, 19 nt, Artificial Sequence
  Description of Artificial Sequence: Synthetic oligonucleotide
  Sense strand starting at position 2860 of SEQ ID NO: 1887109
cccagcuuguccuugauga

SEQ ID NO: 2449151 - RNA, 19 nt, Artificial Sequence
  Description of Artificial Sequence: Synthetic oligonucleotide
  Antisense strand to SEQ ID NO: 2449150
ucaucaaggacaagcuggg

SEQ ID NO: 2449152 - RNA, 19 nt, Artificial Sequence
  Description of Artificial Sequence: Synthetic oligonucleotide
  Sense strand starting at position 2861 of SEQ ID NO: 1887109
ccagcuuguccuugaugac

SEQ ID NO: 2449153 - RNA, 19 nt, Artificial Sequence
  Description of Artificial Sequence: Synthetic oligonucleotide
  Antisense strand to SEQ ID NO: 2449152
gucaucaaggacaagcugg

SEQ ID NO: 2449154 - RNA, 19 nt, Artificial Sequence
  Description of Artificial Sequence: Synthetic oligonucleotide
  Sense strand starting at position 3392 of SEQ ID NO: 1887109
gggauacuugucugggcaa

SEQ ID NO: 2449155 - RNA, 19 nt, Artificial Sequence
  Description of Artificial Sequence: Synthetic oligonucleotide
  Antisense strand to SEQ ID NO: 2449154
uugcccagacaaguauccc

SEQ ID NO: 2449156 - RNA, 19 nt, Artificial Sequence
  Description of Artificial Sequence: Synthetic oligonucleotide
  Sense strand starting at position 3394 of SEQ ID NO: 1887109
gauacuugucugggcaaug

SEQ ID NO: 2449157 - RNA, 19 nt, Artificial Sequence
  Description of Artificial Sequence: Synthetic oligonucleotide
  Antisense strand to SEQ ID NO: 2449156
cauugcccagacaaguauc

SEQ ID NO: 2449158 - RNA, 19 nt, Artificial Sequence
  Description of Artificial Sequence: Synthetic oligonucleotide
  Sense strand starting at position 3395 of SEQ ID NO: 1887109
auacuugucugggcaaugu

SEQ ID NO: 2449159 - RNA, 19 nt, Artificial Sequence
  Description of Artificial Sequence: Synthetic oligonucleotide
  Antisense strand to SEQ ID NO: 2449158
acauugcccagacaaguau

SEQ ID NO: 2449160 - RNA, 19 nt, Artificial Sequence
  Description of Artificial Sequence: Synthetic oligonucleotide
  Sense strand starting at position 3921 of SEQ ID NO: 1887109
ccgggugcccaaugaauga

SEQ ID NO: 2449161 - RNA, 19 nt, Artificial Sequence
  Description of Artificial Sequence: Synthetic oligonucleotide
  Antisense strand to SEQ ID NO: 2449160
ucauucauugggcacccgg

SEQ ID NO: 2449162 - RNA, 19 nt, Artificial Sequence
  Description of Artificial Sequence: Synthetic oligonucleotide
  Sense strand starting at position 3948 of SEQ ID NO: 1887109
ccgagaucagagcauggua

SEQ ID NO: 2449163 - RNA, 19 nt, Artificial Sequence
  Description of Artificial Sequence: Synthetic oligonucleotide
  Antisense strand to SEQ ID NO: 2449162
uaccaugcucugaucucgg

SEQ ID NO: 2449164 - RNA, 19 nt, Artificial Sequence
  Description of Artificial Sequence: Synthetic oligonucleotide
  Sense strand starting at position 360 of SEQ ID NO: 1887110
ugaugacacugccuauaau

SEQ ID NO: 2449165 - RNA, 19 nt, Artificial Sequence
  Description of Artificial Sequence: Synthetic oligonucleotide
  Antisense strand to SEQ ID NO: 2449164
auuauaggcagugucauca

SEQ ID NO: 2449166 - RNA, 19 nt, Artificial Sequence
  Description of Artificial Sequence: Synthetic oligonucleotide
  Sense strand starting at position 472 of SEQ ID NO: 1887110
ggacuacacuugccauguu

SEQ ID NO: 2449167 - RNA, 19 nt, Artificial Sequence
  Description of Artificial Sequence: Synthetic oligonucleotide
  Antisense strand to SEQ ID NO: 2449166
aacauggcaaguguagucc

SEQ ID NO: 2449168 - RNA, 19 nt, Artificial Sequence
  Description of Artificial Sequence: Synthetic oligonucleotide
  Sense strand starting at position 574 of SEQ ID NO: 1887110
ucaaauuccuguguuuaac

SEQ ID NO: 2449169 - RNA, 19 nt, Artificial Sequence
  Description of Artificial Sequence: Synthetic oligonucleotide
  Antisense strand to SEQ ID NO: 2449168
guuaaacacaggaauuuga

SEQ ID NO: 2449170 - RNA, 19 nt, Artificial Sequence
  Description of Artificial Sequence: Synthetic oligonucleotide
  Sense strand starting at position 582 of SEQ ID NO: 1887110
cuguguuuaacagagaugu

SEQ ID NO: 2449171 - RNA, 19 nt, Artificial Sequence
  Description of Artificial Sequence: Synthetic oligonucleotide
  Antisense strand to SEQ ID NO: 2449170
acaucucuguuaaacacag

SEQ ID NO: 2449172 - RNA, 19 nt, Artificial Sequence
  Description of Artificial Sequence: Synthetic oligonucleotide
  Sense strand starting at position 590 of SEQ ID NO: 1887110
aacagagaugucggugaaa

SEQ ID NO: 2449173 - RNA, 19 nt, Artificial Sequence
  Description of Artificial Sequence: Synthetic oligonucleotide
  Antisense strand to SEQ ID NO: 2449172
uuucaccgacaucucuguu

SEQ ID NO: 2449174 - RNA, 19 nt, Artificial Sequence
  Description of Artificial Sequence: Synthetic oligonucleotide
  Sense strand starting at position 592 of SEQ ID NO: 1887110
cagagaugucggugaaacu

SEQ ID NO: 2449175 - RNA, 19 nt, Artificial Sequence
  Description of Artificial Sequence: Synthetic oligonucleotide
  Antisense strand to SEQ ID NO: 2449174
aguuucaccgacaucucug

SEQ ID NO: 2449176 - RNA, 19 nt, Artificial Sequence
  Description of Artificial Sequence: Synthetic oligonucleotide
  Sense strand starting at position 593 of SEQ ID NO: 1887110
agagaugucggugaaacuu

SEQ ID NO: 2449177 - RNA, 19 nt, Artificial Sequence
  Description of Artificial Sequence: Synthetic oligonucleotide
  Antisense strand to SEQ ID NO: 2449176
aaguuucaccgacaucucu

SEQ ID NO: 2449178 - RNA, 19 nt, Artificial Sequence
  Description of Artificial Sequence: Synthetic oligonucleotide
  Sense strand starting at position 677 of SEQ ID NO: 1887110
cccuaagguucugucaaga

SEQ ID NO: 2449179 - RNA, 19 nt, Artificial Sequence
  Description of Artificial Sequence: Synthetic oligonucleotide
  Antisense strand to SEQ ID NO: 2449178
ucuugacagaaccuuaggg

SEQ ID NO: 2449180 - RNA, 19 nt, Artificial Sequence
  Description of Artificial Sequence: Synthetic oligonucleotide
  Sense strand starting at position 682 of SEQ ID NO: 1887110
agguucugucaagacaauu

SEQ ID NO: 2449181 - RNA, 19 nt, Artificial Sequence
  Description of Artificial Sequence: Synthetic oligonucleotide
  Antisense strand to SEQ ID NO: 2449180
aauugucuugacagaaccu

SEQ ID NO: 2449182 - RNA, 19 nt, Artificial Sequence
  Description of Artificial Sequence: Synthetic oligonucleotide
  Sense strand starting at position 765 of SEQ ID NO: 1887110
agaguaacuauauggugaa

SEQ ID NO: 2449183 - RNA, 19 nt, Artificial Sequence
  Description of Artificial Sequence: Synthetic oligonucleotide
  Antisense strand to SEQ ID NO: 2449182
uucaccauauaguuacucu

SEQ ID NO: 2449184 - RNA, 19 nt, Artificial Sequence
  Description of Artificial Sequence: Synthetic oligonucleotide
  Sense strand starting at position 789 of SEQ ID NO: 1887110
aucacauaauuucgaauga

SEQ ID NO: 2449185 - RNA, 19 nt, Artificial Sequence
  Description of Artificial Sequence: Synthetic oligonucleotide
  Antisense strand to SEQ ID NO: 2449184
ucauucgaaauuaugugau

SEQ ID NO: 2449186 - RNA, 19 nt, Artificial Sequence
  Description of Artificial Sequence: Synthetic oligonucleotide
  Sense strand starting at position 790 of SEQ ID NO: 1887110
ucacauaauuucgaaugaa

SEQ ID NO: 2449187 - RNA, 19 nt, Artificial Sequence
  Description of Artificial Sequence: Synthetic oligonucleotide
  Antisense strand to SEQ ID NO: 2449186
uucauucgaaauuauguga

SEQ ID NO: 2449188 - RNA, 19 nt, Artificial Sequence
  Description of Artificial Sequence: Synthetic oligonucleotide
  Sense strand starting at position 812 of SEQ ID NO: 1887110
uccauaaaguuguuuccaa

SEQ ID NO: 2449189 - RNA, 19 nt, Artificial Sequence
  Description of Artificial Sequence: Synthetic oligonucleotide
  Antisense strand to SEQ ID NO: 2449188
uuggaaacaacuuuaugga

SEQ ID NO: 2449190 - RNA, 19 nt, Artificial Sequence
  Description of Artificial Sequence: Synthetic oligonucleotide
  Sense strand starting at position 813 of SEQ ID NO: 1887110
ccauaaaguuguuuccaau

SEQ ID NO: 2449191 - RNA, 19 nt, Artificial Sequence
  Description of Artificial Sequence: Synthetic oligonucleotide
  Antisense strand to SEQ ID NO: 2449190
auuggaaacaacuuuaugg

SEQ ID NO: 2449192 - RNA, 19 nt, Artificial Sequence
  Description of Artificial Sequence: Synthetic oligonucleotide
  Sense strand starting at position 823 of SEQ ID NO: 1887110
guuuccaauuccguaugaa

SEQ ID NO: 2449193 - RNA, 19 nt, Artificial Sequence
  Description of Artificial Sequence: Synthetic oligonucleotide
  Antisense strand to SEQ ID NO: 2449192
uucauacggaauuggaaac

SEQ ID NO: 2449194 - RNA, 19 nt, Artificial Sequence
  Description of Artificial Sequence: Synthetic oligonucleotide
  Sense strand starting at position 824 of SEQ ID NO: 1887110
uuuccaauuccguaugaau

SEQ ID NO: 2449195 - RNA, 19 nt, Artificial Sequence
  Description of Artificial Sequence: Synthetic oligonucleotide
  Antisense strand to SEQ ID NO: 2449194
auucauacggaauuggaaa

SEQ ID NO: 2449196 - RNA, 19 nt, Artificial Sequence
  Description of Artificial Sequence: Synthetic oligonucleotide
  Sense strand starting at position 835 of SEQ ID NO: 1887110
guaugaauuuauguugcca

SEQ ID NO: 2449197 - RNA, 19 nt, Artificial Sequence
  Description of Artificial Sequence: Synthetic oligonucleotide
  Antisense strand to SEQ ID NO: 2449196
uggcaacauaaauucauac

SEQ ID NO: 2449198 - RNA, 19 nt, Artificial Sequence
  Description of Artificial Sequence: Synthetic oligonucleotide
  Sense strand starting at position 839 of SEQ ID NO: 1887110
gaauuuauguugccaagca

SEQ ID NO: 2449199 - RNA, 19 nt, Artificial Sequence
  Description of Artificial Sequence: Synthetic oligonucleotide
  Antisense strand to SEQ ID NO: 2449198
ugcuuggcaacauaaauuc

SEQ ID NO: 2449200 - RNA, 19 nt, Artificial Sequence
  Description of Artificial Sequence: Synthetic oligonucleotide
  Sense strand starting at position 1168 of SEQ ID NO: 1887110
gaaacuccgcccugugaga

SEQ ID NO: 2449201 - RNA, 19 nt, Artificial Sequence
  Description of Artificial Sequence: Synthetic oligonucleotide
  Antisense strand to SEQ ID NO: 2449200
ucucacagggcggaguuuc

SEQ ID NO: 2449202 - RNA, 19 nt, Artificial Sequence
  Description of Artificial Sequence: Synthetic oligonucleotide
  Sense strand starting at position 1182 of SEQ ID NO: 1887110
ugagaacgcuuccugaaga

SEQ ID NO: 2449203 - RNA, 19 nt, Artificial Sequence
  Description of Artificial Sequence: Synthetic oligonucleotide
  Antisense strand to SEQ ID NO: 2449202
ucuucaggaagcguucuca

SEQ ID NO: 2449204 - RNA, 19 nt, Artificial Sequence
  Description of Artificial Sequence: Synthetic oligonucleotide
  Sense strand starting at position 1187 of SEQ ID NO: 1887110
acgcuuccugaagauuaag

SEQ ID NO: 2449205 - RNA, 19 nt, Artificial Sequence
  Description of Artificial Sequence: Synthetic oligonucleotide
  Antisense strand to SEQ ID NO: 2449204
cuuaaucuucaggaagcgu

SEQ ID NO: 2449206 - RNA, 19 nt, Artificial Sequence
  Description of Artificial Sequence: Synthetic oligonucleotide
  Sense strand starting at position 1288 of SEQ ID NO: 1887110
ugacuaacuugguucuuua

SEQ ID NO: 2449207 - RNA, 19 nt, Artificial Sequence
  Description of Artificial Sequence: Synthetic oligonucleotide
  Antisense strand to SEQ ID NO: 2449206
uaaagaaccaaguuaguca

SEQ ID NO: 2449208 - RNA, 19 nt, Artificial Sequence
  Description of Artificial Sequence: Synthetic oligonucleotide
  Sense strand starting at position 1419 of SEQ ID NO: 1887110
ccuaucgcacucgaagaaa

SEQ ID NO: 2449209 - RNA, 19 nt, Artificial Sequence
  Description of Artificial Sequence: Synthetic oligonucleotide
  Antisense strand to SEQ ID NO: 2449208
uuucuucgagugcgauagg

SEQ ID NO: 2449210 - RNA, 19 nt, Artificial Sequence
  Description of Artificial Sequence: Synthetic oligonucleotide
  Sense strand starting at position 1443 of SEQ ID NO: 1887110
cuuguugaaucgucaccaa

SEQ ID NO: 2449211 - RNA, 19 nt, Artificial Sequence
  Description of Artificial Sequence: Synthetic oligonucleotide
  Antisense strand to SEQ ID NO: 2449210
uuggugacgauucaacaag

SEQ ID NO: 2449212 - RNA, 19 nt, Artificial Sequence
  Description of Artificial Sequence: Synthetic oligonucleotide
  Sense strand starting at position 2127 of SEQ ID NO: 1887110
ggagcacuuuggguuucau

SEQ ID NO: 2449213 - RNA, 19 nt, Artificial Sequence
  Description of Artificial Sequence: Synthetic oligonucleotide
  Antisense strand to SEQ ID NO: 2449212
augaaacccaaagugcucc

SEQ ID NO: 2449214 - RNA, 19 nt, Artificial Sequence
  Description of Artificial Sequence: Synthetic oligonucleotide
  Sense strand starting at position 2137 of SEQ ID NO: 1887110
ggguuucauuuguaaagga

SEQ ID NO: 2449215 - RNA, 19 nt, Artificial Sequence
  Description of Artificial Sequence: Synthetic oligonucleotide
  Antisense strand to SEQ ID NO: 2449214
uccuuuacaaaugaaaccc

SEQ ID NO: 2449216 - RNA, 19 nt, Artificial Sequence
  Description of Artificial Sequence: Synthetic oligonucleotide
  Sense strand starting at position 2473 of SEQ ID NO: 1887110
guggucguuggguugucaa

SEQ ID NO: 2449217 - RNA, 19 nt, Artificial Sequence
  Description of Artificial Sequence: Synthetic oligonucleotide
  Antisense strand to SEQ ID NO: 2449216
uugacaacccaacgaccac

SEQ ID NO: 2449218 - RNA, 19 nt, Artificial Sequence
  Description of Artificial Sequence: Synthetic oligonucleotide
  Sense strand starting at position 2475 of SEQ ID NO: 1887110
ggucguuggguugucaagu

SEQ ID NO: 2449219 - RNA, 19 nt, Artificial Sequence
  Description of Artificial Sequence: Synthetic oligonucleotide
  Antisense strand to SEQ ID NO: 2449218
acuugacaacccaacgacc

SEQ ID NO: 2449220 - RNA, 19 nt, Artificial Sequence
  Description of Artificial Sequence: Synthetic oligonucleotide
  Sense strand starting at position 2481 of SEQ ID NO: 1887110
uggguugucaaguaaaguu

SEQ ID NO: 2449221 - RNA, 19 nt, Artificial Sequence
  Description of Artificial Sequence: Synthetic oligonucleotide
  Antisense strand to SEQ ID NO: 2449220
aacuuuacuugacaaccca

SEQ ID NO: 2449222 - RNA, 19 nt, Artificial Sequence
  Description of Artificial Sequence: Synthetic oligonucleotide
  Sense strand starting at position 2816 of SEQ ID NO: 1887110
agguuucuugaggagucaa

SEQ ID NO: 2449223 - RNA, 19 nt, Artificial Sequence
  Description of Artificial Sequence: Synthetic oligonucleotide
  Antisense strand to SEQ ID NO: 2449222
uugacuccucaagaaaccu

SEQ ID NO: 2449224 - RNA, 19 nt, Artificial Sequence
  Description of Artificial Sequence: Synthetic oligonucleotide
  Sense strand starting at position 2858 of SEQ ID NO: 1887110
aggguaucuccguaaggga

SEQ ID NO: 2449225 - RNA, 19 nt, Artificial Sequence
  Description of Artificial Sequence: Synthetic oligonucleotide
  Antisense strand to SEQ ID NO: 2449224
ucccuuacggagauacccu

SEQ ID NO: 2449226 - RNA, 19 nt, Artificial Sequence
  Description of Artificial Sequence: Synthetic oligonucleotide
  Sense strand starting at position 2875 of SEQ ID NO: 1887110
gagcaaagaguuuaagucu

SEQ ID NO: 2449227 - RNA, 19 nt, Artificial Sequence
  Description of Artificial Sequence: Synthetic oligonucleotide
  Antisense strand to SEQ ID NO: 2449226
agacuuaaacucuuugcuc

SEQ ID NO: 2449228 - RNA, 19 nt, Artificial Sequence
  Description of Artificial Sequence: Synthetic oligonucleotide
  Sense strand starting at position 3259 of SEQ ID NO: 1887110
gaaggugcuggucacaaga

SEQ ID NO: 2449229 - RNA, 19 nt, Artificial Sequence
  Description of Artificial Sequence: Synthetic oligonucleotide
  Antisense strand to SEQ ID NO: 2449228
ucuugugaccagcaccuuc

SEQ ID NO: 2449230 - RNA, 19 nt, Artificial Sequence
  Description of Artificial Sequence: Synthetic oligonucleotide
  Sense strand starting at position 3274 of SEQ ID NO: 1887110
aagagauaauccuagggag

SEQ ID NO: 2449231 - RNA, 19 nt, Artificial Sequence
  Description of Artificial Sequence: Synthetic oligonucleotide
  Antisense strand to SEQ ID NO: 2449230
cucccuaggauuaucucuu

SEQ ID NO: 2449232 - RNA, 19 nt, Artificial Sequence
  Description of Artificial Sequence: Synthetic oligonucleotide
  Sense strand starting at position 3311 of SEQ ID NO: 1887110
uggcgaacccuagaagcau

SEQ ID NO: 2449233 - RNA, 19 nt, Artificial Sequence
  Description of Artificial Sequence: Synthetic oligonucleotide
  Antisense strand to SEQ ID NO: 2449232
augcuucuaggguucgcca

SEQ ID NO: 2449234 - RNA, 19 nt, Artificial Sequence
  Description of Artificial Sequence: Synthetic oligonucleotide
  Sense strand starting at position 3320 of SEQ ID NO: 1887110
cuagaagcauucucagaag

SEQ ID NO: 2449235 - RNA, 19 nt, Artificial Sequence
  Description of Artificial Sequence: Synthetic oligonucleotide
  Antisense strand to SEQ ID NO: 2449234
cuucugagaaugcuucuag

SEQ ID NO: 2449236 - RNA, 19 nt, Artificial Sequence
  Description of Artificial Sequence: Synthetic oligonucleotide
  Sense strand starting at position 3348 of SEQ ID NO: 1887110
agcugaagucucugagaag

SEQ ID NO: 2449237 - RNA, 19 nt, Artificial Sequence
  Description of Artificial Sequence: Synthetic oligonucleotide
  Antisense strand to SEQ ID NO: 2449236
cuucucagagacuucagcu

SEQ ID NO: 2449238 - RNA, 19 nt, Artificial Sequence
  Description of Artificial Sequence: Synthetic oligonucleotide
  Sense strand starting at position 3402 of SEQ ID NO: 1887110
gcaagugagaggugguuaa

SEQ ID NO: 2449239 - RNA, 19 nt, Artificial Sequence
  Description of Artificial Sequence: Synthetic oligonucleotide
  Antisense strand to SEQ ID NO: 2449238
uuaaccaccucucacuugc

SEQ ID NO: 2449240 - RNA, 19 nt, Artificial Sequence
  Description of Artificial Sequence: Synthetic oligonucleotide
  Sense strand starting at position 3669 of SEQ ID NO: 1887110
auugucaacuuguuaauag

SEQ ID NO: 2449241 - RNA, 19 nt, Artificial Sequence
  Description of Artificial Sequence: Synthetic oligonucleotide
  Antisense strand to SEQ ID NO: 2449240
cuauuaacaaguugacaau

SEQ ID NO: 2449242 - RNA, 19 nt, Artificial Sequence
  Description of Artificial Sequence: Synthetic oligonucleotide
  Sense strand starting at position 3744 of SEQ ID NO: 1887110
auguguggagcugaauuaa

SEQ ID NO: 2449243 - RNA, 19 nt, Artificial Sequence
  Description of Artificial Sequence: Synthetic oligonucleotide
  Antisense strand to SEQ ID NO: 2449242
uuaauucagcuccacacau

SEQ ID NO: 2449244 - RNA, 19 nt, Artificial Sequence
  Description of Artificial Sequence: Synthetic oligonucleotide
  Sense strand starting at position 102 of SEQ ID NO: 1887111
uuuaaauggcauugguaga

SEQ ID NO: 2449245 - RNA, 19 nt, Artificial Sequence
  Description of Artificial Sequence: Synthetic oligonucleotide
  Antisense strand to SEQ ID NO: 2449244
ucuaccaaugccauuuaaa

SEQ ID NO: 2449246 - RNA, 19 nt, Artificial Sequence
  Description of Artificial Sequence: Synthetic oligonucleotide
  Sense strand starting at position 103 of SEQ ID NO: 1887111
uuaaauggcauugguagau

SEQ ID NO: 2449247 - RNA, 19 nt, Artificial Sequence
  Description of Artificial Sequence: Synthetic oligonucleotide
  Antisense strand to SEQ ID NO: 2449246
aucuaccaaugccauuuaa

SEQ ID NO: 2449248 - RNA, 19 nt, Artificial Sequence
  Description of Artificial Sequence: Synthetic oligonucleotide
  Sense strand starting at position 268 of SEQ ID NO: 1887111
cuaggaagacugggcuuua

SEQ ID NO: 2449249 - RNA, 19 nt, Artificial Sequence
  Description of Artificial Sequence: Synthetic oligonucleotide
  Antisense strand to SEQ ID NO: 2449248
uaaagcccagucuuccuag

SEQ ID NO: 2449250 - RNA, 19 nt, Artificial Sequence
  Description of Artificial Sequence: Synthetic oligonucleotide
  Sense strand starting at position 269 of SEQ ID NO: 1887111
uaggaagacugggcuuuau

SEQ ID NO: 2449251 - RNA, 19 nt, Artificial Sequence
  Description of Artificial Sequence: Synthetic oligonucleotide
  Antisense strand to SEQ ID NO: 2449250
auaaagcccagucuuccua

SEQ ID NO: 2449252 - RNA, 19 nt, Artificial Sequence
  Description of Artificial Sequence: Synthetic oligonucleotide
  Sense strand starting at position 697 of SEQ ID NO: 1887111
acauaucauccuggaagcu

SEQ ID NO: 2449253 - RNA, 19 nt, Artificial Sequence
  Description of Artificial Sequence: Synthetic oligonucleotide
  Antisense strand to SEQ ID NO: 2449252
agcuuccaggaugauaugu

SEQ ID NO: 2449254 - RNA, 19 nt, Artificial Sequence
  Description of Artificial Sequence: Synthetic oligonucleotide
  Sense strand starting at position 706 of SEQ ID NO: 1887111
ccuggaagcuguuuagaag

SEQ ID NO: 2449255 - RNA, 19 nt, Artificial Sequence
  Description of Artificial Sequence: Synthetic oligonucleotide
  Antisense strand to SEQ ID NO: 2449254
cuucuaaacagcuuccagg

SEQ ID NO: 2449256 - RNA, 19 nt, Artificial Sequence
  Description of Artificial Sequence: Synthetic oligonucleotide
  Sense strand starting at position 712 of SEQ ID NO: 1887111
agcuguuuagaagacugau

SEQ ID NO: 2449257 - RNA, 19 nt, Artificial Sequence
  Description of Artificial Sequence: Synthetic oligonucleotide
  Antisense strand to SEQ ID NO: 2449256
aucagucuucuaaacagcu

SEQ ID NO: 2449258 - RNA, 19 nt, Artificial Sequence
  Description of Artificial Sequence: Synthetic oligonucleotide
  Sense strand starting at position 749 of SEQ ID NO: 1887111
guaucagagagaugaguga

SEQ ID NO: 2449259 - RNA, 19 nt, Artificial Sequence
  Description of Artificial Sequence: Synthetic oligonucleotide
  Antisense strand to SEQ ID NO: 2449258
ucacucaucucucugauac

SEQ ID NO: 2449260 - RNA, 19 nt, Artificial Sequence
  Description of Artificial Sequence: Synthetic oligonucleotide
  Sense strand starting at position 765 of SEQ ID NO: 1887111
ugaggagacaguuguagua

SEQ ID NO: 2449261 - RNA, 19 nt, Artificial Sequence
  Description of Artificial Sequence: Synthetic oligonucleotide
  Antisense strand to SEQ ID NO: 2449260
uacuacaacugucuccuca

SEQ ID NO: 2449262 - RNA, 19 nt, Artificial Sequence
  Description of Artificial Sequence: Synthetic oligonucleotide
  Sense strand starting at position 780 of SEQ ID NO: 1887111
aguaguuugggugagaaau

SEQ ID NO: 2449263 - RNA, 19 nt, Artificial Sequence
  Description of Artificial Sequence: Synthetic oligonucleotide
  Antisense strand to SEQ ID NO: 2449262
auuucucacccaaacuacu

SEQ ID NO: 2449264 - RNA, 19 nt, Artificial Sequence
  Description of Artificial Sequence: Synthetic oligonucleotide
  Sense strand starting at position 968 of SEQ ID NO: 1887111
ggugccauuaacugagaaa

SEQ ID NO: 2449265 - RNA, 19 nt, Artificial Sequence
  Description of Artificial Sequence: Synthetic oligonucleotide
  Antisense strand to SEQ ID NO: 2449264
uuucucaguuaauggcacc

SEQ ID NO: 2449266 - RNA, 19 nt, Artificial Sequence
  Description of Artificial Sequence: Synthetic oligonucleotide
  Sense strand starting at position 1012 of SEQ ID NO: 1887111
cugaaaugaagagguaguu

SEQ ID NO: 2449267 - RNA, 19 nt, Artificial Sequence
  Description of Artificial Sequence: Synthetic oligonucleotide
  Antisense strand to SEQ ID NO: 2449266
aacuaccucuucauuucag

SEQ ID NO: 2449268 - RNA, 19 nt, Artificial Sequence
  Description of Artificial Sequence: Synthetic oligonucleotide
  Sense strand starting at position 1030 of SEQ ID NO: 1887111
uuuggauaauacuuaggua

SEQ ID NO: 2449269 - RNA, 19 nt, Artificial Sequence
  Description of Artificial Sequence: Synthetic oligonucleotide
  Antisense strand to SEQ ID NO: 2449268
uaccuaaguauuauccaaa

SEQ ID NO: 2449270 - RNA, 19 nt, Artificial Sequence
  Description of Artificial Sequence: Synthetic oligonucleotide
  Sense strand starting at position 1071 of SEQ ID NO: 1887111
agaggaugugcccagcaau

SEQ ID NO: 2449271 - RNA, 19 nt, Artificial Sequence
  Description of Artificial Sequence: Synthetic oligonucleotide
  Antisense strand to SEQ ID NO: 2449270
auugcugggcacauccucu

SEQ ID NO: 2449272 - RNA, 19 nt, Artificial Sequence
  Description of Artificial Sequence: Synthetic oligonucleotide
  Sense strand starting at position 1074 of SEQ ID NO: 1887111
ggaugugcccagcaaucaa

SEQ ID NO: 2449273 - RNA, 19 nt, Artificial Sequence
  Description of Artificial Sequence: Synthetic oligonucleotide
  Antisense strand to SEQ ID NO: 2449272
uugauugcugggcacaucc

SEQ ID NO: 2449274 - RNA, 19 nt, Artificial Sequence
  Description of Artificial Sequence: Synthetic oligonucleotide
  Sense strand starting at position 1093 of SEQ ID NO: 1887111
uguaacuuugaucaagcua

SEQ ID NO: 2449275 - RNA, 19 nt, Artificial Sequence
  Description of Artificial Sequence: Synthetic oligonucleotide
  Antisense strand to SEQ ID NO: 2449274
uagcuugaucaaaguuaca

SEQ ID NO: 2449276 - RNA, 19 nt, Artificial Sequence
  Description of Artificial Sequence: Synthetic oligonucleotide
  Sense strand starting at position 1618 of SEQ ID NO: 1887111
ucuagcucucuauaagaag

SEQ ID NO: 2449277 - RNA, 19 nt, Artificial Sequence
  Description of Artificial Sequence: Synthetic oligonucleotide
  Antisense strand to SEQ ID NO: 2449276
cuucuuauagagagcuaga

SEQ ID NO: 2449278 - RNA, 19 nt, Artificial Sequence
  Description of Artificial Sequence: Synthetic oligonucleotide
  Sense strand starting at position 1782 of SEQ ID NO: 1887111
gacauuccuccuggugaau

SEQ ID NO: 2449279 - RNA, 19 nt, Artificial Sequence
  Description of Artificial Sequence: Synthetic oligonucleotide
  Antisense strand to SEQ ID NO: 2449278
auucaccaggaggaauguc

SEQ ID NO: 2449280 - RNA, 19 nt, Artificial Sequence
  Description of Artificial Sequence: Synthetic oligonucleotide
  Sense strand starting at position 1785 of SEQ ID NO: 1887111
auuccuccuggugaauaua

SEQ ID NO: 2449281 - RNA, 19 nt, Artificial Sequence
  Description of Artificial Sequence: Synthetic oligonucleotide
  Antisense strand to SEQ ID NO: 2449280
uauauucaccaggaggaau

SEQ ID NO: 2449282 - RNA, 19 nt, Artificial Sequence
  Description of Artificial Sequence: Synthetic oligonucleotide
  Sense strand starting at position 1793 of SEQ ID NO: 1887111
uggugaauauaagccaauu

SEQ ID NO: 2449283 - RNA, 19 nt, Artificial Sequence
  Description of Artificial Sequence: Synthetic oligonucleotide
  Antisense strand to SEQ ID NO: 2449282
aauuggcuuauauucacca

SEQ ID NO: 2449284 - RNA, 19 nt, Artificial Sequence
  Description of Artificial Sequence: Synthetic oligonucleotide
  Sense strand starting at position 1806 of SEQ ID NO: 1887111
ccaauuuacuuuggagaaa

SEQ ID NO: 2449285 - RNA, 19 nt, Artificial Sequence
  Description of Artificial Sequence: Synthetic oligonucleotide
  Antisense strand to SEQ ID NO: 2449284
uuucuccaaaguaaauugg

SEQ ID NO: 2449286 - RNA, 19 nt, Artificial Sequence
  Description of Artificial Sequence: Synthetic oligonucleotide
  Sense strand starting at position 1992 of SEQ ID NO: 1887111
aagagagguugaguagcau

SEQ ID NO: 2449287 - RNA, 19 nt, Artificial Sequence
  Description of Artificial Sequence: Synthetic oligonucleotide
  Antisense strand to SEQ ID NO: 2449286
augcuacucaaccucucuu

SEQ ID NO: 2449288 - RNA, 19 nt, Artificial Sequence
  Description of Artificial Sequence: Synthetic oligonucleotide
  Sense strand starting at position 1998 of SEQ ID NO: 1887111
gguugaguagcauaaccaa

SEQ ID NO: 2449289 - RNA, 19 nt, Artificial Sequence
  Description of Artificial Sequence: Synthetic oligonucleotide
  Antisense strand to SEQ ID NO: 2449288
uugguuaugcuacucaacc

SEQ ID NO: 2449290 - RNA, 19 nt, Artificial Sequence
  Description of Artificial Sequence: Synthetic oligonucleotide
  Sense strand starting at position 2034 of SEQ ID NO: 1887111
gcaauaagccaggacucaa

SEQ ID NO: 2449291 - RNA, 19 nt, Artificial Sequence
  Description of Artificial Sequence: Synthetic oligonucleotide
  Antisense strand to SEQ ID NO: 2449290
uugaguccuggcuuauugc

SEQ ID NO: 2449292 - RNA, 19 nt, Artificial Sequence
  Description of Artificial Sequence: Synthetic oligonucleotide
  Sense strand starting at position 2153 of SEQ ID NO: 1887111
auaaucaucuggucugauu

SEQ ID NO: 2449293 - RNA, 19 nt, Artificial Sequence
  Description of Artificial Sequence: Synthetic oligonucleotide
  Antisense strand to SEQ ID NO: 2449292
aaucagaccagaugauuau

SEQ ID NO: 2449294 - RNA, 19 nt, Artificial Sequence
  Description of Artificial Sequence: Synthetic oligonucleotide
  Sense strand starting at position 2235 of SEQ ID NO: 1887111
guuaauuucuagguucugu

SEQ ID NO: 2449295 - RNA, 19 nt, Artificial Sequence
  Description of Artificial Sequence: Synthetic oligonucleotide
  Antisense strand to SEQ ID NO: 2449294
acagaaccuagaaauuaac

SEQ ID NO: 2449296 - RNA, 19 nt, Artificial Sequence
  Description of Artificial Sequence: Synthetic oligonucleotide
  Sense strand starting at position 2668 of SEQ ID NO: 1887111
ggagcagucaaguacauag

SEQ ID NO: 2449297 - RNA, 19 nt, Artificial Sequence
  Description of Artificial Sequence: Synthetic oligonucleotide
  Antisense strand to SEQ ID NO: 2449296
cuauguacuugacugcucc

SEQ ID NO: 2449298 - RNA, 19 nt, Artificial Sequence
  Description of Artificial Sequence: Synthetic oligonucleotide
  Sense strand starting at position 2697 of SEQ ID NO: 1887111
acagcaggauuccucauaa

SEQ ID NO: 2449299 - RNA, 19 nt, Artificial Sequence
  Description of Artificial Sequence: Synthetic oligonucleotide
  Antisense strand to SEQ ID NO: 2449298
uuaugaggaauccugcugu

SEQ ID NO: 2449300 - RNA, 19 nt, Artificial Sequence
  Description of Artificial Sequence: Synthetic oligonucleotide
  Sense strand starting at position 2712 of SEQ ID NO: 1887111
auaagauggagcuauguuu

SEQ ID NO: 2449301 - RNA, 19 nt, Artificial Sequence
  Description of Artificial Sequence: Synthetic oligonucleotide
  Antisense strand to SEQ ID NO: 2449300
aaacauagcuccaucuuau

SEQ ID NO: 2449302 - RNA, 19 nt, Artificial Sequence
  Description of Artificial Sequence: Synthetic oligonucleotide
  Sense strand starting at position 2723 of SEQ ID NO: 1887111
cuauguuugaacgagggca

SEQ ID NO: 2449303 - RNA, 19 nt, Artificial Sequence
  Description of Artificial Sequence: Synthetic oligonucleotide
  Antisense strand to SEQ ID NO: 2449302
ugcccucguucaaacauag

SEQ ID NO: 2449304 - RNA, 19 nt, Artificial Sequence
  Description of Artificial Sequence: Synthetic oligonucleotide
  Sense strand starting at position 2770 of SEQ ID NO: 1887111
uaucuaggccagggauagu

SEQ ID NO: 2449305 - RNA, 19 nt, Artificial Sequence
  Description of Artificial Sequence: Synthetic oligonucleotide
  Antisense strand to SEQ ID NO: 2449304
acuaucccuggccuagaua

SEQ ID NO: 2449306 - RNA, 19 nt, Artificial Sequence
  Description of Artificial Sequence: Synthetic oligonucleotide
  Sense strand starting at position 2830 of SEQ ID NO: 1887111
ugagaagaaccuugccgaa

SEQ ID NO: 2449307 - RNA, 19 nt, Artificial Sequence
  Description of Artificial Sequence: Synthetic oligonucleotide
  Antisense strand to SEQ ID NO: 2449306
uucggcaagguucuucuca

SEQ ID NO: 2449308 - RNA, 19 nt, Artificial Sequence
  Description of Artificial Sequence: Synthetic oligonucleotide
  Sense strand starting at position 2967 of SEQ ID NO: 1887111
cccaaaugucagcaugcaa

SEQ ID NO: 2449309 - RNA, 19 nt, Artificial Sequence
  Description of Artificial Sequence: Synthetic oligonucleotide
  Antisense strand to SEQ ID NO: 2449308
uugcaugcugacauuuggg

SEQ ID NO: 2449310 - RNA, 19 nt, Artificial Sequence
  Description of Artificial Sequence: Synthetic oligonucleotide
  Sense strand starting at position 3122 of SEQ ID NO: 1887111
gaagguuauuucuacugaa

SEQ ID NO: 2449311 - RNA, 19 nt, Artificial Sequence
  Description of Artificial Sequence: Synthetic oligonucleotide
  Antisense strand to SEQ ID NO: 2449310
uucaguagaaauaaccuuc

SEQ ID NO: 2449312 - RNA, 19 nt, Artificial Sequence
  Description of Artificial Sequence: Synthetic oligonucleotide
  Sense strand starting at position 3298 of SEQ ID NO: 1887111
cguguauugcauguaauuc

SEQ ID NO: 2449313 - RNA, 19 nt, Artificial Sequence
  Description of Artificial Sequence: Synthetic oligonucleotide
  Antisense strand to SEQ ID NO: 2449312
gaauuacaugcaauacacg

SEQ ID NO: 2449314 - RNA, 19 nt, Artificial Sequence
  Description of Artificial Sequence: Synthetic oligonucleotide
  Sense strand starting at position 3466 of SEQ ID NO: 1887111
agcuuuagucuacacuaca

SEQ ID NO: 2449315 - RNA, 19 nt, Artificial Sequence
  Description of Artificial Sequence: Synthetic oligonucleotide
  Antisense strand to SEQ ID NO: 2449314
uguaguguagacuaaagcu

SEQ ID NO: 2449316 - RNA, 19 nt, Artificial Sequence
  Description of Artificial Sequence: Synthetic oligonucleotide
  Sense strand starting at position 3686 of SEQ ID NO: 1887111
uuauacauuugacaaggau

SEQ ID NO: 2449317 - RNA, 19 nt, Artificial Sequence
  Description of Artificial Sequence: Synthetic oligonucleotide
  Antisense strand to SEQ ID NO: 2449316
auccuugucaaauguauaa

SEQ ID NO: 2449318 - RNA, 19 nt, Artificial Sequence
  Description of Artificial Sequence: Synthetic oligonucleotide
  Sense strand starting at position 3695 of SEQ ID NO: 1887111
ugacaaggauaccaagaaa

SEQ ID NO: 2449319 - RNA, 19 nt, Artificial Sequence
  Description of Artificial Sequence: Synthetic oligonucleotide
  Antisense strand to SEQ ID NO: 2449318
uuucuugguauccuuguca

SEQ ID NO: 2449320 - RNA, 19 nt, Artificial Sequence
  Description of Artificial Sequence: Synthetic oligonucleotide
  Sense strand starting at position 3880 of SEQ ID NO: 1887111
auggaagauucugucuuag

SEQ ID NO: 2449321 - RNA, 19 nt, Artificial Sequence
  Description of Artificial Sequence: Synthetic oligonucleotide
  Antisense strand to SEQ ID NO: 2449320
cuaagacagaaucuuccau

SEQ ID NO: 2449322 - RNA, 19 nt, Artificial Sequence
  Description of Artificial Sequence: Synthetic oligonucleotide
  Sense strand starting at position 3882 of SEQ ID NO: 1887111
ggaagauucugucuuagaa

SEQ ID NO: 2449323 - RNA, 19 nt, Artificial Sequence
  Description of Artificial Sequence: Synthetic oligonucleotide
  Antisense strand to SEQ ID NO: 2449322
uucuaagacagaaucuucc

SEQ ID NO: 2449324 - RNA, 19 nt, Artificial Sequence
  Description of Artificial Sequence: Synthetic oligonucleotide
  Sense strand starting at position 3 of SEQ ID NO: 1887112
ggccuccucucuccaagaa

SEQ ID NO: 2449325 - RNA, 19 nt, Artificial Sequence
  Description of Artificial Sequence: Synthetic oligonucleotide
  Antisense strand to SEQ ID NO: 2449324
uucuuggagagaggaggcc

SEQ ID NO: 2449326 - RNA, 19 nt, Artificial Sequence
  Description of Artificial Sequence: Synthetic oligonucleotide
  Sense strand starting at position 224 of SEQ ID NO: 1887112
uuggucaucagcuagaaag

SEQ ID NO: 2449327 - RNA, 19 nt, Artificial Sequence
  Description of Artificial Sequence: Synthetic oligonucleotide
  Antisense strand to SEQ ID NO: 2449326
cuuucuagcugaugaccaa

SEQ ID NO: 2449328 - RNA, 19 nt, Artificial Sequence
  Description of Artificial Sequence: Synthetic oligonucleotide
  Sense strand starting at position 544 of SEQ ID NO: 1887112
cuauacauguaucuaguaa

SEQ ID NO: 2449329 - RNA, 19 nt, Artificial Sequence
  Description of Artificial Sequence: Synthetic oligonucleotide
  Antisense strand to SEQ ID NO: 2449328
uuacuagauacauguauag

SEQ ID NO: 2449330 - RNA, 19 nt, Artificial Sequence
  Description of Artificial Sequence: Synthetic oligonucleotide
  Sense strand starting at position 786 of SEQ ID NO: 1887112
gaacucucugaaggcagaa

SEQ ID NO: 2449331 - RNA, 19 nt, Artificial Sequence
  Description of Artificial Sequence: Synthetic oligonucleotide
  Antisense strand to SEQ ID NO: 2449330
uucugccuucagagaguuc

SEQ ID NO: 2449332 - RNA, 19 nt, Artificial Sequence
  Description of Artificial Sequence: Synthetic oligonucleotide
  Sense strand starting at position 849 of SEQ ID NO: 1887112
uuggaugacacgugacaaa

SEQ ID NO: 2449333 - RNA, 19 nt, Artificial Sequence
  Description of Artificial Sequence: Synthetic oligonucleotide
  Antisense strand to SEQ ID NO: 2449332
uuugucacgugucauccaa

SEQ ID NO: 2449334 - RNA, 19 nt, Artificial Sequence
  Description of Artificial Sequence: Synthetic oligonucleotide
  Sense strand starting at position 898 of SEQ ID NO: 1887112
cuguuaaggguauauugua

SEQ ID NO: 2449335 - RNA, 19 nt, Artificial Sequence
  Description of Artificial Sequence: Synthetic oligonucleotide
  Antisense strand to SEQ ID NO: 2449334
uacaauauacccuuaacag

SEQ ID NO: 2449336 - RNA, 19 nt, Artificial Sequence
  Description of Artificial Sequence: Synthetic oligonucleotide
  Sense strand starting at position 906 of SEQ ID NO: 1887112
gguauauuguacuccaucu

SEQ ID NO: 2449337 - RNA, 19 nt, Artificial Sequence
  Description of Artificial Sequence: Synthetic oligonucleotide
  Antisense strand to SEQ ID NO: 2449336
agauggaguacaauauacc

SEQ ID NO: 2449338 - RNA, 19 nt, Artificial Sequence
  Description of Artificial Sequence: Synthetic oligonucleotide
  Sense strand starting at position 939 of SEQ ID NO: 1887112
auagcuuugugaucuaacu

SEQ ID NO: 2449339 - RNA, 19 nt, Artificial Sequence
  Description of Artificial Sequence: Synthetic oligonucleotide
  Antisense strand to SEQ ID NO: 2449338
aguuagaucacaaagcuau

SEQ ID NO: 2449340 - RNA, 19 nt, Artificial Sequence
  Description of Artificial Sequence: Synthetic oligonucleotide
  Sense strand starting at position 1265 of SEQ ID NO: 1887112
ggagcaacacuguaagguu

SEQ ID NO: 2449341 - RNA, 19 nt, Artificial Sequence
  Description of Artificial Sequence: Synthetic oligonucleotide
  Antisense strand to SEQ ID NO: 2449340
aaccuuacaguguugcucc

SEQ ID NO: 2449342 - RNA, 19 nt, Artificial Sequence
  Description of Artificial Sequence: Synthetic oligonucleotide
  Sense strand starting at position 1427 of SEQ ID NO: 1887112
ugcaauuacauggguggau

SEQ ID NO: 2449343 - RNA, 19 nt, Artificial Sequence
  Description of Artificial Sequence: Synthetic oligonucleotide
  Antisense strand to SEQ ID NO: 2449342
auccacccauguaauugca

SEQ ID NO: 2449344 - RNA, 19 nt, Artificial Sequence
  Description of Artificial Sequence: Synthetic oligonucleotide
  Sense strand starting at position 1428 of SEQ ID NO: 1887112
gcaauuacauggguggauu

SEQ ID NO: 2449345 - RNA, 19 nt, Artificial Sequence
  Description of Artificial Sequence: Synthetic oligonucleotide
  Antisense strand to SEQ ID NO: 2449344
aauccacccauguaauugc

SEQ ID NO: 2449346 - RNA, 19 nt, Artificial Sequence
  Description of Artificial Sequence: Synthetic oligonucleotide
  Sense strand starting at position 1486 of SEQ ID NO: 1887112
gugccaauugcuguaugua

SEQ ID NO: 2449347 - RNA, 19 nt, Artificial Sequence
  Description of Artificial Sequence: Synthetic oligonucleotide
  Antisense strand to SEQ ID NO: 2449346
uacauacagcaauuggcac

SEQ ID NO: 2449348 - RNA, 19 nt, Artificial Sequence
  Description of Artificial Sequence: Synthetic oligonucleotide
  Sense strand starting at position 1592 of SEQ ID NO: 1887112
ucugaugacaucugguagu

SEQ ID NO: 2449349 - RNA, 19 nt, Artificial Sequence
  Description of Artificial Sequence: Synthetic oligonucleotide
  Antisense strand to SEQ ID NO: 2449348
acuaccagaugucaucaga

SEQ ID NO: 2449350 - RNA, 19 nt, Artificial Sequence
  Description of Artificial Sequence: Synthetic oligonucleotide
  Sense strand starting at position 1627 of SEQ ID NO: 1887112
ugaaauggauuagaaugaa

SEQ ID NO: 2449351 - RNA, 19 nt, Artificial Sequence
  Description of Artificial Sequence: Synthetic oligonucleotide
  Antisense strand to SEQ ID NO: 2449350
uucauucuaauccauuuca

SEQ ID NO: 2449352 - RNA, 19 nt, Artificial Sequence
  Description of Artificial Sequence: Synthetic oligonucleotide
  Sense strand starting at position 1651 of SEQ ID NO: 1887112
cgguacagucauuagguga

SEQ ID NO: 2449353 - RNA, 19 nt, Artificial Sequence
  Description of Artificial Sequence: Synthetic oligonucleotide
  Antisense strand to SEQ ID NO: 2449352
ucaccuaaugacuguaccg

SEQ ID NO: 2449354 - RNA, 19 nt, Artificial Sequence
  Description of Artificial Sequence: Synthetic oligonucleotide
  Sense strand starting at position 1674 of SEQ ID NO: 1887112
gccagagucccaggaagua

SEQ ID NO: 2449355 - RNA, 19 nt, Artificial Sequence
  Description of Artificial Sequence: Synthetic oligonucleotide
  Antisense strand to SEQ ID NO: 2449354
uacuuccugggacucuggc

SEQ ID NO: 2449356 - RNA, 19 nt, Artificial Sequence
  Description of Artificial Sequence: Synthetic oligonucleotide
  Sense strand starting at position 1741 of SEQ ID NO: 1887112
ugcccaguagaauggauaa

SEQ ID NO: 2449357 - RNA, 19 nt, Artificial Sequence
  Description of Artificial Sequence: Synthetic oligonucleotide
  Antisense strand to SEQ ID NO: 2449356
uuauccauucuacugggca

SEQ ID NO: 2449358 - RNA, 19 nt, Artificial Sequence
  Description of Artificial Sequence: Synthetic oligonucleotide
  Sense strand starting at position 1828 of SEQ ID NO: 1887112
ucaccauauugagugaaag

SEQ ID NO: 2449359 - RNA, 19 nt, Artificial Sequence
  Description of Artificial Sequence: Synthetic oligonucleotide
  Antisense strand to SEQ ID NO: 2449358
cuuucacucaauaugguga

SEQ ID NO: 2449360 - RNA, 19 nt, Artificial Sequence
  Description of Artificial Sequence: Synthetic oligonucleotide
  Sense strand starting at position 2053 of SEQ ID NO: 1887112
caaagcucuugguccauga

SEQ ID NO: 2449361 - RNA, 19 nt, Artificial Sequence
  Description of Artificial Sequence: Synthetic oligonucleotide
  Antisense strand to SEQ ID NO: 2449360
ucauggaccaagagcuuug

SEQ ID NO: 2449362 - RNA, 19 nt, Artificial Sequence
  Description of Artificial Sequence: Synthetic oligonucleotide
  Sense strand starting at position 2060 of SEQ ID NO: 1887112
cuugguccaugaucacaaa

SEQ ID NO: 2449363 - RNA, 19 nt, Artificial Sequence
  Description of Artificial Sequence: Synthetic oligonucleotide
  Antisense strand to SEQ ID NO: 2449362
uuugugaucauggaccaag

SEQ ID NO: 2449364 - RNA, 19 nt, Artificial Sequence
  Description of Artificial Sequence: Synthetic oligonucleotide
  Sense strand starting at position 2220 of SEQ ID NO: 1887112
aaagaaagaugggaaagua

SEQ ID NO: 2449365 - RNA, 19 nt, Artificial Sequence
  Description of Artificial Sequence: Synthetic oligonucleotide
  Antisense strand to SEQ ID NO: 2449364
uacuuucccaucuuucuuu

SEQ ID NO: 2449366 - RNA, 19 nt, Artificial Sequence
  Description of Artificial Sequence: Synthetic oligonucleotide
  Sense strand starting at position 2351 of SEQ ID NO: 1887112
cgguuuauuugaucaucuu

SEQ ID NO: 2449367 - RNA, 19 nt, Artificial Sequence
  Description of Artificial Sequence: Synthetic oligonucleotide
  Antisense strand to SEQ ID NO: 2449366
aagaugaucaaauaaaccg

SEQ ID NO: 2449368 - RNA, 19 nt, Artificial Sequence
  Description of Artificial Sequence: Synthetic oligonucleotide
  Sense strand starting at position 2367 of SEQ ID NO: 1887112
cuuuaaugagauugacggu

SEQ ID NO: 2449369 - RNA, 19 nt, Artificial Sequence
  Description of Artificial Sequence: Synthetic oligonucleotide
  Antisense strand to SEQ ID NO: 2449368
accgucaaucucauuaaag

SEQ ID NO: 2449370 - RNA, 19 nt, Artificial Sequence
  Description of Artificial Sequence: Synthetic oligonucleotide
  Sense strand starting at position 2539 of SEQ ID NO: 1887112
ucuaauuacgaucaaguua

SEQ ID NO: 2449371 - RNA, 19 nt, Artificial Sequence
  Description of Artificial Sequence: Synthetic oligonucleotide
  Antisense strand to SEQ ID NO: 2449370
uaacuugaucguaauuaga

SEQ ID NO: 2449372 - RNA, 19 nt, Artificial Sequence
  Description of Artificial Sequence: Synthetic oligonucleotide
  Sense strand starting at position 2544 of SEQ ID NO: 1887112
uuacgaucaaguuagguua

SEQ ID NO: 2449373 - RNA, 19 nt, Artificial Sequence
  Description of Artificial Sequence: Synthetic oligonucleotide
  Antisense strand to SEQ ID NO: 2449372
uaaccuaacuugaucguaa

SEQ ID NO: 2449374 - RNA, 19 nt, Artificial Sequence
  Description of Artificial Sequence: Synthetic oligonucleotide
  Sense strand starting at position 2568 of SEQ ID NO: 1887112
ggcuuuguggucagaaggu

SEQ ID NO: 2449375 - RNA, 19 nt, Artificial Sequence
  Description of Artificial Sequence: Synthetic oligonucleotide
  Antisense strand to SEQ ID NO: 2449374
accuucugaccacaaagcc

SEQ ID NO: 2449376 - RNA, 19 nt, Artificial Sequence
  Description of Artificial Sequence: Synthetic oligonucleotide
  Sense strand starting at position 2637 of SEQ ID NO: 1887112
uugagaacguggccuaaga

SEQ ID NO: 2449377 - RNA, 19 nt, Artificial Sequence
  Description of Artificial Sequence: Synthetic oligonucleotide
  Antisense strand to SEQ ID NO: 2449376
ucuuaggccacguucucaa

SEQ ID NO: 2449378 - RNA, 19 nt, Artificial Sequence
  Description of Artificial Sequence: Synthetic oligonucleotide
  Sense strand starting at position 2833 of SEQ ID NO: 1887112
gggaccuuguggcuuuaga

SEQ ID NO: 2449379 - RNA, 19 nt, Artificial Sequence
  Description of Artificial Sequence: Synthetic oligonucleotide
  Antisense strand to SEQ ID NO: 2449378
ucuaaagccacaagguccc

SEQ ID NO: 2449380 - RNA, 19 nt, Artificial Sequence
  Description of Artificial Sequence: Synthetic oligonucleotide
  Sense strand starting at position 3279 of SEQ ID NO: 1887112
aguaaagugccuuguauuu

SEQ ID NO: 2449381 - RNA, 19 nt, Artificial Sequence
  Description of Artificial Sequence: Synthetic oligonucleotide
  Antisense strand to SEQ ID NO: 2449380
aaauacaaggcacuuuacu

SEQ ID NO: 2449382 - RNA, 19 nt, Artificial Sequence
  Description of Artificial Sequence: Synthetic oligonucleotide
  Sense strand starting at position 3308 of SEQ ID NO: 1887112
ccaauaagcgccgaaugaa

SEQ ID NO: 2449383 - RNA, 19 nt, Artificial Sequence
  Description of Artificial Sequence: Synthetic oligonucleotide
  Antisense strand to SEQ ID NO: 2449382
uucauucggcgcuuauugg

SEQ ID NO: 2449384 - RNA, 19 nt, Artificial Sequence
  Description of Artificial Sequence: Synthetic oligonucleotide
  Sense strand starting at position 3328 of SEQ ID NO: 1887112
gcaacuuagcaguauuauu

SEQ ID NO: 2449385 - RNA, 19 nt, Artificial Sequence
  Description of Artificial Sequence: Synthetic oligonucleotide
  Antisense strand to SEQ ID NO: 2449384
aauaauacugcuaaguugc

SEQ ID NO: 2449386 - RNA, 19 nt, Artificial Sequence
  Description of Artificial Sequence: Synthetic oligonucleotide
  Sense strand starting at position 3443 of SEQ ID NO: 1887112
gucuguaguccugagggau

SEQ ID NO: 2449387 - RNA, 19 nt, Artificial Sequence
  Description of Artificial Sequence: Synthetic oligonucleotide
  Antisense strand to SEQ ID NO: 2449386
aucccucaggacuacagac

SEQ ID NO: 2449388 - RNA, 19 nt, Artificial Sequence
  Description of Artificial Sequence: Synthetic oligonucleotide
  Sense strand starting at position 3447 of SEQ ID NO: 1887112
guaguccugagggauccau

SEQ ID NO: 2449389 - RNA, 19 nt, Artificial Sequence
  Description of Artificial Sequence: Synthetic oligonucleotide
  Antisense strand to SEQ ID NO: 2449388
auggaucccucaggacuac

SEQ ID NO: 2449390 - RNA, 19 nt, Artificial Sequence
  Description of Artificial Sequence: Synthetic oligonucleotide
  Sense strand starting at position 3498 of SEQ ID NO: 1887112
gaggaaagcguucauggga

SEQ ID NO: 2449391 - RNA, 19 nt, Artificial Sequence
  Description of Artificial Sequence: Synthetic oligonucleotide
  Antisense strand to SEQ ID NO: 2449390
ucccaugaacgcuuuccuc

SEQ ID NO: 2449392 - RNA, 19 nt, Artificial Sequence
  Description of Artificial Sequence: Synthetic oligonucleotide
  Sense strand starting at position 3512 of SEQ ID NO: 1887112
ugggaaauuccguaaugcu

SEQ ID NO: 2449393 - RNA, 19 nt, Artificial Sequence
  Description of Artificial Sequence: Synthetic oligonucleotide
  Antisense strand to SEQ ID NO: 2449392
agcauuacggaauuuccca

SEQ ID NO: 2449394 - RNA, 19 nt, Artificial Sequence
  Description of Artificial Sequence: Synthetic oligonucleotide
  Sense strand starting at position 3552 of SEQ ID NO: 1887112
ugagcuuagcgucagaaag

SEQ ID NO: 2449395 - RNA, 19 nt, Artificial Sequence
  Description of Artificial Sequence: Synthetic oligonucleotide
  Antisense strand to SEQ ID NO: 2449394
cuuucugacgcuaagcuca

SEQ ID NO: 2449396 - RNA, 19 nt, Artificial Sequence
  Description of Artificial Sequence: Synthetic oligonucleotide
  Sense strand starting at position 3605 of SEQ ID NO: 1887112
uuguuuaaucuugagaugu

SEQ ID NO: 2449397 - RNA, 19 nt, Artificial Sequence
  Description of Artificial Sequence: Synthetic oligonucleotide
  Antisense strand to SEQ ID NO: 2449396
acaucucaagauuaaacaa

SEQ ID NO: 2449398 - RNA, 19 nt, Artificial Sequence
  Description of Artificial Sequence: Synthetic oligonucleotide
  Sense strand starting at position 3623 of SEQ ID NO: 1887112
uuccuuucucgugggaaag

SEQ ID NO: 2449399 - RNA, 19 nt, Artificial Sequence
  Description of Artificial Sequence: Synthetic oligonucleotide
  Antisense strand to SEQ ID NO: 2449398
cuuucccacgagaaaggaa

SEQ ID NO: 2449400 - RNA, 19 nt, Artificial Sequence
  Description of Artificial Sequence: Synthetic oligonucleotide
  Sense strand starting at position 3624 of SEQ ID NO: 1887112
uccuuucucgugggaaaga

SEQ ID NO: 2449401 - RNA, 19 nt, Artificial Sequence
  Description of Artificial Sequence: Synthetic oligonucleotide
  Antisense strand to SEQ ID NO: 2449400
ucuuucccacgagaaagga

SEQ ID NO: 2449402 - RNA, 19 nt, Artificial Sequence
  Description of Artificial Sequence: Synthetic oligonucleotide
  Sense strand starting at position 3703 of SEQ ID NO: 1887112
ugaacugaauccucgauca

SEQ ID NO: 2449403 - RNA, 19 nt, Artificial Sequence
  Description of Artificial Sequence: Synthetic oligonucleotide
  Antisense strand to SEQ ID NO: 2449402
ugaucgaggauucaguuca

SEQ ID NO: 2449404 - RNA, 19 nt, Artificial Sequence
  Description of Artificial Sequence: Synthetic oligonucleotide
  Sense strand starting at position 128 of SEQ ID NO: 1887113
uggagaucacgccaacaca

SEQ ID NO: 2449405 - RNA, 19 nt, Artificial Sequence
  Description of Artificial Sequence: Synthetic oligonucleotide
  Antisense strand to SEQ ID NO: 2449404
uguguuggcgugaucucca

SEQ ID NO: 2449406 - RNA, 19 nt, Artificial Sequence
  Description of Artificial Sequence: Synthetic oligonucleotide
  Sense strand starting at position 143 of SEQ ID NO: 1887113
cacauucuagccugaggga

SEQ ID NO: 2449407 - RNA, 19 nt, Artificial Sequence
  Description of Artificial Sequence: Synthetic oligonucleotide
  Antisense strand to SEQ ID NO: 2449406
ucccucaggcuagaaugug

SEQ ID NO: 2449408 - RNA, 19 nt, Artificial Sequence
  Description of Artificial Sequence: Synthetic oligonucleotide
  Sense strand starting at position 206 of SEQ ID NO: 1887113
aagggaaggucaguuuaua

SEQ ID NO: 2449409 - RNA, 19 nt, Artificial Sequence
  Description of Artificial Sequence: Synthetic oligonucleotide
  Antisense strand to SEQ ID NO: 2449408
uauaaacugaccuucccuu

SEQ ID NO: 2449410 - RNA, 19 nt, Artificial Sequence
  Description of Artificial Sequence: Synthetic oligonucleotide
  Sense strand starting at position 242 of SEQ ID NO: 1887113
cugacucuugcucacaaga

SEQ ID NO: 2449411 - RNA, 19 nt, Artificial Sequence
  Description of Artificial Sequence: Synthetic oligonucleotide
  Antisense strand to SEQ ID NO: 2449410
ucuugugagcaagagucag

SEQ ID NO: 2449412 - RNA, 19 nt, Artificial Sequence
  Description of Artificial Sequence: Synthetic oligonucleotide
  Sense strand starting at position 300 of SEQ ID NO: 1887113
uggcuuguuccugaaacaa

SEQ ID NO: 2449413 - RNA, 19 nt, Artificial Sequence
  Description of Artificial Sequence: Synthetic oligonucleotide
  Antisense strand to SEQ ID NO: 2449412
uuguuucaggaacaagcca

SEQ ID NO: 2449414 - RNA, 19 nt, Artificial Sequence
  Description of Artificial Sequence: Synthetic oligonucleotide
  Sense strand starting at position 324 of SEQ ID NO: 1887113
ucucauccucccgaaugua

SEQ ID NO: 2449415 - RNA, 19 nt, Artificial Sequence
  Description of Artificial Sequence: Synthetic oligonucleotide
  Antisense strand to SEQ ID NO: 2449414
uacauucgggaggaugaga

SEQ ID NO: 2449416 - RNA, 19 nt, Artificial Sequence
  Description of Artificial Sequence: Synthetic oligonucleotide
  Sense strand starting at position 627 of SEQ ID NO: 1887113
ugaguaaagaugugaauuc

SEQ ID NO: 2449417 - RNA, 19 nt, Artificial Sequence
  Description of Artificial Sequence: Synthetic oligonucleotide
  Antisense strand to SEQ ID NO: 2449416
gaauucacaucuuuacuca

SEQ ID NO: 2449418 - RNA, 19 nt, Artificial Sequence
  Description of Artificial Sequence: Synthetic oligonucleotide
  Sense strand starting at position 636 of SEQ ID NO: 1887113
augugaauucugcacagag

SEQ ID NO: 2449419 - RNA, 19 nt, Artificial Sequence
  Description of Artificial Sequence: Synthetic oligonucleotide
  Antisense strand to SEQ ID NO: 2449418
cucugugcagaauucacau

SEQ ID NO: 2449420 - RNA, 19 nt, Artificial Sequence
  Description of Artificial Sequence: Synthetic oligonucleotide
  Sense strand starting at position 638 of SEQ ID NO: 1887113
gugaauucugcacagagau

SEQ ID NO: 2449421 - RNA, 19 nt, Artificial Sequence
  Description of Artificial Sequence: Synthetic oligonucleotide
  Antisense strand to SEQ ID NO: 2449420
aucucugugcagaauucac

SEQ ID NO: 2449422 - RNA, 19 nt, Artificial Sequence
  Description of Artificial Sequence: Synthetic oligonucleotide
  Sense strand starting at position 657 of SEQ ID NO: 1887113
uugcaauaggcaugacaau

SEQ ID NO: 2449423 - RNA, 19 nt, Artificial Sequence
  Description of Artificial Sequence: Synthetic oligonucleotide
  Antisense strand to SEQ ID NO: 2449422
auugucaugccuauugcaa

SEQ ID NO: 2449424 - RNA, 19 nt, Artificial Sequence
  Description of Artificial Sequence: Synthetic oligonucleotide
  Sense strand starting at position 658 of SEQ ID NO: 1887113
ugcaauaggcaugacaauu

SEQ ID NO: 2449425 - RNA, 19 nt, Artificial Sequence
  Description of Artificial Sequence: Synthetic oligonucleotide
  Antisense strand to SEQ ID NO: 2449424
aauugucaugccuauugca

SEQ ID NO: 2449426 - RNA, 19 nt, Artificial Sequence
  Description of Artificial Sequence: Synthetic oligonucleotide
  Sense strand starting at position 693 of SEQ ID NO: 1887113
agaggaaguucccuagcau

SEQ ID NO: 2449427 - RNA, 19 nt, Artificial Sequence
  Description of Artificial Sequence: Synthetic oligonucleotide
  Antisense strand to SEQ ID NO: 2449426
augcuagggaacuuccucu

SEQ ID NO: 2449428 - RNA, 19 nt, Artificial Sequence
  Description of Artificial Sequence: Synthetic oligonucleotide
  Sense strand starting at position 694 of SEQ ID NO: 1887113
gaggaaguucccuagcauc

SEQ ID NO: 2449429 - RNA, 19 nt, Artificial Sequence
  Description of Artificial Sequence: Synthetic oligonucleotide
  Antisense strand to SEQ ID NO: 2449428
gaugcuagggaacuuccuc

SEQ ID NO: 2449430 - RNA, 19 nt, Artificial Sequence
  Description of Artificial Sequence: Synthetic oligonucleotide
  Sense strand starting at position 716 of SEQ ID NO: 1887113
cgcugaacauuucugccaa

SEQ ID NO: 2449431 - RNA, 19 nt, Artificial Sequence
  Description of Artificial Sequence: Synthetic oligonucleotide
  Antisense strand to SEQ ID NO: 2449430
uuggcagaaauguucagcg

SEQ ID NO: 2449432 - RNA, 19 nt, Artificial Sequence
  Description of Artificial Sequence: Synthetic oligonucleotide
  Sense strand starting at position 793 of SEQ ID NO: 1887113
ugguccuuacauggugaga

SEQ ID NO: 2449433 - RNA, 19 nt, Artificial Sequence
  Description of Artificial Sequence: Synthetic oligonucleotide
  Antisense strand to SEQ ID NO: 2449432
ucucaccauguaaggacca

SEQ ID NO: 2449434 - RNA, 19 nt, Artificial Sequence
  Description of Artificial Sequence: Synthetic oligonucleotide
  Sense strand starting at position 1011 of SEQ ID NO: 1887113
aguauuucuugcguauaaa

SEQ ID NO: 2449435 - RNA, 19 nt, Artificial Sequence
  Description of Artificial Sequence: Synthetic oligonucleotide
  Antisense strand to SEQ ID NO: 2449434
uuuauacgcaagaaauacu

SEQ ID NO: 2449436 - RNA, 19 nt, Artificial Sequence
  Description of Artificial Sequence: Synthetic oligonucleotide
  Sense strand starting at position 1012 of SEQ ID NO: 1887113
guauuucuugcguauaaau

SEQ ID NO: 2449437 - RNA, 19 nt, Artificial Sequence
  Description of Artificial Sequence: Synthetic oligonucleotide
  Antisense strand to SEQ ID NO: 2449436
auuuauacgcaagaaauac

SEQ ID NO: 2449438 - RNA, 19 nt, Artificial Sequence
  Description of Artificial Sequence: Synthetic oligonucleotide
  Sense strand starting at position 1233 of SEQ ID NO: 1887113
uauacagguucuuuggcaa

SEQ ID NO: 2449439 - RNA, 19 nt, Artificial Sequence
  Description of Artificial Sequence: Synthetic oligonucleotide
  Antisense strand to SEQ ID NO: 2449438
uugccaaagaaccuguaua

SEQ ID NO: 2449440 - RNA, 19 nt, Artificial Sequence
  Description of Artificial Sequence: Synthetic oligonucleotide
  Sense strand starting at position 1236 of SEQ ID NO: 1887113
acagguucuuuggcaagga

SEQ ID NO: 2449441 - RNA, 19 nt, Artificial Sequence
  Description of Artificial Sequence: Synthetic oligonucleotide
  Antisense strand to SEQ ID NO: 2449440
uccuugccaaagaaccugu

SEQ ID NO: 2449442 - RNA, 19 nt, Artificial Sequence
  Description of Artificial Sequence: Synthetic oligonucleotide
  Sense strand starting at position 1240 of SEQ ID NO: 1887113
guucuuuggcaaggaacua

SEQ ID NO: 2449443 - RNA, 19 nt, Artificial Sequence
  Description of Artificial Sequence: Synthetic oligonucleotide
  Antisense strand to SEQ ID NO: 2449442
uaguuccuugccaaagaac

SEQ ID NO: 2449444 - RNA, 19 nt, Artificial Sequence
  Description of Artificial Sequence: Synthetic oligonucleotide
  Sense strand starting at position 1411 of SEQ ID NO: 1887113
ugugguaaacccugacaga

SEQ ID NO: 2449445 - RNA, 19 nt, Artificial Sequence
  Description of Artificial Sequence: Synthetic oligonucleotide
  Antisense strand to SEQ ID NO: 2449444
ucugucaggguuuaccaca

SEQ ID NO: 2449446 - RNA, 19 nt, Artificial Sequence
  Description of Artificial Sequence: Synthetic oligonucleotide
  Sense strand starting at position 1427 of SEQ ID NO: 1887113
agaguagaauggucacauu

SEQ ID NO: 2449447 - RNA, 19 nt, Artificial Sequence
  Description of Artificial Sequence: Synthetic oligonucleotide
  Antisense strand to SEQ ID NO: 2449446
aaugugaccauucuacucu

SEQ ID NO: 2449448 - RNA, 19 nt, Artificial Sequence
  Description of Artificial Sequence: Synthetic oligonucleotide
  Sense strand starting at position 1462 of SEQ ID NO: 1887113
gaccuagagugcucuggau

SEQ ID NO: 2449449 - RNA, 19 nt, Artificial Sequence
  Description of Artificial Sequence: Synthetic oligonucleotide
  Antisense strand to SEQ ID NO: 2449448
auccagagcacucuagguc

SEQ ID NO: 2449450 - RNA, 19 nt, Artificial Sequence
  Description of Artificial Sequence: Synthetic oligonucleotide
  Sense strand starting at position 1697 of SEQ ID NO: 1887113
ugacaaccugccuauugaa

SEQ ID NO: 2449451 - RNA, 19 nt, Artificial Sequence
  Description of Artificial Sequence: Synthetic oligonucleotide
  Antisense strand to SEQ ID NO: 2449450
uucaauaggcagguuguca

SEQ ID NO: 2449452 - RNA, 19 nt, Artificial Sequence
  Description of Artificial Sequence: Synthetic oligonucleotide
  Sense strand starting at position 1854 of SEQ ID NO: 1887113
cacggaucugcgggagaaa

SEQ ID NO: 2449453 - RNA, 19 nt, Artificial Sequence
  Description of Artificial Sequence: Synthetic oligonucleotide
  Antisense strand to SEQ ID NO: 2449452
uuucucccgcagauccgug

SEQ ID NO: 2449454 - RNA, 19 nt, Artificial Sequence
  Description of Artificial Sequence: Synthetic oligonucleotide
  Sense strand starting at position 2409 of SEQ ID NO: 1887113
acaagagcggucuauaugu

SEQ ID NO: 2449455 - RNA, 19 nt, Artificial Sequence
  Description of Artificial Sequence: Synthetic oligonucleotide
  Antisense strand to SEQ ID NO: 2449454
acauauagaccgcucuugu

SEQ ID NO: 2449456 - RNA, 19 nt, Artificial Sequence
  Description of Artificial Sequence: Synthetic oligonucleotide
  Sense strand starting at position 2411 of SEQ ID NO: 1887113
aagagcggucuauauguua

SEQ ID NO: 2449457 - RNA, 19 nt, Artificial Sequence
  Description of Artificial Sequence: Synthetic oligonucleotide
  Antisense strand to SEQ ID NO: 2449456
uaacauauagaccgcucuu

SEQ ID NO: 2449458 - RNA, 19 nt, Artificial Sequence
  Description of Artificial Sequence: Synthetic oligonucleotide
  Sense strand starting at position 2418 of SEQ ID NO: 1887113
gucuauauguuacuccaga

SEQ ID NO: 2449459 - RNA, 19 nt, Artificial Sequence
  Description of Artificial Sequence: Synthetic oligonucleotide
  Antisense strand to SEQ ID NO: 2449458
ucuggaguaacauauagac

SEQ ID NO: 2449460 - RNA, 19 nt, Artificial Sequence
  Description of Artificial Sequence: Synthetic oligonucleotide
  Sense strand starting at position 2419 of SEQ ID NO: 1887113
ucuauauguuacuccagau

SEQ ID NO: 2449461 - RNA, 19 nt, Artificial Sequence
  Description of Artificial Sequence: Synthetic oligonucleotide
  Antisense strand to SEQ ID NO: 2449460
aucuggaguaacauauaga

SEQ ID NO: 2449462 - RNA, 19 nt, Artificial Sequence
  Description of Artificial Sequence: Synthetic oligonucleotide
  Sense strand starting at position 2443 of SEQ ID NO: 1887113
ccugaagaaucagcaguua

SEQ ID NO: 2449463 - RNA, 19 nt, Artificial Sequence
  Description of Artificial Sequence: Synthetic oligonucleotide
  Antisense strand to SEQ ID NO: 2449462
uaacugcugauucuucagg

SEQ ID NO: 2449464 - RNA, 19 nt, Artificial Sequence
  Description of Artificial Sequence: Synthetic oligonucleotide
  Sense strand starting at position 3222 of SEQ ID NO: 1887113
gucagugcuacagaagcaa

SEQ ID NO: 2449465 - RNA, 19 nt, Artificial Sequence
  Description of Artificial Sequence: Synthetic oligonucleotide
  Antisense strand to SEQ ID NO: 2449464
uugcuucuguagcacugac

SEQ ID NO: 2449466 - RNA, 19 nt, Artificial Sequence
  Description of Artificial Sequence: Synthetic oligonucleotide
  Sense strand starting at position 3278 of SEQ ID NO: 1887113
ccaagacucccuggauuag

SEQ ID NO: 2449467 - RNA, 19 nt, Artificial Sequence
  Description of Artificial Sequence: Synthetic oligonucleotide
  Antisense strand to SEQ ID NO: 2449466
cuaauccagggagucuugg

SEQ ID NO: 2449468 - RNA, 19 nt, Artificial Sequence
  Description of Artificial Sequence: Synthetic oligonucleotide
  Sense strand starting at position 3293 of SEQ ID NO: 1887113
uuaguauucggugacucua

SEQ ID NO: 2449469 - RNA, 19 nt, Artificial Sequence
  Description of Artificial Sequence: Synthetic oligonucleotide
  Antisense strand to SEQ ID NO: 2449468
uagagucaccgaauacuaa

SEQ ID NO: 2449470 - RNA, 19 nt, Artificial Sequence
  Description of Artificial Sequence: Synthetic oligonucleotide
  Sense strand starting at position 3307 of SEQ ID NO: 1887113
cucuaaugccaucaggguu

SEQ ID NO: 2449471 - RNA, 19 nt, Artificial Sequence
  Description of Artificial Sequence: Synthetic oligonucleotide
  Antisense strand to SEQ ID NO: 2449470
aacccugauggcauuagag

SEQ ID NO: 2449472 - RNA, 19 nt, Artificial Sequence
  Description of Artificial Sequence: Synthetic oligonucleotide
  Sense strand starting at position 3322 of SEQ ID NO: 1887113
gguuuagcucgacaccuaa

SEQ ID NO: 2449473 - RNA, 19 nt, Artificial Sequence
  Description of Artificial Sequence: Synthetic oligonucleotide
  Antisense strand to SEQ ID NO: 2449472
uuaggugucgagcuaaacc

SEQ ID NO: 2449474 - RNA, 19 nt, Artificial Sequence
  Description of Artificial Sequence: Synthetic oligonucleotide
  Sense strand starting at position 3340 of SEQ ID NO: 1887113
aagccuacucuguaggauu

SEQ ID NO: 2449475 - RNA, 19 nt, Artificial Sequence
  Description of Artificial Sequence: Synthetic oligonucleotide
  Antisense strand to SEQ ID NO: 2449474
aauccuacagaguaggcuu

SEQ ID NO: 2449476 - RNA, 19 nt, Artificial Sequence
  Description of Artificial Sequence: Synthetic oligonucleotide
  Sense strand starting at position 3405 of SEQ ID NO: 1887113
agcagagaauuaguuguua

SEQ ID NO: 2449477 - RNA, 19 nt, Artificial Sequence
  Description of Artificial Sequence: Synthetic oligonucleotide
  Antisense strand to SEQ ID NO: 2449476
uaacaacuaauucucugcu

SEQ ID NO: 2449478 - RNA, 19 nt, Artificial Sequence
  Description of Artificial Sequence: Synthetic oligonucleotide
  Sense strand starting at position 3409 of SEQ ID NO: 1887113
gagaauuaguuguuauaga

SEQ ID NO: 2449479 - RNA, 19 nt, Artificial Sequence
  Description of Artificial Sequence: Synthetic oligonucleotide
  Antisense strand to SEQ ID NO: 2449478
ucuauaacaacuaauucuc

SEQ ID NO: 2449480 - RNA, 19 nt, Artificial Sequence
  Description of Artificial Sequence: Synthetic oligonucleotide
  Sense strand starting at position 3512 of SEQ ID NO: 1887113
guuccuaaugcucacagga

SEQ ID NO: 2449481 - RNA, 19 nt, Artificial Sequence
  Description of Artificial Sequence: Synthetic oligonucleotide
  Antisense strand to SEQ ID NO: 2449480
uccugugagcauuaggaac

SEQ ID NO: 2449482 - RNA, 19 nt, Artificial Sequence
  Description of Artificial Sequence: Synthetic oligonucleotide
  Sense strand starting at position 3961 of SEQ ID NO: 1887113
acuacaggcucuuuggaaa

SEQ ID NO: 2449483 - RNA, 19 nt, Artificial Sequence
  Description of Artificial Sequence: Synthetic oligonucleotide
  Antisense strand to SEQ ID NO: 2449482
uuuccaaagagccuguagu

SEQ ID NO: 2449484 - RNA, 19 nt, Artificial Sequence
  Description of Artificial Sequence: Synthetic oligonucleotide
  Sense strand starting at position 40 of SEQ ID NO: 1887114
agagauuagaauuguguuu

SEQ ID NO: 2449485 - RNA, 19 nt, Artificial Sequence
  Description of Artificial Sequence: Synthetic oligonucleotide
  Antisense strand to SEQ ID NO: 2449484
aaacacaauucuaaucucu

SEQ ID NO: 2449486 - RNA, 19 nt, Artificial Sequence
  Description of Artificial Sequence: Synthetic oligonucleotide
  Sense strand starting at position 130 of SEQ ID NO: 1887114
ccauuuagaucugaaggua

SEQ ID NO: 2449487 - RNA, 19 nt, Artificial Sequence
  Description of Artificial Sequence: Synthetic oligonucleotide
  Antisense strand to SEQ ID NO: 2449486
uaccuucagaucuaaaugg

SEQ ID NO: 2449488 - RNA, 19 nt, Artificial Sequence
  Description of Artificial Sequence: Synthetic oligonucleotide
  Sense strand starting at position 133 of SEQ ID NO: 1887114
uuuagaucugaagguaaau

SEQ ID NO: 2449489 - RNA, 19 nt, Artificial Sequence
  Description of Artificial Sequence: Synthetic oligonucleotide
  Antisense strand to SEQ ID NO: 2449488
auuuaccuucagaucuaaa

SEQ ID NO: 2449490 - RNA, 19 nt, Artificial Sequence
  Description of Artificial Sequence: Synthetic oligonucleotide
  Sense strand starting at position 204 of SEQ ID NO: 1887114
aggcaaugcugagucaauc

SEQ ID NO: 2449491 - RNA, 19 nt, Artificial Sequence
  Description of Artificial Sequence: Synthetic oligonucleotide
  Antisense strand to SEQ ID NO: 2449490
gauugacucagcauugccu

SEQ ID NO: 2449492 - RNA, 19 nt, Artificial Sequence
  Description of Artificial Sequence: Synthetic oligonucleotide
  Sense strand starting at position 212 of SEQ ID NO: 1887114
cugagucaaucucuugaca

SEQ ID NO: 2449493 - RNA, 19 nt, Artificial Sequence
  Description of Artificial Sequence: Synthetic oligonucleotide
  Antisense strand to SEQ ID NO: 2449492
ugucaagagauugacucag

SEQ ID NO: 2449494 - RNA, 19 nt, Artificial Sequence
  Description of Artificial Sequence: Synthetic oligonucleotide
  Sense strand starting at position 215 of SEQ ID NO: 1887114
agucaaucucuugacagcu

SEQ ID NO: 2449495 - RNA, 19 nt, Artificial Sequence
  Description of Artificial Sequence: Synthetic oligonucleotide
  Antisense strand to SEQ ID NO: 2449494
agcugucaagagauugacu

SEQ ID NO: 2449496 - RNA, 19 nt, Artificial Sequence
  Description of Artificial Sequence: Synthetic oligonucleotide
  Sense strand starting at position 229 of SEQ ID NO: 1887114
cagcuuuaggcugugugua

SEQ ID NO: 2449497 - RNA, 19 nt, Artificial Sequence
  Description of Artificial Sequence: Synthetic oligonucleotide
  Antisense strand to SEQ ID NO: 2449496
uacacacagccuaaagcug

SEQ ID NO: 2449498 - RNA, 19 nt, Artificial Sequence
  Description of Artificial Sequence: Synthetic oligonucleotide
  Sense strand starting at position 292 of SEQ ID NO: 1887114
gguuaccaaucuguuuaau

SEQ ID NO: 2449499 - RNA, 19 nt, Artificial Sequence
  Description of Artificial Sequence: Synthetic oligonucleotide
  Antisense strand to SEQ ID NO: 2449498
auuaaacagauugguaacc

SEQ ID NO: 2449500 - RNA, 19 nt, Artificial Sequence
  Description of Artificial Sequence: Synthetic oligonucleotide
  Sense strand starting at position 538 of SEQ ID NO: 1887114
caaggacucuucuucgaug

SEQ ID NO: 2449501 - RNA, 19 nt, Artificial Sequence
  Description of Artificial Sequence: Synthetic oligonucleotide
  Antisense strand to SEQ ID NO: 2449500
caucgaagaagaguccuug

SEQ ID NO: 2449502 - RNA, 19 nt, Artificial Sequence
  Description of Artificial Sequence: Synthetic oligonucleotide
  Sense strand starting at position 540 of SEQ ID NO: 1887114
aggacucuucuucgaugga

SEQ ID NO: 2449503 - RNA, 19 nt, Artificial Sequence
  Description of Artificial Sequence: Synthetic oligonucleotide
  Antisense strand to SEQ ID NO: 2449502
uccaucgaagaagaguccu

SEQ ID NO: 2449504 - RNA, 19 nt, Artificial Sequence
  Description of Artificial Sequence: Synthetic oligonucleotide
  Sense strand starting at position 543 of SEQ ID NO: 1887114
acucuucuucgauggacua

SEQ ID NO: 2449505 - RNA, 19 nt, Artificial Sequence
  Description of Artificial Sequence: Synthetic oligonucleotide
  Antisense strand to SEQ ID NO: 2449504
uaguccaucgaagaagagu

SEQ ID NO: 2449506 - RNA, 19 nt, Artificial Sequence
  Description of Artificial Sequence: Synthetic oligonucleotide
  Sense strand starting at position 544 of SEQ ID NO: 1887114
cucuucuucgauggacuau

SEQ ID NO: 2449507 - RNA, 19 nt, Artificial Sequence
  Description of Artificial Sequence: Synthetic oligonucleotide
  Antisense strand to SEQ ID NO: 2449506
auaguccaucgaagaagag

SEQ ID NO: 2449508 - RNA, 19 nt, Artificial Sequence
  Description of Artificial Sequence: Synthetic oligonucleotide
  Sense strand starting at position 600 of SEQ ID NO: 1887114
ugccgauacaucuagguuu

SEQ ID NO: 2449509 - RNA, 19 nt, Artificial Sequence
  Description of Artificial Sequence: Synthetic oligonucleotide
  Antisense strand to SEQ ID NO: 2449508
aaaccuagauguaucggca

SEQ ID NO: 2449510 - RNA, 19 nt, Artificial Sequence
  Description of Artificial Sequence: Synthetic oligonucleotide
  Sense strand starting at position 602 of SEQ ID NO: 1887114
ccgauacaucuagguuuga

SEQ ID NO: 2449511 - RNA, 19 nt, Artificial Sequence
  Description of Artificial Sequence: Synthetic oligonucleotide
  Antisense strand to SEQ ID NO: 2449510
ucaaaccuagauguaucgg

SEQ ID NO: 2449512 - RNA, 19 nt, Artificial Sequence
  Description of Artificial Sequence: Synthetic oligonucleotide
  Sense strand starting at position 603 of SEQ ID NO: 1887114
cgauacaucuagguuugaa

SEQ ID NO: 2449513 - RNA, 19 nt, Artificial Sequence
  Description of Artificial Sequence: Synthetic oligonucleotide
  Antisense strand to SEQ ID NO: 2449512
uucaaaccuagauguaucg

SEQ ID NO: 2449514 - RNA, 19 nt, Artificial Sequence
  Description of Artificial Sequence: Synthetic oligonucleotide
  Sense strand starting at position 683 of SEQ ID NO: 1887114
uuacuaaggcucuggucaa

SEQ ID NO: 2449515 - RNA, 19 nt, Artificial Sequence
  Description of Artificial Sequence: Synthetic oligonucleotide
  Antisense strand to SEQ ID NO: 2449514
uugaccagagccuuaguaa

SEQ ID NO: 2449516 - RNA, 19 nt, Artificial Sequence
  Description of Artificial Sequence: Synthetic oligonucleotide
  Sense strand starting at position 803 of SEQ ID NO: 1887114
cguauuccuggccaaauaa

SEQ ID NO: 2449517 - RNA, 19 nt, Artificial Sequence
  Description of Artificial Sequence: Synthetic oligonucleotide
  Antisense strand to SEQ ID NO: 2449516
uuauuuggccaggaauacg

SEQ ID NO: 2449518 - RNA, 19 nt, Artificial Sequence
  Description of Artificial Sequence: Synthetic oligonucleotide
  Sense strand starting at position 897 of SEQ ID NO: 1887114
aucagagaauuggucuaua

SEQ ID NO: 2449519 - RNA, 19 nt, Artificial Sequence
  Description of Artificial Sequence: Synthetic oligonucleotide
  Antisense strand to SEQ ID NO: 2449518
uauagaccaauucucugau

SEQ ID NO: 2449520 - RNA, 19 nt, Artificial Sequence
  Description of Artificial Sequence: Synthetic oligonucleotide
  Sense strand starting at position 941 of SEQ ID NO: 1887114
ugaaacauuugguaauuga

SEQ ID NO: 2449521 - RNA, 19 nt, Artificial Sequence
  Description of Artificial Sequence: Synthetic oligonucleotide
  Antisense strand to SEQ ID NO: 2449520
ucaauuaccaaauguuuca

SEQ ID NO: 2449522 - RNA, 19 nt, Artificial Sequence
  Description of Artificial Sequence: Synthetic oligonucleotide
  Sense strand starting at position 1061 of SEQ ID NO: 1887114
gugcaauaccuguaacuuu

SEQ ID NO: 2449523 - RNA, 19 nt, Artificial Sequence
  Description of Artificial Sequence: Synthetic oligonucleotide
  Antisense strand to SEQ ID NO: 2449522
aaaguuacagguauugcac

SEQ ID NO: 2449524 - RNA, 19 nt, Artificial Sequence
  Description of Artificial Sequence: Synthetic oligonucleotide
  Sense strand starting at position 1167 of SEQ ID NO: 1887114
aguugaacugauuguuucu

SEQ ID NO: 2449525 - RNA, 19 nt, Artificial Sequence
  Description of Artificial Sequence: Synthetic oligonucleotide
  Antisense strand to SEQ ID NO: 2449524
agaaacaaucaguucaacu

SEQ ID NO: 2449526 - RNA, 19 nt, Artificial Sequence
  Description of Artificial Sequence: Synthetic oligonucleotide
  Sense strand starting at position 1173 of SEQ ID NO: 1887114
acugauuguuucucuaaga

SEQ ID NO: 2449527 - RNA, 19 nt, Artificial Sequence
  Description of Artificial Sequence: Synthetic oligonucleotide
  Antisense strand to SEQ ID NO: 2449526
ucuuagagaaacaaucagu

SEQ ID NO: 2449528 - RNA, 19 nt, Artificial Sequence
  Description of Artificial Sequence: Synthetic oligonucleotide
  Sense strand starting at position 1174 of SEQ ID NO: 1887114
cugauuguuucucuaagag

SEQ ID NO: 2449529 - RNA, 19 nt, Artificial Sequence
  Description of Artificial Sequence: Synthetic oligonucleotide
  Antisense strand to SEQ ID NO: 2449528
cucuuagagaaacaaucag

SEQ ID NO: 2449530 - RNA, 19 nt, Artificial Sequence
  Description of Artificial Sequence: Synthetic oligonucleotide
  Sense strand starting at position 1180 of SEQ ID NO: 1887114
guuucucuaagaggauagu

SEQ ID NO: 2449531 - RNA, 19 nt, Artificial Sequence
  Description of Artificial Sequence: Synthetic oligonucleotide
  Antisense strand to SEQ ID NO: 2449530
acuauccucuuagagaaac

SEQ ID NO: 2449532 - RNA, 19 nt, Artificial Sequence
  Description of Artificial Sequence: Synthetic oligonucleotide
  Sense strand starting at position 1245 of SEQ ID NO: 1887114
gaaacuggucccuggagga

SEQ ID NO: 2449533 - RNA, 19 nt, Artificial Sequence
  Description of Artificial Sequence: Synthetic oligonucleotide
  Antisense strand to SEQ ID NO: 2449532
uccuccagggaccaguuuc

SEQ ID NO: 2449534 - RNA, 19 nt, Artificial Sequence
  Description of Artificial Sequence: Synthetic oligonucleotide
  Sense strand starting at position 1255 of SEQ ID NO: 1887114
ccuggaggaucagccaaau

SEQ ID NO: 2449535 - RNA, 19 nt, Artificial Sequence
  Description of Artificial Sequence: Synthetic oligonucleotide
  Antisense strand to SEQ ID NO: 2449534
auuuggcugauccuccagg

SEQ ID NO: 2449536 - RNA, 19 nt, Artificial Sequence
  Description of Artificial Sequence: Synthetic oligonucleotide
  Sense strand starting at position 1284 of SEQ ID NO: 1887114
cugcaauacuggccaauau

SEQ ID NO: 2449537 - RNA, 19 nt, Artificial Sequence
  Description of Artificial Sequence: Synthetic oligonucleotide
  Antisense strand to SEQ ID NO: 2449536
auauuggccaguauugcag

SEQ ID NO: 2449538 - RNA, 19 nt, Artificial Sequence
  Description of Artificial Sequence: Synthetic oligonucleotide
  Sense strand starting at position 1285 of SEQ ID NO: 1887114
ugcaauacuggccaauauu

SEQ ID NO: 2449539 - RNA, 19 nt, Artificial Sequence
  Description of Artificial Sequence: Synthetic oligonucleotide
  Antisense strand to SEQ ID NO: 2449538
aauauuggccaguauugca

SEQ ID NO: 2449540 - RNA, 19 nt, Artificial Sequence
  Description of Artificial Sequence: Synthetic oligonucleotide
  Sense strand starting at position 1341 of SEQ ID NO: 1887114
aaaugcagacguuggauaa

SEQ ID NO: 2449541 - RNA, 19 nt, Artificial Sequence
  Description of Artificial Sequence: Synthetic oligonucleotide
  Antisense strand to SEQ ID NO: 2449540
uuauccaacgucugcauuu

SEQ ID NO: 2449542 - RNA, 19 nt, Artificial Sequence
  Description of Artificial Sequence: Synthetic oligonucleotide
  Sense strand starting at position 1342 of SEQ ID NO: 1887114
aaugcagacguuggauaaa

SEQ ID NO: 2449543 - RNA, 19 nt, Artificial Sequence
  Description of Artificial Sequence: Synthetic oligonucleotide
  Antisense strand to SEQ ID NO: 2449542
uuuauccaacgucugcauu

SEQ ID NO: 2449544 - RNA, 19 nt, Artificial Sequence
  Description of Artificial Sequence: Synthetic oligonucleotide
  Sense strand starting at position 1567 of SEQ ID NO: 1887114
augaauuaggguuaugugu

SEQ ID NO: 2449545 - RNA, 19 nt, Artificial Sequence
  Description of Artificial Sequence: Synthetic oligonucleotide
  Antisense strand to SEQ ID NO: 2449544
acacauaacccuaauucau

SEQ ID NO: 2449546 - RNA, 19 nt, Artificial Sequence
  Description of Artificial Sequence: Synthetic oligonucleotide
  Sense strand starting at position 1586 of SEQ ID NO: 1887114
cucggauucccagacauua

SEQ ID NO: 2449547 - RNA, 19 nt, Artificial Sequence
  Description of Artificial Sequence: Synthetic oligonucleotide
  Antisense strand to SEQ ID NO: 2449546
uaaugucugggaauccgag

SEQ ID NO: 2449548 - RNA, 19 nt, Artificial Sequence
  Description of Artificial Sequence: Synthetic oligonucleotide
  Sense strand starting at position 2552 of SEQ ID NO: 1887114
gguuguccaccuugaggga

SEQ ID NO: 2449549 - RNA, 19 nt, Artificial Sequence
  Description of Artificial Sequence: Synthetic oligonucleotide
  Antisense strand to SEQ ID NO: 2449548
ucccucaagguggacaacc

SEQ ID NO: 2449550 - RNA, 19 nt, Artificial Sequence
  Description of Artificial Sequence: Synthetic oligonucleotide
  Sense strand starting at position 2559 of SEQ ID NO: 1887114
caccuugagggaggucaua

SEQ ID NO: 2449551 - RNA, 19 nt, Artificial Sequence
  Description of Artificial Sequence: Synthetic oligonucleotide
  Antisense strand to SEQ ID NO: 2449550
uaugaccucccucaaggug

SEQ ID NO: 2449552 - RNA, 19 nt, Artificial Sequence
  Description of Artificial Sequence: Synthetic oligonucleotide
  Sense strand starting at position 2797 of SEQ ID NO: 1887114
gccucugcgcccguuuaua

SEQ ID NO: 2449553 - RNA, 19 nt, Artificial Sequence
  Description of Artificial Sequence: Synthetic oligonucleotide
  Antisense strand to SEQ ID NO: 2449552
uauaaacgggcgcagaggc

SEQ ID NO: 2449554 - RNA, 19 nt, Artificial Sequence
  Description of Artificial Sequence: Synthetic oligonucleotide
  Sense strand starting at position 3925 of SEQ ID NO: 1887114
cuuugaagugcccaucaua

SEQ ID NO: 2449555 - RNA, 19 nt, Artificial Sequence
  Description of Artificial Sequence: Synthetic oligonucleotide
  Antisense strand to SEQ ID NO: 2449554
uaugaugggcacuucaaag

SEQ ID NO: 2449556 - RNA, 19 nt, Artificial Sequence
  Description of Artificial Sequence: Synthetic oligonucleotide
  Sense strand starting at position 3928 of SEQ ID NO: 1887114
ugaagugcccaucauaaug

SEQ ID NO: 2449557 - RNA, 19 nt, Artificial Sequence
  Description of Artificial Sequence: Synthetic oligonucleotide
  Antisense strand to SEQ ID NO: 2449556
cauuaugaugggcacuuca

SEQ ID NO: 2449558 - RNA, 19 nt, Artificial Sequence
  Description of Artificial Sequence: Synthetic oligonucleotide
  Sense strand starting at position 3978 of SEQ ID NO: 1887114
aucuaauagcgcgcuuuaa

SEQ ID NO: 2449559 - RNA, 19 nt, Artificial Sequence
  Description of Artificial Sequence: Synthetic oligonucleotide
  Antisense strand to SEQ ID NO: 2449558
uuaaagcgcgcuauuagau

SEQ ID NO: 2449560 - RNA, 19 nt, Artificial Sequence
  Description of Artificial Sequence: Synthetic oligonucleotide
  Sense strand starting at position 3979 of SEQ ID NO: 1887114
ucuaauagcgcgcuuuaau

SEQ ID NO: 2449561 - RNA, 19 nt, Artificial Sequence
  Description of Artificial Sequence: Synthetic oligonucleotide
  Antisense strand to SEQ ID NO: 2449560
auuaaagcgcgcuauuaga

SEQ ID NO: 2449562 - RNA, 19 nt, Artificial Sequence
  Description of Artificial Sequence: Synthetic oligonucleotide
  Sense strand starting at position 3980 of SEQ ID NO: 1887114
cuaauagcgcgcuuuaauu

SEQ ID NO: 2449563 - RNA, 19 nt, Artificial Sequence
  Description of Artificial Sequence: Synthetic oligonucleotide
  Antisense strand to SEQ ID NO: 2449562
aauuaaagcgcgcuauuag

SEQ ID NO: 2449564 - RNA, 19 nt, Artificial Sequence
  Description of Artificial Sequence: Synthetic oligonucleotide
  Sense strand starting at position 73 of SEQ ID NO: 1887115
ugaccugucccagguaaca

SEQ ID NO: 2449565 - RNA, 19 nt, Artificial Sequence
  Description of Artificial Sequence: Synthetic oligonucleotide
  Antisense strand to SEQ ID NO: 2449564
uguuaccugggacagguca

SEQ ID NO: 2449566 - RNA, 19 nt, Artificial Sequence
  Description of Artificial Sequence: Synthetic oligonucleotide
  Sense strand starting at position 301 of SEQ ID NO: 1887115
gcuccagccgugucuuuau

SEQ ID NO: 2449567 - RNA, 19 nt, Artificial Sequence
  Description of Artificial Sequence: Synthetic oligonucleotide
  Antisense strand to SEQ ID NO: 2449566
auaaagacacggcuggagc

SEQ ID NO: 2449568 - RNA, 19 nt, Artificial Sequence
  Description of Artificial Sequence: Synthetic oligonucleotide
  Sense strand starting at position 309 of SEQ ID NO: 1887115
cgugucuuuaugucaagca

SEQ ID NO: 2449569 - RNA, 19 nt, Artificial Sequence
  Description of Artificial Sequence: Synthetic oligonucleotide
  Antisense strand to SEQ ID NO: 2449568
ugcuugacauaaagacacg

SEQ ID NO: 2449570 - RNA, 19 nt, Artificial Sequence
  Description of Artificial Sequence: Synthetic oligonucleotide
  Sense strand starting at position 452 of SEQ ID NO: 1887115
cagugaguucuccagccca

SEQ ID NO: 2449571 - RNA, 19 nt, Artificial Sequence
  Description of Artificial Sequence: Synthetic oligonucleotide
  Antisense strand to SEQ ID NO: 2449570
ugggcuggagaacucacug

SEQ ID NO: 2449572 - RNA, 19 nt, Artificial Sequence
  Description of Artificial Sequence: Synthetic oligonucleotide
  Sense strand starting at position 582 of SEQ ID NO: 1887115
gcuugagaacuccaaggcu

SEQ ID NO: 2449573 - RNA, 19 nt, Artificial Sequence
  Description of Artificial Sequence: Synthetic oligonucleotide
  Antisense strand to SEQ ID NO: 2449572
agccuuggaguucucaagc

SEQ ID NO: 2449574 - RNA, 19 nt, Artificial Sequence
  Description of Artificial Sequence: Synthetic oligonucleotide
  Sense strand starting at position 585 of SEQ ID NO: 1887115
ugagaacuccaaggcuuaa

SEQ ID NO: 2449575 - RNA, 19 nt, Artificial Sequence
  Description of Artificial Sequence: Synthetic oligonucleotide
  Antisense strand to SEQ ID NO: 2449574
uuaagccuuggaguucuca

SEQ ID NO: 2449576 - RNA, 19 nt, Artificial Sequence
  Description of Artificial Sequence: Synthetic oligonucleotide
  Sense strand starting at position 711 of SEQ ID NO: 1887115
gugcgucucaggucuguga

SEQ ID NO: 2449577 - RNA, 19 nt, Artificial Sequence
  Description of Artificial Sequence: Synthetic oligonucleotide
  Antisense strand to SEQ ID NO: 2449576
ucacagaccugagacgcac

SEQ ID NO: 2449578 - RNA, 19 nt, Artificial Sequence
  Description of Artificial Sequence: Synthetic oligonucleotide
  Sense strand starting at position 715 of SEQ ID NO: 1887115
gucucaggucugugaucuc

SEQ ID NO: 2449579 - RNA, 19 nt, Artificial Sequence
  Description of Artificial Sequence: Synthetic oligonucleotide
  Antisense strand to SEQ ID NO: 2449578
gagaucacagaccugagac

SEQ ID NO: 2449580 - RNA, 19 nt, Artificial Sequence
  Description of Artificial Sequence: Synthetic oligonucleotide
  Sense strand starting at position 724 of SEQ ID NO: 1887115
cugugaucuccgucuugcu

SEQ ID NO: 2449581 - RNA, 19 nt, Artificial Sequence
  Description of Artificial Sequence: Synthetic oligonucleotide
  Antisense strand to SEQ ID NO: 2449580
agcaagacggagaucacag

SEQ ID NO: 2449582 - RNA, 19 nt, Artificial Sequence
  Description of Artificial Sequence: Synthetic oligonucleotide
  Sense strand starting at position 737 of SEQ ID NO: 1887115
cuugcuggucuggaucauu

SEQ ID NO: 2449583 - RNA, 19 nt, Artificial Sequence
  Description of Artificial Sequence: Synthetic oligonucleotide
  Antisense strand to SEQ ID NO: 2449582
aaugauccagaccagcaag

SEQ ID NO: 2449584 - RNA, 19 nt, Artificial Sequence
  Description of Artificial Sequence: Synthetic oligonucleotide
  Sense strand starting at position 745 of SEQ ID NO: 1887115
ucuggaucauuucuguguu

SEQ ID NO: 2449585 - RNA, 19 nt, Artificial Sequence
  Description of Artificial Sequence: Synthetic oligonucleotide
  Antisense strand to SEQ ID NO: 2449584
aacacagaaaugauccaga

SEQ ID NO: 2449586 - RNA, 19 nt, Artificial Sequence
  Description of Artificial Sequence: Synthetic oligonucleotide
  Sense strand starting at position 796 of SEQ ID NO: 1887115
guaggucaugcacaacaga

SEQ ID NO: 2449587 - RNA, 19 nt, Artificial Sequence
  Description of Artificial Sequence: Synthetic oligonucleotide
  Antisense strand to SEQ ID NO: 2449586
ucuguugugcaugaccuac

SEQ ID NO: 2449588 - RNA, 19 nt, Artificial Sequence
  Description of Artificial Sequence: Synthetic oligonucleotide
  Sense strand starting at position 1100 of SEQ ID NO: 1887115
agagucuggcgucacacau

SEQ ID NO: 2449589 - RNA, 19 nt, Artificial Sequence
  Description of Artificial Sequence: Synthetic oligonucleotide
  Antisense strand to SEQ ID NO: 2449588
augugugacgccagacucu

SEQ ID NO: 2449590 - RNA, 19 nt, Artificial Sequence
  Description of Artificial Sequence: Synthetic oligonucleotide
  Sense strand starting at position 1127 of SEQ ID NO: 1887115
uggcucugcccguaacaca

SEQ ID NO: 2449591 - RNA, 19 nt, Artificial Sequence
  Description of Artificial Sequence: Synthetic oligonucleotide
  Antisense strand to SEQ ID NO: 2449590
uguguuacgggcagagcca

SEQ ID NO: 2449592 - RNA, 19 nt, Artificial Sequence
  Description of Artificial Sequence: Synthetic oligonucleotide
  Sense strand starting at position 1172 of SEQ ID NO: 1887115
ugaagagguuuggucacau

SEQ ID NO: 2449593 - RNA, 19 nt, Artificial Sequence
  Description of Artificial Sequence: Synthetic oligonucleotide
  Antisense strand to SEQ ID NO: 2449592
augugaccaaaccucuuca

SEQ ID NO: 2449594 - RNA, 19 nt, Artificial Sequence
  Description of Artificial Sequence: Synthetic oligonucleotide
  Sense strand starting at position 1940 of SEQ ID NO: 1887115
ggccaugaucugcaggaga

SEQ ID NO: 2449595 - RNA, 19 nt, Artificial Sequence
  Description of Artificial Sequence: Synthetic oligonucleotide
  Antisense strand to SEQ ID NO: 2449594
ucuccugcagaucauggcc

SEQ ID NO: 2449596 - RNA, 19 nt, Artificial Sequence
  Description of Artificial Sequence: Synthetic oligonucleotide
  Sense strand starting at position 1955 of SEQ ID NO: 1887115
gagacagagucggugucua

SEQ ID NO: 2449597 - RNA, 19 nt, Artificial Sequence
  Description of Artificial Sequence: Synthetic oligonucleotide
  Antisense strand to SEQ ID NO: 2449596
uagacaccgacucugucuc

SEQ ID NO: 2449598 - RNA, 19 nt, Artificial Sequence
  Description of Artificial Sequence: Synthetic oligonucleotide
  Sense strand starting at position 2215 of SEQ ID NO: 1887115
caguauugccugugggaau

SEQ ID NO: 2449599 - RNA, 19 nt, Artificial Sequence
  Description of Artificial Sequence: Synthetic oligonucleotide
  Antisense strand to SEQ ID NO: 2449598
auucccacaggcaauacug

SEQ ID NO: 2449600 - RNA, 19 nt, Artificial Sequence
  Description of Artificial Sequence: Synthetic oligonucleotide
  Sense strand starting at position 2228 of SEQ ID NO: 1887115
gggaauugguugcccagga

SEQ ID NO: 2449601 - RNA, 19 nt, Artificial Sequence
  Description of Artificial Sequence: Synthetic oligonucleotide
  Antisense strand to SEQ ID NO: 2449600
uccugggcaaccaauuccc

SEQ ID NO: 2449602 - RNA, 19 nt, Artificial Sequence
  Description of Artificial Sequence: Synthetic oligonucleotide
  Sense strand starting at position 2232 of SEQ ID NO: 1887115
auugguugcccaggagagu

SEQ ID NO: 2449603 - RNA, 19 nt, Artificial Sequence
  Description of Artificial Sequence: Synthetic oligonucleotide
  Antisense strand to SEQ ID NO: 2449602
acucuccugggcaaccaau

SEQ ID NO: 2449604 - RNA, 19 nt, Artificial Sequence
  Description of Artificial Sequence: Synthetic oligonucleotide
  Sense strand starting at position 2315 of SEQ ID NO: 1887115
uggacaacucauggucacu

SEQ ID NO: 2449605 - RNA, 19 nt, Artificial Sequence
  Description of Artificial Sequence: Synthetic oligonucleotide
  Antisense strand to SEQ ID NO: 2449604
agugaccaugaguugucca

SEQ ID NO: 2449606 - RNA, 19 nt, Artificial Sequence
  Description of Artificial Sequence: Synthetic oligonucleotide
  Sense strand starting at position 2465 of SEQ ID NO: 1887115
guggcagaauguguaauga

SEQ ID NO: 2449607 - RNA, 19 nt, Artificial Sequence
  Description of Artificial Sequence: Synthetic oligonucleotide
  Antisense strand to SEQ ID NO: 2449606
ucauuacacauucugccac

SEQ ID NO: 2449608 - RNA, 19 nt, Artificial Sequence
  Description of Artificial Sequence: Synthetic oligonucleotide
  Sense strand starting at position 2484 of SEQ ID NO: 1887115
guucccaggucuccuaaga

SEQ ID NO: 2449609 - RNA, 19 nt, Artificial Sequence
  Description of Artificial Sequence: Synthetic oligonucleotide
  Antisense strand to SEQ ID NO: 2449608
ucuuaggagaccugggaac

SEQ ID NO: 2449610 - RNA, 19 nt, Artificial Sequence
  Description of Artificial Sequence: Synthetic oligonucleotide
  Sense strand starting at position 2552 of SEQ ID NO: 1887115
gguucuagcaucuggaacu

SEQ ID NO: 2449611 - RNA, 19 nt, Artificial Sequence
  Description of Artificial Sequence: Synthetic oligonucleotide
  Antisense strand to SEQ ID NO: 2449610
aguuccagaugcuagaacc

SEQ ID NO: 2449612 - RNA, 19 nt, Artificial Sequence
  Description of Artificial Sequence: Synthetic oligonucleotide
  Sense strand starting at position 2613 of SEQ ID NO: 1887115
ggaauacuuuaugcagaag

SEQ ID NO: 2449613 - RNA, 19 nt, Artificial Sequence
  Description of Artificial Sequence: Synthetic oligonucleotide
  Antisense strand to SEQ ID NO: 2449612
cuucugcauaaaguauucc

SEQ ID NO: 2449614 - RNA, 19 nt, Artificial Sequence
  Description of Artificial Sequence: Synthetic oligonucleotide
  Sense strand starting at position 2833 of SEQ ID NO: 1887115
gccucuggcucuuuauaau

SEQ ID NO: 2449615 - RNA, 19 nt, Artificial Sequence
  Description of Artificial Sequence: Synthetic oligonucleotide
  Antisense strand to SEQ ID NO: 2449614
auuauaaagagccagaggc

SEQ ID NO: 2449616 - RNA, 19 nt, Artificial Sequence
  Description of Artificial Sequence: Synthetic oligonucleotide
  Sense strand starting at position 2970 of SEQ ID NO: 1887115
uuccaaauuugcugagauu

SEQ ID NO: 2449617 - RNA, 19 nt, Artificial Sequence
  Description of Artificial Sequence: Synthetic oligonucleotide
  Antisense strand to SEQ ID NO: 2449616
aaucucagcaaauuuggaa

SEQ ID NO: 2449618 - RNA, 19 nt, Artificial Sequence
  Description of Artificial Sequence: Synthetic oligonucleotide
  Sense strand starting at position 3025 of SEQ ID NO: 1887115
uuccuugagucagcaguaa

SEQ ID NO: 2449619 - RNA, 19 nt, Artificial Sequence
  Description of Artificial Sequence: Synthetic oligonucleotide
  Antisense strand to SEQ ID NO: 2449618
uuacugcugacucaaggaa

SEQ ID NO: 2449620 - RNA, 19 nt, Artificial Sequence
  Description of Artificial Sequence: Synthetic oligonucleotide
  Sense strand starting at position 3029 of SEQ ID NO: 1887115
uugagucagcaguaacacu

SEQ ID NO: 2449621 - RNA, 19 nt, Artificial Sequence
  Description of Artificial Sequence: Synthetic oligonucleotide
  Antisense strand to SEQ ID NO: 2449620
aguguuacugcugacucaa

SEQ ID NO: 2449622 - RNA, 19 nt, Artificial Sequence
  Description of Artificial Sequence: Synthetic oligonucleotide
  Sense strand starting at position 3047 of SEQ ID NO: 1887115
ugacauuagagcuguguac

SEQ ID NO: 2449623 - RNA, 19 nt, Artificial Sequence
  Description of Artificial Sequence: Synthetic oligonucleotide
  Antisense strand to SEQ ID NO: 2449622
guacacagcucuaauguca

SEQ ID NO: 2449624 - RNA, 19 nt, Artificial Sequence
  Description of Artificial Sequence: Synthetic oligonucleotide
  Sense strand starting at position 3049 of SEQ ID NO: 1887115
acauuagagcuguguacag

SEQ ID NO: 2449625 - RNA, 19 nt, Artificial Sequence
  Description of Artificial Sequence: Synthetic oligonucleotide
  Antisense strand to SEQ ID NO: 2449624
cuguacacagcucuaaugu

SEQ ID NO: 2449626 - RNA, 19 nt, Artificial Sequence
  Description of Artificial Sequence: Synthetic oligonucleotide
  Sense strand starting at position 3139 of SEQ ID NO: 1887115
ugaaguauuggcuguaguc

SEQ ID NO: 2449627 - RNA, 19 nt, Artificial Sequence
  Description of Artificial Sequence: Synthetic oligonucleotide
  Antisense strand to SEQ ID NO: 2449626
gacuacagccaauacuuca

SEQ ID NO: 2449628 - RNA, 19 nt, Artificial Sequence
  Description of Artificial Sequence: Synthetic oligonucleotide
  Sense strand starting at position 3184 of SEQ ID NO: 1887115
ucugguaccagucauggau

SEQ ID NO: 2449629 - RNA, 19 nt, Artificial Sequence
  Description of Artificial Sequence: Synthetic oligonucleotide
  Antisense strand to SEQ ID NO: 2449628
auccaugacugguaccaga

SEQ ID NO: 2449630 - RNA, 19 nt, Artificial Sequence
  Description of Artificial Sequence: Synthetic oligonucleotide
  Sense strand starting at position 3241 of SEQ ID NO: 1887115
guaccuuguccagguagga

SEQ ID NO: 2449631 - RNA, 19 nt, Artificial Sequence
  Description of Artificial Sequence: Synthetic oligonucleotide
  Antisense strand to SEQ ID NO: 2449630
uccuaccuggacaagguac

SEQ ID NO: 2449632 - RNA, 19 nt, Artificial Sequence
  Description of Artificial Sequence: Synthetic oligonucleotide
  Sense strand starting at position 3274 of SEQ ID NO: 1887115
ugagguucugcaugguaau

SEQ ID NO: 2449633 - RNA, 19 nt, Artificial Sequence
  Description of Artificial Sequence: Synthetic oligonucleotide
  Antisense strand to SEQ ID NO: 2449632
auuaccaugcagaaccuca

SEQ ID NO: 2449634 - RNA, 19 nt, Artificial Sequence
  Description of Artificial Sequence: Synthetic oligonucleotide
  Sense strand starting at position 3275 of SEQ ID NO: 1887115
gagguucugcaugguaauu

SEQ ID NO: 2449635 - RNA, 19 nt, Artificial Sequence
  Description of Artificial Sequence: Synthetic oligonucleotide
  Antisense strand to SEQ ID NO: 2449634
aauuaccaugcagaaccuc

SEQ ID NO: 2449636 - RNA, 19 nt, Artificial Sequence
  Description of Artificial Sequence: Synthetic oligonucleotide
  Sense strand starting at position 3467 of SEQ ID NO: 1887115
agaagaagcugagauacuu

SEQ ID NO: 2449637 - RNA, 19 nt, Artificial Sequence
  Description of Artificial Sequence: Synthetic oligonucleotide
  Antisense strand to SEQ ID NO: 2449636
aaguaucucagcuucuucu

SEQ ID NO: 2449638 - RNA, 19 nt, Artificial Sequence
  Description of Artificial Sequence: Synthetic oligonucleotide
  Sense strand starting at position 3476 of SEQ ID NO: 1887115
ugagauacuucggcuucca

SEQ ID NO: 2449639 - RNA, 19 nt, Artificial Sequence
  Description of Artificial Sequence: Synthetic oligonucleotide
  Antisense strand to SEQ ID NO: 2449638
uggaagccgaaguaucuca

SEQ ID NO: 2449640 - RNA, 19 nt, Artificial Sequence
  Description of Artificial Sequence: Synthetic oligonucleotide
  Sense strand starting at position 3593 of SEQ ID NO: 1887115
cagaaaugugguggucaug

SEQ ID NO: 2449641 - RNA, 19 nt, Artificial Sequence
  Description of Artificial Sequence: Synthetic oligonucleotide
  Antisense strand to SEQ ID NO: 2449640
caugaccaccacauuucug

SEQ ID NO: 2449642 - RNA, 19 nt, Artificial Sequence
  Description of Artificial Sequence: Synthetic oligonucleotide
  Sense strand starting at position 3793 of SEQ ID NO: 1887115
ccuugagugggucauguga

SEQ ID NO: 2449643 - RNA, 19 nt, Artificial Sequence
  Description of Artificial Sequence: Synthetic oligonucleotide
  Antisense strand to SEQ ID NO: 2449642
ucacaugacccacucaagg

SEQ ID NO: 2449644 - RNA, 19 nt, Artificial Sequence
  Description of Artificial Sequence: Synthetic oligonucleotide
  Sense strand starting at position 352 of SEQ ID NO: 1887116
augguaucccauuauucuu

SEQ ID NO: 2449645 - RNA, 19 nt, Artificial Sequence
  Description of Artificial Sequence: Synthetic oligonucleotide
  Antisense strand to SEQ ID NO: 2449644
aagaauaaugggauaccau

SEQ ID NO: 2449646 - RNA, 19 nt, Artificial Sequence
  Description of Artificial Sequence: Synthetic oligonucleotide
  Sense strand starting at position 748 of SEQ ID NO: 1887116
uuugcuuucugggcuacaa

SEQ ID NO: 2449647 - RNA, 19 nt, Artificial Sequence
  Description of Artificial Sequence: Synthetic oligonucleotide
  Antisense strand to SEQ ID NO: 2449646
uuguagcccagaaagcaaa

SEQ ID NO: 2449648 - RNA, 19 nt, Artificial Sequence
  Description of Artificial Sequence: Synthetic oligonucleotide
  Sense strand starting at position 1040 of SEQ ID NO: 1887116
ccgccagauccuugggaua

SEQ ID NO: 2449649 - RNA, 19 nt, Artificial Sequence
  Description of Artificial Sequence: Synthetic oligonucleotide
  Antisense strand to SEQ ID NO: 2449648
uaucccaaggaucuggcgg

SEQ ID NO: 2449650 - RNA, 19 nt, Artificial Sequence
  Description of Artificial Sequence: Synthetic oligonucleotide
  Sense strand starting at position 1042 of SEQ ID NO: 1887116
gccagauccuugggauaua

SEQ ID NO: 2449651 - RNA, 19 nt, Artificial Sequence
  Description of Artificial Sequence: Synthetic oligonucleotide
  Antisense strand to SEQ ID NO: 2449650
uauaucccaaggaucuggc

SEQ ID NO: 2449652 - RNA, 19 nt, Artificial Sequence
  Description of Artificial Sequence: Synthetic oligonucleotide
  Sense strand starting at position 1043 of SEQ ID NO: 1887116
ccagauccuugggauauau

SEQ ID NO: 2449653 - RNA, 19 nt, Artificial Sequence
  Description of Artificial Sequence: Synthetic oligonucleotide
  Antisense strand to SEQ ID NO: 2449652
auauaucccaaggaucugg

SEQ ID NO: 2449654 - RNA, 19 nt, Artificial Sequence
  Description of Artificial Sequence: Synthetic oligonucleotide
  Sense strand starting at position 1054 of SEQ ID NO: 1887116
ggauauauguucuuacguu

SEQ ID NO: 2449655 - RNA, 19 nt, Artificial Sequence
  Description of Artificial Sequence: Synthetic oligonucleotide
  Antisense strand to SEQ ID NO: 2449654
aacguaagaacauauaucc

SEQ ID NO: 2449656 - RNA, 19 nt, Artificial Sequence
  Description of Artificial Sequence: Synthetic oligonucleotide
  Sense strand starting at position 1089 of SEQ ID NO: 1887116
cucacuuuggcuugaauua

SEQ ID NO: 2449657 - RNA, 19 nt, Artificial Sequence
  Description of Artificial Sequence: Synthetic oligonucleotide
  Antisense strand to SEQ ID NO: 2449656
uaauucaagccaaagugag

SEQ ID NO: 2449658 - RNA, 19 nt, Artificial Sequence
  Description of Artificial Sequence: Synthetic oligonucleotide
  Sense strand starting at position 1090 of SEQ ID NO: 1887116
ucacuuuggcuugaauuau

SEQ ID NO: 2449659 - RNA, 19 nt, Artificial Sequence
  Description of Artificial Sequence: Synthetic oligonucleotide
  Antisense strand to SEQ ID NO: 2449658
auaauucaagccaaaguga

SEQ ID NO: 2449660 - RNA, 19 nt, Artificial Sequence
  Description of Artificial Sequence: Synthetic oligonucleotide
  Sense strand starting at position 1682 of SEQ ID NO: 1887116
gcugaauuaugcccucuua

SEQ ID NO: 2449661 - RNA, 19 nt, Artificial Sequence
  Description of Artificial Sequence: Synthetic oligonucleotide
  Antisense strand to SEQ ID NO: 2449660
uaagagggcauaauucagc

SEQ ID NO: 2449662 - RNA, 19 nt, Artificial Sequence
  Description of Artificial Sequence: Synthetic oligonucleotide
  Sense strand starting at position 1693 of SEQ ID NO: 1887116
cccucuuaagugugaucau

SEQ ID NO: 2449663 - RNA, 19 nt, Artificial Sequence
  Description of Artificial Sequence: Synthetic oligonucleotide
  Antisense strand to SEQ ID NO: 2449662
augaucacacuuaagaggg

SEQ ID NO: 2449664 - RNA, 19 nt, Artificial Sequence
  Description of Artificial Sequence: Synthetic oligonucleotide
  Sense strand starting at position 1694 of SEQ ID NO: 1887116
ccucuuaagugugaucauu

SEQ ID NO: 2449665 - RNA, 19 nt, Artificial Sequence
  Description of Artificial Sequence: Synthetic oligonucleotide
  Antisense strand to SEQ ID NO: 2449664
aaugaucacacuuaagagg

SEQ ID NO: 2449666 - RNA, 19 nt, Artificial Sequence
  Description of Artificial Sequence: Synthetic oligonucleotide
  Sense strand starting at position 1733 of SEQ ID NO: 1887116
gguuguaguucccagagaa

SEQ ID NO: 2449667 - RNA, 19 nt, Artificial Sequence
  Description of Artificial Sequence: Synthetic oligonucleotide
  Antisense strand to SEQ ID NO: 2449666
uucucugggaacuacaacc

SEQ ID NO: 2449668 - RNA, 19 nt, Artificial Sequence
  Description of Artificial Sequence: Synthetic oligonucleotide
  Sense strand starting at position 1775 of SEQ ID NO: 1887116
aucucuguauccguaacau

SEQ ID NO: 2449669 - RNA, 19 nt, Artificial Sequence
  Description of Artificial Sequence: Synthetic oligonucleotide
  Antisense strand to SEQ ID NO: 2449668
auguuacggauacagagau

SEQ ID NO: 2449670 - RNA, 19 nt, Artificial Sequence
  Description of Artificial Sequence: Synthetic oligonucleotide
  Sense strand starting at position 1779 of SEQ ID NO: 1887116
cuguauccguaacauuuaa

SEQ ID NO: 2449671 - RNA, 19 nt, Artificial Sequence
  Description of Artificial Sequence: Synthetic oligonucleotide
  Antisense strand to SEQ ID NO: 2449670
uuaaauguuacggauacag

SEQ ID NO: 2449672 - RNA, 19 nt, Artificial Sequence
  Description of Artificial Sequence: Synthetic oligonucleotide
  Sense strand starting at position 1807 of SEQ ID NO: 1887116
aggccaauguaucaacaaa

SEQ ID NO: 2449673 - RNA, 19 nt, Artificial Sequence
  Description of Artificial Sequence: Synthetic oligonucleotide
  Antisense strand to SEQ ID NO: 2449672
uuuguugauacauuggccu

SEQ ID NO: 2449674 - RNA, 19 nt, Artificial Sequence
  Description of Artificial Sequence: Synthetic oligonucleotide
  Sense strand starting at position 1848 of SEQ ID NO: 1887116
acaguaacauuguuuauga

SEQ ID NO: 2449675 - RNA, 19 nt, Artificial Sequence
  Description of Artificial Sequence: Synthetic oligonucleotide
  Antisense strand to SEQ ID NO: 2449674
ucauaaacaauguuacugu

SEQ ID NO: 2449676 - RNA, 19 nt, Artificial Sequence
  Description of Artificial Sequence: Synthetic oligonucleotide
  Sense strand starting at position 1881 of SEQ ID NO: 1887116
agggcucucugauacuaac

SEQ ID NO: 2449677 - RNA, 19 nt, Artificial Sequence
  Description of Artificial Sequence: Synthetic oligonucleotide
  Antisense strand to SEQ ID NO: 2449676
guuaguaucagagagcccu

SEQ ID NO: 2449678 - RNA, 19 nt, Artificial Sequence
  Description of Artificial Sequence: Synthetic oligonucleotide
  Sense strand starting at position 1920 of SEQ ID NO: 1887116
guagguccuguuugcagua

SEQ ID NO: 2449679 - RNA, 19 nt, Artificial Sequence
  Description of Artificial Sequence: Synthetic oligonucleotide
  Antisense strand to SEQ ID NO: 2449678
uacugcaaacaggaccuac

SEQ ID NO: 2449680 - RNA, 19 nt, Artificial Sequence
  Description of Artificial Sequence: Synthetic oligonucleotide
  Sense strand starting at position 2127 of SEQ ID NO: 1887116
ugucaccaugcuugacaua

SEQ ID NO: 2449681 - RNA, 19 nt, Artificial Sequence
  Description of Artificial Sequence: Synthetic oligonucleotide
  Antisense strand to SEQ ID NO: 2449680
uaugucaagcauggugaca

SEQ ID NO: 2449682 - RNA, 19 nt, Artificial Sequence
  Description of Artificial Sequence: Synthetic oligonucleotide
  Sense strand starting at position 2279 of SEQ ID NO: 1887116
guaacauaaugugcuuuaa

SEQ ID NO: 2449683 - RNA, 19 nt, Artificial Sequence
  Description of Artificial Sequence: Synthetic oligonucleotide
  Antisense strand to SEQ ID NO: 2449682
uuaaagcacauuauguuac

SEQ ID NO: 2449684 - RNA, 19 nt, Artificial Sequence
  Description of Artificial Sequence: Synthetic oligonucleotide
  Sense strand starting at position 2463 of SEQ ID NO: 1887116
cccuacuugcgaugggaga

SEQ ID NO: 2449685 - RNA, 19 nt, Artificial Sequence
  Description of Artificial Sequence: Synthetic oligonucleotide
  Antisense strand to SEQ ID NO: 2449684
ucucccaucgcaaguaggg

SEQ ID NO: 2449686 - RNA, 19 nt, Artificial Sequence
  Description of Artificial Sequence: Synthetic oligonucleotide
  Sense strand starting at position 2464 of SEQ ID NO: 1887116
ccuacuugcgaugggagaa

SEQ ID NO: 2449687 - RNA, 19 nt, Artificial Sequence
  Description of Artificial Sequence: Synthetic oligonucleotide
  Antisense strand to SEQ ID NO: 2449686
uucucccaucgcaaguagg

SEQ ID NO: 2449688 - RNA, 19 nt, Artificial Sequence
  Description of Artificial Sequence: Synthetic oligonucleotide
  Sense strand starting at position 2786 of SEQ ID NO: 1887116
gugauaacuuaccauagag

SEQ ID NO: 2449689 - RNA, 19 nt, Artificial Sequence
  Description of Artificial Sequence: Synthetic oligonucleotide
  Antisense strand to SEQ ID NO: 2449688
cucuaugguaaguuaucac

SEQ ID NO: 2449690 - RNA, 19 nt, Artificial Sequence
  Description of Artificial Sequence: Synthetic oligonucleotide
  Sense strand starting at position 2818 of SEQ ID NO: 1887116
agucgaugacuuuggaucu

SEQ ID NO: 2449691 - RNA, 19 nt, Artificial Sequence
  Description of Artificial Sequence: Synthetic oligonucleotide
  Antisense strand to SEQ ID NO: 2449690
agauccaaagucaucgacu

SEQ ID NO: 2449692 - RNA, 19 nt, Artificial Sequence
  Description of Artificial Sequence: Synthetic oligonucleotide
  Sense strand starting at position 2970 of SEQ ID NO: 1887116
gguuccuggagccgugaaa

SEQ ID NO: 2449693 - RNA, 19 nt, Artificial Sequence
  Description of Artificial Sequence: Synthetic oligonucleotide
  Antisense strand to SEQ ID NO: 2449692
uuucacggcuccaggaacc

SEQ ID NO: 2449694 - RNA, 19 nt, Artificial Sequence
  Description of Artificial Sequence: Synthetic oligonucleotide
  Sense strand starting at position 2981 of SEQ ID NO: 1887116
ccgugaaagcauuaucucu

SEQ ID NO: 2449695 - RNA, 19 nt, Artificial Sequence
  Description of Artificial Sequence: Synthetic oligonucleotide
  Antisense strand to SEQ ID NO: 2449694
agagauaaugcuuucacgg

SEQ ID NO: 2449696 - RNA, 19 nt, Artificial Sequence
  Description of Artificial Sequence: Synthetic oligonucleotide
  Sense strand starting at position 2983 of SEQ ID NO: 1887116
gugaaagcauuaucucucu

SEQ ID NO: 2449697 - RNA, 19 nt, Artificial Sequence
  Description of Artificial Sequence: Synthetic oligonucleotide
  Antisense strand to SEQ ID NO: 2449696
agagagauaaugcuuucac

SEQ ID NO: 2449698 - RNA, 19 nt, Artificial Sequence
  Description of Artificial Sequence: Synthetic oligonucleotide
  Sense strand starting at position 3041 of SEQ ID NO: 1887116
uccugucuuguagaugaga

SEQ ID NO: 2449699 - RNA, 19 nt, Artificial Sequence
  Description of Artificial Sequence: Synthetic oligonucleotide
  Antisense strand to SEQ ID NO: 2449698
ucucaucuacaagacagga

SEQ ID NO: 2449700 - RNA, 19 nt, Artificial Sequence
  Description of Artificial Sequence: Synthetic oligonucleotide
  Sense strand starting at position 3043 of SEQ ID NO: 1887116
cugucuuguagaugagaag

SEQ ID NO: 2449701 - RNA, 19 nt, Artificial Sequence
  Description of Artificial Sequence: Synthetic oligonucleotide
  Antisense strand to SEQ ID NO: 2449700
cuucucaucuacaagacag

SEQ ID NO: 2449702 - RNA, 19 nt, Artificial Sequence
  Description of Artificial Sequence: Synthetic oligonucleotide
  Sense strand starting at position 3044 of SEQ ID NO: 1887116
ugucuuguagaugagaagu

SEQ ID NO: 2449703 - RNA, 19 nt, Artificial Sequence
  Description of Artificial Sequence: Synthetic oligonucleotide
  Antisense strand to SEQ ID NO: 2449702
acuucucaucuacaagaca

SEQ ID NO: 2449704 - RNA, 19 nt, Artificial Sequence
  Description of Artificial Sequence: Synthetic oligonucleotide
  Sense strand starting at position 3072 of SEQ ID NO: 1887116
cggagaugcuugguuacuu

SEQ ID NO: 2449705 - RNA, 19 nt, Artificial Sequence
  Description of Artificial Sequence: Synthetic oligonucleotide
  Antisense strand to SEQ ID NO: 2449704
aaguaaccaagcaucuccg

SEQ ID NO: 2449706 - RNA, 19 nt, Artificial Sequence
  Description of Artificial Sequence: Synthetic oligonucleotide
  Sense strand starting at position 3073 of SEQ ID NO: 1887116
ggagaugcuugguuacuuu

SEQ ID NO: 2449707 - RNA, 19 nt, Artificial Sequence
  Description of Artificial Sequence: Synthetic oligonucleotide
  Antisense strand to SEQ ID NO: 2449706
aaaguaaccaagcaucucc

SEQ ID NO: 2449708 - RNA, 19 nt, Artificial Sequence
  Description of Artificial Sequence: Synthetic oligonucleotide
  Sense strand starting at position 3331 of SEQ ID NO: 1887116
acaggaaucuugcucugag

SEQ ID NO: 2449709 - RNA, 19 nt, Artificial Sequence
  Description of Artificial Sequence: Synthetic oligonucleotide
  Antisense strand to SEQ ID NO: 2449708
cucagagcaagauuccugu

SEQ ID NO: 2449710 - RNA, 19 nt, Artificial Sequence
  Description of Artificial Sequence: Synthetic oligonucleotide
  Sense strand starting at position 3332 of SEQ ID NO: 1887116
caggaaucuugcucugagu

SEQ ID NO: 2449711 - RNA, 19 nt, Artificial Sequence
  Description of Artificial Sequence: Synthetic oligonucleotide
  Antisense strand to SEQ ID NO: 2449710
acucagagcaagauuccug

SEQ ID NO: 2449712 - RNA, 19 nt, Artificial Sequence
  Description of Artificial Sequence: Synthetic oligonucleotide
  Sense strand starting at position 3334 of SEQ ID NO: 1887116
ggaaucuugcucugagucu

SEQ ID NO: 2449713 - RNA, 19 nt, Artificial Sequence
  Description of Artificial Sequence: Synthetic oligonucleotide
  Antisense strand to SEQ ID NO: 2449712
agacucagagcaagauucc

SEQ ID NO: 2449714 - RNA, 19 nt, Artificial Sequence
  Description of Artificial Sequence: Synthetic oligonucleotide
  Sense strand starting at position 3367 of SEQ ID NO: 1887116
ggaagaauugcuggaccuu

SEQ ID NO: 2449715 - RNA, 19 nt, Artificial Sequence
  Description of Artificial Sequence: Synthetic oligonucleotide
  Antisense strand to SEQ ID NO: 2449714
aagguccagcaauucuucc

SEQ ID NO: 2449716 - RNA, 19 nt, Artificial Sequence
  Description of Artificial Sequence: Synthetic oligonucleotide
  Sense strand starting at position 3382 of SEQ ID NO: 1887116
ccuugucucagaggcguuu

SEQ ID NO: 2449717 - RNA, 19 nt, Artificial Sequence
  Description of Artificial Sequence: Synthetic oligonucleotide
  Antisense strand to SEQ ID NO: 2449716
aaacgccucugagacaagg

SEQ ID NO: 2449718 - RNA, 19 nt, Artificial Sequence
  Description of Artificial Sequence: Synthetic oligonucleotide
  Sense strand starting at position 3460 of SEQ ID NO: 1887116
gaugcauugcuaggucaua

SEQ ID NO: 2449719 - RNA, 19 nt, Artificial Sequence
  Description of Artificial Sequence: Synthetic oligonucleotide
  Antisense strand to SEQ ID NO: 2449718
uaugaccuagcaaugcauc

SEQ ID NO: 2449720 - RNA, 19 nt, Artificial Sequence
  Description of Artificial Sequence: Synthetic oligonucleotide
  Sense strand starting at position 3472 of SEQ ID NO: 1887116
ggucauacagcucauaaag

SEQ ID NO: 2449721 - RNA, 19 nt, Artificial Sequence
  Description of Artificial Sequence: Synthetic oligonucleotide
  Antisense strand to SEQ ID NO: 2449720
cuuuaugagcuguaugacc

SEQ ID NO: 2449722 - RNA, 19 nt, Artificial Sequence
  Description of Artificial Sequence: Synthetic oligonucleotide
  Sense strand starting at position 3957 of SEQ ID NO: 1887116
guggcucgacccuguaauu

SEQ ID NO: 2449723 - RNA, 19 nt, Artificial Sequence
  Description of Artificial Sequence: Synthetic oligonucleotide
  Antisense strand to SEQ ID NO: 2449722
aauuacagggucgagccac

SEQ ID NO: 2449724 - RNA, 19 nt, Artificial Sequence
  Description of Artificial Sequence: Synthetic oligonucleotide
  Sense strand starting at position 537 of SEQ ID NO: 1887117
gagugagacagaggugauu

SEQ ID NO: 2449725 - RNA, 19 nt, Artificial Sequence
  Description of Artificial Sequence: Synthetic oligonucleotide
  Antisense strand to SEQ ID NO: 2449724
aaucaccucugucucacuc

SEQ ID NO: 2449726 - RNA, 19 nt, Artificial Sequence
  Description of Artificial Sequence: Synthetic oligonucleotide
  Sense strand starting at position 734 of SEQ ID NO: 1887117
gcccgugggaucugagagu

SEQ ID NO: 2449727 - RNA, 19 nt, Artificial Sequence
  Description of Artificial Sequence: Synthetic oligonucleotide
  Antisense strand to SEQ ID NO: 2449726
acucucagaucccacgggc

SEQ ID NO: 2449728 - RNA, 19 nt, Artificial Sequence
  Description of Artificial Sequence: Synthetic oligonucleotide
  Sense strand starting at position 890 of SEQ ID NO: 1887117
gucuacaccaggugugaau

SEQ ID NO: 2449729 - RNA, 19 nt, Artificial Sequence
  Description of Artificial Sequence: Synthetic oligonucleotide
  Antisense strand to SEQ ID NO: 2449728
auucacaccugguguagac

SEQ ID NO: 2449730 - RNA, 19 nt, Artificial Sequence
  Description of Artificial Sequence: Synthetic oligonucleotide
  Sense strand starting at position 918 of SEQ ID NO: 1887117
gggcuaggcacucaggaua

SEQ ID NO: 2449731 - RNA, 19 nt, Artificial Sequence
  Description of Artificial Sequence: Synthetic oligonucleotide
  Antisense strand to SEQ ID NO: 2449730
uauccugagugccuagccc

SEQ ID NO: 2449732 - RNA, 19 nt, Artificial Sequence
  Description of Artificial Sequence: Synthetic oligonucleotide
  Sense strand starting at position 1271 of SEQ ID NO: 1887117
acuacucauggccaugauu

SEQ ID NO: 2449733 - RNA, 19 nt, Artificial Sequence
  Description of Artificial Sequence: Synthetic oligonucleotide
  Antisense strand to SEQ ID NO: 2449732
aaucauggccaugaguagu

SEQ ID NO: 2449734 - RNA, 19 nt, Artificial Sequence
  Description of Artificial Sequence: Synthetic oligonucleotide
  Sense strand starting at position 1577 of SEQ ID NO: 1887117
ggccauagucaccaaucuu

SEQ ID NO: 2449735 - RNA, 19 nt, Artificial Sequence
  Description of Artificial Sequence: Synthetic oligonucleotide
  Antisense strand to SEQ ID NO: 2449734
aagauuggugacuauggcc

SEQ ID NO: 2449736 - RNA, 19 nt, Artificial Sequence
  Description of Artificial Sequence: Synthetic oligonucleotide
  Sense strand starting at position 1877 of SEQ ID NO: 1887117
gugcgugggccucaaaugu

SEQ ID NO: 2449737 - RNA, 19 nt, Artificial Sequence
  Description of Artificial Sequence: Synthetic oligonucleotide
  Antisense strand to SEQ ID NO: 2449736
acauuugaggcccacgcac

SEQ ID NO: 2449738 - RNA, 19 nt, Artificial Sequence
  Description of Artificial Sequence: Synthetic oligonucleotide
  Sense strand starting at position 2165 of SEQ ID NO: 1887117
uggguagggucuggaaaga

SEQ ID NO: 2449739 - RNA, 19 nt, Artificial Sequence
  Description of Artificial Sequence: Synthetic oligonucleotide
  Antisense strand to SEQ ID NO: 2449738
ucuuuccagacccuaccca

SEQ ID NO: 2449740 - RNA, 19 nt, Artificial Sequence
  Description of Artificial Sequence: Synthetic oligonucleotide
  Sense strand starting at position 2287 of SEQ ID NO: 1887117
gguagauauuaccacagcu

SEQ ID NO: 2449741 - RNA, 19 nt, Artificial Sequence
  Description of Artificial Sequence: Synthetic oligonucleotide
  Antisense strand to SEQ ID NO: 2449740
agcugugguaauaucuacc

SEQ ID NO: 2449742 - RNA, 19 nt, Artificial Sequence
  Description of Artificial Sequence: Synthetic oligonucleotide
  Sense strand starting at position 2308 of SEQ ID NO: 1887117
cguauuacuucugugcuca

SEQ ID NO: 2449743 - RNA, 19 nt, Artificial Sequence
  Description of Artificial Sequence: Synthetic oligonucleotide
  Antisense strand to SEQ ID NO: 2449742
ugagcacagaaguaauacg

SEQ ID NO: 2449744 - RNA, 19 nt, Artificial Sequence
  Description of Artificial Sequence: Synthetic oligonucleotide
  Sense strand starting at position 2828 of SEQ ID NO: 1887117
guacgcaucucuucgucua

SEQ ID NO: 2449745 - RNA, 19 nt, Artificial Sequence
  Description of Artificial Sequence: Synthetic oligonucleotide
  Antisense strand to SEQ ID NO: 2449744
uagacgaagagaugcguac

SEQ ID NO: 2449746 - RNA, 19 nt, Artificial Sequence
  Description of Artificial Sequence: Synthetic oligonucleotide
  Sense strand starting at position 2829 of SEQ ID NO: 1887117
uacgcaucucuucgucuaa

SEQ ID NO: 2449747 - RNA, 19 nt, Artificial Sequence
  Description of Artificial Sequence: Synthetic oligonucleotide
  Antisense strand to SEQ ID NO: 2449746
uuagacgaagagaugcgua

SEQ ID NO: 2449748 - RNA, 19 nt, Artificial Sequence
  Description of Artificial Sequence: Synthetic oligonucleotide
  Sense strand starting at position 2830 of SEQ ID NO: 1887117
acgcaucucuucgucuaaa

SEQ ID NO: 2449749 - RNA, 19 nt, Artificial Sequence
  Description of Artificial Sequence: Synthetic oligonucleotide
  Antisense strand to SEQ ID NO: 2449748
uuuagacgaagagaugcgu

SEQ ID NO: 2449750 - RNA, 19 nt, Artificial Sequence
  Description of Artificial Sequence: Synthetic oligonucleotide
  Sense strand starting at position 2831 of SEQ ID NO: 1887117
cgcaucucuucgucuaaac

SEQ ID NO: 2449751 - RNA, 19 nt, Artificial Sequence
  Description of Artificial Sequence: Synthetic oligonucleotide
  Antisense strand to SEQ ID NO: 2449750
guuuagacgaagagaugcg

SEQ ID NO: 2449752 - RNA, 19 nt, Artificial Sequence
  Description of Artificial Sequence: Synthetic oligonucleotide
  Sense strand starting at position 2850 of SEQ ID NO: 1887117
cugcaaagugggugucaaa

SEQ ID NO: 2449753 - RNA, 19 nt, Artificial Sequence
  Description of Artificial Sequence: Synthetic oligonucleotide
  Antisense strand to SEQ ID NO: 2449752
uuugacacccacuuugcag

SEQ ID NO: 2449754 - RNA, 19 nt, Artificial Sequence
  Description of Artificial Sequence: Synthetic oligonucleotide
  Sense strand starting at position 2861 of SEQ ID NO: 1887117
gugucaaaccauugucuuc

SEQ ID NO: 2449755 - RNA, 19 nt, Artificial Sequence
  Description of Artificial Sequence: Synthetic oligonucleotide
  Antisense strand to SEQ ID NO: 2449754
gaagacaaugguuugacac

SEQ ID NO: 2449756 - RNA, 19 nt, Artificial Sequence
  Description of Artificial Sequence: Synthetic oligonucleotide
  Sense strand starting at position 2910 of SEQ ID NO: 1887117
cugcauagugguugucuga

SEQ ID NO: 2449757 - RNA, 19 nt, Artificial Sequence
  Description of Artificial Sequence: Synthetic oligonucleotide
  Antisense strand to SEQ ID NO: 2449756
ucagacaaccacuaugcag

SEQ ID NO: 2449758 - RNA, 19 nt, Artificial Sequence
  Description of Artificial Sequence: Synthetic oligonucleotide
  Sense strand starting at position 2917 of SEQ ID NO: 1887117
gugguugucugaugcugca

SEQ ID NO: 2449759 - RNA, 19 nt, Artificial Sequence
  Description of Artificial Sequence: Synthetic oligonucleotide
  Antisense strand to SEQ ID NO: 2449758
ugcagcaucagacaaccac

SEQ ID NO: 2449760 - RNA, 19 nt, Artificial Sequence
  Description of Artificial Sequence: Synthetic oligonucleotide
  Sense strand starting at position 3049 of SEQ ID NO: 1887117
cucaccugugcacgaaauu

SEQ ID NO: 2449761 - RNA, 19 nt, Artificial Sequence
  Description of Artificial Sequence: Synthetic oligonucleotide
  Antisense strand to SEQ ID NO: 2449760
aauuucgugcacaggugag

SEQ ID NO: 2449762 - RNA, 19 nt, Artificial Sequence
  Description of Artificial Sequence: Synthetic oligonucleotide
  Sense strand starting at position 3058 of SEQ ID NO: 1887117
gcacgaaauuguugcgaug

SEQ ID NO: 2449763 - RNA, 19 nt, Artificial Sequence
  Description of Artificial Sequence: Synthetic oligonucleotide
  Antisense strand to SEQ ID NO: 2449762
caucgcaacaauuucgugc

SEQ ID NO: 2449764 - RNA, 19 nt, Artificial Sequence
  Description of Artificial Sequence: Synthetic oligonucleotide
  Sense strand starting at position 3060 of SEQ ID NO: 1887117
acgaaauuguugcgaugaa

SEQ ID NO: 2449765 - RNA, 19 nt, Artificial Sequence
  Description of Artificial Sequence: Synthetic oligonucleotide
  Antisense strand to SEQ ID NO: 2449764
uucaucgcaacaauuucgu

SEQ ID NO: 2449766 - RNA, 19 nt, Artificial Sequence
  Description of Artificial Sequence: Synthetic oligonucleotide
  Sense strand starting at position 3061 of SEQ ID NO: 1887117
cgaaauuguugcgaugaag

SEQ ID NO: 2449767 - RNA, 19 nt, Artificial Sequence
  Description of Artificial Sequence: Synthetic oligonucleotide
  Antisense strand to SEQ ID NO: 2449766
cuucaucgcaacaauuucg

SEQ ID NO: 2449768 - RNA, 19 nt, Artificial Sequence
  Description of Artificial Sequence: Synthetic oligonucleotide
  Sense strand starting at position 3436 of SEQ ID NO: 1887117
ucccuuggccugugguaga

SEQ ID NO: 2449769 - RNA, 19 nt, Artificial Sequence
  Description of Artificial Sequence: Synthetic oligonucleotide
  Antisense strand to SEQ ID NO: 2449768
ucuaccacaggccaaggga

SEQ ID NO: 2449770 - RNA, 19 nt, Artificial Sequence
  Description of Artificial Sequence: Synthetic oligonucleotide
  Sense strand starting at position 3471 of SEQ ID NO: 1887117
ccaaguggaucugcuugau

SEQ ID NO: 2449771 - RNA, 19 nt, Artificial Sequence
  Description of Artificial Sequence: Synthetic oligonucleotide
  Antisense strand to SEQ ID NO: 2449770
aucaagcagauccacuugg

SEQ ID NO: 2449772 - RNA, 19 nt, Artificial Sequence
  Description of Artificial Sequence: Synthetic oligonucleotide
  Sense strand starting at position 3474 of SEQ ID NO: 1887117
aguggaucugcuugaugga

SEQ ID NO: 2449773 - RNA, 19 nt, Artificial Sequence
  Description of Artificial Sequence: Synthetic oligonucleotide
  Antisense strand to SEQ ID NO: 2449772
uccaucaagcagauccacu

SEQ ID NO: 2449774 - RNA, 19 nt, Artificial Sequence
  Description of Artificial Sequence: Synthetic oligonucleotide
  Sense strand starting at position 1 of SEQ ID NO: 1887118
ggcggaaggucccugaaca

SEQ ID NO: 2449775 - RNA, 19 nt, Artificial Sequence
  Description of Artificial Sequence: Synthetic oligonucleotide
  Antisense strand to SEQ ID NO: 2449774
uguucagggaccuuccgcc

SEQ ID NO: 2449776 - RNA, 19 nt, Artificial Sequence
  Description of Artificial Sequence: Synthetic oligonucleotide
  Sense strand starting at position 283 of SEQ ID NO: 1887118
ccaagauacuuugugugaa

SEQ ID NO: 2449777 - RNA, 19 nt, Artificial Sequence
  Description of Artificial Sequence: Synthetic oligonucleotide
  Antisense strand to SEQ ID NO: 2449776
uucacacaaaguaucuugg

SEQ ID NO: 2449778 - RNA, 19 nt, Artificial Sequence
  Description of Artificial Sequence: Synthetic oligonucleotide
  Sense strand starting at position 284 of SEQ ID NO: 1887118
caagauacuuugugugaag

SEQ ID NO: 2449779 - RNA, 19 nt, Artificial Sequence
  Description of Artificial Sequence: Synthetic oligonucleotide
  Antisense strand to SEQ ID NO: 2449778
cuucacacaaaguaucuug

SEQ ID NO: 2449780 - RNA, 19 nt, Artificial Sequence
  Description of Artificial Sequence: Synthetic oligonucleotide
  Sense strand starting at position 286 of SEQ ID NO: 1887118
agauacuuugugugaagca

SEQ ID NO: 2449781 - RNA, 19 nt, Artificial Sequence
  Description of Artificial Sequence: Synthetic oligonucleotide
  Antisense strand to SEQ ID NO: 2449780
ugcuucacacaaaguaucu

SEQ ID NO: 2449782 - RNA, 19 nt, Artificial Sequence
  Description of Artificial Sequence: Synthetic oligonucleotide
  Sense strand starting at position 287 of SEQ ID NO: 1887118
gauacuuugugugaagcag

SEQ ID NO: 2449783 - RNA, 19 nt, Artificial Sequence
  Description of Artificial Sequence: Synthetic oligonucleotide
  Antisense strand to SEQ ID NO: 2449782
cugcuucacacaaaguauc

SEQ ID NO: 2449784 - RNA, 19 nt, Artificial Sequence
  Description of Artificial Sequence: Synthetic oligonucleotide
  Sense strand starting at position 315 of SEQ ID NO: 1887118
ggucuucacucgcggaaug

SEQ ID NO: 2449785 - RNA, 19 nt, Artificial Sequence
  Description of Artificial Sequence: Synthetic oligonucleotide
  Antisense strand to SEQ ID NO: 2449784
cauuccgcgagugaagacc

SEQ ID NO: 2449786 - RNA, 19 nt, Artificial Sequence
  Description of Artificial Sequence: Synthetic oligonucleotide
  Sense strand starting at position 682 of SEQ ID NO: 1887118
ggccucaccugagaggaau

SEQ ID NO: 2449787 - RNA, 19 nt, Artificial Sequence
  Description of Artificial Sequence: Synthetic oligonucleotide
  Antisense strand to SEQ ID NO: 2449786
auuccucucaggugaggcc

SEQ ID NO: 2449788 - RNA, 19 nt, Artificial Sequence
  Description of Artificial Sequence: Synthetic oligonucleotide
  Sense strand starting at position 700 of SEQ ID NO: 1887118
ugaagaggaugccguuaau

SEQ ID NO: 2449789 - RNA, 19 nt, Artificial Sequence
  Description of Artificial Sequence: Synthetic oligonucleotide
  Antisense strand to SEQ ID NO: 2449788
auuaacggcauccucuuca

SEQ ID NO: 2449790 - RNA, 19 nt, Artificial Sequence
  Description of Artificial Sequence: Synthetic oligonucleotide
  Sense strand starting at position 703 of SEQ ID NO: 1887118
agaggaugccguuaaugac

SEQ ID NO: 2449791 - RNA, 19 nt, Artificial Sequence
  Description of Artificial Sequence: Synthetic oligonucleotide
  Antisense strand to SEQ ID NO: 2449790
gucauuaacggcauccucu

SEQ ID NO: 2449792 - RNA, 19 nt, Artificial Sequence
  Description of Artificial Sequence: Synthetic oligonucleotide
  Sense strand starting at position 874 of SEQ ID NO: 1887118
ugcgguagaucucguucau

SEQ ID NO: 2449793 - RNA, 19 nt, Artificial Sequence
  Description of Artificial Sequence: Synthetic oligonucleotide
  Antisense strand to SEQ ID NO: 2449792
augaacgagaucuaccgca

SEQ ID NO: 2449794 - RNA, 19 nt, Artificial Sequence
  Description of Artificial Sequence: Synthetic oligonucleotide
  Sense strand starting at position 1081 of SEQ ID NO: 1887118
gcaccugcgucuuguagau

SEQ ID NO: 2449795 - RNA, 19 nt, Artificial Sequence
  Description of Artificial Sequence: Synthetic oligonucleotide
  Antisense strand to SEQ ID NO: 2449794
aucuacaagacgcaggugc

SEQ ID NO: 2449796 - RNA, 19 nt, Artificial Sequence
  Description of Artificial Sequence: Synthetic oligonucleotide
  Sense strand starting at position 1087 of SEQ ID NO: 1887118
gcgucuuguagauggugua

SEQ ID NO: 2449797 - RNA, 19 nt, Artificial Sequence
  Description of Artificial Sequence: Synthetic oligonucleotide
  Antisense strand to SEQ ID NO: 2449796
uacaccaucuacaagacgc

SEQ ID NO: 2449798 - RNA, 19 nt, Artificial Sequence
  Description of Artificial Sequence: Synthetic oligonucleotide
  Sense strand starting at position 1088 of SEQ ID NO: 1887118
cgucuuguagaugguguaa

SEQ ID NO: 2449799 - RNA, 19 nt, Artificial Sequence
  Description of Artificial Sequence: Synthetic oligonucleotide
  Antisense strand to SEQ ID NO: 2449798
uuacaccaucuacaagacg

SEQ ID NO: 2449800 - RNA, 19 nt, Artificial Sequence
  Description of Artificial Sequence: Synthetic oligonucleotide
  Sense strand starting at position 1140 of SEQ ID NO: 1887118
ucagcuuugcucucguaga

SEQ ID NO: 2449801 - RNA, 19 nt, Artificial Sequence
  Description of Artificial Sequence: Synthetic oligonucleotide
  Antisense strand to SEQ ID NO: 2449800
ucuacgagagcaaagcuga

SEQ ID NO: 2449802 - RNA, 19 nt, Artificial Sequence
  Description of Artificial Sequence: Synthetic oligonucleotide
  Sense strand starting at position 1141 of SEQ ID NO: 1887118
cagcuuugcucucguagac

SEQ ID NO: 2449803 - RNA, 19 nt, Artificial Sequence
  Description of Artificial Sequence: Synthetic oligonucleotide
  Antisense strand to SEQ ID NO: 2449802
gucuacgagagcaaagcug

SEQ ID NO: 2449804 - RNA, 19 nt, Artificial Sequence
  Description of Artificial Sequence: Synthetic oligonucleotide
  Sense strand starting at position 1142 of SEQ ID NO: 1887118
agcuuugcucucguagacu

SEQ ID NO: 2449805 - RNA, 19 nt, Artificial Sequence
  Description of Artificial Sequence: Synthetic oligonucleotide
  Antisense strand to SEQ ID NO: 2449804
agucuacgagagcaaagcu

SEQ ID NO: 2449806 - RNA, 19 nt, Artificial Sequence
  Description of Artificial Sequence: Synthetic oligonucleotide
  Sense strand starting at position 1919 of SEQ ID NO: 1887118
gccuucugcugguuacuca

SEQ ID NO: 2449807 - RNA, 19 nt, Artificial Sequence
  Description of Artificial Sequence: Synthetic oligonucleotide
  Antisense strand to SEQ ID NO: 2449806
ugaguaaccagcagaaggc

SEQ ID NO: 2449808 - RNA, 19 nt, Artificial Sequence
  Description of Artificial Sequence: Synthetic oligonucleotide
  Sense strand starting at position 2424 of SEQ ID NO: 1887118
ucgauaucacgccacuaca

SEQ ID NO: 2449809 - RNA, 19 nt, Artificial Sequence
  Description of Artificial Sequence: Synthetic oligonucleotide
  Antisense strand to SEQ ID NO: 2449808
uguaguggcgugauaucga

SEQ ID NO: 2449810 - RNA, 19 nt, Artificial Sequence
  Description of Artificial Sequence: Synthetic oligonucleotide
  Sense strand starting at position 2973 of SEQ ID NO: 1887118
gaggguaccucugcguagu

SEQ ID NO: 2449811 - RNA, 19 nt, Artificial Sequence
  Description of Artificial Sequence: Synthetic oligonucleotide
  Antisense strand to SEQ ID NO: 2449810
acuacgcagagguacccuc

SEQ ID NO: 2449812 - RNA, 19 nt, Artificial Sequence
  Description of Artificial Sequence: Synthetic oligonucleotide
  Sense strand starting at position 2983 of SEQ ID NO: 1887118
cugcguagucgcccaugau

SEQ ID NO: 2449813 - RNA, 19 nt, Artificial Sequence
  Description of Artificial Sequence: Synthetic oligonucleotide
  Antisense strand to SEQ ID NO: 2449812
aucaugggcgacuacgcag

SEQ ID NO: 2449814 - RNA, 19 nt, Artificial Sequence
  Description of Artificial Sequence: Synthetic oligonucleotide
  Sense strand starting at position 2986 of SEQ ID NO: 1887118
cguagucgcccaugaugua

SEQ ID NO: 2449815 - RNA, 19 nt, Artificial Sequence
  Description of Artificial Sequence: Synthetic oligonucleotide
  Antisense strand to SEQ ID NO: 2449814
uacaucaugggcgacuacg

SEQ ID NO: 2449816 - RNA, 19 nt, Artificial Sequence
  Description of Artificial Sequence: Synthetic oligonucleotide
  Sense strand starting at position 3055 of SEQ ID NO: 1887118
cuccguagacguuguuaaa

SEQ ID NO: 2449817 - RNA, 19 nt, Artificial Sequence
  Description of Artificial Sequence: Synthetic oligonucleotide
  Antisense strand to SEQ ID NO: 2449816
uuuaacaacgucuacggag

SEQ ID NO: 2449818 - RNA, 19 nt, Artificial Sequence
  Description of Artificial Sequence: Synthetic oligonucleotide
  Sense strand starting at position 3076 of SEQ ID NO: 1887118
gguucagggccucauugau

SEQ ID NO: 2449819 - RNA, 19 nt, Artificial Sequence
  Description of Artificial Sequence: Synthetic oligonucleotide
  Antisense strand to SEQ ID NO: 2449818
aucaaugaggcccugaacc

SEQ ID NO: 2449820 - RNA, 19 nt, Artificial Sequence
  Description of Artificial Sequence: Synthetic oligonucleotide
  Sense strand starting at position 3085 of SEQ ID NO: 1887118
ccucauugaugagcucaca

SEQ ID NO: 2449821 - RNA, 19 nt, Artificial Sequence
  Description of Artificial Sequence: Synthetic oligonucleotide
  Antisense strand to SEQ ID NO: 2449820
ugugagcucaucaaugagg

SEQ ID NO: 2449822 - RNA, 19 nt, Artificial Sequence
  Description of Artificial Sequence: Synthetic oligonucleotide
  Sense strand starting at position 3294 of SEQ ID NO: 1887118
gcacguccuccucggugaa

SEQ ID NO: 2449823 - RNA, 19 nt, Artificial Sequence
  Description of Artificial Sequence: Synthetic oligonucleotide
  Antisense strand to SEQ ID NO: 2449822
uucaccgaggaggacgugc

SEQ ID NO: 2449824 - RNA, 19 nt, Artificial Sequence
  Description of Artificial Sequence: Synthetic oligonucleotide
  Sense strand starting at position 3942 of SEQ ID NO: 1887118
cgaggucgaagucaaagua

SEQ ID NO: 2449825 - RNA, 19 nt, Artificial Sequence
  Description of Artificial Sequence: Synthetic oligonucleotide
  Antisense strand to SEQ ID NO: 2449824
uacuuugacuucgaccucg

SEQ ID NO: 2449826 - RNA, 19 nt, Artificial Sequence
  Description of Artificial Sequence: Synthetic oligonucleotide
  Sense strand starting at position 3975 of SEQ ID NO: 1887118
ggcagauguucuuccagag

SEQ ID NO: 2449827 - RNA, 19 nt, Artificial Sequence
  Description of Artificial Sequence: Synthetic oligonucleotide
  Antisense strand to SEQ ID NO: 2449826
cucuggaagaacaucugcc

SEQ ID NO: 2449828 - RNA, 19 nt, Artificial Sequence
  Description of Artificial Sequence: Synthetic oligonucleotide
  Sense strand starting at position 96 of SEQ ID NO: 1887119
ggaggcuucuuugcuguga

SEQ ID NO: 2449829 - RNA, 19 nt, Artificial Sequence
  Description of Artificial Sequence: Synthetic oligonucleotide
  Antisense strand to SEQ ID NO: 2449828
ucacagcaaagaagccucc

SEQ ID NO: 2449830 - RNA, 19 nt, Artificial Sequence
  Description of Artificial Sequence: Synthetic oligonucleotide
  Sense strand starting at position 98 of SEQ ID NO: 1887119
aggcuucuuugcugugaga

SEQ ID NO: 2449831 - RNA, 19 nt, Artificial Sequence
  Description of Artificial Sequence: Synthetic oligonucleotide
  Antisense strand to SEQ ID NO: 2449830
ucucacagcaaagaagccu

SEQ ID NO: 2449832 - RNA, 19 nt, Artificial Sequence
  Description of Artificial Sequence: Synthetic oligonucleotide
  Sense strand starting at position 100 of SEQ ID NO: 1887119
gcuucuuugcugugagaug

SEQ ID NO: 2449833 - RNA, 19 nt, Artificial Sequence
  Description of Artificial Sequence: Synthetic oligonucleotide
  Antisense strand to SEQ ID NO: 2449832
caucucacagcaaagaagc

SEQ ID NO: 2449834 - RNA, 19 nt, Artificial Sequence
  Description of Artificial Sequence: Synthetic oligonucleotide
  Sense strand starting at position 101 of SEQ ID NO: 1887119
cuucuuugcugugagauga

SEQ ID NO: 2449835 - RNA, 19 nt, Artificial Sequence
  Description of Artificial Sequence: Synthetic oligonucleotide
  Antisense strand to SEQ ID NO: 2449834
ucaucucacagcaaagaag

SEQ ID NO: 2449836 - RNA, 19 nt, Artificial Sequence
  Description of Artificial Sequence: Synthetic oligonucleotide
  Sense strand starting at position 175 of SEQ ID NO: 1887119
agcuguagcuccugucaca

SEQ ID NO: 2449837 - RNA, 19 nt, Artificial Sequence
  Description of Artificial Sequence: Synthetic oligonucleotide
  Antisense strand to SEQ ID NO: 2449836
ugugacaggagcuacagcu

SEQ ID NO: 2449838 - RNA, 19 nt, Artificial Sequence
  Description of Artificial Sequence: Synthetic oligonucleotide
  Sense strand starting at position 289 of SEQ ID NO: 1887119
ggcccuaaggguugacaca

SEQ ID NO: 2449839 - RNA, 19 nt, Artificial Sequence
  Description of Artificial Sequence: Synthetic oligonucleotide
  Antisense strand to SEQ ID NO: 2449838
ugugucaacccuuagggcc

SEQ ID NO: 2449840 - RNA, 19 nt, Artificial Sequence
  Description of Artificial Sequence: Synthetic oligonucleotide
  Sense strand starting at position 891 of SEQ ID NO: 1887119
cggucuuagggucaagauc

SEQ ID NO: 2449841 - RNA, 19 nt, Artificial Sequence
  Description of Artificial Sequence: Synthetic oligonucleotide
  Antisense strand to SEQ ID NO: 2449840
gaucuugacccuaagaccg

SEQ ID NO: 2449842 - RNA, 19 nt, Artificial Sequence
  Description of Artificial Sequence: Synthetic oligonucleotide
  Sense strand starting at position 1315 of SEQ ID NO: 1887119
acgaggaugugucagggau

SEQ ID NO: 2449843 - RNA, 19 nt, Artificial Sequence
  Description of Artificial Sequence: Synthetic oligonucleotide
  Antisense strand to SEQ ID NO: 2449842
aucccugacacauccucgu

SEQ ID NO: 2449844 - RNA, 19 nt, Artificial Sequence
  Description of Artificial Sequence: Synthetic oligonucleotide
  Sense strand starting at position 1319 of SEQ ID NO: 1887119
ggaugugucagggaugggu

SEQ ID NO: 2449845 - RNA, 19 nt, Artificial Sequence
  Description of Artificial Sequence: Synthetic oligonucleotide
  Antisense strand to SEQ ID NO: 2449844
acccaucccugacacaucc

SEQ ID NO: 2449846 - RNA, 19 nt, Artificial Sequence
  Description of Artificial Sequence: Synthetic oligonucleotide
  Sense strand starting at position 1497 of SEQ ID NO: 1887119
cgugcagucauguauccca

SEQ ID NO: 2449847 - RNA, 19 nt, Artificial Sequence
  Description of Artificial Sequence: Synthetic oligonucleotide
  Antisense strand to SEQ ID NO: 2449846
ugggauacaugacugcacg

SEQ ID NO: 2449848 - RNA, 19 nt, Artificial Sequence
  Description of Artificial Sequence: Synthetic oligonucleotide
  Sense strand starting at position 1500 of SEQ ID NO: 1887119
gcagucauguaucccacaa

SEQ ID NO: 2449849 - RNA, 19 nt, Artificial Sequence
  Description of Artificial Sequence: Synthetic oligonucleotide
  Antisense strand to SEQ ID NO: 2449848
uugugggauacaugacugc

SEQ ID NO: 2449850 - RNA, 19 nt, Artificial Sequence
  Description of Artificial Sequence: Synthetic oligonucleotide
  Sense strand starting at position 1502 of SEQ ID NO: 1887119
agucauguaucccacaaau

SEQ ID NO: 2449851 - RNA, 19 nt, Artificial Sequence
  Description of Artificial Sequence: Synthetic oligonucleotide
  Antisense strand to SEQ ID NO: 2449850
auuugugggauacaugacu

SEQ ID NO: 2449852 - RNA, 19 nt, Artificial Sequence
  Description of Artificial Sequence: Synthetic oligonucleotide
  Sense strand starting at position 1530 of SEQ ID NO: 1887119
cccacugauuccuugugaa

SEQ ID NO: 2449853 - RNA, 19 nt, Artificial Sequence
  Description of Artificial Sequence: Synthetic oligonucleotide
  Antisense strand to SEQ ID NO: 2449852
uucacaaggaaucaguggg

SEQ ID NO: 2449854 - RNA, 19 nt, Artificial Sequence
  Description of Artificial Sequence: Synthetic oligonucleotide
  Sense strand starting at position 1533 of SEQ ID NO: 1887119
acugauuccuugugaaagg

SEQ ID NO: 2449855 - RNA, 19 nt, Artificial Sequence
  Description of Artificial Sequence: Synthetic oligonucleotide
  Antisense strand to SEQ ID NO: 2449854
ccuuucacaaggaaucagu

SEQ ID NO: 2449856 - RNA, 19 nt, Artificial Sequence
  Description of Artificial Sequence: Synthetic oligonucleotide
  Sense strand starting at position 1534 of SEQ ID NO: 1887119
cugauuccuugugaaagga

SEQ ID NO: 2449857 - RNA, 19 nt, Artificial Sequence
  Description of Artificial Sequence: Synthetic oligonucleotide
  Antisense strand to SEQ ID NO: 2449856
uccuuucacaaggaaucag

SEQ ID NO: 2449858 - RNA, 19 nt, Artificial Sequence
  Description of Artificial Sequence: Synthetic oligonucleotide
  Sense strand starting at position 1543 of SEQ ID NO: 1887119
ugugaaaggaauugucauc

SEQ ID NO: 2449859 - RNA, 19 nt, Artificial Sequence
  Description of Artificial Sequence: Synthetic oligonucleotide
  Antisense strand to SEQ ID NO: 2449858
gaugacaauuccuuucaca

SEQ ID NO: 2449860 - RNA, 19 nt, Artificial Sequence
  Description of Artificial Sequence: Synthetic oligonucleotide
  Sense strand starting at position 1548 of SEQ ID NO: 1887119
aaggaauugucaucaggua

SEQ ID NO: 2449861 - RNA, 19 nt, Artificial Sequence
  Description of Artificial Sequence: Synthetic oligonucleotide
  Antisense strand to SEQ ID NO: 2449860
uaccugaugacaauuccuu

SEQ ID NO: 2449862 - RNA, 19 nt, Artificial Sequence
  Description of Artificial Sequence: Synthetic oligonucleotide
  Sense strand starting at position 1572 of SEQ ID NO: 1887119
caagaagaugcuuggucuu

SEQ ID NO: 2449863 - RNA, 19 nt, Artificial Sequence
  Description of Artificial Sequence: Synthetic oligonucleotide
  Antisense strand to SEQ ID NO: 2449862
aagaccaagcaucuucuug

SEQ ID NO: 2449864 - RNA, 19 nt, Artificial Sequence
  Description of Artificial Sequence: Synthetic oligonucleotide
  Sense strand starting at position 1717 of SEQ ID NO: 1887119
gucugucccgucugacaca

SEQ ID NO: 2449865 - RNA, 19 nt, Artificial Sequence
  Description of Artificial Sequence: Synthetic oligonucleotide
  Antisense strand to SEQ ID NO: 2449864
ugugucagacgggacagac

SEQ ID NO: 2449866 - RNA, 19 nt, Artificial Sequence
  Description of Artificial Sequence: Synthetic oligonucleotide
  Sense strand starting at position 2940 of SEQ ID NO: 1887119
gcucgaguucccugaggaa

SEQ ID NO: 2449867 - RNA, 19 nt, Artificial Sequence
  Description of Artificial Sequence: Synthetic oligonucleotide
  Antisense strand to SEQ ID NO: 2449866
uuccucagggaacucgagc

SEQ ID NO: 2449868 - RNA, 19 nt, Artificial Sequence
  Description of Artificial Sequence: Synthetic oligonucleotide
  Sense strand starting at position 3391 of SEQ ID NO: 1887119
gagaauucccuguggaagg

SEQ ID NO: 2449869 - RNA, 19 nt, Artificial Sequence
  Description of Artificial Sequence: Synthetic oligonucleotide
  Antisense strand to SEQ ID NO: 2449868
ccuuccacagggaauucuc

SEQ ID NO: 2449870 - RNA, 19 nt, Artificial Sequence
  Description of Artificial Sequence: Synthetic oligonucleotide
  Sense strand starting at position 3392 of SEQ ID NO: 1887119
agaauucccuguggaagga

SEQ ID NO: 2449871 - RNA, 19 nt, Artificial Sequence
  Description of Artificial Sequence: Synthetic oligonucleotide
  Antisense strand to SEQ ID NO: 2449870
uccuuccacagggaauucu

SEQ ID NO: 2449872 - RNA, 19 nt, Artificial Sequence
  Description of Artificial Sequence: Synthetic oligonucleotide
  Sense strand starting at position 3547 of SEQ ID NO: 1887119
agaggaaugaagcgugcau

SEQ ID NO: 2449873 - RNA, 19 nt, Artificial Sequence
  Description of Artificial Sequence: Synthetic oligonucleotide
  Antisense strand to SEQ ID NO: 2449872
augcacgcuucauuccucu

SEQ ID NO: 2449874 - RNA, 19 nt, Artificial Sequence
  Description of Artificial Sequence: Synthetic oligonucleotide
  Sense strand starting at position 3726 of SEQ ID NO: 1887119
cagugcucgcucuaagaga

SEQ ID NO: 2449875 - RNA, 19 nt, Artificial Sequence
  Description of Artificial Sequence: Synthetic oligonucleotide
  Antisense strand to SEQ ID NO: 2449874
ucucuuagagcgagcacug

SEQ ID NO: 2449876 - RNA, 19 nt, Artificial Sequence
  Description of Artificial Sequence: Synthetic oligonucleotide
  Sense strand starting at position 3739 of SEQ ID NO: 1887119
aagagauguucccggaaua

SEQ ID NO: 2449877 - RNA, 19 nt, Artificial Sequence
  Description of Artificial Sequence: Synthetic oligonucleotide
  Antisense strand to SEQ ID NO: 2449876
uauuccgggaacaucucuu

SEQ ID NO: 2449878 - RNA, 19 nt, Artificial Sequence
  Description of Artificial Sequence: Synthetic oligonucleotide
  Sense strand starting at position 3740 of SEQ ID NO: 1887119
agagauguucccggaauag

SEQ ID NO: 2449879 - RNA, 19 nt, Artificial Sequence
  Description of Artificial Sequence: Synthetic oligonucleotide
  Antisense strand to SEQ ID NO: 2449878
cuauuccgggaacaucucu

SEQ ID NO: 2449880 - RNA, 19 nt, Artificial Sequence
  Description of Artificial Sequence: Synthetic oligonucleotide
  Sense strand starting at position 3966 of SEQ ID NO: 1887119
cagccuuggccaggagaca

SEQ ID NO: 2449881 - RNA, 19 nt, Artificial Sequence
  Description of Artificial Sequence: Synthetic oligonucleotide
  Antisense strand to SEQ ID NO: 2449880
ugucuccuggccaaggcug

SEQ ID NO: 2449882 - RNA, 19 nt, Artificial Sequence
  Description of Artificial Sequence: Synthetic oligonucleotide
  Sense strand starting at position 193 of SEQ ID NO: 1887120
agaguaauguagucaccag

SEQ ID NO: 2449883 - RNA, 19 nt, Artificial Sequence
  Description of Artificial Sequence: Synthetic oligonucleotide
  Antisense strand to SEQ ID NO: 2449882
cuggugacuacauuacucu

SEQ ID NO: 2449884 - RNA, 19 nt, Artificial Sequence
  Description of Artificial Sequence: Synthetic oligonucleotide
  Sense strand starting at position 218 of SEQ ID NO: 1887120
ggugucucugcugaugcaa

SEQ ID NO: 2449885 - RNA, 19 nt, Artificial Sequence
  Description of Artificial Sequence: Synthetic oligonucleotide
  Antisense strand to SEQ ID NO: 2449884
uugcaucagcagagacacc

SEQ ID NO: 2449886 - RNA, 19 nt, Artificial Sequence
  Description of Artificial Sequence: Synthetic oligonucleotide
  Sense strand starting at position 289 of SEQ ID NO: 1887120
ggcuuucccagguauggga

SEQ ID NO: 2449887 - RNA, 19 nt, Artificial Sequence
  Description of Artificial Sequence: Synthetic oligonucleotide
  Antisense strand to SEQ ID NO: 2449886
ucccauaccugggaaagcc

SEQ ID NO: 2449888 - RNA, 19 nt, Artificial Sequence
  Description of Artificial Sequence: Synthetic oligonucleotide
  Sense strand starting at position 391 of SEQ ID NO: 1887120
acauccaugucuucuaguu

SEQ ID NO: 2449889 - RNA, 19 nt, Artificial Sequence
  Description of Artificial Sequence: Synthetic oligonucleotide
  Antisense strand to SEQ ID NO: 2449888
aacuagaagacauggaugu

SEQ ID NO: 2449890 - RNA, 19 nt, Artificial Sequence
  Description of Artificial Sequence: Synthetic oligonucleotide
  Sense strand starting at position 401 of SEQ ID NO: 1887120
cuucuaguuugacuacuau

SEQ ID NO: 2449891 - RNA, 19 nt, Artificial Sequence
  Description of Artificial Sequence: Synthetic oligonucleotide
  Antisense strand to SEQ ID NO: 2449890
auaguagucaaacuagaag

SEQ ID NO: 2449892 - RNA, 19 nt, Artificial Sequence
  Description of Artificial Sequence: Synthetic oligonucleotide
  Sense strand starting at position 407 of SEQ ID NO: 1887120
guuugacuacuaugagucu

SEQ ID NO: 2449893 - RNA, 19 nt, Artificial Sequence
  Description of Artificial Sequence: Synthetic oligonucleotide
  Antisense strand to SEQ ID NO: 2449892
agacucauaguagucaaac

SEQ ID NO: 2449894 - RNA, 19 nt, Artificial Sequence
  Description of Artificial Sequence: Synthetic oligonucleotide
  Sense strand starting at position 416 of SEQ ID NO: 1887120
cuaugagucuuucucuuug

SEQ ID NO: 2449895 - RNA, 19 nt, Artificial Sequence
  Description of Artificial Sequence: Synthetic oligonucleotide
  Antisense strand to SEQ ID NO: 2449894
caaagagaaagacucauag

SEQ ID NO: 2449896 - RNA, 19 nt, Artificial Sequence
  Description of Artificial Sequence: Synthetic oligonucleotide
  Sense strand starting at position 433 of SEQ ID NO: 1887120
ugagaaacaugauggauca

SEQ ID NO: 2449897 - RNA, 19 nt, Artificial Sequence
  Description of Artificial Sequence: Synthetic oligonucleotide
  Antisense strand to SEQ ID NO: 2449896
ugauccaucauguuucuca

SEQ ID NO: 2449898 - RNA, 19 nt, Artificial Sequence
  Description of Artificial Sequence: Synthetic oligonucleotide
  Sense strand starting at position 443 of SEQ ID NO: 1887120
gauggaucacuguaaguuc

SEQ ID NO: 2449899 - RNA, 19 nt, Artificial Sequence
  Description of Artificial Sequence: Synthetic oligonucleotide
  Antisense strand to SEQ ID NO: 2449898
gaacuuacagugauccauc

SEQ ID NO: 2449900 - RNA, 19 nt, Artificial Sequence
  Description of Artificial Sequence: Synthetic oligonucleotide
  Sense strand starting at position 973 of SEQ ID NO: 1887120
cgggaauccuuucuguaaa

SEQ ID NO: 2449901 - RNA, 19 nt, Artificial Sequence
  Description of Artificial Sequence: Synthetic oligonucleotide
  Antisense strand to SEQ ID NO: 2449900
uuuacagaaaggauucccg

SEQ ID NO: 2449902 - RNA, 19 nt, Artificial Sequence
  Description of Artificial Sequence: Synthetic oligonucleotide
  Sense strand starting at position 1153 of SEQ ID NO: 1887120
ucaccuuuccuguagaaga

SEQ ID NO: 2449903 - RNA, 19 nt, Artificial Sequence
  Description of Artificial Sequence: Synthetic oligonucleotide
  Antisense strand to SEQ ID NO: 2449902
ucuucuacaggaaagguga

SEQ ID NO: 2449904 - RNA, 19 nt, Artificial Sequence
  Description of Artificial Sequence: Synthetic oligonucleotide
  Sense strand starting at position 1281 of SEQ ID NO: 1887120
agccauguccgccaugaga

SEQ ID NO: 2449905 - RNA, 19 nt, Artificial Sequence
  Description of Artificial Sequence: Synthetic oligonucleotide
  Antisense strand to SEQ ID NO: 2449904
ucucauggcggacauggcu

SEQ ID NO: 2449906 - RNA, 19 nt, Artificial Sequence
  Description of Artificial Sequence: Synthetic oligonucleotide
  Sense strand starting at position 1283 of SEQ ID NO: 1887120
ccauguccgccaugagaua

SEQ ID NO: 2449907 - RNA, 19 nt, Artificial Sequence
  Description of Artificial Sequence: Synthetic oligonucleotide
  Antisense strand to SEQ ID NO: 2449906
uaucucauggcggacaugg

SEQ ID NO: 2449908 - RNA, 19 nt, Artificial Sequence
  Description of Artificial Sequence: Synthetic oligonucleotide
  Sense strand starting at position 1307 of SEQ ID NO: 1887120
cguucucaucugcaaucuu

SEQ ID NO: 2449909 - RNA, 19 nt, Artificial Sequence
  Description of Artificial Sequence: Synthetic oligonucleotide
  Antisense strand to SEQ ID NO: 2449908
aagauugcagaugagaacg

SEQ ID NO: 2449910 - RNA, 19 nt, Artificial Sequence
  Description of Artificial Sequence: Synthetic oligonucleotide
  Sense strand starting at position 1437 of SEQ ID NO: 1887120
ggccucuagaugugcagau

SEQ ID NO: 2449911 - RNA, 19 nt, Artificial Sequence
  Description of Artificial Sequence: Synthetic oligonucleotide
  Antisense strand to SEQ ID NO: 2449910
aucugcacaucuagaggcc

SEQ ID NO: 2449912 - RNA, 19 nt, Artificial Sequence
  Description of Artificial Sequence: Synthetic oligonucleotide
  Sense strand starting at position 1441 of SEQ ID NO: 1887120
ucuagaugugcagaucuga

SEQ ID NO: 2449913 - RNA, 19 nt, Artificial Sequence
  Description of Artificial Sequence: Synthetic oligonucleotide
  Antisense strand to SEQ ID NO: 2449912
ucagaucugcacaucuaga

SEQ ID NO: 2449914 - RNA, 19 nt, Artificial Sequence
  Description of Artificial Sequence: Synthetic oligonucleotide
  Sense strand starting at position 1479 of SEQ ID NO: 1887120
cuuaaagucucagagcaaa

SEQ ID NO: 2449915 - RNA, 19 nt, Artificial Sequence
  Description of Artificial Sequence: Synthetic oligonucleotide
  Antisense strand to SEQ ID NO: 2449914
uuugcucugagacuuuaag

SEQ ID NO: 2449916 - RNA, 19 nt, Artificial Sequence
  Description of Artificial Sequence: Synthetic oligonucleotide
  Sense strand starting at position 1556 of SEQ ID NO: 1887120
acgucuuggugguugagau

SEQ ID NO: 2449917 - RNA, 19 nt, Artificial Sequence
  Description of Artificial Sequence: Synthetic oligonucleotide
  Antisense strand to SEQ ID NO: 2449916
aucucaaccaccaagacgu

SEQ ID NO: 2449918 - RNA, 19 nt, Artificial Sequence
  Description of Artificial Sequence: Synthetic oligonucleotide
  Sense strand starting at position 1557 of SEQ ID NO: 1887120
cgucuuggugguugagaug

SEQ ID NO: 2449919 - RNA, 19 nt, Artificial Sequence
  Description of Artificial Sequence: Synthetic oligonucleotide
  Antisense strand to SEQ ID NO: 2449918
caucucaaccaccaagacg

SEQ ID NO: 2449920 - RNA, 19 nt, Artificial Sequence
  Description of Artificial Sequence: Synthetic oligonucleotide
  Sense strand starting at position 1583 of SEQ ID NO: 1887120
cuacuauugccagcgcagu

SEQ ID NO: 2449921 - RNA, 19 nt, Artificial Sequence
  Description of Artificial Sequence: Synthetic oligonucleotide
  Antisense strand to SEQ ID NO: 2449920
acugcgcuggcaauaguag

SEQ ID NO: 2449922 - RNA, 19 nt, Artificial Sequence
  Description of Artificial Sequence: Synthetic oligonucleotide
  Sense strand starting at position 1597 of SEQ ID NO: 1887120
gcagucagggccugacauu

SEQ ID NO: 2449923 - RNA, 19 nt, Artificial Sequence
  Description of Artificial Sequence: Synthetic oligonucleotide
  Antisense strand to SEQ ID NO: 2449922
aaugucaggcccugacugc

SEQ ID NO: 2449924 - RNA, 19 nt, Artificial Sequence
  Description of Artificial Sequence: Synthetic oligonucleotide
  Sense strand starting at position 1616 of SEQ ID NO: 1887120
ucuagaugcuucucugaga

SEQ ID NO: 2449925 - RNA, 19 nt, Artificial Sequence
  Description of Artificial Sequence: Synthetic oligonucleotide
  Antisense strand to SEQ ID NO: 2449924
ucucagagaagcaucuaga

SEQ ID NO: 2449926 - RNA, 19 nt, Artificial Sequence
  Description of Artificial Sequence: Synthetic oligonucleotide
  Sense strand starting at position 1617 of SEQ ID NO: 1887120
cuagaugcuucucugagaa

SEQ ID NO: 2449927 - RNA, 19 nt, Artificial Sequence
  Description of Artificial Sequence: Synthetic oligonucleotide
  Antisense strand to SEQ ID NO: 2449926
uucucagagaagcaucuag

SEQ ID NO: 2449928 - RNA, 19 nt, Artificial Sequence
  Description of Artificial Sequence: Synthetic oligonucleotide
  Sense strand starting at position 1619 of SEQ ID NO: 1887120
agaugcuucucugagaaca

SEQ ID NO: 2449929 - RNA, 19 nt, Artificial Sequence
  Description of Artificial Sequence: Synthetic oligonucleotide
  Antisense strand to SEQ ID NO: 2449928
uguucucagagaagcaucu

SEQ ID NO: 2449930 - RNA, 19 nt, Artificial Sequence
  Description of Artificial Sequence: Synthetic oligonucleotide
  Sense strand starting at position 1630 of SEQ ID NO: 1887120
ugagaacagucucacaucu

SEQ ID NO: 2449931 - RNA, 19 nt, Artificial Sequence
  Description of Artificial Sequence: Synthetic oligonucleotide
  Antisense strand to SEQ ID NO: 2449930
agaugugagacuguucuca

SEQ ID NO: 2449932 - RNA, 19 nt, Artificial Sequence
  Description of Artificial Sequence: Synthetic oligonucleotide
  Sense strand starting at position 1765 of SEQ ID NO: 1887120
gugcgaacaucuuuccauc

SEQ ID NO: 2449933 - RNA, 19 nt, Artificial Sequence
  Description of Artificial Sequence: Synthetic oligonucleotide
  Antisense strand to SEQ ID NO: 2449932
gauggaaagauguucgcac

SEQ ID NO: 2449934 - RNA, 19 nt, Artificial Sequence
  Description of Artificial Sequence: Synthetic oligonucleotide
  Sense strand starting at position 1919 of SEQ ID NO: 1887120
uggguucaccuguggaaug

SEQ ID NO: 2449935 - RNA, 19 nt, Artificial Sequence
  Description of Artificial Sequence: Synthetic oligonucleotide
  Antisense strand to SEQ ID NO: 2449934
cauuccacaggugaaccca

SEQ ID NO: 2449936 - RNA, 19 nt, Artificial Sequence
  Description of Artificial Sequence: Synthetic oligonucleotide
  Sense strand starting at position 2122 of SEQ ID NO: 1887120
ugaggagucccaggguugu

SEQ ID NO: 2449937 - RNA, 19 nt, Artificial Sequence
  Description of Artificial Sequence: Synthetic oligonucleotide
  Antisense strand to SEQ ID NO: 2449936
acaacccugggacuccuca

SEQ ID NO: 2449938 - RNA, 19 nt, Artificial Sequence
  Description of Artificial Sequence: Synthetic oligonucleotide
  Sense strand starting at position 2290 of SEQ ID NO: 1887120
caaguauaaugaggcaaga

SEQ ID NO: 2449939 - RNA, 19 nt, Artificial Sequence
  Description of Artificial Sequence: Synthetic oligonucleotide
  Antisense strand to SEQ ID NO: 2449938
ucuugccucauuauacuug

SEQ ID NO: 2449940 - RNA, 19 nt, Artificial Sequence
  Description of Artificial Sequence: Synthetic oligonucleotide
  Sense strand starting at position 2323 of SEQ ID NO: 1887120
gcauaacgauuaggaaaga

SEQ ID NO: 2449941 - RNA, 19 nt, Artificial Sequence
  Description of Artificial Sequence: Synthetic oligonucleotide
  Antisense strand to SEQ ID NO: 2449940
ucuuuccuaaucguuaugc

SEQ ID NO: 2449942 - RNA, 19 nt, Artificial Sequence
  Description of Artificial Sequence: Synthetic oligonucleotide
  Sense strand starting at position 2406 of SEQ ID NO: 1887120
ggccaacuguuagaauaag

SEQ ID NO: 2449943 - RNA, 19 nt, Artificial Sequence
  Description of Artificial Sequence: Synthetic oligonucleotide
  Antisense strand to SEQ ID NO: 2449942
cuuauucuaacaguuggcc

SEQ ID NO: 2449944 - RNA, 19 nt, Artificial Sequence
  Description of Artificial Sequence: Synthetic oligonucleotide
  Sense strand starting at position 2412 of SEQ ID NO: 1887120
cuguuagaauaagcaaauu

SEQ ID NO: 2449945 - RNA, 19 nt, Artificial Sequence
  Description of Artificial Sequence: Synthetic oligonucleotide
  Antisense strand to SEQ ID NO: 2449944
aauuugcuuauucuaacag

SEQ ID NO: 2449946 - RNA, 19 nt, Artificial Sequence
  Description of Artificial Sequence: Synthetic oligonucleotide
  Sense strand starting at position 2872 of SEQ ID NO: 1887120
acaucauugcguuguguau

SEQ ID NO: 2449947 - RNA, 19 nt, Artificial Sequence
  Description of Artificial Sequence: Synthetic oligonucleotide
  Antisense strand to SEQ ID NO: 2449946
auacacaacgcaaugaugu

SEQ ID NO: 2449948 - RNA, 19 nt, Artificial Sequence
  Description of Artificial Sequence: Synthetic oligonucleotide
  Sense strand starting at position 2873 of SEQ ID NO: 1887120
caucauugcguuguguauu

SEQ ID NO: 2449949 - RNA, 19 nt, Artificial Sequence
  Description of Artificial Sequence: Synthetic oligonucleotide
  Antisense strand to SEQ ID NO: 2449948
aauacacaacgcaaugaug

SEQ ID NO: 2449950 - RNA, 19 nt, Artificial Sequence
  Description of Artificial Sequence: Synthetic oligonucleotide
  Sense strand starting at position 3077 of SEQ ID NO: 1887120
gggcauccauuuggacaaa

SEQ ID NO: 2449951 - RNA, 19 nt, Artificial Sequence
  Description of Artificial Sequence: Synthetic oligonucleotide
  Antisense strand to SEQ ID NO: 2449950
uuuguccaaauggaugccc

SEQ ID NO: 2449952 - RNA, 19 nt, Artificial Sequence
  Description of Artificial Sequence: Synthetic oligonucleotide
  Sense strand starting at position 3157 of SEQ ID NO: 1887120
gugaaucuauaucuuaaga

SEQ ID NO: 2449953 - RNA, 19 nt, Artificial Sequence
  Description of Artificial Sequence: Synthetic oligonucleotide
  Antisense strand to SEQ ID NO: 2449952
ucuuaagauauagauucac

SEQ ID NO: 2449954 - RNA, 19 nt, Artificial Sequence
  Description of Artificial Sequence: Synthetic oligonucleotide
  Sense strand starting at position 3251 of SEQ ID NO: 1887120
ggaauaaagccauguccau

SEQ ID NO: 2449955 - RNA, 19 nt, Artificial Sequence
  Description of Artificial Sequence: Synthetic oligonucleotide
  Antisense strand to SEQ ID NO: 2449954
auggacauggcuuuauucc

SEQ ID NO: 2449956 - RNA, 19 nt, Artificial Sequence
  Description of Artificial Sequence: Synthetic oligonucleotide
  Sense strand starting at position 3258 of SEQ ID NO: 1887120
agccauguccaucaacaga

SEQ ID NO: 2449957 - RNA, 19 nt, Artificial Sequence
  Description of Artificial Sequence: Synthetic oligonucleotide
  Antisense strand to SEQ ID NO: 2449956
ucuguugauggacauggcu

SEQ ID NO: 2449958 - RNA, 19 nt, Artificial Sequence
  Description of Artificial Sequence: Synthetic oligonucleotide
  Sense strand starting at position 3722 of SEQ ID NO: 1887120
cuggccaugugaucuuacu

SEQ ID NO: 2449959 - RNA, 19 nt, Artificial Sequence
  Description of Artificial Sequence: Synthetic oligonucleotide
  Antisense strand to SEQ ID NO: 2449958
aguaagaucacauggccag

SEQ ID NO: 2449960 - RNA, 19 nt, Artificial Sequence
  Description of Artificial Sequence: Synthetic oligonucleotide
  Sense strand starting at position 3728 of SEQ ID NO: 1887120
augugaucuuacuucuaug

SEQ ID NO: 2449961 - RNA, 19 nt, Artificial Sequence
  Description of Artificial Sequence: Synthetic oligonucleotide
  Antisense strand to SEQ ID NO: 2449960
cauagaaguaagaucacau

SEQ ID NO: 2449962 - RNA, 19 nt, Artificial Sequence
  Description of Artificial Sequence: Synthetic oligonucleotide
  Sense strand starting at position 71 of SEQ ID NO: 1887121
ugaggacuuugcucaaaug

SEQ ID NO: 2449963 - RNA, 19 nt, Artificial Sequence
  Description of Artificial Sequence: Synthetic oligonucleotide
  Antisense strand to SEQ ID NO: 2449962
cauuugagcaaaguccuca

SEQ ID NO: 2449964 - RNA, 19 nt, Artificial Sequence
  Description of Artificial Sequence: Synthetic oligonucleotide
  Sense strand starting at position 417 of SEQ ID NO: 1887121
uggagauauugcucuguca

SEQ ID NO: 2449965 - RNA, 19 nt, Artificial Sequence
  Description of Artificial Sequence: Synthetic oligonucleotide
  Antisense strand to SEQ ID NO: 2449964
ugacagagcaauaucucca

SEQ ID NO: 2449966 - RNA, 19 nt, Artificial Sequence
  Description of Artificial Sequence: Synthetic oligonucleotide
  Sense strand starting at position 419 of SEQ ID NO: 1887121
gagauauugcucugucacc

SEQ ID NO: 2449967 - RNA, 19 nt, Artificial Sequence
  Description of Artificial Sequence: Synthetic oligonucleotide
  Antisense strand to SEQ ID NO: 2449966
ggugacagagcaauaucuc

SEQ ID NO: 2449968 - RNA, 19 nt, Artificial Sequence
  Description of Artificial Sequence: Synthetic oligonucleotide
  Sense strand starting at position 699 of SEQ ID NO: 1887121
ggccaaaugucuuaaucca

SEQ ID NO: 2449969 - RNA, 19 nt, Artificial Sequence
  Description of Artificial Sequence: Synthetic oligonucleotide
  Antisense strand to SEQ ID NO: 2449968
uggauuaagacauuuggcc

SEQ ID NO: 2449970 - RNA, 19 nt, Artificial Sequence
  Description of Artificial Sequence: Synthetic oligonucleotide
  Sense strand starting at position 768 of SEQ ID NO: 1887121
caccgcugaccuuauguua

SEQ ID NO: 2449971 - RNA, 19 nt, Artificial Sequence
  Description of Artificial Sequence: Synthetic oligonucleotide
  Antisense strand to SEQ ID NO: 2449970
uaacauaaggucagcggug

SEQ ID NO: 2449972 - RNA, 19 nt, Artificial Sequence
  Description of Artificial Sequence: Synthetic oligonucleotide
  Sense strand starting at position 982 of SEQ ID NO: 1887121
guccuaacaucccuuuguu

SEQ ID NO: 2449973 - RNA, 19 nt, Artificial Sequence
  Description of Artificial Sequence: Synthetic oligonucleotide
  Antisense strand to SEQ ID NO: 2449972
aacaaagggauguuaggac

SEQ ID NO: 2449974 - RNA, 19 nt, Artificial Sequence
  Description of Artificial Sequence: Synthetic oligonucleotide
  Sense strand starting at position 985 of SEQ ID NO: 1887121
cuaacaucccuuuguuugu

SEQ ID NO: 2449975 - RNA, 19 nt, Artificial Sequence
  Description of Artificial Sequence: Synthetic oligonucleotide
  Antisense strand to SEQ ID NO: 2449974
acaaacaaagggauguuag

SEQ ID NO: 2449976 - RNA, 19 nt, Artificial Sequence
  Description of Artificial Sequence: Synthetic oligonucleotide
  Sense strand starting at position 994 of SEQ ID NO: 1887121
cuuuguuugugugcccaga

SEQ ID NO: 2449977 - RNA, 19 nt, Artificial Sequence
  Description of Artificial Sequence: Synthetic oligonucleotide
  Antisense strand to SEQ ID NO: 2449976
ucugggcacacaaacaaag

SEQ ID NO: 2449978 - RNA, 19 nt, Artificial Sequence
  Description of Artificial Sequence: Synthetic oligonucleotide
  Sense strand starting at position 1170 of SEQ ID NO: 1887121
gagugaguggcaggacuua

SEQ ID NO: 2449979 - RNA, 19 nt, Artificial Sequence
  Description of Artificial Sequence: Synthetic oligonucleotide
  Antisense strand to SEQ ID NO: 2449978
uaaguccugccacucacuc

SEQ ID NO: 2449980 - RNA, 19 nt, Artificial Sequence
  Description of Artificial Sequence: Synthetic oligonucleotide
  Sense strand starting at position 1419 of SEQ ID NO: 1887121
ggugaugcgcuuuacacga

SEQ ID NO: 2449981 - RNA, 19 nt, Artificial Sequence
  Description of Artificial Sequence: Synthetic oligonucleotide
  Antisense strand to SEQ ID NO: 2449980
ucguguaaagcgcaucacc

SEQ ID NO: 2449982 - RNA, 19 nt, Artificial Sequence
  Description of Artificial Sequence: Synthetic oligonucleotide
  Sense strand starting at position 1545 of SEQ ID NO: 1887121
gcagaaaguugccuugugu

SEQ ID NO: 2449983 - RNA, 19 nt, Artificial Sequence
  Description of Artificial Sequence: Synthetic oligonucleotide
  Antisense strand to SEQ ID NO: 2449982
acacaaggcaacuuucugc

SEQ ID NO: 2449984 - RNA, 19 nt, Artificial Sequence
  Description of Artificial Sequence: Synthetic oligonucleotide
  Sense strand starting at position 1556 of SEQ ID NO: 1887121
ccuuguguguucccaggua

SEQ ID NO: 2449985 - RNA, 19 nt, Artificial Sequence
  Description of Artificial Sequence: Synthetic oligonucleotide
  Antisense strand to SEQ ID NO: 2449984
uaccugggaacacacaagg

SEQ ID NO: 2449986 - RNA, 19 nt, Artificial Sequence
  Description of Artificial Sequence: Synthetic oligonucleotide
  Sense strand starting at position 1705 of SEQ ID NO: 1887121
ggcugagauccuuaucauc

SEQ ID NO: 2449987 - RNA, 19 nt, Artificial Sequence
  Description of Artificial Sequence: Synthetic oligonucleotide
  Antisense strand to SEQ ID NO: 2449986
gaugauaaggaucucagcc

SEQ ID NO: 2449988 - RNA, 19 nt, Artificial Sequence
  Description of Artificial Sequence: Synthetic oligonucleotide
  Sense strand starting at position 1759 of SEQ ID NO: 1887121
auccaugagcuguguccaa

SEQ ID NO: 2449989 - RNA, 19 nt, Artificial Sequence
  Description of Artificial Sequence: Synthetic oligonucleotide
  Antisense strand to SEQ ID NO: 2449988
uuggacacagcucauggau

SEQ ID NO: 2449990 - RNA, 19 nt, Artificial Sequence
  Description of Artificial Sequence: Synthetic oligonucleotide
  Sense strand starting at position 1992 of SEQ ID NO: 1887121
cccagagcucccgagaagu

SEQ ID NO: 2449991 - RNA, 19 nt, Artificial Sequence
  Description of Artificial Sequence: Synthetic oligonucleotide
  Antisense strand to SEQ ID NO: 2449990
acuucucgggagcucuggg

SEQ ID NO: 2449992 - RNA, 19 nt, Artificial Sequence
  Description of Artificial Sequence: Synthetic oligonucleotide
  Sense strand starting at position 2002 of SEQ ID NO: 1887121
ccgagaaguccauaccaug

SEQ ID NO: 2449993 - RNA, 19 nt, Artificial Sequence
  Description of Artificial Sequence: Synthetic oligonucleotide
  Antisense strand to SEQ ID NO: 2449992
caugguauggacuucucgg

SEQ ID NO: 2449994 - RNA, 19 nt, Artificial Sequence
  Description of Artificial Sequence: Synthetic oligonucleotide
  Sense strand starting at position 2095 of SEQ ID NO: 1887121
guguguuguaucccacgca

SEQ ID NO: 2449995 - RNA, 19 nt, Artificial Sequence
  Description of Artificial Sequence: Synthetic oligonucleotide
  Antisense strand to SEQ ID NO: 2449994
ugcgugggauacaacacac

SEQ ID NO: 2449996 - RNA, 19 nt, Artificial Sequence
  Description of Artificial Sequence: Synthetic oligonucleotide
  Sense strand starting at position 2194 of SEQ ID NO: 1887121
ccucauucuggaugagaau

SEQ ID NO: 2449997 - RNA, 19 nt, Artificial Sequence
  Description of Artificial Sequence: Synthetic oligonucleotide
  Antisense strand to SEQ ID NO: 2449996
auucucauccagaaugagg

SEQ ID NO: 2449998 - RNA, 19 nt, Artificial Sequence
  Description of Artificial Sequence: Synthetic oligonucleotide
  Sense strand starting at position 2377 of SEQ ID NO: 1887121
ggcauaaucgccuguugau

SEQ ID NO: 2449999 - RNA, 19 nt, Artificial Sequence
  Description of Artificial Sequence: Synthetic oligonucleotide
  Antisense strand to SEQ ID NO: 2449998
aucaacaggcgauuaugcc

SEQ ID NO: 2450000 - RNA, 19 nt, Artificial Sequence
  Description of Artificial Sequence: Synthetic oligonucleotide
  Sense strand starting at position 2873 of SEQ ID NO: 1887121
cucagacacuguuggagaa

SEQ ID NO: 2450001 - RNA, 19 nt, Artificial Sequence
  Description of Artificial Sequence: Synthetic oligonucleotide
  Antisense strand to SEQ ID NO: 2450000
uucuccaacagugucugag

SEQ ID NO: 2450002 - RNA, 19 nt, Artificial Sequence
  Description of Artificial Sequence: Synthetic oligonucleotide
  Sense strand starting at position 2874 of SEQ ID NO: 1887121
ucagacacuguuggagaau

SEQ ID NO: 2450003 - RNA, 19 nt, Artificial Sequence
  Description of Artificial Sequence: Synthetic oligonucleotide
  Antisense strand to SEQ ID NO: 2450002
auucuccaacagugucuga

SEQ ID NO: 2450004 - RNA, 19 nt, Artificial Sequence
  Description of Artificial Sequence: Synthetic oligonucleotide
  Sense strand starting at position 2894 of SEQ ID NO: 1887121
caaugaaaugaccgaugua

SEQ ID NO: 2450005 - RNA, 19 nt, Artificial Sequence
  Description of Artificial Sequence: Synthetic oligonucleotide
  Antisense strand to SEQ ID NO: 2450004
uacaucggucauuucauug

SEQ ID NO: 2450006 - RNA, 19 nt, Artificial Sequence
  Description of Artificial Sequence: Synthetic oligonucleotide
  Sense strand starting at position 2942 of SEQ ID NO: 1887121
caaagugaguggucccuuu

SEQ ID NO: 2450007 - RNA, 19 nt, Artificial Sequence
  Description of Artificial Sequence: Synthetic oligonucleotide
  Antisense strand to SEQ ID NO: 2450006
aaagggaccacucacuuug

SEQ ID NO: 2450008 - RNA, 19 nt, Artificial Sequence
  Description of Artificial Sequence: Synthetic oligonucleotide
  Sense strand starting at position 3340 of SEQ ID NO: 1887121
cccguuuccugagcucuua

SEQ ID NO: 2450009 - RNA, 19 nt, Artificial Sequence
  Description of Artificial Sequence: Synthetic oligonucleotide
  Antisense strand to SEQ ID NO: 2450008
uaagagcucaggaaacggg

SEQ ID NO: 2450010 - RNA, 19 nt, Artificial Sequence
  Description of Artificial Sequence: Synthetic oligonucleotide
  Sense strand starting at position 3461 of SEQ ID NO: 1887121
agcgaagggauugauaagu

SEQ ID NO: 2450011 - RNA, 19 nt, Artificial Sequence
  Description of Artificial Sequence: Synthetic oligonucleotide
  Antisense strand to SEQ ID NO: 2450010
acuuaucaaucccuucgcu

SEQ ID NO: 2450012 - RNA, 19 nt, Artificial Sequence
  Description of Artificial Sequence: Synthetic oligonucleotide
  Sense strand starting at position 3467 of SEQ ID NO: 1887121
gggauugauaagugaagug

SEQ ID NO: 2450013 - RNA, 19 nt, Artificial Sequence
  Description of Artificial Sequence: Synthetic oligonucleotide
  Antisense strand to SEQ ID NO: 2450012
cacuucacuuaucaauccc

SEQ ID NO: 2450014 - RNA, 19 nt, Artificial Sequence
  Description of Artificial Sequence: Synthetic oligonucleotide
  Sense strand starting at position 3481 of SEQ ID NO: 1887121
aagugaguggcccaagauc

SEQ ID NO: 2450015 - RNA, 19 nt, Artificial Sequence
  Description of Artificial Sequence: Synthetic oligonucleotide
  Antisense strand to SEQ ID NO: 2450014
gaucuugggccacucacuu

SEQ ID NO: 2450016 - RNA, 19 nt, Artificial Sequence
  Description of Artificial Sequence: Synthetic oligonucleotide
  Sense strand starting at position 3538 of SEQ ID NO: 1887121
ccaccucuugugugcaaga

SEQ ID NO: 2450017 - RNA, 19 nt, Artificial Sequence
  Description of Artificial Sequence: Synthetic oligonucleotide
  Antisense strand to SEQ ID NO: 2450016
ucuugcacacaagaggugg

SEQ ID NO: 2450018 - RNA, 19 nt, Artificial Sequence
  Description of Artificial Sequence: Synthetic oligonucleotide
  Sense strand starting at position 3539 of SEQ ID NO: 1887121
caccucuugugugcaagau

SEQ ID NO: 2450019 - RNA, 19 nt, Artificial Sequence
  Description of Artificial Sequence: Synthetic oligonucleotide
  Antisense strand to SEQ ID NO: 2450018
aucuugcacacaagaggug

SEQ ID NO: 2450020 - RNA, 19 nt, Artificial Sequence
  Description of Artificial Sequence: Synthetic oligonucleotide
  Sense strand starting at position 3540 of SEQ ID NO: 1887121
accucuugugugcaagaug

SEQ ID NO: 2450021 - RNA, 19 nt, Artificial Sequence
  Description of Artificial Sequence: Synthetic oligonucleotide
  Antisense strand to SEQ ID NO: 2450020
caucuugcacacaagaggu

SEQ ID NO: 2450022 - RNA, 19 nt, Artificial Sequence
  Description of Artificial Sequence: Synthetic oligonucleotide
  Sense strand starting at position 3551 of SEQ ID NO: 1887121
gcaagaugucguggguacu

SEQ ID NO: 2450023 - RNA, 19 nt, Artificial Sequence
  Description of Artificial Sequence: Synthetic oligonucleotide
  Antisense strand to SEQ ID NO: 2450022
aguacccacgacaucuugc

SEQ ID NO: 2450024 - RNA, 19 nt, Artificial Sequence
  Description of Artificial Sequence: Synthetic oligonucleotide
  Sense strand starting at position 3552 of SEQ ID NO: 1887121
caagaugucguggguacua

SEQ ID NO: 2450025 - RNA, 19 nt, Artificial Sequence
  Description of Artificial Sequence: Synthetic oligonucleotide
  Antisense strand to SEQ ID NO: 2450024
uaguacccacgacaucuug

SEQ ID NO: 2450026 - RNA, 19 nt, Artificial Sequence
  Description of Artificial Sequence: Synthetic oligonucleotide
  Sense strand starting at position 3554 of SEQ ID NO: 1887121
agaugucguggguacuaca

SEQ ID NO: 2450027 - RNA, 19 nt, Artificial Sequence
  Description of Artificial Sequence: Synthetic oligonucleotide
  Antisense strand to SEQ ID NO: 2450026
uguaguacccacgacaucu

SEQ ID NO: 2450028 - RNA, 19 nt, Artificial Sequence
  Description of Artificial Sequence: Synthetic oligonucleotide
  Sense strand starting at position 3575 of SEQ ID NO: 1887121
cuaggaugcuccgcugaga

SEQ ID NO: 2450029 - RNA, 19 nt, Artificial Sequence
  Description of Artificial Sequence: Synthetic oligonucleotide
  Antisense strand to SEQ ID NO: 2450028
ucucagcggagcauccuag

SEQ ID NO: 2450030 - RNA, 19 nt, Artificial Sequence
  Description of Artificial Sequence: Synthetic oligonucleotide
  Sense strand starting at position 3578 of SEQ ID NO: 1887121
ggaugcuccgcugagaauc

SEQ ID NO: 2450031 - RNA, 19 nt, Artificial Sequence
  Description of Artificial Sequence: Synthetic oligonucleotide
  Antisense strand to SEQ ID NO: 2450030
gauucucagcggagcaucc

SEQ ID NO: 2450032 - RNA, 19 nt, Artificial Sequence
  Description of Artificial Sequence: Synthetic oligonucleotide
  Sense strand starting at position 3596 of SEQ ID NO: 1887121
cccagccuuuagggauaaa

SEQ ID NO: 2450033 - RNA, 19 nt, Artificial Sequence
  Description of Artificial Sequence: Synthetic oligonucleotide
  Antisense strand to SEQ ID NO: 2450032
uuuaucccuaaaggcuggg

SEQ ID NO: 2450034 - RNA, 19 nt, Artificial Sequence
  Description of Artificial Sequence: Synthetic oligonucleotide
  Sense strand starting at position 3637 of SEQ ID NO: 1887121
gcgggacauugucuuggau

SEQ ID NO: 2450035 - RNA, 19 nt, Artificial Sequence
  Description of Artificial Sequence: Synthetic oligonucleotide
  Antisense strand to SEQ ID NO: 2450034
auccaagacaaugucccgc

SEQ ID NO: 2450036 - RNA, 19 nt, Artificial Sequence
  Description of Artificial Sequence: Synthetic oligonucleotide
  Sense strand starting at position 3703 of SEQ ID NO: 1887121
gaagucauaucccucagga

SEQ ID NO: 2450037 - RNA, 19 nt, Artificial Sequence
  Description of Artificial Sequence: Synthetic oligonucleotide
  Antisense strand to SEQ ID NO: 2450036
uccugagggauaugacuuc

SEQ ID NO: 2450038 - RNA, 19 nt, Artificial Sequence
  Description of Artificial Sequence: Synthetic oligonucleotide
  Sense strand starting at position 3782 of SEQ ID NO: 1887121
gugcucuacuggcuacaga

SEQ ID NO: 2450039 - RNA, 19 nt, Artificial Sequence
  Description of Artificial Sequence: Synthetic oligonucleotide
  Antisense strand to SEQ ID NO: 2450038
ucuguagccaguagagcac

SEQ ID NO: 2450040 - RNA, 19 nt, Artificial Sequence
  Description of Artificial Sequence: Synthetic oligonucleotide
  Sense strand starting at position 3851 of SEQ ID NO: 1887121
uuguuugagggcugugacu

SEQ ID NO: 2450041 - RNA, 19 nt, Artificial Sequence
  Description of Artificial Sequence: Synthetic oligonucleotide
  Antisense strand to SEQ ID NO: 2450040
agucacagcccucaaacaa

SEQ ID NO: 2450042 - RNA, 19 nt, Artificial Sequence
  Description of Artificial Sequence: Synthetic oligonucleotide
  Sense strand starting at position 22 of SEQ ID NO: 1887122
aaacgauucugaccuggga

SEQ ID NO: 2450043 - RNA, 19 nt, Artificial Sequence
  Description of Artificial Sequence: Synthetic oligonucleotide
  Antisense strand to SEQ ID NO: 2450042
ucccaggucagaaucguuu

SEQ ID NO: 2450044 - RNA, 19 nt, Artificial Sequence
  Description of Artificial Sequence: Synthetic oligonucleotide
  Sense strand starting at position 24 of SEQ ID NO: 1887122
acgauucugaccugggaag

SEQ ID NO: 2450045 - RNA, 19 nt, Artificial Sequence
  Description of Artificial Sequence: Synthetic oligonucleotide
  Antisense strand to SEQ ID NO: 2450044
cuucccaggucagaaucgu

SEQ ID NO: 2450046 - RNA, 19 nt, Artificial Sequence
  Description of Artificial Sequence: Synthetic oligonucleotide
  Sense strand starting at position 84 of SEQ ID NO: 1887122
gggcuugugguugacucaa

SEQ ID NO: 2450047 - RNA, 19 nt, Artificial Sequence
  Description of Artificial Sequence: Synthetic oligonucleotide
  Antisense strand to SEQ ID NO: 2450046
uugagucaaccacaagccc

SEQ ID NO: 2450048 - RNA, 19 nt, Artificial Sequence
  Description of Artificial Sequence: Synthetic oligonucleotide
  Sense strand starting at position 130 of SEQ ID NO: 1887122
guucaaggauguuuggcaa

SEQ ID NO: 2450049 - RNA, 19 nt, Artificial Sequence
  Description of Artificial Sequence: Synthetic oligonucleotide
  Antisense strand to SEQ ID NO: 2450048
uugccaaacauccuugaac

SEQ ID NO: 2450050 - RNA, 19 nt, Artificial Sequence
  Description of Artificial Sequence: Synthetic oligonucleotide
  Sense strand starting at position 443 of SEQ ID NO: 1887122
ggaugaauggcuugagcca

SEQ ID NO: 2450051 - RNA, 19 nt, Artificial Sequence
  Description of Artificial Sequence: Synthetic oligonucleotide
  Antisense strand to SEQ ID NO: 2450050
uggcucaagccauucaucc

SEQ ID NO: 2450052 - RNA, 19 nt, Artificial Sequence
  Description of Artificial Sequence: Synthetic oligonucleotide
  Sense strand starting at position 647 of SEQ ID NO: 1887122
auaugaaaucaguguguuu

SEQ ID NO: 2450053 - RNA, 19 nt, Artificial Sequence
  Description of Artificial Sequence: Synthetic oligonucleotide
  Antisense strand to SEQ ID NO: 2450052
aaacacacugauuucauau

SEQ ID NO: 2450054 - RNA, 19 nt, Artificial Sequence
  Description of Artificial Sequence: Synthetic oligonucleotide
  Sense strand starting at position 667 of SEQ ID NO: 1887122
acugguaaauugucaccau

SEQ ID NO: 2450055 - RNA, 19 nt, Artificial Sequence
  Description of Artificial Sequence: Synthetic oligonucleotide
  Antisense strand to SEQ ID NO: 2450054
auggugacaauuuaccagu

SEQ ID NO: 2450056 - RNA, 19 nt, Artificial Sequence
  Description of Artificial Sequence: Synthetic oligonucleotide
  Sense strand starting at position 670 of SEQ ID NO: 1887122
gguaaauugucaccaucaa

SEQ ID NO: 2450057 - RNA, 19 nt, Artificial Sequence
  Description of Artificial Sequence: Synthetic oligonucleotide
  Antisense strand to SEQ ID NO: 2450056
uugauggugacaauuuacc

SEQ ID NO: 2450058 - RNA, 19 nt, Artificial Sequence
  Description of Artificial Sequence: Synthetic oligonucleotide
  Sense strand starting at position 878 of SEQ ID NO: 1887122
ucagcuuugaguugggaag

SEQ ID NO: 2450059 - RNA, 19 nt, Artificial Sequence
  Description of Artificial Sequence: Synthetic oligonucleotide
  Antisense strand to SEQ ID NO: 2450058
cuucccaacucaaagcuga

SEQ ID NO: 2450060 - RNA, 19 nt, Artificial Sequence
  Description of Artificial Sequence: Synthetic oligonucleotide
  Sense strand starting at position 957 of SEQ ID NO: 1887122
ccugucuucuaccugauau

SEQ ID NO: 2450061 - RNA, 19 nt, Artificial Sequence
  Description of Artificial Sequence: Synthetic oligonucleotide
  Antisense strand to SEQ ID NO: 2450060
auaucagguagaagacagg

SEQ ID NO: 2450062 - RNA, 19 nt, Artificial Sequence
  Description of Artificial Sequence: Synthetic oligonucleotide
  Sense strand starting at position 959 of SEQ ID NO: 1887122
ugucuucuaccugauauua

SEQ ID NO: 2450063 - RNA, 19 nt, Artificial Sequence
  Description of Artificial Sequence: Synthetic oligonucleotide
  Antisense strand to SEQ ID NO: 2450062
uaauaucagguagaagaca

SEQ ID NO: 2450064 - RNA, 19 nt, Artificial Sequence
  Description of Artificial Sequence: Synthetic oligonucleotide
  Sense strand starting at position 1330 of SEQ ID NO: 1887122
gaguccugaccuuaaguga

SEQ ID NO: 2450065 - RNA, 19 nt, Artificial Sequence
  Description of Artificial Sequence: Synthetic oligonucleotide
  Antisense strand to SEQ ID NO: 2450064
ucacuuaaggucaggacuc

SEQ ID NO: 2450066 - RNA, 19 nt, Artificial Sequence
  Description of Artificial Sequence: Synthetic oligonucleotide
  Sense strand starting at position 1478 of SEQ ID NO: 1887122
aagugauccgccuacccaa

SEQ ID NO: 2450067 - RNA, 19 nt, Artificial Sequence
  Description of Artificial Sequence: Synthetic oligonucleotide
  Antisense strand to SEQ ID NO: 2450066
uuggguaggcggaucacuu

SEQ ID NO: 2450068 - RNA, 19 nt, Artificial Sequence
  Description of Artificial Sequence: Synthetic oligonucleotide
  Sense strand starting at position 1574 of SEQ ID NO: 1887122
gggaaaguaucugauuucu

SEQ ID NO: 2450069 - RNA, 19 nt, Artificial Sequence
  Description of Artificial Sequence: Synthetic oligonucleotide
  Antisense strand to SEQ ID NO: 2450068
agaaaucagauacuuuccc

SEQ ID NO: 2450070 - RNA, 19 nt, Artificial Sequence
  Description of Artificial Sequence: Synthetic oligonucleotide
  Sense strand starting at position 1579 of SEQ ID NO: 1887122
aguaucugauuucugugua

SEQ ID NO: 2450071 - RNA, 19 nt, Artificial Sequence
  Description of Artificial Sequence: Synthetic oligonucleotide
  Antisense strand to SEQ ID NO: 2450070
uacacagaaaucagauacu

SEQ ID NO: 2450072 - RNA, 19 nt, Artificial Sequence
  Description of Artificial Sequence: Synthetic oligonucleotide
  Sense strand starting at position 1909 of SEQ ID NO: 1887122
uguacacuuguguggaaga

SEQ ID NO: 2450073 - RNA, 19 nt, Artificial Sequence
  Description of Artificial Sequence: Synthetic oligonucleotide
  Antisense strand to SEQ ID NO: 2450072
ucuuccacacaaguguaca

SEQ ID NO: 2450074 - RNA, 19 nt, Artificial Sequence
  Description of Artificial Sequence: Synthetic oligonucleotide
  Sense strand starting at position 1911 of SEQ ID NO: 1887122
uacacuuguguggaagagu

SEQ ID NO: 2450075 - RNA, 19 nt, Artificial Sequence
  Description of Artificial Sequence: Synthetic oligonucleotide
  Antisense strand to SEQ ID NO: 2450074
acucuuccacacaagugua

SEQ ID NO: 2450076 - RNA, 19 nt, Artificial Sequence
  Description of Artificial Sequence: Synthetic oligonucleotide
  Sense strand starting at position 1914 of SEQ ID NO: 1887122
acuuguguggaagaguuau

SEQ ID NO: 2450077 - RNA, 19 nt, Artificial Sequence
  Description of Artificial Sequence: Synthetic oligonucleotide
  Antisense strand to SEQ ID NO: 2450076
auaacucuuccacacaagu

SEQ ID NO: 2450078 - RNA, 19 nt, Artificial Sequence
  Description of Artificial Sequence: Synthetic oligonucleotide
  Sense strand starting at position 1920 of SEQ ID NO: 1887122
guggaagaguuaucuagga

SEQ ID NO: 2450079 - RNA, 19 nt, Artificial Sequence
  Description of Artificial Sequence: Synthetic oligonucleotide
  Antisense strand to SEQ ID NO: 2450078
uccuagauaacucuuccac

SEQ ID NO: 2450080 - RNA, 19 nt, Artificial Sequence
  Description of Artificial Sequence: Synthetic oligonucleotide
  Sense strand starting at position 2078 of SEQ ID NO: 1887122
ggaugaccguuguucauaa

SEQ ID NO: 2450081 - RNA, 19 nt, Artificial Sequence
  Description of Artificial Sequence: Synthetic oligonucleotide
  Antisense strand to SEQ ID NO: 2450080
uuaugaacaacggucaucc

SEQ ID NO: 2450082 - RNA, 19 nt, Artificial Sequence
  Description of Artificial Sequence: Synthetic oligonucleotide
  Sense strand starting at position 2131 of SEQ ID NO: 1887122
guggagauggucugggaca

SEQ ID NO: 2450083 - RNA, 19 nt, Artificial Sequence
  Description of Artificial Sequence: Synthetic oligonucleotide
  Antisense strand to SEQ ID NO: 2450082
ugucccagaccaucuccac

SEQ ID NO: 2450084 - RNA, 19 nt, Artificial Sequence
  Description of Artificial Sequence: Synthetic oligonucleotide
  Sense strand starting at position 2525 of SEQ ID NO: 1887122
ccacaaggcccuuaauguu

SEQ ID NO: 2450085 - RNA, 19 nt, Artificial Sequence
  Description of Artificial Sequence: Synthetic oligonucleotide
  Antisense strand to SEQ ID NO: 2450084
aacauuaagggccuugugg

SEQ ID NO: 2450086 - RNA, 19 nt, Artificial Sequence
  Description of Artificial Sequence: Synthetic oligonucleotide
  Sense strand starting at position 2590 of SEQ ID NO: 1887122
ucaguugcugcagagaauu

SEQ ID NO: 2450087 - RNA, 19 nt, Artificial Sequence
  Description of Artificial Sequence: Synthetic oligonucleotide
  Antisense strand to SEQ ID NO: 2450086
aauucucugcagcaacuga

SEQ ID NO: 2450088 - RNA, 19 nt, Artificial Sequence
  Description of Artificial Sequence: Synthetic oligonucleotide
  Sense strand starting at position 2689 of SEQ ID NO: 1887122
agcugaacugcugaagaau

SEQ ID NO: 2450089 - RNA, 19 nt, Artificial Sequence
  Description of Artificial Sequence: Synthetic oligonucleotide
  Antisense strand to SEQ ID NO: 2450088
auucuucagcaguucagcu

SEQ ID NO: 2450090 - RNA, 19 nt, Artificial Sequence
  Description of Artificial Sequence: Synthetic oligonucleotide
  Sense strand starting at position 2700 of SEQ ID NO: 1887122
ugaagaaugcccugguaga

SEQ ID NO: 2450091 - RNA, 19 nt, Artificial Sequence
  Description of Artificial Sequence: Synthetic oligonucleotide
  Antisense strand to SEQ ID NO: 2450090
ucuaccagggcauucuuca

SEQ ID NO: 2450092 - RNA, 19 nt, Artificial Sequence
  Description of Artificial Sequence: Synthetic oligonucleotide
  Sense strand starting at position 2701 of SEQ ID NO: 1887122
gaagaaugcccugguagaa

SEQ ID NO: 2450093 - RNA, 19 nt, Artificial Sequence
  Description of Artificial Sequence: Synthetic oligonucleotide
  Antisense strand to SEQ ID NO: 2450092
uucuaccagggcauucuuc

SEQ ID NO: 2450094 - RNA, 19 nt, Artificial Sequence
  Description of Artificial Sequence: Synthetic oligonucleotide
  Sense strand starting at position 2713 of SEQ ID NO: 1887122
gguagaacuuaccuuucuu

SEQ ID NO: 2450095 - RNA, 19 nt, Artificial Sequence
  Description of Artificial Sequence: Synthetic oligonucleotide
  Antisense strand to SEQ ID NO: 2450094
aagaaagguaaguucuacc

SEQ ID NO: 2450096 - RNA, 19 nt, Artificial Sequence
  Description of Artificial Sequence: Synthetic oligonucleotide
  Sense strand starting at position 2814 of SEQ ID NO: 1887122
ugcaaaugcagguaaauga

SEQ ID NO: 2450097 - RNA, 19 nt, Artificial Sequence
  Description of Artificial Sequence: Synthetic oligonucleotide
  Antisense strand to SEQ ID NO: 2450096
ucauuuaccugcauuugca

SEQ ID NO: 2450098 - RNA, 19 nt, Artificial Sequence
  Description of Artificial Sequence: Synthetic oligonucleotide
  Sense strand starting at position 2824 of SEQ ID NO: 1887122
gguaaaugacaacgugacu

SEQ ID NO: 2450099 - RNA, 19 nt, Artificial Sequence
  Description of Artificial Sequence: Synthetic oligonucleotide
  Antisense strand to SEQ ID NO: 2450098
agucacguugucauuuacc

SEQ ID NO: 2450100 - RNA, 19 nt, Artificial Sequence
  Description of Artificial Sequence: Synthetic oligonucleotide
  Sense strand starting at position 2849 of SEQ ID NO: 1887122
gagggacuguguuugauga

SEQ ID NO: 2450101 - RNA, 19 nt, Artificial Sequence
  Description of Artificial Sequence: Synthetic oligonucleotide
  Antisense strand to SEQ ID NO: 2450100
ucaucaaacacagucccuc

SEQ ID NO: 2450102 - RNA, 19 nt, Artificial Sequence
  Description of Artificial Sequence: Synthetic oligonucleotide
  Sense strand starting at position 3036 of SEQ ID NO: 1887122
agccuauuggucuauuaua

SEQ ID NO: 2450103 - RNA, 19 nt, Artificial Sequence
  Description of Artificial Sequence: Synthetic oligonucleotide
  Antisense strand to SEQ ID NO: 2450102
uauaauagaccaauaggcu

SEQ ID NO: 2450104 - RNA, 19 nt, Artificial Sequence
  Description of Artificial Sequence: Synthetic oligonucleotide
  Sense strand starting at position 3223 of SEQ ID NO: 1887122
uccucugauaggugauagu

SEQ ID NO: 2450105 - RNA, 19 nt, Artificial Sequence
  Description of Artificial Sequence: Synthetic oligonucleotide
  Antisense strand to SEQ ID NO: 2450104
acuaucaccuaucagagga

SEQ ID NO: 2450106 - RNA, 19 nt, Artificial Sequence
  Description of Artificial Sequence: Synthetic oligonucleotide
  Sense strand starting at position 3232 of SEQ ID NO: 1887122
aggugauagucacuaggga

SEQ ID NO: 2450107 - RNA, 19 nt, Artificial Sequence
  Description of Artificial Sequence: Synthetic oligonucleotide
  Antisense strand to SEQ ID NO: 2450106
ucccuagugacuaucaccu

SEQ ID NO: 2450108 - RNA, 19 nt, Artificial Sequence
  Description of Artificial Sequence: Synthetic oligonucleotide
  Sense strand starting at position 3300 of SEQ ID NO: 1887122
gcuaucauguaacucagaa

SEQ ID NO: 2450109 - RNA, 19 nt, Artificial Sequence
  Description of Artificial Sequence: Synthetic oligonucleotide
  Antisense strand to SEQ ID NO: 2450108
uucugaguuacaugauagc

SEQ ID NO: 2450110 - RNA, 19 nt, Artificial Sequence
  Description of Artificial Sequence: Synthetic oligonucleotide
  Sense strand starting at position 3436 of SEQ ID NO: 1887122
uccuauuggccagaagcuu

SEQ ID NO: 2450111 - RNA, 19 nt, Artificial Sequence
  Description of Artificial Sequence: Synthetic oligonucleotide
  Antisense strand to SEQ ID NO: 2450110
aagcuucuggccaauagga

SEQ ID NO: 2450112 - RNA, 19 nt, Artificial Sequence
  Description of Artificial Sequence: Synthetic oligonucleotide
  Sense strand starting at position 3469 of SEQ ID NO: 1887122
acaguuaugguccacagca

SEQ ID NO: 2450113 - RNA, 19 nt, Artificial Sequence
  Description of Artificial Sequence: Synthetic oligonucleotide
  Antisense strand to SEQ ID NO: 2450112
ugcuguggaccauaacugu

SEQ ID NO: 2450114 - RNA, 19 nt, Artificial Sequence
  Description of Artificial Sequence: Synthetic oligonucleotide
  Sense strand starting at position 3744 of SEQ ID NO: 1887122
gcagcuucaggauaaguga

SEQ ID NO: 2450115 - RNA, 19 nt, Artificial Sequence
  Description of Artificial Sequence: Synthetic oligonucleotide
  Antisense strand to SEQ ID NO: 2450114
ucacuuauccugaagcugc

SEQ ID NO: 2450116 - RNA, 19 nt, Artificial Sequence
  Description of Artificial Sequence: Synthetic oligonucleotide
  Sense strand starting at position 3755 of SEQ ID NO: 1887122
auaagugauucuuugacug

SEQ ID NO: 2450117 - RNA, 19 nt, Artificial Sequence
  Description of Artificial Sequence: Synthetic oligonucleotide
  Antisense strand to SEQ ID NO: 2450116
cagucaaagaaucacuuau

SEQ ID NO: 2450118 - RNA, 19 nt, Artificial Sequence
  Description of Artificial Sequence: Synthetic oligonucleotide
  Sense strand starting at position 3759 of SEQ ID NO: 1887122
gugauucuuugacugcaaa

SEQ ID NO: 2450119 - RNA, 19 nt, Artificial Sequence
  Description of Artificial Sequence: Synthetic oligonucleotide
  Antisense strand to SEQ ID NO: 2450118
uuugcagucaaagaaucac

SEQ ID NO: 2450120 - RNA, 19 nt, Artificial Sequence
  Description of Artificial Sequence: Synthetic oligonucleotide
  Sense strand starting at position 3760 of SEQ ID NO: 1887122
ugauucuuugacugcaaac

SEQ ID NO: 2450121 - RNA, 19 nt, Artificial Sequence
  Description of Artificial Sequence: Synthetic oligonucleotide
  Antisense strand to SEQ ID NO: 2450120
guuugcagucaaagaauca

SEQ ID NO: 2450122 - RNA, 19 nt, Artificial Sequence
  Description of Artificial Sequence: Synthetic oligonucleotide
  Sense strand starting at position 352 of SEQ ID NO: 1887123
gcaaauuccuaaguguuuc

SEQ ID NO: 2450123 - RNA, 19 nt, Artificial Sequence
  Description of Artificial Sequence: Synthetic oligonucleotide
  Antisense strand to SEQ ID NO: 2450122
gaaacacuuaggaauuugc

SEQ ID NO: 2450124 - RNA, 19 nt, Artificial Sequence
  Description of Artificial Sequence: Synthetic oligonucleotide
  Sense strand starting at position 360 of SEQ ID NO: 1887123
cuaaguguuucugugguuu

SEQ ID NO: 2450125 - RNA, 19 nt, Artificial Sequence
  Description of Artificial Sequence: Synthetic oligonucleotide
  Antisense strand to SEQ ID NO: 2450124
aaaccacagaaacacuuag

SEQ ID NO: 2450126 - RNA, 19 nt, Artificial Sequence
  Description of Artificial Sequence: Synthetic oligonucleotide
  Sense strand starting at position 364 of SEQ ID NO: 1887123
guguuucugugguuuguca

SEQ ID NO: 2450127 - RNA, 19 nt, Artificial Sequence
  Description of Artificial Sequence: Synthetic oligonucleotide
  Antisense strand to SEQ ID NO: 2450126
ugacaaaccacagaaacac

SEQ ID NO: 2450128 - RNA, 19 nt, Artificial Sequence
  Description of Artificial Sequence: Synthetic oligonucleotide
  Sense strand starting at position 366 of SEQ ID NO: 1887123
guuucugugguuugucaua

SEQ ID NO: 2450129 - RNA, 19 nt, Artificial Sequence
  Description of Artificial Sequence: Synthetic oligonucleotide
  Antisense strand to SEQ ID NO: 2450128
uaugacaaaccacagaaac

SEQ ID NO: 2450130 - RNA, 19 nt, Artificial Sequence
  Description of Artificial Sequence: Synthetic oligonucleotide
  Sense strand starting at position 368 of SEQ ID NO: 1887123
uucugugguuugucauauu

SEQ ID NO: 2450131 - RNA, 19 nt, Artificial Sequence
  Description of Artificial Sequence: Synthetic oligonucleotide
  Antisense strand to SEQ ID NO: 2450130
aauaugacaaaccacagaa

SEQ ID NO: 2450132 - RNA, 19 nt, Artificial Sequence
  Description of Artificial Sequence: Synthetic oligonucleotide
  Sense strand starting at position 371 of SEQ ID NO: 1887123
ugugguuugucauauuuga

SEQ ID NO: 2450133 - RNA, 19 nt, Artificial Sequence
  Description of Artificial Sequence: Synthetic oligonucleotide
  Antisense strand to SEQ ID NO: 2450132
ucaaauaugacaaaccaca

SEQ ID NO: 2450134 - RNA, 19 nt, Artificial Sequence
  Description of Artificial Sequence: Synthetic oligonucleotide
  Sense strand starting at position 395 of SEQ ID NO: 1887123
auaaauucuuuaugaggca

SEQ ID NO: 2450135 - RNA, 19 nt, Artificial Sequence
  Description of Artificial Sequence: Synthetic oligonucleotide
  Antisense strand to SEQ ID NO: 2450134
ugccucauaaagaauuuau

SEQ ID NO: 2450136 - RNA, 19 nt, Artificial Sequence
  Description of Artificial Sequence: Synthetic oligonucleotide
  Sense strand starting at position 441 of SEQ ID NO: 1887123
aaccaaggcuuggagaaau

SEQ ID NO: 2450137 - RNA, 19 nt, Artificial Sequence
  Description of Artificial Sequence: Synthetic oligonucleotide
  Antisense strand to SEQ ID NO: 2450136
auuucuccaagccuugguu

SEQ ID NO: 2450138 - RNA, 19 nt, Artificial Sequence
  Description of Artificial Sequence: Synthetic oligonucleotide
  Sense strand starting at position 597 of SEQ ID NO: 1887123
uucugacuuugcgggauuu

SEQ ID NO: 2450139 - RNA, 19 nt, Artificial Sequence
  Description of Artificial Sequence: Synthetic oligonucleotide
  Antisense strand to SEQ ID NO: 2450138
aaaucccgcaaagucagaa

SEQ ID NO: 2450140 - RNA, 19 nt, Artificial Sequence
  Description of Artificial Sequence: Synthetic oligonucleotide
  Sense strand starting at position 1074 of SEQ ID NO: 1887123
gcuguuggaccuuagguaa

SEQ ID NO: 2450141 - RNA, 19 nt, Artificial Sequence
  Description of Artificial Sequence: Synthetic oligonucleotide
  Antisense strand to SEQ ID NO: 2450140
uuaccuaagguccaacagc

SEQ ID NO: 2450142 - RNA, 19 nt, Artificial Sequence
  Description of Artificial Sequence: Synthetic oligonucleotide
  Sense strand starting at position 1159 of SEQ ID NO: 1887123
cggguuguuacagggacua

SEQ ID NO: 2450143 - RNA, 19 nt, Artificial Sequence
  Description of Artificial Sequence: Synthetic oligonucleotide
  Antisense strand to SEQ ID NO: 2450142
uagucccuguaacaacccg

SEQ ID NO: 2450144 - RNA, 19 nt, Artificial Sequence
  Description of Artificial Sequence: Synthetic oligonucleotide
  Sense strand starting at position 1180 of SEQ ID NO: 1887123
ugaaguaauacguguaaug

SEQ ID NO: 2450145 - RNA, 19 nt, Artificial Sequence
  Description of Artificial Sequence: Synthetic oligonucleotide
  Antisense strand to SEQ ID NO: 2450144
cauuacacguauuacuuca

SEQ ID NO: 2450146 - RNA, 19 nt, Artificial Sequence
  Description of Artificial Sequence: Synthetic oligonucleotide
  Sense strand starting at position 1182 of SEQ ID NO: 1887123
aaguaauacguguaaugca

SEQ ID NO: 2450147 - RNA, 19 nt, Artificial Sequence
  Description of Artificial Sequence: Synthetic oligonucleotide
  Antisense strand to SEQ ID NO: 2450146
ugcauuacacguauuacuu

SEQ ID NO: 2450148 - RNA, 19 nt, Artificial Sequence
  Description of Artificial Sequence: Synthetic oligonucleotide
  Sense strand starting at position 1191 of SEQ ID NO: 1887123
guguaaugcacuugguauu

SEQ ID NO: 2450149 - RNA, 19 nt, Artificial Sequence
  Description of Artificial Sequence: Synthetic oligonucleotide
  Antisense strand to SEQ ID NO: 2450148
aauaccaagugcauuacac

SEQ ID NO: 2450150 - RNA, 19 nt, Artificial Sequence
  Description of Artificial Sequence: Synthetic oligonucleotide
  Sense strand starting at position 1192 of SEQ ID NO: 1887123
uguaaugcacuugguauua

SEQ ID NO: 2450151 - RNA, 19 nt, Artificial Sequence
  Description of Artificial Sequence: Synthetic oligonucleotide
  Antisense strand to SEQ ID NO: 2450150
uaauaccaagugcauuaca

SEQ ID NO: 2450152 - RNA, 19 nt, Artificial Sequence
  Description of Artificial Sequence: Synthetic oligonucleotide
  Sense strand starting at position 1633 of SEQ ID NO: 1887123
augucagaaugcuuuaugu

SEQ ID NO: 2450153 - RNA, 19 nt, Artificial Sequence
  Description of Artificial Sequence: Synthetic oligonucleotide
  Antisense strand to SEQ ID NO: 2450152
acauaaagcauucugacau

SEQ ID NO: 2450154 - RNA, 19 nt, Artificial Sequence
  Description of Artificial Sequence: Synthetic oligonucleotide
  Sense strand starting at position 1635 of SEQ ID NO: 1887123
gucagaaugcuuuauguuu

SEQ ID NO: 2450155 - RNA, 19 nt, Artificial Sequence
  Description of Artificial Sequence: Synthetic oligonucleotide
  Antisense strand to SEQ ID NO: 2450154
aaacauaaagcauucugac

SEQ ID NO: 2450156 - RNA, 19 nt, Artificial Sequence
  Description of Artificial Sequence: Synthetic oligonucleotide
  Sense strand starting at position 1642 of SEQ ID NO: 1887123
ugcuuuauguuuccaagga

SEQ ID NO: 2450157 - RNA, 19 nt, Artificial Sequence
  Description of Artificial Sequence: Synthetic oligonucleotide
  Antisense strand to SEQ ID NO: 2450156
uccuuggaaacauaaagca

SEQ ID NO: 2450158 - RNA, 19 nt, Artificial Sequence
  Description of Artificial Sequence: Synthetic oligonucleotide
  Sense strand starting at position 1646 of SEQ ID NO: 1887123
uuauguuuccaaggagaaa

SEQ ID NO: 2450159 - RNA, 19 nt, Artificial Sequence
  Description of Artificial Sequence: Synthetic oligonucleotide
  Antisense strand to SEQ ID NO: 2450158
uuucuccuuggaaacauaa

SEQ ID NO: 2450160 - RNA, 19 nt, Artificial Sequence
  Description of Artificial Sequence: Synthetic oligonucleotide
  Sense strand starting at position 1678 of SEQ ID NO: 1887123
ugaagugacuuuccuaggu

SEQ ID NO: 2450161 - RNA, 19 nt, Artificial Sequence
  Description of Artificial Sequence: Synthetic oligonucleotide
  Antisense strand to SEQ ID NO: 2450160
accuaggaaagucacuuca

SEQ ID NO: 2450162 - RNA, 19 nt, Artificial Sequence
  Description of Artificial Sequence: Synthetic oligonucleotide
  Sense strand starting at position 1691 of SEQ ID NO: 1887123
cuagguucacacgaugagu

SEQ ID NO: 2450163 - RNA, 19 nt, Artificial Sequence
  Description of Artificial Sequence: Synthetic oligonucleotide
  Antisense strand to SEQ ID NO: 2450162
acucaucgugugaaccuag

SEQ ID NO: 2450164 - RNA, 19 nt, Artificial Sequence
  Description of Artificial Sequence: Synthetic oligonucleotide
  Sense strand starting at position 1693 of SEQ ID NO: 1887123
agguucacacgaugaguuu

SEQ ID NO: 2450165 - RNA, 19 nt, Artificial Sequence
  Description of Artificial Sequence: Synthetic oligonucleotide
  Antisense strand to SEQ ID NO: 2450164
aaacucaucgugugaaccu

SEQ ID NO: 2450166 - RNA, 19 nt, Artificial Sequence
  Description of Artificial Sequence: Synthetic oligonucleotide
  Sense strand starting at position 1699 of SEQ ID NO: 1887123
acacgaugaguuuguggca

SEQ ID NO: 2450167 - RNA, 19 nt, Artificial Sequence
  Description of Artificial Sequence: Synthetic oligonucleotide
  Antisense strand to SEQ ID NO: 2450166
ugccacaaacucaucgugu

SEQ ID NO: 2450168 - RNA, 19 nt, Artificial Sequence
  Description of Artificial Sequence: Synthetic oligonucleotide
  Sense strand starting at position 1706 of SEQ ID NO: 1887123
gaguuuguggcagacuaca

SEQ ID NO: 2450169 - RNA, 19 nt, Artificial Sequence
  Description of Artificial Sequence: Synthetic oligonucleotide
  Antisense strand to SEQ ID NO: 2450168
uguagucugccacaaacuc

SEQ ID NO: 2450170 - RNA, 19 nt, Artificial Sequence
  Description of Artificial Sequence: Synthetic oligonucleotide
  Sense strand starting at position 1805 of SEQ ID NO: 1887123
cugugaguuccuggauggu

SEQ ID NO: 2450171 - RNA, 19 nt, Artificial Sequence
  Description of Artificial Sequence: Synthetic oligonucleotide
  Antisense strand to SEQ ID NO: 2450170
accauccaggaacucacag

SEQ ID NO: 2450172 - RNA, 19 nt, Artificial Sequence
  Description of Artificial Sequence: Synthetic oligonucleotide
  Sense strand starting at position 1829 of SEQ ID NO: 1887123
gguccaggaucuugaaacu

SEQ ID NO: 2450173 - RNA, 19 nt, Artificial Sequence
  Description of Artificial Sequence: Synthetic oligonucleotide
  Antisense strand to SEQ ID NO: 2450172
aguuucaagauccuggacc

SEQ ID NO: 2450174 - RNA, 19 nt, Artificial Sequence
  Description of Artificial Sequence: Synthetic oligonucleotide
  Sense strand starting at position 1841 of SEQ ID NO: 1887123
ugaaacucguguccaguuu

SEQ ID NO: 2450175 - RNA, 19 nt, Artificial Sequence
  Description of Artificial Sequence: Synthetic oligonucleotide
  Antisense strand to SEQ ID NO: 2450174
aaacuggacacgaguuuca

SEQ ID NO: 2450176 - RNA, 19 nt, Artificial Sequence
  Description of Artificial Sequence: Synthetic oligonucleotide
  Sense strand starting at position 1905 of SEQ ID NO: 1887123
gcuguuguuggacgucuua

SEQ ID NO: 2450177 - RNA, 19 nt, Artificial Sequence
  Description of Artificial Sequence: Synthetic oligonucleotide
  Antisense strand to SEQ ID NO: 2450176
uaagacguccaacaacagc

SEQ ID NO: 2450178 - RNA, 19 nt, Artificial Sequence
  Description of Artificial Sequence: Synthetic oligonucleotide
  Sense strand starting at position 2048 of SEQ ID NO: 1887123
cgccguucccucuaggaau

SEQ ID NO: 2450179 - RNA, 19 nt, Artificial Sequence
  Description of Artificial Sequence: Synthetic oligonucleotide
  Antisense strand to SEQ ID NO: 2450178
auuccuagagggaacggcg

SEQ ID NO: 2450180 - RNA, 19 nt, Artificial Sequence
  Description of Artificial Sequence: Synthetic oligonucleotide
  Sense strand starting at position 2145 of SEQ ID NO: 1887123
caauaagagccgugagggu

SEQ ID NO: 2450181 - RNA, 19 nt, Artificial Sequence
  Description of Artificial Sequence: Synthetic oligonucleotide
  Antisense strand to SEQ ID NO: 2450180
acccucacggcucuuauug

SEQ ID NO: 2450182 - RNA, 19 nt, Artificial Sequence
  Description of Artificial Sequence: Synthetic oligonucleotide
  Sense strand starting at position 2154 of SEQ ID NO: 1887123
ccgugaggguucccagacu

SEQ ID NO: 2450183 - RNA, 19 nt, Artificial Sequence
  Description of Artificial Sequence: Synthetic oligonucleotide
  Antisense strand to SEQ ID NO: 2450182
agucugggaacccucacgg

SEQ ID NO: 2450184 - RNA, 19 nt, Artificial Sequence
  Description of Artificial Sequence: Synthetic oligonucleotide
  Sense strand starting at position 2282 of SEQ ID NO: 1887123
gagcgaggccuccagaacu

SEQ ID NO: 2450185 - RNA, 19 nt, Artificial Sequence
  Description of Artificial Sequence: Synthetic oligonucleotide
  Antisense strand to SEQ ID NO: 2450184
aguucuggaggccucgcuc

SEQ ID NO: 2450186 - RNA, 19 nt, Artificial Sequence
  Description of Artificial Sequence: Synthetic oligonucleotide
  Sense strand starting at position 2468 of SEQ ID NO: 1887123
caagguuaccacgggaagu

SEQ ID NO: 2450187 - RNA, 19 nt, Artificial Sequence
  Description of Artificial Sequence: Synthetic oligonucleotide
  Antisense strand to SEQ ID NO: 2450186
acuucccgugguaaccuug

SEQ ID NO: 2450188 - RNA, 19 nt, Artificial Sequence
  Description of Artificial Sequence: Synthetic oligonucleotide
  Sense strand starting at position 3229 of SEQ ID NO: 1887123
uuaccugcaucuuaaggaa

SEQ ID NO: 2450189 - RNA, 19 nt, Artificial Sequence
  Description of Artificial Sequence: Synthetic oligonucleotide
  Antisense strand to SEQ ID NO: 2450188
uuccuuaagaugcagguaa

SEQ ID NO: 2450190 - RNA, 19 nt, Artificial Sequence
  Description of Artificial Sequence: Synthetic oligonucleotide
  Sense strand starting at position 3309 of SEQ ID NO: 1887123
ggcugguguggcuagaaga

SEQ ID NO: 2450191 - RNA, 19 nt, Artificial Sequence
  Description of Artificial Sequence: Synthetic oligonucleotide
  Antisense strand to SEQ ID NO: 2450190
ucuucuagccacaccagcc

SEQ ID NO: 2450192 - RNA, 19 nt, Artificial Sequence
  Description of Artificial Sequence: Synthetic oligonucleotide
  Sense strand starting at position 3310 of SEQ ID NO: 1887123
gcugguguggcuagaagau

SEQ ID NO: 2450193 - RNA, 19 nt, Artificial Sequence
  Description of Artificial Sequence: Synthetic oligonucleotide
  Antisense strand to SEQ ID NO: 2450192
aucuucuagccacaccagc

SEQ ID NO: 2450194 - RNA, 19 nt, Artificial Sequence
  Description of Artificial Sequence: Synthetic oligonucleotide
  Sense strand starting at position 3391 of SEQ ID NO: 1887123
ggcucuuauagggauugua

SEQ ID NO: 2450195 - RNA, 19 nt, Artificial Sequence
  Description of Artificial Sequence: Synthetic oligonucleotide
  Antisense strand to SEQ ID NO: 2450194
uacaaucccuauaagagcc

SEQ ID NO: 2450196 - RNA, 19 nt, Artificial Sequence
  Description of Artificial Sequence: Synthetic oligonucleotide
  Sense strand starting at position 3394 of SEQ ID NO: 1887123
ucuuauagggauuguaaag

SEQ ID NO: 2450197 - RNA, 19 nt, Artificial Sequence
  Description of Artificial Sequence: Synthetic oligonucleotide
  Antisense strand to SEQ ID NO: 2450196
cuuuacaaucccuauaaga

SEQ ID NO: 2450198 - RNA, 19 nt, Artificial Sequence
  Description of Artificial Sequence: Synthetic oligonucleotide
  Sense strand starting at position 3423 of SEQ ID NO: 1887123
cacuuugaaugagaugaga

SEQ ID NO: 2450199 - RNA, 19 nt, Artificial Sequence
  Description of Artificial Sequence: Synthetic oligonucleotide
  Antisense strand to SEQ ID NO: 2450198
ucucaucucauucaaagug

SEQ ID NO: 2450200 - RNA, 19 nt, Artificial Sequence
  Description of Artificial Sequence: Synthetic oligonucleotide
  Sense strand starting at position 3437 of SEQ ID NO: 1887123
ugagaugacugggucuuga

SEQ ID NO: 2450201 - RNA, 19 nt, Artificial Sequence
  Description of Artificial Sequence: Synthetic oligonucleotide
  Antisense strand to SEQ ID NO: 2450200
ucaagacccagucaucuca

SEQ ID NO: 2450202 - RNA, 19 nt, Artificial Sequence
  Description of Artificial Sequence: Synthetic oligonucleotide
  Sense strand starting at position 169 of SEQ ID NO: 1887124
gcuggagggauguguaagu

SEQ ID NO: 2450203 - RNA, 19 nt, Artificial Sequence
  Description of Artificial Sequence: Synthetic oligonucleotide
  Antisense strand to SEQ ID NO: 2450202
acuuacacaucccuccagc

SEQ ID NO: 2450204 - RNA, 19 nt, Artificial Sequence
  Description of Artificial Sequence: Synthetic oligonucleotide
  Sense strand starting at position 174 of SEQ ID NO: 1887124
agggauguguaaguuagga

SEQ ID NO: 2450205 - RNA, 19 nt, Artificial Sequence
  Description of Artificial Sequence: Synthetic oligonucleotide
  Antisense strand to SEQ ID NO: 2450204
uccuaacuuacacaucccu

SEQ ID NO: 2450206 - RNA, 19 nt, Artificial Sequence
  Description of Artificial Sequence: Synthetic oligonucleotide
  Sense strand starting at position 321 of SEQ ID NO: 1887124
ccgccuuccugcuggacaa

SEQ ID NO: 2450207 - RNA, 19 nt, Artificial Sequence
  Description of Artificial Sequence: Synthetic oligonucleotide
  Antisense strand to SEQ ID NO: 2450206
uuguccagcaggaaggcgg

SEQ ID NO: 2450208 - RNA, 19 nt, Artificial Sequence
  Description of Artificial Sequence: Synthetic oligonucleotide
  Sense strand starting at position 322 of SEQ ID NO: 1887124
cgccuuccugcuggacaau

SEQ ID NO: 2450209 - RNA, 19 nt, Artificial Sequence
  Description of Artificial Sequence: Synthetic oligonucleotide
  Antisense strand to SEQ ID NO: 2450208
auuguccagcaggaaggcg

SEQ ID NO: 2450210 - RNA, 19 nt, Artificial Sequence
  Description of Artificial Sequence: Synthetic oligonucleotide
  Sense strand starting at position 389 of SEQ ID NO: 1887124
cugggaagcauccgagaau

SEQ ID NO: 2450211 - RNA, 19 nt, Artificial Sequence
  Description of Artificial Sequence: Synthetic oligonucleotide
  Antisense strand to SEQ ID NO: 2450210
auucucggaugcuucccag

SEQ ID NO: 2450212 - RNA, 19 nt, Artificial Sequence
  Description of Artificial Sequence: Synthetic oligonucleotide
  Sense strand starting at position 390 of SEQ ID NO: 1887124
ugggaagcauccgagaaug

SEQ ID NO: 2450213 - RNA, 19 nt, Artificial Sequence
  Description of Artificial Sequence: Synthetic oligonucleotide
  Antisense strand to SEQ ID NO: 2450212
cauucucggaugcuuccca

SEQ ID NO: 2450214 - RNA, 19 nt, Artificial Sequence
  Description of Artificial Sequence: Synthetic oligonucleotide
  Sense strand starting at position 746 of SEQ ID NO: 1887124
agccgagaucgguaggaaa

SEQ ID NO: 2450215 - RNA, 19 nt, Artificial Sequence
  Description of Artificial Sequence: Synthetic oligonucleotide
  Antisense strand to SEQ ID NO: 2450214
uuuccuaccgaucucggcu

SEQ ID NO: 2450216 - RNA, 19 nt, Artificial Sequence
  Description of Artificial Sequence: Synthetic oligonucleotide
  Sense strand starting at position 758 of SEQ ID NO: 1887124
uaggaaacgucucguugac

SEQ ID NO: 2450217 - RNA, 19 nt, Artificial Sequence
  Description of Artificial Sequence: Synthetic oligonucleotide
  Antisense strand to SEQ ID NO: 2450216
gucaacgagacguuuccua

SEQ ID NO: 2450218 - RNA, 19 nt, Artificial Sequence
  Description of Artificial Sequence: Synthetic oligonucleotide
  Sense strand starting at position 760 of SEQ ID NO: 1887124
ggaaacgucucguugacag

SEQ ID NO: 2450219 - RNA, 19 nt, Artificial Sequence
  Description of Artificial Sequence: Synthetic oligonucleotide
  Antisense strand to SEQ ID NO: 2450218
cugucaacgagacguuucc

SEQ ID NO: 2450220 - RNA, 19 nt, Artificial Sequence
  Description of Artificial Sequence: Synthetic oligonucleotide
  Sense strand starting at position 1040 of SEQ ID NO: 1887124
uguggagggccucaucaaa

SEQ ID NO: 2450221 - RNA, 19 nt, Artificial Sequence
  Description of Artificial Sequence: Synthetic oligonucleotide
  Antisense strand to SEQ ID NO: 2450220
uuugaugaggcccuccaca

SEQ ID NO: 2450222 - RNA, 19 nt, Artificial Sequence
  Description of Artificial Sequence: Synthetic oligonucleotide
  Sense strand starting at position 1089 of SEQ ID NO: 1887124
guccauuguccaugccgga

SEQ ID NO: 2450223 - RNA, 19 nt, Artificial Sequence
  Description of Artificial Sequence: Synthetic oligonucleotide
  Antisense strand to SEQ ID NO: 2450222
uccggcauggacaauggac

SEQ ID NO: 2450224 - RNA, 19 nt, Artificial Sequence
  Description of Artificial Sequence: Synthetic oligonucleotide
  Sense strand starting at position 1152 of SEQ ID NO: 1887124
gcuggcuuagucugauagu

SEQ ID NO: 2450225 - RNA, 19 nt, Artificial Sequence
  Description of Artificial Sequence: Synthetic oligonucleotide
  Antisense strand to SEQ ID NO: 2450224
acuaucagacuaagccagc

SEQ ID NO: 2450226 - RNA, 19 nt, Artificial Sequence
  Description of Artificial Sequence: Synthetic oligonucleotide
  Sense strand starting at position 1153 of SEQ ID NO: 1887124
cuggcuuagucugauaguu

SEQ ID NO: 2450227 - RNA, 19 nt, Artificial Sequence
  Description of Artificial Sequence: Synthetic oligonucleotide
  Antisense strand to SEQ ID NO: 2450226
aacuaucagacuaagccag

SEQ ID NO: 2450228 - RNA, 19 nt, Artificial Sequence
  Description of Artificial Sequence: Synthetic oligonucleotide
  Sense strand starting at position 1410 of SEQ ID NO: 1887124
gagucagagucugaggagu

SEQ ID NO: 2450229 - RNA, 19 nt, Artificial Sequence
  Description of Artificial Sequence: Synthetic oligonucleotide
  Antisense strand to SEQ ID NO: 2450228
acuccucagacucugacuc

SEQ ID NO: 2450230 - RNA, 19 nt, Artificial Sequence
  Description of Artificial Sequence: Synthetic oligonucleotide
  Sense strand starting at position 1664 of SEQ ID NO: 1887124
ccgccaucuucagaggagu

SEQ ID NO: 2450231 - RNA, 19 nt, Artificial Sequence
  Description of Artificial Sequence: Synthetic oligonucleotide
  Antisense strand to SEQ ID NO: 2450230
acuccucugaagauggcgg

SEQ ID NO: 2450232 - RNA, 19 nt, Artificial Sequence
  Description of Artificial Sequence: Synthetic oligonucleotide
  Sense strand starting at position 1860 of SEQ ID NO: 1887124
cgacuuggacugcagagua

SEQ ID NO: 2450233 - RNA, 19 nt, Artificial Sequence
  Description of Artificial Sequence: Synthetic oligonucleotide
  Antisense strand to SEQ ID NO: 2450232
uacucugcaguccaagucg

SEQ ID NO: 2450234 - RNA, 19 nt, Artificial Sequence
  Description of Artificial Sequence: Synthetic oligonucleotide
  Sense strand starting at position 1913 of SEQ ID NO: 1887124
uggucaugcucuuacguuu

SEQ ID NO: 2450235 - RNA, 19 nt, Artificial Sequence
  Description of Artificial Sequence: Synthetic oligonucleotide
  Antisense strand to SEQ ID NO: 2450234
aaacguaagagcaugacca

SEQ ID NO: 2450236 - RNA, 19 nt, Artificial Sequence
  Description of Artificial Sequence: Synthetic oligonucleotide
  Sense strand starting at position 2189 of SEQ ID NO: 1887124
cucccaggcucccuagauu

SEQ ID NO: 2450237 - RNA, 19 nt, Artificial Sequence
  Description of Artificial Sequence: Synthetic oligonucleotide
  Antisense strand to SEQ ID NO: 2450236
aaucuagggagccugggag

SEQ ID NO: 2450238 - RNA, 19 nt, Artificial Sequence
  Description of Artificial Sequence: Synthetic oligonucleotide
  Sense strand starting at position 2854 of SEQ ID NO: 1887124
acaggugauucucuccacu

SEQ ID NO: 2450239 - RNA, 19 nt, Artificial Sequence
  Description of Artificial Sequence: Synthetic oligonucleotide
  Antisense strand to SEQ ID NO: 2450238
aguggagagaaucaccugu

SEQ ID NO: 2450240 - RNA, 19 nt, Artificial Sequence
  Description of Artificial Sequence: Synthetic oligonucleotide
  Sense strand starting at position 2856 of SEQ ID NO: 1887124
aggugauucucuccacuuu

SEQ ID NO: 2450241 - RNA, 19 nt, Artificial Sequence
  Description of Artificial Sequence: Synthetic oligonucleotide
  Antisense strand to SEQ ID NO: 2450240
aaaguggagagaaucaccu

SEQ ID NO: 2450242 - RNA, 19 nt, Artificial Sequence
  Description of Artificial Sequence: Synthetic oligonucleotide
  Sense strand starting at position 2857 of SEQ ID NO: 1887124
ggugauucucuccacuuua

SEQ ID NO: 2450243 - RNA, 19 nt, Artificial Sequence
  Description of Artificial Sequence: Synthetic oligonucleotide
  Antisense strand to SEQ ID NO: 2450242
uaaaguggagagaaucacc

SEQ ID NO: 2450244 - RNA, 19 nt, Artificial Sequence
  Description of Artificial Sequence: Synthetic oligonucleotide
  Sense strand starting at position 2968 of SEQ ID NO: 1887124
cagucugauuuggauucuu

SEQ ID NO: 2450245 - RNA, 19 nt, Artificial Sequence
  Description of Artificial Sequence: Synthetic oligonucleotide
  Antisense strand to SEQ ID NO: 2450244
aagaauccaaaucagacug

SEQ ID NO: 2450246 - RNA, 19 nt, Artificial Sequence
  Description of Artificial Sequence: Synthetic oligonucleotide
  Sense strand starting at position 2979 of SEQ ID NO: 1887124
ggauucuucuacuuacugu

SEQ ID NO: 2450247 - RNA, 19 nt, Artificial Sequence
  Description of Artificial Sequence: Synthetic oligonucleotide
  Antisense strand to SEQ ID NO: 2450246
acaguaaguagaagaaucc

SEQ ID NO: 2450248 - RNA, 19 nt, Artificial Sequence
  Description of Artificial Sequence: Synthetic oligonucleotide
  Sense strand starting at position 3357 of SEQ ID NO: 1887124
gggugauagugaccguuau

SEQ ID NO: 2450249 - RNA, 19 nt, Artificial Sequence
  Description of Artificial Sequence: Synthetic oligonucleotide
  Antisense strand to SEQ ID NO: 2450248
auaacggucacuaucaccc

SEQ ID NO: 2450250 - RNA, 19 nt, Artificial Sequence
  Description of Artificial Sequence: Synthetic oligonucleotide
  Sense strand starting at position 3358 of SEQ ID NO: 1887124
ggugauagugaccguuauc

SEQ ID NO: 2450251 - RNA, 19 nt, Artificial Sequence
  Description of Artificial Sequence: Synthetic oligonucleotide
  Antisense strand to SEQ ID NO: 2450250
gauaacggucacuaucacc

SEQ ID NO: 2450252 - RNA, 19 nt, Artificial Sequence
  Description of Artificial Sequence: Synthetic oligonucleotide
  Sense strand starting at position 3361 of SEQ ID NO: 1887124
gauagugaccguuauccug

SEQ ID NO: 2450253 - RNA, 19 nt, Artificial Sequence
  Description of Artificial Sequence: Synthetic oligonucleotide
  Antisense strand to SEQ ID NO: 2450252
caggauaacggucacuauc

SEQ ID NO: 2450254 - RNA, 19 nt, Artificial Sequence
  Description of Artificial Sequence: Synthetic oligonucleotide
  Sense strand starting at position 3363 of SEQ ID NO: 1887124
uagugaccguuauccugaa

SEQ ID NO: 2450255 - RNA, 19 nt, Artificial Sequence
  Description of Artificial Sequence: Synthetic oligonucleotide
  Antisense strand to SEQ ID NO: 2450254
uucaggauaacggucacua

SEQ ID NO: 2450256 - RNA, 19 nt, Artificial Sequence
  Description of Artificial Sequence: Synthetic oligonucleotide
  Sense strand starting at position 3367 of SEQ ID NO: 1887124
gaccguuauccugaaggau

SEQ ID NO: 2450257 - RNA, 19 nt, Artificial Sequence
  Description of Artificial Sequence: Synthetic oligonucleotide
  Antisense strand to SEQ ID NO: 2450256
auccuucaggauaacgguc

SEQ ID NO: 2450258 - RNA, 19 nt, Artificial Sequence
  Description of Artificial Sequence: Synthetic oligonucleotide
  Sense strand starting at position 3379 of SEQ ID NO: 1887124
gaaggauugcgagggcaug

SEQ ID NO: 2450259 - RNA, 19 nt, Artificial Sequence
  Description of Artificial Sequence: Synthetic oligonucleotide
  Antisense strand to SEQ ID NO: 2450258
caugcccucgcaauccuuc

SEQ ID NO: 2450260 - RNA, 19 nt, Artificial Sequence
  Description of Artificial Sequence: Synthetic oligonucleotide
  Sense strand starting at position 3449 of SEQ ID NO: 1887124
cuaggauggugcuggcuua

SEQ ID NO: 2450261 - RNA, 19 nt, Artificial Sequence
  Description of Artificial Sequence: Synthetic oligonucleotide
  Antisense strand to SEQ ID NO: 2450260
uaagccagcaccauccuag

SEQ ID NO: 2450262 - RNA, 19 nt, Artificial Sequence
  Description of Artificial Sequence: Synthetic oligonucleotide
  Sense strand starting at position 3680 of SEQ ID NO: 1887124
gggagaacuucugguaacc

SEQ ID NO: 2450263 - RNA, 19 nt, Artificial Sequence
  Description of Artificial Sequence: Synthetic oligonucleotide
  Antisense strand to SEQ ID NO: 2450262
gguuaccagaaguucuccc

SEQ ID NO: 2450264 - RNA, 19 nt, Artificial Sequence
  Description of Artificial Sequence: Synthetic oligonucleotide
  Sense strand starting at position 3682 of SEQ ID NO: 1887124
gagaacuucugguaaccgu

SEQ ID NO: 2450265 - RNA, 19 nt, Artificial Sequence
  Description of Artificial Sequence: Synthetic oligonucleotide
  Antisense strand to SEQ ID NO: 2450264
acgguuaccagaaguucuc

SEQ ID NO: 2450266 - RNA, 19 nt, Artificial Sequence
  Description of Artificial Sequence: Synthetic oligonucleotide
  Sense strand starting at position 3818 of SEQ ID NO: 1887124
uuggguucucccuggaauu

SEQ ID NO: 2450267 - RNA, 19 nt, Artificial Sequence
  Description of Artificial Sequence: Synthetic oligonucleotide
  Antisense strand to SEQ ID NO: 2450266
aauuccagggagaacccaa

SEQ ID NO: 2450268 - RNA, 19 nt, Artificial Sequence
  Description of Artificial Sequence: Synthetic oligonucleotide
  Sense strand starting at position 439 of SEQ ID NO: 1887125
cagagaaggucaguaucau

SEQ ID NO: 2450269 - RNA, 19 nt, Artificial Sequence
  Description of Artificial Sequence: Synthetic oligonucleotide
  Antisense strand to SEQ ID NO: 2450268
augauacugaccuucucug

SEQ ID NO: 2450270 - RNA, 19 nt, Artificial Sequence
  Description of Artificial Sequence: Synthetic oligonucleotide
  Sense strand starting at position 445 of SEQ ID NO: 1887125
aggucaguaucaugccuga

SEQ ID NO: 2450271 - RNA, 19 nt, Artificial Sequence
  Description of Artificial Sequence: Synthetic oligonucleotide
  Antisense strand to SEQ ID NO: 2450270
ucaggcaugauacugaccu

SEQ ID NO: 2450272 - RNA, 19 nt, Artificial Sequence
  Description of Artificial Sequence: Synthetic oligonucleotide
  Sense strand starting at position 448 of SEQ ID NO: 1887125
ucaguaucaugccugagac

SEQ ID NO: 2450273 - RNA, 19 nt, Artificial Sequence
  Description of Artificial Sequence: Synthetic oligonucleotide
  Antisense strand to SEQ ID NO: 2450272
gucucaggcaugauacuga

SEQ ID NO: 2450274 - RNA, 19 nt, Artificial Sequence
  Description of Artificial Sequence: Synthetic oligonucleotide
  Sense strand starting at position 450 of SEQ ID NO: 1887125
aguaucaugccugagacca

SEQ ID NO: 2450275 - RNA, 19 nt, Artificial Sequence
  Description of Artificial Sequence: Synthetic oligonucleotide
  Antisense strand to SEQ ID NO: 2450274
uggucucaggcaugauacu

SEQ ID NO: 2450276 - RNA, 19 nt, Artificial Sequence
  Description of Artificial Sequence: Synthetic oligonucleotide
  Sense strand starting at position 600 of SEQ ID NO: 1887125
gcagaaagcauauauuggu

SEQ ID NO: 2450277 - RNA, 19 nt, Artificial Sequence
  Description of Artificial Sequence: Synthetic oligonucleotide
  Antisense strand to SEQ ID NO: 2450276
accaauauaugcuuucugc

SEQ ID NO: 2450278 - RNA, 19 nt, Artificial Sequence
  Description of Artificial Sequence: Synthetic oligonucleotide
  Sense strand starting at position 605 of SEQ ID NO: 1887125
aagcauauauugguguuua

SEQ ID NO: 2450279 - RNA, 19 nt, Artificial Sequence
  Description of Artificial Sequence: Synthetic oligonucleotide
  Antisense strand to SEQ ID NO: 2450278
uaaacaccaauauaugcuu

SEQ ID NO: 2450280 - RNA, 19 nt, Artificial Sequence
  Description of Artificial Sequence: Synthetic oligonucleotide
  Sense strand starting at position 606 of SEQ ID NO: 1887125
agcauauauugguguuuau

SEQ ID NO: 2450281 - RNA, 19 nt, Artificial Sequence
  Description of Artificial Sequence: Synthetic oligonucleotide
  Antisense strand to SEQ ID NO: 2450280
auaaacaccaauauaugcu

SEQ ID NO: 2450282 - RNA, 19 nt, Artificial Sequence
  Description of Artificial Sequence: Synthetic oligonucleotide
  Sense strand starting at position 766 of SEQ ID NO: 1887125
gggacugugucgcuucuau

SEQ ID NO: 2450283 - RNA, 19 nt, Artificial Sequence
  Description of Artificial Sequence: Synthetic oligonucleotide
  Antisense strand to SEQ ID NO: 2450282
auagaagcgacacaguccc

SEQ ID NO: 2450284 - RNA, 19 nt, Artificial Sequence
  Description of Artificial Sequence: Synthetic oligonucleotide
  Sense strand starting at position 770 of SEQ ID NO: 1887125
cugugucgcuucuaucaca

SEQ ID NO: 2450285 - RNA, 19 nt, Artificial Sequence
  Description of Artificial Sequence: Synthetic oligonucleotide
  Antisense strand to SEQ ID NO: 2450284
ugugauagaagcgacacag

SEQ ID NO: 2450286 - RNA, 19 nt, Artificial Sequence
  Description of Artificial Sequence: Synthetic oligonucleotide
  Sense strand starting at position 1241 of SEQ ID NO: 1887125
ccgagagccugaucuccuu

SEQ ID NO: 2450287 - RNA, 19 nt, Artificial Sequence
  Description of Artificial Sequence: Synthetic oligonucleotide
  Antisense strand to SEQ ID NO: 2450286
aaggagaucaggcucucgg

SEQ ID NO: 2450288 - RNA, 19 nt, Artificial Sequence
  Description of Artificial Sequence: Synthetic oligonucleotide
  Sense strand starting at position 1268 of SEQ ID NO: 1887125
cggcauauuugaggguguu

SEQ ID NO: 2450289 - RNA, 19 nt, Artificial Sequence
  Description of Artificial Sequence: Synthetic oligonucleotide
  Antisense strand to SEQ ID NO: 2450288
aacacccucaaauaugccg

SEQ ID NO: 2450290 - RNA, 19 nt, Artificial Sequence
  Description of Artificial Sequence: Synthetic oligonucleotide
  Sense strand starting at position 1283 of SEQ ID NO: 1887125
uguuguacguguccucgua

SEQ ID NO: 2450291 - RNA, 19 nt, Artificial Sequence
  Description of Artificial Sequence: Synthetic oligonucleotide
  Antisense strand to SEQ ID NO: 2450290
uacgaggacacguacaaca

SEQ ID NO: 2450292 - RNA, 19 nt, Artificial Sequence
  Description of Artificial Sequence: Synthetic oligonucleotide
  Sense strand starting at position 1316 of SEQ ID NO: 1887125
ggcugauggcagcgaucau

SEQ ID NO: 2450293 - RNA, 19 nt, Artificial Sequence
  Description of Artificial Sequence: Synthetic oligonucleotide
  Antisense strand to SEQ ID NO: 2450292
augaucgcugccaucagcc

SEQ ID NO: 2450294 - RNA, 19 nt, Artificial Sequence
  Description of Artificial Sequence: Synthetic oligonucleotide
  Sense strand starting at position 1593 of SEQ ID NO: 1887125
gcagagagcgguugauguu

SEQ ID NO: 2450295 - RNA, 19 nt, Artificial Sequence
  Description of Artificial Sequence: Synthetic oligonucleotide
  Antisense strand to SEQ ID NO: 2450294
aacaucaaccgcucucugc

SEQ ID NO: 2450296 - RNA, 19 nt, Artificial Sequence
  Description of Artificial Sequence: Synthetic oligonucleotide
  Sense strand starting at position 1848 of SEQ ID NO: 1887125
gaggaagucgcguuggcau

SEQ ID NO: 2450297 - RNA, 19 nt, Artificial Sequence
  Description of Artificial Sequence: Synthetic oligonucleotide
  Antisense strand to SEQ ID NO: 2450296
augccaacgcgacuuccuc

SEQ ID NO: 2450298 - RNA, 19 nt, Artificial Sequence
  Description of Artificial Sequence: Synthetic oligonucleotide
  Sense strand starting at position 2331 of SEQ ID NO: 1887125
agcugaggccgggauguau

SEQ ID NO: 2450299 - RNA, 19 nt, Artificial Sequence
  Description of Artificial Sequence: Synthetic oligonucleotide
  Antisense strand to SEQ ID NO: 2450298
auacaucccggccucagcu

SEQ ID NO: 2450300 - RNA, 19 nt, Artificial Sequence
  Description of Artificial Sequence: Synthetic oligonucleotide
  Sense strand starting at position 2339 of SEQ ID NO: 1887125
ccgggauguaucugagaca

SEQ ID NO: 2450301 - RNA, 19 nt, Artificial Sequence
  Description of Artificial Sequence: Synthetic oligonucleotide
  Antisense strand to SEQ ID NO: 2450300
ugucucagauacaucccgg

SEQ ID NO: 2450302 - RNA, 19 nt, Artificial Sequence
  Description of Artificial Sequence: Synthetic oligonucleotide
  Sense strand starting at position 2377 of SEQ ID NO: 1887125
ccaggacuguguuacauga

SEQ ID NO: 2450303 - RNA, 19 nt, Artificial Sequence
  Description of Artificial Sequence: Synthetic oligonucleotide
  Antisense strand to SEQ ID NO: 2450302
ucauguaacacaguccugg

SEQ ID NO: 2450304 - RNA, 19 nt, Artificial Sequence
  Description of Artificial Sequence: Synthetic oligonucleotide
  Sense strand starting at position 2432 of SEQ ID NO: 1887125
gcaucucacugagcaguau

SEQ ID NO: 2450305 - RNA, 19 nt, Artificial Sequence
  Description of Artificial Sequence: Synthetic oligonucleotide
  Antisense strand to SEQ ID NO: 2450304
auacugcucagugagaugc

SEQ ID NO: 2450306 - RNA, 19 nt, Artificial Sequence
  Description of Artificial Sequence: Synthetic oligonucleotide
  Sense strand starting at position 2436 of SEQ ID NO: 1887125
cucacugagcaguaucuau

SEQ ID NO: 2450307 - RNA, 19 nt, Artificial Sequence
  Description of Artificial Sequence: Synthetic oligonucleotide
  Antisense strand to SEQ ID NO: 2450306
auagauacugcucagugag

SEQ ID NO: 2450308 - RNA, 19 nt, Artificial Sequence
  Description of Artificial Sequence: Synthetic oligonucleotide
  Sense strand starting at position 2535 of SEQ ID NO: 1887125
ccgggugguugugagaaca

SEQ ID NO: 2450309 - RNA, 19 nt, Artificial Sequence
  Description of Artificial Sequence: Synthetic oligonucleotide
  Antisense strand to SEQ ID NO: 2450308
uguucucacaaccacccgg

SEQ ID NO: 2450310 - RNA, 19 nt, Artificial Sequence
  Description of Artificial Sequence: Synthetic oligonucleotide
  Sense strand starting at position 2827 of SEQ ID NO: 1887125
uguguucccugguccauua

SEQ ID NO: 2450311 - RNA, 19 nt, Artificial Sequence
  Description of Artificial Sequence: Synthetic oligonucleotide
  Antisense strand to SEQ ID NO: 2450310
uaauggaccagggaacaca

SEQ ID NO: 2450312 - RNA, 19 nt, Artificial Sequence
  Description of Artificial Sequence: Synthetic oligonucleotide
  Sense strand starting at position 2829 of SEQ ID NO: 1887125
uguucccugguccauuaau

SEQ ID NO: 2450313 - RNA, 19 nt, Artificial Sequence
  Description of Artificial Sequence: Synthetic oligonucleotide
  Antisense strand to SEQ ID NO: 2450312
auuaauggaccagggaaca

SEQ ID NO: 2450314 - RNA, 19 nt, Artificial Sequence
  Description of Artificial Sequence: Synthetic oligonucleotide
  Sense strand starting at position 2883 of SEQ ID NO: 1887125
gcuggaguucucugugugu

SEQ ID NO: 2450315 - RNA, 19 nt, Artificial Sequence
  Description of Artificial Sequence: Synthetic oligonucleotide
  Antisense strand to SEQ ID NO: 2450314
acacacagagaacuccagc

SEQ ID NO: 2450316 - RNA, 19 nt, Artificial Sequence
  Description of Artificial Sequence: Synthetic oligonucleotide
  Sense strand starting at position 2885 of SEQ ID NO: 1887125
uggaguucucuguguguuu

SEQ ID NO: 2450317 - RNA, 19 nt, Artificial Sequence
  Description of Artificial Sequence: Synthetic oligonucleotide
  Antisense strand to SEQ ID NO: 2450316
aaacacacagagaacucca

SEQ ID NO: 2450318 - RNA, 19 nt, Artificial Sequence
  Description of Artificial Sequence: Synthetic oligonucleotide
  Sense strand starting at position 2886 of SEQ ID NO: 1887125
ggaguucucuguguguuug

SEQ ID NO: 2450319 - RNA, 19 nt, Artificial Sequence
  Description of Artificial Sequence: Synthetic oligonucleotide
  Antisense strand to SEQ ID NO: 2450318
caaacacacagagaacucc

SEQ ID NO: 2450320 - RNA, 19 nt, Artificial Sequence
  Description of Artificial Sequence: Synthetic oligonucleotide
  Sense strand starting at position 2887 of SEQ ID NO: 1887125
gaguucucuguguguuugu

SEQ ID NO: 2450321 - RNA, 19 nt, Artificial Sequence
  Description of Artificial Sequence: Synthetic oligonucleotide
  Antisense strand to SEQ ID NO: 2450320
acaaacacacagagaacuc

SEQ ID NO: 2450322 - RNA, 19 nt, Artificial Sequence
  Description of Artificial Sequence: Synthetic oligonucleotide
  Sense strand starting at position 3000 of SEQ ID NO: 1887125
guugaaggcucacaguuau

SEQ ID NO: 2450323 - RNA, 19 nt, Artificial Sequence
  Description of Artificial Sequence: Synthetic oligonucleotide
  Antisense strand to SEQ ID NO: 2450322
auaacugugagccuucaac

SEQ ID NO: 2450324 - RNA, 19 nt, Artificial Sequence
  Description of Artificial Sequence: Synthetic oligonucleotide
  Sense strand starting at position 3028 of SEQ ID NO: 1887125
accacuuacccugguuuau

SEQ ID NO: 2450325 - RNA, 19 nt, Artificial Sequence
  Description of Artificial Sequence: Synthetic oligonucleotide
  Antisense strand to SEQ ID NO: 2450324
auaaaccaggguaaguggu

SEQ ID NO: 2450326 - RNA, 19 nt, Artificial Sequence
  Description of Artificial Sequence: Synthetic oligonucleotide
  Sense strand starting at position 3058 of SEQ ID NO: 1887125
gugggugugaucugugagu

SEQ ID NO: 2450327 - RNA, 19 nt, Artificial Sequence
  Description of Artificial Sequence: Synthetic oligonucleotide
  Antisense strand to SEQ ID NO: 2450326
acucacagaucacacccac

SEQ ID NO: 2450328 - RNA, 19 nt, Artificial Sequence
  Description of Artificial Sequence: Synthetic oligonucleotide
  Sense strand starting at position 3061 of SEQ ID NO: 1887125
ggugugaucugugaguggu

SEQ ID NO: 2450329 - RNA, 19 nt, Artificial Sequence
  Description of Artificial Sequence: Synthetic oligonucleotide
  Antisense strand to SEQ ID NO: 2450328
accacucacagaucacacc

SEQ ID NO: 2450330 - RNA, 19 nt, Artificial Sequence
  Description of Artificial Sequence: Synthetic oligonucleotide
  Sense strand starting at position 3062 of SEQ ID NO: 1887125
gugugaucugugaguggug

SEQ ID NO: 2450331 - RNA, 19 nt, Artificial Sequence
  Description of Artificial Sequence: Synthetic oligonucleotide
  Antisense strand to SEQ ID NO: 2450330
caccacucacagaucacac

SEQ ID NO: 2450332 - RNA, 19 nt, Artificial Sequence
  Description of Artificial Sequence: Synthetic oligonucleotide
  Sense strand starting at position 3115 of SEQ ID NO: 1887125
caggaacuguccugucuga

SEQ ID NO: 2450333 - RNA, 19 nt, Artificial Sequence
  Description of Artificial Sequence: Synthetic oligonucleotide
  Antisense strand to SEQ ID NO: 2450332
ucagacaggacaguuccug

SEQ ID NO: 2450334 - RNA, 19 nt, Artificial Sequence
  Description of Artificial Sequence: Synthetic oligonucleotide
  Sense strand starting at position 3189 of SEQ ID NO: 1887125
gaaugagugucccacagag

SEQ ID NO: 2450335 - RNA, 19 nt, Artificial Sequence
  Description of Artificial Sequence: Synthetic oligonucleotide
  Antisense strand to SEQ ID NO: 2450334
cucugugggacacucauuc

SEQ ID NO: 2450336 - RNA, 19 nt, Artificial Sequence
  Description of Artificial Sequence: Synthetic oligonucleotide
  Sense strand starting at position 3236 of SEQ ID NO: 1887125
aguaaaucgugcccagcuu

SEQ ID NO: 2450337 - RNA, 19 nt, Artificial Sequence
  Description of Artificial Sequence: Synthetic oligonucleotide
  Antisense strand to SEQ ID NO: 2450336
aagcugggcacgauuuacu

SEQ ID NO: 2450338 - RNA, 19 nt, Artificial Sequence
  Description of Artificial Sequence: Synthetic oligonucleotide
  Sense strand starting at position 3336 of SEQ ID NO: 1887125
ggcugagguucucaccuga

SEQ ID NO: 2450339 - RNA, 19 nt, Artificial Sequence
  Description of Artificial Sequence: Synthetic oligonucleotide
  Antisense strand to SEQ ID NO: 2450338
ucaggugagaaccucagcc

SEQ ID NO: 2450340 - RNA, 19 nt, Artificial Sequence
  Description of Artificial Sequence: Synthetic oligonucleotide
  Sense strand starting at position 3357 of SEQ ID NO: 1887125
aguuguagcccuggaggaa

SEQ ID NO: 2450341 - RNA, 19 nt, Artificial Sequence
  Description of Artificial Sequence: Synthetic oligonucleotide
  Antisense strand to SEQ ID NO: 2450340
uuccuccagggcuacaacu

SEQ ID NO: 2450342 - RNA, 19 nt, Artificial Sequence
  Description of Artificial Sequence: Synthetic oligonucleotide
  Sense strand starting at position 3450 of SEQ ID NO: 1887125
agacaaacgucaggucuuu

SEQ ID NO: 2450343 - RNA, 19 nt, Artificial Sequence
  Description of Artificial Sequence: Synthetic oligonucleotide
  Antisense strand to SEQ ID NO: 2450342
aaagaccugacguuugucu

SEQ ID NO: 2450344 - RNA, 19 nt, Artificial Sequence
  Description of Artificial Sequence: Synthetic oligonucleotide
  Sense strand starting at position 3528 of SEQ ID NO: 1887125
cgggcuccucaggguuaaa

SEQ ID NO: 2450345 - RNA, 19 nt, Artificial Sequence
  Description of Artificial Sequence: Synthetic oligonucleotide
  Antisense strand to SEQ ID NO: 2450344
uuuaacccugaggagcccg

SEQ ID NO: 2450346 - RNA, 19 nt, Artificial Sequence
  Description of Artificial Sequence: Synthetic oligonucleotide
  Sense strand starting at position 3807 of SEQ ID NO: 1887125
aauauuggugcugaaacca

SEQ ID NO: 2450347 - RNA, 19 nt, Artificial Sequence
  Description of Artificial Sequence: Synthetic oligonucleotide
  Antisense strand to SEQ ID NO: 2450346
ugguuucagcaccaauauu

SEQ ID NO: 2450348 - RNA, 19 nt, Artificial Sequence
  Description of Artificial Sequence: Synthetic oligonucleotide
  Sense strand starting at position 347 of SEQ ID NO: 1887126
caggaaauucgaggcacaa

SEQ ID NO: 2450349 - RNA, 19 nt, Artificial Sequence
  Description of Artificial Sequence: Synthetic oligonucleotide
  Antisense strand to SEQ ID NO: 2450348
uugugccucgaauuuccug

SEQ ID NO: 2450350 - RNA, 19 nt, Artificial Sequence
  Description of Artificial Sequence: Synthetic oligonucleotide
  Sense strand starting at position 481 of SEQ ID NO: 1887126
gggagguggcgucauaauc

SEQ ID NO: 2450351 - RNA, 19 nt, Artificial Sequence
  Description of Artificial Sequence: Synthetic oligonucleotide
  Antisense strand to SEQ ID NO: 2450350
gauuaugacgccaccuccc

SEQ ID NO: 2450352 - RNA, 19 nt, Artificial Sequence
  Description of Artificial Sequence: Synthetic oligonucleotide
  Sense strand starting at position 489 of SEQ ID NO: 1887126
gcgucauaaucuuccacca

SEQ ID NO: 2450353 - RNA, 19 nt, Artificial Sequence
  Description of Artificial Sequence: Synthetic oligonucleotide
  Antisense strand to SEQ ID NO: 2450352
ugguggaagauuaugacgc

SEQ ID NO: 2450354 - RNA, 19 nt, Artificial Sequence
  Description of Artificial Sequence: Synthetic oligonucleotide
  Sense strand starting at position 775 of SEQ ID NO: 1887126
gaguguggcuucucggcau

SEQ ID NO: 2450355 - RNA, 19 nt, Artificial Sequence
  Description of Artificial Sequence: Synthetic oligonucleotide
  Antisense strand to SEQ ID NO: 2450354
augccgagaagccacacuc

SEQ ID NO: 2450356 - RNA, 19 nt, Artificial Sequence
  Description of Artificial Sequence: Synthetic oligonucleotide
  Sense strand starting at position 1015 of SEQ ID NO: 1887126
gagagugguucugggaggu

SEQ ID NO: 2450357 - RNA, 19 nt, Artificial Sequence
  Description of Artificial Sequence: Synthetic oligonucleotide
  Antisense strand to SEQ ID NO: 2450356
accucccagaaccacucuc

SEQ ID NO: 2450358 - RNA, 19 nt, Artificial Sequence
  Description of Artificial Sequence: Synthetic oligonucleotide
  Sense strand starting at position 1527 of SEQ ID NO: 1887126
ccuugucaguguugacuua

SEQ ID NO: 2450359 - RNA, 19 nt, Artificial Sequence
  Description of Artificial Sequence: Synthetic oligonucleotide
  Antisense strand to SEQ ID NO: 2450358
uaagucaacacugacaagg

SEQ ID NO: 2450360 - RNA, 19 nt, Artificial Sequence
  Description of Artificial Sequence: Synthetic oligonucleotide
  Sense strand starting at position 1850 of SEQ ID NO: 1887126
gacuguaguuggcugaguu

SEQ ID NO: 2450361 - RNA, 19 nt, Artificial Sequence
  Description of Artificial Sequence: Synthetic oligonucleotide
  Antisense strand to SEQ ID NO: 2450360
aacucagccaacuacaguc

SEQ ID NO: 2450362 - RNA, 19 nt, Artificial Sequence
  Description of Artificial Sequence: Synthetic oligonucleotide
  Sense strand starting at position 1906 of SEQ ID NO: 1887126
cgggcauugugccugacaa

SEQ ID NO: 2450363 - RNA, 19 nt, Artificial Sequence
  Description of Artificial Sequence: Synthetic oligonucleotide
  Antisense strand to SEQ ID NO: 2450362
uugucaggcacaaugcccg

SEQ ID NO: 2450364 - RNA, 19 nt, Artificial Sequence
  Description of Artificial Sequence: Synthetic oligonucleotide
  Sense strand starting at position 1907 of SEQ ID NO: 1887126
gggcauugugccugacaaa

SEQ ID NO: 2450365 - RNA, 19 nt, Artificial Sequence
  Description of Artificial Sequence: Synthetic oligonucleotide
  Antisense strand to SEQ ID NO: 2450364
uuugucaggcacaaugccc

SEQ ID NO: 2450366 - RNA, 19 nt, Artificial Sequence
  Description of Artificial Sequence: Synthetic oligonucleotide
  Sense strand starting at position 1908 of SEQ ID NO: 1887126
ggcauugugccugacaaag

SEQ ID NO: 2450367 - RNA, 19 nt, Artificial Sequence
  Description of Artificial Sequence: Synthetic oligonucleotide
  Antisense strand to SEQ ID NO: 2450366
cuuugucaggcacaaugcc

SEQ ID NO: 2450368 - RNA, 19 nt, Artificial Sequence
  Description of Artificial Sequence: Synthetic oligonucleotide
  Sense strand starting at position 1994 of SEQ ID NO: 1887126
gccuguaaccuccagggaa

SEQ ID NO: 2450369 - RNA, 19 nt, Artificial Sequence
  Description of Artificial Sequence: Synthetic oligonucleotide
  Antisense strand to SEQ ID NO: 2450368
uucccuggagguuacaggc

SEQ ID NO: 2450370 - RNA, 19 nt, Artificial Sequence
  Description of Artificial Sequence: Synthetic oligonucleotide
  Sense strand starting at position 1996 of SEQ ID NO: 1887126
cuguaaccuccagggaaca

SEQ ID NO: 2450371 - RNA, 19 nt, Artificial Sequence
  Description of Artificial Sequence: Synthetic oligonucleotide
  Antisense strand to SEQ ID NO: 2450370
uguucccuggagguuacag

SEQ ID NO: 2450372 - RNA, 19 nt, Artificial Sequence
  Description of Artificial Sequence: Synthetic oligonucleotide
  Sense strand starting at position 2211 of SEQ ID NO: 1887126
cacugugguuccuggaauu

SEQ ID NO: 2450373 - RNA, 19 nt, Artificial Sequence
  Description of Artificial Sequence: Synthetic oligonucleotide
  Antisense strand to SEQ ID NO: 2450372
aauuccaggaaccacagug

SEQ ID NO: 2450374 - RNA, 19 nt, Artificial Sequence
  Description of Artificial Sequence: Synthetic oligonucleotide
  Sense strand starting at position 2224 of SEQ ID NO: 1887126
ggaauucuucuccaggcca

SEQ ID NO: 2450375 - RNA, 19 nt, Artificial Sequence
  Description of Artificial Sequence: Synthetic oligonucleotide
  Antisense strand to SEQ ID NO: 2450374
uggccuggagaagaauucc

SEQ ID NO: 2450376 - RNA, 19 nt, Artificial Sequence
  Description of Artificial Sequence: Synthetic oligonucleotide
  Sense strand starting at position 2661 of SEQ ID NO: 1887126
cugccucccgaaugaguuu

SEQ ID NO: 2450377 - RNA, 19 nt, Artificial Sequence
  Description of Artificial Sequence: Synthetic oligonucleotide
  Antisense strand to SEQ ID NO: 2450376
aaacucauucgggaggcag

SEQ ID NO: 2450378 - RNA, 19 nt, Artificial Sequence
  Description of Artificial Sequence: Synthetic oligonucleotide
  Sense strand starting at position 2796 of SEQ ID NO: 1887126
gggagaucugcuuggccua

SEQ ID NO: 2450379 - RNA, 19 nt, Artificial Sequence
  Description of Artificial Sequence: Synthetic oligonucleotide
  Antisense strand to SEQ ID NO: 2450378
uaggccaagcagaucuccc

SEQ ID NO: 2450380 - RNA, 19 nt, Artificial Sequence
  Description of Artificial Sequence: Synthetic oligonucleotide
  Sense strand starting at position 2801 of SEQ ID NO: 1887126
aucugcuuggccuaggaga

SEQ ID NO: 2450381 - RNA, 19 nt, Artificial Sequence
  Description of Artificial Sequence: Synthetic oligonucleotide
  Antisense strand to SEQ ID NO: 2450380
ucuccuaggccaagcagau

SEQ ID NO: 2450382 - RNA, 19 nt, Artificial Sequence
  Description of Artificial Sequence: Synthetic oligonucleotide
  Sense strand starting at position 3111 of SEQ ID NO: 1887126
gccagucagucaguuauuc

SEQ ID NO: 2450383 - RNA, 19 nt, Artificial Sequence
  Description of Artificial Sequence: Synthetic oligonucleotide
  Antisense strand to SEQ ID NO: 2450382
gaauaacugacugacuggc

SEQ ID NO: 2450384 - RNA, 19 nt, Artificial Sequence
  Description of Artificial Sequence: Synthetic oligonucleotide
  Sense strand starting at position 3180 of SEQ ID NO: 1887126
cacagagaugagcgauguu

SEQ ID NO: 2450385 - RNA, 19 nt, Artificial Sequence
  Description of Artificial Sequence: Synthetic oligonucleotide
  Antisense strand to SEQ ID NO: 2450384
aacaucgcucaucucugug

SEQ ID NO: 2450386 - RNA, 19 nt, Artificial Sequence
  Description of Artificial Sequence: Synthetic oligonucleotide
  Sense strand starting at position 3183 of SEQ ID NO: 1887126
agagaugagcgauguuucu

SEQ ID NO: 2450387 - RNA, 19 nt, Artificial Sequence
  Description of Artificial Sequence: Synthetic oligonucleotide
  Antisense strand to SEQ ID NO: 2450386
agaaacaucgcucaucucu

SEQ ID NO: 2450388 - RNA, 19 nt, Artificial Sequence
  Description of Artificial Sequence: Synthetic oligonucleotide
  Sense strand starting at position 3189 of SEQ ID NO: 1887126
gagcgauguuucuaauagg

SEQ ID NO: 2450389 - RNA, 19 nt, Artificial Sequence
  Description of Artificial Sequence: Synthetic oligonucleotide
  Antisense strand to SEQ ID NO: 2450388
ccuauuagaaacaucgcuc

SEQ ID NO: 2450390 - RNA, 19 nt, Artificial Sequence
  Description of Artificial Sequence: Synthetic oligonucleotide
  Sense strand starting at position 3192 of SEQ ID NO: 1887126
cgauguuucuaauaggaaa

SEQ ID NO: 2450391 - RNA, 19 nt, Artificial Sequence
  Description of Artificial Sequence: Synthetic oligonucleotide
  Antisense strand to SEQ ID NO: 2450390
uuuccuauuagaaacaucg

SEQ ID NO: 2450392 - RNA, 19 nt, Artificial Sequence
  Description of Artificial Sequence: Synthetic oligonucleotide
  Sense strand starting at position 3340 of SEQ ID NO: 1887126
agaagaucuuacguggaag

SEQ ID NO: 2450393 - RNA, 19 nt, Artificial Sequence
  Description of Artificial Sequence: Synthetic oligonucleotide
  Antisense strand to SEQ ID NO: 2450392
cuuccacguaagaucuucu

SEQ ID NO: 2450394 - RNA, 19 nt, Artificial Sequence
  Description of Artificial Sequence: Synthetic oligonucleotide
  Sense strand starting at position 3341 of SEQ ID NO: 1887126
gaagaucuuacguggaaga

SEQ ID NO: 2450395 - RNA, 19 nt, Artificial Sequence
  Description of Artificial Sequence: Synthetic oligonucleotide
  Antisense strand to SEQ ID NO: 2450394
ucuuccacguaagaucuuc

SEQ ID NO: 2450396 - RNA, 19 nt, Artificial Sequence
  Description of Artificial Sequence: Synthetic oligonucleotide
  Sense strand starting at position 3342 of SEQ ID NO: 1887126
aagaucuuacguggaagaa

SEQ ID NO: 2450397 - RNA, 19 nt, Artificial Sequence
  Description of Artificial Sequence: Synthetic oligonucleotide
  Antisense strand to SEQ ID NO: 2450396
uucuuccacguaagaucuu

SEQ ID NO: 2450398 - RNA, 19 nt, Artificial Sequence
  Description of Artificial Sequence: Synthetic oligonucleotide
  Sense strand starting at position 3473 of SEQ ID NO: 1887126
gaaaguuagagaugguuac

SEQ ID NO: 2450399 - RNA, 19 nt, Artificial Sequence
  Description of Artificial Sequence: Synthetic oligonucleotide
  Antisense strand to SEQ ID NO: 2450398
guaaccaucucuaacuuuc

SEQ ID NO: 2450400 - RNA, 19 nt, Artificial Sequence
  Description of Artificial Sequence: Synthetic oligonucleotide
  Sense strand starting at position 3474 of SEQ ID NO: 1887126
aaaguuagagaugguuacu

SEQ ID NO: 2450401 - RNA, 19 nt, Artificial Sequence
  Description of Artificial Sequence: Synthetic oligonucleotide
  Antisense strand to SEQ ID NO: 2450400
aguaaccaucucuaacuuu

SEQ ID NO: 2450402 - RNA, 19 nt, Artificial Sequence
  Description of Artificial Sequence: Synthetic oligonucleotide
  Sense strand starting at position 3477 of SEQ ID NO: 1887126
guuagagaugguuacuucu

SEQ ID NO: 2450403 - RNA, 19 nt, Artificial Sequence
  Description of Artificial Sequence: Synthetic oligonucleotide
  Antisense strand to SEQ ID NO: 2450402
agaaguaaccaucucuaac

SEQ ID NO: 2450404 - RNA, 19 nt, Artificial Sequence
  Description of Artificial Sequence: Synthetic oligonucleotide
  Sense strand starting at position 3483 of SEQ ID NO: 1887126
gaugguuacuucuugugaa

SEQ ID NO: 2450405 - RNA, 19 nt, Artificial Sequence
  Description of Artificial Sequence: Synthetic oligonucleotide
  Antisense strand to SEQ ID NO: 2450404
uucacaagaaguaaccauc

SEQ ID NO: 2450406 - RNA, 19 nt, Artificial Sequence
  Description of Artificial Sequence: Synthetic oligonucleotide
  Sense strand starting at position 3486 of SEQ ID NO: 1887126
gguuacuucuugugaaaga

SEQ ID NO: 2450407 - RNA, 19 nt, Artificial Sequence
  Description of Artificial Sequence: Synthetic oligonucleotide
  Antisense strand to SEQ ID NO: 2450406
ucuuucacaagaaguaacc

SEQ ID NO: 2450408 - RNA, 19 nt, Artificial Sequence
  Description of Artificial Sequence: Synthetic oligonucleotide
  Sense strand starting at position 3487 of SEQ ID NO: 1887126
guuacuucuugugaaagag

SEQ ID NO: 2450409 - RNA, 19 nt, Artificial Sequence
  Description of Artificial Sequence: Synthetic oligonucleotide
  Antisense strand to SEQ ID NO: 2450408
cucuuucacaagaaguaac

SEQ ID NO: 2450410 - RNA, 19 nt, Artificial Sequence
  Description of Artificial Sequence: Synthetic oligonucleotide
  Sense strand starting at position 3569 of SEQ ID NO: 1887126
uuaccauacgggugugauu

SEQ ID NO: 2450411 - RNA, 19 nt, Artificial Sequence
  Description of Artificial Sequence: Synthetic oligonucleotide
  Antisense strand to SEQ ID NO: 2450410
aaucacacccguaugguaa

SEQ ID NO: 2450412 - RNA, 19 nt, Artificial Sequence
  Description of Artificial Sequence: Synthetic oligonucleotide
  Sense strand starting at position 3697 of SEQ ID NO: 1887126
ggauaaaugucuggagaga

SEQ ID NO: 2450413 - RNA, 19 nt, Artificial Sequence
  Description of Artificial Sequence: Synthetic oligonucleotide
  Antisense strand to SEQ ID NO: 2450412
ucucuccagacauuuaucc

SEQ ID NO: 2450414 - RNA, 19 nt, Artificial Sequence
  Description of Artificial Sequence: Synthetic oligonucleotide
  Sense strand starting at position 3805 of SEQ ID NO: 1887126
ggcugaaguugagcugaau

SEQ ID NO: 2450415 - RNA, 19 nt, Artificial Sequence
  Description of Artificial Sequence: Synthetic oligonucleotide
  Antisense strand to SEQ ID NO: 2450414
auucagcucaacuucagcc

SEQ ID NO: 2450416 - RNA, 19 nt, Artificial Sequence
  Description of Artificial Sequence: Synthetic oligonucleotide
  Sense strand starting at position 3818 of SEQ ID NO: 1887126
cugaauucuaagcagguga

SEQ ID NO: 2450417 - RNA, 19 nt, Artificial Sequence
  Description of Artificial Sequence: Synthetic oligonucleotide
  Antisense strand to SEQ ID NO: 2450416
ucaccugcuuagaauucag

SEQ ID NO: 2450418 - RNA, 19 nt, Artificial Sequence
  Description of Artificial Sequence: Synthetic oligonucleotide
  Sense strand starting at position 30 of SEQ ID NO: 1887127
guuaacagaucccacaagu

SEQ ID NO: 2450419 - RNA, 19 nt, Artificial Sequence
  Description of Artificial Sequence: Synthetic oligonucleotide
  Antisense strand to SEQ ID NO: 2450418
acuugugggaucuguuaac

SEQ ID NO: 2450420 - RNA, 19 nt, Artificial Sequence
  Description of Artificial Sequence: Synthetic oligonucleotide
  Sense strand starting at position 81 of SEQ ID NO: 1887127
agcagagagaaaugcauau

SEQ ID NO: 2450421 - RNA, 19 nt, Artificial Sequence
  Description of Artificial Sequence: Synthetic oligonucleotide
  Antisense strand to SEQ ID NO: 2450420
auaugcauuucucucugcu

SEQ ID NO: 2450422 - RNA, 19 nt, Artificial Sequence
  Description of Artificial Sequence: Synthetic oligonucleotide
  Sense strand starting at position 1308 of SEQ ID NO: 1887127
aguacagguuggcaaagau

SEQ ID NO: 2450423 - RNA, 19 nt, Artificial Sequence
  Description of Artificial Sequence: Synthetic oligonucleotide
  Antisense strand to SEQ ID NO: 2450422
aucuuugccaaccuguacu

SEQ ID NO: 2450424 - RNA, 19 nt, Artificial Sequence
  Description of Artificial Sequence: Synthetic oligonucleotide
  Sense strand starting at position 1393 of SEQ ID NO: 1887127
gagugucgccaagggagua

SEQ ID NO: 2450425 - RNA, 19 nt, Artificial Sequence
  Description of Artificial Sequence: Synthetic oligonucleotide
  Antisense strand to SEQ ID NO: 2450424
uacucccuuggcgacacuc

SEQ ID NO: 2450426 - RNA, 19 nt, Artificial Sequence
  Description of Artificial Sequence: Synthetic oligonucleotide
  Sense strand starting at position 1464 of SEQ ID NO: 1887127
caccgaaucucauguagcu

SEQ ID NO: 2450427 - RNA, 19 nt, Artificial Sequence
  Description of Artificial Sequence: Synthetic oligonucleotide
  Antisense strand to SEQ ID NO: 2450426
agcuacaugagauucggug

SEQ ID NO: 2450428 - RNA, 19 nt, Artificial Sequence
  Description of Artificial Sequence: Synthetic oligonucleotide
  Sense strand starting at position 2594 of SEQ ID NO: 1887127
uccagagccuuccagauua

SEQ ID NO: 2450429 - RNA, 19 nt, Artificial Sequence
  Description of Artificial Sequence: Synthetic oligonucleotide
  Antisense strand to SEQ ID NO: 2450428
uaaucuggaaggcucugga

SEQ ID NO: 2450430 - RNA, 19 nt, Artificial Sequence
  Description of Artificial Sequence: Synthetic oligonucleotide
  Sense strand starting at position 2680 of SEQ ID NO: 1887127
ugcuuaccuucuugggaau

SEQ ID NO: 2450431 - RNA, 19 nt, Artificial Sequence
  Description of Artificial Sequence: Synthetic oligonucleotide
  Antisense strand to SEQ ID NO: 2450430
auucccaagaagguaagca

SEQ ID NO: 2450432 - RNA, 19 nt, Artificial Sequence
  Description of Artificial Sequence: Synthetic oligonucleotide
  Sense strand starting at position 2683 of SEQ ID NO: 1887127
uuaccuucuugggaaugga

SEQ ID NO: 2450433 - RNA, 19 nt, Artificial Sequence
  Description of Artificial Sequence: Synthetic oligonucleotide
  Antisense strand to SEQ ID NO: 2450432
uccauucccaagaagguaa

SEQ ID NO: 2450434 - RNA, 19 nt, Artificial Sequence
  Description of Artificial Sequence: Synthetic oligonucleotide
  Sense strand starting at position 2845 of SEQ ID NO: 1887127
ggagucuugcgcgugaggu

SEQ ID NO: 2450435 - RNA, 19 nt, Artificial Sequence
  Description of Artificial Sequence: Synthetic oligonucleotide
  Antisense strand to SEQ ID NO: 2450434
accucacgcgcaagacucc

SEQ ID NO: 2450436 - RNA, 19 nt, Artificial Sequence
  Description of Artificial Sequence: Synthetic oligonucleotide
  Sense strand starting at position 2846 of SEQ ID NO: 1887127
gagucuugcgcgugagguc

SEQ ID NO: 2450437 - RNA, 19 nt, Artificial Sequence
  Description of Artificial Sequence: Synthetic oligonucleotide
  Antisense strand to SEQ ID NO: 2450436
gaccucacgcgcaagacuc

SEQ ID NO: 2450438 - RNA, 19 nt, Artificial Sequence
  Description of Artificial Sequence: Synthetic oligonucleotide
  Sense strand starting at position 3253 of SEQ ID NO: 1887127
ugagcaguuccagaaccuu

SEQ ID NO: 2450439 - RNA, 19 nt, Artificial Sequence
  Description of Artificial Sequence: Synthetic oligonucleotide
  Antisense strand to SEQ ID NO: 2450438
aagguucuggaacugcuca

SEQ ID NO: 2450440 - RNA, 19 nt, Artificial Sequence
  Description of Artificial Sequence: Synthetic oligonucleotide
  Sense strand starting at position 3523 of SEQ ID NO: 1887127
ccagauagaugcucacauc

SEQ ID NO: 2450441 - RNA, 19 nt, Artificial Sequence
  Description of Artificial Sequence: Synthetic oligonucleotide
  Antisense strand to SEQ ID NO: 2450440
gaugugagcaucuaucugg

SEQ ID NO: 2450442 - RNA, 19 nt, Artificial Sequence
  Description of Artificial Sequence: Synthetic oligonucleotide
  Sense strand starting at position 3565 of SEQ ID NO: 1887127
agggaauacucuucugcca

SEQ ID NO: 2450443 - RNA, 19 nt, Artificial Sequence
  Description of Artificial Sequence: Synthetic oligonucleotide
  Antisense strand to SEQ ID NO: 2450442
uggcagaagaguauucccu

SEQ ID NO: 2450444 - RNA, 19 nt, Artificial Sequence
  Description of Artificial Sequence: Synthetic oligonucleotide
  Sense strand starting at position 3567 of SEQ ID NO: 1887127
ggaauacucuucugccaau

SEQ ID NO: 2450445 - RNA, 19 nt, Artificial Sequence
  Description of Artificial Sequence: Synthetic oligonucleotide
  Antisense strand to SEQ ID NO: 2450444
auuggcagaagaguauucc

SEQ ID NO: 2450446 - RNA, 19 nt, Artificial Sequence
  Description of Artificial Sequence: Synthetic oligonucleotide
  Sense strand starting at position 3582 of SEQ ID NO: 1887127
caaugagggucagcucaaa

SEQ ID NO: 2450447 - RNA, 19 nt, Artificial Sequence
  Description of Artificial Sequence: Synthetic oligonucleotide
  Antisense strand to SEQ ID NO: 2450446
uuugagcugacccucauug

SEQ ID NO: 2450448 - RNA, 19 nt, Artificial Sequence
  Description of Artificial Sequence: Synthetic oligonucleotide
  Sense strand starting at position 3835 of SEQ ID NO: 1887127
gacagauuauggccugggu

SEQ ID NO: 2450449 - RNA, 19 nt, Artificial Sequence
  Description of Artificial Sequence: Synthetic oligonucleotide
  Antisense strand to SEQ ID NO: 2450448
acccaggccauaaucuguc

SEQ ID NO: 2450450 - RNA, 19 nt, Artificial Sequence
  Description of Artificial Sequence: Synthetic oligonucleotide
  Sense strand starting at position 3838 of SEQ ID NO: 1887127
agauuauggccugggucua

SEQ ID NO: 2450451 - RNA, 19 nt, Artificial Sequence
  Description of Artificial Sequence: Synthetic oligonucleotide
  Antisense strand to SEQ ID NO: 2450450
uagacccaggccauaaucu

SEQ ID NO: 2450452 - RNA, 19 nt, Artificial Sequence
  Description of Artificial Sequence: Synthetic oligonucleotide
  Sense strand starting at position 3941 of SEQ ID NO: 1887127
aauguaacugccugggaga

SEQ ID NO: 2450453 - RNA, 19 nt, Artificial Sequence
  Description of Artificial Sequence: Synthetic oligonucleotide
  Antisense strand to SEQ ID NO: 2450452
ucucccaggcaguuacauu

SEQ ID NO: 2450454 - RNA, 19 nt, Artificial Sequence
  Description of Artificial Sequence: Synthetic oligonucleotide
  Sense strand starting at position 263 of SEQ ID NO: 1887128
ggacucaucugaugguucu

SEQ ID NO: 2450455 - RNA, 19 nt, Artificial Sequence
  Description of Artificial Sequence: Synthetic oligonucleotide
  Antisense strand to SEQ ID NO: 2450454
agaaccaucagaugagucc

SEQ ID NO: 2450456 - RNA, 19 nt, Artificial Sequence
  Description of Artificial Sequence: Synthetic oligonucleotide
  Sense strand starting at position 264 of SEQ ID NO: 1887128
gacucaucugaugguucua

SEQ ID NO: 2450457 - RNA, 19 nt, Artificial Sequence
  Description of Artificial Sequence: Synthetic oligonucleotide
  Antisense strand to SEQ ID NO: 2450456
uagaaccaucagaugaguc

SEQ ID NO: 2450458 - RNA, 19 nt, Artificial Sequence
  Description of Artificial Sequence: Synthetic oligonucleotide
  Sense strand starting at position 277 of SEQ ID NO: 1887128
guucuaggcugcucuggaa

SEQ ID NO: 2450459 - RNA, 19 nt, Artificial Sequence
  Description of Artificial Sequence: Synthetic oligonucleotide
  Antisense strand to SEQ ID NO: 2450458
uuccagagcagccuagaac

SEQ ID NO: 2450460 - RNA, 19 nt, Artificial Sequence
  Description of Artificial Sequence: Synthetic oligonucleotide
  Sense strand starting at position 280 of SEQ ID NO: 1887128
cuaggcugcucuggaauau

SEQ ID NO: 2450461 - RNA, 19 nt, Artificial Sequence
  Description of Artificial Sequence: Synthetic oligonucleotide
  Antisense strand to SEQ ID NO: 2450460
auauuccagagcagccuag

SEQ ID NO: 2450462 - RNA, 19 nt, Artificial Sequence
  Description of Artificial Sequence: Synthetic oligonucleotide
  Sense strand starting at position 281 of SEQ ID NO: 1887128
uaggcugcucuggaauauu

SEQ ID NO: 2450463 - RNA, 19 nt, Artificial Sequence
  Description of Artificial Sequence: Synthetic oligonucleotide
  Antisense strand to SEQ ID NO: 2450462
aauauuccagagcagccua

SEQ ID NO: 2450464 - RNA, 19 nt, Artificial Sequence
  Description of Artificial Sequence: Synthetic oligonucleotide
  Sense strand starting at position 355 of SEQ ID NO: 1887128
uagaguuuccauugggaga

SEQ ID NO: 2450465 - RNA, 19 nt, Artificial Sequence
  Description of Artificial Sequence: Synthetic oligonucleotide
  Antisense strand to SEQ ID NO: 2450464
ucucccaauggaaacucua

SEQ ID NO: 2450466 - RNA, 19 nt, Artificial Sequence
  Description of Artificial Sequence: Synthetic oligonucleotide
  Sense strand starting at position 356 of SEQ ID NO: 1887128
agaguuuccauugggagag

SEQ ID NO: 2450467 - RNA, 19 nt, Artificial Sequence
  Description of Artificial Sequence: Synthetic oligonucleotide
  Antisense strand to SEQ ID NO: 2450466
cucucccaauggaaacucu

SEQ ID NO: 2450468 - RNA, 19 nt, Artificial Sequence
  Description of Artificial Sequence: Synthetic oligonucleotide
  Sense strand starting at position 415 of SEQ ID NO: 1887128
ggcagacacccuugcucua

SEQ ID NO: 2450469 - RNA, 19 nt, Artificial Sequence
  Description of Artificial Sequence: Synthetic oligonucleotide
  Antisense strand to SEQ ID NO: 2450468
uagagcaagggugucugcc

SEQ ID NO: 2450470 - RNA, 19 nt, Artificial Sequence
  Description of Artificial Sequence: Synthetic oligonucleotide
  Sense strand starting at position 864 of SEQ ID NO: 1887128
gccagaaaccgugagagga

SEQ ID NO: 2450471 - RNA, 19 nt, Artificial Sequence
  Description of Artificial Sequence: Synthetic oligonucleotide
  Antisense strand to SEQ ID NO: 2450470
uccucucacgguuucuggc

SEQ ID NO: 2450472 - RNA, 19 nt, Artificial Sequence
  Description of Artificial Sequence: Synthetic oligonucleotide
  Sense strand starting at position 962 of SEQ ID NO: 1887128
cugagucucacaggugaca

SEQ ID NO: 2450473 - RNA, 19 nt, Artificial Sequence
  Description of Artificial Sequence: Synthetic oligonucleotide
  Antisense strand to SEQ ID NO: 2450472
ugucaccugugagacucag

SEQ ID NO: 2450474 - RNA, 19 nt, Artificial Sequence
  Description of Artificial Sequence: Synthetic oligonucleotide
  Sense strand starting at position 964 of SEQ ID NO: 1887128
gagucucacaggugacaga

SEQ ID NO: 2450475 - RNA, 19 nt, Artificial Sequence
  Description of Artificial Sequence: Synthetic oligonucleotide
  Antisense strand to SEQ ID NO: 2450474
ucugucaccugugagacuc

SEQ ID NO: 2450476 - RNA, 19 nt, Artificial Sequence
  Description of Artificial Sequence: Synthetic oligonucleotide
  Sense strand starting at position 1110 of SEQ ID NO: 1887128
cuuccagaugcuuagaacu

SEQ ID NO: 2450477 - RNA, 19 nt, Artificial Sequence
  Description of Artificial Sequence: Synthetic oligonucleotide
  Antisense strand to SEQ ID NO: 2450476
aguucuaagcaucuggaag

SEQ ID NO: 2450478 - RNA, 19 nt, Artificial Sequence
  Description of Artificial Sequence: Synthetic oligonucleotide
  Sense strand starting at position 1881 of SEQ ID NO: 1887128
uucugucucugaggcagaa

SEQ ID NO: 2450479 - RNA, 19 nt, Artificial Sequence
  Description of Artificial Sequence: Synthetic oligonucleotide
  Antisense strand to SEQ ID NO: 2450478
uucugccucagagacagaa

SEQ ID NO: 2450480 - RNA, 19 nt, Artificial Sequence
  Description of Artificial Sequence: Synthetic oligonucleotide
  Sense strand starting at position 2459 of SEQ ID NO: 1887128
gggugagucccucagggua

SEQ ID NO: 2450481 - RNA, 19 nt, Artificial Sequence
  Description of Artificial Sequence: Synthetic oligonucleotide
  Antisense strand to SEQ ID NO: 2450480
uacccugagggacucaccc

SEQ ID NO: 2450482 - RNA, 19 nt, Artificial Sequence
  Description of Artificial Sequence: Synthetic oligonucleotide
  Sense strand starting at position 2617 of SEQ ID NO: 1887128
gacugucaugcccaguaag

SEQ ID NO: 2450483 - RNA, 19 nt, Artificial Sequence
  Description of Artificial Sequence: Synthetic oligonucleotide
  Antisense strand to SEQ ID NO: 2450482
cuuacugggcaugacaguc

SEQ ID NO: 2450484 - RNA, 19 nt, Artificial Sequence
  Description of Artificial Sequence: Synthetic oligonucleotide
  Sense strand starting at position 3231 of SEQ ID NO: 1887128
gggacuugacguggcucaa

SEQ ID NO: 2450485 - RNA, 19 nt, Artificial Sequence
  Description of Artificial Sequence: Synthetic oligonucleotide
  Antisense strand to SEQ ID NO: 2450484
uugagccacgucaaguccc

SEQ ID NO: 2450486 - RNA, 19 nt, Artificial Sequence
  Description of Artificial Sequence: Synthetic oligonucleotide
  Sense strand starting at position 3248 of SEQ ID NO: 1887128
aaggcaaguucuucucagu

SEQ ID NO: 2450487 - RNA, 19 nt, Artificial Sequence
  Description of Artificial Sequence: Synthetic oligonucleotide
  Antisense strand to SEQ ID NO: 2450486
acugagaagaacuugccuu

SEQ ID NO: 2450488 - RNA, 19 nt, Artificial Sequence
  Description of Artificial Sequence: Synthetic oligonucleotide
  Sense strand starting at position 3251 of SEQ ID NO: 1887128
gcaaguucuucucaguuac

SEQ ID NO: 2450489 - RNA, 19 nt, Artificial Sequence
  Description of Artificial Sequence: Synthetic oligonucleotide
  Antisense strand to SEQ ID NO: 2450488
guaacugagaagaacuugc

SEQ ID NO: 2450490 - RNA, 19 nt, Artificial Sequence
  Description of Artificial Sequence: Synthetic oligonucleotide
  Sense strand starting at position 3434 of SEQ ID NO: 1887128
agaaauguccacggagcga

SEQ ID NO: 2450491 - RNA, 19 nt, Artificial Sequence
  Description of Artificial Sequence: Synthetic oligonucleotide
  Antisense strand to SEQ ID NO: 2450490
ucgcuccguggacauuucu

SEQ ID NO: 2450492 - RNA, 19 nt, Artificial Sequence
  Description of Artificial Sequence: Synthetic oligonucleotide
  Sense strand starting at position 3464 of SEQ ID NO: 1887128
agugacacguuccaggaaa

SEQ ID NO: 2450493 - RNA, 19 nt, Artificial Sequence
  Description of Artificial Sequence: Synthetic oligonucleotide
  Antisense strand to SEQ ID NO: 2450492
uuuccuggaacgugucacu

SEQ ID NO: 2450494 - RNA, 19 nt, Artificial Sequence
  Description of Artificial Sequence: Synthetic oligonucleotide
  Sense strand starting at position 3612 of SEQ ID NO: 1887128
agcgcagucccgagugacu

SEQ ID NO: 2450495 - RNA, 19 nt, Artificial Sequence
  Description of Artificial Sequence: Synthetic oligonucleotide
  Antisense strand to SEQ ID NO: 2450494
agucacucgggacugcgcu

SEQ ID NO: 2450496 - RNA, 19 nt, Artificial Sequence
  Description of Artificial Sequence: Synthetic oligonucleotide
  Sense strand starting at position 3627 of SEQ ID NO: 1887128
gacugcuguggccaugaga

SEQ ID NO: 2450497 - RNA, 19 nt, Artificial Sequence
  Description of Artificial Sequence: Synthetic oligonucleotide
  Antisense strand to SEQ ID NO: 2450496
ucucauggccacagcaguc

SEQ ID NO: 2450498 - RNA, 19 nt, Artificial Sequence
  Description of Artificial Sequence: Synthetic oligonucleotide
  Sense strand starting at position 3660 of SEQ ID NO: 1887128
agagaucacaggcgaagau

SEQ ID NO: 2450499 - RNA, 19 nt, Artificial Sequence
  Description of Artificial Sequence: Synthetic oligonucleotide
  Antisense strand to SEQ ID NO: 2450498
aucuucgccugugaucucu

SEQ ID NO: 2450500 - RNA, 19 nt, Artificial Sequence
  Description of Artificial Sequence: Synthetic oligonucleotide
  Sense strand starting at position 3672 of SEQ ID NO: 1887128
cgaagaucugagugccaag

SEQ ID NO: 2450501 - RNA, 19 nt, Artificial Sequence
  Description of Artificial Sequence: Synthetic oligonucleotide
  Antisense strand to SEQ ID NO: 2450500
cuuggcacucagaucuucg

SEQ ID NO: 2450502 - RNA, 19 nt, Artificial Sequence
  Description of Artificial Sequence: Synthetic oligonucleotide
  Sense strand starting at position 3693 of SEQ ID NO: 1887128
gcaugacaucugcacucau

SEQ ID NO: 2450503 - RNA, 19 nt, Artificial Sequence
  Description of Artificial Sequence: Synthetic oligonucleotide
  Antisense strand to SEQ ID NO: 2450502
augagugcagaugucaugc

SEQ ID NO: 2450504 - RNA, 19 nt, Artificial Sequence
  Description of Artificial Sequence: Synthetic oligonucleotide
  Sense strand starting at position 3765 of SEQ ID NO: 1887128
cagaguaaacucugcgaca

SEQ ID NO: 2450505 - RNA, 19 nt, Artificial Sequence
  Description of Artificial Sequence: Synthetic oligonucleotide
  Antisense strand to SEQ ID NO: 2450504
ugucgcagaguuuacucug

SEQ ID NO: 2450506 - RNA, 19 nt, Artificial Sequence
  Description of Artificial Sequence: Synthetic oligonucleotide
  Sense strand starting at position 3766 of SEQ ID NO: 1887128
agaguaaacucugcgacaa

SEQ ID NO: 2450507 - RNA, 19 nt, Artificial Sequence
  Description of Artificial Sequence: Synthetic oligonucleotide
  Antisense strand to SEQ ID NO: 2450506
uugucgcagaguuuacucu

SEQ ID NO: 2450508 - RNA, 19 nt, Artificial Sequence
  Description of Artificial Sequence: Synthetic oligonucleotide
  Sense strand starting at position 3767 of SEQ ID NO: 1887128
gaguaaacucugcgacaaa

SEQ ID NO: 2450509 - RNA, 19 nt, Artificial Sequence
  Description of Artificial Sequence: Synthetic oligonucleotide
  Antisense strand to SEQ ID NO: 2450508
uuugucgcagaguuuacuc

SEQ ID NO: 2450510 - RNA, 19 nt, Artificial Sequence
  Description of Artificial Sequence: Synthetic oligonucleotide
  Sense strand starting at position 3854 of SEQ ID NO: 1887128
gcagcuucucugugcuacu

SEQ ID NO: 2450511 - RNA, 19 nt, Artificial Sequence
  Description of Artificial Sequence: Synthetic oligonucleotide
  Antisense strand to SEQ ID NO: 2450510
aguagcacagagaagcugc

SEQ ID NO: 2450512 - RNA, 19 nt, Artificial Sequence
  Description of Artificial Sequence: Synthetic oligonucleotide
  Sense strand starting at position 388 of SEQ ID NO: 1887129
ggcugcuccagucagaacu

SEQ ID NO: 2450513 - RNA, 19 nt, Artificial Sequence
  Description of Artificial Sequence: Synthetic oligonucleotide
  Antisense strand to SEQ ID NO: 2450512
aguucugacuggagcagcc

SEQ ID NO: 2450514 - RNA, 19 nt, Artificial Sequence
  Description of Artificial Sequence: Synthetic oligonucleotide
  Sense strand starting at position 390 of SEQ ID NO: 1887129
cugcuccagucagaacuua

SEQ ID NO: 2450515 - RNA, 19 nt, Artificial Sequence
  Description of Artificial Sequence: Synthetic oligonucleotide
  Antisense strand to SEQ ID NO: 2450514
uaaguucugacuggagcag

SEQ ID NO: 2450516 - RNA, 19 nt, Artificial Sequence
  Description of Artificial Sequence: Synthetic oligonucleotide
  Sense strand starting at position 416 of SEQ ID NO: 1887129
ucacguguuagcucaguca

SEQ ID NO: 2450517 - RNA, 19 nt, Artificial Sequence
  Description of Artificial Sequence: Synthetic oligonucleotide
  Antisense strand to SEQ ID NO: 2450516
ugacugagcuaacacguga

SEQ ID NO: 2450518 - RNA, 19 nt, Artificial Sequence
  Description of Artificial Sequence: Synthetic oligonucleotide
  Sense strand starting at position 2182 of SEQ ID NO: 1887129
aggagccuguccucugaga

SEQ ID NO: 2450519 - RNA, 19 nt, Artificial Sequence
  Description of Artificial Sequence: Synthetic oligonucleotide
  Antisense strand to SEQ ID NO: 2450518
ucucagaggacaggcuccu

SEQ ID NO: 2450520 - RNA, 19 nt, Artificial Sequence
  Description of Artificial Sequence: Synthetic oligonucleotide
  Sense strand starting at position 2958 of SEQ ID NO: 1887129
cagauuaccuccugggaca

SEQ ID NO: 2450521 - RNA, 19 nt, Artificial Sequence
  Description of Artificial Sequence: Synthetic oligonucleotide
  Antisense strand to SEQ ID NO: 2450520
ugucccaggagguaaucug

SEQ ID NO: 2450522 - RNA, 19 nt, Artificial Sequence
  Description of Artificial Sequence: Synthetic oligonucleotide
  Sense strand starting at position 3064 of SEQ ID NO: 1887129
ccaugauucuggcagcaga

SEQ ID NO: 2450523 - RNA, 19 nt, Artificial Sequence
  Description of Artificial Sequence: Synthetic oligonucleotide
  Antisense strand to SEQ ID NO: 2450522
ucugcugccagaaucaugg

SEQ ID NO: 2450524 - RNA, 19 nt, Artificial Sequence
  Description of Artificial Sequence: Synthetic oligonucleotide
  Sense strand starting at position 3141 of SEQ ID NO: 1887129
caggucucucccggucuaa

SEQ ID NO: 2450525 - RNA, 19 nt, Artificial Sequence
  Description of Artificial Sequence: Synthetic oligonucleotide
  Antisense strand to SEQ ID NO: 2450524
uuagaccgggagagaccug

SEQ ID NO: 2450526 - RNA, 19 nt, Artificial Sequence
  Description of Artificial Sequence: Synthetic oligonucleotide
  Sense strand starting at position 3153 of SEQ ID NO: 1887129
ggucuaaaucuagguggag

SEQ ID NO: 2450527 - RNA, 19 nt, Artificial Sequence
  Description of Artificial Sequence: Synthetic oligonucleotide
  Antisense strand to SEQ ID NO: 2450526
cuccaccuagauuuagacc

SEQ ID NO: 2450528 - RNA, 19 nt, Artificial Sequence
  Description of Artificial Sequence: Synthetic oligonucleotide
  Sense strand starting at position 3412 of SEQ ID NO: 1887129
ugacuccuccagugagauc

SEQ ID NO: 2450529 - RNA, 19 nt, Artificial Sequence
  Description of Artificial Sequence: Synthetic oligonucleotide
  Antisense strand to SEQ ID NO: 2450528
gaucucacuggaggaguca

SEQ ID NO: 2450530 - RNA, 19 nt, Artificial Sequence
  Description of Artificial Sequence: Synthetic oligonucleotide
  Sense strand starting at position 3553 of SEQ ID NO: 1887129
uggugucccuuucuaaacu

SEQ ID NO: 2450531 - RNA, 19 nt, Artificial Sequence
  Description of Artificial Sequence: Synthetic oligonucleotide
  Antisense strand to SEQ ID NO: 2450530
aguuuagaaagggacacca

SEQ ID NO: 2450532 - RNA, 19 nt, Artificial Sequence
  Description of Artificial Sequence: Synthetic oligonucleotide
  Sense strand starting at position 3576 of SEQ ID NO: 1887129
gagcucagcucguuugagu

SEQ ID NO: 2450533 - RNA, 19 nt, Artificial Sequence
  Description of Artificial Sequence: Synthetic oligonucleotide
  Antisense strand to SEQ ID NO: 2450532
acucaaacgagcugagcuc

SEQ ID NO: 2450534 - RNA, 19 nt, Artificial Sequence
  Description of Artificial Sequence: Synthetic oligonucleotide
  Sense strand starting at position 3583 of SEQ ID NO: 1887129
gcucguuugagucaaguug

SEQ ID NO: 2450535 - RNA, 19 nt, Artificial Sequence
  Description of Artificial Sequence: Synthetic oligonucleotide
  Antisense strand to SEQ ID NO: 2450534
caacuugacucaaacgagc

SEQ ID NO: 2450536 - RNA, 19 nt, Artificial Sequence
  Description of Artificial Sequence: Synthetic oligonucleotide
  Sense strand starting at position 3899 of SEQ ID NO: 1887129
cgucuuugccucuaaggca

SEQ ID NO: 2450537 - RNA, 19 nt, Artificial Sequence
  Description of Artificial Sequence: Synthetic oligonucleotide
  Antisense strand to SEQ ID NO: 2450536
ugccuuagaggcaaagacg

SEQ ID NO: 2450538 - RNA, 19 nt, Artificial Sequence
  Description of Artificial Sequence: Synthetic oligonucleotide
  Sense strand starting at position 3949 of SEQ ID NO: 1887129
ggaccuuugcugggagagu

SEQ ID NO: 2450539 - RNA, 19 nt, Artificial Sequence
  Description of Artificial Sequence: Synthetic oligonucleotide
  Antisense strand to SEQ ID NO: 2450538
acucucccagcaaaggucc

SEQ ID NO: 2450540 - RNA, 19 nt, Artificial Sequence
  Description of Artificial Sequence: Synthetic oligonucleotide
  Sense strand starting at position 30 of SEQ ID NO: 1887130
ccaucuugggagugacuga

SEQ ID NO: 2450541 - RNA, 19 nt, Artificial Sequence
  Description of Artificial Sequence: Synthetic oligonucleotide
  Antisense strand to SEQ ID NO: 2450540
ucagucacucccaagaugg

SEQ ID NO: 2450542 - RNA, 19 nt, Artificial Sequence
  Description of Artificial Sequence: Synthetic oligonucleotide
  Sense strand starting at position 84 of SEQ ID NO: 1887130
gccuuuaaggccggaaaca

SEQ ID NO: 2450543 - RNA, 19 nt, Artificial Sequence
  Description of Artificial Sequence: Synthetic oligonucleotide
  Antisense strand to SEQ ID NO: 2450542
uguuuccggccuuaaaggc

SEQ ID NO: 2450544 - RNA, 19 nt, Artificial Sequence
  Description of Artificial Sequence: Synthetic oligonucleotide
  Sense strand starting at position 244 of SEQ ID NO: 1887130
uggcaauucguauaaacca

SEQ ID NO: 2450545 - RNA, 19 nt, Artificial Sequence
  Description of Artificial Sequence: Synthetic oligonucleotide
  Antisense strand to SEQ ID NO: 2450544
ugguuuauacgaauugcca

SEQ ID NO: 2450546 - RNA, 19 nt, Artificial Sequence
  Description of Artificial Sequence: Synthetic oligonucleotide
  Sense strand starting at position 374 of SEQ ID NO: 1887130
ucacuauacucuguauguu

SEQ ID NO: 2450547 - RNA, 19 nt, Artificial Sequence
  Description of Artificial Sequence: Synthetic oligonucleotide
  Antisense strand to SEQ ID NO: 2450546
aacauacagaguauaguga

SEQ ID NO: 2450548 - RNA, 19 nt, Artificial Sequence
  Description of Artificial Sequence: Synthetic oligonucleotide
  Sense strand starting at position 377 of SEQ ID NO: 1887130
cuauacucuguauguuaca

SEQ ID NO: 2450549 - RNA, 19 nt, Artificial Sequence
  Description of Artificial Sequence: Synthetic oligonucleotide
  Antisense strand to SEQ ID NO: 2450548
uguaacauacagaguauag

SEQ ID NO: 2450550 - RNA, 19 nt, Artificial Sequence
  Description of Artificial Sequence: Synthetic oligonucleotide
  Sense strand starting at position 563 of SEQ ID NO: 1887130
cacggucagcccugaaaca

SEQ ID NO: 2450551 - RNA, 19 nt, Artificial Sequence
  Description of Artificial Sequence: Synthetic oligonucleotide
  Antisense strand to SEQ ID NO: 2450550
uguuucagggcugaccgug

SEQ ID NO: 2450552 - RNA, 19 nt, Artificial Sequence
  Description of Artificial Sequence: Synthetic oligonucleotide
  Sense strand starting at position 632 of SEQ ID NO: 1887130
cagagacgcgucgaacaaa

SEQ ID NO: 2450553 - RNA, 19 nt, Artificial Sequence
  Description of Artificial Sequence: Synthetic oligonucleotide
  Antisense strand to SEQ ID NO: 2450552
uuuguucgacgcgucucug

SEQ ID NO: 2450554 - RNA, 19 nt, Artificial Sequence
  Description of Artificial Sequence: Synthetic oligonucleotide
  Sense strand starting at position 633 of SEQ ID NO: 1887130
agagacgcgucgaacaaau

SEQ ID NO: 2450555 - RNA, 19 nt, Artificial Sequence
  Description of Artificial Sequence: Synthetic oligonucleotide
  Antisense strand to SEQ ID NO: 2450554
auuuguucgacgcgucucu

SEQ ID NO: 2450556 - RNA, 19 nt, Artificial Sequence
  Description of Artificial Sequence: Synthetic oligonucleotide
  Sense strand starting at position 635 of SEQ ID NO: 1887130
agacgcgucgaacaaauaa

SEQ ID NO: 2450557 - RNA, 19 nt, Artificial Sequence
  Description of Artificial Sequence: Synthetic oligonucleotide
  Antisense strand to SEQ ID NO: 2450556
uuauuuguucgacgcgucu

SEQ ID NO: 2450558 - RNA, 19 nt, Artificial Sequence
  Description of Artificial Sequence: Synthetic oligonucleotide
  Sense strand starting at position 1184 of SEQ ID NO: 1887130
uccugcuucuuggugagaa

SEQ ID NO: 2450559 - RNA, 19 nt, Artificial Sequence
  Description of Artificial Sequence: Synthetic oligonucleotide
  Antisense strand to SEQ ID NO: 2450558
uucucaccaagaagcagga

SEQ ID NO: 2450560 - RNA, 19 nt, Artificial Sequence
  Description of Artificial Sequence: Synthetic oligonucleotide
  Sense strand starting at position 1186 of SEQ ID NO: 1887130
cugcuucuuggugagaaag

SEQ ID NO: 2450561 - RNA, 19 nt, Artificial Sequence
  Description of Artificial Sequence: Synthetic oligonucleotide
  Antisense strand to SEQ ID NO: 2450560
cuuucucaccaagaagcag

SEQ ID NO: 2450562 - RNA, 19 nt, Artificial Sequence
  Description of Artificial Sequence: Synthetic oligonucleotide
  Sense strand starting at position 1290 of SEQ ID NO: 1887130
ggcagugaggcaugaugau

SEQ ID NO: 2450563 - RNA, 19 nt, Artificial Sequence
  Description of Artificial Sequence: Synthetic oligonucleotide
  Antisense strand to SEQ ID NO: 2450562
aucaucaugccucacugcc

SEQ ID NO: 2450564 - RNA, 19 nt, Artificial Sequence
  Description of Artificial Sequence: Synthetic oligonucleotide
  Sense strand starting at position 1481 of SEQ ID NO: 1887130
ugcugaaaucgcuucuguu

SEQ ID NO: 2450565 - RNA, 19 nt, Artificial Sequence
  Description of Artificial Sequence: Synthetic oligonucleotide
  Antisense strand to SEQ ID NO: 2450564
aacagaagcgauuucagca

SEQ ID NO: 2450566 - RNA, 19 nt, Artificial Sequence
  Description of Artificial Sequence: Synthetic oligonucleotide
  Sense strand starting at position 1482 of SEQ ID NO: 1887130
gcugaaaucgcuucuguuc

SEQ ID NO: 2450567 - RNA, 19 nt, Artificial Sequence
  Description of Artificial Sequence: Synthetic oligonucleotide
  Antisense strand to SEQ ID NO: 2450566
gaacagaagcgauuucagc

SEQ ID NO: 2450568 - RNA, 19 nt, Artificial Sequence
  Description of Artificial Sequence: Synthetic oligonucleotide
  Sense strand starting at position 1509 of SEQ ID NO: 1887130
uucggaacuugcucuggau

SEQ ID NO: 2450569 - RNA, 19 nt, Artificial Sequence
  Description of Artificial Sequence: Synthetic oligonucleotide
  Antisense strand to SEQ ID NO: 2450568
auccagagcaaguuccgaa

SEQ ID NO: 2450570 - RNA, 19 nt, Artificial Sequence
  Description of Artificial Sequence: Synthetic oligonucleotide
  Sense strand starting at position 1511 of SEQ ID NO: 1887130
cggaacuugcucuggauca

SEQ ID NO: 2450571 - RNA, 19 nt, Artificial Sequence
  Description of Artificial Sequence: Synthetic oligonucleotide
  Antisense strand to SEQ ID NO: 2450570
ugauccagagcaaguuccg

SEQ ID NO: 2450572 - RNA, 19 nt, Artificial Sequence
  Description of Artificial Sequence: Synthetic oligonucleotide
  Sense strand starting at position 1541 of SEQ ID NO: 1887130
ugggucaucuucuuauaga

SEQ ID NO: 2450573 - RNA, 19 nt, Artificial Sequence
  Description of Artificial Sequence: Synthetic oligonucleotide
  Antisense strand to SEQ ID NO: 2450572
ucuauaagaagaugaccca

SEQ ID NO: 2450574 - RNA, 19 nt, Artificial Sequence
  Description of Artificial Sequence: Synthetic oligonucleotide
  Sense strand starting at position 1549 of SEQ ID NO: 1887130
cuucuuauagagugcaaac

SEQ ID NO: 2450575 - RNA, 19 nt, Artificial Sequence
  Description of Artificial Sequence: Synthetic oligonucleotide
  Antisense strand to SEQ ID NO: 2450574
guuugcacucuauaagaag

SEQ ID NO: 2450576 - RNA, 19 nt, Artificial Sequence
  Description of Artificial Sequence: Synthetic oligonucleotide
  Sense strand starting at position 1635 of SEQ ID NO: 1887130
ccaaguuaggcugaugcaa

SEQ ID NO: 2450577 - RNA, 19 nt, Artificial Sequence
  Description of Artificial Sequence: Synthetic oligonucleotide
  Antisense strand to SEQ ID NO: 2450576
uugcaucagccuaacuugg

SEQ ID NO: 2450578 - RNA, 19 nt, Artificial Sequence
  Description of Artificial Sequence: Synthetic oligonucleotide
  Sense strand starting at position 1648 of SEQ ID NO: 1887130
augcaagacucucuguaac

SEQ ID NO: 2450579 - RNA, 19 nt, Artificial Sequence
  Description of Artificial Sequence: Synthetic oligonucleotide
  Antisense strand to SEQ ID NO: 2450578
guuacagagagucuugcau

SEQ ID NO: 2450580 - RNA, 19 nt, Artificial Sequence
  Description of Artificial Sequence: Synthetic oligonucleotide
  Sense strand starting at position 1768 of SEQ ID NO: 1887130
gaguuagggcucuggcaac

SEQ ID NO: 2450581 - RNA, 19 nt, Artificial Sequence
  Description of Artificial Sequence: Synthetic oligonucleotide
  Antisense strand to SEQ ID NO: 2450580
guugccagagcccuaacuc

SEQ ID NO: 2450582 - RNA, 19 nt, Artificial Sequence
  Description of Artificial Sequence: Synthetic oligonucleotide
  Sense strand starting at position 2086 of SEQ ID NO: 1887130
cugacuggagauuguguaa

SEQ ID NO: 2450583 - RNA, 19 nt, Artificial Sequence
  Description of Artificial Sequence: Synthetic oligonucleotide
  Antisense strand to SEQ ID NO: 2450582
uuacacaaucuccagucag

SEQ ID NO: 2450584 - RNA, 19 nt, Artificial Sequence
  Description of Artificial Sequence: Synthetic oligonucleotide
  Sense strand starting at position 2089 of SEQ ID NO: 1887130
acuggagauuguguaauuc

SEQ ID NO: 2450585 - RNA, 19 nt, Artificial Sequence
  Description of Artificial Sequence: Synthetic oligonucleotide
  Antisense strand to SEQ ID NO: 2450584
gaauuacacaaucuccagu

SEQ ID NO: 2450586 - RNA, 19 nt, Artificial Sequence
  Description of Artificial Sequence: Synthetic oligonucleotide
  Sense strand starting at position 2336 of SEQ ID NO: 1887130
ggugucaugaagcaucuga

SEQ ID NO: 2450587 - RNA, 19 nt, Artificial Sequence
  Description of Artificial Sequence: Synthetic oligonucleotide
  Antisense strand to SEQ ID NO: 2450586
ucagaugcuucaugacacc

SEQ ID NO: 2450588 - RNA, 19 nt, Artificial Sequence
  Description of Artificial Sequence: Synthetic oligonucleotide
  Sense strand starting at position 2410 of SEQ ID NO: 1887130
ucuggagagugacuucaga

SEQ ID NO: 2450589 - RNA, 19 nt, Artificial Sequence
  Description of Artificial Sequence: Synthetic oligonucleotide
  Antisense strand to SEQ ID NO: 2450588
ucugaagucacucuccaga

SEQ ID NO: 2450590 - RNA, 19 nt, Artificial Sequence
  Description of Artificial Sequence: Synthetic oligonucleotide
  Sense strand starting at position 2484 of SEQ ID NO: 1887130
gagcuuuggcugugggaaa

SEQ ID NO: 2450591 - RNA, 19 nt, Artificial Sequence
  Description of Artificial Sequence: Synthetic oligonucleotide
  Antisense strand to SEQ ID NO: 2450590
uuucccacagccaaagcuc

SEQ ID NO: 2450592 - RNA, 19 nt, Artificial Sequence
  Description of Artificial Sequence: Synthetic oligonucleotide
  Sense strand starting at position 2697 of SEQ ID NO: 1887130
gaaguccucucguuuaauc

SEQ ID NO: 2450593 - RNA, 19 nt, Artificial Sequence
  Description of Artificial Sequence: Synthetic oligonucleotide
  Antisense strand to SEQ ID NO: 2450592
gauuaaacgagaggacuuc

SEQ ID NO: 2450594 - RNA, 19 nt, Artificial Sequence
  Description of Artificial Sequence: Synthetic oligonucleotide
  Sense strand starting at position 2719 of SEQ ID NO: 1887130
uccgguguggcuucgauga

SEQ ID NO: 2450595 - RNA, 19 nt, Artificial Sequence
  Description of Artificial Sequence: Synthetic oligonucleotide
  Antisense strand to SEQ ID NO: 2450594
ucaucgaagccacaccgga

SEQ ID NO: 2450596 - RNA, 19 nt, Artificial Sequence
  Description of Artificial Sequence: Synthetic oligonucleotide
  Sense strand starting at position 2756 of SEQ ID NO: 1887130
ucauguccaccuggaagaa

SEQ ID NO: 2450597 - RNA, 19 nt, Artificial Sequence
  Description of Artificial Sequence: Synthetic oligonucleotide
  Antisense strand to SEQ ID NO: 2450596
uucuuccagguggacauga

SEQ ID NO: 2450598 - RNA, 19 nt, Artificial Sequence
  Description of Artificial Sequence: Synthetic oligonucleotide
  Sense strand starting at position 2779 of SEQ ID NO: 1887130
gaagcugagugaguccuua

SEQ ID NO: 2450599 - RNA, 19 nt, Artificial Sequence
  Description of Artificial Sequence: Synthetic oligonucleotide
  Antisense strand to SEQ ID NO: 2450598
uaaggacucacucagcuuc

SEQ ID NO: 2450600 - RNA, 19 nt, Artificial Sequence
  Description of Artificial Sequence: Synthetic oligonucleotide
  Sense strand starting at position 3260 of SEQ ID NO: 1887130
uguggaguucccuaaguuu

SEQ ID NO: 2450601 - RNA, 19 nt, Artificial Sequence
  Description of Artificial Sequence: Synthetic oligonucleotide
  Antisense strand to SEQ ID NO: 2450600
aaacuuagggaacuccaca

SEQ ID NO: 2450602 - RNA, 19 nt, Artificial Sequence
  Description of Artificial Sequence: Synthetic oligonucleotide
  Sense strand starting at position 3348 of SEQ ID NO: 1887130
agagaaguacaaggcuaua

SEQ ID NO: 2450603 - RNA, 19 nt, Artificial Sequence
  Description of Artificial Sequence: Synthetic oligonucleotide
  Antisense strand to SEQ ID NO: 2450602
uauagccuuguacuucucu

SEQ ID NO: 2450604 - RNA, 19 nt, Artificial Sequence
  Description of Artificial Sequence: Synthetic oligonucleotide
  Sense strand starting at position 3419 of SEQ ID NO: 1887130
gccuccuuccugcaucaga

SEQ ID NO: 2450605 - RNA, 19 nt, Artificial Sequence
  Description of Artificial Sequence: Synthetic oligonucleotide
  Antisense strand to SEQ ID NO: 2450604
ucugaugcaggaaggaggc

SEQ ID NO: 2450606 - RNA, 19 nt, Artificial Sequence
  Description of Artificial Sequence: Synthetic oligonucleotide
  Sense strand starting at position 3430 of SEQ ID NO: 1887130
gcaucagaucacugccaaa

SEQ ID NO: 2450607 - RNA, 19 nt, Artificial Sequence
  Description of Artificial Sequence: Synthetic oligonucleotide
  Antisense strand to SEQ ID NO: 2450606
uuuggcagugaucugaugc

SEQ ID NO: 2450608 - RNA, 19 nt, Artificial Sequence
  Description of Artificial Sequence: Synthetic oligonucleotide
  Sense strand starting at position 3501 of SEQ ID NO: 1887130
ucaucuugguucuccuaga

SEQ ID NO: 2450609 - RNA, 19 nt, Artificial Sequence
  Description of Artificial Sequence: Synthetic oligonucleotide
  Antisense strand to SEQ ID NO: 2450608
ucuaggagaaccaagauga

SEQ ID NO: 2450610 - RNA, 19 nt, Artificial Sequence
  Description of Artificial Sequence: Synthetic oligonucleotide
  Sense strand starting at position 3506 of SEQ ID NO: 1887130
uugguucuccuagaaccuu

SEQ ID NO: 2450611 - RNA, 19 nt, Artificial Sequence
  Description of Artificial Sequence: Synthetic oligonucleotide
  Antisense strand to SEQ ID NO: 2450610
aagguucuaggagaaccaa

SEQ ID NO: 2450612 - RNA, 19 nt, Artificial Sequence
  Description of Artificial Sequence: Synthetic oligonucleotide
  Sense strand starting at position 3530 of SEQ ID NO: 1887130
uacauagaucaacgguuaa

SEQ ID NO: 2450613 - RNA, 19 nt, Artificial Sequence
  Description of Artificial Sequence: Synthetic oligonucleotide
  Antisense strand to SEQ ID NO: 2450612
uuaaccguugaucuaugua

SEQ ID NO: 2450614 - RNA, 19 nt, Artificial Sequence
  Description of Artificial Sequence: Synthetic oligonucleotide
  Sense strand starting at position 3562 of SEQ ID NO: 1887130
gcucuaacugaagauauuc

SEQ ID NO: 2450615 - RNA, 19 nt, Artificial Sequence
  Description of Artificial Sequence: Synthetic oligonucleotide
  Antisense strand to SEQ ID NO: 2450614
gaauaucuucaguuagagc

SEQ ID NO: 2450616 - RNA, 19 nt, Artificial Sequence
  Description of Artificial Sequence: Synthetic oligonucleotide
  Sense strand starting at position 3818 of SEQ ID NO: 1887130
cccaccucguucucugaaa

SEQ ID NO: 2450617 - RNA, 19 nt, Artificial Sequence
  Description of Artificial Sequence: Synthetic oligonucleotide
  Antisense strand to SEQ ID NO: 2450616
uuucagagaacgagguggg

SEQ ID NO: 2450618 - RNA, 19 nt, Artificial Sequence
  Description of Artificial Sequence: Synthetic oligonucleotide
  Sense strand starting at position 3820 of SEQ ID NO: 1887130
caccucguucucugaaagu

SEQ ID NO: 2450619 - RNA, 19 nt, Artificial Sequence
  Description of Artificial Sequence: Synthetic oligonucleotide
  Antisense strand to SEQ ID NO: 2450618
acuuucagagaacgaggug

SEQ ID NO: 2450620 - RNA, 19 nt, Artificial Sequence
  Description of Artificial Sequence: Synthetic oligonucleotide
  Sense strand starting at position 184 of SEQ ID NO: 1887131
cacggucagcccugaaaca

SEQ ID NO: 2450621 - RNA, 19 nt, Artificial Sequence
  Description of Artificial Sequence: Synthetic oligonucleotide
  Antisense strand to SEQ ID NO: 2450620
uguuucagggcugaccgug

SEQ ID NO: 2450622 - RNA, 19 nt, Artificial Sequence
  Description of Artificial Sequence: Synthetic oligonucleotide
  Sense strand starting at position 253 of SEQ ID NO: 1887131
cagagacgcgucgaacaaa

SEQ ID NO: 2450623 - RNA, 19 nt, Artificial Sequence
  Description of Artificial Sequence: Synthetic oligonucleotide
  Antisense strand to SEQ ID NO: 2450622
uuuguucgacgcgucucug

SEQ ID NO: 2450624 - RNA, 19 nt, Artificial Sequence
  Description of Artificial Sequence: Synthetic oligonucleotide
  Sense strand starting at position 254 of SEQ ID NO: 1887131
agagacgcgucgaacaaau

SEQ ID NO: 2450625 - RNA, 19 nt, Artificial Sequence
  Description of Artificial Sequence: Synthetic oligonucleotide
  Antisense strand to SEQ ID NO: 2450624
auuuguucgacgcgucucu

SEQ ID NO: 2450626 - RNA, 19 nt, Artificial Sequence
  Description of Artificial Sequence: Synthetic oligonucleotide
  Sense strand starting at position 256 of SEQ ID NO: 1887131
agacgcgucgaacaaauaa

SEQ ID NO: 2450627 - RNA, 19 nt, Artificial Sequence
  Description of Artificial Sequence: Synthetic oligonucleotide
  Antisense strand to SEQ ID NO: 2450626
uuauuuguucgacgcgucu

SEQ ID NO: 2450628 - RNA, 19 nt, Artificial Sequence
  Description of Artificial Sequence: Synthetic oligonucleotide
  Sense strand starting at position 805 of SEQ ID NO: 1887131
uccugcuucuuggugagaa

SEQ ID NO: 2450629 - RNA, 19 nt, Artificial Sequence
  Description of Artificial Sequence: Synthetic oligonucleotide
  Antisense strand to SEQ ID NO: 2450628
uucucaccaagaagcagga

SEQ ID NO: 2450630 - RNA, 19 nt, Artificial Sequence
  Description of Artificial Sequence: Synthetic oligonucleotide
  Sense strand starting at position 807 of SEQ ID NO: 1887131
cugcuucuuggugagaaag

SEQ ID NO: 2450631 - RNA, 19 nt, Artificial Sequence
  Description of Artificial Sequence: Synthetic oligonucleotide
  Antisense strand to SEQ ID NO: 2450630
cuuucucaccaagaagcag

SEQ ID NO: 2450632 - RNA, 19 nt, Artificial Sequence
  Description of Artificial Sequence: Synthetic oligonucleotide
  Sense strand starting at position 911 of SEQ ID NO: 1887131
ggcagugaggcaugaugau

SEQ ID NO: 2450633 - RNA, 19 nt, Artificial Sequence
  Description of Artificial Sequence: Synthetic oligonucleotide
  Antisense strand to SEQ ID NO: 2450632
aucaucaugccucacugcc

SEQ ID NO: 2450634 - RNA, 19 nt, Artificial Sequence
  Description of Artificial Sequence: Synthetic oligonucleotide
  Sense strand starting at position 1102 of SEQ ID NO: 1887131
ugcugaaaucgcuucuguu

SEQ ID NO: 2450635 - RNA, 19 nt, Artificial Sequence
  Description of Artificial Sequence: Synthetic oligonucleotide
  Antisense strand to SEQ ID NO: 2450634
aacagaagcgauuucagca

SEQ ID NO: 2450636 - RNA, 19 nt, Artificial Sequence
  Description of Artificial Sequence: Synthetic oligonucleotide
  Sense strand starting at position 1103 of SEQ ID NO: 1887131
gcugaaaucgcuucuguuc

SEQ ID NO: 2450637 - RNA, 19 nt, Artificial Sequence
  Description of Artificial Sequence: Synthetic oligonucleotide
  Antisense strand to SEQ ID NO: 2450636
gaacagaagcgauuucagc

SEQ ID NO: 2450638 - RNA, 19 nt, Artificial Sequence
  Description of Artificial Sequence: Synthetic oligonucleotide
  Sense strand starting at position 1130 of SEQ ID NO: 1887131
uucggaacuugcucuggau

SEQ ID NO: 2450639 - RNA, 19 nt, Artificial Sequence
  Description of Artificial Sequence: Synthetic oligonucleotide
  Antisense strand to SEQ ID NO: 2450638
auccagagcaaguuccgaa

SEQ ID NO: 2450640 - RNA, 19 nt, Artificial Sequence
  Description of Artificial Sequence: Synthetic oligonucleotide
  Sense strand starting at position 1132 of SEQ ID NO: 1887131
cggaacuugcucuggauca

SEQ ID NO: 2450641 - RNA, 19 nt, Artificial Sequence
  Description of Artificial Sequence: Synthetic oligonucleotide
  Antisense strand to SEQ ID NO: 2450640
ugauccagagcaaguuccg

SEQ ID NO: 2450642 - RNA, 19 nt, Artificial Sequence
  Description of Artificial Sequence: Synthetic oligonucleotide
  Sense strand starting at position 1162 of SEQ ID NO: 1887131
ugggucaucuucuuauaga

SEQ ID NO: 2450643 - RNA, 19 nt, Artificial Sequence
  Description of Artificial Sequence: Synthetic oligonucleotide
  Antisense strand to SEQ ID NO: 2450642
ucuauaagaagaugaccca

SEQ ID NO: 2450644 - RNA, 19 nt, Artificial Sequence
  Description of Artificial Sequence: Synthetic oligonucleotide
  Sense strand starting at position 1170 of SEQ ID NO: 1887131
cuucuuauagagugcaaac

SEQ ID NO: 2450645 - RNA, 19 nt, Artificial Sequence
  Description of Artificial Sequence: Synthetic oligonucleotide
  Antisense strand to SEQ ID NO: 2450644
guuugcacucuauaagaag

SEQ ID NO: 2450646 - RNA, 19 nt, Artificial Sequence
  Description of Artificial Sequence: Synthetic oligonucleotide
  Sense strand starting at position 1256 of SEQ ID NO: 1887131
ccaaguuaggcugaugcaa

SEQ ID NO: 2450647 - RNA, 19 nt, Artificial Sequence
  Description of Artificial Sequence: Synthetic oligonucleotide
  Antisense strand to SEQ ID NO: 2450646
uugcaucagccuaacuugg

SEQ ID NO: 2450648 - RNA, 19 nt, Artificial Sequence
  Description of Artificial Sequence: Synthetic oligonucleotide
  Sense strand starting at position 1269 of SEQ ID NO: 1887131
augcaagacucucuguaac

SEQ ID NO: 2450649 - RNA, 19 nt, Artificial Sequence
  Description of Artificial Sequence: Synthetic oligonucleotide
  Antisense strand to SEQ ID NO: 2450648
guuacagagagucuugcau

SEQ ID NO: 2450650 - RNA, 19 nt, Artificial Sequence
  Description of Artificial Sequence: Synthetic oligonucleotide
  Sense strand starting at position 1389 of SEQ ID NO: 1887131
gaguuagggcucuggcaac

SEQ ID NO: 2450651 - RNA, 19 nt, Artificial Sequence
  Description of Artificial Sequence: Synthetic oligonucleotide
  Antisense strand to SEQ ID NO: 2450650
guugccagagcccuaacuc

SEQ ID NO: 2450652 - RNA, 19 nt, Artificial Sequence
  Description of Artificial Sequence: Synthetic oligonucleotide
  Sense strand starting at position 1440 of SEQ ID NO: 1887131
guggguugcugguuacacu

SEQ ID NO: 2450653 - RNA, 19 nt, Artificial Sequence
  Description of Artificial Sequence: Synthetic oligonucleotide
  Antisense strand to SEQ ID NO: 2450652
aguguaaccagcaacccac

SEQ ID NO: 2450654 - RNA, 19 nt, Artificial Sequence
  Description of Artificial Sequence: Synthetic oligonucleotide
  Sense strand starting at position 1707 of SEQ ID NO: 1887131
cugacuggagauuguguaa

SEQ ID NO: 2450655 - RNA, 19 nt, Artificial Sequence
  Description of Artificial Sequence: Synthetic oligonucleotide
  Antisense strand to SEQ ID NO: 2450654
uuacacaaucuccagucag

SEQ ID NO: 2450656 - RNA, 19 nt, Artificial Sequence
  Description of Artificial Sequence: Synthetic oligonucleotide
  Sense strand starting at position 1710 of SEQ ID NO: 1887131
acuggagauuguguaauuc

SEQ ID NO: 2450657 - RNA, 19 nt, Artificial Sequence
  Description of Artificial Sequence: Synthetic oligonucleotide
  Antisense strand to SEQ ID NO: 2450656
gaauuacacaaucuccagu

SEQ ID NO: 2450658 - RNA, 19 nt, Artificial Sequence
  Description of Artificial Sequence: Synthetic oligonucleotide
  Sense strand starting at position 1950 of SEQ ID NO: 1887131
gaaagagggugucaugaag

SEQ ID NO: 2450659 - RNA, 19 nt, Artificial Sequence
  Description of Artificial Sequence: Synthetic oligonucleotide
  Antisense strand to SEQ ID NO: 2450658
cuucaugacacccucuuuc

SEQ ID NO: 2450660 - RNA, 19 nt, Artificial Sequence
  Description of Artificial Sequence: Synthetic oligonucleotide
  Sense strand starting at position 1957 of SEQ ID NO: 1887131
ggugucaugaagcaucuga

SEQ ID NO: 2450661 - RNA, 19 nt, Artificial Sequence
  Description of Artificial Sequence: Synthetic oligonucleotide
  Antisense strand to SEQ ID NO: 2450660
ucagaugcuucaugacacc

SEQ ID NO: 2450662 - RNA, 19 nt, Artificial Sequence
  Description of Artificial Sequence: Synthetic oligonucleotide
  Sense strand starting at position 2031 of SEQ ID NO: 1887131
ucuggagagugacuucaga

SEQ ID NO: 2450663 - RNA, 19 nt, Artificial Sequence
  Description of Artificial Sequence: Synthetic oligonucleotide
  Antisense strand to SEQ ID NO: 2450662
ucugaagucacucuccaga

SEQ ID NO: 2450664 - RNA, 19 nt, Artificial Sequence
  Description of Artificial Sequence: Synthetic oligonucleotide
  Sense strand starting at position 2105 of SEQ ID NO: 1887131
gagcuuuggcugugggaaa

SEQ ID NO: 2450665 - RNA, 19 nt, Artificial Sequence
  Description of Artificial Sequence: Synthetic oligonucleotide
  Antisense strand to SEQ ID NO: 2450664
uuucccacagccaaagcuc

SEQ ID NO: 2450666 - RNA, 19 nt, Artificial Sequence
  Description of Artificial Sequence: Synthetic oligonucleotide
  Sense strand starting at position 2318 of SEQ ID NO: 1887131
gaaguccucucguuuaauc

SEQ ID NO: 2450667 - RNA, 19 nt, Artificial Sequence
  Description of Artificial Sequence: Synthetic oligonucleotide
  Antisense strand to SEQ ID NO: 2450666
gauuaaacgagaggacuuc

SEQ ID NO: 2450668 - RNA, 19 nt, Artificial Sequence
  Description of Artificial Sequence: Synthetic oligonucleotide
  Sense strand starting at position 2340 of SEQ ID NO: 1887131
uccgguguggcuucgauga

SEQ ID NO: 2450669 - RNA, 19 nt, Artificial Sequence
  Description of Artificial Sequence: Synthetic oligonucleotide
  Antisense strand to SEQ ID NO: 2450668
ucaucgaagccacaccgga

SEQ ID NO: 2450670 - RNA, 19 nt, Artificial Sequence
  Description of Artificial Sequence: Synthetic oligonucleotide
  Sense strand starting at position 2353 of SEQ ID NO: 1887131
cgaugaucugcuuggcuag

SEQ ID NO: 2450671 - RNA, 19 nt, Artificial Sequence
  Description of Artificial Sequence: Synthetic oligonucleotide
  Antisense strand to SEQ ID NO: 2450670
cuagccaagcagaucaucg

SEQ ID NO: 2450672 - RNA, 19 nt, Artificial Sequence
  Description of Artificial Sequence: Synthetic oligonucleotide
  Sense strand starting at position 2377 of SEQ ID NO: 1887131
ucauguccaccuggaagaa

SEQ ID NO: 2450673 - RNA, 19 nt, Artificial Sequence
  Description of Artificial Sequence: Synthetic oligonucleotide
  Antisense strand to SEQ ID NO: 2450672
uucuuccagguggacauga

SEQ ID NO: 2450674 - RNA, 19 nt, Artificial Sequence
  Description of Artificial Sequence: Synthetic oligonucleotide
  Sense strand starting at position 2400 of SEQ ID NO: 1887131
gaagcugagugaguccuua

SEQ ID NO: 2450675 - RNA, 19 nt, Artificial Sequence
  Description of Artificial Sequence: Synthetic oligonucleotide
  Antisense strand to SEQ ID NO: 2450674
uaaggacucacucagcuuc

SEQ ID NO: 2450676 - RNA, 19 nt, Artificial Sequence
  Description of Artificial Sequence: Synthetic oligonucleotide
  Sense strand starting at position 2435 of SEQ ID NO: 1887131
gcuguaaccucaguccauu

SEQ ID NO: 2450677 - RNA, 19 nt, Artificial Sequence
  Description of Artificial Sequence: Synthetic oligonucleotide
  Antisense strand to SEQ ID NO: 2450676
aauggacugagguuacagc

SEQ ID NO: 2450678 - RNA, 19 nt, Artificial Sequence
  Description of Artificial Sequence: Synthetic oligonucleotide
  Sense strand starting at position 2881 of SEQ ID NO: 1887131
uguggaguucccuaaguuu

SEQ ID NO: 2450679 - RNA, 19 nt, Artificial Sequence
  Description of Artificial Sequence: Synthetic oligonucleotide
  Antisense strand to SEQ ID NO: 2450678
aaacuuagggaacuccaca

SEQ ID NO: 2450680 - RNA, 19 nt, Artificial Sequence
  Description of Artificial Sequence: Synthetic oligonucleotide
  Sense strand starting at position 2969 of SEQ ID NO: 1887131
agagaaguacaaggcuaua

SEQ ID NO: 2450681 - RNA, 19 nt, Artificial Sequence
  Description of Artificial Sequence: Synthetic oligonucleotide
  Antisense strand to SEQ ID NO: 2450680
uauagccuuguacuucucu

SEQ ID NO: 2450682 - RNA, 19 nt, Artificial Sequence
  Description of Artificial Sequence: Synthetic oligonucleotide
  Sense strand starting at position 3040 of SEQ ID NO: 1887131
gccuccuuccugcaucaga

SEQ ID NO: 2450683 - RNA, 19 nt, Artificial Sequence
  Description of Artificial Sequence: Synthetic oligonucleotide
  Antisense strand to SEQ ID NO: 2450682
ucugaugcaggaaggaggc

SEQ ID NO: 2450684 - RNA, 19 nt, Artificial Sequence
  Description of Artificial Sequence: Synthetic oligonucleotide
  Sense strand starting at position 3051 of SEQ ID NO: 1887131
gcaucagaucacugccaaa

SEQ ID NO: 2450685 - RNA, 19 nt, Artificial Sequence
  Description of Artificial Sequence: Synthetic oligonucleotide
  Antisense strand to SEQ ID NO: 2450684
uuuggcagugaucugaugc

SEQ ID NO: 2450686 - RNA, 19 nt, Artificial Sequence
  Description of Artificial Sequence: Synthetic oligonucleotide
  Sense strand starting at position 3122 of SEQ ID NO: 1887131
ucaucuugguucuccuaga

SEQ ID NO: 2450687 - RNA, 19 nt, Artificial Sequence
  Description of Artificial Sequence: Synthetic oligonucleotide
  Antisense strand to SEQ ID NO: 2450686
ucuaggagaaccaagauga

SEQ ID NO: 2450688 - RNA, 19 nt, Artificial Sequence
  Description of Artificial Sequence: Synthetic oligonucleotide
  Sense strand starting at position 3127 of SEQ ID NO: 1887131
uugguucuccuagaaccuu

SEQ ID NO: 2450689 - RNA, 19 nt, Artificial Sequence
  Description of Artificial Sequence: Synthetic oligonucleotide
  Antisense strand to SEQ ID NO: 2450688
aagguucuaggagaaccaa

SEQ ID NO: 2450690 - RNA, 19 nt, Artificial Sequence
  Description of Artificial Sequence: Synthetic oligonucleotide
  Sense strand starting at position 3151 of SEQ ID NO: 1887131
uacauagaucaacgguuaa

SEQ ID NO: 2450691 - RNA, 19 nt, Artificial Sequence
  Description of Artificial Sequence: Synthetic oligonucleotide
  Antisense strand to SEQ ID NO: 2450690
uuaaccguugaucuaugua

SEQ ID NO: 2450692 - RNA, 19 nt, Artificial Sequence
  Description of Artificial Sequence: Synthetic oligonucleotide
  Sense strand starting at position 3183 of SEQ ID NO: 1887131
gcucuaacugaagauauuc

SEQ ID NO: 2450693 - RNA, 19 nt, Artificial Sequence
  Description of Artificial Sequence: Synthetic oligonucleotide
  Antisense strand to SEQ ID NO: 2450692
gaauaucuucaguuagagc

SEQ ID NO: 2450694 - RNA, 19 nt, Artificial Sequence
  Description of Artificial Sequence: Synthetic oligonucleotide
  Sense strand starting at position 3388 of SEQ ID NO: 1887131
ucuuguuauguuggccaga

SEQ ID NO: 2450695 - RNA, 19 nt, Artificial Sequence
  Description of Artificial Sequence: Synthetic oligonucleotide
  Antisense strand to SEQ ID NO: 2450694
ucuggccaacauaacaaga

SEQ ID NO: 2450696 - RNA, 19 nt, Artificial Sequence
  Description of Artificial Sequence: Synthetic oligonucleotide
  Sense strand starting at position 3439 of SEQ ID NO: 1887131
cccaccucguucucugaaa

SEQ ID NO: 2450697 - RNA, 19 nt, Artificial Sequence
  Description of Artificial Sequence: Synthetic oligonucleotide
  Antisense strand to SEQ ID NO: 2450696
uuucagagaacgagguggg

SEQ ID NO: 2450698 - RNA, 19 nt, Artificial Sequence
  Description of Artificial Sequence: Synthetic oligonucleotide
  Sense strand starting at position 3441 of SEQ ID NO: 1887131
caccucguucucugaaagu

SEQ ID NO: 2450699 - RNA, 19 nt, Artificial Sequence
  Description of Artificial Sequence: Synthetic oligonucleotide
  Antisense strand to SEQ ID NO: 2450698
acuuucagagaacgaggug

SEQ ID NO: 2450700 - RNA, 19 nt, Artificial Sequence
  Description of Artificial Sequence: Synthetic oligonucleotide
  Sense strand starting at position 469 of SEQ ID NO: 1887132
ugaagaaacuguuaggaaa

SEQ ID NO: 2450701 - RNA, 19 nt, Artificial Sequence
  Description of Artificial Sequence: Synthetic oligonucleotide
  Antisense strand to SEQ ID NO: 2450700
uuuccuaacaguuucuuca

SEQ ID NO: 2450702 - RNA, 19 nt, Artificial Sequence
  Description of Artificial Sequence: Synthetic oligonucleotide
  Sense strand starting at position 472 of SEQ ID NO: 1887132
agaaacuguuaggaaauua

SEQ ID NO: 2450703 - RNA, 19 nt, Artificial Sequence
  Description of Artificial Sequence: Synthetic oligonucleotide
  Antisense strand to SEQ ID NO: 2450702
uaauuuccuaacaguuucu

SEQ ID NO: 2450704 - RNA, 19 nt, Artificial Sequence
  Description of Artificial Sequence: Synthetic oligonucleotide
  Sense strand starting at position 630 of SEQ ID NO: 1887132
aaauuagccgaucgcgaua

SEQ ID NO: 2450705 - RNA, 19 nt, Artificial Sequence
  Description of Artificial Sequence: Synthetic oligonucleotide
  Antisense strand to SEQ ID NO: 2450704
uaucgcgaucggcuaauuu

SEQ ID NO: 2450706 - RNA, 19 nt, Artificial Sequence
  Description of Artificial Sequence: Synthetic oligonucleotide
  Sense strand starting at position 645 of SEQ ID NO: 1887132
gauaguacgcgccuguaau

SEQ ID NO: 2450707 - RNA, 19 nt, Artificial Sequence
  Description of Artificial Sequence: Synthetic oligonucleotide
  Antisense strand to SEQ ID NO: 2450706
auuacaggcgcguacuauc

SEQ ID NO: 2450708 - RNA, 19 nt, Artificial Sequence
  Description of Artificial Sequence: Synthetic oligonucleotide
  Sense strand starting at position 646 of SEQ ID NO: 1887132
auaguacgcgccuguaauc

SEQ ID NO: 2450709 - RNA, 19 nt, Artificial Sequence
  Description of Artificial Sequence: Synthetic oligonucleotide
  Antisense strand to SEQ ID NO: 2450708
gauuacaggcgcguacuau

SEQ ID NO: 2450710 - RNA, 19 nt, Artificial Sequence
  Description of Artificial Sequence: Synthetic oligonucleotide
  Sense strand starting at position 963 of SEQ ID NO: 1887132
cgggauuccagguguaagc

SEQ ID NO: 2450711 - RNA, 19 nt, Artificial Sequence
  Description of Artificial Sequence: Synthetic oligonucleotide
  Antisense strand to SEQ ID NO: 2450710
gcuuacaccuggaaucccg

SEQ ID NO: 2450712 - RNA, 19 nt, Artificial Sequence
  Description of Artificial Sequence: Synthetic oligonucleotide
  Sense strand starting at position 1231 of SEQ ID NO: 1887132
ugucuugggucagcagaau

SEQ ID NO: 2450713 - RNA, 19 nt, Artificial Sequence
  Description of Artificial Sequence: Synthetic oligonucleotide
  Antisense strand to SEQ ID NO: 2450712
auucugcugacccaagaca

SEQ ID NO: 2450714 - RNA, 19 nt, Artificial Sequence
  Description of Artificial Sequence: Synthetic oligonucleotide
  Sense strand starting at position 1240 of SEQ ID NO: 1887132
ucagcagaauucuccaagu

SEQ ID NO: 2450715 - RNA, 19 nt, Artificial Sequence
  Description of Artificial Sequence: Synthetic oligonucleotide
  Antisense strand to SEQ ID NO: 2450714
acuuggagaauucugcuga

SEQ ID NO: 2450716 - RNA, 19 nt, Artificial Sequence
  Description of Artificial Sequence: Synthetic oligonucleotide
  Sense strand starting at position 1242 of SEQ ID NO: 1887132
agcagaauucuccaaguag

SEQ ID NO: 2450717 - RNA, 19 nt, Artificial Sequence
  Description of Artificial Sequence: Synthetic oligonucleotide
  Antisense strand to SEQ ID NO: 2450716
cuacuuggagaauucugcu

SEQ ID NO: 2450718 - RNA, 19 nt, Artificial Sequence
  Description of Artificial Sequence: Synthetic oligonucleotide
  Sense strand starting at position 1258 of SEQ ID NO: 1887132
uagagauguucuugaacaa

SEQ ID NO: 2450719 - RNA, 19 nt, Artificial Sequence
  Description of Artificial Sequence: Synthetic oligonucleotide
  Antisense strand to SEQ ID NO: 2450718
uuguucaagaacaucucua

SEQ ID NO: 2450720 - RNA, 19 nt, Artificial Sequence
  Description of Artificial Sequence: Synthetic oligonucleotide
  Sense strand starting at position 1365 of SEQ ID NO: 1887132
gcaagcgugaaucacagaa

SEQ ID NO: 2450721 - RNA, 19 nt, Artificial Sequence
  Description of Artificial Sequence: Synthetic oligonucleotide
  Antisense strand to SEQ ID NO: 2450720
uucugugauucacgcuugc

SEQ ID NO: 2450722 - RNA, 19 nt, Artificial Sequence
  Description of Artificial Sequence: Synthetic oligonucleotide
  Sense strand starting at position 1369 of SEQ ID NO: 1887132
gcgugaaucacagaaccuc

SEQ ID NO: 2450723 - RNA, 19 nt, Artificial Sequence
  Description of Artificial Sequence: Synthetic oligonucleotide
  Antisense strand to SEQ ID NO: 2450722
gagguucugugauucacgc

SEQ ID NO: 2450724 - RNA, 19 nt, Artificial Sequence
  Description of Artificial Sequence: Synthetic oligonucleotide
  Sense strand starting at position 1391 of SEQ ID NO: 1887132
gccugcugggcucaaauau

SEQ ID NO: 2450725 - RNA, 19 nt, Artificial Sequence
  Description of Artificial Sequence: Synthetic oligonucleotide
  Antisense strand to SEQ ID NO: 2450724
auauuugagcccagcaggc

SEQ ID NO: 2450726 - RNA, 19 nt, Artificial Sequence
  Description of Artificial Sequence: Synthetic oligonucleotide
  Sense strand starting at position 1516 of SEQ ID NO: 1887132
cgccuuacaccucagacua

SEQ ID NO: 2450727 - RNA, 19 nt, Artificial Sequence
  Description of Artificial Sequence: Synthetic oligonucleotide
  Antisense strand to SEQ ID NO: 2450726
uagucugagguguaaggcg

SEQ ID NO: 2450728 - RNA, 19 nt, Artificial Sequence
  Description of Artificial Sequence: Synthetic oligonucleotide
  Sense strand starting at position 1562 of SEQ ID NO: 1887132
gaagaugaguucuggaaac

SEQ ID NO: 2450729 - RNA, 19 nt, Artificial Sequence
  Description of Artificial Sequence: Synthetic oligonucleotide
  Antisense strand to SEQ ID NO: 2450728
guuuccagaacucaucuuc

SEQ ID NO: 2450730 - RNA, 19 nt, Artificial Sequence
  Description of Artificial Sequence: Synthetic oligonucleotide
  Sense strand starting at position 1576 of SEQ ID NO: 1887132
gaaacaaacuguccuaggu

SEQ ID NO: 2450731 - RNA, 19 nt, Artificial Sequence
  Description of Artificial Sequence: Synthetic oligonucleotide
  Antisense strand to SEQ ID NO: 2450730
accuaggacaguuuguuuc

SEQ ID NO: 2450732 - RNA, 19 nt, Artificial Sequence
  Description of Artificial Sequence: Synthetic oligonucleotide
  Sense strand starting at position 1586 of SEQ ID NO: 1887132
guccuaggucuguaucuua

SEQ ID NO: 2450733 - RNA, 19 nt, Artificial Sequence
  Description of Artificial Sequence: Synthetic oligonucleotide
  Antisense strand to SEQ ID NO: 2450732
uaagauacagaccuaggac

SEQ ID NO: 2450734 - RNA, 19 nt, Artificial Sequence
  Description of Artificial Sequence: Synthetic oligonucleotide
  Sense strand starting at position 1643 of SEQ ID NO: 1887132
uuuccucauuuguacgaua

SEQ ID NO: 2450735 - RNA, 19 nt, Artificial Sequence
  Description of Artificial Sequence: Synthetic oligonucleotide
  Antisense strand to SEQ ID NO: 2450734
uaucguacaaaugaggaaa

SEQ ID NO: 2450736 - RNA, 19 nt, Artificial Sequence
  Description of Artificial Sequence: Synthetic oligonucleotide
  Sense strand starting at position 1651 of SEQ ID NO: 1887132
uuuguacgauaaggauaau

SEQ ID NO: 2450737 - RNA, 19 nt, Artificial Sequence
  Description of Artificial Sequence: Synthetic oligonucleotide
  Antisense strand to SEQ ID NO: 2450736
auuauccuuaucguacaaa

SEQ ID NO: 2450738 - RNA, 19 nt, Artificial Sequence
  Description of Artificial Sequence: Synthetic oligonucleotide
  Sense strand starting at position 1924 of SEQ ID NO: 1887132
ugugcucuccuagaggaca

SEQ ID NO: 2450739 - RNA, 19 nt, Artificial Sequence
  Description of Artificial Sequence: Synthetic oligonucleotide
  Antisense strand to SEQ ID NO: 2450738
uguccucuaggagagcaca

SEQ ID NO: 2450740 - RNA, 19 nt, Artificial Sequence
  Description of Artificial Sequence: Synthetic oligonucleotide
  Sense strand starting at position 2002 of SEQ ID NO: 1887132
aggacuguggaauguacua

SEQ ID NO: 2450741 - RNA, 19 nt, Artificial Sequence
  Description of Artificial Sequence: Synthetic oligonucleotide
  Antisense strand to SEQ ID NO: 2450740
uaguacauuccacaguccu

SEQ ID NO: 2450742 - RNA, 19 nt, Artificial Sequence
  Description of Artificial Sequence: Synthetic oligonucleotide
  Sense strand starting at position 2189 of SEQ ID NO: 1887132
aaguuucccugucagcgau

SEQ ID NO: 2450743 - RNA, 19 nt, Artificial Sequence
  Description of Artificial Sequence: Synthetic oligonucleotide
  Antisense strand to SEQ ID NO: 2450742
aucgcugacagggaaacuu

SEQ ID NO: 2450744 - RNA, 19 nt, Artificial Sequence
  Description of Artificial Sequence: Synthetic oligonucleotide
  Sense strand starting at position 2193 of SEQ ID NO: 1887132
uucccugucagcgaugcau

SEQ ID NO: 2450745 - RNA, 19 nt, Artificial Sequence
  Description of Artificial Sequence: Synthetic oligonucleotide
  Antisense strand to SEQ ID NO: 2450744
augcaucgcugacagggaa

SEQ ID NO: 2450746 - RNA, 19 nt, Artificial Sequence
  Description of Artificial Sequence: Synthetic oligonucleotide
  Sense strand starting at position 2195 of SEQ ID NO: 1887132
cccugucagcgaugcauau

SEQ ID NO: 2450747 - RNA, 19 nt, Artificial Sequence
  Description of Artificial Sequence: Synthetic oligonucleotide
  Antisense strand to SEQ ID NO: 2450746
auaugcaucgcugacaggg

SEQ ID NO: 2450748 - RNA, 19 nt, Artificial Sequence
  Description of Artificial Sequence: Synthetic oligonucleotide
  Sense strand starting at position 2197 of SEQ ID NO: 1887132
cugucagcgaugcauauaa

SEQ ID NO: 2450749 - RNA, 19 nt, Artificial Sequence
  Description of Artificial Sequence: Synthetic oligonucleotide
  Antisense strand to SEQ ID NO: 2450748
uuauaugcaucgcugacag

SEQ ID NO: 2450750 - RNA, 19 nt, Artificial Sequence
  Description of Artificial Sequence: Synthetic oligonucleotide
  Sense strand starting at position 2199 of SEQ ID NO: 1887132
gucagcgaugcauauaaga

SEQ ID NO: 2450751 - RNA, 19 nt, Artificial Sequence
  Description of Artificial Sequence: Synthetic oligonucleotide
  Antisense strand to SEQ ID NO: 2450750
ucuuauaugcaucgcugac

SEQ ID NO: 2450752 - RNA, 19 nt, Artificial Sequence
  Description of Artificial Sequence: Synthetic oligonucleotide
  Sense strand starting at position 2209 of SEQ ID NO: 1887132
cauauaagaucugaacggu

SEQ ID NO: 2450753 - RNA, 19 nt, Artificial Sequence
  Description of Artificial Sequence: Synthetic oligonucleotide
  Antisense strand to SEQ ID NO: 2450752
accguucagaucuuauaug

SEQ ID NO: 2450754 - RNA, 19 nt, Artificial Sequence
  Description of Artificial Sequence: Synthetic oligonucleotide
  Sense strand starting at position 3021 of SEQ ID NO: 1887132
auagguauuccuggaacau

SEQ ID NO: 2450755 - RNA, 19 nt, Artificial Sequence
  Description of Artificial Sequence: Synthetic oligonucleotide
  Antisense strand to SEQ ID NO: 2450754
auguuccaggaauaccuau

SEQ ID NO: 2450756 - RNA, 19 nt, Artificial Sequence
  Description of Artificial Sequence: Synthetic oligonucleotide
  Sense strand starting at position 3381 of SEQ ID NO: 1887132
ggagcuuaaucuuccuuga

SEQ ID NO: 2450757 - RNA, 19 nt, Artificial Sequence
  Description of Artificial Sequence: Synthetic oligonucleotide
  Antisense strand to SEQ ID NO: 2450756
ucaaggaagauuaagcucc

SEQ ID NO: 2450758 - RNA, 19 nt, Artificial Sequence
  Description of Artificial Sequence: Synthetic oligonucleotide
  Sense strand starting at position 3720 of SEQ ID NO: 1887132
gcccaugaauugucucuua

SEQ ID NO: 2450759 - RNA, 19 nt, Artificial Sequence
  Description of Artificial Sequence: Synthetic oligonucleotide
  Antisense strand to SEQ ID NO: 2450758
uaagagacaauucaugggc

SEQ ID NO: 2450760 - RNA, 19 nt, Artificial Sequence
  Description of Artificial Sequence: Synthetic oligonucleotide
  Sense strand starting at position 3743 of SEQ ID NO: 1887132
ugcagugccuaauaacuau

SEQ ID NO: 2450761 - RNA, 19 nt, Artificial Sequence
  Description of Artificial Sequence: Synthetic oligonucleotide
  Antisense strand to SEQ ID NO: 2450760
auaguuauuaggcacugca

SEQ ID NO: 2450762 - RNA, 19 nt, Artificial Sequence
  Description of Artificial Sequence: Synthetic oligonucleotide
  Sense strand starting at position 3754 of SEQ ID NO: 1887132
auaacuauacuuugacgua

SEQ ID NO: 2450763 - RNA, 19 nt, Artificial Sequence
  Description of Artificial Sequence: Synthetic oligonucleotide
  Antisense strand to SEQ ID NO: 2450762
uacgucaaaguauaguuau

SEQ ID NO: 2450764 - RNA, 19 nt, Artificial Sequence
  Description of Artificial Sequence: Synthetic oligonucleotide
  Sense strand starting at position 3757 of SEQ ID NO: 1887132
acuauacuuugacguaagu

SEQ ID NO: 2450765 - RNA, 19 nt, Artificial Sequence
  Description of Artificial Sequence: Synthetic oligonucleotide
  Antisense strand to SEQ ID NO: 2450764
acuuacgucaaaguauagu

SEQ ID NO: 2450766 - RNA, 19 nt, Artificial Sequence
  Description of Artificial Sequence: Synthetic oligonucleotide
  Sense strand starting at position 3766 of SEQ ID NO: 1887132
ugacguaaguugugaacuc

SEQ ID NO: 2450767 - RNA, 19 nt, Artificial Sequence
  Description of Artificial Sequence: Synthetic oligonucleotide
  Antisense strand to SEQ ID NO: 2450766
gaguucacaacuuacguca

SEQ ID NO: 2450768 - RNA, 19 nt, Artificial Sequence
  Description of Artificial Sequence: Synthetic oligonucleotide
  Sense strand starting at position 3767 of SEQ ID NO: 1887132
gacguaaguugugaacucu

SEQ ID NO: 2450769 - RNA, 19 nt, Artificial Sequence
  Description of Artificial Sequence: Synthetic oligonucleotide
  Antisense strand to SEQ ID NO: 2450768
agaguucacaacuuacguc

SEQ ID NO: 2450770 - RNA, 19 nt, Artificial Sequence
  Description of Artificial Sequence: Synthetic oligonucleotide
  Sense strand starting at position 2025 of SEQ ID NO: 1887133
gacagauguugggcaggaa

SEQ ID NO: 2450771 - RNA, 19 nt, Artificial Sequence
  Description of Artificial Sequence: Synthetic oligonucleotide
  Antisense strand to SEQ ID NO: 2450770
uuccugcccaacaucuguc

SEQ ID NO: 2450772 - RNA, 19 nt, Artificial Sequence
  Description of Artificial Sequence: Synthetic oligonucleotide
  Sense strand starting at position 2076 of SEQ ID NO: 1887133
ccagcaaguguauggaaau

SEQ ID NO: 2450773 - RNA, 19 nt, Artificial Sequence
  Description of Artificial Sequence: Synthetic oligonucleotide
  Antisense strand to SEQ ID NO: 2450772
auuuccauacacuugcugg

SEQ ID NO: 2450774 - RNA, 19 nt, Artificial Sequence
  Description of Artificial Sequence: Synthetic oligonucleotide
  Sense strand starting at position 2077 of SEQ ID NO: 1887133
cagcaaguguauggaaaua

SEQ ID NO: 2450775 - RNA, 19 nt, Artificial Sequence
  Description of Artificial Sequence: Synthetic oligonucleotide
  Antisense strand to SEQ ID NO: 2450774
uauuuccauacacuugcug

SEQ ID NO: 2450776 - RNA, 19 nt, Artificial Sequence
  Description of Artificial Sequence: Synthetic oligonucleotide
  Sense strand starting at position 2227 of SEQ ID NO: 1887133
cacugaaugcugggagaug

SEQ ID NO: 2450777 - RNA, 19 nt, Artificial Sequence
  Description of Artificial Sequence: Synthetic oligonucleotide
  Antisense strand to SEQ ID NO: 2450776
caucucccagcauucagug

SEQ ID NO: 2450778 - RNA, 19 nt, Artificial Sequence
  Description of Artificial Sequence: Synthetic oligonucleotide
  Sense strand starting at position 2228 of SEQ ID NO: 1887133
acugaaugcugggagauga

SEQ ID NO: 2450779 - RNA, 19 nt, Artificial Sequence
  Description of Artificial Sequence: Synthetic oligonucleotide
  Antisense strand to SEQ ID NO: 2450778
ucaucucccagcauucagu

SEQ ID NO: 2450780 - RNA, 19 nt, Artificial Sequence
  Description of Artificial Sequence: Synthetic oligonucleotide
  Sense strand starting at position 2449 of SEQ ID NO: 1887133
guggguugccacagugaug

SEQ ID NO: 2450781 - RNA, 19 nt, Artificial Sequence
  Description of Artificial Sequence: Synthetic oligonucleotide
  Antisense strand to SEQ ID NO: 2450780
caucacuguggcaacccac

SEQ ID NO: 2450782 - RNA, 19 nt, Artificial Sequence
  Description of Artificial Sequence: Synthetic oligonucleotide
  Sense strand starting at position 2483 of SEQ ID NO: 1887133
ucaagagucuguuaggcaa

SEQ ID NO: 2450783 - RNA, 19 nt, Artificial Sequence
  Description of Artificial Sequence: Synthetic oligonucleotide
  Antisense strand to SEQ ID NO: 2450782
uugccuaacagacucuuga

SEQ ID NO: 2450784 - RNA, 19 nt, Artificial Sequence
  Description of Artificial Sequence: Synthetic oligonucleotide
  Sense strand starting at position 2888 of SEQ ID NO: 1887133
gggaguaacucucucaccu

SEQ ID NO: 2450785 - RNA, 19 nt, Artificial Sequence
  Description of Artificial Sequence: Synthetic oligonucleotide
  Antisense strand to SEQ ID NO: 2450784
aggugagagaguuacuccc

SEQ ID NO: 2450786 - RNA, 19 nt, Artificial Sequence
  Description of Artificial Sequence: Synthetic oligonucleotide
  Sense strand starting at position 2896 of SEQ ID NO: 1887133
cucucucaccuuugaggau

SEQ ID NO: 2450787 - RNA, 19 nt, Artificial Sequence
  Description of Artificial Sequence: Synthetic oligonucleotide
  Antisense strand to SEQ ID NO: 2450786
auccucaaaggugagagag

SEQ ID NO: 2450788 - RNA, 19 nt, Artificial Sequence
  Description of Artificial Sequence: Synthetic oligonucleotide
  Sense strand starting at position 2990 of SEQ ID NO: 1887133
guccuaguauuccacagga

SEQ ID NO: 2450789 - RNA, 19 nt, Artificial Sequence
  Description of Artificial Sequence: Synthetic oligonucleotide
  Antisense strand to SEQ ID NO: 2450788
uccuguggaauacuaggac

SEQ ID NO: 2450790 - RNA, 19 nt, Artificial Sequence
  Description of Artificial Sequence: Synthetic oligonucleotide
  Sense strand starting at position 3030 of SEQ ID NO: 1887133
gccaaugcaucccaaagau

SEQ ID NO: 2450791 - RNA, 19 nt, Artificial Sequence
  Description of Artificial Sequence: Synthetic oligonucleotide
  Antisense strand to SEQ ID NO: 2450790
aucuuugggaugcauuggc

SEQ ID NO: 2450792 - RNA, 19 nt, Artificial Sequence
  Description of Artificial Sequence: Synthetic oligonucleotide
  Sense strand starting at position 3079 of SEQ ID NO: 1887133
uguauacauuccugaucag

SEQ ID NO: 2450793 - RNA, 19 nt, Artificial Sequence
  Description of Artificial Sequence: Synthetic oligonucleotide
  Antisense strand to SEQ ID NO: 2450792
cugaucaggaauguauaca

SEQ ID NO: 2450794 - RNA, 19 nt, Artificial Sequence
  Description of Artificial Sequence: Synthetic oligonucleotide
  Sense strand starting at position 3281 of SEQ ID NO: 1887133
gaggguuucugggcucuca

SEQ ID NO: 2450795 - RNA, 19 nt, Artificial Sequence
  Description of Artificial Sequence: Synthetic oligonucleotide
  Antisense strand to SEQ ID NO: 2450794
ugagagcccagaaacccuc

SEQ ID NO: 2450796 - RNA, 19 nt, Artificial Sequence
  Description of Artificial Sequence: Synthetic oligonucleotide
  Sense strand starting at position 3385 of SEQ ID NO: 1887133
ucugcagaguuugaaggaa

SEQ ID NO: 2450797 - RNA, 19 nt, Artificial Sequence
  Description of Artificial Sequence: Synthetic oligonucleotide
  Antisense strand to SEQ ID NO: 2450796
uuccuucaaacucugcaga

SEQ ID NO: 2450798 - RNA, 19 nt, Artificial Sequence
  Description of Artificial Sequence: Synthetic oligonucleotide
  Sense strand starting at position 3410 of SEQ ID NO: 1887133
gggauaucagaguggagcu

SEQ ID NO: 2450799 - RNA, 19 nt, Artificial Sequence
  Description of Artificial Sequence: Synthetic oligonucleotide
  Antisense strand to SEQ ID NO: 2450798
agcuccacucugauauccc

SEQ ID NO: 2450800 - RNA, 19 nt, Artificial Sequence
  Description of Artificial Sequence: Synthetic oligonucleotide
  Sense strand starting at position 3420 of SEQ ID NO: 1887133
aguggagcuccuuggguua

SEQ ID NO: 2450801 - RNA, 19 nt, Artificial Sequence
  Description of Artificial Sequence: Synthetic oligonucleotide
  Antisense strand to SEQ ID NO: 2450800
uaacccaaggagcuccacu

SEQ ID NO: 2450802 - RNA, 19 nt, Artificial Sequence
  Description of Artificial Sequence: Synthetic oligonucleotide
  Sense strand starting at position 3423 of SEQ ID NO: 1887133
ggagcuccuuggguuacau

SEQ ID NO: 2450803 - RNA, 19 nt, Artificial Sequence
  Description of Artificial Sequence: Synthetic oligonucleotide
  Antisense strand to SEQ ID NO: 2450802
auguaacccaaggagcucc

SEQ ID NO: 2450804 - RNA, 19 nt, Artificial Sequence
  Description of Artificial Sequence: Synthetic oligonucleotide
  Sense strand starting at position 3440 of SEQ ID NO: 1887133
augggagccucggauuaau

SEQ ID NO: 2450805 - RNA, 19 nt, Artificial Sequence
  Description of Artificial Sequence: Synthetic oligonucleotide
  Antisense strand to SEQ ID NO: 2450804
auuaauccgaggcucccau

SEQ ID NO: 2450806 - RNA, 19 nt, Artificial Sequence
  Description of Artificial Sequence: Synthetic oligonucleotide
  Sense strand starting at position 3450 of SEQ ID NO: 1887133
cggauuaauucucccuguu

SEQ ID NO: 2450807 - RNA, 19 nt, Artificial Sequence
  Description of Artificial Sequence: Synthetic oligonucleotide
  Antisense strand to SEQ ID NO: 2450806
aacagggagaauuaauccg

SEQ ID NO: 2450808 - RNA, 19 nt, Artificial Sequence
  Description of Artificial Sequence: Synthetic oligonucleotide
  Sense strand starting at position 3453 of SEQ ID NO: 1887133
auuaauucucccuguugga

SEQ ID NO: 2450809 - RNA, 19 nt, Artificial Sequence
  Description of Artificial Sequence: Synthetic oligonucleotide
  Antisense strand to SEQ ID NO: 2450808
uccaacagggagaauuaau

SEQ ID NO: 2450810 - RNA, 19 nt, Artificial Sequence
  Description of Artificial Sequence: Synthetic oligonucleotide
  Sense strand starting at position 3528 of SEQ ID NO: 1887133
gaagucaggccuuggcuaa

SEQ ID NO: 2450811 - RNA, 19 nt, Artificial Sequence
  Description of Artificial Sequence: Synthetic oligonucleotide
  Antisense strand to SEQ ID NO: 2450810
uuagccaaggccugacuuc

SEQ ID NO: 2450812 - RNA, 19 nt, Artificial Sequence
  Description of Artificial Sequence: Synthetic oligonucleotide
  Sense strand starting at position 3535 of SEQ ID NO: 1887133
ggccuuggcuaagucuaga

SEQ ID NO: 2450813 - RNA, 19 nt, Artificial Sequence
  Description of Artificial Sequence: Synthetic oligonucleotide
  Antisense strand to SEQ ID NO: 2450812
ucuagacuuagccaaggcc

SEQ ID NO: 2450814 - RNA, 19 nt, Artificial Sequence
  Description of Artificial Sequence: Synthetic oligonucleotide
  Sense strand starting at position 3540 of SEQ ID NO: 1887133
uggcuaagucuagaggcuu

SEQ ID NO: 2450815 - RNA, 19 nt, Artificial Sequence
  Description of Artificial Sequence: Synthetic oligonucleotide
  Antisense strand to SEQ ID NO: 2450814
aagccucuagacuuagcca

SEQ ID NO: 2450816 - RNA, 19 nt, Artificial Sequence
  Description of Artificial Sequence: Synthetic oligonucleotide
  Sense strand starting at position 3546 of SEQ ID NO: 1887133
agucuagaggcuugaaaca

SEQ ID NO: 2450817 - RNA, 19 nt, Artificial Sequence
  Description of Artificial Sequence: Synthetic oligonucleotide
  Antisense strand to SEQ ID NO: 2450816
uguuucaagccucuagacu

SEQ ID NO: 2450818 - RNA, 19 nt, Artificial Sequence
  Description of Artificial Sequence: Synthetic oligonucleotide
  Sense strand starting at position 3610 of SEQ ID NO: 1887133
gcaggugcuuuguauaaag

SEQ ID NO: 2450819 - RNA, 19 nt, Artificial Sequence
  Description of Artificial Sequence: Synthetic oligonucleotide
  Antisense strand to SEQ ID NO: 2450818
cuuuauacaaagcaccugc

SEQ ID NO: 2450820 - RNA, 19 nt, Artificial Sequence
  Description of Artificial Sequence: Synthetic oligonucleotide
  Sense strand starting at position 3612 of SEQ ID NO: 1887133
aggugcuuuguauaaagau

SEQ ID NO: 2450821 - RNA, 19 nt, Artificial Sequence
  Description of Artificial Sequence: Synthetic oligonucleotide
  Antisense strand to SEQ ID NO: 2450820
aucuuuauacaaagcaccu

SEQ ID NO: 2450822 - RNA, 19 nt, Artificial Sequence
  Description of Artificial Sequence: Synthetic oligonucleotide
  Sense strand starting at position 3786 of SEQ ID NO: 1887133
gguugcguaugccagaaga

SEQ ID NO: 2450823 - RNA, 19 nt, Artificial Sequence
  Description of Artificial Sequence: Synthetic oligonucleotide
  Antisense strand to SEQ ID NO: 2450822
ucuucuggcauacgcaacc

SEQ ID NO: 2450824 - RNA, 19 nt, Artificial Sequence
  Description of Artificial Sequence: Synthetic oligonucleotide
  Sense strand starting at position 3888 of SEQ ID NO: 1887133
cccagauucccagguagga

SEQ ID NO: 2450825 - RNA, 19 nt, Artificial Sequence
  Description of Artificial Sequence: Synthetic oligonucleotide
  Antisense strand to SEQ ID NO: 2450824
uccuaccugggaaucuggg

SEQ ID NO: 2450826 - RNA, 19 nt, Artificial Sequence
  Description of Artificial Sequence: Synthetic oligonucleotide
  Sense strand starting at position 100 of SEQ ID NO: 1887134
uugguauguguacacacaa

SEQ ID NO: 2450827 - RNA, 19 nt, Artificial Sequence
  Description of Artificial Sequence: Synthetic oligonucleotide
  Antisense strand to SEQ ID NO: 2450826
uuguguguacacauaccaa

SEQ ID NO: 2450828 - RNA, 19 nt, Artificial Sequence
  Description of Artificial Sequence: Synthetic oligonucleotide
  Sense strand starting at position 125 of SEQ ID NO: 1887134
agaagaguuggagggcuaa

SEQ ID NO: 2450829 - RNA, 19 nt, Artificial Sequence
  Description of Artificial Sequence: Synthetic oligonucleotide
  Antisense strand to SEQ ID NO: 2450828
uuagcccuccaacucuucu

SEQ ID NO: 2450830 - RNA, 19 nt, Artificial Sequence
  Description of Artificial Sequence: Synthetic oligonucleotide
  Sense strand starting at position 591 of SEQ ID NO: 1887134
uugccucagccucaguaau

SEQ ID NO: 2450831 - RNA, 19 nt, Artificial Sequence
  Description of Artificial Sequence: Synthetic oligonucleotide
  Antisense strand to SEQ ID NO: 2450830
auuacugaggcugaggcaa

SEQ ID NO: 2450832 - RNA, 19 nt, Artificial Sequence
  Description of Artificial Sequence: Synthetic oligonucleotide
  Sense strand starting at position 593 of SEQ ID NO: 1887134
gccucagccucaguaauag

SEQ ID NO: 2450833 - RNA, 19 nt, Artificial Sequence
  Description of Artificial Sequence: Synthetic oligonucleotide
  Antisense strand to SEQ ID NO: 2450832
cuauuacugaggcugaggc

SEQ ID NO: 2450834 - RNA, 19 nt, Artificial Sequence
  Description of Artificial Sequence: Synthetic oligonucleotide
  Sense strand starting at position 601 of SEQ ID NO: 1887134
cucaguaauagcugggauu

SEQ ID NO: 2450835 - RNA, 19 nt, Artificial Sequence
  Description of Artificial Sequence: Synthetic oligonucleotide
  Antisense strand to SEQ ID NO: 2450834
aaucccagcuauuacugag

SEQ ID NO: 2450836 - RNA, 19 nt, Artificial Sequence
  Description of Artificial Sequence: Synthetic oligonucleotide
  Sense strand starting at position 602 of SEQ ID NO: 1887134
ucaguaauagcugggauua

SEQ ID NO: 2450837 - RNA, 19 nt, Artificial Sequence
  Description of Artificial Sequence: Synthetic oligonucleotide
  Antisense strand to SEQ ID NO: 2450836
uaaucccagcuauuacuga

SEQ ID NO: 2450838 - RNA, 19 nt, Artificial Sequence
  Description of Artificial Sequence: Synthetic oligonucleotide
  Sense strand starting at position 603 of SEQ ID NO: 1887134
caguaauagcugggauuac

SEQ ID NO: 2450839 - RNA, 19 nt, Artificial Sequence
  Description of Artificial Sequence: Synthetic oligonucleotide
  Antisense strand to SEQ ID NO: 2450838
guaaucccagcuauuacug

SEQ ID NO: 2450840 - RNA, 19 nt, Artificial Sequence
  Description of Artificial Sequence: Synthetic oligonucleotide
  Sense strand starting at position 1086 of SEQ ID NO: 1887134
agugcucaucuuuggcuua

SEQ ID NO: 2450841 - RNA, 19 nt, Artificial Sequence
  Description of Artificial Sequence: Synthetic oligonucleotide
  Antisense strand to SEQ ID NO: 2450840
uaagccaaagaugagcacu

SEQ ID NO: 2450842 - RNA, 19 nt, Artificial Sequence
  Description of Artificial Sequence: Synthetic oligonucleotide
  Sense strand starting at position 1091 of SEQ ID NO: 1887134
ucaucuuuggcuuauguaa

SEQ ID NO: 2450843 - RNA, 19 nt, Artificial Sequence
  Description of Artificial Sequence: Synthetic oligonucleotide
  Antisense strand to SEQ ID NO: 2450842
uuacauaagccaaagauga

SEQ ID NO: 2450844 - RNA, 19 nt, Artificial Sequence
  Description of Artificial Sequence: Synthetic oligonucleotide
  Sense strand starting at position 1099 of SEQ ID NO: 1887134
ggcuuauguaauggaggca

SEQ ID NO: 2450845 - RNA, 19 nt, Artificial Sequence
  Description of Artificial Sequence: Synthetic oligonucleotide
  Antisense strand to SEQ ID NO: 2450844
ugccuccauuacauaagcc

SEQ ID NO: 2450846 - RNA, 19 nt, Artificial Sequence
  Description of Artificial Sequence: Synthetic oligonucleotide
  Sense strand starting at position 1100 of SEQ ID NO: 1887134
gcuuauguaauggaggcau

SEQ ID NO: 2450847 - RNA, 19 nt, Artificial Sequence
  Description of Artificial Sequence: Synthetic oligonucleotide
  Antisense strand to SEQ ID NO: 2450846
augccuccauuacauaagc

SEQ ID NO: 2450848 - RNA, 19 nt, Artificial Sequence
  Description of Artificial Sequence: Synthetic oligonucleotide
  Sense strand starting at position 1102 of SEQ ID NO: 1887134
uuauguaauggaggcauca

SEQ ID NO: 2450849 - RNA, 19 nt, Artificial Sequence
  Description of Artificial Sequence: Synthetic oligonucleotide
  Antisense strand to SEQ ID NO: 2450848
ugaugccuccauuacauaa

SEQ ID NO: 2450850 - RNA, 19 nt, Artificial Sequence
  Description of Artificial Sequence: Synthetic oligonucleotide
  Sense strand starting at position 1246 of SEQ ID NO: 1887134
auauacaagucauagaaug

SEQ ID NO: 2450851 - RNA, 19 nt, Artificial Sequence
  Description of Artificial Sequence: Synthetic oligonucleotide
  Antisense strand to SEQ ID NO: 2450850
cauucuaugacuuguauau

SEQ ID NO: 2450852 - RNA, 19 nt, Artificial Sequence
  Description of Artificial Sequence: Synthetic oligonucleotide
  Sense strand starting at position 1254 of SEQ ID NO: 1887134
gucauagaaugguugcuua

SEQ ID NO: 2450853 - RNA, 19 nt, Artificial Sequence
  Description of Artificial Sequence: Synthetic oligonucleotide
  Antisense strand to SEQ ID NO: 2450852
uaagcaaccauucuaugac

SEQ ID NO: 2450854 - RNA, 19 nt, Artificial Sequence
  Description of Artificial Sequence: Synthetic oligonucleotide
  Sense strand starting at position 1257 of SEQ ID NO: 1887134
auagaaugguugcuuauau

SEQ ID NO: 2450855 - RNA, 19 nt, Artificial Sequence
  Description of Artificial Sequence: Synthetic oligonucleotide
  Antisense strand to SEQ ID NO: 2450854
auauaagcaaccauucuau

SEQ ID NO: 2450856 - RNA, 19 nt, Artificial Sequence
  Description of Artificial Sequence: Synthetic oligonucleotide
  Sense strand starting at position 1258 of SEQ ID NO: 1887134
uagaaugguugcuuauauu

SEQ ID NO: 2450857 - RNA, 19 nt, Artificial Sequence
  Description of Artificial Sequence: Synthetic oligonucleotide
  Antisense strand to SEQ ID NO: 2450856
aauauaagcaaccauucua

SEQ ID NO: 2450858 - RNA, 19 nt, Artificial Sequence
  Description of Artificial Sequence: Synthetic oligonucleotide
  Sense strand starting at position 1264 of SEQ ID NO: 1887134
gguugcuuauauucuuaua

SEQ ID NO: 2450859 - RNA, 19 nt, Artificial Sequence
  Description of Artificial Sequence: Synthetic oligonucleotide
  Antisense strand to SEQ ID NO: 2450858
uauaagaauauaagcaacc

SEQ ID NO: 2450860 - RNA, 19 nt, Artificial Sequence
  Description of Artificial Sequence: Synthetic oligonucleotide
  Sense strand starting at position 1686 of SEQ ID NO: 1887134
uggugugucauguggccaa

SEQ ID NO: 2450861 - RNA, 19 nt, Artificial Sequence
  Description of Artificial Sequence: Synthetic oligonucleotide
  Antisense strand to SEQ ID NO: 2450860
uuggccacaugacacacca

SEQ ID NO: 2450862 - RNA, 19 nt, Artificial Sequence
  Description of Artificial Sequence: Synthetic oligonucleotide
  Sense strand starting at position 1690 of SEQ ID NO: 1887134
gugucauguggccaagcca

SEQ ID NO: 2450863 - RNA, 19 nt, Artificial Sequence
  Description of Artificial Sequence: Synthetic oligonucleotide
  Antisense strand to SEQ ID NO: 2450862
uggcuuggccacaugacac

SEQ ID NO: 2450864 - RNA, 19 nt, Artificial Sequence
  Description of Artificial Sequence: Synthetic oligonucleotide
  Sense strand starting at position 1705 of SEQ ID NO: 1887134
gccagaaucccuuaccuug

SEQ ID NO: 2450865 - RNA, 19 nt, Artificial Sequence
  Description of Artificial Sequence: Synthetic oligonucleotide
  Antisense strand to SEQ ID NO: 2450864
caagguaagggauucuggc

SEQ ID NO: 2450866 - RNA, 19 nt, Artificial Sequence
  Description of Artificial Sequence: Synthetic oligonucleotide
  Sense strand starting at position 1750 of SEQ ID NO: 1887134
gggagaugcgaaugacauc

SEQ ID NO: 2450867 - RNA, 19 nt, Artificial Sequence
  Description of Artificial Sequence: Synthetic oligonucleotide
  Antisense strand to SEQ ID NO: 2450866
gaugucauucgcaucuccc

SEQ ID NO: 2450868 - RNA, 19 nt, Artificial Sequence
  Description of Artificial Sequence: Synthetic oligonucleotide
  Sense strand starting at position 1884 of SEQ ID NO: 1887134
gucaucaggcugcgaaauu

SEQ ID NO: 2450869 - RNA, 19 nt, Artificial Sequence
  Description of Artificial Sequence: Synthetic oligonucleotide
  Antisense strand to SEQ ID NO: 2450868
aauuucgcagccugaugac

SEQ ID NO: 2450870 - RNA, 19 nt, Artificial Sequence
  Description of Artificial Sequence: Synthetic oligonucleotide
  Sense strand starting at position 1933 of SEQ ID NO: 1887134
agagcaguuucugcacaga

SEQ ID NO: 2450871 - RNA, 19 nt, Artificial Sequence
  Description of Artificial Sequence: Synthetic oligonucleotide
  Antisense strand to SEQ ID NO: 2450870
ucugugcagaaacugcucu

SEQ ID NO: 2450872 - RNA, 19 nt, Artificial Sequence
  Description of Artificial Sequence: Synthetic oligonucleotide
  Sense strand starting at position 1936 of SEQ ID NO: 1887134
gcaguuucugcacagacaa

SEQ ID NO: 2450873 - RNA, 19 nt, Artificial Sequence
  Description of Artificial Sequence: Synthetic oligonucleotide
  Antisense strand to SEQ ID NO: 2450872
uugucugugcagaaacugc

SEQ ID NO: 2450874 - RNA, 19 nt, Artificial Sequence
  Description of Artificial Sequence: Synthetic oligonucleotide
  Sense strand starting at position 2405 of SEQ ID NO: 1887134
cuuggugacuccuuuacuu

SEQ ID NO: 2450875 - RNA, 19 nt, Artificial Sequence
  Description of Artificial Sequence: Synthetic oligonucleotide
  Antisense strand to SEQ ID NO: 2450874
aaguaaaggagucaccaag

SEQ ID NO: 2450876 - RNA, 19 nt, Artificial Sequence
  Description of Artificial Sequence: Synthetic oligonucleotide
  Sense strand starting at position 2469 of SEQ ID NO: 1887134
acaagaaguaggugcuuaa

SEQ ID NO: 2450877 - RNA, 19 nt, Artificial Sequence
  Description of Artificial Sequence: Synthetic oligonucleotide
  Antisense strand to SEQ ID NO: 2450876
uuaagcaccuacuucuugu

SEQ ID NO: 2450878 - RNA, 19 nt, Artificial Sequence
  Description of Artificial Sequence: Synthetic oligonucleotide
  Sense strand starting at position 2472 of SEQ ID NO: 1887134
agaaguaggugcuuaauaa

SEQ ID NO: 2450879 - RNA, 19 nt, Artificial Sequence
  Description of Artificial Sequence: Synthetic oligonucleotide
  Antisense strand to SEQ ID NO: 2450878
uuauuaagcaccuacuucu

SEQ ID NO: 2450880 - RNA, 19 nt, Artificial Sequence
  Description of Artificial Sequence: Synthetic oligonucleotide
  Sense strand starting at position 2837 of SEQ ID NO: 1887134
guuaauuugucuucuuguu

SEQ ID NO: 2450881 - RNA, 19 nt, Artificial Sequence
  Description of Artificial Sequence: Synthetic oligonucleotide
  Antisense strand to SEQ ID NO: 2450880
aacaagaagacaaauuaac

SEQ ID NO: 2450882 - RNA, 19 nt, Artificial Sequence
  Description of Artificial Sequence: Synthetic oligonucleotide
  Sense strand starting at position 3022 of SEQ ID NO: 1887134
gagaaugaaucuguccaca

SEQ ID NO: 2450883 - RNA, 19 nt, Artificial Sequence
  Description of Artificial Sequence: Synthetic oligonucleotide
  Antisense strand to SEQ ID NO: 2450882
uguggacagauucauucuc

SEQ ID NO: 2450884 - RNA, 19 nt, Artificial Sequence
  Description of Artificial Sequence: Synthetic oligonucleotide
  Sense strand starting at position 3025 of SEQ ID NO: 1887134
aaugaaucuguccacacga

SEQ ID NO: 2450885 - RNA, 19 nt, Artificial Sequence
  Description of Artificial Sequence: Synthetic oligonucleotide
  Antisense strand to SEQ ID NO: 2450884
ucguguggacagauucauu

SEQ ID NO: 2450886 - RNA, 19 nt, Artificial Sequence
  Description of Artificial Sequence: Synthetic oligonucleotide
  Sense strand starting at position 3047 of SEQ ID NO: 1887134
cauauauaagaggguuuau

SEQ ID NO: 2450887 - RNA, 19 nt, Artificial Sequence
  Description of Artificial Sequence: Synthetic oligonucleotide
  Antisense strand to SEQ ID NO: 2450886
auaaacccucuuauauaug

SEQ ID NO: 2450888 - RNA, 19 nt, Artificial Sequence
  Description of Artificial Sequence: Synthetic oligonucleotide
  Sense strand starting at position 3487 of SEQ ID NO: 1887134
aggaauaucauauggcaug

SEQ ID NO: 2450889 - RNA, 19 nt, Artificial Sequence
  Description of Artificial Sequence: Synthetic oligonucleotide
  Antisense strand to SEQ ID NO: 2450888
caugccauaugauauuccu

SEQ ID NO: 2450890 - RNA, 19 nt, Artificial Sequence
  Description of Artificial Sequence: Synthetic oligonucleotide
  Sense strand starting at position 3529 of SEQ ID NO: 1887134
augcuauagcauggauuga

SEQ ID NO: 2450891 - RNA, 19 nt, Artificial Sequence
  Description of Artificial Sequence: Synthetic oligonucleotide
  Antisense strand to SEQ ID NO: 2450890
ucaauccaugcuauagcau

SEQ ID NO: 2450892 - RNA, 19 nt, Artificial Sequence
  Description of Artificial Sequence: Synthetic oligonucleotide
  Sense strand starting at position 3530 of SEQ ID NO: 1887134
ugcuauagcauggauugau

SEQ ID NO: 2450893 - RNA, 19 nt, Artificial Sequence
  Description of Artificial Sequence: Synthetic oligonucleotide
  Antisense strand to SEQ ID NO: 2450892
aucaauccaugcuauagca

SEQ ID NO: 2450894 - RNA, 19 nt, Artificial Sequence
  Description of Artificial Sequence: Synthetic oligonucleotide
  Sense strand starting at position 3548 of SEQ ID NO: 1887134
ucuugaaagcaucacgcua

SEQ ID NO: 2450895 - RNA, 19 nt, Artificial Sequence
  Description of Artificial Sequence: Synthetic oligonucleotide
  Antisense strand to SEQ ID NO: 2450894
uagcgugaugcuuucaaga

SEQ ID NO: 2450896 - RNA, 19 nt, Artificial Sequence
  Description of Artificial Sequence: Synthetic oligonucleotide
  Sense strand starting at position 3553 of SEQ ID NO: 1887134
aaagcaucacgcuaaguga

SEQ ID NO: 2450897 - RNA, 19 nt, Artificial Sequence
  Description of Artificial Sequence: Synthetic oligonucleotide
  Antisense strand to SEQ ID NO: 2450896
ucacuuagcgugaugcuuu

SEQ ID NO: 2450898 - RNA, 19 nt, Artificial Sequence
  Description of Artificial Sequence: Synthetic oligonucleotide
  Sense strand starting at position 3588 of SEQ ID NO: 1887134
aaggccauguauuauaaga

SEQ ID NO: 2450899 - RNA, 19 nt, Artificial Sequence
  Description of Artificial Sequence: Synthetic oligonucleotide
  Antisense strand to SEQ ID NO: 2450898
ucuuauaauacauggccuu

SEQ ID NO: 2450900 - RNA, 19 nt, Artificial Sequence
  Description of Artificial Sequence: Synthetic oligonucleotide
  Sense strand starting at position 3685 of SEQ ID NO: 1887134
accaucuugcucugaugau

SEQ ID NO: 2450901 - RNA, 19 nt, Artificial Sequence
  Description of Artificial Sequence: Synthetic oligonucleotide
  Antisense strand to SEQ ID NO: 2450900
aucaucagagcaagauggu

SEQ ID NO: 2450902 - RNA, 19 nt, Artificial Sequence
  Description of Artificial Sequence: Synthetic oligonucleotide
  Sense strand starting at position 3689 of SEQ ID NO: 1887134
ucuugcucugaugaucuaa

SEQ ID NO: 2450903 - RNA, 19 nt, Artificial Sequence
  Description of Artificial Sequence: Synthetic oligonucleotide
  Antisense strand to SEQ ID NO: 2450902
uuagaucaucagagcaaga

SEQ ID NO: 2450904 - RNA, 19 nt, Artificial Sequence
  Description of Artificial Sequence: Synthetic oligonucleotide
  Sense strand starting at position 3752 of SEQ ID NO: 1887134
guggguaaugcccguaauc

SEQ ID NO: 2450905 - RNA, 19 nt, Artificial Sequence
  Description of Artificial Sequence: Synthetic oligonucleotide
  Antisense strand to SEQ ID NO: 2450904
gauuacgggcauuacccac

SEQ ID NO: 2450906 - RNA, 19 nt, Artificial Sequence
  Description of Artificial Sequence: Synthetic oligonucleotide
  Sense strand starting at position 333 of SEQ ID NO: 1887135
gcaucucgaguugaacagu

SEQ ID NO: 2450907 - RNA, 19 nt, Artificial Sequence
  Description of Artificial Sequence: Synthetic oligonucleotide
  Antisense strand to SEQ ID NO: 2450906
acuguucaacucgagaugc

SEQ ID NO: 2450908 - RNA, 19 nt, Artificial Sequence
  Description of Artificial Sequence: Synthetic oligonucleotide
  Sense strand starting at position 1096 of SEQ ID NO: 1887135
gggugaguccauggacaca

SEQ ID NO: 2450909 - RNA, 19 nt, Artificial Sequence
  Description of Artificial Sequence: Synthetic oligonucleotide
  Antisense strand to SEQ ID NO: 2450908
uguguccauggacucaccc

SEQ ID NO: 2450910 - RNA, 19 nt, Artificial Sequence
  Description of Artificial Sequence: Synthetic oligonucleotide
  Sense strand starting at position 1186 of SEQ ID NO: 1887135
gccguauucugccuagcuu

SEQ ID NO: 2450911 - RNA, 19 nt, Artificial Sequence
  Description of Artificial Sequence: Synthetic oligonucleotide
  Antisense strand to SEQ ID NO: 2450910
aagcuaggcagaauacggc

SEQ ID NO: 2450912 - RNA, 19 nt, Artificial Sequence
  Description of Artificial Sequence: Synthetic oligonucleotide
  Sense strand starting at position 1203 of SEQ ID NO: 1887135
uugcaauggagugaagagu

SEQ ID NO: 2450913 - RNA, 19 nt, Artificial Sequence
  Description of Artificial Sequence: Synthetic oligonucleotide
  Antisense strand to SEQ ID NO: 2450912
acucuucacuccauugcaa

SEQ ID NO: 2450914 - RNA, 19 nt, Artificial Sequence
  Description of Artificial Sequence: Synthetic oligonucleotide
  Sense strand starting at position 1328 of SEQ ID NO: 1887135
agaguuggcccagaaucua

SEQ ID NO: 2450915 - RNA, 19 nt, Artificial Sequence
  Description of Artificial Sequence: Synthetic oligonucleotide
  Antisense strand to SEQ ID NO: 2450914
uagauucugggccaacucu

SEQ ID NO: 2450916 - RNA, 19 nt, Artificial Sequence
  Description of Artificial Sequence: Synthetic oligonucleotide
  Sense strand starting at position 1422 of SEQ ID NO: 1887135
agucgcuuaccuggagaca

SEQ ID NO: 2450917 - RNA, 19 nt, Artificial Sequence
  Description of Artificial Sequence: Synthetic oligonucleotide
  Antisense strand to SEQ ID NO: 2450916
ugucuccagguaagcgacu

SEQ ID NO: 2450918 - RNA, 19 nt, Artificial Sequence
  Description of Artificial Sequence: Synthetic oligonucleotide
  Sense strand starting at position 1902 of SEQ ID NO: 1887135
gguccuccaucaugaugau

SEQ ID NO: 2450919 - RNA, 19 nt, Artificial Sequence
  Description of Artificial Sequence: Synthetic oligonucleotide
  Antisense strand to SEQ ID NO: 2450918
aucaucaugauggaggacc

SEQ ID NO: 2450920 - RNA, 19 nt, Artificial Sequence
  Description of Artificial Sequence: Synthetic oligonucleotide
  Sense strand starting at position 1908 of SEQ ID NO: 1887135
ccaucaugaugaugucuga

SEQ ID NO: 2450921 - RNA, 19 nt, Artificial Sequence
  Description of Artificial Sequence: Synthetic oligonucleotide
  Antisense strand to SEQ ID NO: 2450920
ucagacaucaucaugaugg

SEQ ID NO: 2450922 - RNA, 19 nt, Artificial Sequence
  Description of Artificial Sequence: Synthetic oligonucleotide
  Sense strand starting at position 1911 of SEQ ID NO: 1887135
ucaugaugaugucugagga

SEQ ID NO: 2450923 - RNA, 19 nt, Artificial Sequence
  Description of Artificial Sequence: Synthetic oligonucleotide
  Antisense strand to SEQ ID NO: 2450922
uccucagacaucaucauga

SEQ ID NO: 2450924 - RNA, 19 nt, Artificial Sequence
  Description of Artificial Sequence: Synthetic oligonucleotide
  Sense strand starting at position 1921 of SEQ ID NO: 1887135
gucugaggagagugagaua

SEQ ID NO: 2450925 - RNA, 19 nt, Artificial Sequence
  Description of Artificial Sequence: Synthetic oligonucleotide
  Antisense strand to SEQ ID NO: 2450924
uaucucacucuccucagac

SEQ ID NO: 2450926 - RNA, 19 nt, Artificial Sequence
  Description of Artificial Sequence: Synthetic oligonucleotide
  Sense strand starting at position 1990 of SEQ ID NO: 1887135
cucccugucugauagccua

SEQ ID NO: 2450927 - RNA, 19 nt, Artificial Sequence
  Description of Artificial Sequence: Synthetic oligonucleotide
  Antisense strand to SEQ ID NO: 2450926
uaggcuaucagacagggag

SEQ ID NO: 2450928 - RNA, 19 nt, Artificial Sequence
  Description of Artificial Sequence: Synthetic oligonucleotide
  Sense strand starting at position 2190 of SEQ ID NO: 1887135
cgucacaacucucauugga

SEQ ID NO: 2450929 - RNA, 19 nt, Artificial Sequence
  Description of Artificial Sequence: Synthetic oligonucleotide
  Antisense strand to SEQ ID NO: 2450928
uccaaugagaguugugacg

SEQ ID NO: 2450930 - RNA, 19 nt, Artificial Sequence
  Description of Artificial Sequence: Synthetic oligonucleotide
  Sense strand starting at position 2826 of SEQ ID NO: 1887135
gggagcucuagcugggaga

SEQ ID NO: 2450931 - RNA, 19 nt, Artificial Sequence
  Description of Artificial Sequence: Synthetic oligonucleotide
  Antisense strand to SEQ ID NO: 2450930
ucucccagcuagagcuccc

SEQ ID NO: 2450932 - RNA, 19 nt, Artificial Sequence
  Description of Artificial Sequence: Synthetic oligonucleotide
  Sense strand starting at position 3059 of SEQ ID NO: 1887135
cggcggaucugugcagaga

SEQ ID NO: 2450933 - RNA, 19 nt, Artificial Sequence
  Description of Artificial Sequence: Synthetic oligonucleotide
  Antisense strand to SEQ ID NO: 2450932
ucucugcacagauccgccg

SEQ ID NO: 2450934 - RNA, 19 nt, Artificial Sequence
  Description of Artificial Sequence: Synthetic oligonucleotide
  Sense strand starting at position 3061 of SEQ ID NO: 1887135
gcggaucugugcagagaga

SEQ ID NO: 2450935 - RNA, 19 nt, Artificial Sequence
  Description of Artificial Sequence: Synthetic oligonucleotide
  Antisense strand to SEQ ID NO: 2450934
ucucucugcacagauccgc

SEQ ID NO: 2450936 - RNA, 19 nt, Artificial Sequence
  Description of Artificial Sequence: Synthetic oligonucleotide
  Sense strand starting at position 3062 of SEQ ID NO: 1887135
cggaucugugcagagagau

SEQ ID NO: 2450937 - RNA, 19 nt, Artificial Sequence
  Description of Artificial Sequence: Synthetic oligonucleotide
  Antisense strand to SEQ ID NO: 2450936
aucucucugcacagauccg

SEQ ID NO: 2450938 - RNA, 19 nt, Artificial Sequence
  Description of Artificial Sequence: Synthetic oligonucleotide
  Sense strand starting at position 3074 of SEQ ID NO: 1887135
gagagauggugccaguuac

SEQ ID NO: 2450939 - RNA, 19 nt, Artificial Sequence
  Description of Artificial Sequence: Synthetic oligonucleotide
  Antisense strand to SEQ ID NO: 2450938
guaacuggcaccaucucuc

SEQ ID NO: 2450940 - RNA, 19 nt, Artificial Sequence
  Description of Artificial Sequence: Synthetic oligonucleotide
  Sense strand starting at position 3512 of SEQ ID NO: 1887135
gcaggccuuaccugaggau

SEQ ID NO: 2450941 - RNA, 19 nt, Artificial Sequence
  Description of Artificial Sequence: Synthetic oligonucleotide
  Antisense strand to SEQ ID NO: 2450940
auccucagguaaggccugc

SEQ ID NO: 2450942 - RNA, 19 nt, Artificial Sequence
  Description of Artificial Sequence: Synthetic oligonucleotide
  Sense strand starting at position 3539 of SEQ ID NO: 1887135
ggcaguugaucugcuggua

SEQ ID NO: 2450943 - RNA, 19 nt, Artificial Sequence
  Description of Artificial Sequence: Synthetic oligonucleotide
  Antisense strand to SEQ ID NO: 2450942
uaccagcagaucaacugcc

SEQ ID NO: 2450944 - RNA, 19 nt, Artificial Sequence
  Description of Artificial Sequence: Synthetic oligonucleotide
  Sense strand starting at position 3542 of SEQ ID NO: 1887135
aguugaucugcugguagga

SEQ ID NO: 2450945 - RNA, 19 nt, Artificial Sequence
  Description of Artificial Sequence: Synthetic oligonucleotide
  Antisense strand to SEQ ID NO: 2450944
uccuaccagcagaucaacu

SEQ ID NO: 2450946 - RNA, 19 nt, Artificial Sequence
  Description of Artificial Sequence: Synthetic oligonucleotide
  Sense strand starting at position 3897 of SEQ ID NO: 1887135
agaugcacauccuuacaga

SEQ ID NO: 2450947 - RNA, 19 nt, Artificial Sequence
  Description of Artificial Sequence: Synthetic oligonucleotide
  Antisense strand to SEQ ID NO: 2450946
ucuguaaggaugugcaucu

SEQ ID NO: 2450948 - RNA, 19 nt, Artificial Sequence
  Description of Artificial Sequence: Synthetic oligonucleotide
  Sense strand starting at position 3907 of SEQ ID NO: 1887135
ccuuacagaucugcuggaa

SEQ ID NO: 2450949 - RNA, 19 nt, Artificial Sequence
  Description of Artificial Sequence: Synthetic oligonucleotide
  Antisense strand to SEQ ID NO: 2450948
uuccagcagaucuguaagg

SEQ ID NO: 2450950 - RNA, 19 nt, Artificial Sequence
  Description of Artificial Sequence: Synthetic oligonucleotide
  Sense strand starting at position 3910 of SEQ ID NO: 1887135
uacagaucugcuggaaagu

SEQ ID NO: 2450951 - RNA, 19 nt, Artificial Sequence
  Description of Artificial Sequence: Synthetic oligonucleotide
  Antisense strand to SEQ ID NO: 2450950
acuuuccagcagaucugua

SEQ ID NO: 2450952 - RNA, 19 nt, Artificial Sequence
  Description of Artificial Sequence: Synthetic oligonucleotide
  Sense strand starting at position 3921 of SEQ ID NO: 1887135
uggaaagucaccuguggga

SEQ ID NO: 2450953 - RNA, 19 nt, Artificial Sequence
  Description of Artificial Sequence: Synthetic oligonucleotide
  Antisense strand to SEQ ID NO: 2450952
ucccacaggugacuuucca

SEQ ID NO: 2450954 - RNA, 19 nt, Artificial Sequence
  Description of Artificial Sequence: Synthetic oligonucleotide
  Sense strand starting at position 3923 of SEQ ID NO: 1887135
gaaagucaccugugggaca

SEQ ID NO: 2450955 - RNA, 19 nt, Artificial Sequence
  Description of Artificial Sequence: Synthetic oligonucleotide
  Antisense strand to SEQ ID NO: 2450954
ugucccacaggugacuuuc

SEQ ID NO: 2450956 - RNA, 19 nt, Artificial Sequence
  Description of Artificial Sequence: Synthetic oligonucleotide
  Sense strand starting at position 263 of SEQ ID NO: 1887136
ugaaguguccacugacaga

SEQ ID NO: 2450957 - RNA, 19 nt, Artificial Sequence
  Description of Artificial Sequence: Synthetic oligonucleotide
  Antisense strand to SEQ ID NO: 2450956
ucugucaguggacacuuca

SEQ ID NO: 2450958 - RNA, 19 nt, Artificial Sequence
  Description of Artificial Sequence: Synthetic oligonucleotide
  Sense strand starting at position 283 of SEQ ID NO: 1887136
gagggaucaagauguggua

SEQ ID NO: 2450959 - RNA, 19 nt, Artificial Sequence
  Description of Artificial Sequence: Synthetic oligonucleotide
  Antisense strand to SEQ ID NO: 2450958
uaccacaucuugaucccuc

SEQ ID NO: 2450960 - RNA, 19 nt, Artificial Sequence
  Description of Artificial Sequence: Synthetic oligonucleotide
  Sense strand starting at position 285 of SEQ ID NO: 1887136
gggaucaagaugugguaua

SEQ ID NO: 2450961 - RNA, 19 nt, Artificial Sequence
  Description of Artificial Sequence: Synthetic oligonucleotide
  Antisense strand to SEQ ID NO: 2450960
uauaccacaucuugauccc

SEQ ID NO: 2450962 - RNA, 19 nt, Artificial Sequence
  Description of Artificial Sequence: Synthetic oligonucleotide
  Sense strand starting at position 296 of SEQ ID NO: 1887136
gugguauagccacacaaua

SEQ ID NO: 2450963 - RNA, 19 nt, Artificial Sequence
  Description of Artificial Sequence: Synthetic oligonucleotide
  Antisense strand to SEQ ID NO: 2450962
uauuguguggcuauaccac

SEQ ID NO: 2450964 - RNA, 19 nt, Artificial Sequence
  Description of Artificial Sequence: Synthetic oligonucleotide
  Sense strand starting at position 701 of SEQ ID NO: 1887136
acaccaugcugagugaagu

SEQ ID NO: 2450965 - RNA, 19 nt, Artificial Sequence
  Description of Artificial Sequence: Synthetic oligonucleotide
  Antisense strand to SEQ ID NO: 2450964
acuucacucagcauggugu

SEQ ID NO: 2450966 - RNA, 19 nt, Artificial Sequence
  Description of Artificial Sequence: Synthetic oligonucleotide
  Sense strand starting at position 711 of SEQ ID NO: 1887136
gagugaagucagugaguca

SEQ ID NO: 2450967 - RNA, 19 nt, Artificial Sequence
  Description of Artificial Sequence: Synthetic oligonucleotide
  Antisense strand to SEQ ID NO: 2450966
ugacucacugacuucacuc

SEQ ID NO: 2450968 - RNA, 19 nt, Artificial Sequence
  Description of Artificial Sequence: Synthetic oligonucleotide
  Sense strand starting at position 716 of SEQ ID NO: 1887136
aagucagugagucacgaaa

SEQ ID NO: 2450969 - RNA, 19 nt, Artificial Sequence
  Description of Artificial Sequence: Synthetic oligonucleotide
  Antisense strand to SEQ ID NO: 2450968
uuucgugacucacugacuu

SEQ ID NO: 2450970 - RNA, 19 nt, Artificial Sequence
  Description of Artificial Sequence: Synthetic oligonucleotide
  Sense strand starting at position 999 of SEQ ID NO: 1887136
cagugagacucacucugau

SEQ ID NO: 2450971 - RNA, 19 nt, Artificial Sequence
  Description of Artificial Sequence: Synthetic oligonucleotide
  Antisense strand to SEQ ID NO: 2450970
aucagagugagucucacug

SEQ ID NO: 2450972 - RNA, 19 nt, Artificial Sequence
  Description of Artificial Sequence: Synthetic oligonucleotide
  Sense strand starting at position 1070 of SEQ ID NO: 1887136
guagucaaauuccuagaca

SEQ ID NO: 2450973 - RNA, 19 nt, Artificial Sequence
  Description of Artificial Sequence: Synthetic oligonucleotide
  Antisense strand to SEQ ID NO: 2450972
ugucuaggaauuugacuac

SEQ ID NO: 2450974 - RNA, 19 nt, Artificial Sequence
  Description of Artificial Sequence: Synthetic oligonucleotide
  Sense strand starting at position 1177 of SEQ ID NO: 1887136
gaaaguucuggagaccugu

SEQ ID NO: 2450975 - RNA, 19 nt, Artificial Sequence
  Description of Artificial Sequence: Synthetic oligonucleotide
  Antisense strand to SEQ ID NO: 2450974
acaggucuccagaacuuuc

SEQ ID NO: 2450976 - RNA, 19 nt, Artificial Sequence
  Description of Artificial Sequence: Synthetic oligonucleotide
  Sense strand starting at position 1295 of SEQ ID NO: 1887136
caacuuauugguuggguga

SEQ ID NO: 2450977 - RNA, 19 nt, Artificial Sequence
  Description of Artificial Sequence: Synthetic oligonucleotide
  Antisense strand to SEQ ID NO: 2450976
ucacccaaccaauaaguug

SEQ ID NO: 2450978 - RNA, 19 nt, Artificial Sequence
  Description of Artificial Sequence: Synthetic oligonucleotide
  Sense strand starting at position 1296 of SEQ ID NO: 1887136
aacuuauugguugggugaa

SEQ ID NO: 2450979 - RNA, 19 nt, Artificial Sequence
  Description of Artificial Sequence: Synthetic oligonucleotide
  Antisense strand to SEQ ID NO: 2450978
uucacccaaccaauaaguu

SEQ ID NO: 2450980 - RNA, 19 nt, Artificial Sequence
  Description of Artificial Sequence: Synthetic oligonucleotide
  Sense strand starting at position 1309 of SEQ ID NO: 1887136
ggugaaugaacucaacgua

SEQ ID NO: 2450981 - RNA, 19 nt, Artificial Sequence
  Description of Artificial Sequence: Synthetic oligonucleotide
  Antisense strand to SEQ ID NO: 2450980
uacguugaguucauucacc

SEQ ID NO: 2450982 - RNA, 19 nt, Artificial Sequence
  Description of Artificial Sequence: Synthetic oligonucleotide
  Sense strand starting at position 1370 of SEQ ID NO: 1887136
gcaggaaacuguccuaaga

SEQ ID NO: 2450983 - RNA, 19 nt, Artificial Sequence
  Description of Artificial Sequence: Synthetic oligonucleotide
  Antisense strand to SEQ ID NO: 2450982
ucuuaggacaguuuccugc

SEQ ID NO: 2450984 - RNA, 19 nt, Artificial Sequence
  Description of Artificial Sequence: Synthetic oligonucleotide
  Sense strand starting at position 1470 of SEQ ID NO: 1887136
gggagcuaguugucuagaa

SEQ ID NO: 2450985 - RNA, 19 nt, Artificial Sequence
  Description of Artificial Sequence: Synthetic oligonucleotide
  Antisense strand to SEQ ID NO: 2450984
uucuagacaacuagcuccc

SEQ ID NO: 2450986 - RNA, 19 nt, Artificial Sequence
  Description of Artificial Sequence: Synthetic oligonucleotide
  Sense strand starting at position 1471 of SEQ ID NO: 1887136
ggagcuaguugucuagaac

SEQ ID NO: 2450987 - RNA, 19 nt, Artificial Sequence
  Description of Artificial Sequence: Synthetic oligonucleotide
  Antisense strand to SEQ ID NO: 2450986
guucuagacaacuagcucc

SEQ ID NO: 2450988 - RNA, 19 nt, Artificial Sequence
  Description of Artificial Sequence: Synthetic oligonucleotide
  Sense strand starting at position 1472 of SEQ ID NO: 1887136
gagcuaguugucuagaacu

SEQ ID NO: 2450989 - RNA, 19 nt, Artificial Sequence
  Description of Artificial Sequence: Synthetic oligonucleotide
  Antisense strand to SEQ ID NO: 2450988
aguucuagacaacuagcuc

SEQ ID NO: 2450990 - RNA, 19 nt, Artificial Sequence
  Description of Artificial Sequence: Synthetic oligonucleotide
  Sense strand starting at position 1474 of SEQ ID NO: 1887136
gcuaguugucuagaacuug

SEQ ID NO: 2450991 - RNA, 19 nt, Artificial Sequence
  Description of Artificial Sequence: Synthetic oligonucleotide
  Antisense strand to SEQ ID NO: 2450990
caaguucuagacaacuagc

SEQ ID NO: 2450992 - RNA, 19 nt, Artificial Sequence
  Description of Artificial Sequence: Synthetic oligonucleotide
  Sense strand starting at position 1590 of SEQ ID NO: 1887136
ugcugagucagaugaguga

SEQ ID NO: 2450993 - RNA, 19 nt, Artificial Sequence
  Description of Artificial Sequence: Synthetic oligonucleotide
  Antisense strand to SEQ ID NO: 2450992
ucacucaucugacucagca

SEQ ID NO: 2450994 - RNA, 19 nt, Artificial Sequence
  Description of Artificial Sequence: Synthetic oligonucleotide
  Sense strand starting at position 1621 of SEQ ID NO: 1887136
gaaagugagugagugauca

SEQ ID NO: 2450995 - RNA, 19 nt, Artificial Sequence
  Description of Artificial Sequence: Synthetic oligonucleotide
  Antisense strand to SEQ ID NO: 2450994
ugaucacucacucacuuuc

SEQ ID NO: 2450996 - RNA, 19 nt, Artificial Sequence
  Description of Artificial Sequence: Synthetic oligonucleotide
  Sense strand starting at position 1625 of SEQ ID NO: 1887136
gugagugagugaucaagua

SEQ ID NO: 2450997 - RNA, 19 nt, Artificial Sequence
  Description of Artificial Sequence: Synthetic oligonucleotide
  Antisense strand to SEQ ID NO: 2450996
uacuugaucacucacucac

SEQ ID NO: 2450998 - RNA, 19 nt, Artificial Sequence
  Description of Artificial Sequence: Synthetic oligonucleotide
  Sense strand starting at position 1637 of SEQ ID NO: 1887136
ucaaguagcguguuugcga

SEQ ID NO: 2450999 - RNA, 19 nt, Artificial Sequence
  Description of Artificial Sequence: Synthetic oligonucleotide
  Antisense strand to SEQ ID NO: 2450998
ucgcaaacacgcuacuuga

SEQ ID NO: 2451000 - RNA, 19 nt, Artificial Sequence
  Description of Artificial Sequence: Synthetic oligonucleotide
  Sense strand starting at position 1644 of SEQ ID NO: 1887136
gcguguuugcgaaggucag

SEQ ID NO: 2451001 - RNA, 19 nt, Artificial Sequence
  Description of Artificial Sequence: Synthetic oligonucleotide
  Antisense strand to SEQ ID NO: 2451000
cugaccuucgcaaacacgc

SEQ ID NO: 2451002 - RNA, 19 nt, Artificial Sequence
  Description of Artificial Sequence: Synthetic oligonucleotide
  Sense strand starting at position 1689 of SEQ ID NO: 1887136
ugugcugacuucucacaac

SEQ ID NO: 2451003 - RNA, 19 nt, Artificial Sequence
  Description of Artificial Sequence: Synthetic oligonucleotide
  Antisense strand to SEQ ID NO: 2451002
guugugagaagucagcaca

SEQ ID NO: 2451004 - RNA, 19 nt, Artificial Sequence
  Description of Artificial Sequence: Synthetic oligonucleotide
  Sense strand starting at position 1741 of SEQ ID NO: 1887136
accgaccucucauuguaga

SEQ ID NO: 2451005 - RNA, 19 nt, Artificial Sequence
  Description of Artificial Sequence: Synthetic oligonucleotide
  Antisense strand to SEQ ID NO: 2451004
ucuacaaugagaggucggu

SEQ ID NO: 2451006 - RNA, 19 nt, Artificial Sequence
  Description of Artificial Sequence: Synthetic oligonucleotide
  Sense strand starting at position 1742 of SEQ ID NO: 1887136
ccgaccucucauuguagaa

SEQ ID NO: 2451007 - RNA, 19 nt, Artificial Sequence
  Description of Artificial Sequence: Synthetic oligonucleotide
  Antisense strand to SEQ ID NO: 2451006
uucuacaaugagaggucgg

SEQ ID NO: 2451008 - RNA, 19 nt, Artificial Sequence
  Description of Artificial Sequence: Synthetic oligonucleotide
  Sense strand starting at position 1766 of SEQ ID NO: 1887136
ggguguucucacuaaacag

SEQ ID NO: 2451009 - RNA, 19 nt, Artificial Sequence
  Description of Artificial Sequence: Synthetic oligonucleotide
  Antisense strand to SEQ ID NO: 2451008
cuguuuagugagaacaccc

SEQ ID NO: 2451010 - RNA, 19 nt, Artificial Sequence
  Description of Artificial Sequence: Synthetic oligonucleotide
  Sense strand starting at position 1892 of SEQ ID NO: 1887136
auaccuucccuuugauguu

SEQ ID NO: 2451011 - RNA, 19 nt, Artificial Sequence
  Description of Artificial Sequence: Synthetic oligonucleotide
  Antisense strand to SEQ ID NO: 2451010
aacaucaaagggaagguau

SEQ ID NO: 2451012 - RNA, 19 nt, Artificial Sequence
  Description of Artificial Sequence: Synthetic oligonucleotide
  Sense strand starting at position 2129 of SEQ ID NO: 1887136
acaugagcuccuggauuaa

SEQ ID NO: 2451013 - RNA, 19 nt, Artificial Sequence
  Description of Artificial Sequence: Synthetic oligonucleotide
  Antisense strand to SEQ ID NO: 2451012
uuaauccaggagcucaugu

SEQ ID NO: 2451014 - RNA, 19 nt, Artificial Sequence
  Description of Artificial Sequence: Synthetic oligonucleotide
  Sense strand starting at position 2151 of SEQ ID NO: 1887136
ucuucuugcccuuacgaaa

SEQ ID NO: 2451015 - RNA, 19 nt, Artificial Sequence
  Description of Artificial Sequence: Synthetic oligonucleotide
  Antisense strand to SEQ ID NO: 2451014
uuucguaagggcaagaaga

SEQ ID NO: 2451016 - RNA, 19 nt, Artificial Sequence
  Description of Artificial Sequence: Synthetic oligonucleotide
  Sense strand starting at position 2452 of SEQ ID NO: 1887136
cuucaucuccgaggaguug

SEQ ID NO: 2451017 - RNA, 19 nt, Artificial Sequence
  Description of Artificial Sequence: Synthetic oligonucleotide
  Antisense strand to SEQ ID NO: 2451016
caacuccucggagaugaag

SEQ ID NO: 2451018 - RNA, 19 nt, Artificial Sequence
  Description of Artificial Sequence: Synthetic oligonucleotide
  Sense strand starting at position 2787 of SEQ ID NO: 1887136
ccuaguggucaaugugaac

SEQ ID NO: 2451019 - RNA, 19 nt, Artificial Sequence
  Description of Artificial Sequence: Synthetic oligonucleotide
  Antisense strand to SEQ ID NO: 2451018
guucacauugaccacuagg

SEQ ID NO: 2451020 - RNA, 19 nt, Artificial Sequence
  Description of Artificial Sequence: Synthetic oligonucleotide
  Sense strand starting at position 3359 of SEQ ID NO: 1887136
ggaagcuuccauuggucau

SEQ ID NO: 2451021 - RNA, 19 nt, Artificial Sequence
  Description of Artificial Sequence: Synthetic oligonucleotide
  Antisense strand to SEQ ID NO: 2451020
augaccaauggaagcuucc

SEQ ID NO: 2451022 - RNA, 19 nt, Artificial Sequence
  Description of Artificial Sequence: Synthetic oligonucleotide
  Sense strand starting at position 3623 of SEQ ID NO: 1887136
auagcuagagucugaguua

SEQ ID NO: 2451023 - RNA, 19 nt, Artificial Sequence
  Description of Artificial Sequence: Synthetic oligonucleotide
  Antisense strand to SEQ ID NO: 2451022
uaacucagacucuagcuau

SEQ ID NO: 2451024 - RNA, 19 nt, Artificial Sequence
  Description of Artificial Sequence: Synthetic oligonucleotide
  Sense strand starting at position 3626 of SEQ ID NO: 1887136
gcuagagucugaguuacug

SEQ ID NO: 2451025 - RNA, 19 nt, Artificial Sequence
  Description of Artificial Sequence: Synthetic oligonucleotide
  Antisense strand to SEQ ID NO: 2451024
caguaacucagacucuagc

SEQ ID NO: 2451026 - RNA, 19 nt, Artificial Sequence
  Description of Artificial Sequence: Synthetic oligonucleotide
  Sense strand starting at position 3630 of SEQ ID NO: 1887136
gagucugaguuacugguua

SEQ ID NO: 2451027 - RNA, 19 nt, Artificial Sequence
  Description of Artificial Sequence: Synthetic oligonucleotide
  Antisense strand to SEQ ID NO: 2451026
uaaccaguaacucagacuc

SEQ ID NO: 2451028 - RNA, 19 nt, Artificial Sequence
  Description of Artificial Sequence: Synthetic oligonucleotide
  Sense strand starting at position 3632 of SEQ ID NO: 1887136
gucugaguuacugguuaaa

SEQ ID NO: 2451029 - RNA, 19 nt, Artificial Sequence
  Description of Artificial Sequence: Synthetic oligonucleotide
  Antisense strand to SEQ ID NO: 2451028
uuuaaccaguaacucagac

SEQ ID NO: 2451030 - RNA, 19 nt, Artificial Sequence
  Description of Artificial Sequence: Synthetic oligonucleotide
  Sense strand starting at position 3634 of SEQ ID NO: 1887136
cugaguuacugguuaaacu

SEQ ID NO: 2451031 - RNA, 19 nt, Artificial Sequence
  Description of Artificial Sequence: Synthetic oligonucleotide
  Antisense strand to SEQ ID NO: 2451030
aguuuaaccaguaacucag

SEQ ID NO: 2451032 - RNA, 19 nt, Artificial Sequence
  Description of Artificial Sequence: Synthetic oligonucleotide
  Sense strand starting at position 3635 of SEQ ID NO: 1887136
ugaguuacugguuaaacuu

SEQ ID NO: 2451033 - RNA, 19 nt, Artificial Sequence
  Description of Artificial Sequence: Synthetic oligonucleotide
  Antisense strand to SEQ ID NO: 2451032
aaguuuaaccaguaacuca

SEQ ID NO: 2451034 - RNA, 19 nt, Artificial Sequence
  Description of Artificial Sequence: Synthetic oligonucleotide
  Sense strand starting at position 3658 of SEQ ID NO: 1887136
ugagacacauugcuauaga

SEQ ID NO: 2451035 - RNA, 19 nt, Artificial Sequence
  Description of Artificial Sequence: Synthetic oligonucleotide
  Antisense strand to SEQ ID NO: 2451034
ucuauagcaaugugucuca

SEQ ID NO: 2451036 - RNA, 19 nt, Artificial Sequence
  Description of Artificial Sequence: Synthetic oligonucleotide
  Sense strand starting at position 66 of SEQ ID NO: 1887137
aucauacauugauucugua

SEQ ID NO: 2451037 - RNA, 19 nt, Artificial Sequence
  Description of Artificial Sequence: Synthetic oligonucleotide
  Antisense strand to SEQ ID NO: 2451036
uacagaaucaauguaugau

SEQ ID NO: 2451038 - RNA, 19 nt, Artificial Sequence
  Description of Artificial Sequence: Synthetic oligonucleotide
  Sense strand starting at position 82 of SEQ ID NO: 1887137
guauauuugugccugucaa

SEQ ID NO: 2451039 - RNA, 19 nt, Artificial Sequence
  Description of Artificial Sequence: Synthetic oligonucleotide
  Antisense strand to SEQ ID NO: 2451038
uugacaggcacaaauauac

SEQ ID NO: 2451040 - RNA, 19 nt, Artificial Sequence
  Description of Artificial Sequence: Synthetic oligonucleotide
  Sense strand starting at position 135 of SEQ ID NO: 1887137
cucucucaagugugaugaa

SEQ ID NO: 2451041 - RNA, 19 nt, Artificial Sequence
  Description of Artificial Sequence: Synthetic oligonucleotide
  Antisense strand to SEQ ID NO: 2451040
uucaucacacuugagagag

SEQ ID NO: 2451042 - RNA, 19 nt, Artificial Sequence
  Description of Artificial Sequence: Synthetic oligonucleotide
  Sense strand starting at position 154 of SEQ ID NO: 1887137
agacuauucuucuuugaag

SEQ ID NO: 2451043 - RNA, 19 nt, Artificial Sequence
  Description of Artificial Sequence: Synthetic oligonucleotide
  Antisense strand to SEQ ID NO: 2451042
cuucaaagaagaauagucu

SEQ ID NO: 2451044 - RNA, 19 nt, Artificial Sequence
  Description of Artificial Sequence: Synthetic oligonucleotide
  Sense strand starting at position 218 of SEQ ID NO: 1887137
ugucaucaauugguaucaa

SEQ ID NO: 2451045 - RNA, 19 nt, Artificial Sequence
  Description of Artificial Sequence: Synthetic oligonucleotide
  Antisense strand to SEQ ID NO: 2451044
uugauaccaauugaugaca

SEQ ID NO: 2451046 - RNA, 19 nt, Artificial Sequence
  Description of Artificial Sequence: Synthetic oligonucleotide
  Sense strand starting at position 377 of SEQ ID NO: 1887137
agaauucgagaugguaaac

SEQ ID NO: 2451047 - RNA, 19 nt, Artificial Sequence
  Description of Artificial Sequence: Synthetic oligonucleotide
  Antisense strand to SEQ ID NO: 2451046
guuuaccaucucgaauucu

SEQ ID NO: 2451048 - RNA, 19 nt, Artificial Sequence
  Description of Artificial Sequence: Synthetic oligonucleotide
  Sense strand starting at position 410 of SEQ ID NO: 1887137
ccaugugguggguauacau

SEQ ID NO: 2451049 - RNA, 19 nt, Artificial Sequence
  Description of Artificial Sequence: Synthetic oligonucleotide
  Antisense strand to SEQ ID NO: 2451048
auguauacccaccacaugg

SEQ ID NO: 2451050 - RNA, 19 nt, Artificial Sequence
  Description of Artificial Sequence: Synthetic oligonucleotide
  Sense strand starting at position 451 of SEQ ID NO: 1887137
ucucaugacugccuugaaa

SEQ ID NO: 2451051 - RNA, 19 nt, Artificial Sequence
  Description of Artificial Sequence: Synthetic oligonucleotide
  Antisense strand to SEQ ID NO: 2451050
uuucaaggcagucaugaga

SEQ ID NO: 2451052 - RNA, 19 nt, Artificial Sequence
  Description of Artificial Sequence: Synthetic oligonucleotide
  Sense strand starting at position 453 of SEQ ID NO: 1887137
ucaugacugccuugaaagu

SEQ ID NO: 2451053 - RNA, 19 nt, Artificial Sequence
  Description of Artificial Sequence: Synthetic oligonucleotide
  Antisense strand to SEQ ID NO: 2451052
acuuucaaggcagucauga

SEQ ID NO: 2451054 - RNA, 19 nt, Artificial Sequence
  Description of Artificial Sequence: Synthetic oligonucleotide
  Sense strand starting at position 454 of SEQ ID NO: 1887137
caugacugccuugaaaguu

SEQ ID NO: 2451055 - RNA, 19 nt, Artificial Sequence
  Description of Artificial Sequence: Synthetic oligonucleotide
  Antisense strand to SEQ ID NO: 2451054
aacuuucaaggcagucaug

SEQ ID NO: 2451056 - RNA, 19 nt, Artificial Sequence
  Description of Artificial Sequence: Synthetic oligonucleotide
  Sense strand starting at position 604 of SEQ ID NO: 1887137
uugaguaagcauuauacaa

SEQ ID NO: 2451057 - RNA, 19 nt, Artificial Sequence
  Description of Artificial Sequence: Synthetic oligonucleotide
  Antisense strand to SEQ ID NO: 2451056
uuguauaaugcuuacucaa

SEQ ID NO: 2451058 - RNA, 19 nt, Artificial Sequence
  Description of Artificial Sequence: Synthetic oligonucleotide
  Sense strand starting at position 1071 of SEQ ID NO: 1887137
ucuuuagaggucuacgguu

SEQ ID NO: 2451059 - RNA, 19 nt, Artificial Sequence
  Description of Artificial Sequence: Synthetic oligonucleotide
  Antisense strand to SEQ ID NO: 2451058
aaccguagaccucuaaaga

SEQ ID NO: 2451060 - RNA, 19 nt, Artificial Sequence
  Description of Artificial Sequence: Synthetic oligonucleotide
  Sense strand starting at position 1290 of SEQ ID NO: 1887137
uaagguuuggcucacaaca

SEQ ID NO: 2451061 - RNA, 19 nt, Artificial Sequence
  Description of Artificial Sequence: Synthetic oligonucleotide
  Antisense strand to SEQ ID NO: 2451060
uguugugagccaaaccuua

SEQ ID NO: 2451062 - RNA, 19 nt, Artificial Sequence
  Description of Artificial Sequence: Synthetic oligonucleotide
  Sense strand starting at position 1425 of SEQ ID NO: 1887137
agaugauuagcuuggacua

SEQ ID NO: 2451063 - RNA, 19 nt, Artificial Sequence
  Description of Artificial Sequence: Synthetic oligonucleotide
  Antisense strand to SEQ ID NO: 2451062
uaguccaagcuaaucaucu

SEQ ID NO: 2451064 - RNA, 19 nt, Artificial Sequence
  Description of Artificial Sequence: Synthetic oligonucleotide
  Sense strand starting at position 1426 of SEQ ID NO: 1887137
gaugauuagcuuggacuau

SEQ ID NO: 2451065 - RNA, 19 nt, Artificial Sequence
  Description of Artificial Sequence: Synthetic oligonucleotide
  Antisense strand to SEQ ID NO: 2451064
auaguccaagcuaaucauc

SEQ ID NO: 2451066 - RNA, 19 nt, Artificial Sequence
  Description of Artificial Sequence: Synthetic oligonucleotide
  Sense strand starting at position 1707 of SEQ ID NO: 1887137
ccagguauugucuauggau

SEQ ID NO: 2451067 - RNA, 19 nt, Artificial Sequence
  Description of Artificial Sequence: Synthetic oligonucleotide
  Antisense strand to SEQ ID NO: 2451066
auccauagacaauaccugg

SEQ ID NO: 2451068 - RNA, 19 nt, Artificial Sequence
  Description of Artificial Sequence: Synthetic oligonucleotide
  Sense strand starting at position 1709 of SEQ ID NO: 1887137
agguauugucuauggauca

SEQ ID NO: 2451069 - RNA, 19 nt, Artificial Sequence
  Description of Artificial Sequence: Synthetic oligonucleotide
  Antisense strand to SEQ ID NO: 2451068
ugauccauagacaauaccu

SEQ ID NO: 2451070 - RNA, 19 nt, Artificial Sequence
  Description of Artificial Sequence: Synthetic oligonucleotide
  Sense strand starting at position 1714 of SEQ ID NO: 1887137
uugucuauggaucaaaucu

SEQ ID NO: 2451071 - RNA, 19 nt, Artificial Sequence
  Description of Artificial Sequence: Synthetic oligonucleotide
  Antisense strand to SEQ ID NO: 2451070
agauuugauccauagacaa

SEQ ID NO: 2451072 - RNA, 19 nt, Artificial Sequence
  Description of Artificial Sequence: Synthetic oligonucleotide
  Sense strand starting at position 1722 of SEQ ID NO: 1887137
ggaucaaaucucuguuucu

SEQ ID NO: 2451073 - RNA, 19 nt, Artificial Sequence
  Description of Artificial Sequence: Synthetic oligonucleotide
  Antisense strand to SEQ ID NO: 2451072
agaaacagagauuugaucc

SEQ ID NO: 2451074 - RNA, 19 nt, Artificial Sequence
  Description of Artificial Sequence: Synthetic oligonucleotide
  Sense strand starting at position 1854 of SEQ ID NO: 1887137
ggcaguacugaguagagau

SEQ ID NO: 2451075 - RNA, 19 nt, Artificial Sequence
  Description of Artificial Sequence: Synthetic oligonucleotide
  Antisense strand to SEQ ID NO: 2451074
aucucuacucaguacugcc

SEQ ID NO: 2451076 - RNA, 19 nt, Artificial Sequence
  Description of Artificial Sequence: Synthetic oligonucleotide
  Sense strand starting at position 2099 of SEQ ID NO: 1887137
guagaagggccugaaguuu

SEQ ID NO: 2451077 - RNA, 19 nt, Artificial Sequence
  Description of Artificial Sequence: Synthetic oligonucleotide
  Antisense strand to SEQ ID NO: 2451076
aaacuucaggcccuucuac

SEQ ID NO: 2451078 - RNA, 19 nt, Artificial Sequence
  Description of Artificial Sequence: Synthetic oligonucleotide
  Sense strand starting at position 2123 of SEQ ID NO: 1887137
auguuaaugcaucaugcca

SEQ ID NO: 2451079 - RNA, 19 nt, Artificial Sequence
  Description of Artificial Sequence: Synthetic oligonucleotide
  Antisense strand to SEQ ID NO: 2451078
uggcaugaugcauuaacau

SEQ ID NO: 2451080 - RNA, 19 nt, Artificial Sequence
  Description of Artificial Sequence: Synthetic oligonucleotide
  Sense strand starting at position 2300 of SEQ ID NO: 1887137
gugguauuacugcaccaug

SEQ ID NO: 2451081 - RNA, 19 nt, Artificial Sequence
  Description of Artificial Sequence: Synthetic oligonucleotide
  Antisense strand to SEQ ID NO: 2451080
cauggugcaguaauaccac

SEQ ID NO: 2451082 - RNA, 19 nt, Artificial Sequence
  Description of Artificial Sequence: Synthetic oligonucleotide
  Sense strand starting at position 2303 of SEQ ID NO: 1887137
guauuacugcaccaugaaa

SEQ ID NO: 2451083 - RNA, 19 nt, Artificial Sequence
  Description of Artificial Sequence: Synthetic oligonucleotide
  Antisense strand to SEQ ID NO: 2451082
uuucauggugcaguaauac

SEQ ID NO: 2451084 - RNA, 19 nt, Artificial Sequence
  Description of Artificial Sequence: Synthetic oligonucleotide
  Sense strand starting at position 2608 of SEQ ID NO: 1887137
uacugauuaauguguggga

SEQ ID NO: 2451085 - RNA, 19 nt, Artificial Sequence
  Description of Artificial Sequence: Synthetic oligonucleotide
  Antisense strand to SEQ ID NO: 2451084
ucccacacauuaaucagua

SEQ ID NO: 2451086 - RNA, 19 nt, Artificial Sequence
  Description of Artificial Sequence: Synthetic oligonucleotide
  Sense strand starting at position 2609 of SEQ ID NO: 1887137
acugauuaaugugugggaa

SEQ ID NO: 2451087 - RNA, 19 nt, Artificial Sequence
  Description of Artificial Sequence: Synthetic oligonucleotide
  Antisense strand to SEQ ID NO: 2451086
uucccacacauuaaucagu

SEQ ID NO: 2451088 - RNA, 19 nt, Artificial Sequence
  Description of Artificial Sequence: Synthetic oligonucleotide
  Sense strand starting at position 2610 of SEQ ID NO: 1887137
cugauuaaugugugggaaa

SEQ ID NO: 2451089 - RNA, 19 nt, Artificial Sequence
  Description of Artificial Sequence: Synthetic oligonucleotide
  Antisense strand to SEQ ID NO: 2451088
uuucccacacauuaaucag

SEQ ID NO: 2451090 - RNA, 19 nt, Artificial Sequence
  Description of Artificial Sequence: Synthetic oligonucleotide
  Sense strand starting at position 2817 of SEQ ID NO: 1887137
acuaauucugcagaucagu

SEQ ID NO: 2451091 - RNA, 19 nt, Artificial Sequence
  Description of Artificial Sequence: Synthetic oligonucleotide
  Antisense strand to SEQ ID NO: 2451090
acugaucugcagaauuagu

SEQ ID NO: 2451092 - RNA, 19 nt, Artificial Sequence
  Description of Artificial Sequence: Synthetic oligonucleotide
  Sense strand starting at position 2871 of SEQ ID NO: 1887137
gaugaugguuuauccaaac

SEQ ID NO: 2451093 - RNA, 19 nt, Artificial Sequence
  Description of Artificial Sequence: Synthetic oligonucleotide
  Antisense strand to SEQ ID NO: 2451092
guuuggauaaaccaucauc

SEQ ID NO: 2451094 - RNA, 19 nt, Artificial Sequence
  Description of Artificial Sequence: Synthetic oligonucleotide
  Sense strand starting at position 3138 of SEQ ID NO: 1887137
agaugauuccaguaauguu

SEQ ID NO: 2451095 - RNA, 19 nt, Artificial Sequence
  Description of Artificial Sequence: Synthetic oligonucleotide
  Antisense strand to SEQ ID NO: 2451094
aacauuacuggaaucaucu

SEQ ID NO: 2451096 - RNA, 19 nt, Artificial Sequence
  Description of Artificial Sequence: Synthetic oligonucleotide
  Sense strand starting at position 3145 of SEQ ID NO: 1887137
uccaguaauguuugggaac

SEQ ID NO: 2451097 - RNA, 19 nt, Artificial Sequence
  Description of Artificial Sequence: Synthetic oligonucleotide
  Antisense strand to SEQ ID NO: 2451096
guucccaaacauuacugga

SEQ ID NO: 2451098 - RNA, 19 nt, Artificial Sequence
  Description of Artificial Sequence: Synthetic oligonucleotide
  Sense strand starting at position 3160 of SEQ ID NO: 1887137
gaacuagugccuuaguaua

SEQ ID NO: 2451099 - RNA, 19 nt, Artificial Sequence
  Description of Artificial Sequence: Synthetic oligonucleotide
  Antisense strand to SEQ ID NO: 2451098
uauacuaaggcacuaguuc

SEQ ID NO: 2451100 - RNA, 19 nt, Artificial Sequence
  Description of Artificial Sequence: Synthetic oligonucleotide
  Sense strand starting at position 3295 of SEQ ID NO: 1887137
ucgauaaagcaaugggaua

SEQ ID NO: 2451101 - RNA, 19 nt, Artificial Sequence
  Description of Artificial Sequence: Synthetic oligonucleotide
  Antisense strand to SEQ ID NO: 2451100
uaucccauugcuuuaucga

SEQ ID NO: 2451102 - RNA, 19 nt, Artificial Sequence
  Description of Artificial Sequence: Synthetic oligonucleotide
  Sense strand starting at position 3296 of SEQ ID NO: 1887137
cgauaaagcaaugggauaa

SEQ ID NO: 2451103 - RNA, 19 nt, Artificial Sequence
  Description of Artificial Sequence: Synthetic oligonucleotide
  Antisense strand to SEQ ID NO: 2451102
uuaucccauugcuuuaucg

SEQ ID NO: 2451104 - RNA, 19 nt, Artificial Sequence
  Description of Artificial Sequence: Synthetic oligonucleotide
  Sense strand starting at position 3717 of SEQ ID NO: 1887137
uguagcaaccuuuaagguu

SEQ ID NO: 2451105 - RNA, 19 nt, Artificial Sequence
  Description of Artificial Sequence: Synthetic oligonucleotide
  Antisense strand to SEQ ID NO: 2451104
aaccuuaaagguugcuaca

SEQ ID NO: 2451106 - RNA, 19 nt, Artificial Sequence
  Description of Artificial Sequence: Synthetic oligonucleotide
  Sense strand starting at position 3770 of SEQ ID NO: 1887137
cucugagaauaaucguaug

SEQ ID NO: 2451107 - RNA, 19 nt, Artificial Sequence
  Description of Artificial Sequence: Synthetic oligonucleotide
  Antisense strand to SEQ ID NO: 2451106
cauacgauuauucucagag

SEQ ID NO: 2451108 - RNA, 19 nt, Artificial Sequence
  Description of Artificial Sequence: Synthetic oligonucleotide
  Sense strand starting at position 3775 of SEQ ID NO: 1887137
agaauaaucguauguacua

SEQ ID NO: 2451109 - RNA, 19 nt, Artificial Sequence
  Description of Artificial Sequence: Synthetic oligonucleotide
  Antisense strand to SEQ ID NO: 2451108
uaguacauacgauuauucu

SEQ ID NO: 2451110 - RNA, 19 nt, Artificial Sequence
  Description of Artificial Sequence: Synthetic oligonucleotide
  Sense strand starting at position 3776 of SEQ ID NO: 1887137
gaauaaucguauguacuaa

SEQ ID NO: 2451111 - RNA, 19 nt, Artificial Sequence
  Description of Artificial Sequence: Synthetic oligonucleotide
  Antisense strand to SEQ ID NO: 2451110
uuaguacauacgauuauuc

SEQ ID NO: 2451112 - RNA, 19 nt, Artificial Sequence
  Description of Artificial Sequence: Synthetic oligonucleotide
  Sense strand starting at position 3850 of SEQ ID NO: 1887137
uuacuaaaucaguguucca

SEQ ID NO: 2451113 - RNA, 19 nt, Artificial Sequence
  Description of Artificial Sequence: Synthetic oligonucleotide
  Antisense strand to SEQ ID NO: 2451112
uggaacacugauuuaguaa

SEQ ID NO: 2451114 - RNA, 19 nt, Artificial Sequence
  Description of Artificial Sequence: Synthetic oligonucleotide
  Sense strand starting at position 3853 of SEQ ID NO: 1887137
cuaaaucaguguuccaaau

SEQ ID NO: 2451115 - RNA, 19 nt, Artificial Sequence
  Description of Artificial Sequence: Synthetic oligonucleotide
  Antisense strand to SEQ ID NO: 2451114
auuuggaacacugauuuag

SEQ ID NO: 2451116 - RNA, 19 nt, Artificial Sequence
  Description of Artificial Sequence: Synthetic oligonucleotide
  Sense strand starting at position 14 of SEQ ID NO: 1887138
agaagagaguuacaauaug

SEQ ID NO: 2451117 - RNA, 19 nt, Artificial Sequence
  Description of Artificial Sequence: Synthetic oligonucleotide
  Antisense strand to SEQ ID NO: 2451116
cauauuguaacucucuucu

SEQ ID NO: 2451118 - RNA, 19 nt, Artificial Sequence
  Description of Artificial Sequence: Synthetic oligonucleotide
  Sense strand starting at position 93 of SEQ ID NO: 1887138
cggcaugaaacagauucuu

SEQ ID NO: 2451119 - RNA, 19 nt, Artificial Sequence
  Description of Artificial Sequence: Synthetic oligonucleotide
  Antisense strand to SEQ ID NO: 2451118
aagaaucuguuucaugccg

SEQ ID NO: 2451120 - RNA, 19 nt, Artificial Sequence
  Description of Artificial Sequence: Synthetic oligonucleotide
  Sense strand starting at position 160 of SEQ ID NO: 1887138
guuucuggccucuacaacu

SEQ ID NO: 2451121 - RNA, 19 nt, Artificial Sequence
  Description of Artificial Sequence: Synthetic oligonucleotide
  Antisense strand to SEQ ID NO: 2451120
aguuguagaggccagaaac

SEQ ID NO: 2451122 - RNA, 19 nt, Artificial Sequence
  Description of Artificial Sequence: Synthetic oligonucleotide
  Sense strand starting at position 261 of SEQ ID NO: 1887138
gggagaacccuuugguguu

SEQ ID NO: 2451123 - RNA, 19 nt, Artificial Sequence
  Description of Artificial Sequence: Synthetic oligonucleotide
  Antisense strand to SEQ ID NO: 2451122
aacaccaaaggguucuccc

SEQ ID NO: 2451124 - RNA, 19 nt, Artificial Sequence
  Description of Artificial Sequence: Synthetic oligonucleotide
  Sense strand starting at position 295 of SEQ ID NO: 1887138
auaugaaguuguucucuua

SEQ ID NO: 2451125 - RNA, 19 nt, Artificial Sequence
  Description of Artificial Sequence: Synthetic oligonucleotide
  Antisense strand to SEQ ID NO: 2451124
uaagagaacaacuucauau

SEQ ID NO: 2451126 - RNA, 19 nt, Artificial Sequence
  Description of Artificial Sequence: Synthetic oligonucleotide
  Sense strand starting at position 298 of SEQ ID NO: 1887138
ugaaguuguucucuuaaau

SEQ ID NO: 2451127 - RNA, 19 nt, Artificial Sequence
  Description of Artificial Sequence: Synthetic oligonucleotide
  Antisense strand to SEQ ID NO: 2451126
auuuaagagaacaacuuca

SEQ ID NO: 2451128 - RNA, 19 nt, Artificial Sequence
  Description of Artificial Sequence: Synthetic oligonucleotide
  Sense strand starting at position 382 of SEQ ID NO: 1887138
gaaauagaugcauguguuu

SEQ ID NO: 2451129 - RNA, 19 nt, Artificial Sequence
  Description of Artificial Sequence: Synthetic oligonucleotide
  Antisense strand to SEQ ID NO: 2451128
aaacacaugcaucuauuuc

SEQ ID NO: 2451130 - RNA, 19 nt, Artificial Sequence
  Description of Artificial Sequence: Synthetic oligonucleotide
  Sense strand starting at position 388 of SEQ ID NO: 1887138
gaugcauguguuuaugugu

SEQ ID NO: 2451131 - RNA, 19 nt, Artificial Sequence
  Description of Artificial Sequence: Synthetic oligonucleotide
  Antisense strand to SEQ ID NO: 2451130
acacauaaacacaugcauc

SEQ ID NO: 2451132 - RNA, 19 nt, Artificial Sequence
  Description of Artificial Sequence: Synthetic oligonucleotide
  Sense strand starting at position 468 of SEQ ID NO: 1887138
acaucuccaugggaaugau

SEQ ID NO: 2451133 - RNA, 19 nt, Artificial Sequence
  Description of Artificial Sequence: Synthetic oligonucleotide
  Antisense strand to SEQ ID NO: 2451132
aucauucccauggagaugu

SEQ ID NO: 2451134 - RNA, 19 nt, Artificial Sequence
  Description of Artificial Sequence: Synthetic oligonucleotide
  Sense strand starting at position 477 of SEQ ID NO: 1887138
ugggaaugaucacaccugu

SEQ ID NO: 2451135 - RNA, 19 nt, Artificial Sequence
  Description of Artificial Sequence: Synthetic oligonucleotide
  Antisense strand to SEQ ID NO: 2451134
acaggugugaucauuccca

SEQ ID NO: 2451136 - RNA, 19 nt, Artificial Sequence
  Description of Artificial Sequence: Synthetic oligonucleotide
  Sense strand starting at position 488 of SEQ ID NO: 1887138
acaccugugccucauggaa

SEQ ID NO: 2451137 - RNA, 19 nt, Artificial Sequence
  Description of Artificial Sequence: Synthetic oligonucleotide
  Antisense strand to SEQ ID NO: 2451136
uuccaugaggcacaggugu

SEQ ID NO: 2451138 - RNA, 19 nt, Artificial Sequence
  Description of Artificial Sequence: Synthetic oligonucleotide
  Sense strand starting at position 523 of SEQ ID NO: 1887138
ggagaaaugccugaucgca

SEQ ID NO: 2451139 - RNA, 19 nt, Artificial Sequence
  Description of Artificial Sequence: Synthetic oligonucleotide
  Antisense strand to SEQ ID NO: 2451138
ugcgaucaggcauuucucc

SEQ ID NO: 2451140 - RNA, 19 nt, Artificial Sequence
  Description of Artificial Sequence: Synthetic oligonucleotide
  Sense strand starting at position 580 of SEQ ID NO: 1887138
cuugaugugccaugaaaua

SEQ ID NO: 2451141 - RNA, 19 nt, Artificial Sequence
  Description of Artificial Sequence: Synthetic oligonucleotide
  Antisense strand to SEQ ID NO: 2451140
uauuucauggcacaucaag

SEQ ID NO: 2451142 - RNA, 19 nt, Artificial Sequence
  Description of Artificial Sequence: Synthetic oligonucleotide
  Sense strand starting at position 596 of SEQ ID NO: 1887138
auaagaaagugcucacagu

SEQ ID NO: 2451143 - RNA, 19 nt, Artificial Sequence
  Description of Artificial Sequence: Synthetic oligonucleotide
  Antisense strand to SEQ ID NO: 2451142
acugugagcacuuucuuau

SEQ ID NO: 2451144 - RNA, 19 nt, Artificial Sequence
  Description of Artificial Sequence: Synthetic oligonucleotide
  Sense strand starting at position 985 of SEQ ID NO: 1887138
uggacaaaguugggaugau

SEQ ID NO: 2451145 - RNA, 19 nt, Artificial Sequence
  Description of Artificial Sequence: Synthetic oligonucleotide
  Antisense strand to SEQ ID NO: 2451144
aucaucccaacuuugucca

SEQ ID NO: 2451146 - RNA, 19 nt, Artificial Sequence
  Description of Artificial Sequence: Synthetic oligonucleotide
  Sense strand starting at position 986 of SEQ ID NO: 1887138
ggacaaaguugggaugauu

SEQ ID NO: 2451147 - RNA, 19 nt, Artificial Sequence
  Description of Artificial Sequence: Synthetic oligonucleotide
  Antisense strand to SEQ ID NO: 2451146
aaucaucccaacuuugucc

SEQ ID NO: 2451148 - RNA, 19 nt, Artificial Sequence
  Description of Artificial Sequence: Synthetic oligonucleotide
  Sense strand starting at position 1015 of SEQ ID NO: 1887138
aauagaucaugauagugau

SEQ ID NO: 2451149 - RNA, 19 nt, Artificial Sequence
  Description of Artificial Sequence: Synthetic oligonucleotide
  Antisense strand to SEQ ID NO: 2451148
aucacuaucaugaucuauu

SEQ ID NO: 2451150 - RNA, 19 nt, Artificial Sequence
  Description of Artificial Sequence: Synthetic oligonucleotide
  Sense strand starting at position 1018 of SEQ ID NO: 1887138
agaucaugauagugaugga

SEQ ID NO: 2451151 - RNA, 19 nt, Artificial Sequence
  Description of Artificial Sequence: Synthetic oligonucleotide
  Antisense strand to SEQ ID NO: 2451150
uccaucacuaucaugaucu

SEQ ID NO: 2451152 - RNA, 19 nt, Artificial Sequence
  Description of Artificial Sequence: Synthetic oligonucleotide
  Sense strand starting at position 1091 of SEQ ID NO: 1887138
augaauggaugagaaguaa

SEQ ID NO: 2451153 - RNA, 19 nt, Artificial Sequence
  Description of Artificial Sequence: Synthetic oligonucleotide
  Antisense strand to SEQ ID NO: 2451152
uuacuucucauccauucau

SEQ ID NO: 2451154 - RNA, 19 nt, Artificial Sequence
  Description of Artificial Sequence: Synthetic oligonucleotide
  Sense strand starting at position 1225 of SEQ ID NO: 1887138
gcacaacuuucuguaaguu

SEQ ID NO: 2451155 - RNA, 19 nt, Artificial Sequence
  Description of Artificial Sequence: Synthetic oligonucleotide
  Antisense strand to SEQ ID NO: 2451154
aacuuacagaaaguugugc

SEQ ID NO: 2451156 - RNA, 19 nt, Artificial Sequence
  Description of Artificial Sequence: Synthetic oligonucleotide
  Sense strand starting at position 1364 of SEQ ID NO: 1887138
gccuguguggcaguugauu

SEQ ID NO: 2451157 - RNA, 19 nt, Artificial Sequence
  Description of Artificial Sequence: Synthetic oligonucleotide
  Antisense strand to SEQ ID NO: 2451156
aaucaacugccacacaggc

SEQ ID NO: 2451158 - RNA, 19 nt, Artificial Sequence
  Description of Artificial Sequence: Synthetic oligonucleotide
  Sense strand starting at position 1846 of SEQ ID NO: 1887138
aaaugaguguuguugagug

SEQ ID NO: 2451159 - RNA, 19 nt, Artificial Sequence
  Description of Artificial Sequence: Synthetic oligonucleotide
  Antisense strand to SEQ ID NO: 2451158
cacucaacaacacucauuu

SEQ ID NO: 2451160 - RNA, 19 nt, Artificial Sequence
  Description of Artificial Sequence: Synthetic oligonucleotide
  Sense strand starting at position 1848 of SEQ ID NO: 1887138
augaguguuguugagugaa

SEQ ID NO: 2451161 - RNA, 19 nt, Artificial Sequence
  Description of Artificial Sequence: Synthetic oligonucleotide
  Antisense strand to SEQ ID NO: 2451160
uucacucaacaacacucau

SEQ ID NO: 2451162 - RNA, 19 nt, Artificial Sequence
  Description of Artificial Sequence: Synthetic oligonucleotide
  Sense strand starting at position 1859 of SEQ ID NO: 1887138
ugagugaacgugugaguga

SEQ ID NO: 2451163 - RNA, 19 nt, Artificial Sequence
  Description of Artificial Sequence: Synthetic oligonucleotide
  Antisense strand to SEQ ID NO: 2451162
ucacucacacguucacuca

SEQ ID NO: 2451164 - RNA, 19 nt, Artificial Sequence
  Description of Artificial Sequence: Synthetic oligonucleotide
  Sense strand starting at position 2153 of SEQ ID NO: 1887138
ccuguucuugcagaaagac

SEQ ID NO: 2451165 - RNA, 19 nt, Artificial Sequence
  Description of Artificial Sequence: Synthetic oligonucleotide
  Antisense strand to SEQ ID NO: 2451164
gucuuucugcaagaacagg

SEQ ID NO: 2451166 - RNA, 19 nt, Artificial Sequence
  Description of Artificial Sequence: Synthetic oligonucleotide
  Sense strand starting at position 2561 of SEQ ID NO: 1887138
uguuguuugguuuaugguu

SEQ ID NO: 2451167 - RNA, 19 nt, Artificial Sequence
  Description of Artificial Sequence: Synthetic oligonucleotide
  Antisense strand to SEQ ID NO: 2451166
aaccauaaaccaaacaaca

SEQ ID NO: 2451168 - RNA, 19 nt, Artificial Sequence
  Description of Artificial Sequence: Synthetic oligonucleotide
  Sense strand starting at position 2964 of SEQ ID NO: 1887138
uuugucauuggaggguuaa

SEQ ID NO: 2451169 - RNA, 19 nt, Artificial Sequence
  Description of Artificial Sequence: Synthetic oligonucleotide
  Antisense strand to SEQ ID NO: 2451168
uuaacccuccaaugacaaa

SEQ ID NO: 2451170 - RNA, 19 nt, Artificial Sequence
  Description of Artificial Sequence: Synthetic oligonucleotide
  Sense strand starting at position 2965 of SEQ ID NO: 1887138
uugucauuggaggguuaaa

SEQ ID NO: 2451171 - RNA, 19 nt, Artificial Sequence
  Description of Artificial Sequence: Synthetic oligonucleotide
  Antisense strand to SEQ ID NO: 2451170
uuuaacccuccaaugacaa

SEQ ID NO: 2451172 - RNA, 19 nt, Artificial Sequence
  Description of Artificial Sequence: Synthetic oligonucleotide
  Sense strand starting at position 2986 of SEQ ID NO: 1887138
aaaugugagcguuacccga

SEQ ID NO: 2451173 - RNA, 19 nt, Artificial Sequence
  Description of Artificial Sequence: Synthetic oligonucleotide
  Antisense strand to SEQ ID NO: 2451172
ucggguaacgcucacauuu

SEQ ID NO: 2451174 - RNA, 19 nt, Artificial Sequence
  Description of Artificial Sequence: Synthetic oligonucleotide
  Sense strand starting at position 2990 of SEQ ID NO: 1887138
gugagcguuacccgaacau

SEQ ID NO: 2451175 - RNA, 19 nt, Artificial Sequence
  Description of Artificial Sequence: Synthetic oligonucleotide
  Antisense strand to SEQ ID NO: 2451174
auguucggguaacgcucac

SEQ ID NO: 2451176 - RNA, 19 nt, Artificial Sequence
  Description of Artificial Sequence: Synthetic oligonucleotide
  Sense strand starting at position 3001 of SEQ ID NO: 1887138
ccgaacaucuggguuccua

SEQ ID NO: 2451177 - RNA, 19 nt, Artificial Sequence
  Description of Artificial Sequence: Synthetic oligonucleotide
  Antisense strand to SEQ ID NO: 2451176
uaggaacccagauguucgg

SEQ ID NO: 2451178 - RNA, 19 nt, Artificial Sequence
  Description of Artificial Sequence: Synthetic oligonucleotide
  Sense strand starting at position 3292 of SEQ ID NO: 1887138
gaaacaaaguguuugguuu

SEQ ID NO: 2451179 - RNA, 19 nt, Artificial Sequence
  Description of Artificial Sequence: Synthetic oligonucleotide
  Antisense strand to SEQ ID NO: 2451178
aaaccaaacacuuuguuuc

SEQ ID NO: 2451180 - RNA, 19 nt, Artificial Sequence
  Description of Artificial Sequence: Synthetic oligonucleotide
  Sense strand starting at position 3421 of SEQ ID NO: 1887138
gcaccauucccucggguga

SEQ ID NO: 2451181 - RNA, 19 nt, Artificial Sequence
  Description of Artificial Sequence: Synthetic oligonucleotide
  Antisense strand to SEQ ID NO: 2451180
ucacccgagggaauggugc

SEQ ID NO: 2451182 - RNA, 19 nt, Artificial Sequence
  Description of Artificial Sequence: Synthetic oligonucleotide
  Sense strand starting at position 3521 of SEQ ID NO: 1887138
ggccucacccugugcaaau

SEQ ID NO: 2451183 - RNA, 19 nt, Artificial Sequence
  Description of Artificial Sequence: Synthetic oligonucleotide
  Antisense strand to SEQ ID NO: 2451182
auuugcacagggugaggcc

SEQ ID NO: 2451184 - RNA, 19 nt, Artificial Sequence
  Description of Artificial Sequence: Synthetic oligonucleotide
  Sense strand starting at position 3612 of SEQ ID NO: 1887138
gcaagaacacacuguuguu

SEQ ID NO: 2451185 - RNA, 19 nt, Artificial Sequence
  Description of Artificial Sequence: Synthetic oligonucleotide
  Antisense strand to SEQ ID NO: 2451184
aacaacaguguguucuugc

SEQ ID NO: 2451186 - RNA, 19 nt, Artificial Sequence
  Description of Artificial Sequence: Synthetic oligonucleotide
  Sense strand starting at position 3679 of SEQ ID NO: 1887138
uugggagcuugugcauaaa

SEQ ID NO: 2451187 - RNA, 19 nt, Artificial Sequence
  Description of Artificial Sequence: Synthetic oligonucleotide
  Antisense strand to SEQ ID NO: 2451186
uuuaugcacaagcucccaa

SEQ ID NO: 2451188 - RNA, 19 nt, Artificial Sequence
  Description of Artificial Sequence: Synthetic oligonucleotide
  Sense strand starting at position 3711 of SEQ ID NO: 1887138
gcacaucugacggacuaga

SEQ ID NO: 2451189 - RNA, 19 nt, Artificial Sequence
  Description of Artificial Sequence: Synthetic oligonucleotide
  Antisense strand to SEQ ID NO: 2451188
ucuaguccgucagaugugc

SEQ ID NO: 2451190 - RNA, 19 nt, Artificial Sequence
  Description of Artificial Sequence: Synthetic oligonucleotide
  Sense strand starting at position 3787 of SEQ ID NO: 1887138
ggaguccuguucccaacau

SEQ ID NO: 2451191 - RNA, 19 nt, Artificial Sequence
  Description of Artificial Sequence: Synthetic oligonucleotide
  Antisense strand to SEQ ID NO: 2451190
auguugggaacaggacucc

SEQ ID NO: 2451192 - RNA, 19 nt, Artificial Sequence
  Description of Artificial Sequence: Synthetic oligonucleotide
  Sense strand starting at position 3799 of SEQ ID NO: 1887138
ccaacaugguccucaagga

SEQ ID NO: 2451193 - RNA, 19 nt, Artificial Sequence
  Description of Artificial Sequence: Synthetic oligonucleotide
  Antisense strand to SEQ ID NO: 2451192
uccuugaggaccauguugg

SEQ ID NO: 2451194 - RNA, 19 nt, Artificial Sequence
  Description of Artificial Sequence: Synthetic oligonucleotide
  Sense strand starting at position 3948 of SEQ ID NO: 1887138
gaagcaagugucuauagcu

SEQ ID NO: 2451195 - RNA, 19 nt, Artificial Sequence
  Description of Artificial Sequence: Synthetic oligonucleotide
  Antisense strand to SEQ ID NO: 2451194
agcuauagacacuugcuuc

SEQ ID NO: 2451196 - RNA, 19 nt, Artificial Sequence
  Description of Artificial Sequence: Synthetic oligonucleotide
  Sense strand starting at position 19 of SEQ ID NO: 1887139
gcaguuugagggcaggaaa

SEQ ID NO: 2451197 - RNA, 19 nt, Artificial Sequence
  Description of Artificial Sequence: Synthetic oligonucleotide
  Antisense strand to SEQ ID NO: 2451196
uuuccugcccucaaacugc

SEQ ID NO: 2451198 - RNA, 19 nt, Artificial Sequence
  Description of Artificial Sequence: Synthetic oligonucleotide
  Sense strand starting at position 70 of SEQ ID NO: 1887139
gagcauugggcucaguaau

SEQ ID NO: 2451199 - RNA, 19 nt, Artificial Sequence
  Description of Artificial Sequence: Synthetic oligonucleotide
  Antisense strand to SEQ ID NO: 2451198
auuacugagcccaaugcuc

SEQ ID NO: 2451200 - RNA, 19 nt, Artificial Sequence
  Description of Artificial Sequence: Synthetic oligonucleotide
  Sense strand starting at position 448 of SEQ ID NO: 1887139
cuggccguauucuugagaa

SEQ ID NO: 2451201 - RNA, 19 nt, Artificial Sequence
  Description of Artificial Sequence: Synthetic oligonucleotide
  Antisense strand to SEQ ID NO: 2451200
uucucaagaauacggccag

SEQ ID NO: 2451202 - RNA, 19 nt, Artificial Sequence
  Description of Artificial Sequence: Synthetic oligonucleotide
  Sense strand starting at position 450 of SEQ ID NO: 1887139
ggccguauucuugagaaga

SEQ ID NO: 2451203 - RNA, 19 nt, Artificial Sequence
  Description of Artificial Sequence: Synthetic oligonucleotide
  Antisense strand to SEQ ID NO: 2451202
ucuucucaagaauacggcc

SEQ ID NO: 2451204 - RNA, 19 nt, Artificial Sequence
  Description of Artificial Sequence: Synthetic oligonucleotide
  Sense strand starting at position 513 of SEQ ID NO: 1887139
agauacuguuguguuauua

SEQ ID NO: 2451205 - RNA, 19 nt, Artificial Sequence
  Description of Artificial Sequence: Synthetic oligonucleotide
  Antisense strand to SEQ ID NO: 2451204
uaauaacacaacaguaucu

SEQ ID NO: 2451206 - RNA, 19 nt, Artificial Sequence
  Description of Artificial Sequence: Synthetic oligonucleotide
  Sense strand starting at position 517 of SEQ ID NO: 1887139
acuguuguguuauuacaac

SEQ ID NO: 2451207 - RNA, 19 nt, Artificial Sequence
  Description of Artificial Sequence: Synthetic oligonucleotide
  Antisense strand to SEQ ID NO: 2451206
guuguaauaacacaacagu

SEQ ID NO: 2451208 - RNA, 19 nt, Artificial Sequence
  Description of Artificial Sequence: Synthetic oligonucleotide
  Sense strand starting at position 924 of SEQ ID NO: 1887139
gcaaguugaguccaaagca

SEQ ID NO: 2451209 - RNA, 19 nt, Artificial Sequence
  Description of Artificial Sequence: Synthetic oligonucleotide
  Antisense strand to SEQ ID NO: 2451208
ugcuuuggacucaacuugc

SEQ ID NO: 2451210 - RNA, 19 nt, Artificial Sequence
  Description of Artificial Sequence: Synthetic oligonucleotide
  Sense strand starting at position 953 of SEQ ID NO: 1887139
aagggagcucucuaagguu

SEQ ID NO: 2451211 - RNA, 19 nt, Artificial Sequence
  Description of Artificial Sequence: Synthetic oligonucleotide
  Antisense strand to SEQ ID NO: 2451210
aaccuuagagagcucccuu

SEQ ID NO: 2451212 - RNA, 19 nt, Artificial Sequence
  Description of Artificial Sequence: Synthetic oligonucleotide
  Sense strand starting at position 1009 of SEQ ID NO: 1887139
guuuaaagcuccuuagaag

SEQ ID NO: 2451213 - RNA, 19 nt, Artificial Sequence
  Description of Artificial Sequence: Synthetic oligonucleotide
  Antisense strand to SEQ ID NO: 2451212
cuucuaaggagcuuuaaac

SEQ ID NO: 2451214 - RNA, 19 nt, Artificial Sequence
  Description of Artificial Sequence: Synthetic oligonucleotide
  Sense strand starting at position 1074 of SEQ ID NO: 1887139
acuaguucugagcaguuua

SEQ ID NO: 2451215 - RNA, 19 nt, Artificial Sequence
  Description of Artificial Sequence: Synthetic oligonucleotide
  Antisense strand to SEQ ID NO: 2451214
uaaacugcucagaacuagu

SEQ ID NO: 2451216 - RNA, 19 nt, Artificial Sequence
  Description of Artificial Sequence: Synthetic oligonucleotide
  Sense strand starting at position 1088 of SEQ ID NO: 1887139
guuuaaauggcuugcccaa

SEQ ID NO: 2451217 - RNA, 19 nt, Artificial Sequence
  Description of Artificial Sequence: Synthetic oligonucleotide
  Antisense strand to SEQ ID NO: 2451216
uugggcaagccauuuaaac

SEQ ID NO: 2451218 - RNA, 19 nt, Artificial Sequence
  Description of Artificial Sequence: Synthetic oligonucleotide
  Sense strand starting at position 1502 of SEQ ID NO: 1887139
cgaguucugacaggucuca

SEQ ID NO: 2451219 - RNA, 19 nt, Artificial Sequence
  Description of Artificial Sequence: Synthetic oligonucleotide
  Antisense strand to SEQ ID NO: 2451218
ugagaccugucagaacucg

SEQ ID NO: 2451220 - RNA, 19 nt, Artificial Sequence
  Description of Artificial Sequence: Synthetic oligonucleotide
  Sense strand starting at position 2108 of SEQ ID NO: 1887139
ggaucuguccagggagggu

SEQ ID NO: 2451221 - RNA, 19 nt, Artificial Sequence
  Description of Artificial Sequence: Synthetic oligonucleotide
  Antisense strand to SEQ ID NO: 2451220
acccucccuggacagaucc

SEQ ID NO: 2451222 - RNA, 19 nt, Artificial Sequence
  Description of Artificial Sequence: Synthetic oligonucleotide
  Sense strand starting at position 2162 of SEQ ID NO: 1887139
accuaagacuucgaugaag

SEQ ID NO: 2451223 - RNA, 19 nt, Artificial Sequence
  Description of Artificial Sequence: Synthetic oligonucleotide
  Antisense strand to SEQ ID NO: 2451222
cuucaucgaagucuuaggu

SEQ ID NO: 2451224 - RNA, 19 nt, Artificial Sequence
  Description of Artificial Sequence: Synthetic oligonucleotide
  Sense strand starting at position 2178 of SEQ ID NO: 1887139
aagagagguccuggucuac

SEQ ID NO: 2451225 - RNA, 19 nt, Artificial Sequence
  Description of Artificial Sequence: Synthetic oligonucleotide
  Antisense strand to SEQ ID NO: 2451224
guagaccaggaccucucuu

SEQ ID NO: 2451226 - RNA, 19 nt, Artificial Sequence
  Description of Artificial Sequence: Synthetic oligonucleotide
  Sense strand starting at position 2278 of SEQ ID NO: 1887139
uggagucagaacuggguuu

SEQ ID NO: 2451227 - RNA, 19 nt, Artificial Sequence
  Description of Artificial Sequence: Synthetic oligonucleotide
  Antisense strand to SEQ ID NO: 2451226
aaacccaguucugacucca

SEQ ID NO: 2451228 - RNA, 19 nt, Artificial Sequence
  Description of Artificial Sequence: Synthetic oligonucleotide
  Sense strand starting at position 2280 of SEQ ID NO: 1887139
gagucagaacuggguuuga

SEQ ID NO: 2451229 - RNA, 19 nt, Artificial Sequence
  Description of Artificial Sequence: Synthetic oligonucleotide
  Antisense strand to SEQ ID NO: 2451228
ucaaacccaguucugacuc

SEQ ID NO: 2451230 - RNA, 19 nt, Artificial Sequence
  Description of Artificial Sequence: Synthetic oligonucleotide
  Sense strand starting at position 2403 of SEQ ID NO: 1887139
aucaguaaaugggauaaua

SEQ ID NO: 2451231 - RNA, 19 nt, Artificial Sequence
  Description of Artificial Sequence: Synthetic oligonucleotide
  Antisense strand to SEQ ID NO: 2451230
uauuaucccauuuacugau

SEQ ID NO: 2451232 - RNA, 19 nt, Artificial Sequence
  Description of Artificial Sequence: Synthetic oligonucleotide
  Sense strand starting at position 2426 of SEQ ID NO: 1887139
uaccgauauucugugacug

SEQ ID NO: 2451233 - RNA, 19 nt, Artificial Sequence
  Description of Artificial Sequence: Synthetic oligonucleotide
  Antisense strand to SEQ ID NO: 2451232
cagucacagaauaucggua

SEQ ID NO: 2451234 - RNA, 19 nt, Artificial Sequence
  Description of Artificial Sequence: Synthetic oligonucleotide
  Sense strand starting at position 2427 of SEQ ID NO: 1887139
accgauauucugugacugu

SEQ ID NO: 2451235 - RNA, 19 nt, Artificial Sequence
  Description of Artificial Sequence: Synthetic oligonucleotide
  Antisense strand to SEQ ID NO: 2451234
acagucacagaauaucggu

SEQ ID NO: 2451236 - RNA, 19 nt, Artificial Sequence
  Description of Artificial Sequence: Synthetic oligonucleotide
  Sense strand starting at position 2461 of SEQ ID NO: 1887139
gccuguaaauuacugaaca

SEQ ID NO: 2451237 - RNA, 19 nt, Artificial Sequence
  Description of Artificial Sequence: Synthetic oligonucleotide
  Antisense strand to SEQ ID NO: 2451236
uguucaguaauuuacaggc

SEQ ID NO: 2451238 - RNA, 19 nt, Artificial Sequence
  Description of Artificial Sequence: Synthetic oligonucleotide
  Sense strand starting at position 2492 of SEQ ID NO: 1887139
ucacgaagugugcacuuaa

SEQ ID NO: 2451239 - RNA, 19 nt, Artificial Sequence
  Description of Artificial Sequence: Synthetic oligonucleotide
  Antisense strand to SEQ ID NO: 2451238
uuaagugcacacuucguga

SEQ ID NO: 2451240 - RNA, 19 nt, Artificial Sequence
  Description of Artificial Sequence: Synthetic oligonucleotide
  Sense strand starting at position 2530 of SEQ ID NO: 1887139
gugugaucuuuggcaaagg

SEQ ID NO: 2451241 - RNA, 19 nt, Artificial Sequence
  Description of Artificial Sequence: Synthetic oligonucleotide
  Antisense strand to SEQ ID NO: 2451240
ccuuugccaaagaucacac

SEQ ID NO: 2451242 - RNA, 19 nt, Artificial Sequence
  Description of Artificial Sequence: Synthetic oligonucleotide
  Sense strand starting at position 2643 of SEQ ID NO: 1887139
aguguaaagugccugauuu

SEQ ID NO: 2451243 - RNA, 19 nt, Artificial Sequence
  Description of Artificial Sequence: Synthetic oligonucleotide
  Antisense strand to SEQ ID NO: 2451242
aaaucaggcacuuuacacu

SEQ ID NO: 2451244 - RNA, 19 nt, Artificial Sequence
  Description of Artificial Sequence: Synthetic oligonucleotide
  Sense strand starting at position 2677 of SEQ ID NO: 1887139
guuggagugaaacgguuua

SEQ ID NO: 2451245 - RNA, 19 nt, Artificial Sequence
  Description of Artificial Sequence: Synthetic oligonucleotide
  Antisense strand to SEQ ID NO: 2451244
uaaaccguuucacuccaac

SEQ ID NO: 2451246 - RNA, 19 nt, Artificial Sequence
  Description of Artificial Sequence: Synthetic oligonucleotide
  Sense strand starting at position 2682 of SEQ ID NO: 1887139
agugaaacgguuuacguga

SEQ ID NO: 2451247 - RNA, 19 nt, Artificial Sequence
  Description of Artificial Sequence: Synthetic oligonucleotide
  Antisense strand to SEQ ID NO: 2451246
ucacguaaaccguuucacu

SEQ ID NO: 2451248 - RNA, 19 nt, Artificial Sequence
  Description of Artificial Sequence: Synthetic oligonucleotide
  Sense strand starting at position 2696 of SEQ ID NO: 1887139
cgugaaagccuuugcuaaa

SEQ ID NO: 2451249 - RNA, 19 nt, Artificial Sequence
  Description of Artificial Sequence: Synthetic oligonucleotide
  Antisense strand to SEQ ID NO: 2451248
uuuagcaaaggcuuucacg

SEQ ID NO: 2451250 - RNA, 19 nt, Artificial Sequence
  Description of Artificial Sequence: Synthetic oligonucleotide
  Sense strand starting at position 2697 of SEQ ID NO: 1887139
gugaaagccuuugcuaaac

SEQ ID NO: 2451251 - RNA, 19 nt, Artificial Sequence
  Description of Artificial Sequence: Synthetic oligonucleotide
  Antisense strand to SEQ ID NO: 2451250
guuuagcaaaggcuuucac

SEQ ID NO: 2451252 - RNA, 19 nt, Artificial Sequence
  Description of Artificial Sequence: Synthetic oligonucleotide
  Sense strand starting at position 2743 of SEQ ID NO: 1887139
ucauuaucugucuguguaa

SEQ ID NO: 2451253 - RNA, 19 nt, Artificial Sequence
  Description of Artificial Sequence: Synthetic oligonucleotide
  Antisense strand to SEQ ID NO: 2451252
uuacacagacagauaauga

SEQ ID NO: 2451254 - RNA, 19 nt, Artificial Sequence
  Description of Artificial Sequence: Synthetic oligonucleotide
  Sense strand starting at position 2745 of SEQ ID NO: 1887139
auuaucugucuguguaacu

SEQ ID NO: 2451255 - RNA, 19 nt, Artificial Sequence
  Description of Artificial Sequence: Synthetic oligonucleotide
  Antisense strand to SEQ ID NO: 2451254
aguuacacagacagauaau

SEQ ID NO: 2451256 - RNA, 19 nt, Artificial Sequence
  Description of Artificial Sequence: Synthetic oligonucleotide
  Sense strand starting at position 2891 of SEQ ID NO: 1887139
cccuaaagugcugaacaaa

SEQ ID NO: 2451257 - RNA, 19 nt, Artificial Sequence
  Description of Artificial Sequence: Synthetic oligonucleotide
  Antisense strand to SEQ ID NO: 2451256
uuuguucagcacuuuaggg

SEQ ID NO: 2451258 - RNA, 19 nt, Artificial Sequence
  Description of Artificial Sequence: Synthetic oligonucleotide
  Sense strand starting at position 2944 of SEQ ID NO: 1887139
cucgguaucacacaacguu

SEQ ID NO: 2451259 - RNA, 19 nt, Artificial Sequence
  Description of Artificial Sequence: Synthetic oligonucleotide
  Antisense strand to SEQ ID NO: 2451258
aacguugugugauaccgag

SEQ ID NO: 2451260 - RNA, 19 nt, Artificial Sequence
  Description of Artificial Sequence: Synthetic oligonucleotide
  Sense strand starting at position 2985 of SEQ ID NO: 1887139
accacuuguguggaggaau

SEQ ID NO: 2451261 - RNA, 19 nt, Artificial Sequence
  Description of Artificial Sequence: Synthetic oligonucleotide
  Antisense strand to SEQ ID NO: 2451260
auuccuccacacaaguggu

SEQ ID NO: 2451262 - RNA, 19 nt, Artificial Sequence
  Description of Artificial Sequence: Synthetic oligonucleotide
  Sense strand starting at position 3238 of SEQ ID NO: 1887139
uggaaagauucugccugga

SEQ ID NO: 2451263 - RNA, 19 nt, Artificial Sequence
  Description of Artificial Sequence: Synthetic oligonucleotide
  Antisense strand to SEQ ID NO: 2451262
uccaggcagaaucuuucca

SEQ ID NO: 2451264 - RNA, 19 nt, Artificial Sequence
  Description of Artificial Sequence: Synthetic oligonucleotide
  Sense strand starting at position 3240 of SEQ ID NO: 1887139
gaaagauucugccuggaga

SEQ ID NO: 2451265 - RNA, 19 nt, Artificial Sequence
  Description of Artificial Sequence: Synthetic oligonucleotide
  Antisense strand to SEQ ID NO: 2451264
ucuccaggcagaaucuuuc

SEQ ID NO: 2451266 - RNA, 19 nt, Artificial Sequence
  Description of Artificial Sequence: Synthetic oligonucleotide
  Sense strand starting at position 3241 of SEQ ID NO: 1887139
aaagauucugccuggagaa

SEQ ID NO: 2451267 - RNA, 19 nt, Artificial Sequence
  Description of Artificial Sequence: Synthetic oligonucleotide
  Antisense strand to SEQ ID NO: 2451266
uucuccaggcagaaucuuu

SEQ ID NO: 2451268 - RNA, 19 nt, Artificial Sequence
  Description of Artificial Sequence: Synthetic oligonucleotide
  Sense strand starting at position 3242 of SEQ ID NO: 1887139
aagauucugccuggagaaa

SEQ ID NO: 2451269 - RNA, 19 nt, Artificial Sequence
  Description of Artificial Sequence: Synthetic oligonucleotide
  Antisense strand to SEQ ID NO: 2451268
uuucuccaggcagaaucuu

SEQ ID NO: 2451270 - RNA, 19 nt, Artificial Sequence
  Description of Artificial Sequence: Synthetic oligonucleotide
  Sense strand starting at position 3294 of SEQ ID NO: 1887139
uccacaguguccuuaccaa

SEQ ID NO: 2451271 - RNA, 19 nt, Artificial Sequence
  Description of Artificial Sequence: Synthetic oligonucleotide
  Antisense strand to SEQ ID NO: 2451270
uugguaaggacacugugga

SEQ ID NO: 2451272 - RNA, 19 nt, Artificial Sequence
  Description of Artificial Sequence: Synthetic oligonucleotide
  Sense strand starting at position 3911 of SEQ ID NO: 1887139
gcuggaagcucucuaagag

SEQ ID NO: 2451273 - RNA, 19 nt, Artificial Sequence
  Description of Artificial Sequence: Synthetic oligonucleotide
  Antisense strand to SEQ ID NO: 2451272
cucuuagagagcuuccagc

SEQ ID NO: 2451274 - RNA, 19 nt, Artificial Sequence
  Description of Artificial Sequence: Synthetic oligonucleotide
  Sense strand starting at position 3980 of SEQ ID NO: 1887139
cagggaugcuucuuaugaa

SEQ ID NO: 2451275 - RNA, 19 nt, Artificial Sequence
  Description of Artificial Sequence: Synthetic oligonucleotide
  Antisense strand to SEQ ID NO: 2451274
uucauaagaagcaucccug

SEQ ID NO: 2451276 - RNA, 19 nt, Artificial Sequence
  Description of Artificial Sequence: Synthetic oligonucleotide
  Sense strand starting at position 364 of SEQ ID NO: 1887140
ggauuauaagcucgagcua

SEQ ID NO: 2451277 - RNA, 19 nt, Artificial Sequence
  Description of Artificial Sequence: Synthetic oligonucleotide
  Antisense strand to SEQ ID NO: 2451276
uagcucgagcuuauaaucc

SEQ ID NO: 2451278 - RNA, 19 nt, Artificial Sequence
  Description of Artificial Sequence: Synthetic oligonucleotide
  Sense strand starting at position 541 of SEQ ID NO: 1887140
agagcucucugauccuuua

SEQ ID NO: 2451279 - RNA, 19 nt, Artificial Sequence
  Description of Artificial Sequence: Synthetic oligonucleotide
  Antisense strand to SEQ ID NO: 2451278
uaaaggaucagagagcucu

SEQ ID NO: 2451280 - RNA, 19 nt, Artificial Sequence
  Description of Artificial Sequence: Synthetic oligonucleotide
  Sense strand starting at position 1068 of SEQ ID NO: 1887140
ggaacuuggucuaguggga

SEQ ID NO: 2451281 - RNA, 19 nt, Artificial Sequence
  Description of Artificial Sequence: Synthetic oligonucleotide
  Antisense strand to SEQ ID NO: 2451280
ucccacuagaccaaguucc

SEQ ID NO: 2451282 - RNA, 19 nt, Artificial Sequence
  Description of Artificial Sequence: Synthetic oligonucleotide
  Sense strand starting at position 1092 of SEQ ID NO: 1887140
acucucacgggucaugaau

SEQ ID NO: 2451283 - RNA, 19 nt, Artificial Sequence
  Description of Artificial Sequence: Synthetic oligonucleotide
  Antisense strand to SEQ ID NO: 2451282
auucaugacccgugagagu

SEQ ID NO: 2451284 - RNA, 19 nt, Artificial Sequence
  Description of Artificial Sequence: Synthetic oligonucleotide
  Sense strand starting at position 1100 of SEQ ID NO: 1887140
gggucaugaaugcggcuaa

SEQ ID NO: 2451285 - RNA, 19 nt, Artificial Sequence
  Description of Artificial Sequence: Synthetic oligonucleotide
  Antisense strand to SEQ ID NO: 2451284
uuagccgcauucaugaccc

SEQ ID NO: 2451286 - RNA, 19 nt, Artificial Sequence
  Description of Artificial Sequence: Synthetic oligonucleotide
  Sense strand starting at position 1204 of SEQ ID NO: 1887140
uguggagcugucucgcaau

SEQ ID NO: 2451287 - RNA, 19 nt, Artificial Sequence
  Description of Artificial Sequence: Synthetic oligonucleotide
  Antisense strand to SEQ ID NO: 2451286
auugcgagacagcuccaca

SEQ ID NO: 2451288 - RNA, 19 nt, Artificial Sequence
  Description of Artificial Sequence: Synthetic oligonucleotide
  Sense strand starting at position 1236 of SEQ ID NO: 1887140
ggaggcaaauuauuccgaa

SEQ ID NO: 2451289 - RNA, 19 nt, Artificial Sequence
  Description of Artificial Sequence: Synthetic oligonucleotide
  Antisense strand to SEQ ID NO: 2451288
uucggaauaauuugccucc

SEQ ID NO: 2451290 - RNA, 19 nt, Artificial Sequence
  Description of Artificial Sequence: Synthetic oligonucleotide
  Sense strand starting at position 1237 of SEQ ID NO: 1887140
gaggcaaauuauuccgaaa

SEQ ID NO: 2451291 - RNA, 19 nt, Artificial Sequence
  Description of Artificial Sequence: Synthetic oligonucleotide
  Antisense strand to SEQ ID NO: 2451290
uuucggaauaauuugccuc

SEQ ID NO: 2451292 - RNA, 19 nt, Artificial Sequence
  Description of Artificial Sequence: Synthetic oligonucleotide
  Sense strand starting at position 1239 of SEQ ID NO: 1887140
ggcaaauuauuccgaaauc

SEQ ID NO: 2451293 - RNA, 19 nt, Artificial Sequence
  Description of Artificial Sequence: Synthetic oligonucleotide
  Antisense strand to SEQ ID NO: 2451292
gauuucggaauaauuugcc

SEQ ID NO: 2451294 - RNA, 19 nt, Artificial Sequence
  Description of Artificial Sequence: Synthetic oligonucleotide
  Sense strand starting at position 1240 of SEQ ID NO: 1887140
gcaaauuauuccgaaauca

SEQ ID NO: 2451295 - RNA, 19 nt, Artificial Sequence
  Description of Artificial Sequence: Synthetic oligonucleotide
  Antisense strand to SEQ ID NO: 2451294
ugauuucggaauaauuugc

SEQ ID NO: 2451296 - RNA, 19 nt, Artificial Sequence
  Description of Artificial Sequence: Synthetic oligonucleotide
  Sense strand starting at position 1377 of SEQ ID NO: 1887140
uaauaaagguuggcaugau

SEQ ID NO: 2451297 - RNA, 19 nt, Artificial Sequence
  Description of Artificial Sequence: Synthetic oligonucleotide
  Antisense strand to SEQ ID NO: 2451296
aucaugccaaccuuuauua

SEQ ID NO: 2451298 - RNA, 19 nt, Artificial Sequence
  Description of Artificial Sequence: Synthetic oligonucleotide
  Sense strand starting at position 1378 of SEQ ID NO: 1887140
aauaaagguuggcaugauu

SEQ ID NO: 2451299 - RNA, 19 nt, Artificial Sequence
  Description of Artificial Sequence: Synthetic oligonucleotide
  Antisense strand to SEQ ID NO: 2451298
aaucaugccaaccuuuauu

SEQ ID NO: 2451300 - RNA, 19 nt, Artificial Sequence
  Description of Artificial Sequence: Synthetic oligonucleotide
  Sense strand starting at position 1386 of SEQ ID NO: 1887140
uuggcaugauuugacuuaa

SEQ ID NO: 2451301 - RNA, 19 nt, Artificial Sequence
  Description of Artificial Sequence: Synthetic oligonucleotide
  Antisense strand to SEQ ID NO: 2451300
uuaagucaaaucaugccaa

SEQ ID NO: 2451302 - RNA, 19 nt, Artificial Sequence
  Description of Artificial Sequence: Synthetic oligonucleotide
  Sense strand starting at position 1545 of SEQ ID NO: 1887140
ccgcccuucucagaaguga

SEQ ID NO: 2451303 - RNA, 19 nt, Artificial Sequence
  Description of Artificial Sequence: Synthetic oligonucleotide
  Antisense strand to SEQ ID NO: 2451302
ucacuucugagaagggcgg

SEQ ID NO: 2451304 - RNA, 19 nt, Artificial Sequence
  Description of Artificial Sequence: Synthetic oligonucleotide
  Sense strand starting at position 1599 of SEQ ID NO: 1887140
gucacuuagucgccgauca

SEQ ID NO: 2451305 - RNA, 19 nt, Artificial Sequence
  Description of Artificial Sequence: Synthetic oligonucleotide
  Antisense strand to SEQ ID NO: 2451304
ugaucggcgacuaagugac

SEQ ID NO: 2451306 - RNA, 19 nt, Artificial Sequence
  Description of Artificial Sequence: Synthetic oligonucleotide
  Sense strand starting at position 1600 of SEQ ID NO: 1887140
ucacuuagucgccgaucaa

SEQ ID NO: 2451307 - RNA, 19 nt, Artificial Sequence
  Description of Artificial Sequence: Synthetic oligonucleotide
  Antisense strand to SEQ ID NO: 2451306
uugaucggcgacuaaguga

SEQ ID NO: 2451308 - RNA, 19 nt, Artificial Sequence
  Description of Artificial Sequence: Synthetic oligonucleotide
  Sense strand starting at position 1601 of SEQ ID NO: 1887140
cacuuagucgccgaucaag

SEQ ID NO: 2451309 - RNA, 19 nt, Artificial Sequence
  Description of Artificial Sequence: Synthetic oligonucleotide
  Antisense strand to SEQ ID NO: 2451308
cuugaucggcgacuaagug

SEQ ID NO: 2451310 - RNA, 19 nt, Artificial Sequence
  Description of Artificial Sequence: Synthetic oligonucleotide
  Sense strand starting at position 1611 of SEQ ID NO: 1887140
ccgaucaaggcuuggacua

SEQ ID NO: 2451311 - RNA, 19 nt, Artificial Sequence
  Description of Artificial Sequence: Synthetic oligonucleotide
  Antisense strand to SEQ ID NO: 2451310
uaguccaagccuugaucgg

SEQ ID NO: 2451312 - RNA, 19 nt, Artificial Sequence
  Description of Artificial Sequence: Synthetic oligonucleotide
  Sense strand starting at position 1612 of SEQ ID NO: 1887140
cgaucaaggcuuggacuaa

SEQ ID NO: 2451313 - RNA, 19 nt, Artificial Sequence
  Description of Artificial Sequence: Synthetic oligonucleotide
  Antisense strand to SEQ ID NO: 2451312
uuaguccaagccuugaucg

SEQ ID NO: 2451314 - RNA, 19 nt, Artificial Sequence
  Description of Artificial Sequence: Synthetic oligonucleotide
  Sense strand starting at position 1657 of SEQ ID NO: 1887140
uggaucggaugcugaauaa

SEQ ID NO: 2451315 - RNA, 19 nt, Artificial Sequence
  Description of Artificial Sequence: Synthetic oligonucleotide
  Antisense strand to SEQ ID NO: 2451314
uuauucagcauccgaucca

SEQ ID NO: 2451316 - RNA, 19 nt, Artificial Sequence
  Description of Artificial Sequence: Synthetic oligonucleotide
  Sense strand starting at position 1989 of SEQ ID NO: 1887140
aauuguaaagcuugccgaa

SEQ ID NO: 2451317 - RNA, 19 nt, Artificial Sequence
  Description of Artificial Sequence: Synthetic oligonucleotide
  Antisense strand to SEQ ID NO: 2451316
uucggcaagcuuuacaauu

SEQ ID NO: 2451318 - RNA, 19 nt, Artificial Sequence
  Description of Artificial Sequence: Synthetic oligonucleotide
  Sense strand starting at position 2108 of SEQ ID NO: 1887140
gccaucuugucuucuccua

SEQ ID NO: 2451319 - RNA, 19 nt, Artificial Sequence
  Description of Artificial Sequence: Synthetic oligonucleotide
  Antisense strand to SEQ ID NO: 2451318
uaggagaagacaagauggc

SEQ ID NO: 2451320 - RNA, 19 nt, Artificial Sequence
  Description of Artificial Sequence: Synthetic oligonucleotide
  Sense strand starting at position 2130 of SEQ ID NO: 1887140
cacuuuguauuguucgaag

SEQ ID NO: 2451321 - RNA, 19 nt, Artificial Sequence
  Description of Artificial Sequence: Synthetic oligonucleotide
  Antisense strand to SEQ ID NO: 2451320
cuucgaacaauacaaagug

SEQ ID NO: 2451322 - RNA, 19 nt, Artificial Sequence
  Description of Artificial Sequence: Synthetic oligonucleotide
  Sense strand starting at position 2132 of SEQ ID NO: 1887140
cuuuguauuguucgaaguu

SEQ ID NO: 2451323 - RNA, 19 nt, Artificial Sequence
  Description of Artificial Sequence: Synthetic oligonucleotide
  Antisense strand to SEQ ID NO: 2451322
aacuucgaacaauacaaag

SEQ ID NO: 2451324 - RNA, 19 nt, Artificial Sequence
  Description of Artificial Sequence: Synthetic oligonucleotide
  Sense strand starting at position 2138 of SEQ ID NO: 1887140
auuguucgaaguugagaga

SEQ ID NO: 2451325 - RNA, 19 nt, Artificial Sequence
  Description of Artificial Sequence: Synthetic oligonucleotide
  Antisense strand to SEQ ID NO: 2451324
ucucucaacuucgaacaau

SEQ ID NO: 2451326 - RNA, 19 nt, Artificial Sequence
  Description of Artificial Sequence: Synthetic oligonucleotide
  Sense strand starting at position 2670 of SEQ ID NO: 1887140
gcgucauuccgcuguggau

SEQ ID NO: 2451327 - RNA, 19 nt, Artificial Sequence
  Description of Artificial Sequence: Synthetic oligonucleotide
  Antisense strand to SEQ ID NO: 2451326
auccacagcggaaugacgc

SEQ ID NO: 2451328 - RNA, 19 nt, Artificial Sequence
  Description of Artificial Sequence: Synthetic oligonucleotide
  Sense strand starting at position 2729 of SEQ ID NO: 1887140
acggaugucugcaggcaga

SEQ ID NO: 2451329 - RNA, 19 nt, Artificial Sequence
  Description of Artificial Sequence: Synthetic oligonucleotide
  Antisense strand to SEQ ID NO: 2451328
ucugccugcagacauccgu

SEQ ID NO: 2451330 - RNA, 19 nt, Artificial Sequence
  Description of Artificial Sequence: Synthetic oligonucleotide
  Sense strand starting at position 2876 of SEQ ID NO: 1887140
cgccguagccagcuguaau

SEQ ID NO: 2451331 - RNA, 19 nt, Artificial Sequence
  Description of Artificial Sequence: Synthetic oligonucleotide
  Antisense strand to SEQ ID NO: 2451330
auuacagcuggcuacggcg

SEQ ID NO: 2451332 - RNA, 19 nt, Artificial Sequence
  Description of Artificial Sequence: Synthetic oligonucleotide
  Sense strand starting at position 2877 of SEQ ID NO: 1887140
gccguagccagcuguaaug

SEQ ID NO: 2451333 - RNA, 19 nt, Artificial Sequence
  Description of Artificial Sequence: Synthetic oligonucleotide
  Antisense strand to SEQ ID NO: 2451332
cauuacagcuggcuacggc

SEQ ID NO: 2451334 - RNA, 19 nt, Artificial Sequence
  Description of Artificial Sequence: Synthetic oligonucleotide
  Sense strand starting at position 2939 of SEQ ID NO: 1887140
ggagguccuuucuggaauc

SEQ ID NO: 2451335 - RNA, 19 nt, Artificial Sequence
  Description of Artificial Sequence: Synthetic oligonucleotide
  Antisense strand to SEQ ID NO: 2451334
gauuccagaaaggaccucc

SEQ ID NO: 2451336 - RNA, 19 nt, Artificial Sequence
  Description of Artificial Sequence: Synthetic oligonucleotide
  Sense strand starting at position 2960 of SEQ ID NO: 1887140
gaccuuggcuguccugaga

SEQ ID NO: 2451337 - RNA, 19 nt, Artificial Sequence
  Description of Artificial Sequence: Synthetic oligonucleotide
  Antisense strand to SEQ ID NO: 2451336
ucucaggacagccaagguc

SEQ ID NO: 2451338 - RNA, 19 nt, Artificial Sequence
  Description of Artificial Sequence: Synthetic oligonucleotide
  Sense strand starting at position 3162 of SEQ ID NO: 1887140
uucugcuggccuugaauau

SEQ ID NO: 2451339 - RNA, 19 nt, Artificial Sequence
  Description of Artificial Sequence: Synthetic oligonucleotide
  Antisense strand to SEQ ID NO: 2451338
auauucaaggccagcagaa

SEQ ID NO: 2451340 - RNA, 19 nt, Artificial Sequence
  Description of Artificial Sequence: Synthetic oligonucleotide
  Sense strand starting at position 3193 of SEQ ID NO: 1887140
aggacauucucauugcuca

SEQ ID NO: 2451341 - RNA, 19 nt, Artificial Sequence
  Description of Artificial Sequence: Synthetic oligonucleotide
  Antisense strand to SEQ ID NO: 2451340
ugagcaaugagaauguccu

SEQ ID NO: 2451342 - RNA, 19 nt, Artificial Sequence
  Description of Artificial Sequence: Synthetic oligonucleotide
  Sense strand starting at position 3220 of SEQ ID NO: 1887140
uggcgcugccuuugggaau

SEQ ID NO: 2451343 - RNA, 19 nt, Artificial Sequence
  Description of Artificial Sequence: Synthetic oligonucleotide
  Antisense strand to SEQ ID NO: 2451342
auucccaaaggcagcgcca

SEQ ID NO: 2451344 - RNA, 19 nt, Artificial Sequence
  Description of Artificial Sequence: Synthetic oligonucleotide
  Sense strand starting at position 3223 of SEQ ID NO: 1887140
cgcugccuuugggaaugaa

SEQ ID NO: 2451345 - RNA, 19 nt, Artificial Sequence
  Description of Artificial Sequence: Synthetic oligonucleotide
  Antisense strand to SEQ ID NO: 2451344
uucauucccaaaggcagcg

SEQ ID NO: 2451346 - RNA, 19 nt, Artificial Sequence
  Description of Artificial Sequence: Synthetic oligonucleotide
  Sense strand starting at position 3226 of SEQ ID NO: 1887140
ugccuuugggaaugaaguu

SEQ ID NO: 2451347 - RNA, 19 nt, Artificial Sequence
  Description of Artificial Sequence: Synthetic oligonucleotide
  Antisense strand to SEQ ID NO: 2451346
aacuucauucccaaaggca

SEQ ID NO: 2451348 - RNA, 19 nt, Artificial Sequence
  Description of Artificial Sequence: Synthetic oligonucleotide
  Sense strand starting at position 3269 of SEQ ID NO: 1887140
ggcugucugcugcauuuga

SEQ ID NO: 2451349 - RNA, 19 nt, Artificial Sequence
  Description of Artificial Sequence: Synthetic oligonucleotide
  Antisense strand to SEQ ID NO: 2451348
ucaaaugcagcagacagcc

SEQ ID NO: 2451350 - RNA, 19 nt, Artificial Sequence
  Description of Artificial Sequence: Synthetic oligonucleotide
  Sense strand starting at position 3434 of SEQ ID NO: 1887140
gggugaacccaugaggcau

SEQ ID NO: 2451351 - RNA, 19 nt, Artificial Sequence
  Description of Artificial Sequence: Synthetic oligonucleotide
  Antisense strand to SEQ ID NO: 2451350
augccucauggguucaccc

SEQ ID NO: 2451352 - RNA, 19 nt, Artificial Sequence
  Description of Artificial Sequence: Synthetic oligonucleotide
  Sense strand starting at position 3523 of SEQ ID NO: 1887140
cauagaaaggcaugugaca

SEQ ID NO: 2451353 - RNA, 19 nt, Artificial Sequence
  Description of Artificial Sequence: Synthetic oligonucleotide
  Antisense strand to SEQ ID NO: 2451352
ugucacaugccuuucuaug

SEQ ID NO: 2451354 - RNA, 19 nt, Artificial Sequence
  Description of Artificial Sequence: Synthetic oligonucleotide
  Sense strand starting at position 3528 of SEQ ID NO: 1887140
aaaggcaugugacaagaaa

SEQ ID NO: 2451355 - RNA, 19 nt, Artificial Sequence
  Description of Artificial Sequence: Synthetic oligonucleotide
  Antisense strand to SEQ ID NO: 2451354
uuucuugucacaugccuuu

SEQ ID NO: 2451356 - RNA, 19 nt, Artificial Sequence
  Description of Artificial Sequence: Synthetic oligonucleotide
  Sense strand starting at position 123 of SEQ ID NO: 1887141
uagcgaagcuucucaugaa

SEQ ID NO: 2451357 - RNA, 19 nt, Artificial Sequence
  Description of Artificial Sequence: Synthetic oligonucleotide
  Antisense strand to SEQ ID NO: 2451356
uucaugagaagcuucgcua

SEQ ID NO: 2451358 - RNA, 19 nt, Artificial Sequence
  Description of Artificial Sequence: Synthetic oligonucleotide
  Sense strand starting at position 133 of SEQ ID NO: 1887141
ucucaugaaucugcaaaga

SEQ ID NO: 2451359 - RNA, 19 nt, Artificial Sequence
  Description of Artificial Sequence: Synthetic oligonucleotide
  Antisense strand to SEQ ID NO: 2451358
ucuuugcagauucaugaga

SEQ ID NO: 2451360 - RNA, 19 nt, Artificial Sequence
  Description of Artificial Sequence: Synthetic oligonucleotide
  Sense strand starting at position 248 of SEQ ID NO: 1887141
gagaaaguccuguguagug

SEQ ID NO: 2451361 - RNA, 19 nt, Artificial Sequence
  Description of Artificial Sequence: Synthetic oligonucleotide
  Antisense strand to SEQ ID NO: 2451360
cacuacacaggacuuucuc

SEQ ID NO: 2451362 - RNA, 19 nt, Artificial Sequence
  Description of Artificial Sequence: Synthetic oligonucleotide
  Sense strand starting at position 257 of SEQ ID NO: 1887141
cuguguagugggcaaguga

SEQ ID NO: 2451363 - RNA, 19 nt, Artificial Sequence
  Description of Artificial Sequence: Synthetic oligonucleotide
  Antisense strand to SEQ ID NO: 2451362
ucacuugcccacuacacag

SEQ ID NO: 2451364 - RNA, 19 nt, Artificial Sequence
  Description of Artificial Sequence: Synthetic oligonucleotide
  Sense strand starting at position 699 of SEQ ID NO: 1887141
uuaccagaguccuccgaua

SEQ ID NO: 2451365 - RNA, 19 nt, Artificial Sequence
  Description of Artificial Sequence: Synthetic oligonucleotide
  Antisense strand to SEQ ID NO: 2451364
uaucggaggacucugguaa

SEQ ID NO: 2451366 - RNA, 19 nt, Artificial Sequence
  Description of Artificial Sequence: Synthetic oligonucleotide
  Sense strand starting at position 704 of SEQ ID NO: 1887141
agaguccuccgauagcacu

SEQ ID NO: 2451367 - RNA, 19 nt, Artificial Sequence
  Description of Artificial Sequence: Synthetic oligonucleotide
  Antisense strand to SEQ ID NO: 2451366
agugcuaucggaggacucu

SEQ ID NO: 2451368 - RNA, 19 nt, Artificial Sequence
  Description of Artificial Sequence: Synthetic oligonucleotide
  Sense strand starting at position 777 of SEQ ID NO: 1887141
gguggagguggguauugaa

SEQ ID NO: 2451369 - RNA, 19 nt, Artificial Sequence
  Description of Artificial Sequence: Synthetic oligonucleotide
  Antisense strand to SEQ ID NO: 2451368
uucaauacccaccuccacc

SEQ ID NO: 2451370 - RNA, 19 nt, Artificial Sequence
  Description of Artificial Sequence: Synthetic oligonucleotide
  Sense strand starting at position 835 of SEQ ID NO: 1887141
ucuacuguguucucugaga

SEQ ID NO: 2451371 - RNA, 19 nt, Artificial Sequence
  Description of Artificial Sequence: Synthetic oligonucleotide
  Antisense strand to SEQ ID NO: 2451370
ucucagagaacacaguaga

SEQ ID NO: 2451372 - RNA, 19 nt, Artificial Sequence
  Description of Artificial Sequence: Synthetic oligonucleotide
  Sense strand starting at position 967 of SEQ ID NO: 1887141
ggugauuucuaugauaaac

SEQ ID NO: 2451373 - RNA, 19 nt, Artificial Sequence
  Description of Artificial Sequence: Synthetic oligonucleotide
  Antisense strand to SEQ ID NO: 2451372
guuuaucauagaaaucacc

SEQ ID NO: 2451374 - RNA, 19 nt, Artificial Sequence
  Description of Artificial Sequence: Synthetic oligonucleotide
  Sense strand starting at position 1005 of SEQ ID NO: 1887141
cugagaaaugacugcgaau

SEQ ID NO: 2451375 - RNA, 19 nt, Artificial Sequence
  Description of Artificial Sequence: Synthetic oligonucleotide
  Antisense strand to SEQ ID NO: 2451374
auucgcagucauuucucag

SEQ ID NO: 2451376 - RNA, 19 nt, Artificial Sequence
  Description of Artificial Sequence: Synthetic oligonucleotide
  Sense strand starting at position 1007 of SEQ ID NO: 1887141
gagaaaugacugcgaaugu

SEQ ID NO: 2451377 - RNA, 19 nt, Artificial Sequence
  Description of Artificial Sequence: Synthetic oligonucleotide
  Antisense strand to SEQ ID NO: 2451376
acauucgcagucauuucuc

SEQ ID NO: 2451378 - RNA, 19 nt, Artificial Sequence
  Description of Artificial Sequence: Synthetic oligonucleotide
  Sense strand starting at position 1014 of SEQ ID NO: 1887141
gacugcgaauguucccauu

SEQ ID NO: 2451379 - RNA, 19 nt, Artificial Sequence
  Description of Artificial Sequence: Synthetic oligonucleotide
  Antisense strand to SEQ ID NO: 2451378
aaugggaacauucgcaguc

SEQ ID NO: 2451380 - RNA, 19 nt, Artificial Sequence
  Description of Artificial Sequence: Synthetic oligonucleotide
  Sense strand starting at position 1064 of SEQ ID NO: 1887141
uucaguaagcuguggguca

SEQ ID NO: 2451381 - RNA, 19 nt, Artificial Sequence
  Description of Artificial Sequence: Synthetic oligonucleotide
  Antisense strand to SEQ ID NO: 2451380
ugacccacagcuuacugaa

SEQ ID NO: 2451382 - RNA, 19 nt, Artificial Sequence
  Description of Artificial Sequence: Synthetic oligonucleotide
  Sense strand starting at position 1066 of SEQ ID NO: 1887141
caguaagcugugggucaaa

SEQ ID NO: 2451383 - RNA, 19 nt, Artificial Sequence
  Description of Artificial Sequence: Synthetic oligonucleotide
  Antisense strand to SEQ ID NO: 2451382
uuugacccacagcuuacug

SEQ ID NO: 2451384 - RNA, 19 nt, Artificial Sequence
  Description of Artificial Sequence: Synthetic oligonucleotide
  Sense strand starting at position 1503 of SEQ ID NO: 1887141
gccacuaagaggcguaaga

SEQ ID NO: 2451385 - RNA, 19 nt, Artificial Sequence
  Description of Artificial Sequence: Synthetic oligonucleotide
  Antisense strand to SEQ ID NO: 2451384
ucuuacgccucuuaguggc

SEQ ID NO: 2451386 - RNA, 19 nt, Artificial Sequence
  Description of Artificial Sequence: Synthetic oligonucleotide
  Sense strand starting at position 1633 of SEQ ID NO: 1887141
gaaggaaccugugggagaa

SEQ ID NO: 2451387 - RNA, 19 nt, Artificial Sequence
  Description of Artificial Sequence: Synthetic oligonucleotide
  Antisense strand to SEQ ID NO: 2451386
uucucccacagguuccuuc

SEQ ID NO: 2451388 - RNA, 19 nt, Artificial Sequence
  Description of Artificial Sequence: Synthetic oligonucleotide
  Sense strand starting at position 1933 of SEQ ID NO: 1887141
gggaugugugcuccgcgaa

SEQ ID NO: 2451389 - RNA, 19 nt, Artificial Sequence
  Description of Artificial Sequence: Synthetic oligonucleotide
  Antisense strand to SEQ ID NO: 2451388
uucgcggagcacacauccc

SEQ ID NO: 2451390 - RNA, 19 nt, Artificial Sequence
  Description of Artificial Sequence: Synthetic oligonucleotide
  Sense strand starting at position 2385 of SEQ ID NO: 1887141
cacagauccuggguuugaa

SEQ ID NO: 2451391 - RNA, 19 nt, Artificial Sequence
  Description of Artificial Sequence: Synthetic oligonucleotide
  Antisense strand to SEQ ID NO: 2451390
uucaaacccaggaucugug

SEQ ID NO: 2451392 - RNA, 19 nt, Artificial Sequence
  Description of Artificial Sequence: Synthetic oligonucleotide
  Sense strand starting at position 2388 of SEQ ID NO: 1887141
agauccuggguuugaagau

SEQ ID NO: 2451393 - RNA, 19 nt, Artificial Sequence
  Description of Artificial Sequence: Synthetic oligonucleotide
  Antisense strand to SEQ ID NO: 2451392
aucuucaaacccaggaucu

SEQ ID NO: 2451394 - RNA, 19 nt, Artificial Sequence
  Description of Artificial Sequence: Synthetic oligonucleotide
  Sense strand starting at position 2441 of SEQ ID NO: 1887141
agggcaacucgcuguaaca

SEQ ID NO: 2451395 - RNA, 19 nt, Artificial Sequence
  Description of Artificial Sequence: Synthetic oligonucleotide
  Antisense strand to SEQ ID NO: 2451394
uguuacagcgaguugcccu

SEQ ID NO: 2451396 - RNA, 19 nt, Artificial Sequence
  Description of Artificial Sequence: Synthetic oligonucleotide
  Sense strand starting at position 2443 of SEQ ID NO: 1887141
ggcaacucgcuguaacaau

SEQ ID NO: 2451397 - RNA, 19 nt, Artificial Sequence
  Description of Artificial Sequence: Synthetic oligonucleotide
  Antisense strand to SEQ ID NO: 2451396
auuguuacagcgaguugcc

SEQ ID NO: 2451398 - RNA, 19 nt, Artificial Sequence
  Description of Artificial Sequence: Synthetic oligonucleotide
  Sense strand starting at position 2629 of SEQ ID NO: 1887141
cugaaauggccaugacgau

SEQ ID NO: 2451399 - RNA, 19 nt, Artificial Sequence
  Description of Artificial Sequence: Synthetic oligonucleotide
  Antisense strand to SEQ ID NO: 2451398
aucgucauggccauuucag

SEQ ID NO: 2451400 - RNA, 19 nt, Artificial Sequence
  Description of Artificial Sequence: Synthetic oligonucleotide
  Sense strand starting at position 2635 of SEQ ID NO: 1887141
uggccaugacgauaacuga

SEQ ID NO: 2451401 - RNA, 19 nt, Artificial Sequence
  Description of Artificial Sequence: Synthetic oligonucleotide
  Antisense strand to SEQ ID NO: 2451400
ucaguuaucgucauggcca

SEQ ID NO: 2451402 - RNA, 19 nt, Artificial Sequence
  Description of Artificial Sequence: Synthetic oligonucleotide
  Sense strand starting at position 2652 of SEQ ID NO: 1887141
gacuuauauugugcugucu

SEQ ID NO: 2451403 - RNA, 19 nt, Artificial Sequence
  Description of Artificial Sequence: Synthetic oligonucleotide
  Antisense strand to SEQ ID NO: 2451402
agacagcacaauauaaguc

SEQ ID NO: 2451404 - RNA, 19 nt, Artificial Sequence
  Description of Artificial Sequence: Synthetic oligonucleotide
  Sense strand starting at position 2677 of SEQ ID NO: 1887141
ccagguacuccucagauca

SEQ ID NO: 2451405 - RNA, 19 nt, Artificial Sequence
  Description of Artificial Sequence: Synthetic oligonucleotide
  Antisense strand to SEQ ID NO: 2451404
ugaucugaggaguaccugg

SEQ ID NO: 2451406 - RNA, 19 nt, Artificial Sequence
  Description of Artificial Sequence: Synthetic oligonucleotide
  Sense strand starting at position 2705 of SEQ ID NO: 1887141
acaguaguuccugauauca

SEQ ID NO: 2451407 - RNA, 19 nt, Artificial Sequence
  Description of Artificial Sequence: Synthetic oligonucleotide
  Antisense strand to SEQ ID NO: 2451406
ugauaucaggaacuacugu

SEQ ID NO: 2451408 - RNA, 19 nt, Artificial Sequence
  Description of Artificial Sequence: Synthetic oligonucleotide
  Sense strand starting at position 2739 of SEQ ID NO: 1887141
ugguucugcaauugaggaa

SEQ ID NO: 2451409 - RNA, 19 nt, Artificial Sequence
  Description of Artificial Sequence: Synthetic oligonucleotide
  Antisense strand to SEQ ID NO: 2451408
uuccucaauugcagaacca

SEQ ID NO: 2451410 - RNA, 19 nt, Artificial Sequence
  Description of Artificial Sequence: Synthetic oligonucleotide
  Sense strand starting at position 2770 of SEQ ID NO: 1887141
ggugaaagaauguguauag

SEQ ID NO: 2451411 - RNA, 19 nt, Artificial Sequence
  Description of Artificial Sequence: Synthetic oligonucleotide
  Antisense strand to SEQ ID NO: 2451410
cuauacacauucuuucacc

SEQ ID NO: 2451412 - RNA, 19 nt, Artificial Sequence
  Description of Artificial Sequence: Synthetic oligonucleotide
  Sense strand starting at position 2928 of SEQ ID NO: 1887141
agagguuaagucuggaagu

SEQ ID NO: 2451413 - RNA, 19 nt, Artificial Sequence
  Description of Artificial Sequence: Synthetic oligonucleotide
  Antisense strand to SEQ ID NO: 2451412
acuuccagacuuaaccucu

SEQ ID NO: 2451414 - RNA, 19 nt, Artificial Sequence
  Description of Artificial Sequence: Synthetic oligonucleotide
  Sense strand starting at position 2930 of SEQ ID NO: 1887141
agguuaagucuggaaguaa

SEQ ID NO: 2451415 - RNA, 19 nt, Artificial Sequence
  Description of Artificial Sequence: Synthetic oligonucleotide
  Antisense strand to SEQ ID NO: 2451414
uuacuuccagacuuaaccu

SEQ ID NO: 2451416 - RNA, 19 nt, Artificial Sequence
  Description of Artificial Sequence: Synthetic oligonucleotide
  Sense strand starting at position 3031 of SEQ ID NO: 1887141
aaaugucaugaugauguuu

SEQ ID NO: 2451417 - RNA, 19 nt, Artificial Sequence
  Description of Artificial Sequence: Synthetic oligonucleotide
  Antisense strand to SEQ ID NO: 2451416
aaacaucaucaugacauuu

SEQ ID NO: 2451418 - RNA, 19 nt, Artificial Sequence
  Description of Artificial Sequence: Synthetic oligonucleotide
  Sense strand starting at position 3112 of SEQ ID NO: 1887141
auguaacgugccugagacu

SEQ ID NO: 2451419 - RNA, 19 nt, Artificial Sequence
  Description of Artificial Sequence: Synthetic oligonucleotide
  Antisense strand to SEQ ID NO: 2451418
agucucaggcacguuacau

SEQ ID NO: 2451420 - RNA, 19 nt, Artificial Sequence
  Description of Artificial Sequence: Synthetic oligonucleotide
  Sense strand starting at position 3142 of SEQ ID NO: 1887141
uguguaaugcuggaguggu

SEQ ID NO: 2451421 - RNA, 19 nt, Artificial Sequence
  Description of Artificial Sequence: Synthetic oligonucleotide
  Antisense strand to SEQ ID NO: 2451420
accacuccagcauuacaca

SEQ ID NO: 2451422 - RNA, 19 nt, Artificial Sequence
  Description of Artificial Sequence: Synthetic oligonucleotide
  Sense strand starting at position 3159 of SEQ ID NO: 1887141
gugccagauucugaauuuc

SEQ ID NO: 2451423 - RNA, 19 nt, Artificial Sequence
  Description of Artificial Sequence: Synthetic oligonucleotide
  Antisense strand to SEQ ID NO: 2451422
gaaauucagaaucuggcac

SEQ ID NO: 2451424 - RNA, 19 nt, Artificial Sequence
  Description of Artificial Sequence: Synthetic oligonucleotide
  Sense strand starting at position 3290 of SEQ ID NO: 1887141
ugagaaccaucugauccau

SEQ ID NO: 2451425 - RNA, 19 nt, Artificial Sequence
  Description of Artificial Sequence: Synthetic oligonucleotide
  Antisense strand to SEQ ID NO: 2451424
auggaucagaugguucuca

SEQ ID NO: 2451426 - RNA, 19 nt, Artificial Sequence
  Description of Artificial Sequence: Synthetic oligonucleotide
  Sense strand starting at position 3345 of SEQ ID NO: 1887141
ggaagugguguuggaacaa

SEQ ID NO: 2451427 - RNA, 19 nt, Artificial Sequence
  Description of Artificial Sequence: Synthetic oligonucleotide
  Antisense strand to SEQ ID NO: 2451426
uuguuccaacaccacuucc

SEQ ID NO: 2451428 - RNA, 19 nt, Artificial Sequence
  Description of Artificial Sequence: Synthetic oligonucleotide
  Sense strand starting at position 3417 of SEQ ID NO: 1887141
aacgcaauuuaagagagau

SEQ ID NO: 2451429 - RNA, 19 nt, Artificial Sequence
  Description of Artificial Sequence: Synthetic oligonucleotide
  Antisense strand to SEQ ID NO: 2451428
aucucucuuaaauugcguu

SEQ ID NO: 2451430 - RNA, 19 nt, Artificial Sequence
  Description of Artificial Sequence: Synthetic oligonucleotide
  Sense strand starting at position 3427 of SEQ ID NO: 1887141
aagagagaucauuggccua

SEQ ID NO: 2451431 - RNA, 19 nt, Artificial Sequence
  Description of Artificial Sequence: Synthetic oligonucleotide
  Antisense strand to SEQ ID NO: 2451430
uaggccaaugaucucucuu

SEQ ID NO: 2451432 - RNA, 19 nt, Artificial Sequence
  Description of Artificial Sequence: Synthetic oligonucleotide
  Sense strand starting at position 3429 of SEQ ID NO: 1887141
gagagaucauuggccuaaa

SEQ ID NO: 2451433 - RNA, 19 nt, Artificial Sequence
  Description of Artificial Sequence: Synthetic oligonucleotide
  Antisense strand to SEQ ID NO: 2451432
uuuaggccaaugaucucuc

SEQ ID NO: 2451434 - RNA, 19 nt, Artificial Sequence
  Description of Artificial Sequence: Synthetic oligonucleotide
  Sense strand starting at position 3430 of SEQ ID NO: 1887141
agagaucauuggccuaaac

SEQ ID NO: 2451435 - RNA, 19 nt, Artificial Sequence
  Description of Artificial Sequence: Synthetic oligonucleotide
  Antisense strand to SEQ ID NO: 2451434
guuuaggccaaugaucucu

SEQ ID NO: 2451436 - RNA, 19 nt, Artificial Sequence
  Description of Artificial Sequence: Synthetic oligonucleotide
  Sense strand starting at position 47 of SEQ ID NO: 1887142
gagagcuuguuagaaauuu

SEQ ID NO: 2451437 - RNA, 19 nt, Artificial Sequence
  Description of Artificial Sequence: Synthetic oligonucleotide
  Antisense strand to SEQ ID NO: 2451436
aaauuucuaacaagcucuc

SEQ ID NO: 2451438 - RNA, 19 nt, Artificial Sequence
  Description of Artificial Sequence: Synthetic oligonucleotide
  Sense strand starting at position 544 of SEQ ID NO: 1887142
gaugcugacgcaugcuaaa

SEQ ID NO: 2451439 - RNA, 19 nt, Artificial Sequence
  Description of Artificial Sequence: Synthetic oligonucleotide
  Antisense strand to SEQ ID NO: 2451438
uuuagcaugcgucagcauc

SEQ ID NO: 2451440 - RNA, 19 nt, Artificial Sequence
  Description of Artificial Sequence: Synthetic oligonucleotide
  Sense strand starting at position 674 of SEQ ID NO: 1887142
cucucuuccuguuuacaga

SEQ ID NO: 2451441 - RNA, 19 nt, Artificial Sequence
  Description of Artificial Sequence: Synthetic oligonucleotide
  Antisense strand to SEQ ID NO: 2451440
ucuguaaacaggaagagag

SEQ ID NO: 2451442 - RNA, 19 nt, Artificial Sequence
  Description of Artificial Sequence: Synthetic oligonucleotide
  Sense strand starting at position 1316 of SEQ ID NO: 1887142
acccaacuggucugaacuu

SEQ ID NO: 2451443 - RNA, 19 nt, Artificial Sequence
  Description of Artificial Sequence: Synthetic oligonucleotide
  Antisense strand to SEQ ID NO: 2451442
aaguucagaccaguugggu

SEQ ID NO: 2451444 - RNA, 19 nt, Artificial Sequence
  Description of Artificial Sequence: Synthetic oligonucleotide
  Sense strand starting at position 1334 of SEQ ID NO: 1887142
ucaguugcugcgucuguaa

SEQ ID NO: 2451445 - RNA, 19 nt, Artificial Sequence
  Description of Artificial Sequence: Synthetic oligonucleotide
  Antisense strand to SEQ ID NO: 2451444
uuacagacgcagcaacuga

SEQ ID NO: 2451446 - RNA, 19 nt, Artificial Sequence
  Description of Artificial Sequence: Synthetic oligonucleotide
  Sense strand starting at position 1355 of SEQ ID NO: 1887142
aggagaugcgaaugucuuu

SEQ ID NO: 2451447 - RNA, 19 nt, Artificial Sequence
  Description of Artificial Sequence: Synthetic oligonucleotide
  Antisense strand to SEQ ID NO: 2451446
aaagacauucgcaucuccu

SEQ ID NO: 2451448 - RNA, 19 nt, Artificial Sequence
  Description of Artificial Sequence: Synthetic oligonucleotide
  Sense strand starting at position 1360 of SEQ ID NO: 1887142
augcgaaugucuuucucac

SEQ ID NO: 2451449 - RNA, 19 nt, Artificial Sequence
  Description of Artificial Sequence: Synthetic oligonucleotide
  Antisense strand to SEQ ID NO: 2451448
gugagaaagacauucgcau

SEQ ID NO: 2451450 - RNA, 19 nt, Artificial Sequence
  Description of Artificial Sequence: Synthetic oligonucleotide
  Sense strand starting at position 1362 of SEQ ID NO: 1887142
gcgaaugucuuucucacag

SEQ ID NO: 2451451 - RNA, 19 nt, Artificial Sequence
  Description of Artificial Sequence: Synthetic oligonucleotide
  Antisense strand to SEQ ID NO: 2451450
cugugagaaagacauucgc

SEQ ID NO: 2451452 - RNA, 19 nt, Artificial Sequence
  Description of Artificial Sequence: Synthetic oligonucleotide
  Sense strand starting at position 1374 of SEQ ID NO: 1887142
cucacagggugcuuuagau

SEQ ID NO: 2451453 - RNA, 19 nt, Artificial Sequence
  Description of Artificial Sequence: Synthetic oligonucleotide
  Antisense strand to SEQ ID NO: 2451452
aucuaaagcacccugugag

SEQ ID NO: 2451454 - RNA, 19 nt, Artificial Sequence
  Description of Artificial Sequence: Synthetic oligonucleotide
  Sense strand starting at position 1378 of SEQ ID NO: 1887142
cagggugcuuuagauuuaa

SEQ ID NO: 2451455 - RNA, 19 nt, Artificial Sequence
  Description of Artificial Sequence: Synthetic oligonucleotide
  Antisense strand to SEQ ID NO: 2451454
uuaaaucuaaagcacccug

SEQ ID NO: 2451456 - RNA, 19 nt, Artificial Sequence
  Description of Artificial Sequence: Synthetic oligonucleotide
  Sense strand starting at position 1453 of SEQ ID NO: 1887142
ggccuauauuaagugcuca

SEQ ID NO: 2451457 - RNA, 19 nt, Artificial Sequence
  Description of Artificial Sequence: Synthetic oligonucleotide
  Antisense strand to SEQ ID NO: 2451456
ugagcacuuaauauaggcc

SEQ ID NO: 2451458 - RNA, 19 nt, Artificial Sequence
  Description of Artificial Sequence: Synthetic oligonucleotide
  Sense strand starting at position 1532 of SEQ ID NO: 1887142
gcuggcuaugcugaaugaa

SEQ ID NO: 2451459 - RNA, 19 nt, Artificial Sequence
  Description of Artificial Sequence: Synthetic oligonucleotide
  Antisense strand to SEQ ID NO: 2451458
uucauucagcauagccagc

SEQ ID NO: 2451460 - RNA, 19 nt, Artificial Sequence
  Description of Artificial Sequence: Synthetic oligonucleotide
  Sense strand starting at position 1535 of SEQ ID NO: 1887142
ggcuaugcugaaugaacau

SEQ ID NO: 2451461 - RNA, 19 nt, Artificial Sequence
  Description of Artificial Sequence: Synthetic oligonucleotide
  Antisense strand to SEQ ID NO: 2451460
auguucauucagcauagcc

SEQ ID NO: 2451462 - RNA, 19 nt, Artificial Sequence
  Description of Artificial Sequence: Synthetic oligonucleotide
  Sense strand starting at position 1541 of SEQ ID NO: 1887142
gcugaaugaacaugguucu

SEQ ID NO: 2451463 - RNA, 19 nt, Artificial Sequence
  Description of Artificial Sequence: Synthetic oligonucleotide
  Antisense strand to SEQ ID NO: 2451462
agaaccauguucauucagc

SEQ ID NO: 2451464 - RNA, 19 nt, Artificial Sequence
  Description of Artificial Sequence: Synthetic oligonucleotide
  Sense strand starting at position 1562 of SEQ ID NO: 1887142
ccuugcggaguuuaauaga

SEQ ID NO: 2451465 - RNA, 19 nt, Artificial Sequence
  Description of Artificial Sequence: Synthetic oligonucleotide
  Antisense strand to SEQ ID NO: 2451464
ucuauuaaacuccgcaagg

SEQ ID NO: 2451466 - RNA, 19 nt, Artificial Sequence
  Description of Artificial Sequence: Synthetic oligonucleotide
  Sense strand starting at position 1703 of SEQ ID NO: 1887142
cgaggagugguccaggcaa

SEQ ID NO: 2451467 - RNA, 19 nt, Artificial Sequence
  Description of Artificial Sequence: Synthetic oligonucleotide
  Antisense strand to SEQ ID NO: 2451466
uugccuggaccacuccucg

SEQ ID NO: 2451468 - RNA, 19 nt, Artificial Sequence
  Description of Artificial Sequence: Synthetic oligonucleotide
  Sense strand starting at position 1762 of SEQ ID NO: 1887142
gugauuaccagucgaguca

SEQ ID NO: 2451469 - RNA, 19 nt, Artificial Sequence
  Description of Artificial Sequence: Synthetic oligonucleotide
  Antisense strand to SEQ ID NO: 2451468
ugacucgacugguaaucac

SEQ ID NO: 2451470 - RNA, 19 nt, Artificial Sequence
  Description of Artificial Sequence: Synthetic oligonucleotide
  Sense strand starting at position 1823 of SEQ ID NO: 1887142
gucagagauuaugggaaga

SEQ ID NO: 2451471 - RNA, 19 nt, Artificial Sequence
  Description of Artificial Sequence: Synthetic oligonucleotide
  Antisense strand to SEQ ID NO: 2451470
ucuucccauaaucucugac

SEQ ID NO: 2451472 - RNA, 19 nt, Artificial Sequence
  Description of Artificial Sequence: Synthetic oligonucleotide
  Sense strand starting at position 1825 of SEQ ID NO: 1887142
cagagauuaugggaagaau

SEQ ID NO: 2451473 - RNA, 19 nt, Artificial Sequence
  Description of Artificial Sequence: Synthetic oligonucleotide
  Antisense strand to SEQ ID NO: 2451472
auucuucccauaaucucug

SEQ ID NO: 2451474 - RNA, 19 nt, Artificial Sequence
  Description of Artificial Sequence: Synthetic oligonucleotide
  Sense strand starting at position 2505 of SEQ ID NO: 1887142
ggguaaggccuccaagagu

SEQ ID NO: 2451475 - RNA, 19 nt, Artificial Sequence
  Description of Artificial Sequence: Synthetic oligonucleotide
  Antisense strand to SEQ ID NO: 2451474
acucuuggaggccuuaccc

SEQ ID NO: 2451476 - RNA, 19 nt, Artificial Sequence
  Description of Artificial Sequence: Synthetic oligonucleotide
  Sense strand starting at position 2689 of SEQ ID NO: 1887142
gugcuagaaggcugaaaca

SEQ ID NO: 2451477 - RNA, 19 nt, Artificial Sequence
  Description of Artificial Sequence: Synthetic oligonucleotide
  Antisense strand to SEQ ID NO: 2451476
uguuucagccuucuagcac

SEQ ID NO: 2451478 - RNA, 19 nt, Artificial Sequence
  Description of Artificial Sequence: Synthetic oligonucleotide
  Sense strand starting at position 2722 of SEQ ID NO: 1887142
gucccugacguguacugau

SEQ ID NO: 2451479 - RNA, 19 nt, Artificial Sequence
  Description of Artificial Sequence: Synthetic oligonucleotide
  Antisense strand to SEQ ID NO: 2451478
aucaguacacgucagggac

SEQ ID NO: 2451480 - RNA, 19 nt, Artificial Sequence
  Description of Artificial Sequence: Synthetic oligonucleotide
  Sense strand starting at position 2730 of SEQ ID NO: 1887142
cguguacugauuugucaac

SEQ ID NO: 2451481 - RNA, 19 nt, Artificial Sequence
  Description of Artificial Sequence: Synthetic oligonucleotide
  Antisense strand to SEQ ID NO: 2451480
guugacaaaucaguacacg

SEQ ID NO: 2451482 - RNA, 19 nt, Artificial Sequence
  Description of Artificial Sequence: Synthetic oligonucleotide
  Sense strand starting at position 2731 of SEQ ID NO: 1887142
guguacugauuugucaacu

SEQ ID NO: 2451483 - RNA, 19 nt, Artificial Sequence
  Description of Artificial Sequence: Synthetic oligonucleotide
  Antisense strand to SEQ ID NO: 2451482
aguugacaaaucaguacac

SEQ ID NO: 2451484 - RNA, 19 nt, Artificial Sequence
  Description of Artificial Sequence: Synthetic oligonucleotide
  Sense strand starting at position 2786 of SEQ ID NO: 1887142
agugguaaugcccagcuga

SEQ ID NO: 2451485 - RNA, 19 nt, Artificial Sequence
  Description of Artificial Sequence: Synthetic oligonucleotide
  Antisense strand to SEQ ID NO: 2451484
ucagcugggcauuaccacu

SEQ ID NO: 2451486 - RNA, 19 nt, Artificial Sequence
  Description of Artificial Sequence: Synthetic oligonucleotide
  Sense strand starting at position 3333 of SEQ ID NO: 1887142
gccuaagcaugaguugacu

SEQ ID NO: 2451487 - RNA, 19 nt, Artificial Sequence
  Description of Artificial Sequence: Synthetic oligonucleotide
  Antisense strand to SEQ ID NO: 2451486
agucaacucaugcuuaggc

SEQ ID NO: 2451488 - RNA, 19 nt, Artificial Sequence
  Description of Artificial Sequence: Synthetic oligonucleotide
  Sense strand starting at position 3424 of SEQ ID NO: 1887142
guaccuuacuacucagagu

SEQ ID NO: 2451489 - RNA, 19 nt, Artificial Sequence
  Description of Artificial Sequence: Synthetic oligonucleotide
  Antisense strand to SEQ ID NO: 2451488
acucugaguaguaagguac

SEQ ID NO: 2451490 - RNA, 19 nt, Artificial Sequence
  Description of Artificial Sequence: Synthetic oligonucleotide
  Sense strand starting at position 3438 of SEQ ID NO: 1887142
agaguauguguggauggga

SEQ ID NO: 2451491 - RNA, 19 nt, Artificial Sequence
  Description of Artificial Sequence: Synthetic oligonucleotide
  Antisense strand to SEQ ID NO: 2451490
ucccauccacacauacucu

SEQ ID NO: 2451492 - RNA, 19 nt, Artificial Sequence
  Description of Artificial Sequence: Synthetic oligonucleotide
  Sense strand starting at position 3498 of SEQ ID NO: 1887142
gcuuguuagaaguggagca

SEQ ID NO: 2451493 - RNA, 19 nt, Artificial Sequence
  Description of Artificial Sequence: Synthetic oligonucleotide
  Antisense strand to SEQ ID NO: 2451492
ugcuccacuucuaacaagc

SEQ ID NO: 2451494 - RNA, 19 nt, Artificial Sequence
  Description of Artificial Sequence: Synthetic oligonucleotide
  Sense strand starting at position 3545 of SEQ ID NO: 1887142
uuagaaucugcaugggcau

SEQ ID NO: 2451495 - RNA, 19 nt, Artificial Sequence
  Description of Artificial Sequence: Synthetic oligonucleotide
  Antisense strand to SEQ ID NO: 2451494
augcccaugcagauucuaa

SEQ ID NO: 2451496 - RNA, 19 nt, Artificial Sequence
  Description of Artificial Sequence: Synthetic oligonucleotide
  Sense strand starting at position 3546 of SEQ ID NO: 1887142
uagaaucugcaugggcaua

SEQ ID NO: 2451497 - RNA, 19 nt, Artificial Sequence
  Description of Artificial Sequence: Synthetic oligonucleotide
  Antisense strand to SEQ ID NO: 2451496
uaugcccaugcagauucua

SEQ ID NO: 2451498 - RNA, 19 nt, Artificial Sequence
  Description of Artificial Sequence: Synthetic oligonucleotide
  Sense strand starting at position 3756 of SEQ ID NO: 1887142
guuauccacuugucaggga

SEQ ID NO: 2451499 - RNA, 19 nt, Artificial Sequence
  Description of Artificial Sequence: Synthetic oligonucleotide
  Antisense strand to SEQ ID NO: 2451498
ucccugacaaguggauaac

SEQ ID NO: 2451500 - RNA, 19 nt, Artificial Sequence
  Description of Artificial Sequence: Synthetic oligonucleotide
  Sense strand starting at position 3760 of SEQ ID NO: 1887142
uccacuugucagggauguu

SEQ ID NO: 2451501 - RNA, 19 nt, Artificial Sequence
  Description of Artificial Sequence: Synthetic oligonucleotide
  Antisense strand to SEQ ID NO: 2451500
aacaucccugacaagugga

SEQ ID NO: 2451502 - RNA, 19 nt, Artificial Sequence
  Description of Artificial Sequence: Synthetic oligonucleotide
  Sense strand starting at position 3761 of SEQ ID NO: 1887142
ccacuugucagggauguuu

SEQ ID NO: 2451503 - RNA, 19 nt, Artificial Sequence
  Description of Artificial Sequence: Synthetic oligonucleotide
  Antisense strand to SEQ ID NO: 2451502
aaacaucccugacaagugg

SEQ ID NO: 2451504 - RNA, 19 nt, Artificial Sequence
  Description of Artificial Sequence: Synthetic oligonucleotide
  Sense strand starting at position 3769 of SEQ ID NO: 1887142
cagggauguuuggccuuau

SEQ ID NO: 2451505 - RNA, 19 nt, Artificial Sequence
  Description of Artificial Sequence: Synthetic oligonucleotide
  Antisense strand to SEQ ID NO: 2451504
auaaggccaaacaucccug

SEQ ID NO: 2451506 - RNA, 19 nt, Artificial Sequence
  Description of Artificial Sequence: Synthetic oligonucleotide
  Sense strand starting at position 3770 of SEQ ID NO: 1887142
agggauguuuggccuuauu

SEQ ID NO: 2451507 - RNA, 19 nt, Artificial Sequence
  Description of Artificial Sequence: Synthetic oligonucleotide
  Antisense strand to SEQ ID NO: 2451506
aauaaggccaaacaucccu

SEQ ID NO: 2451508 - RNA, 19 nt, Artificial Sequence
  Description of Artificial Sequence: Synthetic oligonucleotide
  Sense strand starting at position 3773 of SEQ ID NO: 1887142
gauguuuggccuuauucuu

SEQ ID NO: 2451509 - RNA, 19 nt, Artificial Sequence
  Description of Artificial Sequence: Synthetic oligonucleotide
  Antisense strand to SEQ ID NO: 2451508
aagaauaaggccaaacauc

SEQ ID NO: 2451510 - RNA, 19 nt, Artificial Sequence
  Description of Artificial Sequence: Synthetic oligonucleotide
  Sense strand starting at position 3871 of SEQ ID NO: 1887142
guuauccacuugucauaga

SEQ ID NO: 2451511 - RNA, 19 nt, Artificial Sequence
  Description of Artificial Sequence: Synthetic oligonucleotide
  Antisense strand to SEQ ID NO: 2451510
ucuaugacaaguggauaac

SEQ ID NO: 2451512 - RNA, 19 nt, Artificial Sequence
  Description of Artificial Sequence: Synthetic oligonucleotide
  Sense strand starting at position 3882 of SEQ ID NO: 1887142
gucauagauguuuggccuu

SEQ ID NO: 2451513 - RNA, 19 nt, Artificial Sequence
  Description of Artificial Sequence: Synthetic oligonucleotide
  Antisense strand to SEQ ID NO: 2451512
aaggccaaacaucuaugac

SEQ ID NO: 2451514 - RNA, 19 nt, Artificial Sequence
  Description of Artificial Sequence: Synthetic oligonucleotide
  Sense strand starting at position 3885 of SEQ ID NO: 1887142
auagauguuuggccuucuu

SEQ ID NO: 2451515 - RNA, 19 nt, Artificial Sequence
  Description of Artificial Sequence: Synthetic oligonucleotide
  Antisense strand to SEQ ID NO: 2451514
aagaaggccaaacaucuau

SEQ ID NO: 2451516 - RNA, 19 nt, Artificial Sequence
  Description of Artificial Sequence: Synthetic oligonucleotide
  Sense strand starting at position 289 of SEQ ID NO: 1887143
ugacuucgugcuuaauuaa

SEQ ID NO: 2451517 - RNA, 19 nt, Artificial Sequence
  Description of Artificial Sequence: Synthetic oligonucleotide
  Antisense strand to SEQ ID NO: 2451516
uuaauuaagcacgaaguca

SEQ ID NO: 2451518 - RNA, 19 nt, Artificial Sequence
  Description of Artificial Sequence: Synthetic oligonucleotide
  Sense strand starting at position 345 of SEQ ID NO: 1887143
gaagaucucugacagaagg

SEQ ID NO: 2451519 - RNA, 19 nt, Artificial Sequence
  Description of Artificial Sequence: Synthetic oligonucleotide
  Antisense strand to SEQ ID NO: 2451518
ccuucugucagagaucuuc

SEQ ID NO: 2451520 - RNA, 19 nt, Artificial Sequence
  Description of Artificial Sequence: Synthetic oligonucleotide
  Sense strand starting at position 458 of SEQ ID NO: 1887143
gggcauguugcauaaacuc

SEQ ID NO: 2451521 - RNA, 19 nt, Artificial Sequence
  Description of Artificial Sequence: Synthetic oligonucleotide
  Antisense strand to SEQ ID NO: 2451520
gaguuuaugcaacaugccc

SEQ ID NO: 2451522 - RNA, 19 nt, Artificial Sequence
  Description of Artificial Sequence: Synthetic oligonucleotide
  Sense strand starting at position 711 of SEQ ID NO: 1887143
gcauuaggaccuuaauacu

SEQ ID NO: 2451523 - RNA, 19 nt, Artificial Sequence
  Description of Artificial Sequence: Synthetic oligonucleotide
  Antisense strand to SEQ ID NO: 2451522
aguauuaagguccuaaugc

SEQ ID NO: 2451524 - RNA, 19 nt, Artificial Sequence
  Description of Artificial Sequence: Synthetic oligonucleotide
  Sense strand starting at position 727 of SEQ ID NO: 1887143
acuuaugggugucucuaaa

SEQ ID NO: 2451525 - RNA, 19 nt, Artificial Sequence
  Description of Artificial Sequence: Synthetic oligonucleotide
  Antisense strand to SEQ ID NO: 2451524
uuuagagacacccauaagu

SEQ ID NO: 2451526 - RNA, 19 nt, Artificial Sequence
  Description of Artificial Sequence: Synthetic oligonucleotide
  Sense strand starting at position 834 of SEQ ID NO: 1887143
uacggauacugaguugauc

SEQ ID NO: 2451527 - RNA, 19 nt, Artificial Sequence
  Description of Artificial Sequence: Synthetic oligonucleotide
  Antisense strand to SEQ ID NO: 2451526
gaucaacucaguauccgua

SEQ ID NO: 2451528 - RNA, 19 nt, Artificial Sequence
  Description of Artificial Sequence: Synthetic oligonucleotide
  Sense strand starting at position 836 of SEQ ID NO: 1887143
cggauacugaguugaucaa

SEQ ID NO: 2451529 - RNA, 19 nt, Artificial Sequence
  Description of Artificial Sequence: Synthetic oligonucleotide
  Antisense strand to SEQ ID NO: 2451528
uugaucaacucaguauccg

SEQ ID NO: 2451530 - RNA, 19 nt, Artificial Sequence
  Description of Artificial Sequence: Synthetic oligonucleotide
  Sense strand starting at position 840 of SEQ ID NO: 1887143
uacugaguugaucaaagca

SEQ ID NO: 2451531 - RNA, 19 nt, Artificial Sequence
  Description of Artificial Sequence: Synthetic oligonucleotide
  Antisense strand to SEQ ID NO: 2451530
ugcuuugaucaacucagua

SEQ ID NO: 2451532 - RNA, 19 nt, Artificial Sequence
  Description of Artificial Sequence: Synthetic oligonucleotide
  Sense strand starting at position 1087 of SEQ ID NO: 1887143
uuguaaagaccaggucuua

SEQ ID NO: 2451533 - RNA, 19 nt, Artificial Sequence
  Description of Artificial Sequence: Synthetic oligonucleotide
  Antisense strand to SEQ ID NO: 2451532
uaagaccuggucuuuacaa

SEQ ID NO: 2451534 - RNA, 19 nt, Artificial Sequence
  Description of Artificial Sequence: Synthetic oligonucleotide
  Sense strand starting at position 1206 of SEQ ID NO: 1887143
ccugaaugcuaugcuuaaa

SEQ ID NO: 2451535 - RNA, 19 nt, Artificial Sequence
  Description of Artificial Sequence: Synthetic oligonucleotide
  Antisense strand to SEQ ID NO: 2451534
uuuaagcauagcauucagg

SEQ ID NO: 2451536 - RNA, 19 nt, Artificial Sequence
  Description of Artificial Sequence: Synthetic oligonucleotide
  Sense strand starting at position 1216 of SEQ ID NO: 1887143
augcuuaaagcauaagcaa

SEQ ID NO: 2451537 - RNA, 19 nt, Artificial Sequence
  Description of Artificial Sequence: Synthetic oligonucleotide
  Antisense strand to SEQ ID NO: 2451536
uugcuuaugcuuuaagcau

SEQ ID NO: 2451538 - RNA, 19 nt, Artificial Sequence
  Description of Artificial Sequence: Synthetic oligonucleotide
  Sense strand starting at position 1246 of SEQ ID NO: 1887143
aggcaucugcuccauaugu

SEQ ID NO: 2451539 - RNA, 19 nt, Artificial Sequence
  Description of Artificial Sequence: Synthetic oligonucleotide
  Antisense strand to SEQ ID NO: 2451538
acauauggagcagaugccu

SEQ ID NO: 2451540 - RNA, 19 nt, Artificial Sequence
  Description of Artificial Sequence: Synthetic oligonucleotide
  Sense strand starting at position 1371 of SEQ ID NO: 1887143
cucucugaucaugagguuu

SEQ ID NO: 2451541 - RNA, 19 nt, Artificial Sequence
  Description of Artificial Sequence: Synthetic oligonucleotide
  Antisense strand to SEQ ID NO: 2451540
aaaccucaugaucagagag

SEQ ID NO: 2451542 - RNA, 19 nt, Artificial Sequence
  Description of Artificial Sequence: Synthetic oligonucleotide
  Sense strand starting at position 1706 of SEQ ID NO: 1887143
gaguauuucccucgacucu

SEQ ID NO: 2451543 - RNA, 19 nt, Artificial Sequence
  Description of Artificial Sequence: Synthetic oligonucleotide
  Antisense strand to SEQ ID NO: 2451542
agagucgagggaaauacuc

SEQ ID NO: 2451544 - RNA, 19 nt, Artificial Sequence
  Description of Artificial Sequence: Synthetic oligonucleotide
  Sense strand starting at position 2171 of SEQ ID NO: 1887143
uggcacauugccguuuauu

SEQ ID NO: 2451545 - RNA, 19 nt, Artificial Sequence
  Description of Artificial Sequence: Synthetic oligonucleotide
  Antisense strand to SEQ ID NO: 2451544
aauaaacggcaaugugcca

SEQ ID NO: 2451546 - RNA, 19 nt, Artificial Sequence
  Description of Artificial Sequence: Synthetic oligonucleotide
  Sense strand starting at position 2172 of SEQ ID NO: 1887143
ggcacauugccguuuauuc

SEQ ID NO: 2451547 - RNA, 19 nt, Artificial Sequence
  Description of Artificial Sequence: Synthetic oligonucleotide
  Antisense strand to SEQ ID NO: 2451546
gaauaaacggcaaugugcc

SEQ ID NO: 2451548 - RNA, 19 nt, Artificial Sequence
  Description of Artificial Sequence: Synthetic oligonucleotide
  Sense strand starting at position 2182 of SEQ ID NO: 1887143
cguuuauuccauuaguuaa

SEQ ID NO: 2451549 - RNA, 19 nt, Artificial Sequence
  Description of Artificial Sequence: Synthetic oligonucleotide
  Antisense strand to SEQ ID NO: 2451548
uuaacuaauggaauaaacg

SEQ ID NO: 2451550 - RNA, 19 nt, Artificial Sequence
  Description of Artificial Sequence: Synthetic oligonucleotide
  Sense strand starting at position 2503 of SEQ ID NO: 1887143
gguugucaugcgccagcaa

SEQ ID NO: 2451551 - RNA, 19 nt, Artificial Sequence
  Description of Artificial Sequence: Synthetic oligonucleotide
  Antisense strand to SEQ ID NO: 2451550
uugcuggcgcaugacaacc

SEQ ID NO: 2451552 - RNA, 19 nt, Artificial Sequence
  Description of Artificial Sequence: Synthetic oligonucleotide
  Sense strand starting at position 2722 of SEQ ID NO: 1887143
gcagaagacacgugaauug

SEQ ID NO: 2451553 - RNA, 19 nt, Artificial Sequence
  Description of Artificial Sequence: Synthetic oligonucleotide
  Antisense strand to SEQ ID NO: 2451552
caauucacgugucuucugc

SEQ ID NO: 2451554 - RNA, 19 nt, Artificial Sequence
  Description of Artificial Sequence: Synthetic oligonucleotide
  Sense strand starting at position 2727 of SEQ ID NO: 1887143
agacacgugaauugacaaa

SEQ ID NO: 2451555 - RNA, 19 nt, Artificial Sequence
  Description of Artificial Sequence: Synthetic oligonucleotide
  Antisense strand to SEQ ID NO: 2451554
uuugucaauucacgugucu

SEQ ID NO: 2451556 - RNA, 19 nt, Artificial Sequence
  Description of Artificial Sequence: Synthetic oligonucleotide
  Sense strand starting at position 2784 of SEQ ID NO: 1887143
gcaauuacguaauuuacuu

SEQ ID NO: 2451557 - RNA, 19 nt, Artificial Sequence
  Description of Artificial Sequence: Synthetic oligonucleotide
  Antisense strand to SEQ ID NO: 2451556
aaguaaauuacguaauugc

SEQ ID NO: 2451558 - RNA, 19 nt, Artificial Sequence
  Description of Artificial Sequence: Synthetic oligonucleotide
  Sense strand starting at position 2802 of SEQ ID NO: 1887143
uaagguuagauaggugaua

SEQ ID NO: 2451559 - RNA, 19 nt, Artificial Sequence
  Description of Artificial Sequence: Synthetic oligonucleotide
  Antisense strand to SEQ ID NO: 2451558
uaucaccuaucuaaccuua

SEQ ID NO: 2451560 - RNA, 19 nt, Artificial Sequence
  Description of Artificial Sequence: Synthetic oligonucleotide
  Sense strand starting at position 2804 of SEQ ID NO: 1887143
agguuagauaggugauaac

SEQ ID NO: 2451561 - RNA, 19 nt, Artificial Sequence
  Description of Artificial Sequence: Synthetic oligonucleotide
  Antisense strand to SEQ ID NO: 2451560
guuaucaccuaucuaaccu

SEQ ID NO: 2451562 - RNA, 19 nt, Artificial Sequence
  Description of Artificial Sequence: Synthetic oligonucleotide
  Sense strand starting at position 2811 of SEQ ID NO: 1887143
auaggugauaacuggcaga

SEQ ID NO: 2451563 - RNA, 19 nt, Artificial Sequence
  Description of Artificial Sequence: Synthetic oligonucleotide
  Antisense strand to SEQ ID NO: 2451562
ucugccaguuaucaccuau

SEQ ID NO: 2451564 - RNA, 19 nt, Artificial Sequence
  Description of Artificial Sequence: Synthetic oligonucleotide
  Sense strand starting at position 2904 of SEQ ID NO: 1887143
uguuaaaggauucgugaug

SEQ ID NO: 2451565 - RNA, 19 nt, Artificial Sequence
  Description of Artificial Sequence: Synthetic oligonucleotide
  Antisense strand to SEQ ID NO: 2451564
caucacgaauccuuuaaca

SEQ ID NO: 2451566 - RNA, 19 nt, Artificial Sequence
  Description of Artificial Sequence: Synthetic oligonucleotide
  Sense strand starting at position 2913 of SEQ ID NO: 1887143
auucgugauguugggauca

SEQ ID NO: 2451567 - RNA, 19 nt, Artificial Sequence
  Description of Artificial Sequence: Synthetic oligonucleotide
  Antisense strand to SEQ ID NO: 2451566
ugaucccaacaucacgaau

SEQ ID NO: 2451568 - RNA, 19 nt, Artificial Sequence
  Description of Artificial Sequence: Synthetic oligonucleotide
  Sense strand starting at position 2923 of SEQ ID NO: 1887143
uugggaucacccugguaaa

SEQ ID NO: 2451569 - RNA, 19 nt, Artificial Sequence
  Description of Artificial Sequence: Synthetic oligonucleotide
  Antisense strand to SEQ ID NO: 2451568
uuuaccagggugaucccaa

SEQ ID NO: 2451570 - RNA, 19 nt, Artificial Sequence
  Description of Artificial Sequence: Synthetic oligonucleotide
  Sense strand starting at position 2924 of SEQ ID NO: 1887143
ugggaucacccugguaaau

SEQ ID NO: 2451571 - RNA, 19 nt, Artificial Sequence
  Description of Artificial Sequence: Synthetic oligonucleotide
  Antisense strand to SEQ ID NO: 2451570
auuuaccagggugauccca

SEQ ID NO: 2451572 - RNA, 19 nt, Artificial Sequence
  Description of Artificial Sequence: Synthetic oligonucleotide
  Sense strand starting at position 3017 of SEQ ID NO: 1887143
cuuacagaguucuuaucua

SEQ ID NO: 2451573 - RNA, 19 nt, Artificial Sequence
  Description of Artificial Sequence: Synthetic oligonucleotide
  Antisense strand to SEQ ID NO: 2451572
uagauaagaacucuguaag

SEQ ID NO: 2451574 - RNA, 19 nt, Artificial Sequence
  Description of Artificial Sequence: Synthetic oligonucleotide
  Sense strand starting at position 3095 of SEQ ID NO: 1887143
guggaauugcuacaaaggu

SEQ ID NO: 2451575 - RNA, 19 nt, Artificial Sequence
  Description of Artificial Sequence: Synthetic oligonucleotide
  Antisense strand to SEQ ID NO: 2451574
accuuuguagcaauuccac

SEQ ID NO: 2451576 - RNA, 19 nt, Artificial Sequence
  Description of Artificial Sequence: Synthetic oligonucleotide
  Sense strand starting at position 3351 of SEQ ID NO: 1887143
ucuaguuuaguagagacga

SEQ ID NO: 2451577 - RNA, 19 nt, Artificial Sequence
  Description of Artificial Sequence: Synthetic oligonucleotide
  Antisense strand to SEQ ID NO: 2451576
ucgucucuacuaaacuaga

SEQ ID NO: 2451578 - RNA, 19 nt, Artificial Sequence
  Description of Artificial Sequence: Synthetic oligonucleotide
  Sense strand starting at position 3478 of SEQ ID NO: 1887143
cgcagcuauaucguacauu

SEQ ID NO: 2451579 - RNA, 19 nt, Artificial Sequence
  Description of Artificial Sequence: Synthetic oligonucleotide
  Antisense strand to SEQ ID NO: 2451578
aauguacgauauagcugcg

SEQ ID NO: 2451580 - RNA, 19 nt, Artificial Sequence
  Description of Artificial Sequence: Synthetic oligonucleotide
  Sense strand starting at position 3481 of SEQ ID NO: 1887143
agcuauaucguacauucuu

SEQ ID NO: 2451581 - RNA, 19 nt, Artificial Sequence
  Description of Artificial Sequence: Synthetic oligonucleotide
  Antisense strand to SEQ ID NO: 2451580
aagaauguacgauauagcu

SEQ ID NO: 2451582 - RNA, 19 nt, Artificial Sequence
  Description of Artificial Sequence: Synthetic oligonucleotide
  Sense strand starting at position 3491 of SEQ ID NO: 1887143
uacauucuucugugguaag

SEQ ID NO: 2451583 - RNA, 19 nt, Artificial Sequence
  Description of Artificial Sequence: Synthetic oligonucleotide
  Antisense strand to SEQ ID NO: 2451582
cuuaccacagaagaaugua

SEQ ID NO: 2451584 - RNA, 19 nt, Artificial Sequence
  Description of Artificial Sequence: Synthetic oligonucleotide
  Sense strand starting at position 3501 of SEQ ID NO: 1887143
ugugguaaguauuucccua

SEQ ID NO: 2451585 - RNA, 19 nt, Artificial Sequence
  Description of Artificial Sequence: Synthetic oligonucleotide
  Antisense strand to SEQ ID NO: 2451584
uagggaaauacuuaccaca

SEQ ID NO: 2451586 - RNA, 19 nt, Artificial Sequence
  Description of Artificial Sequence: Synthetic oligonucleotide
  Sense strand starting at position 3543 of SEQ ID NO: 1887143
ccuauagcacgacacauua

SEQ ID NO: 2451587 - RNA, 19 nt, Artificial Sequence
  Description of Artificial Sequence: Synthetic oligonucleotide
  Antisense strand to SEQ ID NO: 2451586
uaaugugucgugcuauagg

SEQ ID NO: 2451588 - RNA, 19 nt, Artificial Sequence
  Description of Artificial Sequence: Synthetic oligonucleotide
  Sense strand starting at position 3573 of SEQ ID NO: 1887143
aaauuagugcuguauguau

SEQ ID NO: 2451589 - RNA, 19 nt, Artificial Sequence
  Description of Artificial Sequence: Synthetic oligonucleotide
  Antisense strand to SEQ ID NO: 2451588
auacauacagcacuaauuu

SEQ ID NO: 2451590 - RNA, 19 nt, Artificial Sequence
  Description of Artificial Sequence: Synthetic oligonucleotide
  Sense strand starting at position 3585 of SEQ ID NO: 1887143
uauguauguguugaagagu

SEQ ID NO: 2451591 - RNA, 19 nt, Artificial Sequence
  Description of Artificial Sequence: Synthetic oligonucleotide
  Antisense strand to SEQ ID NO: 2451590
acucuucaacacauacaua

SEQ ID NO: 2451592 - RNA, 19 nt, Artificial Sequence
  Description of Artificial Sequence: Synthetic oligonucleotide
  Sense strand starting at position 3588 of SEQ ID NO: 1887143
guauguguugaagaguaug

SEQ ID NO: 2451593 - RNA, 19 nt, Artificial Sequence
  Description of Artificial Sequence: Synthetic oligonucleotide
  Antisense strand to SEQ ID NO: 2451592
cauacucuucaacacauac

SEQ ID NO: 2451594 - RNA, 19 nt, Artificial Sequence
  Description of Artificial Sequence: Synthetic oligonucleotide
  Sense strand starting at position 3665 of SEQ ID NO: 1887143
guuagaucccucgagccca

SEQ ID NO: 2451595 - RNA, 19 nt, Artificial Sequence
  Description of Artificial Sequence: Synthetic oligonucleotide
  Antisense strand to SEQ ID NO: 2451594
ugggcucgagggaucuaac

SEQ ID NO: 2451596 - RNA, 19 nt, Artificial Sequence
  Description of Artificial Sequence: Synthetic oligonucleotide
  Sense strand starting at position 2033 of SEQ ID NO: 1887144
cgagauaacuuucuaaauu

SEQ ID NO: 2451597 - RNA, 19 nt, Artificial Sequence
  Description of Artificial Sequence: Synthetic oligonucleotide
  Antisense strand to SEQ ID NO: 2451596
aauuuagaaaguuaucucg

SEQ ID NO: 2451598 - RNA, 19 nt, Artificial Sequence
  Description of Artificial Sequence: Synthetic oligonucleotide
  Sense strand starting at position 2094 of SEQ ID NO: 1887144
auguaacugucccagaguu

SEQ ID NO: 2451599 - RNA, 19 nt, Artificial Sequence
  Description of Artificial Sequence: Synthetic oligonucleotide
  Antisense strand to SEQ ID NO: 2451598
aacucugggacaguuacau

SEQ ID NO: 2451600 - RNA, 19 nt, Artificial Sequence
  Description of Artificial Sequence: Synthetic oligonucleotide
  Sense strand starting at position 2096 of SEQ ID NO: 1887144
guaacugucccagaguuaa

SEQ ID NO: 2451601 - RNA, 19 nt, Artificial Sequence
  Description of Artificial Sequence: Synthetic oligonucleotide
  Antisense strand to SEQ ID NO: 2451600
uuaacucugggacaguuac

SEQ ID NO: 2451602 - RNA, 19 nt, Artificial Sequence
  Description of Artificial Sequence: Synthetic oligonucleotide
  Sense strand starting at position 2157 of SEQ ID NO: 1887144
cgaagaccucucuagguuu

SEQ ID NO: 2451603 - RNA, 19 nt, Artificial Sequence
  Description of Artificial Sequence: Synthetic oligonucleotide
  Antisense strand to SEQ ID NO: 2451602
aaaccuagagaggucuucg

SEQ ID NO: 2451604 - RNA, 19 nt, Artificial Sequence
  Description of Artificial Sequence: Synthetic oligonucleotide
  Sense strand starting at position 2188 of SEQ ID NO: 1887144
gcaggaaacucuugaguuu

SEQ ID NO: 2451605 - RNA, 19 nt, Artificial Sequence
  Description of Artificial Sequence: Synthetic oligonucleotide
  Antisense strand to SEQ ID NO: 2451604
aaacucaagaguuuccugc

SEQ ID NO: 2451606 - RNA, 19 nt, Artificial Sequence
  Description of Artificial Sequence: Synthetic oligonucleotide
  Sense strand starting at position 2228 of SEQ ID NO: 1887144
gccucuaaacuuggaguca

SEQ ID NO: 2451607 - RNA, 19 nt, Artificial Sequence
  Description of Artificial Sequence: Synthetic oligonucleotide
  Antisense strand to SEQ ID NO: 2451606
ugacuccaaguuuagaggc

SEQ ID NO: 2451608 - RNA, 19 nt, Artificial Sequence
  Description of Artificial Sequence: Synthetic oligonucleotide
  Sense strand starting at position 2229 of SEQ ID NO: 1887144
ccucuaaacuuggagucaa

SEQ ID NO: 2451609 - RNA, 19 nt, Artificial Sequence
  Description of Artificial Sequence: Synthetic oligonucleotide
  Antisense strand to SEQ ID NO: 2451608
uugacuccaaguuuagagg

SEQ ID NO: 2451610 - RNA, 19 nt, Artificial Sequence
  Description of Artificial Sequence: Synthetic oligonucleotide
  Sense strand starting at position 2305 of SEQ ID NO: 1887144
gucacuucucucugcguuu

SEQ ID NO: 2451611 - RNA, 19 nt, Artificial Sequence
  Description of Artificial Sequence: Synthetic oligonucleotide
  Antisense strand to SEQ ID NO: 2451610
aaacgcagagagaagugac

SEQ ID NO: 2451612 - RNA, 19 nt, Artificial Sequence
  Description of Artificial Sequence: Synthetic oligonucleotide
  Sense strand starting at position 2715 of SEQ ID NO: 1887144
cguggaagugcuuaacaca

SEQ ID NO: 2451613 - RNA, 19 nt, Artificial Sequence
  Description of Artificial Sequence: Synthetic oligonucleotide
  Antisense strand to SEQ ID NO: 2451612
uguguuaagcacuuccacg

SEQ ID NO: 2451614 - RNA, 19 nt, Artificial Sequence
  Description of Artificial Sequence: Synthetic oligonucleotide
  Sense strand starting at position 2718 of SEQ ID NO: 1887144
ggaagugcuuaacacagua

SEQ ID NO: 2451615 - RNA, 19 nt, Artificial Sequence
  Description of Artificial Sequence: Synthetic oligonucleotide
  Antisense strand to SEQ ID NO: 2451614
uacuguguuaagcacuucc

SEQ ID NO: 2451616 - RNA, 19 nt, Artificial Sequence
  Description of Artificial Sequence: Synthetic oligonucleotide
  Sense strand starting at position 2746 of SEQ ID NO: 1887144
gcacuagguccucaagaaa

SEQ ID NO: 2451617 - RNA, 19 nt, Artificial Sequence
  Description of Artificial Sequence: Synthetic oligonucleotide
  Antisense strand to SEQ ID NO: 2451616
uuucuugaggaccuagugc

SEQ ID NO: 2451618 - RNA, 19 nt, Artificial Sequence
  Description of Artificial Sequence: Synthetic oligonucleotide
  Sense strand starting at position 2776 of SEQ ID NO: 1887144
ucugauuuguuaugcuuua

SEQ ID NO: 2451619 - RNA, 19 nt, Artificial Sequence
  Description of Artificial Sequence: Synthetic oligonucleotide
  Antisense strand to SEQ ID NO: 2451618
uaaagcauaacaaaucaga

SEQ ID NO: 2451620 - RNA, 19 nt, Artificial Sequence
  Description of Artificial Sequence: Synthetic oligonucleotide
  Sense strand starting at position 2777 of SEQ ID NO: 1887144
cugauuuguuaugcuuuau

SEQ ID NO: 2451621 - RNA, 19 nt, Artificial Sequence
  Description of Artificial Sequence: Synthetic oligonucleotide
  Antisense strand to SEQ ID NO: 2451620
auaaagcauaacaaaucag

SEQ ID NO: 2451622 - RNA, 19 nt, Artificial Sequence
  Description of Artificial Sequence: Synthetic oligonucleotide
  Sense strand starting at position 2783 of SEQ ID NO: 1887144
uguuaugcuuuauaaagac

SEQ ID NO: 2451623 - RNA, 19 nt, Artificial Sequence
  Description of Artificial Sequence: Synthetic oligonucleotide
  Antisense strand to SEQ ID NO: 2451622
gucuuuauaaagcauaaca

SEQ ID NO: 2451624 - RNA, 19 nt, Artificial Sequence
  Description of Artificial Sequence: Synthetic oligonucleotide
  Sense strand starting at position 3789 of SEQ ID NO: 1887144
gguguucugugguuccaua

SEQ ID NO: 2451625 - RNA, 19 nt, Artificial Sequence
  Description of Artificial Sequence: Synthetic oligonucleotide
  Antisense strand to SEQ ID NO: 2451624
uauggaaccacagaacacc

SEQ ID NO: 2451626 - RNA, 19 nt, Artificial Sequence
  Description of Artificial Sequence: Synthetic oligonucleotide
  Sense strand starting at position 3796 of SEQ ID NO: 1887144
ugugguuccauaggaucuu

SEQ ID NO: 2451627 - RNA, 19 nt, Artificial Sequence
  Description of Artificial Sequence: Synthetic oligonucleotide
  Antisense strand to SEQ ID NO: 2451626
aagauccuauggaaccaca

SEQ ID NO: 2451628 - RNA, 19 nt, Artificial Sequence
  Description of Artificial Sequence: Synthetic oligonucleotide
  Sense strand starting at position 3895 of SEQ ID NO: 1887144
ucaggauugaguugauuaa

SEQ ID NO: 2451629 - RNA, 19 nt, Artificial Sequence
  Description of Artificial Sequence: Synthetic oligonucleotide
  Antisense strand to SEQ ID NO: 2451628
uuaaucaacucaauccuga

SEQ ID NO: 2451630 - RNA, 19 nt, Artificial Sequence
  Description of Artificial Sequence: Synthetic oligonucleotide
  Sense strand starting at position 3899 of SEQ ID NO: 1887144
gauugaguugauuaaguug

SEQ ID NO: 2451631 - RNA, 19 nt, Artificial Sequence
  Description of Artificial Sequence: Synthetic oligonucleotide
  Antisense strand to SEQ ID NO: 2451630
caacuuaaucaacucaauc

SEQ ID NO: 2451632 - RNA, 19 nt, Artificial Sequence
  Description of Artificial Sequence: Synthetic oligonucleotide
  Sense strand starting at position 3902 of SEQ ID NO: 1887144
ugaguugauuaaguugagu

SEQ ID NO: 2451633 - RNA, 19 nt, Artificial Sequence
  Description of Artificial Sequence: Synthetic oligonucleotide
  Antisense strand to SEQ ID NO: 2451632
acucaacuuaaucaacuca

SEQ ID NO: 2451634 - RNA, 19 nt, Artificial Sequence
  Description of Artificial Sequence: Synthetic oligonucleotide
  Sense strand starting at position 3904 of SEQ ID NO: 1887144
aguugauuaaguugaguug

SEQ ID NO: 2451635 - RNA, 19 nt, Artificial Sequence
  Description of Artificial Sequence: Synthetic oligonucleotide
  Antisense strand to SEQ ID NO: 2451634
caacucaacuuaaucaacu

SEQ ID NO: 2451636 - RNA, 19 nt, Artificial Sequence
  Description of Artificial Sequence: Synthetic oligonucleotide
  Sense strand starting at position 3915 of SEQ ID NO: 1887144
uugaguuguugagugucaa

SEQ ID NO: 2451637 - RNA, 19 nt, Artificial Sequence
  Description of Artificial Sequence: Synthetic oligonucleotide
  Antisense strand to SEQ ID NO: 2451636
uugacacucaacaacucaa

SEQ ID NO: 2451638 - RNA, 19 nt, Artificial Sequence
  Description of Artificial Sequence: Synthetic oligonucleotide
  Sense strand starting at position 3916 of SEQ ID NO: 1887144
ugaguuguugagugucaau

SEQ ID NO: 2451639 - RNA, 19 nt, Artificial Sequence
  Description of Artificial Sequence: Synthetic oligonucleotide
  Antisense strand to SEQ ID NO: 2451638
auugacacucaacaacuca

SEQ ID NO: 2451640 - RNA, 19 nt, Artificial Sequence
  Description of Artificial Sequence: Synthetic oligonucleotide
  Sense strand starting at position 3925 of SEQ ID NO: 1887144
gagugucaauccgagaugu

SEQ ID NO: 2451641 - RNA, 19 nt, Artificial Sequence
  Description of Artificial Sequence: Synthetic oligonucleotide
  Antisense strand to SEQ ID NO: 2451640
acaucucggauugacacuc

SEQ ID NO: 2451642 - RNA, 19 nt, Artificial Sequence
  Description of Artificial Sequence: Synthetic oligonucleotide
  Sense strand starting at position 3927 of SEQ ID NO: 1887144
gugucaauccgagauguag

SEQ ID NO: 2451643 - RNA, 19 nt, Artificial Sequence
  Description of Artificial Sequence: Synthetic oligonucleotide
  Antisense strand to SEQ ID NO: 2451642
cuacaucucggauugacac

SEQ ID NO: 2451644 - RNA, 19 nt, Artificial Sequence
  Description of Artificial Sequence: Synthetic oligonucleotide
  Sense strand starting at position 3929 of SEQ ID NO: 1887144
gucaauccgagauguagcu

SEQ ID NO: 2451645 - RNA, 19 nt, Artificial Sequence
  Description of Artificial Sequence: Synthetic oligonucleotide
  Antisense strand to SEQ ID NO: 2451644
agcuacaucucggauugac

SEQ ID NO: 2451646 - RNA, 19 nt, Artificial Sequence
  Description of Artificial Sequence: Synthetic oligonucleotide
  Sense strand starting at position 3936 of SEQ ID NO: 1887144
cgagauguagcuuaggaaa

SEQ ID NO: 2451647 - RNA, 19 nt, Artificial Sequence
  Description of Artificial Sequence: Synthetic oligonucleotide
  Antisense strand to SEQ ID NO: 2451646
uuuccuaagcuacaucucg

SEQ ID NO: 2451648 - RNA, 19 nt, Artificial Sequence
  Description of Artificial Sequence: Synthetic oligonucleotide
  Sense strand starting at position 3967 of SEQ ID NO: 1887144
gaggaaguuccauauguuu

SEQ ID NO: 2451649 - RNA, 19 nt, Artificial Sequence
  Description of Artificial Sequence: Synthetic oligonucleotide
  Antisense strand to SEQ ID NO: 2451648
aaacauauggaacuuccuc

SEQ ID NO: 2451650 - RNA, 19 nt, Artificial Sequence
  Description of Artificial Sequence: Synthetic oligonucleotide
  Sense strand starting at position 32 of SEQ ID NO: 1887145
gcgccauuucaaggguugu

SEQ ID NO: 2451651 - RNA, 19 nt, Artificial Sequence
  Description of Artificial Sequence: Synthetic oligonucleotide
  Antisense strand to SEQ ID NO: 2451650
acaacccuugaaauggcgc

SEQ ID NO: 2451652 - RNA, 19 nt, Artificial Sequence
  Description of Artificial Sequence: Synthetic oligonucleotide
  Sense strand starting at position 67 of SEQ ID NO: 1887145
guaacaucaaagggugauu

SEQ ID NO: 2451653 - RNA, 19 nt, Artificial Sequence
  Description of Artificial Sequence: Synthetic oligonucleotide
  Antisense strand to SEQ ID NO: 2451652
aaucacccuuugauguuac

SEQ ID NO: 2451654 - RNA, 19 nt, Artificial Sequence
  Description of Artificial Sequence: Synthetic oligonucleotide
  Sense strand starting at position 118 of SEQ ID NO: 1887145
auugguauuagaggucaaa

SEQ ID NO: 2451655 - RNA, 19 nt, Artificial Sequence
  Description of Artificial Sequence: Synthetic oligonucleotide
  Antisense strand to SEQ ID NO: 2451654
uuugaccucuaauaccaau

SEQ ID NO: 2451656 - RNA, 19 nt, Artificial Sequence
  Description of Artificial Sequence: Synthetic oligonucleotide
  Sense strand starting at position 136 of SEQ ID NO: 1887145
auacuaucuuugucuguga

SEQ ID NO: 2451657 - RNA, 19 nt, Artificial Sequence
  Description of Artificial Sequence: Synthetic oligonucleotide
  Antisense strand to SEQ ID NO: 2451656
ucacagacaaagauaguau

SEQ ID NO: 2451658 - RNA, 19 nt, Artificial Sequence
  Description of Artificial Sequence: Synthetic oligonucleotide
  Sense strand starting at position 164 of SEQ ID NO: 1887145
uguagagaagggugaugua

SEQ ID NO: 2451659 - RNA, 19 nt, Artificial Sequence
  Description of Artificial Sequence: Synthetic oligonucleotide
  Antisense strand to SEQ ID NO: 2451658
uacaucacccuucucuaca

SEQ ID NO: 2451660 - RNA, 19 nt, Artificial Sequence
  Description of Artificial Sequence: Synthetic oligonucleotide
  Sense strand starting at position 229 of SEQ ID NO: 1887145
uccucaagaguaggacaau

SEQ ID NO: 2451661 - RNA, 19 nt, Artificial Sequence
  Description of Artificial Sequence: Synthetic oligonucleotide
  Antisense strand to SEQ ID NO: 2451660
auuguccuacucuugagga

SEQ ID NO: 2451662 - RNA, 19 nt, Artificial Sequence
  Description of Artificial Sequence: Synthetic oligonucleotide
  Sense strand starting at position 827 of SEQ ID NO: 1887145
cuuuaagcugccuagacua

SEQ ID NO: 2451663 - RNA, 19 nt, Artificial Sequence
  Description of Artificial Sequence: Synthetic oligonucleotide
  Antisense strand to SEQ ID NO: 2451662
uagucuaggcagcuuaaag

SEQ ID NO: 2451664 - RNA, 19 nt, Artificial Sequence
  Description of Artificial Sequence: Synthetic oligonucleotide
  Sense strand starting at position 832 of SEQ ID NO: 1887145
agcugccuagacuaugauu

SEQ ID NO: 2451665 - RNA, 19 nt, Artificial Sequence
  Description of Artificial Sequence: Synthetic oligonucleotide
  Antisense strand to SEQ ID NO: 2451664
aaucauagucuaggcagcu

SEQ ID NO: 2451666 - RNA, 19 nt, Artificial Sequence
  Description of Artificial Sequence: Synthetic oligonucleotide
  Sense strand starting at position 834 of SEQ ID NO: 1887145
cugccuagacuaugauuau

SEQ ID NO: 2451667 - RNA, 19 nt, Artificial Sequence
  Description of Artificial Sequence: Synthetic oligonucleotide
  Antisense strand to SEQ ID NO: 2451666
auaaucauagucuaggcag

SEQ ID NO: 2451668 - RNA, 19 nt, Artificial Sequence
  Description of Artificial Sequence: Synthetic oligonucleotide
  Sense strand starting at position 875 of SEQ ID NO: 1887145
gagcauuuacugugucaac

SEQ ID NO: 2451669 - RNA, 19 nt, Artificial Sequence
  Description of Artificial Sequence: Synthetic oligonucleotide
  Antisense strand to SEQ ID NO: 2451668
guugacacaguaaaugcuc

SEQ ID NO: 2451670 - RNA, 19 nt, Artificial Sequence
  Description of Artificial Sequence: Synthetic oligonucleotide
  Sense strand starting at position 876 of SEQ ID NO: 1887145
agcauuuacugugucaacu

SEQ ID NO: 2451671 - RNA, 19 nt, Artificial Sequence
  Description of Artificial Sequence: Synthetic oligonucleotide
  Antisense strand to SEQ ID NO: 2451670
aguugacacaguaaaugcu

SEQ ID NO: 2451672 - RNA, 19 nt, Artificial Sequence
  Description of Artificial Sequence: Synthetic oligonucleotide
  Sense strand starting at position 895 of SEQ ID NO: 1887145
gcuuacugugucucguuua

SEQ ID NO: 2451673 - RNA, 19 nt, Artificial Sequence
  Description of Artificial Sequence: Synthetic oligonucleotide
  Antisense strand to SEQ ID NO: 2451672
uaaacgagacacaguaagc

SEQ ID NO: 2451674 - RNA, 19 nt, Artificial Sequence
  Description of Artificial Sequence: Synthetic oligonucleotide
  Sense strand starting at position 905 of SEQ ID NO: 1887145
ucucguuuaguugugucau

SEQ ID NO: 2451675 - RNA, 19 nt, Artificial Sequence
  Description of Artificial Sequence: Synthetic oligonucleotide
  Antisense strand to SEQ ID NO: 2451674
augacacaacuaaacgaga

SEQ ID NO: 2451676 - RNA, 19 nt, Artificial Sequence
  Description of Artificial Sequence: Synthetic oligonucleotide
  Sense strand starting at position 946 of SEQ ID NO: 1887145
cauucuguuggugaggaaa

SEQ ID NO: 2451677 - RNA, 19 nt, Artificial Sequence
  Description of Artificial Sequence: Synthetic oligonucleotide
  Antisense strand to SEQ ID NO: 2451676
uuuccucaccaacagaaug

SEQ ID NO: 2451678 - RNA, 19 nt, Artificial Sequence
  Description of Artificial Sequence: Synthetic oligonucleotide
  Sense strand starting at position 1096 of SEQ ID NO: 1887145
ccaauagaaugcucuuaag

SEQ ID NO: 2451679 - RNA, 19 nt, Artificial Sequence
  Description of Artificial Sequence: Synthetic oligonucleotide
  Antisense strand to SEQ ID NO: 2451678
cuuaagagcauucuauugg

SEQ ID NO: 2451680 - RNA, 19 nt, Artificial Sequence
  Description of Artificial Sequence: Synthetic oligonucleotide
  Sense strand starting at position 1105 of SEQ ID NO: 1887145
ugcucuuaaguuggaaaca

SEQ ID NO: 2451681 - RNA, 19 nt, Artificial Sequence
  Description of Artificial Sequence: Synthetic oligonucleotide
  Antisense strand to SEQ ID NO: 2451680
uguuuccaacuuaagagca

SEQ ID NO: 2451682 - RNA, 19 nt, Artificial Sequence
  Description of Artificial Sequence: Synthetic oligonucleotide
  Sense strand starting at position 1285 of SEQ ID NO: 1887145
agagcccuucccugagagu

SEQ ID NO: 2451683 - RNA, 19 nt, Artificial Sequence
  Description of Artificial Sequence: Synthetic oligonucleotide
  Antisense strand to SEQ ID NO: 2451682
acucucagggaagggcucu

SEQ ID NO: 2451684 - RNA, 19 nt, Artificial Sequence
  Description of Artificial Sequence: Synthetic oligonucleotide
  Sense strand starting at position 1468 of SEQ ID NO: 1887145
gagguacacauauguggaa

SEQ ID NO: 2451685 - RNA, 19 nt, Artificial Sequence
  Description of Artificial Sequence: Synthetic oligonucleotide
  Antisense strand to SEQ ID NO: 2451684
uuccacauauguguaccuc

SEQ ID NO: 2451686 - RNA, 19 nt, Artificial Sequence
  Description of Artificial Sequence: Synthetic oligonucleotide
  Sense strand starting at position 1470 of SEQ ID NO: 1887145
gguacacauauguggaaga

SEQ ID NO: 2451687 - RNA, 19 nt, Artificial Sequence
  Description of Artificial Sequence: Synthetic oligonucleotide
  Antisense strand to SEQ ID NO: 2451686
ucuuccacauauguguacc

SEQ ID NO: 2451688 - RNA, 19 nt, Artificial Sequence
  Description of Artificial Sequence: Synthetic oligonucleotide
  Sense strand starting at position 1824 of SEQ ID NO: 1887145
uugggaggcucaucaucau

SEQ ID NO: 2451689 - RNA, 19 nt, Artificial Sequence
  Description of Artificial Sequence: Synthetic oligonucleotide
  Antisense strand to SEQ ID NO: 2451688
augaugaugagccucccaa

SEQ ID NO: 2451690 - RNA, 19 nt, Artificial Sequence
  Description of Artificial Sequence: Synthetic oligonucleotide
  Sense strand starting at position 1861 of SEQ ID NO: 1887145
guggguaggaacugucuaa

SEQ ID NO: 2451691 - RNA, 19 nt, Artificial Sequence
  Description of Artificial Sequence: Synthetic oligonucleotide
  Antisense strand to SEQ ID NO: 2451690
uuagacaguuccuacccac

SEQ ID NO: 2451692 - RNA, 19 nt, Artificial Sequence
  Description of Artificial Sequence: Synthetic oligonucleotide
  Sense strand starting at position 1874 of SEQ ID NO: 1887145
gucuaaaugcagggaggau

SEQ ID NO: 2451693 - RNA, 19 nt, Artificial Sequence
  Description of Artificial Sequence: Synthetic oligonucleotide
  Antisense strand to SEQ ID NO: 2451692
auccucccugcauuuagac

SEQ ID NO: 2451694 - RNA, 19 nt, Artificial Sequence
  Description of Artificial Sequence: Synthetic oligonucleotide
  Sense strand starting at position 2087 of SEQ ID NO: 1887145
ccuaguugugaauauauug

SEQ ID NO: 2451695 - RNA, 19 nt, Artificial Sequence
  Description of Artificial Sequence: Synthetic oligonucleotide
  Antisense strand to SEQ ID NO: 2451694
caauauauucacaacuagg

SEQ ID NO: 2451696 - RNA, 19 nt, Artificial Sequence
  Description of Artificial Sequence: Synthetic oligonucleotide
  Sense strand starting at position 2132 of SEQ ID NO: 1887145
ugcugaguuguucuuuguu

SEQ ID NO: 2451697 - RNA, 19 nt, Artificial Sequence
  Description of Artificial Sequence: Synthetic oligonucleotide
  Antisense strand to SEQ ID NO: 2451696
aacaaagaacaacucagca

SEQ ID NO: 2451698 - RNA, 19 nt, Artificial Sequence
  Description of Artificial Sequence: Synthetic oligonucleotide
  Sense strand starting at position 2268 of SEQ ID NO: 1887145
gcauguguuguuccgguga

SEQ ID NO: 2451699 - RNA, 19 nt, Artificial Sequence
  Description of Artificial Sequence: Synthetic oligonucleotide
  Antisense strand to SEQ ID NO: 2451698
ucaccggaacaacacaugc

SEQ ID NO: 2451700 - RNA, 19 nt, Artificial Sequence
  Description of Artificial Sequence: Synthetic oligonucleotide
  Sense strand starting at position 2292 of SEQ ID NO: 1887145
uucugaagucaaugcuaua

SEQ ID NO: 2451701 - RNA, 19 nt, Artificial Sequence
  Description of Artificial Sequence: Synthetic oligonucleotide
  Antisense strand to SEQ ID NO: 2451700
uauagcauugacuucagaa

SEQ ID NO: 2451702 - RNA, 19 nt, Artificial Sequence
  Description of Artificial Sequence: Synthetic oligonucleotide
  Sense strand starting at position 2324 of SEQ ID NO: 1887145
agacgucugugauuccaga

SEQ ID NO: 2451703 - RNA, 19 nt, Artificial Sequence
  Description of Artificial Sequence: Synthetic oligonucleotide
  Antisense strand to SEQ ID NO: 2451702
ucuggaaucacagacgucu

SEQ ID NO: 2451704 - RNA, 19 nt, Artificial Sequence
  Description of Artificial Sequence: Synthetic oligonucleotide
  Sense strand starting at position 2463 of SEQ ID NO: 1887145
augguagcauuugagauga

SEQ ID NO: 2451705 - RNA, 19 nt, Artificial Sequence
  Description of Artificial Sequence: Synthetic oligonucleotide
  Antisense strand to SEQ ID NO: 2451704
ucaucucaaaugcuaccau

SEQ ID NO: 2451706 - RNA, 19 nt, Artificial Sequence
  Description of Artificial Sequence: Synthetic oligonucleotide
  Sense strand starting at position 2644 of SEQ ID NO: 1887145
acaauuaugccagaaguca

SEQ ID NO: 2451707 - RNA, 19 nt, Artificial Sequence
  Description of Artificial Sequence: Synthetic oligonucleotide
  Antisense strand to SEQ ID NO: 2451706
ugacuucuggcauaauugu

SEQ ID NO: 2451708 - RNA, 19 nt, Artificial Sequence
  Description of Artificial Sequence: Synthetic oligonucleotide
  Sense strand starting at position 3044 of SEQ ID NO: 1887145
gucuguuuaccucaaagua

SEQ ID NO: 2451709 - RNA, 19 nt, Artificial Sequence
  Description of Artificial Sequence: Synthetic oligonucleotide
  Antisense strand to SEQ ID NO: 2451708
uacuuugagguaaacagac

SEQ ID NO: 2451710 - RNA, 19 nt, Artificial Sequence
  Description of Artificial Sequence: Synthetic oligonucleotide
  Sense strand starting at position 3376 of SEQ ID NO: 1887145
gggugauagagcuagaguc

SEQ ID NO: 2451711 - RNA, 19 nt, Artificial Sequence
  Description of Artificial Sequence: Synthetic oligonucleotide
  Antisense strand to SEQ ID NO: 2451710
gacucuagcucuaucaccc

SEQ ID NO: 2451712 - RNA, 19 nt, Artificial Sequence
  Description of Artificial Sequence: Synthetic oligonucleotide
  Sense strand starting at position 3494 of SEQ ID NO: 1887145
gcuggaucccuagaagcca

SEQ ID NO: 2451713 - RNA, 19 nt, Artificial Sequence
  Description of Artificial Sequence: Synthetic oligonucleotide
  Antisense strand to SEQ ID NO: 2451712
uggcuucuagggauccagc

SEQ ID NO: 2451714 - RNA, 19 nt, Artificial Sequence
  Description of Artificial Sequence: Synthetic oligonucleotide
  Sense strand starting at position 3747 of SEQ ID NO: 1887145
gcaggaacucuguggagaa

SEQ ID NO: 2451715 - RNA, 19 nt, Artificial Sequence
  Description of Artificial Sequence: Synthetic oligonucleotide
  Antisense strand to SEQ ID NO: 2451714
uucuccacagaguuccugc

SEQ ID NO: 2451716 - RNA, 19 nt, Artificial Sequence
  Description of Artificial Sequence: Synthetic oligonucleotide
  Sense strand starting at position 3796 of SEQ ID NO: 1887145
ccaacaugccuugguuaag

SEQ ID NO: 2451717 - RNA, 19 nt, Artificial Sequence
  Description of Artificial Sequence: Synthetic oligonucleotide
  Antisense strand to SEQ ID NO: 2451716
cuuaaccaaggcauguugg

SEQ ID NO: 2451718 - RNA, 19 nt, Artificial Sequence
  Description of Artificial Sequence: Synthetic oligonucleotide
  Sense strand starting at position 3797 of SEQ ID NO: 1887145
caacaugccuugguuaaga

SEQ ID NO: 2451719 - RNA, 19 nt, Artificial Sequence
  Description of Artificial Sequence: Synthetic oligonucleotide
  Antisense strand to SEQ ID NO: 2451718
ucuuaaccaaggcauguug

SEQ ID NO: 2451720 - RNA, 19 nt, Artificial Sequence
  Description of Artificial Sequence: Synthetic oligonucleotide
  Sense strand starting at position 3799 of SEQ ID NO: 1887145
acaugccuugguuaagaga

SEQ ID NO: 2451721 - RNA, 19 nt, Artificial Sequence
  Description of Artificial Sequence: Synthetic oligonucleotide
  Antisense strand to SEQ ID NO: 2451720
ucucuuaaccaaggcaugu

SEQ ID NO: 2451722 - RNA, 19 nt, Artificial Sequence
  Description of Artificial Sequence: Synthetic oligonucleotide
  Sense strand starting at position 3895 of SEQ ID NO: 1887145
guguauggguauguagaga

SEQ ID NO: 2451723 - RNA, 19 nt, Artificial Sequence
  Description of Artificial Sequence: Synthetic oligonucleotide
  Antisense strand to SEQ ID NO: 2451722
ucucuacauacccauacac

SEQ ID NO: 2451724 - RNA, 19 nt, Artificial Sequence
  Description of Artificial Sequence: Synthetic oligonucleotide
  Sense strand starting at position 3899 of SEQ ID NO: 1887145
auggguauguagagaaggu

SEQ ID NO: 2451725 - RNA, 19 nt, Artificial Sequence
  Description of Artificial Sequence: Synthetic oligonucleotide
  Antisense strand to SEQ ID NO: 2451724
accuucucuacauacccau

SEQ ID NO: 2451726 - RNA, 19 nt, Artificial Sequence
  Description of Artificial Sequence: Synthetic oligonucleotide
  Sense strand starting at position 3913 of SEQ ID NO: 1887145
aagguagaguaaucacaug

SEQ ID NO: 2451727 - RNA, 19 nt, Artificial Sequence
  Description of Artificial Sequence: Synthetic oligonucleotide
  Antisense strand to SEQ ID NO: 2451726
caugugauuacucuaccuu

SEQ ID NO: 2451728 - RNA, 19 nt, Artificial Sequence
  Description of Artificial Sequence: Synthetic oligonucleotide
  Sense strand starting at position 3973 of SEQ ID NO: 1887145
ucaucugguccucauggaa

SEQ ID NO: 2451729 - RNA, 19 nt, Artificial Sequence
  Description of Artificial Sequence: Synthetic oligonucleotide
  Antisense strand to SEQ ID NO: 2451728
uuccaugaggaccagauga

SEQ ID NO: 2451730 - RNA, 19 nt, Artificial Sequence
  Description of Artificial Sequence: Synthetic oligonucleotide
  Sense strand starting at position 455 of SEQ ID NO: 1887146
agaugacuucuaugcuaaa

SEQ ID NO: 2451731 - RNA, 19 nt, Artificial Sequence
  Description of Artificial Sequence: Synthetic oligonucleotide
  Antisense strand to SEQ ID NO: 2451730
uuuagcauagaagucaucu

SEQ ID NO: 2451732 - RNA, 19 nt, Artificial Sequence
  Description of Artificial Sequence: Synthetic oligonucleotide
  Sense strand starting at position 616 of SEQ ID NO: 1887146
ucaucaaagacguggauau

SEQ ID NO: 2451733 - RNA, 19 nt, Artificial Sequence
  Description of Artificial Sequence: Synthetic oligonucleotide
  Antisense strand to SEQ ID NO: 2451732
auauccacgucuuugauga

SEQ ID NO: 2451734 - RNA, 19 nt, Artificial Sequence
  Description of Artificial Sequence: Synthetic oligonucleotide
  Sense strand starting at position 617 of SEQ ID NO: 1887146
caucaaagacguggauaua

SEQ ID NO: 2451735 - RNA, 19 nt, Artificial Sequence
  Description of Artificial Sequence: Synthetic oligonucleotide
  Antisense strand to SEQ ID NO: 2451734
uauauccacgucuuugaug

SEQ ID NO: 2451736 - RNA, 19 nt, Artificial Sequence
  Description of Artificial Sequence: Synthetic oligonucleotide
  Sense strand starting at position 626 of SEQ ID NO: 1887146
cguggauauaacugacaac

SEQ ID NO: 2451737 - RNA, 19 nt, Artificial Sequence
  Description of Artificial Sequence: Synthetic oligonucleotide
  Antisense strand to SEQ ID NO: 2451736
guugucaguuauauccacg

SEQ ID NO: 2451738 - RNA, 19 nt, Artificial Sequence
  Description of Artificial Sequence: Synthetic oligonucleotide
  Sense strand starting at position 654 of SEQ ID NO: 1887146
aagagagggucguuugaug

SEQ ID NO: 2451739 - RNA, 19 nt, Artificial Sequence
  Description of Artificial Sequence: Synthetic oligonucleotide
  Antisense strand to SEQ ID NO: 2451738
caucaaacgacccucucuu

SEQ ID NO: 2451740 - RNA, 19 nt, Artificial Sequence
  Description of Artificial Sequence: Synthetic oligonucleotide
  Sense strand starting at position 661 of SEQ ID NO: 1887146
ggucguuugauggaugaga

SEQ ID NO: 2451741 - RNA, 19 nt, Artificial Sequence
  Description of Artificial Sequence: Synthetic oligonucleotide
  Antisense strand to SEQ ID NO: 2451740
ucucauccaucaaacgacc

SEQ ID NO: 2451742 - RNA, 19 nt, Artificial Sequence
  Description of Artificial Sequence: Synthetic oligonucleotide
  Sense strand starting at position 663 of SEQ ID NO: 1887146
ucguuugauggaugagauc

SEQ ID NO: 2451743 - RNA, 19 nt, Artificial Sequence
  Description of Artificial Sequence: Synthetic oligonucleotide
  Antisense strand to SEQ ID NO: 2451742
gaucucauccaucaaacga

SEQ ID NO: 2451744 - RNA, 19 nt, Artificial Sequence
  Description of Artificial Sequence: Synthetic oligonucleotide
  Sense strand starting at position 700 of SEQ ID NO: 1887146
agcuguugccugucaucca

SEQ ID NO: 2451745 - RNA, 19 nt, Artificial Sequence
  Description of Artificial Sequence: Synthetic oligonucleotide
  Antisense strand to SEQ ID NO: 2451744
uggaugacaggcaacagcu

SEQ ID NO: 2451746 - RNA, 19 nt, Artificial Sequence
  Description of Artificial Sequence: Synthetic oligonucleotide
  Sense strand starting at position 716 of SEQ ID NO: 1887146
ccaagcucucuguaaggau

SEQ ID NO: 2451747 - RNA, 19 nt, Artificial Sequence
  Description of Artificial Sequence: Synthetic oligonucleotide
  Antisense strand to SEQ ID NO: 2451746
auccuuacagagagcuugg

SEQ ID NO: 2451748 - RNA, 19 nt, Artificial Sequence
  Description of Artificial Sequence: Synthetic oligonucleotide
  Sense strand starting at position 912 of SEQ ID NO: 1887146
uggaaagaaccuugcuuaa

SEQ ID NO: 2451749 - RNA, 19 nt, Artificial Sequence
  Description of Artificial Sequence: Synthetic oligonucleotide
  Antisense strand to SEQ ID NO: 2451748
uuaagcaagguucuuucca

SEQ ID NO: 2451750 - RNA, 19 nt, Artificial Sequence
  Description of Artificial Sequence: Synthetic oligonucleotide
  Sense strand starting at position 1013 of SEQ ID NO: 1887146
aaagccucuccauggugaa

SEQ ID NO: 2451751 - RNA, 19 nt, Artificial Sequence
  Description of Artificial Sequence: Synthetic oligonucleotide
  Antisense strand to SEQ ID NO: 2451750
uucaccauggagaggcuuu

SEQ ID NO: 2451752 - RNA, 19 nt, Artificial Sequence
  Description of Artificial Sequence: Synthetic oligonucleotide
  Sense strand starting at position 1189 of SEQ ID NO: 1887146
aggcucaaaguaugagaaa

SEQ ID NO: 2451753 - RNA, 19 nt, Artificial Sequence
  Description of Artificial Sequence: Synthetic oligonucleotide
  Antisense strand to SEQ ID NO: 2451752
uuucucauacuuugagccu

SEQ ID NO: 2451754 - RNA, 19 nt, Artificial Sequence
  Description of Artificial Sequence: Synthetic oligonucleotide
  Sense strand starting at position 1236 of SEQ ID NO: 1887146
aguaccuucugagcaacaa

SEQ ID NO: 2451755 - RNA, 19 nt, Artificial Sequence
  Description of Artificial Sequence: Synthetic oligonucleotide
  Antisense strand to SEQ ID NO: 2451754
uuguugcucagaagguacu

SEQ ID NO: 2451756 - RNA, 19 nt, Artificial Sequence
  Description of Artificial Sequence: Synthetic oligonucleotide
  Sense strand starting at position 1237 of SEQ ID NO: 1887146
guaccuucugagcaacaaa

SEQ ID NO: 2451757 - RNA, 19 nt, Artificial Sequence
  Description of Artificial Sequence: Synthetic oligonucleotide
  Antisense strand to SEQ ID NO: 2451756
uuuguugcucagaagguac

SEQ ID NO: 2451758 - RNA, 19 nt, Artificial Sequence
  Description of Artificial Sequence: Synthetic oligonucleotide
  Sense strand starting at position 1312 of SEQ ID NO: 1887146
guaucugaaccugacuuua

SEQ ID NO: 2451759 - RNA, 19 nt, Artificial Sequence
  Description of Artificial Sequence: Synthetic oligonucleotide
  Antisense strand to SEQ ID NO: 2451758
uaaagucagguucagauac

SEQ ID NO: 2451760 - RNA, 19 nt, Artificial Sequence
  Description of Artificial Sequence: Synthetic oligonucleotide
  Sense strand starting at position 1691 of SEQ ID NO: 1887146
uggcuauguaugcacugaa

SEQ ID NO: 2451761 - RNA, 19 nt, Artificial Sequence
  Description of Artificial Sequence: Synthetic oligonucleotide
  Antisense strand to SEQ ID NO: 2451760
uucagugcauacauagcca

SEQ ID NO: 2451762 - RNA, 19 nt, Artificial Sequence
  Description of Artificial Sequence: Synthetic oligonucleotide
  Sense strand starting at position 1719 of SEQ ID NO: 1887146
acgggcuuuguugacaaga

SEQ ID NO: 2451763 - RNA, 19 nt, Artificial Sequence
  Description of Artificial Sequence: Synthetic oligonucleotide
  Antisense strand to SEQ ID NO: 2451762
ucuugucaacaaagcccgu

SEQ ID NO: 2451764 - RNA, 19 nt, Artificial Sequence
  Description of Artificial Sequence: Synthetic oligonucleotide
  Sense strand starting at position 1759 of SEQ ID NO: 1887146
ccagucagucaugggacuu

SEQ ID NO: 2451765 - RNA, 19 nt, Artificial Sequence
  Description of Artificial Sequence: Synthetic oligonucleotide
  Antisense strand to SEQ ID NO: 2451764
aagucccaugacugacugg

SEQ ID NO: 2451766 - RNA, 19 nt, Artificial Sequence
  Description of Artificial Sequence: Synthetic oligonucleotide
  Sense strand starting at position 1836 of SEQ ID NO: 1887146
cggaucuacugucuggaau

SEQ ID NO: 2451767 - RNA, 19 nt, Artificial Sequence
  Description of Artificial Sequence: Synthetic oligonucleotide
  Antisense strand to SEQ ID NO: 2451766
auuccagacaguagauccg

SEQ ID NO: 2451768 - RNA, 19 nt, Artificial Sequence
  Description of Artificial Sequence: Synthetic oligonucleotide
  Sense strand starting at position 1837 of SEQ ID NO: 1887146
ggaucuacugucuggaauu

SEQ ID NO: 2451769 - RNA, 19 nt, Artificial Sequence
  Description of Artificial Sequence: Synthetic oligonucleotide
  Antisense strand to SEQ ID NO: 2451768
aauuccagacaguagaucc

SEQ ID NO: 2451770 - RNA, 19 nt, Artificial Sequence
  Description of Artificial Sequence: Synthetic oligonucleotide
  Sense strand starting at position 2439 of SEQ ID NO: 1887146
acuagaucauaguuguuga

SEQ ID NO: 2451771 - RNA, 19 nt, Artificial Sequence
  Description of Artificial Sequence: Synthetic oligonucleotide
  Antisense strand to SEQ ID NO: 2451770
ucaacaacuaugaucuagu

SEQ ID NO: 2451772 - RNA, 19 nt, Artificial Sequence
  Description of Artificial Sequence: Synthetic oligonucleotide
  Sense strand starting at position 2442 of SEQ ID NO: 1887146
agaucauaguuguugagaa

SEQ ID NO: 2451773 - RNA, 19 nt, Artificial Sequence
  Description of Artificial Sequence: Synthetic oligonucleotide
  Antisense strand to SEQ ID NO: 2451772
uucucaacaacuaugaucu

SEQ ID NO: 2451774 - RNA, 19 nt, Artificial Sequence
  Description of Artificial Sequence: Synthetic oligonucleotide
  Sense strand starting at position 2500 of SEQ ID NO: 1887146
uagccuucuguugaaugaa

SEQ ID NO: 2451775 - RNA, 19 nt, Artificial Sequence
  Description of Artificial Sequence: Synthetic oligonucleotide
  Antisense strand to SEQ ID NO: 2451774
uucauucaacagaaggcua

SEQ ID NO: 2451776 - RNA, 19 nt, Artificial Sequence
  Description of Artificial Sequence: Synthetic oligonucleotide
  Sense strand starting at position 2503 of SEQ ID NO: 1887146
ccuucuguugaaugaagag

SEQ ID NO: 2451777 - RNA, 19 nt, Artificial Sequence
  Description of Artificial Sequence: Synthetic oligonucleotide
  Antisense strand to SEQ ID NO: 2451776
cucuucauucaacagaagg

SEQ ID NO: 2451778 - RNA, 19 nt, Artificial Sequence
  Description of Artificial Sequence: Synthetic oligonucleotide
  Sense strand starting at position 2653 of SEQ ID NO: 1887146
acccgaaguccuuaccuua

SEQ ID NO: 2451779 - RNA, 19 nt, Artificial Sequence
  Description of Artificial Sequence: Synthetic oligonucleotide
  Antisense strand to SEQ ID NO: 2451778
uaagguaaggacuucgggu

SEQ ID NO: 2451780 - RNA, 19 nt, Artificial Sequence
  Description of Artificial Sequence: Synthetic oligonucleotide
  Sense strand starting at position 2656 of SEQ ID NO: 1887146
cgaaguccuuaccuuaauu

SEQ ID NO: 2451781 - RNA, 19 nt, Artificial Sequence
  Description of Artificial Sequence: Synthetic oligonucleotide
  Antisense strand to SEQ ID NO: 2451780
aauuaagguaaggacuucg

SEQ ID NO: 2451782 - RNA, 19 nt, Artificial Sequence
  Description of Artificial Sequence: Synthetic oligonucleotide
  Sense strand starting at position 2761 of SEQ ID NO: 1887146
cucccagagcguuugcauu

SEQ ID NO: 2451783 - RNA, 19 nt, Artificial Sequence
  Description of Artificial Sequence: Synthetic oligonucleotide
  Antisense strand to SEQ ID NO: 2451782
aaugcaaacgcucugggag

SEQ ID NO: 2451784 - RNA, 19 nt, Artificial Sequence
  Description of Artificial Sequence: Synthetic oligonucleotide
  Sense strand starting at position 2777 of SEQ ID NO: 1887146
auuuguuuccucugccuga

SEQ ID NO: 2451785 - RNA, 19 nt, Artificial Sequence
  Description of Artificial Sequence: Synthetic oligonucleotide
  Antisense strand to SEQ ID NO: 2451784
ucaggcagaggaaacaaau

SEQ ID NO: 2451786 - RNA, 19 nt, Artificial Sequence
  Description of Artificial Sequence: Synthetic oligonucleotide
  Sense strand starting at position 2970 of SEQ ID NO: 1887146
uuuguucuccaguacuuaa

SEQ ID NO: 2451787 - RNA, 19 nt, Artificial Sequence
  Description of Artificial Sequence: Synthetic oligonucleotide
  Antisense strand to SEQ ID NO: 2451786
uuaaguacuggagaacaaa

SEQ ID NO: 2451788 - RNA, 19 nt, Artificial Sequence
  Description of Artificial Sequence: Synthetic oligonucleotide
  Sense strand starting at position 3010 of SEQ ID NO: 1887146
gguuucaacgaauguugaa

SEQ ID NO: 2451789 - RNA, 19 nt, Artificial Sequence
  Description of Artificial Sequence: Synthetic oligonucleotide
  Antisense strand to SEQ ID NO: 2451788
uucaacauucguugaaacc

SEQ ID NO: 2451790 - RNA, 19 nt, Artificial Sequence
  Description of Artificial Sequence: Synthetic oligonucleotide
  Sense strand starting at position 3017 of SEQ ID NO: 1887146
acgaauguugaaugaauga

SEQ ID NO: 2451791 - RNA, 19 nt, Artificial Sequence
  Description of Artificial Sequence: Synthetic oligonucleotide
  Antisense strand to SEQ ID NO: 2451790
ucauucauucaacauucgu

SEQ ID NO: 2451792 - RNA, 19 nt, Artificial Sequence
  Description of Artificial Sequence: Synthetic oligonucleotide
  Sense strand starting at position 3125 of SEQ ID NO: 1887146
aucauuguagcuuggauca

SEQ ID NO: 2451793 - RNA, 19 nt, Artificial Sequence
  Description of Artificial Sequence: Synthetic oligonucleotide
  Antisense strand to SEQ ID NO: 2451792
ugauccaagcuacaaugau

SEQ ID NO: 2451794 - RNA, 19 nt, Artificial Sequence
  Description of Artificial Sequence: Synthetic oligonucleotide
  Sense strand starting at position 3130 of SEQ ID NO: 1887146
uguagcuuggaucauucua

SEQ ID NO: 2451795 - RNA, 19 nt, Artificial Sequence
  Description of Artificial Sequence: Synthetic oligonucleotide
  Antisense strand to SEQ ID NO: 2451794
uagaaugauccaagcuaca

SEQ ID NO: 2451796 - RNA, 19 nt, Artificial Sequence
  Description of Artificial Sequence: Synthetic oligonucleotide
  Sense strand starting at position 3132 of SEQ ID NO: 1887146
uagcuuggaucauucuaga

SEQ ID NO: 2451797 - RNA, 19 nt, Artificial Sequence
  Description of Artificial Sequence: Synthetic oligonucleotide
  Antisense strand to SEQ ID NO: 2451796
ucuagaaugauccaagcua

SEQ ID NO: 2451798 - RNA, 19 nt, Artificial Sequence
  Description of Artificial Sequence: Synthetic oligonucleotide
  Sense strand starting at position 3351 of SEQ ID NO: 1887146
aggacuuugccaugauacc

SEQ ID NO: 2451799 - RNA, 19 nt, Artificial Sequence
  Description of Artificial Sequence: Synthetic oligonucleotide
  Antisense strand to SEQ ID NO: 2451798
gguaucauggcaaaguccu

SEQ ID NO: 2451800 - RNA, 19 nt, Artificial Sequence
  Description of Artificial Sequence: Synthetic oligonucleotide
  Sense strand starting at position 3378 of SEQ ID NO: 1887146
accuaucagguauagugau

SEQ ID NO: 2451801 - RNA, 19 nt, Artificial Sequence
  Description of Artificial Sequence: Synthetic oligonucleotide
  Antisense strand to SEQ ID NO: 2451800
aucacuauaccugauaggu

SEQ ID NO: 2451802 - RNA, 19 nt, Artificial Sequence
  Description of Artificial Sequence: Synthetic oligonucleotide
  Sense strand starting at position 3573 of SEQ ID NO: 1887146
gcuacauauacuggguaga

SEQ ID NO: 2451803 - RNA, 19 nt, Artificial Sequence
  Description of Artificial Sequence: Synthetic oligonucleotide
  Antisense strand to SEQ ID NO: 2451802
ucuacccaguauauguagc

SEQ ID NO: 2451804 - RNA, 19 nt, Artificial Sequence
  Description of Artificial Sequence: Synthetic oligonucleotide
  Sense strand starting at position 3574 of SEQ ID NO: 1887146
cuacauauacuggguagaa

SEQ ID NO: 2451805 - RNA, 19 nt, Artificial Sequence
  Description of Artificial Sequence: Synthetic oligonucleotide
  Antisense strand to SEQ ID NO: 2451804
uucuacccaguauauguag

SEQ ID NO: 2451806 - RNA, 19 nt, Artificial Sequence
  Description of Artificial Sequence: Synthetic oligonucleotide
  Sense strand starting at position 3575 of SEQ ID NO: 1887146
uacauauacuggguagaau

SEQ ID NO: 2451807 - RNA, 19 nt, Artificial Sequence
  Description of Artificial Sequence: Synthetic oligonucleotide
  Antisense strand to SEQ ID NO: 2451806
auucuacccaguauaugua

SEQ ID NO: 2451808 - RNA, 19 nt, Artificial Sequence
  Description of Artificial Sequence: Synthetic oligonucleotide
  Sense strand starting at position 3874 of SEQ ID NO: 1887146
ccuccugaguuacuguuaa

SEQ ID NO: 2451809 - RNA, 19 nt, Artificial Sequence
  Description of Artificial Sequence: Synthetic oligonucleotide
  Antisense strand to SEQ ID NO: 2451808
uuaacaguaacucaggagg

SEQ ID NO: 2451810 - RNA, 19 nt, Artificial Sequence
  Description of Artificial Sequence: Synthetic oligonucleotide
  Sense strand starting at position 2145 of SEQ ID NO: 1887147
gccuuacaggaccaucaau

SEQ ID NO: 2451811 - RNA, 19 nt, Artificial Sequence
  Description of Artificial Sequence: Synthetic oligonucleotide
  Antisense strand to SEQ ID NO: 2451810
auugaugguccuguaaggc

SEQ ID NO: 2451812 - RNA, 19 nt, Artificial Sequence
  Description of Artificial Sequence: Synthetic oligonucleotide
  Sense strand starting at position 2547 of SEQ ID NO: 1887147
ugucuaccuccuuggaguu

SEQ ID NO: 2451813 - RNA, 19 nt, Artificial Sequence
  Description of Artificial Sequence: Synthetic oligonucleotide
  Antisense strand to SEQ ID NO: 2451812
aacuccaaggagguagaca

SEQ ID NO: 2451814 - RNA, 19 nt, Artificial Sequence
  Description of Artificial Sequence: Synthetic oligonucleotide
  Sense strand starting at position 2553 of SEQ ID NO: 1887147
ccuccuuggaguuguggaa

SEQ ID NO: 2451815 - RNA, 19 nt, Artificial Sequence
  Description of Artificial Sequence: Synthetic oligonucleotide
  Antisense strand to SEQ ID NO: 2451814
uuccacaacuccaaggagg

SEQ ID NO: 2451816 - RNA, 19 nt, Artificial Sequence
  Description of Artificial Sequence: Synthetic oligonucleotide
  Sense strand starting at position 2708 of SEQ ID NO: 1887147
agccuauguacucaguguu

SEQ ID NO: 2451817 - RNA, 19 nt, Artificial Sequence
  Description of Artificial Sequence: Synthetic oligonucleotide
  Antisense strand to SEQ ID NO: 2451816
aacacugaguacauaggcu

SEQ ID NO: 2451818 - RNA, 19 nt, Artificial Sequence
  Description of Artificial Sequence: Synthetic oligonucleotide
  Sense strand starting at position 3209 of SEQ ID NO: 1887147
aauguaaucuggugauuuc

SEQ ID NO: 2451819 - RNA, 19 nt, Artificial Sequence
  Description of Artificial Sequence: Synthetic oligonucleotide
  Antisense strand to SEQ ID NO: 2451818
gaaaucaccagauuacauu

SEQ ID NO: 2451820 - RNA, 19 nt, Artificial Sequence
  Description of Artificial Sequence: Synthetic oligonucleotide
  Sense strand starting at position 3314 of SEQ ID NO: 1887147
auuccuuauugauggguuu

SEQ ID NO: 2451821 - RNA, 19 nt, Artificial Sequence
  Description of Artificial Sequence: Synthetic oligonucleotide
  Antisense strand to SEQ ID NO: 2451820
aaacccaucaauaaggaau

SEQ ID NO: 2451822 - RNA, 19 nt, Artificial Sequence
  Description of Artificial Sequence: Synthetic oligonucleotide
  Sense strand starting at position 3317 of SEQ ID NO: 1887147
ccuuauugauggguuucua

SEQ ID NO: 2451823 - RNA, 19 nt, Artificial Sequence
  Description of Artificial Sequence: Synthetic oligonucleotide
  Antisense strand to SEQ ID NO: 2451822
uagaaacccaucaauaagg

SEQ ID NO: 2451824 - RNA, 19 nt, Artificial Sequence
  Description of Artificial Sequence: Synthetic oligonucleotide
  Sense strand starting at position 3582 of SEQ ID NO: 1887147
cugagauuguuccacccua

SEQ ID NO: 2451825 - RNA, 19 nt, Artificial Sequence
  Description of Artificial Sequence: Synthetic oligonucleotide
  Antisense strand to SEQ ID NO: 2451824
uaggguggaacaaucucag

SEQ ID NO: 2451826 - RNA, 19 nt, Artificial Sequence
  Description of Artificial Sequence: Synthetic oligonucleotide
  Sense strand starting at position 3723 of SEQ ID NO: 1887147
ccagcaucugcauagaauc

SEQ ID NO: 2451827 - RNA, 19 nt, Artificial Sequence
  Description of Artificial Sequence: Synthetic oligonucleotide
  Antisense strand to SEQ ID NO: 2451826
gauucuaugcagaugcugg

SEQ ID NO: 2451828 - RNA, 19 nt, Artificial Sequence
  Description of Artificial Sequence: Synthetic oligonucleotide
  Sense strand starting at position 3750 of SEQ ID NO: 1887147
guagaaucgcugcaccaua

SEQ ID NO: 2451829 - RNA, 19 nt, Artificial Sequence
  Description of Artificial Sequence: Synthetic oligonucleotide
  Antisense strand to SEQ ID NO: 2451828
uauggugcagcgauucuac

SEQ ID NO: 2451830 - RNA, 19 nt, Artificial Sequence
  Description of Artificial Sequence: Synthetic oligonucleotide
  Sense strand starting at position 3896 of SEQ ID NO: 1887147
gugccacuuugaggaaaua

SEQ ID NO: 2451831 - RNA, 19 nt, Artificial Sequence
  Description of Artificial Sequence: Synthetic oligonucleotide
  Antisense strand to SEQ ID NO: 2451830
uauuuccucaaaguggcac

SEQ ID NO: 2451832 - RNA, 19 nt, Artificial Sequence
  Description of Artificial Sequence: Synthetic oligonucleotide
  Sense strand starting at position 3929 of SEQ ID NO: 1887147
auagaucagugggaugacu

SEQ ID NO: 2451833 - RNA, 19 nt, Artificial Sequence
  Description of Artificial Sequence: Synthetic oligonucleotide
  Antisense strand to SEQ ID NO: 2451832
agucaucccacugaucuau

SEQ ID NO: 2451834 - RNA, 19 nt, Artificial Sequence
  Description of Artificial Sequence: Synthetic oligonucleotide
  Sense strand starting at position 174 of SEQ ID NO: 1887148
cacagaaguucuccaagug

SEQ ID NO: 2451835 - RNA, 19 nt, Artificial Sequence
  Description of Artificial Sequence: Synthetic oligonucleotide
  Antisense strand to SEQ ID NO: 2451834
cacuuggagaacuucugug

SEQ ID NO: 2451836 - RNA, 19 nt, Artificial Sequence
  Description of Artificial Sequence: Synthetic oligonucleotide
  Sense strand starting at position 259 of SEQ ID NO: 1887148
ugcugacuggugcauauaa

SEQ ID NO: 2451837 - RNA, 19 nt, Artificial Sequence
  Description of Artificial Sequence: Synthetic oligonucleotide
  Antisense strand to SEQ ID NO: 2451836
uuauaugcaccagucagca

SEQ ID NO: 2451838 - RNA, 19 nt, Artificial Sequence
  Description of Artificial Sequence: Synthetic oligonucleotide
  Sense strand starting at position 1006 of SEQ ID NO: 1887148
acgauuagcuguccggaga

SEQ ID NO: 2451839 - RNA, 19 nt, Artificial Sequence
  Description of Artificial Sequence: Synthetic oligonucleotide
  Antisense strand to SEQ ID NO: 2451838
ucuccggacagcuaaucgu

SEQ ID NO: 2451840 - RNA, 19 nt, Artificial Sequence
  Description of Artificial Sequence: Synthetic oligonucleotide
  Sense strand starting at position 1261 of SEQ ID NO: 1887148
ccaagaagauuggcucuua

SEQ ID NO: 2451841 - RNA, 19 nt, Artificial Sequence
  Description of Artificial Sequence: Synthetic oligonucleotide
  Antisense strand to SEQ ID NO: 2451840
uaagagccaaucuucuugg

SEQ ID NO: 2451842 - RNA, 19 nt, Artificial Sequence
  Description of Artificial Sequence: Synthetic oligonucleotide
  Sense strand starting at position 1318 of SEQ ID NO: 1887148
gcgauugcgucgacggaga

SEQ ID NO: 2451843 - RNA, 19 nt, Artificial Sequence
  Description of Artificial Sequence: Synthetic oligonucleotide
  Antisense strand to SEQ ID NO: 2451842
ucuccgucgacgcaaucgc

SEQ ID NO: 2451844 - RNA, 19 nt, Artificial Sequence
  Description of Artificial Sequence: Synthetic oligonucleotide
  Sense strand starting at position 1439 of SEQ ID NO: 1887148
ggcaaauucggcgcucacu

SEQ ID NO: 2451845 - RNA, 19 nt, Artificial Sequence
  Description of Artificial Sequence: Synthetic oligonucleotide
  Antisense strand to SEQ ID NO: 2451844
agugagcgccgaauuugcc

SEQ ID NO: 2451846 - RNA, 19 nt, Artificial Sequence
  Description of Artificial Sequence: Synthetic oligonucleotide
  Sense strand starting at position 1516 of SEQ ID NO: 1887148
ugggaauuguagucucccu

SEQ ID NO: 2451847 - RNA, 19 nt, Artificial Sequence
  Description of Artificial Sequence: Synthetic oligonucleotide
  Antisense strand to SEQ ID NO: 2451846
agggagacuacaauuccca

SEQ ID NO: 2451848 - RNA, 19 nt, Artificial Sequence
  Description of Artificial Sequence: Synthetic oligonucleotide
  Sense strand starting at position 1521 of SEQ ID NO: 1887148
auuguagucucccuaaaga

SEQ ID NO: 2451849 - RNA, 19 nt, Artificial Sequence
  Description of Artificial Sequence: Synthetic oligonucleotide
  Antisense strand to SEQ ID NO: 2451848
ucuuuagggagacuacaau

SEQ ID NO: 2451850 - RNA, 19 nt, Artificial Sequence
  Description of Artificial Sequence: Synthetic oligonucleotide
  Sense strand starting at position 1530 of SEQ ID NO: 1887148
ucccuaaagaguuguacgu

SEQ ID NO: 2451851 - RNA, 19 nt, Artificial Sequence
  Description of Artificial Sequence: Synthetic oligonucleotide
  Antisense strand to SEQ ID NO: 2451850
acguacaacucuuuaggga

SEQ ID NO: 2451852 - RNA, 19 nt, Artificial Sequence
  Description of Artificial Sequence: Synthetic oligonucleotide
  Sense strand starting at position 1534 of SEQ ID NO: 1887148
uaaagaguuguacguaucu

SEQ ID NO: 2451853 - RNA, 19 nt, Artificial Sequence
  Description of Artificial Sequence: Synthetic oligonucleotide
  Antisense strand to SEQ ID NO: 2451852
agauacguacaacucuuua

SEQ ID NO: 2451854 - RNA, 19 nt, Artificial Sequence
  Description of Artificial Sequence: Synthetic oligonucleotide
  Sense strand starting at position 1602 of SEQ ID NO: 1887148
uccauaacuguugacaagu

SEQ ID NO: 2451855 - RNA, 19 nt, Artificial Sequence
  Description of Artificial Sequence: Synthetic oligonucleotide
  Antisense strand to SEQ ID NO: 2451854
acuugucaacaguuaugga

SEQ ID NO: 2451856 - RNA, 19 nt, Artificial Sequence
  Description of Artificial Sequence: Synthetic oligonucleotide
  Sense strand starting at position 1628 of SEQ ID NO: 1887148
cgcacaggucuccaaucua

SEQ ID NO: 2451857 - RNA, 19 nt, Artificial Sequence
  Description of Artificial Sequence: Synthetic oligonucleotide
  Antisense strand to SEQ ID NO: 2451856
uagauuggagaccugugcg

SEQ ID NO: 2451858 - RNA, 19 nt, Artificial Sequence
  Description of Artificial Sequence: Synthetic oligonucleotide
  Sense strand starting at position 1750 of SEQ ID NO: 1887148
caacgcaugcuggaaauaa

SEQ ID NO: 2451859 - RNA, 19 nt, Artificial Sequence
  Description of Artificial Sequence: Synthetic oligonucleotide
  Antisense strand to SEQ ID NO: 2451858
uuauuuccagcaugcguug

SEQ ID NO: 2451860 - RNA, 19 nt, Artificial Sequence
  Description of Artificial Sequence: Synthetic oligonucleotide
  Sense strand starting at position 2093 of SEQ ID NO: 1887148
cucugauuguaccuugauu

SEQ ID NO: 2451861 - RNA, 19 nt, Artificial Sequence
  Description of Artificial Sequence: Synthetic oligonucleotide
  Antisense strand to SEQ ID NO: 2451860
aaucaagguacaaucagag

SEQ ID NO: 2451862 - RNA, 19 nt, Artificial Sequence
  Description of Artificial Sequence: Synthetic oligonucleotide
  Sense strand starting at position 2098 of SEQ ID NO: 1887148
auuguaccuugauuucgua

SEQ ID NO: 2451863 - RNA, 19 nt, Artificial Sequence
  Description of Artificial Sequence: Synthetic oligonucleotide
  Antisense strand to SEQ ID NO: 2451862
uacgaaaucaagguacaau

SEQ ID NO: 2451864 - RNA, 19 nt, Artificial Sequence
  Description of Artificial Sequence: Synthetic oligonucleotide
  Sense strand starting at position 2208 of SEQ ID NO: 1887148
cggcgugagcucgcugaga

SEQ ID NO: 2451865 - RNA, 19 nt, Artificial Sequence
  Description of Artificial Sequence: Synthetic oligonucleotide
  Antisense strand to SEQ ID NO: 2451864
ucucagcgagcucacgccg

SEQ ID NO: 2451866 - RNA, 19 nt, Artificial Sequence
  Description of Artificial Sequence: Synthetic oligonucleotide
  Sense strand starting at position 2297 of SEQ ID NO: 1887148
cucugcucuggguaaaggu

SEQ ID NO: 2451867 - RNA, 19 nt, Artificial Sequence
  Description of Artificial Sequence: Synthetic oligonucleotide
  Antisense strand to SEQ ID NO: 2451866
accuuuacccagagcagag

SEQ ID NO: 2451868 - RNA, 19 nt, Artificial Sequence
  Description of Artificial Sequence: Synthetic oligonucleotide
  Sense strand starting at position 2388 of SEQ ID NO: 1887148
gaagcugacagauggguau

SEQ ID NO: 2451869 - RNA, 19 nt, Artificial Sequence
  Description of Artificial Sequence: Synthetic oligonucleotide
  Antisense strand to SEQ ID NO: 2451868
auacccaucugucagcuuc

SEQ ID NO: 2451870 - RNA, 19 nt, Artificial Sequence
  Description of Artificial Sequence: Synthetic oligonucleotide
  Sense strand starting at position 2395 of SEQ ID NO: 1887148
acagauggguauucuuuga

SEQ ID NO: 2451871 - RNA, 19 nt, Artificial Sequence
  Description of Artificial Sequence: Synthetic oligonucleotide
  Antisense strand to SEQ ID NO: 2451870
ucaaagaauacccaucugu

SEQ ID NO: 2451872 - RNA, 19 nt, Artificial Sequence
  Description of Artificial Sequence: Synthetic oligonucleotide
  Sense strand starting at position 2438 of SEQ ID NO: 1887148
aggcguaaggcguugugaa

SEQ ID NO: 2451873 - RNA, 19 nt, Artificial Sequence
  Description of Artificial Sequence: Synthetic oligonucleotide
  Antisense strand to SEQ ID NO: 2451872
uucacaacgccuuacgccu

SEQ ID NO: 2451874 - RNA, 19 nt, Artificial Sequence
  Description of Artificial Sequence: Synthetic oligonucleotide
  Sense strand starting at position 2541 of SEQ ID NO: 1887148
cgugauaggaacuggaaua

SEQ ID NO: 2451875 - RNA, 19 nt, Artificial Sequence
  Description of Artificial Sequence: Synthetic oligonucleotide
  Antisense strand to SEQ ID NO: 2451874
uauuccaguuccuaucacg

SEQ ID NO: 2451876 - RNA, 19 nt, Artificial Sequence
  Description of Artificial Sequence: Synthetic oligonucleotide
  Sense strand starting at position 2570 of SEQ ID NO: 1887148
gggacacuaugucuuuaaa

SEQ ID NO: 2451877 - RNA, 19 nt, Artificial Sequence
  Description of Artificial Sequence: Synthetic oligonucleotide
  Antisense strand to SEQ ID NO: 2451876
uuuaaagacauaguguccc

SEQ ID NO: 2451878 - RNA, 19 nt, Artificial Sequence
  Description of Artificial Sequence: Synthetic oligonucleotide
  Sense strand starting at position 2841 of SEQ ID NO: 1887148
ccggcugguauguaugaga

SEQ ID NO: 2451879 - RNA, 19 nt, Artificial Sequence
  Description of Artificial Sequence: Synthetic oligonucleotide
  Antisense strand to SEQ ID NO: 2451878
ucucauacauaccagccgg

SEQ ID NO: 2451880 - RNA, 19 nt, Artificial Sequence
  Description of Artificial Sequence: Synthetic oligonucleotide
  Sense strand starting at position 3019 of SEQ ID NO: 1887148
cagggaugugcuugaggag

SEQ ID NO: 2451881 - RNA, 19 nt, Artificial Sequence
  Description of Artificial Sequence: Synthetic oligonucleotide
  Antisense strand to SEQ ID NO: 2451880
cuccucaagcacaucccug

SEQ ID NO: 2451882 - RNA, 19 nt, Artificial Sequence
  Description of Artificial Sequence: Synthetic oligonucleotide
  Sense strand starting at position 3050 of SEQ ID NO: 1887148
agagcaggucacugggaaa

SEQ ID NO: 2451883 - RNA, 19 nt, Artificial Sequence
  Description of Artificial Sequence: Synthetic oligonucleotide
  Antisense strand to SEQ ID NO: 2451882
uuucccagugaccugcucu

SEQ ID NO: 2451884 - RNA, 19 nt, Artificial Sequence
  Description of Artificial Sequence: Synthetic oligonucleotide
  Sense strand starting at position 3245 of SEQ ID NO: 1887148
uuggcagcaauaugugaaa

SEQ ID NO: 2451885 - RNA, 19 nt, Artificial Sequence
  Description of Artificial Sequence: Synthetic oligonucleotide
  Antisense strand to SEQ ID NO: 2451884
uuucacauauugcugccaa

SEQ ID NO: 2451886 - RNA, 19 nt, Artificial Sequence
  Description of Artificial Sequence: Synthetic oligonucleotide
  Sense strand starting at position 3318 of SEQ ID NO: 1887148
aauaaaggacguugucauu

SEQ ID NO: 2451887 - RNA, 19 nt, Artificial Sequence
  Description of Artificial Sequence: Synthetic oligonucleotide
  Antisense strand to SEQ ID NO: 2451886
aaugacaacguccuuuauu

SEQ ID NO: 2451888 - RNA, 19 nt, Artificial Sequence
  Description of Artificial Sequence: Synthetic oligonucleotide
  Sense strand starting at position 3324 of SEQ ID NO: 1887148
ggacguugucauuaguucu

SEQ ID NO: 2451889 - RNA, 19 nt, Artificial Sequence
  Description of Artificial Sequence: Synthetic oligonucleotide
  Antisense strand to SEQ ID NO: 2451888
agaacuaaugacaacgucc

SEQ ID NO: 2451890 - RNA, 19 nt, Artificial Sequence
  Description of Artificial Sequence: Synthetic oligonucleotide
  Sense strand starting at position 3337 of SEQ ID NO: 1887148
aguucuuugguuuguauua

SEQ ID NO: 2451891 - RNA, 19 nt, Artificial Sequence
  Description of Artificial Sequence: Synthetic oligonucleotide
  Antisense strand to SEQ ID NO: 2451890
uaauacaaaccaaagaacu

SEQ ID NO: 2451892 - RNA, 19 nt, Artificial Sequence
  Description of Artificial Sequence: Synthetic oligonucleotide
  Sense strand starting at position 3498 of SEQ ID NO: 1887148
cugcucuucgcguugaaga

SEQ ID NO: 2451893 - RNA, 19 nt, Artificial Sequence
  Description of Artificial Sequence: Synthetic oligonucleotide
  Antisense strand to SEQ ID NO: 2451892
ucuucaacgcgaagagcag

SEQ ID NO: 2451894 - RNA, 19 nt, Artificial Sequence
  Description of Artificial Sequence: Synthetic oligonucleotide
  Sense strand starting at position 3528 of SEQ ID NO: 1887148
ucauuaaugcuaugcagaa

SEQ ID NO: 2451895 - RNA, 19 nt, Artificial Sequence
  Description of Artificial Sequence: Synthetic oligonucleotide
  Antisense strand to SEQ ID NO: 2451894
uucugcauagcauuaauga

SEQ ID NO: 2451896 - RNA, 19 nt, Artificial Sequence
  Description of Artificial Sequence: Synthetic oligonucleotide
  Sense strand starting at position 3554 of SEQ ID NO: 1887148
gagugucccaucugguaag

SEQ ID NO: 2451897 - RNA, 19 nt, Artificial Sequence
  Description of Artificial Sequence: Synthetic oligonucleotide
  Antisense strand to SEQ ID NO: 2451896
cuuaccagaugggacacuc

SEQ ID NO: 2451898 - RNA, 19 nt, Artificial Sequence
  Description of Artificial Sequence: Synthetic oligonucleotide
  Sense strand starting at position 3565 of SEQ ID NO: 1887148
cugguaagucagcacaaga

SEQ ID NO: 2451899 - RNA, 19 nt, Artificial Sequence
  Description of Artificial Sequence: Synthetic oligonucleotide
  Antisense strand to SEQ ID NO: 2451898
ucuugugcugacuuaccag

SEQ ID NO: 2451900 - RNA, 19 nt, Artificial Sequence
  Description of Artificial Sequence: Synthetic oligonucleotide
  Sense strand starting at position 3573 of SEQ ID NO: 1887148
ucagcacaagaguguauua

SEQ ID NO: 2451901 - RNA, 19 nt, Artificial Sequence
  Description of Artificial Sequence: Synthetic oligonucleotide
  Antisense strand to SEQ ID NO: 2451900
uaauacacucuugugcuga

SEQ ID NO: 2451902 - RNA, 19 nt, Artificial Sequence
  Description of Artificial Sequence: Synthetic oligonucleotide
  Sense strand starting at position 3575 of SEQ ID NO: 1887148
agcacaagaguguauuaau

SEQ ID NO: 2451903 - RNA, 19 nt, Artificial Sequence
  Description of Artificial Sequence: Synthetic oligonucleotide
  Antisense strand to SEQ ID NO: 2451902
auuaauacacucuugugcu

SEQ ID NO: 2451904 - RNA, 19 nt, Artificial Sequence
  Description of Artificial Sequence: Synthetic oligonucleotide
  Sense strand starting at position 3578 of SEQ ID NO: 1887148
acaagaguguauuaauuug

SEQ ID NO: 2451905 - RNA, 19 nt, Artificial Sequence
  Description of Artificial Sequence: Synthetic oligonucleotide
  Antisense strand to SEQ ID NO: 2451904
caaauuaauacacucuugu

SEQ ID NO: 2451906 - RNA, 19 nt, Artificial Sequence
  Description of Artificial Sequence: Synthetic oligonucleotide
  Sense strand starting at position 3594 of SEQ ID NO: 1887148
uugggauuccuaugauuau

SEQ ID NO: 2451907 - RNA, 19 nt, Artificial Sequence
  Description of Artificial Sequence: Synthetic oligonucleotide
  Antisense strand to SEQ ID NO: 2451906
auaaucauaggaaucccaa

SEQ ID NO: 2451908 - RNA, 19 nt, Artificial Sequence
  Description of Artificial Sequence: Synthetic oligonucleotide
  Sense strand starting at position 3670 of SEQ ID NO: 1887148
guaagauuaggcuauugua

SEQ ID NO: 2451909 - RNA, 19 nt, Artificial Sequence
  Description of Artificial Sequence: Synthetic oligonucleotide
  Antisense strand to SEQ ID NO: 2451908
uacaauagccuaaucuuac

SEQ ID NO: 2451910 - RNA, 19 nt, Artificial Sequence
  Description of Artificial Sequence: Synthetic oligonucleotide
  Sense strand starting at position 3787 of SEQ ID NO: 1887148
aauccugugguccgggaaa

SEQ ID NO: 2451911 - RNA, 19 nt, Artificial Sequence
  Description of Artificial Sequence: Synthetic oligonucleotide
  Antisense strand to SEQ ID NO: 2451910
uuucccggaccacaggauu

SEQ ID NO: 2451912 - RNA, 19 nt, Artificial Sequence
  Description of Artificial Sequence: Synthetic oligonucleotide
  Sense strand starting at position 3789 of SEQ ID NO: 1887148
uccugugguccgggaaaga

SEQ ID NO: 2451913 - RNA, 19 nt, Artificial Sequence
  Description of Artificial Sequence: Synthetic oligonucleotide
  Antisense strand to SEQ ID NO: 2451912
ucuuucccggaccacagga

SEQ ID NO: 2451914 - RNA, 19 nt, Artificial Sequence
  Description of Artificial Sequence: Synthetic oligonucleotide
  Sense strand starting at position 48 of SEQ ID NO: 1887149
gaacuaauaugucaaugug

SEQ ID NO: 2451915 - RNA, 19 nt, Artificial Sequence
  Description of Artificial Sequence: Synthetic oligonucleotide
  Antisense strand to SEQ ID NO: 2451914
cacauugacauauuaguuc

SEQ ID NO: 2451916 - RNA, 19 nt, Artificial Sequence
  Description of Artificial Sequence: Synthetic oligonucleotide
  Sense strand starting at position 51 of SEQ ID NO: 1887149
cuaauaugucaauguggga

SEQ ID NO: 2451917 - RNA, 19 nt, Artificial Sequence
  Description of Artificial Sequence: Synthetic oligonucleotide
  Antisense strand to SEQ ID NO: 2451916
ucccacauugacauauuag

SEQ ID NO: 2451918 - RNA, 19 nt, Artificial Sequence
  Description of Artificial Sequence: Synthetic oligonucleotide
  Sense strand starting at position 609 of SEQ ID NO: 1887149
acaucuacuguguaccaaa

SEQ ID NO: 2451919 - RNA, 19 nt, Artificial Sequence
  Description of Artificial Sequence: Synthetic oligonucleotide
  Antisense strand to SEQ ID NO: 2451918
uuugguacacaguagaugu

SEQ ID NO: 2451920 - RNA, 19 nt, Artificial Sequence
  Description of Artificial Sequence: Synthetic oligonucleotide
  Sense strand starting at position 730 of SEQ ID NO: 1887149
gaaagugauguccgguaca

SEQ ID NO: 2451921 - RNA, 19 nt, Artificial Sequence
  Description of Artificial Sequence: Synthetic oligonucleotide
  Antisense strand to SEQ ID NO: 2451920
uguaccggacaucacuuuc

SEQ ID NO: 2451922 - RNA, 19 nt, Artificial Sequence
  Description of Artificial Sequence: Synthetic oligonucleotide
  Sense strand starting at position 733 of SEQ ID NO: 1887149
agugauguccgguacaaag

SEQ ID NO: 2451923 - RNA, 19 nt, Artificial Sequence
  Description of Artificial Sequence: Synthetic oligonucleotide
  Antisense strand to SEQ ID NO: 2451922
cuuuguaccggacaucacu

SEQ ID NO: 2451924 - RNA, 19 nt, Artificial Sequence
  Description of Artificial Sequence: Synthetic oligonucleotide
  Sense strand starting at position 994 of SEQ ID NO: 1887149
aggaauaucugauacggga

SEQ ID NO: 2451925 - RNA, 19 nt, Artificial Sequence
  Description of Artificial Sequence: Synthetic oligonucleotide
  Antisense strand to SEQ ID NO: 2451924
ucccguaucagauauuccu

SEQ ID NO: 2451926 - RNA, 19 nt, Artificial Sequence
  Description of Artificial Sequence: Synthetic oligonucleotide
  Sense strand starting at position 1038 of SEQ ID NO: 1887149
aguaacuauuccguccaga

SEQ ID NO: 2451927 - RNA, 19 nt, Artificial Sequence
  Description of Artificial Sequence: Synthetic oligonucleotide
  Antisense strand to SEQ ID NO: 2451926
ucuggacggaauaguuacu

SEQ ID NO: 2451928 - RNA, 19 nt, Artificial Sequence
  Description of Artificial Sequence: Synthetic oligonucleotide
  Sense strand starting at position 1085 of SEQ ID NO: 1887149
ugaccuacccuguaucaca

SEQ ID NO: 2451929 - RNA, 19 nt, Artificial Sequence
  Description of Artificial Sequence: Synthetic oligonucleotide
  Antisense strand to SEQ ID NO: 2451928
ugugauacaggguagguca

SEQ ID NO: 2451930 - RNA, 19 nt, Artificial Sequence
  Description of Artificial Sequence: Synthetic oligonucleotide
  Sense strand starting at position 1393 of SEQ ID NO: 1887149
cccaaagacugcggagaau

SEQ ID NO: 2451931 - RNA, 19 nt, Artificial Sequence
  Description of Artificial Sequence: Synthetic oligonucleotide
  Antisense strand to SEQ ID NO: 2451930
auucuccgcagucuuuggg

SEQ ID NO: 2451932 - RNA, 19 nt, Artificial Sequence
  Description of Artificial Sequence: Synthetic oligonucleotide
  Sense strand starting at position 1458 of SEQ ID NO: 1887149
ggacuaaagcgccagaaau

SEQ ID NO: 2451933 - RNA, 19 nt, Artificial Sequence
  Description of Artificial Sequence: Synthetic oligonucleotide
  Antisense strand to SEQ ID NO: 2451932
auuucuggcgcuuuagucc

SEQ ID NO: 2451934 - RNA, 19 nt, Artificial Sequence
  Description of Artificial Sequence: Synthetic oligonucleotide
  Sense strand starting at position 1525 of SEQ ID NO: 1887149
gcacucagugcuugcugaa

SEQ ID NO: 2451935 - RNA, 19 nt, Artificial Sequence
  Description of Artificial Sequence: Synthetic oligonucleotide
  Antisense strand to SEQ ID NO: 2451934
uucagcaagcacugagugc

SEQ ID NO: 2451936 - RNA, 19 nt, Artificial Sequence
  Description of Artificial Sequence: Synthetic oligonucleotide
  Sense strand starting at position 1774 of SEQ ID NO: 1887149
ccucuuagagcugaacuca

SEQ ID NO: 2451937 - RNA, 19 nt, Artificial Sequence
  Description of Artificial Sequence: Synthetic oligonucleotide
  Antisense strand to SEQ ID NO: 2451936
ugaguucagcucuaagagg

SEQ ID NO: 2451938 - RNA, 19 nt, Artificial Sequence
  Description of Artificial Sequence: Synthetic oligonucleotide
  Sense strand starting at position 2025 of SEQ ID NO: 1887149
acgcuuccucuugggagua

SEQ ID NO: 2451939 - RNA, 19 nt, Artificial Sequence
  Description of Artificial Sequence: Synthetic oligonucleotide
  Antisense strand to SEQ ID NO: 2451938
uacucccaagaggaagcgu

SEQ ID NO: 2451940 - RNA, 19 nt, Artificial Sequence
  Description of Artificial Sequence: Synthetic oligonucleotide
  Sense strand starting at position 2038 of SEQ ID NO: 1887149
ggaguaggcagucauucua

SEQ ID NO: 2451941 - RNA, 19 nt, Artificial Sequence
  Description of Artificial Sequence: Synthetic oligonucleotide
  Antisense strand to SEQ ID NO: 2451940
uagaaugacugccuacucc

SEQ ID NO: 2451942 - RNA, 19 nt, Artificial Sequence
  Description of Artificial Sequence: Synthetic oligonucleotide
  Sense strand starting at position 2045 of SEQ ID NO: 1887149
gcagucauucuagggaaca

SEQ ID NO: 2451943 - RNA, 19 nt, Artificial Sequence
  Description of Artificial Sequence: Synthetic oligonucleotide
  Antisense strand to SEQ ID NO: 2451942
uguucccuagaaugacugc

SEQ ID NO: 2451944 - RNA, 19 nt, Artificial Sequence
  Description of Artificial Sequence: Synthetic oligonucleotide
  Sense strand starting at position 2046 of SEQ ID NO: 1887149
cagucauucuagggaacaa

SEQ ID NO: 2451945 - RNA, 19 nt, Artificial Sequence
  Description of Artificial Sequence: Synthetic oligonucleotide
  Antisense strand to SEQ ID NO: 2451944
uuguucccuagaaugacug

SEQ ID NO: 2451946 - RNA, 19 nt, Artificial Sequence
  Description of Artificial Sequence: Synthetic oligonucleotide
  Sense strand starting at position 2141 of SEQ ID NO: 1887149
cggguucucugacucacuu

SEQ ID NO: 2451947 - RNA, 19 nt, Artificial Sequence
  Description of Artificial Sequence: Synthetic oligonucleotide
  Antisense strand to SEQ ID NO: 2451946
aagugagucagagaacccg

SEQ ID NO: 2451948 - RNA, 19 nt, Artificial Sequence
  Description of Artificial Sequence: Synthetic oligonucleotide
  Sense strand starting at position 2159 of SEQ ID NO: 1887149
uccuucguucgcgagcaaa

SEQ ID NO: 2451949 - RNA, 19 nt, Artificial Sequence
  Description of Artificial Sequence: Synthetic oligonucleotide
  Antisense strand to SEQ ID NO: 2451948
uuugcucgcgaacgaagga

SEQ ID NO: 2451950 - RNA, 19 nt, Artificial Sequence
  Description of Artificial Sequence: Synthetic oligonucleotide
  Sense strand starting at position 2161 of SEQ ID NO: 1887149
cuucguucgcgagcaaauu

SEQ ID NO: 2451951 - RNA, 19 nt, Artificial Sequence
  Description of Artificial Sequence: Synthetic oligonucleotide
  Antisense strand to SEQ ID NO: 2451950
aauuugcucgcgaacgaag

SEQ ID NO: 2451952 - RNA, 19 nt, Artificial Sequence
  Description of Artificial Sequence: Synthetic oligonucleotide
  Sense strand starting at position 2221 of SEQ ID NO: 1887149
aagagugccugaccuagaa

SEQ ID NO: 2451953 - RNA, 19 nt, Artificial Sequence
  Description of Artificial Sequence: Synthetic oligonucleotide
  Antisense strand to SEQ ID NO: 2451952
uucuaggucaggcacucuu

SEQ ID NO: 2451954 - RNA, 19 nt, Artificial Sequence
  Description of Artificial Sequence: Synthetic oligonucleotide
  Sense strand starting at position 2223 of SEQ ID NO: 1887149
gagugccugaccuagaagu

SEQ ID NO: 2451955 - RNA, 19 nt, Artificial Sequence
  Description of Artificial Sequence: Synthetic oligonucleotide
  Antisense strand to SEQ ID NO: 2451954
acuucuaggucaggcacuc

SEQ ID NO: 2451956 - RNA, 19 nt, Artificial Sequence
  Description of Artificial Sequence: Synthetic oligonucleotide
  Sense strand starting at position 2321 of SEQ ID NO: 1887149
cgcauuauucuaggcccua

SEQ ID NO: 2451957 - RNA, 19 nt, Artificial Sequence
  Description of Artificial Sequence: Synthetic oligonucleotide
  Antisense strand to SEQ ID NO: 2451956
uagggccuagaauaaugcg

SEQ ID NO: 2451958 - RNA, 19 nt, Artificial Sequence
  Description of Artificial Sequence: Synthetic oligonucleotide
  Sense strand starting at position 2322 of SEQ ID NO: 1887149
gcauuauucuaggcccuag

SEQ ID NO: 2451959 - RNA, 19 nt, Artificial Sequence
  Description of Artificial Sequence: Synthetic oligonucleotide
  Antisense strand to SEQ ID NO: 2451958
cuagggccuagaauaaugc

SEQ ID NO: 2451960 - RNA, 19 nt, Artificial Sequence
  Description of Artificial Sequence: Synthetic oligonucleotide
  Sense strand starting at position 2348 of SEQ ID NO: 1887149
acaguaugcucucuuggag

SEQ ID NO: 2451961 - RNA, 19 nt, Artificial Sequence
  Description of Artificial Sequence: Synthetic oligonucleotide
  Antisense strand to SEQ ID NO: 2451960
cuccaagagagcauacugu

SEQ ID NO: 2451962 - RNA, 19 nt, Artificial Sequence
  Description of Artificial Sequence: Synthetic oligonucleotide
  Sense strand starting at position 2351 of SEQ ID NO: 1887149
guaugcucucuuggagcuu

SEQ ID NO: 2451963 - RNA, 19 nt, Artificial Sequence
  Description of Artificial Sequence: Synthetic oligonucleotide
  Antisense strand to SEQ ID NO: 2451962
aagcuccaagagagcauac

SEQ ID NO: 2451964 - RNA, 19 nt, Artificial Sequence
  Description of Artificial Sequence: Synthetic oligonucleotide
  Sense strand starting at position 2419 of SEQ ID NO: 1887149
uauguaauagaucgcauuu

SEQ ID NO: 2451965 - RNA, 19 nt, Artificial Sequence
  Description of Artificial Sequence: Synthetic oligonucleotide
  Antisense strand to SEQ ID NO: 2451964
aaaugcgaucuauuacaua

SEQ ID NO: 2451966 - RNA, 19 nt, Artificial Sequence
  Description of Artificial Sequence: Synthetic oligonucleotide
  Sense strand starting at position 2437 of SEQ ID NO: 1887149
uuguaagugcugugaagaa

SEQ ID NO: 2451967 - RNA, 19 nt, Artificial Sequence
  Description of Artificial Sequence: Synthetic oligonucleotide
  Antisense strand to SEQ ID NO: 2451966
uucuucacagcacuuacaa

SEQ ID NO: 2451968 - RNA, 19 nt, Artificial Sequence
  Description of Artificial Sequence: Synthetic oligonucleotide
  Sense strand starting at position 2462 of SEQ ID NO: 1887149
agagaaaucucugaguaag

SEQ ID NO: 2451969 - RNA, 19 nt, Artificial Sequence
  Description of Artificial Sequence: Synthetic oligonucleotide
  Antisense strand to SEQ ID NO: 2451968
cuuacucagagauuucucu

SEQ ID NO: 2451970 - RNA, 19 nt, Artificial Sequence
  Description of Artificial Sequence: Synthetic oligonucleotide
  Sense strand starting at position 2468 of SEQ ID NO: 1887149
aucucugaguaagugauaa

SEQ ID NO: 2451971 - RNA, 19 nt, Artificial Sequence
  Description of Artificial Sequence: Synthetic oligonucleotide
  Antisense strand to SEQ ID NO: 2451970
uuaucacuuacucagagau

SEQ ID NO: 2451972 - RNA, 19 nt, Artificial Sequence
  Description of Artificial Sequence: Synthetic oligonucleotide
  Sense strand starting at position 2472 of SEQ ID NO: 1887149
cugaguaagugauaauaga

SEQ ID NO: 2451973 - RNA, 19 nt, Artificial Sequence
  Description of Artificial Sequence: Synthetic oligonucleotide
  Antisense strand to SEQ ID NO: 2451972
ucuauuaucacuuacucag

SEQ ID NO: 2451974 - RNA, 19 nt, Artificial Sequence
  Description of Artificial Sequence: Synthetic oligonucleotide
  Sense strand starting at position 2519 of SEQ ID NO: 1887149
cccagugauucuucgagag

SEQ ID NO: 2451975 - RNA, 19 nt, Artificial Sequence
  Description of Artificial Sequence: Synthetic oligonucleotide
  Antisense strand to SEQ ID NO: 2451974
cucucgaagaaucacuggg

SEQ ID NO: 2451976 - RNA, 19 nt, Artificial Sequence
  Description of Artificial Sequence: Synthetic oligonucleotide
  Sense strand starting at position 2523 of SEQ ID NO: 1887149
gugauucuucgagagccaa

SEQ ID NO: 2451977 - RNA, 19 nt, Artificial Sequence
  Description of Artificial Sequence: Synthetic oligonucleotide
  Antisense strand to SEQ ID NO: 2451976
uuggcucucgaagaaucac

SEQ ID NO: 2451978 - RNA, 19 nt, Artificial Sequence
  Description of Artificial Sequence: Synthetic oligonucleotide
  Sense strand starting at position 2539 of SEQ ID NO: 1887149
caaguauuacgguggacau

SEQ ID NO: 2451979 - RNA, 19 nt, Artificial Sequence
  Description of Artificial Sequence: Synthetic oligonucleotide
  Antisense strand to SEQ ID NO: 2451978
auguccaccguaauacuug

SEQ ID NO: 2451980 - RNA, 19 nt, Artificial Sequence
  Description of Artificial Sequence: Synthetic oligonucleotide
  Sense strand starting at position 2540 of SEQ ID NO: 1887149
aaguauuacgguggacauc

SEQ ID NO: 2451981 - RNA, 19 nt, Artificial Sequence
  Description of Artificial Sequence: Synthetic oligonucleotide
  Antisense strand to SEQ ID NO: 2451980
gauguccaccguaauacuu

SEQ ID NO: 2451982 - RNA, 19 nt, Artificial Sequence
  Description of Artificial Sequence: Synthetic oligonucleotide
  Sense strand starting at position 2551 of SEQ ID NO: 1887149
uggacaucgagugguggaa

SEQ ID NO: 2451983 - RNA, 19 nt, Artificial Sequence
  Description of Artificial Sequence: Synthetic oligonucleotide
  Antisense strand to SEQ ID NO: 2451982
uuccaccacucgaugucca

SEQ ID NO: 2451984 - RNA, 19 nt, Artificial Sequence
  Description of Artificial Sequence: Synthetic oligonucleotide
  Sense strand starting at position 2587 of SEQ ID NO: 1887149
gccaaaucuuauguuguga

SEQ ID NO: 2451985 - RNA, 19 nt, Artificial Sequence
  Description of Artificial Sequence: Synthetic oligonucleotide
  Antisense strand to SEQ ID NO: 2451984
ucacaacauaagauuuggc

SEQ ID NO: 2451986 - RNA, 19 nt, Artificial Sequence
  Description of Artificial Sequence: Synthetic oligonucleotide
  Sense strand starting at position 2602 of SEQ ID NO: 1887149
gugagaugcuaauacagau

SEQ ID NO: 2451987 - RNA, 19 nt, Artificial Sequence
  Description of Artificial Sequence: Synthetic oligonucleotide
  Antisense strand to SEQ ID NO: 2451986
aucuguauuagcaucucac

SEQ ID NO: 2451988 - RNA, 19 nt, Artificial Sequence
  Description of Artificial Sequence: Synthetic oligonucleotide
  Sense strand starting at position 2736 of SEQ ID NO: 1887149
ggagcaauuggacgaauau

SEQ ID NO: 2451989 - RNA, 19 nt, Artificial Sequence
  Description of Artificial Sequence: Synthetic oligonucleotide
  Antisense strand to SEQ ID NO: 2451988
auauucguccaauugcucc

SEQ ID NO: 2451990 - RNA, 19 nt, Artificial Sequence
  Description of Artificial Sequence: Synthetic oligonucleotide
  Sense strand starting at position 2941 of SEQ ID NO: 1887149
guugauaaauuggaacuua

SEQ ID NO: 2451991 - RNA, 19 nt, Artificial Sequence
  Description of Artificial Sequence: Synthetic oligonucleotide
  Antisense strand to SEQ ID NO: 2451990
uaaguuccaauuuaucaac

SEQ ID NO: 2451992 - RNA, 19 nt, Artificial Sequence
  Description of Artificial Sequence: Synthetic oligonucleotide
  Sense strand starting at position 3915 of SEQ ID NO: 1887149
gugcucggccuuuauuuau

SEQ ID NO: 2451993 - RNA, 19 nt, Artificial Sequence
  Description of Artificial Sequence: Synthetic oligonucleotide
  Antisense strand to SEQ ID NO: 2451992
auaaauaaaggccgagcac

SEQ ID NO: 2451994 - RNA, 19 nt, Artificial Sequence
  Description of Artificial Sequence: Synthetic oligonucleotide
  Sense strand starting at position 712 of SEQ ID NO: 1887153
ccgcgcuugcuaucuaaga

SEQ ID NO: 2451995 - RNA, 19 nt, Artificial Sequence
  Description of Artificial Sequence: Synthetic oligonucleotide
  Antisense strand to SEQ ID NO: 2451994
ucuuagauagcaagcgcgg

SEQ ID NO: 2451996 - RNA, 19 nt, Artificial Sequence
  Description of Artificial Sequence: Synthetic oligonucleotide
  Sense strand starting at position 713 of SEQ ID NO: 1887153
cgcgcuugcuaucuaagau

SEQ ID NO: 2451997 - RNA, 19 nt, Artificial Sequence
  Description of Artificial Sequence: Synthetic oligonucleotide
  Antisense strand to SEQ ID NO: 2451996
aucuuagauagcaagcgcg

SEQ ID NO: 2451998 - RNA, 19 nt, Artificial Sequence
  Description of Artificial Sequence: Synthetic oligonucleotide
  Sense strand starting at position 714 of SEQ ID NO: 1887153
gcgcuugcuaucuaagauc

SEQ ID NO: 2451999 - RNA, 19 nt, Artificial Sequence
  Description of Artificial Sequence: Synthetic oligonucleotide
  Antisense strand to SEQ ID NO: 2451998
gaucuuagauagcaagcgc

SEQ ID NO: 2452000 - RNA, 19 nt, Artificial Sequence
  Description of Artificial Sequence: Synthetic oligonucleotide
  Sense strand starting at position 873 of SEQ ID NO: 1887153
gccaucugucauggguauu

SEQ ID NO: 2452001 - RNA, 19 nt, Artificial Sequence
  Description of Artificial Sequence: Synthetic oligonucleotide
  Antisense strand to SEQ ID NO: 2452000
aauacccaugacagauggc

SEQ ID NO: 2452002 - RNA, 19 nt, Artificial Sequence
  Description of Artificial Sequence: Synthetic oligonucleotide
  Sense strand starting at position 876 of SEQ ID NO: 1887153
aucugucauggguauuauu

SEQ ID NO: 2452003 - RNA, 19 nt, Artificial Sequence
  Description of Artificial Sequence: Synthetic oligonucleotide
  Antisense strand to SEQ ID NO: 2452002
aauaauacccaugacagau

SEQ ID NO: 2452004 - RNA, 19 nt, Artificial Sequence
  Description of Artificial Sequence: Synthetic oligonucleotide
  Sense strand starting at position 960 of SEQ ID NO: 1887153
cgaacuguguccuugucau

SEQ ID NO: 2452005 - RNA, 19 nt, Artificial Sequence
  Description of Artificial Sequence: Synthetic oligonucleotide
  Antisense strand to SEQ ID NO: 2452004
augacaaggacacaguucg

SEQ ID NO: 2452006 - RNA, 19 nt, Artificial Sequence
  Description of Artificial Sequence: Synthetic oligonucleotide
  Sense strand starting at position 964 of SEQ ID NO: 1887153
cuguguccuugucaucaau

SEQ ID NO: 2452007 - RNA, 19 nt, Artificial Sequence
  Description of Artificial Sequence: Synthetic oligonucleotide
  Antisense strand to SEQ ID NO: 2452006
auugaugacaaggacacag

SEQ ID NO: 2452008 - RNA, 19 nt, Artificial Sequence
  Description of Artificial Sequence: Synthetic oligonucleotide
  Sense strand starting at position 966 of SEQ ID NO: 1887153
guguccuugucaucaauga

SEQ ID NO: 2452009 - RNA, 19 nt, Artificial Sequence
  Description of Artificial Sequence: Synthetic oligonucleotide
  Antisense strand to SEQ ID NO: 2452008
ucauugaugacaaggacac

SEQ ID NO: 2452010 - RNA, 19 nt, Artificial Sequence
  Description of Artificial Sequence: Synthetic oligonucleotide
  Sense strand starting at position 1006 of SEQ ID NO: 1887153
ucuugucccuugucaggau

SEQ ID NO: 2452011 - RNA, 19 nt, Artificial Sequence
  Description of Artificial Sequence: Synthetic oligonucleotide
  Antisense strand to SEQ ID NO: 2452010
auccugacaagggacaaga

SEQ ID NO: 2452012 - RNA, 19 nt, Artificial Sequence
  Description of Artificial Sequence: Synthetic oligonucleotide
  Sense strand starting at position 1009 of SEQ ID NO: 1887153
ugucccuugucaggauaau

SEQ ID NO: 2452013 - RNA, 19 nt, Artificial Sequence
  Description of Artificial Sequence: Synthetic oligonucleotide
  Antisense strand to SEQ ID NO: 2452012
auuauccugacaagggaca

SEQ ID NO: 2452014 - RNA, 19 nt, Artificial Sequence
  Description of Artificial Sequence: Synthetic oligonucleotide
  Sense strand starting at position 1010 of SEQ ID NO: 1887153
gucccuugucaggauaauu

SEQ ID NO: 2452015 - RNA, 19 nt, Artificial Sequence
  Description of Artificial Sequence: Synthetic oligonucleotide
  Antisense strand to SEQ ID NO: 2452014
aauuauccugacaagggac

SEQ ID NO: 2452016 - RNA, 19 nt, Artificial Sequence
  Description of Artificial Sequence: Synthetic oligonucleotide
  Sense strand starting at position 1018 of SEQ ID NO: 1887153
ucaggauaauucguucuac

SEQ ID NO: 2452017 - RNA, 19 nt, Artificial Sequence
  Description of Artificial Sequence: Synthetic oligonucleotide
  Antisense strand to SEQ ID NO: 2452016
guagaacgaauuauccuga

SEQ ID NO: 2452018 - RNA, 19 nt, Artificial Sequence
  Description of Artificial Sequence: Synthetic oligonucleotide
  Sense strand starting at position 1022 of SEQ ID NO: 1887153
gauaauucguucuacgaac

SEQ ID NO: 2452019 - RNA, 19 nt, Artificial Sequence
  Description of Artificial Sequence: Synthetic oligonucleotide
  Antisense strand to SEQ ID NO: 2452018
guucguagaacgaauuauc

SEQ ID NO: 2452020 - RNA, 19 nt, Artificial Sequence
  Description of Artificial Sequence: Synthetic oligonucleotide
  Sense strand starting at position 1093 of SEQ ID NO: 1887153
gugaguagggccugaugga

SEQ ID NO: 2452021 - RNA, 19 nt, Artificial Sequence
  Description of Artificial Sequence: Synthetic oligonucleotide
  Antisense strand to SEQ ID NO: 2452020
uccaucaggcccuacucac

SEQ ID NO: 2452022 - RNA, 19 nt, Artificial Sequence
  Description of Artificial Sequence: Synthetic oligonucleotide
  Sense strand starting at position 1474 of SEQ ID NO: 1887153
uggccacuuuauccugaaa

SEQ ID NO: 2452023 - RNA, 19 nt, Artificial Sequence
  Description of Artificial Sequence: Synthetic oligonucleotide
  Antisense strand to SEQ ID NO: 2452022
uuucaggauaaaguggcca

SEQ ID NO: 2452024 - RNA, 19 nt, Artificial Sequence
  Description of Artificial Sequence: Synthetic oligonucleotide
  Sense strand starting at position 1476 of SEQ ID NO: 1887153
gccacuuuauccugaaaga

SEQ ID NO: 2452025 - RNA, 19 nt, Artificial Sequence
  Description of Artificial Sequence: Synthetic oligonucleotide
  Antisense strand to SEQ ID NO: 2452024
ucuuucaggauaaaguggc

SEQ ID NO: 2452026 - RNA, 19 nt, Artificial Sequence
  Description of Artificial Sequence: Synthetic oligonucleotide
  Sense strand starting at position 2246 of SEQ ID NO: 1887153
aagggaugcucugaaauac

SEQ ID NO: 2452027 - RNA, 19 nt, Artificial Sequence
  Description of Artificial Sequence: Synthetic oligonucleotide
  Antisense strand to SEQ ID NO: 2452026
guauuucagagcaucccuu

SEQ ID NO: 2452028 - RNA, 19 nt, Artificial Sequence
  Description of Artificial Sequence: Synthetic oligonucleotide
  Sense strand starting at position 2256 of SEQ ID NO: 1887153
cugaaauacugggaagcau

SEQ ID NO: 2452029 - RNA, 19 nt, Artificial Sequence
  Description of Artificial Sequence: Synthetic oligonucleotide
  Antisense strand to SEQ ID NO: 2452028
augcuucccaguauuucag

SEQ ID NO: 2452030 - RNA, 19 nt, Artificial Sequence
  Description of Artificial Sequence: Synthetic oligonucleotide
  Sense strand starting at position 2268 of SEQ ID NO: 1887153
gaagcaucuaacgaggagu

SEQ ID NO: 2452031 - RNA, 19 nt, Artificial Sequence
  Description of Artificial Sequence: Synthetic oligonucleotide
  Antisense strand to SEQ ID NO: 2452030
acuccucguuagaugcuuc

SEQ ID NO: 2452032 - RNA, 19 nt, Artificial Sequence
  Description of Artificial Sequence: Synthetic oligonucleotide
  Sense strand starting at position 2271 of SEQ ID NO: 1887153
gcaucuaacgaggagucaa

SEQ ID NO: 2452033 - RNA, 19 nt, Artificial Sequence
  Description of Artificial Sequence: Synthetic oligonucleotide
  Antisense strand to SEQ ID NO: 2452032
uugacuccucguuagaugc

SEQ ID NO: 2452034 - RNA, 19 nt, Artificial Sequence
  Description of Artificial Sequence: Synthetic oligonucleotide
  Sense strand starting at position 2279 of SEQ ID NO: 1887153
cgaggagucaaggguccua

SEQ ID NO: 2452035 - RNA, 19 nt, Artificial Sequence
  Description of Artificial Sequence: Synthetic oligonucleotide
  Antisense strand to SEQ ID NO: 2452034
uaggacccuugacuccucg

SEQ ID NO: 2452036 - RNA, 19 nt, Artificial Sequence
  Description of Artificial Sequence: Synthetic oligonucleotide
  Sense strand starting at position 2676 of SEQ ID NO: 1887153
gauugcuuucgucugugca

SEQ ID NO: 2452037 - RNA, 19 nt, Artificial Sequence
  Description of Artificial Sequence: Synthetic oligonucleotide
  Antisense strand to SEQ ID NO: 2452036
ugcacagacgaaagcaauc

SEQ ID NO: 2452038 - RNA, 19 nt, Artificial Sequence
  Description of Artificial Sequence: Synthetic oligonucleotide
  Sense strand starting at position 2703 of SEQ ID NO: 1887153
ggaacaaucccucgaggac

SEQ ID NO: 2452039 - RNA, 19 nt, Artificial Sequence
  Description of Artificial Sequence: Synthetic oligonucleotide
  Antisense strand to SEQ ID NO: 2452038
guccucgagggauuguucc

SEQ ID NO: 2452040 - RNA, 19 nt, Artificial Sequence
  Description of Artificial Sequence: Synthetic oligonucleotide
  Sense strand starting at position 2729 of SEQ ID NO: 1887153
ugaaaugaaucuguuaacu

SEQ ID NO: 2452041 - RNA, 19 nt, Artificial Sequence
  Description of Artificial Sequence: Synthetic oligonucleotide
  Antisense strand to SEQ ID NO: 2452040
aguuaacagauucauuuca

SEQ ID NO: 2452042 - RNA, 19 nt, Artificial Sequence
  Description of Artificial Sequence: Synthetic oligonucleotide
  Sense strand starting at position 2740 of SEQ ID NO: 1887153
uguuaacugguuuguguaa

SEQ ID NO: 2452043 - RNA, 19 nt, Artificial Sequence
  Description of Artificial Sequence: Synthetic oligonucleotide
  Antisense strand to SEQ ID NO: 2452042
uuacacaaaccaguuaaca

SEQ ID NO: 2452044 - RNA, 19 nt, Artificial Sequence
  Description of Artificial Sequence: Synthetic oligonucleotide
  Sense strand starting at position 2752 of SEQ ID NO: 1887153
uguguaagucuagcucguu

SEQ ID NO: 2452045 - RNA, 19 nt, Artificial Sequence
  Description of Artificial Sequence: Synthetic oligonucleotide
  Antisense strand to SEQ ID NO: 2452044
aacgagcuagacuuacaca

SEQ ID NO: 2452046 - RNA, 19 nt, Artificial Sequence
  Description of Artificial Sequence: Synthetic oligonucleotide
  Sense strand starting at position 2753 of SEQ ID NO: 1887153
guguaagucuagcucguua

SEQ ID NO: 2452047 - RNA, 19 nt, Artificial Sequence
  Description of Artificial Sequence: Synthetic oligonucleotide
  Antisense strand to SEQ ID NO: 2452046
uaacgagcuagacuuacac

SEQ ID NO: 2452048 - RNA, 19 nt, Artificial Sequence
  Description of Artificial Sequence: Synthetic oligonucleotide
  Sense strand starting at position 2755 of SEQ ID NO: 1887153
guaagucuagcucguuaag

SEQ ID NO: 2452049 - RNA, 19 nt, Artificial Sequence
  Description of Artificial Sequence: Synthetic oligonucleotide
  Antisense strand to SEQ ID NO: 2452048
cuuaacgagcuagacuuac

SEQ ID NO: 2452050 - RNA, 19 nt, Artificial Sequence
  Description of Artificial Sequence: Synthetic oligonucleotide
  Sense strand starting at position 2757 of SEQ ID NO: 1887153
aagucuagcucguuaagag

SEQ ID NO: 2452051 - RNA, 19 nt, Artificial Sequence
  Description of Artificial Sequence: Synthetic oligonucleotide
  Antisense strand to SEQ ID NO: 2452050
cucuuaacgagcuagacuu

SEQ ID NO: 2452052 - RNA, 19 nt, Artificial Sequence
  Description of Artificial Sequence: Synthetic oligonucleotide
  Sense strand starting at position 2758 of SEQ ID NO: 1887153
agucuagcucguuaagaga

SEQ ID NO: 2452053 - RNA, 19 nt, Artificial Sequence
  Description of Artificial Sequence: Synthetic oligonucleotide
  Antisense strand to SEQ ID NO: 2452052
ucucuuaacgagcuagacu

SEQ ID NO: 2452054 - RNA, 19 nt, Artificial Sequence
  Description of Artificial Sequence: Synthetic oligonucleotide
  Sense strand starting at position 2784 of SEQ ID NO: 1887153
acacuagaguuggcuugaa

SEQ ID NO: 2452055 - RNA, 19 nt, Artificial Sequence
  Description of Artificial Sequence: Synthetic oligonucleotide
  Antisense strand to SEQ ID NO: 2452054
uucaagccaacucuagugu

SEQ ID NO: 2452056 - RNA, 19 nt, Artificial Sequence
  Description of Artificial Sequence: Synthetic oligonucleotide
  Sense strand starting at position 2788 of SEQ ID NO: 1887153
uagaguuggcuugaaacau

SEQ ID NO: 2452057 - RNA, 19 nt, Artificial Sequence
  Description of Artificial Sequence: Synthetic oligonucleotide
  Antisense strand to SEQ ID NO: 2452056
auguuucaagccaacucua

SEQ ID NO: 2452058 - RNA, 19 nt, Artificial Sequence
  Description of Artificial Sequence: Synthetic oligonucleotide
  Sense strand starting at position 2796 of SEQ ID NO: 1887153
gcuugaaacaugggagcuu

SEQ ID NO: 2452059 - RNA, 19 nt, Artificial Sequence
  Description of Artificial Sequence: Synthetic oligonucleotide
  Antisense strand to SEQ ID NO: 2452058
aagcucccauguuucaagc

SEQ ID NO: 2452060 - RNA, 19 nt, Artificial Sequence
  Description of Artificial Sequence: Synthetic oligonucleotide
  Sense strand starting at position 2807 of SEQ ID NO: 1887153
gggagcuucaagugugguu

SEQ ID NO: 2452061 - RNA, 19 nt, Artificial Sequence
  Description of Artificial Sequence: Synthetic oligonucleotide
  Antisense strand to SEQ ID NO: 2452060
aaccacacuugaagcuccc

SEQ ID NO: 2452062 - RNA, 19 nt, Artificial Sequence
  Description of Artificial Sequence: Synthetic oligonucleotide
  Sense strand starting at position 2866 of SEQ ID NO: 1887153
gacuguccucaggacuuua

SEQ ID NO: 2452063 - RNA, 19 nt, Artificial Sequence
  Description of Artificial Sequence: Synthetic oligonucleotide
  Antisense strand to SEQ ID NO: 2452062
uaaaguccugaggacaguc

SEQ ID NO: 2452064 - RNA, 19 nt, Artificial Sequence
  Description of Artificial Sequence: Synthetic oligonucleotide
  Sense strand starting at position 3035 of SEQ ID NO: 1887153
gagaaauccugucgcuacu

SEQ ID NO: 2452065 - RNA, 19 nt, Artificial Sequence
  Description of Artificial Sequence: Synthetic oligonucleotide
  Antisense strand to SEQ ID NO: 2452064
aguagcgacaggauuucuc

SEQ ID NO: 2452066 - RNA, 19 nt, Artificial Sequence
  Description of Artificial Sequence: Synthetic oligonucleotide
  Sense strand starting at position 3235 of SEQ ID NO: 1887153
caugcugaacugugauaca

SEQ ID NO: 2452067 - RNA, 19 nt, Artificial Sequence
  Description of Artificial Sequence: Synthetic oligonucleotide
  Antisense strand to SEQ ID NO: 2452066
uguaucacaguucagcaug

SEQ ID NO: 2452068 - RNA, 19 nt, Artificial Sequence
  Description of Artificial Sequence: Synthetic oligonucleotide
  Sense strand starting at position 3238 of SEQ ID NO: 1887153
gcugaacugugauacauuu

SEQ ID NO: 2452069 - RNA, 19 nt, Artificial Sequence
  Description of Artificial Sequence: Synthetic oligonucleotide
  Antisense strand to SEQ ID NO: 2452068
aaauguaucacaguucagc

SEQ ID NO: 2452070 - RNA, 19 nt, Artificial Sequence
  Description of Artificial Sequence: Synthetic oligonucleotide
  Sense strand starting at position 3273 of SEQ ID NO: 1887153
uguggaugucaugaaacuu

SEQ ID NO: 2452071 - RNA, 19 nt, Artificial Sequence
  Description of Artificial Sequence: Synthetic oligonucleotide
  Antisense strand to SEQ ID NO: 2452070
aaguuucaugacauccaca

SEQ ID NO: 2452072 - RNA, 19 nt, Artificial Sequence
  Description of Artificial Sequence: Synthetic oligonucleotide
  Sense strand starting at position 3647 of SEQ ID NO: 1887153
ggcccaucucgccauuguu

SEQ ID NO: 2452073 - RNA, 19 nt, Artificial Sequence
  Description of Artificial Sequence: Synthetic oligonucleotide
  Antisense strand to SEQ ID NO: 2452072
aacaauggcgagaugggcc

SEQ ID NO: 2452074 - RNA, 19 nt, Artificial Sequence
  Description of Artificial Sequence: Synthetic oligonucleotide
  Sense strand starting at position 362 of SEQ ID NO: 1887154
auuagcuagguguaauguu

SEQ ID NO: 2452075 - RNA, 19 nt, Artificial Sequence
  Description of Artificial Sequence: Synthetic oligonucleotide
  Antisense strand to SEQ ID NO: 2452074
aacauuacaccuagcuaau

SEQ ID NO: 2452076 - RNA, 19 nt, Artificial Sequence
  Description of Artificial Sequence: Synthetic oligonucleotide
  Sense strand starting at position 376 of SEQ ID NO: 1887154
auguuacaugcuuguaguu

SEQ ID NO: 2452077 - RNA, 19 nt, Artificial Sequence
  Description of Artificial Sequence: Synthetic oligonucleotide
  Antisense strand to SEQ ID NO: 2452076
aacuacaagcauguaacau

SEQ ID NO: 2452078 - RNA, 19 nt, Artificial Sequence
  Description of Artificial Sequence: Synthetic oligonucleotide
  Sense strand starting at position 535 of SEQ ID NO: 1887154
cugccauuuggcuguauga

SEQ ID NO: 2452079 - RNA, 19 nt, Artificial Sequence
  Description of Artificial Sequence: Synthetic oligonucleotide
  Antisense strand to SEQ ID NO: 2452078
ucauacagccaaauggcag

SEQ ID NO: 2452080 - RNA, 19 nt, Artificial Sequence
  Description of Artificial Sequence: Synthetic oligonucleotide
  Sense strand starting at position 567 of SEQ ID NO: 1887154
gcugaaccuccagaauguu

SEQ ID NO: 2452081 - RNA, 19 nt, Artificial Sequence
  Description of Artificial Sequence: Synthetic oligonucleotide
  Antisense strand to SEQ ID NO: 2452080
aacauucuggagguucagc

SEQ ID NO: 2452082 - RNA, 19 nt, Artificial Sequence
  Description of Artificial Sequence: Synthetic oligonucleotide
  Sense strand starting at position 647 of SEQ ID NO: 1887154
aucauauguccuggccagu

SEQ ID NO: 2452083 - RNA, 19 nt, Artificial Sequence
  Description of Artificial Sequence: Synthetic oligonucleotide
  Antisense strand to SEQ ID NO: 2452082
acuggccaggacauaugau

SEQ ID NO: 2452084 - RNA, 19 nt, Artificial Sequence
  Description of Artificial Sequence: Synthetic oligonucleotide
  Sense strand starting at position 653 of SEQ ID NO: 1887154
uguccuggccaguaaggaa

SEQ ID NO: 2452085 - RNA, 19 nt, Artificial Sequence
  Description of Artificial Sequence: Synthetic oligonucleotide
  Antisense strand to SEQ ID NO: 2452084
uuccuuacuggccaggaca

SEQ ID NO: 2452086 - RNA, 19 nt, Artificial Sequence
  Description of Artificial Sequence: Synthetic oligonucleotide
  Sense strand starting at position 744 of SEQ ID NO: 1887154
gucucuauacuggaaucuu

SEQ ID NO: 2452087 - RNA, 19 nt, Artificial Sequence
  Description of Artificial Sequence: Synthetic oligonucleotide
  Antisense strand to SEQ ID NO: 2452086
aagauuccaguauagagac

SEQ ID NO: 2452088 - RNA, 19 nt, Artificial Sequence
  Description of Artificial Sequence: Synthetic oligonucleotide
  Sense strand starting at position 753 of SEQ ID NO: 1887154
cuggaaucuuugguuccaa

SEQ ID NO: 2452089 - RNA, 19 nt, Artificial Sequence
  Description of Artificial Sequence: Synthetic oligonucleotide
  Antisense strand to SEQ ID NO: 2452088
uuggaaccaaagauuccag

SEQ ID NO: 2452090 - RNA, 19 nt, Artificial Sequence
  Description of Artificial Sequence: Synthetic oligonucleotide
  Sense strand starting at position 754 of SEQ ID NO: 1887154
uggaaucuuugguuccaau

SEQ ID NO: 2452091 - RNA, 19 nt, Artificial Sequence
  Description of Artificial Sequence: Synthetic oligonucleotide
  Antisense strand to SEQ ID NO: 2452090
auuggaaccaaagauucca

SEQ ID NO: 2452092 - RNA, 19 nt, Artificial Sequence
  Description of Artificial Sequence: Synthetic oligonucleotide
  Sense strand starting at position 841 of SEQ ID NO: 1887154
cgacacuccucacugauga

SEQ ID NO: 2452093 - RNA, 19 nt, Artificial Sequence
  Description of Artificial Sequence: Synthetic oligonucleotide
  Antisense strand to SEQ ID NO: 2452092
ucaucagugaggagugucg

SEQ ID NO: 2452094 - RNA, 19 nt, Artificial Sequence
  Description of Artificial Sequence: Synthetic oligonucleotide
  Sense strand starting at position 950 of SEQ ID NO: 1887154
gcuagaaugugacuuacug

SEQ ID NO: 2452095 - RNA, 19 nt, Artificial Sequence
  Description of Artificial Sequence: Synthetic oligonucleotide
  Antisense strand to SEQ ID NO: 2452094
caguaagucacauucuagc

SEQ ID NO: 2452096 - RNA, 19 nt, Artificial Sequence
  Description of Artificial Sequence: Synthetic oligonucleotide
  Sense strand starting at position 954 of SEQ ID NO: 1887154
gaaugugacuuacuguaag

SEQ ID NO: 2452097 - RNA, 19 nt, Artificial Sequence
  Description of Artificial Sequence: Synthetic oligonucleotide
  Antisense strand to SEQ ID NO: 2452096
cuuacaguaagucacauuc

SEQ ID NO: 2452098 - RNA, 19 nt, Artificial Sequence
  Description of Artificial Sequence: Synthetic oligonucleotide
  Sense strand starting at position 960 of SEQ ID NO: 1887154
gacuuacuguaagaagaag

SEQ ID NO: 2452099 - RNA, 19 nt, Artificial Sequence
  Description of Artificial Sequence: Synthetic oligonucleotide
  Antisense strand to SEQ ID NO: 2452098
cuucuucuuacaguaaguc

SEQ ID NO: 2452100 - RNA, 19 nt, Artificial Sequence
  Description of Artificial Sequence: Synthetic oligonucleotide
  Sense strand starting at position 978 of SEQ ID NO: 1887154
gggcaucgcuuuccauuau

SEQ ID NO: 2452101 - RNA, 19 nt, Artificial Sequence
  Description of Artificial Sequence: Synthetic oligonucleotide
  Antisense strand to SEQ ID NO: 2452100
auaauggaaagcgaugccc

SEQ ID NO: 2452102 - RNA, 19 nt, Artificial Sequence
  Description of Artificial Sequence: Synthetic oligonucleotide
  Sense strand starting at position 1163 of SEQ ID NO: 1887154
ggaguuaccgagugacaca

SEQ ID NO: 2452103 - RNA, 19 nt, Artificial Sequence
  Description of Artificial Sequence: Synthetic oligonucleotide
  Antisense strand to SEQ ID NO: 2452102
ugugucacucgguaacucc

SEQ ID NO: 2452104 - RNA, 19 nt, Artificial Sequence
  Description of Artificial Sequence: Synthetic oligonucleotide
  Sense strand starting at position 1203 of SEQ ID NO: 1887154
ccuaauuaguacccguuaa

SEQ ID NO: 2452105 - RNA, 19 nt, Artificial Sequence
  Description of Artificial Sequence: Synthetic oligonucleotide
  Antisense strand to SEQ ID NO: 2452104
uuaacggguacuaauuagg

SEQ ID NO: 2452106 - RNA, 19 nt, Artificial Sequence
  Description of Artificial Sequence: Synthetic oligonucleotide
  Sense strand starting at position 1213 of SEQ ID NO: 1887154
acccguuaacccugaggaa

SEQ ID NO: 2452107 - RNA, 19 nt, Artificial Sequence
  Description of Artificial Sequence: Synthetic oligonucleotide
  Antisense strand to SEQ ID NO: 2452106
uuccucaggguuaacgggu

SEQ ID NO: 2452108 - RNA, 19 nt, Artificial Sequence
  Description of Artificial Sequence: Synthetic oligonucleotide
  Sense strand starting at position 1214 of SEQ ID NO: 1887154
cccguuaacccugaggaaa

SEQ ID NO: 2452109 - RNA, 19 nt, Artificial Sequence
  Description of Artificial Sequence: Synthetic oligonucleotide
  Antisense strand to SEQ ID NO: 2452108
uuuccucaggguuaacggg

SEQ ID NO: 2452110 - RNA, 19 nt, Artificial Sequence
  Description of Artificial Sequence: Synthetic oligonucleotide
  Sense strand starting at position 1294 of SEQ ID NO: 1887154
ucaggucccuccuaagaga

SEQ ID NO: 2452111 - RNA, 19 nt, Artificial Sequence
  Description of Artificial Sequence: Synthetic oligonucleotide
  Antisense strand to SEQ ID NO: 2452110
ucucuuaggagggaccuga

SEQ ID NO: 2452112 - RNA, 19 nt, Artificial Sequence
  Description of Artificial Sequence: Synthetic oligonucleotide
  Sense strand starting at position 1398 of SEQ ID NO: 1887154
gggcgccuucuguccaauu

SEQ ID NO: 2452113 - RNA, 19 nt, Artificial Sequence
  Description of Artificial Sequence: Synthetic oligonucleotide
  Antisense strand to SEQ ID NO: 2452112
aauuggacagaaggcgccc

SEQ ID NO: 2452114 - RNA, 19 nt, Artificial Sequence
  Description of Artificial Sequence: Synthetic oligonucleotide
  Sense strand starting at position 1430 of SEQ ID NO: 1887154
ugaccauauugagaaaucu

SEQ ID NO: 2452115 - RNA, 19 nt, Artificial Sequence
  Description of Artificial Sequence: Synthetic oligonucleotide
  Antisense strand to SEQ ID NO: 2452114
agauuucucaauaugguca

SEQ ID NO: 2452116 - RNA, 19 nt, Artificial Sequence
  Description of Artificial Sequence: Synthetic oligonucleotide
  Sense strand starting at position 2130 of SEQ ID NO: 1887154
gccgguugcgcuaggcaaa

SEQ ID NO: 2452117 - RNA, 19 nt, Artificial Sequence
  Description of Artificial Sequence: Synthetic oligonucleotide
  Antisense strand to SEQ ID NO: 2452116
uuugccuagcgcaaccggc

SEQ ID NO: 2452118 - RNA, 19 nt, Artificial Sequence
  Description of Artificial Sequence: Synthetic oligonucleotide
  Sense strand starting at position 2151 of SEQ ID NO: 1887154
ggaggaggguucuauuuau

SEQ ID NO: 2452119 - RNA, 19 nt, Artificial Sequence
  Description of Artificial Sequence: Synthetic oligonucleotide
  Antisense strand to SEQ ID NO: 2452118
auaaauagaacccuccucc

SEQ ID NO: 2452120 - RNA, 19 nt, Artificial Sequence
  Description of Artificial Sequence: Synthetic oligonucleotide
  Sense strand starting at position 2158 of SEQ ID NO: 1887154
gguucuauuuauuaugaag

SEQ ID NO: 2452121 - RNA, 19 nt, Artificial Sequence
  Description of Artificial Sequence: Synthetic oligonucleotide
  Antisense strand to SEQ ID NO: 2452120
cuucauaauaaauagaacc

SEQ ID NO: 2452122 - RNA, 19 nt, Artificial Sequence
  Description of Artificial Sequence: Synthetic oligonucleotide
  Sense strand starting at position 2274 of SEQ ID NO: 1887154
ggcugaaaguuugugacaa

SEQ ID NO: 2452123 - RNA, 19 nt, Artificial Sequence
  Description of Artificial Sequence: Synthetic oligonucleotide
  Antisense strand to SEQ ID NO: 2452122
uugucacaaacuuucagcc

SEQ ID NO: 2452124 - RNA, 19 nt, Artificial Sequence
  Description of Artificial Sequence: Synthetic oligonucleotide
  Sense strand starting at position 2359 of SEQ ID NO: 1887154
ggaugaucgcuugagccga

SEQ ID NO: 2452125 - RNA, 19 nt, Artificial Sequence
  Description of Artificial Sequence: Synthetic oligonucleotide
  Antisense strand to SEQ ID NO: 2452124
ucggcucaagcgaucaucc

SEQ ID NO: 2452126 - RNA, 19 nt, Artificial Sequence
  Description of Artificial Sequence: Synthetic oligonucleotide
  Sense strand starting at position 2529 of SEQ ID NO: 1887154
ccaguaggccgagaucaua

SEQ ID NO: 2452127 - RNA, 19 nt, Artificial Sequence
  Description of Artificial Sequence: Synthetic oligonucleotide
  Antisense strand to SEQ ID NO: 2452126
uaugaucucggccuacugg

SEQ ID NO: 2452128 - RNA, 19 nt, Artificial Sequence
  Description of Artificial Sequence: Synthetic oligonucleotide
  Sense strand starting at position 2676 of SEQ ID NO: 1887154
cucuguuaacuaggccauu

SEQ ID NO: 2452129 - RNA, 19 nt, Artificial Sequence
  Description of Artificial Sequence: Synthetic oligonucleotide
  Antisense strand to SEQ ID NO: 2452128
aauggccuaguuaacagag

SEQ ID NO: 2452130 - RNA, 19 nt, Artificial Sequence
  Description of Artificial Sequence: Synthetic oligonucleotide
  Sense strand starting at position 2747 of SEQ ID NO: 1887154
cgggacagcuuucugaaau

SEQ ID NO: 2452131 - RNA, 19 nt, Artificial Sequence
  Description of Artificial Sequence: Synthetic oligonucleotide
  Antisense strand to SEQ ID NO: 2452130
auuucagaaagcugucccg

SEQ ID NO: 2452132 - RNA, 19 nt, Artificial Sequence
  Description of Artificial Sequence: Synthetic oligonucleotide
  Sense strand starting at position 2758 of SEQ ID NO: 1887154
ucugaaauguaaucagcgu

SEQ ID NO: 2452133 - RNA, 19 nt, Artificial Sequence
  Description of Artificial Sequence: Synthetic oligonucleotide
  Antisense strand to SEQ ID NO: 2452132
acgcugauuacauuucaga

SEQ ID NO: 2452134 - RNA, 19 nt, Artificial Sequence
  Description of Artificial Sequence: Synthetic oligonucleotide
  Sense strand starting at position 2759 of SEQ ID NO: 1887154
cugaaauguaaucagcguu

SEQ ID NO: 2452135 - RNA, 19 nt, Artificial Sequence
  Description of Artificial Sequence: Synthetic oligonucleotide
  Antisense strand to SEQ ID NO: 2452134
aacgcugauuacauuucag

SEQ ID NO: 2452136 - RNA, 19 nt, Artificial Sequence
  Description of Artificial Sequence: Synthetic oligonucleotide
  Sense strand starting at position 2911 of SEQ ID NO: 1887154
cgagacccgucccuagaaa

SEQ ID NO: 2452137 - RNA, 19 nt, Artificial Sequence
  Description of Artificial Sequence: Synthetic oligonucleotide
  Antisense strand to SEQ ID NO: 2452136
uuucuagggacgggucucg

SEQ ID NO: 2452138 - RNA, 19 nt, Artificial Sequence
  Description of Artificial Sequence: Synthetic oligonucleotide
  Sense strand starting at position 3267 of SEQ ID NO: 1887154
ggauuuccuugaguucggu

SEQ ID NO: 2452139 - RNA, 19 nt, Artificial Sequence
  Description of Artificial Sequence: Synthetic oligonucleotide
  Antisense strand to SEQ ID NO: 2452138
accgaacucaaggaaaucc

SEQ ID NO: 2452140 - RNA, 19 nt, Artificial Sequence
  Description of Artificial Sequence: Synthetic oligonucleotide
  Sense strand starting at position 3273 of SEQ ID NO: 1887154
ccuugaguucggugucuag

SEQ ID NO: 2452141 - RNA, 19 nt, Artificial Sequence
  Description of Artificial Sequence: Synthetic oligonucleotide
  Antisense strand to SEQ ID NO: 2452140
cuagacaccgaacucaagg

SEQ ID NO: 2452142 - RNA, 19 nt, Artificial Sequence
  Description of Artificial Sequence: Synthetic oligonucleotide
  Sense strand starting at position 3321 of SEQ ID NO: 1887154
augaaugcuccagggauag

SEQ ID NO: 2452143 - RNA, 19 nt, Artificial Sequence
  Description of Artificial Sequence: Synthetic oligonucleotide
  Antisense strand to SEQ ID NO: 2452142
cuaucccuggagcauucau

SEQ ID NO: 2452144 - RNA, 19 nt, Artificial Sequence
  Description of Artificial Sequence: Synthetic oligonucleotide
  Sense strand starting at position 3342 of SEQ ID NO: 1887154
accuguaucaggugaguaa

SEQ ID NO: 2452145 - RNA, 19 nt, Artificial Sequence
  Description of Artificial Sequence: Synthetic oligonucleotide
  Antisense strand to SEQ ID NO: 2452144
uuacucaccugauacaggu

SEQ ID NO: 2452146 - RNA, 19 nt, Artificial Sequence
  Description of Artificial Sequence: Synthetic oligonucleotide
  Sense strand starting at position 3523 of SEQ ID NO: 1887154
agcacaauccugugugauc

SEQ ID NO: 2452147 - RNA, 19 nt, Artificial Sequence
  Description of Artificial Sequence: Synthetic oligonucleotide
  Antisense strand to SEQ ID NO: 2452146
gaucacacaggauugugcu

SEQ ID NO: 2452148 - RNA, 19 nt, Artificial Sequence
  Description of Artificial Sequence: Synthetic oligonucleotide
  Sense strand starting at position 3524 of SEQ ID NO: 1887154
gcacaauccugugugaucu

SEQ ID NO: 2452149 - RNA, 19 nt, Artificial Sequence
  Description of Artificial Sequence: Synthetic oligonucleotide
  Antisense strand to SEQ ID NO: 2452148
agaucacacaggauugugc

SEQ ID NO: 2452150 - RNA, 19 nt, Artificial Sequence
  Description of Artificial Sequence: Synthetic oligonucleotide
  Sense strand starting at position 3891 of SEQ ID NO: 1887154
guauaacaggguugccaaa

SEQ ID NO: 2452151 - RNA, 19 nt, Artificial Sequence
  Description of Artificial Sequence: Synthetic oligonucleotide
  Antisense strand to SEQ ID NO: 2452150
uuuggcaacccuguuauac

SEQ ID NO: 2452152 - RNA, 19 nt, Artificial Sequence
  Description of Artificial Sequence: Synthetic oligonucleotide
  Sense strand starting at position 3893 of SEQ ID NO: 1887154
auaacaggguugccaaauu

SEQ ID NO: 2452153 - RNA, 19 nt, Artificial Sequence
  Description of Artificial Sequence: Synthetic oligonucleotide
  Antisense strand to SEQ ID NO: 2452152
aauuuggcaacccuguuau

SEQ ID NO: 2452154 - RNA, 19 nt, Artificial Sequence
  Description of Artificial Sequence: Synthetic oligonucleotide
  Sense strand starting at position 327 of SEQ ID NO: 1887155
auuagcuagguguaauguu

SEQ ID NO: 2452155 - RNA, 19 nt, Artificial Sequence
  Description of Artificial Sequence: Synthetic oligonucleotide
  Antisense strand to SEQ ID NO: 2452154
aacauuacaccuagcuaau

SEQ ID NO: 2452156 - RNA, 19 nt, Artificial Sequence
  Description of Artificial Sequence: Synthetic oligonucleotide
  Sense strand starting at position 341 of SEQ ID NO: 1887155
auguuacaugcuuguaguu

SEQ ID NO: 2452157 - RNA, 19 nt, Artificial Sequence
  Description of Artificial Sequence: Synthetic oligonucleotide
  Antisense strand to SEQ ID NO: 2452156
aacuacaagcauguaacau

SEQ ID NO: 2452158 - RNA, 19 nt, Artificial Sequence
  Description of Artificial Sequence: Synthetic oligonucleotide
  Sense strand starting at position 500 of SEQ ID NO: 1887155
cugccauuuggcuguauga

SEQ ID NO: 2452159 - RNA, 19 nt, Artificial Sequence
  Description of Artificial Sequence: Synthetic oligonucleotide
  Antisense strand to SEQ ID NO: 2452158
ucauacagccaaauggcag

SEQ ID NO: 2452160 - RNA, 19 nt, Artificial Sequence
  Description of Artificial Sequence: Synthetic oligonucleotide
  Sense strand starting at position 532 of SEQ ID NO: 1887155
gcugaaccuccagaauguu

SEQ ID NO: 2452161 - RNA, 19 nt, Artificial Sequence
  Description of Artificial Sequence: Synthetic oligonucleotide
  Antisense strand to SEQ ID NO: 2452160
aacauucuggagguucagc

SEQ ID NO: 2452162 - RNA, 19 nt, Artificial Sequence
  Description of Artificial Sequence: Synthetic oligonucleotide
  Sense strand starting at position 612 of SEQ ID NO: 1887155
aucauauguccuggccagu

SEQ ID NO: 2452163 - RNA, 19 nt, Artificial Sequence
  Description of Artificial Sequence: Synthetic oligonucleotide
  Antisense strand to SEQ ID NO: 2452162
acuggccaggacauaugau

SEQ ID NO: 2452164 - RNA, 19 nt, Artificial Sequence
  Description of Artificial Sequence: Synthetic oligonucleotide
  Sense strand starting at position 618 of SEQ ID NO: 1887155
uguccuggccaguaaggaa

SEQ ID NO: 2452165 - RNA, 19 nt, Artificial Sequence
  Description of Artificial Sequence: Synthetic oligonucleotide
  Antisense strand to SEQ ID NO: 2452164
uuccuuacuggccaggaca

SEQ ID NO: 2452166 - RNA, 19 nt, Artificial Sequence
  Description of Artificial Sequence: Synthetic oligonucleotide
  Sense strand starting at position 709 of SEQ ID NO: 1887155
gucucuauacuggaaucuu

SEQ ID NO: 2452167 - RNA, 19 nt, Artificial Sequence
  Description of Artificial Sequence: Synthetic oligonucleotide
  Antisense strand to SEQ ID NO: 2452166
aagauuccaguauagagac

SEQ ID NO: 2452168 - RNA, 19 nt, Artificial Sequence
  Description of Artificial Sequence: Synthetic oligonucleotide
  Sense strand starting at position 718 of SEQ ID NO: 1887155
cuggaaucuuugguuccaa

SEQ ID NO: 2452169 - RNA, 19 nt, Artificial Sequence
  Description of Artificial Sequence: Synthetic oligonucleotide
  Antisense strand to SEQ ID NO: 2452168
uuggaaccaaagauuccag

SEQ ID NO: 2452170 - RNA, 19 nt, Artificial Sequence
  Description of Artificial Sequence: Synthetic oligonucleotide
  Sense strand starting at position 719 of SEQ ID NO: 1887155
uggaaucuuugguuccaau

SEQ ID NO: 2452171 - RNA, 19 nt, Artificial Sequence
  Description of Artificial Sequence: Synthetic oligonucleotide
  Antisense strand to SEQ ID NO: 2452170
auuggaaccaaagauucca

SEQ ID NO: 2452172 - RNA, 19 nt, Artificial Sequence
  Description of Artificial Sequence: Synthetic oligonucleotide
  Sense strand starting at position 806 of SEQ ID NO: 1887155
cgacacuccucacugauga

SEQ ID NO: 2452173 - RNA, 19 nt, Artificial Sequence
  Description of Artificial Sequence: Synthetic oligonucleotide
  Antisense strand to SEQ ID NO: 2452172
ucaucagugaggagugucg

SEQ ID NO: 2452174 - RNA, 19 nt, Artificial Sequence
  Description of Artificial Sequence: Synthetic oligonucleotide
  Sense strand starting at position 915 of SEQ ID NO: 1887155
gcuagaaugugacuuacug

SEQ ID NO: 2452175 - RNA, 19 nt, Artificial Sequence
  Description of Artificial Sequence: Synthetic oligonucleotide
  Antisense strand to SEQ ID NO: 2452174
caguaagucacauucuagc

SEQ ID NO: 2452176 - RNA, 19 nt, Artificial Sequence
  Description of Artificial Sequence: Synthetic oligonucleotide
  Sense strand starting at position 919 of SEQ ID NO: 1887155
gaaugugacuuacuguaag

SEQ ID NO: 2452177 - RNA, 19 nt, Artificial Sequence
  Description of Artificial Sequence: Synthetic oligonucleotide
  Antisense strand to SEQ ID NO: 2452176
cuuacaguaagucacauuc

SEQ ID NO: 2452178 - RNA, 19 nt, Artificial Sequence
  Description of Artificial Sequence: Synthetic oligonucleotide
  Sense strand starting at position 925 of SEQ ID NO: 1887155
gacuuacuguaagaagaag

SEQ ID NO: 2452179 - RNA, 19 nt, Artificial Sequence
  Description of Artificial Sequence: Synthetic oligonucleotide
  Antisense strand to SEQ ID NO: 2452178
cuucuucuuacaguaaguc

SEQ ID NO: 2452180 - RNA, 19 nt, Artificial Sequence
  Description of Artificial Sequence: Synthetic oligonucleotide
  Sense strand starting at position 943 of SEQ ID NO: 1887155
gggcaucgcuuuccauuau

SEQ ID NO: 2452181 - RNA, 19 nt, Artificial Sequence
  Description of Artificial Sequence: Synthetic oligonucleotide
  Antisense strand to SEQ ID NO: 2452180
auaauggaaagcgaugccc

SEQ ID NO: 2452182 - RNA, 19 nt, Artificial Sequence
  Description of Artificial Sequence: Synthetic oligonucleotide
  Sense strand starting at position 1128 of SEQ ID NO: 1887155
ggaguuaccgagugacaca

SEQ ID NO: 2452183 - RNA, 19 nt, Artificial Sequence
  Description of Artificial Sequence: Synthetic oligonucleotide
  Antisense strand to SEQ ID NO: 2452182
ugugucacucgguaacucc

SEQ ID NO: 2452184 - RNA, 19 nt, Artificial Sequence
  Description of Artificial Sequence: Synthetic oligonucleotide
  Sense strand starting at position 1168 of SEQ ID NO: 1887155
ccuaauuaguacccguuaa

SEQ ID NO: 2452185 - RNA, 19 nt, Artificial Sequence
  Description of Artificial Sequence: Synthetic oligonucleotide
  Antisense strand to SEQ ID NO: 2452184
uuaacggguacuaauuagg

SEQ ID NO: 2452186 - RNA, 19 nt, Artificial Sequence
  Description of Artificial Sequence: Synthetic oligonucleotide
  Sense strand starting at position 1178 of SEQ ID NO: 1887155
acccguuaacccugaggaa

SEQ ID NO: 2452187 - RNA, 19 nt, Artificial Sequence
  Description of Artificial Sequence: Synthetic oligonucleotide
  Antisense strand to SEQ ID NO: 2452186
uuccucaggguuaacgggu

SEQ ID NO: 2452188 - RNA, 19 nt, Artificial Sequence
  Description of Artificial Sequence: Synthetic oligonucleotide
  Sense strand starting at position 1179 of SEQ ID NO: 1887155
cccguuaacccugaggaaa

SEQ ID NO: 2452189 - RNA, 19 nt, Artificial Sequence
  Description of Artificial Sequence: Synthetic oligonucleotide
  Antisense strand to SEQ ID NO: 2452188
uuuccucaggguuaacggg

SEQ ID NO: 2452190 - RNA, 19 nt, Artificial Sequence
  Description of Artificial Sequence: Synthetic oligonucleotide
  Sense strand starting at position 1259 of SEQ ID NO: 1887155
ucaggucccuccuaagaga

SEQ ID NO: 2452191 - RNA, 19 nt, Artificial Sequence
  Description of Artificial Sequence: Synthetic oligonucleotide
  Antisense strand to SEQ ID NO: 2452190
ucucuuaggagggaccuga

SEQ ID NO: 2452192 - RNA, 19 nt, Artificial Sequence
  Description of Artificial Sequence: Synthetic oligonucleotide
  Sense strand starting at position 1363 of SEQ ID NO: 1887155
gggcgccuucuguccaauu

SEQ ID NO: 2452193 - RNA, 19 nt, Artificial Sequence
  Description of Artificial Sequence: Synthetic oligonucleotide
  Antisense strand to SEQ ID NO: 2452192
aauuggacagaaggcgccc

SEQ ID NO: 2452194 - RNA, 19 nt, Artificial Sequence
  Description of Artificial Sequence: Synthetic oligonucleotide
  Sense strand starting at position 1395 of SEQ ID NO: 1887155
ugaccauauugagaaaucu

SEQ ID NO: 2452195 - RNA, 19 nt, Artificial Sequence
  Description of Artificial Sequence: Synthetic oligonucleotide
  Antisense strand to SEQ ID NO: 2452194
agauuucucaauaugguca

SEQ ID NO: 2452196 - RNA, 19 nt, Artificial Sequence
  Description of Artificial Sequence: Synthetic oligonucleotide
  Sense strand starting at position 2095 of SEQ ID NO: 1887155
gccgguugcgcuaggcaaa

SEQ ID NO: 2452197 - RNA, 19 nt, Artificial Sequence
  Description of Artificial Sequence: Synthetic oligonucleotide
  Antisense strand to SEQ ID NO: 2452196
uuugccuagcgcaaccggc

SEQ ID NO: 2452198 - RNA, 19 nt, Artificial Sequence
  Description of Artificial Sequence: Synthetic oligonucleotide
  Sense strand starting at position 2116 of SEQ ID NO: 1887155
ggaggaggguucuauuuau

SEQ ID NO: 2452199 - RNA, 19 nt, Artificial Sequence
  Description of Artificial Sequence: Synthetic oligonucleotide
  Antisense strand to SEQ ID NO: 2452198
auaaauagaacccuccucc

SEQ ID NO: 2452200 - RNA, 19 nt, Artificial Sequence
  Description of Artificial Sequence: Synthetic oligonucleotide
  Sense strand starting at position 2123 of SEQ ID NO: 1887155
gguucuauuuauuaugaag

SEQ ID NO: 2452201 - RNA, 19 nt, Artificial Sequence
  Description of Artificial Sequence: Synthetic oligonucleotide
  Antisense strand to SEQ ID NO: 2452200
cuucauaauaaauagaacc

SEQ ID NO: 2452202 - RNA, 19 nt, Artificial Sequence
  Description of Artificial Sequence: Synthetic oligonucleotide
  Sense strand starting at position 2239 of SEQ ID NO: 1887155
ggcugaaaguuugugacaa

SEQ ID NO: 2452203 - RNA, 19 nt, Artificial Sequence
  Description of Artificial Sequence: Synthetic oligonucleotide
  Antisense strand to SEQ ID NO: 2452202
uugucacaaacuuucagcc

SEQ ID NO: 2452204 - RNA, 19 nt, Artificial Sequence
  Description of Artificial Sequence: Synthetic oligonucleotide
  Sense strand starting at position 2324 of SEQ ID NO: 1887155
ggaugaucgcuugagccga

SEQ ID NO: 2452205 - RNA, 19 nt, Artificial Sequence
  Description of Artificial Sequence: Synthetic oligonucleotide
  Antisense strand to SEQ ID NO: 2452204
ucggcucaagcgaucaucc

SEQ ID NO: 2452206 - RNA, 19 nt, Artificial Sequence
  Description of Artificial Sequence: Synthetic oligonucleotide
  Sense strand starting at position 2494 of SEQ ID NO: 1887155
ccaguaggccgagaucaua

SEQ ID NO: 2452207 - RNA, 19 nt, Artificial Sequence
  Description of Artificial Sequence: Synthetic oligonucleotide
  Antisense strand to SEQ ID NO: 2452206
uaugaucucggccuacugg

SEQ ID NO: 2452208 - RNA, 19 nt, Artificial Sequence
  Description of Artificial Sequence: Synthetic oligonucleotide
  Sense strand starting at position 2641 of SEQ ID NO: 1887155
cucuguuaacuaggccauu

SEQ ID NO: 2452209 - RNA, 19 nt, Artificial Sequence
  Description of Artificial Sequence: Synthetic oligonucleotide
  Antisense strand to SEQ ID NO: 2452208
aauggccuaguuaacagag

SEQ ID NO: 2452210 - RNA, 19 nt, Artificial Sequence
  Description of Artificial Sequence: Synthetic oligonucleotide
  Sense strand starting at position 2712 of SEQ ID NO: 1887155
cgggacagcuuucugaaau

SEQ ID NO: 2452211 - RNA, 19 nt, Artificial Sequence
  Description of Artificial Sequence: Synthetic oligonucleotide
  Antisense strand to SEQ ID NO: 2452210
auuucagaaagcugucccg

SEQ ID NO: 2452212 - RNA, 19 nt, Artificial Sequence
  Description of Artificial Sequence: Synthetic oligonucleotide
  Sense strand starting at position 2723 of SEQ ID NO: 1887155
ucugaaauguaaucagcgu

SEQ ID NO: 2452213 - RNA, 19 nt, Artificial Sequence
  Description of Artificial Sequence: Synthetic oligonucleotide
  Antisense strand to SEQ ID NO: 2452212
acgcugauuacauuucaga

SEQ ID NO: 2452214 - RNA, 19 nt, Artificial Sequence
  Description of Artificial Sequence: Synthetic oligonucleotide
  Sense strand starting at position 2724 of SEQ ID NO: 1887155
cugaaauguaaucagcguu

SEQ ID NO: 2452215 - RNA, 19 nt, Artificial Sequence
  Description of Artificial Sequence: Synthetic oligonucleotide
  Antisense strand to SEQ ID NO: 2452214
aacgcugauuacauuucag

SEQ ID NO: 2452216 - RNA, 19 nt, Artificial Sequence
  Description of Artificial Sequence: Synthetic oligonucleotide
  Sense strand starting at position 2876 of SEQ ID NO: 1887155
cgagacccgucccuagaaa

SEQ ID NO: 2452217 - RNA, 19 nt, Artificial Sequence
  Description of Artificial Sequence: Synthetic oligonucleotide
  Antisense strand to SEQ ID NO: 2452216
uuucuagggacgggucucg

SEQ ID NO: 2452218 - RNA, 19 nt, Artificial Sequence
  Description of Artificial Sequence: Synthetic oligonucleotide
  Sense strand starting at position 3232 of SEQ ID NO: 1887155
ggauuuccuugaguucggu

SEQ ID NO: 2452219 - RNA, 19 nt, Artificial Sequence
  Description of Artificial Sequence: Synthetic oligonucleotide
  Antisense strand to SEQ ID NO: 2452218
accgaacucaaggaaaucc

SEQ ID NO: 2452220 - RNA, 19 nt, Artificial Sequence
  Description of Artificial Sequence: Synthetic oligonucleotide
  Sense strand starting at position 3238 of SEQ ID NO: 1887155
ccuugaguucggugucuag

SEQ ID NO: 2452221 - RNA, 19 nt, Artificial Sequence
  Description of Artificial Sequence: Synthetic oligonucleotide
  Antisense strand to SEQ ID NO: 2452220
cuagacaccgaacucaagg

SEQ ID NO: 2452222 - RNA, 19 nt, Artificial Sequence
  Description of Artificial Sequence: Synthetic oligonucleotide
  Sense strand starting at position 3286 of SEQ ID NO: 1887155
augaaugcuccagggauag

SEQ ID NO: 2452223 - RNA, 19 nt, Artificial Sequence
  Description of Artificial Sequence: Synthetic oligonucleotide
  Antisense strand to SEQ ID NO: 2452222
cuaucccuggagcauucau

SEQ ID NO: 2452224 - RNA, 19 nt, Artificial Sequence
  Description of Artificial Sequence: Synthetic oligonucleotide
  Sense strand starting at position 3307 of SEQ ID NO: 1887155
accuguaucaggugaguaa

SEQ ID NO: 2452225 - RNA, 19 nt, Artificial Sequence
  Description of Artificial Sequence: Synthetic oligonucleotide
  Antisense strand to SEQ ID NO: 2452224
uuacucaccugauacaggu

SEQ ID NO: 2452226 - RNA, 19 nt, Artificial Sequence
  Description of Artificial Sequence: Synthetic oligonucleotide
  Sense strand starting at position 3488 of SEQ ID NO: 1887155
agcacaauccugugugauc

SEQ ID NO: 2452227 - RNA, 19 nt, Artificial Sequence
  Description of Artificial Sequence: Synthetic oligonucleotide
  Antisense strand to SEQ ID NO: 2452226
gaucacacaggauugugcu

SEQ ID NO: 2452228 - RNA, 19 nt, Artificial Sequence
  Description of Artificial Sequence: Synthetic oligonucleotide
  Sense strand starting at position 3489 of SEQ ID NO: 1887155
gcacaauccugugugaucu

SEQ ID NO: 2452229 - RNA, 19 nt, Artificial Sequence
  Description of Artificial Sequence: Synthetic oligonucleotide
  Antisense strand to SEQ ID NO: 2452228
agaucacacaggauugugc

SEQ ID NO: 2452230 - RNA, 19 nt, Artificial Sequence
  Description of Artificial Sequence: Synthetic oligonucleotide
  Sense strand starting at position 3856 of SEQ ID NO: 1887155
guauaacaggguugccaaa

SEQ ID NO: 2452231 - RNA, 19 nt, Artificial Sequence
  Description of Artificial Sequence: Synthetic oligonucleotide
  Antisense strand to SEQ ID NO: 2452230
uuuggcaacccuguuauac

SEQ ID NO: 2452232 - RNA, 19 nt, Artificial Sequence
  Description of Artificial Sequence: Synthetic oligonucleotide
  Sense strand starting at position 3858 of SEQ ID NO: 1887155
auaacaggguugccaaauu

SEQ ID NO: 2452233 - RNA, 19 nt, Artificial Sequence
  Description of Artificial Sequence: Synthetic oligonucleotide
  Antisense strand to SEQ ID NO: 2452232
aauuuggcaacccuguuau

SEQ ID NO: 2452234 - RNA, 19 nt, Artificial Sequence
  Description of Artificial Sequence: Synthetic oligonucleotide
  Sense strand starting at position 406 of SEQ ID NO: 1887156
uguacaaguuuacuggaaa

SEQ ID NO: 2452235 - RNA, 19 nt, Artificial Sequence
  Description of Artificial Sequence: Synthetic oligonucleotide
  Antisense strand to SEQ ID NO: 2452234
uuuccaguaaacuuguaca

SEQ ID NO: 2452236 - RNA, 19 nt, Artificial Sequence
  Description of Artificial Sequence: Synthetic oligonucleotide
  Sense strand starting at position 454 of SEQ ID NO: 1887156
ucauauuacuauugaagga

SEQ ID NO: 2452237 - RNA, 19 nt, Artificial Sequence
  Description of Artificial Sequence: Synthetic oligonucleotide
  Antisense strand to SEQ ID NO: 2452236
uccuucaauaguaauauga

SEQ ID NO: 2452238 - RNA, 19 nt, Artificial Sequence
  Description of Artificial Sequence: Synthetic oligonucleotide
  Sense strand starting at position 759 of SEQ ID NO: 1887156
auugcuugagguugagagu

SEQ ID NO: 2452239 - RNA, 19 nt, Artificial Sequence
  Description of Artificial Sequence: Synthetic oligonucleotide
  Antisense strand to SEQ ID NO: 2452238
acucucaaccucaagcaau

SEQ ID NO: 2452240 - RNA, 19 nt, Artificial Sequence
  Description of Artificial Sequence: Synthetic oligonucleotide
  Sense strand starting at position 760 of SEQ ID NO: 1887156
uugcuugagguugagaguu

SEQ ID NO: 2452241 - RNA, 19 nt, Artificial Sequence
  Description of Artificial Sequence: Synthetic oligonucleotide
  Antisense strand to SEQ ID NO: 2452240
aacucucaaccucaagcaa

SEQ ID NO: 2452242 - RNA, 19 nt, Artificial Sequence
  Description of Artificial Sequence: Synthetic oligonucleotide
  Sense strand starting at position 1018 of SEQ ID NO: 1887156
ugaggcauuuaagauccua

SEQ ID NO: 2452243 - RNA, 19 nt, Artificial Sequence
  Description of Artificial Sequence: Synthetic oligonucleotide
  Antisense strand to SEQ ID NO: 2452242
uaggaucuuaaaugccuca

SEQ ID NO: 2452244 - RNA, 19 nt, Artificial Sequence
  Description of Artificial Sequence: Synthetic oligonucleotide
  Sense strand starting at position 1026 of SEQ ID NO: 1887156
uuaagauccuaucuaguag

SEQ ID NO: 2452245 - RNA, 19 nt, Artificial Sequence
  Description of Artificial Sequence: Synthetic oligonucleotide
  Antisense strand to SEQ ID NO: 2452244
cuacuagauaggaucuuaa

SEQ ID NO: 2452246 - RNA, 19 nt, Artificial Sequence
  Description of Artificial Sequence: Synthetic oligonucleotide
  Sense strand starting at position 1086 of SEQ ID NO: 1887156
agaacaaacuaugagguuu

SEQ ID NO: 2452247 - RNA, 19 nt, Artificial Sequence
  Description of Artificial Sequence: Synthetic oligonucleotide
  Antisense strand to SEQ ID NO: 2452246
aaaccucauaguuuguucu

SEQ ID NO: 2452248 - RNA, 19 nt, Artificial Sequence
  Description of Artificial Sequence: Synthetic oligonucleotide
  Sense strand starting at position 1101 of SEQ ID NO: 1887156
guuuaagaguuauugcagu

SEQ ID NO: 2452249 - RNA, 19 nt, Artificial Sequence
  Description of Artificial Sequence: Synthetic oligonucleotide
  Antisense strand to SEQ ID NO: 2452248
acugcaauaacucuuaaac

SEQ ID NO: 2452250 - RNA, 19 nt, Artificial Sequence
  Description of Artificial Sequence: Synthetic oligonucleotide
  Sense strand starting at position 1109 of SEQ ID NO: 1887156
guuauugcagucuauccaa

SEQ ID NO: 2452251 - RNA, 19 nt, Artificial Sequence
  Description of Artificial Sequence: Synthetic oligonucleotide
  Antisense strand to SEQ ID NO: 2452250
uuggauagacugcaauaac

SEQ ID NO: 2452252 - RNA, 19 nt, Artificial Sequence
  Description of Artificial Sequence: Synthetic oligonucleotide
  Sense strand starting at position 1135 of SEQ ID NO: 1887156
guguccuccugauauuucu

SEQ ID NO: 2452253 - RNA, 19 nt, Artificial Sequence
  Description of Artificial Sequence: Synthetic oligonucleotide
  Antisense strand to SEQ ID NO: 2452252
agaaauaucaggaggacac

SEQ ID NO: 2452254 - RNA, 19 nt, Artificial Sequence
  Description of Artificial Sequence: Synthetic oligonucleotide
  Sense strand starting at position 1170 of SEQ ID NO: 1887156
ugugcaaaucgucaauaga

SEQ ID NO: 2452255 - RNA, 19 nt, Artificial Sequence
  Description of Artificial Sequence: Synthetic oligonucleotide
  Antisense strand to SEQ ID NO: 2452254
ucuauugacgauuugcaca

SEQ ID NO: 2452256 - RNA, 19 nt, Artificial Sequence
  Description of Artificial Sequence: Synthetic oligonucleotide
  Sense strand starting at position 1242 of SEQ ID NO: 1887156
agcuguauucugcacguua

SEQ ID NO: 2452257 - RNA, 19 nt, Artificial Sequence
  Description of Artificial Sequence: Synthetic oligonucleotide
  Antisense strand to SEQ ID NO: 2452256
uaacgugcagaauacagcu

SEQ ID NO: 2452258 - RNA, 19 nt, Artificial Sequence
  Description of Artificial Sequence: Synthetic oligonucleotide
  Sense strand starting at position 1244 of SEQ ID NO: 1887156
cuguauucugcacguuaga

SEQ ID NO: 2452259 - RNA, 19 nt, Artificial Sequence
  Description of Artificial Sequence: Synthetic oligonucleotide
  Antisense strand to SEQ ID NO: 2452258
ucuaacgugcagaauacag

SEQ ID NO: 2452260 - RNA, 19 nt, Artificial Sequence
  Description of Artificial Sequence: Synthetic oligonucleotide
  Sense strand starting at position 1442 of SEQ ID NO: 1887156
uggguuauuccacgggaca

SEQ ID NO: 2452261 - RNA, 19 nt, Artificial Sequence
  Description of Artificial Sequence: Synthetic oligonucleotide
  Antisense strand to SEQ ID NO: 2452260
ugucccguggaauaaccca

SEQ ID NO: 2452262 - RNA, 19 nt, Artificial Sequence
  Description of Artificial Sequence: Synthetic oligonucleotide
  Sense strand starting at position 1443 of SEQ ID NO: 1887156
ggguuauuccacgggacag

SEQ ID NO: 2452263 - RNA, 19 nt, Artificial Sequence
  Description of Artificial Sequence: Synthetic oligonucleotide
  Antisense strand to SEQ ID NO: 2452262
cugucccguggaauaaccc

SEQ ID NO: 2452264 - RNA, 19 nt, Artificial Sequence
  Description of Artificial Sequence: Synthetic oligonucleotide
  Sense strand starting at position 2272 of SEQ ID NO: 1887156
agagccuguggguguaaau

SEQ ID NO: 2452265 - RNA, 19 nt, Artificial Sequence
  Description of Artificial Sequence: Synthetic oligonucleotide
  Antisense strand to SEQ ID NO: 2452264
auuuacacccacaggcucu

SEQ ID NO: 2452266 - RNA, 19 nt, Artificial Sequence
  Description of Artificial Sequence: Synthetic oligonucleotide
  Sense strand starting at position 2282 of SEQ ID NO: 1887156
gguguaaauuguguguaac

SEQ ID NO: 2452267 - RNA, 19 nt, Artificial Sequence
  Description of Artificial Sequence: Synthetic oligonucleotide
  Antisense strand to SEQ ID NO: 2452266
guuacacacaauuuacacc

SEQ ID NO: 2452268 - RNA, 19 nt, Artificial Sequence
  Description of Artificial Sequence: Synthetic oligonucleotide
  Sense strand starting at position 2283 of SEQ ID NO: 1887156
guguaaauuguguguaacu

SEQ ID NO: 2452269 - RNA, 19 nt, Artificial Sequence
  Description of Artificial Sequence: Synthetic oligonucleotide
  Antisense strand to SEQ ID NO: 2452268
aguuacacacaauuuacac

SEQ ID NO: 2452270 - RNA, 19 nt, Artificial Sequence
  Description of Artificial Sequence: Synthetic oligonucleotide
  Sense strand starting at position 2284 of SEQ ID NO: 1887156
uguaaauuguguguaacug

SEQ ID NO: 2452271 - RNA, 19 nt, Artificial Sequence
  Description of Artificial Sequence: Synthetic oligonucleotide
  Antisense strand to SEQ ID NO: 2452270
caguuacacacaauuuaca

SEQ ID NO: 2452272 - RNA, 19 nt, Artificial Sequence
  Description of Artificial Sequence: Synthetic oligonucleotide
  Sense strand starting at position 2317 of SEQ ID NO: 1887156
cugaaagugcuguguuaca

SEQ ID NO: 2452273 - RNA, 19 nt, Artificial Sequence
  Description of Artificial Sequence: Synthetic oligonucleotide
  Antisense strand to SEQ ID NO: 2452272
uguaacacagcacuuucag

SEQ ID NO: 2452274 - RNA, 19 nt, Artificial Sequence
  Description of Artificial Sequence: Synthetic oligonucleotide
  Sense strand starting at position 2385 of SEQ ID NO: 1887156
ggauuacugaacugagucu

SEQ ID NO: 2452275 - RNA, 19 nt, Artificial Sequence
  Description of Artificial Sequence: Synthetic oligonucleotide
  Antisense strand to SEQ ID NO: 2452274
agacucaguucaguaaucc

SEQ ID NO: 2452276 - RNA, 19 nt, Artificial Sequence
  Description of Artificial Sequence: Synthetic oligonucleotide
  Sense strand starting at position 2644 of SEQ ID NO: 1887156
gcaguuucuuccucuuuau

SEQ ID NO: 2452277 - RNA, 19 nt, Artificial Sequence
  Description of Artificial Sequence: Synthetic oligonucleotide
  Antisense strand to SEQ ID NO: 2452276
auaaagaggaagaaacugc

SEQ ID NO: 2452278 - RNA, 19 nt, Artificial Sequence
  Description of Artificial Sequence: Synthetic oligonucleotide
  Sense strand starting at position 2720 of SEQ ID NO: 1887156
ggauaaauuuccuacagaa

SEQ ID NO: 2452279 - RNA, 19 nt, Artificial Sequence
  Description of Artificial Sequence: Synthetic oligonucleotide
  Antisense strand to SEQ ID NO: 2452278
uucuguaggaaauuuaucc

SEQ ID NO: 2452280 - RNA, 19 nt, Artificial Sequence
  Description of Artificial Sequence: Synthetic oligonucleotide
  Sense strand starting at position 2745 of SEQ ID NO: 1887156
uauugugcggccugauaag

SEQ ID NO: 2452281 - RNA, 19 nt, Artificial Sequence
  Description of Artificial Sequence: Synthetic oligonucleotide
  Antisense strand to SEQ ID NO: 2452280
cuuaucaggccgcacaaua

SEQ ID NO: 2452282 - RNA, 19 nt, Artificial Sequence
  Description of Artificial Sequence: Synthetic oligonucleotide
  Sense strand starting at position 2806 of SEQ ID NO: 1887156
guacaucuaguuuaacaag

SEQ ID NO: 2452283 - RNA, 19 nt, Artificial Sequence
  Description of Artificial Sequence: Synthetic oligonucleotide
  Antisense strand to SEQ ID NO: 2452282
cuuguuaaacuagauguac

SEQ ID NO: 2452284 - RNA, 19 nt, Artificial Sequence
  Description of Artificial Sequence: Synthetic oligonucleotide
  Sense strand starting at position 2835 of SEQ ID NO: 1887156
caagguuguuuggcaguua

SEQ ID NO: 2452285 - RNA, 19 nt, Artificial Sequence
  Description of Artificial Sequence: Synthetic oligonucleotide
  Antisense strand to SEQ ID NO: 2452284
uaacugccaaacaaccuug

SEQ ID NO: 2452286 - RNA, 19 nt, Artificial Sequence
  Description of Artificial Sequence: Synthetic oligonucleotide
  Sense strand starting at position 2927 of SEQ ID NO: 1887156
agcagaggucucuauaucu

SEQ ID NO: 2452287 - RNA, 19 nt, Artificial Sequence
  Description of Artificial Sequence: Synthetic oligonucleotide
  Antisense strand to SEQ ID NO: 2452286
agauauagagaccucugcu

SEQ ID NO: 2452288 - RNA, 19 nt, Artificial Sequence
  Description of Artificial Sequence: Synthetic oligonucleotide
  Sense strand starting at position 2940 of SEQ ID NO: 1887156
auaucuuaacauggaggua

SEQ ID NO: 2452289 - RNA, 19 nt, Artificial Sequence
  Description of Artificial Sequence: Synthetic oligonucleotide
  Antisense strand to SEQ ID NO: 2452288
uaccuccauguuaagauau

SEQ ID NO: 2452290 - RNA, 19 nt, Artificial Sequence
  Description of Artificial Sequence: Synthetic oligonucleotide
  Sense strand starting at position 2988 of SEQ ID NO: 1887156
augaguuuccuccaaguua

SEQ ID NO: 2452291 - RNA, 19 nt, Artificial Sequence
  Description of Artificial Sequence: Synthetic oligonucleotide
  Antisense strand to SEQ ID NO: 2452290
uaacuuggaggaaacucau

SEQ ID NO: 2452292 - RNA, 19 nt, Artificial Sequence
  Description of Artificial Sequence: Synthetic oligonucleotide
  Sense strand starting at position 3040 of SEQ ID NO: 1887156
cugaaaguauaaggagaaa

SEQ ID NO: 2452293 - RNA, 19 nt, Artificial Sequence
  Description of Artificial Sequence: Synthetic oligonucleotide
  Antisense strand to SEQ ID NO: 2452292
uuucuccuuauacuuucag

SEQ ID NO: 2452294 - RNA, 19 nt, Artificial Sequence
  Description of Artificial Sequence: Synthetic oligonucleotide
  Sense strand starting at position 3311 of SEQ ID NO: 1887156
agcaguguucuguggaaac

SEQ ID NO: 2452295 - RNA, 19 nt, Artificial Sequence
  Description of Artificial Sequence: Synthetic oligonucleotide
  Antisense strand to SEQ ID NO: 2452294
guuuccacagaacacugcu

SEQ ID NO: 2452296 - RNA, 19 nt, Artificial Sequence
  Description of Artificial Sequence: Synthetic oligonucleotide
  Sense strand starting at position 3350 of SEQ ID NO: 1887156
caagguucucgguggagca

SEQ ID NO: 2452297 - RNA, 19 nt, Artificial Sequence
  Description of Artificial Sequence: Synthetic oligonucleotide
  Antisense strand to SEQ ID NO: 2452296
ugcuccaccgagaaccuug

SEQ ID NO: 2452298 - RNA, 19 nt, Artificial Sequence
  Description of Artificial Sequence: Synthetic oligonucleotide
  Sense strand starting at position 3351 of SEQ ID NO: 1887156
aagguucucgguggagcaa

SEQ ID NO: 2452299 - RNA, 19 nt, Artificial Sequence
  Description of Artificial Sequence: Synthetic oligonucleotide
  Antisense strand to SEQ ID NO: 2452298
uugcuccaccgagaaccuu

SEQ ID NO: 2452300 - RNA, 19 nt, Artificial Sequence
  Description of Artificial Sequence: Synthetic oligonucleotide
  Sense strand starting at position 3495 of SEQ ID NO: 1887156
uggguugaaguguaucuuu

SEQ ID NO: 2452301 - RNA, 19 nt, Artificial Sequence
  Description of Artificial Sequence: Synthetic oligonucleotide
  Antisense strand to SEQ ID NO: 2452300
aaagauacacuucaaccca

SEQ ID NO: 2452302 - RNA, 19 nt, Artificial Sequence
  Description of Artificial Sequence: Synthetic oligonucleotide
  Sense strand starting at position 3498 of SEQ ID NO: 1887156
guugaaguguaucuuucca

SEQ ID NO: 2452303 - RNA, 19 nt, Artificial Sequence
  Description of Artificial Sequence: Synthetic oligonucleotide
  Antisense strand to SEQ ID NO: 2452302
uggaaagauacacuucaac

SEQ ID NO: 2452304 - RNA, 19 nt, Artificial Sequence
  Description of Artificial Sequence: Synthetic oligonucleotide
  Sense strand starting at position 3500 of SEQ ID NO: 1887156
ugaaguguaucuuuccaaa

SEQ ID NO: 2452305 - RNA, 19 nt, Artificial Sequence
  Description of Artificial Sequence: Synthetic oligonucleotide
  Antisense strand to SEQ ID NO: 2452304
uuuggaaagauacacuuca

SEQ ID NO: 2452306 - RNA, 19 nt, Artificial Sequence
  Description of Artificial Sequence: Synthetic oligonucleotide
  Sense strand starting at position 3611 of SEQ ID NO: 1887156
uguacuagaauauggugaa

SEQ ID NO: 2452307 - RNA, 19 nt, Artificial Sequence
  Description of Artificial Sequence: Synthetic oligonucleotide
  Antisense strand to SEQ ID NO: 2452306
uucaccauauucuaguaca

SEQ ID NO: 2452308 - RNA, 19 nt, Artificial Sequence
  Description of Artificial Sequence: Synthetic oligonucleotide
  Sense strand starting at position 3645 of SEQ ID NO: 1887156
uggcauccuuaugaggaga

SEQ ID NO: 2452309 - RNA, 19 nt, Artificial Sequence
  Description of Artificial Sequence: Synthetic oligonucleotide
  Antisense strand to SEQ ID NO: 2452308
ucuccucauaaggaugcca

SEQ ID NO: 2452310 - RNA, 19 nt, Artificial Sequence
  Description of Artificial Sequence: Synthetic oligonucleotide
  Sense strand starting at position 3786 of SEQ ID NO: 1887156
ugacgaucaccagaagcua

SEQ ID NO: 2452311 - RNA, 19 nt, Artificial Sequence
  Description of Artificial Sequence: Synthetic oligonucleotide
  Antisense strand to SEQ ID NO: 2452310
uagcuucuggugaucguca

SEQ ID NO: 2452312 - RNA, 19 nt, Artificial Sequence
  Description of Artificial Sequence: Synthetic oligonucleotide
  Sense strand starting at position 3905 of SEQ ID NO: 1887156
aaauuucuguugugucaag

SEQ ID NO: 2452313 - RNA, 19 nt, Artificial Sequence
  Description of Artificial Sequence: Synthetic oligonucleotide
  Antisense strand to SEQ ID NO: 2452312
cuugacacaacagaaauuu

SEQ ID NO: 2452314 - RNA, 19 nt, Artificial Sequence
  Description of Artificial Sequence: Synthetic oligonucleotide
  Sense strand starting at position 229 of SEQ ID NO: 1887157
cuauguucucugggaucac

SEQ ID NO: 2452315 - RNA, 19 nt, Artificial Sequence
  Description of Artificial Sequence: Synthetic oligonucleotide
  Antisense strand to SEQ ID NO: 2452314
gugaucccagagaacauag

SEQ ID NO: 2452316 - RNA, 19 nt, Artificial Sequence
  Description of Artificial Sequence: Synthetic oligonucleotide
  Sense strand starting at position 315 of SEQ ID NO: 1887157
ugcauuuauguuugagagu

SEQ ID NO: 2452317 - RNA, 19 nt, Artificial Sequence
  Description of Artificial Sequence: Synthetic oligonucleotide
  Antisense strand to SEQ ID NO: 2452316
acucucaaacauaaaugca

SEQ ID NO: 2452318 - RNA, 19 nt, Artificial Sequence
  Description of Artificial Sequence: Synthetic oligonucleotide
  Sense strand starting at position 402 of SEQ ID NO: 1887157
auaggauggucuuuccaag

SEQ ID NO: 2452319 - RNA, 19 nt, Artificial Sequence
  Description of Artificial Sequence: Synthetic oligonucleotide
  Antisense strand to SEQ ID NO: 2452318
cuuggaaagaccauccuau

SEQ ID NO: 2452320 - RNA, 19 nt, Artificial Sequence
  Description of Artificial Sequence: Synthetic oligonucleotide
  Sense strand starting at position 425 of SEQ ID NO: 1887157
aggucugacuuccuacaga

SEQ ID NO: 2452321 - RNA, 19 nt, Artificial Sequence
  Description of Artificial Sequence: Synthetic oligonucleotide
  Antisense strand to SEQ ID NO: 2452320
ucuguaggaagucagaccu

SEQ ID NO: 2452322 - RNA, 19 nt, Artificial Sequence
  Description of Artificial Sequence: Synthetic oligonucleotide
  Sense strand starting at position 467 of SEQ ID NO: 1887157
aagagaguguugcuuugag

SEQ ID NO: 2452323 - RNA, 19 nt, Artificial Sequence
  Description of Artificial Sequence: Synthetic oligonucleotide
  Antisense strand to SEQ ID NO: 2452322
cucaaagcaacacucucuu

SEQ ID NO: 2452324 - RNA, 19 nt, Artificial Sequence
  Description of Artificial Sequence: Synthetic oligonucleotide
  Sense strand starting at position 516 of SEQ ID NO: 1887157
agaggaaucuuguuggcau

SEQ ID NO: 2452325 - RNA, 19 nt, Artificial Sequence
  Description of Artificial Sequence: Synthetic oligonucleotide
  Antisense strand to SEQ ID NO: 2452324
augccaacaagauuccucu

SEQ ID NO: 2452326 - RNA, 19 nt, Artificial Sequence
  Description of Artificial Sequence: Synthetic oligonucleotide
  Sense strand starting at position 527 of SEQ ID NO: 1887157
guuggcauuucugcaugaa

SEQ ID NO: 2452327 - RNA, 19 nt, Artificial Sequence
  Description of Artificial Sequence: Synthetic oligonucleotide
  Antisense strand to SEQ ID NO: 2452326
uucaugcagaaaugccaac

SEQ ID NO: 2452328 - RNA, 19 nt, Artificial Sequence
  Description of Artificial Sequence: Synthetic oligonucleotide
  Sense strand starting at position 564 of SEQ ID NO: 1887157
gagugacuauaugucaaca

SEQ ID NO: 2452329 - RNA, 19 nt, Artificial Sequence
  Description of Artificial Sequence: Synthetic oligonucleotide
  Antisense strand to SEQ ID NO: 2452328
uguugacauauagucacuc

SEQ ID NO: 2452330 - RNA, 19 nt, Artificial Sequence
  Description of Artificial Sequence: Synthetic oligonucleotide
  Sense strand starting at position 591 of SEQ ID NO: 1887157
gugcguguuguaccuguua

SEQ ID NO: 2452331 - RNA, 19 nt, Artificial Sequence
  Description of Artificial Sequence: Synthetic oligonucleotide
  Antisense strand to SEQ ID NO: 2452330
uaacagguacaacacgcac

SEQ ID NO: 2452332 - RNA, 19 nt, Artificial Sequence
  Description of Artificial Sequence: Synthetic oligonucleotide
  Sense strand starting at position 664 of SEQ ID NO: 1887157
aagugucuucucuaaagag

SEQ ID NO: 2452333 - RNA, 19 nt, Artificial Sequence
  Description of Artificial Sequence: Synthetic oligonucleotide
  Antisense strand to SEQ ID NO: 2452332
cucuuuagagaagacacuu

SEQ ID NO: 2452334 - RNA, 19 nt, Artificial Sequence
  Description of Artificial Sequence: Synthetic oligonucleotide
  Sense strand starting at position 673 of SEQ ID NO: 1887157
cucuaaagagcuugaagau

SEQ ID NO: 2452335 - RNA, 19 nt, Artificial Sequence
  Description of Artificial Sequence: Synthetic oligonucleotide
  Antisense strand to SEQ ID NO: 2452334
aucuucaagcucuuuagag

SEQ ID NO: 2452336 - RNA, 19 nt, Artificial Sequence
  Description of Artificial Sequence: Synthetic oligonucleotide
  Sense strand starting at position 690 of SEQ ID NO: 1887157
auagcaggcuccuuagaga

SEQ ID NO: 2452337 - RNA, 19 nt, Artificial Sequence
  Description of Artificial Sequence: Synthetic oligonucleotide
  Antisense strand to SEQ ID NO: 2452336
ucucuaaggagccugcuau

SEQ ID NO: 2452338 - RNA, 19 nt, Artificial Sequence
  Description of Artificial Sequence: Synthetic oligonucleotide
  Sense strand starting at position 711 of SEQ ID NO: 1887157
ccaaaccucugggucauaa

SEQ ID NO: 2452339 - RNA, 19 nt, Artificial Sequence
  Description of Artificial Sequence: Synthetic oligonucleotide
  Antisense strand to SEQ ID NO: 2452338
uuaugacccagagguuugg

SEQ ID NO: 2452340 - RNA, 19 nt, Artificial Sequence
  Description of Artificial Sequence: Synthetic oligonucleotide
  Sense strand starting at position 713 of SEQ ID NO: 1887157
aaaccucugggucauaagu

SEQ ID NO: 2452341 - RNA, 19 nt, Artificial Sequence
  Description of Artificial Sequence: Synthetic oligonucleotide
  Antisense strand to SEQ ID NO: 2452340
acuuaugacccagagguuu

SEQ ID NO: 2452342 - RNA, 19 nt, Artificial Sequence
  Description of Artificial Sequence: Synthetic oligonucleotide
  Sense strand starting at position 809 of SEQ ID NO: 1887157
uaugaucaagcagguuuaa

SEQ ID NO: 2452343 - RNA, 19 nt, Artificial Sequence
  Description of Artificial Sequence: Synthetic oligonucleotide
  Antisense strand to SEQ ID NO: 2452342
uuaaaccugcuugaucaua

SEQ ID NO: 2452344 - RNA, 19 nt, Artificial Sequence
  Description of Artificial Sequence: Synthetic oligonucleotide
  Sense strand starting at position 850 of SEQ ID NO: 1887157
gguaguaguguuagcauga

SEQ ID NO: 2452345 - RNA, 19 nt, Artificial Sequence
  Description of Artificial Sequence: Synthetic oligonucleotide
  Antisense strand to SEQ ID NO: 2452344
ucaugcuaacacuacuacc

SEQ ID NO: 2452346 - RNA, 19 nt, Artificial Sequence
  Description of Artificial Sequence: Synthetic oligonucleotide
  Sense strand starting at position 940 of SEQ ID NO: 1887157
gguagauaugcucauccug

SEQ ID NO: 2452347 - RNA, 19 nt, Artificial Sequence
  Description of Artificial Sequence: Synthetic oligonucleotide
  Antisense strand to SEQ ID NO: 2452346
caggaugagcauaucuacc

SEQ ID NO: 2452348 - RNA, 19 nt, Artificial Sequence
  Description of Artificial Sequence: Synthetic oligonucleotide
  Sense strand starting at position 1007 of SEQ ID NO: 1887157
auguguggagaaggauauu

SEQ ID NO: 2452349 - RNA, 19 nt, Artificial Sequence
  Description of Artificial Sequence: Synthetic oligonucleotide
  Antisense strand to SEQ ID NO: 2452348
aauauccuucuccacacau

SEQ ID NO: 2452350 - RNA, 19 nt, Artificial Sequence
  Description of Artificial Sequence: Synthetic oligonucleotide
  Sense strand starting at position 2144 of SEQ ID NO: 1887157
aggucauuauaggcacaaa

SEQ ID NO: 2452351 - RNA, 19 nt, Artificial Sequence
  Description of Artificial Sequence: Synthetic oligonucleotide
  Antisense strand to SEQ ID NO: 2452350
uuugugccuauaaugaccu

SEQ ID NO: 2452352 - RNA, 19 nt, Artificial Sequence
  Description of Artificial Sequence: Synthetic oligonucleotide
  Sense strand starting at position 2269 of SEQ ID NO: 1887157
uccaauagucuugaagugu

SEQ ID NO: 2452353 - RNA, 19 nt, Artificial Sequence
  Description of Artificial Sequence: Synthetic oligonucleotide
  Antisense strand to SEQ ID NO: 2452352
acacuucaagacuauugga

SEQ ID NO: 2452354 - RNA, 19 nt, Artificial Sequence
  Description of Artificial Sequence: Synthetic oligonucleotide
  Sense strand starting at position 2277 of SEQ ID NO: 1887157
ucuugaaguguuuaaaguu

SEQ ID NO: 2452355 - RNA, 19 nt, Artificial Sequence
  Description of Artificial Sequence: Synthetic oligonucleotide
  Antisense strand to SEQ ID NO: 2452354
aacuuuaaacacuucaaga

SEQ ID NO: 2452356 - RNA, 19 nt, Artificial Sequence
  Description of Artificial Sequence: Synthetic oligonucleotide
  Sense strand starting at position 2447 of SEQ ID NO: 1887157
augaucucucugggaaauc

SEQ ID NO: 2452357 - RNA, 19 nt, Artificial Sequence
  Description of Artificial Sequence: Synthetic oligonucleotide
  Antisense strand to SEQ ID NO: 2452356
gauuucccagagagaucau

SEQ ID NO: 2452358 - RNA, 19 nt, Artificial Sequence
  Description of Artificial Sequence: Synthetic oligonucleotide
  Sense strand starting at position 2509 of SEQ ID NO: 1887157
ugauuagucagugaaguga

SEQ ID NO: 2452359 - RNA, 19 nt, Artificial Sequence
  Description of Artificial Sequence: Synthetic oligonucleotide
  Antisense strand to SEQ ID NO: 2452358
ucacuucacugacuaauca

SEQ ID NO: 2452360 - RNA, 19 nt, Artificial Sequence
  Description of Artificial Sequence: Synthetic oligonucleotide
  Sense strand starting at position 2702 of SEQ ID NO: 1887157
ggcaucuauugaucccgaa

SEQ ID NO: 2452361 - RNA, 19 nt, Artificial Sequence
  Description of Artificial Sequence: Synthetic oligonucleotide
  Antisense strand to SEQ ID NO: 2452360
uucgggaucaauagaugcc

SEQ ID NO: 2452362 - RNA, 19 nt, Artificial Sequence
  Description of Artificial Sequence: Synthetic oligonucleotide
  Sense strand starting at position 2706 of SEQ ID NO: 1887157
ucuauugaucccgaacucu

SEQ ID NO: 2452363 - RNA, 19 nt, Artificial Sequence
  Description of Artificial Sequence: Synthetic oligonucleotide
  Antisense strand to SEQ ID NO: 2452362
agaguucgggaucaauaga

SEQ ID NO: 2452364 - RNA, 19 nt, Artificial Sequence
  Description of Artificial Sequence: Synthetic oligonucleotide
  Sense strand starting at position 2778 of SEQ ID NO: 1887157
acuuguguucuuuaagacu

SEQ ID NO: 2452365 - RNA, 19 nt, Artificial Sequence
  Description of Artificial Sequence: Synthetic oligonucleotide
  Antisense strand to SEQ ID NO: 2452364
agucuuaaagaacacaagu

SEQ ID NO: 2452366 - RNA, 19 nt, Artificial Sequence
  Description of Artificial Sequence: Synthetic oligonucleotide
  Sense strand starting at position 3013 of SEQ ID NO: 1887157
ucuauugaggcauaaagua

SEQ ID NO: 2452367 - RNA, 19 nt, Artificial Sequence
  Description of Artificial Sequence: Synthetic oligonucleotide
  Antisense strand to SEQ ID NO: 2452366
uacuuuaugccucaauaga

SEQ ID NO: 2452368 - RNA, 19 nt, Artificial Sequence
  Description of Artificial Sequence: Synthetic oligonucleotide
  Sense strand starting at position 3229 of SEQ ID NO: 1887157
aggagacacuugcucuauu

SEQ ID NO: 2452369 - RNA, 19 nt, Artificial Sequence
  Description of Artificial Sequence: Synthetic oligonucleotide
  Antisense strand to SEQ ID NO: 2452368
aauagagcaagugucuccu

SEQ ID NO: 2452370 - RNA, 19 nt, Artificial Sequence
  Description of Artificial Sequence: Synthetic oligonucleotide
  Sense strand starting at position 3230 of SEQ ID NO: 1887157
ggagacacuugcucuauua

SEQ ID NO: 2452371 - RNA, 19 nt, Artificial Sequence
  Description of Artificial Sequence: Synthetic oligonucleotide
  Antisense strand to SEQ ID NO: 2452370
uaauagagcaagugucucc

SEQ ID NO: 2452372 - RNA, 19 nt, Artificial Sequence
  Description of Artificial Sequence: Synthetic oligonucleotide
  Sense strand starting at position 3232 of SEQ ID NO: 1887157
agacacuugcucuauuaag

SEQ ID NO: 2452373 - RNA, 19 nt, Artificial Sequence
  Description of Artificial Sequence: Synthetic oligonucleotide
  Antisense strand to SEQ ID NO: 2452372
cuuaauagagcaagugucu

SEQ ID NO: 2452374 - RNA, 19 nt, Artificial Sequence
  Description of Artificial Sequence: Synthetic oligonucleotide
  Sense strand starting at position 3328 of SEQ ID NO: 1887157
guucauguggaaugugaca

SEQ ID NO: 2452375 - RNA, 19 nt, Artificial Sequence
  Description of Artificial Sequence: Synthetic oligonucleotide
  Antisense strand to SEQ ID NO: 2452374
ugucacauuccacaugaac

SEQ ID NO: 2452376 - RNA, 19 nt, Artificial Sequence
  Description of Artificial Sequence: Synthetic oligonucleotide
  Sense strand starting at position 3369 of SEQ ID NO: 1887157
ugcauuaugcaauaaauga

SEQ ID NO: 2452377 - RNA, 19 nt, Artificial Sequence
  Description of Artificial Sequence: Synthetic oligonucleotide
  Antisense strand to SEQ ID NO: 2452376
ucauuuauugcauaaugca

SEQ ID NO: 2452378 - RNA, 19 nt, Artificial Sequence
  Description of Artificial Sequence: Synthetic oligonucleotide
  Sense strand starting at position 3617 of SEQ ID NO: 1887157
guuagauaaccauggcuaa

SEQ ID NO: 2452379 - RNA, 19 nt, Artificial Sequence
  Description of Artificial Sequence: Synthetic oligonucleotide
  Antisense strand to SEQ ID NO: 2452378
uuagccaugguuaucuaac

SEQ ID NO: 2452380 - RNA, 19 nt, Artificial Sequence
  Description of Artificial Sequence: Synthetic oligonucleotide
  Sense strand starting at position 3618 of SEQ ID NO: 1887157
uuagauaaccauggcuaau

SEQ ID NO: 2452381 - RNA, 19 nt, Artificial Sequence
  Description of Artificial Sequence: Synthetic oligonucleotide
  Antisense strand to SEQ ID NO: 2452380
auuagccaugguuaucuaa

SEQ ID NO: 2452382 - RNA, 19 nt, Artificial Sequence
  Description of Artificial Sequence: Synthetic oligonucleotide
  Sense strand starting at position 3826 of SEQ ID NO: 1887157
ugcaauggccaguaaugaa

SEQ ID NO: 2452383 - RNA, 19 nt, Artificial Sequence
  Description of Artificial Sequence: Synthetic oligonucleotide
  Antisense strand to SEQ ID NO: 2452382
uucauuacuggccauugca

SEQ ID NO: 2452384 - RNA, 19 nt, Artificial Sequence
  Description of Artificial Sequence: Synthetic oligonucleotide
  Sense strand starting at position 3836 of SEQ ID NO: 1887157
aguaaugaacuguaaagca

SEQ ID NO: 2452385 - RNA, 19 nt, Artificial Sequence
  Description of Artificial Sequence: Synthetic oligonucleotide
  Antisense strand to SEQ ID NO: 2452384
ugcuuuacaguucauuacu

SEQ ID NO: 2452386 - RNA, 19 nt, Artificial Sequence
  Description of Artificial Sequence: Synthetic oligonucleotide
  Sense strand starting at position 3860 of SEQ ID NO: 1887157
ggcugugcauauuuagcaa

SEQ ID NO: 2452387 - RNA, 19 nt, Artificial Sequence
  Description of Artificial Sequence: Synthetic oligonucleotide
  Antisense strand to SEQ ID NO: 2452386
uugcuaaauaugcacagcc

SEQ ID NO: 2452388 - RNA, 19 nt, Artificial Sequence
  Description of Artificial Sequence: Synthetic oligonucleotide
  Sense strand starting at position 3863 of SEQ ID NO: 1887157
ugugcauauuuagcaacua

SEQ ID NO: 2452389 - RNA, 19 nt, Artificial Sequence
  Description of Artificial Sequence: Synthetic oligonucleotide
  Antisense strand to SEQ ID NO: 2452388
uaguugcuaaauaugcaca

SEQ ID NO: 2452390 - RNA, 19 nt, Artificial Sequence
  Description of Artificial Sequence: Synthetic oligonucleotide
  Sense strand starting at position 3959 of SEQ ID NO: 1887157
agugucacucaagauacau

SEQ ID NO: 2452391 - RNA, 19 nt, Artificial Sequence
  Description of Artificial Sequence: Synthetic oligonucleotide
  Antisense strand to SEQ ID NO: 2452390
auguaucuugagugacacu

SEQ ID NO: 2452392 - RNA, 19 nt, Artificial Sequence
  Description of Artificial Sequence: Synthetic oligonucleotide
  Sense strand starting at position 3974 of SEQ ID NO: 1887157
acauuaugugaauagccuu

SEQ ID NO: 2452393 - RNA, 19 nt, Artificial Sequence
  Description of Artificial Sequence: Synthetic oligonucleotide
  Antisense strand to SEQ ID NO: 2452392
aaggcuauucacauaaugu

SEQ ID NO: 2452394 - RNA, 19 nt, Artificial Sequence
  Description of Artificial Sequence: Synthetic oligonucleotide
  Sense strand starting at position 42 of SEQ ID NO: 1887158
aauaguuugucucccgcua

SEQ ID NO: 2452395 - RNA, 19 nt, Artificial Sequence
  Description of Artificial Sequence: Synthetic oligonucleotide
  Antisense strand to SEQ ID NO: 2452394
uagcgggagacaaacuauu

SEQ ID NO: 2452396 - RNA, 19 nt, Artificial Sequence
  Description of Artificial Sequence: Synthetic oligonucleotide
  Sense strand starting at position 101 of SEQ ID NO: 1887158
uuguaucaguaacuuagau

SEQ ID NO: 2452397 - RNA, 19 nt, Artificial Sequence
  Description of Artificial Sequence: Synthetic oligonucleotide
  Antisense strand to SEQ ID NO: 2452396
aucuaaguuacugauacaa

SEQ ID NO: 2452398 - RNA, 19 nt, Artificial Sequence
  Description of Artificial Sequence: Synthetic oligonucleotide
  Sense strand starting at position 368 of SEQ ID NO: 1887158
gguucuggaggcuguaaau

SEQ ID NO: 2452399 - RNA, 19 nt, Artificial Sequence
  Description of Artificial Sequence: Synthetic oligonucleotide
  Antisense strand to SEQ ID NO: 2452398
auuuacagccuccagaacc

SEQ ID NO: 2452400 - RNA, 19 nt, Artificial Sequence
  Description of Artificial Sequence: Synthetic oligonucleotide
  Sense strand starting at position 411 of SEQ ID NO: 1887158
gauaguguugaggauccca

SEQ ID NO: 2452401 - RNA, 19 nt, Artificial Sequence
  Description of Artificial Sequence: Synthetic oligonucleotide
  Antisense strand to SEQ ID NO: 2452400
ugggauccucaacacuauc

SEQ ID NO: 2452402 - RNA, 19 nt, Artificial Sequence
  Description of Artificial Sequence: Synthetic oligonucleotide
  Sense strand starting at position 623 of SEQ ID NO: 1887158
ggaucacuccuaugaaggu

SEQ ID NO: 2452403 - RNA, 19 nt, Artificial Sequence
  Description of Artificial Sequence: Synthetic oligonucleotide
  Antisense strand to SEQ ID NO: 2452402
accuucauaggagugaucc

SEQ ID NO: 2452404 - RNA, 19 nt, Artificial Sequence
  Description of Artificial Sequence: Synthetic oligonucleotide
  Sense strand starting at position 719 of SEQ ID NO: 1887158
agaagugguugaccacauu

SEQ ID NO: 2452405 - RNA, 19 nt, Artificial Sequence
  Description of Artificial Sequence: Synthetic oligonucleotide
  Antisense strand to SEQ ID NO: 2452404
aauguggucaaccacuucu

SEQ ID NO: 2452406 - RNA, 19 nt, Artificial Sequence
  Description of Artificial Sequence: Synthetic oligonucleotide
  Sense strand starting at position 776 of SEQ ID NO: 1887158
gagucagagcauugaugaa

SEQ ID NO: 2452407 - RNA, 19 nt, Artificial Sequence
  Description of Artificial Sequence: Synthetic oligonucleotide
  Antisense strand to SEQ ID NO: 2452406
uucaucaaugcucugacuc

SEQ ID NO: 2452408 - RNA, 19 nt, Artificial Sequence
  Description of Artificial Sequence: Synthetic oligonucleotide
  Sense strand starting at position 2002 of SEQ ID NO: 1887158
agguguugauaacaaucau

SEQ ID NO: 2452409 - RNA, 19 nt, Artificial Sequence
  Description of Artificial Sequence: Synthetic oligonucleotide
  Antisense strand to SEQ ID NO: 2452408
augauuguuaucaacaccu

SEQ ID NO: 2452410 - RNA, 19 nt, Artificial Sequence
  Description of Artificial Sequence: Synthetic oligonucleotide
  Sense strand starting at position 2023 of SEQ ID NO: 1887158
augagaucuugauagcaau

SEQ ID NO: 2452411 - RNA, 19 nt, Artificial Sequence
  Description of Artificial Sequence: Synthetic oligonucleotide
  Antisense strand to SEQ ID NO: 2452410
auugcuaucaagaucucau

SEQ ID NO: 2452412 - RNA, 19 nt, Artificial Sequence
  Description of Artificial Sequence: Synthetic oligonucleotide
  Sense strand starting at position 2142 of SEQ ID NO: 1887158
ggguaacaagaguggcauu

SEQ ID NO: 2452413 - RNA, 19 nt, Artificial Sequence
  Description of Artificial Sequence: Synthetic oligonucleotide
  Antisense strand to SEQ ID NO: 2452412
aaugccacucuuguuaccc

SEQ ID NO: 2452414 - RNA, 19 nt, Artificial Sequence
  Description of Artificial Sequence: Synthetic oligonucleotide
  Sense strand starting at position 2201 of SEQ ID NO: 1887158
gggaacaaauguuacauua

SEQ ID NO: 2452415 - RNA, 19 nt, Artificial Sequence
  Description of Artificial Sequence: Synthetic oligonucleotide
  Antisense strand to SEQ ID NO: 2452414
uaauguaacauuuguuccc

SEQ ID NO: 2452416 - RNA, 19 nt, Artificial Sequence
  Description of Artificial Sequence: Synthetic oligonucleotide
  Sense strand starting at position 2208 of SEQ ID NO: 1887158
aauguuacauuagaaaggu

SEQ ID NO: 2452417 - RNA, 19 nt, Artificial Sequence
  Description of Artificial Sequence: Synthetic oligonucleotide
  Antisense strand to SEQ ID NO: 2452416
accuuucuaauguaacauu

SEQ ID NO: 2452418 - RNA, 19 nt, Artificial Sequence
  Description of Artificial Sequence: Synthetic oligonucleotide
  Sense strand starting at position 2251 of SEQ ID NO: 1887158
gccaaaguucugggaggaa

SEQ ID NO: 2452419 - RNA, 19 nt, Artificial Sequence
  Description of Artificial Sequence: Synthetic oligonucleotide
  Antisense strand to SEQ ID NO: 2452418
uuccucccagaacuuuggc

SEQ ID NO: 2452420 - RNA, 19 nt, Artificial Sequence
  Description of Artificial Sequence: Synthetic oligonucleotide
  Sense strand starting at position 2288 of SEQ ID NO: 1887158
guggcauggccauaguuga

SEQ ID NO: 2452421 - RNA, 19 nt, Artificial Sequence
  Description of Artificial Sequence: Synthetic oligonucleotide
  Antisense strand to SEQ ID NO: 2452420
ucaacuauggccaugccac

SEQ ID NO: 2452422 - RNA, 19 nt, Artificial Sequence
  Description of Artificial Sequence: Synthetic oligonucleotide
  Sense strand starting at position 2434 of SEQ ID NO: 1887158
ugucguggcccagacuauu

SEQ ID NO: 2452423 - RNA, 19 nt, Artificial Sequence
  Description of Artificial Sequence: Synthetic oligonucleotide
  Antisense strand to SEQ ID NO: 2452422
aauagucugggccacgaca

SEQ ID NO: 2452424 - RNA, 19 nt, Artificial Sequence
  Description of Artificial Sequence: Synthetic oligonucleotide
  Sense strand starting at position 2437 of SEQ ID NO: 1887158
cguggcccagacuauuaaa

SEQ ID NO: 2452425 - RNA, 19 nt, Artificial Sequence
  Description of Artificial Sequence: Synthetic oligonucleotide
  Antisense strand to SEQ ID NO: 2452424
uuuaauagucugggccacg

SEQ ID NO: 2452426 - RNA, 19 nt, Artificial Sequence
  Description of Artificial Sequence: Synthetic oligonucleotide
  Sense strand starting at position 2476 of SEQ ID NO: 1887158
gagauuugguccggacauu

SEQ ID NO: 2452427 - RNA, 19 nt, Artificial Sequence
  Description of Artificial Sequence: Synthetic oligonucleotide
  Antisense strand to SEQ ID NO: 2452426
aauguccggaccaaaucuc

SEQ ID NO: 2452428 - RNA, 19 nt, Artificial Sequence
  Description of Artificial Sequence: Synthetic oligonucleotide
  Sense strand starting at position 2618 of SEQ ID NO: 1887158
auugcauuucuccguauag

SEQ ID NO: 2452429 - RNA, 19 nt, Artificial Sequence
  Description of Artificial Sequence: Synthetic oligonucleotide
  Antisense strand to SEQ ID NO: 2452428
cuauacggagaaaugcaau

SEQ ID NO: 2452430 - RNA, 19 nt, Artificial Sequence
  Description of Artificial Sequence: Synthetic oligonucleotide
  Sense strand starting at position 2619 of SEQ ID NO: 1887158
uugcauuucuccguauaga

SEQ ID NO: 2452431 - RNA, 19 nt, Artificial Sequence
  Description of Artificial Sequence: Synthetic oligonucleotide
  Antisense strand to SEQ ID NO: 2452430
ucuauacggagaaaugcaa

SEQ ID NO: 2452432 - RNA, 19 nt, Artificial Sequence
  Description of Artificial Sequence: Synthetic oligonucleotide
  Sense strand starting at position 2629 of SEQ ID NO: 1887158
ccguauagagucugggaaa

SEQ ID NO: 2452433 - RNA, 19 nt, Artificial Sequence
  Description of Artificial Sequence: Synthetic oligonucleotide
  Antisense strand to SEQ ID NO: 2452432
uuucccagacucuauacgg

SEQ ID NO: 2452434 - RNA, 19 nt, Artificial Sequence
  Description of Artificial Sequence: Synthetic oligonucleotide
  Sense strand starting at position 2632 of SEQ ID NO: 1887158
uauagagucugggaaauuu

SEQ ID NO: 2452435 - RNA, 19 nt, Artificial Sequence
  Description of Artificial Sequence: Synthetic oligonucleotide
  Antisense strand to SEQ ID NO: 2452434
aaauuucccagacucuaua

SEQ ID NO: 2452436 - RNA, 19 nt, Artificial Sequence
  Description of Artificial Sequence: Synthetic oligonucleotide
  Sense strand starting at position 2640 of SEQ ID NO: 1887158
cugggaaauuugggcucaa

SEQ ID NO: 2452437 - RNA, 19 nt, Artificial Sequence
  Description of Artificial Sequence: Synthetic oligonucleotide
  Antisense strand to SEQ ID NO: 2452436
uugagcccaaauuucccag

SEQ ID NO: 2452438 - RNA, 19 nt, Artificial Sequence
  Description of Artificial Sequence: Synthetic oligonucleotide
  Sense strand starting at position 2783 of SEQ ID NO: 1887158
ggugaacucucacacaaau

SEQ ID NO: 2452439 - RNA, 19 nt, Artificial Sequence
  Description of Artificial Sequence: Synthetic oligonucleotide
  Antisense strand to SEQ ID NO: 2452438
auuugugugagaguucacc

SEQ ID NO: 2452440 - RNA, 19 nt, Artificial Sequence
  Description of Artificial Sequence: Synthetic oligonucleotide
  Sense strand starting at position 2797 of SEQ ID NO: 1887158
caaauagagucuuagguaa

SEQ ID NO: 2452441 - RNA, 19 nt, Artificial Sequence
  Description of Artificial Sequence: Synthetic oligonucleotide
  Antisense strand to SEQ ID NO: 2452440
uuaccuaagacucuauuug

SEQ ID NO: 2452442 - RNA, 19 nt, Artificial Sequence
  Description of Artificial Sequence: Synthetic oligonucleotide
  Sense strand starting at position 2804 of SEQ ID NO: 1887158
agucuuagguaagcagaua

SEQ ID NO: 2452443 - RNA, 19 nt, Artificial Sequence
  Description of Artificial Sequence: Synthetic oligonucleotide
  Antisense strand to SEQ ID NO: 2452442
uaucugcuuaccuaagacu

SEQ ID NO: 2452444 - RNA, 19 nt, Artificial Sequence
  Description of Artificial Sequence: Synthetic oligonucleotide
  Sense strand starting at position 2879 of SEQ ID NO: 1887158
ucugucuccugguucuaau

SEQ ID NO: 2452445 - RNA, 19 nt, Artificial Sequence
  Description of Artificial Sequence: Synthetic oligonucleotide
  Antisense strand to SEQ ID NO: 2452444
auuagaaccaggagacaga

SEQ ID NO: 2452446 - RNA, 19 nt, Artificial Sequence
  Description of Artificial Sequence: Synthetic oligonucleotide
  Sense strand starting at position 2889 of SEQ ID NO: 1887158
gguucuaauuacgcaucau

SEQ ID NO: 2452447 - RNA, 19 nt, Artificial Sequence
  Description of Artificial Sequence: Synthetic oligonucleotide
  Antisense strand to SEQ ID NO: 2452446
augaugcguaauuagaacc

SEQ ID NO: 2452448 - RNA, 19 nt, Artificial Sequence
  Description of Artificial Sequence: Synthetic oligonucleotide
  Sense strand starting at position 3477 of SEQ ID NO: 1887158
augauuaaauguggagaau

SEQ ID NO: 2452449 - RNA, 19 nt, Artificial Sequence
  Description of Artificial Sequence: Synthetic oligonucleotide
  Antisense strand to SEQ ID NO: 2452448
auucuccacauuuaaucau

SEQ ID NO: 2452450 - RNA, 19 nt, Artificial Sequence
  Description of Artificial Sequence: Synthetic oligonucleotide
  Sense strand starting at position 3514 of SEQ ID NO: 1887158
gagggucaauuaccaucua

SEQ ID NO: 2452451 - RNA, 19 nt, Artificial Sequence
  Description of Artificial Sequence: Synthetic oligonucleotide
  Antisense strand to SEQ ID NO: 2452450
uagaugguaauugacccuc

SEQ ID NO: 2452452 - RNA, 19 nt, Artificial Sequence
  Description of Artificial Sequence: Synthetic oligonucleotide
  Sense strand starting at position 3515 of SEQ ID NO: 1887158
agggucaauuaccaucuaa

SEQ ID NO: 2452453 - RNA, 19 nt, Artificial Sequence
  Description of Artificial Sequence: Synthetic oligonucleotide
  Antisense strand to SEQ ID NO: 2452452
uuagaugguaauugacccu

SEQ ID NO: 2452454 - RNA, 19 nt, Artificial Sequence
  Description of Artificial Sequence: Synthetic oligonucleotide
  Sense strand starting at position 3616 of SEQ ID NO: 1887158
cucaaucugcuuuggacua

SEQ ID NO: 2452455 - RNA, 19 nt, Artificial Sequence
  Description of Artificial Sequence: Synthetic oligonucleotide
  Antisense strand to SEQ ID NO: 2452454
uaguccaaagcagauugag

SEQ ID NO: 2452456 - RNA, 19 nt, Artificial Sequence
  Description of Artificial Sequence: Synthetic oligonucleotide
  Sense strand starting at position 3621 of SEQ ID NO: 1887158
ucugcuuuggacuaaguau

SEQ ID NO: 2452457 - RNA, 19 nt, Artificial Sequence
  Description of Artificial Sequence: Synthetic oligonucleotide
  Antisense strand to SEQ ID NO: 2452456
auacuuaguccaaagcaga

SEQ ID NO: 2452458 - RNA, 19 nt, Artificial Sequence
  Description of Artificial Sequence: Synthetic oligonucleotide
  Sense strand starting at position 3665 of SEQ ID NO: 1887158
ccgugaguagcgcuugaaa

SEQ ID NO: 2452459 - RNA, 19 nt, Artificial Sequence
  Description of Artificial Sequence: Synthetic oligonucleotide
  Antisense strand to SEQ ID NO: 2452458
uuucaagcgcuacucacgg

SEQ ID NO: 2452460 - RNA, 19 nt, Artificial Sequence
  Description of Artificial Sequence: Synthetic oligonucleotide
  Sense strand starting at position 3668 of SEQ ID NO: 1887158
ugaguagcgcuugaaagcu

SEQ ID NO: 2452461 - RNA, 19 nt, Artificial Sequence
  Description of Artificial Sequence: Synthetic oligonucleotide
  Antisense strand to SEQ ID NO: 2452460
agcuuucaagcgcuacuca

SEQ ID NO: 2452462 - RNA, 19 nt, Artificial Sequence
  Description of Artificial Sequence: Synthetic oligonucleotide
  Sense strand starting at position 3674 of SEQ ID NO: 1887158
gcgcuugaaagcuuaguca

SEQ ID NO: 2452463 - RNA, 19 nt, Artificial Sequence
  Description of Artificial Sequence: Synthetic oligonucleotide
  Antisense strand to SEQ ID NO: 2452462
ugacuaagcuuucaagcgc

SEQ ID NO: 2452464 - RNA, 19 nt, Artificial Sequence
  Description of Artificial Sequence: Synthetic oligonucleotide
  Sense strand starting at position 3677 of SEQ ID NO: 1887158
cuugaaagcuuagucauua

SEQ ID NO: 2452465 - RNA, 19 nt, Artificial Sequence
  Description of Artificial Sequence: Synthetic oligonucleotide
  Antisense strand to SEQ ID NO: 2452464
uaaugacuaagcuuucaag

SEQ ID NO: 2452466 - RNA, 19 nt, Artificial Sequence
  Description of Artificial Sequence: Synthetic oligonucleotide
  Sense strand starting at position 3678 of SEQ ID NO: 1887158
uugaaagcuuagucauuac

SEQ ID NO: 2452467 - RNA, 19 nt, Artificial Sequence
  Description of Artificial Sequence: Synthetic oligonucleotide
  Antisense strand to SEQ ID NO: 2452466
guaaugacuaagcuuucaa

SEQ ID NO: 2452468 - RNA, 19 nt, Artificial Sequence
  Description of Artificial Sequence: Synthetic oligonucleotide
  Sense strand starting at position 3764 of SEQ ID NO: 1887158
gugagaagcuguuucagag

SEQ ID NO: 2452469 - RNA, 19 nt, Artificial Sequence
  Description of Artificial Sequence: Synthetic oligonucleotide
  Antisense strand to SEQ ID NO: 2452468
cucugaaacagcuucucac

SEQ ID NO: 2452470 - RNA, 19 nt, Artificial Sequence
  Description of Artificial Sequence: Synthetic oligonucleotide
  Sense strand starting at position 3832 of SEQ ID NO: 1887158
ugaggagucuugagaugag

SEQ ID NO: 2452471 - RNA, 19 nt, Artificial Sequence
  Description of Artificial Sequence: Synthetic oligonucleotide
  Antisense strand to SEQ ID NO: 2452470
cucaucucaagacuccuca

SEQ ID NO: 2452472 - RNA, 19 nt, Artificial Sequence
  Description of Artificial Sequence: Synthetic oligonucleotide
  Sense strand starting at position 3835 of SEQ ID NO: 1887158
ggagucuugagaugagacu

SEQ ID NO: 2452473 - RNA, 19 nt, Artificial Sequence
  Description of Artificial Sequence: Synthetic oligonucleotide
  Antisense strand to SEQ ID NO: 2452472
agucucaucucaagacucc

SEQ ID NO: 2452474 - RNA, 19 nt, Artificial Sequence
  Description of Artificial Sequence: Synthetic oligonucleotide
  Sense strand starting at position 118 of SEQ ID NO: 1887159
ucauacuuguacuuaguua

SEQ ID NO: 2452475 - RNA, 19 nt, Artificial Sequence
  Description of Artificial Sequence: Synthetic oligonucleotide
  Antisense strand to SEQ ID NO: 2452474
uaacuaaguacaaguauga

SEQ ID NO: 2452476 - RNA, 19 nt, Artificial Sequence
  Description of Artificial Sequence: Synthetic oligonucleotide
  Sense strand starting at position 132 of SEQ ID NO: 1887159
aguuaaauauguccugcuu

SEQ ID NO: 2452477 - RNA, 19 nt, Artificial Sequence
  Description of Artificial Sequence: Synthetic oligonucleotide
  Antisense strand to SEQ ID NO: 2452476
aagcaggacauauuuaacu

SEQ ID NO: 2452478 - RNA, 19 nt, Artificial Sequence
  Description of Artificial Sequence: Synthetic oligonucleotide
  Sense strand starting at position 234 of SEQ ID NO: 1887159
ccacccucgucucagauuu

SEQ ID NO: 2452479 - RNA, 19 nt, Artificial Sequence
  Description of Artificial Sequence: Synthetic oligonucleotide
  Antisense strand to SEQ ID NO: 2452478
aaaucugagacgagggugg

SEQ ID NO: 2452480 - RNA, 19 nt, Artificial Sequence
  Description of Artificial Sequence: Synthetic oligonucleotide
  Sense strand starting at position 256 of SEQ ID NO: 1887159
cauccaggacugcgagaau

SEQ ID NO: 2452481 - RNA, 19 nt, Artificial Sequence
  Description of Artificial Sequence: Synthetic oligonucleotide
  Antisense strand to SEQ ID NO: 2452480
auucucgcaguccuggaug

SEQ ID NO: 2452482 - RNA, 19 nt, Artificial Sequence
  Description of Artificial Sequence: Synthetic oligonucleotide
  Sense strand starting at position 430 of SEQ ID NO: 1887159
caauaauuacacuguggga

SEQ ID NO: 2452483 - RNA, 19 nt, Artificial Sequence
  Description of Artificial Sequence: Synthetic oligonucleotide
  Antisense strand to SEQ ID NO: 2452482
ucccacaguguaauuauug

SEQ ID NO: 2452484 - RNA, 19 nt, Artificial Sequence
  Description of Artificial Sequence: Synthetic oligonucleotide
  Sense strand starting at position 887 of SEQ ID NO: 1887159
cgagcugggugcagagaua

SEQ ID NO: 2452485 - RNA, 19 nt, Artificial Sequence
  Description of Artificial Sequence: Synthetic oligonucleotide
  Antisense strand to SEQ ID NO: 2452484
uaucucugcacccagcucg

SEQ ID NO: 2452486 - RNA, 19 nt, Artificial Sequence
  Description of Artificial Sequence: Synthetic oligonucleotide
  Sense strand starting at position 961 of SEQ ID NO: 1887159
gcaaguugaccggaaggga

SEQ ID NO: 2452487 - RNA, 19 nt, Artificial Sequence
  Description of Artificial Sequence: Synthetic oligonucleotide
  Antisense strand to SEQ ID NO: 2452486
ucccuuccggucaacuugc

SEQ ID NO: 2452488 - RNA, 19 nt, Artificial Sequence
  Description of Artificial Sequence: Synthetic oligonucleotide
  Sense strand starting at position 1027 of SEQ ID NO: 1887159
agugacacccugugauuau

SEQ ID NO: 2452489 - RNA, 19 nt, Artificial Sequence
  Description of Artificial Sequence: Synthetic oligonucleotide
  Antisense strand to SEQ ID NO: 2452488
auaaucacagggugucacu

SEQ ID NO: 2452490 - RNA, 19 nt, Artificial Sequence
  Description of Artificial Sequence: Synthetic oligonucleotide
  Sense strand starting at position 1193 of SEQ ID NO: 1887159
gggaaagccugauaaaucg

SEQ ID NO: 2452491 - RNA, 19 nt, Artificial Sequence
  Description of Artificial Sequence: Synthetic oligonucleotide
  Antisense strand to SEQ ID NO: 2452490
cgauuuaucaggcuuuccc

SEQ ID NO: 2452492 - RNA, 19 nt, Artificial Sequence
  Description of Artificial Sequence: Synthetic oligonucleotide
  Sense strand starting at position 1521 of SEQ ID NO: 1887159
cuuguucuuggcgaugaca

SEQ ID NO: 2452493 - RNA, 19 nt, Artificial Sequence
  Description of Artificial Sequence: Synthetic oligonucleotide
  Antisense strand to SEQ ID NO: 2452492
ugucaucgccaagaacaag

SEQ ID NO: 2452494 - RNA, 19 nt, Artificial Sequence
  Description of Artificial Sequence: Synthetic oligonucleotide
  Sense strand starting at position 1523 of SEQ ID NO: 1887159
uguucuuggcgaugacaua

SEQ ID NO: 2452495 - RNA, 19 nt, Artificial Sequence
  Description of Artificial Sequence: Synthetic oligonucleotide
  Antisense strand to SEQ ID NO: 2452494
uaugucaucgccaagaaca

SEQ ID NO: 2452496 - RNA, 19 nt, Artificial Sequence
  Description of Artificial Sequence: Synthetic oligonucleotide
  Sense strand starting at position 1546 of SEQ ID NO: 1887159
ucggucuuguagucgaaca

SEQ ID NO: 2452497 - RNA, 19 nt, Artificial Sequence
  Description of Artificial Sequence: Synthetic oligonucleotide
  Antisense strand to SEQ ID NO: 2452496
uguucgacuacaagaccga

SEQ ID NO: 2452498 - RNA, 19 nt, Artificial Sequence
  Description of Artificial Sequence: Synthetic oligonucleotide
  Sense strand starting at position 1777 of SEQ ID NO: 1887159
uauugacgcgguugagaaa

SEQ ID NO: 2452499 - RNA, 19 nt, Artificial Sequence
  Description of Artificial Sequence: Synthetic oligonucleotide
  Antisense strand to SEQ ID NO: 2452498
uuucucaaccgcgucaaua

SEQ ID NO: 2452500 - RNA, 19 nt, Artificial Sequence
  Description of Artificial Sequence: Synthetic oligonucleotide
  Sense strand starting at position 2185 of SEQ ID NO: 1887159
ggacuacaggcgugauaau

SEQ ID NO: 2452501 - RNA, 19 nt, Artificial Sequence
  Description of Artificial Sequence: Synthetic oligonucleotide
  Antisense strand to SEQ ID NO: 2452500
auuaucacgccuguagucc

SEQ ID NO: 2452502 - RNA, 19 nt, Artificial Sequence
  Description of Artificial Sequence: Synthetic oligonucleotide
  Sense strand starting at position 2186 of SEQ ID NO: 1887159
gacuacaggcgugauaauu

SEQ ID NO: 2452503 - RNA, 19 nt, Artificial Sequence
  Description of Artificial Sequence: Synthetic oligonucleotide
  Antisense strand to SEQ ID NO: 2452502
aauuaucacgccuguaguc

SEQ ID NO: 2452504 - RNA, 19 nt, Artificial Sequence
  Description of Artificial Sequence: Synthetic oligonucleotide
  Sense strand starting at position 2335 of SEQ ID NO: 1887159
cgggaagagcuccguuuaa

SEQ ID NO: 2452505 - RNA, 19 nt, Artificial Sequence
  Description of Artificial Sequence: Synthetic oligonucleotide
  Antisense strand to SEQ ID NO: 2452504
uuaaacggagcucuucccg

SEQ ID NO: 2452506 - RNA, 19 nt, Artificial Sequence
  Description of Artificial Sequence: Synthetic oligonucleotide
  Sense strand starting at position 2339 of SEQ ID NO: 1887159
aagagcuccguuuaaagca

SEQ ID NO: 2452507 - RNA, 19 nt, Artificial Sequence
  Description of Artificial Sequence: Synthetic oligonucleotide
  Antisense strand to SEQ ID NO: 2452506
ugcuuuaaacggagcucuu

SEQ ID NO: 2452508 - RNA, 19 nt, Artificial Sequence
  Description of Artificial Sequence: Synthetic oligonucleotide
  Sense strand starting at position 2385 of SEQ ID NO: 1887159
cccaaaggguucuuccuau

SEQ ID NO: 2452509 - RNA, 19 nt, Artificial Sequence
  Description of Artificial Sequence: Synthetic oligonucleotide
  Antisense strand to SEQ ID NO: 2452508
auaggaagaacccuuuggg

SEQ ID NO: 2452510 - RNA, 19 nt, Artificial Sequence
  Description of Artificial Sequence: Synthetic oligonucleotide
  Sense strand starting at position 2478 of SEQ ID NO: 1887159
gucuccugccagggagaua

SEQ ID NO: 2452511 - RNA, 19 nt, Artificial Sequence
  Description of Artificial Sequence: Synthetic oligonucleotide
  Antisense strand to SEQ ID NO: 2452510
uaucucccuggcaggagac

SEQ ID NO: 2452512 - RNA, 19 nt, Artificial Sequence
  Description of Artificial Sequence: Synthetic oligonucleotide
  Sense strand starting at position 2603 of SEQ ID NO: 1887159
cgacuaaugcgcguuucua

SEQ ID NO: 2452513 - RNA, 19 nt, Artificial Sequence
  Description of Artificial Sequence: Synthetic oligonucleotide
  Antisense strand to SEQ ID NO: 2452512
uagaaacgcgcauuagucg

SEQ ID NO: 2452514 - RNA, 19 nt, Artificial Sequence
  Description of Artificial Sequence: Synthetic oligonucleotide
  Sense strand starting at position 2604 of SEQ ID NO: 1887159
gacuaaugcgcguuucuac

SEQ ID NO: 2452515 - RNA, 19 nt, Artificial Sequence
  Description of Artificial Sequence: Synthetic oligonucleotide
  Antisense strand to SEQ ID NO: 2452514
guagaaacgcgcauuaguc

SEQ ID NO: 2452516 - RNA, 19 nt, Artificial Sequence
  Description of Artificial Sequence: Synthetic oligonucleotide
  Sense strand starting at position 2820 of SEQ ID NO: 1887159
uguaccaacuguuuggaau

SEQ ID NO: 2452517 - RNA, 19 nt, Artificial Sequence
  Description of Artificial Sequence: Synthetic oligonucleotide
  Antisense strand to SEQ ID NO: 2452516
auuccaaacaguugguaca

SEQ ID NO: 2452518 - RNA, 19 nt, Artificial Sequence
  Description of Artificial Sequence: Synthetic oligonucleotide
  Sense strand starting at position 3150 of SEQ ID NO: 1887159
ucaucagugugauucuaaa

SEQ ID NO: 2452519 - RNA, 19 nt, Artificial Sequence
  Description of Artificial Sequence: Synthetic oligonucleotide
  Antisense strand to SEQ ID NO: 2452518
uuuagaaucacacugauga

SEQ ID NO: 2452520 - RNA, 19 nt, Artificial Sequence
  Description of Artificial Sequence: Synthetic oligonucleotide
  Sense strand starting at position 3207 of SEQ ID NO: 1887159
ugggaaucauguggaagaa

SEQ ID NO: 2452521 - RNA, 19 nt, Artificial Sequence
  Description of Artificial Sequence: Synthetic oligonucleotide
  Antisense strand to SEQ ID NO: 2452520
uucuuccacaugauuccca

SEQ ID NO: 2452522 - RNA, 19 nt, Artificial Sequence
  Description of Artificial Sequence: Synthetic oligonucleotide
  Sense strand starting at position 3319 of SEQ ID NO: 1887159
uugggaaagcguggaucuu

SEQ ID NO: 2452523 - RNA, 19 nt, Artificial Sequence
  Description of Artificial Sequence: Synthetic oligonucleotide
  Antisense strand to SEQ ID NO: 2452522
aagauccacgcuuucccaa

SEQ ID NO: 2452524 - RNA, 19 nt, Artificial Sequence
  Description of Artificial Sequence: Synthetic oligonucleotide
  Sense strand starting at position 3320 of SEQ ID NO: 1887159
ugggaaagcguggaucuuu

SEQ ID NO: 2452525 - RNA, 19 nt, Artificial Sequence
  Description of Artificial Sequence: Synthetic oligonucleotide
  Antisense strand to SEQ ID NO: 2452524
aaagauccacgcuuuccca

SEQ ID NO: 2452526 - RNA, 19 nt, Artificial Sequence
  Description of Artificial Sequence: Synthetic oligonucleotide
  Sense strand starting at position 3474 of SEQ ID NO: 1887159
gucacuauccaguaggauc

SEQ ID NO: 2452527 - RNA, 19 nt, Artificial Sequence
  Description of Artificial Sequence: Synthetic oligonucleotide
  Antisense strand to SEQ ID NO: 2452526
gauccuacuggauagugac

SEQ ID NO: 2452528 - RNA, 19 nt, Artificial Sequence
  Description of Artificial Sequence: Synthetic oligonucleotide
  Sense strand starting at position 3485 of SEQ ID NO: 1887159
guaggaucucguugacuua

SEQ ID NO: 2452529 - RNA, 19 nt, Artificial Sequence
  Description of Artificial Sequence: Synthetic oligonucleotide
  Antisense strand to SEQ ID NO: 2452528
uaagucaacgagauccuac

SEQ ID NO: 2452530 - RNA, 19 nt, Artificial Sequence
  Description of Artificial Sequence: Synthetic oligonucleotide
  Sense strand starting at position 3506 of SEQ ID NO: 1887159
gacugugucccaugcuaag

SEQ ID NO: 2452531 - RNA, 19 nt, Artificial Sequence
  Description of Artificial Sequence: Synthetic oligonucleotide
  Antisense strand to SEQ ID NO: 2452530
cuuagcaugggacacaguc

SEQ ID NO: 2452532 - RNA, 19 nt, Artificial Sequence
  Description of Artificial Sequence: Synthetic oligonucleotide
  Sense strand starting at position 3547 of SEQ ID NO: 1887159
ggaccaugccuuuggacau

SEQ ID NO: 2452533 - RNA, 19 nt, Artificial Sequence
  Description of Artificial Sequence: Synthetic oligonucleotide
  Antisense strand to SEQ ID NO: 2452532
auguccaaaggcauggucc

SEQ ID NO: 2452534 - RNA, 19 nt, Artificial Sequence
  Description of Artificial Sequence: Synthetic oligonucleotide
  Sense strand starting at position 3578 of SEQ ID NO: 1887159
cugugccugccacauaaua

SEQ ID NO: 2452535 - RNA, 19 nt, Artificial Sequence
  Description of Artificial Sequence: Synthetic oligonucleotide
  Antisense strand to SEQ ID NO: 2452534
uauuauguggcaggcacag

SEQ ID NO: 2452536 - RNA, 19 nt, Artificial Sequence
  Description of Artificial Sequence: Synthetic oligonucleotide
  Sense strand starting at position 3586 of SEQ ID NO: 1887159
gccacauaauaguucuaga

SEQ ID NO: 2452537 - RNA, 19 nt, Artificial Sequence
  Description of Artificial Sequence: Synthetic oligonucleotide
  Antisense strand to SEQ ID NO: 2452536
ucuagaacuauuauguggc

SEQ ID NO: 2452538 - RNA, 19 nt, Artificial Sequence
  Description of Artificial Sequence: Synthetic oligonucleotide
  Sense strand starting at position 3684 of SEQ ID NO: 1887159
cccagucaugacugcgaau

SEQ ID NO: 2452539 - RNA, 19 nt, Artificial Sequence
  Description of Artificial Sequence: Synthetic oligonucleotide
  Antisense strand to SEQ ID NO: 2452538
auucgcagucaugacuggg

SEQ ID NO: 2452540 - RNA, 19 nt, Artificial Sequence
  Description of Artificial Sequence: Synthetic oligonucleotide
  Sense strand starting at position 3686 of SEQ ID NO: 1887159
cagucaugacugcgaauuu

SEQ ID NO: 2452541 - RNA, 19 nt, Artificial Sequence
  Description of Artificial Sequence: Synthetic oligonucleotide
  Antisense strand to SEQ ID NO: 2452540
aaauucgcagucaugacug

SEQ ID NO: 2452542 - RNA, 19 nt, Artificial Sequence
  Description of Artificial Sequence: Synthetic oligonucleotide
  Sense strand starting at position 3886 of SEQ ID NO: 1887159
acaggagucgccugaauug

SEQ ID NO: 2452543 - RNA, 19 nt, Artificial Sequence
  Description of Artificial Sequence: Synthetic oligonucleotide
  Antisense strand to SEQ ID NO: 2452542
caauucaggcgacuccugu

SEQ ID NO: 2452544 - RNA, 19 nt, Artificial Sequence
  Description of Artificial Sequence: Synthetic oligonucleotide
  Sense strand starting at position 3904 of SEQ ID NO: 1887159
gcaucugcccuggagaaga

SEQ ID NO: 2452545 - RNA, 19 nt, Artificial Sequence
  Description of Artificial Sequence: Synthetic oligonucleotide
  Antisense strand to SEQ ID NO: 2452544
ucuucuccagggcagaugc

SEQ ID NO: 2452546 - RNA, 19 nt, Artificial Sequence
  Description of Artificial Sequence: Synthetic oligonucleotide
  Sense strand starting at position 3914 of SEQ ID NO: 1887159
uggagaagagcuugcccau

SEQ ID NO: 2452547 - RNA, 19 nt, Artificial Sequence
  Description of Artificial Sequence: Synthetic oligonucleotide
  Antisense strand to SEQ ID NO: 2452546
augggcaagcucuucucca

SEQ ID NO: 2452548 - RNA, 19 nt, Artificial Sequence
  Description of Artificial Sequence: Synthetic oligonucleotide
  Sense strand starting at position 3917 of SEQ ID NO: 1887159
agaagagcuugcccaucaa

SEQ ID NO: 2452549 - RNA, 19 nt, Artificial Sequence
  Description of Artificial Sequence: Synthetic oligonucleotide
  Antisense strand to SEQ ID NO: 2452548
uugaugggcaagcucuucu

SEQ ID NO: 2452550 - RNA, 19 nt, Artificial Sequence
  Description of Artificial Sequence: Synthetic oligonucleotide
  Sense strand starting at position 3946 of SEQ ID NO: 1887159
ggacaacaugagugucaca

SEQ ID NO: 2452551 - RNA, 19 nt, Artificial Sequence
  Description of Artificial Sequence: Synthetic oligonucleotide
  Antisense strand to SEQ ID NO: 2452550
ugugacacucauguugucc

SEQ ID NO: 2452552 - RNA, 19 nt, Artificial Sequence
  Description of Artificial Sequence: Synthetic oligonucleotide
  Sense strand starting at position 3951 of SEQ ID NO: 1887159
acaugagugucacagagau

SEQ ID NO: 2452553 - RNA, 19 nt, Artificial Sequence
  Description of Artificial Sequence: Synthetic oligonucleotide
  Antisense strand to SEQ ID NO: 2452552
aucucugugacacucaugu

SEQ ID NO: 2452554 - RNA, 19 nt, Artificial Sequence
  Description of Artificial Sequence: Synthetic oligonucleotide
  Sense strand starting at position 142 of SEQ ID NO: 1887160
gauccuauuccagagcugu

SEQ ID NO: 2452555 - RNA, 19 nt, Artificial Sequence
  Description of Artificial Sequence: Synthetic oligonucleotide
  Antisense strand to SEQ ID NO: 2452554
acagcucuggaauaggauc

SEQ ID NO: 2452556 - RNA, 19 nt, Artificial Sequence
  Description of Artificial Sequence: Synthetic oligonucleotide
  Sense strand starting at position 489 of SEQ ID NO: 1887160
gauucuuauugauggguuu

SEQ ID NO: 2452557 - RNA, 19 nt, Artificial Sequence
  Description of Artificial Sequence: Synthetic oligonucleotide
  Antisense strand to SEQ ID NO: 2452556
aaacccaucaauaagaauc

SEQ ID NO: 2452558 - RNA, 19 nt, Artificial Sequence
  Description of Artificial Sequence: Synthetic oligonucleotide
  Sense strand starting at position 490 of SEQ ID NO: 1887160
auucuuauugauggguuua

SEQ ID NO: 2452559 - RNA, 19 nt, Artificial Sequence
  Description of Artificial Sequence: Synthetic oligonucleotide
  Antisense strand to SEQ ID NO: 2452558
uaaacccaucaauaagaau

SEQ ID NO: 2452560 - RNA, 19 nt, Artificial Sequence
  Description of Artificial Sequence: Synthetic oligonucleotide
  Sense strand starting at position 492 of SEQ ID NO: 1887160
ucuuauugauggguuuauu

SEQ ID NO: 2452561 - RNA, 19 nt, Artificial Sequence
  Description of Artificial Sequence: Synthetic oligonucleotide
  Antisense strand to SEQ ID NO: 2452560
aauaaacccaucaauaaga

SEQ ID NO: 2452562 - RNA, 19 nt, Artificial Sequence
  Description of Artificial Sequence: Synthetic oligonucleotide
  Sense strand starting at position 503 of SEQ ID NO: 1887160
gguuuauugcuuucugccu

SEQ ID NO: 2452563 - RNA, 19 nt, Artificial Sequence
  Description of Artificial Sequence: Synthetic oligonucleotide
  Antisense strand to SEQ ID NO: 2452562
aggcagaaagcaauaaacc

SEQ ID NO: 2452564 - RNA, 19 nt, Artificial Sequence
  Description of Artificial Sequence: Synthetic oligonucleotide
  Sense strand starting at position 613 of SEQ ID NO: 1887160
cgcagugcugauggagaau

SEQ ID NO: 2452565 - RNA, 19 nt, Artificial Sequence
  Description of Artificial Sequence: Synthetic oligonucleotide
  Antisense strand to SEQ ID NO: 2452564
auucuccaucagcacugcg

SEQ ID NO: 2452566 - RNA, 19 nt, Artificial Sequence
  Description of Artificial Sequence: Synthetic oligonucleotide
  Sense strand starting at position 682 of SEQ ID NO: 1887160
gggccugucucagagacuu

SEQ ID NO: 2452567 - RNA, 19 nt, Artificial Sequence
  Description of Artificial Sequence: Synthetic oligonucleotide
  Antisense strand to SEQ ID NO: 2452566
aagucucugagacaggccc

SEQ ID NO: 2452568 - RNA, 19 nt, Artificial Sequence
  Description of Artificial Sequence: Synthetic oligonucleotide
  Sense strand starting at position 899 of SEQ ID NO: 1887160
ggacgagaucagugucccu

SEQ ID NO: 2452569 - RNA, 19 nt, Artificial Sequence
  Description of Artificial Sequence: Synthetic oligonucleotide
  Antisense strand to SEQ ID NO: 2452568
agggacacugaucucgucc

SEQ ID NO: 2452570 - RNA, 19 nt, Artificial Sequence
  Description of Artificial Sequence: Synthetic oligonucleotide
  Sense strand starting at position 1075 of SEQ ID NO: 1887160
gcacaugcugccggaaagu

SEQ ID NO: 2452571 - RNA, 19 nt, Artificial Sequence
  Description of Artificial Sequence: Synthetic oligonucleotide
  Antisense strand to SEQ ID NO: 2452570
acuuuccggcagcaugugc

SEQ ID NO: 2452572 - RNA, 19 nt, Artificial Sequence
  Description of Artificial Sequence: Synthetic oligonucleotide
  Sense strand starting at position 1085 of SEQ ID NO: 1887160
ccggaaaguucuggaagga

SEQ ID NO: 2452573 - RNA, 19 nt, Artificial Sequence
  Description of Artificial Sequence: Synthetic oligonucleotide
  Antisense strand to SEQ ID NO: 2452572
uccuuccagaacuuuccgg

SEQ ID NO: 2452574 - RNA, 19 nt, Artificial Sequence
  Description of Artificial Sequence: Synthetic oligonucleotide
  Sense strand starting at position 1241 of SEQ ID NO: 1887160
ccgagcuucaggcgugaga

SEQ ID NO: 2452575 - RNA, 19 nt, Artificial Sequence
  Description of Artificial Sequence: Synthetic oligonucleotide
  Antisense strand to SEQ ID NO: 2452574
ucucacgccugaagcucgg

SEQ ID NO: 2452576 - RNA, 19 nt, Artificial Sequence
  Description of Artificial Sequence: Synthetic oligonucleotide
  Sense strand starting at position 1243 of SEQ ID NO: 1887160
gagcuucaggcgugagagu

SEQ ID NO: 2452577 - RNA, 19 nt, Artificial Sequence
  Description of Artificial Sequence: Synthetic oligonucleotide
  Antisense strand to SEQ ID NO: 2452576
acucucacgccugaagcuc

SEQ ID NO: 2452578 - RNA, 19 nt, Artificial Sequence
  Description of Artificial Sequence: Synthetic oligonucleotide
  Sense strand starting at position 1250 of SEQ ID NO: 1887160
aggcgugagagugaucaga

SEQ ID NO: 2452579 - RNA, 19 nt, Artificial Sequence
  Description of Artificial Sequence: Synthetic oligonucleotide
  Antisense strand to SEQ ID NO: 2452578
ucugaucacucucacgccu

SEQ ID NO: 2452580 - RNA, 19 nt, Artificial Sequence
  Description of Artificial Sequence: Synthetic oligonucleotide
  Sense strand starting at position 1252 of SEQ ID NO: 1887160
gcgugagagugaucagaaa

SEQ ID NO: 2452581 - RNA, 19 nt, Artificial Sequence
  Description of Artificial Sequence: Synthetic oligonucleotide
  Antisense strand to SEQ ID NO: 2452580
uuucugaucacucucacgc

SEQ ID NO: 2452582 - RNA, 19 nt, Artificial Sequence
  Description of Artificial Sequence: Synthetic oligonucleotide
  Sense strand starting at position 1572 of SEQ ID NO: 1887160
agaugccauccauguggaa

SEQ ID NO: 2452583 - RNA, 19 nt, Artificial Sequence
  Description of Artificial Sequence: Synthetic oligonucleotide
  Antisense strand to SEQ ID NO: 2452582
uuccacauggauggcaucu

SEQ ID NO: 2452584 - RNA, 19 nt, Artificial Sequence
  Description of Artificial Sequence: Synthetic oligonucleotide
  Sense strand starting at position 1872 of SEQ ID NO: 1887160
ggaaguggcugccaggaaa

SEQ ID NO: 2452585 - RNA, 19 nt, Artificial Sequence
  Description of Artificial Sequence: Synthetic oligonucleotide
  Antisense strand to SEQ ID NO: 2452584
uuuccuggcagccacuucc

SEQ ID NO: 2452586 - RNA, 19 nt, Artificial Sequence
  Description of Artificial Sequence: Synthetic oligonucleotide
  Sense strand starting at position 2009 of SEQ ID NO: 1887160
gcugauuaggcgucucagu

SEQ ID NO: 2452587 - RNA, 19 nt, Artificial Sequence
  Description of Artificial Sequence: Synthetic oligonucleotide
  Antisense strand to SEQ ID NO: 2452586
acugagacgccuaaucagc

SEQ ID NO: 2452588 - RNA, 19 nt, Artificial Sequence
  Description of Artificial Sequence: Synthetic oligonucleotide
  Sense strand starting at position 2026 of SEQ ID NO: 1887160
gugccacccuaaugagauu

SEQ ID NO: 2452589 - RNA, 19 nt, Artificial Sequence
  Description of Artificial Sequence: Synthetic oligonucleotide
  Antisense strand to SEQ ID NO: 2452588
aaucucauuaggguggcac

SEQ ID NO: 2452590 - RNA, 19 nt, Artificial Sequence
  Description of Artificial Sequence: Synthetic oligonucleotide
  Sense strand starting at position 2158 of SEQ ID NO: 1887160
agagaagugugacccugaa

SEQ ID NO: 2452591 - RNA, 19 nt, Artificial Sequence
  Description of Artificial Sequence: Synthetic oligonucleotide
  Antisense strand to SEQ ID NO: 2452590
uucagggucacacuucucu

SEQ ID NO: 2452592 - RNA, 19 nt, Artificial Sequence
  Description of Artificial Sequence: Synthetic oligonucleotide
  Sense strand starting at position 2196 of SEQ ID NO: 1887160
gcccaucuuccagauggaa

SEQ ID NO: 2452593 - RNA, 19 nt, Artificial Sequence
  Description of Artificial Sequence: Synthetic oligonucleotide
  Antisense strand to SEQ ID NO: 2452592
uuccaucuggaagaugggc

SEQ ID NO: 2452594 - RNA, 19 nt, Artificial Sequence
  Description of Artificial Sequence: Synthetic oligonucleotide
  Sense strand starting at position 2452 of SEQ ID NO: 1887160
ggacaauguugaguuccuu

SEQ ID NO: 2452595 - RNA, 19 nt, Artificial Sequence
  Description of Artificial Sequence: Synthetic oligonucleotide
  Antisense strand to SEQ ID NO: 2452594
aaggaacucaacauugucc

SEQ ID NO: 2452596 - RNA, 19 nt, Artificial Sequence
  Description of Artificial Sequence: Synthetic oligonucleotide
  Sense strand starting at position 2924 of SEQ ID NO: 1887160
ccuugcuauuuauggcaaa

SEQ ID NO: 2452597 - RNA, 19 nt, Artificial Sequence
  Description of Artificial Sequence: Synthetic oligonucleotide
  Antisense strand to SEQ ID NO: 2452596
uuugccauaaauagcaagg

SEQ ID NO: 2452598 - RNA, 19 nt, Artificial Sequence
  Description of Artificial Sequence: Synthetic oligonucleotide
  Sense strand starting at position 3489 of SEQ ID NO: 1887160
ugcaguggcucacuucuua

SEQ ID NO: 2452599 - RNA, 19 nt, Artificial Sequence
  Description of Artificial Sequence: Synthetic oligonucleotide
  Antisense strand to SEQ ID NO: 2452598
uaagaagugagccacugca

SEQ ID NO: 2452600 - RNA, 19 nt, Artificial Sequence
  Description of Artificial Sequence: Synthetic oligonucleotide
  Sense strand starting at position 1 of SEQ ID NO: 1887161
ggacguagaagucaucuga

SEQ ID NO: 2452601 - RNA, 19 nt, Artificial Sequence
  Description of Artificial Sequence: Synthetic oligonucleotide
  Antisense strand to SEQ ID NO: 2452600
ucagaugacuucuacgucc

SEQ ID NO: 2452602 - RNA, 19 nt, Artificial Sequence
  Description of Artificial Sequence: Synthetic oligonucleotide
  Sense strand starting at position 20 of SEQ ID NO: 1887161
cuucgucacccagagauga

SEQ ID NO: 2452603 - RNA, 19 nt, Artificial Sequence
  Description of Artificial Sequence: Synthetic oligonucleotide
  Antisense strand to SEQ ID NO: 2452602
ucaucucugggugacgaag

SEQ ID NO: 2452604 - RNA, 19 nt, Artificial Sequence
  Description of Artificial Sequence: Synthetic oligonucleotide
  Sense strand starting at position 30 of SEQ ID NO: 1887161
cagagaugagcaggucuuu

SEQ ID NO: 2452605 - RNA, 19 nt, Artificial Sequence
  Description of Artificial Sequence: Synthetic oligonucleotide
  Antisense strand to SEQ ID NO: 2452604
aaagaccugcucaucucug

SEQ ID NO: 2452606 - RNA, 19 nt, Artificial Sequence
  Description of Artificial Sequence: Synthetic oligonucleotide
  Sense strand starting at position 117 of SEQ ID NO: 1887161
uggguucaccaacgugaaa

SEQ ID NO: 2452607 - RNA, 19 nt, Artificial Sequence
  Description of Artificial Sequence: Synthetic oligonucleotide
  Antisense strand to SEQ ID NO: 2452606
uuucacguuggugaaccca

SEQ ID NO: 2452608 - RNA, 19 nt, Artificial Sequence
  Description of Artificial Sequence: Synthetic oligonucleotide
  Sense strand starting at position 154 of SEQ ID NO: 1887161
gcgccauccugcccugauu

SEQ ID NO: 2452609 - RNA, 19 nt, Artificial Sequence
  Description of Artificial Sequence: Synthetic oligonucleotide
  Antisense strand to SEQ ID NO: 2452608
aaucagggcaggauggcgc

SEQ ID NO: 2452610 - RNA, 19 nt, Artificial Sequence
  Description of Artificial Sequence: Synthetic oligonucleotide
  Sense strand starting at position 288 of SEQ ID NO: 1887161
cccagaucucuguacuaga

SEQ ID NO: 2452611 - RNA, 19 nt, Artificial Sequence
  Description of Artificial Sequence: Synthetic oligonucleotide
  Antisense strand to SEQ ID NO: 2452610
ucuaguacagagaucuggg

SEQ ID NO: 2452612 - RNA, 19 nt, Artificial Sequence
  Description of Artificial Sequence: Synthetic oligonucleotide
  Sense strand starting at position 291 of SEQ ID NO: 1887161
agaucucuguacuagaugu

SEQ ID NO: 2452613 - RNA, 19 nt, Artificial Sequence
  Description of Artificial Sequence: Synthetic oligonucleotide
  Antisense strand to SEQ ID NO: 2452612
acaucuaguacagagaucu

SEQ ID NO: 2452614 - RNA, 19 nt, Artificial Sequence
  Description of Artificial Sequence: Synthetic oligonucleotide
  Sense strand starting at position 325 of SEQ ID NO: 1887161
caaaucucacccgaggagu

SEQ ID NO: 2452615 - RNA, 19 nt, Artificial Sequence
  Description of Artificial Sequence: Synthetic oligonucleotide
  Antisense strand to SEQ ID NO: 2452614
acuccucgggugagauuug

SEQ ID NO: 2452616 - RNA, 19 nt, Artificial Sequence
  Description of Artificial Sequence: Synthetic oligonucleotide
  Sense strand starting at position 418 of SEQ ID NO: 1887161
gaucaaguguaagacucaa

SEQ ID NO: 2452617 - RNA, 19 nt, Artificial Sequence
  Description of Artificial Sequence: Synthetic oligonucleotide
  Antisense strand to SEQ ID NO: 2452616
uugagucuuacacuugauc

SEQ ID NO: 2452618 - RNA, 19 nt, Artificial Sequence
  Description of Artificial Sequence: Synthetic oligonucleotide
  Sense strand starting at position 1119 of SEQ ID NO: 1887161
gucagcauguucuuggcaa

SEQ ID NO: 2452619 - RNA, 19 nt, Artificial Sequence
  Description of Artificial Sequence: Synthetic oligonucleotide
  Antisense strand to SEQ ID NO: 2452618
uugccaagaacaugcugac

SEQ ID NO: 2452620 - RNA, 19 nt, Artificial Sequence
  Description of Artificial Sequence: Synthetic oligonucleotide
  Sense strand starting at position 1121 of SEQ ID NO: 1887161
cagcauguucuuggcaaau

SEQ ID NO: 2452621 - RNA, 19 nt, Artificial Sequence
  Description of Artificial Sequence: Synthetic oligonucleotide
  Antisense strand to SEQ ID NO: 2452620
auuugccaagaacaugcug

SEQ ID NO: 2452622 - RNA, 19 nt, Artificial Sequence
  Description of Artificial Sequence: Synthetic oligonucleotide
  Sense strand starting at position 1226 of SEQ ID NO: 1887161
ggcccuuugaaauguguaa

SEQ ID NO: 2452623 - RNA, 19 nt, Artificial Sequence
  Description of Artificial Sequence: Synthetic oligonucleotide
  Antisense strand to SEQ ID NO: 2452622
uuacacauuucaaagggcc

SEQ ID NO: 2452624 - RNA, 19 nt, Artificial Sequence
  Description of Artificial Sequence: Synthetic oligonucleotide
  Sense strand starting at position 1272 of SEQ ID NO: 1887161
augccugaguguuacuaag

SEQ ID NO: 2452625 - RNA, 19 nt, Artificial Sequence
  Description of Artificial Sequence: Synthetic oligonucleotide
  Antisense strand to SEQ ID NO: 2452624
cuuaguaacacucaggcau

SEQ ID NO: 2452626 - RNA, 19 nt, Artificial Sequence
  Description of Artificial Sequence: Synthetic oligonucleotide
  Sense strand starting at position 1274 of SEQ ID NO: 1887161
gccugaguguuacuaagga

SEQ ID NO: 2452627 - RNA, 19 nt, Artificial Sequence
  Description of Artificial Sequence: Synthetic oligonucleotide
  Antisense strand to SEQ ID NO: 2452626
uccuuaguaacacucaggc

SEQ ID NO: 2452628 - RNA, 19 nt, Artificial Sequence
  Description of Artificial Sequence: Synthetic oligonucleotide
  Sense strand starting at position 1316 of SEQ ID NO: 1887161
ggaugugagaaacgcucua

SEQ ID NO: 2452629 - RNA, 19 nt, Artificial Sequence
  Description of Artificial Sequence: Synthetic oligonucleotide
  Antisense strand to SEQ ID NO: 2452628
uagagcguuucucacaucc

SEQ ID NO: 2452630 - RNA, 19 nt, Artificial Sequence
  Description of Artificial Sequence: Synthetic oligonucleotide
  Sense strand starting at position 1321 of SEQ ID NO: 1887161
ugagaaacgcucuauacac

SEQ ID NO: 2452631 - RNA, 19 nt, Artificial Sequence
  Description of Artificial Sequence: Synthetic oligonucleotide
  Antisense strand to SEQ ID NO: 2452630
guguauagagcguuucuca

SEQ ID NO: 2452632 - RNA, 19 nt, Artificial Sequence
  Description of Artificial Sequence: Synthetic oligonucleotide
  Sense strand starting at position 1395 of SEQ ID NO: 1887161
cucugaacucuccgacacu

SEQ ID NO: 2452633 - RNA, 19 nt, Artificial Sequence
  Description of Artificial Sequence: Synthetic oligonucleotide
  Antisense strand to SEQ ID NO: 2452632
agugucggagaguucagag

SEQ ID NO: 2452634 - RNA, 19 nt, Artificial Sequence
  Description of Artificial Sequence: Synthetic oligonucleotide
  Sense strand starting at position 1426 of SEQ ID NO: 1887161
ccgaaaccaugauauaaac

SEQ ID NO: 2452635 - RNA, 19 nt, Artificial Sequence
  Description of Artificial Sequence: Synthetic oligonucleotide
  Antisense strand to SEQ ID NO: 2452634
guuuauaucaugguuucgg

SEQ ID NO: 2452636 - RNA, 19 nt, Artificial Sequence
  Description of Artificial Sequence: Synthetic oligonucleotide
  Sense strand starting at position 1988 of SEQ ID NO: 1887161
gcgcgaacuuuauugacaa

SEQ ID NO: 2452637 - RNA, 19 nt, Artificial Sequence
  Description of Artificial Sequence: Synthetic oligonucleotide
  Antisense strand to SEQ ID NO: 2452636
uugucaauaaaguucgcgc

SEQ ID NO: 2452638 - RNA, 19 nt, Artificial Sequence
  Description of Artificial Sequence: Synthetic oligonucleotide
  Sense strand starting at position 2183 of SEQ ID NO: 1887161
gccugcauuccugcaguca

SEQ ID NO: 2452639 - RNA, 19 nt, Artificial Sequence
  Description of Artificial Sequence: Synthetic oligonucleotide
  Antisense strand to SEQ ID NO: 2452638
ugacugcaggaaugcaggc

SEQ ID NO: 2452640 - RNA, 19 nt, Artificial Sequence
  Description of Artificial Sequence: Synthetic oligonucleotide
  Sense strand starting at position 2561 of SEQ ID NO: 1887161
aaguguugccauuacagac

SEQ ID NO: 2452641 - RNA, 19 nt, Artificial Sequence
  Description of Artificial Sequence: Synthetic oligonucleotide
  Antisense strand to SEQ ID NO: 2452640
gucuguaauggcaacacuu

SEQ ID NO: 2452642 - RNA, 19 nt, Artificial Sequence
  Description of Artificial Sequence: Synthetic oligonucleotide
  Sense strand starting at position 2597 of SEQ ID NO: 1887161
accacuggcugucaagauu

SEQ ID NO: 2452643 - RNA, 19 nt, Artificial Sequence
  Description of Artificial Sequence: Synthetic oligonucleotide
  Antisense strand to SEQ ID NO: 2452642
aaucuugacagccaguggu

SEQ ID NO: 2452644 - RNA, 19 nt, Artificial Sequence
  Description of Artificial Sequence: Synthetic oligonucleotide
  Sense strand starting at position 2935 of SEQ ID NO: 1887161
acuucucacugauaaguga

SEQ ID NO: 2452645 - RNA, 19 nt, Artificial Sequence
  Description of Artificial Sequence: Synthetic oligonucleotide
  Antisense strand to SEQ ID NO: 2452644
ucacuuaucagugagaagu

SEQ ID NO: 2452646 - RNA, 19 nt, Artificial Sequence
  Description of Artificial Sequence: Synthetic oligonucleotide
  Sense strand starting at position 2942 of SEQ ID NO: 1887161
acugauaagugagggaauu

SEQ ID NO: 2452647 - RNA, 19 nt, Artificial Sequence
  Description of Artificial Sequence: Synthetic oligonucleotide
  Antisense strand to SEQ ID NO: 2452646
aauucccucacuuaucagu

SEQ ID NO: 2452648 - RNA, 19 nt, Artificial Sequence
  Description of Artificial Sequence: Synthetic oligonucleotide
  Sense strand starting at position 2955 of SEQ ID NO: 1887161
ggaauuacuguuugaggcu

SEQ ID NO: 2452649 - RNA, 19 nt, Artificial Sequence
  Description of Artificial Sequence: Synthetic oligonucleotide
  Antisense strand to SEQ ID NO: 2452648
agccucaaacaguaauucc

SEQ ID NO: 2452650 - RNA, 19 nt, Artificial Sequence
  Description of Artificial Sequence: Synthetic oligonucleotide
  Sense strand starting at position 2972 of SEQ ID NO: 1887161
cucuaauugauaggguguu

SEQ ID NO: 2452651 - RNA, 19 nt, Artificial Sequence
  Description of Artificial Sequence: Synthetic oligonucleotide
  Antisense strand to SEQ ID NO: 2452650
aacacccuaucaauuagag

SEQ ID NO: 2452652 - RNA, 19 nt, Artificial Sequence
  Description of Artificial Sequence: Synthetic oligonucleotide
  Sense strand starting at position 2982 of SEQ ID NO: 1887161
uaggguguucuuuagacuu

SEQ ID NO: 2452653 - RNA, 19 nt, Artificial Sequence
  Description of Artificial Sequence: Synthetic oligonucleotide
  Antisense strand to SEQ ID NO: 2452652
aagucuaaagaacacccua

SEQ ID NO: 2452654 - RNA, 19 nt, Artificial Sequence
  Description of Artificial Sequence: Synthetic oligonucleotide
  Sense strand starting at position 3061 of SEQ ID NO: 1887161
ccugguuaacgcugacuca

SEQ ID NO: 2452655 - RNA, 19 nt, Artificial Sequence
  Description of Artificial Sequence: Synthetic oligonucleotide
  Antisense strand to SEQ ID NO: 2452654
ugagucagcguuaaccagg

SEQ ID NO: 2452656 - RNA, 19 nt, Artificial Sequence
  Description of Artificial Sequence: Synthetic oligonucleotide
  Sense strand starting at position 3064 of SEQ ID NO: 1887161
gguuaacgcugacucacua

SEQ ID NO: 2452657 - RNA, 19 nt, Artificial Sequence
  Description of Artificial Sequence: Synthetic oligonucleotide
  Antisense strand to SEQ ID NO: 2452656
uagugagucagcguuaacc

SEQ ID NO: 2452658 - RNA, 19 nt, Artificial Sequence
  Description of Artificial Sequence: Synthetic oligonucleotide
  Sense strand starting at position 3182 of SEQ ID NO: 1887161
uaagcaaaucugugugaga

SEQ ID NO: 2452659 - RNA, 19 nt, Artificial Sequence
  Description of Artificial Sequence: Synthetic oligonucleotide
  Antisense strand to SEQ ID NO: 2452658
ucucacacagauuugcuua

SEQ ID NO: 2452660 - RNA, 19 nt, Artificial Sequence
  Description of Artificial Sequence: Synthetic oligonucleotide
  Sense strand starting at position 3183 of SEQ ID NO: 1887161
aagcaaaucugugugagau

SEQ ID NO: 2452661 - RNA, 19 nt, Artificial Sequence
  Description of Artificial Sequence: Synthetic oligonucleotide
  Antisense strand to SEQ ID NO: 2452660
aucucacacagauuugcuu

SEQ ID NO: 2452662 - RNA, 19 nt, Artificial Sequence
  Description of Artificial Sequence: Synthetic oligonucleotide
  Sense strand starting at position 3184 of SEQ ID NO: 1887161
agcaaaucugugugagaug

SEQ ID NO: 2452663 - RNA, 19 nt, Artificial Sequence
  Description of Artificial Sequence: Synthetic oligonucleotide
  Antisense strand to SEQ ID NO: 2452662
caucucacacagauuugcu

SEQ ID NO: 2452664 - RNA, 19 nt, Artificial Sequence
  Description of Artificial Sequence: Synthetic oligonucleotide
  Sense strand starting at position 3185 of SEQ ID NO: 1887161
gcaaaucugugugagauga

SEQ ID NO: 2452665 - RNA, 19 nt, Artificial Sequence
  Description of Artificial Sequence: Synthetic oligonucleotide
  Antisense strand to SEQ ID NO: 2452664
ucaucucacacagauuugc

SEQ ID NO: 2452666 - RNA, 19 nt, Artificial Sequence
  Description of Artificial Sequence: Synthetic oligonucleotide
  Sense strand starting at position 3187 of SEQ ID NO: 1887161
aaaucugugugagaugaac

SEQ ID NO: 2452667 - RNA, 19 nt, Artificial Sequence
  Description of Artificial Sequence: Synthetic oligonucleotide
  Antisense strand to SEQ ID NO: 2452666
guucaucucacacagauuu

SEQ ID NO: 2452668 - RNA, 19 nt, Artificial Sequence
  Description of Artificial Sequence: Synthetic oligonucleotide
  Sense strand starting at position 3193 of SEQ ID NO: 1887161
gugugagaugaacagucuu

SEQ ID NO: 2452669 - RNA, 19 nt, Artificial Sequence
  Description of Artificial Sequence: Synthetic oligonucleotide
  Antisense strand to SEQ ID NO: 2452668
aagacuguucaucucacac

SEQ ID NO: 2452670 - RNA, 19 nt, Artificial Sequence
  Description of Artificial Sequence: Synthetic oligonucleotide
  Sense strand starting at position 3218 of SEQ ID NO: 1887161
uccugauaugcccaaguac

SEQ ID NO: 2452671 - RNA, 19 nt, Artificial Sequence
  Description of Artificial Sequence: Synthetic oligonucleotide
  Antisense strand to SEQ ID NO: 2452670
guacuugggcauaucagga

SEQ ID NO: 2452672 - RNA, 19 nt, Artificial Sequence
  Description of Artificial Sequence: Synthetic oligonucleotide
  Sense strand starting at position 3682 of SEQ ID NO: 1887161
agaggugaucucugaucug

SEQ ID NO: 2452673 - RNA, 19 nt, Artificial Sequence
  Description of Artificial Sequence: Synthetic oligonucleotide
  Antisense strand to SEQ ID NO: 2452672
cagaucagagaucaccucu

SEQ ID NO: 2452674 - RNA, 19 nt, Artificial Sequence
  Description of Artificial Sequence: Synthetic oligonucleotide
  Sense strand starting at position 3685 of SEQ ID NO: 1887161
ggugaucucugaucuguaa

SEQ ID NO: 2452675 - RNA, 19 nt, Artificial Sequence
  Description of Artificial Sequence: Synthetic oligonucleotide
  Antisense strand to SEQ ID NO: 2452674
uuacagaucagagaucacc

SEQ ID NO: 2452676 - RNA, 19 nt, Artificial Sequence
  Description of Artificial Sequence: Synthetic oligonucleotide
  Sense strand starting at position 3689 of SEQ ID NO: 1887161
aucucugaucuguaauaug

SEQ ID NO: 2452677 - RNA, 19 nt, Artificial Sequence
  Description of Artificial Sequence: Synthetic oligonucleotide
  Antisense strand to SEQ ID NO: 2452676
cauauuacagaucagagau

SEQ ID NO: 2452678 - RNA, 19 nt, Artificial Sequence
  Description of Artificial Sequence: Synthetic oligonucleotide
  Sense strand starting at position 3777 of SEQ ID NO: 1887161
ugccguguugugagguuaa

SEQ ID NO: 2452679 - RNA, 19 nt, Artificial Sequence
  Description of Artificial Sequence: Synthetic oligonucleotide
  Antisense strand to SEQ ID NO: 2452678
uuaaccucacaacacggca

SEQ ID NO: 2452680 - RNA, 19 nt, Artificial Sequence
  Description of Artificial Sequence: Synthetic oligonucleotide
  Sense strand starting at position 53 of SEQ ID NO: 1887162
gaggucuacuucucagauu

SEQ ID NO: 2452681 - RNA, 19 nt, Artificial Sequence
  Description of Artificial Sequence: Synthetic oligonucleotide
  Antisense strand to SEQ ID NO: 2452680
aaucugagaaguagaccuc

SEQ ID NO: 2452682 - RNA, 19 nt, Artificial Sequence
  Description of Artificial Sequence: Synthetic oligonucleotide
  Sense strand starting at position 237 of SEQ ID NO: 1887162
cuuggugggaucugaauuc

SEQ ID NO: 2452683 - RNA, 19 nt, Artificial Sequence
  Description of Artificial Sequence: Synthetic oligonucleotide
  Antisense strand to SEQ ID NO: 2452682
gaauucagaucccaccaag

SEQ ID NO: 2452684 - RNA, 19 nt, Artificial Sequence
  Description of Artificial Sequence: Synthetic oligonucleotide
  Sense strand starting at position 506 of SEQ ID NO: 1887162
cucauaggcuugucaugag

SEQ ID NO: 2452685 - RNA, 19 nt, Artificial Sequence
  Description of Artificial Sequence: Synthetic oligonucleotide
  Antisense strand to SEQ ID NO: 2452684
cucaugacaagccuaugag

SEQ ID NO: 2452686 - RNA, 19 nt, Artificial Sequence
  Description of Artificial Sequence: Synthetic oligonucleotide
  Sense strand starting at position 510 of SEQ ID NO: 1887162
uaggcuugucaugagacua

SEQ ID NO: 2452687 - RNA, 19 nt, Artificial Sequence
  Description of Artificial Sequence: Synthetic oligonucleotide
  Antisense strand to SEQ ID NO: 2452686
uagucucaugacaagccua

SEQ ID NO: 2452688 - RNA, 19 nt, Artificial Sequence
  Description of Artificial Sequence: Synthetic oligonucleotide
  Sense strand starting at position 522 of SEQ ID NO: 1887162
gagacuaaaugagaugaua

SEQ ID NO: 2452689 - RNA, 19 nt, Artificial Sequence
  Description of Artificial Sequence: Synthetic oligonucleotide
  Antisense strand to SEQ ID NO: 2452688
uaucaucucauuuagucuc

SEQ ID NO: 2452690 - RNA, 19 nt, Artificial Sequence
  Description of Artificial Sequence: Synthetic oligonucleotide
  Sense strand starting at position 1254 of SEQ ID NO: 1887162
auuuguguauaggaagaga

SEQ ID NO: 2452691 - RNA, 19 nt, Artificial Sequence
  Description of Artificial Sequence: Synthetic oligonucleotide
  Antisense strand to SEQ ID NO: 2452690
ucucuuccuauacacaaau

SEQ ID NO: 2452692 - RNA, 19 nt, Artificial Sequence
  Description of Artificial Sequence: Synthetic oligonucleotide
  Sense strand starting at position 1309 of SEQ ID NO: 1887162
aggaaagugaugggcagau

SEQ ID NO: 2452693 - RNA, 19 nt, Artificial Sequence
  Description of Artificial Sequence: Synthetic oligonucleotide
  Antisense strand to SEQ ID NO: 2452692
aucugcccaucacuuuccu

SEQ ID NO: 2452694 - RNA, 19 nt, Artificial Sequence
  Description of Artificial Sequence: Synthetic oligonucleotide
  Sense strand starting at position 1321 of SEQ ID NO: 1887162
ggcagaugaugucccagaa

SEQ ID NO: 2452695 - RNA, 19 nt, Artificial Sequence
  Description of Artificial Sequence: Synthetic oligonucleotide
  Antisense strand to SEQ ID NO: 2452694
uucugggacaucaucugcc

SEQ ID NO: 2452696 - RNA, 19 nt, Artificial Sequence
  Description of Artificial Sequence: Synthetic oligonucleotide
  Sense strand starting at position 1482 of SEQ ID NO: 1887162
ccucuaaaugcuggugaga

SEQ ID NO: 2452697 - RNA, 19 nt, Artificial Sequence
  Description of Artificial Sequence: Synthetic oligonucleotide
  Antisense strand to SEQ ID NO: 2452696
ucucaccagcauuuagagg

SEQ ID NO: 2452698 - RNA, 19 nt, Artificial Sequence
  Description of Artificial Sequence: Synthetic oligonucleotide
  Sense strand starting at position 1485 of SEQ ID NO: 1887162
cuaaaugcuggugagaauc

SEQ ID NO: 2452699 - RNA, 19 nt, Artificial Sequence
  Description of Artificial Sequence: Synthetic oligonucleotide
  Antisense strand to SEQ ID NO: 2452698
gauucucaccagcauuuag

SEQ ID NO: 2452700 - RNA, 19 nt, Artificial Sequence
  Description of Artificial Sequence: Synthetic oligonucleotide
  Sense strand starting at position 1681 of SEQ ID NO: 1887162
aggucacccuucucagaaa

SEQ ID NO: 2452701 - RNA, 19 nt, Artificial Sequence
  Description of Artificial Sequence: Synthetic oligonucleotide
  Antisense strand to SEQ ID NO: 2452700
uuucugagaagggugaccu

SEQ ID NO: 2452702 - RNA, 19 nt, Artificial Sequence
  Description of Artificial Sequence: Synthetic oligonucleotide
  Sense strand starting at position 1797 of SEQ ID NO: 1887162
aucuguucugcucagaucu

SEQ ID NO: 2452703 - RNA, 19 nt, Artificial Sequence
  Description of Artificial Sequence: Synthetic oligonucleotide
  Antisense strand to SEQ ID NO: 2452702
agaucugagcagaacagau

SEQ ID NO: 2452704 - RNA, 19 nt, Artificial Sequence
  Description of Artificial Sequence: Synthetic oligonucleotide
  Sense strand starting at position 2087 of SEQ ID NO: 1887162
cugugaggauccuuucuaa

SEQ ID NO: 2452705 - RNA, 19 nt, Artificial Sequence
  Description of Artificial Sequence: Synthetic oligonucleotide
  Antisense strand to SEQ ID NO: 2452704
uuagaaaggauccucacag

SEQ ID NO: 2452706 - RNA, 19 nt, Artificial Sequence
  Description of Artificial Sequence: Synthetic oligonucleotide
  Sense strand starting at position 2128 of SEQ ID NO: 1887162
ggagguccuuuauucugau

SEQ ID NO: 2452707 - RNA, 19 nt, Artificial Sequence
  Description of Artificial Sequence: Synthetic oligonucleotide
  Antisense strand to SEQ ID NO: 2452706
aucagaauaaaggaccucc

SEQ ID NO: 2452708 - RNA, 19 nt, Artificial Sequence
  Description of Artificial Sequence: Synthetic oligonucleotide
  Sense strand starting at position 2134 of SEQ ID NO: 1887162
ccuuuauucugaucgaaug

SEQ ID NO: 2452709 - RNA, 19 nt, Artificial Sequence
  Description of Artificial Sequence: Synthetic oligonucleotide
  Antisense strand to SEQ ID NO: 2452708
cauucgaucagaauaaagg

SEQ ID NO: 2452710 - RNA, 19 nt, Artificial Sequence
  Description of Artificial Sequence: Synthetic oligonucleotide
  Sense strand starting at position 2135 of SEQ ID NO: 1887162
cuuuauucugaucgaaugu

SEQ ID NO: 2452711 - RNA, 19 nt, Artificial Sequence
  Description of Artificial Sequence: Synthetic oligonucleotide
  Antisense strand to SEQ ID NO: 2452710
acauucgaucagaauaaag

SEQ ID NO: 2452712 - RNA, 19 nt, Artificial Sequence
  Description of Artificial Sequence: Synthetic oligonucleotide
  Sense strand starting at position 2390 of SEQ ID NO: 1887162
cagcaaccucgguaucauc

SEQ ID NO: 2452713 - RNA, 19 nt, Artificial Sequence
  Description of Artificial Sequence: Synthetic oligonucleotide
  Antisense strand to SEQ ID NO: 2452712
gaugauaccgagguugcug

SEQ ID NO: 2452714 - RNA, 19 nt, Artificial Sequence
  Description of Artificial Sequence: Synthetic oligonucleotide
  Sense strand starting at position 2457 of SEQ ID NO: 1887162
cugucaauaggucauggau

SEQ ID NO: 2452715 - RNA, 19 nt, Artificial Sequence
  Description of Artificial Sequence: Synthetic oligonucleotide
  Antisense strand to SEQ ID NO: 2452714
auccaugaccuauugacag

SEQ ID NO: 2452716 - RNA, 19 nt, Artificial Sequence
  Description of Artificial Sequence: Synthetic oligonucleotide
  Sense strand starting at position 2466 of SEQ ID NO: 1887162
ggucauggauccuccacuu

SEQ ID NO: 2452717 - RNA, 19 nt, Artificial Sequence
  Description of Artificial Sequence: Synthetic oligonucleotide
  Antisense strand to SEQ ID NO: 2452716
aaguggaggauccaugacc

SEQ ID NO: 2452718 - RNA, 19 nt, Artificial Sequence
  Description of Artificial Sequence: Synthetic oligonucleotide
  Sense strand starting at position 2527 of SEQ ID NO: 1887162
ggucuuucuccugaaacac

SEQ ID NO: 2452719 - RNA, 19 nt, Artificial Sequence
  Description of Artificial Sequence: Synthetic oligonucleotide
  Antisense strand to SEQ ID NO: 2452718
guguuucaggagaaagacc

SEQ ID NO: 2452720 - RNA, 19 nt, Artificial Sequence
  Description of Artificial Sequence: Synthetic oligonucleotide
  Sense strand starting at position 2574 of SEQ ID NO: 1887162
agccaaaggucucuuucua

SEQ ID NO: 2452721 - RNA, 19 nt, Artificial Sequence
  Description of Artificial Sequence: Synthetic oligonucleotide
  Antisense strand to SEQ ID NO: 2452720
uagaaagagaccuuuggcu

SEQ ID NO: 2452722 - RNA, 19 nt, Artificial Sequence
  Description of Artificial Sequence: Synthetic oligonucleotide
  Sense strand starting at position 2578 of SEQ ID NO: 1887162
aaaggucucuuucuaagag

SEQ ID NO: 2452723 - RNA, 19 nt, Artificial Sequence
  Description of Artificial Sequence: Synthetic oligonucleotide
  Antisense strand to SEQ ID NO: 2452722
cucuuagaaagagaccuuu

SEQ ID NO: 2452724 - RNA, 19 nt, Artificial Sequence
  Description of Artificial Sequence: Synthetic oligonucleotide
  Sense strand starting at position 2585 of SEQ ID NO: 1887162
ucuuucuaagagugaaaca

SEQ ID NO: 2452725 - RNA, 19 nt, Artificial Sequence
  Description of Artificial Sequence: Synthetic oligonucleotide
  Antisense strand to SEQ ID NO: 2452724
uguuucacucuuagaaaga

SEQ ID NO: 2452726 - RNA, 19 nt, Artificial Sequence
  Description of Artificial Sequence: Synthetic oligonucleotide
  Sense strand starting at position 2691 of SEQ ID NO: 1887162
gccagacccuucuugaucu

SEQ ID NO: 2452727 - RNA, 19 nt, Artificial Sequence
  Description of Artificial Sequence: Synthetic oligonucleotide
  Antisense strand to SEQ ID NO: 2452726
agaucaagaagggucuggc

SEQ ID NO: 2452728 - RNA, 19 nt, Artificial Sequence
  Description of Artificial Sequence: Synthetic oligonucleotide
  Sense strand starting at position 3005 of SEQ ID NO: 1887162
guccuuggcaauuaggaga

SEQ ID NO: 2452729 - RNA, 19 nt, Artificial Sequence
  Description of Artificial Sequence: Synthetic oligonucleotide
  Antisense strand to SEQ ID NO: 2452728
ucuccuaauugccaaggac

SEQ ID NO: 2452730 - RNA, 19 nt, Artificial Sequence
  Description of Artificial Sequence: Synthetic oligonucleotide
  Sense strand starting at position 3079 of SEQ ID NO: 1887162
gugacacauuugcuacuuu

SEQ ID NO: 2452731 - RNA, 19 nt, Artificial Sequence
  Description of Artificial Sequence: Synthetic oligonucleotide
  Antisense strand to SEQ ID NO: 2452730
aaaguagcaaaugugucac

SEQ ID NO: 2452732 - RNA, 19 nt, Artificial Sequence
  Description of Artificial Sequence: Synthetic oligonucleotide
  Sense strand starting at position 3128 of SEQ ID NO: 1887162
aaacacuauuugggagagu

SEQ ID NO: 2452733 - RNA, 19 nt, Artificial Sequence
  Description of Artificial Sequence: Synthetic oligonucleotide
  Antisense strand to SEQ ID NO: 2452732
acucucccaaauaguguuu

SEQ ID NO: 2452734 - RNA, 19 nt, Artificial Sequence
  Description of Artificial Sequence: Synthetic oligonucleotide
  Sense strand starting at position 3141 of SEQ ID NO: 1887162
gagagucucugacacauuu

SEQ ID NO: 2452735 - RNA, 19 nt, Artificial Sequence
  Description of Artificial Sequence: Synthetic oligonucleotide
  Antisense strand to SEQ ID NO: 2452734
aaaugugucagagacucuc

SEQ ID NO: 2452736 - RNA, 19 nt, Artificial Sequence
  Description of Artificial Sequence: Synthetic oligonucleotide
  Sense strand starting at position 3211 of SEQ ID NO: 1887162
auggguaaauggcucuaga

SEQ ID NO: 2452737 - RNA, 19 nt, Artificial Sequence
  Description of Artificial Sequence: Synthetic oligonucleotide
  Antisense strand to SEQ ID NO: 2452736
ucuagagccauuuacccau

SEQ ID NO: 2452738 - RNA, 19 nt, Artificial Sequence
  Description of Artificial Sequence: Synthetic oligonucleotide
  Sense strand starting at position 3269 of SEQ ID NO: 1887162
ccagcuaugccugaaauuc

SEQ ID NO: 2452739 - RNA, 19 nt, Artificial Sequence
  Description of Artificial Sequence: Synthetic oligonucleotide
  Antisense strand to SEQ ID NO: 2452738
gaauuucaggcauagcugg

SEQ ID NO: 2452740 - RNA, 19 nt, Artificial Sequence
  Description of Artificial Sequence: Synthetic oligonucleotide
  Sense strand starting at position 3291 of SEQ ID NO: 1887162
ggcugaaucuacucuugga

SEQ ID NO: 2452741 - RNA, 19 nt, Artificial Sequence
  Description of Artificial Sequence: Synthetic oligonucleotide
  Antisense strand to SEQ ID NO: 2452740
uccaagaguagauucagcc

SEQ ID NO: 2452742 - RNA, 19 nt, Artificial Sequence
  Description of Artificial Sequence: Synthetic oligonucleotide
  Sense strand starting at position 3348 of SEQ ID NO: 1887162
uuggauuaagccuguugga

SEQ ID NO: 2452743 - RNA, 19 nt, Artificial Sequence
  Description of Artificial Sequence: Synthetic oligonucleotide
  Antisense strand to SEQ ID NO: 2452742
uccaacaggcuuaauccaa

SEQ ID NO: 2452744 - RNA, 19 nt, Artificial Sequence
  Description of Artificial Sequence: Synthetic oligonucleotide
  Sense strand starting at position 3402 of SEQ ID NO: 1887162
cugugaagucacugauccu

SEQ ID NO: 2452745 - RNA, 19 nt, Artificial Sequence
  Description of Artificial Sequence: Synthetic oligonucleotide
  Antisense strand to SEQ ID NO: 2452744
aggaucagugacuucacag

SEQ ID NO: 2452746 - RNA, 19 nt, Artificial Sequence
  Description of Artificial Sequence: Synthetic oligonucleotide
  Sense strand starting at position 3430 of SEQ ID NO: 1887162
gggcuugacuagguucuau

SEQ ID NO: 2452747 - RNA, 19 nt, Artificial Sequence
  Description of Artificial Sequence: Synthetic oligonucleotide
  Antisense strand to SEQ ID NO: 2452746
auagaaccuagucaagccc

SEQ ID NO: 2452748 - RNA, 19 nt, Artificial Sequence
  Description of Artificial Sequence: Synthetic oligonucleotide
  Sense strand starting at position 3594 of SEQ ID NO: 1887162
uguauuagcguucucagcu

SEQ ID NO: 2452749 - RNA, 19 nt, Artificial Sequence
  Description of Artificial Sequence: Synthetic oligonucleotide
  Antisense strand to SEQ ID NO: 2452748
agcugagaacgcuaauaca

SEQ ID NO: 2452750 - RNA, 19 nt, Artificial Sequence
  Description of Artificial Sequence: Synthetic oligonucleotide
  Sense strand starting at position 3682 of SEQ ID NO: 1887162
cguccaucacagggugaaa

SEQ ID NO: 2452751 - RNA, 19 nt, Artificial Sequence
  Description of Artificial Sequence: Synthetic oligonucleotide
  Antisense strand to SEQ ID NO: 2452750
uuucacccugugauggacg

SEQ ID NO: 2452752 - RNA, 19 nt, Artificial Sequence
  Description of Artificial Sequence: Synthetic oligonucleotide
  Sense strand starting at position 3706 of SEQ ID NO: 1887162
uuaagagaaugcuuggcuu

SEQ ID NO: 2452753 - RNA, 19 nt, Artificial Sequence
  Description of Artificial Sequence: Synthetic oligonucleotide
  Antisense strand to SEQ ID NO: 2452752
aagccaagcauucucuuaa

SEQ ID NO: 2452754 - RNA, 19 nt, Artificial Sequence
  Description of Artificial Sequence: Synthetic oligonucleotide
  Sense strand starting at position 3708 of SEQ ID NO: 1887162
aagagaaugcuuggcuuau

SEQ ID NO: 2452755 - RNA, 19 nt, Artificial Sequence
  Description of Artificial Sequence: Synthetic oligonucleotide
  Antisense strand to SEQ ID NO: 2452754
auaagccaagcauucucuu

SEQ ID NO: 2452756 - RNA, 19 nt, Artificial Sequence
  Description of Artificial Sequence: Synthetic oligonucleotide
  Sense strand starting at position 3709 of SEQ ID NO: 1887162
agagaaugcuuggcuuauu

SEQ ID NO: 2452757 - RNA, 19 nt, Artificial Sequence
  Description of Artificial Sequence: Synthetic oligonucleotide
  Antisense strand to SEQ ID NO: 2452756
aauaagccaagcauucucu

SEQ ID NO: 2452758 - RNA, 19 nt, Artificial Sequence
  Description of Artificial Sequence: Synthetic oligonucleotide
  Sense strand starting at position 3714 of SEQ ID NO: 1887162
augcuuggcuuauuuauga

SEQ ID NO: 2452759 - RNA, 19 nt, Artificial Sequence
  Description of Artificial Sequence: Synthetic oligonucleotide
  Antisense strand to SEQ ID NO: 2452758
ucauaaauaagccaagcau

SEQ ID NO: 2452760 - RNA, 19 nt, Artificial Sequence
  Description of Artificial Sequence: Synthetic oligonucleotide
  Sense strand starting at position 7 of SEQ ID NO: 1887163
uaguaaugcaucuggguag

SEQ ID NO: 2452761 - RNA, 19 nt, Artificial Sequence
  Description of Artificial Sequence: Synthetic oligonucleotide
  Antisense strand to SEQ ID NO: 2452760
cuacccagaugcauuacua

SEQ ID NO: 2452762 - RNA, 19 nt, Artificial Sequence
  Description of Artificial Sequence: Synthetic oligonucleotide
  Sense strand starting at position 46 of SEQ ID NO: 1887163
uuuaucugacuuggaaagu

SEQ ID NO: 2452763 - RNA, 19 nt, Artificial Sequence
  Description of Artificial Sequence: Synthetic oligonucleotide
  Antisense strand to SEQ ID NO: 2452762
acuuuccaagucagauaaa

SEQ ID NO: 2452764 - RNA, 19 nt, Artificial Sequence
  Description of Artificial Sequence: Synthetic oligonucleotide
  Sense strand starting at position 74 of SEQ ID NO: 1887163
ggcauuccuacuggagaaa

SEQ ID NO: 2452765 - RNA, 19 nt, Artificial Sequence
  Description of Artificial Sequence: Synthetic oligonucleotide
  Antisense strand to SEQ ID NO: 2452764
uuucuccaguaggaaugcc

SEQ ID NO: 2452766 - RNA, 19 nt, Artificial Sequence
  Description of Artificial Sequence: Synthetic oligonucleotide
  Sense strand starting at position 183 of SEQ ID NO: 1887163
agaugcggguuaucuugaa

SEQ ID NO: 2452767 - RNA, 19 nt, Artificial Sequence
  Description of Artificial Sequence: Synthetic oligonucleotide
  Antisense strand to SEQ ID NO: 2452766
uucaagauaacccgcaucu

SEQ ID NO: 2452768 - RNA, 19 nt, Artificial Sequence
  Description of Artificial Sequence: Synthetic oligonucleotide
  Sense strand starting at position 187 of SEQ ID NO: 1887163
gcggguuaucuugaaagaa

SEQ ID NO: 2452769 - RNA, 19 nt, Artificial Sequence
  Description of Artificial Sequence: Synthetic oligonucleotide
  Antisense strand to SEQ ID NO: 2452768
uucuuucaagauaacccgc

SEQ ID NO: 2452770 - RNA, 19 nt, Artificial Sequence
  Description of Artificial Sequence: Synthetic oligonucleotide
  Sense strand starting at position 211 of SEQ ID NO: 1887163
cugacauucuaggcagaca

SEQ ID NO: 2452771 - RNA, 19 nt, Artificial Sequence
  Description of Artificial Sequence: Synthetic oligonucleotide
  Antisense strand to SEQ ID NO: 2452770
ugucugccuagaaugucag

SEQ ID NO: 2452772 - RNA, 19 nt, Artificial Sequence
  Description of Artificial Sequence: Synthetic oligonucleotide
  Sense strand starting at position 358 of SEQ ID NO: 1887163
ccauuaugagcugagguca

SEQ ID NO: 2452773 - RNA, 19 nt, Artificial Sequence
  Description of Artificial Sequence: Synthetic oligonucleotide
  Antisense strand to SEQ ID NO: 2452772
ugaccucagcucauaaugg

SEQ ID NO: 2452774 - RNA, 19 nt, Artificial Sequence
  Description of Artificial Sequence: Synthetic oligonucleotide
  Sense strand starting at position 387 of SEQ ID NO: 1887163
ggaauugcagcccacauaa

SEQ ID NO: 2452775 - RNA, 19 nt, Artificial Sequence
  Description of Artificial Sequence: Synthetic oligonucleotide
  Antisense strand to SEQ ID NO: 2452774
uuaugugggcugcaauucc

SEQ ID NO: 2452776 - RNA, 19 nt, Artificial Sequence
  Description of Artificial Sequence: Synthetic oligonucleotide
  Sense strand starting at position 608 of SEQ ID NO: 1887163
ucagaauuccagggucaca

SEQ ID NO: 2452777 - RNA, 19 nt, Artificial Sequence
  Description of Artificial Sequence: Synthetic oligonucleotide
  Antisense strand to SEQ ID NO: 2452776
ugugacccuggaauucuga

SEQ ID NO: 2452778 - RNA, 19 nt, Artificial Sequence
  Description of Artificial Sequence: Synthetic oligonucleotide
  Sense strand starting at position 674 of SEQ ID NO: 1887163
ggccuucucaugcagagag

SEQ ID NO: 2452779 - RNA, 19 nt, Artificial Sequence
  Description of Artificial Sequence: Synthetic oligonucleotide
  Antisense strand to SEQ ID NO: 2452778
cucucugcaugagaaggcc

SEQ ID NO: 2452780 - RNA, 19 nt, Artificial Sequence
  Description of Artificial Sequence: Synthetic oligonucleotide
  Sense strand starting at position 758 of SEQ ID NO: 1887163
gggacucccugacuuacuu

SEQ ID NO: 2452781 - RNA, 19 nt, Artificial Sequence
  Description of Artificial Sequence: Synthetic oligonucleotide
  Antisense strand to SEQ ID NO: 2452780
aaguaagucagggaguccc

SEQ ID NO: 2452782 - RNA, 19 nt, Artificial Sequence
  Description of Artificial Sequence: Synthetic oligonucleotide
  Sense strand starting at position 1691 of SEQ ID NO: 1887163
cggcuaauucuguaggagu

SEQ ID NO: 2452783 - RNA, 19 nt, Artificial Sequence
  Description of Artificial Sequence: Synthetic oligonucleotide
  Antisense strand to SEQ ID NO: 2452782
acuccuacagaauuagccg

SEQ ID NO: 2452784 - RNA, 19 nt, Artificial Sequence
  Description of Artificial Sequence: Synthetic oligonucleotide
  Sense strand starting at position 1699 of SEQ ID NO: 1887163
ucuguaggaguccaggaau

SEQ ID NO: 2452785 - RNA, 19 nt, Artificial Sequence
  Description of Artificial Sequence: Synthetic oligonucleotide
  Antisense strand to SEQ ID NO: 2452784
auuccuggacuccuacaga

SEQ ID NO: 2452786 - RNA, 19 nt, Artificial Sequence
  Description of Artificial Sequence: Synthetic oligonucleotide
  Sense strand starting at position 1720 of SEQ ID NO: 1887163
ccaaacgucccauaugcaa

SEQ ID NO: 2452787 - RNA, 19 nt, Artificial Sequence
  Description of Artificial Sequence: Synthetic oligonucleotide
  Antisense strand to SEQ ID NO: 2452786
uugcauaugggacguuugg

SEQ ID NO: 2452788 - RNA, 19 nt, Artificial Sequence
  Description of Artificial Sequence: Synthetic oligonucleotide
  Sense strand starting at position 1727 of SEQ ID NO: 1887163
ucccauaugcaauagguaa

SEQ ID NO: 2452789 - RNA, 19 nt, Artificial Sequence
  Description of Artificial Sequence: Synthetic oligonucleotide
  Antisense strand to SEQ ID NO: 2452788
uuaccuauugcauauggga

SEQ ID NO: 2452790 - RNA, 19 nt, Artificial Sequence
  Description of Artificial Sequence: Synthetic oligonucleotide
  Sense strand starting at position 1734 of SEQ ID NO: 1887163
ugcaauagguaauccaaua

SEQ ID NO: 2452791 - RNA, 19 nt, Artificial Sequence
  Description of Artificial Sequence: Synthetic oligonucleotide
  Antisense strand to SEQ ID NO: 2452790
uauuggauuaccuauugca

SEQ ID NO: 2452792 - RNA, 19 nt, Artificial Sequence
  Description of Artificial Sequence: Synthetic oligonucleotide
  Sense strand starting at position 1745 of SEQ ID NO: 1887163
auccaauaaguuuggagua

SEQ ID NO: 2452793 - RNA, 19 nt, Artificial Sequence
  Description of Artificial Sequence: Synthetic oligonucleotide
  Antisense strand to SEQ ID NO: 2452792
uacuccaaacuuauuggau

SEQ ID NO: 2452794 - RNA, 19 nt, Artificial Sequence
  Description of Artificial Sequence: Synthetic oligonucleotide
  Sense strand starting at position 1758 of SEQ ID NO: 1887163
ggaguagaagccugaaagu

SEQ ID NO: 2452795 - RNA, 19 nt, Artificial Sequence
  Description of Artificial Sequence: Synthetic oligonucleotide
  Antisense strand to SEQ ID NO: 2452794
acuuucaggcuucuacucc

SEQ ID NO: 2452796 - RNA, 19 nt, Artificial Sequence
  Description of Artificial Sequence: Synthetic oligonucleotide
  Sense strand starting at position 2286 of SEQ ID NO: 1887163
ggucggaguccggaagaaa

SEQ ID NO: 2452797 - RNA, 19 nt, Artificial Sequence
  Description of Artificial Sequence: Synthetic oligonucleotide
  Antisense strand to SEQ ID NO: 2452796
uuucuuccggacuccgacc

SEQ ID NO: 2452798 - RNA, 19 nt, Artificial Sequence
  Description of Artificial Sequence: Synthetic oligonucleotide
  Sense strand starting at position 2544 of SEQ ID NO: 1887163
gcaccagaccuccaugacu

SEQ ID NO: 2452799 - RNA, 19 nt, Artificial Sequence
  Description of Artificial Sequence: Synthetic oligonucleotide
  Antisense strand to SEQ ID NO: 2452798
agucauggaggucuggugc

SEQ ID NO: 2452800 - RNA, 19 nt, Artificial Sequence
  Description of Artificial Sequence: Synthetic oligonucleotide
  Sense strand starting at position 2693 of SEQ ID NO: 1887163
gguugcuuucuggagagga

SEQ ID NO: 2452801 - RNA, 19 nt, Artificial Sequence
  Description of Artificial Sequence: Synthetic oligonucleotide
  Antisense strand to SEQ ID NO: 2452800
uccucuccagaaagcaacc

SEQ ID NO: 2452802 - RNA, 19 nt, Artificial Sequence
  Description of Artificial Sequence: Synthetic oligonucleotide
  Sense strand starting at position 2695 of SEQ ID NO: 1887163
uugcuuucuggagaggaca

SEQ ID NO: 2452803 - RNA, 19 nt, Artificial Sequence
  Description of Artificial Sequence: Synthetic oligonucleotide
  Antisense strand to SEQ ID NO: 2452802
uguccucuccagaaagcaa

SEQ ID NO: 2452804 - RNA, 19 nt, Artificial Sequence
  Description of Artificial Sequence: Synthetic oligonucleotide
  Sense strand starting at position 2724 of SEQ ID NO: 1887163
guuguuugagguuaaagac

SEQ ID NO: 2452805 - RNA, 19 nt, Artificial Sequence
  Description of Artificial Sequence: Synthetic oligonucleotide
  Antisense strand to SEQ ID NO: 2452804
gucuuuaaccucaaacaac

SEQ ID NO: 2452806 - RNA, 19 nt, Artificial Sequence
  Description of Artificial Sequence: Synthetic oligonucleotide
  Sense strand starting at position 2813 of SEQ ID NO: 1887163
ggaggucugccugauccca

SEQ ID NO: 2452807 - RNA, 19 nt, Artificial Sequence
  Description of Artificial Sequence: Synthetic oligonucleotide
  Antisense strand to SEQ ID NO: 2452806
ugggaucaggcagaccucc

SEQ ID NO: 2452808 - RNA, 19 nt, Artificial Sequence
  Description of Artificial Sequence: Synthetic oligonucleotide
  Sense strand starting at position 2821 of SEQ ID NO: 1887163
gccugaucccauggugaac

SEQ ID NO: 2452809 - RNA, 19 nt, Artificial Sequence
  Description of Artificial Sequence: Synthetic oligonucleotide
  Antisense strand to SEQ ID NO: 2452808
guucaccaugggaucaggc

SEQ ID NO: 2452810 - RNA, 19 nt, Artificial Sequence
  Description of Artificial Sequence: Synthetic oligonucleotide
  Sense strand starting at position 2872 of SEQ ID NO: 1887163
ccuuuagggaagugacuua

SEQ ID NO: 2452811 - RNA, 19 nt, Artificial Sequence
  Description of Artificial Sequence: Synthetic oligonucleotide
  Antisense strand to SEQ ID NO: 2452810
uaagucacuucccuaaagg

SEQ ID NO: 2452812 - RNA, 19 nt, Artificial Sequence
  Description of Artificial Sequence: Synthetic oligonucleotide
  Sense strand starting at position 2934 of SEQ ID NO: 1887163
gcccacuuagucuaaguca

SEQ ID NO: 2452813 - RNA, 19 nt, Artificial Sequence
  Description of Artificial Sequence: Synthetic oligonucleotide
  Antisense strand to SEQ ID NO: 2452812
ugacuuagacuaagugggc

SEQ ID NO: 2452814 - RNA, 19 nt, Artificial Sequence
  Description of Artificial Sequence: Synthetic oligonucleotide
  Sense strand starting at position 2968 of SEQ ID NO: 1887163
cugcuaaucgucggauuug

SEQ ID NO: 2452815 - RNA, 19 nt, Artificial Sequence
  Description of Artificial Sequence: Synthetic oligonucleotide
  Antisense strand to SEQ ID NO: 2452814
caaauccgacgauuagcag

SEQ ID NO: 2452816 - RNA, 19 nt, Artificial Sequence
  Description of Artificial Sequence: Synthetic oligonucleotide
  Sense strand starting at position 2973 of SEQ ID NO: 1887163
aaucgucggauuugagagu

SEQ ID NO: 2452817 - RNA, 19 nt, Artificial Sequence
  Description of Artificial Sequence: Synthetic oligonucleotide
  Antisense strand to SEQ ID NO: 2452816
acucucaaauccgacgauu

SEQ ID NO: 2452818 - RNA, 19 nt, Artificial Sequence
  Description of Artificial Sequence: Synthetic oligonucleotide
  Sense strand starting at position 3151 of SEQ ID NO: 1887163
ggugguuucuguauagugu

SEQ ID NO: 2452819 - RNA, 19 nt, Artificial Sequence
  Description of Artificial Sequence: Synthetic oligonucleotide
  Antisense strand to SEQ ID NO: 2452818
acacuauacagaaaccacc

SEQ ID NO: 2452820 - RNA, 19 nt, Artificial Sequence
  Description of Artificial Sequence: Synthetic oligonucleotide
  Sense strand starting at position 3191 of SEQ ID NO: 1887163
acaggaaguugcuuuaaac

SEQ ID NO: 2452821 - RNA, 19 nt, Artificial Sequence
  Description of Artificial Sequence: Synthetic oligonucleotide
  Antisense strand to SEQ ID NO: 2452820
guuuaaagcaacuuccugu

SEQ ID NO: 2452822 - RNA, 19 nt, Artificial Sequence
  Description of Artificial Sequence: Synthetic oligonucleotide
  Sense strand starting at position 3201 of SEQ ID NO: 1887163
gcuuuaaacuggccaagaa

SEQ ID NO: 2452823 - RNA, 19 nt, Artificial Sequence
  Description of Artificial Sequence: Synthetic oligonucleotide
  Antisense strand to SEQ ID NO: 2452822
uucuuggccaguuuaaagc

SEQ ID NO: 2452824 - RNA, 19 nt, Artificial Sequence
  Description of Artificial Sequence: Synthetic oligonucleotide
  Sense strand starting at position 3260 of SEQ ID NO: 1887163
gggucuguuggaggagaga

SEQ ID NO: 2452825 - RNA, 19 nt, Artificial Sequence
  Description of Artificial Sequence: Synthetic oligonucleotide
  Antisense strand to SEQ ID NO: 2452824
ucucuccuccaacagaccc

SEQ ID NO: 2452826 - RNA, 19 nt, Artificial Sequence
  Description of Artificial Sequence: Synthetic oligonucleotide
  Sense strand starting at position 3366 of SEQ ID NO: 1887163
gugccuaggacucaugcua

SEQ ID NO: 2452827 - RNA, 19 nt, Artificial Sequence
  Description of Artificial Sequence: Synthetic oligonucleotide
  Antisense strand to SEQ ID NO: 2452826
uagcaugaguccuaggcac

SEQ ID NO: 2452828 - RNA, 19 nt, Artificial Sequence
  Description of Artificial Sequence: Synthetic oligonucleotide
  Sense strand starting at position 3441 of SEQ ID NO: 1887163
gucugaggcuucuugaaga

SEQ ID NO: 2452829 - RNA, 19 nt, Artificial Sequence
  Description of Artificial Sequence: Synthetic oligonucleotide
  Antisense strand to SEQ ID NO: 2452828
ucuucaagaagccucagac

SEQ ID NO: 2452830 - RNA, 19 nt, Artificial Sequence
  Description of Artificial Sequence: Synthetic oligonucleotide
  Sense strand starting at position 3466 of SEQ ID NO: 1887163
gugacugacuguuccacua

SEQ ID NO: 2452831 - RNA, 19 nt, Artificial Sequence
  Description of Artificial Sequence: Synthetic oligonucleotide
  Antisense strand to SEQ ID NO: 2452830
uaguggaacagucagucac

SEQ ID NO: 2452832 - RNA, 19 nt, Artificial Sequence
  Description of Artificial Sequence: Synthetic oligonucleotide
  Sense strand starting at position 3483 of SEQ ID NO: 1887163
uaaagacaucuguaggucu

SEQ ID NO: 2452833 - RNA, 19 nt, Artificial Sequence
  Description of Artificial Sequence: Synthetic oligonucleotide
  Antisense strand to SEQ ID NO: 2452832
agaccuacagaugucuuua

SEQ ID NO: 2452834 - RNA, 19 nt, Artificial Sequence
  Description of Artificial Sequence: Synthetic oligonucleotide
  Sense strand starting at position 3614 of SEQ ID NO: 1887163
cccagagaguacucuuuau

SEQ ID NO: 2452835 - RNA, 19 nt, Artificial Sequence
  Description of Artificial Sequence: Synthetic oligonucleotide
  Antisense strand to SEQ ID NO: 2452834
auaaagaguacucucuggg

SEQ ID NO: 2452836 - RNA, 19 nt, Artificial Sequence
  Description of Artificial Sequence: Synthetic oligonucleotide
  Sense strand starting at position 3663 of SEQ ID NO: 1887163
auagacucuuaagagagau

SEQ ID NO: 2452837 - RNA, 19 nt, Artificial Sequence
  Description of Artificial Sequence: Synthetic oligonucleotide
  Antisense strand to SEQ ID NO: 2452836
aucucucuuaagagucuau

SEQ ID NO: 2452838 - RNA, 19 nt, Artificial Sequence
  Description of Artificial Sequence: Synthetic oligonucleotide
  Sense strand starting at position 3766 of SEQ ID NO: 1887163
ggcggaucaccugagagau

SEQ ID NO: 2452839 - RNA, 19 nt, Artificial Sequence
  Description of Artificial Sequence: Synthetic oligonucleotide
  Antisense strand to SEQ ID NO: 2452838
aucucucaggugauccgcc

SEQ ID NO: 2452840 - RNA, 19 nt, Artificial Sequence
  Description of Artificial Sequence: Synthetic oligonucleotide
  Sense strand starting at position 289 of SEQ ID NO: 1887165
gaggcaauggccugguaaa

SEQ ID NO: 2452841 - RNA, 19 nt, Artificial Sequence
  Description of Artificial Sequence: Synthetic oligonucleotide
  Antisense strand to SEQ ID NO: 2452840
uuuaccaggccauugccuc

SEQ ID NO: 2452842 - RNA, 19 nt, Artificial Sequence
  Description of Artificial Sequence: Synthetic oligonucleotide
  Sense strand starting at position 290 of SEQ ID NO: 1887165
aggcaauggccugguaaag

SEQ ID NO: 2452843 - RNA, 19 nt, Artificial Sequence
  Description of Artificial Sequence: Synthetic oligonucleotide
  Antisense strand to SEQ ID NO: 2452842
cuuuaccaggccauugccu

SEQ ID NO: 2452844 - RNA, 19 nt, Artificial Sequence
  Description of Artificial Sequence: Synthetic oligonucleotide
  Sense strand starting at position 825 of SEQ ID NO: 1887165
uccugaguggcaggguaau

SEQ ID NO: 2452845 - RNA, 19 nt, Artificial Sequence
  Description of Artificial Sequence: Synthetic oligonucleotide
  Antisense strand to SEQ ID NO: 2452844
auuacccugccacucagga

SEQ ID NO: 2452846 - RNA, 19 nt, Artificial Sequence
  Description of Artificial Sequence: Synthetic oligonucleotide
  Sense strand starting at position 1321 of SEQ ID NO: 1887165
ccgguuacagcgagaguga

SEQ ID NO: 2452847 - RNA, 19 nt, Artificial Sequence
  Description of Artificial Sequence: Synthetic oligonucleotide
  Antisense strand to SEQ ID NO: 2452846
ucacucucgcuguaaccgg

SEQ ID NO: 2452848 - RNA, 19 nt, Artificial Sequence
  Description of Artificial Sequence: Synthetic oligonucleotide
  Sense strand starting at position 1322 of SEQ ID NO: 1887165
cgguuacagcgagagugau

SEQ ID NO: 2452849 - RNA, 19 nt, Artificial Sequence
  Description of Artificial Sequence: Synthetic oligonucleotide
  Antisense strand to SEQ ID NO: 2452848
aucacucucgcuguaaccg

SEQ ID NO: 2452850 - RNA, 19 nt, Artificial Sequence
  Description of Artificial Sequence: Synthetic oligonucleotide
  Sense strand starting at position 1334 of SEQ ID NO: 1887165
gagugauugagacgaggcu

SEQ ID NO: 2452851 - RNA, 19 nt, Artificial Sequence
  Description of Artificial Sequence: Synthetic oligonucleotide
  Antisense strand to SEQ ID NO: 2452850
agccucgucucaaucacuc

SEQ ID NO: 2452852 - RNA, 19 nt, Artificial Sequence
  Description of Artificial Sequence: Synthetic oligonucleotide
  Sense strand starting at position 1803 of SEQ ID NO: 1887165
ggaaguaguguccguugga

SEQ ID NO: 2452853 - RNA, 19 nt, Artificial Sequence
  Description of Artificial Sequence: Synthetic oligonucleotide
  Antisense strand to SEQ ID NO: 2452852
uccaacggacacuacuucc

SEQ ID NO: 2452854 - RNA, 19 nt, Artificial Sequence
  Description of Artificial Sequence: Synthetic oligonucleotide
  Sense strand starting at position 1804 of SEQ ID NO: 1887165
gaaguaguguccguuggag

SEQ ID NO: 2452855 - RNA, 19 nt, Artificial Sequence
  Description of Artificial Sequence: Synthetic oligonucleotide
  Antisense strand to SEQ ID NO: 2452854
cuccaacggacacuacuuc

SEQ ID NO: 2452856 - RNA, 19 nt, Artificial Sequence
  Description of Artificial Sequence: Synthetic oligonucleotide
  Sense strand starting at position 2089 of SEQ ID NO: 1887165
acagucuccucuguccaau

SEQ ID NO: 2452857 - RNA, 19 nt, Artificial Sequence
  Description of Artificial Sequence: Synthetic oligonucleotide
  Antisense strand to SEQ ID NO: 2452856
auuggacagaggagacugu

SEQ ID NO: 2452858 - RNA, 19 nt, Artificial Sequence
  Description of Artificial Sequence: Synthetic oligonucleotide
  Sense strand starting at position 2408 of SEQ ID NO: 1887165
gucucagggucccugagaa

SEQ ID NO: 2452859 - RNA, 19 nt, Artificial Sequence
  Description of Artificial Sequence: Synthetic oligonucleotide
  Antisense strand to SEQ ID NO: 2452858
uucucagggacccugagac

SEQ ID NO: 2452860 - RNA, 19 nt, Artificial Sequence
  Description of Artificial Sequence: Synthetic oligonucleotide
  Sense strand starting at position 2522 of SEQ ID NO: 1887165
uccaguuucucggucugau

SEQ ID NO: 2452861 - RNA, 19 nt, Artificial Sequence
  Description of Artificial Sequence: Synthetic oligonucleotide
  Antisense strand to SEQ ID NO: 2452860
aucagaccgagaaacugga

SEQ ID NO: 2452862 - RNA, 19 nt, Artificial Sequence
  Description of Artificial Sequence: Synthetic oligonucleotide
  Sense strand starting at position 2911 of SEQ ID NO: 1887165
cagaccuaggccggaaaua

SEQ ID NO: 2452863 - RNA, 19 nt, Artificial Sequence
  Description of Artificial Sequence: Synthetic oligonucleotide
  Antisense strand to SEQ ID NO: 2452862
uauuuccggccuaggucug

SEQ ID NO: 2452864 - RNA, 19 nt, Artificial Sequence
  Description of Artificial Sequence: Synthetic oligonucleotide
  Sense strand starting at position 2971 of SEQ ID NO: 1887165
gagacugacuuggauucua

SEQ ID NO: 2452865 - RNA, 19 nt, Artificial Sequence
  Description of Artificial Sequence: Synthetic oligonucleotide
  Antisense strand to SEQ ID NO: 2452864
uagaauccaagucagucuc

SEQ ID NO: 2452866 - RNA, 19 nt, Artificial Sequence
  Description of Artificial Sequence: Synthetic oligonucleotide
  Sense strand starting at position 2976 of SEQ ID NO: 1887165
ugacuuggauucuaaggaa

SEQ ID NO: 2452867 - RNA, 19 nt, Artificial Sequence
  Description of Artificial Sequence: Synthetic oligonucleotide
  Antisense strand to SEQ ID NO: 2452866
uuccuuagaauccaaguca

SEQ ID NO: 2452868 - RNA, 19 nt, Artificial Sequence
  Description of Artificial Sequence: Synthetic oligonucleotide
  Sense strand starting at position 2979 of SEQ ID NO: 1887165
cuuggauucuaaggaauuc

SEQ ID NO: 2452869 - RNA, 19 nt, Artificial Sequence
  Description of Artificial Sequence: Synthetic oligonucleotide
  Antisense strand to SEQ ID NO: 2452868
gaauuccuuagaauccaag

SEQ ID NO: 2452870 - RNA, 19 nt, Artificial Sequence
  Description of Artificial Sequence: Synthetic oligonucleotide
  Sense strand starting at position 2988 of SEQ ID NO: 1887165
uaaggaauucuguggucuc

SEQ ID NO: 2452871 - RNA, 19 nt, Artificial Sequence
  Description of Artificial Sequence: Synthetic oligonucleotide
  Antisense strand to SEQ ID NO: 2452870
gagaccacagaauuccuua

SEQ ID NO: 2452872 - RNA, 19 nt, Artificial Sequence
  Description of Artificial Sequence: Synthetic oligonucleotide
  Sense strand starting at position 2991 of SEQ ID NO: 1887165
ggaauucuguggucuccga

SEQ ID NO: 2452873 - RNA, 19 nt, Artificial Sequence
  Description of Artificial Sequence: Synthetic oligonucleotide
  Antisense strand to SEQ ID NO: 2452872
ucggagaccacagaauucc

SEQ ID NO: 2452874 - RNA, 19 nt, Artificial Sequence
  Description of Artificial Sequence: Synthetic oligonucleotide
  Sense strand starting at position 2995 of SEQ ID NO: 1887165
uucuguggucuccgaauac

SEQ ID NO: 2452875 - RNA, 19 nt, Artificial Sequence
  Description of Artificial Sequence: Synthetic oligonucleotide
  Antisense strand to SEQ ID NO: 2452874
guauucggagaccacagaa

SEQ ID NO: 2452876 - RNA, 19 nt, Artificial Sequence
  Description of Artificial Sequence: Synthetic oligonucleotide
  Sense strand starting at position 3018 of SEQ ID NO: 1887165
gaggccucuuagggcuaau

SEQ ID NO: 2452877 - RNA, 19 nt, Artificial Sequence
  Description of Artificial Sequence: Synthetic oligonucleotide
  Antisense strand to SEQ ID NO: 2452876
auuagcccuaagaggccuc

SEQ ID NO: 2452878 - RNA, 19 nt, Artificial Sequence
  Description of Artificial Sequence: Synthetic oligonucleotide
  Sense strand starting at position 3021 of SEQ ID NO: 1887165
gccucuuagggcuaauauc

SEQ ID NO: 2452879 - RNA, 19 nt, Artificial Sequence
  Description of Artificial Sequence: Synthetic oligonucleotide
  Antisense strand to SEQ ID NO: 2452878
gauauuagcccuaagaggc

SEQ ID NO: 2452880 - RNA, 19 nt, Artificial Sequence
  Description of Artificial Sequence: Synthetic oligonucleotide
  Sense strand starting at position 3135 of SEQ ID NO: 1887165
ggcgauuccagagaucuug

SEQ ID NO: 2452881 - RNA, 19 nt, Artificial Sequence
  Description of Artificial Sequence: Synthetic oligonucleotide
  Antisense strand to SEQ ID NO: 2452880
caagaucucuggaaucgcc

SEQ ID NO: 2452882 - RNA, 19 nt, Artificial Sequence
  Description of Artificial Sequence: Synthetic oligonucleotide
  Sense strand starting at position 3440 of SEQ ID NO: 1887165
gacagcuuugcugaccgau

SEQ ID NO: 2452883 - RNA, 19 nt, Artificial Sequence
  Description of Artificial Sequence: Synthetic oligonucleotide
  Antisense strand to SEQ ID NO: 2452882
aucggucagcaaagcuguc

SEQ ID NO: 2452884 - RNA, 19 nt, Artificial Sequence
  Description of Artificial Sequence: Synthetic oligonucleotide
  Sense strand starting at position 3442 of SEQ ID NO: 1887165
cagcuuugcugaccgauau

SEQ ID NO: 2452885 - RNA, 19 nt, Artificial Sequence
  Description of Artificial Sequence: Synthetic oligonucleotide
  Antisense strand to SEQ ID NO: 2452884
auaucggucagcaaagcug

SEQ ID NO: 2452886 - RNA, 19 nt, Artificial Sequence
  Description of Artificial Sequence: Synthetic oligonucleotide
  Sense strand starting at position 3443 of SEQ ID NO: 1887165
agcuuugcugaccgauauu

SEQ ID NO: 2452887 - RNA, 19 nt, Artificial Sequence
  Description of Artificial Sequence: Synthetic oligonucleotide
  Antisense strand to SEQ ID NO: 2452886
aauaucggucagcaaagcu

SEQ ID NO: 2452888 - RNA, 19 nt, Artificial Sequence
  Description of Artificial Sequence: Synthetic oligonucleotide
  Sense strand starting at position 3446 of SEQ ID NO: 1887165
uuugcugaccgauauuaaa

SEQ ID NO: 2452889 - RNA, 19 nt, Artificial Sequence
  Description of Artificial Sequence: Synthetic oligonucleotide
  Antisense strand to SEQ ID NO: 2452888
uuuaauaucggucagcaaa

SEQ ID NO: 2452890 - RNA, 19 nt, Artificial Sequence
  Description of Artificial Sequence: Synthetic oligonucleotide
  Sense strand starting at position 3454 of SEQ ID NO: 1887165
ccgauauuaaaccgcgaga

SEQ ID NO: 2452891 - RNA, 19 nt, Artificial Sequence
  Description of Artificial Sequence: Synthetic oligonucleotide
  Antisense strand to SEQ ID NO: 2452890
ucucgcgguuuaauaucgg

SEQ ID NO: 2452892 - RNA, 19 nt, Artificial Sequence
  Description of Artificial Sequence: Synthetic oligonucleotide
  Sense strand starting at position 3456 of SEQ ID NO: 1887165
gauauuaaaccgcgagaac

SEQ ID NO: 2452893 - RNA, 19 nt, Artificial Sequence
  Description of Artificial Sequence: Synthetic oligonucleotide
  Antisense strand to SEQ ID NO: 2452892
guucucgcgguuuaauauc

SEQ ID NO: 2452894 - RNA, 19 nt, Artificial Sequence
  Description of Artificial Sequence: Synthetic oligonucleotide
  Sense strand starting at position 3457 of SEQ ID NO: 1887165
auauuaaaccgcgagaacu

SEQ ID NO: 2452895 - RNA, 19 nt, Artificial Sequence
  Description of Artificial Sequence: Synthetic oligonucleotide
  Antisense strand to SEQ ID NO: 2452894
aguucucgcgguuuaauau

SEQ ID NO: 2452896 - RNA, 19 nt, Artificial Sequence
  Description of Artificial Sequence: Synthetic oligonucleotide
  Sense strand starting at position 3470 of SEQ ID NO: 1887165
agaacugucgcacgugaac

SEQ ID NO: 2452897 - RNA, 19 nt, Artificial Sequence
  Description of Artificial Sequence: Synthetic oligonucleotide
  Antisense strand to SEQ ID NO: 2452896
guucacgugcgacaguucu

SEQ ID NO: 2452898 - RNA, 19 nt, Artificial Sequence
  Description of Artificial Sequence: Synthetic oligonucleotide
  Sense strand starting at position 3491 of SEQ ID NO: 1887165
cauccugcccguugugauu

SEQ ID NO: 2452899 - RNA, 19 nt, Artificial Sequence
  Description of Artificial Sequence: Synthetic oligonucleotide
  Antisense strand to SEQ ID NO: 2452898
aaucacaacgggcaggaug

SEQ ID NO: 2452900 - RNA, 19 nt, Artificial Sequence
  Description of Artificial Sequence: Synthetic oligonucleotide
  Sense strand starting at position 3497 of SEQ ID NO: 1887165
gcccguugugauuguguaa

SEQ ID NO: 2452901 - RNA, 19 nt, Artificial Sequence
  Description of Artificial Sequence: Synthetic oligonucleotide
  Antisense strand to SEQ ID NO: 2452900
uuacacaaucacaacgggc

SEQ ID NO: 2452902 - RNA, 19 nt, Artificial Sequence
  Description of Artificial Sequence: Synthetic oligonucleotide
  Sense strand starting at position 3567 of SEQ ID NO: 1887165
ggccucucuccacaugaga

SEQ ID NO: 2452903 - RNA, 19 nt, Artificial Sequence
  Description of Artificial Sequence: Synthetic oligonucleotide
  Antisense strand to SEQ ID NO: 2452902
ucucauguggagagaggcc

SEQ ID NO: 2452904 - RNA, 19 nt, Artificial Sequence
  Description of Artificial Sequence: Synthetic oligonucleotide
  Sense strand starting at position 3586 of SEQ ID NO: 1887165
guggccuguacugagagau

SEQ ID NO: 2452905 - RNA, 19 nt, Artificial Sequence
  Description of Artificial Sequence: Synthetic oligonucleotide
  Antisense strand to SEQ ID NO: 2452904
aucucucaguacaggccac

SEQ ID NO: 2452906 - RNA, 19 nt, Artificial Sequence
  Description of Artificial Sequence: Synthetic oligonucleotide
  Sense strand starting at position 3600 of SEQ ID NO: 1887165
gagauuaccuaggaaugga

SEQ ID NO: 2452907 - RNA, 19 nt, Artificial Sequence
  Description of Artificial Sequence: Synthetic oligonucleotide
  Antisense strand to SEQ ID NO: 2452906
uccauuccuagguaaucuc

SEQ ID NO: 2452908 - RNA, 19 nt, Artificial Sequence
  Description of Artificial Sequence: Synthetic oligonucleotide
  Sense strand starting at position 3652 of SEQ ID NO: 1887165
ggcccuugccugcagagaa

SEQ ID NO: 2452909 - RNA, 19 nt, Artificial Sequence
  Description of Artificial Sequence: Synthetic oligonucleotide
  Antisense strand to SEQ ID NO: 2452908
uucucugcaggcaagggcc

SEQ ID NO: 2452910 - RNA, 19 nt, Artificial Sequence
  Description of Artificial Sequence: Synthetic oligonucleotide
  Sense strand starting at position 3712 of SEQ ID NO: 1887165
gugcauuuccucugaccca

SEQ ID NO: 2452911 - RNA, 19 nt, Artificial Sequence
  Description of Artificial Sequence: Synthetic oligonucleotide
  Antisense strand to SEQ ID NO: 2452910
ugggucagaggaaaugcac

SEQ ID NO: 2452912 - RNA, 19 nt, Artificial Sequence
  Description of Artificial Sequence: Synthetic oligonucleotide
  Sense strand starting at position 3781 of SEQ ID NO: 1887165
cgugauaacuacucuggaa

SEQ ID NO: 2452913 - RNA, 19 nt, Artificial Sequence
  Description of Artificial Sequence: Synthetic oligonucleotide
  Antisense strand to SEQ ID NO: 2452912
uuccagaguaguuaucacg

SEQ ID NO: 2452914 - RNA, 19 nt, Artificial Sequence
  Description of Artificial Sequence: Synthetic oligonucleotide
  Sense strand starting at position 3908 of SEQ ID NO: 1887165
gggauuguaaagugguuau

SEQ ID NO: 2452915 - RNA, 19 nt, Artificial Sequence
  Description of Artificial Sequence: Synthetic oligonucleotide
  Antisense strand to SEQ ID NO: 2452914
auaaccacuuuacaauccc

SEQ ID NO: 2452916 - RNA, 19 nt, Artificial Sequence
  Description of Artificial Sequence: Synthetic oligonucleotide
  Sense strand starting at position 3911 of SEQ ID NO: 1887165
auuguaaagugguuaugaa

SEQ ID NO: 2452917 - RNA, 19 nt, Artificial Sequence
  Description of Artificial Sequence: Synthetic oligonucleotide
  Antisense strand to SEQ ID NO: 2452916
uucauaaccacuuuacaau

SEQ ID NO: 2452918 - RNA, 19 nt, Artificial Sequence
  Description of Artificial Sequence: Synthetic oligonucleotide
  Sense strand starting at position 3912 of SEQ ID NO: 1887165
uuguaaagugguuaugaaa

SEQ ID NO: 2452919 - RNA, 19 nt, Artificial Sequence
  Description of Artificial Sequence: Synthetic oligonucleotide
  Antisense strand to SEQ ID NO: 2452918
uuucauaaccacuuuacaa

SEQ ID NO: 2452920 - RNA, 19 nt, Artificial Sequence
  Description of Artificial Sequence: Synthetic oligonucleotide
  Sense strand starting at position 53 of SEQ ID NO: 1887164
gggccauucugaccucgaa

SEQ ID NO: 2452921 - RNA, 19 nt, Artificial Sequence
  Description of Artificial Sequence: Synthetic oligonucleotide
  Antisense strand to SEQ ID NO: 2452920
uucgaggucagaauggccc

SEQ ID NO: 2452922 - RNA, 19 nt, Artificial Sequence
  Description of Artificial Sequence: Synthetic oligonucleotide
  Sense strand starting at position 291 of SEQ ID NO: 1887164
ggcugagucagcgucacuu

SEQ ID NO: 2452923 - RNA, 19 nt, Artificial Sequence
  Description of Artificial Sequence: Synthetic oligonucleotide
  Antisense strand to SEQ ID NO: 2452922
aagugacgcugacucagcc

SEQ ID NO: 2452924 - RNA, 19 nt, Artificial Sequence
  Description of Artificial Sequence: Synthetic oligonucleotide
  Sense strand starting at position 639 of SEQ ID NO: 1887164
ccacuaacucacuguggaa

SEQ ID NO: 2452925 - RNA, 19 nt, Artificial Sequence
  Description of Artificial Sequence: Synthetic oligonucleotide
  Antisense strand to SEQ ID NO: 2452924
uuccacagugaguuagugg

SEQ ID NO: 2452926 - RNA, 19 nt, Artificial Sequence
  Description of Artificial Sequence: Synthetic oligonucleotide
  Sense strand starting at position 716 of SEQ ID NO: 1887164
aggugagcucguucugcca

SEQ ID NO: 2452927 - RNA, 19 nt, Artificial Sequence
  Description of Artificial Sequence: Synthetic oligonucleotide
  Antisense strand to SEQ ID NO: 2452926
uggcagaacgagcucaccu

SEQ ID NO: 2452928 - RNA, 19 nt, Artificial Sequence
  Description of Artificial Sequence: Synthetic oligonucleotide
  Sense strand starting at position 868 of SEQ ID NO: 1887164
cgucuuacauucucccaua

SEQ ID NO: 2452929 - RNA, 19 nt, Artificial Sequence
  Description of Artificial Sequence: Synthetic oligonucleotide
  Antisense strand to SEQ ID NO: 2452928
uaugggagaauguaagacg

SEQ ID NO: 2452930 - RNA, 19 nt, Artificial Sequence
  Description of Artificial Sequence: Synthetic oligonucleotide
  Sense strand starting at position 899 of SEQ ID NO: 1887164
acucaauggugagcagaga

SEQ ID NO: 2452931 - RNA, 19 nt, Artificial Sequence
  Description of Artificial Sequence: Synthetic oligonucleotide
  Antisense strand to SEQ ID NO: 2452930
ucucugcucaccauugagu

SEQ ID NO: 2452932 - RNA, 19 nt, Artificial Sequence
  Description of Artificial Sequence: Synthetic oligonucleotide
  Sense strand starting at position 1229 of SEQ ID NO: 1887164
gaggcaauggccugguaaa

SEQ ID NO: 2452933 - RNA, 19 nt, Artificial Sequence
  Description of Artificial Sequence: Synthetic oligonucleotide
  Antisense strand to SEQ ID NO: 2452932
uuuaccaggccauugccuc

SEQ ID NO: 2452934 - RNA, 19 nt, Artificial Sequence
  Description of Artificial Sequence: Synthetic oligonucleotide
  Sense strand starting at position 1230 of SEQ ID NO: 1887164
aggcaauggccugguaaag

SEQ ID NO: 2452935 - RNA, 19 nt, Artificial Sequence
  Description of Artificial Sequence: Synthetic oligonucleotide
  Antisense strand to SEQ ID NO: 2452934
cuuuaccaggccauugccu

SEQ ID NO: 2452936 - RNA, 19 nt, Artificial Sequence
  Description of Artificial Sequence: Synthetic oligonucleotide
  Sense strand starting at position 1765 of SEQ ID NO: 1887164
uccugaguggcaggguaau

SEQ ID NO: 2452937 - RNA, 19 nt, Artificial Sequence
  Description of Artificial Sequence: Synthetic oligonucleotide
  Antisense strand to SEQ ID NO: 2452936
auuacccugccacucagga

SEQ ID NO: 2452938 - RNA, 19 nt, Artificial Sequence
  Description of Artificial Sequence: Synthetic oligonucleotide
  Sense strand starting at position 2261 of SEQ ID NO: 1887164
ccgguuacagcgagaguga

SEQ ID NO: 2452939 - RNA, 19 nt, Artificial Sequence
  Description of Artificial Sequence: Synthetic oligonucleotide
  Antisense strand to SEQ ID NO: 2452938
ucacucucgcuguaaccgg

SEQ ID NO: 2452940 - RNA, 19 nt, Artificial Sequence
  Description of Artificial Sequence: Synthetic oligonucleotide
  Sense strand starting at position 2262 of SEQ ID NO: 1887164
cgguuacagcgagagugau

SEQ ID NO: 2452941 - RNA, 19 nt, Artificial Sequence
  Description of Artificial Sequence: Synthetic oligonucleotide
  Antisense strand to SEQ ID NO: 2452940
aucacucucgcuguaaccg

SEQ ID NO: 2452942 - RNA, 19 nt, Artificial Sequence
  Description of Artificial Sequence: Synthetic oligonucleotide
  Sense strand starting at position 2274 of SEQ ID NO: 1887164
gagugauugagacgaggcu

SEQ ID NO: 2452943 - RNA, 19 nt, Artificial Sequence
  Description of Artificial Sequence: Synthetic oligonucleotide
  Antisense strand to SEQ ID NO: 2452942
agccucgucucaaucacuc

SEQ ID NO: 2452944 - RNA, 19 nt, Artificial Sequence
  Description of Artificial Sequence: Synthetic oligonucleotide
  Sense strand starting at position 2743 of SEQ ID NO: 1887164
ggaaguaguguccguugga

SEQ ID NO: 2452945 - RNA, 19 nt, Artificial Sequence
  Description of Artificial Sequence: Synthetic oligonucleotide
  Antisense strand to SEQ ID NO: 2452944
uccaacggacacuacuucc

SEQ ID NO: 2452946 - RNA, 19 nt, Artificial Sequence
  Description of Artificial Sequence: Synthetic oligonucleotide
  Sense strand starting at position 2744 of SEQ ID NO: 1887164
gaaguaguguccguuggag

SEQ ID NO: 2452947 - RNA, 19 nt, Artificial Sequence
  Description of Artificial Sequence: Synthetic oligonucleotide
  Antisense strand to SEQ ID NO: 2452946
cuccaacggacacuacuuc

SEQ ID NO: 2452948 - RNA, 19 nt, Artificial Sequence
  Description of Artificial Sequence: Synthetic oligonucleotide
  Sense strand starting at position 3029 of SEQ ID NO: 1887164
acagucuccucuguccaau

SEQ ID NO: 2452949 - RNA, 19 nt, Artificial Sequence
  Description of Artificial Sequence: Synthetic oligonucleotide
  Antisense strand to SEQ ID NO: 2452948
auuggacagaggagacugu

SEQ ID NO: 2452950 - RNA, 19 nt, Artificial Sequence
  Description of Artificial Sequence: Synthetic oligonucleotide
  Sense strand starting at position 3348 of SEQ ID NO: 1887164
gucucagggucccugagaa

SEQ ID NO: 2452951 - RNA, 19 nt, Artificial Sequence
  Description of Artificial Sequence: Synthetic oligonucleotide
  Antisense strand to SEQ ID NO: 2452950
uucucagggacccugagac

SEQ ID NO: 2452952 - RNA, 19 nt, Artificial Sequence
  Description of Artificial Sequence: Synthetic oligonucleotide
  Sense strand starting at position 3462 of SEQ ID NO: 1887164
uccaguuucucggucugau

SEQ ID NO: 2452953 - RNA, 19 nt, Artificial Sequence
  Description of Artificial Sequence: Synthetic oligonucleotide
  Antisense strand to SEQ ID NO: 2452952
aucagaccgagaaacugga

SEQ ID NO: 2452954 - RNA, 19 nt, Artificial Sequence
  Description of Artificial Sequence: Synthetic oligonucleotide
  Sense strand starting at position 3851 of SEQ ID NO: 1887164
cagaccuaggccggaaaua

SEQ ID NO: 2452955 - RNA, 19 nt, Artificial Sequence
  Description of Artificial Sequence: Synthetic oligonucleotide
  Antisense strand to SEQ ID NO: 2452954
uauuuccggccuaggucug

SEQ ID NO: 2452956 - RNA, 19 nt, Artificial Sequence
  Description of Artificial Sequence: Synthetic oligonucleotide
  Sense strand starting at position 3911 of SEQ ID NO: 1887164
gagacugacuuggauucua

SEQ ID NO: 2452957 - RNA, 19 nt, Artificial Sequence
  Description of Artificial Sequence: Synthetic oligonucleotide
  Antisense strand to SEQ ID NO: 2452956
uagaauccaagucagucuc

SEQ ID NO: 2452958 - RNA, 19 nt, Artificial Sequence
  Description of Artificial Sequence: Synthetic oligonucleotide
  Sense strand starting at position 3916 of SEQ ID NO: 1887164
ugacuuggauucuaaggaa

SEQ ID NO: 2452959 - RNA, 19 nt, Artificial Sequence
  Description of Artificial Sequence: Synthetic oligonucleotide
  Antisense strand to SEQ ID NO: 2452958
uuccuuagaauccaaguca

SEQ ID NO: 2452960 - RNA, 19 nt, Artificial Sequence
  Description of Artificial Sequence: Synthetic oligonucleotide
  Sense strand starting at position 3919 of SEQ ID NO: 1887164
cuuggauucuaaggaauuc

SEQ ID NO: 2452961 - RNA, 19 nt, Artificial Sequence
  Description of Artificial Sequence: Synthetic oligonucleotide
  Antisense strand to SEQ ID NO: 2452960
gaauuccuuagaauccaag

SEQ ID NO: 2452962 - RNA, 19 nt, Artificial Sequence
  Description of Artificial Sequence: Synthetic oligonucleotide
  Sense strand starting at position 3928 of SEQ ID NO: 1887164
uaaggaauucuguggucuc

SEQ ID NO: 2452963 - RNA, 19 nt, Artificial Sequence
  Description of Artificial Sequence: Synthetic oligonucleotide
  Antisense strand to SEQ ID NO: 2452962
gagaccacagaauuccuua

SEQ ID NO: 2452964 - RNA, 19 nt, Artificial Sequence
  Description of Artificial Sequence: Synthetic oligonucleotide
  Sense strand starting at position 3931 of SEQ ID NO: 1887164
ggaauucuguggucuccga

SEQ ID NO: 2452965 - RNA, 19 nt, Artificial Sequence
  Description of Artificial Sequence: Synthetic oligonucleotide
  Antisense strand to SEQ ID NO: 2452964
ucggagaccacagaauucc

SEQ ID NO: 2452966 - RNA, 19 nt, Artificial Sequence
  Description of Artificial Sequence: Synthetic oligonucleotide
  Sense strand starting at position 3935 of SEQ ID NO: 1887164
uucuguggucuccgaauac

SEQ ID NO: 2452967 - RNA, 19 nt, Artificial Sequence
  Description of Artificial Sequence: Synthetic oligonucleotide
  Antisense strand to SEQ ID NO: 2452966
guauucggagaccacagaa

SEQ ID NO: 2452968 - RNA, 19 nt, Artificial Sequence
  Description of Artificial Sequence: Synthetic oligonucleotide
  Sense strand starting at position 3958 of SEQ ID NO: 1887164
gaggccucuuagggcuaau

SEQ ID NO: 2452969 - RNA, 19 nt, Artificial Sequence
  Description of Artificial Sequence: Synthetic oligonucleotide
  Antisense strand to SEQ ID NO: 2452968
auuagcccuaagaggccuc

SEQ ID NO: 2452970 - RNA, 19 nt, Artificial Sequence
  Description of Artificial Sequence: Synthetic oligonucleotide
  Sense strand starting at position 3961 of SEQ ID NO: 1887164
gccucuuagggcuaauauc

SEQ ID NO: 2452971 - RNA, 19 nt, Artificial Sequence
  Description of Artificial Sequence: Synthetic oligonucleotide
  Antisense strand to SEQ ID NO: 2452970
gauauuagcccuaagaggc

SEQ ID NO: 2452972 - RNA, 19 nt, Artificial Sequence
  Description of Artificial Sequence: Synthetic oligonucleotide
  Sense strand starting at position 547 of SEQ ID NO: 1887166
gggagaggcccuuacaagu

SEQ ID NO: 2452973 - RNA, 19 nt, Artificial Sequence
  Description of Artificial Sequence: Synthetic oligonucleotide
  Antisense strand to SEQ ID NO: 2452972
acuuguaagggccucuccc

SEQ ID NO: 2452974 - RNA, 19 nt, Artificial Sequence
  Description of Artificial Sequence: Synthetic oligonucleotide
  Sense strand starting at position 1040 of SEQ ID NO: 1887166
aagcaauggacgcagaguu

SEQ ID NO: 2452975 - RNA, 19 nt, Artificial Sequence
  Description of Artificial Sequence: Synthetic oligonucleotide
  Antisense strand to SEQ ID NO: 2452974
aacucugcguccauugcuu

SEQ ID NO: 2452976 - RNA, 19 nt, Artificial Sequence
  Description of Artificial Sequence: Synthetic oligonucleotide
  Sense strand starting at position 1261 of SEQ ID NO: 1887166
aguuaagacuuggaauaag

SEQ ID NO: 2452977 - RNA, 19 nt, Artificial Sequence
  Description of Artificial Sequence: Synthetic oligonucleotide
  Antisense strand to SEQ ID NO: 2452976
cuuauuccaagucuuaacu

SEQ ID NO: 2452978 - RNA, 19 nt, Artificial Sequence
  Description of Artificial Sequence: Synthetic oligonucleotide
  Sense strand starting at position 1361 of SEQ ID NO: 1887166
gagguagaauguuugggau

SEQ ID NO: 2452979 - RNA, 19 nt, Artificial Sequence
  Description of Artificial Sequence: Synthetic oligonucleotide
  Antisense strand to SEQ ID NO: 2452978
aucccaaacauucuaccuc

SEQ ID NO: 2452980 - RNA, 19 nt, Artificial Sequence
  Description of Artificial Sequence: Synthetic oligonucleotide
  Sense strand starting at position 1363 of SEQ ID NO: 1887166
gguagaauguuugggauga

SEQ ID NO: 2452981 - RNA, 19 nt, Artificial Sequence
  Description of Artificial Sequence: Synthetic oligonucleotide
  Antisense strand to SEQ ID NO: 2452980
ucaucccaaacauucuacc

SEQ ID NO: 2452982 - RNA, 19 nt, Artificial Sequence
  Description of Artificial Sequence: Synthetic oligonucleotide
  Sense strand starting at position 1364 of SEQ ID NO: 1887166
guagaauguuugggaugag

SEQ ID NO: 2452983 - RNA, 19 nt, Artificial Sequence
  Description of Artificial Sequence: Synthetic oligonucleotide
  Antisense strand to SEQ ID NO: 2452982
cucaucccaaacauucuac

SEQ ID NO: 2452984 - RNA, 19 nt, Artificial Sequence
  Description of Artificial Sequence: Synthetic oligonucleotide
  Sense strand starting at position 1367 of SEQ ID NO: 1887166
gaauguuugggaugagcag

SEQ ID NO: 2452985 - RNA, 19 nt, Artificial Sequence
  Description of Artificial Sequence: Synthetic oligonucleotide
  Antisense strand to SEQ ID NO: 2452984
cugcucaucccaaacauuc

SEQ ID NO: 2452986 - RNA, 19 nt, Artificial Sequence
  Description of Artificial Sequence: Synthetic oligonucleotide
  Sense strand starting at position 1551 of SEQ ID NO: 1887166
ggccgagaucgguguugga

SEQ ID NO: 2452987 - RNA, 19 nt, Artificial Sequence
  Description of Artificial Sequence: Synthetic oligonucleotide
  Antisense strand to SEQ ID NO: 2452986
uccaacaccgaucucggcc

SEQ ID NO: 2452988 - RNA, 19 nt, Artificial Sequence
  Description of Artificial Sequence: Synthetic oligonucleotide
  Sense strand starting at position 1554 of SEQ ID NO: 1887166
cgagaucgguguuggaacu

SEQ ID NO: 2452989 - RNA, 19 nt, Artificial Sequence
  Description of Artificial Sequence: Synthetic oligonucleotide
  Antisense strand to SEQ ID NO: 2452988
aguuccaacaccgaucucg

SEQ ID NO: 2452990 - RNA, 19 nt, Artificial Sequence
  Description of Artificial Sequence: Synthetic oligonucleotide
  Sense strand starting at position 2426 of SEQ ID NO: 1887166
cgccuugcgcuuucaggau

SEQ ID NO: 2452991 - RNA, 19 nt, Artificial Sequence
  Description of Artificial Sequence: Synthetic oligonucleotide
  Antisense strand to SEQ ID NO: 2452990
auccugaaagcgcaaggcg

SEQ ID NO: 2452992 - RNA, 19 nt, Artificial Sequence
  Description of Artificial Sequence: Synthetic oligonucleotide
  Sense strand starting at position 2501 of SEQ ID NO: 1887166
ggcacucucccguguguaa

SEQ ID NO: 2452993 - RNA, 19 nt, Artificial Sequence
  Description of Artificial Sequence: Synthetic oligonucleotide
  Antisense strand to SEQ ID NO: 2452992
uuacacacgggagagugcc

SEQ ID NO: 2452994 - RNA, 19 nt, Artificial Sequence
  Description of Artificial Sequence: Synthetic oligonucleotide
  Sense strand starting at position 3123 of SEQ ID NO: 1887166
gucucacuguguuaccuaa

SEQ ID NO: 2452995 - RNA, 19 nt, Artificial Sequence
  Description of Artificial Sequence: Synthetic oligonucleotide
  Antisense strand to SEQ ID NO: 2452994
uuagguaacacagugagac

SEQ ID NO: 2452996 - RNA, 19 nt, Artificial Sequence
  Description of Artificial Sequence: Synthetic oligonucleotide
  Sense strand starting at position 3705 of SEQ ID NO: 1887166
gggucugaguguguuuacu

SEQ ID NO: 2452997 - RNA, 19 nt, Artificial Sequence
  Description of Artificial Sequence: Synthetic oligonucleotide
  Antisense strand to SEQ ID NO: 2452996
aguaaacacacucagaccc

SEQ ID NO: 2452998 - RNA, 19 nt, Artificial Sequence
  Description of Artificial Sequence: Synthetic oligonucleotide
  Sense strand starting at position 3711 of SEQ ID NO: 1887166
gaguguguuuacugcaguu

SEQ ID NO: 2452999 - RNA, 19 nt, Artificial Sequence
  Description of Artificial Sequence: Synthetic oligonucleotide
  Antisense strand to SEQ ID NO: 2452998
aacugcaguaaacacacuc

SEQ ID NO: 2453000 - RNA, 19 nt, Artificial Sequence
  Description of Artificial Sequence: Synthetic oligonucleotide
  Sense strand starting at position 3713 of SEQ ID NO: 1887166
guguguuuacugcaguuaa

SEQ ID NO: 2453001 - RNA, 19 nt, Artificial Sequence
  Description of Artificial Sequence: Synthetic oligonucleotide
  Antisense strand to SEQ ID NO: 2453000
uuaacugcaguaaacacac

SEQ ID NO: 2453002 - RNA, 19 nt, Artificial Sequence
  Description of Artificial Sequence: Synthetic oligonucleotide
  Sense strand starting at position 3875 of SEQ ID NO: 1887166
gcauaauccuugguggcuu

SEQ ID NO: 2453003 - RNA, 19 nt, Artificial Sequence
  Description of Artificial Sequence: Synthetic oligonucleotide
  Antisense strand to SEQ ID NO: 2453002
aagccaccaaggauuaugc

SEQ ID NO: 2453004 - RNA, 19 nt, Artificial Sequence
  Description of Artificial Sequence: Synthetic oligonucleotide
  Sense strand starting at position 262 of SEQ ID NO: 1887167
accauaaaugcugagcaua

SEQ ID NO: 2453005 - RNA, 19 nt, Artificial Sequence
  Description of Artificial Sequence: Synthetic oligonucleotide
  Antisense strand to SEQ ID NO: 2453004
uaugcucagcauuuauggu

SEQ ID NO: 2453006 - RNA, 19 nt, Artificial Sequence
  Description of Artificial Sequence: Synthetic oligonucleotide
  Sense strand starting at position 544 of SEQ ID NO: 1887167
cagggagagucccuuacaa

SEQ ID NO: 2453007 - RNA, 19 nt, Artificial Sequence
  Description of Artificial Sequence: Synthetic oligonucleotide
  Antisense strand to SEQ ID NO: 2453006
uuguaagggacucucccug

SEQ ID NO: 2453008 - RNA, 19 nt, Artificial Sequence
  Description of Artificial Sequence: Synthetic oligonucleotide
  Sense strand starting at position 546 of SEQ ID NO: 1887167
gggagagucccuuacaagu

SEQ ID NO: 2453009 - RNA, 19 nt, Artificial Sequence
  Description of Artificial Sequence: Synthetic oligonucleotide
  Antisense strand to SEQ ID NO: 2453008
acuuguaagggacucuccc

SEQ ID NO: 2453010 - RNA, 19 nt, Artificial Sequence
  Description of Artificial Sequence: Synthetic oligonucleotide
  Sense strand starting at position 1039 of SEQ ID NO: 1887167
aaggaauggacgcagaguu

SEQ ID NO: 2453011 - RNA, 19 nt, Artificial Sequence
  Description of Artificial Sequence: Synthetic oligonucleotide
  Antisense strand to SEQ ID NO: 2453010
aacucugcguccauuccuu

SEQ ID NO: 2453012 - RNA, 19 nt, Artificial Sequence
  Description of Artificial Sequence: Synthetic oligonucleotide
  Sense strand starting at position 1053 of SEQ ID NO: 1887167
gaguuagggugaagaguug

SEQ ID NO: 2453013 - RNA, 19 nt, Artificial Sequence
  Description of Artificial Sequence: Synthetic oligonucleotide
  Antisense strand to SEQ ID NO: 2453012
caacucuucacccuaacuc

SEQ ID NO: 2453014 - RNA, 19 nt, Artificial Sequence
  Description of Artificial Sequence: Synthetic oligonucleotide
  Sense strand starting at position 1219 of SEQ ID NO: 1887167
gaagguauacagugggcua

SEQ ID NO: 2453015 - RNA, 19 nt, Artificial Sequence
  Description of Artificial Sequence: Synthetic oligonucleotide
  Antisense strand to SEQ ID NO: 2453014
uagcccacuguauaccuuc

SEQ ID NO: 2453016 - RNA, 19 nt, Artificial Sequence
  Description of Artificial Sequence: Synthetic oligonucleotide
  Sense strand starting at position 1259 of SEQ ID NO: 1887167
acaguuacgacuuggaaua

SEQ ID NO: 2453017 - RNA, 19 nt, Artificial Sequence
  Description of Artificial Sequence: Synthetic oligonucleotide
  Antisense strand to SEQ ID NO: 2453016
uauuccaagucguaacugu

SEQ ID NO: 2453018 - RNA, 19 nt, Artificial Sequence
  Description of Artificial Sequence: Synthetic oligonucleotide
  Sense strand starting at position 1260 of SEQ ID NO: 1887167
caguuacgacuuggaauaa

SEQ ID NO: 2453019 - RNA, 19 nt, Artificial Sequence
  Description of Artificial Sequence: Synthetic oligonucleotide
  Antisense strand to SEQ ID NO: 2453018
uuauuccaagucguaacug

SEQ ID NO: 2453020 - RNA, 19 nt, Artificial Sequence
  Description of Artificial Sequence: Synthetic oligonucleotide
  Sense strand starting at position 1361 of SEQ ID NO: 1887167
gagguagaauguuuaggau

SEQ ID NO: 2453021 - RNA, 19 nt, Artificial Sequence
  Description of Artificial Sequence: Synthetic oligonucleotide
  Antisense strand to SEQ ID NO: 2453020
auccuaaacauucuaccuc

SEQ ID NO: 2453022 - RNA, 19 nt, Artificial Sequence
  Description of Artificial Sequence: Synthetic oligonucleotide
  Sense strand starting at position 1364 of SEQ ID NO: 1887167
guagaauguuuaggaugag

SEQ ID NO: 2453023 - RNA, 19 nt, Artificial Sequence
  Description of Artificial Sequence: Synthetic oligonucleotide
  Antisense strand to SEQ ID NO: 2453022
cucauccuaaacauucuac

SEQ ID NO: 2453024 - RNA, 19 nt, Artificial Sequence
  Description of Artificial Sequence: Synthetic oligonucleotide
  Sense strand starting at position 2427 of SEQ ID NO: 1887167
cgcguugcgcuuucaggau

SEQ ID NO: 2453025 - RNA, 19 nt, Artificial Sequence
  Description of Artificial Sequence: Synthetic oligonucleotide
  Antisense strand to SEQ ID NO: 2453024
auccugaaagcgcaacgcg

SEQ ID NO: 2453026 - RNA, 19 nt, Artificial Sequence
  Description of Artificial Sequence: Synthetic oligonucleotide
  Sense strand starting at position 2502 of SEQ ID NO: 1887167
ggcacacucccguguguaa

SEQ ID NO: 2453027 - RNA, 19 nt, Artificial Sequence
  Description of Artificial Sequence: Synthetic oligonucleotide
  Antisense strand to SEQ ID NO: 2453026
uuacacacgggagugugcc

SEQ ID NO: 2453028 - RNA, 19 nt, Artificial Sequence
  Description of Artificial Sequence: Synthetic oligonucleotide
  Sense strand starting at position 3436 of SEQ ID NO: 1887167
ugcuacaugccagucguaa

SEQ ID NO: 2453029 - RNA, 19 nt, Artificial Sequence
  Description of Artificial Sequence: Synthetic oligonucleotide
  Antisense strand to SEQ ID NO: 2453028
uuacgacuggcauguagca

SEQ ID NO: 2453030 - RNA, 19 nt, Artificial Sequence
  Description of Artificial Sequence: Synthetic oligonucleotide
  Sense strand starting at position 3438 of SEQ ID NO: 1887167
cuacaugccagucguaagu

SEQ ID NO: 2453031 - RNA, 19 nt, Artificial Sequence
  Description of Artificial Sequence: Synthetic oligonucleotide
  Antisense strand to SEQ ID NO: 2453030
acuuacgacuggcauguag

SEQ ID NO: 2453032 - RNA, 19 nt, Artificial Sequence
  Description of Artificial Sequence: Synthetic oligonucleotide
  Sense strand starting at position 3564 of SEQ ID NO: 1887167
cucuuaucucugcaaaggu

SEQ ID NO: 2453033 - RNA, 19 nt, Artificial Sequence
  Description of Artificial Sequence: Synthetic oligonucleotide
  Antisense strand to SEQ ID NO: 2453032
accuuugcagagauaagag

SEQ ID NO: 2453034 - RNA, 19 nt, Artificial Sequence
  Description of Artificial Sequence: Synthetic oligonucleotide
  Sense strand starting at position 3715 of SEQ ID NO: 1887167
gggucugaguguguuuagu

SEQ ID NO: 2453035 - RNA, 19 nt, Artificial Sequence
  Description of Artificial Sequence: Synthetic oligonucleotide
  Antisense strand to SEQ ID NO: 2453034
acuaaacacacucagaccc

SEQ ID NO: 2453036 - RNA, 19 nt, Artificial Sequence
  Description of Artificial Sequence: Synthetic oligonucleotide
  Sense strand starting at position 3721 of SEQ ID NO: 1887167
gaguguguuuagugcaguu

SEQ ID NO: 2453037 - RNA, 19 nt, Artificial Sequence
  Description of Artificial Sequence: Synthetic oligonucleotide
  Antisense strand to SEQ ID NO: 2453036
aacugcacuaaacacacuc

SEQ ID NO: 2453038 - RNA, 19 nt, Artificial Sequence
  Description of Artificial Sequence: Synthetic oligonucleotide
  Sense strand starting at position 3723 of SEQ ID NO: 1887167
guguguuuagugcaguuaa

SEQ ID NO: 2453039 - RNA, 19 nt, Artificial Sequence
  Description of Artificial Sequence: Synthetic oligonucleotide
  Antisense strand to SEQ ID NO: 2453038
uuaacugcacuaaacacac

SEQ ID NO: 2453040 - RNA, 19 nt, Artificial Sequence
  Description of Artificial Sequence: Synthetic oligonucleotide
  Sense strand starting at position 3885 of SEQ ID NO: 1887167
gcaugauccuugguggcuu

SEQ ID NO: 2453041 - RNA, 19 nt, Artificial Sequence
  Description of Artificial Sequence: Synthetic oligonucleotide
  Antisense strand to SEQ ID NO: 2453040
aagccaccaaggaucaugc

SEQ ID NO: 2453042 - RNA, 19 nt, Artificial Sequence
  Description of Artificial Sequence: Synthetic oligonucleotide
  Sense strand starting at position 168 of SEQ ID NO: 1887168
caggaauguggauguuaaa

SEQ ID NO: 2453043 - RNA, 19 nt, Artificial Sequence
  Description of Artificial Sequence: Synthetic oligonucleotide
  Antisense strand to SEQ ID NO: 2453042
uuuaacauccacauuccug

SEQ ID NO: 2453044 - RNA, 19 nt, Artificial Sequence
  Description of Artificial Sequence: Synthetic oligonucleotide
  Sense strand starting at position 270 of SEQ ID NO: 1887168
gucauagaagcucaucacu

SEQ ID NO: 2453045 - RNA, 19 nt, Artificial Sequence
  Description of Artificial Sequence: Synthetic oligonucleotide
  Antisense strand to SEQ ID NO: 2453044
agugaugagcuucuaugac

SEQ ID NO: 2453046 - RNA, 19 nt, Artificial Sequence
  Description of Artificial Sequence: Synthetic oligonucleotide
  Sense strand starting at position 324 of SEQ ID NO: 1887168
uuugaaaggagcugcuauu

SEQ ID NO: 2453047 - RNA, 19 nt, Artificial Sequence
  Description of Artificial Sequence: Synthetic oligonucleotide
  Antisense strand to SEQ ID NO: 2453046
aauagcagcuccuuucaaa

SEQ ID NO: 2453048 - RNA, 19 nt, Artificial Sequence
  Description of Artificial Sequence: Synthetic oligonucleotide
  Sense strand starting at position 355 of SEQ ID NO: 1887168
auauucuuacgguaaguaa

SEQ ID NO: 2453049 - RNA, 19 nt, Artificial Sequence
  Description of Artificial Sequence: Synthetic oligonucleotide
  Antisense strand to SEQ ID NO: 2453048
uuacuuaccguaagaauau

SEQ ID NO: 2453050 - RNA, 19 nt, Artificial Sequence
  Description of Artificial Sequence: Synthetic oligonucleotide
  Sense strand starting at position 437 of SEQ ID NO: 1887168
aaugaaguguacuuguaaa

SEQ ID NO: 2453051 - RNA, 19 nt, Artificial Sequence
  Description of Artificial Sequence: Synthetic oligonucleotide
  Antisense strand to SEQ ID NO: 2453050
uuuacaaguacacuucauu

SEQ ID NO: 2453052 - RNA, 19 nt, Artificial Sequence
  Description of Artificial Sequence: Synthetic oligonucleotide
  Sense strand starting at position 462 of SEQ ID NO: 1887168
auuuacagugcccguuaua

SEQ ID NO: 2453053 - RNA, 19 nt, Artificial Sequence
  Description of Artificial Sequence: Synthetic oligonucleotide
  Antisense strand to SEQ ID NO: 2453052
uauaacgggcacuguaaau

SEQ ID NO: 2453054 - RNA, 19 nt, Artificial Sequence
  Description of Artificial Sequence: Synthetic oligonucleotide
  Sense strand starting at position 471 of SEQ ID NO: 1887168
gcccguuauaugccaagca

SEQ ID NO: 2453055 - RNA, 19 nt, Artificial Sequence
  Description of Artificial Sequence: Synthetic oligonucleotide
  Antisense strand to SEQ ID NO: 2453054
ugcuuggcauauaacgggc

SEQ ID NO: 2453056 - RNA, 19 nt, Artificial Sequence
  Description of Artificial Sequence: Synthetic oligonucleotide
  Sense strand starting at position 487 of SEQ ID NO: 1887168
gcacuuugccuggacuuua

SEQ ID NO: 2453057 - RNA, 19 nt, Artificial Sequence
  Description of Artificial Sequence: Synthetic oligonucleotide
  Antisense strand to SEQ ID NO: 2453056
uaaaguccaggcaaagugc

SEQ ID NO: 2453058 - RNA, 19 nt, Artificial Sequence
  Description of Artificial Sequence: Synthetic oligonucleotide
  Sense strand starting at position 954 of SEQ ID NO: 1887168
agucuaaagacauggcagu

SEQ ID NO: 2453059 - RNA, 19 nt, Artificial Sequence
  Description of Artificial Sequence: Synthetic oligonucleotide
  Antisense strand to SEQ ID NO: 2453058
acugccaugucuuuagacu

SEQ ID NO: 2453060 - RNA, 19 nt, Artificial Sequence
  Description of Artificial Sequence: Synthetic oligonucleotide
  Sense strand starting at position 1114 of SEQ ID NO: 1887168
uuagaaauaugagcauauc

SEQ ID NO: 2453061 - RNA, 19 nt, Artificial Sequence
  Description of Artificial Sequence: Synthetic oligonucleotide
  Antisense strand to SEQ ID NO: 2453060
gauaugcucauauuucuaa

SEQ ID NO: 2453062 - RNA, 19 nt, Artificial Sequence
  Description of Artificial Sequence: Synthetic oligonucleotide
  Sense strand starting at position 1149 of SEQ ID NO: 1887168
uucccuuccuuugugauuu

SEQ ID NO: 2453063 - RNA, 19 nt, Artificial Sequence
  Description of Artificial Sequence: Synthetic oligonucleotide
  Antisense strand to SEQ ID NO: 2453062
aaaucacaaaggaagggaa

SEQ ID NO: 2453064 - RNA, 19 nt, Artificial Sequence
  Description of Artificial Sequence: Synthetic oligonucleotide
  Sense strand starting at position 1561 of SEQ ID NO: 1887168
gcauuaggguuucuagaug

SEQ ID NO: 2453065 - RNA, 19 nt, Artificial Sequence
  Description of Artificial Sequence: Synthetic oligonucleotide
  Antisense strand to SEQ ID NO: 2453064
caucuagaaacccuaaugc

SEQ ID NO: 2453066 - RNA, 19 nt, Artificial Sequence
  Description of Artificial Sequence: Synthetic oligonucleotide
  Sense strand starting at position 1771 of SEQ ID NO: 1887168
aggcacaguuugccaauaa

SEQ ID NO: 2453067 - RNA, 19 nt, Artificial Sequence
  Description of Artificial Sequence: Synthetic oligonucleotide
  Antisense strand to SEQ ID NO: 2453066
uuauuggcaaacugugccu

SEQ ID NO: 2453068 - RNA, 19 nt, Artificial Sequence
  Description of Artificial Sequence: Synthetic oligonucleotide
  Sense strand starting at position 1827 of SEQ ID NO: 1887168
gcagauuucuuugcagcca

SEQ ID NO: 2453069 - RNA, 19 nt, Artificial Sequence
  Description of Artificial Sequence: Synthetic oligonucleotide
  Antisense strand to SEQ ID NO: 2453068
uggcugcaaagaaaucugc

SEQ ID NO: 2453070 - RNA, 19 nt, Artificial Sequence
  Description of Artificial Sequence: Synthetic oligonucleotide
  Sense strand starting at position 1842 of SEQ ID NO: 1887168
gccaaaugcaagggauguu

SEQ ID NO: 2453071 - RNA, 19 nt, Artificial Sequence
  Description of Artificial Sequence: Synthetic oligonucleotide
  Antisense strand to SEQ ID NO: 2453070
aacaucccuugcauuuggc

SEQ ID NO: 2453072 - RNA, 19 nt, Artificial Sequence
  Description of Artificial Sequence: Synthetic oligonucleotide
  Sense strand starting at position 1982 of SEQ ID NO: 1887168
ggcgucuuuccaguuuauu

SEQ ID NO: 2453073 - RNA, 19 nt, Artificial Sequence
  Description of Artificial Sequence: Synthetic oligonucleotide
  Antisense strand to SEQ ID NO: 2453072
aauaaacuggaaagacgcc

SEQ ID NO: 2453074 - RNA, 19 nt, Artificial Sequence
  Description of Artificial Sequence: Synthetic oligonucleotide
  Sense strand starting at position 1983 of SEQ ID NO: 1887168
gcgucuuuccaguuuauuc

SEQ ID NO: 2453075 - RNA, 19 nt, Artificial Sequence
  Description of Artificial Sequence: Synthetic oligonucleotide
  Antisense strand to SEQ ID NO: 2453074
gaauaaacuggaaagacgc

SEQ ID NO: 2453076 - RNA, 19 nt, Artificial Sequence
  Description of Artificial Sequence: Synthetic oligonucleotide
  Sense strand starting at position 2008 of SEQ ID NO: 1887168
ugguccaaugcugggauau

SEQ ID NO: 2453077 - RNA, 19 nt, Artificial Sequence
  Description of Artificial Sequence: Synthetic oligonucleotide
  Antisense strand to SEQ ID NO: 2453076
auaucccagcauuggacca

SEQ ID NO: 2453078 - RNA, 19 nt, Artificial Sequence
  Description of Artificial Sequence: Synthetic oligonucleotide
  Sense strand starting at position 2009 of SEQ ID NO: 1887168
gguccaaugcugggauaug

SEQ ID NO: 2453079 - RNA, 19 nt, Artificial Sequence
  Description of Artificial Sequence: Synthetic oligonucleotide
  Antisense strand to SEQ ID NO: 2453078
cauaucccagcauuggacc

SEQ ID NO: 2453080 - RNA, 19 nt, Artificial Sequence
  Description of Artificial Sequence: Synthetic oligonucleotide
  Sense strand starting at position 2067 of SEQ ID NO: 1887168
agagacaguguccaacuuu

SEQ ID NO: 2453081 - RNA, 19 nt, Artificial Sequence
  Description of Artificial Sequence: Synthetic oligonucleotide
  Antisense strand to SEQ ID NO: 2453080
aaaguuggacacugucucu

SEQ ID NO: 2453082 - RNA, 19 nt, Artificial Sequence
  Description of Artificial Sequence: Synthetic oligonucleotide
  Sense strand starting at position 2086 of SEQ ID NO: 1887168
guuugcuuuccagaauaca

SEQ ID NO: 2453083 - RNA, 19 nt, Artificial Sequence
  Description of Artificial Sequence: Synthetic oligonucleotide
  Antisense strand to SEQ ID NO: 2453082
uguauucuggaaagcaaac

SEQ ID NO: 2453084 - RNA, 19 nt, Artificial Sequence
  Description of Artificial Sequence: Synthetic oligonucleotide
  Sense strand starting at position 2152 of SEQ ID NO: 1887168
ggagaagagcuuugaguau

SEQ ID NO: 2453085 - RNA, 19 nt, Artificial Sequence
  Description of Artificial Sequence: Synthetic oligonucleotide
  Antisense strand to SEQ ID NO: 2453084
auacucaaagcucuucucc

SEQ ID NO: 2453086 - RNA, 19 nt, Artificial Sequence
  Description of Artificial Sequence: Synthetic oligonucleotide
  Sense strand starting at position 2163 of SEQ ID NO: 1887168
uugaguaugccugaagccu

SEQ ID NO: 2453087 - RNA, 19 nt, Artificial Sequence
  Description of Artificial Sequence: Synthetic oligonucleotide
  Antisense strand to SEQ ID NO: 2453086
aggcuucaggcauacucaa

SEQ ID NO: 2453088 - RNA, 19 nt, Artificial Sequence
  Description of Artificial Sequence: Synthetic oligonucleotide
  Sense strand starting at position 2180 of SEQ ID NO: 1887168
cugugaugccaagacuguu

SEQ ID NO: 2453089 - RNA, 19 nt, Artificial Sequence
  Description of Artificial Sequence: Synthetic oligonucleotide
  Antisense strand to SEQ ID NO: 2453088
aacagucuuggcaucacag

SEQ ID NO: 2453090 - RNA, 19 nt, Artificial Sequence
  Description of Artificial Sequence: Synthetic oligonucleotide
  Sense strand starting at position 2259 of SEQ ID NO: 1887168
cagugaauucugcagagau

SEQ ID NO: 2453091 - RNA, 19 nt, Artificial Sequence
  Description of Artificial Sequence: Synthetic oligonucleotide
  Antisense strand to SEQ ID NO: 2453090
aucucugcagaauucacug

SEQ ID NO: 2453092 - RNA, 19 nt, Artificial Sequence
  Description of Artificial Sequence: Synthetic oligonucleotide
  Sense strand starting at position 2261 of SEQ ID NO: 1887168
gugaauucugcagagauua

SEQ ID NO: 2453093 - RNA, 19 nt, Artificial Sequence
  Description of Artificial Sequence: Synthetic oligonucleotide
  Antisense strand to SEQ ID NO: 2453092
uaaucucugcagaauucac

SEQ ID NO: 2453094 - RNA, 19 nt, Artificial Sequence
  Description of Artificial Sequence: Synthetic oligonucleotide
  Sense strand starting at position 2288 of SEQ ID NO: 1887168
gugggaaggaucugugucu

SEQ ID NO: 2453095 - RNA, 19 nt, Artificial Sequence
  Description of Artificial Sequence: Synthetic oligonucleotide
  Antisense strand to SEQ ID NO: 2453094
agacacagauccuucccac

SEQ ID NO: 2453096 - RNA, 19 nt, Artificial Sequence
  Description of Artificial Sequence: Synthetic oligonucleotide
  Sense strand starting at position 2289 of SEQ ID NO: 1887168
ugggaaggaucugugucua

SEQ ID NO: 2453097 - RNA, 19 nt, Artificial Sequence
  Description of Artificial Sequence: Synthetic oligonucleotide
  Antisense strand to SEQ ID NO: 2453096
uagacacagauccuuccca

SEQ ID NO: 2453098 - RNA, 19 nt, Artificial Sequence
  Description of Artificial Sequence: Synthetic oligonucleotide
  Sense strand starting at position 2293 of SEQ ID NO: 1887168
aaggaucugugucuacagu

SEQ ID NO: 2453099 - RNA, 19 nt, Artificial Sequence
  Description of Artificial Sequence: Synthetic oligonucleotide
  Antisense strand to SEQ ID NO: 2453098
acuguagacacagauccuu

SEQ ID NO: 2453100 - RNA, 19 nt, Artificial Sequence
  Description of Artificial Sequence: Synthetic oligonucleotide
  Sense strand starting at position 2514 of SEQ ID NO: 1887168
acauguguuguacauuaga

SEQ ID NO: 2453101 - RNA, 19 nt, Artificial Sequence
  Description of Artificial Sequence: Synthetic oligonucleotide
  Antisense strand to SEQ ID NO: 2453100
ucuaauguacaacacaugu

SEQ ID NO: 2453102 - RNA, 19 nt, Artificial Sequence
  Description of Artificial Sequence: Synthetic oligonucleotide
  Sense strand starting at position 2569 of SEQ ID NO: 1887168
uuuaaugugcccgaaucaa

SEQ ID NO: 2453103 - RNA, 19 nt, Artificial Sequence
  Description of Artificial Sequence: Synthetic oligonucleotide
  Antisense strand to SEQ ID NO: 2453102
uugauucgggcacauuaaa

SEQ ID NO: 2453104 - RNA, 19 nt, Artificial Sequence
  Description of Artificial Sequence: Synthetic oligonucleotide
  Sense strand starting at position 2664 of SEQ ID NO: 1887168
ggcagaauaggcuggaaga

SEQ ID NO: 2453105 - RNA, 19 nt, Artificial Sequence
  Description of Artificial Sequence: Synthetic oligonucleotide
  Antisense strand to SEQ ID NO: 2453104
ucuuccagccuauucugcc

SEQ ID NO: 2453106 - RNA, 19 nt, Artificial Sequence
  Description of Artificial Sequence: Synthetic oligonucleotide
  Sense strand starting at position 2827 of SEQ ID NO: 1887168
uugcaugaguuuccuggaa

SEQ ID NO: 2453107 - RNA, 19 nt, Artificial Sequence
  Description of Artificial Sequence: Synthetic oligonucleotide
  Antisense strand to SEQ ID NO: 2453106
uuccaggaaacucaugcaa

SEQ ID NO: 2453108 - RNA, 19 nt, Artificial Sequence
  Description of Artificial Sequence: Synthetic oligonucleotide
  Sense strand starting at position 2831 of SEQ ID NO: 1887168
augaguuuccuggaauucu

SEQ ID NO: 2453109 - RNA, 19 nt, Artificial Sequence
  Description of Artificial Sequence: Synthetic oligonucleotide
  Antisense strand to SEQ ID NO: 2453108
agaauuccaggaaacucau

SEQ ID NO: 2453110 - RNA, 19 nt, Artificial Sequence
  Description of Artificial Sequence: Synthetic oligonucleotide
  Sense strand starting at position 3118 of SEQ ID NO: 1887168
acucaagagcuuugcaaau

SEQ ID NO: 2453111 - RNA, 19 nt, Artificial Sequence
  Description of Artificial Sequence: Synthetic oligonucleotide
  Antisense strand to SEQ ID NO: 2453110
auuugcaaagcucuugagu

SEQ ID NO: 2453112 - RNA, 19 nt, Artificial Sequence
  Description of Artificial Sequence: Synthetic oligonucleotide
  Sense strand starting at position 3263 of SEQ ID NO: 1887168
guuagauugucgcugauuu

SEQ ID NO: 2453113 - RNA, 19 nt, Artificial Sequence
  Description of Artificial Sequence: Synthetic oligonucleotide
  Antisense strand to SEQ ID NO: 2453112
aaaucagcgacaaucuaac

SEQ ID NO: 2453114 - RNA, 19 nt, Artificial Sequence
  Description of Artificial Sequence: Synthetic oligonucleotide
  Sense strand starting at position 3264 of SEQ ID NO: 1887168
uuagauugucgcugauuuc

SEQ ID NO: 2453115 - RNA, 19 nt, Artificial Sequence
  Description of Artificial Sequence: Synthetic oligonucleotide
  Antisense strand to SEQ ID NO: 2453114
gaaaucagcgacaaucuaa

SEQ ID NO: 2453116 - RNA, 19 nt, Artificial Sequence
  Description of Artificial Sequence: Synthetic oligonucleotide
  Sense strand starting at position 3699 of SEQ ID NO: 1887168
ggcuucuggccagauagga

SEQ ID NO: 2453117 - RNA, 19 nt, Artificial Sequence
  Description of Artificial Sequence: Synthetic oligonucleotide
  Antisense strand to SEQ ID NO: 2453116
uccuaucuggccagaagcc

SEQ ID NO: 2453118 - RNA, 19 nt, Artificial Sequence
  Description of Artificial Sequence: Synthetic oligonucleotide
  Sense strand starting at position 3712 of SEQ ID NO: 1887168
auaggagcagucugauuag

SEQ ID NO: 2453119 - RNA, 19 nt, Artificial Sequence
  Description of Artificial Sequence: Synthetic oligonucleotide
  Antisense strand to SEQ ID NO: 2453118
cuaaucagacugcuccuau

SEQ ID NO: 2453120 - RNA, 19 nt, Artificial Sequence
  Description of Artificial Sequence: Synthetic oligonucleotide
  Sense strand starting at position 3944 of SEQ ID NO: 1887168
cccagagucaggugaggaa

SEQ ID NO: 2453121 - RNA, 19 nt, Artificial Sequence
  Description of Artificial Sequence: Synthetic oligonucleotide
  Antisense strand to SEQ ID NO: 2453120
uuccucaccugacucuggg

SEQ ID NO: 2453122 - RNA, 19 nt, Artificial Sequence
  Description of Artificial Sequence: Synthetic oligonucleotide
  Sense strand starting at position 23 of SEQ ID NO: 1887169
cagcauucccugugcagga

SEQ ID NO: 2453123 - RNA, 19 nt, Artificial Sequence
  Description of Artificial Sequence: Synthetic oligonucleotide
  Antisense strand to SEQ ID NO: 2453122
uccugcacagggaaugcug

SEQ ID NO: 2453124 - RNA, 19 nt, Artificial Sequence
  Description of Artificial Sequence: Synthetic oligonucleotide
  Sense strand starting at position 974 of SEQ ID NO: 1887169
cgaggaaauccuggcaguu

SEQ ID NO: 2453125 - RNA, 19 nt, Artificial Sequence
  Description of Artificial Sequence: Synthetic oligonucleotide
  Antisense strand to SEQ ID NO: 2453124
aacugccaggauuuccucg

SEQ ID NO: 2453126 - RNA, 19 nt, Artificial Sequence
  Description of Artificial Sequence: Synthetic oligonucleotide
  Sense strand starting at position 1159 of SEQ ID NO: 1887169
guuugcaccucucagcuau

SEQ ID NO: 2453127 - RNA, 19 nt, Artificial Sequence
  Description of Artificial Sequence: Synthetic oligonucleotide
  Antisense strand to SEQ ID NO: 2453126
auagcugagaggugcaaac

SEQ ID NO: 2453128 - RNA, 19 nt, Artificial Sequence
  Description of Artificial Sequence: Synthetic oligonucleotide
  Sense strand starting at position 1170 of SEQ ID NO: 1887169
ucagcuaucucuuguuucu

SEQ ID NO: 2453129 - RNA, 19 nt, Artificial Sequence
  Description of Artificial Sequence: Synthetic oligonucleotide
  Antisense strand to SEQ ID NO: 2453128
agaaacaagagauagcuga

SEQ ID NO: 2453130 - RNA, 19 nt, Artificial Sequence
  Description of Artificial Sequence: Synthetic oligonucleotide
  Sense strand starting at position 2276 of SEQ ID NO: 1887169
ggaggugagcugugcuaau

SEQ ID NO: 2453131 - RNA, 19 nt, Artificial Sequence
  Description of Artificial Sequence: Synthetic oligonucleotide
  Antisense strand to SEQ ID NO: 2453130
auuagcacagcucaccucc

SEQ ID NO: 2453132 - RNA, 19 nt, Artificial Sequence
  Description of Artificial Sequence: Synthetic oligonucleotide
  Sense strand starting at position 2618 of SEQ ID NO: 1887169
ugaagauucugcucagcac

SEQ ID NO: 2453133 - RNA, 19 nt, Artificial Sequence
  Description of Artificial Sequence: Synthetic oligonucleotide
  Antisense strand to SEQ ID NO: 2453132
gugcugagcagaaucuuca

SEQ ID NO: 2453134 - RNA, 19 nt, Artificial Sequence
  Description of Artificial Sequence: Synthetic oligonucleotide
  Sense strand starting at position 2638 of SEQ ID NO: 1887169
ccagguucuggcugucaaa

SEQ ID NO: 2453135 - RNA, 19 nt, Artificial Sequence
  Description of Artificial Sequence: Synthetic oligonucleotide
  Antisense strand to SEQ ID NO: 2453134
uuugacagccagaaccugg

SEQ ID NO: 2453136 - RNA, 19 nt, Artificial Sequence
  Description of Artificial Sequence: Synthetic oligonucleotide
  Sense strand starting at position 2693 of SEQ ID NO: 1887169
gccaauucugccuguggca

SEQ ID NO: 2453137 - RNA, 19 nt, Artificial Sequence
  Description of Artificial Sequence: Synthetic oligonucleotide
  Antisense strand to SEQ ID NO: 2453136
ugccacaggcagaauuggc

SEQ ID NO: 2453138 - RNA, 19 nt, Artificial Sequence
  Description of Artificial Sequence: Synthetic oligonucleotide
  Sense strand starting at position 2706 of SEQ ID NO: 1887169
guggcaucuccguggucuu

SEQ ID NO: 2453139 - RNA, 19 nt, Artificial Sequence
  Description of Artificial Sequence: Synthetic oligonucleotide
  Antisense strand to SEQ ID NO: 2453138
aagaccacggagaugccac

SEQ ID NO: 2453140 - RNA, 19 nt, Artificial Sequence
  Description of Artificial Sequence: Synthetic oligonucleotide
  Sense strand starting at position 2869 of SEQ ID NO: 1887169
gggaaagucuccuugggag

SEQ ID NO: 2453141 - RNA, 19 nt, Artificial Sequence
  Description of Artificial Sequence: Synthetic oligonucleotide
  Antisense strand to SEQ ID NO: 2453140
cucccaaggagacuuuccc

SEQ ID NO: 2453142 - RNA, 19 nt, Artificial Sequence
  Description of Artificial Sequence: Synthetic oligonucleotide
  Sense strand starting at position 2871 of SEQ ID NO: 1887169
gaaagucuccuugggagag

SEQ ID NO: 2453143 - RNA, 19 nt, Artificial Sequence
  Description of Artificial Sequence: Synthetic oligonucleotide
  Antisense strand to SEQ ID NO: 2453142
cucucccaaggagacuuuc

SEQ ID NO: 2453144 - RNA, 19 nt, Artificial Sequence
  Description of Artificial Sequence: Synthetic oligonucleotide
  Sense strand starting at position 2902 of SEQ ID NO: 1887169
ggacaugagucaccacaac

SEQ ID NO: 2453145 - RNA, 19 nt, Artificial Sequence
  Description of Artificial Sequence: Synthetic oligonucleotide
  Antisense strand to SEQ ID NO: 2453144
guuguggugacucaugucc

SEQ ID NO: 2453146 - RNA, 19 nt, Artificial Sequence
  Description of Artificial Sequence: Synthetic oligonucleotide
  Sense strand starting at position 3013 of SEQ ID NO: 1887169
aggauugauucugucugga

SEQ ID NO: 2453147 - RNA, 19 nt, Artificial Sequence
  Description of Artificial Sequence: Synthetic oligonucleotide
  Antisense strand to SEQ ID NO: 2453146
uccagacagaaucaauccu

SEQ ID NO: 2453148 - RNA, 19 nt, Artificial Sequence
  Description of Artificial Sequence: Synthetic oligonucleotide
  Sense strand starting at position 3015 of SEQ ID NO: 1887169
gauugauucugucuggauu

SEQ ID NO: 2453149 - RNA, 19 nt, Artificial Sequence
  Description of Artificial Sequence: Synthetic oligonucleotide
  Antisense strand to SEQ ID NO: 2453148
aauccagacagaaucaauc

SEQ ID NO: 2453150 - RNA, 19 nt, Artificial Sequence
  Description of Artificial Sequence: Synthetic oligonucleotide
  Sense strand starting at position 3016 of SEQ ID NO: 1887169
auugauucugucuggauuc

SEQ ID NO: 2453151 - RNA, 19 nt, Artificial Sequence
  Description of Artificial Sequence: Synthetic oligonucleotide
  Antisense strand to SEQ ID NO: 2453150
gaauccagacagaaucaau

SEQ ID NO: 2453152 - RNA, 19 nt, Artificial Sequence
  Description of Artificial Sequence: Synthetic oligonucleotide
  Sense strand starting at position 3120 of SEQ ID NO: 1887169
cuccauauucuccacgaga

SEQ ID NO: 2453153 - RNA, 19 nt, Artificial Sequence
  Description of Artificial Sequence: Synthetic oligonucleotide
  Antisense strand to SEQ ID NO: 2453152
ucucguggagaauauggag

SEQ ID NO: 2453154 - RNA, 19 nt, Artificial Sequence
  Description of Artificial Sequence: Synthetic oligonucleotide
  Sense strand starting at position 3122 of SEQ ID NO: 1887169
ccauauucuccacgagaca

SEQ ID NO: 2453155 - RNA, 19 nt, Artificial Sequence
  Description of Artificial Sequence: Synthetic oligonucleotide
  Antisense strand to SEQ ID NO: 2453154
ugucucguggagaauaugg

SEQ ID NO: 2453156 - RNA, 19 nt, Artificial Sequence
  Description of Artificial Sequence: Synthetic oligonucleotide
  Sense strand starting at position 3351 of SEQ ID NO: 1887169
ggagccuggucccagaagu

SEQ ID NO: 2453157 - RNA, 19 nt, Artificial Sequence
  Description of Artificial Sequence: Synthetic oligonucleotide
  Antisense strand to SEQ ID NO: 2453156
acuucugggaccaggcucc

SEQ ID NO: 2453158 - RNA, 19 nt, Artificial Sequence
  Description of Artificial Sequence: Synthetic oligonucleotide
  Sense strand starting at position 3423 of SEQ ID NO: 1887169
gcaacucuggcacaugauu

SEQ ID NO: 2453159 - RNA, 19 nt, Artificial Sequence
  Description of Artificial Sequence: Synthetic oligonucleotide
  Antisense strand to SEQ ID NO: 2453158
aaucaugugccagaguugc

SEQ ID NO: 2453160 - RNA, 19 nt, Artificial Sequence
  Description of Artificial Sequence: Synthetic oligonucleotide
  Sense strand starting at position 36 of SEQ ID NO: 1887170
gcuaauugacgguaauacu

SEQ ID NO: 2453161 - RNA, 19 nt, Artificial Sequence
  Description of Artificial Sequence: Synthetic oligonucleotide
  Antisense strand to SEQ ID NO: 2453160
aguauuaccgucaauuagc

SEQ ID NO: 2453162 - RNA, 19 nt, Artificial Sequence
  Description of Artificial Sequence: Synthetic oligonucleotide
  Sense strand starting at position 44 of SEQ ID NO: 1887170
acgguaauacuguaauuga

SEQ ID NO: 2453163 - RNA, 19 nt, Artificial Sequence
  Description of Artificial Sequence: Synthetic oligonucleotide
  Antisense strand to SEQ ID NO: 2453162
ucaauuacaguauuaccgu

SEQ ID NO: 2453164 - RNA, 19 nt, Artificial Sequence
  Description of Artificial Sequence: Synthetic oligonucleotide
  Sense strand starting at position 47 of SEQ ID NO: 1887170
guaauacuguaauugaaca

SEQ ID NO: 2453165 - RNA, 19 nt, Artificial Sequence
  Description of Artificial Sequence: Synthetic oligonucleotide
  Antisense strand to SEQ ID NO: 2453164
uguucaauuacaguauuac

SEQ ID NO: 2453166 - RNA, 19 nt, Artificial Sequence
  Description of Artificial Sequence: Synthetic oligonucleotide
  Sense strand starting at position 52 of SEQ ID NO: 1887170
acuguaauugaacaguauu

SEQ ID NO: 2453167 - RNA, 19 nt, Artificial Sequence
  Description of Artificial Sequence: Synthetic oligonucleotide
  Antisense strand to SEQ ID NO: 2453166
aauacuguucaauuacagu

SEQ ID NO: 2453168 - RNA, 19 nt, Artificial Sequence
  Description of Artificial Sequence: Synthetic oligonucleotide
  Sense strand starting at position 115 of SEQ ID NO: 1887170
aguccacuucuauggaaga

SEQ ID NO: 2453169 - RNA, 19 nt, Artificial Sequence
  Description of Artificial Sequence: Synthetic oligonucleotide
  Antisense strand to SEQ ID NO: 2453168
ucuuccauagaaguggacu

SEQ ID NO: 2453170 - RNA, 19 nt, Artificial Sequence
  Description of Artificial Sequence: Synthetic oligonucleotide
  Sense strand starting at position 178 of SEQ ID NO: 1887170
ggagaaugaucugaucagg

SEQ ID NO: 2453171 - RNA, 19 nt, Artificial Sequence
  Description of Artificial Sequence: Synthetic oligonucleotide
  Antisense strand to SEQ ID NO: 2453170
ccugaucagaucauucucc

SEQ ID NO: 2453172 - RNA, 19 nt, Artificial Sequence
  Description of Artificial Sequence: Synthetic oligonucleotide
  Sense strand starting at position 181 of SEQ ID NO: 1887170
gaaugaucugaucaggugu

SEQ ID NO: 2453173 - RNA, 19 nt, Artificial Sequence
  Description of Artificial Sequence: Synthetic oligonucleotide
  Antisense strand to SEQ ID NO: 2453172
acaccugaucagaucauuc

SEQ ID NO: 2453174 - RNA, 19 nt, Artificial Sequence
  Description of Artificial Sequence: Synthetic oligonucleotide
  Sense strand starting at position 197 of SEQ ID NO: 1887170
ugucuauuagcuuggauga

SEQ ID NO: 2453175 - RNA, 19 nt, Artificial Sequence
  Description of Artificial Sequence: Synthetic oligonucleotide
  Antisense strand to SEQ ID NO: 2453174
ucauccaagcuaauagaca

SEQ ID NO: 2453176 - RNA, 19 nt, Artificial Sequence
  Description of Artificial Sequence: Synthetic oligonucleotide
  Sense strand starting at position 198 of SEQ ID NO: 1887170
gucuauuagcuuggaugaa

SEQ ID NO: 2453177 - RNA, 19 nt, Artificial Sequence
  Description of Artificial Sequence: Synthetic oligonucleotide
  Antisense strand to SEQ ID NO: 2453176
uucauccaagcuaauagac

SEQ ID NO: 2453178 - RNA, 19 nt, Artificial Sequence
  Description of Artificial Sequence: Synthetic oligonucleotide
  Sense strand starting at position 288 of SEQ ID NO: 1887170
acuuaauuacagcgaaucu

SEQ ID NO: 2453179 - RNA, 19 nt, Artificial Sequence
  Description of Artificial Sequence: Synthetic oligonucleotide
  Antisense strand to SEQ ID NO: 2453178
agauucgcuguaauuaagu

SEQ ID NO: 2453180 - RNA, 19 nt, Artificial Sequence
  Description of Artificial Sequence: Synthetic oligonucleotide
  Sense strand starting at position 300 of SEQ ID NO: 1887170
cgaaucuugcaguaguaaa

SEQ ID NO: 2453181 - RNA, 19 nt, Artificial Sequence
  Description of Artificial Sequence: Synthetic oligonucleotide
  Antisense strand to SEQ ID NO: 2453180
uuuacuacugcaagauucg

SEQ ID NO: 2453182 - RNA, 19 nt, Artificial Sequence
  Description of Artificial Sequence: Synthetic oligonucleotide
  Sense strand starting at position 869 of SEQ ID NO: 1887170
cgguauaaccaucauuguu

SEQ ID NO: 2453183 - RNA, 19 nt, Artificial Sequence
  Description of Artificial Sequence: Synthetic oligonucleotide
  Antisense strand to SEQ ID NO: 2453182
aacaaugaugguuauaccg

SEQ ID NO: 2453184 - RNA, 19 nt, Artificial Sequence
  Description of Artificial Sequence: Synthetic oligonucleotide
  Sense strand starting at position 2142 of SEQ ID NO: 1887170
ccuuuauuccuacggagag

SEQ ID NO: 2453185 - RNA, 19 nt, Artificial Sequence
  Description of Artificial Sequence: Synthetic oligonucleotide
  Antisense strand to SEQ ID NO: 2453184
cucuccguaggaauaaagg

SEQ ID NO: 2453186 - RNA, 19 nt, Artificial Sequence
  Description of Artificial Sequence: Synthetic oligonucleotide
  Sense strand starting at position 2279 of SEQ ID NO: 1887170
ucugaaugucuuuauuggu

SEQ ID NO: 2453187 - RNA, 19 nt, Artificial Sequence
  Description of Artificial Sequence: Synthetic oligonucleotide
  Antisense strand to SEQ ID NO: 2453186
accaauaaagacauucaga

SEQ ID NO: 2453188 - RNA, 19 nt, Artificial Sequence
  Description of Artificial Sequence: Synthetic oligonucleotide
  Sense strand starting at position 2284 of SEQ ID NO: 1887170
augucuuuauugguuggau

SEQ ID NO: 2453189 - RNA, 19 nt, Artificial Sequence
  Description of Artificial Sequence: Synthetic oligonucleotide
  Antisense strand to SEQ ID NO: 2453188
auccaaccaauaaagacau

SEQ ID NO: 2453190 - RNA, 19 nt, Artificial Sequence
  Description of Artificial Sequence: Synthetic oligonucleotide
  Sense strand starting at position 2285 of SEQ ID NO: 1887170
ugucuuuauugguuggaua

SEQ ID NO: 2453191 - RNA, 19 nt, Artificial Sequence
  Description of Artificial Sequence: Synthetic oligonucleotide
  Antisense strand to SEQ ID NO: 2453190
uauccaaccaauaaagaca

SEQ ID NO: 2453192 - RNA, 19 nt, Artificial Sequence
  Description of Artificial Sequence: Synthetic oligonucleotide
  Sense strand starting at position 2286 of SEQ ID NO: 1887170
gucuuuauugguuggauac

SEQ ID NO: 2453193 - RNA, 19 nt, Artificial Sequence
  Description of Artificial Sequence: Synthetic oligonucleotide
  Antisense strand to SEQ ID NO: 2453192
guauccaaccaauaaagac

SEQ ID NO: 2453194 - RNA, 19 nt, Artificial Sequence
  Description of Artificial Sequence: Synthetic oligonucleotide
  Sense strand starting at position 2309 of SEQ ID NO: 1887170
cccucacgugguuaagagu

SEQ ID NO: 2453195 - RNA, 19 nt, Artificial Sequence
  Description of Artificial Sequence: Synthetic oligonucleotide
  Antisense strand to SEQ ID NO: 2453194
acucuuaaccacgugaggg

SEQ ID NO: 2453196 - RNA, 19 nt, Artificial Sequence
  Description of Artificial Sequence: Synthetic oligonucleotide
  Sense strand starting at position 2316 of SEQ ID NO: 1887170
gugguuaagagugagcuaa

SEQ ID NO: 2453197 - RNA, 19 nt, Artificial Sequence
  Description of Artificial Sequence: Synthetic oligonucleotide
  Antisense strand to SEQ ID NO: 2453196
uuagcucacucuuaaccac

SEQ ID NO: 2453198 - RNA, 19 nt, Artificial Sequence
  Description of Artificial Sequence: Synthetic oligonucleotide
  Sense strand starting at position 2318 of SEQ ID NO: 1887170
gguuaagagugagcuaaga

SEQ ID NO: 2453199 - RNA, 19 nt, Artificial Sequence
  Description of Artificial Sequence: Synthetic oligonucleotide
  Antisense strand to SEQ ID NO: 2453198
ucuuagcucacucuuaacc

SEQ ID NO: 2453200 - RNA, 19 nt, Artificial Sequence
  Description of Artificial Sequence: Synthetic oligonucleotide
  Sense strand starting at position 2467 of SEQ ID NO: 1887170
gcagucuuugaauaaguag

SEQ ID NO: 2453201 - RNA, 19 nt, Artificial Sequence
  Description of Artificial Sequence: Synthetic oligonucleotide
  Antisense strand to SEQ ID NO: 2453200
cuacuuauucaaagacugc

SEQ ID NO: 2453202 - RNA, 19 nt, Artificial Sequence
  Description of Artificial Sequence: Synthetic oligonucleotide
  Sense strand starting at position 2470 of SEQ ID NO: 1887170
gucuuugaauaaguaguuu

SEQ ID NO: 2453203 - RNA, 19 nt, Artificial Sequence
  Description of Artificial Sequence: Synthetic oligonucleotide
  Antisense strand to SEQ ID NO: 2453202
aaacuacuuauucaaagac

SEQ ID NO: 2453204 - RNA, 19 nt, Artificial Sequence
  Description of Artificial Sequence: Synthetic oligonucleotide
  Sense strand starting at position 2549 of SEQ ID NO: 1887170
ucacuugauucugugaaga

SEQ ID NO: 2453205 - RNA, 19 nt, Artificial Sequence
  Description of Artificial Sequence: Synthetic oligonucleotide
  Antisense strand to SEQ ID NO: 2453204
ucuucacagaaucaaguga

SEQ ID NO: 2453206 - RNA, 19 nt, Artificial Sequence
  Description of Artificial Sequence: Synthetic oligonucleotide
  Sense strand starting at position 2560 of SEQ ID NO: 1887170
ugugaagaaagugguguua

SEQ ID NO: 2453207 - RNA, 19 nt, Artificial Sequence
  Description of Artificial Sequence: Synthetic oligonucleotide
  Antisense strand to SEQ ID NO: 2453206
uaacaccacuuucuucaca

SEQ ID NO: 2453208 - RNA, 19 nt, Artificial Sequence
  Description of Artificial Sequence: Synthetic oligonucleotide
  Sense strand starting at position 2573 of SEQ ID NO: 1887170
guguuacucucauuucuua

SEQ ID NO: 2453209 - RNA, 19 nt, Artificial Sequence
  Description of Artificial Sequence: Synthetic oligonucleotide
  Antisense strand to SEQ ID NO: 2453208
uaagaaaugagaguaacac

SEQ ID NO: 2453210 - RNA, 19 nt, Artificial Sequence
  Description of Artificial Sequence: Synthetic oligonucleotide
  Sense strand starting at position 2723 of SEQ ID NO: 1887170
caacucugucuccggagau

SEQ ID NO: 2453211 - RNA, 19 nt, Artificial Sequence
  Description of Artificial Sequence: Synthetic oligonucleotide
  Antisense strand to SEQ ID NO: 2453210
aucuccggagacagaguug

SEQ ID NO: 2453212 - RNA, 19 nt, Artificial Sequence
  Description of Artificial Sequence: Synthetic oligonucleotide
  Sense strand starting at position 2749 of SEQ ID NO: 1887170
ugcaauugucuguauaaca

SEQ ID NO: 2453213 - RNA, 19 nt, Artificial Sequence
  Description of Artificial Sequence: Synthetic oligonucleotide
  Antisense strand to SEQ ID NO: 2453212
uguuauacagacaauugca

SEQ ID NO: 2453214 - RNA, 19 nt, Artificial Sequence
  Description of Artificial Sequence: Synthetic oligonucleotide
  Sense strand starting at position 2823 of SEQ ID NO: 1887170
accacagucccuugaggua

SEQ ID NO: 2453215 - RNA, 19 nt, Artificial Sequence
  Description of Artificial Sequence: Synthetic oligonucleotide
  Antisense strand to SEQ ID NO: 2453214
uaccucaagggacuguggu

SEQ ID NO: 2453216 - RNA, 19 nt, Artificial Sequence
  Description of Artificial Sequence: Synthetic oligonucleotide
  Sense strand starting at position 2828 of SEQ ID NO: 1887170
agucccuugagguauagga

SEQ ID NO: 2453217 - RNA, 19 nt, Artificial Sequence
  Description of Artificial Sequence: Synthetic oligonucleotide
  Antisense strand to SEQ ID NO: 2453216
uccuauaccucaagggacu

SEQ ID NO: 2453218 - RNA, 19 nt, Artificial Sequence
  Description of Artificial Sequence: Synthetic oligonucleotide
  Sense strand starting at position 2844 of SEQ ID NO: 1887170
ggacguuaccguuaugauu

SEQ ID NO: 2453219 - RNA, 19 nt, Artificial Sequence
  Description of Artificial Sequence: Synthetic oligonucleotide
  Antisense strand to SEQ ID NO: 2453218
aaucauaacgguaacgucc

SEQ ID NO: 2453220 - RNA, 19 nt, Artificial Sequence
  Description of Artificial Sequence: Synthetic oligonucleotide
  Sense strand starting at position 3184 of SEQ ID NO: 1887170
ccuuaaagacauggugacu

SEQ ID NO: 2453221 - RNA, 19 nt, Artificial Sequence
  Description of Artificial Sequence: Synthetic oligonucleotide
  Antisense strand to SEQ ID NO: 2453220
agucaccaugucuuuaagg

SEQ ID NO: 2453222 - RNA, 19 nt, Artificial Sequence
  Description of Artificial Sequence: Synthetic oligonucleotide
  Sense strand starting at position 3235 of SEQ ID NO: 1887170
ggacucaauccaggucuuu

SEQ ID NO: 2453223 - RNA, 19 nt, Artificial Sequence
  Description of Artificial Sequence: Synthetic oligonucleotide
  Antisense strand to SEQ ID NO: 2453222
aaagaccuggauugagucc

SEQ ID NO: 2453224 - RNA, 19 nt, Artificial Sequence
  Description of Artificial Sequence: Synthetic oligonucleotide
  Sense strand starting at position 3739 of SEQ ID NO: 1887170
uuucuuucuuggguuggaa

SEQ ID NO: 2453225 - RNA, 19 nt, Artificial Sequence
  Description of Artificial Sequence: Synthetic oligonucleotide
  Antisense strand to SEQ ID NO: 2453224
uuccaacccaagaaagaaa

SEQ ID NO: 2453226 - RNA, 19 nt, Artificial Sequence
  Description of Artificial Sequence: Synthetic oligonucleotide
  Sense strand starting at position 3741 of SEQ ID NO: 1887170
ucuuucuuggguuggaauu

SEQ ID NO: 2453227 - RNA, 19 nt, Artificial Sequence
  Description of Artificial Sequence: Synthetic oligonucleotide
  Antisense strand to SEQ ID NO: 2453226
aauuccaacccaagaaaga

SEQ ID NO: 2453228 - RNA, 19 nt, Artificial Sequence
  Description of Artificial Sequence: Synthetic oligonucleotide
  Sense strand starting at position 3747 of SEQ ID NO: 1887170
uuggguuggaauugaaaug

SEQ ID NO: 2453229 - RNA, 19 nt, Artificial Sequence
  Description of Artificial Sequence: Synthetic oligonucleotide
  Antisense strand to SEQ ID NO: 2453228
cauuucaauuccaacccaa

SEQ ID NO: 2453230 - RNA, 19 nt, Artificial Sequence
  Description of Artificial Sequence: Synthetic oligonucleotide
  Sense strand starting at position 3858 of SEQ ID NO: 1887170
guuauacagcuguauagau

SEQ ID NO: 2453231 - RNA, 19 nt, Artificial Sequence
  Description of Artificial Sequence: Synthetic oligonucleotide
  Antisense strand to SEQ ID NO: 2453230
aucuauacagcuguauaac

SEQ ID NO: 2453232 - RNA, 19 nt, Artificial Sequence
  Description of Artificial Sequence: Synthetic oligonucleotide
  Sense strand starting at position 3865 of SEQ ID NO: 1887170
agcuguauagaugauagca

SEQ ID NO: 2453233 - RNA, 19 nt, Artificial Sequence
  Description of Artificial Sequence: Synthetic oligonucleotide
  Antisense strand to SEQ ID NO: 2453232
ugcuaucaucuauacagcu

SEQ ID NO: 2453234 - RNA, 19 nt, Artificial Sequence
  Description of Artificial Sequence: Synthetic oligonucleotide
  Sense strand starting at position 3881 of SEQ ID NO: 1887170
gcaucauuacugcaaacug

SEQ ID NO: 2453235 - RNA, 19 nt, Artificial Sequence
  Description of Artificial Sequence: Synthetic oligonucleotide
  Antisense strand to SEQ ID NO: 2453234
caguuugcaguaaugaugc

SEQ ID NO: 2453236 - RNA, 19 nt, Artificial Sequence
  Description of Artificial Sequence: Synthetic oligonucleotide
  Sense strand starting at position 3903 of SEQ ID NO: 1887170
uguccauggcaacauauaa

SEQ ID NO: 2453237 - RNA, 19 nt, Artificial Sequence
  Description of Artificial Sequence: Synthetic oligonucleotide
  Antisense strand to SEQ ID NO: 2453236
uuauauguugccauggaca

SEQ ID NO: 2453238 - RNA, 19 nt, Artificial Sequence
  Description of Artificial Sequence: Synthetic oligonucleotide
  Sense strand starting at position 3936 of SEQ ID NO: 1887170
agugauucuuucucuacuu

SEQ ID NO: 2453239 - RNA, 19 nt, Artificial Sequence
  Description of Artificial Sequence: Synthetic oligonucleotide
  Antisense strand to SEQ ID NO: 2453238
aaguagagaaagaaucacu

SEQ ID NO: 2453240 - RNA, 19 nt, Artificial Sequence
  Description of Artificial Sequence: Synthetic oligonucleotide
  Sense strand starting at position 191 of SEQ ID NO: 1887171
guucuacuuccaggucauu

SEQ ID NO: 2453241 - RNA, 19 nt, Artificial Sequence
  Description of Artificial Sequence: Synthetic oligonucleotide
  Antisense strand to SEQ ID NO: 2453240
aaugaccuggaaguagaac

SEQ ID NO: 2453242 - RNA, 19 nt, Artificial Sequence
  Description of Artificial Sequence: Synthetic oligonucleotide
  Sense strand starting at position 281 of SEQ ID NO: 1887171
aggugcugagcucaggaaa

SEQ ID NO: 2453243 - RNA, 19 nt, Artificial Sequence
  Description of Artificial Sequence: Synthetic oligonucleotide
  Antisense strand to SEQ ID NO: 2453242
uuuccugagcucagcaccu

SEQ ID NO: 2453244 - RNA, 19 nt, Artificial Sequence
  Description of Artificial Sequence: Synthetic oligonucleotide
  Sense strand starting at position 587 of SEQ ID NO: 1887171
cuggaacucucagcuaauc

SEQ ID NO: 2453245 - RNA, 19 nt, Artificial Sequence
  Description of Artificial Sequence: Synthetic oligonucleotide
  Antisense strand to SEQ ID NO: 2453244
gauuagcugagaguuccag

SEQ ID NO: 2453246 - RNA, 19 nt, Artificial Sequence
  Description of Artificial Sequence: Synthetic oligonucleotide
  Sense strand starting at position 729 of SEQ ID NO: 1887171
cugccauagcaccagaauu

SEQ ID NO: 2453247 - RNA, 19 nt, Artificial Sequence
  Description of Artificial Sequence: Synthetic oligonucleotide
  Antisense strand to SEQ ID NO: 2453246
aauucuggugcuauggcag

SEQ ID NO: 2453248 - RNA, 19 nt, Artificial Sequence
  Description of Artificial Sequence: Synthetic oligonucleotide
  Sense strand starting at position 731 of SEQ ID NO: 1887171
gccauagcaccagaauugu

SEQ ID NO: 2453249 - RNA, 19 nt, Artificial Sequence
  Description of Artificial Sequence: Synthetic oligonucleotide
  Antisense strand to SEQ ID NO: 2453248
acaauucuggugcuauggc

SEQ ID NO: 2453250 - RNA, 19 nt, Artificial Sequence
  Description of Artificial Sequence: Synthetic oligonucleotide
  Sense strand starting at position 740 of SEQ ID NO: 1887171
ccagaauugugccuccaug

SEQ ID NO: 2453251 - RNA, 19 nt, Artificial Sequence
  Description of Artificial Sequence: Synthetic oligonucleotide
  Antisense strand to SEQ ID NO: 2453250
cauggaggcacaauucugg

SEQ ID NO: 2453252 - RNA, 19 nt, Artificial Sequence
  Description of Artificial Sequence: Synthetic oligonucleotide
  Sense strand starting at position 782 of SEQ ID NO: 1887171
ugccaaggaugcuuuagua

SEQ ID NO: 2453253 - RNA, 19 nt, Artificial Sequence
  Description of Artificial Sequence: Synthetic oligonucleotide
  Antisense strand to SEQ ID NO: 2453252
uacuaaagcauccuuggca

SEQ ID NO: 2453254 - RNA, 19 nt, Artificial Sequence
  Description of Artificial Sequence: Synthetic oligonucleotide
  Sense strand starting at position 892 of SEQ ID NO: 1887171
ggugcugaacugggaagau

SEQ ID NO: 2453255 - RNA, 19 nt, Artificial Sequence
  Description of Artificial Sequence: Synthetic oligonucleotide
  Antisense strand to SEQ ID NO: 2453254
aucuucccaguucagcacc

SEQ ID NO: 2453256 - RNA, 19 nt, Artificial Sequence
  Description of Artificial Sequence: Synthetic oligonucleotide
  Sense strand starting at position 1027 of SEQ ID NO: 1887171
auggacguucuggaugauu

SEQ ID NO: 2453257 - RNA, 19 nt, Artificial Sequence
  Description of Artificial Sequence: Synthetic oligonucleotide
  Antisense strand to SEQ ID NO: 2453256
aaucauccagaacguccau

SEQ ID NO: 2453258 - RNA, 19 nt, Artificial Sequence
  Description of Artificial Sequence: Synthetic oligonucleotide
  Sense strand starting at position 1147 of SEQ ID NO: 1887171
gagauaagcugugcuuuga

SEQ ID NO: 2453259 - RNA, 19 nt, Artificial Sequence
  Description of Artificial Sequence: Synthetic oligonucleotide
  Antisense strand to SEQ ID NO: 2453258
ucaaagcacagcuuaucuc

SEQ ID NO: 2453260 - RNA, 19 nt, Artificial Sequence
  Description of Artificial Sequence: Synthetic oligonucleotide
  Sense strand starting at position 1298 of SEQ ID NO: 1887171
ugagcucucugugaggaca

SEQ ID NO: 2453261 - RNA, 19 nt, Artificial Sequence
  Description of Artificial Sequence: Synthetic oligonucleotide
  Antisense strand to SEQ ID NO: 2453260
uguccucacagagagcuca

SEQ ID NO: 2453262 - RNA, 19 nt, Artificial Sequence
  Description of Artificial Sequence: Synthetic oligonucleotide
  Sense strand starting at position 2096 of SEQ ID NO: 1887171
cguuuagcccaucauccau

SEQ ID NO: 2453263 - RNA, 19 nt, Artificial Sequence
  Description of Artificial Sequence: Synthetic oligonucleotide
  Antisense strand to SEQ ID NO: 2453262
auggaugaugggcuaaacg

SEQ ID NO: 2453264 - RNA, 19 nt, Artificial Sequence
  Description of Artificial Sequence: Synthetic oligonucleotide
  Sense strand starting at position 2242 of SEQ ID NO: 1887171
aaguuagagaaguguagca

SEQ ID NO: 2453265 - RNA, 19 nt, Artificial Sequence
  Description of Artificial Sequence: Synthetic oligonucleotide
  Antisense strand to SEQ ID NO: 2453264
ugcuacacuucucuaacuu

SEQ ID NO: 2453266 - RNA, 19 nt, Artificial Sequence
  Description of Artificial Sequence: Synthetic oligonucleotide
  Sense strand starting at position 2244 of SEQ ID NO: 1887171
guuagagaaguguagcaga

SEQ ID NO: 2453267 - RNA, 19 nt, Artificial Sequence
  Description of Artificial Sequence: Synthetic oligonucleotide
  Antisense strand to SEQ ID NO: 2453266
ucugcuacacuucucuaac

SEQ ID NO: 2453268 - RNA, 19 nt, Artificial Sequence
  Description of Artificial Sequence: Synthetic oligonucleotide
  Sense strand starting at position 2247 of SEQ ID NO: 1887171
agagaaguguagcagagaa

SEQ ID NO: 2453269 - RNA, 19 nt, Artificial Sequence
  Description of Artificial Sequence: Synthetic oligonucleotide
  Antisense strand to SEQ ID NO: 2453268
uucucugcuacacuucucu

SEQ ID NO: 2453270 - RNA, 19 nt, Artificial Sequence
  Description of Artificial Sequence: Synthetic oligonucleotide
  Sense strand starting at position 2271 of SEQ ID NO: 1887171
agacaugaguccuggagac

SEQ ID NO: 2453271 - RNA, 19 nt, Artificial Sequence
  Description of Artificial Sequence: Synthetic oligonucleotide
  Antisense strand to SEQ ID NO: 2453270
gucuccaggacucaugucu

SEQ ID NO: 2453272 - RNA, 19 nt, Artificial Sequence
  Description of Artificial Sequence: Synthetic oligonucleotide
  Sense strand starting at position 2286 of SEQ ID NO: 1887171
agacacaugucucaugaca

SEQ ID NO: 2453273 - RNA, 19 nt, Artificial Sequence
  Description of Artificial Sequence: Synthetic oligonucleotide
  Antisense strand to SEQ ID NO: 2453272
ugucaugagacaugugucu

SEQ ID NO: 2453274 - RNA, 19 nt, Artificial Sequence
  Description of Artificial Sequence: Synthetic oligonucleotide
  Sense strand starting at position 2288 of SEQ ID NO: 1887171
acacaugucucaugacauc

SEQ ID NO: 2453275 - RNA, 19 nt, Artificial Sequence
  Description of Artificial Sequence: Synthetic oligonucleotide
  Antisense strand to SEQ ID NO: 2453274
gaugucaugagacaugugu

SEQ ID NO: 2453276 - RNA, 19 nt, Artificial Sequence
  Description of Artificial Sequence: Synthetic oligonucleotide
  Sense strand starting at position 2330 of SEQ ID NO: 1887171
gcaguagcuagugggaaau

SEQ ID NO: 2453277 - RNA, 19 nt, Artificial Sequence
  Description of Artificial Sequence: Synthetic oligonucleotide
  Antisense strand to SEQ ID NO: 2453276
auuucccacuagcuacugc

SEQ ID NO: 2453278 - RNA, 19 nt, Artificial Sequence
  Description of Artificial Sequence: Synthetic oligonucleotide
  Sense strand starting at position 2332 of SEQ ID NO: 1887171
aguagcuagugggaaauaa

SEQ ID NO: 2453279 - RNA, 19 nt, Artificial Sequence
  Description of Artificial Sequence: Synthetic oligonucleotide
  Antisense strand to SEQ ID NO: 2453278
uuauuucccacuagcuacu

SEQ ID NO: 2453280 - RNA, 19 nt, Artificial Sequence
  Description of Artificial Sequence: Synthetic oligonucleotide
  Sense strand starting at position 2407 of SEQ ID NO: 1887171
gacagaaauccauggucuu

SEQ ID NO: 2453281 - RNA, 19 nt, Artificial Sequence
  Description of Artificial Sequence: Synthetic oligonucleotide
  Antisense strand to SEQ ID NO: 2453280
aagaccauggauuucuguc

SEQ ID NO: 2453282 - RNA, 19 nt, Artificial Sequence
  Description of Artificial Sequence: Synthetic oligonucleotide
  Sense strand starting at position 2408 of SEQ ID NO: 1887171
acagaaauccauggucuug

SEQ ID NO: 2453283 - RNA, 19 nt, Artificial Sequence
  Description of Artificial Sequence: Synthetic oligonucleotide
  Antisense strand to SEQ ID NO: 2453282
caagaccauggauuucugu

SEQ ID NO: 2453284 - RNA, 19 nt, Artificial Sequence
  Description of Artificial Sequence: Synthetic oligonucleotide
  Sense strand starting at position 2458 of SEQ ID NO: 1887171
agauauggguucuggagaa

SEQ ID NO: 2453285 - RNA, 19 nt, Artificial Sequence
  Description of Artificial Sequence: Synthetic oligonucleotide
  Antisense strand to SEQ ID NO: 2453284
uucuccagaacccauaucu

SEQ ID NO: 2453286 - RNA, 19 nt, Artificial Sequence
  Description of Artificial Sequence: Synthetic oligonucleotide
  Sense strand starting at position 2955 of SEQ ID NO: 1887171
cuagcagcauagucaauaa

SEQ ID NO: 2453287 - RNA, 19 nt, Artificial Sequence
  Description of Artificial Sequence: Synthetic oligonucleotide
  Antisense strand to SEQ ID NO: 2453286
uuauugacuaugcugcuag

SEQ ID NO: 2453288 - RNA, 19 nt, Artificial Sequence
  Description of Artificial Sequence: Synthetic oligonucleotide
  Sense strand starting at position 3071 of SEQ ID NO: 1887171
gggacuucagggugacuga

SEQ ID NO: 2453289 - RNA, 19 nt, Artificial Sequence
  Description of Artificial Sequence: Synthetic oligonucleotide
  Antisense strand to SEQ ID NO: 2453288
ucagucacccugaaguccc

SEQ ID NO: 2453290 - RNA, 19 nt, Artificial Sequence
  Description of Artificial Sequence: Synthetic oligonucleotide
  Sense strand starting at position 3302 of SEQ ID NO: 1887171
ggugccagguuuggagaaa

SEQ ID NO: 2453291 - RNA, 19 nt, Artificial Sequence
  Description of Artificial Sequence: Synthetic oligonucleotide
  Antisense strand to SEQ ID NO: 2453290
uuucuccaaaccuggcacc

SEQ ID NO: 2453292 - RNA, 19 nt, Artificial Sequence
  Description of Artificial Sequence: Synthetic oligonucleotide
  Sense strand starting at position 3321 of SEQ ID NO: 1887171
gccguuuggugggugcaua

SEQ ID NO: 2453293 - RNA, 19 nt, Artificial Sequence
  Description of Artificial Sequence: Synthetic oligonucleotide
  Antisense strand to SEQ ID NO: 2453292
uaugcacccaccaaacggc

SEQ ID NO: 2453294 - RNA, 19 nt, Artificial Sequence
  Description of Artificial Sequence: Synthetic oligonucleotide
  Sense strand starting at position 3341 of SEQ ID NO: 1887171
gaugcagaaugagaacuaa

SEQ ID NO: 2453295 - RNA, 19 nt, Artificial Sequence
  Description of Artificial Sequence: Synthetic oligonucleotide
  Antisense strand to SEQ ID NO: 2453294
uuaguucucauucugcauc

SEQ ID NO: 2453296 - RNA, 19 nt, Artificial Sequence
  Description of Artificial Sequence: Synthetic oligonucleotide
  Sense strand starting at position 3353 of SEQ ID NO: 1887171
gaacuaaugugccuagguu

SEQ ID NO: 2453297 - RNA, 19 nt, Artificial Sequence
  Description of Artificial Sequence: Synthetic oligonucleotide
  Antisense strand to SEQ ID NO: 2453296
aaccuaggcacauuaguuc

SEQ ID NO: 2453298 - RNA, 19 nt, Artificial Sequence
  Description of Artificial Sequence: Synthetic oligonucleotide
  Sense strand starting at position 3584 of SEQ ID NO: 1887171
cagcuagucagugggagau

SEQ ID NO: 2453299 - RNA, 19 nt, Artificial Sequence
  Description of Artificial Sequence: Synthetic oligonucleotide
  Antisense strand to SEQ ID NO: 2453298
aucucccacugacuagcug

SEQ ID NO: 2453300 - RNA, 19 nt, Artificial Sequence
  Description of Artificial Sequence: Synthetic oligonucleotide
  Sense strand starting at position 3638 of SEQ ID NO: 1887171
acuccaaaccuggauuguu

SEQ ID NO: 2453301 - RNA, 19 nt, Artificial Sequence
  Description of Artificial Sequence: Synthetic oligonucleotide
  Antisense strand to SEQ ID NO: 2453300
aacaauccagguuuggagu

SEQ ID NO: 2453302 - RNA, 19 nt, Artificial Sequence
  Description of Artificial Sequence: Synthetic oligonucleotide
  Sense strand starting at position 3676 of SEQ ID NO: 1887171
gucaaaguauugguauaau

SEQ ID NO: 2453303 - RNA, 19 nt, Artificial Sequence
  Description of Artificial Sequence: Synthetic oligonucleotide
  Antisense strand to SEQ ID NO: 2453302
auuauaccaauacuuugac

SEQ ID NO: 2453304 - RNA, 19 nt, Artificial Sequence
  Description of Artificial Sequence: Synthetic oligonucleotide
  Sense strand starting at position 3732 of SEQ ID NO: 1887171
gguaaagaggcuuguucaa

SEQ ID NO: 2453305 - RNA, 19 nt, Artificial Sequence
  Description of Artificial Sequence: Synthetic oligonucleotide
  Antisense strand to SEQ ID NO: 2453304
uugaacaagccucuuuacc

SEQ ID NO: 2453306 - RNA, 19 nt, Artificial Sequence
  Description of Artificial Sequence: Synthetic oligonucleotide
  Sense strand starting at position 3771 of SEQ ID NO: 1887171
cuccaauucuggcuuagau

SEQ ID NO: 2453307 - RNA, 19 nt, Artificial Sequence
  Description of Artificial Sequence: Synthetic oligonucleotide
  Antisense strand to SEQ ID NO: 2453306
aucuaagccagaauuggag

SEQ ID NO: 2453308 - RNA, 19 nt, Artificial Sequence
  Description of Artificial Sequence: Synthetic oligonucleotide
  Sense strand starting at position 3773 of SEQ ID NO: 1887171
ccaauucuggcuuagauuc

SEQ ID NO: 2453309 - RNA, 19 nt, Artificial Sequence
  Description of Artificial Sequence: Synthetic oligonucleotide
  Antisense strand to SEQ ID NO: 2453308
gaaucuaagccagaauugg

SEQ ID NO: 2453310 - RNA, 19 nt, Artificial Sequence
  Description of Artificial Sequence: Synthetic oligonucleotide
  Sense strand starting at position 3889 of SEQ ID NO: 1887171
agugguaacugugucugaa

SEQ ID NO: 2453311 - RNA, 19 nt, Artificial Sequence
  Description of Artificial Sequence: Synthetic oligonucleotide
  Antisense strand to SEQ ID NO: 2453310
uucagacacaguuaccacu

SEQ ID NO: 2453312 - RNA, 19 nt, Artificial Sequence
  Description of Artificial Sequence: Synthetic oligonucleotide
  Sense strand starting at position 3891 of SEQ ID NO: 1887171
ugguaacugugucugaaug

SEQ ID NO: 2453313 - RNA, 19 nt, Artificial Sequence
  Description of Artificial Sequence: Synthetic oligonucleotide
  Antisense strand to SEQ ID NO: 2453312
cauucagacacaguuacca

SEQ ID NO: 2453314 - RNA, 19 nt, Artificial Sequence
  Description of Artificial Sequence: Synthetic oligonucleotide
  Sense strand starting at position 3892 of SEQ ID NO: 1887171
gguaacugugucugaauga

SEQ ID NO: 2453315 - RNA, 19 nt, Artificial Sequence
  Description of Artificial Sequence: Synthetic oligonucleotide
  Antisense strand to SEQ ID NO: 2453314
ucauucagacacaguuacc

SEQ ID NO: 2453316 - RNA, 19 nt, Artificial Sequence
  Description of Artificial Sequence: Synthetic oligonucleotide
  Sense strand starting at position 3893 of SEQ ID NO: 1887171
guaacugugucugaaugac

SEQ ID NO: 2453317 - RNA, 19 nt, Artificial Sequence
  Description of Artificial Sequence: Synthetic oligonucleotide
  Antisense strand to SEQ ID NO: 2453316
gucauucagacacaguuac

SEQ ID NO: 2453318 - RNA, 19 nt, Artificial Sequence
  Description of Artificial Sequence: Synthetic oligonucleotide
  Sense strand starting at position 3936 of SEQ ID NO: 1887171
aaggacuucucagugcuga

SEQ ID NO: 2453319 - RNA, 19 nt, Artificial Sequence
  Description of Artificial Sequence: Synthetic oligonucleotide
  Antisense strand to SEQ ID NO: 2453318
ucagcacugagaaguccuu

SEQ ID NO: 2453320 - RNA, 19 nt, Artificial Sequence
  Description of Artificial Sequence: Synthetic oligonucleotide
  Sense strand starting at position 441 of SEQ ID NO: 1887172
uucucuuaucagggaagca

SEQ ID NO: 2453321 - RNA, 19 nt, Artificial Sequence
  Description of Artificial Sequence: Synthetic oligonucleotide
  Antisense strand to SEQ ID NO: 2453320
ugcuucccugauaagagaa

SEQ ID NO: 2453322 - RNA, 19 nt, Artificial Sequence
  Description of Artificial Sequence: Synthetic oligonucleotide
  Sense strand starting at position 479 of SEQ ID NO: 1887172
uguuuauugagccgucucu

SEQ ID NO: 2453323 - RNA, 19 nt, Artificial Sequence
  Description of Artificial Sequence: Synthetic oligonucleotide
  Antisense strand to SEQ ID NO: 2453322
agagacggcucaauaaaca

SEQ ID NO: 2453324 - RNA, 19 nt, Artificial Sequence
  Description of Artificial Sequence: Synthetic oligonucleotide
  Sense strand starting at position 560 of SEQ ID NO: 1887172
gcgcuguguguaccgagaa

SEQ ID NO: 2453325 - RNA, 19 nt, Artificial Sequence
  Description of Artificial Sequence: Synthetic oligonucleotide
  Antisense strand to SEQ ID NO: 2453324
uucucgguacacacagcgc

SEQ ID NO: 2453326 - RNA, 19 nt, Artificial Sequence
  Description of Artificial Sequence: Synthetic oligonucleotide
  Sense strand starting at position 570 of SEQ ID NO: 1887172
uaccgagaauacgagaaua

SEQ ID NO: 2453327 - RNA, 19 nt, Artificial Sequence
  Description of Artificial Sequence: Synthetic oligonucleotide
  Antisense strand to SEQ ID NO: 2453326
uauucucguauucucggua

SEQ ID NO: 2453328 - RNA, 19 nt, Artificial Sequence
  Description of Artificial Sequence: Synthetic oligonucleotide
  Sense strand starting at position 624 of SEQ ID NO: 1887172
gacagaaugcgccacguuu

SEQ ID NO: 2453329 - RNA, 19 nt, Artificial Sequence
  Description of Artificial Sequence: Synthetic oligonucleotide
  Antisense strand to SEQ ID NO: 2453328
aaacguggcgcauucuguc

SEQ ID NO: 2453330 - RNA, 19 nt, Artificial Sequence
  Description of Artificial Sequence: Synthetic oligonucleotide
  Sense strand starting at position 630 of SEQ ID NO: 1887172
augcgccacguuucagaau

SEQ ID NO: 2453331 - RNA, 19 nt, Artificial Sequence
  Description of Artificial Sequence: Synthetic oligonucleotide
  Antisense strand to SEQ ID NO: 2453330
auucugaaacguggcgcau

SEQ ID NO: 2453332 - RNA, 19 nt, Artificial Sequence
  Description of Artificial Sequence: Synthetic oligonucleotide
  Sense strand starting at position 631 of SEQ ID NO: 1887172
ugcgccacguuucagaauu

SEQ ID NO: 2453333 - RNA, 19 nt, Artificial Sequence
  Description of Artificial Sequence: Synthetic oligonucleotide
  Antisense strand to SEQ ID NO: 2453332
aauucugaaacguggcgca

SEQ ID NO: 2453334 - RNA, 19 nt, Artificial Sequence
  Description of Artificial Sequence: Synthetic oligonucleotide
  Sense strand starting at position 668 of SEQ ID NO: 1887172
auugguaucgugcuuugca

SEQ ID NO: 2453335 - RNA, 19 nt, Artificial Sequence
  Description of Artificial Sequence: Synthetic oligonucleotide
  Antisense strand to SEQ ID NO: 2453334
ugcaaagcacgauaccaau

SEQ ID NO: 2453336 - RNA, 19 nt, Artificial Sequence
  Description of Artificial Sequence: Synthetic oligonucleotide
  Sense strand starting at position 671 of SEQ ID NO: 1887172
gguaucgugcuuugcaguu

SEQ ID NO: 2453337 - RNA, 19 nt, Artificial Sequence
  Description of Artificial Sequence: Synthetic oligonucleotide
  Antisense strand to SEQ ID NO: 2453336
aacugcaaagcacgauacc

SEQ ID NO: 2453338 - RNA, 19 nt, Artificial Sequence
  Description of Artificial Sequence: Synthetic oligonucleotide
  Sense strand starting at position 676 of SEQ ID NO: 1887172
cgugcuuugcaguuuguga

SEQ ID NO: 2453339 - RNA, 19 nt, Artificial Sequence
  Description of Artificial Sequence: Synthetic oligonucleotide
  Antisense strand to SEQ ID NO: 2453338
ucacaaacugcaaagcacg

SEQ ID NO: 2453340 - RNA, 19 nt, Artificial Sequence
  Description of Artificial Sequence: Synthetic oligonucleotide
  Sense strand starting at position 677 of SEQ ID NO: 1887172
gugcuuugcaguuugugaa

SEQ ID NO: 2453341 - RNA, 19 nt, Artificial Sequence
  Description of Artificial Sequence: Synthetic oligonucleotide
  Antisense strand to SEQ ID NO: 2453340
uucacaaacugcaaagcac

SEQ ID NO: 2453342 - RNA, 19 nt, Artificial Sequence
  Description of Artificial Sequence: Synthetic oligonucleotide
  Sense strand starting at position 678 of SEQ ID NO: 1887172
ugcuuugcaguuugugaaa

SEQ ID NO: 2453343 - RNA, 19 nt, Artificial Sequence
  Description of Artificial Sequence: Synthetic oligonucleotide
  Antisense strand to SEQ ID NO: 2453342
uuucacaaacugcaaagca

SEQ ID NO: 2453344 - RNA, 19 nt, Artificial Sequence
  Description of Artificial Sequence: Synthetic oligonucleotide
  Sense strand starting at position 707 of SEQ ID NO: 1887172
cccaguuuaugucacaaga

SEQ ID NO: 2453345 - RNA, 19 nt, Artificial Sequence
  Description of Artificial Sequence: Synthetic oligonucleotide
  Antisense strand to SEQ ID NO: 2453344
ucuugugacauaaacuggg

SEQ ID NO: 2453346 - RNA, 19 nt, Artificial Sequence
  Description of Artificial Sequence: Synthetic oligonucleotide
  Sense strand starting at position 773 of SEQ ID NO: 1887172
ccaguagacuugccugaga

SEQ ID NO: 2453347 - RNA, 19 nt, Artificial Sequence
  Description of Artificial Sequence: Synthetic oligonucleotide
  Antisense strand to SEQ ID NO: 2453346
ucucaggcaagucuacugg

SEQ ID NO: 2453348 - RNA, 19 nt, Artificial Sequence
  Description of Artificial Sequence: Synthetic oligonucleotide
  Sense strand starting at position 775 of SEQ ID NO: 1887172
aguagacuugccugagauc

SEQ ID NO: 2453349 - RNA, 19 nt, Artificial Sequence
  Description of Artificial Sequence: Synthetic oligonucleotide
  Antisense strand to SEQ ID NO: 2453348
gaucucaggcaagucuacu

SEQ ID NO: 2453350 - RNA, 19 nt, Artificial Sequence
  Description of Artificial Sequence: Synthetic oligonucleotide
  Sense strand starting at position 776 of SEQ ID NO: 1887172
guagacuugccugagauca

SEQ ID NO: 2453351 - RNA, 19 nt, Artificial Sequence
  Description of Artificial Sequence: Synthetic oligonucleotide
  Antisense strand to SEQ ID NO: 2453350
ugaucucaggcaagucuac

SEQ ID NO: 2453352 - RNA, 19 nt, Artificial Sequence
  Description of Artificial Sequence: Synthetic oligonucleotide
  Sense strand starting at position 861 of SEQ ID NO: 1887172
gccggaucucuuggcagga

SEQ ID NO: 2453353 - RNA, 19 nt, Artificial Sequence
  Description of Artificial Sequence: Synthetic oligonucleotide
  Antisense strand to SEQ ID NO: 2453352
uccugccaagagauccggc

SEQ ID NO: 2453354 - RNA, 19 nt, Artificial Sequence
  Description of Artificial Sequence: Synthetic oligonucleotide
  Sense strand starting at position 862 of SEQ ID NO: 1887172
ccggaucucuuggcaggaa

SEQ ID NO: 2453355 - RNA, 19 nt, Artificial Sequence
  Description of Artificial Sequence: Synthetic oligonucleotide
  Antisense strand to SEQ ID NO: 2453354
uuccugccaagagauccgg

SEQ ID NO: 2453356 - RNA, 19 nt, Artificial Sequence
  Description of Artificial Sequence: Synthetic oligonucleotide
  Sense strand starting at position 1081 of SEQ ID NO: 1887172
gcuccauuucugggugcca

SEQ ID NO: 2453357 - RNA, 19 nt, Artificial Sequence
  Description of Artificial Sequence: Synthetic oligonucleotide
  Antisense strand to SEQ ID NO: 2453356
uggcacccagaaauggagc

SEQ ID NO: 2453358 - RNA, 19 nt, Artificial Sequence
  Description of Artificial Sequence: Synthetic oligonucleotide
  Sense strand starting at position 1082 of SEQ ID NO: 1887172
cuccauuucugggugccaa

SEQ ID NO: 2453359 - RNA, 19 nt, Artificial Sequence
  Description of Artificial Sequence: Synthetic oligonucleotide
  Antisense strand to SEQ ID NO: 2453358
uuggcacccagaaauggag

SEQ ID NO: 2453360 - RNA, 19 nt, Artificial Sequence
  Description of Artificial Sequence: Synthetic oligonucleotide
  Sense strand starting at position 1309 of SEQ ID NO: 1887172
aggagucccuuagggaaua

SEQ ID NO: 2453361 - RNA, 19 nt, Artificial Sequence
  Description of Artificial Sequence: Synthetic oligonucleotide
  Antisense strand to SEQ ID NO: 2453360
uauucccuaagggacuccu

SEQ ID NO: 2453362 - RNA, 19 nt, Artificial Sequence
  Description of Artificial Sequence: Synthetic oligonucleotide
  Sense strand starting at position 1310 of SEQ ID NO: 1887172
ggagucccuuagggaauaa

SEQ ID NO: 2453363 - RNA, 19 nt, Artificial Sequence
  Description of Artificial Sequence: Synthetic oligonucleotide
  Antisense strand to SEQ ID NO: 2453362
uuauucccuaagggacucc

SEQ ID NO: 2453364 - RNA, 19 nt, Artificial Sequence
  Description of Artificial Sequence: Synthetic oligonucleotide
  Sense strand starting at position 1474 of SEQ ID NO: 1887172
acauaucuagaauguguau

SEQ ID NO: 2453365 - RNA, 19 nt, Artificial Sequence
  Description of Artificial Sequence: Synthetic oligonucleotide
  Antisense strand to SEQ ID NO: 2453364
auacacauucuagauaugu

SEQ ID NO: 2453366 - RNA, 19 nt, Artificial Sequence
  Description of Artificial Sequence: Synthetic oligonucleotide
  Sense strand starting at position 1548 of SEQ ID NO: 1887172
uccgguugugcagagaaca

SEQ ID NO: 2453367 - RNA, 19 nt, Artificial Sequence
  Description of Artificial Sequence: Synthetic oligonucleotide
  Antisense strand to SEQ ID NO: 2453366
uguucucugcacaaccgga

SEQ ID NO: 2453368 - RNA, 19 nt, Artificial Sequence
  Description of Artificial Sequence: Synthetic oligonucleotide
  Sense strand starting at position 1563 of SEQ ID NO: 1887172
aacagaguguucuggcaaa

SEQ ID NO: 2453369 - RNA, 19 nt, Artificial Sequence
  Description of Artificial Sequence: Synthetic oligonucleotide
  Antisense strand to SEQ ID NO: 2453368
uuugccagaacacucuguu

SEQ ID NO: 2453370 - RNA, 19 nt, Artificial Sequence
  Description of Artificial Sequence: Synthetic oligonucleotide
  Sense strand starting at position 2050 of SEQ ID NO: 1887172
ucacgugugucgucuucaa

SEQ ID NO: 2453371 - RNA, 19 nt, Artificial Sequence
  Description of Artificial Sequence: Synthetic oligonucleotide
  Antisense strand to SEQ ID NO: 2453370
uugaagacgacacacguga

SEQ ID NO: 2453372 - RNA, 19 nt, Artificial Sequence
  Description of Artificial Sequence: Synthetic oligonucleotide
  Sense strand starting at position 2054 of SEQ ID NO: 1887172
gugugucgucuucaaggau

SEQ ID NO: 2453373 - RNA, 19 nt, Artificial Sequence
  Description of Artificial Sequence: Synthetic oligonucleotide
  Antisense strand to SEQ ID NO: 2453372
auccuugaagacgacacac

SEQ ID NO: 2453374 - RNA, 19 nt, Artificial Sequence
  Description of Artificial Sequence: Synthetic oligonucleotide
  Sense strand starting at position 2057 of SEQ ID NO: 1887172
ugucgucuucaaggauguu

SEQ ID NO: 2453375 - RNA, 19 nt, Artificial Sequence
  Description of Artificial Sequence: Synthetic oligonucleotide
  Antisense strand to SEQ ID NO: 2453374
aacauccuugaagacgaca

SEQ ID NO: 2453376 - RNA, 19 nt, Artificial Sequence
  Description of Artificial Sequence: Synthetic oligonucleotide
  Sense strand starting at position 2167 of SEQ ID NO: 1887172
uuucuaguuucugauguuu

SEQ ID NO: 2453377 - RNA, 19 nt, Artificial Sequence
  Description of Artificial Sequence: Synthetic oligonucleotide
  Antisense strand to SEQ ID NO: 2453376
aaacaucagaaacuagaaa

SEQ ID NO: 2453378 - RNA, 19 nt, Artificial Sequence
  Description of Artificial Sequence: Synthetic oligonucleotide
  Sense strand starting at position 2169 of SEQ ID NO: 1887172
ucuaguuucugauguuugu

SEQ ID NO: 2453379 - RNA, 19 nt, Artificial Sequence
  Description of Artificial Sequence: Synthetic oligonucleotide
  Antisense strand to SEQ ID NO: 2453378
acaaacaucagaaacuaga

SEQ ID NO: 2453380 - RNA, 19 nt, Artificial Sequence
  Description of Artificial Sequence: Synthetic oligonucleotide
  Sense strand starting at position 2192 of SEQ ID NO: 1887172
agacccagcugugucauua

SEQ ID NO: 2453381 - RNA, 19 nt, Artificial Sequence
  Description of Artificial Sequence: Synthetic oligonucleotide
  Antisense strand to SEQ ID NO: 2453380
uaaugacacagcugggucu

SEQ ID NO: 2453382 - RNA, 19 nt, Artificial Sequence
  Description of Artificial Sequence: Synthetic oligonucleotide
  Sense strand starting at position 2196 of SEQ ID NO: 1887172
ccagcugugucauuaaaca

SEQ ID NO: 2453383 - RNA, 19 nt, Artificial Sequence
  Description of Artificial Sequence: Synthetic oligonucleotide
  Antisense strand to SEQ ID NO: 2453382
uguuuaaugacacagcugg

SEQ ID NO: 2453384 - RNA, 19 nt, Artificial Sequence
  Description of Artificial Sequence: Synthetic oligonucleotide
  Sense strand starting at position 2942 of SEQ ID NO: 1887172
gauuaagauugcugugggu

SEQ ID NO: 2453385 - RNA, 19 nt, Artificial Sequence
  Description of Artificial Sequence: Synthetic oligonucleotide
  Antisense strand to SEQ ID NO: 2453384
acccacagcaaucuuaauc

SEQ ID NO: 2453386 - RNA, 19 nt, Artificial Sequence
  Description of Artificial Sequence: Synthetic oligonucleotide
  Sense strand starting at position 2944 of SEQ ID NO: 1887172
uuaagauugcuguggguuc

SEQ ID NO: 2453387 - RNA, 19 nt, Artificial Sequence
  Description of Artificial Sequence: Synthetic oligonucleotide
  Antisense strand to SEQ ID NO: 2453386
gaacccacagcaaucuuaa

SEQ ID NO: 2453388 - RNA, 19 nt, Artificial Sequence
  Description of Artificial Sequence: Synthetic oligonucleotide
  Sense strand starting at position 3025 of SEQ ID NO: 1887172
ggaggucagccuuguuaaa

SEQ ID NO: 2453389 - RNA, 19 nt, Artificial Sequence
  Description of Artificial Sequence: Synthetic oligonucleotide
  Antisense strand to SEQ ID NO: 2453388
uuuaacaaggcugaccucc

SEQ ID NO: 2453390 - RNA, 19 nt, Artificial Sequence
  Description of Artificial Sequence: Synthetic oligonucleotide
  Sense strand starting at position 3670 of SEQ ID NO: 1887172
aagauuugguucuggaaau

SEQ ID NO: 2453391 - RNA, 19 nt, Artificial Sequence
  Description of Artificial Sequence: Synthetic oligonucleotide
  Antisense strand to SEQ ID NO: 2453390
auuuccagaaccaaaucuu

SEQ ID NO: 2453392 - RNA, 19 nt, Artificial Sequence
  Description of Artificial Sequence: Synthetic oligonucleotide
  Sense strand starting at position 3671 of SEQ ID NO: 1887172
agauuugguucuggaaauc

SEQ ID NO: 2453393 - RNA, 19 nt, Artificial Sequence
  Description of Artificial Sequence: Synthetic oligonucleotide
  Antisense strand to SEQ ID NO: 2453392
gauuuccagaaccaaaucu

SEQ ID NO: 2453394 - RNA, 19 nt, Artificial Sequence
  Description of Artificial Sequence: Synthetic oligonucleotide
  Sense strand starting at position 3761 of SEQ ID NO: 1887172
cuguuugucccagugcuuu

SEQ ID NO: 2453395 - RNA, 19 nt, Artificial Sequence
  Description of Artificial Sequence: Synthetic oligonucleotide
  Antisense strand to SEQ ID NO: 2453394
aaagcacugggacaaacag

SEQ ID NO: 2453396 - RNA, 19 nt, Artificial Sequence
  Description of Artificial Sequence: Synthetic oligonucleotide
  Sense strand starting at position 3767 of SEQ ID NO: 1887172
gucccagugcuuuagugau

SEQ ID NO: 2453397 - RNA, 19 nt, Artificial Sequence
  Description of Artificial Sequence: Synthetic oligonucleotide
  Antisense strand to SEQ ID NO: 2453396
aucacuaaagcacugggac

SEQ ID NO: 2453398 - RNA, 19 nt, Artificial Sequence
  Description of Artificial Sequence: Synthetic oligonucleotide
  Sense strand starting at position 3773 of SEQ ID NO: 1887172
gugcuuuagugauagaucc

SEQ ID NO: 2453399 - RNA, 19 nt, Artificial Sequence
  Description of Artificial Sequence: Synthetic oligonucleotide
  Antisense strand to SEQ ID NO: 2453398
ggaucuaucacuaaagcac

SEQ ID NO: 2453400 - RNA, 19 nt, Artificial Sequence
  Description of Artificial Sequence: Synthetic oligonucleotide
  Sense strand starting at position 28 of SEQ ID NO: 1887173
aagacuaguuuagugacau

SEQ ID NO: 2453401 - RNA, 19 nt, Artificial Sequence
  Description of Artificial Sequence: Synthetic oligonucleotide
  Antisense strand to SEQ ID NO: 2453400
augucacuaaacuagucuu

SEQ ID NO: 2453402 - RNA, 19 nt, Artificial Sequence
  Description of Artificial Sequence: Synthetic oligonucleotide
  Sense strand starting at position 66 of SEQ ID NO: 1887173
agguacaaaugccuauaaa

SEQ ID NO: 2453403 - RNA, 19 nt, Artificial Sequence
  Description of Artificial Sequence: Synthetic oligonucleotide
  Antisense strand to SEQ ID NO: 2453402
uuuauaggcauuuguaccu

SEQ ID NO: 2453404 - RNA, 19 nt, Artificial Sequence
  Description of Artificial Sequence: Synthetic oligonucleotide
  Sense strand starting at position 67 of SEQ ID NO: 1887173
gguacaaaugccuauaaau

SEQ ID NO: 2453405 - RNA, 19 nt, Artificial Sequence
  Description of Artificial Sequence: Synthetic oligonucleotide
  Antisense strand to SEQ ID NO: 2453404
auuuauaggcauuuguacc

SEQ ID NO: 2453406 - RNA, 19 nt, Artificial Sequence
  Description of Artificial Sequence: Synthetic oligonucleotide
  Sense strand starting at position 104 of SEQ ID NO: 1887173
acuuaaauguaccuggaga

SEQ ID NO: 2453407 - RNA, 19 nt, Artificial Sequence
  Description of Artificial Sequence: Synthetic oligonucleotide
  Antisense strand to SEQ ID NO: 2453406
ucuccagguacauuuaagu

SEQ ID NO: 2453408 - RNA, 19 nt, Artificial Sequence
  Description of Artificial Sequence: Synthetic oligonucleotide
  Sense strand starting at position 170 of SEQ ID NO: 1887173
ugcucauagaaugaguagu

SEQ ID NO: 2453409 - RNA, 19 nt, Artificial Sequence
  Description of Artificial Sequence: Synthetic oligonucleotide
  Antisense strand to SEQ ID NO: 2453408
acuacucauucuaugagca

SEQ ID NO: 2453410 - RNA, 19 nt, Artificial Sequence
  Description of Artificial Sequence: Synthetic oligonucleotide
  Sense strand starting at position 172 of SEQ ID NO: 1887173
cucauagaaugaguaguuu

SEQ ID NO: 2453411 - RNA, 19 nt, Artificial Sequence
  Description of Artificial Sequence: Synthetic oligonucleotide
  Antisense strand to SEQ ID NO: 2453410
aaacuacucauucuaugag

SEQ ID NO: 2453412 - RNA, 19 nt, Artificial Sequence
  Description of Artificial Sequence: Synthetic oligonucleotide
  Sense strand starting at position 228 of SEQ ID NO: 1887173
cacaaaugggcuuggauua

SEQ ID NO: 2453413 - RNA, 19 nt, Artificial Sequence
  Description of Artificial Sequence: Synthetic oligonucleotide
  Antisense strand to SEQ ID NO: 2453412
uaauccaagcccauuugug

SEQ ID NO: 2453414 - RNA, 19 nt, Artificial Sequence
  Description of Artificial Sequence: Synthetic oligonucleotide
  Sense strand starting at position 312 of SEQ ID NO: 1887173
ucuagauaaucucugcuga

SEQ ID NO: 2453415 - RNA, 19 nt, Artificial Sequence
  Description of Artificial Sequence: Synthetic oligonucleotide
  Antisense strand to SEQ ID NO: 2453414
ucagcagagauuaucuaga

SEQ ID NO: 2453416 - RNA, 19 nt, Artificial Sequence
  Description of Artificial Sequence: Synthetic oligonucleotide
  Sense strand starting at position 313 of SEQ ID NO: 1887173
cuagauaaucucugcugac

SEQ ID NO: 2453417 - RNA, 19 nt, Artificial Sequence
  Description of Artificial Sequence: Synthetic oligonucleotide
  Antisense strand to SEQ ID NO: 2453416
gucagcagagauuaucuag

SEQ ID NO: 2453418 - RNA, 19 nt, Artificial Sequence
  Description of Artificial Sequence: Synthetic oligonucleotide
  Sense strand starting at position 355 of SEQ ID NO: 1887173
cuuaacuaugauugagcua

SEQ ID NO: 2453419 - RNA, 19 nt, Artificial Sequence
  Description of Artificial Sequence: Synthetic oligonucleotide
  Antisense strand to SEQ ID NO: 2453418
uagcucaaucauaguuaag

SEQ ID NO: 2453420 - RNA, 19 nt, Artificial Sequence
  Description of Artificial Sequence: Synthetic oligonucleotide
  Sense strand starting at position 471 of SEQ ID NO: 1887173
aucaaauuagcaugagguu

SEQ ID NO: 2453421 - RNA, 19 nt, Artificial Sequence
  Description of Artificial Sequence: Synthetic oligonucleotide
  Antisense strand to SEQ ID NO: 2453420
aaccucaugcuaauuugau

SEQ ID NO: 2453422 - RNA, 19 nt, Artificial Sequence
  Description of Artificial Sequence: Synthetic oligonucleotide
  Sense strand starting at position 480 of SEQ ID NO: 1887173
gcaugagguugauucugaa

SEQ ID NO: 2453423 - RNA, 19 nt, Artificial Sequence
  Description of Artificial Sequence: Synthetic oligonucleotide
  Antisense strand to SEQ ID NO: 2453422
uucagaaucaaccucaugc

SEQ ID NO: 2453424 - RNA, 19 nt, Artificial Sequence
  Description of Artificial Sequence: Synthetic oligonucleotide
  Sense strand starting at position 493 of SEQ ID NO: 1887173
ucugaauuggcucacacuu

SEQ ID NO: 2453425 - RNA, 19 nt, Artificial Sequence
  Description of Artificial Sequence: Synthetic oligonucleotide
  Antisense strand to SEQ ID NO: 2453424
aagugugagccaauucaga

SEQ ID NO: 2453426 - RNA, 19 nt, Artificial Sequence
  Description of Artificial Sequence: Synthetic oligonucleotide
  Sense strand starting at position 536 of SEQ ID NO: 1887173
caaagugaucagugaggga

SEQ ID NO: 2453427 - RNA, 19 nt, Artificial Sequence
  Description of Artificial Sequence: Synthetic oligonucleotide
  Antisense strand to SEQ ID NO: 2453426
ucccucacugaucacuuug

SEQ ID NO: 2453428 - RNA, 19 nt, Artificial Sequence
  Description of Artificial Sequence: Synthetic oligonucleotide
  Sense strand starting at position 557 of SEQ ID NO: 1887173
agaagcuugcuguaaagug

SEQ ID NO: 2453429 - RNA, 19 nt, Artificial Sequence
  Description of Artificial Sequence: Synthetic oligonucleotide
  Antisense strand to SEQ ID NO: 2453428
cacuuuacagcaagcuucu

SEQ ID NO: 2453430 - RNA, 19 nt, Artificial Sequence
  Description of Artificial Sequence: Synthetic oligonucleotide
  Sense strand starting at position 700 of SEQ ID NO: 1887173
ccagauuucuaagcgcagu

SEQ ID NO: 2453431 - RNA, 19 nt, Artificial Sequence
  Description of Artificial Sequence: Synthetic oligonucleotide
  Antisense strand to SEQ ID NO: 2453430
acugcgcuuagaaaucugg

SEQ ID NO: 2453432 - RNA, 19 nt, Artificial Sequence
  Description of Artificial Sequence: Synthetic oligonucleotide
  Sense strand starting at position 759 of SEQ ID NO: 1887173
uccuuaaaucgauguuaga

SEQ ID NO: 2453433 - RNA, 19 nt, Artificial Sequence
  Description of Artificial Sequence: Synthetic oligonucleotide
  Antisense strand to SEQ ID NO: 2453432
ucuaacaucgauuuaagga

SEQ ID NO: 2453434 - RNA, 19 nt, Artificial Sequence
  Description of Artificial Sequence: Synthetic oligonucleotide
  Sense strand starting at position 833 of SEQ ID NO: 1887173
gcccuuuccagcucgaagu

SEQ ID NO: 2453435 - RNA, 19 nt, Artificial Sequence
  Description of Artificial Sequence: Synthetic oligonucleotide
  Antisense strand to SEQ ID NO: 2453434
acuucgagcuggaaagggc

SEQ ID NO: 2453436 - RNA, 19 nt, Artificial Sequence
  Description of Artificial Sequence: Synthetic oligonucleotide
  Sense strand starting at position 980 of SEQ ID NO: 1887173
cugaaugaauccguccaua

SEQ ID NO: 2453437 - RNA, 19 nt, Artificial Sequence
  Description of Artificial Sequence: Synthetic oligonucleotide
  Antisense strand to SEQ ID NO: 2453436
uauggacggauucauucag

SEQ ID NO: 2453438 - RNA, 19 nt, Artificial Sequence
  Description of Artificial Sequence: Synthetic oligonucleotide
  Sense strand starting at position 1042 of SEQ ID NO: 1887173
uaaggucaguccuugaaag

SEQ ID NO: 2453439 - RNA, 19 nt, Artificial Sequence
  Description of Artificial Sequence: Synthetic oligonucleotide
  Antisense strand to SEQ ID NO: 2453438
cuuucaaggacugaccuua

SEQ ID NO: 2453440 - RNA, 19 nt, Artificial Sequence
  Description of Artificial Sequence: Synthetic oligonucleotide
  Sense strand starting at position 1188 of SEQ ID NO: 1887173
ucuguaaauggugguuaaa

SEQ ID NO: 2453441 - RNA, 19 nt, Artificial Sequence
  Description of Artificial Sequence: Synthetic oligonucleotide
  Antisense strand to SEQ ID NO: 2453440
uuuaaccaccauuuacaga

SEQ ID NO: 2453442 - RNA, 19 nt, Artificial Sequence
  Description of Artificial Sequence: Synthetic oligonucleotide
  Sense strand starting at position 1320 of SEQ ID NO: 1887173
uacugagguggcugauaga

SEQ ID NO: 2453443 - RNA, 19 nt, Artificial Sequence
  Description of Artificial Sequence: Synthetic oligonucleotide
  Antisense strand to SEQ ID NO: 2453442
ucuaucagccaccucagua

SEQ ID NO: 2453444 - RNA, 19 nt, Artificial Sequence
  Description of Artificial Sequence: Synthetic oligonucleotide
  Sense strand starting at position 1778 of SEQ ID NO: 1887173
gcuguuguuaucccuaguu

SEQ ID NO: 2453445 - RNA, 19 nt, Artificial Sequence
  Description of Artificial Sequence: Synthetic oligonucleotide
  Antisense strand to SEQ ID NO: 2453444
aacuagggauaacaacagc

SEQ ID NO: 2453446 - RNA, 19 nt, Artificial Sequence
  Description of Artificial Sequence: Synthetic oligonucleotide
  Sense strand starting at position 1785 of SEQ ID NO: 1887173
uuaucccuaguuuagagau

SEQ ID NO: 2453447 - RNA, 19 nt, Artificial Sequence
  Description of Artificial Sequence: Synthetic oligonucleotide
  Antisense strand to SEQ ID NO: 2453446
aucucuaaacuagggauaa

SEQ ID NO: 2453448 - RNA, 19 nt, Artificial Sequence
  Description of Artificial Sequence: Synthetic oligonucleotide
  Sense strand starting at position 1955 of SEQ ID NO: 1887173
cagaaaccucacuguggau

SEQ ID NO: 2453449 - RNA, 19 nt, Artificial Sequence
  Description of Artificial Sequence: Synthetic oligonucleotide
  Antisense strand to SEQ ID NO: 2453448
auccacagugagguuucug

SEQ ID NO: 2453450 - RNA, 19 nt, Artificial Sequence
  Description of Artificial Sequence: Synthetic oligonucleotide
  Sense strand starting at position 1969 of SEQ ID NO: 1887173
uggauugucugucugagau

SEQ ID NO: 2453451 - RNA, 19 nt, Artificial Sequence
  Description of Artificial Sequence: Synthetic oligonucleotide
  Antisense strand to SEQ ID NO: 2453450
aucucagacagacaaucca

SEQ ID NO: 2453452 - RNA, 19 nt, Artificial Sequence
  Description of Artificial Sequence: Synthetic oligonucleotide
  Sense strand starting at position 1982 of SEQ ID NO: 1887173
ugagaucuacccuguccau

SEQ ID NO: 2453453 - RNA, 19 nt, Artificial Sequence
  Description of Artificial Sequence: Synthetic oligonucleotide
  Antisense strand to SEQ ID NO: 2453452
auggacaggguagaucuca

SEQ ID NO: 2453454 - RNA, 19 nt, Artificial Sequence
  Description of Artificial Sequence: Synthetic oligonucleotide
  Sense strand starting at position 2451 of SEQ ID NO: 1887173
agauacaggugcccuaaua

SEQ ID NO: 2453455 - RNA, 19 nt, Artificial Sequence
  Description of Artificial Sequence: Synthetic oligonucleotide
  Antisense strand to SEQ ID NO: 2453454
uauuagggcaccuguaucu

SEQ ID NO: 2453456 - RNA, 19 nt, Artificial Sequence
  Description of Artificial Sequence: Synthetic oligonucleotide
  Sense strand starting at position 2493 of SEQ ID NO: 1887173
gaacuuuggucccuaaaga

SEQ ID NO: 2453457 - RNA, 19 nt, Artificial Sequence
  Description of Artificial Sequence: Synthetic oligonucleotide
  Antisense strand to SEQ ID NO: 2453456
ucuuuagggaccaaaguuc

SEQ ID NO: 2453458 - RNA, 19 nt, Artificial Sequence
  Description of Artificial Sequence: Synthetic oligonucleotide
  Sense strand starting at position 2514 of SEQ ID NO: 1887173
uggugaaaucccuagccag

SEQ ID NO: 2453459 - RNA, 19 nt, Artificial Sequence
  Description of Artificial Sequence: Synthetic oligonucleotide
  Antisense strand to SEQ ID NO: 2453458
cuggcuagggauuucacca

SEQ ID NO: 2453460 - RNA, 19 nt, Artificial Sequence
  Description of Artificial Sequence: Synthetic oligonucleotide
  Sense strand starting at position 2546 of SEQ ID NO: 1887173
auuugucuuugccuggauu

SEQ ID NO: 2453461 - RNA, 19 nt, Artificial Sequence
  Description of Artificial Sequence: Synthetic oligonucleotide
  Antisense strand to SEQ ID NO: 2453460
aauccaggcaaagacaaau

SEQ ID NO: 2453462 - RNA, 19 nt, Artificial Sequence
  Description of Artificial Sequence: Synthetic oligonucleotide
  Sense strand starting at position 2560 of SEQ ID NO: 1887173
ggauuaucaucuuugguuc

SEQ ID NO: 2453463 - RNA, 19 nt, Artificial Sequence
  Description of Artificial Sequence: Synthetic oligonucleotide
  Antisense strand to SEQ ID NO: 2453462
gaaccaaagaugauaaucc

SEQ ID NO: 2453464 - RNA, 19 nt, Artificial Sequence
  Description of Artificial Sequence: Synthetic oligonucleotide
  Sense strand starting at position 2635 of SEQ ID NO: 1887173
caggccauuucugcuugua

SEQ ID NO: 2453465 - RNA, 19 nt, Artificial Sequence
  Description of Artificial Sequence: Synthetic oligonucleotide
  Antisense strand to SEQ ID NO: 2453464
uacaagcagaaauggccug

SEQ ID NO: 2453466 - RNA, 19 nt, Artificial Sequence
  Description of Artificial Sequence: Synthetic oligonucleotide
  Sense strand starting at position 2637 of SEQ ID NO: 1887173
ggccauuucugcuuguaga

SEQ ID NO: 2453467 - RNA, 19 nt, Artificial Sequence
  Description of Artificial Sequence: Synthetic oligonucleotide
  Antisense strand to SEQ ID NO: 2453466
ucuacaagcagaaauggcc

SEQ ID NO: 2453468 - RNA, 19 nt, Artificial Sequence
  Description of Artificial Sequence: Synthetic oligonucleotide
  Sense strand starting at position 2638 of SEQ ID NO: 1887173
gccauuucugcuuguagag

SEQ ID NO: 2453469 - RNA, 19 nt, Artificial Sequence
  Description of Artificial Sequence: Synthetic oligonucleotide
  Antisense strand to SEQ ID NO: 2453468
cucuacaagcagaaauggc

SEQ ID NO: 2453470 - RNA, 19 nt, Artificial Sequence
  Description of Artificial Sequence: Synthetic oligonucleotide
  Sense strand starting at position 2915 of SEQ ID NO: 1887173
aguuauuccucuguugaaa

SEQ ID NO: 2453471 - RNA, 19 nt, Artificial Sequence
  Description of Artificial Sequence: Synthetic oligonucleotide
  Antisense strand to SEQ ID NO: 2453470
uuucaacagaggaauaacu

SEQ ID NO: 2453472 - RNA, 19 nt, Artificial Sequence
  Description of Artificial Sequence: Synthetic oligonucleotide
  Sense strand starting at position 3137 of SEQ ID NO: 1887173
ccaaauuagccauguuuga

SEQ ID NO: 2453473 - RNA, 19 nt, Artificial Sequence
  Description of Artificial Sequence: Synthetic oligonucleotide
  Antisense strand to SEQ ID NO: 2453472
ucaaacauggcuaauuugg

SEQ ID NO: 2453474 - RNA, 19 nt, Artificial Sequence
  Description of Artificial Sequence: Synthetic oligonucleotide
  Sense strand starting at position 3284 of SEQ ID NO: 1887173
gaaggacaguucuugcuga

SEQ ID NO: 2453475 - RNA, 19 nt, Artificial Sequence
  Description of Artificial Sequence: Synthetic oligonucleotide
  Antisense strand to SEQ ID NO: 2453474
ucagcaagaacuguccuuc

SEQ ID NO: 2453476 - RNA, 19 nt, Artificial Sequence
  Description of Artificial Sequence: Synthetic oligonucleotide
  Sense strand starting at position 3308 of SEQ ID NO: 1887173
augggaauggcuugcagau

SEQ ID NO: 2453477 - RNA, 19 nt, Artificial Sequence
  Description of Artificial Sequence: Synthetic oligonucleotide
  Antisense strand to SEQ ID NO: 2453476
aucugcaagccauucccau

SEQ ID NO: 2453478 - RNA, 19 nt, Artificial Sequence
  Description of Artificial Sequence: Synthetic oligonucleotide
  Sense strand starting at position 3840 of SEQ ID NO: 1887173
ccuaaagugcgggauuaua

SEQ ID NO: 2453479 - RNA, 19 nt, Artificial Sequence
  Description of Artificial Sequence: Synthetic oligonucleotide
  Antisense strand to SEQ ID NO: 2453478
uauaaucccgcacuuuagg

SEQ ID NO: 2453480 - RNA, 19 nt, Artificial Sequence
  Description of Artificial Sequence: Synthetic oligonucleotide
  Sense strand starting at position 151 of SEQ ID NO: 1887174
gugagaucucaguaagugu

SEQ ID NO: 2453481 - RNA, 19 nt, Artificial Sequence
  Description of Artificial Sequence: Synthetic oligonucleotide
  Antisense strand to SEQ ID NO: 2453480
acacuuacugagaucucac

SEQ ID NO: 2453482 - RNA, 19 nt, Artificial Sequence
  Description of Artificial Sequence: Synthetic oligonucleotide
  Sense strand starting at position 154 of SEQ ID NO: 1887174
agaucucaguaaguguuau

SEQ ID NO: 2453483 - RNA, 19 nt, Artificial Sequence
  Description of Artificial Sequence: Synthetic oligonucleotide
  Antisense strand to SEQ ID NO: 2453482
auaacacuuacugagaucu

SEQ ID NO: 2453484 - RNA, 19 nt, Artificial Sequence
  Description of Artificial Sequence: Synthetic oligonucleotide
  Sense strand starting at position 165 of SEQ ID NO: 1887174
aguguuauguucuugagac

SEQ ID NO: 2453485 - RNA, 19 nt, Artificial Sequence
  Description of Artificial Sequence: Synthetic oligonucleotide
  Antisense strand to SEQ ID NO: 2453484
gucucaagaacauaacacu

SEQ ID NO: 2453486 - RNA, 19 nt, Artificial Sequence
  Description of Artificial Sequence: Synthetic oligonucleotide
  Sense strand starting at position 167 of SEQ ID NO: 1887174
uguuauguucuugagacuc

SEQ ID NO: 2453487 - RNA, 19 nt, Artificial Sequence
  Description of Artificial Sequence: Synthetic oligonucleotide
  Antisense strand to SEQ ID NO: 2453486
gagucucaagaacauaaca

SEQ ID NO: 2453488 - RNA, 19 nt, Artificial Sequence
  Description of Artificial Sequence: Synthetic oligonucleotide
  Sense strand starting at position 868 of SEQ ID NO: 1887174
aacugcuugcaagauguuu

SEQ ID NO: 2453489 - RNA, 19 nt, Artificial Sequence
  Description of Artificial Sequence: Synthetic oligonucleotide
  Antisense strand to SEQ ID NO: 2453488
aaacaucuugcaagcaguu

SEQ ID NO: 2453490 - RNA, 19 nt, Artificial Sequence
  Description of Artificial Sequence: Synthetic oligonucleotide
  Sense strand starting at position 873 of SEQ ID NO: 1887174
cuugcaagauguuucuauu

SEQ ID NO: 2453491 - RNA, 19 nt, Artificial Sequence
  Description of Artificial Sequence: Synthetic oligonucleotide
  Antisense strand to SEQ ID NO: 2453490
aauagaaacaucuugcaag

SEQ ID NO: 2453492 - RNA, 19 nt, Artificial Sequence
  Description of Artificial Sequence: Synthetic oligonucleotide
  Sense strand starting at position 1281 of SEQ ID NO: 1887174
uggugugugguagaugacu

SEQ ID NO: 2453493 - RNA, 19 nt, Artificial Sequence
  Description of Artificial Sequence: Synthetic oligonucleotide
  Antisense strand to SEQ ID NO: 2453492
agucaucuaccacacacca

SEQ ID NO: 2453494 - RNA, 19 nt, Artificial Sequence
  Description of Artificial Sequence: Synthetic oligonucleotide
  Sense strand starting at position 1283 of SEQ ID NO: 1887174
gugugugguagaugacuga

SEQ ID NO: 2453495 - RNA, 19 nt, Artificial Sequence
  Description of Artificial Sequence: Synthetic oligonucleotide
  Antisense strand to SEQ ID NO: 2453494
ucagucaucuaccacacac

SEQ ID NO: 2453496 - RNA, 19 nt, Artificial Sequence
  Description of Artificial Sequence: Synthetic oligonucleotide
  Sense strand starting at position 1993 of SEQ ID NO: 1887174
ggcggacucuuccuggaca

SEQ ID NO: 2453497 - RNA, 19 nt, Artificial Sequence
  Description of Artificial Sequence: Synthetic oligonucleotide
  Antisense strand to SEQ ID NO: 2453496
uguccaggaagaguccgcc

SEQ ID NO: 2453498 - RNA, 19 nt, Artificial Sequence
  Description of Artificial Sequence: Synthetic oligonucleotide
  Sense strand starting at position 2015 of SEQ ID NO: 1887174
gggcuuucuauuggucaca

SEQ ID NO: 2453499 - RNA, 19 nt, Artificial Sequence
  Description of Artificial Sequence: Synthetic oligonucleotide
  Antisense strand to SEQ ID NO: 2453498
ugugaccaauagaaagccc

SEQ ID NO: 2453500 - RNA, 19 nt, Artificial Sequence
  Description of Artificial Sequence: Synthetic oligonucleotide
  Sense strand starting at position 2054 of SEQ ID NO: 1887174
acagguaguuugguugcaa

SEQ ID NO: 2453501 - RNA, 19 nt, Artificial Sequence
  Description of Artificial Sequence: Synthetic oligonucleotide
  Antisense strand to SEQ ID NO: 2453500
uugcaaccaaacuaccugu

SEQ ID NO: 2453502 - RNA, 19 nt, Artificial Sequence
  Description of Artificial Sequence: Synthetic oligonucleotide
  Sense strand starting at position 2120 of SEQ ID NO: 1887174
gcggaagagacuugcgaca

SEQ ID NO: 2453503 - RNA, 19 nt, Artificial Sequence
  Description of Artificial Sequence: Synthetic oligonucleotide
  Antisense strand to SEQ ID NO: 2453502
ugucgcaagucucuuccgc

SEQ ID NO: 2453504 - RNA, 19 nt, Artificial Sequence
  Description of Artificial Sequence: Synthetic oligonucleotide
  Sense strand starting at position 2213 of SEQ ID NO: 1887174
gcuggugaaacuggguuua

SEQ ID NO: 2453505 - RNA, 19 nt, Artificial Sequence
  Description of Artificial Sequence: Synthetic oligonucleotide
  Antisense strand to SEQ ID NO: 2453504
uaaacccaguuucaccagc

SEQ ID NO: 2453506 - RNA, 19 nt, Artificial Sequence
  Description of Artificial Sequence: Synthetic oligonucleotide
  Sense strand starting at position 2267 of SEQ ID NO: 1887174
gcuuaucaacgugauguau

SEQ ID NO: 2453507 - RNA, 19 nt, Artificial Sequence
  Description of Artificial Sequence: Synthetic oligonucleotide
  Antisense strand to SEQ ID NO: 2453506
auacaucacguugauaagc

SEQ ID NO: 2453508 - RNA, 19 nt, Artificial Sequence
  Description of Artificial Sequence: Synthetic oligonucleotide
  Sense strand starting at position 2278 of SEQ ID NO: 1887174
ugauguaugaguucgucgu

SEQ ID NO: 2453509 - RNA, 19 nt, Artificial Sequence
  Description of Artificial Sequence: Synthetic oligonucleotide
  Antisense strand to SEQ ID NO: 2453508
acgacgaacucauacauca

SEQ ID NO: 2453510 - RNA, 19 nt, Artificial Sequence
  Description of Artificial Sequence: Synthetic oligonucleotide
  Sense strand starting at position 2292 of SEQ ID NO: 1887174
gucguauuagucgugcuag

SEQ ID NO: 2453511 - RNA, 19 nt, Artificial Sequence
  Description of Artificial Sequence: Synthetic oligonucleotide
  Antisense strand to SEQ ID NO: 2453510
cuagcacgacuaauacgac

SEQ ID NO: 2453512 - RNA, 19 nt, Artificial Sequence
  Description of Artificial Sequence: Synthetic oligonucleotide
  Sense strand starting at position 2294 of SEQ ID NO: 1887174
cguauuagucgugcuagcu

SEQ ID NO: 2453513 - RNA, 19 nt, Artificial Sequence
  Description of Artificial Sequence: Synthetic oligonucleotide
  Antisense strand to SEQ ID NO: 2453512
agcuagcacgacuaauacg

SEQ ID NO: 2453514 - RNA, 19 nt, Artificial Sequence
  Description of Artificial Sequence: Synthetic oligonucleotide
  Sense strand starting at position 2295 of SEQ ID NO: 1887174
guauuagucgugcuagcuu

SEQ ID NO: 2453515 - RNA, 19 nt, Artificial Sequence
  Description of Artificial Sequence: Synthetic oligonucleotide
  Antisense strand to SEQ ID NO: 2453514
aagcuagcacgacuaauac

SEQ ID NO: 2453516 - RNA, 19 nt, Artificial Sequence
  Description of Artificial Sequence: Synthetic oligonucleotide
  Sense strand starting at position 2298 of SEQ ID NO: 1887174
uuagucgugcuagcuuauu

SEQ ID NO: 2453517 - RNA, 19 nt, Artificial Sequence
  Description of Artificial Sequence: Synthetic oligonucleotide
  Antisense strand to SEQ ID NO: 2453516
aauaagcuagcacgacuaa

SEQ ID NO: 2453518 - RNA, 19 nt, Artificial Sequence
  Description of Artificial Sequence: Synthetic oligonucleotide
  Sense strand starting at position 2404 of SEQ ID NO: 1887174
auaggaggcgcccauuaaa

SEQ ID NO: 2453519 - RNA, 19 nt, Artificial Sequence
  Description of Artificial Sequence: Synthetic oligonucleotide
  Antisense strand to SEQ ID NO: 2453518
uuuaaugggcgccuccuau

SEQ ID NO: 2453520 - RNA, 19 nt, Artificial Sequence
  Description of Artificial Sequence: Synthetic oligonucleotide
  Sense strand starting at position 2422 of SEQ ID NO: 1887174
auggaaauuuaaugaugca

SEQ ID NO: 2453521 - RNA, 19 nt, Artificial Sequence
  Description of Artificial Sequence: Synthetic oligonucleotide
  Antisense strand to SEQ ID NO: 2453520
ugcaucauuaaauuuccau

SEQ ID NO: 2453522 - RNA, 19 nt, Artificial Sequence
  Description of Artificial Sequence: Synthetic oligonucleotide
  Sense strand starting at position 2762 of SEQ ID NO: 1887174
ccacuuauuucgcccgaug

SEQ ID NO: 2453523 - RNA, 19 nt, Artificial Sequence
  Description of Artificial Sequence: Synthetic oligonucleotide
  Antisense strand to SEQ ID NO: 2453522
caucgggcgaaauaagugg

SEQ ID NO: 2453524 - RNA, 19 nt, Artificial Sequence
  Description of Artificial Sequence: Synthetic oligonucleotide
  Sense strand starting at position 3155 of SEQ ID NO: 1887174
gcuagaucgcaggaaaccu

SEQ ID NO: 2453525 - RNA, 19 nt, Artificial Sequence
  Description of Artificial Sequence: Synthetic oligonucleotide
  Antisense strand to SEQ ID NO: 2453524
agguuuccugcgaucuagc

SEQ ID NO: 2453526 - RNA, 19 nt, Artificial Sequence
  Description of Artificial Sequence: Synthetic oligonucleotide
  Sense strand starting at position 3274 of SEQ ID NO: 1887174
uauugucugccucaaucga

SEQ ID NO: 2453527 - RNA, 19 nt, Artificial Sequence
  Description of Artificial Sequence: Synthetic oligonucleotide
  Antisense strand to SEQ ID NO: 2453526
ucgauugaggcagacaaua

SEQ ID NO: 2453528 - RNA, 19 nt, Artificial Sequence
  Description of Artificial Sequence: Synthetic oligonucleotide
  Sense strand starting at position 3281 of SEQ ID NO: 1887174
ugccucaaucgauauuaca

SEQ ID NO: 2453529 - RNA, 19 nt, Artificial Sequence
  Description of Artificial Sequence: Synthetic oligonucleotide
  Antisense strand to SEQ ID NO: 2453528
uguaauaucgauugaggca

SEQ ID NO: 2453530 - RNA, 19 nt, Artificial Sequence
  Description of Artificial Sequence: Synthetic oligonucleotide
  Sense strand starting at position 3385 of SEQ ID NO: 1887174
gggagaacauuguugugau

SEQ ID NO: 2453531 - RNA, 19 nt, Artificial Sequence
  Description of Artificial Sequence: Synthetic oligonucleotide
  Antisense strand to SEQ ID NO: 2453530
aucacaacaauguucuccc

SEQ ID NO: 2453532 - RNA, 19 nt, Artificial Sequence
  Description of Artificial Sequence: Synthetic oligonucleotide
  Sense strand starting at position 3395 of SEQ ID NO: 1887174
uguugugauacagggaaag

SEQ ID NO: 2453533 - RNA, 19 nt, Artificial Sequence
  Description of Artificial Sequence: Synthetic oligonucleotide
  Antisense strand to SEQ ID NO: 2453532
cuuucccuguaucacaaca

SEQ ID NO: 2453534 - RNA, 19 nt, Artificial Sequence
  Description of Artificial Sequence: Synthetic oligonucleotide
  Sense strand starting at position 3481 of SEQ ID NO: 1887174
agacgcauuuaauauuaga

SEQ ID NO: 2453535 - RNA, 19 nt, Artificial Sequence
  Description of Artificial Sequence: Synthetic oligonucleotide
  Antisense strand to SEQ ID NO: 2453534
ucuaauauuaaaugcgucu

SEQ ID NO: 2453536 - RNA, 19 nt, Artificial Sequence
  Description of Artificial Sequence: Synthetic oligonucleotide
  Sense strand starting at position 3702 of SEQ ID NO: 1887174
gggaucugauccucgcaau

SEQ ID NO: 2453537 - RNA, 19 nt, Artificial Sequence
  Description of Artificial Sequence: Synthetic oligonucleotide
  Antisense strand to SEQ ID NO: 2453536
auugcgaggaucagauccc

SEQ ID NO: 2453538 - RNA, 19 nt, Artificial Sequence
  Description of Artificial Sequence: Synthetic oligonucleotide
  Sense strand starting at position 3703 of SEQ ID NO: 1887174
ggaucugauccucgcaaua

SEQ ID NO: 2453539 - RNA, 19 nt, Artificial Sequence
  Description of Artificial Sequence: Synthetic oligonucleotide
  Antisense strand to SEQ ID NO: 2453538
uauugcgaggaucagaucc

SEQ ID NO: 2453540 - RNA, 19 nt, Artificial Sequence
  Description of Artificial Sequence: Synthetic oligonucleotide
  Sense strand starting at position 3726 of SEQ ID NO: 1887174
uugguauaugcuggaggua

SEQ ID NO: 2453541 - RNA, 19 nt, Artificial Sequence
  Description of Artificial Sequence: Synthetic oligonucleotide
  Antisense strand to SEQ ID NO: 2453540
uaccuccagcauauaccaa

SEQ ID NO: 2453542 - RNA, 19 nt, Artificial Sequence
  Description of Artificial Sequence: Synthetic oligonucleotide
  Sense strand starting at position 3727 of SEQ ID NO: 1887174
ugguauaugcuggagguaa

SEQ ID NO: 2453543 - RNA, 19 nt, Artificial Sequence
  Description of Artificial Sequence: Synthetic oligonucleotide
  Antisense strand to SEQ ID NO: 2453542
uuaccuccagcauauacca

SEQ ID NO: 2453544 - RNA, 19 nt, Artificial Sequence
  Description of Artificial Sequence: Synthetic oligonucleotide
  Sense strand starting at position 3729 of SEQ ID NO: 1887174
guauaugcuggagguaauu

SEQ ID NO: 2453545 - RNA, 19 nt, Artificial Sequence
  Description of Artificial Sequence: Synthetic oligonucleotide
  Antisense strand to SEQ ID NO: 2453544
aauuaccuccagcauauac

SEQ ID NO: 2453546 - RNA, 19 nt, Artificial Sequence
  Description of Artificial Sequence: Synthetic oligonucleotide
  Sense strand starting at position 3738 of SEQ ID NO: 1887174
ggagguaauugccuagauu

SEQ ID NO: 2453547 - RNA, 19 nt, Artificial Sequence
  Description of Artificial Sequence: Synthetic oligonucleotide
  Antisense strand to SEQ ID NO: 2453546
aaucuaggcaauuaccucc

SEQ ID NO: 2453548 - RNA, 19 nt, Artificial Sequence
  Description of Artificial Sequence: Synthetic oligonucleotide
  Sense strand starting at position 3750 of SEQ ID NO: 1887174
cuagauuucccgcguuccu

SEQ ID NO: 2453549 - RNA, 19 nt, Artificial Sequence
  Description of Artificial Sequence: Synthetic oligonucleotide
  Antisense strand to SEQ ID NO: 2453548
aggaacgcgggaaaucuag

SEQ ID NO: 2453550 - RNA, 19 nt, Artificial Sequence
  Description of Artificial Sequence: Synthetic oligonucleotide
  Sense strand starting at position 3799 of SEQ ID NO: 1887174
cacugugacucuucugaug

SEQ ID NO: 2453551 - RNA, 19 nt, Artificial Sequence
  Description of Artificial Sequence: Synthetic oligonucleotide
  Antisense strand to SEQ ID NO: 2453550
caucagaagagucacagug

SEQ ID NO: 2453552 - RNA, 19 nt, Artificial Sequence
  Description of Artificial Sequence: Synthetic oligonucleotide
  Sense strand starting at position 3817 of SEQ ID NO: 1887174
gcacuugucagcuagagga

SEQ ID NO: 2453553 - RNA, 19 nt, Artificial Sequence
  Description of Artificial Sequence: Synthetic oligonucleotide
  Antisense strand to SEQ ID NO: 2453552
uccucuagcugacaagugc

SEQ ID NO: 2453554 - RNA, 19 nt, Artificial Sequence
  Description of Artificial Sequence: Synthetic oligonucleotide
  Sense strand starting at position 3961 of SEQ ID NO: 1887174
gacacuuggucucugcaga

SEQ ID NO: 2453555 - RNA, 19 nt, Artificial Sequence
  Description of Artificial Sequence: Synthetic oligonucleotide
  Antisense strand to SEQ ID NO: 2453554
ucugcagagaccaaguguc

SEQ ID NO: 2453556 - RNA, 19 nt, Artificial Sequence
  Description of Artificial Sequence: Synthetic oligonucleotide
  Sense strand starting at position 3962 of SEQ ID NO: 1887174
acacuuggucucugcagau

SEQ ID NO: 2453557 - RNA, 19 nt, Artificial Sequence
  Description of Artificial Sequence: Synthetic oligonucleotide
  Antisense strand to SEQ ID NO: 2453556
aucugcagagaccaagugu

SEQ ID NO: 2453558 - RNA, 19 nt, Artificial Sequence
  Description of Artificial Sequence: Synthetic oligonucleotide
  Sense strand starting at position 3975 of SEQ ID NO: 1887174
gcagauucggcucaaagga

SEQ ID NO: 2453559 - RNA, 19 nt, Artificial Sequence
  Description of Artificial Sequence: Synthetic oligonucleotide
  Antisense strand to SEQ ID NO: 2453558
uccuuugagccgaaucugc

SEQ ID NO: 2453560 - RNA, 19 nt, Artificial Sequence
  Description of Artificial Sequence: Synthetic oligonucleotide
  Sense strand starting at position 240 of SEQ ID NO: 1887176
aacaauuagcucggagcau

SEQ ID NO: 2453561 - RNA, 19 nt, Artificial Sequence
  Description of Artificial Sequence: Synthetic oligonucleotide
  Antisense strand to SEQ ID NO: 2453560
augcuccgagcuaauuguu

SEQ ID NO: 2453562 - RNA, 19 nt, Artificial Sequence
  Description of Artificial Sequence: Synthetic oligonucleotide
  Sense strand starting at position 251 of SEQ ID NO: 1887176
cggagcauucaaggaagau

SEQ ID NO: 2453563 - RNA, 19 nt, Artificial Sequence
  Description of Artificial Sequence: Synthetic oligonucleotide
  Antisense strand to SEQ ID NO: 2453562
aucuuccuugaaugcuccg

SEQ ID NO: 2453564 - RNA, 19 nt, Artificial Sequence
  Description of Artificial Sequence: Synthetic oligonucleotide
  Sense strand starting at position 277 of SEQ ID NO: 1887176
aaaggugaugucuaaguga

SEQ ID NO: 2453565 - RNA, 19 nt, Artificial Sequence
  Description of Artificial Sequence: Synthetic oligonucleotide
  Antisense strand to SEQ ID NO: 2453564
ucacuuagacaucaccuuu

SEQ ID NO: 2453566 - RNA, 19 nt, Artificial Sequence
  Description of Artificial Sequence: Synthetic oligonucleotide
  Sense strand starting at position 280 of SEQ ID NO: 1887176
ggugaugucuaagugaaau

SEQ ID NO: 2453567 - RNA, 19 nt, Artificial Sequence
  Description of Artificial Sequence: Synthetic oligonucleotide
  Antisense strand to SEQ ID NO: 2453566
auuucacuuagacaucacc

SEQ ID NO: 2453568 - RNA, 19 nt, Artificial Sequence
  Description of Artificial Sequence: Synthetic oligonucleotide
  Sense strand starting at position 515 of SEQ ID NO: 1887176
ggugcaugaccagaucuau

SEQ ID NO: 2453569 - RNA, 19 nt, Artificial Sequence
  Description of Artificial Sequence: Synthetic oligonucleotide
  Antisense strand to SEQ ID NO: 2453568
auagaucuggucaugcacc

SEQ ID NO: 2453570 - RNA, 19 nt, Artificial Sequence
  Description of Artificial Sequence: Synthetic oligonucleotide
  Sense strand starting at position 543 of SEQ ID NO: 1887176
ucauucugacugcaauguu

SEQ ID NO: 2453571 - RNA, 19 nt, Artificial Sequence
  Description of Artificial Sequence: Synthetic oligonucleotide
  Antisense strand to SEQ ID NO: 2453570
aacauugcagucagaauga

SEQ ID NO: 2453572 - RNA, 19 nt, Artificial Sequence
  Description of Artificial Sequence: Synthetic oligonucleotide
  Sense strand starting at position 546 of SEQ ID NO: 1887176
uucugacugcaauguuuaa

SEQ ID NO: 2453573 - RNA, 19 nt, Artificial Sequence
  Description of Artificial Sequence: Synthetic oligonucleotide
  Antisense strand to SEQ ID NO: 2453572
uuaaacauugcagucagaa

SEQ ID NO: 2453574 - RNA, 19 nt, Artificial Sequence
  Description of Artificial Sequence: Synthetic oligonucleotide
  Sense strand starting at position 550 of SEQ ID NO: 1887176
gacugcaauguuuaagagu

SEQ ID NO: 2453575 - RNA, 19 nt, Artificial Sequence
  Description of Artificial Sequence: Synthetic oligonucleotide
  Antisense strand to SEQ ID NO: 2453574
acucuuaaacauugcaguc

SEQ ID NO: 2453576 - RNA, 19 nt, Artificial Sequence
  Description of Artificial Sequence: Synthetic oligonucleotide
  Sense strand starting at position 585 of SEQ ID NO: 1887176
gagccaagaucuguuagga

SEQ ID NO: 2453577 - RNA, 19 nt, Artificial Sequence
  Description of Artificial Sequence: Synthetic oligonucleotide
  Antisense strand to SEQ ID NO: 2453576
uccuaacagaucuuggcuc

SEQ ID NO: 2453578 - RNA, 19 nt, Artificial Sequence
  Description of Artificial Sequence: Synthetic oligonucleotide
  Sense strand starting at position 841 of SEQ ID NO: 1887176
uggacuugaugguugacua

SEQ ID NO: 2453579 - RNA, 19 nt, Artificial Sequence
  Description of Artificial Sequence: Synthetic oligonucleotide
  Antisense strand to SEQ ID NO: 2453578
uagucaaccaucaagucca

SEQ ID NO: 2453580 - RNA, 19 nt, Artificial Sequence
  Description of Artificial Sequence: Synthetic oligonucleotide
  Sense strand starting at position 845 of SEQ ID NO: 1887176
cuugaugguugacuaguaa

SEQ ID NO: 2453581 - RNA, 19 nt, Artificial Sequence
  Description of Artificial Sequence: Synthetic oligonucleotide
  Antisense strand to SEQ ID NO: 2453580
uuacuagucaaccaucaag

SEQ ID NO: 2453582 - RNA, 19 nt, Artificial Sequence
  Description of Artificial Sequence: Synthetic oligonucleotide
  Sense strand starting at position 898 of SEQ ID NO: 1887176
ggugaagaguaauuccauu

SEQ ID NO: 2453583 - RNA, 19 nt, Artificial Sequence
  Description of Artificial Sequence: Synthetic oligonucleotide
  Antisense strand to SEQ ID NO: 2453582
aauggaauuacucuucacc

SEQ ID NO: 2453584 - RNA, 19 nt, Artificial Sequence
  Description of Artificial Sequence: Synthetic oligonucleotide
  Sense strand starting at position 920 of SEQ ID NO: 1887176
ggaggagaauguuagaaag

SEQ ID NO: 2453585 - RNA, 19 nt, Artificial Sequence
  Description of Artificial Sequence: Synthetic oligonucleotide
  Antisense strand to SEQ ID NO: 2453584
cuuucuaacauucuccucc

SEQ ID NO: 2453586 - RNA, 19 nt, Artificial Sequence
  Description of Artificial Sequence: Synthetic oligonucleotide
  Sense strand starting at position 1022 of SEQ ID NO: 1887176
ggaggucugggcuggagaa

SEQ ID NO: 2453587 - RNA, 19 nt, Artificial Sequence
  Description of Artificial Sequence: Synthetic oligonucleotide
  Antisense strand to SEQ ID NO: 2453586
uucuccagcccagaccucc

SEQ ID NO: 2453588 - RNA, 19 nt, Artificial Sequence
  Description of Artificial Sequence: Synthetic oligonucleotide
  Sense strand starting at position 1023 of SEQ ID NO: 1887176
gaggucugggcuggagaau

SEQ ID NO: 2453589 - RNA, 19 nt, Artificial Sequence
  Description of Artificial Sequence: Synthetic oligonucleotide
  Antisense strand to SEQ ID NO: 2453588
auucuccagcccagaccuc

SEQ ID NO: 2453590 - RNA, 19 nt, Artificial Sequence
  Description of Artificial Sequence: Synthetic oligonucleotide
  Sense strand starting at position 1046 of SEQ ID NO: 1887176
auuugauauguguguuuag

SEQ ID NO: 2453591 - RNA, 19 nt, Artificial Sequence
  Description of Artificial Sequence: Synthetic oligonucleotide
  Antisense strand to SEQ ID NO: 2453590
cuaaacacacauaucaaau

SEQ ID NO: 2453592 - RNA, 19 nt, Artificial Sequence
  Description of Artificial Sequence: Synthetic oligonucleotide
  Sense strand starting at position 1049 of SEQ ID NO: 1887176
ugauauguguguuuagaga

SEQ ID NO: 2453593 - RNA, 19 nt, Artificial Sequence
  Description of Artificial Sequence: Synthetic oligonucleotide
  Antisense strand to SEQ ID NO: 2453592
ucucuaaacacacauauca

SEQ ID NO: 2453594 - RNA, 19 nt, Artificial Sequence
  Description of Artificial Sequence: Synthetic oligonucleotide
  Sense strand starting at position 1107 of SEQ ID NO: 1887176
guugcuaauguagaugaua

SEQ ID NO: 2453595 - RNA, 19 nt, Artificial Sequence
  Description of Artificial Sequence: Synthetic oligonucleotide
  Antisense strand to SEQ ID NO: 2453594
uaucaucuacauuagcaac

SEQ ID NO: 2453596 - RNA, 19 nt, Artificial Sequence
  Description of Artificial Sequence: Synthetic oligonucleotide
  Sense strand starting at position 1109 of SEQ ID NO: 1887176
ugcuaauguagaugauaag

SEQ ID NO: 2453597 - RNA, 19 nt, Artificial Sequence
  Description of Artificial Sequence: Synthetic oligonucleotide
  Antisense strand to SEQ ID NO: 2453596
cuuaucaucuacauuagca

SEQ ID NO: 2453598 - RNA, 19 nt, Artificial Sequence
  Description of Artificial Sequence: Synthetic oligonucleotide
  Sense strand starting at position 1133 of SEQ ID NO: 1887176
agagcuuuggagcggaaau

SEQ ID NO: 2453599 - RNA, 19 nt, Artificial Sequence
  Description of Artificial Sequence: Synthetic oligonucleotide
  Antisense strand to SEQ ID NO: 2453598
auuuccgcuccaaagcucu

SEQ ID NO: 2453600 - RNA, 19 nt, Artificial Sequence
  Description of Artificial Sequence: Synthetic oligonucleotide
  Sense strand starting at position 1134 of SEQ ID NO: 1887176
gagcuuuggagcggaaaug

SEQ ID NO: 2453601 - RNA, 19 nt, Artificial Sequence
  Description of Artificial Sequence: Synthetic oligonucleotide
  Antisense strand to SEQ ID NO: 2453600
cauuuccgcuccaaagcuc

SEQ ID NO: 2453602 - RNA, 19 nt, Artificial Sequence
  Description of Artificial Sequence: Synthetic oligonucleotide
  Sense strand starting at position 1256 of SEQ ID NO: 1887176
uaaggaugguggccuaaga

SEQ ID NO: 2453603 - RNA, 19 nt, Artificial Sequence
  Description of Artificial Sequence: Synthetic oligonucleotide
  Antisense strand to SEQ ID NO: 2453602
ucuuaggccaccauccuua

SEQ ID NO: 2453604 - RNA, 19 nt, Artificial Sequence
  Description of Artificial Sequence: Synthetic oligonucleotide
  Sense strand starting at position 1267 of SEQ ID NO: 1887176
gccuaagacaggugaguuu

SEQ ID NO: 2453605 - RNA, 19 nt, Artificial Sequence
  Description of Artificial Sequence: Synthetic oligonucleotide
  Antisense strand to SEQ ID NO: 2453604
aaacucaccugucuuaggc

SEQ ID NO: 2453606 - RNA, 19 nt, Artificial Sequence
  Description of Artificial Sequence: Synthetic oligonucleotide
  Sense strand starting at position 1343 of SEQ ID NO: 1887176
gggcucucaugggugacaa

SEQ ID NO: 2453607 - RNA, 19 nt, Artificial Sequence
  Description of Artificial Sequence: Synthetic oligonucleotide
  Antisense strand to SEQ ID NO: 2453606
uugucacccaugagagccc

SEQ ID NO: 2453608 - RNA, 19 nt, Artificial Sequence
  Description of Artificial Sequence: Synthetic oligonucleotide
  Sense strand starting at position 1344 of SEQ ID NO: 1887176
ggcucucaugggugacaau

SEQ ID NO: 2453609 - RNA, 19 nt, Artificial Sequence
  Description of Artificial Sequence: Synthetic oligonucleotide
  Antisense strand to SEQ ID NO: 2453608
auugucacccaugagagcc

SEQ ID NO: 2453610 - RNA, 19 nt, Artificial Sequence
  Description of Artificial Sequence: Synthetic oligonucleotide
  Sense strand starting at position 1355 of SEQ ID NO: 1887176
gugacaaucggcgcaaguu

SEQ ID NO: 2453611 - RNA, 19 nt, Artificial Sequence
  Description of Artificial Sequence: Synthetic oligonucleotide
  Antisense strand to SEQ ID NO: 2453610
aacuugcgccgauugucac

SEQ ID NO: 2453612 - RNA, 19 nt, Artificial Sequence
  Description of Artificial Sequence: Synthetic oligonucleotide
  Sense strand starting at position 1367 of SEQ ID NO: 1887176
gcaaguucuccucaccuga

SEQ ID NO: 2453613 - RNA, 19 nt, Artificial Sequence
  Description of Artificial Sequence: Synthetic oligonucleotide
  Antisense strand to SEQ ID NO: 2453612
ucaggugaggagaacuugc

SEQ ID NO: 2453614 - RNA, 19 nt, Artificial Sequence
  Description of Artificial Sequence: Synthetic oligonucleotide
  Sense strand starting at position 1490 of SEQ ID NO: 1887176
ggagcaaucagaggagucu

SEQ ID NO: 2453615 - RNA, 19 nt, Artificial Sequence
  Description of Artificial Sequence: Synthetic oligonucleotide
  Antisense strand to SEQ ID NO: 2453614
agacuccucugauugcucc

SEQ ID NO: 2453616 - RNA, 19 nt, Artificial Sequence
  Description of Artificial Sequence: Synthetic oligonucleotide
  Sense strand starting at position 2343 of SEQ ID NO: 1887176
uagauagugguaggaaagu

SEQ ID NO: 2453617 - RNA, 19 nt, Artificial Sequence
  Description of Artificial Sequence: Synthetic oligonucleotide
  Antisense strand to SEQ ID NO: 2453616
acuuuccuaccacuaucua

SEQ ID NO: 2453618 - RNA, 19 nt, Artificial Sequence
  Description of Artificial Sequence: Synthetic oligonucleotide
  Sense strand starting at position 2352 of SEQ ID NO: 1887176
guaggaaagugguugugaa

SEQ ID NO: 2453619 - RNA, 19 nt, Artificial Sequence
  Description of Artificial Sequence: Synthetic oligonucleotide
  Antisense strand to SEQ ID NO: 2453618
uucacaaccacuuuccuac

SEQ ID NO: 2453620 - RNA, 19 nt, Artificial Sequence
  Description of Artificial Sequence: Synthetic oligonucleotide
  Sense strand starting at position 2353 of SEQ ID NO: 1887176
uaggaaagugguugugaaa

SEQ ID NO: 2453621 - RNA, 19 nt, Artificial Sequence
  Description of Artificial Sequence: Synthetic oligonucleotide
  Antisense strand to SEQ ID NO: 2453620
uuucacaaccacuuuccua

SEQ ID NO: 2453622 - RNA, 19 nt, Artificial Sequence
  Description of Artificial Sequence: Synthetic oligonucleotide
  Sense strand starting at position 2667 of SEQ ID NO: 1887176
agacgcagucucgaacaaa

SEQ ID NO: 2453623 - RNA, 19 nt, Artificial Sequence
  Description of Artificial Sequence: Synthetic oligonucleotide
  Antisense strand to SEQ ID NO: 2453622
uuuguucgagacugcgucu

SEQ ID NO: 2453624 - RNA, 19 nt, Artificial Sequence
  Description of Artificial Sequence: Synthetic oligonucleotide
  Sense strand starting at position 2859 of SEQ ID NO: 1887176
uuuguuagcccagacaauc

SEQ ID NO: 2453625 - RNA, 19 nt, Artificial Sequence
  Description of Artificial Sequence: Synthetic oligonucleotide
  Antisense strand to SEQ ID NO: 2453624
gauugucugggcuaacaaa

SEQ ID NO: 2453626 - RNA, 19 nt, Artificial Sequence
  Description of Artificial Sequence: Synthetic oligonucleotide
  Sense strand starting at position 2870 of SEQ ID NO: 1887176
agacaaucucagggcaaca

SEQ ID NO: 2453627 - RNA, 19 nt, Artificial Sequence
  Description of Artificial Sequence: Synthetic oligonucleotide
  Antisense strand to SEQ ID NO: 2453626
uguugcccugagauugucu

SEQ ID NO: 2453628 - RNA, 19 nt, Artificial Sequence
  Description of Artificial Sequence: Synthetic oligonucleotide
  Sense strand starting at position 3092 of SEQ ID NO: 1887176
gcacguuuaggagacaaua

SEQ ID NO: 2453629 - RNA, 19 nt, Artificial Sequence
  Description of Artificial Sequence: Synthetic oligonucleotide
  Antisense strand to SEQ ID NO: 2453628
uauugucuccuaaacgugc

SEQ ID NO: 2453630 - RNA, 19 nt, Artificial Sequence
  Description of Artificial Sequence: Synthetic oligonucleotide
  Sense strand starting at position 3100 of SEQ ID NO: 1887176
aggagacaauauuaagaau

SEQ ID NO: 2453631 - RNA, 19 nt, Artificial Sequence
  Description of Artificial Sequence: Synthetic oligonucleotide
  Antisense strand to SEQ ID NO: 2453630
auucuuaauauugucuccu

SEQ ID NO: 2453632 - RNA, 19 nt, Artificial Sequence
  Description of Artificial Sequence: Synthetic oligonucleotide
  Sense strand starting at position 3497 of SEQ ID NO: 1887176
gaaggaaaguagccucaua

SEQ ID NO: 2453633 - RNA, 19 nt, Artificial Sequence
  Description of Artificial Sequence: Synthetic oligonucleotide
  Antisense strand to SEQ ID NO: 2453632
uaugaggcuacuuuccuuc

SEQ ID NO: 2453634 - RNA, 19 nt, Artificial Sequence
  Description of Artificial Sequence: Synthetic oligonucleotide
  Sense strand starting at position 3892 of SEQ ID NO: 1887176
ccugucuuuccacaucaga

SEQ ID NO: 2453635 - RNA, 19 nt, Artificial Sequence
  Description of Artificial Sequence: Synthetic oligonucleotide
  Antisense strand to SEQ ID NO: 2453634
ucugauguggaaagacagg

SEQ ID NO: 2453636 - RNA, 19 nt, Artificial Sequence
  Description of Artificial Sequence: Synthetic oligonucleotide
  Sense strand starting at position 3903 of SEQ ID NO: 1887176
acaucagagcucugaacuu

SEQ ID NO: 2453637 - RNA, 19 nt, Artificial Sequence
  Description of Artificial Sequence: Synthetic oligonucleotide
  Antisense strand to SEQ ID NO: 2453636
aaguucagagcucugaugu

SEQ ID NO: 2453638 - RNA, 19 nt, Artificial Sequence
  Description of Artificial Sequence: Synthetic oligonucleotide
  Sense strand starting at position 3940 of SEQ ID NO: 1887176
guuugagaagccuaaagug

SEQ ID NO: 2453639 - RNA, 19 nt, Artificial Sequence
  Description of Artificial Sequence: Synthetic oligonucleotide
  Antisense strand to SEQ ID NO: 2453638
cacuuuaggcuucucaaac

SEQ ID NO: 2453640 - RNA, 19 nt, Artificial Sequence
  Description of Artificial Sequence: Synthetic oligonucleotide
  Sense strand starting at position 355 of SEQ ID NO: 1887175
aacaauuagcucggagcau

SEQ ID NO: 2453641 - RNA, 19 nt, Artificial Sequence
  Description of Artificial Sequence: Synthetic oligonucleotide
  Antisense strand to SEQ ID NO: 2453640
augcuccgagcuaauuguu

SEQ ID NO: 2453642 - RNA, 19 nt, Artificial Sequence
  Description of Artificial Sequence: Synthetic oligonucleotide
  Sense strand starting at position 366 of SEQ ID NO: 1887175
cggagcauucaaggaagau

SEQ ID NO: 2453643 - RNA, 19 nt, Artificial Sequence
  Description of Artificial Sequence: Synthetic oligonucleotide
  Antisense strand to SEQ ID NO: 2453642
aucuuccuugaaugcuccg

SEQ ID NO: 2453644 - RNA, 19 nt, Artificial Sequence
  Description of Artificial Sequence: Synthetic oligonucleotide
  Sense strand starting at position 392 of SEQ ID NO: 1887175
aaaggugaugucuaaguga

SEQ ID NO: 2453645 - RNA, 19 nt, Artificial Sequence
  Description of Artificial Sequence: Synthetic oligonucleotide
  Antisense strand to SEQ ID NO: 2453644
ucacuuagacaucaccuuu

SEQ ID NO: 2453646 - RNA, 19 nt, Artificial Sequence
  Description of Artificial Sequence: Synthetic oligonucleotide
  Sense strand starting at position 395 of SEQ ID NO: 1887175
ggugaugucuaagugaaau

SEQ ID NO: 2453647 - RNA, 19 nt, Artificial Sequence
  Description of Artificial Sequence: Synthetic oligonucleotide
  Antisense strand to SEQ ID NO: 2453646
auuucacuuagacaucacc

SEQ ID NO: 2453648 - RNA, 19 nt, Artificial Sequence
  Description of Artificial Sequence: Synthetic oligonucleotide
  Sense strand starting at position 630 of SEQ ID NO: 1887175
ggugcaugaccagaucuau

SEQ ID NO: 2453649 - RNA, 19 nt, Artificial Sequence
  Description of Artificial Sequence: Synthetic oligonucleotide
  Antisense strand to SEQ ID NO: 2453648
auagaucuggucaugcacc

SEQ ID NO: 2453650 - RNA, 19 nt, Artificial Sequence
  Description of Artificial Sequence: Synthetic oligonucleotide
  Sense strand starting at position 658 of SEQ ID NO: 1887175
ucauucugacugcaauguu

SEQ ID NO: 2453651 - RNA, 19 nt, Artificial Sequence
  Description of Artificial Sequence: Synthetic oligonucleotide
  Antisense strand to SEQ ID NO: 2453650
aacauugcagucagaauga

SEQ ID NO: 2453652 - RNA, 19 nt, Artificial Sequence
  Description of Artificial Sequence: Synthetic oligonucleotide
  Sense strand starting at position 661 of SEQ ID NO: 1887175
uucugacugcaauguuuaa

SEQ ID NO: 2453653 - RNA, 19 nt, Artificial Sequence
  Description of Artificial Sequence: Synthetic oligonucleotide
  Antisense strand to SEQ ID NO: 2453652
uuaaacauugcagucagaa

SEQ ID NO: 2453654 - RNA, 19 nt, Artificial Sequence
  Description of Artificial Sequence: Synthetic oligonucleotide
  Sense strand starting at position 665 of SEQ ID NO: 1887175
gacugcaauguuuaagagu

SEQ ID NO: 2453655 - RNA, 19 nt, Artificial Sequence
  Description of Artificial Sequence: Synthetic oligonucleotide
  Antisense strand to SEQ ID NO: 2453654
acucuuaaacauugcaguc

SEQ ID NO: 2453656 - RNA, 19 nt, Artificial Sequence
  Description of Artificial Sequence: Synthetic oligonucleotide
  Sense strand starting at position 700 of SEQ ID NO: 1887175
gagccaagaucuguuagga

SEQ ID NO: 2453657 - RNA, 19 nt, Artificial Sequence
  Description of Artificial Sequence: Synthetic oligonucleotide
  Antisense strand to SEQ ID NO: 2453656
uccuaacagaucuuggcuc

SEQ ID NO: 2453658 - RNA, 19 nt, Artificial Sequence
  Description of Artificial Sequence: Synthetic oligonucleotide
  Sense strand starting at position 956 of SEQ ID NO: 1887175
uggacuugaugguugacua

SEQ ID NO: 2453659 - RNA, 19 nt, Artificial Sequence
  Description of Artificial Sequence: Synthetic oligonucleotide
  Antisense strand to SEQ ID NO: 2453658
uagucaaccaucaagucca

SEQ ID NO: 2453660 - RNA, 19 nt, Artificial Sequence
  Description of Artificial Sequence: Synthetic oligonucleotide
  Sense strand starting at position 960 of SEQ ID NO: 1887175
cuugaugguugacuaguaa

SEQ ID NO: 2453661 - RNA, 19 nt, Artificial Sequence
  Description of Artificial Sequence: Synthetic oligonucleotide
  Antisense strand to SEQ ID NO: 2453660
uuacuagucaaccaucaag

SEQ ID NO: 2453662 - RNA, 19 nt, Artificial Sequence
  Description of Artificial Sequence: Synthetic oligonucleotide
  Sense strand starting at position 1006 of SEQ ID NO: 1887175
ugguuugggugaagaguaa

SEQ ID NO: 2453663 - RNA, 19 nt, Artificial Sequence
  Description of Artificial Sequence: Synthetic oligonucleotide
  Antisense strand to SEQ ID NO: 2453662
uuacucuucacccaaacca

SEQ ID NO: 2453664 - RNA, 19 nt, Artificial Sequence
  Description of Artificial Sequence: Synthetic oligonucleotide
  Sense strand starting at position 1013 of SEQ ID NO: 1887175
ggugaagaguaauuccauu

SEQ ID NO: 2453665 - RNA, 19 nt, Artificial Sequence
  Description of Artificial Sequence: Synthetic oligonucleotide
  Antisense strand to SEQ ID NO: 2453664
aauggaauuacucuucacc

SEQ ID NO: 2453666 - RNA, 19 nt, Artificial Sequence
  Description of Artificial Sequence: Synthetic oligonucleotide
  Sense strand starting at position 1035 of SEQ ID NO: 1887175
ggaggagaauguuagaaag

SEQ ID NO: 2453667 - RNA, 19 nt, Artificial Sequence
  Description of Artificial Sequence: Synthetic oligonucleotide
  Antisense strand to SEQ ID NO: 2453666
cuuucuaacauucuccucc

SEQ ID NO: 2453668 - RNA, 19 nt, Artificial Sequence
  Description of Artificial Sequence: Synthetic oligonucleotide
  Sense strand starting at position 1137 of SEQ ID NO: 1887175
ggaggucugggcuggagaa

SEQ ID NO: 2453669 - RNA, 19 nt, Artificial Sequence
  Description of Artificial Sequence: Synthetic oligonucleotide
  Antisense strand to SEQ ID NO: 2453668
uucuccagcccagaccucc

SEQ ID NO: 2453670 - RNA, 19 nt, Artificial Sequence
  Description of Artificial Sequence: Synthetic oligonucleotide
  Sense strand starting at position 1138 of SEQ ID NO: 1887175
gaggucugggcuggagaau

SEQ ID NO: 2453671 - RNA, 19 nt, Artificial Sequence
  Description of Artificial Sequence: Synthetic oligonucleotide
  Antisense strand to SEQ ID NO: 2453670
auucuccagcccagaccuc

SEQ ID NO: 2453672 - RNA, 19 nt, Artificial Sequence
  Description of Artificial Sequence: Synthetic oligonucleotide
  Sense strand starting at position 1161 of SEQ ID NO: 1887175
auuugauauguguguuuag

SEQ ID NO: 2453673 - RNA, 19 nt, Artificial Sequence
  Description of Artificial Sequence: Synthetic oligonucleotide
  Antisense strand to SEQ ID NO: 2453672
cuaaacacacauaucaaau

SEQ ID NO: 2453674 - RNA, 19 nt, Artificial Sequence
  Description of Artificial Sequence: Synthetic oligonucleotide
  Sense strand starting at position 1162 of SEQ ID NO: 1887175
uuugauauguguguuuaga

SEQ ID NO: 2453675 - RNA, 19 nt, Artificial Sequence
  Description of Artificial Sequence: Synthetic oligonucleotide
  Antisense strand to SEQ ID NO: 2453674
ucuaaacacacauaucaaa

SEQ ID NO: 2453676 - RNA, 19 nt, Artificial Sequence
  Description of Artificial Sequence: Synthetic oligonucleotide
  Sense strand starting at position 1164 of SEQ ID NO: 1887175
ugauauguguguuuagaga

SEQ ID NO: 2453677 - RNA, 19 nt, Artificial Sequence
  Description of Artificial Sequence: Synthetic oligonucleotide
  Antisense strand to SEQ ID NO: 2453676
ucucuaaacacacauauca

SEQ ID NO: 2453678 - RNA, 19 nt, Artificial Sequence
  Description of Artificial Sequence: Synthetic oligonucleotide
  Sense strand starting at position 1222 of SEQ ID NO: 1887175
guugcuaauguagaugaua

SEQ ID NO: 2453679 - RNA, 19 nt, Artificial Sequence
  Description of Artificial Sequence: Synthetic oligonucleotide
  Antisense strand to SEQ ID NO: 2453678
uaucaucuacauuagcaac

SEQ ID NO: 2453680 - RNA, 19 nt, Artificial Sequence
  Description of Artificial Sequence: Synthetic oligonucleotide
  Sense strand starting at position 1224 of SEQ ID NO: 1887175
ugcuaauguagaugauaag

SEQ ID NO: 2453681 - RNA, 19 nt, Artificial Sequence
  Description of Artificial Sequence: Synthetic oligonucleotide
  Antisense strand to SEQ ID NO: 2453680
cuuaucaucuacauuagca

SEQ ID NO: 2453682 - RNA, 19 nt, Artificial Sequence
  Description of Artificial Sequence: Synthetic oligonucleotide
  Sense strand starting at position 1227 of SEQ ID NO: 1887175
uaauguagaugauaaggaa

SEQ ID NO: 2453683 - RNA, 19 nt, Artificial Sequence
  Description of Artificial Sequence: Synthetic oligonucleotide
  Antisense strand to SEQ ID NO: 2453682
uuccuuaucaucuacauua

SEQ ID NO: 2453684 - RNA, 19 nt, Artificial Sequence
  Description of Artificial Sequence: Synthetic oligonucleotide
  Sense strand starting at position 1248 of SEQ ID NO: 1887175
agagcuuuggagcggaaau

SEQ ID NO: 2453685 - RNA, 19 nt, Artificial Sequence
  Description of Artificial Sequence: Synthetic oligonucleotide
  Antisense strand to SEQ ID NO: 2453684
auuuccgcuccaaagcucu

SEQ ID NO: 2453686 - RNA, 19 nt, Artificial Sequence
  Description of Artificial Sequence: Synthetic oligonucleotide
  Sense strand starting at position 1249 of SEQ ID NO: 1887175
gagcuuuggagcggaaaug

SEQ ID NO: 2453687 - RNA, 19 nt, Artificial Sequence
  Description of Artificial Sequence: Synthetic oligonucleotide
  Antisense strand to SEQ ID NO: 2453686
cauuuccgcuccaaagcuc

SEQ ID NO: 2453688 - RNA, 19 nt, Artificial Sequence
  Description of Artificial Sequence: Synthetic oligonucleotide
  Sense strand starting at position 1371 of SEQ ID NO: 1887175
uaaggaugguggccuaaga

SEQ ID NO: 2453689 - RNA, 19 nt, Artificial Sequence
  Description of Artificial Sequence: Synthetic oligonucleotide
  Antisense strand to SEQ ID NO: 2453688
ucuuaggccaccauccuua

SEQ ID NO: 2453690 - RNA, 19 nt, Artificial Sequence
  Description of Artificial Sequence: Synthetic oligonucleotide
  Sense strand starting at position 1382 of SEQ ID NO: 1887175
gccuaagacaggugaguuu

SEQ ID NO: 2453691 - RNA, 19 nt, Artificial Sequence
  Description of Artificial Sequence: Synthetic oligonucleotide
  Antisense strand to SEQ ID NO: 2453690
aaacucaccugucuuaggc

SEQ ID NO: 2453692 - RNA, 19 nt, Artificial Sequence
  Description of Artificial Sequence: Synthetic oligonucleotide
  Sense strand starting at position 1458 of SEQ ID NO: 1887175
gggcucucaugggugacaa

SEQ ID NO: 2453693 - RNA, 19 nt, Artificial Sequence
  Description of Artificial Sequence: Synthetic oligonucleotide
  Antisense strand to SEQ ID NO: 2453692
uugucacccaugagagccc

SEQ ID NO: 2453694 - RNA, 19 nt, Artificial Sequence
  Description of Artificial Sequence: Synthetic oligonucleotide
  Sense strand starting at position 1459 of SEQ ID NO: 1887175
ggcucucaugggugacaau

SEQ ID NO: 2453695 - RNA, 19 nt, Artificial Sequence
  Description of Artificial Sequence: Synthetic oligonucleotide
  Antisense strand to SEQ ID NO: 2453694
auugucacccaugagagcc

SEQ ID NO: 2453696 - RNA, 19 nt, Artificial Sequence
  Description of Artificial Sequence: Synthetic oligonucleotide
  Sense strand starting at position 1470 of SEQ ID NO: 1887175
gugacaaucggcgcaaguu

SEQ ID NO: 2453697 - RNA, 19 nt, Artificial Sequence
  Description of Artificial Sequence: Synthetic oligonucleotide
  Antisense strand to SEQ ID NO: 2453696
aacuugcgccgauugucac

SEQ ID NO: 2453698 - RNA, 19 nt, Artificial Sequence
  Description of Artificial Sequence: Synthetic oligonucleotide
  Sense strand starting at position 1482 of SEQ ID NO: 1887175
gcaaguucuccucaccuga

SEQ ID NO: 2453699 - RNA, 19 nt, Artificial Sequence
  Description of Artificial Sequence: Synthetic oligonucleotide
  Antisense strand to SEQ ID NO: 2453698
ucaggugaggagaacuugc

SEQ ID NO: 2453700 - RNA, 19 nt, Artificial Sequence
  Description of Artificial Sequence: Synthetic oligonucleotide
  Sense strand starting at position 1605 of SEQ ID NO: 1887175
ggagcaaucagaggagucu

SEQ ID NO: 2453701 - RNA, 19 nt, Artificial Sequence
  Description of Artificial Sequence: Synthetic oligonucleotide
  Antisense strand to SEQ ID NO: 2453700
agacuccucugauugcucc

SEQ ID NO: 2453702 - RNA, 19 nt, Artificial Sequence
  Description of Artificial Sequence: Synthetic oligonucleotide
  Sense strand starting at position 2458 of SEQ ID NO: 1887175
uagauagugguaggaaagu

SEQ ID NO: 2453703 - RNA, 19 nt, Artificial Sequence
  Description of Artificial Sequence: Synthetic oligonucleotide
  Antisense strand to SEQ ID NO: 2453702
acuuuccuaccacuaucua

SEQ ID NO: 2453704 - RNA, 19 nt, Artificial Sequence
  Description of Artificial Sequence: Synthetic oligonucleotide
  Sense strand starting at position 2467 of SEQ ID NO: 1887175
guaggaaagugguugugaa

SEQ ID NO: 2453705 - RNA, 19 nt, Artificial Sequence
  Description of Artificial Sequence: Synthetic oligonucleotide
  Antisense strand to SEQ ID NO: 2453704
uucacaaccacuuuccuac

SEQ ID NO: 2453706 - RNA, 19 nt, Artificial Sequence
  Description of Artificial Sequence: Synthetic oligonucleotide
  Sense strand starting at position 2468 of SEQ ID NO: 1887175
uaggaaagugguugugaaa

SEQ ID NO: 2453707 - RNA, 19 nt, Artificial Sequence
  Description of Artificial Sequence: Synthetic oligonucleotide
  Antisense strand to SEQ ID NO: 2453706
uuucacaaccacuuuccua

SEQ ID NO: 2453708 - RNA, 19 nt, Artificial Sequence
  Description of Artificial Sequence: Synthetic oligonucleotide
  Sense strand starting at position 2782 of SEQ ID NO: 1887175
agacgcagucucgaacaaa

SEQ ID NO: 2453709 - RNA, 19 nt, Artificial Sequence
  Description of Artificial Sequence: Synthetic oligonucleotide
  Antisense strand to SEQ ID NO: 2453708
uuuguucgagacugcgucu

SEQ ID NO: 2453710 - RNA, 19 nt, Artificial Sequence
  Description of Artificial Sequence: Synthetic oligonucleotide
  Sense strand starting at position 2974 of SEQ ID NO: 1887175
uuuguuagcccagacaauc

SEQ ID NO: 2453711 - RNA, 19 nt, Artificial Sequence
  Description of Artificial Sequence: Synthetic oligonucleotide
  Antisense strand to SEQ ID NO: 2453710
gauugucugggcuaacaaa

SEQ ID NO: 2453712 - RNA, 19 nt, Artificial Sequence
  Description of Artificial Sequence: Synthetic oligonucleotide
  Sense strand starting at position 2985 of SEQ ID NO: 1887175
agacaaucucagggcaaca

SEQ ID NO: 2453713 - RNA, 19 nt, Artificial Sequence
  Description of Artificial Sequence: Synthetic oligonucleotide
  Antisense strand to SEQ ID NO: 2453712
uguugcccugagauugucu

SEQ ID NO: 2453714 - RNA, 19 nt, Artificial Sequence
  Description of Artificial Sequence: Synthetic oligonucleotide
  Sense strand starting at position 3207 of SEQ ID NO: 1887175
gcacguuuaggagacaaua

SEQ ID NO: 2453715 - RNA, 19 nt, Artificial Sequence
  Description of Artificial Sequence: Synthetic oligonucleotide
  Antisense strand to SEQ ID NO: 2453714
uauugucuccuaaacgugc

SEQ ID NO: 2453716 - RNA, 19 nt, Artificial Sequence
  Description of Artificial Sequence: Synthetic oligonucleotide
  Sense strand starting at position 3215 of SEQ ID NO: 1887175
aggagacaauauuaagaau

SEQ ID NO: 2453717 - RNA, 19 nt, Artificial Sequence
  Description of Artificial Sequence: Synthetic oligonucleotide
  Antisense strand to SEQ ID NO: 2453716
auucuuaauauugucuccu

SEQ ID NO: 2453718 - RNA, 19 nt, Artificial Sequence
  Description of Artificial Sequence: Synthetic oligonucleotide
  Sense strand starting at position 3612 of SEQ ID NO: 1887175
gaaggaaaguagccucaua

SEQ ID NO: 2453719 - RNA, 19 nt, Artificial Sequence
  Description of Artificial Sequence: Synthetic oligonucleotide
  Antisense strand to SEQ ID NO: 2453718
uaugaggcuacuuuccuuc

SEQ ID NO: 2453720 - RNA, 19 nt, Artificial Sequence
  Description of Artificial Sequence: Synthetic oligonucleotide
  Sense strand starting at position 123 of SEQ ID NO: 1887177
auacuagagucaucauguc

SEQ ID NO: 2453721 - RNA, 19 nt, Artificial Sequence
  Description of Artificial Sequence: Synthetic oligonucleotide
  Antisense strand to SEQ ID NO: 2453720
gacaugaugacucuaguau

SEQ ID NO: 2453722 - RNA, 19 nt, Artificial Sequence
  Description of Artificial Sequence: Synthetic oligonucleotide
  Sense strand starting at position 132 of SEQ ID NO: 1887177
ucaucaugucuguaacaga

SEQ ID NO: 2453723 - RNA, 19 nt, Artificial Sequence
  Description of Artificial Sequence: Synthetic oligonucleotide
  Antisense strand to SEQ ID NO: 2453722
ucuguuacagacaugauga

SEQ ID NO: 2453724 - RNA, 19 nt, Artificial Sequence
  Description of Artificial Sequence: Synthetic oligonucleotide
  Sense strand starting at position 222 of SEQ ID NO: 1887177
aggaccuacugcucaagaa

SEQ ID NO: 2453725 - RNA, 19 nt, Artificial Sequence
  Description of Artificial Sequence: Synthetic oligonucleotide
  Antisense strand to SEQ ID NO: 2453724
uucuugagcaguagguccu

SEQ ID NO: 2453726 - RNA, 19 nt, Artificial Sequence
  Description of Artificial Sequence: Synthetic oligonucleotide
  Sense strand starting at position 357 of SEQ ID NO: 1887177
guuuaagauugguuccuga

SEQ ID NO: 2453727 - RNA, 19 nt, Artificial Sequence
  Description of Artificial Sequence: Synthetic oligonucleotide
  Antisense strand to SEQ ID NO: 2453726
ucaggaaccaaucuuaaac

SEQ ID NO: 2453728 - RNA, 19 nt, Artificial Sequence
  Description of Artificial Sequence: Synthetic oligonucleotide
  Sense strand starting at position 360 of SEQ ID NO: 1887177
uaagauugguuccugaaag

SEQ ID NO: 2453729 - RNA, 19 nt, Artificial Sequence
  Description of Artificial Sequence: Synthetic oligonucleotide
  Antisense strand to SEQ ID NO: 2453728
cuuucaggaaccaaucuua

SEQ ID NO: 2453730 - RNA, 19 nt, Artificial Sequence
  Description of Artificial Sequence: Synthetic oligonucleotide
  Sense strand starting at position 508 of SEQ ID NO: 1887177
acaguaauaccagggccaa

SEQ ID NO: 2453731 - RNA, 19 nt, Artificial Sequence
  Description of Artificial Sequence: Synthetic oligonucleotide
  Antisense strand to SEQ ID NO: 2453730
uuggcccugguauuacugu

SEQ ID NO: 2453732 - RNA, 19 nt, Artificial Sequence
  Description of Artificial Sequence: Synthetic oligonucleotide
  Sense strand starting at position 509 of SEQ ID NO: 1887177
caguaauaccagggccaaa

SEQ ID NO: 2453733 - RNA, 19 nt, Artificial Sequence
  Description of Artificial Sequence: Synthetic oligonucleotide
  Antisense strand to SEQ ID NO: 2453732
uuuggcccugguauuacug

SEQ ID NO: 2453734 - RNA, 19 nt, Artificial Sequence
  Description of Artificial Sequence: Synthetic oligonucleotide
  Sense strand starting at position 652 of SEQ ID NO: 1887177
ugaauuaauaucuguggga

SEQ ID NO: 2453735 - RNA, 19 nt, Artificial Sequence
  Description of Artificial Sequence: Synthetic oligonucleotide
  Antisense strand to SEQ ID NO: 2453734
ucccacagauauuaauuca

SEQ ID NO: 2453736 - RNA, 19 nt, Artificial Sequence
  Description of Artificial Sequence: Synthetic oligonucleotide
  Sense strand starting at position 656 of SEQ ID NO: 1887177
uuaauaucugugggaaggu

SEQ ID NO: 2453737 - RNA, 19 nt, Artificial Sequence
  Description of Artificial Sequence: Synthetic oligonucleotide
  Antisense strand to SEQ ID NO: 2453736
accuucccacagauauuaa

SEQ ID NO: 2453738 - RNA, 19 nt, Artificial Sequence
  Description of Artificial Sequence: Synthetic oligonucleotide
  Sense strand starting at position 708 of SEQ ID NO: 1887177
gguaucuccucuuugggaa

SEQ ID NO: 2453739 - RNA, 19 nt, Artificial Sequence
  Description of Artificial Sequence: Synthetic oligonucleotide
  Antisense strand to SEQ ID NO: 2453738
uucccaaagaggagauacc

SEQ ID NO: 2453740 - RNA, 19 nt, Artificial Sequence
  Description of Artificial Sequence: Synthetic oligonucleotide
  Sense strand starting at position 709 of SEQ ID NO: 1887177
guaucuccucuuugggaaa

SEQ ID NO: 2453741 - RNA, 19 nt, Artificial Sequence
  Description of Artificial Sequence: Synthetic oligonucleotide
  Antisense strand to SEQ ID NO: 2453740
uuucccaaagaggagauac

SEQ ID NO: 2453742 - RNA, 19 nt, Artificial Sequence
  Description of Artificial Sequence: Synthetic oligonucleotide
  Sense strand starting at position 1123 of SEQ ID NO: 1887177
agaccuagucuaugauacu

SEQ ID NO: 2453743 - RNA, 19 nt, Artificial Sequence
  Description of Artificial Sequence: Synthetic oligonucleotide
  Antisense strand to SEQ ID NO: 2453742
aguaucauagacuaggucu

SEQ ID NO: 2453744 - RNA, 19 nt, Artificial Sequence
  Description of Artificial Sequence: Synthetic oligonucleotide
  Sense strand starting at position 2119 of SEQ ID NO: 1887177
aguguuuaggcuagagcga

SEQ ID NO: 2453745 - RNA, 19 nt, Artificial Sequence
  Description of Artificial Sequence: Synthetic oligonucleotide
  Antisense strand to SEQ ID NO: 2453744
ucgcucuagccuaaacacu

SEQ ID NO: 2453746 - RNA, 19 nt, Artificial Sequence
  Description of Artificial Sequence: Synthetic oligonucleotide
  Sense strand starting at position 2170 of SEQ ID NO: 1887177
gguacauuucccugccaac

SEQ ID NO: 2453747 - RNA, 19 nt, Artificial Sequence
  Description of Artificial Sequence: Synthetic oligonucleotide
  Antisense strand to SEQ ID NO: 2453746
guuggcagggaaauguacc

SEQ ID NO: 2453748 - RNA, 19 nt, Artificial Sequence
  Description of Artificial Sequence: Synthetic oligonucleotide
  Sense strand starting at position 2201 of SEQ ID NO: 1887177
gcuuccagaccucaaagau

SEQ ID NO: 2453749 - RNA, 19 nt, Artificial Sequence
  Description of Artificial Sequence: Synthetic oligonucleotide
  Antisense strand to SEQ ID NO: 2453748
aucuuugaggucuggaagc

SEQ ID NO: 2453750 - RNA, 19 nt, Artificial Sequence
  Description of Artificial Sequence: Synthetic oligonucleotide
  Sense strand starting at position 2280 of SEQ ID NO: 1887177
aguacauccugagccagaa

SEQ ID NO: 2453751 - RNA, 19 nt, Artificial Sequence
  Description of Artificial Sequence: Synthetic oligonucleotide
  Antisense strand to SEQ ID NO: 2453750
uucuggcucaggauguacu

SEQ ID NO: 2453752 - RNA, 19 nt, Artificial Sequence
  Description of Artificial Sequence: Synthetic oligonucleotide
  Sense strand starting at position 2325 of SEQ ID NO: 1887177
ugcuguaucuauuugccua

SEQ ID NO: 2453753 - RNA, 19 nt, Artificial Sequence
  Description of Artificial Sequence: Synthetic oligonucleotide
  Antisense strand to SEQ ID NO: 2453752
uaggcaaauagauacagca

SEQ ID NO: 2453754 - RNA, 19 nt, Artificial Sequence
  Description of Artificial Sequence: Synthetic oligonucleotide
  Sense strand starting at position 2393 of SEQ ID NO: 1887177
cucucucgacauuggauau

SEQ ID NO: 2453755 - RNA, 19 nt, Artificial Sequence
  Description of Artificial Sequence: Synthetic oligonucleotide
  Antisense strand to SEQ ID NO: 2453754
auauccaaugucgagagag

SEQ ID NO: 2453756 - RNA, 19 nt, Artificial Sequence
  Description of Artificial Sequence: Synthetic oligonucleotide
  Sense strand starting at position 2452 of SEQ ID NO: 1887177
agaaauaugugagucacau

SEQ ID NO: 2453757 - RNA, 19 nt, Artificial Sequence
  Description of Artificial Sequence: Synthetic oligonucleotide
  Antisense strand to SEQ ID NO: 2453756
augugacucacauauuucu

SEQ ID NO: 2453758 - RNA, 19 nt, Artificial Sequence
  Description of Artificial Sequence: Synthetic oligonucleotide
  Sense strand starting at position 2458 of SEQ ID NO: 1887177
augugagucacauauguag

SEQ ID NO: 2453759 - RNA, 19 nt, Artificial Sequence
  Description of Artificial Sequence: Synthetic oligonucleotide
  Antisense strand to SEQ ID NO: 2453758
cuacauaugugacucacau

SEQ ID NO: 2453760 - RNA, 19 nt, Artificial Sequence
  Description of Artificial Sequence: Synthetic oligonucleotide
  Sense strand starting at position 2464 of SEQ ID NO: 1887177
gucacauauguagguugaa

SEQ ID NO: 2453761 - RNA, 19 nt, Artificial Sequence
  Description of Artificial Sequence: Synthetic oligonucleotide
  Antisense strand to SEQ ID NO: 2453760
uucaaccuacauaugugac

SEQ ID NO: 2453762 - RNA, 19 nt, Artificial Sequence
  Description of Artificial Sequence: Synthetic oligonucleotide
  Sense strand starting at position 2465 of SEQ ID NO: 1887177
ucacauauguagguugaaa

SEQ ID NO: 2453763 - RNA, 19 nt, Artificial Sequence
  Description of Artificial Sequence: Synthetic oligonucleotide
  Antisense strand to SEQ ID NO: 2453762
uuucaaccuacauauguga

SEQ ID NO: 2453764 - RNA, 19 nt, Artificial Sequence
  Description of Artificial Sequence: Synthetic oligonucleotide
  Sense strand starting at position 2467 of SEQ ID NO: 1887177
acauauguagguugaaauc

SEQ ID NO: 2453765 - RNA, 19 nt, Artificial Sequence
  Description of Artificial Sequence: Synthetic oligonucleotide
  Antisense strand to SEQ ID NO: 2453764
gauuucaaccuacauaugu

SEQ ID NO: 2453766 - RNA, 19 nt, Artificial Sequence
  Description of Artificial Sequence: Synthetic oligonucleotide
  Sense strand starting at position 2719 of SEQ ID NO: 1887177
uucuguauugaagagcaca

SEQ ID NO: 2453767 - RNA, 19 nt, Artificial Sequence
  Description of Artificial Sequence: Synthetic oligonucleotide
  Antisense strand to SEQ ID NO: 2453766
ugugcucuucaauacagaa

SEQ ID NO: 2453768 - RNA, 19 nt, Artificial Sequence
  Description of Artificial Sequence: Synthetic oligonucleotide
  Sense strand starting at position 2730 of SEQ ID NO: 1887177
agagcacagcucugggaaa

SEQ ID NO: 2453769 - RNA, 19 nt, Artificial Sequence
  Description of Artificial Sequence: Synthetic oligonucleotide
  Antisense strand to SEQ ID NO: 2453768
uuucccagagcugugcucu

SEQ ID NO: 2453770 - RNA, 19 nt, Artificial Sequence
  Description of Artificial Sequence: Synthetic oligonucleotide
  Sense strand starting at position 2977 of SEQ ID NO: 1887177
agagccuugagagguauaa

SEQ ID NO: 2453771 - RNA, 19 nt, Artificial Sequence
  Description of Artificial Sequence: Synthetic oligonucleotide
  Antisense strand to SEQ ID NO: 2453770
uuauaccucucaaggcucu

SEQ ID NO: 2453772 - RNA, 19 nt, Artificial Sequence
  Description of Artificial Sequence: Synthetic oligonucleotide
  Sense strand starting at position 3066 of SEQ ID NO: 1887177
ugaggaggguuguuaguaa

SEQ ID NO: 2453773 - RNA, 19 nt, Artificial Sequence
  Description of Artificial Sequence: Synthetic oligonucleotide
  Antisense strand to SEQ ID NO: 2453772
uuacuaacaacccuccuca

SEQ ID NO: 2453774 - RNA, 19 nt, Artificial Sequence
  Description of Artificial Sequence: Synthetic oligonucleotide
  Sense strand starting at position 3134 of SEQ ID NO: 1887177
ucgcucuugcuguugaaca

SEQ ID NO: 2453775 - RNA, 19 nt, Artificial Sequence
  Description of Artificial Sequence: Synthetic oligonucleotide
  Antisense strand to SEQ ID NO: 2453774
uguucaacagcaagagcga

SEQ ID NO: 2453776 - RNA, 19 nt, Artificial Sequence
  Description of Artificial Sequence: Synthetic oligonucleotide
  Sense strand starting at position 3248 of SEQ ID NO: 1887177
ggaucagagaccugggcuu

SEQ ID NO: 2453777 - RNA, 19 nt, Artificial Sequence
  Description of Artificial Sequence: Synthetic oligonucleotide
  Antisense strand to SEQ ID NO: 2453776
aagcccaggucucugaucc

SEQ ID NO: 2453778 - RNA, 19 nt, Artificial Sequence
  Description of Artificial Sequence: Synthetic oligonucleotide
  Sense strand starting at position 3281 of SEQ ID NO: 1887177
gcuccuuacuaacuggaau

SEQ ID NO: 2453779 - RNA, 19 nt, Artificial Sequence
  Description of Artificial Sequence: Synthetic oligonucleotide
  Antisense strand to SEQ ID NO: 2453778
auuccaguuaguaaggagc

SEQ ID NO: 2453780 - RNA, 19 nt, Artificial Sequence
  Description of Artificial Sequence: Synthetic oligonucleotide
  Sense strand starting at position 3293 of SEQ ID NO: 1887177
cuggaaucuugggcaaauu

SEQ ID NO: 2453781 - RNA, 19 nt, Artificial Sequence
  Description of Artificial Sequence: Synthetic oligonucleotide
  Antisense strand to SEQ ID NO: 2453780
aauuugcccaagauuccag

SEQ ID NO: 2453782 - RNA, 19 nt, Artificial Sequence
  Description of Artificial Sequence: Synthetic oligonucleotide
  Sense strand starting at position 3301 of SEQ ID NO: 1887177
uugggcaaauuauugaaau

SEQ ID NO: 2453783 - RNA, 19 nt, Artificial Sequence
  Description of Artificial Sequence: Synthetic oligonucleotide
  Antisense strand to SEQ ID NO: 2453782
auuucaauaauuugcccaa

SEQ ID NO: 2453784 - RNA, 19 nt, Artificial Sequence
  Description of Artificial Sequence: Synthetic oligonucleotide
  Sense strand starting at position 3392 of SEQ ID NO: 1887177
uaguguugugaauauuaga

SEQ ID NO: 2453785 - RNA, 19 nt, Artificial Sequence
  Description of Artificial Sequence: Synthetic oligonucleotide
  Antisense strand to SEQ ID NO: 2453784
ucuaauauucacaacacua

SEQ ID NO: 2453786 - RNA, 19 nt, Artificial Sequence
  Description of Artificial Sequence: Synthetic oligonucleotide
  Sense strand starting at position 3463 of SEQ ID NO: 1887177
gccacugucagguaaguaa

SEQ ID NO: 2453787 - RNA, 19 nt, Artificial Sequence
  Description of Artificial Sequence: Synthetic oligonucleotide
  Antisense strand to SEQ ID NO: 2453786
uuacuuaccugacaguggc

SEQ ID NO: 2453788 - RNA, 19 nt, Artificial Sequence
  Description of Artificial Sequence: Synthetic oligonucleotide
  Sense strand starting at position 3503 of SEQ ID NO: 1887177
ugaagagguuacuccuuaa

SEQ ID NO: 2453789 - RNA, 19 nt, Artificial Sequence
  Description of Artificial Sequence: Synthetic oligonucleotide
  Antisense strand to SEQ ID NO: 2453788
uuaaggaguaaccucuuca

SEQ ID NO: 2453790 - RNA, 19 nt, Artificial Sequence
  Description of Artificial Sequence: Synthetic oligonucleotide
  Sense strand starting at position 3506 of SEQ ID NO: 1887177
agagguuacuccuuaaauu

SEQ ID NO: 2453791 - RNA, 19 nt, Artificial Sequence
  Description of Artificial Sequence: Synthetic oligonucleotide
  Antisense strand to SEQ ID NO: 2453790
aauuuaaggaguaaccucu

SEQ ID NO: 2453792 - RNA, 19 nt, Artificial Sequence
  Description of Artificial Sequence: Synthetic oligonucleotide
  Sense strand starting at position 3639 of SEQ ID NO: 1887177
acauuucccugggaacuuu

SEQ ID NO: 2453793 - RNA, 19 nt, Artificial Sequence
  Description of Artificial Sequence: Synthetic oligonucleotide
  Antisense strand to SEQ ID NO: 2453792
aaaguucccagggaaaugu

SEQ ID NO: 2453794 - RNA, 19 nt, Artificial Sequence
  Description of Artificial Sequence: Synthetic oligonucleotide
  Sense strand starting at position 3659 of SEQ ID NO: 1887177
gagauccgauuugaaacuu

SEQ ID NO: 2453795 - RNA, 19 nt, Artificial Sequence
  Description of Artificial Sequence: Synthetic oligonucleotide
  Antisense strand to SEQ ID NO: 2453794
aaguuucaaaucggaucuc

SEQ ID NO: 2453796 - RNA, 19 nt, Artificial Sequence
  Description of Artificial Sequence: Synthetic oligonucleotide
  Sense strand starting at position 3879 of SEQ ID NO: 1887177
ccauccaaguguuuaauau

SEQ ID NO: 2453797 - RNA, 19 nt, Artificial Sequence
  Description of Artificial Sequence: Synthetic oligonucleotide
  Antisense strand to SEQ ID NO: 2453796
auauuaaacacuuggaugg

SEQ ID NO: 2453798 - RNA, 19 nt, Artificial Sequence
  Description of Artificial Sequence: Synthetic oligonucleotide
  Sense strand starting at position 3983 of SEQ ID NO: 1887177
agucacaugugaucacuga

SEQ ID NO: 2453799 - RNA, 19 nt, Artificial Sequence
  Description of Artificial Sequence: Synthetic oligonucleotide
  Antisense strand to SEQ ID NO: 2453798
ucagugaucacaugugacu

SEQ ID NO: 2453800 - RNA, 19 nt, Artificial Sequence
  Description of Artificial Sequence: Synthetic oligonucleotide
  Sense strand starting at position 37 of SEQ ID NO: 1887178
ucccuauggccuugucacu

SEQ ID NO: 2453801 - RNA, 19 nt, Artificial Sequence
  Description of Artificial Sequence: Synthetic oligonucleotide
  Antisense strand to SEQ ID NO: 2453800
agugacaaggccauaggga

SEQ ID NO: 2453802 - RNA, 19 nt, Artificial Sequence
  Description of Artificial Sequence: Synthetic oligonucleotide
  Sense strand starting at position 42 of SEQ ID NO: 1887178
auggccuugucacuaggaa

SEQ ID NO: 2453803 - RNA, 19 nt, Artificial Sequence
  Description of Artificial Sequence: Synthetic oligonucleotide
  Antisense strand to SEQ ID NO: 2453802
uuccuagugacaaggccau

SEQ ID NO: 2453804 - RNA, 19 nt, Artificial Sequence
  Description of Artificial Sequence: Synthetic oligonucleotide
  Sense strand starting at position 43 of SEQ ID NO: 1887178
uggccuugucacuaggaaa

SEQ ID NO: 2453805 - RNA, 19 nt, Artificial Sequence
  Description of Artificial Sequence: Synthetic oligonucleotide
  Antisense strand to SEQ ID NO: 2453804
uuuccuagugacaaggcca

SEQ ID NO: 2453806 - RNA, 19 nt, Artificial Sequence
  Description of Artificial Sequence: Synthetic oligonucleotide
  Sense strand starting at position 72 of SEQ ID NO: 1887178
ugacuuauccacugagugu

SEQ ID NO: 2453807 - RNA, 19 nt, Artificial Sequence
  Description of Artificial Sequence: Synthetic oligonucleotide
  Antisense strand to SEQ ID NO: 2453806
acacucaguggauaaguca

SEQ ID NO: 2453808 - RNA, 19 nt, Artificial Sequence
  Description of Artificial Sequence: Synthetic oligonucleotide
  Sense strand starting at position 313 of SEQ ID NO: 1887178
caggcuggguggucgaauu

SEQ ID NO: 2453809 - RNA, 19 nt, Artificial Sequence
  Description of Artificial Sequence: Synthetic oligonucleotide
  Antisense strand to SEQ ID NO: 2453808
aauucgaccacccagccug

SEQ ID NO: 2453810 - RNA, 19 nt, Artificial Sequence
  Description of Artificial Sequence: Synthetic oligonucleotide
  Sense strand starting at position 389 of SEQ ID NO: 1887178
gccucuguccgaguagguu

SEQ ID NO: 2453811 - RNA, 19 nt, Artificial Sequence
  Description of Artificial Sequence: Synthetic oligonucleotide
  Antisense strand to SEQ ID NO: 2453810
aaccuacucggacagaggc

SEQ ID NO: 2453812 - RNA, 19 nt, Artificial Sequence
  Description of Artificial Sequence: Synthetic oligonucleotide
  Sense strand starting at position 1394 of SEQ ID NO: 1887178
ccauauguucuccggcacu

SEQ ID NO: 2453813 - RNA, 19 nt, Artificial Sequence
  Description of Artificial Sequence: Synthetic oligonucleotide
  Antisense strand to SEQ ID NO: 2453812
agugccggagaacauaugg

SEQ ID NO: 2453814 - RNA, 19 nt, Artificial Sequence
  Description of Artificial Sequence: Synthetic oligonucleotide
  Sense strand starting at position 1450 of SEQ ID NO: 1887178
ggacauaagcccugccuga

SEQ ID NO: 2453815 - RNA, 19 nt, Artificial Sequence
  Description of Artificial Sequence: Synthetic oligonucleotide
  Antisense strand to SEQ ID NO: 2453814
ucaggcagggcuuaugucc

SEQ ID NO: 2453816 - RNA, 19 nt, Artificial Sequence
  Description of Artificial Sequence: Synthetic oligonucleotide
  Sense strand starting at position 1642 of SEQ ID NO: 1887178
uggauuuccuaguaccaga

SEQ ID NO: 2453817 - RNA, 19 nt, Artificial Sequence
  Description of Artificial Sequence: Synthetic oligonucleotide
  Antisense strand to SEQ ID NO: 2453816
ucugguacuaggaaaucca

SEQ ID NO: 2453818 - RNA, 19 nt, Artificial Sequence
  Description of Artificial Sequence: Synthetic oligonucleotide
  Sense strand starting at position 2032 of SEQ ID NO: 1887178
gguccagccuccugaggaa

SEQ ID NO: 2453819 - RNA, 19 nt, Artificial Sequence
  Description of Artificial Sequence: Synthetic oligonucleotide
  Antisense strand to SEQ ID NO: 2453818
uuccucaggaggcuggacc

SEQ ID NO: 2453820 - RNA, 19 nt, Artificial Sequence
  Description of Artificial Sequence: Synthetic oligonucleotide
  Sense strand starting at position 2049 of SEQ ID NO: 1887178
aagugaagugguuggauua

SEQ ID NO: 2453821 - RNA, 19 nt, Artificial Sequence
  Description of Artificial Sequence: Synthetic oligonucleotide
  Antisense strand to SEQ ID NO: 2453820
uaauccaaccacuucacuu

SEQ ID NO: 2453822 - RNA, 19 nt, Artificial Sequence
  Description of Artificial Sequence: Synthetic oligonucleotide
  Sense strand starting at position 2097 of SEQ ID NO: 1887178
augagauucugucuucccu

SEQ ID NO: 2453823 - RNA, 19 nt, Artificial Sequence
  Description of Artificial Sequence: Synthetic oligonucleotide
  Antisense strand to SEQ ID NO: 2453822
agggaagacagaaucucau

SEQ ID NO: 2453824 - RNA, 19 nt, Artificial Sequence
  Description of Artificial Sequence: Synthetic oligonucleotide
  Sense strand starting at position 2099 of SEQ ID NO: 1887178
gagauucugucuucccuag

SEQ ID NO: 2453825 - RNA, 19 nt, Artificial Sequence
  Description of Artificial Sequence: Synthetic oligonucleotide
  Antisense strand to SEQ ID NO: 2453824
cuagggaagacagaaucuc

SEQ ID NO: 2453826 - RNA, 19 nt, Artificial Sequence
  Description of Artificial Sequence: Synthetic oligonucleotide
  Sense strand starting at position 2173 of SEQ ID NO: 1887178
gggaucugugaccacucuu

SEQ ID NO: 2453827 - RNA, 19 nt, Artificial Sequence
  Description of Artificial Sequence: Synthetic oligonucleotide
  Antisense strand to SEQ ID NO: 2453826
aagaguggucacagauccc

SEQ ID NO: 2453828 - RNA, 19 nt, Artificial Sequence
  Description of Artificial Sequence: Synthetic oligonucleotide
  Sense strand starting at position 2210 of SEQ ID NO: 1887178
ucagccucugcucaguaau

SEQ ID NO: 2453829 - RNA, 19 nt, Artificial Sequence
  Description of Artificial Sequence: Synthetic oligonucleotide
  Antisense strand to SEQ ID NO: 2453828
auuacugagcagaggcuga

SEQ ID NO: 2453830 - RNA, 19 nt, Artificial Sequence
  Description of Artificial Sequence: Synthetic oligonucleotide
  Sense strand starting at position 2212 of SEQ ID NO: 1887178
agccucugcucaguaauac

SEQ ID NO: 2453831 - RNA, 19 nt, Artificial Sequence
  Description of Artificial Sequence: Synthetic oligonucleotide
  Antisense strand to SEQ ID NO: 2453830
guauuacugagcagaggcu

SEQ ID NO: 2453832 - RNA, 19 nt, Artificial Sequence
  Description of Artificial Sequence: Synthetic oligonucleotide
  Sense strand starting at position 2221 of SEQ ID NO: 1887178
ucaguaauaccuuggagaa

SEQ ID NO: 2453833 - RNA, 19 nt, Artificial Sequence
  Description of Artificial Sequence: Synthetic oligonucleotide
  Antisense strand to SEQ ID NO: 2453832
uucuccaagguauuacuga

SEQ ID NO: 2453834 - RNA, 19 nt, Artificial Sequence
  Description of Artificial Sequence: Synthetic oligonucleotide
  Sense strand starting at position 2271 of SEQ ID NO: 1887178
agucuuucuccuggaggca

SEQ ID NO: 2453835 - RNA, 19 nt, Artificial Sequence
  Description of Artificial Sequence: Synthetic oligonucleotide
  Antisense strand to SEQ ID NO: 2453834
ugccuccaggagaaagacu

SEQ ID NO: 2453836 - RNA, 19 nt, Artificial Sequence
  Description of Artificial Sequence: Synthetic oligonucleotide
  Sense strand starting at position 2318 of SEQ ID NO: 1887178
uggccugcaguuuaugaua

SEQ ID NO: 2453837 - RNA, 19 nt, Artificial Sequence
  Description of Artificial Sequence: Synthetic oligonucleotide
  Antisense strand to SEQ ID NO: 2453836
uaucauaaacugcaggcca

SEQ ID NO: 2453838 - RNA, 19 nt, Artificial Sequence
  Description of Artificial Sequence: Synthetic oligonucleotide
  Sense strand starting at position 2354 of SEQ ID NO: 1887178
cucugaacacuccguuaug

SEQ ID NO: 2453839 - RNA, 19 nt, Artificial Sequence
  Description of Artificial Sequence: Synthetic oligonucleotide
  Antisense strand to SEQ ID NO: 2453838
cauaacggaguguucagag

SEQ ID NO: 2453840 - RNA, 19 nt, Artificial Sequence
  Description of Artificial Sequence: Synthetic oligonucleotide
  Sense strand starting at position 2355 of SEQ ID NO: 1887178
ucugaacacuccguuaugu

SEQ ID NO: 2453841 - RNA, 19 nt, Artificial Sequence
  Description of Artificial Sequence: Synthetic oligonucleotide
  Antisense strand to SEQ ID NO: 2453840
acauaacggaguguucaga

SEQ ID NO: 2453842 - RNA, 19 nt, Artificial Sequence
  Description of Artificial Sequence: Synthetic oligonucleotide
  Sense strand starting at position 2357 of SEQ ID NO: 1887178
ugaacacuccguuauguuc

SEQ ID NO: 2453843 - RNA, 19 nt, Artificial Sequence
  Description of Artificial Sequence: Synthetic oligonucleotide
  Antisense strand to SEQ ID NO: 2453842
gaacauaacggaguguuca

SEQ ID NO: 2453844 - RNA, 19 nt, Artificial Sequence
  Description of Artificial Sequence: Synthetic oligonucleotide
  Sense strand starting at position 2444 of SEQ ID NO: 1887178
ugagucagcuaccugugua

SEQ ID NO: 2453845 - RNA, 19 nt, Artificial Sequence
  Description of Artificial Sequence: Synthetic oligonucleotide
  Antisense strand to SEQ ID NO: 2453844
uacacagguagcugacuca

SEQ ID NO: 2453846 - RNA, 19 nt, Artificial Sequence
  Description of Artificial Sequence: Synthetic oligonucleotide
  Sense strand starting at position 2566 of SEQ ID NO: 1887178
gucuucugggccugaguga

SEQ ID NO: 2453847 - RNA, 19 nt, Artificial Sequence
  Description of Artificial Sequence: Synthetic oligonucleotide
  Antisense strand to SEQ ID NO: 2453846
ucacucaggcccagaagac

SEQ ID NO: 2453848 - RNA, 19 nt, Artificial Sequence
  Description of Artificial Sequence: Synthetic oligonucleotide
  Sense strand starting at position 2567 of SEQ ID NO: 1887178
ucuucugggccugagugau

SEQ ID NO: 2453849 - RNA, 19 nt, Artificial Sequence
  Description of Artificial Sequence: Synthetic oligonucleotide
  Antisense strand to SEQ ID NO: 2453848
aucacucaggcccagaaga

SEQ ID NO: 2453850 - RNA, 19 nt, Artificial Sequence
  Description of Artificial Sequence: Synthetic oligonucleotide
  Sense strand starting at position 2650 of SEQ ID NO: 1887178
cccagauccuuugaaggaa

SEQ ID NO: 2453851 - RNA, 19 nt, Artificial Sequence
  Description of Artificial Sequence: Synthetic oligonucleotide
  Antisense strand to SEQ ID NO: 2453850
uuccuucaaaggaucuggg

SEQ ID NO: 2453852 - RNA, 19 nt, Artificial Sequence
  Description of Artificial Sequence: Synthetic oligonucleotide
  Sense strand starting at position 2707 of SEQ ID NO: 1887178
aguacauaauuucggacau

SEQ ID NO: 2453853 - RNA, 19 nt, Artificial Sequence
  Description of Artificial Sequence: Synthetic oligonucleotide
  Antisense strand to SEQ ID NO: 2453852
auguccgaaauuauguacu

SEQ ID NO: 2453854 - RNA, 19 nt, Artificial Sequence
  Description of Artificial Sequence: Synthetic oligonucleotide
  Sense strand starting at position 2708 of SEQ ID NO: 1887178
guacauaauuucggacauc

SEQ ID NO: 2453855 - RNA, 19 nt, Artificial Sequence
  Description of Artificial Sequence: Synthetic oligonucleotide
  Antisense strand to SEQ ID NO: 2453854
gauguccgaaauuauguac

SEQ ID NO: 2453856 - RNA, 19 nt, Artificial Sequence
  Description of Artificial Sequence: Synthetic oligonucleotide
  Sense strand starting at position 2738 of SEQ ID NO: 1887178
agcugaguuuaucuccauu

SEQ ID NO: 2453857 - RNA, 19 nt, Artificial Sequence
  Description of Artificial Sequence: Synthetic oligonucleotide
  Antisense strand to SEQ ID NO: 2453856
aauggagauaaacucagcu

SEQ ID NO: 2453858 - RNA, 19 nt, Artificial Sequence
  Description of Artificial Sequence: Synthetic oligonucleotide
  Sense strand starting at position 3038 of SEQ ID NO: 1887178
gugggaaggucucuccaua

SEQ ID NO: 2453859 - RNA, 19 nt, Artificial Sequence
  Description of Artificial Sequence: Synthetic oligonucleotide
  Antisense strand to SEQ ID NO: 2453858
uauggagagaccuucccac

SEQ ID NO: 2453860 - RNA, 19 nt, Artificial Sequence
  Description of Artificial Sequence: Synthetic oligonucleotide
  Sense strand starting at position 486 of SEQ ID NO: 1887179
auuuaugcuuccucgacua

SEQ ID NO: 2453861 - RNA, 19 nt, Artificial Sequence
  Description of Artificial Sequence: Synthetic oligonucleotide
  Antisense strand to SEQ ID NO: 2453860
uagucgaggaagcauaaau

SEQ ID NO: 2453862 - RNA, 19 nt, Artificial Sequence
  Description of Artificial Sequence: Synthetic oligonucleotide
  Sense strand starting at position 488 of SEQ ID NO: 1887179
uuaugcuuccucgacuaca

SEQ ID NO: 2453863 - RNA, 19 nt, Artificial Sequence
  Description of Artificial Sequence: Synthetic oligonucleotide
  Antisense strand to SEQ ID NO: 2453862
uguagucgaggaagcauaa

SEQ ID NO: 2453864 - RNA, 19 nt, Artificial Sequence
  Description of Artificial Sequence: Synthetic oligonucleotide
  Sense strand starting at position 522 of SEQ ID NO: 1887179
gacaguguggccugagaaa

SEQ ID NO: 2453865 - RNA, 19 nt, Artificial Sequence
  Description of Artificial Sequence: Synthetic oligonucleotide
  Antisense strand to SEQ ID NO: 2453864
uuucucaggccacacuguc

SEQ ID NO: 2453866 - RNA, 19 nt, Artificial Sequence
  Description of Artificial Sequence: Synthetic oligonucleotide
  Sense strand starting at position 589 of SEQ ID NO: 1887179
ugacaucacuuaucaguuu

SEQ ID NO: 2453867 - RNA, 19 nt, Artificial Sequence
  Description of Artificial Sequence: Synthetic oligonucleotide
  Antisense strand to SEQ ID NO: 2453866
aaacugauaagugauguca

SEQ ID NO: 2453868 - RNA, 19 nt, Artificial Sequence
  Description of Artificial Sequence: Synthetic oligonucleotide
  Sense strand starting at position 611 of SEQ ID NO: 1887179
auaucagugcuugaucuga

SEQ ID NO: 2453869 - RNA, 19 nt, Artificial Sequence
  Description of Artificial Sequence: Synthetic oligonucleotide
  Antisense strand to SEQ ID NO: 2453868
ucagaucaagcacugauau

SEQ ID NO: 2453870 - RNA, 19 nt, Artificial Sequence
  Description of Artificial Sequence: Synthetic oligonucleotide
  Sense strand starting at position 613 of SEQ ID NO: 1887179
aucagugcuugaucugaua

SEQ ID NO: 2453871 - RNA, 19 nt, Artificial Sequence
  Description of Artificial Sequence: Synthetic oligonucleotide
  Antisense strand to SEQ ID NO: 2453870
uaucagaucaagcacugau

SEQ ID NO: 2453872 - RNA, 19 nt, Artificial Sequence
  Description of Artificial Sequence: Synthetic oligonucleotide
  Sense strand starting at position 677 of SEQ ID NO: 1887179
gacagcauuuaggaaauga

SEQ ID NO: 2453873 - RNA, 19 nt, Artificial Sequence
  Description of Artificial Sequence: Synthetic oligonucleotide
  Antisense strand to SEQ ID NO: 2453872
ucauuuccuaaaugcuguc

SEQ ID NO: 2453874 - RNA, 19 nt, Artificial Sequence
  Description of Artificial Sequence: Synthetic oligonucleotide
  Sense strand starting at position 710 of SEQ ID NO: 1887179
gccugaaugcuggaauuag

SEQ ID NO: 2453875 - RNA, 19 nt, Artificial Sequence
  Description of Artificial Sequence: Synthetic oligonucleotide
  Antisense strand to SEQ ID NO: 2453874
cuaauuccagcauucaggc

SEQ ID NO: 2453876 - RNA, 19 nt, Artificial Sequence
  Description of Artificial Sequence: Synthetic oligonucleotide
  Sense strand starting at position 722 of SEQ ID NO: 1887179
gaauuagauugccuggguu

SEQ ID NO: 2453877 - RNA, 19 nt, Artificial Sequence
  Description of Artificial Sequence: Synthetic oligonucleotide
  Antisense strand to SEQ ID NO: 2453876
aacccaggcaaucuaauuc

SEQ ID NO: 2453878 - RNA, 19 nt, Artificial Sequence
  Description of Artificial Sequence: Synthetic oligonucleotide
  Sense strand starting at position 877 of SEQ ID NO: 1887179
uaaaguagucaauaguugu

SEQ ID NO: 2453879 - RNA, 19 nt, Artificial Sequence
  Description of Artificial Sequence: Synthetic oligonucleotide
  Antisense strand to SEQ ID NO: 2453878
acaacuauugacuacuuua

SEQ ID NO: 2453880 - RNA, 19 nt, Artificial Sequence
  Description of Artificial Sequence: Synthetic oligonucleotide
  Sense strand starting at position 888 of SEQ ID NO: 1887179
auaguuguuagugaucauu

SEQ ID NO: 2453881 - RNA, 19 nt, Artificial Sequence
  Description of Artificial Sequence: Synthetic oligonucleotide
  Antisense strand to SEQ ID NO: 2453880
aaugaucacuaacaacuau

SEQ ID NO: 2453882 - RNA, 19 nt, Artificial Sequence
  Description of Artificial Sequence: Synthetic oligonucleotide
  Sense strand starting at position 891 of SEQ ID NO: 1887179
guuguuagugaucauuauu

SEQ ID NO: 2453883 - RNA, 19 nt, Artificial Sequence
  Description of Artificial Sequence: Synthetic oligonucleotide
  Antisense strand to SEQ ID NO: 2453882
aauaaugaucacuaacaac

SEQ ID NO: 2453884 - RNA, 19 nt, Artificial Sequence
  Description of Artificial Sequence: Synthetic oligonucleotide
  Sense strand starting at position 994 of SEQ ID NO: 1887179
cgcgguaugacuuaaacag

SEQ ID NO: 2453885 - RNA, 19 nt, Artificial Sequence
  Description of Artificial Sequence: Synthetic oligonucleotide
  Antisense strand to SEQ ID NO: 2453884
cuguuuaagucauaccgcg

SEQ ID NO: 2453886 - RNA, 19 nt, Artificial Sequence
  Description of Artificial Sequence: Synthetic oligonucleotide
  Sense strand starting at position 1019 of SEQ ID NO: 1887179
cuggguccacgagacuuau

SEQ ID NO: 2453887 - RNA, 19 nt, Artificial Sequence
  Description of Artificial Sequence: Synthetic oligonucleotide
  Antisense strand to SEQ ID NO: 2453886
auaagucucguggacccag

SEQ ID NO: 2453888 - RNA, 19 nt, Artificial Sequence
  Description of Artificial Sequence: Synthetic oligonucleotide
  Sense strand starting at position 1025 of SEQ ID NO: 1887179
ccacgagacuuauucuuua

SEQ ID NO: 2453889 - RNA, 19 nt, Artificial Sequence
  Description of Artificial Sequence: Synthetic oligonucleotide
  Antisense strand to SEQ ID NO: 2453888
uaaagaauaagucucgugg

SEQ ID NO: 2453890 - RNA, 19 nt, Artificial Sequence
  Description of Artificial Sequence: Synthetic oligonucleotide
  Sense strand starting at position 1028 of SEQ ID NO: 1887179
cgagacuuauucuuuagag

SEQ ID NO: 2453891 - RNA, 19 nt, Artificial Sequence
  Description of Artificial Sequence: Synthetic oligonucleotide
  Antisense strand to SEQ ID NO: 2453890
cucuaaagaauaagucucg

SEQ ID NO: 2453892 - RNA, 19 nt, Artificial Sequence
  Description of Artificial Sequence: Synthetic oligonucleotide
  Sense strand starting at position 1037 of SEQ ID NO: 1887179
uucuuuagaggcgaauuga

SEQ ID NO: 2453893 - RNA, 19 nt, Artificial Sequence
  Description of Artificial Sequence: Synthetic oligonucleotide
  Antisense strand to SEQ ID NO: 2453892
ucaauucgccucuaaagaa

SEQ ID NO: 2453894 - RNA, 19 nt, Artificial Sequence
  Description of Artificial Sequence: Synthetic oligonucleotide
  Sense strand starting at position 1177 of SEQ ID NO: 1887179
cucauauuuguaugucuca

SEQ ID NO: 2453895 - RNA, 19 nt, Artificial Sequence
  Description of Artificial Sequence: Synthetic oligonucleotide
  Antisense strand to SEQ ID NO: 2453894
ugagacauacaaauaugag

SEQ ID NO: 2453896 - RNA, 19 nt, Artificial Sequence
  Description of Artificial Sequence: Synthetic oligonucleotide
  Sense strand starting at position 1215 of SEQ ID NO: 1887179
ugcaaugcucuggaauaug

SEQ ID NO: 2453897 - RNA, 19 nt, Artificial Sequence
  Description of Artificial Sequence: Synthetic oligonucleotide
  Antisense strand to SEQ ID NO: 2453896
cauauuccagagcauugca

SEQ ID NO: 2453898 - RNA, 19 nt, Artificial Sequence
  Description of Artificial Sequence: Synthetic oligonucleotide
  Sense strand starting at position 1257 of SEQ ID NO: 1887179
uacguaagagaauauucuu

SEQ ID NO: 2453899 - RNA, 19 nt, Artificial Sequence
  Description of Artificial Sequence: Synthetic oligonucleotide
  Antisense strand to SEQ ID NO: 2453898
aagaauauucucuuacgua

SEQ ID NO: 2453900 - RNA, 19 nt, Artificial Sequence
  Description of Artificial Sequence: Synthetic oligonucleotide
  Sense strand starting at position 1260 of SEQ ID NO: 1887179
guaagagaauauucuuucu

SEQ ID NO: 2453901 - RNA, 19 nt, Artificial Sequence
  Description of Artificial Sequence: Synthetic oligonucleotide
  Antisense strand to SEQ ID NO: 2453900
agaaagaauauucucuuac

SEQ ID NO: 2453902 - RNA, 19 nt, Artificial Sequence
  Description of Artificial Sequence: Synthetic oligonucleotide
  Sense strand starting at position 1468 of SEQ ID NO: 1887179
agauaucaguucucucauc

SEQ ID NO: 2453903 - RNA, 19 nt, Artificial Sequence
  Description of Artificial Sequence: Synthetic oligonucleotide
  Antisense strand to SEQ ID NO: 2453902
gaugagagaacugauaucu

SEQ ID NO: 2453904 - RNA, 19 nt, Artificial Sequence
  Description of Artificial Sequence: Synthetic oligonucleotide
  Sense strand starting at position 1516 of SEQ ID NO: 1887179
cggguugaggguuaaauga

SEQ ID NO: 2453905 - RNA, 19 nt, Artificial Sequence
  Description of Artificial Sequence: Synthetic oligonucleotide
  Antisense strand to SEQ ID NO: 2453904
ucauuuaacccucaacccg

SEQ ID NO: 2453906 - RNA, 19 nt, Artificial Sequence
  Description of Artificial Sequence: Synthetic oligonucleotide
  Sense strand starting at position 1518 of SEQ ID NO: 1887179
gguugaggguuaaaugaga

SEQ ID NO: 2453907 - RNA, 19 nt, Artificial Sequence
  Description of Artificial Sequence: Synthetic oligonucleotide
  Antisense strand to SEQ ID NO: 2453906
ucucauuuaacccucaacc

SEQ ID NO: 2453908 - RNA, 19 nt, Artificial Sequence
  Description of Artificial Sequence: Synthetic oligonucleotide
  Sense strand starting at position 1681 of SEQ ID NO: 1887179
gcagaaucuaacggagacu

SEQ ID NO: 2453909 - RNA, 19 nt, Artificial Sequence
  Description of Artificial Sequence: Synthetic oligonucleotide
  Antisense strand to SEQ ID NO: 2453908
agucuccguuagauucugc

SEQ ID NO: 2453910 - RNA, 19 nt, Artificial Sequence
  Description of Artificial Sequence: Synthetic oligonucleotide
  Sense strand starting at position 2061 of SEQ ID NO: 1887179
agcuuugcgcagucuugua

SEQ ID NO: 2453911 - RNA, 19 nt, Artificial Sequence
  Description of Artificial Sequence: Synthetic oligonucleotide
  Antisense strand to SEQ ID NO: 2453910
uacaagacugcgcaaagcu

SEQ ID NO: 2453912 - RNA, 19 nt, Artificial Sequence
  Description of Artificial Sequence: Synthetic oligonucleotide
  Sense strand starting at position 2063 of SEQ ID NO: 1887179
cuuugcgcagucuuguaaa

SEQ ID NO: 2453913 - RNA, 19 nt, Artificial Sequence
  Description of Artificial Sequence: Synthetic oligonucleotide
  Antisense strand to SEQ ID NO: 2453912
uuuacaagacugcgcaaag

SEQ ID NO: 2453914 - RNA, 19 nt, Artificial Sequence
  Description of Artificial Sequence: Synthetic oligonucleotide
  Sense strand starting at position 2065 of SEQ ID NO: 1887179
uugcgcagucuuguaaauu

SEQ ID NO: 2453915 - RNA, 19 nt, Artificial Sequence
  Description of Artificial Sequence: Synthetic oligonucleotide
  Antisense strand to SEQ ID NO: 2453914
aauuuacaagacugcgcaa

SEQ ID NO: 2453916 - RNA, 19 nt, Artificial Sequence
  Description of Artificial Sequence: Synthetic oligonucleotide
  Sense strand starting at position 2256 of SEQ ID NO: 1887179
gccucagagucauuaauag

SEQ ID NO: 2453917 - RNA, 19 nt, Artificial Sequence
  Description of Artificial Sequence: Synthetic oligonucleotide
  Antisense strand to SEQ ID NO: 2453916
cuauuaaugacucugaggc

SEQ ID NO: 2453918 - RNA, 19 nt, Artificial Sequence
  Description of Artificial Sequence: Synthetic oligonucleotide
  Sense strand starting at position 2276 of SEQ ID NO: 1887179
aaugaucucgagugggagu

SEQ ID NO: 2453919 - RNA, 19 nt, Artificial Sequence
  Description of Artificial Sequence: Synthetic oligonucleotide
  Antisense strand to SEQ ID NO: 2453918
acucccacucgagaucauu

SEQ ID NO: 2453920 - RNA, 19 nt, Artificial Sequence
  Description of Artificial Sequence: Synthetic oligonucleotide
  Sense strand starting at position 2277 of SEQ ID NO: 1887179
augaucucgagugggagua

SEQ ID NO: 2453921 - RNA, 19 nt, Artificial Sequence
  Description of Artificial Sequence: Synthetic oligonucleotide
  Antisense strand to SEQ ID NO: 2453920
uacucccacucgagaucau

SEQ ID NO: 2453922 - RNA, 19 nt, Artificial Sequence
  Description of Artificial Sequence: Synthetic oligonucleotide
  Sense strand starting at position 2287 of SEQ ID NO: 1887179
gugggaguagugagcguaa

SEQ ID NO: 2453923 - RNA, 19 nt, Artificial Sequence
  Description of Artificial Sequence: Synthetic oligonucleotide
  Antisense strand to SEQ ID NO: 2453922
uuacgcucacuacucccac

SEQ ID NO: 2453924 - RNA, 19 nt, Artificial Sequence
  Description of Artificial Sequence: Synthetic oligonucleotide
  Sense strand starting at position 2756 of SEQ ID NO: 1887179
agugaccgccucuaaauua

SEQ ID NO: 2453925 - RNA, 19 nt, Artificial Sequence
  Description of Artificial Sequence: Synthetic oligonucleotide
  Antisense strand to SEQ ID NO: 2453924
uaauuuagaggcggucacu

SEQ ID NO: 2453926 - RNA, 19 nt, Artificial Sequence
  Description of Artificial Sequence: Synthetic oligonucleotide
  Sense strand starting at position 2799 of SEQ ID NO: 1887179
caguuuagaaggugguuua

SEQ ID NO: 2453927 - RNA, 19 nt, Artificial Sequence
  Description of Artificial Sequence: Synthetic oligonucleotide
  Antisense strand to SEQ ID NO: 2453926
uaaaccaccuucuaaacug

SEQ ID NO: 2453928 - RNA, 19 nt, Artificial Sequence
  Description of Artificial Sequence: Synthetic oligonucleotide
  Sense strand starting at position 2800 of SEQ ID NO: 1887179
aguuuagaaggugguuuau

SEQ ID NO: 2453929 - RNA, 19 nt, Artificial Sequence
  Description of Artificial Sequence: Synthetic oligonucleotide
  Antisense strand to SEQ ID NO: 2453928
auaaaccaccuucuaaacu

SEQ ID NO: 2453930 - RNA, 19 nt, Artificial Sequence
  Description of Artificial Sequence: Synthetic oligonucleotide
  Sense strand starting at position 3299 of SEQ ID NO: 1887179
uguugagcacuuuagcaaa

SEQ ID NO: 2453931 - RNA, 19 nt, Artificial Sequence
  Description of Artificial Sequence: Synthetic oligonucleotide
  Antisense strand to SEQ ID NO: 2453930
uuugcuaaagugcucaaca

SEQ ID NO: 2453932 - RNA, 19 nt, Artificial Sequence
  Description of Artificial Sequence: Synthetic oligonucleotide
  Sense strand starting at position 3369 of SEQ ID NO: 1887179
ggaagcucagcauauaguu

SEQ ID NO: 2453933 - RNA, 19 nt, Artificial Sequence
  Description of Artificial Sequence: Synthetic oligonucleotide
  Antisense strand to SEQ ID NO: 2453932
aacuauaugcugagcuucc

SEQ ID NO: 2453934 - RNA, 19 nt, Artificial Sequence
  Description of Artificial Sequence: Synthetic oligonucleotide
  Sense strand starting at position 3479 of SEQ ID NO: 1887179
ucucuuugagcucaugagu

SEQ ID NO: 2453935 - RNA, 19 nt, Artificial Sequence
  Description of Artificial Sequence: Synthetic oligonucleotide
  Antisense strand to SEQ ID NO: 2453934
acucaugagcucaaagaga

SEQ ID NO: 2453936 - RNA, 19 nt, Artificial Sequence
  Description of Artificial Sequence: Synthetic oligonucleotide
  Sense strand starting at position 3900 of SEQ ID NO: 1887179
gucuauauuugagcgcuca

SEQ ID NO: 2453937 - RNA, 19 nt, Artificial Sequence
  Description of Artificial Sequence: Synthetic oligonucleotide
  Antisense strand to SEQ ID NO: 2453936
ugagcgcucaaauauagac

SEQ ID NO: 2453938 - RNA, 19 nt, Artificial Sequence
  Description of Artificial Sequence: Synthetic oligonucleotide
  Sense strand starting at position 3974 of SEQ ID NO: 1887179
ccagauucuugggugaaga

SEQ ID NO: 2453939 - RNA, 19 nt, Artificial Sequence
  Description of Artificial Sequence: Synthetic oligonucleotide
  Antisense strand to SEQ ID NO: 2453938
ucuucacccaagaaucugg

SEQ ID NO: 2453940 - RNA, 19 nt, Artificial Sequence
  Description of Artificial Sequence: Synthetic oligonucleotide
  Sense strand starting at position 48 of SEQ ID NO: 1887180
gcuaaacucaaguaggguu

SEQ ID NO: 2453941 - RNA, 19 nt, Artificial Sequence
  Description of Artificial Sequence: Synthetic oligonucleotide
  Antisense strand to SEQ ID NO: 2453940
aacccuacuugaguuuagc

SEQ ID NO: 2453942 - RNA, 19 nt, Artificial Sequence
  Description of Artificial Sequence: Synthetic oligonucleotide
  Sense strand starting at position 61 of SEQ ID NO: 1887180
aggguuaauuaucucuaac

SEQ ID NO: 2453943 - RNA, 19 nt, Artificial Sequence
  Description of Artificial Sequence: Synthetic oligonucleotide
  Antisense strand to SEQ ID NO: 2453942
guuagagauaauuaacccu

SEQ ID NO: 2453944 - RNA, 19 nt, Artificial Sequence
  Description of Artificial Sequence: Synthetic oligonucleotide
  Sense strand starting at position 63 of SEQ ID NO: 1887180
gguuaauuaucucuaacug

SEQ ID NO: 2453945 - RNA, 19 nt, Artificial Sequence
  Description of Artificial Sequence: Synthetic oligonucleotide
  Antisense strand to SEQ ID NO: 2453944
caguuagagauaauuaacc

SEQ ID NO: 2453946 - RNA, 19 nt, Artificial Sequence
  Description of Artificial Sequence: Synthetic oligonucleotide
  Sense strand starting at position 64 of SEQ ID NO: 1887180
guuaauuaucucuaacugg

SEQ ID NO: 2453947 - RNA, 19 nt, Artificial Sequence
  Description of Artificial Sequence: Synthetic oligonucleotide
  Antisense strand to SEQ ID NO: 2453946
ccaguuagagauaauuaac

SEQ ID NO: 2453948 - RNA, 19 nt, Artificial Sequence
  Description of Artificial Sequence: Synthetic oligonucleotide
  Sense strand starting at position 79 of SEQ ID NO: 1887180
cugguagagucacugaaga

SEQ ID NO: 2453949 - RNA, 19 nt, Artificial Sequence
  Description of Artificial Sequence: Synthetic oligonucleotide
  Antisense strand to SEQ ID NO: 2453948
ucuucagugacucuaccag

SEQ ID NO: 2453950 - RNA, 19 nt, Artificial Sequence
  Description of Artificial Sequence: Synthetic oligonucleotide
  Sense strand starting at position 113 of SEQ ID NO: 1887180
acagguaaugccugcacau

SEQ ID NO: 2453951 - RNA, 19 nt, Artificial Sequence
  Description of Artificial Sequence: Synthetic oligonucleotide
  Antisense strand to SEQ ID NO: 2453950
augugcaggcauuaccugu

SEQ ID NO: 2453952 - RNA, 19 nt, Artificial Sequence
  Description of Artificial Sequence: Synthetic oligonucleotide
  Sense strand starting at position 226 of SEQ ID NO: 1887180
gcuuguguuauaggacaau

SEQ ID NO: 2453953 - RNA, 19 nt, Artificial Sequence
  Description of Artificial Sequence: Synthetic oligonucleotide
  Antisense strand to SEQ ID NO: 2453952
auuguccuauaacacaagc

SEQ ID NO: 2453954 - RNA, 19 nt, Artificial Sequence
  Description of Artificial Sequence: Synthetic oligonucleotide
  Sense strand starting at position 235 of SEQ ID NO: 1887180
auaggacaaugcuucucaa

SEQ ID NO: 2453955 - RNA, 19 nt, Artificial Sequence
  Description of Artificial Sequence: Synthetic oligonucleotide
  Antisense strand to SEQ ID NO: 2453954
uugagaagcauuguccuau

SEQ ID NO: 2453956 - RNA, 19 nt, Artificial Sequence
  Description of Artificial Sequence: Synthetic oligonucleotide
  Sense strand starting at position 285 of SEQ ID NO: 1887180
uagccaugucaggagacau

SEQ ID NO: 2453957 - RNA, 19 nt, Artificial Sequence
  Description of Artificial Sequence: Synthetic oligonucleotide
  Antisense strand to SEQ ID NO: 2453956
augucuccugacauggcua

SEQ ID NO: 2453958 - RNA, 19 nt, Artificial Sequence
  Description of Artificial Sequence: Synthetic oligonucleotide
  Sense strand starting at position 462 of SEQ ID NO: 1887180
ccauaacccuguuauagga

SEQ ID NO: 2453959 - RNA, 19 nt, Artificial Sequence
  Description of Artificial Sequence: Synthetic oligonucleotide
  Antisense strand to SEQ ID NO: 2453958
uccuauaacaggguuaugg

SEQ ID NO: 2453960 - RNA, 19 nt, Artificial Sequence
  Description of Artificial Sequence: Synthetic oligonucleotide
  Sense strand starting at position 464 of SEQ ID NO: 1887180
auaacccuguuauaggaua

SEQ ID NO: 2453961 - RNA, 19 nt, Artificial Sequence
  Description of Artificial Sequence: Synthetic oligonucleotide
  Antisense strand to SEQ ID NO: 2453960
uauccuauaacaggguuau

SEQ ID NO: 2453962 - RNA, 19 nt, Artificial Sequence
  Description of Artificial Sequence: Synthetic oligonucleotide
  Sense strand starting at position 665 of SEQ ID NO: 1887180
gucuucaguuccucguaga

SEQ ID NO: 2453963 - RNA, 19 nt, Artificial Sequence
  Description of Artificial Sequence: Synthetic oligonucleotide
  Antisense strand to SEQ ID NO: 2453962
ucuacgaggaacugaagac

SEQ ID NO: 2453964 - RNA, 19 nt, Artificial Sequence
  Description of Artificial Sequence: Synthetic oligonucleotide
  Sense strand starting at position 776 of SEQ ID NO: 1887180
gcaacaaauugcccguaga

SEQ ID NO: 2453965 - RNA, 19 nt, Artificial Sequence
  Description of Artificial Sequence: Synthetic oligonucleotide
  Antisense strand to SEQ ID NO: 2453964
ucuacgggcaauuuguugc

SEQ ID NO: 2453966 - RNA, 19 nt, Artificial Sequence
  Description of Artificial Sequence: Synthetic oligonucleotide
  Sense strand starting at position 1212 of SEQ ID NO: 1887180
agguuuggaauguggagau

SEQ ID NO: 2453967 - RNA, 19 nt, Artificial Sequence
  Description of Artificial Sequence: Synthetic oligonucleotide
  Antisense strand to SEQ ID NO: 2453966
aucuccacauuccaaaccu

SEQ ID NO: 2453968 - RNA, 19 nt, Artificial Sequence
  Description of Artificial Sequence: Synthetic oligonucleotide
  Sense strand starting at position 1232 of SEQ ID NO: 1887180
aggagcucaccuuguaaga

SEQ ID NO: 2453969 - RNA, 19 nt, Artificial Sequence
  Description of Artificial Sequence: Synthetic oligonucleotide
  Antisense strand to SEQ ID NO: 2453968
ucuuacaaggugagcuccu

SEQ ID NO: 2453970 - RNA, 19 nt, Artificial Sequence
  Description of Artificial Sequence: Synthetic oligonucleotide
  Sense strand starting at position 1273 of SEQ ID NO: 1887180
ucuuccaggucugcagaaa

SEQ ID NO: 2453971 - RNA, 19 nt, Artificial Sequence
  Description of Artificial Sequence: Synthetic oligonucleotide
  Antisense strand to SEQ ID NO: 2453970
uuucugcagaccuggaaga

SEQ ID NO: 2453972 - RNA, 19 nt, Artificial Sequence
  Description of Artificial Sequence: Synthetic oligonucleotide
  Sense strand starting at position 1414 of SEQ ID NO: 1887180
ucaggaggccagugugaaa

SEQ ID NO: 2453973 - RNA, 19 nt, Artificial Sequence
  Description of Artificial Sequence: Synthetic oligonucleotide
  Antisense strand to SEQ ID NO: 2453972
uuucacacuggccuccuga

SEQ ID NO: 2453974 - RNA, 19 nt, Artificial Sequence
  Description of Artificial Sequence: Synthetic oligonucleotide
  Sense strand starting at position 1681 of SEQ ID NO: 1887180
uccugagaagcuggaucau

SEQ ID NO: 2453975 - RNA, 19 nt, Artificial Sequence
  Description of Artificial Sequence: Synthetic oligonucleotide
  Antisense strand to SEQ ID NO: 2453974
augauccagcuucucagga

SEQ ID NO: 2453976 - RNA, 19 nt, Artificial Sequence
  Description of Artificial Sequence: Synthetic oligonucleotide
  Sense strand starting at position 1692 of SEQ ID NO: 1887180
uggaucaucuccucgguaa

SEQ ID NO: 2453977 - RNA, 19 nt, Artificial Sequence
  Description of Artificial Sequence: Synthetic oligonucleotide
  Antisense strand to SEQ ID NO: 2453976
uuaccgaggagaugaucca

SEQ ID NO: 2453978 - RNA, 19 nt, Artificial Sequence
  Description of Artificial Sequence: Synthetic oligonucleotide
  Sense strand starting at position 1693 of SEQ ID NO: 1887180
ggaucaucuccucgguaag

SEQ ID NO: 2453979 - RNA, 19 nt, Artificial Sequence
  Description of Artificial Sequence: Synthetic oligonucleotide
  Antisense strand to SEQ ID NO: 2453978
cuuaccgaggagaugaucc

SEQ ID NO: 2453980 - RNA, 19 nt, Artificial Sequence
  Description of Artificial Sequence: Synthetic oligonucleotide
  Sense strand starting at position 2275 of SEQ ID NO: 1887180
gggagcuuacugugagcaa

SEQ ID NO: 2453981 - RNA, 19 nt, Artificial Sequence
  Description of Artificial Sequence: Synthetic oligonucleotide
  Antisense strand to SEQ ID NO: 2453980
uugcucacaguaagcuccc

SEQ ID NO: 2453982 - RNA, 19 nt, Artificial Sequence
  Description of Artificial Sequence: Synthetic oligonucleotide
  Sense strand starting at position 2339 of SEQ ID NO: 1887180
cagauuauacgacaggugu

SEQ ID NO: 2453983 - RNA, 19 nt, Artificial Sequence
  Description of Artificial Sequence: Synthetic oligonucleotide
  Antisense strand to SEQ ID NO: 2453982
acaccugucguauaaucug

SEQ ID NO: 2453984 - RNA, 19 nt, Artificial Sequence
  Description of Artificial Sequence: Synthetic oligonucleotide
  Sense strand starting at position 2341 of SEQ ID NO: 1887180
gauuauacgacagguguca

SEQ ID NO: 2453985 - RNA, 19 nt, Artificial Sequence
  Description of Artificial Sequence: Synthetic oligonucleotide
  Antisense strand to SEQ ID NO: 2453984
ugacaccugucguauaauc

SEQ ID NO: 2453986 - RNA, 19 nt, Artificial Sequence
  Description of Artificial Sequence: Synthetic oligonucleotide
  Sense strand starting at position 2584 of SEQ ID NO: 1887180
uguagagguuucgccucua

SEQ ID NO: 2453987 - RNA, 19 nt, Artificial Sequence
  Description of Artificial Sequence: Synthetic oligonucleotide
  Antisense strand to SEQ ID NO: 2453986
uagaggcgaaaccucuaca

SEQ ID NO: 2453988 - RNA, 19 nt, Artificial Sequence
  Description of Artificial Sequence: Synthetic oligonucleotide
  Sense strand starting at position 2755 of SEQ ID NO: 1887180
gcaagaaaccuugguuaua

SEQ ID NO: 2453989 - RNA, 19 nt, Artificial Sequence
  Description of Artificial Sequence: Synthetic oligonucleotide
  Antisense strand to SEQ ID NO: 2453988
uauaaccaagguuucuugc

SEQ ID NO: 2453990 - RNA, 19 nt, Artificial Sequence
  Description of Artificial Sequence: Synthetic oligonucleotide
  Sense strand starting at position 2827 of SEQ ID NO: 1887180
ccucauccauaggaagaaa

SEQ ID NO: 2453991 - RNA, 19 nt, Artificial Sequence
  Description of Artificial Sequence: Synthetic oligonucleotide
  Antisense strand to SEQ ID NO: 2453990
uuucuuccuauggaugagg

SEQ ID NO: 2453992 - RNA, 19 nt, Artificial Sequence
  Description of Artificial Sequence: Synthetic oligonucleotide
  Sense strand starting at position 2869 of SEQ ID NO: 1887180
ucacaaaucugugagggag

SEQ ID NO: 2453993 - RNA, 19 nt, Artificial Sequence
  Description of Artificial Sequence: Synthetic oligonucleotide
  Antisense strand to SEQ ID NO: 2453992
cucccucacagauuuguga

SEQ ID NO: 2453994 - RNA, 19 nt, Artificial Sequence
  Description of Artificial Sequence: Synthetic oligonucleotide
  Sense strand starting at position 3075 of SEQ ID NO: 1887180
uaaggugguuucucugaga

SEQ ID NO: 2453995 - RNA, 19 nt, Artificial Sequence
  Description of Artificial Sequence: Synthetic oligonucleotide
  Antisense strand to SEQ ID NO: 2453994
ucucagagaaaccaccuua

SEQ ID NO: 2453996 - RNA, 19 nt, Artificial Sequence
  Description of Artificial Sequence: Synthetic oligonucleotide
  Sense strand starting at position 3156 of SEQ ID NO: 1887180
caggaaaguacuugggagu

SEQ ID NO: 2453997 - RNA, 19 nt, Artificial Sequence
  Description of Artificial Sequence: Synthetic oligonucleotide
  Antisense strand to SEQ ID NO: 2453996
acucccaaguacuuuccug

SEQ ID NO: 2453998 - RNA, 19 nt, Artificial Sequence
  Description of Artificial Sequence: Synthetic oligonucleotide
  Sense strand starting at position 3193 of SEQ ID NO: 1887180
gaauucuagcagugaaguc

SEQ ID NO: 2453999 - RNA, 19 nt, Artificial Sequence
  Description of Artificial Sequence: Synthetic oligonucleotide
  Antisense strand to SEQ ID NO: 2453998
gacuucacugcuagaauuc

SEQ ID NO: 2454000 - RNA, 19 nt, Artificial Sequence
  Description of Artificial Sequence: Synthetic oligonucleotide
  Sense strand starting at position 3200 of SEQ ID NO: 1887180
agcagugaagucugaucau

SEQ ID NO: 2454001 - RNA, 19 nt, Artificial Sequence
  Description of Artificial Sequence: Synthetic oligonucleotide
  Antisense strand to SEQ ID NO: 2454000
augaucagacuucacugcu

SEQ ID NO: 2454002 - RNA, 19 nt, Artificial Sequence
  Description of Artificial Sequence: Synthetic oligonucleotide
  Sense strand starting at position 3203 of SEQ ID NO: 1887180
agugaagucugaucauaug

SEQ ID NO: 2454003 - RNA, 19 nt, Artificial Sequence
  Description of Artificial Sequence: Synthetic oligonucleotide
  Antisense strand to SEQ ID NO: 2454002
cauaugaucagacuucacu

SEQ ID NO: 2454004 - RNA, 19 nt, Artificial Sequence
  Description of Artificial Sequence: Synthetic oligonucleotide
  Sense strand starting at position 3213 of SEQ ID NO: 1887180
gaucauaugugagccauga

SEQ ID NO: 2454005 - RNA, 19 nt, Artificial Sequence
  Description of Artificial Sequence: Synthetic oligonucleotide
  Antisense strand to SEQ ID NO: 2454004
ucauggcucacauaugauc

SEQ ID NO: 2454006 - RNA, 19 nt, Artificial Sequence
  Description of Artificial Sequence: Synthetic oligonucleotide
  Sense strand starting at position 3309 of SEQ ID NO: 1887180
uagagagccuuagcuucua

SEQ ID NO: 2454007 - RNA, 19 nt, Artificial Sequence
  Description of Artificial Sequence: Synthetic oligonucleotide
  Antisense strand to SEQ ID NO: 2454006
uagaagcuaaggcucucua

SEQ ID NO: 2454008 - RNA, 19 nt, Artificial Sequence
  Description of Artificial Sequence: Synthetic oligonucleotide
  Sense strand starting at position 3320 of SEQ ID NO: 1887180
agcuucuacggacaaaguu

SEQ ID NO: 2454009 - RNA, 19 nt, Artificial Sequence
  Description of Artificial Sequence: Synthetic oligonucleotide
  Antisense strand to SEQ ID NO: 2454008
aacuuuguccguagaagcu

SEQ ID NO: 2454010 - RNA, 19 nt, Artificial Sequence
  Description of Artificial Sequence: Synthetic oligonucleotide
  Sense strand starting at position 3500 of SEQ ID NO: 1887180
cugccaucaccauggagua

SEQ ID NO: 2454011 - RNA, 19 nt, Artificial Sequence
  Description of Artificial Sequence: Synthetic oligonucleotide
  Antisense strand to SEQ ID NO: 2454010
uacuccauggugauggcag

SEQ ID NO: 2454012 - RNA, 19 nt, Artificial Sequence
  Description of Artificial Sequence: Synthetic oligonucleotide
  Sense strand starting at position 3501 of SEQ ID NO: 1887180
ugccaucaccauggaguau

SEQ ID NO: 2454013 - RNA, 19 nt, Artificial Sequence
  Description of Artificial Sequence: Synthetic oligonucleotide
  Antisense strand to SEQ ID NO: 2454012
auacuccauggugauggca

SEQ ID NO: 2454014 - RNA, 19 nt, Artificial Sequence
  Description of Artificial Sequence: Synthetic oligonucleotide
  Sense strand starting at position 3675 of SEQ ID NO: 1887180
auuguuacacucugugaug

SEQ ID NO: 2454015 - RNA, 19 nt, Artificial Sequence
  Description of Artificial Sequence: Synthetic oligonucleotide
  Antisense strand to SEQ ID NO: 2454014
caucacagaguguaacaau

SEQ ID NO: 2454016 - RNA, 19 nt, Artificial Sequence
  Description of Artificial Sequence: Synthetic oligonucleotide
  Sense strand starting at position 3676 of SEQ ID NO: 1887180
uuguuacacucugugauga

SEQ ID NO: 2454017 - RNA, 19 nt, Artificial Sequence
  Description of Artificial Sequence: Synthetic oligonucleotide
  Antisense strand to SEQ ID NO: 2454016
ucaucacagaguguaacaa

SEQ ID NO: 2454018 - RNA, 19 nt, Artificial Sequence
  Description of Artificial Sequence: Synthetic oligonucleotide
  Sense strand starting at position 3677 of SEQ ID NO: 1887180
uguuacacucugugaugau

SEQ ID NO: 2454019 - RNA, 19 nt, Artificial Sequence
  Description of Artificial Sequence: Synthetic oligonucleotide
  Antisense strand to SEQ ID NO: 2454018
aucaucacagaguguaaca

SEQ ID NO: 2454020 - RNA, 19 nt, Artificial Sequence
  Description of Artificial Sequence: Synthetic oligonucleotide
  Sense strand starting at position 28 of SEQ ID NO: 1887181
uccugagaagcuggaucau

SEQ ID NO: 2454021 - RNA, 19 nt, Artificial Sequence
  Description of Artificial Sequence: Synthetic oligonucleotide
  Antisense strand to SEQ ID NO: 2454020
augauccagcuucucagga

SEQ ID NO: 2454022 - RNA, 19 nt, Artificial Sequence
  Description of Artificial Sequence: Synthetic oligonucleotide
  Sense strand starting at position 39 of SEQ ID NO: 1887181
uggaucaucuccucgguaa

SEQ ID NO: 2454023 - RNA, 19 nt, Artificial Sequence
  Description of Artificial Sequence: Synthetic oligonucleotide
  Antisense strand to SEQ ID NO: 2454022
uuaccgaggagaugaucca

SEQ ID NO: 2454024 - RNA, 19 nt, Artificial Sequence
  Description of Artificial Sequence: Synthetic oligonucleotide
  Sense strand starting at position 40 of SEQ ID NO: 1887181
ggaucaucuccucgguaag

SEQ ID NO: 2454025 - RNA, 19 nt, Artificial Sequence
  Description of Artificial Sequence: Synthetic oligonucleotide
  Antisense strand to SEQ ID NO: 2454024
cuuaccgaggagaugaucc

SEQ ID NO: 2454026 - RNA, 19 nt, Artificial Sequence
  Description of Artificial Sequence: Synthetic oligonucleotide
  Sense strand starting at position 622 of SEQ ID NO: 1887181
gggagcuuacugugagcaa

SEQ ID NO: 2454027 - RNA, 19 nt, Artificial Sequence
  Description of Artificial Sequence: Synthetic oligonucleotide
  Antisense strand to SEQ ID NO: 2454026
uugcucacaguaagcuccc

SEQ ID NO: 2454028 - RNA, 19 nt, Artificial Sequence
  Description of Artificial Sequence: Synthetic oligonucleotide
  Sense strand starting at position 686 of SEQ ID NO: 1887181
cagauuauacgacaggugu

SEQ ID NO: 2454029 - RNA, 19 nt, Artificial Sequence
  Description of Artificial Sequence: Synthetic oligonucleotide
  Antisense strand to SEQ ID NO: 2454028
acaccugucguauaaucug

SEQ ID NO: 2454030 - RNA, 19 nt, Artificial Sequence
  Description of Artificial Sequence: Synthetic oligonucleotide
  Sense strand starting at position 688 of SEQ ID NO: 1887181
gauuauacgacagguguca

SEQ ID NO: 2454031 - RNA, 19 nt, Artificial Sequence
  Description of Artificial Sequence: Synthetic oligonucleotide
  Antisense strand to SEQ ID NO: 2454030
ugacaccugucguauaauc

SEQ ID NO: 2454032 - RNA, 19 nt, Artificial Sequence
  Description of Artificial Sequence: Synthetic oligonucleotide
  Sense strand starting at position 1102 of SEQ ID NO: 1887181
gcaagaaaccuugguuaua

SEQ ID NO: 2454033 - RNA, 19 nt, Artificial Sequence
  Description of Artificial Sequence: Synthetic oligonucleotide
  Antisense strand to SEQ ID NO: 2454032
uauaaccaagguuucuugc

SEQ ID NO: 2454034 - RNA, 19 nt, Artificial Sequence
  Description of Artificial Sequence: Synthetic oligonucleotide
  Sense strand starting at position 1174 of SEQ ID NO: 1887181
ccucauccauaggaagaaa

SEQ ID NO: 2454035 - RNA, 19 nt, Artificial Sequence
  Description of Artificial Sequence: Synthetic oligonucleotide
  Antisense strand to SEQ ID NO: 2454034
uuucuuccuauggaugagg

SEQ ID NO: 2454036 - RNA, 19 nt, Artificial Sequence
  Description of Artificial Sequence: Synthetic oligonucleotide
  Sense strand starting at position 1422 of SEQ ID NO: 1887181
uaaggugguuucucugaga

SEQ ID NO: 2454037 - RNA, 19 nt, Artificial Sequence
  Description of Artificial Sequence: Synthetic oligonucleotide
  Antisense strand to SEQ ID NO: 2454036
ucucagagaaaccaccuua

SEQ ID NO: 2454038 - RNA, 19 nt, Artificial Sequence
  Description of Artificial Sequence: Synthetic oligonucleotide
  Sense strand starting at position 1503 of SEQ ID NO: 1887181
caggaaaguacuugggagu

SEQ ID NO: 2454039 - RNA, 19 nt, Artificial Sequence
  Description of Artificial Sequence: Synthetic oligonucleotide
  Antisense strand to SEQ ID NO: 2454038
acucccaaguacuuuccug

SEQ ID NO: 2454040 - RNA, 19 nt, Artificial Sequence
  Description of Artificial Sequence: Synthetic oligonucleotide
  Sense strand starting at position 1540 of SEQ ID NO: 1887181
gaauucuagcagugaaguc

SEQ ID NO: 2454041 - RNA, 19 nt, Artificial Sequence
  Description of Artificial Sequence: Synthetic oligonucleotide
  Antisense strand to SEQ ID NO: 2454040
gacuucacugcuagaauuc

SEQ ID NO: 2454042 - RNA, 19 nt, Artificial Sequence
  Description of Artificial Sequence: Synthetic oligonucleotide
  Sense strand starting at position 1547 of SEQ ID NO: 1887181
agcagugaagucugaucau

SEQ ID NO: 2454043 - RNA, 19 nt, Artificial Sequence
  Description of Artificial Sequence: Synthetic oligonucleotide
  Antisense strand to SEQ ID NO: 2454042
augaucagacuucacugcu

SEQ ID NO: 2454044 - RNA, 19 nt, Artificial Sequence
  Description of Artificial Sequence: Synthetic oligonucleotide
  Sense strand starting at position 1550 of SEQ ID NO: 1887181
agugaagucugaucauaug

SEQ ID NO: 2454045 - RNA, 19 nt, Artificial Sequence
  Description of Artificial Sequence: Synthetic oligonucleotide
  Antisense strand to SEQ ID NO: 2454044
cauaugaucagacuucacu

SEQ ID NO: 2454046 - RNA, 19 nt, Artificial Sequence
  Description of Artificial Sequence: Synthetic oligonucleotide
  Sense strand starting at position 1560 of SEQ ID NO: 1887181
gaucauaugugagccauga

SEQ ID NO: 2454047 - RNA, 19 nt, Artificial Sequence
  Description of Artificial Sequence: Synthetic oligonucleotide
  Antisense strand to SEQ ID NO: 2454046
ucauggcucacauaugauc

SEQ ID NO: 2454048 - RNA, 19 nt, Artificial Sequence
  Description of Artificial Sequence: Synthetic oligonucleotide
  Sense strand starting at position 1656 of SEQ ID NO: 1887181
uagagagccuuagcuucua

SEQ ID NO: 2454049 - RNA, 19 nt, Artificial Sequence
  Description of Artificial Sequence: Synthetic oligonucleotide
  Antisense strand to SEQ ID NO: 2454048
uagaagcuaaggcucucua

SEQ ID NO: 2454050 - RNA, 19 nt, Artificial Sequence
  Description of Artificial Sequence: Synthetic oligonucleotide
  Sense strand starting at position 1667 of SEQ ID NO: 1887181
agcuucuacggacaaaguu

SEQ ID NO: 2454051 - RNA, 19 nt, Artificial Sequence
  Description of Artificial Sequence: Synthetic oligonucleotide
  Antisense strand to SEQ ID NO: 2454050
aacuuuguccguagaagcu

SEQ ID NO: 2454052 - RNA, 19 nt, Artificial Sequence
  Description of Artificial Sequence: Synthetic oligonucleotide
  Sense strand starting at position 1847 of SEQ ID NO: 1887181
cugccaucaccauggagua

SEQ ID NO: 2454053 - RNA, 19 nt, Artificial Sequence
  Description of Artificial Sequence: Synthetic oligonucleotide
  Antisense strand to SEQ ID NO: 2454052
uacuccauggugauggcag

SEQ ID NO: 2454054 - RNA, 19 nt, Artificial Sequence
  Description of Artificial Sequence: Synthetic oligonucleotide
  Sense strand starting at position 1848 of SEQ ID NO: 1887181
ugccaucaccauggaguau

SEQ ID NO: 2454055 - RNA, 19 nt, Artificial Sequence
  Description of Artificial Sequence: Synthetic oligonucleotide
  Antisense strand to SEQ ID NO: 2454054
auacuccauggugauggca

SEQ ID NO: 2454056 - RNA, 19 nt, Artificial Sequence
  Description of Artificial Sequence: Synthetic oligonucleotide
  Sense strand starting at position 2022 of SEQ ID NO: 1887181
auuguuacacucugugaug

SEQ ID NO: 2454057 - RNA, 19 nt, Artificial Sequence
  Description of Artificial Sequence: Synthetic oligonucleotide
  Antisense strand to SEQ ID NO: 2454056
caucacagaguguaacaau

SEQ ID NO: 2454058 - RNA, 19 nt, Artificial Sequence
  Description of Artificial Sequence: Synthetic oligonucleotide
  Sense strand starting at position 2023 of SEQ ID NO: 1887181
uuguuacacucugugauga

SEQ ID NO: 2454059 - RNA, 19 nt, Artificial Sequence
  Description of Artificial Sequence: Synthetic oligonucleotide
  Antisense strand to SEQ ID NO: 2454058
ucaucacagaguguaacaa

SEQ ID NO: 2454060 - RNA, 19 nt, Artificial Sequence
  Description of Artificial Sequence: Synthetic oligonucleotide
  Sense strand starting at position 2024 of SEQ ID NO: 1887181
uguuacacucugugaugau

SEQ ID NO: 2454061 - RNA, 19 nt, Artificial Sequence
  Description of Artificial Sequence: Synthetic oligonucleotide
  Antisense strand to SEQ ID NO: 2454060
aucaucacagaguguaaca

SEQ ID NO: 2454062 - RNA, 19 nt, Artificial Sequence
  Description of Artificial Sequence: Synthetic oligonucleotide
  Sense strand starting at position 2811 of SEQ ID NO: 1887181
ugccuauaguuucuaagaa

SEQ ID NO: 2454063 - RNA, 19 nt, Artificial Sequence
  Description of Artificial Sequence: Synthetic oligonucleotide
  Antisense strand to SEQ ID NO: 2454062
uucuuagaaacuauaggca

SEQ ID NO: 2454064 - RNA, 19 nt, Artificial Sequence
  Description of Artificial Sequence: Synthetic oligonucleotide
  Sense strand starting at position 2867 of SEQ ID NO: 1887181
cuauacuucccugacuugu

SEQ ID NO: 2454065 - RNA, 19 nt, Artificial Sequence
  Description of Artificial Sequence: Synthetic oligonucleotide
  Antisense strand to SEQ ID NO: 2454064
acaagucagggaaguauag

SEQ ID NO: 2454066 - RNA, 19 nt, Artificial Sequence
  Description of Artificial Sequence: Synthetic oligonucleotide
  Sense strand starting at position 2962 of SEQ ID NO: 1887181
ucacuucuuggaggcauau

SEQ ID NO: 2454067 - RNA, 19 nt, Artificial Sequence
  Description of Artificial Sequence: Synthetic oligonucleotide
  Antisense strand to SEQ ID NO: 2454066
auaugccuccaagaaguga

SEQ ID NO: 2454068 - RNA, 19 nt, Artificial Sequence
  Description of Artificial Sequence: Synthetic oligonucleotide
  Sense strand starting at position 3006 of SEQ ID NO: 1887181
uuggauuagucaguuuguu

SEQ ID NO: 2454069 - RNA, 19 nt, Artificial Sequence
  Description of Artificial Sequence: Synthetic oligonucleotide
  Antisense strand to SEQ ID NO: 2454068
aacaaacugacuaauccaa

SEQ ID NO: 2454070 - RNA, 19 nt, Artificial Sequence
  Description of Artificial Sequence: Synthetic oligonucleotide
  Sense strand starting at position 3010 of SEQ ID NO: 1887181
auuagucaguuuguugaca

SEQ ID NO: 2454071 - RNA, 19 nt, Artificial Sequence
  Description of Artificial Sequence: Synthetic oligonucleotide
  Antisense strand to SEQ ID NO: 2454070
ugucaacaaacugacuaau

SEQ ID NO: 2454072 - RNA, 19 nt, Artificial Sequence
  Description of Artificial Sequence: Synthetic oligonucleotide
  Sense strand starting at position 3247 of SEQ ID NO: 1887181
gugucugucccaguguuua

SEQ ID NO: 2454073 - RNA, 19 nt, Artificial Sequence
  Description of Artificial Sequence: Synthetic oligonucleotide
  Antisense strand to SEQ ID NO: 2454072
uaaacacugggacagacac

SEQ ID NO: 2454074 - RNA, 19 nt, Artificial Sequence
  Description of Artificial Sequence: Synthetic oligonucleotide
  Sense strand starting at position 3375 of SEQ ID NO: 1887181
gauauagcauggucuggua

SEQ ID NO: 2454075 - RNA, 19 nt, Artificial Sequence
  Description of Artificial Sequence: Synthetic oligonucleotide
  Antisense strand to SEQ ID NO: 2454074
uaccagaccaugcuauauc

SEQ ID NO: 2454076 - RNA, 19 nt, Artificial Sequence
  Description of Artificial Sequence: Synthetic oligonucleotide
  Sense strand starting at position 3428 of SEQ ID NO: 1887181
ggcuuaguauagcuugaga

SEQ ID NO: 2454077 - RNA, 19 nt, Artificial Sequence
  Description of Artificial Sequence: Synthetic oligonucleotide
  Antisense strand to SEQ ID NO: 2454076
ucucaagcuauacuaagcc

SEQ ID NO: 2454078 - RNA, 19 nt, Artificial Sequence
  Description of Artificial Sequence: Synthetic oligonucleotide
  Sense strand starting at position 3430 of SEQ ID NO: 1887181
cuuaguauagcuugagacu

SEQ ID NO: 2454079 - RNA, 19 nt, Artificial Sequence
  Description of Artificial Sequence: Synthetic oligonucleotide
  Antisense strand to SEQ ID NO: 2454078
agucucaagcuauacuaag

SEQ ID NO: 2454080 - RNA, 19 nt, Artificial Sequence
  Description of Artificial Sequence: Synthetic oligonucleotide
  Sense strand starting at position 3488 of SEQ ID NO: 1887181
ugagcugagucuccaagga

SEQ ID NO: 2454081 - RNA, 19 nt, Artificial Sequence
  Description of Artificial Sequence: Synthetic oligonucleotide
  Antisense strand to SEQ ID NO: 2454080
uccuuggagacucagcuca

SEQ ID NO: 2454082 - RNA, 19 nt, Artificial Sequence
  Description of Artificial Sequence: Synthetic oligonucleotide
  Sense strand starting at position 3557 of SEQ ID NO: 1887181
gagggaauuacuugcaggu

SEQ ID NO: 2454083 - RNA, 19 nt, Artificial Sequence
  Description of Artificial Sequence: Synthetic oligonucleotide
  Antisense strand to SEQ ID NO: 2454082
accugcaaguaauucccuc

SEQ ID NO: 2454084 - RNA, 19 nt, Artificial Sequence
  Description of Artificial Sequence: Synthetic oligonucleotide
  Sense strand starting at position 3588 of SEQ ID NO: 1887181
gggugaaugaccugugcag

SEQ ID NO: 2454085 - RNA, 19 nt, Artificial Sequence
  Description of Artificial Sequence: Synthetic oligonucleotide
  Antisense strand to SEQ ID NO: 2454084
cugcacaggucauucaccc

SEQ ID NO: 2454086 - RNA, 19 nt, Artificial Sequence
  Description of Artificial Sequence: Synthetic oligonucleotide
  Sense strand starting at position 3739 of SEQ ID NO: 1887181
gcuggucuugaguauguga

SEQ ID NO: 2454087 - RNA, 19 nt, Artificial Sequence
  Description of Artificial Sequence: Synthetic oligonucleotide
  Antisense strand to SEQ ID NO: 2454086
ucacauacucaagaccagc

SEQ ID NO: 2454088 - RNA, 19 nt, Artificial Sequence
  Description of Artificial Sequence: Synthetic oligonucleotide
  Sense strand starting at position 3741 of SEQ ID NO: 1887181
uggucuugaguaugugaga

SEQ ID NO: 2454089 - RNA, 19 nt, Artificial Sequence
  Description of Artificial Sequence: Synthetic oligonucleotide
  Antisense strand to SEQ ID NO: 2454088
ucucacauacucaagacca

SEQ ID NO: 2454090 - RNA, 19 nt, Artificial Sequence
  Description of Artificial Sequence: Synthetic oligonucleotide
  Sense strand starting at position 3813 of SEQ ID NO: 1887181
gugauggaugcucguagga

SEQ ID NO: 2454091 - RNA, 19 nt, Artificial Sequence
  Description of Artificial Sequence: Synthetic oligonucleotide
  Antisense strand to SEQ ID NO: 2454090
uccuacgagcauccaucac

SEQ ID NO: 2454092 - RNA, 19 nt, Artificial Sequence
  Description of Artificial Sequence: Synthetic oligonucleotide
  Sense strand starting at position 3837 of SEQ ID NO: 1887181
caugguauacugggaaucu

SEQ ID NO: 2454093 - RNA, 19 nt, Artificial Sequence
  Description of Artificial Sequence: Synthetic oligonucleotide
  Antisense strand to SEQ ID NO: 2454092
agauucccaguauaccaug

SEQ ID NO: 2454094 - RNA, 19 nt, Artificial Sequence
  Description of Artificial Sequence: Synthetic oligonucleotide
  Sense strand starting at position 3846 of SEQ ID NO: 1887181
cugggaaucuuggacuaga

SEQ ID NO: 2454095 - RNA, 19 nt, Artificial Sequence
  Description of Artificial Sequence: Synthetic oligonucleotide
  Antisense strand to SEQ ID NO: 2454094
ucuaguccaagauucccag

SEQ ID NO: 2454096 - RNA, 19 nt, Artificial Sequence
  Description of Artificial Sequence: Synthetic oligonucleotide
  Sense strand starting at position 3893 of SEQ ID NO: 1887181
cuuagagauuuauggucuu

SEQ ID NO: 2454097 - RNA, 19 nt, Artificial Sequence
  Description of Artificial Sequence: Synthetic oligonucleotide
  Antisense strand to SEQ ID NO: 2454096
aagaccauaaaucucuaag

SEQ ID NO: 2454098 - RNA, 19 nt, Artificial Sequence
  Description of Artificial Sequence: Synthetic oligonucleotide
  Sense strand starting at position 3899 of SEQ ID NO: 1887181
gauuuauggucuuagacaa

SEQ ID NO: 2454099 - RNA, 19 nt, Artificial Sequence
  Description of Artificial Sequence: Synthetic oligonucleotide
  Antisense strand to SEQ ID NO: 2454098
uugucuaagaccauaaauc

SEQ ID NO: 2454100 - RNA, 19 nt, Artificial Sequence
  Description of Artificial Sequence: Synthetic oligonucleotide
  Sense strand starting at position 363 of SEQ ID NO: 1887182
ugcuuccuucuugaaagga

SEQ ID NO: 2454101 - RNA, 19 nt, Artificial Sequence
  Description of Artificial Sequence: Synthetic oligonucleotide
  Antisense strand to SEQ ID NO: 2454100
uccuuucaagaaggaagca

SEQ ID NO: 2454102 - RNA, 19 nt, Artificial Sequence
  Description of Artificial Sequence: Synthetic oligonucleotide
  Sense strand starting at position 422 of SEQ ID NO: 1887182
ccugaaaugucucagagac

SEQ ID NO: 2454103 - RNA, 19 nt, Artificial Sequence
  Description of Artificial Sequence: Synthetic oligonucleotide
  Antisense strand to SEQ ID NO: 2454102
gucucugagacauuucagg

SEQ ID NO: 2454104 - RNA, 19 nt, Artificial Sequence
  Description of Artificial Sequence: Synthetic oligonucleotide
  Sense strand starting at position 454 of SEQ ID NO: 1887182
ucugcaucauuguagaaau

SEQ ID NO: 2454105 - RNA, 19 nt, Artificial Sequence
  Description of Artificial Sequence: Synthetic oligonucleotide
  Antisense strand to SEQ ID NO: 2454104
auuucuacaaugaugcaga

SEQ ID NO: 2454106 - RNA, 19 nt, Artificial Sequence
  Description of Artificial Sequence: Synthetic oligonucleotide
  Sense strand starting at position 456 of SEQ ID NO: 1887182
ugcaucauuguagaaauga

SEQ ID NO: 2454107 - RNA, 19 nt, Artificial Sequence
  Description of Artificial Sequence: Synthetic oligonucleotide
  Antisense strand to SEQ ID NO: 2454106
ucauuucuacaaugaugca

SEQ ID NO: 2454108 - RNA, 19 nt, Artificial Sequence
  Description of Artificial Sequence: Synthetic oligonucleotide
  Sense strand starting at position 481 of SEQ ID NO: 1887182
ccaggaggacuuuggaguu

SEQ ID NO: 2454109 - RNA, 19 nt, Artificial Sequence
  Description of Artificial Sequence: Synthetic oligonucleotide
  Antisense strand to SEQ ID NO: 2454108
aacuccaaaguccuccugg

SEQ ID NO: 2454110 - RNA, 19 nt, Artificial Sequence
  Description of Artificial Sequence: Synthetic oligonucleotide
  Sense strand starting at position 526 of SEQ ID NO: 1887182
cccacuggauucuuugcaa

SEQ ID NO: 2454111 - RNA, 19 nt, Artificial Sequence
  Description of Artificial Sequence: Synthetic oligonucleotide
  Antisense strand to SEQ ID NO: 2454110
uugcaaagaauccaguggg

SEQ ID NO: 2454112 - RNA, 19 nt, Artificial Sequence
  Description of Artificial Sequence: Synthetic oligonucleotide
  Sense strand starting at position 574 of SEQ ID NO: 1887182
acagguuauccgugcccau

SEQ ID NO: 2454113 - RNA, 19 nt, Artificial Sequence
  Description of Artificial Sequence: Synthetic oligonucleotide
  Antisense strand to SEQ ID NO: 2454112
augggcacggauaaccugu

SEQ ID NO: 2454114 - RNA, 19 nt, Artificial Sequence
  Description of Artificial Sequence: Synthetic oligonucleotide
  Sense strand starting at position 577 of SEQ ID NO: 1887182
gguuauccgugcccaugau

SEQ ID NO: 2454115 - RNA, 19 nt, Artificial Sequence
  Description of Artificial Sequence: Synthetic oligonucleotide
  Antisense strand to SEQ ID NO: 2454114
aucaugggcacggauaacc

SEQ ID NO: 2454116 - RNA, 19 nt, Artificial Sequence
  Description of Artificial Sequence: Synthetic oligonucleotide
  Sense strand starting at position 593 of SEQ ID NO: 1887182
gauccaagagcuugagauc

SEQ ID NO: 2454117 - RNA, 19 nt, Artificial Sequence
  Description of Artificial Sequence: Synthetic oligonucleotide
  Antisense strand to SEQ ID NO: 2454116
gaucucaagcucuuggauc

SEQ ID NO: 2454118 - RNA, 19 nt, Artificial Sequence
  Description of Artificial Sequence: Synthetic oligonucleotide
  Sense strand starting at position 604 of SEQ ID NO: 1887182
uugagauccugagaugaag

SEQ ID NO: 2454119 - RNA, 19 nt, Artificial Sequence
  Description of Artificial Sequence: Synthetic oligonucleotide
  Antisense strand to SEQ ID NO: 2454118
cuucaucucaggaucucaa

SEQ ID NO: 2454120 - RNA, 19 nt, Artificial Sequence
  Description of Artificial Sequence: Synthetic oligonucleotide
  Sense strand starting at position 655 of SEQ ID NO: 1887182
gugggcaggaaucaguaaa

SEQ ID NO: 2454121 - RNA, 19 nt, Artificial Sequence
  Description of Artificial Sequence: Synthetic oligonucleotide
  Antisense strand to SEQ ID NO: 2454120
uuuacugauuccugcccac

SEQ ID NO: 2454122 - RNA, 19 nt, Artificial Sequence
  Description of Artificial Sequence: Synthetic oligonucleotide
  Sense strand starting at position 704 of SEQ ID NO: 1887182
gucagugucugggaguaau

SEQ ID NO: 2454123 - RNA, 19 nt, Artificial Sequence
  Description of Artificial Sequence: Synthetic oligonucleotide
  Antisense strand to SEQ ID NO: 2454122
auuacucccagacacugac

SEQ ID NO: 2454124 - RNA, 19 nt, Artificial Sequence
  Description of Artificial Sequence: Synthetic oligonucleotide
  Sense strand starting at position 714 of SEQ ID NO: 1887182
gggaguaauuuaggaaagu

SEQ ID NO: 2454125 - RNA, 19 nt, Artificial Sequence
  Description of Artificial Sequence: Synthetic oligonucleotide
  Antisense strand to SEQ ID NO: 2454124
acuuuccuaaauuacuccc

SEQ ID NO: 2454126 - RNA, 19 nt, Artificial Sequence
  Description of Artificial Sequence: Synthetic oligonucleotide
  Sense strand starting at position 715 of SEQ ID NO: 1887182
ggaguaauuuaggaaaguu

SEQ ID NO: 2454127 - RNA, 19 nt, Artificial Sequence
  Description of Artificial Sequence: Synthetic oligonucleotide
  Antisense strand to SEQ ID NO: 2454126
aacuuuccuaaauuacucc

SEQ ID NO: 2454128 - RNA, 19 nt, Artificial Sequence
  Description of Artificial Sequence: Synthetic oligonucleotide
  Sense strand starting at position 744 of SEQ ID NO: 1887182
agcugugucugggacuuga

SEQ ID NO: 2454129 - RNA, 19 nt, Artificial Sequence
  Description of Artificial Sequence: Synthetic oligonucleotide
  Antisense strand to SEQ ID NO: 2454128
ucaagucccagacacagcu

SEQ ID NO: 2454130 - RNA, 19 nt, Artificial Sequence
  Description of Artificial Sequence: Synthetic oligonucleotide
  Sense strand starting at position 895 of SEQ ID NO: 1887182
uccuuaacagugugaccuu

SEQ ID NO: 2454131 - RNA, 19 nt, Artificial Sequence
  Description of Artificial Sequence: Synthetic oligonucleotide
  Antisense strand to SEQ ID NO: 2454130
aaggucacacuguuaagga

SEQ ID NO: 2454132 - RNA, 19 nt, Artificial Sequence
  Description of Artificial Sequence: Synthetic oligonucleotide
  Sense strand starting at position 896 of SEQ ID NO: 1887182
ccuuaacagugugaccuua

SEQ ID NO: 2454133 - RNA, 19 nt, Artificial Sequence
  Description of Artificial Sequence: Synthetic oligonucleotide
  Antisense strand to SEQ ID NO: 2454132
uaaggucacacuguuaagg

SEQ ID NO: 2454134 - RNA, 19 nt, Artificial Sequence
  Description of Artificial Sequence: Synthetic oligonucleotide
  Sense strand starting at position 898 of SEQ ID NO: 1887182
uuaacagugugaccuuaga

SEQ ID NO: 2454135 - RNA, 19 nt, Artificial Sequence
  Description of Artificial Sequence: Synthetic oligonucleotide
  Antisense strand to SEQ ID NO: 2454134
ucuaaggucacacuguuaa

SEQ ID NO: 2454136 - RNA, 19 nt, Artificial Sequence
  Description of Artificial Sequence: Synthetic oligonucleotide
  Sense strand starting at position 912 of SEQ ID NO: 1887182
uuagauaagucacuuagga

SEQ ID NO: 2454137 - RNA, 19 nt, Artificial Sequence
  Description of Artificial Sequence: Synthetic oligonucleotide
  Antisense strand to SEQ ID NO: 2454136
uccuaagugacuuaucuaa

SEQ ID NO: 2454138 - RNA, 19 nt, Artificial Sequence
  Description of Artificial Sequence: Synthetic oligonucleotide
  Sense strand starting at position 946 of SEQ ID NO: 1887182
cuagcauuuagcgagugca

SEQ ID NO: 2454139 - RNA, 19 nt, Artificial Sequence
  Description of Artificial Sequence: Synthetic oligonucleotide
  Antisense strand to SEQ ID NO: 2454138
ugcacucgcuaaaugcuag

SEQ ID NO: 2454140 - RNA, 19 nt, Artificial Sequence
  Description of Artificial Sequence: Synthetic oligonucleotide
  Sense strand starting at position 1115 of SEQ ID NO: 1887182
ggcuguuggcccugagcuu

SEQ ID NO: 2454141 - RNA, 19 nt, Artificial Sequence
  Description of Artificial Sequence: Synthetic oligonucleotide
  Antisense strand to SEQ ID NO: 2454140
aagcucagggccaacagcc

SEQ ID NO: 2454142 - RNA, 19 nt, Artificial Sequence
  Description of Artificial Sequence: Synthetic oligonucleotide
  Sense strand starting at position 1246 of SEQ ID NO: 1887182
gcaccuucuuccugggaac

SEQ ID NO: 2454143 - RNA, 19 nt, Artificial Sequence
  Description of Artificial Sequence: Synthetic oligonucleotide
  Antisense strand to SEQ ID NO: 2454142
guucccaggaagaaggugc

SEQ ID NO: 2454144 - RNA, 19 nt, Artificial Sequence
  Description of Artificial Sequence: Synthetic oligonucleotide
  Sense strand starting at position 1249 of SEQ ID NO: 1887182
ccuucuuccugggaacgua

SEQ ID NO: 2454145 - RNA, 19 nt, Artificial Sequence
  Description of Artificial Sequence: Synthetic oligonucleotide
  Antisense strand to SEQ ID NO: 2454144
uacguucccaggaagaagg

SEQ ID NO: 2454146 - RNA, 19 nt, Artificial Sequence
  Description of Artificial Sequence: Synthetic oligonucleotide
  Sense strand starting at position 1258 of SEQ ID NO: 1887182
ugggaacguagucaucgua

SEQ ID NO: 2454147 - RNA, 19 nt, Artificial Sequence
  Description of Artificial Sequence: Synthetic oligonucleotide
  Antisense strand to SEQ ID NO: 2454146
uacgaugacuacguuccca

SEQ ID NO: 2454148 - RNA, 19 nt, Artificial Sequence
  Description of Artificial Sequence: Synthetic oligonucleotide
  Sense strand starting at position 1261 of SEQ ID NO: 1887182
gaacguagucaucguauuu

SEQ ID NO: 2454149 - RNA, 19 nt, Artificial Sequence
  Description of Artificial Sequence: Synthetic oligonucleotide
  Antisense strand to SEQ ID NO: 2454148
aaauacgaugacuacguuc

SEQ ID NO: 2454150 - RNA, 19 nt, Artificial Sequence
  Description of Artificial Sequence: Synthetic oligonucleotide
  Sense strand starting at position 1318 of SEQ ID NO: 1887182
ggaggugucugaagggaag

SEQ ID NO: 2454151 - RNA, 19 nt, Artificial Sequence
  Description of Artificial Sequence: Synthetic oligonucleotide
  Antisense strand to SEQ ID NO: 2454150
cuucccuucagacaccucc

SEQ ID NO: 2454152 - RNA, 19 nt, Artificial Sequence
  Description of Artificial Sequence: Synthetic oligonucleotide
  Sense strand starting at position 1446 of SEQ ID NO: 1887182
cugguauuccuagggauag

SEQ ID NO: 2454153 - RNA, 19 nt, Artificial Sequence
  Description of Artificial Sequence: Synthetic oligonucleotide
  Antisense strand to SEQ ID NO: 2454152
cuaucccuaggaauaccag

SEQ ID NO: 2454154 - RNA, 19 nt, Artificial Sequence
  Description of Artificial Sequence: Synthetic oligonucleotide
  Sense strand starting at position 1447 of SEQ ID NO: 1887182
ugguauuccuagggauagg

SEQ ID NO: 2454155 - RNA, 19 nt, Artificial Sequence
  Description of Artificial Sequence: Synthetic oligonucleotide
  Antisense strand to SEQ ID NO: 2454154
ccuaucccuaggaauacca

SEQ ID NO: 2454156 - RNA, 19 nt, Artificial Sequence
  Description of Artificial Sequence: Synthetic oligonucleotide
  Sense strand starting at position 2569 of SEQ ID NO: 1887182
ucccacagcuguccugaau

SEQ ID NO: 2454157 - RNA, 19 nt, Artificial Sequence
  Description of Artificial Sequence: Synthetic oligonucleotide
  Antisense strand to SEQ ID NO: 2454156
auucaggacagcuguggga

SEQ ID NO: 2454158 - RNA, 19 nt, Artificial Sequence
  Description of Artificial Sequence: Synthetic oligonucleotide
  Sense strand starting at position 2866 of SEQ ID NO: 1887182
aaagguguacguggaaguu

SEQ ID NO: 2454159 - RNA, 19 nt, Artificial Sequence
  Description of Artificial Sequence: Synthetic oligonucleotide
  Antisense strand to SEQ ID NO: 2454158
aacuuccacguacaccuuu

SEQ ID NO: 2454160 - RNA, 19 nt, Artificial Sequence
  Description of Artificial Sequence: Synthetic oligonucleotide
  Sense strand starting at position 2869 of SEQ ID NO: 1887182
gguguacguggaaguucuu

SEQ ID NO: 2454161 - RNA, 19 nt, Artificial Sequence
  Description of Artificial Sequence: Synthetic oligonucleotide
  Antisense strand to SEQ ID NO: 2454160
aagaacuuccacguacacc

SEQ ID NO: 2454162 - RNA, 19 nt, Artificial Sequence
  Description of Artificial Sequence: Synthetic oligonucleotide
  Sense strand starting at position 2904 of SEQ ID NO: 1887182
aagugcuuagcacauggaa

SEQ ID NO: 2454163 - RNA, 19 nt, Artificial Sequence
  Description of Artificial Sequence: Synthetic oligonucleotide
  Antisense strand to SEQ ID NO: 2454162
uuccaugugcuaagcacuu

SEQ ID NO: 2454164 - RNA, 19 nt, Artificial Sequence
  Description of Artificial Sequence: Synthetic oligonucleotide
  Sense strand starting at position 2906 of SEQ ID NO: 1887182
gugcuuagcacauggaagu

SEQ ID NO: 2454165 - RNA, 19 nt, Artificial Sequence
  Description of Artificial Sequence: Synthetic oligonucleotide
  Antisense strand to SEQ ID NO: 2454164
acuuccaugugcuaagcac

SEQ ID NO: 2454166 - RNA, 19 nt, Artificial Sequence
  Description of Artificial Sequence: Synthetic oligonucleotide
  Sense strand starting at position 2930 of SEQ ID NO: 1887182
uaggauuccugagcuggga

SEQ ID NO: 2454167 - RNA, 19 nt, Artificial Sequence
  Description of Artificial Sequence: Synthetic oligonucleotide
  Antisense strand to SEQ ID NO: 2454166
ucccagcucaggaauccua

SEQ ID NO: 2454168 - RNA, 19 nt, Artificial Sequence
  Description of Artificial Sequence: Synthetic oligonucleotide
  Sense strand starting at position 2952 of SEQ ID NO: 1887182
uguccucagccagaauguu

SEQ ID NO: 2454169 - RNA, 19 nt, Artificial Sequence
  Description of Artificial Sequence: Synthetic oligonucleotide
  Antisense strand to SEQ ID NO: 2454168
aacauucuggcugaggaca

SEQ ID NO: 2454170 - RNA, 19 nt, Artificial Sequence
  Description of Artificial Sequence: Synthetic oligonucleotide
  Sense strand starting at position 2977 of SEQ ID NO: 1887182
gggaaacuuucugaagggu

SEQ ID NO: 2454171 - RNA, 19 nt, Artificial Sequence
  Description of Artificial Sequence: Synthetic oligonucleotide
  Antisense strand to SEQ ID NO: 2454170
acccuucagaaaguuuccc

SEQ ID NO: 2454172 - RNA, 19 nt, Artificial Sequence
  Description of Artificial Sequence: Synthetic oligonucleotide
  Sense strand starting at position 3064 of SEQ ID NO: 1887182
ggguguggucauuguguag

SEQ ID NO: 2454173 - RNA, 19 nt, Artificial Sequence
  Description of Artificial Sequence: Synthetic oligonucleotide
  Antisense strand to SEQ ID NO: 2454172
cuacacaaugaccacaccc

SEQ ID NO: 2454174 - RNA, 19 nt, Artificial Sequence
  Description of Artificial Sequence: Synthetic oligonucleotide
  Sense strand starting at position 3067 of SEQ ID NO: 1887182
uguggucauuguguagcau

SEQ ID NO: 2454175 - RNA, 19 nt, Artificial Sequence
  Description of Artificial Sequence: Synthetic oligonucleotide
  Antisense strand to SEQ ID NO: 2454174
augcuacacaaugaccaca

SEQ ID NO: 2454176 - RNA, 19 nt, Artificial Sequence
  Description of Artificial Sequence: Synthetic oligonucleotide
  Sense strand starting at position 3076 of SEQ ID NO: 1887182
uguguagcaucuguaccua

SEQ ID NO: 2454177 - RNA, 19 nt, Artificial Sequence
  Description of Artificial Sequence: Synthetic oligonucleotide
  Antisense strand to SEQ ID NO: 2454176
uagguacagaugcuacaca

SEQ ID NO: 2454178 - RNA, 19 nt, Artificial Sequence
  Description of Artificial Sequence: Synthetic oligonucleotide
  Sense strand starting at position 3258 of SEQ ID NO: 1887182
gcagguagacccugaguga

SEQ ID NO: 2454179 - RNA, 19 nt, Artificial Sequence
  Description of Artificial Sequence: Synthetic oligonucleotide
  Antisense strand to SEQ ID NO: 2454178
ucacucagggucuaccugc

SEQ ID NO: 2454180 - RNA, 19 nt, Artificial Sequence
  Description of Artificial Sequence: Synthetic oligonucleotide
  Sense strand starting at position 23 of SEQ ID NO: 1887183
gagggcuucuaggaugaag

SEQ ID NO: 2454181 - RNA, 19 nt, Artificial Sequence
  Description of Artificial Sequence: Synthetic oligonucleotide
  Antisense strand to SEQ ID NO: 2454180
cuucauccuagaagcccuc

SEQ ID NO: 2454182 - RNA, 19 nt, Artificial Sequence
  Description of Artificial Sequence: Synthetic oligonucleotide
  Sense strand starting at position 25 of SEQ ID NO: 1887183
gggcuucuaggaugaagua

SEQ ID NO: 2454183 - RNA, 19 nt, Artificial Sequence
  Description of Artificial Sequence: Synthetic oligonucleotide
  Antisense strand to SEQ ID NO: 2454182
uacuucauccuagaagccc

SEQ ID NO: 2454184 - RNA, 19 nt, Artificial Sequence
  Description of Artificial Sequence: Synthetic oligonucleotide
  Sense strand starting at position 192 of SEQ ID NO: 1887183
gccuguguuugugccaaca

SEQ ID NO: 2454185 - RNA, 19 nt, Artificial Sequence
  Description of Artificial Sequence: Synthetic oligonucleotide
  Antisense strand to SEQ ID NO: 2454184
uguuggcacaaacacaggc

SEQ ID NO: 2454186 - RNA, 19 nt, Artificial Sequence
  Description of Artificial Sequence: Synthetic oligonucleotide
  Sense strand starting at position 241 of SEQ ID NO: 1887183
gccggagucacacaugaug

SEQ ID NO: 2454187 - RNA, 19 nt, Artificial Sequence
  Description of Artificial Sequence: Synthetic oligonucleotide
  Antisense strand to SEQ ID NO: 2454186
caucaugugugacuccggc

SEQ ID NO: 2454188 - RNA, 19 nt, Artificial Sequence
  Description of Artificial Sequence: Synthetic oligonucleotide
  Sense strand starting at position 281 of SEQ ID NO: 1887183
ggugucucauuccgacaca

SEQ ID NO: 2454189 - RNA, 19 nt, Artificial Sequence
  Description of Artificial Sequence: Synthetic oligonucleotide
  Antisense strand to SEQ ID NO: 2454188
ugugucggaaugagacacc

SEQ ID NO: 2454190 - RNA, 19 nt, Artificial Sequence
  Description of Artificial Sequence: Synthetic oligonucleotide
  Sense strand starting at position 512 of SEQ ID NO: 1887183
aggcgaguucagcgagagu

SEQ ID NO: 2454191 - RNA, 19 nt, Artificial Sequence
  Description of Artificial Sequence: Synthetic oligonucleotide
  Antisense strand to SEQ ID NO: 2454190
acucucgcugaacucgccu

SEQ ID NO: 2454192 - RNA, 19 nt, Artificial Sequence
  Description of Artificial Sequence: Synthetic oligonucleotide
  Sense strand starting at position 523 of SEQ ID NO: 1887183
gcgagaguucagccgcauu

SEQ ID NO: 2454193 - RNA, 19 nt, Artificial Sequence
  Description of Artificial Sequence: Synthetic oligonucleotide
  Antisense strand to SEQ ID NO: 2454192
aaugcggcugaacucucgc

SEQ ID NO: 2454194 - RNA, 19 nt, Artificial Sequence
  Description of Artificial Sequence: Synthetic oligonucleotide
  Sense strand starting at position 534 of SEQ ID NO: 1887183
gccgcauugcauuaggcaa

SEQ ID NO: 2454195 - RNA, 19 nt, Artificial Sequence
  Description of Artificial Sequence: Synthetic oligonucleotide
  Antisense strand to SEQ ID NO: 2454194
uugccuaaugcaaugcggc

SEQ ID NO: 2454196 - RNA, 19 nt, Artificial Sequence
  Description of Artificial Sequence: Synthetic oligonucleotide
  Sense strand starting at position 1915 of SEQ ID NO: 1887183
aagugcaauuuguguuaga

SEQ ID NO: 2454197 - RNA, 19 nt, Artificial Sequence
  Description of Artificial Sequence: Synthetic oligonucleotide
  Antisense strand to SEQ ID NO: 2454196
ucuaacacaaauugcacuu

SEQ ID NO: 2454198 - RNA, 19 nt, Artificial Sequence
  Description of Artificial Sequence: Synthetic oligonucleotide
  Sense strand starting at position 1916 of SEQ ID NO: 1887183
agugcaauuuguguuagau

SEQ ID NO: 2454199 - RNA, 19 nt, Artificial Sequence
  Description of Artificial Sequence: Synthetic oligonucleotide
  Antisense strand to SEQ ID NO: 2454198
aucuaacacaaauugcacu

SEQ ID NO: 2454200 - RNA, 19 nt, Artificial Sequence
  Description of Artificial Sequence: Synthetic oligonucleotide
  Sense strand starting at position 1918 of SEQ ID NO: 1887183
ugcaauuuguguuagauua

SEQ ID NO: 2454201 - RNA, 19 nt, Artificial Sequence
  Description of Artificial Sequence: Synthetic oligonucleotide
  Antisense strand to SEQ ID NO: 2454200
uaaucuaacacaaauugca

SEQ ID NO: 2454202 - RNA, 19 nt, Artificial Sequence
  Description of Artificial Sequence: Synthetic oligonucleotide
  Sense strand starting at position 1948 of SEQ ID NO: 1887183
cuuugagaguuccuucuuu

SEQ ID NO: 2454203 - RNA, 19 nt, Artificial Sequence
  Description of Artificial Sequence: Synthetic oligonucleotide
  Antisense strand to SEQ ID NO: 2454202
aaagaaggaacucucaaag

SEQ ID NO: 2454204 - RNA, 19 nt, Artificial Sequence
  Description of Artificial Sequence: Synthetic oligonucleotide
  Sense strand starting at position 1993 of SEQ ID NO: 1887183
ucacuucuuccaggagaaa

SEQ ID NO: 2454205 - RNA, 19 nt, Artificial Sequence
  Description of Artificial Sequence: Synthetic oligonucleotide
  Antisense strand to SEQ ID NO: 2454204
uuucuccuggaagaaguga

SEQ ID NO: 2454206 - RNA, 19 nt, Artificial Sequence
  Description of Artificial Sequence: Synthetic oligonucleotide
  Sense strand starting at position 2040 of SEQ ID NO: 1887183
auaucuucuugccuggaau

SEQ ID NO: 2454207 - RNA, 19 nt, Artificial Sequence
  Description of Artificial Sequence: Synthetic oligonucleotide
  Antisense strand to SEQ ID NO: 2454206
auuccaggcaagaagauau

SEQ ID NO: 2454208 - RNA, 19 nt, Artificial Sequence
  Description of Artificial Sequence: Synthetic oligonucleotide
  Sense strand starting at position 2206 of SEQ ID NO: 1887183
ccuugcucuugcgucauua

SEQ ID NO: 2454209 - RNA, 19 nt, Artificial Sequence
  Description of Artificial Sequence: Synthetic oligonucleotide
  Antisense strand to SEQ ID NO: 2454208
uaaugacgcaagagcaagg

SEQ ID NO: 2454210 - RNA, 19 nt, Artificial Sequence
  Description of Artificial Sequence: Synthetic oligonucleotide
  Sense strand starting at position 2208 of SEQ ID NO: 1887183
uugcucuugcgucauuaga

SEQ ID NO: 2454211 - RNA, 19 nt, Artificial Sequence
  Description of Artificial Sequence: Synthetic oligonucleotide
  Antisense strand to SEQ ID NO: 2454210
ucuaaugacgcaagagcaa

SEQ ID NO: 2454212 - RNA, 19 nt, Artificial Sequence
  Description of Artificial Sequence: Synthetic oligonucleotide
  Sense strand starting at position 2210 of SEQ ID NO: 1887183
gcucuugcgucauuagagu

SEQ ID NO: 2454213 - RNA, 19 nt, Artificial Sequence
  Description of Artificial Sequence: Synthetic oligonucleotide
  Antisense strand to SEQ ID NO: 2454212
acucuaaugacgcaagagc

SEQ ID NO: 2454214 - RNA, 19 nt, Artificial Sequence
  Description of Artificial Sequence: Synthetic oligonucleotide
  Sense strand starting at position 2216 of SEQ ID NO: 1887183
gcgucauuagagugggugu

SEQ ID NO: 2454215 - RNA, 19 nt, Artificial Sequence
  Description of Artificial Sequence: Synthetic oligonucleotide
  Antisense strand to SEQ ID NO: 2454214
acacccacucuaaugacgc

SEQ ID NO: 2454216 - RNA, 19 nt, Artificial Sequence
  Description of Artificial Sequence: Synthetic oligonucleotide
  Sense strand starting at position 2218 of SEQ ID NO: 1887183
gucauuagaguggguguca

SEQ ID NO: 2454217 - RNA, 19 nt, Artificial Sequence
  Description of Artificial Sequence: Synthetic oligonucleotide
  Antisense strand to SEQ ID NO: 2454216
ugacacccacucuaaugac

SEQ ID NO: 2454218 - RNA, 19 nt, Artificial Sequence
  Description of Artificial Sequence: Synthetic oligonucleotide
  Sense strand starting at position 2238 of SEQ ID NO: 1887183
gggagcacucagugucuuu

SEQ ID NO: 2454219 - RNA, 19 nt, Artificial Sequence
  Description of Artificial Sequence: Synthetic oligonucleotide
  Antisense strand to SEQ ID NO: 2454218
aaagacacugagugcuccc

SEQ ID NO: 2454220 - RNA, 19 nt, Artificial Sequence
  Description of Artificial Sequence: Synthetic oligonucleotide
  Sense strand starting at position 2243 of SEQ ID NO: 1887183
cacucagugucuuugguau

SEQ ID NO: 2454221 - RNA, 19 nt, Artificial Sequence
  Description of Artificial Sequence: Synthetic oligonucleotide
  Antisense strand to SEQ ID NO: 2454220
auaccaaagacacugagug

SEQ ID NO: 2454222 - RNA, 19 nt, Artificial Sequence
  Description of Artificial Sequence: Synthetic oligonucleotide
  Sense strand starting at position 2382 of SEQ ID NO: 1887183
ggcugucaucuuugaggcu

SEQ ID NO: 2454223 - RNA, 19 nt, Artificial Sequence
  Description of Artificial Sequence: Synthetic oligonucleotide
  Antisense strand to SEQ ID NO: 2454222
agccucaaagaugacagcc

SEQ ID NO: 2454224 - RNA, 19 nt, Artificial Sequence
  Description of Artificial Sequence: Synthetic oligonucleotide
  Sense strand starting at position 2383 of SEQ ID NO: 1887183
gcugucaucuuugaggcuu

SEQ ID NO: 2454225 - RNA, 19 nt, Artificial Sequence
  Description of Artificial Sequence: Synthetic oligonucleotide
  Antisense strand to SEQ ID NO: 2454224
aagccucaaagaugacagc

SEQ ID NO: 2454226 - RNA, 19 nt, Artificial Sequence
  Description of Artificial Sequence: Synthetic oligonucleotide
  Sense strand starting at position 2423 of SEQ ID NO: 1887183
agaagcugcucuggugaga

SEQ ID NO: 2454227 - RNA, 19 nt, Artificial Sequence
  Description of Artificial Sequence: Synthetic oligonucleotide
  Antisense strand to SEQ ID NO: 2454226
ucucaccagagcagcuucu

SEQ ID NO: 2454228 - RNA, 19 nt, Artificial Sequence
  Description of Artificial Sequence: Synthetic oligonucleotide
  Sense strand starting at position 2426 of SEQ ID NO: 1887183
agcugcucuggugagaaga

SEQ ID NO: 2454229 - RNA, 19 nt, Artificial Sequence
  Description of Artificial Sequence: Synthetic oligonucleotide
  Antisense strand to SEQ ID NO: 2454228
ucuucucaccagagcagcu

SEQ ID NO: 2454230 - RNA, 19 nt, Artificial Sequence
  Description of Artificial Sequence: Synthetic oligonucleotide
  Sense strand starting at position 2428 of SEQ ID NO: 1887183
cugcucuggugagaagaau

SEQ ID NO: 2454231 - RNA, 19 nt, Artificial Sequence
  Description of Artificial Sequence: Synthetic oligonucleotide
  Antisense strand to SEQ ID NO: 2454230
auucuucucaccagagcag

SEQ ID NO: 2454232 - RNA, 19 nt, Artificial Sequence
  Description of Artificial Sequence: Synthetic oligonucleotide
  Sense strand starting at position 2630 of SEQ ID NO: 1887183
ugaugagaauccuagcauc

SEQ ID NO: 2454233 - RNA, 19 nt, Artificial Sequence
  Description of Artificial Sequence: Synthetic oligonucleotide
  Antisense strand to SEQ ID NO: 2454232
gaugcuaggauucucauca

SEQ ID NO: 2454234 - RNA, 19 nt, Artificial Sequence
  Description of Artificial Sequence: Synthetic oligonucleotide
  Sense strand starting at position 2821 of SEQ ID NO: 1887183
ggguuauuguuagauggcu

SEQ ID NO: 2454235 - RNA, 19 nt, Artificial Sequence
  Description of Artificial Sequence: Synthetic oligonucleotide
  Antisense strand to SEQ ID NO: 2454234
agccaucuaacaauaaccc

SEQ ID NO: 2454236 - RNA, 19 nt, Artificial Sequence
  Description of Artificial Sequence: Synthetic oligonucleotide
  Sense strand starting at position 2823 of SEQ ID NO: 1887183
guuauuguuagauggcuca

SEQ ID NO: 2454237 - RNA, 19 nt, Artificial Sequence
  Description of Artificial Sequence: Synthetic oligonucleotide
  Antisense strand to SEQ ID NO: 2454236
ugagccaucuaacaauaac

SEQ ID NO: 2454238 - RNA, 19 nt, Artificial Sequence
  Description of Artificial Sequence: Synthetic oligonucleotide
  Sense strand starting at position 2883 of SEQ ID NO: 1887183
gaagcucuuccguggagga

SEQ ID NO: 2454239 - RNA, 19 nt, Artificial Sequence
  Description of Artificial Sequence: Synthetic oligonucleotide
  Antisense strand to SEQ ID NO: 2454238
uccuccacggaagagcuuc

SEQ ID NO: 2454240 - RNA, 19 nt, Artificial Sequence
  Description of Artificial Sequence: Synthetic oligonucleotide
  Sense strand starting at position 2884 of SEQ ID NO: 1887183
aagcucuuccguggaggau

SEQ ID NO: 2454241 - RNA, 19 nt, Artificial Sequence
  Description of Artificial Sequence: Synthetic oligonucleotide
  Antisense strand to SEQ ID NO: 2454240
auccuccacggaagagcuu

SEQ ID NO: 2454242 - RNA, 19 nt, Artificial Sequence
  Description of Artificial Sequence: Synthetic oligonucleotide
  Sense strand starting at position 3020 of SEQ ID NO: 1887183
cccucuugcugggagaaga

SEQ ID NO: 2454243 - RNA, 19 nt, Artificial Sequence
  Description of Artificial Sequence: Synthetic oligonucleotide
  Antisense strand to SEQ ID NO: 2454242
ucuucucccagcaagaggg

SEQ ID NO: 2454244 - RNA, 19 nt, Artificial Sequence
  Description of Artificial Sequence: Synthetic oligonucleotide
  Sense strand starting at position 3171 of SEQ ID NO: 1887183
agguaucacccuugacuuu

SEQ ID NO: 2454245 - RNA, 19 nt, Artificial Sequence
  Description of Artificial Sequence: Synthetic oligonucleotide
  Antisense strand to SEQ ID NO: 2454244
aaagucaagggugauaccu

SEQ ID NO: 2454246 - RNA, 19 nt, Artificial Sequence
  Description of Artificial Sequence: Synthetic oligonucleotide
  Sense strand starting at position 3178 of SEQ ID NO: 1887183
acccuugacuuuggaagaa

SEQ ID NO: 2454247 - RNA, 19 nt, Artificial Sequence
  Description of Artificial Sequence: Synthetic oligonucleotide
  Antisense strand to SEQ ID NO: 2454246
uucuuccaaagucaagggu

SEQ ID NO: 2454248 - RNA, 19 nt, Artificial Sequence
  Description of Artificial Sequence: Synthetic oligonucleotide
  Sense strand starting at position 3340 of SEQ ID NO: 1887183
gagagaagcugggaucuga

SEQ ID NO: 2454249 - RNA, 19 nt, Artificial Sequence
  Description of Artificial Sequence: Synthetic oligonucleotide
  Antisense strand to SEQ ID NO: 2454248
ucagaucccagcuucucuc

SEQ ID NO: 2454250 - RNA, 19 nt, Artificial Sequence
  Description of Artificial Sequence: Synthetic oligonucleotide
  Sense strand starting at position 3594 of SEQ ID NO: 1887183
ugcauauauaagugaguga

SEQ ID NO: 2454251 - RNA, 19 nt, Artificial Sequence
  Description of Artificial Sequence: Synthetic oligonucleotide
  Antisense strand to SEQ ID NO: 2454250
ucacucacuuauauaugca

SEQ ID NO: 2454252 - RNA, 19 nt, Artificial Sequence
  Description of Artificial Sequence: Synthetic oligonucleotide
  Sense strand starting at position 3603 of SEQ ID NO: 1887183
aagugagugaggugucagu

SEQ ID NO: 2454253 - RNA, 19 nt, Artificial Sequence
  Description of Artificial Sequence: Synthetic oligonucleotide
  Antisense strand to SEQ ID NO: 2454252
acugacaccucacucacuu

SEQ ID NO: 2454254 - RNA, 19 nt, Artificial Sequence
  Description of Artificial Sequence: Synthetic oligonucleotide
  Sense strand starting at position 3639 of SEQ ID NO: 1887183
cugugagguugggagugau

SEQ ID NO: 2454255 - RNA, 19 nt, Artificial Sequence
  Description of Artificial Sequence: Synthetic oligonucleotide
  Antisense strand to SEQ ID NO: 2454254
aucacucccaaccucacag

SEQ ID NO: 2454256 - RNA, 19 nt, Artificial Sequence
  Description of Artificial Sequence: Synthetic oligonucleotide
  Sense strand starting at position 3935 of SEQ ID NO: 1887183
gcccucauuucggugcauu

SEQ ID NO: 2454257 - RNA, 19 nt, Artificial Sequence
  Description of Artificial Sequence: Synthetic oligonucleotide
  Antisense strand to SEQ ID NO: 2454256
aaugcaccgaaaugagggc

SEQ ID NO: 2454258 - RNA, 19 nt, Artificial Sequence
  Description of Artificial Sequence: Synthetic oligonucleotide
  Sense strand starting at position 3936 of SEQ ID NO: 1887183
cccucauuucggugcauua

SEQ ID NO: 2454259 - RNA, 19 nt, Artificial Sequence
  Description of Artificial Sequence: Synthetic oligonucleotide
  Antisense strand to SEQ ID NO: 2454258
uaaugcaccgaaaugaggg

SEQ ID NO: 2454260 - RNA, 19 nt, Artificial Sequence
  Description of Artificial Sequence: Synthetic oligonucleotide
  Sense strand starting at position 633 of SEQ ID NO: 1887185
ugccacaucuggcugauau

SEQ ID NO: 2454261 - RNA, 19 nt, Artificial Sequence
  Description of Artificial Sequence: Synthetic oligonucleotide
  Antisense strand to SEQ ID NO: 2454260
auaucagccagauguggca

SEQ ID NO: 2454262 - RNA, 19 nt, Artificial Sequence
  Description of Artificial Sequence: Synthetic oligonucleotide
  Sense strand starting at position 1094 of SEQ ID NO: 1887185
ccauaauucuugucaggaa

SEQ ID NO: 2454263 - RNA, 19 nt, Artificial Sequence
  Description of Artificial Sequence: Synthetic oligonucleotide
  Antisense strand to SEQ ID NO: 2454262
uuccugacaagaauuaugg

SEQ ID NO: 2454264 - RNA, 19 nt, Artificial Sequence
  Description of Artificial Sequence: Synthetic oligonucleotide
  Sense strand starting at position 1126 of SEQ ID NO: 1887185
gcucaaccaccuugaguuu

SEQ ID NO: 2454265 - RNA, 19 nt, Artificial Sequence
  Description of Artificial Sequence: Synthetic oligonucleotide
  Antisense strand to SEQ ID NO: 2454264
aaacucaaggugguugagc

SEQ ID NO: 2454266 - RNA, 19 nt, Artificial Sequence
  Description of Artificial Sequence: Synthetic oligonucleotide
  Sense strand starting at position 1176 of SEQ ID NO: 1887185
ggaagauuaguguggcaau

SEQ ID NO: 2454267 - RNA, 19 nt, Artificial Sequence
  Description of Artificial Sequence: Synthetic oligonucleotide
  Antisense strand to SEQ ID NO: 2454266
auugccacacuaaucuucc

SEQ ID NO: 2454268 - RNA, 19 nt, Artificial Sequence
  Description of Artificial Sequence: Synthetic oligonucleotide
  Sense strand starting at position 1358 of SEQ ID NO: 1887185
gcagcccuugcagaauaaa

SEQ ID NO: 2454269 - RNA, 19 nt, Artificial Sequence
  Description of Artificial Sequence: Synthetic oligonucleotide
  Antisense strand to SEQ ID NO: 2454268
uuuauucugcaagggcugc

SEQ ID NO: 2454270 - RNA, 19 nt, Artificial Sequence
  Description of Artificial Sequence: Synthetic oligonucleotide
  Sense strand starting at position 1557 of SEQ ID NO: 1887185
accucucuucgcgaaggau

SEQ ID NO: 2454271 - RNA, 19 nt, Artificial Sequence
  Description of Artificial Sequence: Synthetic oligonucleotide
  Antisense strand to SEQ ID NO: 2454270
auccuucgcgaagagaggu

SEQ ID NO: 2454272 - RNA, 19 nt, Artificial Sequence
  Description of Artificial Sequence: Synthetic oligonucleotide
  Sense strand starting at position 1670 of SEQ ID NO: 1887185
gagauaccucuccgggacu

SEQ ID NO: 2454273 - RNA, 19 nt, Artificial Sequence
  Description of Artificial Sequence: Synthetic oligonucleotide
  Antisense strand to SEQ ID NO: 2454272
agucccggagagguaucuc

SEQ ID NO: 2454274 - RNA, 19 nt, Artificial Sequence
  Description of Artificial Sequence: Synthetic oligonucleotide
  Sense strand starting at position 1739 of SEQ ID NO: 1887185
uuaagaguccuucagcgga

SEQ ID NO: 2454275 - RNA, 19 nt, Artificial Sequence
  Description of Artificial Sequence: Synthetic oligonucleotide
  Antisense strand to SEQ ID NO: 2454274
uccgcugaaggacucuuaa

SEQ ID NO: 2454276 - RNA, 19 nt, Artificial Sequence
  Description of Artificial Sequence: Synthetic oligonucleotide
  Sense strand starting at position 2128 of SEQ ID NO: 1887185
gccacaagaucccugaguu

SEQ ID NO: 2454277 - RNA, 19 nt, Artificial Sequence
  Description of Artificial Sequence: Synthetic oligonucleotide
  Antisense strand to SEQ ID NO: 2454276
aacucagggaucuuguggc

SEQ ID NO: 2454278 - RNA, 19 nt, Artificial Sequence
  Description of Artificial Sequence: Synthetic oligonucleotide
  Sense strand starting at position 2129 of SEQ ID NO: 1887185
ccacaagaucccugaguuu

SEQ ID NO: 2454279 - RNA, 19 nt, Artificial Sequence
  Description of Artificial Sequence: Synthetic oligonucleotide
  Antisense strand to SEQ ID NO: 2454278
aaacucagggaucuugugg

SEQ ID NO: 2454280 - RNA, 19 nt, Artificial Sequence
  Description of Artificial Sequence: Synthetic oligonucleotide
  Sense strand starting at position 2132 of SEQ ID NO: 1887185
caagaucccugaguuuaga

SEQ ID NO: 2454281 - RNA, 19 nt, Artificial Sequence
  Description of Artificial Sequence: Synthetic oligonucleotide
  Antisense strand to SEQ ID NO: 2454280
ucuaaacucagggaucuug

SEQ ID NO: 2454282 - RNA, 19 nt, Artificial Sequence
  Description of Artificial Sequence: Synthetic oligonucleotide
  Sense strand starting at position 2164 of SEQ ID NO: 1887185
gcauguuuaggguaaaguc

SEQ ID NO: 2454283 - RNA, 19 nt, Artificial Sequence
  Description of Artificial Sequence: Synthetic oligonucleotide
  Antisense strand to SEQ ID NO: 2454282
gacuuuacccuaaacaugc

SEQ ID NO: 2454284 - RNA, 19 nt, Artificial Sequence
  Description of Artificial Sequence: Synthetic oligonucleotide
  Sense strand starting at position 2206 of SEQ ID NO: 1887185
aggguagggacguguuuau

SEQ ID NO: 2454285 - RNA, 19 nt, Artificial Sequence
  Description of Artificial Sequence: Synthetic oligonucleotide
  Antisense strand to SEQ ID NO: 2454284
auaaacacgucccuacccu

SEQ ID NO: 2454286 - RNA, 19 nt, Artificial Sequence
  Description of Artificial Sequence: Synthetic oligonucleotide
  Sense strand starting at position 2210 of SEQ ID NO: 1887185
uagggacguguuuauagaa

SEQ ID NO: 2454287 - RNA, 19 nt, Artificial Sequence
  Description of Artificial Sequence: Synthetic oligonucleotide
  Antisense strand to SEQ ID NO: 2454286
uucuauaaacacgucccua

SEQ ID NO: 2454288 - RNA, 19 nt, Artificial Sequence
  Description of Artificial Sequence: Synthetic oligonucleotide
  Sense strand starting at position 2269 of SEQ ID NO: 1887185
aguauuagcacuuguggga

SEQ ID NO: 2454289 - RNA, 19 nt, Artificial Sequence
  Description of Artificial Sequence: Synthetic oligonucleotide
  Antisense strand to SEQ ID NO: 2454288
ucccacaagugcuaauacu

SEQ ID NO: 2454290 - RNA, 19 nt, Artificial Sequence
  Description of Artificial Sequence: Synthetic oligonucleotide
  Sense strand starting at position 2273 of SEQ ID NO: 1887185
uuagcacuugugggaaaua

SEQ ID NO: 2454291 - RNA, 19 nt, Artificial Sequence
  Description of Artificial Sequence: Synthetic oligonucleotide
  Antisense strand to SEQ ID NO: 2454290
uauuucccacaagugcuaa

SEQ ID NO: 2454292 - RNA, 19 nt, Artificial Sequence
  Description of Artificial Sequence: Synthetic oligonucleotide
  Sense strand starting at position 2376 of SEQ ID NO: 1887185
aacagucucgcaugaaauc

SEQ ID NO: 2454293 - RNA, 19 nt, Artificial Sequence
  Description of Artificial Sequence: Synthetic oligonucleotide
  Antisense strand to SEQ ID NO: 2454292
gauuucaugcgagacuguu

SEQ ID NO: 2454294 - RNA, 19 nt, Artificial Sequence
  Description of Artificial Sequence: Synthetic oligonucleotide
  Sense strand starting at position 2431 of SEQ ID NO: 1887185
ggugaaucguguaugugua

SEQ ID NO: 2454295 - RNA, 19 nt, Artificial Sequence
  Description of Artificial Sequence: Synthetic oligonucleotide
  Antisense strand to SEQ ID NO: 2454294
uacacauacacgauucacc

SEQ ID NO: 2454296 - RNA, 19 nt, Artificial Sequence
  Description of Artificial Sequence: Synthetic oligonucleotide
  Sense strand starting at position 2582 of SEQ ID NO: 1887185
agcugauggugucugagaa

SEQ ID NO: 2454297 - RNA, 19 nt, Artificial Sequence
  Description of Artificial Sequence: Synthetic oligonucleotide
  Antisense strand to SEQ ID NO: 2454296
uucucagacaccaucagcu

SEQ ID NO: 2454298 - RNA, 19 nt, Artificial Sequence
  Description of Artificial Sequence: Synthetic oligonucleotide
  Sense strand starting at position 2583 of SEQ ID NO: 1887185
gcugauggugucugagaag

SEQ ID NO: 2454299 - RNA, 19 nt, Artificial Sequence
  Description of Artificial Sequence: Synthetic oligonucleotide
  Antisense strand to SEQ ID NO: 2454298
cuucucagacaccaucagc

SEQ ID NO: 2454300 - RNA, 19 nt, Artificial Sequence
  Description of Artificial Sequence: Synthetic oligonucleotide
  Sense strand starting at position 2629 of SEQ ID NO: 1887185
ggaggaguguaaucaacug

SEQ ID NO: 2454301 - RNA, 19 nt, Artificial Sequence
  Description of Artificial Sequence: Synthetic oligonucleotide
  Antisense strand to SEQ ID NO: 2454300
caguugauuacacuccucc

SEQ ID NO: 2454302 - RNA, 19 nt, Artificial Sequence
  Description of Artificial Sequence: Synthetic oligonucleotide
  Sense strand starting at position 2679 of SEQ ID NO: 1887185
cugauuuacugagacagug

SEQ ID NO: 2454303 - RNA, 19 nt, Artificial Sequence
  Description of Artificial Sequence: Synthetic oligonucleotide
  Antisense strand to SEQ ID NO: 2454302
cacugucucaguaaaucag

SEQ ID NO: 2454304 - RNA, 19 nt, Artificial Sequence
  Description of Artificial Sequence: Synthetic oligonucleotide
  Sense strand starting at position 2689 of SEQ ID NO: 1887185
gagacaguguuauugaaau

SEQ ID NO: 2454305 - RNA, 19 nt, Artificial Sequence
  Description of Artificial Sequence: Synthetic oligonucleotide
  Antisense strand to SEQ ID NO: 2454304
auuucaauaacacugucuc

SEQ ID NO: 2454306 - RNA, 19 nt, Artificial Sequence
  Description of Artificial Sequence: Synthetic oligonucleotide
  Sense strand starting at position 2695 of SEQ ID NO: 1887185
guguuauugaaauaggcaa

SEQ ID NO: 2454307 - RNA, 19 nt, Artificial Sequence
  Description of Artificial Sequence: Synthetic oligonucleotide
  Antisense strand to SEQ ID NO: 2454306
uugccuauuucaauaacac

SEQ ID NO: 2454308 - RNA, 19 nt, Artificial Sequence
  Description of Artificial Sequence: Synthetic oligonucleotide
  Sense strand starting at position 2855 of SEQ ID NO: 1887185
cugguugggucaaggauga

SEQ ID NO: 2454309 - RNA, 19 nt, Artificial Sequence
  Description of Artificial Sequence: Synthetic oligonucleotide
  Antisense strand to SEQ ID NO: 2454308
ucauccuugacccaaccag

SEQ ID NO: 2454310 - RNA, 19 nt, Artificial Sequence
  Description of Artificial Sequence: Synthetic oligonucleotide
  Sense strand starting at position 2891 of SEQ ID NO: 1887185
gcuuguguucuugugcuga

SEQ ID NO: 2454311 - RNA, 19 nt, Artificial Sequence
  Description of Artificial Sequence: Synthetic oligonucleotide
  Antisense strand to SEQ ID NO: 2454310
ucagcacaagaacacaagc

SEQ ID NO: 2454312 - RNA, 19 nt, Artificial Sequence
  Description of Artificial Sequence: Synthetic oligonucleotide
  Sense strand starting at position 3031 of SEQ ID NO: 1887185
aauaguaauguugaaagca

SEQ ID NO: 2454313 - RNA, 19 nt, Artificial Sequence
  Description of Artificial Sequence: Synthetic oligonucleotide
  Antisense strand to SEQ ID NO: 2454312
ugcuuucaacauuacuauu

SEQ ID NO: 2454314 - RNA, 19 nt, Artificial Sequence
  Description of Artificial Sequence: Synthetic oligonucleotide
  Sense strand starting at position 3040 of SEQ ID NO: 1887185
guugaaagcaguuaguuag

SEQ ID NO: 2454315 - RNA, 19 nt, Artificial Sequence
  Description of Artificial Sequence: Synthetic oligonucleotide
  Antisense strand to SEQ ID NO: 2454314
cuaacuaacugcuuucaac

SEQ ID NO: 2454316 - RNA, 19 nt, Artificial Sequence
  Description of Artificial Sequence: Synthetic oligonucleotide
  Sense strand starting at position 3050 of SEQ ID NO: 1887185
guuaguuagcuuggacaca

SEQ ID NO: 2454317 - RNA, 19 nt, Artificial Sequence
  Description of Artificial Sequence: Synthetic oligonucleotide
  Antisense strand to SEQ ID NO: 2454316
uguguccaagcuaacuaac

SEQ ID NO: 2454318 - RNA, 19 nt, Artificial Sequence
  Description of Artificial Sequence: Synthetic oligonucleotide
  Sense strand starting at position 3347 of SEQ ID NO: 1887185
ggaugaaguugcuucuacu

SEQ ID NO: 2454319 - RNA, 19 nt, Artificial Sequence
  Description of Artificial Sequence: Synthetic oligonucleotide
  Antisense strand to SEQ ID NO: 2454318
aguagaagcaacuucaucc

SEQ ID NO: 2454320 - RNA, 19 nt, Artificial Sequence
  Description of Artificial Sequence: Synthetic oligonucleotide
  Sense strand starting at position 3547 of SEQ ID NO: 1887185
caagcugaguucuccaaga

SEQ ID NO: 2454321 - RNA, 19 nt, Artificial Sequence
  Description of Artificial Sequence: Synthetic oligonucleotide
  Antisense strand to SEQ ID NO: 2454320
ucuuggagaacucagcuug

SEQ ID NO: 2454322 - RNA, 19 nt, Artificial Sequence
  Description of Artificial Sequence: Synthetic oligonucleotide
  Sense strand starting at position 3549 of SEQ ID NO: 1887185
agcugaguucuccaagaca

SEQ ID NO: 2454323 - RNA, 19 nt, Artificial Sequence
  Description of Artificial Sequence: Synthetic oligonucleotide
  Antisense strand to SEQ ID NO: 2454322
ugucuuggagaacucagcu

SEQ ID NO: 2454324 - RNA, 19 nt, Artificial Sequence
  Description of Artificial Sequence: Synthetic oligonucleotide
  Sense strand starting at position 3552 of SEQ ID NO: 1887185
ugaguucuccaagacagcu

SEQ ID NO: 2454325 - RNA, 19 nt, Artificial Sequence
  Description of Artificial Sequence: Synthetic oligonucleotide
  Antisense strand to SEQ ID NO: 2454324
agcugucuuggagaacuca

SEQ ID NO: 2454326 - RNA, 19 nt, Artificial Sequence
  Description of Artificial Sequence: Synthetic oligonucleotide
  Sense strand starting at position 3562 of SEQ ID NO: 1887185
aagacagcugucggacuaa

SEQ ID NO: 2454327 - RNA, 19 nt, Artificial Sequence
  Description of Artificial Sequence: Synthetic oligonucleotide
  Antisense strand to SEQ ID NO: 2454326
uuaguccgacagcugucuu

SEQ ID NO: 2454328 - RNA, 19 nt, Artificial Sequence
  Description of Artificial Sequence: Synthetic oligonucleotide
  Sense strand starting at position 3713 of SEQ ID NO: 1887185
guccacgcuccuuaaucau

SEQ ID NO: 2454329 - RNA, 19 nt, Artificial Sequence
  Description of Artificial Sequence: Synthetic oligonucleotide
  Antisense strand to SEQ ID NO: 2454328
augauuaaggagcguggac

SEQ ID NO: 2454330 - RNA, 19 nt, Artificial Sequence
  Description of Artificial Sequence: Synthetic oligonucleotide
  Sense strand starting at position 3723 of SEQ ID NO: 1887185
cuuaaucaucuuggaggua

SEQ ID NO: 2454331 - RNA, 19 nt, Artificial Sequence
  Description of Artificial Sequence: Synthetic oligonucleotide
  Antisense strand to SEQ ID NO: 2454330
uaccuccaagaugauuaag

SEQ ID NO: 2454332 - RNA, 19 nt, Artificial Sequence
  Description of Artificial Sequence: Synthetic oligonucleotide
  Sense strand starting at position 3770 of SEQ ID NO: 1887185
acaacuacagaguguuaua

SEQ ID NO: 2454333 - RNA, 19 nt, Artificial Sequence
  Description of Artificial Sequence: Synthetic oligonucleotide
  Antisense strand to SEQ ID NO: 2454332
uauaacacucuguaguugu

SEQ ID NO: 2454334 - RNA, 19 nt, Artificial Sequence
  Description of Artificial Sequence: Synthetic oligonucleotide
  Sense strand starting at position 3855 of SEQ ID NO: 1887185
guggccucugucuacauaa

SEQ ID NO: 2454335 - RNA, 19 nt, Artificial Sequence
  Description of Artificial Sequence: Synthetic oligonucleotide
  Antisense strand to SEQ ID NO: 2454334
uuauguagacagaggccac

SEQ ID NO: 2454336 - RNA, 19 nt, Artificial Sequence
  Description of Artificial Sequence: Synthetic oligonucleotide
  Sense strand starting at position 3857 of SEQ ID NO: 1887185
ggccucugucuacauaauu

SEQ ID NO: 2454337 - RNA, 19 nt, Artificial Sequence
  Description of Artificial Sequence: Synthetic oligonucleotide
  Antisense strand to SEQ ID NO: 2454336
aauuauguagacagaggcc

SEQ ID NO: 2454338 - RNA, 19 nt, Artificial Sequence
  Description of Artificial Sequence: Synthetic oligonucleotide
  Sense strand starting at position 3967 of SEQ ID NO: 1887185
ggacuauuaucuuuguuuc

SEQ ID NO: 2454339 - RNA, 19 nt, Artificial Sequence
  Description of Artificial Sequence: Synthetic oligonucleotide
  Antisense strand to SEQ ID NO: 2454338
gaaacaaagauaauagucc

SEQ ID NO: 2454340 - RNA, 19 nt, Artificial Sequence
  Description of Artificial Sequence: Synthetic oligonucleotide
  Sense strand starting at position 61 of SEQ ID NO: 1887184
gagccauggugaguaugau

SEQ ID NO: 2454341 - RNA, 19 nt, Artificial Sequence
  Description of Artificial Sequence: Synthetic oligonucleotide
  Antisense strand to SEQ ID NO: 2454340
aucauacucaccauggcuc

SEQ ID NO: 2454342 - RNA, 19 nt, Artificial Sequence
  Description of Artificial Sequence: Synthetic oligonucleotide
  Sense strand starting at position 98 of SEQ ID NO: 1887184
augauacagucuccuuuau

SEQ ID NO: 2454343 - RNA, 19 nt, Artificial Sequence
  Description of Artificial Sequence: Synthetic oligonucleotide
  Antisense strand to SEQ ID NO: 2454342
auaaaggagacuguaucau

SEQ ID NO: 2454344 - RNA, 19 nt, Artificial Sequence
  Description of Artificial Sequence: Synthetic oligonucleotide
  Sense strand starting at position 113 of SEQ ID NO: 1887184
uuauguaacagcuggcaga

SEQ ID NO: 2454345 - RNA, 19 nt, Artificial Sequence
  Description of Artificial Sequence: Synthetic oligonucleotide
  Antisense strand to SEQ ID NO: 2454344
ucugccagcuguuacauaa

SEQ ID NO: 2454346 - RNA, 19 nt, Artificial Sequence
  Description of Artificial Sequence: Synthetic oligonucleotide
  Sense strand starting at position 126 of SEQ ID NO: 1887184
ggcagaagaccuggucaca

SEQ ID NO: 2454347 - RNA, 19 nt, Artificial Sequence
  Description of Artificial Sequence: Synthetic oligonucleotide
  Antisense strand to SEQ ID NO: 2454346
ugugaccaggucuucugcc

SEQ ID NO: 2454348 - RNA, 19 nt, Artificial Sequence
  Description of Artificial Sequence: Synthetic oligonucleotide
  Sense strand starting at position 1110 of SEQ ID NO: 1887184
ugccacaucuggcugauau

SEQ ID NO: 2454349 - RNA, 19 nt, Artificial Sequence
  Description of Artificial Sequence: Synthetic oligonucleotide
  Antisense strand to SEQ ID NO: 2454348
auaucagccagauguggca

SEQ ID NO: 2454350 - RNA, 19 nt, Artificial Sequence
  Description of Artificial Sequence: Synthetic oligonucleotide
  Sense strand starting at position 1111 of SEQ ID NO: 1887184
gccacaucuggcugauauu

SEQ ID NO: 2454351 - RNA, 19 nt, Artificial Sequence
  Description of Artificial Sequence: Synthetic oligonucleotide
  Antisense strand to SEQ ID NO: 2454350
aauaucagccagauguggc

SEQ ID NO: 2454352 - RNA, 19 nt, Artificial Sequence
  Description of Artificial Sequence: Synthetic oligonucleotide
  Sense strand starting at position 1571 of SEQ ID NO: 1887184
ccauaauucuugucaggaa

SEQ ID NO: 2454353 - RNA, 19 nt, Artificial Sequence
  Description of Artificial Sequence: Synthetic oligonucleotide
  Antisense strand to SEQ ID NO: 2454352
uuccugacaagaauuaugg

SEQ ID NO: 2454354 - RNA, 19 nt, Artificial Sequence
  Description of Artificial Sequence: Synthetic oligonucleotide
  Sense strand starting at position 1603 of SEQ ID NO: 1887184
gcucaaccaccuugaguuu

SEQ ID NO: 2454355 - RNA, 19 nt, Artificial Sequence
  Description of Artificial Sequence: Synthetic oligonucleotide
  Antisense strand to SEQ ID NO: 2454354
aaacucaaggugguugagc

SEQ ID NO: 2454356 - RNA, 19 nt, Artificial Sequence
  Description of Artificial Sequence: Synthetic oligonucleotide
  Sense strand starting at position 1612 of SEQ ID NO: 1887184
ccuugaguuugaguuucuu

SEQ ID NO: 2454357 - RNA, 19 nt, Artificial Sequence
  Description of Artificial Sequence: Synthetic oligonucleotide
  Antisense strand to SEQ ID NO: 2454356
aagaaacucaaacucaagg

SEQ ID NO: 2454358 - RNA, 19 nt, Artificial Sequence
  Description of Artificial Sequence: Synthetic oligonucleotide
  Sense strand starting at position 1653 of SEQ ID NO: 1887184
ggaagauuaguguggcaau

SEQ ID NO: 2454359 - RNA, 19 nt, Artificial Sequence
  Description of Artificial Sequence: Synthetic oligonucleotide
  Antisense strand to SEQ ID NO: 2454358
auugccacacuaaucuucc

SEQ ID NO: 2454360 - RNA, 19 nt, Artificial Sequence
  Description of Artificial Sequence: Synthetic oligonucleotide
  Sense strand starting at position 1835 of SEQ ID NO: 1887184
gcagcccuugcagaauaaa

SEQ ID NO: 2454361 - RNA, 19 nt, Artificial Sequence
  Description of Artificial Sequence: Synthetic oligonucleotide
  Antisense strand to SEQ ID NO: 2454360
uuuauucugcaagggcugc

SEQ ID NO: 2454362 - RNA, 19 nt, Artificial Sequence
  Description of Artificial Sequence: Synthetic oligonucleotide
  Sense strand starting at position 2034 of SEQ ID NO: 1887184
accucucuucgcgaaggau

SEQ ID NO: 2454363 - RNA, 19 nt, Artificial Sequence
  Description of Artificial Sequence: Synthetic oligonucleotide
  Antisense strand to SEQ ID NO: 2454362
auccuucgcgaagagaggu

SEQ ID NO: 2454364 - RNA, 19 nt, Artificial Sequence
  Description of Artificial Sequence: Synthetic oligonucleotide
  Sense strand starting at position 2147 of SEQ ID NO: 1887184
gagauaccucuccgggacu

SEQ ID NO: 2454365 - RNA, 19 nt, Artificial Sequence
  Description of Artificial Sequence: Synthetic oligonucleotide
  Antisense strand to SEQ ID NO: 2454364
agucccggagagguaucuc

SEQ ID NO: 2454366 - RNA, 19 nt, Artificial Sequence
  Description of Artificial Sequence: Synthetic oligonucleotide
  Sense strand starting at position 2187 of SEQ ID NO: 1887184
ucaguugucaguugggauc

SEQ ID NO: 2454367 - RNA, 19 nt, Artificial Sequence
  Description of Artificial Sequence: Synthetic oligonucleotide
  Antisense strand to SEQ ID NO: 2454366
gaucccaacugacaacuga

SEQ ID NO: 2454368 - RNA, 19 nt, Artificial Sequence
  Description of Artificial Sequence: Synthetic oligonucleotide
  Sense strand starting at position 2216 of SEQ ID NO: 1887184
uuaagaguccuucagcgga

SEQ ID NO: 2454369 - RNA, 19 nt, Artificial Sequence
  Description of Artificial Sequence: Synthetic oligonucleotide
  Antisense strand to SEQ ID NO: 2454368
uccgcugaaggacucuuaa

SEQ ID NO: 2454370 - RNA, 19 nt, Artificial Sequence
  Description of Artificial Sequence: Synthetic oligonucleotide
  Sense strand starting at position 2605 of SEQ ID NO: 1887184
gccacaagaucccugaguu

SEQ ID NO: 2454371 - RNA, 19 nt, Artificial Sequence
  Description of Artificial Sequence: Synthetic oligonucleotide
  Antisense strand to SEQ ID NO: 2454370
aacucagggaucuuguggc

SEQ ID NO: 2454372 - RNA, 19 nt, Artificial Sequence
  Description of Artificial Sequence: Synthetic oligonucleotide
  Sense strand starting at position 2606 of SEQ ID NO: 1887184
ccacaagaucccugaguuu

SEQ ID NO: 2454373 - RNA, 19 nt, Artificial Sequence
  Description of Artificial Sequence: Synthetic oligonucleotide
  Antisense strand to SEQ ID NO: 2454372
aaacucagggaucuugugg

SEQ ID NO: 2454374 - RNA, 19 nt, Artificial Sequence
  Description of Artificial Sequence: Synthetic oligonucleotide
  Sense strand starting at position 2609 of SEQ ID NO: 1887184
caagaucccugaguuuaga

SEQ ID NO: 2454375 - RNA, 19 nt, Artificial Sequence
  Description of Artificial Sequence: Synthetic oligonucleotide
  Antisense strand to SEQ ID NO: 2454374
ucuaaacucagggaucuug

SEQ ID NO: 2454376 - RNA, 19 nt, Artificial Sequence
  Description of Artificial Sequence: Synthetic oligonucleotide
  Sense strand starting at position 2641 of SEQ ID NO: 1887184
gcauguuuaggguaaaguc

SEQ ID NO: 2454377 - RNA, 19 nt, Artificial Sequence
  Description of Artificial Sequence: Synthetic oligonucleotide
  Antisense strand to SEQ ID NO: 2454376
gacuuuacccuaaacaugc

SEQ ID NO: 2454378 - RNA, 19 nt, Artificial Sequence
  Description of Artificial Sequence: Synthetic oligonucleotide
  Sense strand starting at position 2683 of SEQ ID NO: 1887184
aggguagggacguguuuau

SEQ ID NO: 2454379 - RNA, 19 nt, Artificial Sequence
  Description of Artificial Sequence: Synthetic oligonucleotide
  Antisense strand to SEQ ID NO: 2454378
auaaacacgucccuacccu

SEQ ID NO: 2454380 - RNA, 19 nt, Artificial Sequence
  Description of Artificial Sequence: Synthetic oligonucleotide
  Sense strand starting at position 2687 of SEQ ID NO: 1887184
uagggacguguuuauagaa

SEQ ID NO: 2454381 - RNA, 19 nt, Artificial Sequence
  Description of Artificial Sequence: Synthetic oligonucleotide
  Antisense strand to SEQ ID NO: 2454380
uucuauaaacacgucccua

SEQ ID NO: 2454382 - RNA, 19 nt, Artificial Sequence
  Description of Artificial Sequence: Synthetic oligonucleotide
  Sense strand starting at position 2746 of SEQ ID NO: 1887184
aguauuagcacuuguggga

SEQ ID NO: 2454383 - RNA, 19 nt, Artificial Sequence
  Description of Artificial Sequence: Synthetic oligonucleotide
  Antisense strand to SEQ ID NO: 2454382
ucccacaagugcuaauacu

SEQ ID NO: 2454384 - RNA, 19 nt, Artificial Sequence
  Description of Artificial Sequence: Synthetic oligonucleotide
  Sense strand starting at position 2750 of SEQ ID NO: 1887184
uuagcacuugugggaaaua

SEQ ID NO: 2454385 - RNA, 19 nt, Artificial Sequence
  Description of Artificial Sequence: Synthetic oligonucleotide
  Antisense strand to SEQ ID NO: 2454384
uauuucccacaagugcuaa

SEQ ID NO: 2454386 - RNA, 19 nt, Artificial Sequence
  Description of Artificial Sequence: Synthetic oligonucleotide
  Sense strand starting at position 2853 of SEQ ID NO: 1887184
aacagucucgcaugaaauc

SEQ ID NO: 2454387 - RNA, 19 nt, Artificial Sequence
  Description of Artificial Sequence: Synthetic oligonucleotide
  Antisense strand to SEQ ID NO: 2454386
gauuucaugcgagacuguu

SEQ ID NO: 2454388 - RNA, 19 nt, Artificial Sequence
  Description of Artificial Sequence: Synthetic oligonucleotide
  Sense strand starting at position 2908 of SEQ ID NO: 1887184
ggugaaucguguaugugua

SEQ ID NO: 2454389 - RNA, 19 nt, Artificial Sequence
  Description of Artificial Sequence: Synthetic oligonucleotide
  Antisense strand to SEQ ID NO: 2454388
uacacauacacgauucacc

SEQ ID NO: 2454390 - RNA, 19 nt, Artificial Sequence
  Description of Artificial Sequence: Synthetic oligonucleotide
  Sense strand starting at position 3059 of SEQ ID NO: 1887184
agcugauggugucugagaa

SEQ ID NO: 2454391 - RNA, 19 nt, Artificial Sequence
  Description of Artificial Sequence: Synthetic oligonucleotide
  Antisense strand to SEQ ID NO: 2454390
uucucagacaccaucagcu

SEQ ID NO: 2454392 - RNA, 19 nt, Artificial Sequence
  Description of Artificial Sequence: Synthetic oligonucleotide
  Sense strand starting at position 3060 of SEQ ID NO: 1887184
gcugauggugucugagaag

SEQ ID NO: 2454393 - RNA, 19 nt, Artificial Sequence
  Description of Artificial Sequence: Synthetic oligonucleotide
  Antisense strand to SEQ ID NO: 2454392
cuucucagacaccaucagc

SEQ ID NO: 2454394 - RNA, 19 nt, Artificial Sequence
  Description of Artificial Sequence: Synthetic oligonucleotide
  Sense strand starting at position 3106 of SEQ ID NO: 1887184
ggaggaguguaaucaacug

SEQ ID NO: 2454395 - RNA, 19 nt, Artificial Sequence
  Description of Artificial Sequence: Synthetic oligonucleotide
  Antisense strand to SEQ ID NO: 2454394
caguugauuacacuccucc

SEQ ID NO: 2454396 - RNA, 19 nt, Artificial Sequence
  Description of Artificial Sequence: Synthetic oligonucleotide
  Sense strand starting at position 3112 of SEQ ID NO: 1887184
guguaaucaacuggugggu

SEQ ID NO: 2454397 - RNA, 19 nt, Artificial Sequence
  Description of Artificial Sequence: Synthetic oligonucleotide
  Antisense strand to SEQ ID NO: 2454396
acccaccaguugauuacac

SEQ ID NO: 2454398 - RNA, 19 nt, Artificial Sequence
  Description of Artificial Sequence: Synthetic oligonucleotide
  Sense strand starting at position 3156 of SEQ ID NO: 1887184
cugauuuacugagacagug

SEQ ID NO: 2454399 - RNA, 19 nt, Artificial Sequence
  Description of Artificial Sequence: Synthetic oligonucleotide
  Antisense strand to SEQ ID NO: 2454398
cacugucucaguaaaucag

SEQ ID NO: 2454400 - RNA, 19 nt, Artificial Sequence
  Description of Artificial Sequence: Synthetic oligonucleotide
  Sense strand starting at position 3166 of SEQ ID NO: 1887184
gagacaguguuauugaaau

SEQ ID NO: 2454401 - RNA, 19 nt, Artificial Sequence
  Description of Artificial Sequence: Synthetic oligonucleotide
  Antisense strand to SEQ ID NO: 2454400
auuucaauaacacugucuc

SEQ ID NO: 2454402 - RNA, 19 nt, Artificial Sequence
  Description of Artificial Sequence: Synthetic oligonucleotide
  Sense strand starting at position 3172 of SEQ ID NO: 1887184
guguuauugaaauaggcaa

SEQ ID NO: 2454403 - RNA, 19 nt, Artificial Sequence
  Description of Artificial Sequence: Synthetic oligonucleotide
  Antisense strand to SEQ ID NO: 2454402
uugccuauuucaauaacac

SEQ ID NO: 2454404 - RNA, 19 nt, Artificial Sequence
  Description of Artificial Sequence: Synthetic oligonucleotide
  Sense strand starting at position 3332 of SEQ ID NO: 1887184
cugguugggucaaggauga

SEQ ID NO: 2454405 - RNA, 19 nt, Artificial Sequence
  Description of Artificial Sequence: Synthetic oligonucleotide
  Antisense strand to SEQ ID NO: 2454404
ucauccuugacccaaccag

SEQ ID NO: 2454406 - RNA, 19 nt, Artificial Sequence
  Description of Artificial Sequence: Synthetic oligonucleotide
  Sense strand starting at position 3368 of SEQ ID NO: 1887184
gcuuguguucuugugcuga

SEQ ID NO: 2454407 - RNA, 19 nt, Artificial Sequence
  Description of Artificial Sequence: Synthetic oligonucleotide
  Antisense strand to SEQ ID NO: 2454406
ucagcacaagaacacaagc

SEQ ID NO: 2454408 - RNA, 19 nt, Artificial Sequence
  Description of Artificial Sequence: Synthetic oligonucleotide
  Sense strand starting at position 3373 of SEQ ID NO: 1887184
uguucuugugcugagugaa

SEQ ID NO: 2454409 - RNA, 19 nt, Artificial Sequence
  Description of Artificial Sequence: Synthetic oligonucleotide
  Antisense strand to SEQ ID NO: 2454408
uucacucagcacaagaaca

SEQ ID NO: 2454410 - RNA, 19 nt, Artificial Sequence
  Description of Artificial Sequence: Synthetic oligonucleotide
  Sense strand starting at position 3508 of SEQ ID NO: 1887184
aauaguaauguugaaagca

SEQ ID NO: 2454411 - RNA, 19 nt, Artificial Sequence
  Description of Artificial Sequence: Synthetic oligonucleotide
  Antisense strand to SEQ ID NO: 2454410
ugcuuucaacauuacuauu

SEQ ID NO: 2454412 - RNA, 19 nt, Artificial Sequence
  Description of Artificial Sequence: Synthetic oligonucleotide
  Sense strand starting at position 3517 of SEQ ID NO: 1887184
guugaaagcaguuaguuag

SEQ ID NO: 2454413 - RNA, 19 nt, Artificial Sequence
  Description of Artificial Sequence: Synthetic oligonucleotide
  Antisense strand to SEQ ID NO: 2454412
cuaacuaacugcuuucaac

SEQ ID NO: 2454414 - RNA, 19 nt, Artificial Sequence
  Description of Artificial Sequence: Synthetic oligonucleotide
  Sense strand starting at position 3520 of SEQ ID NO: 1887184
gaaagcaguuaguuagcuu

SEQ ID NO: 2454415 - RNA, 19 nt, Artificial Sequence
  Description of Artificial Sequence: Synthetic oligonucleotide
  Antisense strand to SEQ ID NO: 2454414
aagcuaacuaacugcuuuc

SEQ ID NO: 2454416 - RNA, 19 nt, Artificial Sequence
  Description of Artificial Sequence: Synthetic oligonucleotide
  Sense strand starting at position 3527 of SEQ ID NO: 1887184
guuaguuagcuuggacaca

SEQ ID NO: 2454417 - RNA, 19 nt, Artificial Sequence
  Description of Artificial Sequence: Synthetic oligonucleotide
  Antisense strand to SEQ ID NO: 2454416
uguguccaagcuaacuaac

SEQ ID NO: 2454418 - RNA, 19 nt, Artificial Sequence
  Description of Artificial Sequence: Synthetic oligonucleotide
  Sense strand starting at position 3824 of SEQ ID NO: 1887184
ggaugaaguugcuucuacu

SEQ ID NO: 2454419 - RNA, 19 nt, Artificial Sequence
  Description of Artificial Sequence: Synthetic oligonucleotide
  Antisense strand to SEQ ID NO: 2454418
aguagaagcaacuucaucc

SEQ ID NO: 2454420 - RNA, 19 nt, Artificial Sequence
  Description of Artificial Sequence: Synthetic oligonucleotide
  Sense strand starting at position 75 of SEQ ID NO: 1887186
uggcuuggucaugagagaa

SEQ ID NO: 2454421 - RNA, 19 nt, Artificial Sequence
  Description of Artificial Sequence: Synthetic oligonucleotide
  Antisense strand to SEQ ID NO: 2454420
uucucucaugaccaagcca

SEQ ID NO: 2454422 - RNA, 19 nt, Artificial Sequence
  Description of Artificial Sequence: Synthetic oligonucleotide
  Sense strand starting at position 87 of SEQ ID NO: 1887186
gagagaagguuugaaagaa

SEQ ID NO: 2454423 - RNA, 19 nt, Artificial Sequence
  Description of Artificial Sequence: Synthetic oligonucleotide
  Antisense strand to SEQ ID NO: 2454422
uucuuucaaaccuucucuc

SEQ ID NO: 2454424 - RNA, 19 nt, Artificial Sequence
  Description of Artificial Sequence: Synthetic oligonucleotide
  Sense strand starting at position 156 of SEQ ID NO: 1887186
uuuggaggcugguuaaacu

SEQ ID NO: 2454425 - RNA, 19 nt, Artificial Sequence
  Description of Artificial Sequence: Synthetic oligonucleotide
  Antisense strand to SEQ ID NO: 2454424
aguuuaaccagccuccaaa

SEQ ID NO: 2454426 - RNA, 19 nt, Artificial Sequence
  Description of Artificial Sequence: Synthetic oligonucleotide
  Sense strand starting at position 229 of SEQ ID NO: 1887186
ugucuaccugaucaauaug

SEQ ID NO: 2454427 - RNA, 19 nt, Artificial Sequence
  Description of Artificial Sequence: Synthetic oligonucleotide
  Antisense strand to SEQ ID NO: 2454426
cauauugaucagguagaca

SEQ ID NO: 2454428 - RNA, 19 nt, Artificial Sequence
  Description of Artificial Sequence: Synthetic oligonucleotide
  Sense strand starting at position 258 of SEQ ID NO: 1887186
acaggcuggucuuuguaau

SEQ ID NO: 2454429 - RNA, 19 nt, Artificial Sequence
  Description of Artificial Sequence: Synthetic oligonucleotide
  Antisense strand to SEQ ID NO: 2454428
auuacaaagaccagccugu

SEQ ID NO: 2454430 - RNA, 19 nt, Artificial Sequence
  Description of Artificial Sequence: Synthetic oligonucleotide
  Sense strand starting at position 269 of SEQ ID NO: 1887186
uuuguaauuagacgggcau

SEQ ID NO: 2454431 - RNA, 19 nt, Artificial Sequence
  Description of Artificial Sequence: Synthetic oligonucleotide
  Antisense strand to SEQ ID NO: 2454430
augcccgucuaauuacaaa

SEQ ID NO: 2454432 - RNA, 19 nt, Artificial Sequence
  Description of Artificial Sequence: Synthetic oligonucleotide
  Sense strand starting at position 270 of SEQ ID NO: 1887186
uuguaauuagacgggcauu

SEQ ID NO: 2454433 - RNA, 19 nt, Artificial Sequence
  Description of Artificial Sequence: Synthetic oligonucleotide
  Antisense strand to SEQ ID NO: 2454432
aaugcccgucuaauuacaa

SEQ ID NO: 2454434 - RNA, 19 nt, Artificial Sequence
  Description of Artificial Sequence: Synthetic oligonucleotide
  Sense strand starting at position 271 of SEQ ID NO: 1887186
uguaauuagacgggcauua

SEQ ID NO: 2454435 - RNA, 19 nt, Artificial Sequence
  Description of Artificial Sequence: Synthetic oligonucleotide
  Antisense strand to SEQ ID NO: 2454434
uaaugcccgucuaauuaca

SEQ ID NO: 2454436 - RNA, 19 nt, Artificial Sequence
  Description of Artificial Sequence: Synthetic oligonucleotide
  Sense strand starting at position 294 of SEQ ID NO: 1887186
gagugcguccuagauuaca

SEQ ID NO: 2454437 - RNA, 19 nt, Artificial Sequence
  Description of Artificial Sequence: Synthetic oligonucleotide
  Antisense strand to SEQ ID NO: 2454436
uguaaucuaggacgcacuc

SEQ ID NO: 2454438 - RNA, 19 nt, Artificial Sequence
  Description of Artificial Sequence: Synthetic oligonucleotide
  Sense strand starting at position 338 of SEQ ID NO: 1887186
agauauuagcccugccaca

SEQ ID NO: 2454439 - RNA, 19 nt, Artificial Sequence
  Description of Artificial Sequence: Synthetic oligonucleotide
  Antisense strand to SEQ ID NO: 2454438
uguggcagggcuaauaucu

SEQ ID NO: 2454440 - RNA, 19 nt, Artificial Sequence
  Description of Artificial Sequence: Synthetic oligonucleotide
  Sense strand starting at position 479 of SEQ ID NO: 1887186
cggaaaccuuugccaucau

SEQ ID NO: 2454441 - RNA, 19 nt, Artificial Sequence
  Description of Artificial Sequence: Synthetic oligonucleotide
  Antisense strand to SEQ ID NO: 2454440
augauggcaaagguuuccg

SEQ ID NO: 2454442 - RNA, 19 nt, Artificial Sequence
  Description of Artificial Sequence: Synthetic oligonucleotide
  Sense strand starting at position 511 of SEQ ID NO: 1887186
ugugaaagagaauguaauc

SEQ ID NO: 2454443 - RNA, 19 nt, Artificial Sequence
  Description of Artificial Sequence: Synthetic oligonucleotide
  Antisense strand to SEQ ID NO: 2454442
gauuacauucucuuucaca

SEQ ID NO: 2454444 - RNA, 19 nt, Artificial Sequence
  Description of Artificial Sequence: Synthetic oligonucleotide
  Sense strand starting at position 602 of SEQ ID NO: 1887186
gcccuagaacucuguacac

SEQ ID NO: 2454445 - RNA, 19 nt, Artificial Sequence
  Description of Artificial Sequence: Synthetic oligonucleotide
  Antisense strand to SEQ ID NO: 2454444
guguacagaguucuagggc

SEQ ID NO: 2454446 - RNA, 19 nt, Artificial Sequence
  Description of Artificial Sequence: Synthetic oligonucleotide
  Sense strand starting at position 658 of SEQ ID NO: 1887186
uuccuagaagaaugguaua

SEQ ID NO: 2454447 - RNA, 19 nt, Artificial Sequence
  Description of Artificial Sequence: Synthetic oligonucleotide
  Antisense strand to SEQ ID NO: 2454446
uauaccauucuucuaggaa

SEQ ID NO: 2454448 - RNA, 19 nt, Artificial Sequence
  Description of Artificial Sequence: Synthetic oligonucleotide
  Sense strand starting at position 661 of SEQ ID NO: 1887186
cuagaagaaugguauaaua

SEQ ID NO: 2454449 - RNA, 19 nt, Artificial Sequence
  Description of Artificial Sequence: Synthetic oligonucleotide
  Antisense strand to SEQ ID NO: 2454448
uauuauaccauucuucuag

SEQ ID NO: 2454450 - RNA, 19 nt, Artificial Sequence
  Description of Artificial Sequence: Synthetic oligonucleotide
  Sense strand starting at position 813 of SEQ ID NO: 1887186
ggaacucacugcuuucuua

SEQ ID NO: 2454451 - RNA, 19 nt, Artificial Sequence
  Description of Artificial Sequence: Synthetic oligonucleotide
  Antisense strand to SEQ ID NO: 2454450
uaagaaagcagugaguucc

SEQ ID NO: 2454452 - RNA, 19 nt, Artificial Sequence
  Description of Artificial Sequence: Synthetic oligonucleotide
  Sense strand starting at position 817 of SEQ ID NO: 1887186
cucacugcuuucuuagaag

SEQ ID NO: 2454453 - RNA, 19 nt, Artificial Sequence
  Description of Artificial Sequence: Synthetic oligonucleotide
  Antisense strand to SEQ ID NO: 2454452
cuucuaagaaagcagugag

SEQ ID NO: 2454454 - RNA, 19 nt, Artificial Sequence
  Description of Artificial Sequence: Synthetic oligonucleotide
  Sense strand starting at position 877 of SEQ ID NO: 1887186
gccuuuaaccagggagcaa

SEQ ID NO: 2454455 - RNA, 19 nt, Artificial Sequence
  Description of Artificial Sequence: Synthetic oligonucleotide
  Antisense strand to SEQ ID NO: 2454454
uugcucccugguuaaaggc

SEQ ID NO: 2454456 - RNA, 19 nt, Artificial Sequence
  Description of Artificial Sequence: Synthetic oligonucleotide
  Sense strand starting at position 935 of SEQ ID NO: 1887186
auuauccuuccuuauggua

SEQ ID NO: 2454457 - RNA, 19 nt, Artificial Sequence
  Description of Artificial Sequence: Synthetic oligonucleotide
  Antisense strand to SEQ ID NO: 2454456
uaccauaaggaaggauaau

SEQ ID NO: 2454458 - RNA, 19 nt, Artificial Sequence
  Description of Artificial Sequence: Synthetic oligonucleotide
  Sense strand starting at position 968 of SEQ ID NO: 1887186
cgguacacucuugauuaca

SEQ ID NO: 2454459 - RNA, 19 nt, Artificial Sequence
  Description of Artificial Sequence: Synthetic oligonucleotide
  Antisense strand to SEQ ID NO: 2454458
uguaaucaagaguguaccg

SEQ ID NO: 2454460 - RNA, 19 nt, Artificial Sequence
  Description of Artificial Sequence: Synthetic oligonucleotide
  Sense strand starting at position 970 of SEQ ID NO: 1887186
guacacucuugauuacaca

SEQ ID NO: 2454461 - RNA, 19 nt, Artificial Sequence
  Description of Artificial Sequence: Synthetic oligonucleotide
  Antisense strand to SEQ ID NO: 2454460
uguguaaucaagaguguac

SEQ ID NO: 2454462 - RNA, 19 nt, Artificial Sequence
  Description of Artificial Sequence: Synthetic oligonucleotide
  Sense strand starting at position 1348 of SEQ ID NO: 1887186
cuccucuaagacggagaua

SEQ ID NO: 2454463 - RNA, 19 nt, Artificial Sequence
  Description of Artificial Sequence: Synthetic oligonucleotide
  Antisense strand to SEQ ID NO: 2454462
uaucuccgucuuagaggag

SEQ ID NO: 2454464 - RNA, 19 nt, Artificial Sequence
  Description of Artificial Sequence: Synthetic oligonucleotide
  Sense strand starting at position 1431 of SEQ ID NO: 1887186
cguacaaagagguaucuuu

SEQ ID NO: 2454465 - RNA, 19 nt, Artificial Sequence
  Description of Artificial Sequence: Synthetic oligonucleotide
  Antisense strand to SEQ ID NO: 2454464
aaagauaccucuuuguacg

SEQ ID NO: 2454466 - RNA, 19 nt, Artificial Sequence
  Description of Artificial Sequence: Synthetic oligonucleotide
  Sense strand starting at position 2235 of SEQ ID NO: 1887186
ugguuaccuuggucacaca

SEQ ID NO: 2454467 - RNA, 19 nt, Artificial Sequence
  Description of Artificial Sequence: Synthetic oligonucleotide
  Antisense strand to SEQ ID NO: 2454466
ugugugaccaagguaacca

SEQ ID NO: 2454468 - RNA, 19 nt, Artificial Sequence
  Description of Artificial Sequence: Synthetic oligonucleotide
  Sense strand starting at position 2363 of SEQ ID NO: 1887186
uuugaaaggugccugacuu

SEQ ID NO: 2454469 - RNA, 19 nt, Artificial Sequence
  Description of Artificial Sequence: Synthetic oligonucleotide
  Antisense strand to SEQ ID NO: 2454468
aagucaggcaccuuucaaa

SEQ ID NO: 2454470 - RNA, 19 nt, Artificial Sequence
  Description of Artificial Sequence: Synthetic oligonucleotide
  Sense strand starting at position 2364 of SEQ ID NO: 1887186
uugaaaggugccugacuuu

SEQ ID NO: 2454471 - RNA, 19 nt, Artificial Sequence
  Description of Artificial Sequence: Synthetic oligonucleotide
  Antisense strand to SEQ ID NO: 2454470
aaagucaggcaccuuucaa

SEQ ID NO: 2454472 - RNA, 19 nt, Artificial Sequence
  Description of Artificial Sequence: Synthetic oligonucleotide
  Sense strand starting at position 2467 of SEQ ID NO: 1887186
ggguuacgagcuuauucag

SEQ ID NO: 2454473 - RNA, 19 nt, Artificial Sequence
  Description of Artificial Sequence: Synthetic oligonucleotide
  Antisense strand to SEQ ID NO: 2454472
cugaauaagcucguaaccc

SEQ ID NO: 2454474 - RNA, 19 nt, Artificial Sequence
  Description of Artificial Sequence: Synthetic oligonucleotide
  Sense strand starting at position 2490 of SEQ ID NO: 1887186
ccacaacugggagguauua

SEQ ID NO: 2454475 - RNA, 19 nt, Artificial Sequence
  Description of Artificial Sequence: Synthetic oligonucleotide
  Antisense strand to SEQ ID NO: 2454474
uaauaccucccaguugugg

SEQ ID NO: 2454476 - RNA, 19 nt, Artificial Sequence
  Description of Artificial Sequence: Synthetic oligonucleotide
  Sense strand starting at position 2620 of SEQ ID NO: 1887186
ugaggaaggcugugguaga

SEQ ID NO: 2454477 - RNA, 19 nt, Artificial Sequence
  Description of Artificial Sequence: Synthetic oligonucleotide
  Antisense strand to SEQ ID NO: 2454476
ucuaccacagccuuccuca

SEQ ID NO: 2454478 - RNA, 19 nt, Artificial Sequence
  Description of Artificial Sequence: Synthetic oligonucleotide
  Sense strand starting at position 2641 of SEQ ID NO: 1887186
gagaaugacucagcgagga

SEQ ID NO: 2454479 - RNA, 19 nt, Artificial Sequence
  Description of Artificial Sequence: Synthetic oligonucleotide
  Antisense strand to SEQ ID NO: 2454478
uccucgcugagucauucuc

SEQ ID NO: 2454480 - RNA, 19 nt, Artificial Sequence
  Description of Artificial Sequence: Synthetic oligonucleotide
  Sense strand starting at position 2773 of SEQ ID NO: 1887186
uguagcugugguuaguaaa

SEQ ID NO: 2454481 - RNA, 19 nt, Artificial Sequence
  Description of Artificial Sequence: Synthetic oligonucleotide
  Antisense strand to SEQ ID NO: 2454480
uuuacuaaccacagcuaca

SEQ ID NO: 2454482 - RNA, 19 nt, Artificial Sequence
  Description of Artificial Sequence: Synthetic oligonucleotide
  Sense strand starting at position 2838 of SEQ ID NO: 1887186
uacgaugccuagucaugaa

SEQ ID NO: 2454483 - RNA, 19 nt, Artificial Sequence
  Description of Artificial Sequence: Synthetic oligonucleotide
  Antisense strand to SEQ ID NO: 2454482
uucaugacuaggcaucgua

SEQ ID NO: 2454484 - RNA, 19 nt, Artificial Sequence
  Description of Artificial Sequence: Synthetic oligonucleotide
  Sense strand starting at position 2842 of SEQ ID NO: 1887186
augccuagucaugaacaua

SEQ ID NO: 2454485 - RNA, 19 nt, Artificial Sequence
  Description of Artificial Sequence: Synthetic oligonucleotide
  Antisense strand to SEQ ID NO: 2454484
uauguucaugacuaggcau

SEQ ID NO: 2454486 - RNA, 19 nt, Artificial Sequence
  Description of Artificial Sequence: Synthetic oligonucleotide
  Sense strand starting at position 2882 of SEQ ID NO: 1887186
uuuaaauggugucuaguga

SEQ ID NO: 2454487 - RNA, 19 nt, Artificial Sequence
  Description of Artificial Sequence: Synthetic oligonucleotide
  Antisense strand to SEQ ID NO: 2454486
ucacuagacaccauuuaaa

SEQ ID NO: 2454488 - RNA, 19 nt, Artificial Sequence
  Description of Artificial Sequence: Synthetic oligonucleotide
  Sense strand starting at position 3281 of SEQ ID NO: 1887186
auaucagacucugucacuu

SEQ ID NO: 2454489 - RNA, 19 nt, Artificial Sequence
  Description of Artificial Sequence: Synthetic oligonucleotide
  Antisense strand to SEQ ID NO: 2454488
aagugacagagucugauau

SEQ ID NO: 2454490 - RNA, 19 nt, Artificial Sequence
  Description of Artificial Sequence: Synthetic oligonucleotide
  Sense strand starting at position 3328 of SEQ ID NO: 1887186
ccagcaaacugaguacuau

SEQ ID NO: 2454491 - RNA, 19 nt, Artificial Sequence
  Description of Artificial Sequence: Synthetic oligonucleotide
  Antisense strand to SEQ ID NO: 2454490
auaguacucaguuugcugg

SEQ ID NO: 2454492 - RNA, 19 nt, Artificial Sequence
  Description of Artificial Sequence: Synthetic oligonucleotide
  Sense strand starting at position 3340 of SEQ ID NO: 1887186
guacuauuauucccauguu

SEQ ID NO: 2454493 - RNA, 19 nt, Artificial Sequence
  Description of Artificial Sequence: Synthetic oligonucleotide
  Antisense strand to SEQ ID NO: 2454492
aacaugggaauaauaguac

SEQ ID NO: 2454494 - RNA, 19 nt, Artificial Sequence
  Description of Artificial Sequence: Synthetic oligonucleotide
  Sense strand starting at position 3352 of SEQ ID NO: 1887186
ccauguuaucaaugaggau

SEQ ID NO: 2454495 - RNA, 19 nt, Artificial Sequence
  Description of Artificial Sequence: Synthetic oligonucleotide
  Antisense strand to SEQ ID NO: 2454494
auccucauugauaacaugg

SEQ ID NO: 2454496 - RNA, 19 nt, Artificial Sequence
  Description of Artificial Sequence: Synthetic oligonucleotide
  Sense strand starting at position 3894 of SEQ ID NO: 1887186
uguaacuuucccugaugca

SEQ ID NO: 2454497 - RNA, 19 nt, Artificial Sequence
  Description of Artificial Sequence: Synthetic oligonucleotide
  Antisense strand to SEQ ID NO: 2454496
ugcaucagggaaaguuaca

SEQ ID NO: 2454498 - RNA, 19 nt, Artificial Sequence
  Description of Artificial Sequence: Synthetic oligonucleotide
  Sense strand starting at position 3895 of SEQ ID NO: 1887186
guaacuuucccugaugcaa

SEQ ID NO: 2454499 - RNA, 19 nt, Artificial Sequence
  Description of Artificial Sequence: Synthetic oligonucleotide
  Antisense strand to SEQ ID NO: 2454498
uugcaucagggaaaguuac

SEQ ID NO: 2454500 - RNA, 19 nt, Artificial Sequence
  Description of Artificial Sequence: Synthetic oligonucleotide
  Sense strand starting at position 364 of SEQ ID NO: 1887187
uccugaaccuugucaagga

SEQ ID NO: 2454501 - RNA, 19 nt, Artificial Sequence
  Description of Artificial Sequence: Synthetic oligonucleotide
  Antisense strand to SEQ ID NO: 2454500
uccuugacaagguucagga

SEQ ID NO: 2454502 - RNA, 19 nt, Artificial Sequence
  Description of Artificial Sequence: Synthetic oligonucleotide
  Sense strand starting at position 466 of SEQ ID NO: 1887187
ggcuaagcuuacuccuaaa

SEQ ID NO: 2454503 - RNA, 19 nt, Artificial Sequence
  Description of Artificial Sequence: Synthetic oligonucleotide
  Antisense strand to SEQ ID NO: 2454502
uuuaggaguaagcuuagcc

SEQ ID NO: 2454504 - RNA, 19 nt, Artificial Sequence
  Description of Artificial Sequence: Synthetic oligonucleotide
  Sense strand starting at position 513 of SEQ ID NO: 1887187
acagcagguggaugaaauu

SEQ ID NO: 2454505 - RNA, 19 nt, Artificial Sequence
  Description of Artificial Sequence: Synthetic oligonucleotide
  Antisense strand to SEQ ID NO: 2454504
aauuucauccaccugcugu

SEQ ID NO: 2454506 - RNA, 19 nt, Artificial Sequence
  Description of Artificial Sequence: Synthetic oligonucleotide
  Sense strand starting at position 574 of SEQ ID NO: 1887187
uuaacuuucuuccuuggga

SEQ ID NO: 2454507 - RNA, 19 nt, Artificial Sequence
  Description of Artificial Sequence: Synthetic oligonucleotide
  Antisense strand to SEQ ID NO: 2454506
ucccaaggaagaaaguuaa

SEQ ID NO: 2454508 - RNA, 19 nt, Artificial Sequence
  Description of Artificial Sequence: Synthetic oligonucleotide
  Sense strand starting at position 659 of SEQ ID NO: 1887187
acagcaauggcagacuauu

SEQ ID NO: 2454509 - RNA, 19 nt, Artificial Sequence
  Description of Artificial Sequence: Synthetic oligonucleotide
  Antisense strand to SEQ ID NO: 2454508
aauagucugccauugcugu

SEQ ID NO: 2454510 - RNA, 19 nt, Artificial Sequence
  Description of Artificial Sequence: Synthetic oligonucleotide
  Sense strand starting at position 743 of SEQ ID NO: 1887187
ccuagcaacugaguuacau

SEQ ID NO: 2454511 - RNA, 19 nt, Artificial Sequence
  Description of Artificial Sequence: Synthetic oligonucleotide
  Antisense strand to SEQ ID NO: 2454510
auguaacucaguugcuagg

SEQ ID NO: 2454512 - RNA, 19 nt, Artificial Sequence
  Description of Artificial Sequence: Synthetic oligonucleotide
  Sense strand starting at position 761 of SEQ ID NO: 1887187
uaacuugcagagugaaauc

SEQ ID NO: 2454513 - RNA, 19 nt, Artificial Sequence
  Description of Artificial Sequence: Synthetic oligonucleotide
  Antisense strand to SEQ ID NO: 2454512
gauuucacucugcaaguua

SEQ ID NO: 2454514 - RNA, 19 nt, Artificial Sequence
  Description of Artificial Sequence: Synthetic oligonucleotide
  Sense strand starting at position 800 of SEQ ID NO: 1887187
uccucaugucagugaacag

SEQ ID NO: 2454515 - RNA, 19 nt, Artificial Sequence
  Description of Artificial Sequence: Synthetic oligonucleotide
  Antisense strand to SEQ ID NO: 2454514
cuguucacugacaugagga

SEQ ID NO: 2454516 - RNA, 19 nt, Artificial Sequence
  Description of Artificial Sequence: Synthetic oligonucleotide
  Sense strand starting at position 819 of SEQ ID NO: 1887187
agggaacucuccuuuauua

SEQ ID NO: 2454517 - RNA, 19 nt, Artificial Sequence
  Description of Artificial Sequence: Synthetic oligonucleotide
  Antisense strand to SEQ ID NO: 2454516
uaauaaaggagaguucccu

SEQ ID NO: 2454518 - RNA, 19 nt, Artificial Sequence
  Description of Artificial Sequence: Synthetic oligonucleotide
  Sense strand starting at position 848 of SEQ ID NO: 1887187
aggugaaauguaugaaauu

SEQ ID NO: 2454519 - RNA, 19 nt, Artificial Sequence
  Description of Artificial Sequence: Synthetic oligonucleotide
  Antisense strand to SEQ ID NO: 2454518
aauuucauacauuucaccu

SEQ ID NO: 2454520 - RNA, 19 nt, Artificial Sequence
  Description of Artificial Sequence: Synthetic oligonucleotide
  Sense strand starting at position 849 of SEQ ID NO: 1887187
ggugaaauguaugaaauuu

SEQ ID NO: 2454521 - RNA, 19 nt, Artificial Sequence
  Description of Artificial Sequence: Synthetic oligonucleotide
  Antisense strand to SEQ ID NO: 2454520
aaauuucauacauuucacc

SEQ ID NO: 2454522 - RNA, 19 nt, Artificial Sequence
  Description of Artificial Sequence: Synthetic oligonucleotide
  Sense strand starting at position 878 of SEQ ID NO: 1887187
ggagauaucaaaugucugu

SEQ ID NO: 2454523 - RNA, 19 nt, Artificial Sequence
  Description of Artificial Sequence: Synthetic oligonucleotide
  Antisense strand to SEQ ID NO: 2454522
acagacauuugauaucucc

SEQ ID NO: 2454524 - RNA, 19 nt, Artificial Sequence
  Description of Artificial Sequence: Synthetic oligonucleotide
  Sense strand starting at position 891 of SEQ ID NO: 1887187
gucugugugccugugguua

SEQ ID NO: 2454525 - RNA, 19 nt, Artificial Sequence
  Description of Artificial Sequence: Synthetic oligonucleotide
  Antisense strand to SEQ ID NO: 2454524
uaaccacaggcacacagac

SEQ ID NO: 2454526 - RNA, 19 nt, Artificial Sequence
  Description of Artificial Sequence: Synthetic oligonucleotide
  Sense strand starting at position 913 of SEQ ID NO: 1887187
auaaguuaacuacgaagua

SEQ ID NO: 2454527 - RNA, 19 nt, Artificial Sequence
  Description of Artificial Sequence: Synthetic oligonucleotide
  Antisense strand to SEQ ID NO: 2454526
uacuucguaguuaacuuau

SEQ ID NO: 2454528 - RNA, 19 nt, Artificial Sequence
  Description of Artificial Sequence: Synthetic oligonucleotide
  Sense strand starting at position 965 of SEQ ID NO: 1887187
aagauuacgcuuuagggua

SEQ ID NO: 2454529 - RNA, 19 nt, Artificial Sequence
  Description of Artificial Sequence: Synthetic oligonucleotide
  Antisense strand to SEQ ID NO: 2454528
uacccuaaagcguaaucuu

SEQ ID NO: 2454530 - RNA, 19 nt, Artificial Sequence
  Description of Artificial Sequence: Synthetic oligonucleotide
  Sense strand starting at position 1032 of SEQ ID NO: 1887187
auaacucgaaguugaguaa

SEQ ID NO: 2454531 - RNA, 19 nt, Artificial Sequence
  Description of Artificial Sequence: Synthetic oligonucleotide
  Antisense strand to SEQ ID NO: 2454530
uuacucaacuucgaguuau

SEQ ID NO: 2454532 - RNA, 19 nt, Artificial Sequence
  Description of Artificial Sequence: Synthetic oligonucleotide
  Sense strand starting at position 1060 of SEQ ID NO: 1887187
augaaauaucucgaguacg

SEQ ID NO: 2454533 - RNA, 19 nt, Artificial Sequence
  Description of Artificial Sequence: Synthetic oligonucleotide
  Antisense strand to SEQ ID NO: 2454532
cguacucgagauauuucau

SEQ ID NO: 2454534 - RNA, 19 nt, Artificial Sequence
  Description of Artificial Sequence: Synthetic oligonucleotide
  Sense strand starting at position 1081 of SEQ ID NO: 1887187
gaguuaguccaaugcaaag

SEQ ID NO: 2454535 - RNA, 19 nt, Artificial Sequence
  Description of Artificial Sequence: Synthetic oligonucleotide
  Antisense strand to SEQ ID NO: 2454534
cuuugcauuggacuaacuc

SEQ ID NO: 2454536 - RNA, 19 nt, Artificial Sequence
  Description of Artificial Sequence: Synthetic oligonucleotide
  Sense strand starting at position 2254 of SEQ ID NO: 1887187
gacucagagcagggaucuu

SEQ ID NO: 2454537 - RNA, 19 nt, Artificial Sequence
  Description of Artificial Sequence: Synthetic oligonucleotide
  Antisense strand to SEQ ID NO: 2454536
aagaucccugcucugaguc

SEQ ID NO: 2454538 - RNA, 19 nt, Artificial Sequence
  Description of Artificial Sequence: Synthetic oligonucleotide
  Sense strand starting at position 2535 of SEQ ID NO: 1887187
cugucuauguaguuuauuu

SEQ ID NO: 2454539 - RNA, 19 nt, Artificial Sequence
  Description of Artificial Sequence: Synthetic oligonucleotide
  Antisense strand to SEQ ID NO: 2454538
aaauaaacuacauagacag

SEQ ID NO: 2454540 - RNA, 19 nt, Artificial Sequence
  Description of Artificial Sequence: Synthetic oligonucleotide
  Sense strand starting at position 2598 of SEQ ID NO: 1887187
gcguaaugcuagacacgga

SEQ ID NO: 2454541 - RNA, 19 nt, Artificial Sequence
  Description of Artificial Sequence: Synthetic oligonucleotide
  Antisense strand to SEQ ID NO: 2454540
uccgugucuagcauuacgc

SEQ ID NO: 2454542 - RNA, 19 nt, Artificial Sequence
  Description of Artificial Sequence: Synthetic oligonucleotide
  Sense strand starting at position 2614 of SEQ ID NO: 1887187
ggagguggcacucgauaau

SEQ ID NO: 2454543 - RNA, 19 nt, Artificial Sequence
  Description of Artificial Sequence: Synthetic oligonucleotide
  Antisense strand to SEQ ID NO: 2454542
auuaucgagugccaccucc

SEQ ID NO: 2454544 - RNA, 19 nt, Artificial Sequence
  Description of Artificial Sequence: Synthetic oligonucleotide
  Sense strand starting at position 2617 of SEQ ID NO: 1887187
gguggcacucgauaauaaa

SEQ ID NO: 2454545 - RNA, 19 nt, Artificial Sequence
  Description of Artificial Sequence: Synthetic oligonucleotide
  Antisense strand to SEQ ID NO: 2454544
uuuauuaucgagugccacc

SEQ ID NO: 2454546 - RNA, 19 nt, Artificial Sequence
  Description of Artificial Sequence: Synthetic oligonucleotide
  Sense strand starting at position 2827 of SEQ ID NO: 1887187
gcacuaucugugcauaaug

SEQ ID NO: 2454547 - RNA, 19 nt, Artificial Sequence
  Description of Artificial Sequence: Synthetic oligonucleotide
  Antisense strand to SEQ ID NO: 2454546
cauuaugcacagauagugc

SEQ ID NO: 2454548 - RNA, 19 nt, Artificial Sequence
  Description of Artificial Sequence: Synthetic oligonucleotide
  Sense strand starting at position 2829 of SEQ ID NO: 1887187
acuaucugugcauaaugua

SEQ ID NO: 2454549 - RNA, 19 nt, Artificial Sequence
  Description of Artificial Sequence: Synthetic oligonucleotide
  Antisense strand to SEQ ID NO: 2454548
uacauuaugcacagauagu

SEQ ID NO: 2454550 - RNA, 19 nt, Artificial Sequence
  Description of Artificial Sequence: Synthetic oligonucleotide
  Sense strand starting at position 2888 of SEQ ID NO: 1887187
gggaaugaaaugugcguaa

SEQ ID NO: 2454551 - RNA, 19 nt, Artificial Sequence
  Description of Artificial Sequence: Synthetic oligonucleotide
  Antisense strand to SEQ ID NO: 2454550
uuacgcacauuucauuccc

SEQ ID NO: 2454552 - RNA, 19 nt, Artificial Sequence
  Description of Artificial Sequence: Synthetic oligonucleotide
  Sense strand starting at position 2890 of SEQ ID NO: 1887187
gaaugaaaugugcguaaua

SEQ ID NO: 2454553 - RNA, 19 nt, Artificial Sequence
  Description of Artificial Sequence: Synthetic oligonucleotide
  Antisense strand to SEQ ID NO: 2454552
uauuacgcacauuucauuc

SEQ ID NO: 2454554 - RNA, 19 nt, Artificial Sequence
  Description of Artificial Sequence: Synthetic oligonucleotide
  Sense strand starting at position 2892 of SEQ ID NO: 1887187
augaaaugugcguaauacc

SEQ ID NO: 2454555 - RNA, 19 nt, Artificial Sequence
  Description of Artificial Sequence: Synthetic oligonucleotide
  Antisense strand to SEQ ID NO: 2454554
gguauuacgcacauuucau

SEQ ID NO: 2454556 - RNA, 19 nt, Artificial Sequence
  Description of Artificial Sequence: Synthetic oligonucleotide
  Sense strand starting at position 2916 of SEQ ID NO: 1887187
cccuuucuccuaggagaag

SEQ ID NO: 2454557 - RNA, 19 nt, Artificial Sequence
  Description of Artificial Sequence: Synthetic oligonucleotide
  Antisense strand to SEQ ID NO: 2454556
cuucuccuaggagaaaggg

SEQ ID NO: 2454558 - RNA, 19 nt, Artificial Sequence
  Description of Artificial Sequence: Synthetic oligonucleotide
  Sense strand starting at position 2928 of SEQ ID NO: 1887187
ggagaagucauguggucuc

SEQ ID NO: 2454559 - RNA, 19 nt, Artificial Sequence
  Description of Artificial Sequence: Synthetic oligonucleotide
  Antisense strand to SEQ ID NO: 2454558
gagaccacaugacuucucc

SEQ ID NO: 2454560 - RNA, 19 nt, Artificial Sequence
  Description of Artificial Sequence: Synthetic oligonucleotide
  Sense strand starting at position 2999 of SEQ ID NO: 1887187
acauaauagcucugugauc

SEQ ID NO: 2454561 - RNA, 19 nt, Artificial Sequence
  Description of Artificial Sequence: Synthetic oligonucleotide
  Antisense strand to SEQ ID NO: 2454560
gaucacagagcuauuaugu

SEQ ID NO: 2454562 - RNA, 19 nt, Artificial Sequence
  Description of Artificial Sequence: Synthetic oligonucleotide
  Sense strand starting at position 3008 of SEQ ID NO: 1887187
cucugugaucucgacuaag

SEQ ID NO: 2454563 - RNA, 19 nt, Artificial Sequence
  Description of Artificial Sequence: Synthetic oligonucleotide
  Antisense strand to SEQ ID NO: 2454562
cuuagucgagaucacagag

SEQ ID NO: 2454564 - RNA, 19 nt, Artificial Sequence
  Description of Artificial Sequence: Synthetic oligonucleotide
  Sense strand starting at position 3106 of SEQ ID NO: 1887187
gaugguugugaguaauaaa

SEQ ID NO: 2454565 - RNA, 19 nt, Artificial Sequence
  Description of Artificial Sequence: Synthetic oligonucleotide
  Antisense strand to SEQ ID NO: 2454564
uuuauuacucacaaccauc

SEQ ID NO: 2454566 - RNA, 19 nt, Artificial Sequence
  Description of Artificial Sequence: Synthetic oligonucleotide
  Sense strand starting at position 3169 of SEQ ID NO: 1887187
gcgugugcucuacugaucu

SEQ ID NO: 2454567 - RNA, 19 nt, Artificial Sequence
  Description of Artificial Sequence: Synthetic oligonucleotide
  Antisense strand to SEQ ID NO: 2454566
agaucaguagagcacacgc

SEQ ID NO: 2454568 - RNA, 19 nt, Artificial Sequence
  Description of Artificial Sequence: Synthetic oligonucleotide
  Sense strand starting at position 3747 of SEQ ID NO: 1887187
gcguuccuggguagaugua

SEQ ID NO: 2454569 - RNA, 19 nt, Artificial Sequence
  Description of Artificial Sequence: Synthetic oligonucleotide
  Antisense strand to SEQ ID NO: 2454568
uacaucuacccaggaacgc

SEQ ID NO: 2454570 - RNA, 19 nt, Artificial Sequence
  Description of Artificial Sequence: Synthetic oligonucleotide
  Sense strand starting at position 3748 of SEQ ID NO: 1887187
cguuccuggguagauguaa

SEQ ID NO: 2454571 - RNA, 19 nt, Artificial Sequence
  Description of Artificial Sequence: Synthetic oligonucleotide
  Antisense strand to SEQ ID NO: 2454570
uuacaucuacccaggaacg

SEQ ID NO: 2454572 - RNA, 19 nt, Artificial Sequence
  Description of Artificial Sequence: Synthetic oligonucleotide
  Sense strand starting at position 3798 of SEQ ID NO: 1887187
caccucaaugaguggaaau

SEQ ID NO: 2454573 - RNA, 19 nt, Artificial Sequence
  Description of Artificial Sequence: Synthetic oligonucleotide
  Antisense strand to SEQ ID NO: 2454572
auuuccacucauugaggug

SEQ ID NO: 2454574 - RNA, 19 nt, Artificial Sequence
  Description of Artificial Sequence: Synthetic oligonucleotide
  Sense strand starting at position 3816 of SEQ ID NO: 1887187
ugugaaauucaggaggcuu

SEQ ID NO: 2454575 - RNA, 19 nt, Artificial Sequence
  Description of Artificial Sequence: Synthetic oligonucleotide
  Antisense strand to SEQ ID NO: 2454574
aagccuccugaauuucaca

SEQ ID NO: 2454576 - RNA, 19 nt, Artificial Sequence
  Description of Artificial Sequence: Synthetic oligonucleotide
  Sense strand starting at position 3886 of SEQ ID NO: 1887187
aauguuugaguuggaagaa

SEQ ID NO: 2454577 - RNA, 19 nt, Artificial Sequence
  Description of Artificial Sequence: Synthetic oligonucleotide
  Antisense strand to SEQ ID NO: 2454576
uucuuccaacucaaacauu

SEQ ID NO: 2454578 - RNA, 19 nt, Artificial Sequence
  Description of Artificial Sequence: Synthetic oligonucleotide
  Sense strand starting at position 3929 of SEQ ID NO: 1887187
cccguuacucuguagauaa

SEQ ID NO: 2454579 - RNA, 19 nt, Artificial Sequence
  Description of Artificial Sequence: Synthetic oligonucleotide
  Antisense strand to SEQ ID NO: 2454578
uuaucuacagaguaacggg

SEQ ID NO: 2454580 - RNA, 19 nt, Artificial Sequence
  Description of Artificial Sequence: Synthetic oligonucleotide
  Sense strand starting at position 594 of SEQ ID NO: 1887188
gggccucccagacguaauu

SEQ ID NO: 2454581 - RNA, 19 nt, Artificial Sequence
  Description of Artificial Sequence: Synthetic oligonucleotide
  Antisense strand to SEQ ID NO: 2454580
aauuacgucugggaggccc

SEQ ID NO: 2454582 - RNA, 19 nt, Artificial Sequence
  Description of Artificial Sequence: Synthetic oligonucleotide
  Sense strand starting at position 740 of SEQ ID NO: 1887188
uuccgagcauuaucuggaa

SEQ ID NO: 2454583 - RNA, 19 nt, Artificial Sequence
  Description of Artificial Sequence: Synthetic oligonucleotide
  Antisense strand to SEQ ID NO: 2454582
uuccagauaaugcucggaa

SEQ ID NO: 2454584 - RNA, 19 nt, Artificial Sequence
  Description of Artificial Sequence: Synthetic oligonucleotide
  Sense strand starting at position 1118 of SEQ ID NO: 1887188
gcuacacauuucuggaaca

SEQ ID NO: 2454585 - RNA, 19 nt, Artificial Sequence
  Description of Artificial Sequence: Synthetic oligonucleotide
  Antisense strand to SEQ ID NO: 2454584
uguuccagaaauguguagc

SEQ ID NO: 2454586 - RNA, 19 nt, Artificial Sequence
  Description of Artificial Sequence: Synthetic oligonucleotide
  Sense strand starting at position 2038 of SEQ ID NO: 1887188
ugguaugucacgugaccaa

SEQ ID NO: 2454587 - RNA, 19 nt, Artificial Sequence
  Description of Artificial Sequence: Synthetic oligonucleotide
  Antisense strand to SEQ ID NO: 2454586
uuggucacgugacauacca

SEQ ID NO: 2454588 - RNA, 19 nt, Artificial Sequence
  Description of Artificial Sequence: Synthetic oligonucleotide
  Sense strand starting at position 2119 of SEQ ID NO: 1887188
ggcggaacuccugggaacu

SEQ ID NO: 2454589 - RNA, 19 nt, Artificial Sequence
  Description of Artificial Sequence: Synthetic oligonucleotide
  Antisense strand to SEQ ID NO: 2454588
aguucccaggaguuccgcc

SEQ ID NO: 2454590 - RNA, 19 nt, Artificial Sequence
  Description of Artificial Sequence: Synthetic oligonucleotide
  Sense strand starting at position 2148 of SEQ ID NO: 1887188
gcucuuaguaucggaggau

SEQ ID NO: 2454591 - RNA, 19 nt, Artificial Sequence
  Description of Artificial Sequence: Synthetic oligonucleotide
  Antisense strand to SEQ ID NO: 2454590
auccuccgauacuaagagc

SEQ ID NO: 2454592 - RNA, 19 nt, Artificial Sequence
  Description of Artificial Sequence: Synthetic oligonucleotide
  Sense strand starting at position 2219 of SEQ ID NO: 1887188
aaugguaaguaagacagau

SEQ ID NO: 2454593 - RNA, 19 nt, Artificial Sequence
  Description of Artificial Sequence: Synthetic oligonucleotide
  Antisense strand to SEQ ID NO: 2454592
aucugucuuacuuaccauu

SEQ ID NO: 2454594 - RNA, 19 nt, Artificial Sequence
  Description of Artificial Sequence: Synthetic oligonucleotide
  Sense strand starting at position 2292 of SEQ ID NO: 1887188
agauucugacaguguaaag

SEQ ID NO: 2454595 - RNA, 19 nt, Artificial Sequence
  Description of Artificial Sequence: Synthetic oligonucleotide
  Antisense strand to SEQ ID NO: 2454594
cuuuacacugucagaaucu

SEQ ID NO: 2454596 - RNA, 19 nt, Artificial Sequence
  Description of Artificial Sequence: Synthetic oligonucleotide
  Sense strand starting at position 2371 of SEQ ID NO: 1887188
ugcugaaguuucuugguau

SEQ ID NO: 2454597 - RNA, 19 nt, Artificial Sequence
  Description of Artificial Sequence: Synthetic oligonucleotide
  Antisense strand to SEQ ID NO: 2454596
auaccaagaaacuucagca

SEQ ID NO: 2454598 - RNA, 19 nt, Artificial Sequence
  Description of Artificial Sequence: Synthetic oligonucleotide
  Sense strand starting at position 2389 of SEQ ID NO: 1887188
uuggaacuguuucuccuaa

SEQ ID NO: 2454599 - RNA, 19 nt, Artificial Sequence
  Description of Artificial Sequence: Synthetic oligonucleotide
  Antisense strand to SEQ ID NO: 2454598
uuaggagaaacaguuccaa

SEQ ID NO: 2454600 - RNA, 19 nt, Artificial Sequence
  Description of Artificial Sequence: Synthetic oligonucleotide
  Sense strand starting at position 2391 of SEQ ID NO: 1887188
ggaacuguuucuccuaagu

SEQ ID NO: 2454601 - RNA, 19 nt, Artificial Sequence
  Description of Artificial Sequence: Synthetic oligonucleotide
  Antisense strand to SEQ ID NO: 2454600
acuuaggagaaacaguucc

SEQ ID NO: 2454602 - RNA, 19 nt, Artificial Sequence
  Description of Artificial Sequence: Synthetic oligonucleotide
  Sense strand starting at position 2396 of SEQ ID NO: 1887188
uguuucuccuaaguaacau

SEQ ID NO: 2454603 - RNA, 19 nt, Artificial Sequence
  Description of Artificial Sequence: Synthetic oligonucleotide
  Antisense strand to SEQ ID NO: 2454602
auguuacuuaggagaaaca

SEQ ID NO: 2454604 - RNA, 19 nt, Artificial Sequence
  Description of Artificial Sequence: Synthetic oligonucleotide
  Sense strand starting at position 2427 of SEQ ID NO: 1887188
cgugaaauacuguaacucu

SEQ ID NO: 2454605 - RNA, 19 nt, Artificial Sequence
  Description of Artificial Sequence: Synthetic oligonucleotide
  Antisense strand to SEQ ID NO: 2454604
agaguuacaguauuucacg

SEQ ID NO: 2454606 - RNA, 19 nt, Artificial Sequence
  Description of Artificial Sequence: Synthetic oligonucleotide
  Sense strand starting at position 2588 of SEQ ID NO: 1887188
ugaauaagguaggauauaa

SEQ ID NO: 2454607 - RNA, 19 nt, Artificial Sequence
  Description of Artificial Sequence: Synthetic oligonucleotide
  Antisense strand to SEQ ID NO: 2454606
uuauauccuaccuuauuca

SEQ ID NO: 2454608 - RNA, 19 nt, Artificial Sequence
  Description of Artificial Sequence: Synthetic oligonucleotide
  Sense strand starting at position 2644 of SEQ ID NO: 1887188
gccguuuguauguuuaacu

SEQ ID NO: 2454609 - RNA, 19 nt, Artificial Sequence
  Description of Artificial Sequence: Synthetic oligonucleotide
  Antisense strand to SEQ ID NO: 2454608
aguuaaacauacaaacggc

SEQ ID NO: 2454610 - RNA, 19 nt, Artificial Sequence
  Description of Artificial Sequence: Synthetic oligonucleotide
  Sense strand starting at position 2651 of SEQ ID NO: 1887188
guauguuuaacuggugagu

SEQ ID NO: 2454611 - RNA, 19 nt, Artificial Sequence
  Description of Artificial Sequence: Synthetic oligonucleotide
  Antisense strand to SEQ ID NO: 2454610
acucaccaguuaaacauac

SEQ ID NO: 2454612 - RNA, 19 nt, Artificial Sequence
  Description of Artificial Sequence: Synthetic oligonucleotide
  Sense strand starting at position 2657 of SEQ ID NO: 1887188
uuaacuggugagugacaga

SEQ ID NO: 2454613 - RNA, 19 nt, Artificial Sequence
  Description of Artificial Sequence: Synthetic oligonucleotide
  Antisense strand to SEQ ID NO: 2454612
ucugucacucaccaguuaa

SEQ ID NO: 2454614 - RNA, 19 nt, Artificial Sequence
  Description of Artificial Sequence: Synthetic oligonucleotide
  Sense strand starting at position 2667 of SEQ ID NO: 1887188
agugacagaucuguaauaa

SEQ ID NO: 2454615 - RNA, 19 nt, Artificial Sequence
  Description of Artificial Sequence: Synthetic oligonucleotide
  Antisense strand to SEQ ID NO: 2454614
uuauuacagaucugucacu

SEQ ID NO: 2454616 - RNA, 19 nt, Artificial Sequence
  Description of Artificial Sequence: Synthetic oligonucleotide
  Sense strand starting at position 2837 of SEQ ID NO: 1887188
gauggugaggcgggauaau

SEQ ID NO: 2454617 - RNA, 19 nt, Artificial Sequence
  Description of Artificial Sequence: Synthetic oligonucleotide
  Antisense strand to SEQ ID NO: 2454616
auuaucccgccucaccauc

SEQ ID NO: 2454618 - RNA, 19 nt, Artificial Sequence
  Description of Artificial Sequence: Synthetic oligonucleotide
  Sense strand starting at position 2846 of SEQ ID NO: 1887188
gcgggauaaucccuugaac

SEQ ID NO: 2454619 - RNA, 19 nt, Artificial Sequence
  Description of Artificial Sequence: Synthetic oligonucleotide
  Antisense strand to SEQ ID NO: 2454618
guucaagggauuaucccgc

SEQ ID NO: 2454620 - RNA, 19 nt, Artificial Sequence
  Description of Artificial Sequence: Synthetic oligonucleotide
  Sense strand starting at position 3036 of SEQ ID NO: 1887188
cagaauaauugagagggau

SEQ ID NO: 2454621 - RNA, 19 nt, Artificial Sequence
  Description of Artificial Sequence: Synthetic oligonucleotide
  Antisense strand to SEQ ID NO: 2454620
aucccucucaauuauucug

SEQ ID NO: 2454622 - RNA, 19 nt, Artificial Sequence
  Description of Artificial Sequence: Synthetic oligonucleotide
  Sense strand starting at position 3090 of SEQ ID NO: 1887188
acacuaucauuggcuagaa

SEQ ID NO: 2454623 - RNA, 19 nt, Artificial Sequence
  Description of Artificial Sequence: Synthetic oligonucleotide
  Antisense strand to SEQ ID NO: 2454622
uucuagccaaugauagugu

SEQ ID NO: 2454624 - RNA, 19 nt, Artificial Sequence
  Description of Artificial Sequence: Synthetic oligonucleotide
  Sense strand starting at position 3100 of SEQ ID NO: 1887188
uggcuagaauaacuuugua

SEQ ID NO: 2454625 - RNA, 19 nt, Artificial Sequence
  Description of Artificial Sequence: Synthetic oligonucleotide
  Antisense strand to SEQ ID NO: 2454624
uacaaaguuauucuagcca

SEQ ID NO: 2454626 - RNA, 19 nt, Artificial Sequence
  Description of Artificial Sequence: Synthetic oligonucleotide
  Sense strand starting at position 3103 of SEQ ID NO: 1887188
cuagaauaacuuuguaguu

SEQ ID NO: 2454627 - RNA, 19 nt, Artificial Sequence
  Description of Artificial Sequence: Synthetic oligonucleotide
  Antisense strand to SEQ ID NO: 2454626
aacuacaaaguuauucuag

SEQ ID NO: 2454628 - RNA, 19 nt, Artificial Sequence
  Description of Artificial Sequence: Synthetic oligonucleotide
  Sense strand starting at position 3115 of SEQ ID NO: 1887188
uguaguucuuguccauuua

SEQ ID NO: 2454629 - RNA, 19 nt, Artificial Sequence
  Description of Artificial Sequence: Synthetic oligonucleotide
  Antisense strand to SEQ ID NO: 2454628
uaaauggacaagaacuaca

SEQ ID NO: 2454630 - RNA, 19 nt, Artificial Sequence
  Description of Artificial Sequence: Synthetic oligonucleotide
  Sense strand starting at position 3158 of SEQ ID NO: 1887188
gcuugugaaagauaacuug

SEQ ID NO: 2454631 - RNA, 19 nt, Artificial Sequence
  Description of Artificial Sequence: Synthetic oligonucleotide
  Antisense strand to SEQ ID NO: 2454630
caaguuaucuuucacaagc

SEQ ID NO: 2454632 - RNA, 19 nt, Artificial Sequence
  Description of Artificial Sequence: Synthetic oligonucleotide
  Sense strand starting at position 3259 of SEQ ID NO: 1887188
gggacuguuuggagaaaga

SEQ ID NO: 2454633 - RNA, 19 nt, Artificial Sequence
  Description of Artificial Sequence: Synthetic oligonucleotide
  Antisense strand to SEQ ID NO: 2454632
ucuuucuccaaacaguccc

SEQ ID NO: 2454634 - RNA, 19 nt, Artificial Sequence
  Description of Artificial Sequence: Synthetic oligonucleotide
  Sense strand starting at position 3348 of SEQ ID NO: 1887188
augggugaauaggagaaau

SEQ ID NO: 2454635 - RNA, 19 nt, Artificial Sequence
  Description of Artificial Sequence: Synthetic oligonucleotide
  Antisense strand to SEQ ID NO: 2454634
auuucuccuauucacccau

SEQ ID NO: 2454636 - RNA, 19 nt, Artificial Sequence
  Description of Artificial Sequence: Synthetic oligonucleotide
  Sense strand starting at position 3374 of SEQ ID NO: 1887188
gaaggaauuugccaaagaa

SEQ ID NO: 2454637 - RNA, 19 nt, Artificial Sequence
  Description of Artificial Sequence: Synthetic oligonucleotide
  Antisense strand to SEQ ID NO: 2454636
uucuuuggcaaauuccuuc

SEQ ID NO: 2454638 - RNA, 19 nt, Artificial Sequence
  Description of Artificial Sequence: Synthetic oligonucleotide
  Sense strand starting at position 3389 of SEQ ID NO: 1887188
agaacugagucaggaauuu

SEQ ID NO: 2454639 - RNA, 19 nt, Artificial Sequence
  Description of Artificial Sequence: Synthetic oligonucleotide
  Antisense strand to SEQ ID NO: 2454638
aaauuccugacucaguucu

SEQ ID NO: 2454640 - RNA, 19 nt, Artificial Sequence
  Description of Artificial Sequence: Synthetic oligonucleotide
  Sense strand starting at position 3428 of SEQ ID NO: 1887188
gaagguuaguuccugggaa

SEQ ID NO: 2454641 - RNA, 19 nt, Artificial Sequence
  Description of Artificial Sequence: Synthetic oligonucleotide
  Antisense strand to SEQ ID NO: 2454640
uucccaggaacuaaccuuc

SEQ ID NO: 2454642 - RNA, 19 nt, Artificial Sequence
  Description of Artificial Sequence: Synthetic oligonucleotide
  Sense strand starting at position 3430 of SEQ ID NO: 1887188
agguuaguuccugggaaug

SEQ ID NO: 2454643 - RNA, 19 nt, Artificial Sequence
  Description of Artificial Sequence: Synthetic oligonucleotide
  Antisense strand to SEQ ID NO: 2454642
cauucccaggaacuaaccu

SEQ ID NO: 2454644 - RNA, 19 nt, Artificial Sequence
  Description of Artificial Sequence: Synthetic oligonucleotide
  Sense strand starting at position 3447 of SEQ ID NO: 1887188
uggagaguuagcugaggua

SEQ ID NO: 2454645 - RNA, 19 nt, Artificial Sequence
  Description of Artificial Sequence: Synthetic oligonucleotide
  Antisense strand to SEQ ID NO: 2454644
uaccucagcuaacucucca

SEQ ID NO: 2454646 - RNA, 19 nt, Artificial Sequence
  Description of Artificial Sequence: Synthetic oligonucleotide
  Sense strand starting at position 3493 of SEQ ID NO: 1887188
cuccaugaucuuggauguu

SEQ ID NO: 2454647 - RNA, 19 nt, Artificial Sequence
  Description of Artificial Sequence: Synthetic oligonucleotide
  Antisense strand to SEQ ID NO: 2454646
aacauccaagaucauggag

SEQ ID NO: 2454648 - RNA, 19 nt, Artificial Sequence
  Description of Artificial Sequence: Synthetic oligonucleotide
  Sense strand starting at position 3597 of SEQ ID NO: 1887188
agcacauuuguuuguggau

SEQ ID NO: 2454649 - RNA, 19 nt, Artificial Sequence
  Description of Artificial Sequence: Synthetic oligonucleotide
  Antisense strand to SEQ ID NO: 2454648
auccacaaacaaaugugcu

SEQ ID NO: 2454650 - RNA, 19 nt, Artificial Sequence
  Description of Artificial Sequence: Synthetic oligonucleotide
  Sense strand starting at position 3598 of SEQ ID NO: 1887188
gcacauuuguuuguggauu

SEQ ID NO: 2454651 - RNA, 19 nt, Artificial Sequence
  Description of Artificial Sequence: Synthetic oligonucleotide
  Antisense strand to SEQ ID NO: 2454650
aauccacaaacaaaugugc

SEQ ID NO: 2454652 - RNA, 19 nt, Artificial Sequence
  Description of Artificial Sequence: Synthetic oligonucleotide
  Sense strand starting at position 3599 of SEQ ID NO: 1887188
cacauuuguuuguggauuu

SEQ ID NO: 2454653 - RNA, 19 nt, Artificial Sequence
  Description of Artificial Sequence: Synthetic oligonucleotide
  Antisense strand to SEQ ID NO: 2454652
aaauccacaaacaaaugug

SEQ ID NO: 2454654 - RNA, 19 nt, Artificial Sequence
  Description of Artificial Sequence: Synthetic oligonucleotide
  Sense strand starting at position 3650 of SEQ ID NO: 1887188
agaagacuacuuugugaug

SEQ ID NO: 2454655 - RNA, 19 nt, Artificial Sequence
  Description of Artificial Sequence: Synthetic oligonucleotide
  Antisense strand to SEQ ID NO: 2454654
caucacaaaguagucuucu

SEQ ID NO: 2454656 - RNA, 19 nt, Artificial Sequence
  Description of Artificial Sequence: Synthetic oligonucleotide
  Sense strand starting at position 3651 of SEQ ID NO: 1887188
gaagacuacuuugugaugu

SEQ ID NO: 2454657 - RNA, 19 nt, Artificial Sequence
  Description of Artificial Sequence: Synthetic oligonucleotide
  Antisense strand to SEQ ID NO: 2454656
acaucacaaaguagucuuc

SEQ ID NO: 2454658 - RNA, 19 nt, Artificial Sequence
  Description of Artificial Sequence: Synthetic oligonucleotide
  Sense strand starting at position 3677 of SEQ ID NO: 1887188
auaucucaguguccauaaa

SEQ ID NO: 2454659 - RNA, 19 nt, Artificial Sequence
  Description of Artificial Sequence: Synthetic oligonucleotide
  Antisense strand to SEQ ID NO: 2454658
uuuauggacacugagauau

SEQ ID NO: 2454660 - RNA, 19 nt, Artificial Sequence
  Description of Artificial Sequence: Synthetic oligonucleotide
  Sense strand starting at position 594 of SEQ ID NO: 1887189
gggccucccagacguaauu

SEQ ID NO: 2454661 - RNA, 19 nt, Artificial Sequence
  Description of Artificial Sequence: Synthetic oligonucleotide
  Antisense strand to SEQ ID NO: 2454660
aauuacgucugggaggccc

SEQ ID NO: 2454662 - RNA, 19 nt, Artificial Sequence
  Description of Artificial Sequence: Synthetic oligonucleotide
  Sense strand starting at position 740 of SEQ ID NO: 1887189
uuccgagcauuaucuggaa

SEQ ID NO: 2454663 - RNA, 19 nt, Artificial Sequence
  Description of Artificial Sequence: Synthetic oligonucleotide
  Antisense strand to SEQ ID NO: 2454662
uuccagauaaugcucggaa

SEQ ID NO: 2454664 - RNA, 19 nt, Artificial Sequence
  Description of Artificial Sequence: Synthetic oligonucleotide
  Sense strand starting at position 1118 of SEQ ID NO: 1887189
gcuacacauuucuggaaca

SEQ ID NO: 2454665 - RNA, 19 nt, Artificial Sequence
  Description of Artificial Sequence: Synthetic oligonucleotide
  Antisense strand to SEQ ID NO: 2454664
uguuccagaaauguguagc

SEQ ID NO: 2454666 - RNA, 19 nt, Artificial Sequence
  Description of Artificial Sequence: Synthetic oligonucleotide
  Sense strand starting at position 2038 of SEQ ID NO: 1887189
ugguaugucacgugaccaa

SEQ ID NO: 2454667 - RNA, 19 nt, Artificial Sequence
  Description of Artificial Sequence: Synthetic oligonucleotide
  Antisense strand to SEQ ID NO: 2454666
uuggucacgugacauacca

SEQ ID NO: 2454668 - RNA, 19 nt, Artificial Sequence
  Description of Artificial Sequence: Synthetic oligonucleotide
  Sense strand starting at position 2119 of SEQ ID NO: 1887189
ggcggaacuccugggaacu

SEQ ID NO: 2454669 - RNA, 19 nt, Artificial Sequence
  Description of Artificial Sequence: Synthetic oligonucleotide
  Antisense strand to SEQ ID NO: 2454668
aguucccaggaguuccgcc

SEQ ID NO: 2454670 - RNA, 19 nt, Artificial Sequence
  Description of Artificial Sequence: Synthetic oligonucleotide
  Sense strand starting at position 2148 of SEQ ID NO: 1887189
gcucuuaguaucggaggau

SEQ ID NO: 2454671 - RNA, 19 nt, Artificial Sequence
  Description of Artificial Sequence: Synthetic oligonucleotide
  Antisense strand to SEQ ID NO: 2454670
auccuccgauacuaagagc

SEQ ID NO: 2454672 - RNA, 19 nt, Artificial Sequence
  Description of Artificial Sequence: Synthetic oligonucleotide
  Sense strand starting at position 2219 of SEQ ID NO: 1887189
aaugguaaguaagacagau

SEQ ID NO: 2454673 - RNA, 19 nt, Artificial Sequence
  Description of Artificial Sequence: Synthetic oligonucleotide
  Antisense strand to SEQ ID NO: 2454672
aucugucuuacuuaccauu

SEQ ID NO: 2454674 - RNA, 19 nt, Artificial Sequence
  Description of Artificial Sequence: Synthetic oligonucleotide
  Sense strand starting at position 2292 of SEQ ID NO: 1887189
agauucugacaguguaaag

SEQ ID NO: 2454675 - RNA, 19 nt, Artificial Sequence
  Description of Artificial Sequence: Synthetic oligonucleotide
  Antisense strand to SEQ ID NO: 2454674
cuuuacacugucagaaucu

SEQ ID NO: 2454676 - RNA, 19 nt, Artificial Sequence
  Description of Artificial Sequence: Synthetic oligonucleotide
  Sense strand starting at position 2371 of SEQ ID NO: 1887189
ugcugaaguuucuugguau

SEQ ID NO: 2454677 - RNA, 19 nt, Artificial Sequence
  Description of Artificial Sequence: Synthetic oligonucleotide
  Antisense strand to SEQ ID NO: 2454676
auaccaagaaacuucagca

SEQ ID NO: 2454678 - RNA, 19 nt, Artificial Sequence
  Description of Artificial Sequence: Synthetic oligonucleotide
  Sense strand starting at position 2389 of SEQ ID NO: 1887189
uuggaacuguuucuccuaa

SEQ ID NO: 2454679 - RNA, 19 nt, Artificial Sequence
  Description of Artificial Sequence: Synthetic oligonucleotide
  Antisense strand to SEQ ID NO: 2454678
uuaggagaaacaguuccaa

SEQ ID NO: 2454680 - RNA, 19 nt, Artificial Sequence
  Description of Artificial Sequence: Synthetic oligonucleotide
  Sense strand starting at position 2391 of SEQ ID NO: 1887189
ggaacuguuucuccuaagu

SEQ ID NO: 2454681 - RNA, 19 nt, Artificial Sequence
  Description of Artificial Sequence: Synthetic oligonucleotide
  Antisense strand to SEQ ID NO: 2454680
acuuaggagaaacaguucc

SEQ ID NO: 2454682 - RNA, 19 nt, Artificial Sequence
  Description of Artificial Sequence: Synthetic oligonucleotide
  Sense strand starting at position 2396 of SEQ ID NO: 1887189
uguuucuccuaaguaacau

SEQ ID NO: 2454683 - RNA, 19 nt, Artificial Sequence
  Description of Artificial Sequence: Synthetic oligonucleotide
  Antisense strand to SEQ ID NO: 2454682
auguuacuuaggagaaaca

SEQ ID NO: 2454684 - RNA, 19 nt, Artificial Sequence
  Description of Artificial Sequence: Synthetic oligonucleotide
  Sense strand starting at position 2427 of SEQ ID NO: 1887189
cgugaaauacuguaacucu

SEQ ID NO: 2454685 - RNA, 19 nt, Artificial Sequence
  Description of Artificial Sequence: Synthetic oligonucleotide
  Antisense strand to SEQ ID NO: 2454684
agaguuacaguauuucacg

SEQ ID NO: 2454686 - RNA, 19 nt, Artificial Sequence
  Description of Artificial Sequence: Synthetic oligonucleotide
  Sense strand starting at position 2588 of SEQ ID NO: 1887189
ugaauaagguaggauauaa

SEQ ID NO: 2454687 - RNA, 19 nt, Artificial Sequence
  Description of Artificial Sequence: Synthetic oligonucleotide
  Antisense strand to SEQ ID NO: 2454686
uuauauccuaccuuauuca

SEQ ID NO: 2454688 - RNA, 19 nt, Artificial Sequence
  Description of Artificial Sequence: Synthetic oligonucleotide
  Sense strand starting at position 2644 of SEQ ID NO: 1887189
gccguuuguauguuuaacu

SEQ ID NO: 2454689 - RNA, 19 nt, Artificial Sequence
  Description of Artificial Sequence: Synthetic oligonucleotide
  Antisense strand to SEQ ID NO: 2454688
aguuaaacauacaaacggc

SEQ ID NO: 2454690 - RNA, 19 nt, Artificial Sequence
  Description of Artificial Sequence: Synthetic oligonucleotide
  Sense strand starting at position 2651 of SEQ ID NO: 1887189
guauguuuaacuggugagu

SEQ ID NO: 2454691 - RNA, 19 nt, Artificial Sequence
  Description of Artificial Sequence: Synthetic oligonucleotide
  Antisense strand to SEQ ID NO: 2454690
acucaccaguuaaacauac

SEQ ID NO: 2454692 - RNA, 19 nt, Artificial Sequence
  Description of Artificial Sequence: Synthetic oligonucleotide
  Sense strand starting at position 2657 of SEQ ID NO: 1887189
uuaacuggugagugacaga

SEQ ID NO: 2454693 - RNA, 19 nt, Artificial Sequence
  Description of Artificial Sequence: Synthetic oligonucleotide
  Antisense strand to SEQ ID NO: 2454692
ucugucacucaccaguuaa

SEQ ID NO: 2454694 - RNA, 19 nt, Artificial Sequence
  Description of Artificial Sequence: Synthetic oligonucleotide
  Sense strand starting at position 2667 of SEQ ID NO: 1887189
agugacagaucuguaauaa

SEQ ID NO: 2454695 - RNA, 19 nt, Artificial Sequence
  Description of Artificial Sequence: Synthetic oligonucleotide
  Antisense strand to SEQ ID NO: 2454694
uuauuacagaucugucacu

SEQ ID NO: 2454696 - RNA, 19 nt, Artificial Sequence
  Description of Artificial Sequence: Synthetic oligonucleotide
  Sense strand starting at position 2837 of SEQ ID NO: 1887189
gauggugaggcgggauaau

SEQ ID NO: 2454697 - RNA, 19 nt, Artificial Sequence
  Description of Artificial Sequence: Synthetic oligonucleotide
  Antisense strand to SEQ ID NO: 2454696
auuaucccgccucaccauc

SEQ ID NO: 2454698 - RNA, 19 nt, Artificial Sequence
  Description of Artificial Sequence: Synthetic oligonucleotide
  Sense strand starting at position 2846 of SEQ ID NO: 1887189
gcgggauaaucccuugaac

SEQ ID NO: 2454699 - RNA, 19 nt, Artificial Sequence
  Description of Artificial Sequence: Synthetic oligonucleotide
  Antisense strand to SEQ ID NO: 2454698
guucaagggauuaucccgc

SEQ ID NO: 2454700 - RNA, 19 nt, Artificial Sequence
  Description of Artificial Sequence: Synthetic oligonucleotide
  Sense strand starting at position 3036 of SEQ ID NO: 1887189
cagaauaauugagagggau

SEQ ID NO: 2454701 - RNA, 19 nt, Artificial Sequence
  Description of Artificial Sequence: Synthetic oligonucleotide
  Antisense strand to SEQ ID NO: 2454700
aucccucucaauuauucug

SEQ ID NO: 2454702 - RNA, 19 nt, Artificial Sequence
  Description of Artificial Sequence: Synthetic oligonucleotide
  Sense strand starting at position 3090 of SEQ ID NO: 1887189
acacuaucauuggcuagaa

SEQ ID NO: 2454703 - RNA, 19 nt, Artificial Sequence
  Description of Artificial Sequence: Synthetic oligonucleotide
  Antisense strand to SEQ ID NO: 2454702
uucuagccaaugauagugu

SEQ ID NO: 2454704 - RNA, 19 nt, Artificial Sequence
  Description of Artificial Sequence: Synthetic oligonucleotide
  Sense strand starting at position 3100 of SEQ ID NO: 1887189
uggcuagaauaacuuugua

SEQ ID NO: 2454705 - RNA, 19 nt, Artificial Sequence
  Description of Artificial Sequence: Synthetic oligonucleotide
  Antisense strand to SEQ ID NO: 2454704
uacaaaguuauucuagcca

SEQ ID NO: 2454706 - RNA, 19 nt, Artificial Sequence
  Description of Artificial Sequence: Synthetic oligonucleotide
  Sense strand starting at position 3103 of SEQ ID NO: 1887189
cuagaauaacuuuguaguu

SEQ ID NO: 2454707 - RNA, 19 nt, Artificial Sequence
  Description of Artificial Sequence: Synthetic oligonucleotide
  Antisense strand to SEQ ID NO: 2454706
aacuacaaaguuauucuag

SEQ ID NO: 2454708 - RNA, 19 nt, Artificial Sequence
  Description of Artificial Sequence: Synthetic oligonucleotide
  Sense strand starting at position 3115 of SEQ ID NO: 1887189
uguaguucuuguccauuua

SEQ ID NO: 2454709 - RNA, 19 nt, Artificial Sequence
  Description of Artificial Sequence: Synthetic oligonucleotide
  Antisense strand to SEQ ID NO: 2454708
uaaauggacaagaacuaca

SEQ ID NO: 2454710 - RNA, 19 nt, Artificial Sequence
  Description of Artificial Sequence: Synthetic oligonucleotide
  Sense strand starting at position 3158 of SEQ ID NO: 1887189
gcuugugaaagauaacuug

SEQ ID NO: 2454711 - RNA, 19 nt, Artificial Sequence
  Description of Artificial Sequence: Synthetic oligonucleotide
  Antisense strand to SEQ ID NO: 2454710
caaguuaucuuucacaagc

SEQ ID NO: 2454712 - RNA, 19 nt, Artificial Sequence
  Description of Artificial Sequence: Synthetic oligonucleotide
  Sense strand starting at position 3259 of SEQ ID NO: 1887189
gggacuguuuggagaaaga

SEQ ID NO: 2454713 - RNA, 19 nt, Artificial Sequence
  Description of Artificial Sequence: Synthetic oligonucleotide
  Antisense strand to SEQ ID NO: 2454712
ucuuucuccaaacaguccc

SEQ ID NO: 2454714 - RNA, 19 nt, Artificial Sequence
  Description of Artificial Sequence: Synthetic oligonucleotide
  Sense strand starting at position 3348 of SEQ ID NO: 1887189
augggugaauaggagaaau

SEQ ID NO: 2454715 - RNA, 19 nt, Artificial Sequence
  Description of Artificial Sequence: Synthetic oligonucleotide
  Antisense strand to SEQ ID NO: 2454714
auuucuccuauucacccau

SEQ ID NO: 2454716 - RNA, 19 nt, Artificial Sequence
  Description of Artificial Sequence: Synthetic oligonucleotide
  Sense strand starting at position 3374 of SEQ ID NO: 1887189
gaaggaauuugccaaagaa

SEQ ID NO: 2454717 - RNA, 19 nt, Artificial Sequence
  Description of Artificial Sequence: Synthetic oligonucleotide
  Antisense strand to SEQ ID NO: 2454716
uucuuuggcaaauuccuuc

SEQ ID NO: 2454718 - RNA, 19 nt, Artificial Sequence
  Description of Artificial Sequence: Synthetic oligonucleotide
  Sense strand starting at position 3389 of SEQ ID NO: 1887189
agaacugagucaggaauuu

SEQ ID NO: 2454719 - RNA, 19 nt, Artificial Sequence
  Description of Artificial Sequence: Synthetic oligonucleotide
  Antisense strand to SEQ ID NO: 2454718
aaauuccugacucaguucu

SEQ ID NO: 2454720 - RNA, 19 nt, Artificial Sequence
  Description of Artificial Sequence: Synthetic oligonucleotide
  Sense strand starting at position 3428 of SEQ ID NO: 1887189
gaagguuaguuccugggaa

SEQ ID NO: 2454721 - RNA, 19 nt, Artificial Sequence
  Description of Artificial Sequence: Synthetic oligonucleotide
  Antisense strand to SEQ ID NO: 2454720
uucccaggaacuaaccuuc

SEQ ID NO: 2454722 - RNA, 19 nt, Artificial Sequence
  Description of Artificial Sequence: Synthetic oligonucleotide
  Sense strand starting at position 3430 of SEQ ID NO: 1887189
agguuaguuccugggaaug

SEQ ID NO: 2454723 - RNA, 19 nt, Artificial Sequence
  Description of Artificial Sequence: Synthetic oligonucleotide
  Antisense strand to SEQ ID NO: 2454722
cauucccaggaacuaaccu

SEQ ID NO: 2454724 - RNA, 19 nt, Artificial Sequence
  Description of Artificial Sequence: Synthetic oligonucleotide
  Sense strand starting at position 3447 of SEQ ID NO: 1887189
uggagaguuagcugaggua

SEQ ID NO: 2454725 - RNA, 19 nt, Artificial Sequence
  Description of Artificial Sequence: Synthetic oligonucleotide
  Antisense strand to SEQ ID NO: 2454724
uaccucagcuaacucucca

SEQ ID NO: 2454726 - RNA, 19 nt, Artificial Sequence
  Description of Artificial Sequence: Synthetic oligonucleotide
  Sense strand starting at position 3493 of SEQ ID NO: 1887189
cuccaugaucuuggauguu

SEQ ID NO: 2454727 - RNA, 19 nt, Artificial Sequence
  Description of Artificial Sequence: Synthetic oligonucleotide
  Antisense strand to SEQ ID NO: 2454726
aacauccaagaucauggag

SEQ ID NO: 2454728 - RNA, 19 nt, Artificial Sequence
  Description of Artificial Sequence: Synthetic oligonucleotide
  Sense strand starting at position 3597 of SEQ ID NO: 1887189
agcacauuuguuuguggau

SEQ ID NO: 2454729 - RNA, 19 nt, Artificial Sequence
  Description of Artificial Sequence: Synthetic oligonucleotide
  Antisense strand to SEQ ID NO: 2454728
auccacaaacaaaugugcu

SEQ ID NO: 2454730 - RNA, 19 nt, Artificial Sequence
  Description of Artificial Sequence: Synthetic oligonucleotide
  Sense strand starting at position 3598 of SEQ ID NO: 1887189
gcacauuuguuuguggauu

SEQ ID NO: 2454731 - RNA, 19 nt, Artificial Sequence
  Description of Artificial Sequence: Synthetic oligonucleotide
  Antisense strand to SEQ ID NO: 2454730
aauccacaaacaaaugugc

SEQ ID NO: 2454732 - RNA, 19 nt, Artificial Sequence
  Description of Artificial Sequence: Synthetic oligonucleotide
  Sense strand starting at position 3599 of SEQ ID NO: 1887189
cacauuuguuuguggauuu

SEQ ID NO: 2454733 - RNA, 19 nt, Artificial Sequence
  Description of Artificial Sequence: Synthetic oligonucleotide
  Antisense strand to SEQ ID NO: 2454732
aaauccacaaacaaaugug

SEQ ID NO: 2454734 - RNA, 19 nt, Artificial Sequence
  Description of Artificial Sequence: Synthetic oligonucleotide
  Sense strand starting at position 3650 of SEQ ID NO: 1887189
agaagacuacuuugugaug

SEQ ID NO: 2454735 - RNA, 19 nt, Artificial Sequence
  Description of Artificial Sequence: Synthetic oligonucleotide
  Antisense strand to SEQ ID NO: 2454734
caucacaaaguagucuucu

SEQ ID NO: 2454736 - RNA, 19 nt, Artificial Sequence
  Description of Artificial Sequence: Synthetic oligonucleotide
  Sense strand starting at position 3651 of SEQ ID NO: 1887189
gaagacuacuuugugaugu

SEQ ID NO: 2454737 - RNA, 19 nt, Artificial Sequence
  Description of Artificial Sequence: Synthetic oligonucleotide
  Antisense strand to SEQ ID NO: 2454736
acaucacaaaguagucuuc

SEQ ID NO: 2454738 - RNA, 19 nt, Artificial Sequence
  Description of Artificial Sequence: Synthetic oligonucleotide
  Sense strand starting at position 3677 of SEQ ID NO: 1887189
auaucucaguguccauaaa

SEQ ID NO: 2454739 - RNA, 19 nt, Artificial Sequence
  Description of Artificial Sequence: Synthetic oligonucleotide
  Antisense strand to SEQ ID NO: 2454738
uuuauggacacugagauau

SEQ ID NO: 2454740 - RNA, 19 nt, Artificial Sequence
  Description of Artificial Sequence: Synthetic oligonucleotide
  Sense strand starting at position 650 of SEQ ID NO: 1887190
cccgucuugccacagauca

SEQ ID NO: 2454741 - RNA, 19 nt, Artificial Sequence
  Description of Artificial Sequence: Synthetic oligonucleotide
  Antisense strand to SEQ ID NO: 2454740
ugaucuguggcaagacggg

SEQ ID NO: 2454742 - RNA, 19 nt, Artificial Sequence
  Description of Artificial Sequence: Synthetic oligonucleotide
  Sense strand starting at position 2076 of SEQ ID NO: 1887190
ccuacauaucuaugaucga

SEQ ID NO: 2454743 - RNA, 19 nt, Artificial Sequence
  Description of Artificial Sequence: Synthetic oligonucleotide
  Antisense strand to SEQ ID NO: 2454742
ucgaucauagauauguagg

SEQ ID NO: 2454744 - RNA, 19 nt, Artificial Sequence
  Description of Artificial Sequence: Synthetic oligonucleotide
  Sense strand starting at position 2079 of SEQ ID NO: 1887190
acauaucuaugaucgaguu

SEQ ID NO: 2454745 - RNA, 19 nt, Artificial Sequence
  Description of Artificial Sequence: Synthetic oligonucleotide
  Antisense strand to SEQ ID NO: 2454744
aacucgaucauagauaugu

SEQ ID NO: 2454746 - RNA, 19 nt, Artificial Sequence
  Description of Artificial Sequence: Synthetic oligonucleotide
  Sense strand starting at position 2080 of SEQ ID NO: 1887190
cauaucuaugaucgaguuu

SEQ ID NO: 2454747 - RNA, 19 nt, Artificial Sequence
  Description of Artificial Sequence: Synthetic oligonucleotide
  Antisense strand to SEQ ID NO: 2454746
aaacucgaucauagauaug

SEQ ID NO: 2454748 - RNA, 19 nt, Artificial Sequence
  Description of Artificial Sequence: Synthetic oligonucleotide
  Sense strand starting at position 2124 of SEQ ID NO: 1887190
ggaagcgauuaacaacaau

SEQ ID NO: 2454749 - RNA, 19 nt, Artificial Sequence
  Description of Artificial Sequence: Synthetic oligonucleotide
  Antisense strand to SEQ ID NO: 2454748
auuguuguuaaucgcuucc

SEQ ID NO: 2454750 - RNA, 19 nt, Artificial Sequence
  Description of Artificial Sequence: Synthetic oligonucleotide
  Sense strand starting at position 2206 of SEQ ID NO: 1887190
cauggauuggucugauaac

SEQ ID NO: 2454751 - RNA, 19 nt, Artificial Sequence
  Description of Artificial Sequence: Synthetic oligonucleotide
  Antisense strand to SEQ ID NO: 2454750
guuaucagaccaauccaug

SEQ ID NO: 2454752 - RNA, 19 nt, Artificial Sequence
  Description of Artificial Sequence: Synthetic oligonucleotide
  Sense strand starting at position 2207 of SEQ ID NO: 1887190
auggauuggucugauaacu

SEQ ID NO: 2454753 - RNA, 19 nt, Artificial Sequence
  Description of Artificial Sequence: Synthetic oligonucleotide
  Antisense strand to SEQ ID NO: 2454752
aguuaucagaccaauccau

SEQ ID NO: 2454754 - RNA, 19 nt, Artificial Sequence
  Description of Artificial Sequence: Synthetic oligonucleotide
  Sense strand starting at position 2314 of SEQ ID NO: 1887190
gcaagacggugugagauuu

SEQ ID NO: 2454755 - RNA, 19 nt, Artificial Sequence
  Description of Artificial Sequence: Synthetic oligonucleotide
  Antisense strand to SEQ ID NO: 2454754
aaaucucacaccgucuugc

SEQ ID NO: 2454756 - RNA, 19 nt, Artificial Sequence
  Description of Artificial Sequence: Synthetic oligonucleotide
  Sense strand starting at position 2446 of SEQ ID NO: 1887190
gguacuacugaauguguau

SEQ ID NO: 2454757 - RNA, 19 nt, Artificial Sequence
  Description of Artificial Sequence: Synthetic oligonucleotide
  Antisense strand to SEQ ID NO: 2454756
auacacauucaguaguacc

SEQ ID NO: 2454758 - RNA, 19 nt, Artificial Sequence
  Description of Artificial Sequence: Synthetic oligonucleotide
  Sense strand starting at position 3095 of SEQ ID NO: 1887190
gagccacauggccaagaau

SEQ ID NO: 2454759 - RNA, 19 nt, Artificial Sequence
  Description of Artificial Sequence: Synthetic oligonucleotide
  Antisense strand to SEQ ID NO: 2454758
auucuuggccauguggcuc

SEQ ID NO: 2454760 - RNA, 19 nt, Artificial Sequence
  Description of Artificial Sequence: Synthetic oligonucleotide
  Sense strand starting at position 3479 of SEQ ID NO: 1887190
accuuacauugucauagua

SEQ ID NO: 2454761 - RNA, 19 nt, Artificial Sequence
  Description of Artificial Sequence: Synthetic oligonucleotide
  Antisense strand to SEQ ID NO: 2454760
uacuaugacaauguaaggu

SEQ ID NO: 2454762 - RNA, 19 nt, Artificial Sequence
  Description of Artificial Sequence: Synthetic oligonucleotide
  Sense strand starting at position 3481 of SEQ ID NO: 1887190
cuuacauugucauaguaga

SEQ ID NO: 2454763 - RNA, 19 nt, Artificial Sequence
  Description of Artificial Sequence: Synthetic oligonucleotide
  Antisense strand to SEQ ID NO: 2454762
ucuacuaugacaauguaag

SEQ ID NO: 2454764 - RNA, 19 nt, Artificial Sequence
  Description of Artificial Sequence: Synthetic oligonucleotide
  Sense strand starting at position 3600 of SEQ ID NO: 1887190
uuuaaugaaucucgaugca

SEQ ID NO: 2454765 - RNA, 19 nt, Artificial Sequence
  Description of Artificial Sequence: Synthetic oligonucleotide
  Antisense strand to SEQ ID NO: 2454764
ugcaucgagauucauuaaa

SEQ ID NO: 2454766 - RNA, 19 nt, Artificial Sequence
  Description of Artificial Sequence: Synthetic oligonucleotide
  Sense strand starting at position 3609 of SEQ ID NO: 1887190
ucucgaugcagggauauau

SEQ ID NO: 2454767 - RNA, 19 nt, Artificial Sequence
  Description of Artificial Sequence: Synthetic oligonucleotide
  Antisense strand to SEQ ID NO: 2454766
auauaucccugcaucgaga

SEQ ID NO: 2454768 - RNA, 19 nt, Artificial Sequence
  Description of Artificial Sequence: Synthetic oligonucleotide
  Sense strand starting at position 3655 of SEQ ID NO: 1887190
ggucgccuguucuuugaca

SEQ ID NO: 2454769 - RNA, 19 nt, Artificial Sequence
  Description of Artificial Sequence: Synthetic oligonucleotide
  Antisense strand to SEQ ID NO: 2454768
ugucaaagaacaggcgacc

SEQ ID NO: 2454770 - RNA, 19 nt, Artificial Sequence
  Description of Artificial Sequence: Synthetic oligonucleotide
  Sense strand starting at position 3766 of SEQ ID NO: 1887190
acauccguuuccuaaaguu

SEQ ID NO: 2454771 - RNA, 19 nt, Artificial Sequence
  Description of Artificial Sequence: Synthetic oligonucleotide
  Antisense strand to SEQ ID NO: 2454770
aacuuuaggaaacggaugu

SEQ ID NO: 2454772 - RNA, 19 nt, Artificial Sequence
  Description of Artificial Sequence: Synthetic oligonucleotide
  Sense strand starting at position 3886 of SEQ ID NO: 1887190
gauucuucuuuacuggagu

SEQ ID NO: 2454773 - RNA, 19 nt, Artificial Sequence
  Description of Artificial Sequence: Synthetic oligonucleotide
  Antisense strand to SEQ ID NO: 2454772
acuccaguaaagaagaauc

SEQ ID NO: 2454774 - RNA, 19 nt, Artificial Sequence
  Description of Artificial Sequence: Synthetic oligonucleotide
  Sense strand starting at position 3887 of SEQ ID NO: 1887190
auucuucuuuacuggaguu

SEQ ID NO: 2454775 - RNA, 19 nt, Artificial Sequence
  Description of Artificial Sequence: Synthetic oligonucleotide
  Antisense strand to SEQ ID NO: 2454774
aacuccaguaaagaagaau

SEQ ID NO: 2454776 - RNA, 19 nt, Artificial Sequence
  Description of Artificial Sequence: Synthetic oligonucleotide
  Sense strand starting at position 3968 of SEQ ID NO: 1887190
ggccauugcugccagcaau

SEQ ID NO: 2454777 - RNA, 19 nt, Artificial Sequence
  Description of Artificial Sequence: Synthetic oligonucleotide
  Antisense strand to SEQ ID NO: 2454776
auugcuggcagcaauggcc

SEQ ID NO: 2454778 - RNA, 19 nt, Artificial Sequence
  Description of Artificial Sequence: Synthetic oligonucleotide
  Sense strand starting at position 33 of SEQ ID NO: 1887191
uauggauugcugcaugauu

SEQ ID NO: 2454779 - RNA, 19 nt, Artificial Sequence
  Description of Artificial Sequence: Synthetic oligonucleotide
  Antisense strand to SEQ ID NO: 2454778
aaucaugcagcaauccaua

SEQ ID NO: 2454780 - RNA, 19 nt, Artificial Sequence
  Description of Artificial Sequence: Synthetic oligonucleotide
  Sense strand starting at position 35 of SEQ ID NO: 1887191
uggauugcugcaugauucu

SEQ ID NO: 2454781 - RNA, 19 nt, Artificial Sequence
  Description of Artificial Sequence: Synthetic oligonucleotide
  Antisense strand to SEQ ID NO: 2454780
agaaucaugcagcaaucca

SEQ ID NO: 2454782 - RNA, 19 nt, Artificial Sequence
  Description of Artificial Sequence: Synthetic oligonucleotide
  Sense strand starting at position 99 of SEQ ID NO: 1887191
aagugagcuuaucugugaa

SEQ ID NO: 2454783 - RNA, 19 nt, Artificial Sequence
  Description of Artificial Sequence: Synthetic oligonucleotide
  Antisense strand to SEQ ID NO: 2454782
uucacagauaagcucacuu

SEQ ID NO: 2454784 - RNA, 19 nt, Artificial Sequence
  Description of Artificial Sequence: Synthetic oligonucleotide
  Sense strand starting at position 101 of SEQ ID NO: 1887191
gugagcuuaucugugaaag

SEQ ID NO: 2454785 - RNA, 19 nt, Artificial Sequence
  Description of Artificial Sequence: Synthetic oligonucleotide
  Antisense strand to SEQ ID NO: 2454784
cuuucacagauaagcucac

SEQ ID NO: 2454786 - RNA, 19 nt, Artificial Sequence
  Description of Artificial Sequence: Synthetic oligonucleotide
  Sense strand starting at position 102 of SEQ ID NO: 1887191
ugagcuuaucugugaaagu

SEQ ID NO: 2454787 - RNA, 19 nt, Artificial Sequence
  Description of Artificial Sequence: Synthetic oligonucleotide
  Antisense strand to SEQ ID NO: 2454786
acuuucacagauaagcuca

SEQ ID NO: 2454788 - RNA, 19 nt, Artificial Sequence
  Description of Artificial Sequence: Synthetic oligonucleotide
  Sense strand starting at position 113 of SEQ ID NO: 1887191
gugaaaguuucugucugac

SEQ ID NO: 2454789 - RNA, 19 nt, Artificial Sequence
  Description of Artificial Sequence: Synthetic oligonucleotide
  Antisense strand to SEQ ID NO: 2454788
gucagacagaaacuuucac

SEQ ID NO: 2454790 - RNA, 19 nt, Artificial Sequence
  Description of Artificial Sequence: Synthetic oligonucleotide
  Sense strand starting at position 115 of SEQ ID NO: 1887191
gaaaguuucugucugacuu

SEQ ID NO: 2454791 - RNA, 19 nt, Artificial Sequence
  Description of Artificial Sequence: Synthetic oligonucleotide
  Antisense strand to SEQ ID NO: 2454790
aagucagacagaaacuuuc

SEQ ID NO: 2454792 - RNA, 19 nt, Artificial Sequence
  Description of Artificial Sequence: Synthetic oligonucleotide
  Sense strand starting at position 481 of SEQ ID NO: 1887191
ugacuuaaagguuggugaa

SEQ ID NO: 2454793 - RNA, 19 nt, Artificial Sequence
  Description of Artificial Sequence: Synthetic oligonucleotide
  Antisense strand to SEQ ID NO: 2454792
uucaccaaccuuuaaguca

SEQ ID NO: 2454794 - RNA, 19 nt, Artificial Sequence
  Description of Artificial Sequence: Synthetic oligonucleotide
  Sense strand starting at position 482 of SEQ ID NO: 1887191
gacuuaaagguuggugaaa

SEQ ID NO: 2454795 - RNA, 19 nt, Artificial Sequence
  Description of Artificial Sequence: Synthetic oligonucleotide
  Antisense strand to SEQ ID NO: 2454794
uuucaccaaccuuuaaguc

SEQ ID NO: 2454796 - RNA, 19 nt, Artificial Sequence
  Description of Artificial Sequence: Synthetic oligonucleotide
  Sense strand starting at position 483 of SEQ ID NO: 1887191
acuuaaagguuggugaaau

SEQ ID NO: 2454797 - RNA, 19 nt, Artificial Sequence
  Description of Artificial Sequence: Synthetic oligonucleotide
  Antisense strand to SEQ ID NO: 2454796
auuucaccaaccuuuaagu

SEQ ID NO: 2454798 - RNA, 19 nt, Artificial Sequence
  Description of Artificial Sequence: Synthetic oligonucleotide
  Sense strand starting at position 493 of SEQ ID NO: 1887191
uggugaaauuaauugggca

SEQ ID NO: 2454799 - RNA, 19 nt, Artificial Sequence
  Description of Artificial Sequence: Synthetic oligonucleotide
  Antisense strand to SEQ ID NO: 2454798
ugcccaauuaauuucacca

SEQ ID NO: 2454800 - RNA, 19 nt, Artificial Sequence
  Description of Artificial Sequence: Synthetic oligonucleotide
  Sense strand starting at position 494 of SEQ ID NO: 1887191
ggugaaauuaauugggcaa

SEQ ID NO: 2454801 - RNA, 19 nt, Artificial Sequence
  Description of Artificial Sequence: Synthetic oligonucleotide
  Antisense strand to SEQ ID NO: 2454800
uugcccaauuaauuucacc

SEQ ID NO: 2454802 - RNA, 19 nt, Artificial Sequence
  Description of Artificial Sequence: Synthetic oligonucleotide
  Sense strand starting at position 495 of SEQ ID NO: 1887191
gugaaauuaauugggcaaa

SEQ ID NO: 2454803 - RNA, 19 nt, Artificial Sequence
  Description of Artificial Sequence: Synthetic oligonucleotide
  Antisense strand to SEQ ID NO: 2454802
uuugcccaauuaauuucac

SEQ ID NO: 2454804 - RNA, 19 nt, Artificial Sequence
  Description of Artificial Sequence: Synthetic oligonucleotide
  Sense strand starting at position 496 of SEQ ID NO: 1887191
ugaaauuaauugggcaaau

SEQ ID NO: 2454805 - RNA, 19 nt, Artificial Sequence
  Description of Artificial Sequence: Synthetic oligonucleotide
  Antisense strand to SEQ ID NO: 2454804
auuugcccaauuaauuuca

SEQ ID NO: 2454806 - RNA, 19 nt, Artificial Sequence
  Description of Artificial Sequence: Synthetic oligonucleotide
  Sense strand starting at position 522 of SEQ ID NO: 1887191
cuaggagaauuugacaagu

SEQ ID NO: 2454807 - RNA, 19 nt, Artificial Sequence
  Description of Artificial Sequence: Synthetic oligonucleotide
  Antisense strand to SEQ ID NO: 2454806
acuugucaaauucuccuag

SEQ ID NO: 2454808 - RNA, 19 nt, Artificial Sequence
  Description of Artificial Sequence: Synthetic oligonucleotide
  Sense strand starting at position 532 of SEQ ID NO: 1887191
uugacaaguccaugacuuc

SEQ ID NO: 2454809 - RNA, 19 nt, Artificial Sequence
  Description of Artificial Sequence: Synthetic oligonucleotide
  Antisense strand to SEQ ID NO: 2454808
gaagucauggacuugucaa

SEQ ID NO: 2454810 - RNA, 19 nt, Artificial Sequence
  Description of Artificial Sequence: Synthetic oligonucleotide
  Sense strand starting at position 581 of SEQ ID NO: 1887191
gcugucuccagaggaguga

SEQ ID NO: 2454811 - RNA, 19 nt, Artificial Sequence
  Description of Artificial Sequence: Synthetic oligonucleotide
  Antisense strand to SEQ ID NO: 2454810
ucacuccucuggagacagc

SEQ ID NO: 2454812 - RNA, 19 nt, Artificial Sequence
  Description of Artificial Sequence: Synthetic oligonucleotide
  Sense strand starting at position 596 of SEQ ID NO: 1887191
gugagugcgcuucugcaga

SEQ ID NO: 2454813 - RNA, 19 nt, Artificial Sequence
  Description of Artificial Sequence: Synthetic oligonucleotide
  Antisense strand to SEQ ID NO: 2454812
ucugcagaagcgcacucac

SEQ ID NO: 2454814 - RNA, 19 nt, Artificial Sequence
  Description of Artificial Sequence: Synthetic oligonucleotide
  Sense strand starting at position 609 of SEQ ID NO: 1887191
ugcagaagccucuggaaug

SEQ ID NO: 2454815 - RNA, 19 nt, Artificial Sequence
  Description of Artificial Sequence: Synthetic oligonucleotide
  Antisense strand to SEQ ID NO: 2454814
cauuccagaggcuucugca

SEQ ID NO: 2454816 - RNA, 19 nt, Artificial Sequence
  Description of Artificial Sequence: Synthetic oligonucleotide
  Sense strand starting at position 736 of SEQ ID NO: 1887191
gcagguggcaucggaaagu

SEQ ID NO: 2454817 - RNA, 19 nt, Artificial Sequence
  Description of Artificial Sequence: Synthetic oligonucleotide
  Antisense strand to SEQ ID NO: 2454816
acuuuccgaugccaccugc

SEQ ID NO: 2454818 - RNA, 19 nt, Artificial Sequence
  Description of Artificial Sequence: Synthetic oligonucleotide
  Sense strand starting at position 1391 of SEQ ID NO: 1887191
gggagcaacuucuuccaga

SEQ ID NO: 2454819 - RNA, 19 nt, Artificial Sequence
  Description of Artificial Sequence: Synthetic oligonucleotide
  Antisense strand to SEQ ID NO: 2454818
ucuggaagaaguugcuccc

SEQ ID NO: 2454820 - RNA, 19 nt, Artificial Sequence
  Description of Artificial Sequence: Synthetic oligonucleotide
  Sense strand starting at position 1392 of SEQ ID NO: 1887191
ggagcaacuucuuccagaa

SEQ ID NO: 2454821 - RNA, 19 nt, Artificial Sequence
  Description of Artificial Sequence: Synthetic oligonucleotide
  Antisense strand to SEQ ID NO: 2454820
uucuggaagaaguugcucc

SEQ ID NO: 2454822 - RNA, 19 nt, Artificial Sequence
  Description of Artificial Sequence: Synthetic oligonucleotide
  Sense strand starting at position 1505 of SEQ ID NO: 1887191
cucauucguccuuaacgga

SEQ ID NO: 2454823 - RNA, 19 nt, Artificial Sequence
  Description of Artificial Sequence: Synthetic oligonucleotide
  Antisense strand to SEQ ID NO: 2454822
uccguuaaggacgaaugag

SEQ ID NO: 2454824 - RNA, 19 nt, Artificial Sequence
  Description of Artificial Sequence: Synthetic oligonucleotide
  Sense strand starting at position 1870 of SEQ ID NO: 1887191
cccauaccucggcacuaaa

SEQ ID NO: 2454825 - RNA, 19 nt, Artificial Sequence
  Description of Artificial Sequence: Synthetic oligonucleotide
  Antisense strand to SEQ ID NO: 2454824
uuuagugccgagguauggg

SEQ ID NO: 2454826 - RNA, 19 nt, Artificial Sequence
  Description of Artificial Sequence: Synthetic oligonucleotide
  Sense strand starting at position 2278 of SEQ ID NO: 1887191
gcaggaauucuccauucuc

SEQ ID NO: 2454827 - RNA, 19 nt, Artificial Sequence
  Description of Artificial Sequence: Synthetic oligonucleotide
  Antisense strand to SEQ ID NO: 2454826
gagaauggagaauuccugc

SEQ ID NO: 2454828 - RNA, 19 nt, Artificial Sequence
  Description of Artificial Sequence: Synthetic oligonucleotide
  Sense strand starting at position 2616 of SEQ ID NO: 1887191
cggacaacuucugcuacuu

SEQ ID NO: 2454829 - RNA, 19 nt, Artificial Sequence
  Description of Artificial Sequence: Synthetic oligonucleotide
  Antisense strand to SEQ ID NO: 2454828
aaguagcagaaguuguccg

SEQ ID NO: 2454830 - RNA, 19 nt, Artificial Sequence
  Description of Artificial Sequence: Synthetic oligonucleotide
  Sense strand starting at position 2822 of SEQ ID NO: 1887191
uccuuugacuuccagagag

SEQ ID NO: 2454831 - RNA, 19 nt, Artificial Sequence
  Description of Artificial Sequence: Synthetic oligonucleotide
  Antisense strand to SEQ ID NO: 2454830
cucucuggaagucaaagga

SEQ ID NO: 2454832 - RNA, 19 nt, Artificial Sequence
  Description of Artificial Sequence: Synthetic oligonucleotide
  Sense strand starting at position 2855 of SEQ ID NO: 1887191
gggagaauguccagaggug

SEQ ID NO: 2454833 - RNA, 19 nt, Artificial Sequence
  Description of Artificial Sequence: Synthetic oligonucleotide
  Antisense strand to SEQ ID NO: 2454832
caccucuggacauucuccc

SEQ ID NO: 2454834 - RNA, 19 nt, Artificial Sequence
  Description of Artificial Sequence: Synthetic oligonucleotide
  Sense strand starting at position 3004 of SEQ ID NO: 1887191
ggcgcauucuugucccaag

SEQ ID NO: 2454835 - RNA, 19 nt, Artificial Sequence
  Description of Artificial Sequence: Synthetic oligonucleotide
  Antisense strand to SEQ ID NO: 2454834
cuugggacaagaaugcgcc

SEQ ID NO: 2454836 - RNA, 19 nt, Artificial Sequence
  Description of Artificial Sequence: Synthetic oligonucleotide
  Sense strand starting at position 3005 of SEQ ID NO: 1887191
gcgcauucuugucccaagu

SEQ ID NO: 2454837 - RNA, 19 nt, Artificial Sequence
  Description of Artificial Sequence: Synthetic oligonucleotide
  Antisense strand to SEQ ID NO: 2454836
acuugggacaagaaugcgc

SEQ ID NO: 2454838 - RNA, 19 nt, Artificial Sequence
  Description of Artificial Sequence: Synthetic oligonucleotide
  Sense strand starting at position 3022 of SEQ ID NO: 1887191
guccuagaauuccuagaca

SEQ ID NO: 2454839 - RNA, 19 nt, Artificial Sequence
  Description of Artificial Sequence: Synthetic oligonucleotide
  Antisense strand to SEQ ID NO: 2454838
ugucuaggaauucuaggac

SEQ ID NO: 2454840 - RNA, 19 nt, Artificial Sequence
  Description of Artificial Sequence: Synthetic oligonucleotide
  Sense strand starting at position 3310 of SEQ ID NO: 1887191
gggacaauuaccugagcca

SEQ ID NO: 2454841 - RNA, 19 nt, Artificial Sequence
  Description of Artificial Sequence: Synthetic oligonucleotide
  Antisense strand to SEQ ID NO: 2454840
uggcucagguaauuguccc

SEQ ID NO: 2454842 - RNA, 19 nt, Artificial Sequence
  Description of Artificial Sequence: Synthetic oligonucleotide
  Sense strand starting at position 3500 of SEQ ID NO: 1887191
gcaggcuuuggacaagauu

SEQ ID NO: 2454843 - RNA, 19 nt, Artificial Sequence
  Description of Artificial Sequence: Synthetic oligonucleotide
  Antisense strand to SEQ ID NO: 2454842
aaucuuguccaaagccugc

SEQ ID NO: 2454844 - RNA, 19 nt, Artificial Sequence
  Description of Artificial Sequence: Synthetic oligonucleotide
  Sense strand starting at position 3568 of SEQ ID NO: 1887191
uaggcagugcccuaagagu

SEQ ID NO: 2454845 - RNA, 19 nt, Artificial Sequence
  Description of Artificial Sequence: Synthetic oligonucleotide
  Antisense strand to SEQ ID NO: 2454844
acucuuagggcacugccua

SEQ ID NO: 2454846 - RNA, 19 nt, Artificial Sequence
  Description of Artificial Sequence: Synthetic oligonucleotide
  Sense strand starting at position 3816 of SEQ ID NO: 1887191
gaaugagugcuaugcucuu

SEQ ID NO: 2454847 - RNA, 19 nt, Artificial Sequence
  Description of Artificial Sequence: Synthetic oligonucleotide
  Antisense strand to SEQ ID NO: 2454846
aagagcauagcacucauuc

SEQ ID NO: 2454848 - RNA, 19 nt, Artificial Sequence
  Description of Artificial Sequence: Synthetic oligonucleotide
  Sense strand starting at position 3820 of SEQ ID NO: 1887191
gagugcuaugcucuuagcu

SEQ ID NO: 2454849 - RNA, 19 nt, Artificial Sequence
  Description of Artificial Sequence: Synthetic oligonucleotide
  Antisense strand to SEQ ID NO: 2454848
agcuaagagcauagcacuc

SEQ ID NO: 2454850 - RNA, 19 nt, Artificial Sequence
  Description of Artificial Sequence: Synthetic oligonucleotide
  Sense strand starting at position 3833 of SEQ ID NO: 1887191
uuagcucuuggcuggguaa

SEQ ID NO: 2454851 - RNA, 19 nt, Artificial Sequence
  Description of Artificial Sequence: Synthetic oligonucleotide
  Antisense strand to SEQ ID NO: 2454850
uuacccagccaagagcuaa

SEQ ID NO: 2454852 - RNA, 19 nt, Artificial Sequence
  Description of Artificial Sequence: Synthetic oligonucleotide
  Sense strand starting at position 3834 of SEQ ID NO: 1887191
uagcucuuggcuggguaau

SEQ ID NO: 2454853 - RNA, 19 nt, Artificial Sequence
  Description of Artificial Sequence: Synthetic oligonucleotide
  Antisense strand to SEQ ID NO: 2454852
auuacccagccaagagcua

SEQ ID NO: 2454854 - RNA, 19 nt, Artificial Sequence
  Description of Artificial Sequence: Synthetic oligonucleotide
  Sense strand starting at position 3835 of SEQ ID NO: 1887191
agcucuuggcuggguaaua

SEQ ID NO: 2454855 - RNA, 19 nt, Artificial Sequence
  Description of Artificial Sequence: Synthetic oligonucleotide
  Antisense strand to SEQ ID NO: 2454854
uauuacccagccaagagcu

SEQ ID NO: 2454856 - RNA, 19 nt, Artificial Sequence
  Description of Artificial Sequence: Synthetic oligonucleotide
  Sense strand starting at position 3836 of SEQ ID NO: 1887191
gcucuuggcuggguaauaa

SEQ ID NO: 2454857 - RNA, 19 nt, Artificial Sequence
  Description of Artificial Sequence: Synthetic oligonucleotide
  Antisense strand to SEQ ID NO: 2454856
uuauuacccagccaagagc

SEQ ID NO: 2454858 - RNA, 19 nt, Artificial Sequence
  Description of Artificial Sequence: Synthetic oligonucleotide
  Sense strand starting at position 915 of SEQ ID NO: 1887192
acccguuacuuagcagaau

SEQ ID NO: 2454859 - RNA, 19 nt, Artificial Sequence
  Description of Artificial Sequence: Synthetic oligonucleotide
  Antisense strand to SEQ ID NO: 2454858
auucugcuaaguaacgggu

SEQ ID NO: 2454860 - RNA, 19 nt, Artificial Sequence
  Description of Artificial Sequence: Synthetic oligonucleotide
  Sense strand starting at position 916 of SEQ ID NO: 1887192
cccguuacuuagcagaauu

SEQ ID NO: 2454861 - RNA, 19 nt, Artificial Sequence
  Description of Artificial Sequence: Synthetic oligonucleotide
  Antisense strand to SEQ ID NO: 2454860
aauucugcuaaguaacggg

SEQ ID NO: 2454862 - RNA, 19 nt, Artificial Sequence
  Description of Artificial Sequence: Synthetic oligonucleotide
  Sense strand starting at position 578 of SEQ ID NO: 1887193
gcguauggcugaucccgua

SEQ ID NO: 2454863 - RNA, 19 nt, Artificial Sequence
  Description of Artificial Sequence: Synthetic oligonucleotide
  Antisense strand to SEQ ID NO: 2454862
uacgggaucagccauacgc

SEQ ID NO: 2454864 - RNA, 19 nt, Artificial Sequence
  Description of Artificial Sequence: Synthetic oligonucleotide
  Sense strand starting at position 2131 of SEQ ID NO: 1887193
ucgggcugauuuccuuauu

SEQ ID NO: 2454865 - RNA, 19 nt, Artificial Sequence
  Description of Artificial Sequence: Synthetic oligonucleotide
  Antisense strand to SEQ ID NO: 2454864
aauaaggaaaucagcccga

SEQ ID NO: 2454866 - RNA, 19 nt, Artificial Sequence
  Description of Artificial Sequence: Synthetic oligonucleotide
  Sense strand starting at position 872 of SEQ ID NO: 1887194
ucgggcugauuuccuuauu

SEQ ID NO: 2454867 - RNA, 19 nt, Artificial Sequence
  Description of Artificial Sequence: Synthetic oligonucleotide
  Antisense strand to SEQ ID NO: 2454866
aauaaggaaaucagcccga

SEQ ID NO: 2454868 - RNA, 19 nt, Artificial Sequence
  Description of Artificial Sequence: Synthetic oligonucleotide
  Sense strand starting at position 3257 of SEQ ID NO: 1887194
ggauaaaguuccucuccga

SEQ ID NO: 2454869 - RNA, 19 nt, Artificial Sequence
  Description of Artificial Sequence: Synthetic oligonucleotide
  Antisense strand to SEQ ID NO: 2454868
ucggagaggaacuuuaucc

SEQ ID NO: 2454870 - RNA, 19 nt, Artificial Sequence
  Description of Artificial Sequence: Synthetic oligonucleotide
  Sense strand starting at position 3853 of SEQ ID NO: 1887195
cuccuuggcuagcgguaau

SEQ ID NO: 2454871 - RNA, 19 nt, Artificial Sequence
  Description of Artificial Sequence: Synthetic oligonucleotide
  Antisense strand to SEQ ID NO: 2454870
auuaccgcuagccaaggag

SEQ ID NO: 2454872 - RNA, 19 nt, Artificial Sequence
  Description of Artificial Sequence: Synthetic oligonucleotide
  Sense strand starting at position 1633 of SEQ ID NO: 1887196
acgaaagcgugccacauaa

SEQ ID NO: 2454873 - RNA, 19 nt, Artificial Sequence
  Description of Artificial Sequence: Synthetic oligonucleotide
  Antisense strand to SEQ ID NO: 2454872
uuauguggcacgcuuucgu

SEQ ID NO: 2454874 - RNA, 19 nt, Artificial Sequence
  Description of Artificial Sequence: Synthetic oligonucleotide
  Sense strand starting at position 2539 of SEQ ID NO: 1887196
uggauaaaguucuuuccga

SEQ ID NO: 2454875 - RNA, 19 nt, Artificial Sequence
  Description of Artificial Sequence: Synthetic oligonucleotide
  Antisense strand to SEQ ID NO: 2454874
ucggaaagaacuuuaucca

SEQ ID NO: 2454876 - RNA, 19 nt, Artificial Sequence
  Description of Artificial Sequence: Synthetic oligonucleotide
  Sense strand starting at position 2540 of SEQ ID NO: 1887196
ggauaaaguucuuuccgag

SEQ ID NO: 2454877 - RNA, 19 nt, Artificial Sequence
  Description of Artificial Sequence: Synthetic oligonucleotide
  Antisense strand to SEQ ID NO: 2454876
cucggaaagaacuuuaucc

SEQ ID NO: 2454878 - RNA, 19 nt, Artificial Sequence
  Description of Artificial Sequence: Synthetic oligonucleotide
  Sense strand starting at position 2544 of SEQ ID NO: 1887196
aaaguucuuuccgagcaca

SEQ ID NO: 2454879 - RNA, 19 nt, Artificial Sequence
  Description of Artificial Sequence: Synthetic oligonucleotide
  Antisense strand to SEQ ID NO: 2454878
ugugcucggaaagaacuuu

SEQ ID NO: 2454880 - RNA, 19 nt, Artificial Sequence
  Description of Artificial Sequence: Synthetic oligonucleotide
  Sense strand starting at position 2309 of SEQ ID NO: 1887197
gggcgacuuccuuguucga

SEQ ID NO: 2454881 - RNA, 19 nt, Artificial Sequence
  Description of Artificial Sequence: Synthetic oligonucleotide
  Antisense strand to SEQ ID NO: 2454880
ucgaacaaggaagucgccc

SEQ ID NO: 2454882 - RNA, 19 nt, Artificial Sequence
  Description of Artificial Sequence: Synthetic oligonucleotide
  Sense strand starting at position 2311 of SEQ ID NO: 1887197
gcgacuuccuuguucgaau

SEQ ID NO: 2454883 - RNA, 19 nt, Artificial Sequence
  Description of Artificial Sequence: Synthetic oligonucleotide
  Antisense strand to SEQ ID NO: 2454882
auucgaacaaggaagucgc

SEQ ID NO: 2454884 - RNA, 19 nt, Artificial Sequence
  Description of Artificial Sequence: Synthetic oligonucleotide
  Sense strand starting at position 2312 of SEQ ID NO: 1887197
cgacuuccuuguucgaauc

SEQ ID NO: 2454885 - RNA, 19 nt, Artificial Sequence
  Description of Artificial Sequence: Synthetic oligonucleotide
  Antisense strand to SEQ ID NO: 2454884
gauucgaacaaggaagucg

SEQ ID NO: 2454886 - RNA, 19 nt, Artificial Sequence
  Description of Artificial Sequence: Synthetic oligonucleotide
  Sense strand starting at position 2377 of SEQ ID NO: 1887197
ccggguucuguggaagaua

SEQ ID NO: 2454887 - RNA, 19 nt, Artificial Sequence
  Description of Artificial Sequence: Synthetic oligonucleotide
  Antisense strand to SEQ ID NO: 2454886
uaucuuccacagaacccgg

SEQ ID NO: 2454888 - RNA, 19 nt, Artificial Sequence
  Description of Artificial Sequence: Synthetic oligonucleotide
  Sense strand starting at position 2378 of SEQ ID NO: 1887197
cggguucuguggaagauaa

SEQ ID NO: 2454889 - RNA, 19 nt, Artificial Sequence
  Description of Artificial Sequence: Synthetic oligonucleotide
  Antisense strand to SEQ ID NO: 2454888
uuaucuuccacagaacccg

SEQ ID NO: 2454890 - RNA, 19 nt, Artificial Sequence
  Description of Artificial Sequence: Synthetic oligonucleotide
  Sense strand starting at position 2380 of SEQ ID NO: 1887197
gguucuguggaagauaacu

SEQ ID NO: 2454891 - RNA, 19 nt, Artificial Sequence
  Description of Artificial Sequence: Synthetic oligonucleotide
  Antisense strand to SEQ ID NO: 2454890
aguuaucuuccacagaacc

SEQ ID NO: 2454892 - RNA, 19 nt, Artificial Sequence
  Description of Artificial Sequence: Synthetic oligonucleotide
  Sense strand starting at position 2389 of SEQ ID NO: 1887197
gaagauaacugucgacaga

SEQ ID NO: 2454893 - RNA, 19 nt, Artificial Sequence
  Description of Artificial Sequence: Synthetic oligonucleotide
  Antisense strand to SEQ ID NO: 2454892
ucugucgacaguuaucuuc

SEQ ID NO: 2454894 - RNA, 19 nt, Artificial Sequence
  Description of Artificial Sequence: Synthetic oligonucleotide
  Sense strand starting at position 3884 of SEQ ID NO: 1887197
ugggaagggcccugguuua

SEQ ID NO: 2454895 - RNA, 19 nt, Artificial Sequence
  Description of Artificial Sequence: Synthetic oligonucleotide
  Antisense strand to SEQ ID NO: 2454894
uaaaccagggcccuuccca

SEQ ID NO: 2454896 - RNA, 19 nt, Artificial Sequence
  Description of Artificial Sequence: Synthetic oligonucleotide
  Sense strand starting at position 3239 of SEQ ID NO: 1887200
ggauaaaguuccuuuccga

SEQ ID NO: 2454897 - RNA, 19 nt, Artificial Sequence
  Description of Artificial Sequence: Synthetic oligonucleotide
  Antisense strand to SEQ ID NO: 2454896
ucggaaaggaacuuuaucc

SEQ ID NO: 2454898 - RNA, 19 nt, Artificial Sequence
  Description of Artificial Sequence: Synthetic oligonucleotide
  Sense strand starting at position 930 of SEQ ID NO: 1887201
ugagauagucuucgucgga

SEQ ID NO: 2454899 - RNA, 19 nt, Artificial Sequence
  Description of Artificial Sequence: Synthetic oligonucleotide
  Antisense strand to SEQ ID NO: 2454898
uccgacgaagacuaucuca

SEQ ID NO: 2454900 - RNA, 19 nt, Artificial Sequence
  Description of Artificial Sequence: Synthetic oligonucleotide
  Sense strand starting at position 931 of SEQ ID NO: 1887201
gagauagucuucgucggac

SEQ ID NO: 2454901 - RNA, 19 nt, Artificial Sequence
  Description of Artificial Sequence: Synthetic oligonucleotide
  Antisense strand to SEQ ID NO: 2454900
guccgacgaagacuaucuc

SEQ ID NO: 2454902 - RNA, 19 nt, Artificial Sequence
  Description of Artificial Sequence: Synthetic oligonucleotide
  Sense strand starting at position 1029 of SEQ ID NO: 1887201
gcauguucucgcuccgaag

SEQ ID NO: 2454903 - RNA, 19 nt, Artificial Sequence
  Description of Artificial Sequence: Synthetic oligonucleotide
  Antisense strand to SEQ ID NO: 2454902
cuucggagcgagaacaugc

SEQ ID NO: 2454904 - RNA, 19 nt, Artificial Sequence
  Description of Artificial Sequence: Synthetic oligonucleotide
  Sense strand starting at position 3353 of SEQ ID NO: 1887201
cugcgcauuaccugggaaa

SEQ ID NO: 2454905 - RNA, 19 nt, Artificial Sequence
  Description of Artificial Sequence: Synthetic oligonucleotide
  Antisense strand to SEQ ID NO: 2454904
uuucccagguaaugcgcag

SEQ ID NO: 2454906 - RNA, 19 nt, Artificial Sequence
  Description of Artificial Sequence: Synthetic oligonucleotide
  Sense strand starting at position 38 of SEQ ID NO: 1887202
uggguuaaaggcuguugaa

SEQ ID NO: 2454907 - RNA, 19 nt, Artificial Sequence
  Description of Artificial Sequence: Synthetic oligonucleotide
  Antisense strand to SEQ ID NO: 2454906
uucaacagccuuuaaccca

SEQ ID NO: 2454908 - RNA, 19 nt, Artificial Sequence
  Description of Artificial Sequence: Synthetic oligonucleotide
  Sense strand starting at position 405 of SEQ ID NO: 1887202
acucuuacauuaguugaga

SEQ ID NO: 2454909 - RNA, 19 nt, Artificial Sequence
  Description of Artificial Sequence: Synthetic oligonucleotide
  Antisense strand to SEQ ID NO: 2454908
ucucaacuaauguaagagu

SEQ ID NO: 2454910 - RNA, 19 nt, Artificial Sequence
  Description of Artificial Sequence: Synthetic oligonucleotide
  Sense strand starting at position 406 of SEQ ID NO: 1887202
cucuuacauuaguugagaa

SEQ ID NO: 2454911 - RNA, 19 nt, Artificial Sequence
  Description of Artificial Sequence: Synthetic oligonucleotide
  Antisense strand to SEQ ID NO: 2454910
uucucaacuaauguaagag

SEQ ID NO: 2454912 - RNA, 19 nt, Artificial Sequence
  Description of Artificial Sequence: Synthetic oligonucleotide
  Sense strand starting at position 485 of SEQ ID NO: 1887202
ugcauauuccucuguagag

SEQ ID NO: 2454913 - RNA, 19 nt, Artificial Sequence
  Description of Artificial Sequence: Synthetic oligonucleotide
  Antisense strand to SEQ ID NO: 2454912
cucuacagaggaauaugca

SEQ ID NO: 2454914 - RNA, 19 nt, Artificial Sequence
  Description of Artificial Sequence: Synthetic oligonucleotide
  Sense strand starting at position 486 of SEQ ID NO: 1887202
gcauauuccucuguagaga

SEQ ID NO: 2454915 - RNA, 19 nt, Artificial Sequence
  Description of Artificial Sequence: Synthetic oligonucleotide
  Antisense strand to SEQ ID NO: 2454914
ucucuacagaggaauaugc

SEQ ID NO: 2454916 - RNA, 19 nt, Artificial Sequence
  Description of Artificial Sequence: Synthetic oligonucleotide
  Sense strand starting at position 579 of SEQ ID NO: 1887202
aaugguugugugcauaaua

SEQ ID NO: 2454917 - RNA, 19 nt, Artificial Sequence
  Description of Artificial Sequence: Synthetic oligonucleotide
  Antisense strand to SEQ ID NO: 2454916
uauuaugcacacaaccauu

SEQ ID NO: 2454918 - RNA, 19 nt, Artificial Sequence
  Description of Artificial Sequence: Synthetic oligonucleotide
  Sense strand starting at position 655 of SEQ ID NO: 1887202
ucuagauauggcuggguaa

SEQ ID NO: 2454919 - RNA, 19 nt, Artificial Sequence
  Description of Artificial Sequence: Synthetic oligonucleotide
  Antisense strand to SEQ ID NO: 2454918
uuacccagccauaucuaga

SEQ ID NO: 2454920 - RNA, 19 nt, Artificial Sequence
  Description of Artificial Sequence: Synthetic oligonucleotide
  Sense strand starting at position 656 of SEQ ID NO: 1887202
cuagauauggcuggguaac

SEQ ID NO: 2454921 - RNA, 19 nt, Artificial Sequence
  Description of Artificial Sequence: Synthetic oligonucleotide
  Antisense strand to SEQ ID NO: 2454920
guuacccagccauaucuag

SEQ ID NO: 2454922 - RNA, 19 nt, Artificial Sequence
  Description of Artificial Sequence: Synthetic oligonucleotide
  Sense strand starting at position 696 of SEQ ID NO: 1887202
uucugaacucagggagguu

SEQ ID NO: 2454923 - RNA, 19 nt, Artificial Sequence
  Description of Artificial Sequence: Synthetic oligonucleotide
  Antisense strand to SEQ ID NO: 2454922
aaccucccugaguucagaa

SEQ ID NO: 2454924 - RNA, 19 nt, Artificial Sequence
  Description of Artificial Sequence: Synthetic oligonucleotide
  Sense strand starting at position 762 of SEQ ID NO: 1887202
ucacaauucuaguuauagg

SEQ ID NO: 2454925 - RNA, 19 nt, Artificial Sequence
  Description of Artificial Sequence: Synthetic oligonucleotide
  Antisense strand to SEQ ID NO: 2454924
ccuauaacuagaauuguga

SEQ ID NO: 2454926 - RNA, 19 nt, Artificial Sequence
  Description of Artificial Sequence: Synthetic oligonucleotide
  Sense strand starting at position 808 of SEQ ID NO: 1887202
cgagacguggcuuaaacaa

SEQ ID NO: 2454927 - RNA, 19 nt, Artificial Sequence
  Description of Artificial Sequence: Synthetic oligonucleotide
  Antisense strand to SEQ ID NO: 2454926
uuguuuaagccacgucucg

SEQ ID NO: 2454928 - RNA, 19 nt, Artificial Sequence
  Description of Artificial Sequence: Synthetic oligonucleotide
  Sense strand starting at position 863 of SEQ ID NO: 1887202
cauugucaaggcugagaaa

SEQ ID NO: 2454929 - RNA, 19 nt, Artificial Sequence
  Description of Artificial Sequence: Synthetic oligonucleotide
  Antisense strand to SEQ ID NO: 2454928
uuucucagccuugacaaug

SEQ ID NO: 2454930 - RNA, 19 nt, Artificial Sequence
  Description of Artificial Sequence: Synthetic oligonucleotide
  Sense strand starting at position 874 of SEQ ID NO: 1887202
cugagaaacucugcuguau

SEQ ID NO: 2454931 - RNA, 19 nt, Artificial Sequence
  Description of Artificial Sequence: Synthetic oligonucleotide
  Antisense strand to SEQ ID NO: 2454930
auacagcagaguuucucag

SEQ ID NO: 2454932 - RNA, 19 nt, Artificial Sequence
  Description of Artificial Sequence: Synthetic oligonucleotide
  Sense strand starting at position 911 of SEQ ID NO: 1887202
cggguuacuuucuuggaca

SEQ ID NO: 2454933 - RNA, 19 nt, Artificial Sequence
  Description of Artificial Sequence: Synthetic oligonucleotide
  Antisense strand to SEQ ID NO: 2454932
uguccaagaaaguaacccg

SEQ ID NO: 2454934 - RNA, 19 nt, Artificial Sequence
  Description of Artificial Sequence: Synthetic oligonucleotide
  Sense strand starting at position 913 of SEQ ID NO: 1887202
gguuacuuucuuggacauu

SEQ ID NO: 2454935 - RNA, 19 nt, Artificial Sequence
  Description of Artificial Sequence: Synthetic oligonucleotide
  Antisense strand to SEQ ID NO: 2454934
aauguccaagaaaguaacc

SEQ ID NO: 2454936 - RNA, 19 nt, Artificial Sequence
  Description of Artificial Sequence: Synthetic oligonucleotide
  Sense strand starting at position 1117 of SEQ ID NO: 1887202
cggugauguccugaccaca

SEQ ID NO: 2454937 - RNA, 19 nt, Artificial Sequence
  Description of Artificial Sequence: Synthetic oligonucleotide
  Antisense strand to SEQ ID NO: 2454936
uguggucaggacaucaccg

SEQ ID NO: 2454938 - RNA, 19 nt, Artificial Sequence
  Description of Artificial Sequence: Synthetic oligonucleotide
  Sense strand starting at position 1120 of SEQ ID NO: 1887202
ugauguccugaccacaauu

SEQ ID NO: 2454939 - RNA, 19 nt, Artificial Sequence
  Description of Artificial Sequence: Synthetic oligonucleotide
  Antisense strand to SEQ ID NO: 2454938
aauuguggucaggacauca

SEQ ID NO: 2454940 - RNA, 19 nt, Artificial Sequence
  Description of Artificial Sequence: Synthetic oligonucleotide
  Sense strand starting at position 1195 of SEQ ID NO: 1887202
gggcuaaucccacacucua

SEQ ID NO: 2454941 - RNA, 19 nt, Artificial Sequence
  Description of Artificial Sequence: Synthetic oligonucleotide
  Antisense strand to SEQ ID NO: 2454940
uagagugugggauuagccc

SEQ ID NO: 2454942 - RNA, 19 nt, Artificial Sequence
  Description of Artificial Sequence: Synthetic oligonucleotide
  Sense strand starting at position 2158 of SEQ ID NO: 1887202
ugacgagaaacguggucuu

SEQ ID NO: 2454943 - RNA, 19 nt, Artificial Sequence
  Description of Artificial Sequence: Synthetic oligonucleotide
  Antisense strand to SEQ ID NO: 2454942
aagaccacguuucucguca

SEQ ID NO: 2454944 - RNA, 19 nt, Artificial Sequence
  Description of Artificial Sequence: Synthetic oligonucleotide
  Sense strand starting at position 2503 of SEQ ID NO: 1887202
auacuagugacggaugagu

SEQ ID NO: 2454945 - RNA, 19 nt, Artificial Sequence
  Description of Artificial Sequence: Synthetic oligonucleotide
  Antisense strand to SEQ ID NO: 2454944
acucauccgucacuaguau

SEQ ID NO: 2454946 - RNA, 19 nt, Artificial Sequence
  Description of Artificial Sequence: Synthetic oligonucleotide
  Sense strand starting at position 2582 of SEQ ID NO: 1887202
uuuaguuucgucgagagaa

SEQ ID NO: 2454947 - RNA, 19 nt, Artificial Sequence
  Description of Artificial Sequence: Synthetic oligonucleotide
  Antisense strand to SEQ ID NO: 2454946
uucucucgacgaaacuaaa

SEQ ID NO: 2454948 - RNA, 19 nt, Artificial Sequence
  Description of Artificial Sequence: Synthetic oligonucleotide
  Sense strand starting at position 2584 of SEQ ID NO: 1887202
uaguuucgucgagagaaac

SEQ ID NO: 2454949 - RNA, 19 nt, Artificial Sequence
  Description of Artificial Sequence: Synthetic oligonucleotide
  Antisense strand to SEQ ID NO: 2454948
guuucucucgacgaaacua

SEQ ID NO: 2454950 - RNA, 19 nt, Artificial Sequence
  Description of Artificial Sequence: Synthetic oligonucleotide
  Sense strand starting at position 2595 of SEQ ID NO: 1887202
agagaaaccuguuuccuga

SEQ ID NO: 2454951 - RNA, 19 nt, Artificial Sequence
  Description of Artificial Sequence: Synthetic oligonucleotide
  Antisense strand to SEQ ID NO: 2454950
ucaggaaacagguuucucu

SEQ ID NO: 2454952 - RNA, 19 nt, Artificial Sequence
  Description of Artificial Sequence: Synthetic oligonucleotide
  Sense strand starting at position 2598 of SEQ ID NO: 1887202
gaaaccuguuuccugaugu

SEQ ID NO: 2454953 - RNA, 19 nt, Artificial Sequence
  Description of Artificial Sequence: Synthetic oligonucleotide
  Antisense strand to SEQ ID NO: 2454952
acaucaggaaacagguuuc

SEQ ID NO: 2454954 - RNA, 19 nt, Artificial Sequence
  Description of Artificial Sequence: Synthetic oligonucleotide
  Sense strand starting at position 2611 of SEQ ID NO: 1887202
ugaugugacgcuuauaaua

SEQ ID NO: 2454955 - RNA, 19 nt, Artificial Sequence
  Description of Artificial Sequence: Synthetic oligonucleotide
  Antisense strand to SEQ ID NO: 2454954
uauuauaagcgucacauca

SEQ ID NO: 2454956 - RNA, 19 nt, Artificial Sequence
  Description of Artificial Sequence: Synthetic oligonucleotide
  Sense strand starting at position 2618 of SEQ ID NO: 1887202
acgcuuauaauagguuaga

SEQ ID NO: 2454957 - RNA, 19 nt, Artificial Sequence
  Description of Artificial Sequence: Synthetic oligonucleotide
  Antisense strand to SEQ ID NO: 2454956
ucuaaccuauuauaagcgu

SEQ ID NO: 2454958 - RNA, 19 nt, Artificial Sequence
  Description of Artificial Sequence: Synthetic oligonucleotide
  Sense strand starting at position 2619 of SEQ ID NO: 1887202
cgcuuauaauagguuagau

SEQ ID NO: 2454959 - RNA, 19 nt, Artificial Sequence
  Description of Artificial Sequence: Synthetic oligonucleotide
  Antisense strand to SEQ ID NO: 2454958
aucuaaccuauuauaagcg

SEQ ID NO: 2454960 - RNA, 19 nt, Artificial Sequence
  Description of Artificial Sequence: Synthetic oligonucleotide
  Sense strand starting at position 2698 of SEQ ID NO: 1887202
ucaugcuugacauggagga

SEQ ID NO: 2454961 - RNA, 19 nt, Artificial Sequence
  Description of Artificial Sequence: Synthetic oligonucleotide
  Antisense strand to SEQ ID NO: 2454960
uccuccaugucaagcauga

SEQ ID NO: 2454962 - RNA, 19 nt, Artificial Sequence
  Description of Artificial Sequence: Synthetic oligonucleotide
  Sense strand starting at position 2714 of SEQ ID NO: 1887202
ggaggaagucucuguuaau

SEQ ID NO: 2454963 - RNA, 19 nt, Artificial Sequence
  Description of Artificial Sequence: Synthetic oligonucleotide
  Antisense strand to SEQ ID NO: 2454962
auuaacagagacuuccucc

SEQ ID NO: 2454964 - RNA, 19 nt, Artificial Sequence
  Description of Artificial Sequence: Synthetic oligonucleotide
  Sense strand starting at position 2715 of SEQ ID NO: 1887202
gaggaagucucuguuaauu

SEQ ID NO: 2454965 - RNA, 19 nt, Artificial Sequence
  Description of Artificial Sequence: Synthetic oligonucleotide
  Antisense strand to SEQ ID NO: 2454964
aauuaacagagacuuccuc

SEQ ID NO: 2454966 - RNA, 19 nt, Artificial Sequence
  Description of Artificial Sequence: Synthetic oligonucleotide
  Sense strand starting at position 2821 of SEQ ID NO: 1887202
gggugugauccagaaagua

SEQ ID NO: 2454967 - RNA, 19 nt, Artificial Sequence
  Description of Artificial Sequence: Synthetic oligonucleotide
  Antisense strand to SEQ ID NO: 2454966
uacuuucuggaucacaccc

SEQ ID NO: 2454968 - RNA, 19 nt, Artificial Sequence
  Description of Artificial Sequence: Synthetic oligonucleotide
  Sense strand starting at position 2846 of SEQ ID NO: 1887202
acuugccguggucaaauau

SEQ ID NO: 2454969 - RNA, 19 nt, Artificial Sequence
  Description of Artificial Sequence: Synthetic oligonucleotide
  Antisense strand to SEQ ID NO: 2454968
auauuugaccacggcaagu

SEQ ID NO: 2454970 - RNA, 19 nt, Artificial Sequence
  Description of Artificial Sequence: Synthetic oligonucleotide
  Sense strand starting at position 2855 of SEQ ID NO: 1887202
ggucaaauauugguuuaug

SEQ ID NO: 2454971 - RNA, 19 nt, Artificial Sequence
  Description of Artificial Sequence: Synthetic oligonucleotide
  Antisense strand to SEQ ID NO: 2454970
cauaaaccaauauuugacc

SEQ ID NO: 2454972 - RNA, 19 nt, Artificial Sequence
  Description of Artificial Sequence: Synthetic oligonucleotide
  Sense strand starting at position 2866 of SEQ ID NO: 1887202
gguuuauggaaauguuuau

SEQ ID NO: 2454973 - RNA, 19 nt, Artificial Sequence
  Description of Artificial Sequence: Synthetic oligonucleotide
  Antisense strand to SEQ ID NO: 2454972
auaaacauuuccauaaacc

SEQ ID NO: 2454974 - RNA, 19 nt, Artificial Sequence
  Description of Artificial Sequence: Synthetic oligonucleotide
  Sense strand starting at position 2879 of SEQ ID NO: 1887202
guuuauuuguaauacacag

SEQ ID NO: 2454975 - RNA, 19 nt, Artificial Sequence
  Description of Artificial Sequence: Synthetic oligonucleotide
  Antisense strand to SEQ ID NO: 2454974
cuguguauuacaaauaaac

SEQ ID NO: 2454976 - RNA, 19 nt, Artificial Sequence
  Description of Artificial Sequence: Synthetic oligonucleotide
  Sense strand starting at position 2951 of SEQ ID NO: 1887202
uugugugcccgguccaauu

SEQ ID NO: 2454977 - RNA, 19 nt, Artificial Sequence
  Description of Artificial Sequence: Synthetic oligonucleotide
  Antisense strand to SEQ ID NO: 2454976
aauuggaccgggcacacaa

SEQ ID NO: 2454978 - RNA, 19 nt, Artificial Sequence
  Description of Artificial Sequence: Synthetic oligonucleotide
  Sense strand starting at position 2965 of SEQ ID NO: 1887202
caauucuuguuaccgagaa

SEQ ID NO: 2454979 - RNA, 19 nt, Artificial Sequence
  Description of Artificial Sequence: Synthetic oligonucleotide
  Antisense strand to SEQ ID NO: 2454978
uucucgguaacaagaauug

SEQ ID NO: 2454980 - RNA, 19 nt, Artificial Sequence
  Description of Artificial Sequence: Synthetic oligonucleotide
  Sense strand starting at position 2967 of SEQ ID NO: 1887202
auucuuguuaccgagaagu

SEQ ID NO: 2454981 - RNA, 19 nt, Artificial Sequence
  Description of Artificial Sequence: Synthetic oligonucleotide
  Antisense strand to SEQ ID NO: 2454980
acuucucgguaacaagaau

SEQ ID NO: 2454982 - RNA, 19 nt, Artificial Sequence
  Description of Artificial Sequence: Synthetic oligonucleotide
  Sense strand starting at position 2969 of SEQ ID NO: 1887202
ucuuguuaccgagaaguga

SEQ ID NO: 2454983 - RNA, 19 nt, Artificial Sequence
  Description of Artificial Sequence: Synthetic oligonucleotide
  Antisense strand to SEQ ID NO: 2454982
ucacuucucgguaacaaga

SEQ ID NO: 2454984 - RNA, 19 nt, Artificial Sequence
  Description of Artificial Sequence: Synthetic oligonucleotide
  Sense strand starting at position 2995 of SEQ ID NO: 1887202
uuaauaagacgcuagcaau

SEQ ID NO: 2454985 - RNA, 19 nt, Artificial Sequence
  Description of Artificial Sequence: Synthetic oligonucleotide
  Antisense strand to SEQ ID NO: 2454984
auugcuagcgucuuauuaa

SEQ ID NO: 2454986 - RNA, 19 nt, Artificial Sequence
  Description of Artificial Sequence: Synthetic oligonucleotide
  Sense strand starting at position 552 of SEQ ID NO: 1887203
ucuuaaguguccuuugcca

SEQ ID NO: 2454987 - RNA, 19 nt, Artificial Sequence
  Description of Artificial Sequence: Synthetic oligonucleotide
  Antisense strand to SEQ ID NO: 2454986
uggcaaaggacacuuaaga

SEQ ID NO: 2454988 - RNA, 19 nt, Artificial Sequence
  Description of Artificial Sequence: Synthetic oligonucleotide
  Sense strand starting at position 647 of SEQ ID NO: 1887203
ccgcuccacgucugagaaa

SEQ ID NO: 2454989 - RNA, 19 nt, Artificial Sequence
  Description of Artificial Sequence: Synthetic oligonucleotide
  Antisense strand to SEQ ID NO: 2454988
uuucucagacguggagcgg

SEQ ID NO: 2454990 - RNA, 19 nt, Artificial Sequence
  Description of Artificial Sequence: Synthetic oligonucleotide
  Sense strand starting at position 715 of SEQ ID NO: 1887203
cagcauugguccucaaguu

SEQ ID NO: 2454991 - RNA, 19 nt, Artificial Sequence
  Description of Artificial Sequence: Synthetic oligonucleotide
  Antisense strand to SEQ ID NO: 2454990
aacuugaggaccaaugcug

SEQ ID NO: 2454992 - RNA, 19 nt, Artificial Sequence
  Description of Artificial Sequence: Synthetic oligonucleotide
  Sense strand starting at position 869 of SEQ ID NO: 1887203
ugucucauucuuuagucua

SEQ ID NO: 2454993 - RNA, 19 nt, Artificial Sequence
  Description of Artificial Sequence: Synthetic oligonucleotide
  Antisense strand to SEQ ID NO: 2454992
uagacuaaagaaugagaca

SEQ ID NO: 2454994 - RNA, 19 nt, Artificial Sequence
  Description of Artificial Sequence: Synthetic oligonucleotide
  Sense strand starting at position 902 of SEQ ID NO: 1887203
acgccagugcuggcuaaau

SEQ ID NO: 2454995 - RNA, 19 nt, Artificial Sequence
  Description of Artificial Sequence: Synthetic oligonucleotide
  Antisense strand to SEQ ID NO: 2454994
auuuagccagcacuggcgu

SEQ ID NO: 2454996 - RNA, 19 nt, Artificial Sequence
  Description of Artificial Sequence: Synthetic oligonucleotide
  Sense strand starting at position 958 of SEQ ID NO: 1887203
ggagaaggucauuguggga

SEQ ID NO: 2454997 - RNA, 19 nt, Artificial Sequence
  Description of Artificial Sequence: Synthetic oligonucleotide
  Antisense strand to SEQ ID NO: 2454996
ucccacaaugaccuucucc

SEQ ID NO: 2454998 - RNA, 19 nt, Artificial Sequence
  Description of Artificial Sequence: Synthetic oligonucleotide
  Sense strand starting at position 1151 of SEQ ID NO: 1887203
guugcccucucugcagaaa

SEQ ID NO: 2454999 - RNA, 19 nt, Artificial Sequence
  Description of Artificial Sequence: Synthetic oligonucleotide
  Antisense strand to SEQ ID NO: 2454998
uuucugcagagagggcaac

SEQ ID NO: 2455000 - RNA, 19 nt, Artificial Sequence
  Description of Artificial Sequence: Synthetic oligonucleotide
  Sense strand starting at position 1252 of SEQ ID NO: 1887203
cuguuuccacgcuacaauu

SEQ ID NO: 2455001 - RNA, 19 nt, Artificial Sequence
  Description of Artificial Sequence: Synthetic oligonucleotide
  Antisense strand to SEQ ID NO: 2455000
aauuguagcguggaaacag

SEQ ID NO: 2455002 - RNA, 19 nt, Artificial Sequence
  Description of Artificial Sequence: Synthetic oligonucleotide
  Sense strand starting at position 1273 of SEQ ID NO: 1887203
ucccauuuaugauaggaca

SEQ ID NO: 2455003 - RNA, 19 nt, Artificial Sequence
  Description of Artificial Sequence: Synthetic oligonucleotide
  Antisense strand to SEQ ID NO: 2455002
uguccuaucauaaauggga

SEQ ID NO: 2455004 - RNA, 19 nt, Artificial Sequence
  Description of Artificial Sequence: Synthetic oligonucleotide
  Sense strand starting at position 2064 of SEQ ID NO: 1887203
cauuuaaguuuggccaagu

SEQ ID NO: 2455005 - RNA, 19 nt, Artificial Sequence
  Description of Artificial Sequence: Synthetic oligonucleotide
  Antisense strand to SEQ ID NO: 2455004
acuuggccaaacuuaaaug

SEQ ID NO: 2455006 - RNA, 19 nt, Artificial Sequence
  Description of Artificial Sequence: Synthetic oligonucleotide
  Sense strand starting at position 2065 of SEQ ID NO: 1887203
auuuaaguuuggccaaguu

SEQ ID NO: 2455007 - RNA, 19 nt, Artificial Sequence
  Description of Artificial Sequence: Synthetic oligonucleotide
  Antisense strand to SEQ ID NO: 2455006
aacuuggccaaacuuaaau

SEQ ID NO: 2455008 - RNA, 19 nt, Artificial Sequence
  Description of Artificial Sequence: Synthetic oligonucleotide
  Sense strand starting at position 2074 of SEQ ID NO: 1887203
uggccaaguuucuacaaua

SEQ ID NO: 2455009 - RNA, 19 nt, Artificial Sequence
  Description of Artificial Sequence: Synthetic oligonucleotide
  Antisense strand to SEQ ID NO: 2455008
uauuguagaaacuuggcca

SEQ ID NO: 2455010 - RNA, 19 nt, Artificial Sequence
  Description of Artificial Sequence: Synthetic oligonucleotide
  Sense strand starting at position 2167 of SEQ ID NO: 1887203
gccugccugcuuuaaagaa

SEQ ID NO: 2455011 - RNA, 19 nt, Artificial Sequence
  Description of Artificial Sequence: Synthetic oligonucleotide
  Antisense strand to SEQ ID NO: 2455010
uucuuuaaagcaggcaggc

SEQ ID NO: 2455012 - RNA, 19 nt, Artificial Sequence
  Description of Artificial Sequence: Synthetic oligonucleotide
  Sense strand starting at position 2179 of SEQ ID NO: 1887203
uaaagaaugucguccacag

SEQ ID NO: 2455013 - RNA, 19 nt, Artificial Sequence
  Description of Artificial Sequence: Synthetic oligonucleotide
  Antisense strand to SEQ ID NO: 2455012
cuguggacgacauucuuua

SEQ ID NO: 2455014 - RNA, 19 nt, Artificial Sequence
  Description of Artificial Sequence: Synthetic oligonucleotide
  Sense strand starting at position 2181 of SEQ ID NO: 1887203
aagaaugucguccacagau

SEQ ID NO: 2455015 - RNA, 19 nt, Artificial Sequence
  Description of Artificial Sequence: Synthetic oligonucleotide
  Antisense strand to SEQ ID NO: 2455014
aucuguggacgacauucuu

SEQ ID NO: 2455016 - RNA, 19 nt, Artificial Sequence
  Description of Artificial Sequence: Synthetic oligonucleotide
  Sense strand starting at position 2312 of SEQ ID NO: 1887203
ggaugcuucccaggccuua

SEQ ID NO: 2455017 - RNA, 19 nt, Artificial Sequence
  Description of Artificial Sequence: Synthetic oligonucleotide
  Antisense strand to SEQ ID NO: 2455016
uaaggccugggaagcaucc

SEQ ID NO: 2455018 - RNA, 19 nt, Artificial Sequence
  Description of Artificial Sequence: Synthetic oligonucleotide
  Sense strand starting at position 2774 of SEQ ID NO: 1887203
ucuccagugucccauguaa

SEQ ID NO: 2455019 - RNA, 19 nt, Artificial Sequence
  Description of Artificial Sequence: Synthetic oligonucleotide
  Antisense strand to SEQ ID NO: 2455018
uuacaugggacacuggaga

SEQ ID NO: 2455020 - RNA, 19 nt, Artificial Sequence
  Description of Artificial Sequence: Synthetic oligonucleotide
  Sense strand starting at position 2776 of SEQ ID NO: 1887203
uccagugucccauguaaau

SEQ ID NO: 2455021 - RNA, 19 nt, Artificial Sequence
  Description of Artificial Sequence: Synthetic oligonucleotide
  Antisense strand to SEQ ID NO: 2455020
auuuacaugggacacugga

SEQ ID NO: 2455022 - RNA, 19 nt, Artificial Sequence
  Description of Artificial Sequence: Synthetic oligonucleotide
  Sense strand starting at position 2989 of SEQ ID NO: 1887203
ugugcaacugucuacuaga

SEQ ID NO: 2455023 - RNA, 19 nt, Artificial Sequence
  Description of Artificial Sequence: Synthetic oligonucleotide
  Antisense strand to SEQ ID NO: 2455022
ucuaguagacaguugcaca

SEQ ID NO: 2455024 - RNA, 19 nt, Artificial Sequence
  Description of Artificial Sequence: Synthetic oligonucleotide
  Sense strand starting at position 2992 of SEQ ID NO: 1887203
gcaacugucuacuagauag

SEQ ID NO: 2455025 - RNA, 19 nt, Artificial Sequence
  Description of Artificial Sequence: Synthetic oligonucleotide
  Antisense strand to SEQ ID NO: 2455024
cuaucuaguagacaguugc

SEQ ID NO: 2455026 - RNA, 19 nt, Artificial Sequence
  Description of Artificial Sequence: Synthetic oligonucleotide
  Sense strand starting at position 3017 of SEQ ID NO: 1887203
ccugcuugcucgugcacaa

SEQ ID NO: 2455027 - RNA, 19 nt, Artificial Sequence
  Description of Artificial Sequence: Synthetic oligonucleotide
  Antisense strand to SEQ ID NO: 2455026
uugugcacgagcaagcagg

SEQ ID NO: 2455028 - RNA, 19 nt, Artificial Sequence
  Description of Artificial Sequence: Synthetic oligonucleotide
  Sense strand starting at position 3045 of SEQ ID NO: 1887203
acucaaugugucuagaaac

SEQ ID NO: 2455029 - RNA, 19 nt, Artificial Sequence
  Description of Artificial Sequence: Synthetic oligonucleotide
  Antisense strand to SEQ ID NO: 2455028
guuucuagacacauugagu

SEQ ID NO: 2455030 - RNA, 19 nt, Artificial Sequence
  Description of Artificial Sequence: Synthetic oligonucleotide
  Sense strand starting at position 3153 of SEQ ID NO: 1887203
cggccuuacuuuccgacau

SEQ ID NO: 2455031 - RNA, 19 nt, Artificial Sequence
  Description of Artificial Sequence: Synthetic oligonucleotide
  Antisense strand to SEQ ID NO: 2455030
augucggaaaguaaggccg

SEQ ID NO: 2455032 - RNA, 19 nt, Artificial Sequence
  Description of Artificial Sequence: Synthetic oligonucleotide
  Sense strand starting at position 3154 of SEQ ID NO: 1887203
ggccuuacuuuccgacauc

SEQ ID NO: 2455033 - RNA, 19 nt, Artificial Sequence
  Description of Artificial Sequence: Synthetic oligonucleotide
  Antisense strand to SEQ ID NO: 2455032
gaugucggaaaguaaggcc

SEQ ID NO: 2455034 - RNA, 19 nt, Artificial Sequence
  Description of Artificial Sequence: Synthetic oligonucleotide
  Sense strand starting at position 3236 of SEQ ID NO: 1887203
gcaaguguggcucaagugu

SEQ ID NO: 2455035 - RNA, 19 nt, Artificial Sequence
  Description of Artificial Sequence: Synthetic oligonucleotide
  Antisense strand to SEQ ID NO: 2455034
acacuugagccacacuugc

SEQ ID NO: 2455036 - RNA, 19 nt, Artificial Sequence
  Description of Artificial Sequence: Synthetic oligonucleotide
  Sense strand starting at position 3242 of SEQ ID NO: 1887203
guggcucaagugugaugau

SEQ ID NO: 2455037 - RNA, 19 nt, Artificial Sequence
  Description of Artificial Sequence: Synthetic oligonucleotide
  Antisense strand to SEQ ID NO: 2455036
aucaucacacuugagccac

SEQ ID NO: 2455038 - RNA, 19 nt, Artificial Sequence
  Description of Artificial Sequence: Synthetic oligonucleotide
  Sense strand starting at position 3243 of SEQ ID NO: 1887203
uggcucaagugugaugaua

SEQ ID NO: 2455039 - RNA, 19 nt, Artificial Sequence
  Description of Artificial Sequence: Synthetic oligonucleotide
  Antisense strand to SEQ ID NO: 2455038
uaucaucacacuugagcca

SEQ ID NO: 2455040 - RNA, 19 nt, Artificial Sequence
  Description of Artificial Sequence: Synthetic oligonucleotide
  Sense strand starting at position 3245 of SEQ ID NO: 1887203
gcucaagugugaugauaaa

SEQ ID NO: 2455041 - RNA, 19 nt, Artificial Sequence
  Description of Artificial Sequence: Synthetic oligonucleotide
  Antisense strand to SEQ ID NO: 2455040
uuuaucaucacacuugagc

SEQ ID NO: 2455042 - RNA, 19 nt, Artificial Sequence
  Description of Artificial Sequence: Synthetic oligonucleotide
  Sense strand starting at position 3272 of SEQ ID NO: 1887203
gacgcuuggccuuaaaguu

SEQ ID NO: 2455043 - RNA, 19 nt, Artificial Sequence
  Description of Artificial Sequence: Synthetic oligonucleotide
  Antisense strand to SEQ ID NO: 2455042
aacuuuaaggccaagcguc

SEQ ID NO: 2455044 - RNA, 19 nt, Artificial Sequence
  Description of Artificial Sequence: Synthetic oligonucleotide
  Sense strand starting at position 3303 of SEQ ID NO: 1887203
acaugcucccgcgaagaaa

SEQ ID NO: 2455045 - RNA, 19 nt, Artificial Sequence
  Description of Artificial Sequence: Synthetic oligonucleotide
  Antisense strand to SEQ ID NO: 2455044
uuucuucgcgggagcaugu

SEQ ID NO: 2455046 - RNA, 19 nt, Artificial Sequence
  Description of Artificial Sequence: Synthetic oligonucleotide
  Sense strand starting at position 3346 of SEQ ID NO: 1887203
uguugccaucuggaaaugu

SEQ ID NO: 2455047 - RNA, 19 nt, Artificial Sequence
  Description of Artificial Sequence: Synthetic oligonucleotide
  Antisense strand to SEQ ID NO: 2455046
acauuuccagauggcaaca

SEQ ID NO: 2455048 - RNA, 19 nt, Artificial Sequence
  Description of Artificial Sequence: Synthetic oligonucleotide
  Sense strand starting at position 3531 of SEQ ID NO: 1887203
aguaguuugcaaggguguu

SEQ ID NO: 2455049 - RNA, 19 nt, Artificial Sequence
  Description of Artificial Sequence: Synthetic oligonucleotide
  Antisense strand to SEQ ID NO: 2455048
aacacccuugcaaacuacu

SEQ ID NO: 2455050 - RNA, 19 nt, Artificial Sequence
  Description of Artificial Sequence: Synthetic oligonucleotide
  Sense strand starting at position 3532 of SEQ ID NO: 1887203
guaguuugcaaggguguuu

SEQ ID NO: 2455051 - RNA, 19 nt, Artificial Sequence
  Description of Artificial Sequence: Synthetic oligonucleotide
  Antisense strand to SEQ ID NO: 2455050
aaacacccuugcaaacuac

SEQ ID NO: 2455052 - RNA, 19 nt, Artificial Sequence
  Description of Artificial Sequence: Synthetic oligonucleotide
  Sense strand starting at position 3907 of SEQ ID NO: 1887203
uuacguauaucucugucua

SEQ ID NO: 2455053 - RNA, 19 nt, Artificial Sequence
  Description of Artificial Sequence: Synthetic oligonucleotide
  Antisense strand to SEQ ID NO: 2455052
uagacagagauauacguaa

SEQ ID NO: 2455054 - RNA, 19 nt, Artificial Sequence
  Description of Artificial Sequence: Synthetic oligonucleotide
  Sense strand starting at position 3909 of SEQ ID NO: 1887203
acguauaucucugucuaug

SEQ ID NO: 2455055 - RNA, 19 nt, Artificial Sequence
  Description of Artificial Sequence: Synthetic oligonucleotide
  Antisense strand to SEQ ID NO: 2455054
cauagacagagauauacgu

SEQ ID NO: 2455056 - RNA, 19 nt, Artificial Sequence
  Description of Artificial Sequence: Synthetic oligonucleotide
  Sense strand starting at position 3911 of SEQ ID NO: 1887203
guauaucucugucuaugac

SEQ ID NO: 2455057 - RNA, 19 nt, Artificial Sequence
  Description of Artificial Sequence: Synthetic oligonucleotide
  Antisense strand to SEQ ID NO: 2455056
gucauagacagagauauac

SEQ ID NO: 2455058 - RNA, 19 nt, Artificial Sequence
  Description of Artificial Sequence: Synthetic oligonucleotide
  Sense strand starting at position 3915 of SEQ ID NO: 1887203
aucucugucuaugacaagu

SEQ ID NO: 2455059 - RNA, 19 nt, Artificial Sequence
  Description of Artificial Sequence: Synthetic oligonucleotide
  Antisense strand to SEQ ID NO: 2455058
acuugucauagacagagau

SEQ ID NO: 2455060 - RNA, 19 nt, Artificial Sequence
  Description of Artificial Sequence: Synthetic oligonucleotide
  Sense strand starting at position 3917 of SEQ ID NO: 1887203
cucugucuaugacaaguuu

SEQ ID NO: 2455061 - RNA, 19 nt, Artificial Sequence
  Description of Artificial Sequence: Synthetic oligonucleotide
  Antisense strand to SEQ ID NO: 2455060
aaacuugucauagacagag

SEQ ID NO: 2455062 - RNA, 19 nt, Artificial Sequence
  Description of Artificial Sequence: Synthetic oligonucleotide
  Sense strand starting at position 136 of SEQ ID NO: 1887204
cuaugaauguacuuaguac

SEQ ID NO: 2455063 - RNA, 19 nt, Artificial Sequence
  Description of Artificial Sequence: Synthetic oligonucleotide
  Antisense strand to SEQ ID NO: 2455062
guacuaaguacauucauag

SEQ ID NO: 2455064 - RNA, 19 nt, Artificial Sequence
  Description of Artificial Sequence: Synthetic oligonucleotide
  Sense strand starting at position 148 of SEQ ID NO: 1887204
uuaguacuacuccauugua

SEQ ID NO: 2455065 - RNA, 19 nt, Artificial Sequence
  Description of Artificial Sequence: Synthetic oligonucleotide
  Antisense strand to SEQ ID NO: 2455064
uacaauggaguaguacuaa

SEQ ID NO: 2455066 - RNA, 19 nt, Artificial Sequence
  Description of Artificial Sequence: Synthetic oligonucleotide
  Sense strand starting at position 151 of SEQ ID NO: 1887204
guacuacuccauuguacac

SEQ ID NO: 2455067 - RNA, 19 nt, Artificial Sequence
  Description of Artificial Sequence: Synthetic oligonucleotide
  Antisense strand to SEQ ID NO: 2455066
guguacaauggaguaguac

SEQ ID NO: 2455068 - RNA, 19 nt, Artificial Sequence
  Description of Artificial Sequence: Synthetic oligonucleotide
  Sense strand starting at position 515 of SEQ ID NO: 1887204
gugcccucauuuggagaaa

SEQ ID NO: 2455069 - RNA, 19 nt, Artificial Sequence
  Description of Artificial Sequence: Synthetic oligonucleotide
  Antisense strand to SEQ ID NO: 2455068
uuucuccaaaugagggcac

SEQ ID NO: 2455070 - RNA, 19 nt, Artificial Sequence
  Description of Artificial Sequence: Synthetic oligonucleotide
  Sense strand starting at position 590 of SEQ ID NO: 1887204
gagggacuucuacacguga

SEQ ID NO: 2455071 - RNA, 19 nt, Artificial Sequence
  Description of Artificial Sequence: Synthetic oligonucleotide
  Antisense strand to SEQ ID NO: 2455070
ucacguguagaagucccuc

SEQ ID NO: 2455072 - RNA, 19 nt, Artificial Sequence
  Description of Artificial Sequence: Synthetic oligonucleotide
  Sense strand starting at position 648 of SEQ ID NO: 1887204
agguuauacuaacaucgga

SEQ ID NO: 2455073 - RNA, 19 nt, Artificial Sequence
  Description of Artificial Sequence: Synthetic oligonucleotide
  Antisense strand to SEQ ID NO: 2455072
uccgauguuaguauaaccu

SEQ ID NO: 2455074 - RNA, 19 nt, Artificial Sequence
  Description of Artificial Sequence: Synthetic oligonucleotide
  Sense strand starting at position 656 of SEQ ID NO: 1887204
cuaacaucggaauguguua

SEQ ID NO: 2455075 - RNA, 19 nt, Artificial Sequence
  Description of Artificial Sequence: Synthetic oligonucleotide
  Antisense strand to SEQ ID NO: 2455074
uaacacauuccgauguuag

SEQ ID NO: 2455076 - RNA, 19 nt, Artificial Sequence
  Description of Artificial Sequence: Synthetic oligonucleotide
  Sense strand starting at position 661 of SEQ ID NO: 1887204
aucggaauguguuaauaug

SEQ ID NO: 2455077 - RNA, 19 nt, Artificial Sequence
  Description of Artificial Sequence: Synthetic oligonucleotide
  Antisense strand to SEQ ID NO: 2455076
cauauuaacacauuccgau

SEQ ID NO: 2455078 - RNA, 19 nt, Artificial Sequence
  Description of Artificial Sequence: Synthetic oligonucleotide
  Sense strand starting at position 944 of SEQ ID NO: 1887204
uucagaugugggugcaaau

SEQ ID NO: 2455079 - RNA, 19 nt, Artificial Sequence
  Description of Artificial Sequence: Synthetic oligonucleotide
  Antisense strand to SEQ ID NO: 2455078
auuugcacccacaucugaa

SEQ ID NO: 2455080 - RNA, 19 nt, Artificial Sequence
  Description of Artificial Sequence: Synthetic oligonucleotide
  Sense strand starting at position 953 of SEQ ID NO: 1887204
gggugcaaaucugaaucaa

SEQ ID NO: 2455081 - RNA, 19 nt, Artificial Sequence
  Description of Artificial Sequence: Synthetic oligonucleotide
  Antisense strand to SEQ ID NO: 2455080
uugauucagauuugcaccc

SEQ ID NO: 2455082 - RNA, 19 nt, Artificial Sequence
  Description of Artificial Sequence: Synthetic oligonucleotide
  Sense strand starting at position 982 of SEQ ID NO: 1887204
ucagcaauccacuggcaga

SEQ ID NO: 2455083 - RNA, 19 nt, Artificial Sequence
  Description of Artificial Sequence: Synthetic oligonucleotide
  Antisense strand to SEQ ID NO: 2455082
ucugccaguggauugcuga

SEQ ID NO: 2455084 - RNA, 19 nt, Artificial Sequence
  Description of Artificial Sequence: Synthetic oligonucleotide
  Sense strand starting at position 1021 of SEQ ID NO: 1887204
guaggcagaguuggagaau

SEQ ID NO: 2455085 - RNA, 19 nt, Artificial Sequence
  Description of Artificial Sequence: Synthetic oligonucleotide
  Antisense strand to SEQ ID NO: 2455084
auucuccaacucugccuac

SEQ ID NO: 2455086 - RNA, 19 nt, Artificial Sequence
  Description of Artificial Sequence: Synthetic oligonucleotide
  Sense strand starting at position 1022 of SEQ ID NO: 1887204
uaggcagaguuggagaaua

SEQ ID NO: 2455087 - RNA, 19 nt, Artificial Sequence
  Description of Artificial Sequence: Synthetic oligonucleotide
  Antisense strand to SEQ ID NO: 2455086
uauucuccaacucugccua

SEQ ID NO: 2455088 - RNA, 19 nt, Artificial Sequence
  Description of Artificial Sequence: Synthetic oligonucleotide
  Sense strand starting at position 1033 of SEQ ID NO: 1887204
ggagaauaggugugaguga

SEQ ID NO: 2455089 - RNA, 19 nt, Artificial Sequence
  Description of Artificial Sequence: Synthetic oligonucleotide
  Antisense strand to SEQ ID NO: 2455088
ucacucacaccuauucucc

SEQ ID NO: 2455090 - RNA, 19 nt, Artificial Sequence
  Description of Artificial Sequence: Synthetic oligonucleotide
  Sense strand starting at position 1046 of SEQ ID NO: 1887204
gagugaguccugggaggga

SEQ ID NO: 2455091 - RNA, 19 nt, Artificial Sequence
  Description of Artificial Sequence: Synthetic oligonucleotide
  Antisense strand to SEQ ID NO: 2455090
ucccucccaggacucacuc

SEQ ID NO: 2455092 - RNA, 19 nt, Artificial Sequence
  Description of Artificial Sequence: Synthetic oligonucleotide
  Sense strand starting at position 1047 of SEQ ID NO: 1887204
agugaguccugggagggau

SEQ ID NO: 2455093 - RNA, 19 nt, Artificial Sequence
  Description of Artificial Sequence: Synthetic oligonucleotide
  Antisense strand to SEQ ID NO: 2455092
aucccucccaggacucacu

SEQ ID NO: 2455094 - RNA, 19 nt, Artificial Sequence
  Description of Artificial Sequence: Synthetic oligonucleotide
  Sense strand starting at position 1062 of SEQ ID NO: 1887204
ggauguuccuaagggcaga

SEQ ID NO: 2455095 - RNA, 19 nt, Artificial Sequence
  Description of Artificial Sequence: Synthetic oligonucleotide
  Antisense strand to SEQ ID NO: 2455094
ucugcccuuaggaacaucc

SEQ ID NO: 2455096 - RNA, 19 nt, Artificial Sequence
  Description of Artificial Sequence: Synthetic oligonucleotide
  Sense strand starting at position 1117 of SEQ ID NO: 1887204
aaaggcuuuauguaggagu

SEQ ID NO: 2455097 - RNA, 19 nt, Artificial Sequence
  Description of Artificial Sequence: Synthetic oligonucleotide
  Antisense strand to SEQ ID NO: 2455096
acuccuacauaaagccuuu

SEQ ID NO: 2455098 - RNA, 19 nt, Artificial Sequence
  Description of Artificial Sequence: Synthetic oligonucleotide
  Sense strand starting at position 1128 of SEQ ID NO: 1887204
guaggaguugcggauucca

SEQ ID NO: 2455099 - RNA, 19 nt, Artificial Sequence
  Description of Artificial Sequence: Synthetic oligonucleotide
  Antisense strand to SEQ ID NO: 2455098
uggaauccgcaacuccuac

SEQ ID NO: 2455100 - RNA, 19 nt, Artificial Sequence
  Description of Artificial Sequence: Synthetic oligonucleotide
  Sense strand starting at position 1136 of SEQ ID NO: 1887204
ugcggauuccagcagguga

SEQ ID NO: 2455101 - RNA, 19 nt, Artificial Sequence
  Description of Artificial Sequence: Synthetic oligonucleotide
  Antisense strand to SEQ ID NO: 2455100
ucaccugcuggaauccgca

SEQ ID NO: 2455102 - RNA, 19 nt, Artificial Sequence
  Description of Artificial Sequence: Synthetic oligonucleotide
  Sense strand starting at position 1335 of SEQ ID NO: 1887204
ggccuugcccgagaucaau

SEQ ID NO: 2455103 - RNA, 19 nt, Artificial Sequence
  Description of Artificial Sequence: Synthetic oligonucleotide
  Antisense strand to SEQ ID NO: 2455102
auugaucucgggcaaggcc

SEQ ID NO: 2455104 - RNA, 19 nt, Artificial Sequence
  Description of Artificial Sequence: Synthetic oligonucleotide
  Sense strand starting at position 1358 of SEQ ID NO: 1887204
ccauucagagaggguugau

SEQ ID NO: 2455105 - RNA, 19 nt, Artificial Sequence
  Description of Artificial Sequence: Synthetic oligonucleotide
  Antisense strand to SEQ ID NO: 2455104
aucaacccucucugaaugg

SEQ ID NO: 2455106 - RNA, 19 nt, Artificial Sequence
  Description of Artificial Sequence: Synthetic oligonucleotide
  Sense strand starting at position 1736 of SEQ ID NO: 1887204
cugcgcuuucucgccgaga

SEQ ID NO: 2455107 - RNA, 19 nt, Artificial Sequence
  Description of Artificial Sequence: Synthetic oligonucleotide
  Antisense strand to SEQ ID NO: 2455106
ucucggcgagaaagcgcag

SEQ ID NO: 2455108 - RNA, 19 nt, Artificial Sequence
  Description of Artificial Sequence: Synthetic oligonucleotide
  Sense strand starting at position 1737 of SEQ ID NO: 1887204
ugcgcuuucucgccgagaa

SEQ ID NO: 2455109 - RNA, 19 nt, Artificial Sequence
  Description of Artificial Sequence: Synthetic oligonucleotide
  Antisense strand to SEQ ID NO: 2455108
uucucggcgagaaagcgca

SEQ ID NO: 2455110 - RNA, 19 nt, Artificial Sequence
  Description of Artificial Sequence: Synthetic oligonucleotide
  Sense strand starting at position 1738 of SEQ ID NO: 1887204
gcgcuuucucgccgagaaa

SEQ ID NO: 2455111 - RNA, 19 nt, Artificial Sequence
  Description of Artificial Sequence: Synthetic oligonucleotide
  Antisense strand to SEQ ID NO: 2455110
uuucucggcgagaaagcgc

SEQ ID NO: 2455112 - RNA, 19 nt, Artificial Sequence
  Description of Artificial Sequence: Synthetic oligonucleotide
  Sense strand starting at position 1739 of SEQ ID NO: 1887204
cgcuuucucgccgagaaag

SEQ ID NO: 2455113 - RNA, 19 nt, Artificial Sequence
  Description of Artificial Sequence: Synthetic oligonucleotide
  Antisense strand to SEQ ID NO: 2455112
cuuucucggcgagaaagcg

SEQ ID NO: 2455114 - RNA, 19 nt, Artificial Sequence
  Description of Artificial Sequence: Synthetic oligonucleotide
  Sense strand starting at position 2620 of SEQ ID NO: 1887204
cgagaauaaugcguccacu

SEQ ID NO: 2455115 - RNA, 19 nt, Artificial Sequence
  Description of Artificial Sequence: Synthetic oligonucleotide
  Antisense strand to SEQ ID NO: 2455114
aguggacgcauuauucucg

SEQ ID NO: 2455116 - RNA, 19 nt, Artificial Sequence
  Description of Artificial Sequence: Synthetic oligonucleotide
  Sense strand starting at position 2739 of SEQ ID NO: 1887204
gguguuuaauugguacugu

SEQ ID NO: 2455117 - RNA, 19 nt, Artificial Sequence
  Description of Artificial Sequence: Synthetic oligonucleotide
  Antisense strand to SEQ ID NO: 2455116
acaguaccaauuaaacacc

SEQ ID NO: 2455118 - RNA, 19 nt, Artificial Sequence
  Description of Artificial Sequence: Synthetic oligonucleotide
  Sense strand starting at position 2755 of SEQ ID NO: 1887204
uguagcuuccugugagaac

SEQ ID NO: 2455119 - RNA, 19 nt, Artificial Sequence
  Description of Artificial Sequence: Synthetic oligonucleotide
  Antisense strand to SEQ ID NO: 2455118
guucucacaggaagcuaca

SEQ ID NO: 2455120 - RNA, 19 nt, Artificial Sequence
  Description of Artificial Sequence: Synthetic oligonucleotide
  Sense strand starting at position 2931 of SEQ ID NO: 1887204
guucuccaaugcucagauu

SEQ ID NO: 2455121 - RNA, 19 nt, Artificial Sequence
  Description of Artificial Sequence: Synthetic oligonucleotide
  Antisense strand to SEQ ID NO: 2455120
aaucugagcauuggagaac

SEQ ID NO: 2455122 - RNA, 19 nt, Artificial Sequence
  Description of Artificial Sequence: Synthetic oligonucleotide
  Sense strand starting at position 3129 of SEQ ID NO: 1887204
uugggaagauucuccguga

SEQ ID NO: 2455123 - RNA, 19 nt, Artificial Sequence
  Description of Artificial Sequence: Synthetic oligonucleotide
  Antisense strand to SEQ ID NO: 2455122
ucacggagaaucuucccaa

SEQ ID NO: 2455124 - RNA, 19 nt, Artificial Sequence
  Description of Artificial Sequence: Synthetic oligonucleotide
  Sense strand starting at position 3130 of SEQ ID NO: 1887204
ugggaagauucuccgugau

SEQ ID NO: 2455125 - RNA, 19 nt, Artificial Sequence
  Description of Artificial Sequence: Synthetic oligonucleotide
  Antisense strand to SEQ ID NO: 2455124
aucacggagaaucuuccca

SEQ ID NO: 2455126 - RNA, 19 nt, Artificial Sequence
  Description of Artificial Sequence: Synthetic oligonucleotide
  Sense strand starting at position 3132 of SEQ ID NO: 1887204
ggaagauucuccgugauug

SEQ ID NO: 2455127 - RNA, 19 nt, Artificial Sequence
  Description of Artificial Sequence: Synthetic oligonucleotide
  Antisense strand to SEQ ID NO: 2455126
caaucacggagaaucuucc

SEQ ID NO: 2455128 - RNA, 19 nt, Artificial Sequence
  Description of Artificial Sequence: Synthetic oligonucleotide
  Sense strand starting at position 3133 of SEQ ID NO: 1887204
gaagauucuccgugauugc

SEQ ID NO: 2455129 - RNA, 19 nt, Artificial Sequence
  Description of Artificial Sequence: Synthetic oligonucleotide
  Antisense strand to SEQ ID NO: 2455128
gcaaucacggagaaucuuc

SEQ ID NO: 2455130 - RNA, 19 nt, Artificial Sequence
  Description of Artificial Sequence: Synthetic oligonucleotide
  Sense strand starting at position 3562 of SEQ ID NO: 1887204
cagugcugugcacaucaga

SEQ ID NO: 2455131 - RNA, 19 nt, Artificial Sequence
  Description of Artificial Sequence: Synthetic oligonucleotide
  Antisense strand to SEQ ID NO: 2455130
ucugaugugcacagcacug

SEQ ID NO: 2455132 - RNA, 19 nt, Artificial Sequence
  Description of Artificial Sequence: Synthetic oligonucleotide
  Sense strand starting at position 3573 of SEQ ID NO: 1887204
acaucagaccucugcagaa

SEQ ID NO: 2455133 - RNA, 19 nt, Artificial Sequence
  Description of Artificial Sequence: Synthetic oligonucleotide
  Antisense strand to SEQ ID NO: 2455132
uucugcagaggucugaugu

SEQ ID NO: 2455134 - RNA, 19 nt, Artificial Sequence
  Description of Artificial Sequence: Synthetic oligonucleotide
  Sense strand starting at position 3585 of SEQ ID NO: 1887204
ugcagaaaugccuggaacu

SEQ ID NO: 2455135 - RNA, 19 nt, Artificial Sequence
  Description of Artificial Sequence: Synthetic oligonucleotide
  Antisense strand to SEQ ID NO: 2455134
aguuccaggcauuucugca

SEQ ID NO: 2455136 - RNA, 19 nt, Artificial Sequence
  Description of Artificial Sequence: Synthetic oligonucleotide
  Sense strand starting at position 3586 of SEQ ID NO: 1887204
gcagaaaugccuggaacuu

SEQ ID NO: 2455137 - RNA, 19 nt, Artificial Sequence
  Description of Artificial Sequence: Synthetic oligonucleotide
  Antisense strand to SEQ ID NO: 2455136
aaguuccaggcauuucugc

SEQ ID NO: 2455138 - RNA, 19 nt, Artificial Sequence
  Description of Artificial Sequence: Synthetic oligonucleotide
  Sense strand starting at position 3678 of SEQ ID NO: 1887204
cccugccaguguguuauaa

SEQ ID NO: 2455139 - RNA, 19 nt, Artificial Sequence
  Description of Artificial Sequence: Synthetic oligonucleotide
  Antisense strand to SEQ ID NO: 2455138
uuauaacacacuggcaggg

SEQ ID NO: 2455140 - RNA, 19 nt, Artificial Sequence
  Description of Artificial Sequence: Synthetic oligonucleotide
  Sense strand starting at position 3897 of SEQ ID NO: 1887204
cagaaagagcccuguccua

SEQ ID NO: 2455141 - RNA, 19 nt, Artificial Sequence
  Description of Artificial Sequence: Synthetic oligonucleotide
  Antisense strand to SEQ ID NO: 2455140
uaggacagggcucuuucug

SEQ ID NO: 2455142 - RNA, 19 nt, Artificial Sequence
  Description of Artificial Sequence: Synthetic oligonucleotide
  Sense strand starting at position 82 of SEQ ID NO: 1887205
uuaauaaacugagaagacu

SEQ ID NO: 2455143 - RNA, 19 nt, Artificial Sequence
  Description of Artificial Sequence: Synthetic oligonucleotide
  Antisense strand to SEQ ID NO: 2455142
agucuucucaguuuauuaa

SEQ ID NO: 2455144 - RNA, 19 nt, Artificial Sequence
  Description of Artificial Sequence: Synthetic oligonucleotide
  Sense strand starting at position 131 of SEQ ID NO: 1887205
ugcagaguugacuguagau

SEQ ID NO: 2455145 - RNA, 19 nt, Artificial Sequence
  Description of Artificial Sequence: Synthetic oligonucleotide
  Antisense strand to SEQ ID NO: 2455144
aucuacagucaacucugca

SEQ ID NO: 2455146 - RNA, 19 nt, Artificial Sequence
  Description of Artificial Sequence: Synthetic oligonucleotide
  Sense strand starting at position 177 of SEQ ID NO: 1887205
gccugcuauaaauggagua

SEQ ID NO: 2455147 - RNA, 19 nt, Artificial Sequence
  Description of Artificial Sequence: Synthetic oligonucleotide
  Antisense strand to SEQ ID NO: 2455146
uacuccauuuauagcaggc

SEQ ID NO: 2455148 - RNA, 19 nt, Artificial Sequence
  Description of Artificial Sequence: Synthetic oligonucleotide
  Sense strand starting at position 232 of SEQ ID NO: 1887205
cauugauaucuggguuaaa

SEQ ID NO: 2455149 - RNA, 19 nt, Artificial Sequence
  Description of Artificial Sequence: Synthetic oligonucleotide
  Antisense strand to SEQ ID NO: 2455148
uuuaacccagauaucaaug

SEQ ID NO: 2455150 - RNA, 19 nt, Artificial Sequence
  Description of Artificial Sequence: Synthetic oligonucleotide
  Sense strand starting at position 233 of SEQ ID NO: 1887205
auugauaucuggguuaaau

SEQ ID NO: 2455151 - RNA, 19 nt, Artificial Sequence
  Description of Artificial Sequence: Synthetic oligonucleotide
  Antisense strand to SEQ ID NO: 2455150
auuuaacccagauaucaau

SEQ ID NO: 2455152 - RNA, 19 nt, Artificial Sequence
  Description of Artificial Sequence: Synthetic oligonucleotide
  Sense strand starting at position 394 of SEQ ID NO: 1887205
uggagcuaaccaugaaaug

SEQ ID NO: 2455153 - RNA, 19 nt, Artificial Sequence
  Description of Artificial Sequence: Synthetic oligonucleotide
  Antisense strand to SEQ ID NO: 2455152
cauuucaugguuagcucca

SEQ ID NO: 2455154 - RNA, 19 nt, Artificial Sequence
  Description of Artificial Sequence: Synthetic oligonucleotide
  Sense strand starting at position 591 of SEQ ID NO: 1887205
gccuuucuccucugaaagg

SEQ ID NO: 2455155 - RNA, 19 nt, Artificial Sequence
  Description of Artificial Sequence: Synthetic oligonucleotide
  Antisense strand to SEQ ID NO: 2455154
ccuuucagaggagaaaggc

SEQ ID NO: 2455156 - RNA, 19 nt, Artificial Sequence
  Description of Artificial Sequence: Synthetic oligonucleotide
  Sense strand starting at position 692 of SEQ ID NO: 1887205
ggccaagacuaucucugaa

SEQ ID NO: 2455157 - RNA, 19 nt, Artificial Sequence
  Description of Artificial Sequence: Synthetic oligonucleotide
  Antisense strand to SEQ ID NO: 2455156
uucagagauagucuuggcc

SEQ ID NO: 2455158 - RNA, 19 nt, Artificial Sequence
  Description of Artificial Sequence: Synthetic oligonucleotide
  Sense strand starting at position 729 of SEQ ID NO: 1887205
aucucauguuaaguuacaa

SEQ ID NO: 2455159 - RNA, 19 nt, Artificial Sequence
  Description of Artificial Sequence: Synthetic oligonucleotide
  Antisense strand to SEQ ID NO: 2455158
uuguaacuuaacaugagau

SEQ ID NO: 2455160 - RNA, 19 nt, Artificial Sequence
  Description of Artificial Sequence: Synthetic oligonucleotide
  Sense strand starting at position 755 of SEQ ID NO: 1887205
agauucggcucucugagaa

SEQ ID NO: 2455161 - RNA, 19 nt, Artificial Sequence
  Description of Artificial Sequence: Synthetic oligonucleotide
  Antisense strand to SEQ ID NO: 2455160
uucucagagagccgaaucu

SEQ ID NO: 2455162 - RNA, 19 nt, Artificial Sequence
  Description of Artificial Sequence: Synthetic oligonucleotide
  Sense strand starting at position 824 of SEQ ID NO: 1887205
guacuaaauucuguuucua

SEQ ID NO: 2455163 - RNA, 19 nt, Artificial Sequence
  Description of Artificial Sequence: Synthetic oligonucleotide
  Antisense strand to SEQ ID NO: 2455162
uagaaacagaauuuaguac

SEQ ID NO: 2455164 - RNA, 19 nt, Artificial Sequence
  Description of Artificial Sequence: Synthetic oligonucleotide
  Sense strand starting at position 879 of SEQ ID NO: 1887205
aggaaaccaucagagaacu

SEQ ID NO: 2455165 - RNA, 19 nt, Artificial Sequence
  Description of Artificial Sequence: Synthetic oligonucleotide
  Antisense strand to SEQ ID NO: 2455164
aguucucugaugguuuccu

SEQ ID NO: 2455166 - RNA, 19 nt, Artificial Sequence
  Description of Artificial Sequence: Synthetic oligonucleotide
  Sense strand starting at position 981 of SEQ ID NO: 1887205
agcuaagguccugauaugu

SEQ ID NO: 2455167 - RNA, 19 nt, Artificial Sequence
  Description of Artificial Sequence: Synthetic oligonucleotide
  Antisense strand to SEQ ID NO: 2455166
acauaucaggaccuuagcu

SEQ ID NO: 2455168 - RNA, 19 nt, Artificial Sequence
  Description of Artificial Sequence: Synthetic oligonucleotide
  Sense strand starting at position 994 of SEQ ID NO: 1887205
auauguuguuagguaacuu

SEQ ID NO: 2455169 - RNA, 19 nt, Artificial Sequence
  Description of Artificial Sequence: Synthetic oligonucleotide
  Antisense strand to SEQ ID NO: 2455168
aaguuaccuaacaacauau

SEQ ID NO: 2455170 - RNA, 19 nt, Artificial Sequence
  Description of Artificial Sequence: Synthetic oligonucleotide
  Sense strand starting at position 1002 of SEQ ID NO: 1887205
uuagguaacuuguucuuua

SEQ ID NO: 2455171 - RNA, 19 nt, Artificial Sequence
  Description of Artificial Sequence: Synthetic oligonucleotide
  Antisense strand to SEQ ID NO: 2455170
uaaagaacaaguuaccuaa

SEQ ID NO: 2455172 - RNA, 19 nt, Artificial Sequence
  Description of Artificial Sequence: Synthetic oligonucleotide
  Sense strand starting at position 1030 of SEQ ID NO: 1887205
aggaaucuguuuccauuau

SEQ ID NO: 2455173 - RNA, 19 nt, Artificial Sequence
  Description of Artificial Sequence: Synthetic oligonucleotide
  Antisense strand to SEQ ID NO: 2455172
auaauggaaacagauuccu

SEQ ID NO: 2455174 - RNA, 19 nt, Artificial Sequence
  Description of Artificial Sequence: Synthetic oligonucleotide
  Sense strand starting at position 1079 of SEQ ID NO: 1887205
gaacaucaccguuaggcuu

SEQ ID NO: 2455175 - RNA, 19 nt, Artificial Sequence
  Description of Artificial Sequence: Synthetic oligonucleotide
  Antisense strand to SEQ ID NO: 2455174
aagccuaacggugauguuc

SEQ ID NO: 2455176 - RNA, 19 nt, Artificial Sequence
  Description of Artificial Sequence: Synthetic oligonucleotide
  Sense strand starting at position 1176 of SEQ ID NO: 1887205
cgaauuagguucucucacu

SEQ ID NO: 2455177 - RNA, 19 nt, Artificial Sequence
  Description of Artificial Sequence: Synthetic oligonucleotide
  Antisense strand to SEQ ID NO: 2455176
agugagagaaccuaauucg

SEQ ID NO: 2455178 - RNA, 19 nt, Artificial Sequence
  Description of Artificial Sequence: Synthetic oligonucleotide
  Sense strand starting at position 1188 of SEQ ID NO: 1887205
ucucacuuugggcaucaga

SEQ ID NO: 2455179 - RNA, 19 nt, Artificial Sequence
  Description of Artificial Sequence: Synthetic oligonucleotide
  Antisense strand to SEQ ID NO: 2455178
ucugaugcccaaagugaga

SEQ ID NO: 2455180 - RNA, 19 nt, Artificial Sequence
  Description of Artificial Sequence: Synthetic oligonucleotide
  Sense strand starting at position 1227 of SEQ ID NO: 1887205
ccaagauguguuuagggca

SEQ ID NO: 2455181 - RNA, 19 nt, Artificial Sequence
  Description of Artificial Sequence: Synthetic oligonucleotide
  Antisense strand to SEQ ID NO: 2455180
ugcccuaaacacaucuugg

SEQ ID NO: 2455182 - RNA, 19 nt, Artificial Sequence
  Description of Artificial Sequence: Synthetic oligonucleotide
  Sense strand starting at position 1423 of SEQ ID NO: 1887205
caguaaguuuaggcaaauu

SEQ ID NO: 2455183 - RNA, 19 nt, Artificial Sequence
  Description of Artificial Sequence: Synthetic oligonucleotide
  Antisense strand to SEQ ID NO: 2455182
aauuugccuaaacuuacug

SEQ ID NO: 2455184 - RNA, 19 nt, Artificial Sequence
  Description of Artificial Sequence: Synthetic oligonucleotide
  Sense strand starting at position 1960 of SEQ ID NO: 1887205
gcugaauucccagcgcuuu

SEQ ID NO: 2455185 - RNA, 19 nt, Artificial Sequence
  Description of Artificial Sequence: Synthetic oligonucleotide
  Antisense strand to SEQ ID NO: 2455184
aaagcgcugggaauucagc

SEQ ID NO: 2455186 - RNA, 19 nt, Artificial Sequence
  Description of Artificial Sequence: Synthetic oligonucleotide
  Sense strand starting at position 2274 of SEQ ID NO: 1887205
guuucuucucuugaucuga

SEQ ID NO: 2455187 - RNA, 19 nt, Artificial Sequence
  Description of Artificial Sequence: Synthetic oligonucleotide
  Antisense strand to SEQ ID NO: 2455186
ucagaucaagagaagaaac

SEQ ID NO: 2455188 - RNA, 19 nt, Artificial Sequence
  Description of Artificial Sequence: Synthetic oligonucleotide
  Sense strand starting at position 2291 of SEQ ID NO: 1887205
gauuucuagcucugugcua

SEQ ID NO: 2455189 - RNA, 19 nt, Artificial Sequence
  Description of Artificial Sequence: Synthetic oligonucleotide
  Antisense strand to SEQ ID NO: 2455188
uagcacagagcuagaaauc

SEQ ID NO: 2455190 - RNA, 19 nt, Artificial Sequence
  Description of Artificial Sequence: Synthetic oligonucleotide
  Sense strand starting at position 2292 of SEQ ID NO: 1887205
auuucuagcucugugcuau

SEQ ID NO: 2455191 - RNA, 19 nt, Artificial Sequence
  Description of Artificial Sequence: Synthetic oligonucleotide
  Antisense strand to SEQ ID NO: 2455190
auagcacagagcuagaaau

SEQ ID NO: 2455192 - RNA, 19 nt, Artificial Sequence
  Description of Artificial Sequence: Synthetic oligonucleotide
  Sense strand starting at position 2360 of SEQ ID NO: 1887205
uggagauguuaauuacuga

SEQ ID NO: 2455193 - RNA, 19 nt, Artificial Sequence
  Description of Artificial Sequence: Synthetic oligonucleotide
  Antisense strand to SEQ ID NO: 2455192
ucaguaauuaacaucucca

SEQ ID NO: 2455194 - RNA, 19 nt, Artificial Sequence
  Description of Artificial Sequence: Synthetic oligonucleotide
  Sense strand starting at position 2543 of SEQ ID NO: 1887205
cacuguucuuggcuaagau

SEQ ID NO: 2455195 - RNA, 19 nt, Artificial Sequence
  Description of Artificial Sequence: Synthetic oligonucleotide
  Antisense strand to SEQ ID NO: 2455194
aucuuagccaagaacagug

SEQ ID NO: 2455196 - RNA, 19 nt, Artificial Sequence
  Description of Artificial Sequence: Synthetic oligonucleotide
  Sense strand starting at position 2544 of SEQ ID NO: 1887205
acuguucuuggcuaagaug

SEQ ID NO: 2455197 - RNA, 19 nt, Artificial Sequence
  Description of Artificial Sequence: Synthetic oligonucleotide
  Antisense strand to SEQ ID NO: 2455196
caucuuagccaagaacagu

SEQ ID NO: 2455198 - RNA, 19 nt, Artificial Sequence
  Description of Artificial Sequence: Synthetic oligonucleotide
  Sense strand starting at position 2619 of SEQ ID NO: 1887205
gaagaaggucuuuggguuu

SEQ ID NO: 2455199 - RNA, 19 nt, Artificial Sequence
  Description of Artificial Sequence: Synthetic oligonucleotide
  Antisense strand to SEQ ID NO: 2455198
aaacccaaagaccuucuuc

SEQ ID NO: 2455200 - RNA, 19 nt, Artificial Sequence
  Description of Artificial Sequence: Synthetic oligonucleotide
  Sense strand starting at position 2669 of SEQ ID NO: 1887205
cgaccauggcuguaguaaa

SEQ ID NO: 2455201 - RNA, 19 nt, Artificial Sequence
  Description of Artificial Sequence: Synthetic oligonucleotide
  Antisense strand to SEQ ID NO: 2455200
uuuacuacagccauggucg

SEQ ID NO: 2455202 - RNA, 19 nt, Artificial Sequence
  Description of Artificial Sequence: Synthetic oligonucleotide
  Sense strand starting at position 2826 of SEQ ID NO: 1887205
aagcuuguaguuucguuua

SEQ ID NO: 2455203 - RNA, 19 nt, Artificial Sequence
  Description of Artificial Sequence: Synthetic oligonucleotide
  Antisense strand to SEQ ID NO: 2455202
uaaacgaaacuacaagcuu

SEQ ID NO: 2455204 - RNA, 19 nt, Artificial Sequence
  Description of Artificial Sequence: Synthetic oligonucleotide
  Sense strand starting at position 2829 of SEQ ID NO: 1887205
cuuguaguuucguuuauuu

SEQ ID NO: 2455205 - RNA, 19 nt, Artificial Sequence
  Description of Artificial Sequence: Synthetic oligonucleotide
  Antisense strand to SEQ ID NO: 2455204
aaauaaacgaaacuacaag

SEQ ID NO: 2455206 - RNA, 19 nt, Artificial Sequence
  Description of Artificial Sequence: Synthetic oligonucleotide
  Sense strand starting at position 2831 of SEQ ID NO: 1887205
uguaguuucguuuauuugu

SEQ ID NO: 2455207 - RNA, 19 nt, Artificial Sequence
  Description of Artificial Sequence: Synthetic oligonucleotide
  Antisense strand to SEQ ID NO: 2455206
acaaauaaacgaaacuaca

SEQ ID NO: 2455208 - RNA, 19 nt, Artificial Sequence
  Description of Artificial Sequence: Synthetic oligonucleotide
  Sense strand starting at position 3056 of SEQ ID NO: 1887205
ucagauucucauuauuguu

SEQ ID NO: 2455209 - RNA, 19 nt, Artificial Sequence
  Description of Artificial Sequence: Synthetic oligonucleotide
  Antisense strand to SEQ ID NO: 2455208
aacaauaaugagaaucuga

SEQ ID NO: 2455210 - RNA, 19 nt, Artificial Sequence
  Description of Artificial Sequence: Synthetic oligonucleotide
  Sense strand starting at position 3134 of SEQ ID NO: 1887205
acuggccuccuagguaauu

SEQ ID NO: 2455211 - RNA, 19 nt, Artificial Sequence
  Description of Artificial Sequence: Synthetic oligonucleotide
  Antisense strand to SEQ ID NO: 2455210
aauuaccuaggaggccagu

SEQ ID NO: 2455212 - RNA, 19 nt, Artificial Sequence
  Description of Artificial Sequence: Synthetic oligonucleotide
  Sense strand starting at position 3253 of SEQ ID NO: 1887205
cgagcagcaauguaauauu

SEQ ID NO: 2455213 - RNA, 19 nt, Artificial Sequence
  Description of Artificial Sequence: Synthetic oligonucleotide
  Antisense strand to SEQ ID NO: 2455212
aauauuacauugcugcucg

SEQ ID NO: 2455214 - RNA, 19 nt, Artificial Sequence
  Description of Artificial Sequence: Synthetic oligonucleotide
  Sense strand starting at position 3311 of SEQ ID NO: 1887205
cucucaugucuacacagau

SEQ ID NO: 2455215 - RNA, 19 nt, Artificial Sequence
  Description of Artificial Sequence: Synthetic oligonucleotide
  Antisense strand to SEQ ID NO: 2455214
aucuguguagacaugagag

SEQ ID NO: 2455216 - RNA, 19 nt, Artificial Sequence
  Description of Artificial Sequence: Synthetic oligonucleotide
  Sense strand starting at position 3739 of SEQ ID NO: 1887205
cuagaaaugguuugggcau

SEQ ID NO: 2455217 - RNA, 19 nt, Artificial Sequence
  Description of Artificial Sequence: Synthetic oligonucleotide
  Antisense strand to SEQ ID NO: 2455216
augcccaaaccauuucuag

SEQ ID NO: 2455218 - RNA, 19 nt, Artificial Sequence
  Description of Artificial Sequence: Synthetic oligonucleotide
  Sense strand starting at position 3751 of SEQ ID NO: 1887205
ugggcauguauccaaguuu

SEQ ID NO: 2455219 - RNA, 19 nt, Artificial Sequence
  Description of Artificial Sequence: Synthetic oligonucleotide
  Antisense strand to SEQ ID NO: 2455218
aaacuuggauacaugccca

SEQ ID NO: 2455220 - RNA, 19 nt, Artificial Sequence
  Description of Artificial Sequence: Synthetic oligonucleotide
  Sense strand starting at position 3762 of SEQ ID NO: 1887205
ccaaguuucccaggauccu

SEQ ID NO: 2455221 - RNA, 19 nt, Artificial Sequence
  Description of Artificial Sequence: Synthetic oligonucleotide
  Antisense strand to SEQ ID NO: 2455220
aggauccugggaaacuugg

SEQ ID NO: 2455222 - RNA, 19 nt, Artificial Sequence
  Description of Artificial Sequence: Synthetic oligonucleotide
  Sense strand starting at position 535 of SEQ ID NO: 1887206
uggcuuucuccugaucuca

SEQ ID NO: 2455223 - RNA, 19 nt, Artificial Sequence
  Description of Artificial Sequence: Synthetic oligonucleotide
  Antisense strand to SEQ ID NO: 2455222
ugagaucaggagaaagcca

SEQ ID NO: 2455224 - RNA, 19 nt, Artificial Sequence
  Description of Artificial Sequence: Synthetic oligonucleotide
  Sense strand starting at position 599 of SEQ ID NO: 1887206
ccuagugauuccuugauuc

SEQ ID NO: 2455225 - RNA, 19 nt, Artificial Sequence
  Description of Artificial Sequence: Synthetic oligonucleotide
  Antisense strand to SEQ ID NO: 2455224
gaaucaaggaaucacuagg

SEQ ID NO: 2455226 - RNA, 19 nt, Artificial Sequence
  Description of Artificial Sequence: Synthetic oligonucleotide
  Sense strand starting at position 603 of SEQ ID NO: 1887206
gugauuccuugauuccuga

SEQ ID NO: 2455227 - RNA, 19 nt, Artificial Sequence
  Description of Artificial Sequence: Synthetic oligonucleotide
  Antisense strand to SEQ ID NO: 2455226
ucaggaaucaaggaaucac

SEQ ID NO: 2455228 - RNA, 19 nt, Artificial Sequence
  Description of Artificial Sequence: Synthetic oligonucleotide
  Sense strand starting at position 722 of SEQ ID NO: 1887206
gcccauguauaagguauau

SEQ ID NO: 2455229 - RNA, 19 nt, Artificial Sequence
  Description of Artificial Sequence: Synthetic oligonucleotide
  Antisense strand to SEQ ID NO: 2455228
auauaccuuauacaugggc

SEQ ID NO: 2455230 - RNA, 19 nt, Artificial Sequence
  Description of Artificial Sequence: Synthetic oligonucleotide
  Sense strand starting at position 724 of SEQ ID NO: 1887206
ccauguauaagguauaugu

SEQ ID NO: 2455231 - RNA, 19 nt, Artificial Sequence
  Description of Artificial Sequence: Synthetic oligonucleotide
  Antisense strand to SEQ ID NO: 2455230
acauauaccuuauacaugg

SEQ ID NO: 2455232 - RNA, 19 nt, Artificial Sequence
  Description of Artificial Sequence: Synthetic oligonucleotide
  Sense strand starting at position 728 of SEQ ID NO: 1887206
guauaagguauauguggga

SEQ ID NO: 2455233 - RNA, 19 nt, Artificial Sequence
  Description of Artificial Sequence: Synthetic oligonucleotide
  Antisense strand to SEQ ID NO: 2455232
ucccacauauaccuuauac

SEQ ID NO: 2455234 - RNA, 19 nt, Artificial Sequence
  Description of Artificial Sequence: Synthetic oligonucleotide
  Sense strand starting at position 824 of SEQ ID NO: 1887206
ugggcagugcuuuguggau

SEQ ID NO: 2455235 - RNA, 19 nt, Artificial Sequence
  Description of Artificial Sequence: Synthetic oligonucleotide
  Antisense strand to SEQ ID NO: 2455234
auccacaaagcacugccca

SEQ ID NO: 2455236 - RNA, 19 nt, Artificial Sequence
  Description of Artificial Sequence: Synthetic oligonucleotide
  Sense strand starting at position 826 of SEQ ID NO: 1887206
ggcagugcuuuguggaugu

SEQ ID NO: 2455237 - RNA, 19 nt, Artificial Sequence
  Description of Artificial Sequence: Synthetic oligonucleotide
  Antisense strand to SEQ ID NO: 2455236
acauccacaaagcacugcc

SEQ ID NO: 2455238 - RNA, 19 nt, Artificial Sequence
  Description of Artificial Sequence: Synthetic oligonucleotide
  Sense strand starting at position 866 of SEQ ID NO: 1887206
ggucaucucccgggagugu

SEQ ID NO: 2455239 - RNA, 19 nt, Artificial Sequence
  Description of Artificial Sequence: Synthetic oligonucleotide
  Antisense strand to SEQ ID NO: 2455238
acacucccgggagaugacc

SEQ ID NO: 2455240 - RNA, 19 nt, Artificial Sequence
  Description of Artificial Sequence: Synthetic oligonucleotide
  Sense strand starting at position 904 of SEQ ID NO: 1887206
gaccgcaauuccucaguga

SEQ ID NO: 2455241 - RNA, 19 nt, Artificial Sequence
  Description of Artificial Sequence: Synthetic oligonucleotide
  Antisense strand to SEQ ID NO: 2455240
ucacugaggaauugcgguc

SEQ ID NO: 2455242 - RNA, 19 nt, Artificial Sequence
  Description of Artificial Sequence: Synthetic oligonucleotide
  Sense strand starting at position 905 of SEQ ID NO: 1887206
accgcaauuccucagugaa

SEQ ID NO: 2455243 - RNA, 19 nt, Artificial Sequence
  Description of Artificial Sequence: Synthetic oligonucleotide
  Antisense strand to SEQ ID NO: 2455242
uucacugaggaauugcggu

SEQ ID NO: 2455244 - RNA, 19 nt, Artificial Sequence
  Description of Artificial Sequence: Synthetic oligonucleotide
  Sense strand starting at position 908 of SEQ ID NO: 1887206
gcaauuccucagugaagcu

SEQ ID NO: 2455245 - RNA, 19 nt, Artificial Sequence
  Description of Artificial Sequence: Synthetic oligonucleotide
  Antisense strand to SEQ ID NO: 2455244
agcuucacugaggaauugc

SEQ ID NO: 2455246 - RNA, 19 nt, Artificial Sequence
  Description of Artificial Sequence: Synthetic oligonucleotide
  Sense strand starting at position 1023 of SEQ ID NO: 1887206
ucaucuggcccuugagacu

SEQ ID NO: 2455247 - RNA, 19 nt, Artificial Sequence
  Description of Artificial Sequence: Synthetic oligonucleotide
  Antisense strand to SEQ ID NO: 2455246
agucucaagggccagauga

SEQ ID NO: 2455248 - RNA, 19 nt, Artificial Sequence
  Description of Artificial Sequence: Synthetic oligonucleotide
  Sense strand starting at position 1071 of SEQ ID NO: 1887206
ccaggcuugcaucgacaga

SEQ ID NO: 2455249 - RNA, 19 nt, Artificial Sequence
  Description of Artificial Sequence: Synthetic oligonucleotide
  Antisense strand to SEQ ID NO: 2455248
ucugucgaugcaagccugg

SEQ ID NO: 2455250 - RNA, 19 nt, Artificial Sequence
  Description of Artificial Sequence: Synthetic oligonucleotide
  Sense strand starting at position 1136 of SEQ ID NO: 1887206
cucacagauggcugaaaga

SEQ ID NO: 2455251 - RNA, 19 nt, Artificial Sequence
  Description of Artificial Sequence: Synthetic oligonucleotide
  Antisense strand to SEQ ID NO: 2455250
ucuuucagccaucugugag

SEQ ID NO: 2455252 - RNA, 19 nt, Artificial Sequence
  Description of Artificial Sequence: Synthetic oligonucleotide
  Sense strand starting at position 1260 of SEQ ID NO: 1887206
gggugcgucacaggagaaa

SEQ ID NO: 2455253 - RNA, 19 nt, Artificial Sequence
  Description of Artificial Sequence: Synthetic oligonucleotide
  Antisense strand to SEQ ID NO: 2455252
uuucuccugugacgcaccc

SEQ ID NO: 2455254 - RNA, 19 nt, Artificial Sequence
  Description of Artificial Sequence: Synthetic oligonucleotide
  Sense strand starting at position 1326 of SEQ ID NO: 1887206
aaggguugucacugggcua

SEQ ID NO: 2455255 - RNA, 19 nt, Artificial Sequence
  Description of Artificial Sequence: Synthetic oligonucleotide
  Antisense strand to SEQ ID NO: 2455254
uagcccagugacaacccuu

SEQ ID NO: 2455256 - RNA, 19 nt, Artificial Sequence
  Description of Artificial Sequence: Synthetic oligonucleotide
  Sense strand starting at position 1392 of SEQ ID NO: 1887206
uggugcauucuugauccuu

SEQ ID NO: 2455257 - RNA, 19 nt, Artificial Sequence
  Description of Artificial Sequence: Synthetic oligonucleotide
  Antisense strand to SEQ ID NO: 2455256
aaggaucaagaaugcacca

SEQ ID NO: 2455258 - RNA, 19 nt, Artificial Sequence
  Description of Artificial Sequence: Synthetic oligonucleotide
  Sense strand starting at position 2128 of SEQ ID NO: 1887206
gggccagaagaaugaaguu

SEQ ID NO: 2455259 - RNA, 19 nt, Artificial Sequence
  Description of Artificial Sequence: Synthetic oligonucleotide
  Antisense strand to SEQ ID NO: 2455258
aacuucauucuucuggccc

SEQ ID NO: 2455260 - RNA, 19 nt, Artificial Sequence
  Description of Artificial Sequence: Synthetic oligonucleotide
  Sense strand starting at position 2352 of SEQ ID NO: 1887206
gaggaacaguuucugugua

SEQ ID NO: 2455261 - RNA, 19 nt, Artificial Sequence
  Description of Artificial Sequence: Synthetic oligonucleotide
  Antisense strand to SEQ ID NO: 2455260
uacacagaaacuguuccuc

SEQ ID NO: 2455262 - RNA, 19 nt, Artificial Sequence
  Description of Artificial Sequence: Synthetic oligonucleotide
  Sense strand starting at position 2353 of SEQ ID NO: 1887206
aggaacaguuucuguguau

SEQ ID NO: 2455263 - RNA, 19 nt, Artificial Sequence
  Description of Artificial Sequence: Synthetic oligonucleotide
  Antisense strand to SEQ ID NO: 2455262
auacacagaaacuguuccu

SEQ ID NO: 2455264 - RNA, 19 nt, Artificial Sequence
  Description of Artificial Sequence: Synthetic oligonucleotide
  Sense strand starting at position 2354 of SEQ ID NO: 1887206
ggaacaguuucuguguauu

SEQ ID NO: 2455265 - RNA, 19 nt, Artificial Sequence
  Description of Artificial Sequence: Synthetic oligonucleotide
  Antisense strand to SEQ ID NO: 2455264
aauacacagaaacuguucc

SEQ ID NO: 2455266 - RNA, 19 nt, Artificial Sequence
  Description of Artificial Sequence: Synthetic oligonucleotide
  Sense strand starting at position 2364 of SEQ ID NO: 1887206
cuguguauuacgggcaguu

SEQ ID NO: 2455267 - RNA, 19 nt, Artificial Sequence
  Description of Artificial Sequence: Synthetic oligonucleotide
  Antisense strand to SEQ ID NO: 2455266
aacugcccguaauacacag

SEQ ID NO: 2455268 - RNA, 19 nt, Artificial Sequence
  Description of Artificial Sequence: Synthetic oligonucleotide
  Sense strand starting at position 2374 of SEQ ID NO: 1887206
cgggcaguucuuuauuaca

SEQ ID NO: 2455269 - RNA, 19 nt, Artificial Sequence
  Description of Artificial Sequence: Synthetic oligonucleotide
  Antisense strand to SEQ ID NO: 2455268
uguaauaaagaacugcccg

SEQ ID NO: 2455270 - RNA, 19 nt, Artificial Sequence
  Description of Artificial Sequence: Synthetic oligonucleotide
  Sense strand starting at position 2376 of SEQ ID NO: 1887206
ggcaguucuuuauuacaug

SEQ ID NO: 2455271 - RNA, 19 nt, Artificial Sequence
  Description of Artificial Sequence: Synthetic oligonucleotide
  Antisense strand to SEQ ID NO: 2455270
cauguaauaaagaacugcc

SEQ ID NO: 2455272 - RNA, 19 nt, Artificial Sequence
  Description of Artificial Sequence: Synthetic oligonucleotide
  Sense strand starting at position 2377 of SEQ ID NO: 1887206
gcaguucuuuauuacauga

SEQ ID NO: 2455273 - RNA, 19 nt, Artificial Sequence
  Description of Artificial Sequence: Synthetic oligonucleotide
  Antisense strand to SEQ ID NO: 2455272
ucauguaauaaagaacugc

SEQ ID NO: 2455274 - RNA, 19 nt, Artificial Sequence
  Description of Artificial Sequence: Synthetic oligonucleotide
  Sense strand starting at position 2783 of SEQ ID NO: 1887206
gucucauccucagaggauu

SEQ ID NO: 2455275 - RNA, 19 nt, Artificial Sequence
  Description of Artificial Sequence: Synthetic oligonucleotide
  Antisense strand to SEQ ID NO: 2455274
aauccucugaggaugagac

SEQ ID NO: 2455276 - RNA, 19 nt, Artificial Sequence
  Description of Artificial Sequence: Synthetic oligonucleotide
  Sense strand starting at position 3148 of SEQ ID NO: 1887206
gauggucucccuugucauc

SEQ ID NO: 2455277 - RNA, 19 nt, Artificial Sequence
  Description of Artificial Sequence: Synthetic oligonucleotide
  Antisense strand to SEQ ID NO: 2455276
gaugacaagggagaccauc

SEQ ID NO: 2455278 - RNA, 19 nt, Artificial Sequence
  Description of Artificial Sequence: Synthetic oligonucleotide
  Sense strand starting at position 3153 of SEQ ID NO: 1887206
ucucccuugucaucggaga

SEQ ID NO: 2455279 - RNA, 19 nt, Artificial Sequence
  Description of Artificial Sequence: Synthetic oligonucleotide
  Antisense strand to SEQ ID NO: 2455278
ucuccgaugacaagggaga

SEQ ID NO: 2455280 - RNA, 19 nt, Artificial Sequence
  Description of Artificial Sequence: Synthetic oligonucleotide
  Sense strand starting at position 3770 of SEQ ID NO: 1887206
ggcaguguugucaggcaga

SEQ ID NO: 2455281 - RNA, 19 nt, Artificial Sequence
  Description of Artificial Sequence: Synthetic oligonucleotide
  Antisense strand to SEQ ID NO: 2455280
ucugccugacaacacugcc

SEQ ID NO: 2455282 - RNA, 19 nt, Artificial Sequence
  Description of Artificial Sequence: Synthetic oligonucleotide
  Sense strand starting at position 3773 of SEQ ID NO: 1887206
aguguugucaggcagaaug

SEQ ID NO: 2455283 - RNA, 19 nt, Artificial Sequence
  Description of Artificial Sequence: Synthetic oligonucleotide
  Antisense strand to SEQ ID NO: 2455282
cauucugccugacaacacu

SEQ ID NO: 2455284 - RNA, 19 nt, Artificial Sequence
  Description of Artificial Sequence: Synthetic oligonucleotide
  Sense strand starting at position 3937 of SEQ ID NO: 1887206
cagccucagucugagacaa

SEQ ID NO: 2455285 - RNA, 19 nt, Artificial Sequence
  Description of Artificial Sequence: Synthetic oligonucleotide
  Antisense strand to SEQ ID NO: 2455284
uugucucagacugaggcug

SEQ ID NO: 2455286 - RNA, 19 nt, Artificial Sequence
  Description of Artificial Sequence: Synthetic oligonucleotide
  Sense strand starting at position 3939 of SEQ ID NO: 1887206
gccucagucugagacaaug

SEQ ID NO: 2455287 - RNA, 19 nt, Artificial Sequence
  Description of Artificial Sequence: Synthetic oligonucleotide
  Antisense strand to SEQ ID NO: 2455286
cauugucucagacugaggc

SEQ ID NO: 2455288 - RNA, 19 nt, Artificial Sequence
  Description of Artificial Sequence: Synthetic oligonucleotide
  Sense strand starting at position 3982 of SEQ ID NO: 1887206
ucaucaggcucagcagaau

SEQ ID NO: 2455289 - RNA, 19 nt, Artificial Sequence
  Description of Artificial Sequence: Synthetic oligonucleotide
  Antisense strand to SEQ ID NO: 2455288
auucugcugagccugauga

SEQ ID NO: 2455290 - RNA, 19 nt, Artificial Sequence
  Description of Artificial Sequence: Synthetic oligonucleotide
  Sense strand starting at position 242 of SEQ ID NO: 1887207
augguaucccauuauucuu

SEQ ID NO: 2455291 - RNA, 19 nt, Artificial Sequence
  Description of Artificial Sequence: Synthetic oligonucleotide
  Antisense strand to SEQ ID NO: 2455290
aagaauaaugggauaccau

SEQ ID NO: 2455292 - RNA, 19 nt, Artificial Sequence
  Description of Artificial Sequence: Synthetic oligonucleotide
  Sense strand starting at position 638 of SEQ ID NO: 1887207
uuugcuuucugggcuacaa

SEQ ID NO: 2455293 - RNA, 19 nt, Artificial Sequence
  Description of Artificial Sequence: Synthetic oligonucleotide
  Antisense strand to SEQ ID NO: 2455292
uuguagcccagaaagcaaa

SEQ ID NO: 2455294 - RNA, 19 nt, Artificial Sequence
  Description of Artificial Sequence: Synthetic oligonucleotide
  Sense strand starting at position 930 of SEQ ID NO: 1887207
ccgccagauccuugggaua

SEQ ID NO: 2455295 - RNA, 19 nt, Artificial Sequence
  Description of Artificial Sequence: Synthetic oligonucleotide
  Antisense strand to SEQ ID NO: 2455294
uaucccaaggaucuggcgg

SEQ ID NO: 2455296 - RNA, 19 nt, Artificial Sequence
  Description of Artificial Sequence: Synthetic oligonucleotide
  Sense strand starting at position 932 of SEQ ID NO: 1887207
gccagauccuugggauaua

SEQ ID NO: 2455297 - RNA, 19 nt, Artificial Sequence
  Description of Artificial Sequence: Synthetic oligonucleotide
  Antisense strand to SEQ ID NO: 2455296
uauaucccaaggaucuggc

SEQ ID NO: 2455298 - RNA, 19 nt, Artificial Sequence
  Description of Artificial Sequence: Synthetic oligonucleotide
  Sense strand starting at position 933 of SEQ ID NO: 1887207
ccagauccuugggauauau

SEQ ID NO: 2455299 - RNA, 19 nt, Artificial Sequence
  Description of Artificial Sequence: Synthetic oligonucleotide
  Antisense strand to SEQ ID NO: 2455298
auauaucccaaggaucugg

SEQ ID NO: 2455300 - RNA, 19 nt, Artificial Sequence
  Description of Artificial Sequence: Synthetic oligonucleotide
  Sense strand starting at position 944 of SEQ ID NO: 1887207
ggauauauguucuuacguu

SEQ ID NO: 2455301 - RNA, 19 nt, Artificial Sequence
  Description of Artificial Sequence: Synthetic oligonucleotide
  Antisense strand to SEQ ID NO: 2455300
aacguaagaacauauaucc

SEQ ID NO: 2455302 - RNA, 19 nt, Artificial Sequence
  Description of Artificial Sequence: Synthetic oligonucleotide
  Sense strand starting at position 979 of SEQ ID NO: 1887207
cucacuuuggcuugaauua

SEQ ID NO: 2455303 - RNA, 19 nt, Artificial Sequence
  Description of Artificial Sequence: Synthetic oligonucleotide
  Antisense strand to SEQ ID NO: 2455302
uaauucaagccaaagugag

SEQ ID NO: 2455304 - RNA, 19 nt, Artificial Sequence
  Description of Artificial Sequence: Synthetic oligonucleotide
  Sense strand starting at position 980 of SEQ ID NO: 1887207
ucacuuuggcuugaauuau

SEQ ID NO: 2455305 - RNA, 19 nt, Artificial Sequence
  Description of Artificial Sequence: Synthetic oligonucleotide
  Antisense strand to SEQ ID NO: 2455304
auaauucaagccaaaguga

SEQ ID NO: 2455306 - RNA, 19 nt, Artificial Sequence
  Description of Artificial Sequence: Synthetic oligonucleotide
  Sense strand starting at position 1572 of SEQ ID NO: 1887207
gcugaauuaugcccucuua

SEQ ID NO: 2455307 - RNA, 19 nt, Artificial Sequence
  Description of Artificial Sequence: Synthetic oligonucleotide
  Antisense strand to SEQ ID NO: 2455306
uaagagggcauaauucagc

SEQ ID NO: 2455308 - RNA, 19 nt, Artificial Sequence
  Description of Artificial Sequence: Synthetic oligonucleotide
  Sense strand starting at position 1583 of SEQ ID NO: 1887207
cccucuuaagugugaucau

SEQ ID NO: 2455309 - RNA, 19 nt, Artificial Sequence
  Description of Artificial Sequence: Synthetic oligonucleotide
  Antisense strand to SEQ ID NO: 2455308
augaucacacuuaagaggg

SEQ ID NO: 2455310 - RNA, 19 nt, Artificial Sequence
  Description of Artificial Sequence: Synthetic oligonucleotide
  Sense strand starting at position 1584 of SEQ ID NO: 1887207
ccucuuaagugugaucauu

SEQ ID NO: 2455311 - RNA, 19 nt, Artificial Sequence
  Description of Artificial Sequence: Synthetic oligonucleotide
  Antisense strand to SEQ ID NO: 2455310
aaugaucacacuuaagagg

SEQ ID NO: 2455312 - RNA, 19 nt, Artificial Sequence
  Description of Artificial Sequence: Synthetic oligonucleotide
  Sense strand starting at position 1623 of SEQ ID NO: 1887207
gguuguaguucccagagaa

SEQ ID NO: 2455313 - RNA, 19 nt, Artificial Sequence
  Description of Artificial Sequence: Synthetic oligonucleotide
  Antisense strand to SEQ ID NO: 2455312
uucucugggaacuacaacc

SEQ ID NO: 2455314 - RNA, 19 nt, Artificial Sequence
  Description of Artificial Sequence: Synthetic oligonucleotide
  Sense strand starting at position 1665 of SEQ ID NO: 1887207
aucucuguauccguaacau

SEQ ID NO: 2455315 - RNA, 19 nt, Artificial Sequence
  Description of Artificial Sequence: Synthetic oligonucleotide
  Antisense strand to SEQ ID NO: 2455314
auguuacggauacagagau

SEQ ID NO: 2455316 - RNA, 19 nt, Artificial Sequence
  Description of Artificial Sequence: Synthetic oligonucleotide
  Sense strand starting at position 1669 of SEQ ID NO: 1887207
cuguauccguaacauuuaa

SEQ ID NO: 2455317 - RNA, 19 nt, Artificial Sequence
  Description of Artificial Sequence: Synthetic oligonucleotide
  Antisense strand to SEQ ID NO: 2455316
uuaaauguuacggauacag

SEQ ID NO: 2455318 - RNA, 19 nt, Artificial Sequence
  Description of Artificial Sequence: Synthetic oligonucleotide
  Sense strand starting at position 1697 of SEQ ID NO: 1887207
aggccaauguaucaacaaa

SEQ ID NO: 2455319 - RNA, 19 nt, Artificial Sequence
  Description of Artificial Sequence: Synthetic oligonucleotide
  Antisense strand to SEQ ID NO: 2455318
uuuguugauacauuggccu

SEQ ID NO: 2455320 - RNA, 19 nt, Artificial Sequence
  Description of Artificial Sequence: Synthetic oligonucleotide
  Sense strand starting at position 1738 of SEQ ID NO: 1887207
acaguaacauuguuuauga

SEQ ID NO: 2455321 - RNA, 19 nt, Artificial Sequence
  Description of Artificial Sequence: Synthetic oligonucleotide
  Antisense strand to SEQ ID NO: 2455320
ucauaaacaauguuacugu

SEQ ID NO: 2455322 - RNA, 19 nt, Artificial Sequence
  Description of Artificial Sequence: Synthetic oligonucleotide
  Sense strand starting at position 1771 of SEQ ID NO: 1887207
agggcucucugauacuaac

SEQ ID NO: 2455323 - RNA, 19 nt, Artificial Sequence
  Description of Artificial Sequence: Synthetic oligonucleotide
  Antisense strand to SEQ ID NO: 2455322
guuaguaucagagagcccu

SEQ ID NO: 2455324 - RNA, 19 nt, Artificial Sequence
  Description of Artificial Sequence: Synthetic oligonucleotide
  Sense strand starting at position 1810 of SEQ ID NO: 1887207
guagguccuguuugcagua

SEQ ID NO: 2455325 - RNA, 19 nt, Artificial Sequence
  Description of Artificial Sequence: Synthetic oligonucleotide
  Antisense strand to SEQ ID NO: 2455324
uacugcaaacaggaccuac

SEQ ID NO: 2455326 - RNA, 19 nt, Artificial Sequence
  Description of Artificial Sequence: Synthetic oligonucleotide
  Sense strand starting at position 2017 of SEQ ID NO: 1887207
ugucaccaugcuugacaua

SEQ ID NO: 2455327 - RNA, 19 nt, Artificial Sequence
  Description of Artificial Sequence: Synthetic oligonucleotide
  Antisense strand to SEQ ID NO: 2455326
uaugucaagcauggugaca

SEQ ID NO: 2455328 - RNA, 19 nt, Artificial Sequence
  Description of Artificial Sequence: Synthetic oligonucleotide
  Sense strand starting at position 2169 of SEQ ID NO: 1887207
guaacauaaugugcuuuaa

SEQ ID NO: 2455329 - RNA, 19 nt, Artificial Sequence
  Description of Artificial Sequence: Synthetic oligonucleotide
  Antisense strand to SEQ ID NO: 2455328
uuaaagcacauuauguuac

SEQ ID NO: 2455330 - RNA, 19 nt, Artificial Sequence
  Description of Artificial Sequence: Synthetic oligonucleotide
  Sense strand starting at position 2353 of SEQ ID NO: 1887207
cccuacuugcgaugggaga

SEQ ID NO: 2455331 - RNA, 19 nt, Artificial Sequence
  Description of Artificial Sequence: Synthetic oligonucleotide
  Antisense strand to SEQ ID NO: 2455330
ucucccaucgcaaguaggg

SEQ ID NO: 2455332 - RNA, 19 nt, Artificial Sequence
  Description of Artificial Sequence: Synthetic oligonucleotide
  Sense strand starting at position 2354 of SEQ ID NO: 1887207
ccuacuugcgaugggagaa

SEQ ID NO: 2455333 - RNA, 19 nt, Artificial Sequence
  Description of Artificial Sequence: Synthetic oligonucleotide
  Antisense strand to SEQ ID NO: 2455332
uucucccaucgcaaguagg

SEQ ID NO: 2455334 - RNA, 19 nt, Artificial Sequence
  Description of Artificial Sequence: Synthetic oligonucleotide
  Sense strand starting at position 2676 of SEQ ID NO: 1887207
gugauaacuuaccauagag

SEQ ID NO: 2455335 - RNA, 19 nt, Artificial Sequence
  Description of Artificial Sequence: Synthetic oligonucleotide
  Antisense strand to SEQ ID NO: 2455334
cucuaugguaaguuaucac

SEQ ID NO: 2455336 - RNA, 19 nt, Artificial Sequence
  Description of Artificial Sequence: Synthetic oligonucleotide
  Sense strand starting at position 2708 of SEQ ID NO: 1887207
agucgaugacuuuggaucu

SEQ ID NO: 2455337 - RNA, 19 nt, Artificial Sequence
  Description of Artificial Sequence: Synthetic oligonucleotide
  Antisense strand to SEQ ID NO: 2455336
agauccaaagucaucgacu

SEQ ID NO: 2455338 - RNA, 19 nt, Artificial Sequence
  Description of Artificial Sequence: Synthetic oligonucleotide
  Sense strand starting at position 2860 of SEQ ID NO: 1887207
gguuccuggagccgugaaa

SEQ ID NO: 2455339 - RNA, 19 nt, Artificial Sequence
  Description of Artificial Sequence: Synthetic oligonucleotide
  Antisense strand to SEQ ID NO: 2455338
uuucacggcuccaggaacc

SEQ ID NO: 2455340 - RNA, 19 nt, Artificial Sequence
  Description of Artificial Sequence: Synthetic oligonucleotide
  Sense strand starting at position 2871 of SEQ ID NO: 1887207
ccgugaaagcauuaucucu

SEQ ID NO: 2455341 - RNA, 19 nt, Artificial Sequence
  Description of Artificial Sequence: Synthetic oligonucleotide
  Antisense strand to SEQ ID NO: 2455340
agagauaaugcuuucacgg

SEQ ID NO: 2455342 - RNA, 19 nt, Artificial Sequence
  Description of Artificial Sequence: Synthetic oligonucleotide
  Sense strand starting at position 2873 of SEQ ID NO: 1887207
gugaaagcauuaucucucu

SEQ ID NO: 2455343 - RNA, 19 nt, Artificial Sequence
  Description of Artificial Sequence: Synthetic oligonucleotide
  Antisense strand to SEQ ID NO: 2455342
agagagauaaugcuuucac

SEQ ID NO: 2455344 - RNA, 19 nt, Artificial Sequence
  Description of Artificial Sequence: Synthetic oligonucleotide
  Sense strand starting at position 2931 of SEQ ID NO: 1887207
uccugucuuguagaugaga

SEQ ID NO: 2455345 - RNA, 19 nt, Artificial Sequence
  Description of Artificial Sequence: Synthetic oligonucleotide
  Antisense strand to SEQ ID NO: 2455344
ucucaucuacaagacagga

SEQ ID NO: 2455346 - RNA, 19 nt, Artificial Sequence
  Description of Artificial Sequence: Synthetic oligonucleotide
  Sense strand starting at position 2933 of SEQ ID NO: 1887207
cugucuuguagaugagaag

SEQ ID NO: 2455347 - RNA, 19 nt, Artificial Sequence
  Description of Artificial Sequence: Synthetic oligonucleotide
  Antisense strand to SEQ ID NO: 2455346
cuucucaucuacaagacag

SEQ ID NO: 2455348 - RNA, 19 nt, Artificial Sequence
  Description of Artificial Sequence: Synthetic oligonucleotide
  Sense strand starting at position 2934 of SEQ ID NO: 1887207
ugucuuguagaugagaagu

SEQ ID NO: 2455349 - RNA, 19 nt, Artificial Sequence
  Description of Artificial Sequence: Synthetic oligonucleotide
  Antisense strand to SEQ ID NO: 2455348
acuucucaucuacaagaca

SEQ ID NO: 2455350 - RNA, 19 nt, Artificial Sequence
  Description of Artificial Sequence: Synthetic oligonucleotide
  Sense strand starting at position 2962 of SEQ ID NO: 1887207
cggagaugcuugguuacuu

SEQ ID NO: 2455351 - RNA, 19 nt, Artificial Sequence
  Description of Artificial Sequence: Synthetic oligonucleotide
  Antisense strand to SEQ ID NO: 2455350
aaguaaccaagcaucuccg

SEQ ID NO: 2455352 - RNA, 19 nt, Artificial Sequence
  Description of Artificial Sequence: Synthetic oligonucleotide
  Sense strand starting at position 2963 of SEQ ID NO: 1887207
ggagaugcuugguuacuuu

SEQ ID NO: 2455353 - RNA, 19 nt, Artificial Sequence
  Description of Artificial Sequence: Synthetic oligonucleotide
  Antisense strand to SEQ ID NO: 2455352
aaaguaaccaagcaucucc

SEQ ID NO: 2455354 - RNA, 19 nt, Artificial Sequence
  Description of Artificial Sequence: Synthetic oligonucleotide
  Sense strand starting at position 3221 of SEQ ID NO: 1887207
acaggaaucuugcucugag

SEQ ID NO: 2455355 - RNA, 19 nt, Artificial Sequence
  Description of Artificial Sequence: Synthetic oligonucleotide
  Antisense strand to SEQ ID NO: 2455354
cucagagcaagauuccugu

SEQ ID NO: 2455356 - RNA, 19 nt, Artificial Sequence
  Description of Artificial Sequence: Synthetic oligonucleotide
  Sense strand starting at position 3222 of SEQ ID NO: 1887207
caggaaucuugcucugagu

SEQ ID NO: 2455357 - RNA, 19 nt, Artificial Sequence
  Description of Artificial Sequence: Synthetic oligonucleotide
  Antisense strand to SEQ ID NO: 2455356
acucagagcaagauuccug

SEQ ID NO: 2455358 - RNA, 19 nt, Artificial Sequence
  Description of Artificial Sequence: Synthetic oligonucleotide
  Sense strand starting at position 3224 of SEQ ID NO: 1887207
ggaaucuugcucugagucu

SEQ ID NO: 2455359 - RNA, 19 nt, Artificial Sequence
  Description of Artificial Sequence: Synthetic oligonucleotide
  Antisense strand to SEQ ID NO: 2455358
agacucagagcaagauucc

SEQ ID NO: 2455360 - RNA, 19 nt, Artificial Sequence
  Description of Artificial Sequence: Synthetic oligonucleotide
  Sense strand starting at position 3257 of SEQ ID NO: 1887207
ggaagaauugcuggaccuu

SEQ ID NO: 2455361 - RNA, 19 nt, Artificial Sequence
  Description of Artificial Sequence: Synthetic oligonucleotide
  Antisense strand to SEQ ID NO: 2455360
aagguccagcaauucuucc

SEQ ID NO: 2455362 - RNA, 19 nt, Artificial Sequence
  Description of Artificial Sequence: Synthetic oligonucleotide
  Sense strand starting at position 3272 of SEQ ID NO: 1887207
ccuugucucagaggcguuu

SEQ ID NO: 2455363 - RNA, 19 nt, Artificial Sequence
  Description of Artificial Sequence: Synthetic oligonucleotide
  Antisense strand to SEQ ID NO: 2455362
aaacgccucugagacaagg

SEQ ID NO: 2455364 - RNA, 19 nt, Artificial Sequence
  Description of Artificial Sequence: Synthetic oligonucleotide
  Sense strand starting at position 3350 of SEQ ID NO: 1887207
gaugcauugcuaggucaua

SEQ ID NO: 2455365 - RNA, 19 nt, Artificial Sequence
  Description of Artificial Sequence: Synthetic oligonucleotide
  Antisense strand to SEQ ID NO: 2455364
uaugaccuagcaaugcauc

SEQ ID NO: 2455366 - RNA, 19 nt, Artificial Sequence
  Description of Artificial Sequence: Synthetic oligonucleotide
  Sense strand starting at position 3362 of SEQ ID NO: 1887207
ggucauacagcucauaaag

SEQ ID NO: 2455367 - RNA, 19 nt, Artificial Sequence
  Description of Artificial Sequence: Synthetic oligonucleotide
  Antisense strand to SEQ ID NO: 2455366
cuuuaugagcuguaugacc

SEQ ID NO: 2455368 - RNA, 19 nt, Artificial Sequence
  Description of Artificial Sequence: Synthetic oligonucleotide
  Sense strand starting at position 3847 of SEQ ID NO: 1887207
guggcucgacccuguaauu

SEQ ID NO: 2455369 - RNA, 19 nt, Artificial Sequence
  Description of Artificial Sequence: Synthetic oligonucleotide
  Antisense strand to SEQ ID NO: 2455368
aauuacagggucgagccac

SEQ ID NO: 2455370 - RNA, 19 nt, Artificial Sequence
  Description of Artificial Sequence: Synthetic oligonucleotide
  Sense strand starting at position 45 of SEQ ID NO: 1887208
ugcuauaagugaucuuaaa

SEQ ID NO: 2455371 - RNA, 19 nt, Artificial Sequence
  Description of Artificial Sequence: Synthetic oligonucleotide
  Antisense strand to SEQ ID NO: 2455370
uuuaagaucacuuauagca

SEQ ID NO: 2455372 - RNA, 19 nt, Artificial Sequence
  Description of Artificial Sequence: Synthetic oligonucleotide
  Sense strand starting at position 95 of SEQ ID NO: 1887208
agguaauccguuuauaaau

SEQ ID NO: 2455373 - RNA, 19 nt, Artificial Sequence
  Description of Artificial Sequence: Synthetic oligonucleotide
  Antisense strand to SEQ ID NO: 2455372
auuuauaaacggauuaccu

SEQ ID NO: 2455374 - RNA, 19 nt, Artificial Sequence
  Description of Artificial Sequence: Synthetic oligonucleotide
  Sense strand starting at position 515 of SEQ ID NO: 1887208
uugggucuauuugagcaaa

SEQ ID NO: 2455375 - RNA, 19 nt, Artificial Sequence
  Description of Artificial Sequence: Synthetic oligonucleotide
  Antisense strand to SEQ ID NO: 2455374
uuugcucaaauagacccaa

SEQ ID NO: 2455376 - RNA, 19 nt, Artificial Sequence
  Description of Artificial Sequence: Synthetic oligonucleotide
  Sense strand starting at position 553 of SEQ ID NO: 1887208
cucuaagaugggcauguaa

SEQ ID NO: 2455377 - RNA, 19 nt, Artificial Sequence
  Description of Artificial Sequence: Synthetic oligonucleotide
  Antisense strand to SEQ ID NO: 2455376
uuacaugcccaucuuagag

SEQ ID NO: 2455378 - RNA, 19 nt, Artificial Sequence
  Description of Artificial Sequence: Synthetic oligonucleotide
  Sense strand starting at position 555 of SEQ ID NO: 1887208
cuaagaugggcauguaaga

SEQ ID NO: 2455379 - RNA, 19 nt, Artificial Sequence
  Description of Artificial Sequence: Synthetic oligonucleotide
  Antisense strand to SEQ ID NO: 2455378
ucuuacaugcccaucuuag

SEQ ID NO: 2455380 - RNA, 19 nt, Artificial Sequence
  Description of Artificial Sequence: Synthetic oligonucleotide
  Sense strand starting at position 583 of SEQ ID NO: 1887208
ggaguaauauuuggaauug

SEQ ID NO: 2455381 - RNA, 19 nt, Artificial Sequence
  Description of Artificial Sequence: Synthetic oligonucleotide
  Antisense strand to SEQ ID NO: 2455380
caauuccaaauauuacucc

SEQ ID NO: 2455382 - RNA, 19 nt, Artificial Sequence
  Description of Artificial Sequence: Synthetic oligonucleotide
  Sense strand starting at position 584 of SEQ ID NO: 1887208
gaguaauauuuggaauugu

SEQ ID NO: 2455383 - RNA, 19 nt, Artificial Sequence
  Description of Artificial Sequence: Synthetic oligonucleotide
  Antisense strand to SEQ ID NO: 2455382
acaauuccaaauauuacuc

SEQ ID NO: 2455384 - RNA, 19 nt, Artificial Sequence
  Description of Artificial Sequence: Synthetic oligonucleotide
  Sense strand starting at position 640 of SEQ ID NO: 1887208
gugccuauguuucuaaaga

SEQ ID NO: 2455385 - RNA, 19 nt, Artificial Sequence
  Description of Artificial Sequence: Synthetic oligonucleotide
  Antisense strand to SEQ ID NO: 2455384
ucuuuagaaacauaggcac

SEQ ID NO: 2455386 - RNA, 19 nt, Artificial Sequence
  Description of Artificial Sequence: Synthetic oligonucleotide
  Sense strand starting at position 704 of SEQ ID NO: 1887208
gagcucaguccauagguua

SEQ ID NO: 2455387 - RNA, 19 nt, Artificial Sequence
  Description of Artificial Sequence: Synthetic oligonucleotide
  Antisense strand to SEQ ID NO: 2455386
uaaccuauggacugagcuc

SEQ ID NO: 2455388 - RNA, 19 nt, Artificial Sequence
  Description of Artificial Sequence: Synthetic oligonucleotide
  Sense strand starting at position 707 of SEQ ID NO: 1887208
cucaguccauagguuaaau

SEQ ID NO: 2455389 - RNA, 19 nt, Artificial Sequence
  Description of Artificial Sequence: Synthetic oligonucleotide
  Antisense strand to SEQ ID NO: 2455388
auuuaaccuauggacugag

SEQ ID NO: 2455390 - RNA, 19 nt, Artificial Sequence
  Description of Artificial Sequence: Synthetic oligonucleotide
  Sense strand starting at position 773 of SEQ ID NO: 1887208
gcauuaaauuugcuaggcu

SEQ ID NO: 2455391 - RNA, 19 nt, Artificial Sequence
  Description of Artificial Sequence: Synthetic oligonucleotide
  Antisense strand to SEQ ID NO: 2455390
agccuagcaaauuuaaugc

SEQ ID NO: 2455392 - RNA, 19 nt, Artificial Sequence
  Description of Artificial Sequence: Synthetic oligonucleotide
  Sense strand starting at position 807 of SEQ ID NO: 1887208
uugugaacaggaugauucu

SEQ ID NO: 2455393 - RNA, 19 nt, Artificial Sequence
  Description of Artificial Sequence: Synthetic oligonucleotide
  Antisense strand to SEQ ID NO: 2455392
agaaucauccuguucacaa

SEQ ID NO: 2455394 - RNA, 19 nt, Artificial Sequence
  Description of Artificial Sequence: Synthetic oligonucleotide
  Sense strand starting at position 813 of SEQ ID NO: 1887208
acaggaugauucuaauaac

SEQ ID NO: 2455395 - RNA, 19 nt, Artificial Sequence
  Description of Artificial Sequence: Synthetic oligonucleotide
  Antisense strand to SEQ ID NO: 2455394
guuauuagaaucauccugu

SEQ ID NO: 2455396 - RNA, 19 nt, Artificial Sequence
  Description of Artificial Sequence: Synthetic oligonucleotide
  Sense strand starting at position 831 of SEQ ID NO: 1887208
cuucucagagauugcaaca

SEQ ID NO: 2455397 - RNA, 19 nt, Artificial Sequence
  Description of Artificial Sequence: Synthetic oligonucleotide
  Antisense strand to SEQ ID NO: 2455396
uguugcaaucucugagaag

SEQ ID NO: 2455398 - RNA, 19 nt, Artificial Sequence
  Description of Artificial Sequence: Synthetic oligonucleotide
  Sense strand starting at position 890 of SEQ ID NO: 1887208
augguacagugaguaauaa

SEQ ID NO: 2455399 - RNA, 19 nt, Artificial Sequence
  Description of Artificial Sequence: Synthetic oligonucleotide
  Antisense strand to SEQ ID NO: 2455398
uuauuacucacuguaccau

SEQ ID NO: 2455400 - RNA, 19 nt, Artificial Sequence
  Description of Artificial Sequence: Synthetic oligonucleotide
  Sense strand starting at position 971 of SEQ ID NO: 1887208
acuggucugucuucucauu

SEQ ID NO: 2455401 - RNA, 19 nt, Artificial Sequence
  Description of Artificial Sequence: Synthetic oligonucleotide
  Antisense strand to SEQ ID NO: 2455400
aaugagaagacagaccagu

SEQ ID NO: 2455402 - RNA, 19 nt, Artificial Sequence
  Description of Artificial Sequence: Synthetic oligonucleotide
  Sense strand starting at position 1047 of SEQ ID NO: 1887208
ugaaacugucagcacaacu

SEQ ID NO: 2455403 - RNA, 19 nt, Artificial Sequence
  Description of Artificial Sequence: Synthetic oligonucleotide
  Antisense strand to SEQ ID NO: 2455402
aguugugcugacaguuuca

SEQ ID NO: 2455404 - RNA, 19 nt, Artificial Sequence
  Description of Artificial Sequence: Synthetic oligonucleotide
  Sense strand starting at position 1219 of SEQ ID NO: 1887208
aucuuagagucacuagcuu

SEQ ID NO: 2455405 - RNA, 19 nt, Artificial Sequence
  Description of Artificial Sequence: Synthetic oligonucleotide
  Antisense strand to SEQ ID NO: 2455404
aagcuagugacucuaagau

SEQ ID NO: 2455406 - RNA, 19 nt, Artificial Sequence
  Description of Artificial Sequence: Synthetic oligonucleotide
  Sense strand starting at position 1492 of SEQ ID NO: 1887208
uaggauucccugugaguug

SEQ ID NO: 2455407 - RNA, 19 nt, Artificial Sequence
  Description of Artificial Sequence: Synthetic oligonucleotide
  Antisense strand to SEQ ID NO: 2455406
caacucacagggaauccua

SEQ ID NO: 2455408 - RNA, 19 nt, Artificial Sequence
  Description of Artificial Sequence: Synthetic oligonucleotide
  Sense strand starting at position 1495 of SEQ ID NO: 1887208
gauucccugugaguuguau

SEQ ID NO: 2455409 - RNA, 19 nt, Artificial Sequence
  Description of Artificial Sequence: Synthetic oligonucleotide
  Antisense strand to SEQ ID NO: 2455408
auacaacucacagggaauc

SEQ ID NO: 2455410 - RNA, 19 nt, Artificial Sequence
  Description of Artificial Sequence: Synthetic oligonucleotide
  Sense strand starting at position 1501 of SEQ ID NO: 1887208
cugugaguuguauaaauag

SEQ ID NO: 2455411 - RNA, 19 nt, Artificial Sequence
  Description of Artificial Sequence: Synthetic oligonucleotide
  Antisense strand to SEQ ID NO: 2455410
cuauuuauacaacucacag

SEQ ID NO: 2455412 - RNA, 19 nt, Artificial Sequence
  Description of Artificial Sequence: Synthetic oligonucleotide
  Sense strand starting at position 1589 of SEQ ID NO: 1887208
ccuguacauagguauguua

SEQ ID NO: 2455413 - RNA, 19 nt, Artificial Sequence
  Description of Artificial Sequence: Synthetic oligonucleotide
  Antisense strand to SEQ ID NO: 2455412
uaacauaccuauguacagg

SEQ ID NO: 2455414 - RNA, 19 nt, Artificial Sequence
  Description of Artificial Sequence: Synthetic oligonucleotide
  Sense strand starting at position 1591 of SEQ ID NO: 1887208
uguacauagguauguuaca

SEQ ID NO: 2455415 - RNA, 19 nt, Artificial Sequence
  Description of Artificial Sequence: Synthetic oligonucleotide
  Antisense strand to SEQ ID NO: 2455414
uguaacauaccuauguaca

SEQ ID NO: 2455416 - RNA, 19 nt, Artificial Sequence
  Description of Artificial Sequence: Synthetic oligonucleotide
  Sense strand starting at position 1592 of SEQ ID NO: 1887208
guacauagguauguuacaa

SEQ ID NO: 2455417 - RNA, 19 nt, Artificial Sequence
  Description of Artificial Sequence: Synthetic oligonucleotide
  Antisense strand to SEQ ID NO: 2455416
uuguaacauaccuauguac

SEQ ID NO: 2455418 - RNA, 19 nt, Artificial Sequence
  Description of Artificial Sequence: Synthetic oligonucleotide
  Sense strand starting at position 1653 of SEQ ID NO: 1887208
cugaaaugcuagcuuugga

SEQ ID NO: 2455419 - RNA, 19 nt, Artificial Sequence
  Description of Artificial Sequence: Synthetic oligonucleotide
  Antisense strand to SEQ ID NO: 2455418
uccaaagcuagcauuucag

SEQ ID NO: 2455420 - RNA, 19 nt, Artificial Sequence
  Description of Artificial Sequence: Synthetic oligonucleotide
  Sense strand starting at position 1692 of SEQ ID NO: 1887208
gcaacagauuagguacuaa

SEQ ID NO: 2455421 - RNA, 19 nt, Artificial Sequence
  Description of Artificial Sequence: Synthetic oligonucleotide
  Antisense strand to SEQ ID NO: 2455420
uuaguaccuaaucuguugc

SEQ ID NO: 2455422 - RNA, 19 nt, Artificial Sequence
  Description of Artificial Sequence: Synthetic oligonucleotide
  Sense strand starting at position 1728 of SEQ ID NO: 1887208
ugagcucuagagugcuaga

SEQ ID NO: 2455423 - RNA, 19 nt, Artificial Sequence
  Description of Artificial Sequence: Synthetic oligonucleotide
  Antisense strand to SEQ ID NO: 2455422
ucuagcacucuagagcuca

SEQ ID NO: 2455424 - RNA, 19 nt, Artificial Sequence
  Description of Artificial Sequence: Synthetic oligonucleotide
  Sense strand starting at position 2029 of SEQ ID NO: 1887208
cucuaaaguuacgugauaa

SEQ ID NO: 2455425 - RNA, 19 nt, Artificial Sequence
  Description of Artificial Sequence: Synthetic oligonucleotide
  Antisense strand to SEQ ID NO: 2455424
uuaucacguaacuuuagag

SEQ ID NO: 2455426 - RNA, 19 nt, Artificial Sequence
  Description of Artificial Sequence: Synthetic oligonucleotide
  Sense strand starting at position 2061 of SEQ ID NO: 1887208
ucugcaugugaauaguaau

SEQ ID NO: 2455427 - RNA, 19 nt, Artificial Sequence
  Description of Artificial Sequence: Synthetic oligonucleotide
  Antisense strand to SEQ ID NO: 2455426
auuacuauucacaugcaga

SEQ ID NO: 2455428 - RNA, 19 nt, Artificial Sequence
  Description of Artificial Sequence: Synthetic oligonucleotide
  Sense strand starting at position 2220 of SEQ ID NO: 1887208
gggaaagacugguaagauu

SEQ ID NO: 2455429 - RNA, 19 nt, Artificial Sequence
  Description of Artificial Sequence: Synthetic oligonucleotide
  Antisense strand to SEQ ID NO: 2455428
aaucuuaccagucuuuccc

SEQ ID NO: 2455430 - RNA, 19 nt, Artificial Sequence
  Description of Artificial Sequence: Synthetic oligonucleotide
  Sense strand starting at position 2340 of SEQ ID NO: 1887208
ggucucugaucuuuccauu

SEQ ID NO: 2455431 - RNA, 19 nt, Artificial Sequence
  Description of Artificial Sequence: Synthetic oligonucleotide
  Antisense strand to SEQ ID NO: 2455430
aauggaaagaucagagacc

SEQ ID NO: 2455432 - RNA, 19 nt, Artificial Sequence
  Description of Artificial Sequence: Synthetic oligonucleotide
  Sense strand starting at position 2364 of SEQ ID NO: 1887208
uugccaguauuugaaacau

SEQ ID NO: 2455433 - RNA, 19 nt, Artificial Sequence
  Description of Artificial Sequence: Synthetic oligonucleotide
  Antisense strand to SEQ ID NO: 2455432
auguuucaaauacuggcaa

SEQ ID NO: 2455434 - RNA, 19 nt, Artificial Sequence
  Description of Artificial Sequence: Synthetic oligonucleotide
  Sense strand starting at position 2852 of SEQ ID NO: 1887208
aaacaaggcguuugucaaa

SEQ ID NO: 2455435 - RNA, 19 nt, Artificial Sequence
  Description of Artificial Sequence: Synthetic oligonucleotide
  Antisense strand to SEQ ID NO: 2455434
uuugacaaacgccuuguuu

SEQ ID NO: 2455436 - RNA, 19 nt, Artificial Sequence
  Description of Artificial Sequence: Synthetic oligonucleotide
  Sense strand starting at position 2993 of SEQ ID NO: 1887208
cuagguucgagcuauucuu

SEQ ID NO: 2455437 - RNA, 19 nt, Artificial Sequence
  Description of Artificial Sequence: Synthetic oligonucleotide
  Antisense strand to SEQ ID NO: 2455436
aagaauagcucgaaccuag

SEQ ID NO: 2455438 - RNA, 19 nt, Artificial Sequence
  Description of Artificial Sequence: Synthetic oligonucleotide
  Sense strand starting at position 2997 of SEQ ID NO: 1887208
guucgagcuauucuugugu

SEQ ID NO: 2455439 - RNA, 19 nt, Artificial Sequence
  Description of Artificial Sequence: Synthetic oligonucleotide
  Antisense strand to SEQ ID NO: 2455438
acacaagaauagcucgaac

SEQ ID NO: 2455440 - RNA, 19 nt, Artificial Sequence
  Description of Artificial Sequence: Synthetic oligonucleotide
  Sense strand starting at position 3719 of SEQ ID NO: 1887208
gugggagaauugccucagu

SEQ ID NO: 2455441 - RNA, 19 nt, Artificial Sequence
  Description of Artificial Sequence: Synthetic oligonucleotide
  Antisense strand to SEQ ID NO: 2455440
acugaggcaauucucccac

SEQ ID NO: 2455442 - RNA, 19 nt, Artificial Sequence
  Description of Artificial Sequence: Synthetic oligonucleotide
  Sense strand starting at position 3722 of SEQ ID NO: 1887208
ggagaauugccucagucca

SEQ ID NO: 2455443 - RNA, 19 nt, Artificial Sequence
  Description of Artificial Sequence: Synthetic oligonucleotide
  Antisense strand to SEQ ID NO: 2455442
uggacugaggcaauucucc

SEQ ID NO: 2455444 - RNA, 19 nt, Artificial Sequence
  Description of Artificial Sequence: Synthetic oligonucleotide
  Sense strand starting at position 3800 of SEQ ID NO: 1887208
ggaagauccugucucaaca

SEQ ID NO: 2455445 - RNA, 19 nt, Artificial Sequence
  Description of Artificial Sequence: Synthetic oligonucleotide
  Antisense strand to SEQ ID NO: 2455444
uguugagacaggaucuucc

SEQ ID NO: 2455446 - RNA, 19 nt, Artificial Sequence
  Description of Artificial Sequence: Synthetic oligonucleotide
  Sense strand starting at position 3878 of SEQ ID NO: 1887208
acacuaugagggcgauuau

SEQ ID NO: 2455447 - RNA, 19 nt, Artificial Sequence
  Description of Artificial Sequence: Synthetic oligonucleotide
  Antisense strand to SEQ ID NO: 2455446
auaaucgcccucauagugu

SEQ ID NO: 2455448 - RNA, 19 nt, Artificial Sequence
  Description of Artificial Sequence: Synthetic oligonucleotide
  Sense strand starting at position 3879 of SEQ ID NO: 1887208
cacuaugagggcgauuauu

SEQ ID NO: 2455449 - RNA, 19 nt, Artificial Sequence
  Description of Artificial Sequence: Synthetic oligonucleotide
  Antisense strand to SEQ ID NO: 2455448
aauaaucgcccucauagug

SEQ ID NO: 2455450 - RNA, 19 nt, Artificial Sequence
  Description of Artificial Sequence: Synthetic oligonucleotide
  Sense strand starting at position 221 of SEQ ID NO: 1887209
uuuacaucuucugcuagga

SEQ ID NO: 2455451 - RNA, 19 nt, Artificial Sequence
  Description of Artificial Sequence: Synthetic oligonucleotide
  Antisense strand to SEQ ID NO: 2455450
uccuagcagaagauguaaa

SEQ ID NO: 2455452 - RNA, 19 nt, Artificial Sequence
  Description of Artificial Sequence: Synthetic oligonucleotide
  Sense strand starting at position 225 of SEQ ID NO: 1887209
caucuucugcuaggacaga

SEQ ID NO: 2455453 - RNA, 19 nt, Artificial Sequence
  Description of Artificial Sequence: Synthetic oligonucleotide
  Antisense strand to SEQ ID NO: 2455452
ucuguccuagcagaagaug

SEQ ID NO: 2455454 - RNA, 19 nt, Artificial Sequence
  Description of Artificial Sequence: Synthetic oligonucleotide
  Sense strand starting at position 551 of SEQ ID NO: 1887209
ggaggauguuacccucauc

SEQ ID NO: 2455455 - RNA, 19 nt, Artificial Sequence
  Description of Artificial Sequence: Synthetic oligonucleotide
  Antisense strand to SEQ ID NO: 2455454
gaugaggguaacauccucc

SEQ ID NO: 2455456 - RNA, 19 nt, Artificial Sequence
  Description of Artificial Sequence: Synthetic oligonucleotide
  Sense strand starting at position 1083 of SEQ ID NO: 1887209
uucugauuaccagguuuag

SEQ ID NO: 2455457 - RNA, 19 nt, Artificial Sequence
  Description of Artificial Sequence: Synthetic oligonucleotide
  Antisense strand to SEQ ID NO: 2455456
cuaaaccugguaaucagaa

SEQ ID NO: 2455458 - RNA, 19 nt, Artificial Sequence
  Description of Artificial Sequence: Synthetic oligonucleotide
  Sense strand starting at position 1846 of SEQ ID NO: 1887209
agguuauuguggucaagua

SEQ ID NO: 2455459 - RNA, 19 nt, Artificial Sequence
  Description of Artificial Sequence: Synthetic oligonucleotide
  Antisense strand to SEQ ID NO: 2455458
uacuugaccacaauaaccu

SEQ ID NO: 2455460 - RNA, 19 nt, Artificial Sequence
  Description of Artificial Sequence: Synthetic oligonucleotide
  Sense strand starting at position 1847 of SEQ ID NO: 1887209
gguuauuguggucaaguaa

SEQ ID NO: 2455461 - RNA, 19 nt, Artificial Sequence
  Description of Artificial Sequence: Synthetic oligonucleotide
  Antisense strand to SEQ ID NO: 2455460
uuacuugaccacaauaacc

SEQ ID NO: 2455462 - RNA, 19 nt, Artificial Sequence
  Description of Artificial Sequence: Synthetic oligonucleotide
  Sense strand starting at position 1858 of SEQ ID NO: 1887209
ucaaguaaaugugaggcua

SEQ ID NO: 2455463 - RNA, 19 nt, Artificial Sequence
  Description of Artificial Sequence: Synthetic oligonucleotide
  Antisense strand to SEQ ID NO: 2455462
uagccucacauuuacuuga

SEQ ID NO: 2455464 - RNA, 19 nt, Artificial Sequence
  Description of Artificial Sequence: Synthetic oligonucleotide
  Sense strand starting at position 1991 of SEQ ID NO: 1887209
gaaaucgagccaggaagua

SEQ ID NO: 2455465 - RNA, 19 nt, Artificial Sequence
  Description of Artificial Sequence: Synthetic oligonucleotide
  Antisense strand to SEQ ID NO: 2455464
uacuuccuggcucgauuuc

SEQ ID NO: 2455466 - RNA, 19 nt, Artificial Sequence
  Description of Artificial Sequence: Synthetic oligonucleotide
  Sense strand starting at position 2001 of SEQ ID NO: 1887209
caggaaguauuguaugaca

SEQ ID NO: 2455467 - RNA, 19 nt, Artificial Sequence
  Description of Artificial Sequence: Synthetic oligonucleotide
  Antisense strand to SEQ ID NO: 2455466
ugucauacaauacuuccug

SEQ ID NO: 2455468 - RNA, 19 nt, Artificial Sequence
  Description of Artificial Sequence: Synthetic oligonucleotide
  Sense strand starting at position 2024 of SEQ ID NO: 1887209
gggugauaaucaguugagu

SEQ ID NO: 2455469 - RNA, 19 nt, Artificial Sequence
  Description of Artificial Sequence: Synthetic oligonucleotide
  Antisense strand to SEQ ID NO: 2455468
acucaacugauuaucaccc

SEQ ID NO: 2455470 - RNA, 19 nt, Artificial Sequence
  Description of Artificial Sequence: Synthetic oligonucleotide
  Sense strand starting at position 2026 of SEQ ID NO: 1887209
gugauaaucaguugaguaa

SEQ ID NO: 2455471 - RNA, 19 nt, Artificial Sequence
  Description of Artificial Sequence: Synthetic oligonucleotide
  Antisense strand to SEQ ID NO: 2455470
uuacucaacugauuaucac

SEQ ID NO: 2455472 - RNA, 19 nt, Artificial Sequence
  Description of Artificial Sequence: Synthetic oligonucleotide
  Sense strand starting at position 2038 of SEQ ID NO: 1887209
ugaguaaggucacaucaua

SEQ ID NO: 2455473 - RNA, 19 nt, Artificial Sequence
  Description of Artificial Sequence: Synthetic oligonucleotide
  Antisense strand to SEQ ID NO: 2455472
uaugaugugaccuuacuca

SEQ ID NO: 2455474 - RNA, 19 nt, Artificial Sequence
  Description of Artificial Sequence: Synthetic oligonucleotide
  Sense strand starting at position 2287 of SEQ ID NO: 1887209
aggcaauggcgacaaaugu

SEQ ID NO: 2455475 - RNA, 19 nt, Artificial Sequence
  Description of Artificial Sequence: Synthetic oligonucleotide
  Antisense strand to SEQ ID NO: 2455474
acauuugucgccauugccu

SEQ ID NO: 2455476 - RNA, 19 nt, Artificial Sequence
  Description of Artificial Sequence: Synthetic oligonucleotide
  Sense strand starting at position 2295 of SEQ ID NO: 1887209
gcgacaaaugucuaggguu

SEQ ID NO: 2455477 - RNA, 19 nt, Artificial Sequence
  Description of Artificial Sequence: Synthetic oligonucleotide
  Antisense strand to SEQ ID NO: 2455476
aacccuagacauuugucgc

SEQ ID NO: 2455478 - RNA, 19 nt, Artificial Sequence
  Description of Artificial Sequence: Synthetic oligonucleotide
  Sense strand starting at position 2297 of SEQ ID NO: 1887209
gacaaaugucuaggguucu

SEQ ID NO: 2455479 - RNA, 19 nt, Artificial Sequence
  Description of Artificial Sequence: Synthetic oligonucleotide
  Antisense strand to SEQ ID NO: 2455478
agaacccuagacauuuguc

SEQ ID NO: 2455480 - RNA, 19 nt, Artificial Sequence
  Description of Artificial Sequence: Synthetic oligonucleotide
  Sense strand starting at position 2720 of SEQ ID NO: 1887209
ccagauuaccagugggaau

SEQ ID NO: 2455481 - RNA, 19 nt, Artificial Sequence
  Description of Artificial Sequence: Synthetic oligonucleotide
  Antisense strand to SEQ ID NO: 2455480
auucccacugguaaucugg

SEQ ID NO: 2455482 - RNA, 19 nt, Artificial Sequence
  Description of Artificial Sequence: Synthetic oligonucleotide
  Sense strand starting at position 2765 of SEQ ID NO: 1887209
uagccuauguggucacaca

SEQ ID NO: 2455483 - RNA, 19 nt, Artificial Sequence
  Description of Artificial Sequence: Synthetic oligonucleotide
  Antisense strand to SEQ ID NO: 2455482
ugugugaccacauaggcua

SEQ ID NO: 2455484 - RNA, 19 nt, Artificial Sequence
  Description of Artificial Sequence: Synthetic oligonucleotide
  Sense strand starting at position 2785 of SEQ ID NO: 1887209
accgaaguuuacuagcaga

SEQ ID NO: 2455485 - RNA, 19 nt, Artificial Sequence
  Description of Artificial Sequence: Synthetic oligonucleotide
  Antisense strand to SEQ ID NO: 2455484
ucugcuaguaaacuucggu

SEQ ID NO: 2455486 - RNA, 19 nt, Artificial Sequence
  Description of Artificial Sequence: Synthetic oligonucleotide
  Sense strand starting at position 2788 of SEQ ID NO: 1887209
gaaguuuacuagcagagag

SEQ ID NO: 2455487 - RNA, 19 nt, Artificial Sequence
  Description of Artificial Sequence: Synthetic oligonucleotide
  Antisense strand to SEQ ID NO: 2455486
cucucugcuaguaaacuuc

SEQ ID NO: 2455488 - RNA, 19 nt, Artificial Sequence
  Description of Artificial Sequence: Synthetic oligonucleotide
  Sense strand starting at position 3053 of SEQ ID NO: 1887209
agggagggcucucgggaua

SEQ ID NO: 2455489 - RNA, 19 nt, Artificial Sequence
  Description of Artificial Sequence: Synthetic oligonucleotide
  Antisense strand to SEQ ID NO: 2455488
uaucccgagagcccucccu

SEQ ID NO: 2455490 - RNA, 19 nt, Artificial Sequence
  Description of Artificial Sequence: Synthetic oligonucleotide
  Sense strand starting at position 3054 of SEQ ID NO: 1887209
gggagggcucucgggauau

SEQ ID NO: 2455491 - RNA, 19 nt, Artificial Sequence
  Description of Artificial Sequence: Synthetic oligonucleotide
  Antisense strand to SEQ ID NO: 2455490
auaucccgagagcccuccc

SEQ ID NO: 2455492 - RNA, 19 nt, Artificial Sequence
  Description of Artificial Sequence: Synthetic oligonucleotide
  Sense strand starting at position 3066 of SEQ ID NO: 1887209
gggauaugcccaugcugag

SEQ ID NO: 2455493 - RNA, 19 nt, Artificial Sequence
  Description of Artificial Sequence: Synthetic oligonucleotide
  Antisense strand to SEQ ID NO: 2455492
cucagcaugggcauauccc

SEQ ID NO: 2455494 - RNA, 19 nt, Artificial Sequence
  Description of Artificial Sequence: Synthetic oligonucleotide
  Sense strand starting at position 3084 of SEQ ID NO: 1887209
ggcccuuucuggcuggauu

SEQ ID NO: 2455495 - RNA, 19 nt, Artificial Sequence
  Description of Artificial Sequence: Synthetic oligonucleotide
  Antisense strand to SEQ ID NO: 2455494
aauccagccagaaagggcc

SEQ ID NO: 2455496 - RNA, 19 nt, Artificial Sequence
  Description of Artificial Sequence: Synthetic oligonucleotide
  Sense strand starting at position 3109 of SEQ ID NO: 1887209
ugccgagacuugucuaccu

SEQ ID NO: 2455497 - RNA, 19 nt, Artificial Sequence
  Description of Artificial Sequence: Synthetic oligonucleotide
  Antisense strand to SEQ ID NO: 2455496
agguagacaagucucggca

SEQ ID NO: 2455498 - RNA, 19 nt, Artificial Sequence
  Description of Artificial Sequence: Synthetic oligonucleotide
  Sense strand starting at position 3111 of SEQ ID NO: 1887209
ccgagacuugucuaccuuu

SEQ ID NO: 2455499 - RNA, 19 nt, Artificial Sequence
  Description of Artificial Sequence: Synthetic oligonucleotide
  Antisense strand to SEQ ID NO: 2455498
aaagguagacaagucucgg

SEQ ID NO: 2455500 - RNA, 19 nt, Artificial Sequence
  Description of Artificial Sequence: Synthetic oligonucleotide
  Sense strand starting at position 3114 of SEQ ID NO: 1887209
agacuugucuaccuuuauu

SEQ ID NO: 2455501 - RNA, 19 nt, Artificial Sequence
  Description of Artificial Sequence: Synthetic oligonucleotide
  Antisense strand to SEQ ID NO: 2455500
aauaaagguagacaagucu

SEQ ID NO: 2455502 - RNA, 19 nt, Artificial Sequence
  Description of Artificial Sequence: Synthetic oligonucleotide
  Sense strand starting at position 3306 of SEQ ID NO: 1887209
caccgaagaguuuaaaucu

SEQ ID NO: 2455503 - RNA, 19 nt, Artificial Sequence
  Description of Artificial Sequence: Synthetic oligonucleotide
  Antisense strand to SEQ ID NO: 2455502
agauuuaaacucuucggug

SEQ ID NO: 2455504 - RNA, 19 nt, Artificial Sequence
  Description of Artificial Sequence: Synthetic oligonucleotide
  Sense strand starting at position 3345 of SEQ ID NO: 1887209
cuggguaguuccuaaugac

SEQ ID NO: 2455505 - RNA, 19 nt, Artificial Sequence
  Description of Artificial Sequence: Synthetic oligonucleotide
  Antisense strand to SEQ ID NO: 2455504
gucauuaggaacuacccag

SEQ ID NO: 2455506 - RNA, 19 nt, Artificial Sequence
  Description of Artificial Sequence: Synthetic oligonucleotide
  Sense strand starting at position 3390 of SEQ ID NO: 1887209
agaggaaggcucugacuuc

SEQ ID NO: 2455507 - RNA, 19 nt, Artificial Sequence
  Description of Artificial Sequence: Synthetic oligonucleotide
  Antisense strand to SEQ ID NO: 2455506
gaagucagagccuuccucu

SEQ ID NO: 2455508 - RNA, 19 nt, Artificial Sequence
  Description of Artificial Sequence: Synthetic oligonucleotide
  Sense strand starting at position 3713 of SEQ ID NO: 1887209
gggucuccuucuuugcuaa

SEQ ID NO: 2455509 - RNA, 19 nt, Artificial Sequence
  Description of Artificial Sequence: Synthetic oligonucleotide
  Antisense strand to SEQ ID NO: 2455508
uuagcaaagaaggagaccc

SEQ ID NO: 2455510 - RNA, 19 nt, Artificial Sequence
  Description of Artificial Sequence: Synthetic oligonucleotide
  Sense strand starting at position 3714 of SEQ ID NO: 1887209
ggucuccuucuuugcuaau

SEQ ID NO: 2455511 - RNA, 19 nt, Artificial Sequence
  Description of Artificial Sequence: Synthetic oligonucleotide
  Antisense strand to SEQ ID NO: 2455510
auuagcaaagaaggagacc

SEQ ID NO: 2455512 - RNA, 19 nt, Artificial Sequence
  Description of Artificial Sequence: Synthetic oligonucleotide
  Sense strand starting at position 3801 of SEQ ID NO: 1887209
cguggcucugcauacauuu

SEQ ID NO: 2455513 - RNA, 19 nt, Artificial Sequence
  Description of Artificial Sequence: Synthetic oligonucleotide
  Antisense strand to SEQ ID NO: 2455512
aaauguaugcagagccacg

SEQ ID NO: 2455514 - RNA, 19 nt, Artificial Sequence
  Description of Artificial Sequence: Synthetic oligonucleotide
  Sense strand starting at position 3823 of SEQ ID NO: 1887209
ggacauugcgcauguucca

SEQ ID NO: 2455515 - RNA, 19 nt, Artificial Sequence
  Description of Artificial Sequence: Synthetic oligonucleotide
  Antisense strand to SEQ ID NO: 2455514
uggaacaugcgcaaugucc

SEQ ID NO: 2455516 - RNA, 19 nt, Artificial Sequence
  Description of Artificial Sequence: Synthetic oligonucleotide
  Sense strand starting at position 3830 of SEQ ID NO: 1887209
gcgcauguuccaugccauc

SEQ ID NO: 2455517 - RNA, 19 nt, Artificial Sequence
  Description of Artificial Sequence: Synthetic oligonucleotide
  Antisense strand to SEQ ID NO: 2455516
gauggcauggaacaugcgc

SEQ ID NO: 2455518 - RNA, 19 nt, Artificial Sequence
  Description of Artificial Sequence: Synthetic oligonucleotide
  Sense strand starting at position 3860 of SEQ ID NO: 1887209
augugcucuccucauguuu

SEQ ID NO: 2455519 - RNA, 19 nt, Artificial Sequence
  Description of Artificial Sequence: Synthetic oligonucleotide
  Antisense strand to SEQ ID NO: 2455518
aaacaugaggagagcacau

SEQ ID NO: 2455520 - RNA, 19 nt, Artificial Sequence
  Description of Artificial Sequence: Synthetic oligonucleotide
  Sense strand starting at position 3951 of SEQ ID NO: 1887209
ccaguacugucugugccua

SEQ ID NO: 2455521 - RNA, 19 nt, Artificial Sequence
  Description of Artificial Sequence: Synthetic oligonucleotide
  Antisense strand to SEQ ID NO: 2455520
uaggcacagacaguacugg

SEQ ID NO: 2455522 - RNA, 19 nt, Artificial Sequence
  Description of Artificial Sequence: Synthetic oligonucleotide
  Sense strand starting at position 3965 of SEQ ID NO: 1887209
gccuacguuucucucugaa

SEQ ID NO: 2455523 - RNA, 19 nt, Artificial Sequence
  Description of Artificial Sequence: Synthetic oligonucleotide
  Antisense strand to SEQ ID NO: 2455522
uucagagagaaacguaggc

SEQ ID NO: 2455524 - RNA, 19 nt, Artificial Sequence
  Description of Artificial Sequence: Synthetic oligonucleotide
  Sense strand starting at position 3967 of SEQ ID NO: 1887209
cuacguuucucucugaagu

SEQ ID NO: 2455525 - RNA, 19 nt, Artificial Sequence
  Description of Artificial Sequence: Synthetic oligonucleotide
  Antisense strand to SEQ ID NO: 2455524
acuucagagagaaacguag

SEQ ID NO: 2455526 - RNA, 19 nt, Artificial Sequence
  Description of Artificial Sequence: Synthetic oligonucleotide
  Sense strand starting at position 3968 of SEQ ID NO: 1887209
uacguuucucucugaaguc

SEQ ID NO: 2455527 - RNA, 19 nt, Artificial Sequence
  Description of Artificial Sequence: Synthetic oligonucleotide
  Antisense strand to SEQ ID NO: 2455526
gacuucagagagaaacgua

SEQ ID NO: 2455528 - RNA, 19 nt, Artificial Sequence
  Description of Artificial Sequence: Synthetic oligonucleotide
  Sense strand starting at position 3983 of SEQ ID NO: 1887209
aguccagucucaccuauua

SEQ ID NO: 2455529 - RNA, 19 nt, Artificial Sequence
  Description of Artificial Sequence: Synthetic oligonucleotide
  Antisense strand to SEQ ID NO: 2455528
uaauaggugagacuggacu

SEQ ID NO: 2455530 - RNA, 19 nt, Artificial Sequence
  Description of Artificial Sequence: Synthetic oligonucleotide
  Sense strand starting at position 231 of SEQ ID NO: 1887210
cagucuguacaagauguua

SEQ ID NO: 2455531 - RNA, 19 nt, Artificial Sequence
  Description of Artificial Sequence: Synthetic oligonucleotide
  Antisense strand to SEQ ID NO: 2455530
uaacaucuuguacagacug

SEQ ID NO: 2455532 - RNA, 19 nt, Artificial Sequence
  Description of Artificial Sequence: Synthetic oligonucleotide
  Sense strand starting at position 288 of SEQ ID NO: 1887210
uucugagcuccggacugaa

SEQ ID NO: 2455533 - RNA, 19 nt, Artificial Sequence
  Description of Artificial Sequence: Synthetic oligonucleotide
  Antisense strand to SEQ ID NO: 2455532
uucaguccggagcucagaa

SEQ ID NO: 2455534 - RNA, 19 nt, Artificial Sequence
  Description of Artificial Sequence: Synthetic oligonucleotide
  Sense strand starting at position 457 of SEQ ID NO: 1887210
augguagguguucacugaa

SEQ ID NO: 2455535 - RNA, 19 nt, Artificial Sequence
  Description of Artificial Sequence: Synthetic oligonucleotide
  Antisense strand to SEQ ID NO: 2455534
uucagugaacaccuaccau

SEQ ID NO: 2455536 - RNA, 19 nt, Artificial Sequence
  Description of Artificial Sequence: Synthetic oligonucleotide
  Sense strand starting at position 479 of SEQ ID NO: 1887210
gugcuagaauuauuaagac

SEQ ID NO: 2455537 - RNA, 19 nt, Artificial Sequence
  Description of Artificial Sequence: Synthetic oligonucleotide
  Antisense strand to SEQ ID NO: 2455536
gucuuaauaauucuagcac

SEQ ID NO: 2455538 - RNA, 19 nt, Artificial Sequence
  Description of Artificial Sequence: Synthetic oligonucleotide
  Sense strand starting at position 493 of SEQ ID NO: 1887210
aagacaucgcagugaugau

SEQ ID NO: 2455539 - RNA, 19 nt, Artificial Sequence
  Description of Artificial Sequence: Synthetic oligonucleotide
  Antisense strand to SEQ ID NO: 2455538
aucaucacugcgaugucuu

SEQ ID NO: 2455540 - RNA, 19 nt, Artificial Sequence
  Description of Artificial Sequence: Synthetic oligonucleotide
  Sense strand starting at position 494 of SEQ ID NO: 1887210
agacaucgcagugaugaua

SEQ ID NO: 2455541 - RNA, 19 nt, Artificial Sequence
  Description of Artificial Sequence: Synthetic oligonucleotide
  Antisense strand to SEQ ID NO: 2455540
uaucaucacugcgaugucu

SEQ ID NO: 2455542 - RNA, 19 nt, Artificial Sequence
  Description of Artificial Sequence: Synthetic oligonucleotide
  Sense strand starting at position 502 of SEQ ID NO: 1887210
cagugaugauaacucaugu

SEQ ID NO: 2455543 - RNA, 19 nt, Artificial Sequence
  Description of Artificial Sequence: Synthetic oligonucleotide
  Antisense strand to SEQ ID NO: 2455542
acaugaguuaucaucacug

SEQ ID NO: 2455544 - RNA, 19 nt, Artificial Sequence
  Description of Artificial Sequence: Synthetic oligonucleotide
  Sense strand starting at position 528 of SEQ ID NO: 1887210
uagucugacugaucagaug

SEQ ID NO: 2455545 - RNA, 19 nt, Artificial Sequence
  Description of Artificial Sequence: Synthetic oligonucleotide
  Antisense strand to SEQ ID NO: 2455544
caucugaucagucagacua

SEQ ID NO: 2455546 - RNA, 19 nt, Artificial Sequence
  Description of Artificial Sequence: Synthetic oligonucleotide
  Sense strand starting at position 769 of SEQ ID NO: 1887210
gacugauuaucaccaccga

SEQ ID NO: 2455547 - RNA, 19 nt, Artificial Sequence
  Description of Artificial Sequence: Synthetic oligonucleotide
  Antisense strand to SEQ ID NO: 2455546
ucgguggugauaaucaguc

SEQ ID NO: 2455548 - RNA, 19 nt, Artificial Sequence
  Description of Artificial Sequence: Synthetic oligonucleotide
  Sense strand starting at position 1156 of SEQ ID NO: 1887210
ggcuuugaaccuggauaga

SEQ ID NO: 2455549 - RNA, 19 nt, Artificial Sequence
  Description of Artificial Sequence: Synthetic oligonucleotide
  Antisense strand to SEQ ID NO: 2455548
ucuauccagguucaaagcc

SEQ ID NO: 2455550 - RNA, 19 nt, Artificial Sequence
  Description of Artificial Sequence: Synthetic oligonucleotide
  Sense strand starting at position 1166 of SEQ ID NO: 1887210
cuggauagauuuggauaga

SEQ ID NO: 2455551 - RNA, 19 nt, Artificial Sequence
  Description of Artificial Sequence: Synthetic oligonucleotide
  Antisense strand to SEQ ID NO: 2455550
ucuauccaaaucuauccag

SEQ ID NO: 2455552 - RNA, 19 nt, Artificial Sequence
  Description of Artificial Sequence: Synthetic oligonucleotide
  Sense strand starting at position 1188 of SEQ ID NO: 1887210
ccgacuuugucauuugcua

SEQ ID NO: 2455553 - RNA, 19 nt, Artificial Sequence
  Description of Artificial Sequence: Synthetic oligonucleotide
  Antisense strand to SEQ ID NO: 2455552
uagcaaaugacaaagucgg

SEQ ID NO: 2455554 - RNA, 19 nt, Artificial Sequence
  Description of Artificial Sequence: Synthetic oligonucleotide
  Sense strand starting at position 1207 of SEQ ID NO: 1887210
acugcaaggcuuugaauaa

SEQ ID NO: 2455555 - RNA, 19 nt, Artificial Sequence
  Description of Artificial Sequence: Synthetic oligonucleotide
  Antisense strand to SEQ ID NO: 2455554
uuauucaaagccuugcagu

SEQ ID NO: 2455556 - RNA, 19 nt, Artificial Sequence
  Description of Artificial Sequence: Synthetic oligonucleotide
  Sense strand starting at position 1368 of SEQ ID NO: 1887210
cgauuaagaugccuuagaa

SEQ ID NO: 2455557 - RNA, 19 nt, Artificial Sequence
  Description of Artificial Sequence: Synthetic oligonucleotide
  Antisense strand to SEQ ID NO: 2455556
uucuaaggcaucuuaaucg

SEQ ID NO: 2455558 - RNA, 19 nt, Artificial Sequence
  Description of Artificial Sequence: Synthetic oligonucleotide
  Sense strand starting at position 1791 of SEQ ID NO: 1887210
gagucugaucuuuaugguu

SEQ ID NO: 2455559 - RNA, 19 nt, Artificial Sequence
  Description of Artificial Sequence: Synthetic oligonucleotide
  Antisense strand to SEQ ID NO: 2455558
aaccauaaagaucagacuc

SEQ ID NO: 2455560 - RNA, 19 nt, Artificial Sequence
  Description of Artificial Sequence: Synthetic oligonucleotide
  Sense strand starting at position 1803 of SEQ ID NO: 1887210
uaugguuuauuugacuaga

SEQ ID NO: 2455561 - RNA, 19 nt, Artificial Sequence
  Description of Artificial Sequence: Synthetic oligonucleotide
  Antisense strand to SEQ ID NO: 2455560
ucuagucaaauaaaccaua

SEQ ID NO: 2455562 - RNA, 19 nt, Artificial Sequence
  Description of Artificial Sequence: Synthetic oligonucleotide
  Sense strand starting at position 1816 of SEQ ID NO: 1887210
acuagagcggccugagaaa

SEQ ID NO: 2455563 - RNA, 19 nt, Artificial Sequence
  Description of Artificial Sequence: Synthetic oligonucleotide
  Antisense strand to SEQ ID NO: 2455562
uuucucaggccgcucuagu

SEQ ID NO: 2455564 - RNA, 19 nt, Artificial Sequence
  Description of Artificial Sequence: Synthetic oligonucleotide
  Sense strand starting at position 2521 of SEQ ID NO: 1887210
auaugaauccuguggagcu

SEQ ID NO: 2455565 - RNA, 19 nt, Artificial Sequence
  Description of Artificial Sequence: Synthetic oligonucleotide
  Antisense strand to SEQ ID NO: 2455564
agcuccacaggauucauau

SEQ ID NO: 2455566 - RNA, 19 nt, Artificial Sequence
  Description of Artificial Sequence: Synthetic oligonucleotide
  Sense strand starting at position 2647 of SEQ ID NO: 1887210
cuuucuaaagaucgaaggu

SEQ ID NO: 2455567 - RNA, 19 nt, Artificial Sequence
  Description of Artificial Sequence: Synthetic oligonucleotide
  Antisense strand to SEQ ID NO: 2455566
accuucgaucuuuagaaag

SEQ ID NO: 2455568 - RNA, 19 nt, Artificial Sequence
  Description of Artificial Sequence: Synthetic oligonucleotide
  Sense strand starting at position 2685 of SEQ ID NO: 1887210
ccguccauucucuauagau

SEQ ID NO: 2455569 - RNA, 19 nt, Artificial Sequence
  Description of Artificial Sequence: Synthetic oligonucleotide
  Antisense strand to SEQ ID NO: 2455568
aucuauagagaauggacgg

SEQ ID NO: 2455570 - RNA, 19 nt, Artificial Sequence
  Description of Artificial Sequence: Synthetic oligonucleotide
  Sense strand starting at position 2687 of SEQ ID NO: 1887210
guccauucucuauagauuc

SEQ ID NO: 2455571 - RNA, 19 nt, Artificial Sequence
  Description of Artificial Sequence: Synthetic oligonucleotide
  Antisense strand to SEQ ID NO: 2455570
gaaucuauagagaauggac

SEQ ID NO: 2455572 - RNA, 19 nt, Artificial Sequence
  Description of Artificial Sequence: Synthetic oligonucleotide
  Sense strand starting at position 2884 of SEQ ID NO: 1887210
aaauacuuccguggaaauu

SEQ ID NO: 2455573 - RNA, 19 nt, Artificial Sequence
  Description of Artificial Sequence: Synthetic oligonucleotide
  Antisense strand to SEQ ID NO: 2455572
aauuuccacggaaguauuu

SEQ ID NO: 2455574 - RNA, 19 nt, Artificial Sequence
  Description of Artificial Sequence: Synthetic oligonucleotide
  Sense strand starting at position 2885 of SEQ ID NO: 1887210
aauacuuccguggaaauuc

SEQ ID NO: 2455575 - RNA, 19 nt, Artificial Sequence
  Description of Artificial Sequence: Synthetic oligonucleotide
  Antisense strand to SEQ ID NO: 2455574
gaauuuccacggaaguauu

SEQ ID NO: 2455576 - RNA, 19 nt, Artificial Sequence
  Description of Artificial Sequence: Synthetic oligonucleotide
  Sense strand starting at position 2927 of SEQ ID NO: 1887210
gguguaugaagcuacauca

SEQ ID NO: 2455577 - RNA, 19 nt, Artificial Sequence
  Description of Artificial Sequence: Synthetic oligonucleotide
  Antisense strand to SEQ ID NO: 2455576
ugauguagcuucauacacc

SEQ ID NO: 2455578 - RNA, 19 nt, Artificial Sequence
  Description of Artificial Sequence: Synthetic oligonucleotide
  Sense strand starting at position 2952 of SEQ ID NO: 1887210
agcauuagggaguguaaac

SEQ ID NO: 2455579 - RNA, 19 nt, Artificial Sequence
  Description of Artificial Sequence: Synthetic oligonucleotide
  Antisense strand to SEQ ID NO: 2455578
guuuacacucccuaaugcu

SEQ ID NO: 2455580 - RNA, 19 nt, Artificial Sequence
  Description of Artificial Sequence: Synthetic oligonucleotide
  Sense strand starting at position 3014 of SEQ ID NO: 1887210
acuguuuaucuggaaguua

SEQ ID NO: 2455581 - RNA, 19 nt, Artificial Sequence
  Description of Artificial Sequence: Synthetic oligonucleotide
  Antisense strand to SEQ ID NO: 2455580
uaacuuccagauaaacagu

SEQ ID NO: 2455582 - RNA, 19 nt, Artificial Sequence
  Description of Artificial Sequence: Synthetic oligonucleotide
  Sense strand starting at position 3080 of SEQ ID NO: 1887210
uuccaucagcugugaauuu

SEQ ID NO: 2455583 - RNA, 19 nt, Artificial Sequence
  Description of Artificial Sequence: Synthetic oligonucleotide
  Antisense strand to SEQ ID NO: 2455582
aaauucacagcugauggaa

SEQ ID NO: 2455584 - RNA, 19 nt, Artificial Sequence
  Description of Artificial Sequence: Synthetic oligonucleotide
  Sense strand starting at position 3159 of SEQ ID NO: 1887210
gcuuguguggcugcuagau

SEQ ID NO: 2455585 - RNA, 19 nt, Artificial Sequence
  Description of Artificial Sequence: Synthetic oligonucleotide
  Antisense strand to SEQ ID NO: 2455584
aucuagcagccacacaagc

SEQ ID NO: 2455586 - RNA, 19 nt, Artificial Sequence
  Description of Artificial Sequence: Synthetic oligonucleotide
  Sense strand starting at position 3171 of SEQ ID NO: 1887210
gcuagauuggauuagcaua

SEQ ID NO: 2455587 - RNA, 19 nt, Artificial Sequence
  Description of Artificial Sequence: Synthetic oligonucleotide
  Antisense strand to SEQ ID NO: 2455586
uaugcuaauccaaucuagc

SEQ ID NO: 2455588 - RNA, 19 nt, Artificial Sequence
  Description of Artificial Sequence: Synthetic oligonucleotide
  Sense strand starting at position 3253 of SEQ ID NO: 1887210
ucuggagaggcuuagucaa

SEQ ID NO: 2455589 - RNA, 19 nt, Artificial Sequence
  Description of Artificial Sequence: Synthetic oligonucleotide
  Antisense strand to SEQ ID NO: 2455588
uugacuaagccucuccaga

SEQ ID NO: 2455590 - RNA, 19 nt, Artificial Sequence
  Description of Artificial Sequence: Synthetic oligonucleotide
  Sense strand starting at position 3255 of SEQ ID NO: 1887210
uggagaggcuuagucaaau

SEQ ID NO: 2455591 - RNA, 19 nt, Artificial Sequence
  Description of Artificial Sequence: Synthetic oligonucleotide
  Antisense strand to SEQ ID NO: 2455590
auuugacuaagccucucca

SEQ ID NO: 2455592 - RNA, 19 nt, Artificial Sequence
  Description of Artificial Sequence: Synthetic oligonucleotide
  Sense strand starting at position 3300 of SEQ ID NO: 1887210
ccuagugugguggaaacau

SEQ ID NO: 2455593 - RNA, 19 nt, Artificial Sequence
  Description of Artificial Sequence: Synthetic oligonucleotide
  Antisense strand to SEQ ID NO: 2455592
auguuuccaccacacuagg

SEQ ID NO: 2455594 - RNA, 19 nt, Artificial Sequence
  Description of Artificial Sequence: Synthetic oligonucleotide
  Sense strand starting at position 3309 of SEQ ID NO: 1887210
guggaaacaugaucuuugu

SEQ ID NO: 2455595 - RNA, 19 nt, Artificial Sequence
  Description of Artificial Sequence: Synthetic oligonucleotide
  Antisense strand to SEQ ID NO: 2455594
acaaagaucauguuuccac

SEQ ID NO: 2455596 - RNA, 19 nt, Artificial Sequence
  Description of Artificial Sequence: Synthetic oligonucleotide
  Sense strand starting at position 3312 of SEQ ID NO: 1887210
gaaacaugaucuuuguagg

SEQ ID NO: 2455597 - RNA, 19 nt, Artificial Sequence
  Description of Artificial Sequence: Synthetic oligonucleotide
  Antisense strand to SEQ ID NO: 2455596
ccuacaaagaucauguuuc

SEQ ID NO: 2455598 - RNA, 19 nt, Artificial Sequence
  Description of Artificial Sequence: Synthetic oligonucleotide
  Sense strand starting at position 3317 of SEQ ID NO: 1887210
augaucuuuguaggcaaau

SEQ ID NO: 2455599 - RNA, 19 nt, Artificial Sequence
  Description of Artificial Sequence: Synthetic oligonucleotide
  Antisense strand to SEQ ID NO: 2455598
auuugccuacaaagaucau

SEQ ID NO: 2455600 - RNA, 19 nt, Artificial Sequence
  Description of Artificial Sequence: Synthetic oligonucleotide
  Sense strand starting at position 3318 of SEQ ID NO: 1887210
ugaucuuuguaggcaaaua

SEQ ID NO: 2455601 - RNA, 19 nt, Artificial Sequence
  Description of Artificial Sequence: Synthetic oligonucleotide
  Antisense strand to SEQ ID NO: 2455600
uauuugccuacaaagauca

SEQ ID NO: 2455602 - RNA, 19 nt, Artificial Sequence
  Description of Artificial Sequence: Synthetic oligonucleotide
  Sense strand starting at position 3855 of SEQ ID NO: 1887210
auggauacuuuguucucau

SEQ ID NO: 2455603 - RNA, 19 nt, Artificial Sequence
  Description of Artificial Sequence: Synthetic oligonucleotide
  Antisense strand to SEQ ID NO: 2455602
augagaacaaaguauccau

SEQ ID NO: 2455604 - RNA, 19 nt, Artificial Sequence
  Description of Artificial Sequence: Synthetic oligonucleotide
  Sense strand starting at position 3856 of SEQ ID NO: 1887210
uggauacuuuguucucaua

SEQ ID NO: 2455605 - RNA, 19 nt, Artificial Sequence
  Description of Artificial Sequence: Synthetic oligonucleotide
  Antisense strand to SEQ ID NO: 2455604
uaugagaacaaaguaucca

SEQ ID NO: 2455606 - RNA, 19 nt, Artificial Sequence
  Description of Artificial Sequence: Synthetic oligonucleotide
  Sense strand starting at position 3971 of SEQ ID NO: 1887210
ccggcuguuccuucugagu

SEQ ID NO: 2455607 - RNA, 19 nt, Artificial Sequence
  Description of Artificial Sequence: Synthetic oligonucleotide
  Antisense strand to SEQ ID NO: 2455606
acucagaaggaacagccgg

SEQ ID NO: 2455608 - RNA, 19 nt, Artificial Sequence
  Description of Artificial Sequence: Synthetic oligonucleotide
  Sense strand starting at position 3982 of SEQ ID NO: 1887210
uucugagucucauuugcua

SEQ ID NO: 2455609 - RNA, 19 nt, Artificial Sequence
  Description of Artificial Sequence: Synthetic oligonucleotide
  Antisense strand to SEQ ID NO: 2455608
uagcaaaugagacucagaa

SEQ ID NO: 2455610 - RNA, 19 nt, Artificial Sequence
  Description of Artificial Sequence: Synthetic oligonucleotide
  Sense strand starting at position 19 of SEQ ID NO: 1887211
aggcuuacuuucugcucaa

SEQ ID NO: 2455611 - RNA, 19 nt, Artificial Sequence
  Description of Artificial Sequence: Synthetic oligonucleotide
  Antisense strand to SEQ ID NO: 2455610
uugagcagaaaguaagccu

SEQ ID NO: 2455612 - RNA, 19 nt, Artificial Sequence
  Description of Artificial Sequence: Synthetic oligonucleotide
  Sense strand starting at position 20 of SEQ ID NO: 1887211
ggcuuacuuucugcucaaa

SEQ ID NO: 2455613 - RNA, 19 nt, Artificial Sequence
  Description of Artificial Sequence: Synthetic oligonucleotide
  Antisense strand to SEQ ID NO: 2455612
uuugagcagaaaguaagcc

SEQ ID NO: 2455614 - RNA, 19 nt, Artificial Sequence
  Description of Artificial Sequence: Synthetic oligonucleotide
  Sense strand starting at position 51 of SEQ ID NO: 1887211
ggagacauuucgcagcucu

SEQ ID NO: 2455615 - RNA, 19 nt, Artificial Sequence
  Description of Artificial Sequence: Synthetic oligonucleotide
  Antisense strand to SEQ ID NO: 2455614
agagcugcgaaaugucucc

SEQ ID NO: 2455616 - RNA, 19 nt, Artificial Sequence
  Description of Artificial Sequence: Synthetic oligonucleotide
  Sense strand starting at position 1060 of SEQ ID NO: 1887211
uuaagaucuucccgguuaa

SEQ ID NO: 2455617 - RNA, 19 nt, Artificial Sequence
  Description of Artificial Sequence: Synthetic oligonucleotide
  Antisense strand to SEQ ID NO: 2455616
uuaaccgggaagaucuuaa

SEQ ID NO: 2455618 - RNA, 19 nt, Artificial Sequence
  Description of Artificial Sequence: Synthetic oligonucleotide
  Sense strand starting at position 1061 of SEQ ID NO: 1887211
uaagaucuucccgguuaac

SEQ ID NO: 2455619 - RNA, 19 nt, Artificial Sequence
  Description of Artificial Sequence: Synthetic oligonucleotide
  Antisense strand to SEQ ID NO: 2455618
guuaaccgggaagaucuua

SEQ ID NO: 2455620 - RNA, 19 nt, Artificial Sequence
  Description of Artificial Sequence: Synthetic oligonucleotide
  Sense strand starting at position 1072 of SEQ ID NO: 1887211
cgguuaacgcgguccacaa

SEQ ID NO: 2455621 - RNA, 19 nt, Artificial Sequence
  Description of Artificial Sequence: Synthetic oligonucleotide
  Antisense strand to SEQ ID NO: 2455620
uuguggaccgcguuaaccg

SEQ ID NO: 2455622 - RNA, 19 nt, Artificial Sequence
  Description of Artificial Sequence: Synthetic oligonucleotide
  Sense strand starting at position 1156 of SEQ ID NO: 1887211
gcaggccucagagaucuua

SEQ ID NO: 2455623 - RNA, 19 nt, Artificial Sequence
  Description of Artificial Sequence: Synthetic oligonucleotide
  Antisense strand to SEQ ID NO: 2455622
uaagaucucugaggccugc

SEQ ID NO: 2455624 - RNA, 19 nt, Artificial Sequence
  Description of Artificial Sequence: Synthetic oligonucleotide
  Sense strand starting at position 1270 of SEQ ID NO: 1887211
caguuucuuuccucaggga

SEQ ID NO: 2455625 - RNA, 19 nt, Artificial Sequence
  Description of Artificial Sequence: Synthetic oligonucleotide
  Antisense strand to SEQ ID NO: 2455624
ucccugaggaaagaaacug

SEQ ID NO: 2455626 - RNA, 19 nt, Artificial Sequence
  Description of Artificial Sequence: Synthetic oligonucleotide
  Sense strand starting at position 1273 of SEQ ID NO: 1887211
uuucuuuccucagggacau

SEQ ID NO: 2455627 - RNA, 19 nt, Artificial Sequence
  Description of Artificial Sequence: Synthetic oligonucleotide
  Antisense strand to SEQ ID NO: 2455626
augucccugaggaaagaaa

SEQ ID NO: 2455628 - RNA, 19 nt, Artificial Sequence
  Description of Artificial Sequence: Synthetic oligonucleotide
  Sense strand starting at position 1286 of SEQ ID NO: 1887211
ggacaugauaaccguggua

SEQ ID NO: 2455629 - RNA, 19 nt, Artificial Sequence
  Description of Artificial Sequence: Synthetic oligonucleotide
  Antisense strand to SEQ ID NO: 2455628
uaccacgguuaucaugucc

SEQ ID NO: 2455630 - RNA, 19 nt, Artificial Sequence
  Description of Artificial Sequence: Synthetic oligonucleotide
  Sense strand starting at position 1288 of SEQ ID NO: 1887211
acaugauaaccgugguacu

SEQ ID NO: 2455631 - RNA, 19 nt, Artificial Sequence
  Description of Artificial Sequence: Synthetic oligonucleotide
  Antisense strand to SEQ ID NO: 2455630
aguaccacgguuaucaugu

SEQ ID NO: 2455632 - RNA, 19 nt, Artificial Sequence
  Description of Artificial Sequence: Synthetic oligonucleotide
  Sense strand starting at position 1289 of SEQ ID NO: 1887211
caugauaaccgugguacuu

SEQ ID NO: 2455633 - RNA, 19 nt, Artificial Sequence
  Description of Artificial Sequence: Synthetic oligonucleotide
  Antisense strand to SEQ ID NO: 2455632
aaguaccacgguuaucaug

SEQ ID NO: 2455634 - RNA, 19 nt, Artificial Sequence
  Description of Artificial Sequence: Synthetic oligonucleotide
  Sense strand starting at position 1298 of SEQ ID NO: 1887211
cgugguacuugaggagaau

SEQ ID NO: 2455635 - RNA, 19 nt, Artificial Sequence
  Description of Artificial Sequence: Synthetic oligonucleotide
  Antisense strand to SEQ ID NO: 2455634
auucuccucaaguaccacg

SEQ ID NO: 2455636 - RNA, 19 nt, Artificial Sequence
  Description of Artificial Sequence: Synthetic oligonucleotide
  Sense strand starting at position 1347 of SEQ ID NO: 1887211
gggagacaguucucuaaca

SEQ ID NO: 2455637 - RNA, 19 nt, Artificial Sequence
  Description of Artificial Sequence: Synthetic oligonucleotide
  Antisense strand to SEQ ID NO: 2455636
uguuagagaacugucuccc

SEQ ID NO: 2455638 - RNA, 19 nt, Artificial Sequence
  Description of Artificial Sequence: Synthetic oligonucleotide
  Sense strand starting at position 1348 of SEQ ID NO: 1887211
ggagacaguucucuaacac

SEQ ID NO: 2455639 - RNA, 19 nt, Artificial Sequence
  Description of Artificial Sequence: Synthetic oligonucleotide
  Antisense strand to SEQ ID NO: 2455638
guguuagagaacugucucc

SEQ ID NO: 2455640 - RNA, 19 nt, Artificial Sequence
  Description of Artificial Sequence: Synthetic oligonucleotide
  Sense strand starting at position 1398 of SEQ ID NO: 1887211
ggucaucucaagugcagau

SEQ ID NO: 2455641 - RNA, 19 nt, Artificial Sequence
  Description of Artificial Sequence: Synthetic oligonucleotide
  Antisense strand to SEQ ID NO: 2455640
aucugcacuugagaugacc

SEQ ID NO: 2455642 - RNA, 19 nt, Artificial Sequence
  Description of Artificial Sequence: Synthetic oligonucleotide
  Sense strand starting at position 1410 of SEQ ID NO: 1887211
ugcagaugccagggauaug

SEQ ID NO: 2455643 - RNA, 19 nt, Artificial Sequence
  Description of Artificial Sequence: Synthetic oligonucleotide
  Antisense strand to SEQ ID NO: 2455642
cauaucccuggcaucugca

SEQ ID NO: 2455644 - RNA, 19 nt, Artificial Sequence
  Description of Artificial Sequence: Synthetic oligonucleotide
  Sense strand starting at position 2057 of SEQ ID NO: 1887211
gcacgauuaguacgucaca

SEQ ID NO: 2455645 - RNA, 19 nt, Artificial Sequence
  Description of Artificial Sequence: Synthetic oligonucleotide
  Antisense strand to SEQ ID NO: 2455644
ugugacguacuaaucgugc

SEQ ID NO: 2455646 - RNA, 19 nt, Artificial Sequence
  Description of Artificial Sequence: Synthetic oligonucleotide
  Sense strand starting at position 3283 of SEQ ID NO: 1887211
gaaaguagauucgcaguga

SEQ ID NO: 2455647 - RNA, 19 nt, Artificial Sequence
  Description of Artificial Sequence: Synthetic oligonucleotide
  Antisense strand to SEQ ID NO: 2455646
ucacugcgaaucuacuuuc

SEQ ID NO: 2455648 - RNA, 19 nt, Artificial Sequence
  Description of Artificial Sequence: Synthetic oligonucleotide
  Sense strand starting at position 3284 of SEQ ID NO: 1887211
aaaguagauucgcagugaa

SEQ ID NO: 2455649 - RNA, 19 nt, Artificial Sequence
  Description of Artificial Sequence: Synthetic oligonucleotide
  Antisense strand to SEQ ID NO: 2455648
uucacugcgaaucuacuuu

SEQ ID NO: 2455650 - RNA, 19 nt, Artificial Sequence
  Description of Artificial Sequence: Synthetic oligonucleotide
  Sense strand starting at position 3287 of SEQ ID NO: 1887211
guagauucgcagugaagca

SEQ ID NO: 2455651 - RNA, 19 nt, Artificial Sequence
  Description of Artificial Sequence: Synthetic oligonucleotide
  Antisense strand to SEQ ID NO: 2455650
ugcuucacugcgaaucuac

SEQ ID NO: 2455652 - RNA, 19 nt, Artificial Sequence
  Description of Artificial Sequence: Synthetic oligonucleotide
  Sense strand starting at position 3496 of SEQ ID NO: 1887211
ggcucucaccugcgcuaua

SEQ ID NO: 2455653 - RNA, 19 nt, Artificial Sequence
  Description of Artificial Sequence: Synthetic oligonucleotide
  Antisense strand to SEQ ID NO: 2455652
uauagcgcaggugagagcc

SEQ ID NO: 2455654 - RNA, 19 nt, Artificial Sequence
  Description of Artificial Sequence: Synthetic oligonucleotide
  Sense strand starting at position 3738 of SEQ ID NO: 1887211
cuggguuugguaugaauag

SEQ ID NO: 2455655 - RNA, 19 nt, Artificial Sequence
  Description of Artificial Sequence: Synthetic oligonucleotide
  Antisense strand to SEQ ID NO: 2455654
cuauucauaccaaacccag

SEQ ID NO: 2455656 - RNA, 19 nt, Artificial Sequence
  Description of Artificial Sequence: Synthetic oligonucleotide
  Sense strand starting at position 3739 of SEQ ID NO: 1887211
uggguuugguaugaauaga

SEQ ID NO: 2455657 - RNA, 19 nt, Artificial Sequence
  Description of Artificial Sequence: Synthetic oligonucleotide
  Antisense strand to SEQ ID NO: 2455656
ucuauucauaccaaaccca

SEQ ID NO: 2455658 - RNA, 19 nt, Artificial Sequence
  Description of Artificial Sequence: Synthetic oligonucleotide
  Sense strand starting at position 3936 of SEQ ID NO: 1887211
cggagucaucuggagguga

SEQ ID NO: 2455659 - RNA, 19 nt, Artificial Sequence
  Description of Artificial Sequence: Synthetic oligonucleotide
  Antisense strand to SEQ ID NO: 2455658
ucaccuccagaugacuccg

SEQ ID NO: 2455660 - RNA, 19 nt, Artificial Sequence
  Description of Artificial Sequence: Synthetic oligonucleotide
  Sense strand starting at position 3937 of SEQ ID NO: 1887211
ggagucaucuggaggugag

SEQ ID NO: 2455661 - RNA, 19 nt, Artificial Sequence
  Description of Artificial Sequence: Synthetic oligonucleotide
  Antisense strand to SEQ ID NO: 2455660
cucaccuccagaugacucc

SEQ ID NO: 2455662 - RNA, 19 nt, Artificial Sequence
  Description of Artificial Sequence: Synthetic oligonucleotide
  Sense strand starting at position 3938 of SEQ ID NO: 1887211
gagucaucuggaggugaga

SEQ ID NO: 2455663 - RNA, 19 nt, Artificial Sequence
  Description of Artificial Sequence: Synthetic oligonucleotide
  Antisense strand to SEQ ID NO: 2455662
ucucaccuccagaugacuc

SEQ ID NO: 2455664 - RNA, 19 nt, Artificial Sequence
  Description of Artificial Sequence: Synthetic oligonucleotide
  Sense strand starting at position 3953 of SEQ ID NO: 1887211
gagagugugucggucagga

SEQ ID NO: 2455665 - RNA, 19 nt, Artificial Sequence
  Description of Artificial Sequence: Synthetic oligonucleotide
  Antisense strand to SEQ ID NO: 2455664
uccugaccgacacacucuc

SEQ ID NO: 2455666 - RNA, 19 nt, Artificial Sequence
  Description of Artificial Sequence: Synthetic oligonucleotide
  Sense strand starting at position 121 of SEQ ID NO: 1887212
cucaguauaguugauccua

SEQ ID NO: 2455667 - RNA, 19 nt, Artificial Sequence
  Description of Artificial Sequence: Synthetic oligonucleotide
  Antisense strand to SEQ ID NO: 2455666
uaggaucaacuauacugag

SEQ ID NO: 2455668 - RNA, 19 nt, Artificial Sequence
  Description of Artificial Sequence: Synthetic oligonucleotide
  Sense strand starting at position 309 of SEQ ID NO: 1887212
cccaacugugagggacaua

SEQ ID NO: 2455669 - RNA, 19 nt, Artificial Sequence
  Description of Artificial Sequence: Synthetic oligonucleotide
  Antisense strand to SEQ ID NO: 2455668
uaugucccucacaguuggg

SEQ ID NO: 2455670 - RNA, 19 nt, Artificial Sequence
  Description of Artificial Sequence: Synthetic oligonucleotide
  Sense strand starting at position 437 of SEQ ID NO: 1887212
gacugacuccucuguagaa

SEQ ID NO: 2455671 - RNA, 19 nt, Artificial Sequence
  Description of Artificial Sequence: Synthetic oligonucleotide
  Antisense strand to SEQ ID NO: 2455670
uucuacagaggagucaguc

SEQ ID NO: 2455672 - RNA, 19 nt, Artificial Sequence
  Description of Artificial Sequence: Synthetic oligonucleotide
  Sense strand starting at position 447 of SEQ ID NO: 1887212
ucuguagaagccuguucua

SEQ ID NO: 2455673 - RNA, 19 nt, Artificial Sequence
  Description of Artificial Sequence: Synthetic oligonucleotide
  Antisense strand to SEQ ID NO: 2455672
uagaacaggcuucuacaga

SEQ ID NO: 2455674 - RNA, 19 nt, Artificial Sequence
  Description of Artificial Sequence: Synthetic oligonucleotide
  Sense strand starting at position 731 of SEQ ID NO: 1887212
auaagauagccacagucuu

SEQ ID NO: 2455675 - RNA, 19 nt, Artificial Sequence
  Description of Artificial Sequence: Synthetic oligonucleotide
  Antisense strand to SEQ ID NO: 2455674
aagacuguggcuaucuuau

SEQ ID NO: 2455676 - RNA, 19 nt, Artificial Sequence
  Description of Artificial Sequence: Synthetic oligonucleotide
  Sense strand starting at position 793 of SEQ ID NO: 1887212
agguguaugccagagggaa

SEQ ID NO: 2455677 - RNA, 19 nt, Artificial Sequence
  Description of Artificial Sequence: Synthetic oligonucleotide
  Antisense strand to SEQ ID NO: 2455676
uucccucuggcauacaccu

SEQ ID NO: 2455678 - RNA, 19 nt, Artificial Sequence
  Description of Artificial Sequence: Synthetic oligonucleotide
  Sense strand starting at position 795 of SEQ ID NO: 1887212
guguaugccagagggaaga

SEQ ID NO: 2455679 - RNA, 19 nt, Artificial Sequence
  Description of Artificial Sequence: Synthetic oligonucleotide
  Antisense strand to SEQ ID NO: 2455678
ucuucccucuggcauacac

SEQ ID NO: 2455680 - RNA, 19 nt, Artificial Sequence
  Description of Artificial Sequence: Synthetic oligonucleotide
  Sense strand starting at position 909 of SEQ ID NO: 1887212
cagugcucgccuggacaga

SEQ ID NO: 2455681 - RNA, 19 nt, Artificial Sequence
  Description of Artificial Sequence: Synthetic oligonucleotide
  Antisense strand to SEQ ID NO: 2455680
ucuguccaggcgagcacug

SEQ ID NO: 2455682 - RNA, 19 nt, Artificial Sequence
  Description of Artificial Sequence: Synthetic oligonucleotide
  Sense strand starting at position 991 of SEQ ID NO: 1887212
agaggcuauccugaggcaa

SEQ ID NO: 2455683 - RNA, 19 nt, Artificial Sequence
  Description of Artificial Sequence: Synthetic oligonucleotide
  Antisense strand to SEQ ID NO: 2455682
uugccucaggauagccucu

SEQ ID NO: 2455684 - RNA, 19 nt, Artificial Sequence
  Description of Artificial Sequence: Synthetic oligonucleotide
  Sense strand starting at position 1050 of SEQ ID NO: 1887212
uccaguggugaccauacau

SEQ ID NO: 2455685 - RNA, 19 nt, Artificial Sequence
  Description of Artificial Sequence: Synthetic oligonucleotide
  Antisense strand to SEQ ID NO: 2455684
auguauggucaccacugga

SEQ ID NO: 2455686 - RNA, 19 nt, Artificial Sequence
  Description of Artificial Sequence: Synthetic oligonucleotide
  Sense strand starting at position 1084 of SEQ ID NO: 1887212
cuguccuggcaucaugauu

SEQ ID NO: 2455687 - RNA, 19 nt, Artificial Sequence
  Description of Artificial Sequence: Synthetic oligonucleotide
  Antisense strand to SEQ ID NO: 2455686
aaucaugaugccaggacag

SEQ ID NO: 2455688 - RNA, 19 nt, Artificial Sequence
  Description of Artificial Sequence: Synthetic oligonucleotide
  Sense strand starting at position 1089 of SEQ ID NO: 1887212
cuggcaucaugauuaauug

SEQ ID NO: 2455689 - RNA, 19 nt, Artificial Sequence
  Description of Artificial Sequence: Synthetic oligonucleotide
  Antisense strand to SEQ ID NO: 2455688
caauuaaucaugaugccag

SEQ ID NO: 2455690 - RNA, 19 nt, Artificial Sequence
  Description of Artificial Sequence: Synthetic oligonucleotide
  Sense strand starting at position 1145 of SEQ ID NO: 1887212
uuaauuacauggcaacaga

SEQ ID NO: 2455691 - RNA, 19 nt, Artificial Sequence
  Description of Artificial Sequence: Synthetic oligonucleotide
  Antisense strand to SEQ ID NO: 2455690
ucuguugccauguaauuaa

SEQ ID NO: 2455692 - RNA, 19 nt, Artificial Sequence
  Description of Artificial Sequence: Synthetic oligonucleotide
  Sense strand starting at position 1190 of SEQ ID NO: 1887212
acguguugucuggcagcua

SEQ ID NO: 2455693 - RNA, 19 nt, Artificial Sequence
  Description of Artificial Sequence: Synthetic oligonucleotide
  Antisense strand to SEQ ID NO: 2455692
uagcugccagacaacacgu

SEQ ID NO: 2455694 - RNA, 19 nt, Artificial Sequence
  Description of Artificial Sequence: Synthetic oligonucleotide
  Sense strand starting at position 1729 of SEQ ID NO: 1887212
gucagaaagcucuaggucu

SEQ ID NO: 2455695 - RNA, 19 nt, Artificial Sequence
  Description of Artificial Sequence: Synthetic oligonucleotide
  Antisense strand to SEQ ID NO: 2455694
agaccuagagcuuucugac

SEQ ID NO: 2455696 - RNA, 19 nt, Artificial Sequence
  Description of Artificial Sequence: Synthetic oligonucleotide
  Sense strand starting at position 1731 of SEQ ID NO: 1887212
cagaaagcucuaggucuaa

SEQ ID NO: 2455697 - RNA, 19 nt, Artificial Sequence
  Description of Artificial Sequence: Synthetic oligonucleotide
  Antisense strand to SEQ ID NO: 2455696
uuagaccuagagcuuucug

SEQ ID NO: 2455698 - RNA, 19 nt, Artificial Sequence
  Description of Artificial Sequence: Synthetic oligonucleotide
  Sense strand starting at position 1761 of SEQ ID NO: 1887212
aggcaaaguuccucacaca

SEQ ID NO: 2455699 - RNA, 19 nt, Artificial Sequence
  Description of Artificial Sequence: Synthetic oligonucleotide
  Antisense strand to SEQ ID NO: 2455698
ugugugaggaacuuugccu

SEQ ID NO: 2455700 - RNA, 19 nt, Artificial Sequence
  Description of Artificial Sequence: Synthetic oligonucleotide
  Sense strand starting at position 2115 of SEQ ID NO: 1887212
gacacuguggccuguauga

SEQ ID NO: 2455701 - RNA, 19 nt, Artificial Sequence
  Description of Artificial Sequence: Synthetic oligonucleotide
  Antisense strand to SEQ ID NO: 2455700
ucauacaggccacaguguc

SEQ ID NO: 2455702 - RNA, 19 nt, Artificial Sequence
  Description of Artificial Sequence: Synthetic oligonucleotide
  Sense strand starting at position 2128 of SEQ ID NO: 1887212
guaugaggacuaugagcua

SEQ ID NO: 2455703 - RNA, 19 nt, Artificial Sequence
  Description of Artificial Sequence: Synthetic oligonucleotide
  Antisense strand to SEQ ID NO: 2455702
uagcucauaguccucauac

SEQ ID NO: 2455704 - RNA, 19 nt, Artificial Sequence
  Description of Artificial Sequence: Synthetic oligonucleotide
  Sense strand starting at position 2530 of SEQ ID NO: 1887212
guuagcacuuggucucuga

SEQ ID NO: 2455705 - RNA, 19 nt, Artificial Sequence
  Description of Artificial Sequence: Synthetic oligonucleotide
  Antisense strand to SEQ ID NO: 2455704
ucagagaccaagugcuaac

SEQ ID NO: 2455706 - RNA, 19 nt, Artificial Sequence
  Description of Artificial Sequence: Synthetic oligonucleotide
  Sense strand starting at position 2533 of SEQ ID NO: 1887212
agcacuuggucucugagga

SEQ ID NO: 2455707 - RNA, 19 nt, Artificial Sequence
  Description of Artificial Sequence: Synthetic oligonucleotide
  Antisense strand to SEQ ID NO: 2455706
uccucagagaccaagugcu

SEQ ID NO: 2455708 - RNA, 19 nt, Artificial Sequence
  Description of Artificial Sequence: Synthetic oligonucleotide
  Sense strand starting at position 2534 of SEQ ID NO: 1887212
gcacuuggucucugaggag

SEQ ID NO: 2455709 - RNA, 19 nt, Artificial Sequence
  Description of Artificial Sequence: Synthetic oligonucleotide
  Antisense strand to SEQ ID NO: 2455708
cuccucagagaccaagugc

SEQ ID NO: 2455710 - RNA, 19 nt, Artificial Sequence
  Description of Artificial Sequence: Synthetic oligonucleotide
  Sense strand starting at position 2602 of SEQ ID NO: 1887212
ccauuuaggugggagauaa

SEQ ID NO: 2455711 - RNA, 19 nt, Artificial Sequence
  Description of Artificial Sequence: Synthetic oligonucleotide
  Antisense strand to SEQ ID NO: 2455710
uuaucucccaccuaaaugg

SEQ ID NO: 2455712 - RNA, 19 nt, Artificial Sequence
  Description of Artificial Sequence: Synthetic oligonucleotide
  Sense strand starting at position 2634 of SEQ ID NO: 1887212
guuggaagugugcacucaa

SEQ ID NO: 2455713 - RNA, 19 nt, Artificial Sequence
  Description of Artificial Sequence: Synthetic oligonucleotide
  Antisense strand to SEQ ID NO: 2455712
uugagugcacacuuccaac

SEQ ID NO: 2455714 - RNA, 19 nt, Artificial Sequence
  Description of Artificial Sequence: Synthetic oligonucleotide
  Sense strand starting at position 2673 of SEQ ID NO: 1887212
guuucugguuggguggaaa

SEQ ID NO: 2455715 - RNA, 19 nt, Artificial Sequence
  Description of Artificial Sequence: Synthetic oligonucleotide
  Antisense strand to SEQ ID NO: 2455714
uuuccacccaaccagaaac

SEQ ID NO: 2455716 - RNA, 19 nt, Artificial Sequence
  Description of Artificial Sequence: Synthetic oligonucleotide
  Sense strand starting at position 2676 of SEQ ID NO: 1887212
ucugguuggguggaaacau

SEQ ID NO: 2455717 - RNA, 19 nt, Artificial Sequence
  Description of Artificial Sequence: Synthetic oligonucleotide
  Antisense strand to SEQ ID NO: 2455716
auguuuccacccaaccaga

SEQ ID NO: 2455718 - RNA, 19 nt, Artificial Sequence
  Description of Artificial Sequence: Synthetic oligonucleotide
  Sense strand starting at position 2705 of SEQ ID NO: 1887212
ucuggauagugucuuaauu

SEQ ID NO: 2455719 - RNA, 19 nt, Artificial Sequence
  Description of Artificial Sequence: Synthetic oligonucleotide
  Antisense strand to SEQ ID NO: 2455718
aauuaagacacuauccaga

SEQ ID NO: 2455720 - RNA, 19 nt, Artificial Sequence
  Description of Artificial Sequence: Synthetic oligonucleotide
  Sense strand starting at position 2707 of SEQ ID NO: 1887212
uggauagugucuuaauuug

SEQ ID NO: 2455721 - RNA, 19 nt, Artificial Sequence
  Description of Artificial Sequence: Synthetic oligonucleotide
  Antisense strand to SEQ ID NO: 2455720
caaauuaagacacuaucca

SEQ ID NO: 2455722 - RNA, 19 nt, Artificial Sequence
  Description of Artificial Sequence: Synthetic oligonucleotide
  Sense strand starting at position 2715 of SEQ ID NO: 1887212
gucuuaauuugaggaccuu

SEQ ID NO: 2455723 - RNA, 19 nt, Artificial Sequence
  Description of Artificial Sequence: Synthetic oligonucleotide
  Antisense strand to SEQ ID NO: 2455722
aagguccucaaauuaagac

SEQ ID NO: 2455724 - RNA, 19 nt, Artificial Sequence
  Description of Artificial Sequence: Synthetic oligonucleotide
  Sense strand starting at position 2819 of SEQ ID NO: 1887212
cuuugaaccugagaagaga

SEQ ID NO: 2455725 - RNA, 19 nt, Artificial Sequence
  Description of Artificial Sequence: Synthetic oligonucleotide
  Antisense strand to SEQ ID NO: 2455724
ucucuucucagguucaaag

SEQ ID NO: 2455726 - RNA, 19 nt, Artificial Sequence
  Description of Artificial Sequence: Synthetic oligonucleotide
  Sense strand starting at position 2851 of SEQ ID NO: 1887212
gucacaggauggucauuaa

SEQ ID NO: 2455727 - RNA, 19 nt, Artificial Sequence
  Description of Artificial Sequence: Synthetic oligonucleotide
  Antisense strand to SEQ ID NO: 2455726
uuaaugaccauccugugac

SEQ ID NO: 2455728 - RNA, 19 nt, Artificial Sequence
  Description of Artificial Sequence: Synthetic oligonucleotide
  Sense strand starting at position 2854 of SEQ ID NO: 1887212
acaggauggucauuaaugu

SEQ ID NO: 2455729 - RNA, 19 nt, Artificial Sequence
  Description of Artificial Sequence: Synthetic oligonucleotide
  Antisense strand to SEQ ID NO: 2455728
acauuaaugaccauccugu

SEQ ID NO: 2455730 - RNA, 19 nt, Artificial Sequence
  Description of Artificial Sequence: Synthetic oligonucleotide
  Sense strand starting at position 2855 of SEQ ID NO: 1887212
caggauggucauuaauguu

SEQ ID NO: 2455731 - RNA, 19 nt, Artificial Sequence
  Description of Artificial Sequence: Synthetic oligonucleotide
  Antisense strand to SEQ ID NO: 2455730
aacauuaaugaccauccug

SEQ ID NO: 2455732 - RNA, 19 nt, Artificial Sequence
  Description of Artificial Sequence: Synthetic oligonucleotide
  Sense strand starting at position 2864 of SEQ ID NO: 1887212
cauuaauguuggccuguca

SEQ ID NO: 2455733 - RNA, 19 nt, Artificial Sequence
  Description of Artificial Sequence: Synthetic oligonucleotide
  Antisense strand to SEQ ID NO: 2455732
ugacaggccaacauuaaug

SEQ ID NO: 2455734 - RNA, 19 nt, Artificial Sequence
  Description of Artificial Sequence: Synthetic oligonucleotide
  Sense strand starting at position 2997 of SEQ ID NO: 1887212
aggagucugaucugaacca

SEQ ID NO: 2455735 - RNA, 19 nt, Artificial Sequence
  Description of Artificial Sequence: Synthetic oligonucleotide
  Antisense strand to SEQ ID NO: 2455734
ugguucagaucagacuccu

SEQ ID NO: 2455736 - RNA, 19 nt, Artificial Sequence
  Description of Artificial Sequence: Synthetic oligonucleotide
  Sense strand starting at position 3096 of SEQ ID NO: 1887212
gugugucuuuaauuagaga

SEQ ID NO: 2455737 - RNA, 19 nt, Artificial Sequence
  Description of Artificial Sequence: Synthetic oligonucleotide
  Antisense strand to SEQ ID NO: 2455736
ucucuaauuaaagacacac

SEQ ID NO: 2455738 - RNA, 19 nt, Artificial Sequence
  Description of Artificial Sequence: Synthetic oligonucleotide
  Sense strand starting at position 3166 of SEQ ID NO: 1887212
gaaguuaguguguggcaga

SEQ ID NO: 2455739 - RNA, 19 nt, Artificial Sequence
  Description of Artificial Sequence: Synthetic oligonucleotide
  Antisense strand to SEQ ID NO: 2455738
ucugccacacacuaacuuc

SEQ ID NO: 2455740 - RNA, 19 nt, Artificial Sequence
  Description of Artificial Sequence: Synthetic oligonucleotide
  Sense strand starting at position 3418 of SEQ ID NO: 1887212
aaagguuggcccuaccaaa

SEQ ID NO: 2455741 - RNA, 19 nt, Artificial Sequence
  Description of Artificial Sequence: Synthetic oligonucleotide
  Antisense strand to SEQ ID NO: 2455740
uuugguagggccaaccuuu

SEQ ID NO: 2455742 - RNA, 19 nt, Artificial Sequence
  Description of Artificial Sequence: Synthetic oligonucleotide
  Sense strand starting at position 3623 of SEQ ID NO: 1887212
uccugacacccuuacguua

SEQ ID NO: 2455743 - RNA, 19 nt, Artificial Sequence
  Description of Artificial Sequence: Synthetic oligonucleotide
  Antisense strand to SEQ ID NO: 2455742
uaacguaagggugucagga

SEQ ID NO: 2455744 - RNA, 19 nt, Artificial Sequence
  Description of Artificial Sequence: Synthetic oligonucleotide
  Sense strand starting at position 3852 of SEQ ID NO: 1887212
gaggaagcuuucccauggu

SEQ ID NO: 2455745 - RNA, 19 nt, Artificial Sequence
  Description of Artificial Sequence: Synthetic oligonucleotide
  Antisense strand to SEQ ID NO: 2455744
accaugggaaagcuuccuc

SEQ ID NO: 2455746 - RNA, 19 nt, Artificial Sequence
  Description of Artificial Sequence: Synthetic oligonucleotide
  Sense strand starting at position 17 of SEQ ID NO: 1887213
guuggaagugugcacucaa

SEQ ID NO: 2455747 - RNA, 19 nt, Artificial Sequence
  Description of Artificial Sequence: Synthetic oligonucleotide
  Antisense strand to SEQ ID NO: 2455746
uugagugcacacuuccaac

SEQ ID NO: 2455748 - RNA, 19 nt, Artificial Sequence
  Description of Artificial Sequence: Synthetic oligonucleotide
  Sense strand starting at position 56 of SEQ ID NO: 1887213
guuucugguuggguggaaa

SEQ ID NO: 2455749 - RNA, 19 nt, Artificial Sequence
  Description of Artificial Sequence: Synthetic oligonucleotide
  Antisense strand to SEQ ID NO: 2455748
uuuccacccaaccagaaac

SEQ ID NO: 2455750 - RNA, 19 nt, Artificial Sequence
  Description of Artificial Sequence: Synthetic oligonucleotide
  Sense strand starting at position 59 of SEQ ID NO: 1887213
ucugguuggguggaaacau

SEQ ID NO: 2455751 - RNA, 19 nt, Artificial Sequence
  Description of Artificial Sequence: Synthetic oligonucleotide
  Antisense strand to SEQ ID NO: 2455750
auguuuccacccaaccaga

SEQ ID NO: 2455752 - RNA, 19 nt, Artificial Sequence
  Description of Artificial Sequence: Synthetic oligonucleotide
  Sense strand starting at position 88 of SEQ ID NO: 1887213
ucuggauagugucuuaauu

SEQ ID NO: 2455753 - RNA, 19 nt, Artificial Sequence
  Description of Artificial Sequence: Synthetic oligonucleotide
  Antisense strand to SEQ ID NO: 2455752
aauuaagacacuauccaga

SEQ ID NO: 2455754 - RNA, 19 nt, Artificial Sequence
  Description of Artificial Sequence: Synthetic oligonucleotide
  Sense strand starting at position 90 of SEQ ID NO: 1887213
uggauagugucuuaauuug

SEQ ID NO: 2455755 - RNA, 19 nt, Artificial Sequence
  Description of Artificial Sequence: Synthetic oligonucleotide
  Antisense strand to SEQ ID NO: 2455754
caaauuaagacacuaucca

SEQ ID NO: 2455756 - RNA, 19 nt, Artificial Sequence
  Description of Artificial Sequence: Synthetic oligonucleotide
  Sense strand starting at position 202 of SEQ ID NO: 1887213
cuuugaaccugagaagaga

SEQ ID NO: 2455757 - RNA, 19 nt, Artificial Sequence
  Description of Artificial Sequence: Synthetic oligonucleotide
  Antisense strand to SEQ ID NO: 2455756
ucucuucucagguucaaag

SEQ ID NO: 2455758 - RNA, 19 nt, Artificial Sequence
  Description of Artificial Sequence: Synthetic oligonucleotide
  Sense strand starting at position 234 of SEQ ID NO: 1887213
gucacaggauggucauuaa

SEQ ID NO: 2455759 - RNA, 19 nt, Artificial Sequence
  Description of Artificial Sequence: Synthetic oligonucleotide
  Antisense strand to SEQ ID NO: 2455758
uuaaugaccauccugugac

SEQ ID NO: 2455760 - RNA, 19 nt, Artificial Sequence
  Description of Artificial Sequence: Synthetic oligonucleotide
  Sense strand starting at position 237 of SEQ ID NO: 1887213
acaggauggucauuaaugu

SEQ ID NO: 2455761 - RNA, 19 nt, Artificial Sequence
  Description of Artificial Sequence: Synthetic oligonucleotide
  Antisense strand to SEQ ID NO: 2455760
acauuaaugaccauccugu

SEQ ID NO: 2455762 - RNA, 19 nt, Artificial Sequence
  Description of Artificial Sequence: Synthetic oligonucleotide
  Sense strand starting at position 238 of SEQ ID NO: 1887213
caggauggucauuaauguu

SEQ ID NO: 2455763 - RNA, 19 nt, Artificial Sequence
  Description of Artificial Sequence: Synthetic oligonucleotide
  Antisense strand to SEQ ID NO: 2455762
aacauuaaugaccauccug

SEQ ID NO: 2455764 - RNA, 19 nt, Artificial Sequence
  Description of Artificial Sequence: Synthetic oligonucleotide
  Sense strand starting at position 247 of SEQ ID NO: 1887213
cauuaauguuggccuguca

SEQ ID NO: 2455765 - RNA, 19 nt, Artificial Sequence
  Description of Artificial Sequence: Synthetic oligonucleotide
  Antisense strand to SEQ ID NO: 2455764
ugacaggccaacauuaaug

SEQ ID NO: 2455766 - RNA, 19 nt, Artificial Sequence
  Description of Artificial Sequence: Synthetic oligonucleotide
  Sense strand starting at position 380 of SEQ ID NO: 1887213
aggagucugaucugaacca

SEQ ID NO: 2455767 - RNA, 19 nt, Artificial Sequence
  Description of Artificial Sequence: Synthetic oligonucleotide
  Antisense strand to SEQ ID NO: 2455766
ugguucagaucagacuccu

SEQ ID NO: 2455768 - RNA, 19 nt, Artificial Sequence
  Description of Artificial Sequence: Synthetic oligonucleotide
  Sense strand starting at position 479 of SEQ ID NO: 1887213
gugugucuuuaauuagaga

SEQ ID NO: 2455769 - RNA, 19 nt, Artificial Sequence
  Description of Artificial Sequence: Synthetic oligonucleotide
  Antisense strand to SEQ ID NO: 2455768
ucucuaauuaaagacacac

SEQ ID NO: 2455770 - RNA, 19 nt, Artificial Sequence
  Description of Artificial Sequence: Synthetic oligonucleotide
  Sense strand starting at position 801 of SEQ ID NO: 1887213
aaagguuggcccuaccaaa

SEQ ID NO: 2455771 - RNA, 19 nt, Artificial Sequence
  Description of Artificial Sequence: Synthetic oligonucleotide
  Antisense strand to SEQ ID NO: 2455770
uuugguagggccaaccuuu

SEQ ID NO: 2455772 - RNA, 19 nt, Artificial Sequence
  Description of Artificial Sequence: Synthetic oligonucleotide
  Sense strand starting at position 1006 of SEQ ID NO: 1887213
uccugacacccuuacguua

SEQ ID NO: 2455773 - RNA, 19 nt, Artificial Sequence
  Description of Artificial Sequence: Synthetic oligonucleotide
  Antisense strand to SEQ ID NO: 2455772
uaacguaagggugucagga

SEQ ID NO: 2455774 - RNA, 19 nt, Artificial Sequence
  Description of Artificial Sequence: Synthetic oligonucleotide
  Sense strand starting at position 1235 of SEQ ID NO: 1887213
gaggaagcuuucccauggu

SEQ ID NO: 2455775 - RNA, 19 nt, Artificial Sequence
  Description of Artificial Sequence: Synthetic oligonucleotide
  Antisense strand to SEQ ID NO: 2455774
accaugggaaagcuuccuc

SEQ ID NO: 2455776 - RNA, 19 nt, Artificial Sequence
  Description of Artificial Sequence: Synthetic oligonucleotide
  Sense strand starting at position 2321 of SEQ ID NO: 1887213
gggaguugcugcaugaguu

SEQ ID NO: 2455777 - RNA, 19 nt, Artificial Sequence
  Description of Artificial Sequence: Synthetic oligonucleotide
  Antisense strand to SEQ ID NO: 2455776
aacucaugcagcaacuccc

SEQ ID NO: 2455778 - RNA, 19 nt, Artificial Sequence
  Description of Artificial Sequence: Synthetic oligonucleotide
  Sense strand starting at position 2328 of SEQ ID NO: 1887213
gcugcaugaguuggagaga

SEQ ID NO: 2455779 - RNA, 19 nt, Artificial Sequence
  Description of Artificial Sequence: Synthetic oligonucleotide
  Antisense strand to SEQ ID NO: 2455778
ucucuccaacucaugcagc

SEQ ID NO: 2455780 - RNA, 19 nt, Artificial Sequence
  Description of Artificial Sequence: Synthetic oligonucleotide
  Sense strand starting at position 2441 of SEQ ID NO: 1887213
gucagauauucuccaccuc

SEQ ID NO: 2455781 - RNA, 19 nt, Artificial Sequence
  Description of Artificial Sequence: Synthetic oligonucleotide
  Antisense strand to SEQ ID NO: 2455780
gagguggagaauaucugac

SEQ ID NO: 2455782 - RNA, 19 nt, Artificial Sequence
  Description of Artificial Sequence: Synthetic oligonucleotide
  Sense strand starting at position 2552 of SEQ ID NO: 1887213
cagggaucaucugcuggaa

SEQ ID NO: 2455783 - RNA, 19 nt, Artificial Sequence
  Description of Artificial Sequence: Synthetic oligonucleotide
  Antisense strand to SEQ ID NO: 2455782
uuccagcagaugaucccug

SEQ ID NO: 2455784 - RNA, 19 nt, Artificial Sequence
  Description of Artificial Sequence: Synthetic oligonucleotide
  Sense strand starting at position 2555 of SEQ ID NO: 1887213
ggaucaucugcuggaagga

SEQ ID NO: 2455785 - RNA, 19 nt, Artificial Sequence
  Description of Artificial Sequence: Synthetic oligonucleotide
  Antisense strand to SEQ ID NO: 2455784
uccuuccagcagaugaucc

SEQ ID NO: 2455786 - RNA, 19 nt, Artificial Sequence
  Description of Artificial Sequence: Synthetic oligonucleotide
  Sense strand starting at position 2686 of SEQ ID NO: 1887213
ggccacucuuccucugaca

SEQ ID NO: 2455787 - RNA, 19 nt, Artificial Sequence
  Description of Artificial Sequence: Synthetic oligonucleotide
  Antisense strand to SEQ ID NO: 2455786
ugucagaggaagaguggcc

SEQ ID NO: 2455788 - RNA, 19 nt, Artificial Sequence
  Description of Artificial Sequence: Synthetic oligonucleotide
  Sense strand starting at position 2737 of SEQ ID NO: 1887213
agaagcuuuagaggcauua

SEQ ID NO: 2455789 - RNA, 19 nt, Artificial Sequence
  Description of Artificial Sequence: Synthetic oligonucleotide
  Antisense strand to SEQ ID NO: 2455788
uaaugccucuaaagcuucu

SEQ ID NO: 2455790 - RNA, 19 nt, Artificial Sequence
  Description of Artificial Sequence: Synthetic oligonucleotide
  Sense strand starting at position 2822 of SEQ ID NO: 1887213
gggauucccugagcuaagu

SEQ ID NO: 2455791 - RNA, 19 nt, Artificial Sequence
  Description of Artificial Sequence: Synthetic oligonucleotide
  Antisense strand to SEQ ID NO: 2455790
acuuagcucagggaauccc

SEQ ID NO: 2455792 - RNA, 19 nt, Artificial Sequence
  Description of Artificial Sequence: Synthetic oligonucleotide
  Sense strand starting at position 2928 of SEQ ID NO: 1887213
acuggcuucugccugaaua

SEQ ID NO: 2455793 - RNA, 19 nt, Artificial Sequence
  Description of Artificial Sequence: Synthetic oligonucleotide
  Antisense strand to SEQ ID NO: 2455792
uauucaggcagaagccagu

SEQ ID NO: 2455794 - RNA, 19 nt, Artificial Sequence
  Description of Artificial Sequence: Synthetic oligonucleotide
  Sense strand starting at position 2929 of SEQ ID NO: 1887213
cuggcuucugccugaauac

SEQ ID NO: 2455795 - RNA, 19 nt, Artificial Sequence
  Description of Artificial Sequence: Synthetic oligonucleotide
  Antisense strand to SEQ ID NO: 2455794
guauucaggcagaagccag

SEQ ID NO: 2455796 - RNA, 19 nt, Artificial Sequence
  Description of Artificial Sequence: Synthetic oligonucleotide
  Sense strand starting at position 2930 of SEQ ID NO: 1887213
uggcuucugccugaauaca

SEQ ID NO: 2455797 - RNA, 19 nt, Artificial Sequence
  Description of Artificial Sequence: Synthetic oligonucleotide
  Antisense strand to SEQ ID NO: 2455796
uguauucaggcagaagcca

SEQ ID NO: 2455798 - RNA, 19 nt, Artificial Sequence
  Description of Artificial Sequence: Synthetic oligonucleotide
  Sense strand starting at position 3024 of SEQ ID NO: 1887213
cagucugaccugugaacca

SEQ ID NO: 2455799 - RNA, 19 nt, Artificial Sequence
  Description of Artificial Sequence: Synthetic oligonucleotide
  Antisense strand to SEQ ID NO: 2455798
ugguucacaggucagacug

SEQ ID NO: 2455800 - RNA, 19 nt, Artificial Sequence
  Description of Artificial Sequence: Synthetic oligonucleotide
  Sense strand starting at position 3105 of SEQ ID NO: 1887213
guaagaucaggcugagaaa

SEQ ID NO: 2455801 - RNA, 19 nt, Artificial Sequence
  Description of Artificial Sequence: Synthetic oligonucleotide
  Antisense strand to SEQ ID NO: 2455800
uuucucagccugaucuuac

SEQ ID NO: 2455802 - RNA, 19 nt, Artificial Sequence
  Description of Artificial Sequence: Synthetic oligonucleotide
  Sense strand starting at position 3133 of SEQ ID NO: 1887213
gcugcuacuggagauguua

SEQ ID NO: 2455803 - RNA, 19 nt, Artificial Sequence
  Description of Artificial Sequence: Synthetic oligonucleotide
  Antisense strand to SEQ ID NO: 2455802
uaacaucuccaguagcagc

SEQ ID NO: 2455804 - RNA, 19 nt, Artificial Sequence
  Description of Artificial Sequence: Synthetic oligonucleotide
  Sense strand starting at position 3135 of SEQ ID NO: 1887213
ugcuacuggagauguuauu

SEQ ID NO: 2455805 - RNA, 19 nt, Artificial Sequence
  Description of Artificial Sequence: Synthetic oligonucleotide
  Antisense strand to SEQ ID NO: 2455804
aauaacaucuccaguagca

SEQ ID NO: 2455806 - RNA, 19 nt, Artificial Sequence
  Description of Artificial Sequence: Synthetic oligonucleotide
  Sense strand starting at position 3142 of SEQ ID NO: 1887213
ggagauguuauuggcuguu

SEQ ID NO: 2455807 - RNA, 19 nt, Artificial Sequence
  Description of Artificial Sequence: Synthetic oligonucleotide
  Antisense strand to SEQ ID NO: 2455806
aacagccaauaacaucucc

SEQ ID NO: 2455808 - RNA, 19 nt, Artificial Sequence
  Description of Artificial Sequence: Synthetic oligonucleotide
  Sense strand starting at position 3212 of SEQ ID NO: 1887213
ggagaaaccuuccuagcug

SEQ ID NO: 2455809 - RNA, 19 nt, Artificial Sequence
  Description of Artificial Sequence: Synthetic oligonucleotide
  Antisense strand to SEQ ID NO: 2455808
cagcuaggaagguuucucc

SEQ ID NO: 2455810 - RNA, 19 nt, Artificial Sequence
  Description of Artificial Sequence: Synthetic oligonucleotide
  Sense strand starting at position 3300 of SEQ ID NO: 1887213
cuagaugauuucuaagcuu

SEQ ID NO: 2455811 - RNA, 19 nt, Artificial Sequence
  Description of Artificial Sequence: Synthetic oligonucleotide
  Antisense strand to SEQ ID NO: 2455810
aagcuuagaaaucaucuag

SEQ ID NO: 2455812 - RNA, 19 nt, Artificial Sequence
  Description of Artificial Sequence: Synthetic oligonucleotide
  Sense strand starting at position 3362 of SEQ ID NO: 1887213
gaggauaugcuguaugcua

SEQ ID NO: 2455813 - RNA, 19 nt, Artificial Sequence
  Description of Artificial Sequence: Synthetic oligonucleotide
  Antisense strand to SEQ ID NO: 2455812
uagcauacagcauauccuc

SEQ ID NO: 2455814 - RNA, 19 nt, Artificial Sequence
  Description of Artificial Sequence: Synthetic oligonucleotide
  Sense strand starting at position 3379 of SEQ ID NO: 1887213
uacuauaggccuuggagga

SEQ ID NO: 2455815 - RNA, 19 nt, Artificial Sequence
  Description of Artificial Sequence: Synthetic oligonucleotide
  Antisense strand to SEQ ID NO: 2455814
uccuccaaggccuauagua

SEQ ID NO: 2455816 - RNA, 19 nt, Artificial Sequence
  Description of Artificial Sequence: Synthetic oligonucleotide
  Sense strand starting at position 3380 of SEQ ID NO: 1887213
acuauaggccuuggaggaa

SEQ ID NO: 2455817 - RNA, 19 nt, Artificial Sequence
  Description of Artificial Sequence: Synthetic oligonucleotide
  Antisense strand to SEQ ID NO: 2455816
uuccuccaaggccuauagu

SEQ ID NO: 2455818 - RNA, 19 nt, Artificial Sequence
  Description of Artificial Sequence: Synthetic oligonucleotide
  Sense strand starting at position 3511 of SEQ ID NO: 1887213
cagcuuggguucccugaaa

SEQ ID NO: 2455819 - RNA, 19 nt, Artificial Sequence
  Description of Artificial Sequence: Synthetic oligonucleotide
  Antisense strand to SEQ ID NO: 2455818
uuucagggaacccaagcug

SEQ ID NO: 2455820 - RNA, 19 nt, Artificial Sequence
  Description of Artificial Sequence: Synthetic oligonucleotide
  Sense strand starting at position 3621 of SEQ ID NO: 1887213
gagagaaaccaauggcagu

SEQ ID NO: 2455821 - RNA, 19 nt, Artificial Sequence
  Description of Artificial Sequence: Synthetic oligonucleotide
  Antisense strand to SEQ ID NO: 2455820
acugccauugguuucucuc

SEQ ID NO: 2455822 - RNA, 19 nt, Artificial Sequence
  Description of Artificial Sequence: Synthetic oligonucleotide
  Sense strand starting at position 3682 of SEQ ID NO: 1887213
aaaugucaagcuuggacua

SEQ ID NO: 2455823 - RNA, 19 nt, Artificial Sequence
  Description of Artificial Sequence: Synthetic oligonucleotide
  Antisense strand to SEQ ID NO: 2455822
uaguccaagcuugacauuu

SEQ ID NO: 2455824 - RNA, 19 nt, Artificial Sequence
  Description of Artificial Sequence: Synthetic oligonucleotide
  Sense strand starting at position 3742 of SEQ ID NO: 1887213
auguaugcacucuaagaau

SEQ ID NO: 2455825 - RNA, 19 nt, Artificial Sequence
  Description of Artificial Sequence: Synthetic oligonucleotide
  Antisense strand to SEQ ID NO: 2455824
auucuuagagugcauacau

SEQ ID NO: 2455826 - RNA, 19 nt, Artificial Sequence
  Description of Artificial Sequence: Synthetic oligonucleotide
  Sense strand starting at position 174 of SEQ ID NO: 1887214
cccucaucuguuugucaga

SEQ ID NO: 2455827 - RNA, 19 nt, Artificial Sequence
  Description of Artificial Sequence: Synthetic oligonucleotide
  Antisense strand to SEQ ID NO: 2455826
ucugacaaacagaugaggg

SEQ ID NO: 2455828 - RNA, 19 nt, Artificial Sequence
  Description of Artificial Sequence: Synthetic oligonucleotide
  Sense strand starting at position 175 of SEQ ID NO: 1887214
ccucaucuguuugucagau

SEQ ID NO: 2455829 - RNA, 19 nt, Artificial Sequence
  Description of Artificial Sequence: Synthetic oligonucleotide
  Antisense strand to SEQ ID NO: 2455828
aucugacaaacagaugagg

SEQ ID NO: 2455830 - RNA, 19 nt, Artificial Sequence
  Description of Artificial Sequence: Synthetic oligonucleotide
  Sense strand starting at position 176 of SEQ ID NO: 1887214
cucaucuguuugucagauc

SEQ ID NO: 2455831 - RNA, 19 nt, Artificial Sequence
  Description of Artificial Sequence: Synthetic oligonucleotide
  Antisense strand to SEQ ID NO: 2455830
gaucugacaaacagaugag

SEQ ID NO: 2455832 - RNA, 19 nt, Artificial Sequence
  Description of Artificial Sequence: Synthetic oligonucleotide
  Sense strand starting at position 368 of SEQ ID NO: 1887214
aggcuaucagggugggaaa

SEQ ID NO: 2455833 - RNA, 19 nt, Artificial Sequence
  Description of Artificial Sequence: Synthetic oligonucleotide
  Antisense strand to SEQ ID NO: 2455832
uuucccacccugauagccu

SEQ ID NO: 2455834 - RNA, 19 nt, Artificial Sequence
  Description of Artificial Sequence: Synthetic oligonucleotide
  Sense strand starting at position 505 of SEQ ID NO: 1887214
aguaauuggcagcaacacu

SEQ ID NO: 2455835 - RNA, 19 nt, Artificial Sequence
  Description of Artificial Sequence: Synthetic oligonucleotide
  Antisense strand to SEQ ID NO: 2455834
aguguugcugccaauuacu

SEQ ID NO: 2455836 - RNA, 19 nt, Artificial Sequence
  Description of Artificial Sequence: Synthetic oligonucleotide
  Sense strand starting at position 994 of SEQ ID NO: 1887214
agcaaacugacucgggaaa

SEQ ID NO: 2455837 - RNA, 19 nt, Artificial Sequence
  Description of Artificial Sequence: Synthetic oligonucleotide
  Antisense strand to SEQ ID NO: 2455836
uuucccgagucaguuugcu

SEQ ID NO: 2455838 - RNA, 19 nt, Artificial Sequence
  Description of Artificial Sequence: Synthetic oligonucleotide
  Sense strand starting at position 1062 of SEQ ID NO: 1887214
aacugagaagcuuauccga

SEQ ID NO: 2455839 - RNA, 19 nt, Artificial Sequence
  Description of Artificial Sequence: Synthetic oligonucleotide
  Antisense strand to SEQ ID NO: 2455838
ucggauaagcuucucaguu

SEQ ID NO: 2455840 - RNA, 19 nt, Artificial Sequence
  Description of Artificial Sequence: Synthetic oligonucleotide
  Sense strand starting at position 1064 of SEQ ID NO: 1887214
cugagaagcuuauccgaga

SEQ ID NO: 2455841 - RNA, 19 nt, Artificial Sequence
  Description of Artificial Sequence: Synthetic oligonucleotide
  Antisense strand to SEQ ID NO: 2455840
ucucggauaagcuucucag

SEQ ID NO: 2455842 - RNA, 19 nt, Artificial Sequence
  Description of Artificial Sequence: Synthetic oligonucleotide
  Sense strand starting at position 1120 of SEQ ID NO: 1887214
gaggucuccuguuugauca

SEQ ID NO: 2455843 - RNA, 19 nt, Artificial Sequence
  Description of Artificial Sequence: Synthetic oligonucleotide
  Antisense strand to SEQ ID NO: 2455842
ugaucaaacaggagaccuc

SEQ ID NO: 2455844 - RNA, 19 nt, Artificial Sequence
  Description of Artificial Sequence: Synthetic oligonucleotide
  Sense strand starting at position 1127 of SEQ ID NO: 1887214
ccuguuugaucaccaacgu

SEQ ID NO: 2455845 - RNA, 19 nt, Artificial Sequence
  Description of Artificial Sequence: Synthetic oligonucleotide
  Antisense strand to SEQ ID NO: 2455844
acguuggugaucaaacagg

SEQ ID NO: 2455846 - RNA, 19 nt, Artificial Sequence
  Description of Artificial Sequence: Synthetic oligonucleotide
  Sense strand starting at position 1128 of SEQ ID NO: 1887214
cuguuugaucaccaacguu

SEQ ID NO: 2455847 - RNA, 19 nt, Artificial Sequence
  Description of Artificial Sequence: Synthetic oligonucleotide
  Antisense strand to SEQ ID NO: 2455846
aacguuggugaucaaacag

SEQ ID NO: 2455848 - RNA, 19 nt, Artificial Sequence
  Description of Artificial Sequence: Synthetic oligonucleotide
  Sense strand starting at position 1147 of SEQ ID NO: 1887214
gguaucucuuuguuuggua

SEQ ID NO: 2455849 - RNA, 19 nt, Artificial Sequence
  Description of Artificial Sequence: Synthetic oligonucleotide
  Antisense strand to SEQ ID NO: 2455848
uaccaaacaaagagauacc

SEQ ID NO: 2455850 - RNA, 19 nt, Artificial Sequence
  Description of Artificial Sequence: Synthetic oligonucleotide
  Sense strand starting at position 1148 of SEQ ID NO: 1887214
guaucucuuuguuugguaa

SEQ ID NO: 2455851 - RNA, 19 nt, Artificial Sequence
  Description of Artificial Sequence: Synthetic oligonucleotide
  Antisense strand to SEQ ID NO: 2455850
uuaccaaacaaagagauac

SEQ ID NO: 2455852 - RNA, 19 nt, Artificial Sequence
  Description of Artificial Sequence: Synthetic oligonucleotide
  Sense strand starting at position 1151 of SEQ ID NO: 1887214
ucucuuuguuugguaauag

SEQ ID NO: 2455853 - RNA, 19 nt, Artificial Sequence
  Description of Artificial Sequence: Synthetic oligonucleotide
  Antisense strand to SEQ ID NO: 2455852
cuauuaccaaacaaagaga

SEQ ID NO: 2455854 - RNA, 19 nt, Artificial Sequence
  Description of Artificial Sequence: Synthetic oligonucleotide
  Sense strand starting at position 1538 of SEQ ID NO: 1887214
cccagagacucagaggaaa

SEQ ID NO: 2455855 - RNA, 19 nt, Artificial Sequence
  Description of Artificial Sequence: Synthetic oligonucleotide
  Antisense strand to SEQ ID NO: 2455854
uuuccucugagucucuggg

SEQ ID NO: 2455856 - RNA, 19 nt, Artificial Sequence
  Description of Artificial Sequence: Synthetic oligonucleotide
  Sense strand starting at position 1584 of SEQ ID NO: 1887214
ucuggugucccugugugua

SEQ ID NO: 2455857 - RNA, 19 nt, Artificial Sequence
  Description of Artificial Sequence: Synthetic oligonucleotide
  Antisense strand to SEQ ID NO: 2455856
uacacacagggacaccaga

SEQ ID NO: 2455858 - RNA, 19 nt, Artificial Sequence
  Description of Artificial Sequence: Synthetic oligonucleotide
  Sense strand starting at position 1727 of SEQ ID NO: 1887214
cuaagucccugcuuagaau

SEQ ID NO: 2455859 - RNA, 19 nt, Artificial Sequence
  Description of Artificial Sequence: Synthetic oligonucleotide
  Antisense strand to SEQ ID NO: 2455858
auucuaagcagggacuuag

SEQ ID NO: 2455860 - RNA, 19 nt, Artificial Sequence
  Description of Artificial Sequence: Synthetic oligonucleotide
  Sense strand starting at position 1758 of SEQ ID NO: 1887214
cuccaucuugacgaucaua

SEQ ID NO: 2455861 - RNA, 19 nt, Artificial Sequence
  Description of Artificial Sequence: Synthetic oligonucleotide
  Antisense strand to SEQ ID NO: 2455860
uaugaucgucaagauggag

SEQ ID NO: 2455862 - RNA, 19 nt, Artificial Sequence
  Description of Artificial Sequence: Synthetic oligonucleotide
  Sense strand starting at position 1766 of SEQ ID NO: 1887214
ugacgaucauaucuaucau

SEQ ID NO: 2455863 - RNA, 19 nt, Artificial Sequence
  Description of Artificial Sequence: Synthetic oligonucleotide
  Antisense strand to SEQ ID NO: 2455862
augauagauaugaucguca

SEQ ID NO: 2455864 - RNA, 19 nt, Artificial Sequence
  Description of Artificial Sequence: Synthetic oligonucleotide
  Sense strand starting at position 1778 of SEQ ID NO: 1887214
cuaucaugccucuguuauc

SEQ ID NO: 2455865 - RNA, 19 nt, Artificial Sequence
  Description of Artificial Sequence: Synthetic oligonucleotide
  Antisense strand to SEQ ID NO: 2455864
gauaacagaggcaugauag

SEQ ID NO: 2455866 - RNA, 19 nt, Artificial Sequence
  Description of Artificial Sequence: Synthetic oligonucleotide
  Sense strand starting at position 2591 of SEQ ID NO: 1887214
gauaccugcccuugggaaa

SEQ ID NO: 2455867 - RNA, 19 nt, Artificial Sequence
  Description of Artificial Sequence: Synthetic oligonucleotide
  Antisense strand to SEQ ID NO: 2455866
uuucccaagggcagguauc

SEQ ID NO: 2455868 - RNA, 19 nt, Artificial Sequence
  Description of Artificial Sequence: Synthetic oligonucleotide
  Sense strand starting at position 2679 of SEQ ID NO: 1887214
gguuaagcucuacacugua

SEQ ID NO: 2455869 - RNA, 19 nt, Artificial Sequence
  Description of Artificial Sequence: Synthetic oligonucleotide
  Antisense strand to SEQ ID NO: 2455868
uacaguguagagcuuaacc

SEQ ID NO: 2455870 - RNA, 19 nt, Artificial Sequence
  Description of Artificial Sequence: Synthetic oligonucleotide
  Sense strand starting at position 2695 of SEQ ID NO: 1887214
guagaaagccugugauaga

SEQ ID NO: 2455871 - RNA, 19 nt, Artificial Sequence
  Description of Artificial Sequence: Synthetic oligonucleotide
  Antisense strand to SEQ ID NO: 2455870
ucuaucacaggcuuucuac

SEQ ID NO: 2455872 - RNA, 19 nt, Artificial Sequence
  Description of Artificial Sequence: Synthetic oligonucleotide
  Sense strand starting at position 2706 of SEQ ID NO: 1887214
gugauagagcuuugaacaa

SEQ ID NO: 2455873 - RNA, 19 nt, Artificial Sequence
  Description of Artificial Sequence: Synthetic oligonucleotide
  Antisense strand to SEQ ID NO: 2455872
uuguucaaagcucuaucac

SEQ ID NO: 2455874 - RNA, 19 nt, Artificial Sequence
  Description of Artificial Sequence: Synthetic oligonucleotide
  Sense strand starting at position 2755 of SEQ ID NO: 1887214
auaguaagugcugggaaug

SEQ ID NO: 2455875 - RNA, 19 nt, Artificial Sequence
  Description of Artificial Sequence: Synthetic oligonucleotide
  Antisense strand to SEQ ID NO: 2455874
cauucccagcacuuacuau

SEQ ID NO: 2455876 - RNA, 19 nt, Artificial Sequence
  Description of Artificial Sequence: Synthetic oligonucleotide
  Sense strand starting at position 2756 of SEQ ID NO: 1887214
uaguaagugcugggaauga

SEQ ID NO: 2455877 - RNA, 19 nt, Artificial Sequence
  Description of Artificial Sequence: Synthetic oligonucleotide
  Antisense strand to SEQ ID NO: 2455876
ucauucccagcacuuacua

SEQ ID NO: 2455878 - RNA, 19 nt, Artificial Sequence
  Description of Artificial Sequence: Synthetic oligonucleotide
  Sense strand starting at position 2760 of SEQ ID NO: 1887214
aagugcugggaaugaauaa

SEQ ID NO: 2455879 - RNA, 19 nt, Artificial Sequence
  Description of Artificial Sequence: Synthetic oligonucleotide
  Antisense strand to SEQ ID NO: 2455878
uuauucauucccagcacuu

SEQ ID NO: 2455880 - RNA, 19 nt, Artificial Sequence
  Description of Artificial Sequence: Synthetic oligonucleotide
  Sense strand starting at position 2866 of SEQ ID NO: 1887214
guucaaguagugcaaaguu

SEQ ID NO: 2455881 - RNA, 19 nt, Artificial Sequence
  Description of Artificial Sequence: Synthetic oligonucleotide
  Antisense strand to SEQ ID NO: 2455880
aacuuugcacuacuugaac

SEQ ID NO: 2455882 - RNA, 19 nt, Artificial Sequence
  Description of Artificial Sequence: Synthetic oligonucleotide
  Sense strand starting at position 2884 of SEQ ID NO: 1887214
uccugucuuccuggaacuu

SEQ ID NO: 2455883 - RNA, 19 nt, Artificial Sequence
  Description of Artificial Sequence: Synthetic oligonucleotide
  Antisense strand to SEQ ID NO: 2455882
aaguuccaggaagacagga

SEQ ID NO: 2455884 - RNA, 19 nt, Artificial Sequence
  Description of Artificial Sequence: Synthetic oligonucleotide
  Sense strand starting at position 2885 of SEQ ID NO: 1887214
ccugucuuccuggaacuua

SEQ ID NO: 2455885 - RNA, 19 nt, Artificial Sequence
  Description of Artificial Sequence: Synthetic oligonucleotide
  Antisense strand to SEQ ID NO: 2455884
uaaguuccaggaagacagg

SEQ ID NO: 2455886 - RNA, 19 nt, Artificial Sequence
  Description of Artificial Sequence: Synthetic oligonucleotide
  Sense strand starting at position 2984 of SEQ ID NO: 1887214
ccgcuccagaccugagaau

SEQ ID NO: 2455887 - RNA, 19 nt, Artificial Sequence
  Description of Artificial Sequence: Synthetic oligonucleotide
  Antisense strand to SEQ ID NO: 2455886
auucucaggucuggagcgg

SEQ ID NO: 2455888 - RNA, 19 nt, Artificial Sequence
  Description of Artificial Sequence: Synthetic oligonucleotide
  Sense strand starting at position 2995 of SEQ ID NO: 1887214
cugagaauaucagcugaau

SEQ ID NO: 2455889 - RNA, 19 nt, Artificial Sequence
  Description of Artificial Sequence: Synthetic oligonucleotide
  Antisense strand to SEQ ID NO: 2455888
auucagcugauauucucag

SEQ ID NO: 2455890 - RNA, 19 nt, Artificial Sequence
  Description of Artificial Sequence: Synthetic oligonucleotide
  Sense strand starting at position 3265 of SEQ ID NO: 1887214
gcgcaaugcaggucgugaa

SEQ ID NO: 2455891 - RNA, 19 nt, Artificial Sequence
  Description of Artificial Sequence: Synthetic oligonucleotide
  Antisense strand to SEQ ID NO: 2455890
uucacgaccugcauugcgc

SEQ ID NO: 2455892 - RNA, 19 nt, Artificial Sequence
  Description of Artificial Sequence: Synthetic oligonucleotide
  Sense strand starting at position 3294 of SEQ ID NO: 1887214
gucguuuaucgauacaaag

SEQ ID NO: 2455893 - RNA, 19 nt, Artificial Sequence
  Description of Artificial Sequence: Synthetic oligonucleotide
  Antisense strand to SEQ ID NO: 2455892
cuuuguaucgauaaacgac

SEQ ID NO: 2455894 - RNA, 19 nt, Artificial Sequence
  Description of Artificial Sequence: Synthetic oligonucleotide
  Sense strand starting at position 3296 of SEQ ID NO: 1887214
cguuuaucgauacaaagug

SEQ ID NO: 2455895 - RNA, 19 nt, Artificial Sequence
  Description of Artificial Sequence: Synthetic oligonucleotide
  Antisense strand to SEQ ID NO: 2455894
cacuuuguaucgauaaacg

SEQ ID NO: 2455896 - RNA, 19 nt, Artificial Sequence
  Description of Artificial Sequence: Synthetic oligonucleotide
  Sense strand starting at position 3305 of SEQ ID NO: 1887214
auacaaagugaguguugga

SEQ ID NO: 2455897 - RNA, 19 nt, Artificial Sequence
  Description of Artificial Sequence: Synthetic oligonucleotide
  Antisense strand to SEQ ID NO: 2455896
uccaacacucacuuuguau

SEQ ID NO: 2455898 - RNA, 19 nt, Artificial Sequence
  Description of Artificial Sequence: Synthetic oligonucleotide
  Sense strand starting at position 3453 of SEQ ID NO: 1887214
ccggaugacagcugcgaaa

SEQ ID NO: 2455899 - RNA, 19 nt, Artificial Sequence
  Description of Artificial Sequence: Synthetic oligonucleotide
  Antisense strand to SEQ ID NO: 2455898
uuucgcagcugucauccgg

SEQ ID NO: 2455900 - RNA, 19 nt, Artificial Sequence
  Description of Artificial Sequence: Synthetic oligonucleotide
  Sense strand starting at position 3550 of SEQ ID NO: 1887214
aguggcuuuaggcauguaa

SEQ ID NO: 2455901 - RNA, 19 nt, Artificial Sequence
  Description of Artificial Sequence: Synthetic oligonucleotide
  Antisense strand to SEQ ID NO: 2455900
uuacaugccuaaagccacu

SEQ ID NO: 2455902 - RNA, 19 nt, Artificial Sequence
  Description of Artificial Sequence: Synthetic oligonucleotide
  Sense strand starting at position 3762 of SEQ ID NO: 1887214
uaggcauccgauuggcuaa

SEQ ID NO: 2455903 - RNA, 19 nt, Artificial Sequence
  Description of Artificial Sequence: Synthetic oligonucleotide
  Antisense strand to SEQ ID NO: 2455902
uuagccaaucggaugccua

SEQ ID NO: 2455904 - RNA, 19 nt, Artificial Sequence
  Description of Artificial Sequence: Synthetic oligonucleotide
  Sense strand starting at position 3887 of SEQ ID NO: 1887214
gcggguacaggcuagagau

SEQ ID NO: 2455905 - RNA, 19 nt, Artificial Sequence
  Description of Artificial Sequence: Synthetic oligonucleotide
  Antisense strand to SEQ ID NO: 2455904
aucucuagccuguacccgc

SEQ ID NO: 2455906 - RNA, 19 nt, Artificial Sequence
  Description of Artificial Sequence: Synthetic oligonucleotide
  Sense strand starting at position 2205 of SEQ ID NO: 1887215
gccuacuuacuuuguagau

SEQ ID NO: 2455907 - RNA, 19 nt, Artificial Sequence
  Description of Artificial Sequence: Synthetic oligonucleotide
  Antisense strand to SEQ ID NO: 2455906
aucuacaaaguaaguaggc

SEQ ID NO: 2455908 - RNA, 19 nt, Artificial Sequence
  Description of Artificial Sequence: Synthetic oligonucleotide
  Sense strand starting at position 2206 of SEQ ID NO: 1887215
ccuacuuacuuuguagaua

SEQ ID NO: 2455909 - RNA, 19 nt, Artificial Sequence
  Description of Artificial Sequence: Synthetic oligonucleotide
  Antisense strand to SEQ ID NO: 2455908
uaucuacaaaguaaguagg

SEQ ID NO: 2455910 - RNA, 19 nt, Artificial Sequence
  Description of Artificial Sequence: Synthetic oligonucleotide
  Sense strand starting at position 2218 of SEQ ID NO: 1887215
guagauaaauguguaaacu

SEQ ID NO: 2455911 - RNA, 19 nt, Artificial Sequence
  Description of Artificial Sequence: Synthetic oligonucleotide
  Antisense strand to SEQ ID NO: 2455910
aguuuacacauuuaucuac

SEQ ID NO: 2455912 - RNA, 19 nt, Artificial Sequence
  Description of Artificial Sequence: Synthetic oligonucleotide
  Sense strand starting at position 2227 of SEQ ID NO: 1887215
uguguaaacuccucaagac

SEQ ID NO: 2455913 - RNA, 19 nt, Artificial Sequence
  Description of Artificial Sequence: Synthetic oligonucleotide
  Antisense strand to SEQ ID NO: 2455912
gucuugaggaguuuacaca

SEQ ID NO: 2455914 - RNA, 19 nt, Artificial Sequence
  Description of Artificial Sequence: Synthetic oligonucleotide
  Sense strand starting at position 2228 of SEQ ID NO: 1887215
guguaaacuccucaagacu

SEQ ID NO: 2455915 - RNA, 19 nt, Artificial Sequence
  Description of Artificial Sequence: Synthetic oligonucleotide
  Antisense strand to SEQ ID NO: 2455914
agucuugaggaguuuacac

SEQ ID NO: 2455916 - RNA, 19 nt, Artificial Sequence
  Description of Artificial Sequence: Synthetic oligonucleotide
  Sense strand starting at position 2390 of SEQ ID NO: 1887215
aagugagaaaguuggucaa

SEQ ID NO: 2455917 - RNA, 19 nt, Artificial Sequence
  Description of Artificial Sequence: Synthetic oligonucleotide
  Antisense strand to SEQ ID NO: 2455916
uugaccaacuuucucacuu

SEQ ID NO: 2455918 - RNA, 19 nt, Artificial Sequence
  Description of Artificial Sequence: Synthetic oligonucleotide
  Sense strand starting at position 2392 of SEQ ID NO: 1887215
gugagaaaguuggucaaug

SEQ ID NO: 2455919 - RNA, 19 nt, Artificial Sequence
  Description of Artificial Sequence: Synthetic oligonucleotide
  Antisense strand to SEQ ID NO: 2455918
cauugaccaacuuucucac

SEQ ID NO: 2455920 - RNA, 19 nt, Artificial Sequence
  Description of Artificial Sequence: Synthetic oligonucleotide
  Sense strand starting at position 2393 of SEQ ID NO: 1887215
ugagaaaguuggucaauga

SEQ ID NO: 2455921 - RNA, 19 nt, Artificial Sequence
  Description of Artificial Sequence: Synthetic oligonucleotide
  Antisense strand to SEQ ID NO: 2455920
ucauugaccaacuuucuca

SEQ ID NO: 2455922 - RNA, 19 nt, Artificial Sequence
  Description of Artificial Sequence: Synthetic oligonucleotide
  Sense strand starting at position 2503 of SEQ ID NO: 1887215
cugacagcccggugaagau

SEQ ID NO: 2455923 - RNA, 19 nt, Artificial Sequence
  Description of Artificial Sequence: Synthetic oligonucleotide
  Antisense strand to SEQ ID NO: 2455922
aucuucaccgggcugucag

SEQ ID NO: 2455924 - RNA, 19 nt, Artificial Sequence
  Description of Artificial Sequence: Synthetic oligonucleotide
  Sense strand starting at position 2700 of SEQ ID NO: 1887215
acaauagggccuugcagaa

SEQ ID NO: 2455925 - RNA, 19 nt, Artificial Sequence
  Description of Artificial Sequence: Synthetic oligonucleotide
  Antisense strand to SEQ ID NO: 2455924
uucugcaaggcccuauugu

SEQ ID NO: 2455926 - RNA, 19 nt, Artificial Sequence
  Description of Artificial Sequence: Synthetic oligonucleotide
  Sense strand starting at position 2704 of SEQ ID NO: 1887215
uagggccuugcagaaauau

SEQ ID NO: 2455927 - RNA, 19 nt, Artificial Sequence
  Description of Artificial Sequence: Synthetic oligonucleotide
  Antisense strand to SEQ ID NO: 2455926
auauuucugcaaggcccua

SEQ ID NO: 2455928 - RNA, 19 nt, Artificial Sequence
  Description of Artificial Sequence: Synthetic oligonucleotide
  Sense strand starting at position 3276 of SEQ ID NO: 1887215
cuacacaauuucugggaga

SEQ ID NO: 2455929 - RNA, 19 nt, Artificial Sequence
  Description of Artificial Sequence: Synthetic oligonucleotide
  Antisense strand to SEQ ID NO: 2455928
ucucccagaaauuguguag

SEQ ID NO: 2455930 - RNA, 19 nt, Artificial Sequence
  Description of Artificial Sequence: Synthetic oligonucleotide
  Sense strand starting at position 3794 of SEQ ID NO: 1887215
accacaaucugagagaaga

SEQ ID NO: 2455931 - RNA, 19 nt, Artificial Sequence
  Description of Artificial Sequence: Synthetic oligonucleotide
  Antisense strand to SEQ ID NO: 2455930
ucuucucucagauuguggu

SEQ ID NO: 2455932 - RNA, 19 nt, Artificial Sequence
  Description of Artificial Sequence: Synthetic oligonucleotide
  Sense strand starting at position 2037 of SEQ ID NO: 1887216
ccgccucgaguucaugauu

SEQ ID NO: 2455933 - RNA, 19 nt, Artificial Sequence
  Description of Artificial Sequence: Synthetic oligonucleotide
  Antisense strand to SEQ ID NO: 2455932
aaucaugaacucgaggcgg

SEQ ID NO: 2455934 - RNA, 19 nt, Artificial Sequence
  Description of Artificial Sequence: Synthetic oligonucleotide
  Sense strand starting at position 2176 of SEQ ID NO: 1887216
auacgcguuaaagaucauu

SEQ ID NO: 2455935 - RNA, 19 nt, Artificial Sequence
  Description of Artificial Sequence: Synthetic oligonucleotide
  Antisense strand to SEQ ID NO: 2455934
aaugaucuuuaacgcguau

SEQ ID NO: 2455936 - RNA, 19 nt, Artificial Sequence
  Description of Artificial Sequence: Synthetic oligonucleotide
  Sense strand starting at position 2179 of SEQ ID NO: 1887216
cgcguuaaagaucauuaca

SEQ ID NO: 2455937 - RNA, 19 nt, Artificial Sequence
  Description of Artificial Sequence: Synthetic oligonucleotide
  Antisense strand to SEQ ID NO: 2455936
uguaaugaucuuuaacgcg

SEQ ID NO: 2455938 - RNA, 19 nt, Artificial Sequence
  Description of Artificial Sequence: Synthetic oligonucleotide
  Sense strand starting at position 2181 of SEQ ID NO: 1887216
cguuaaagaucauuacaca

SEQ ID NO: 2455939 - RNA, 19 nt, Artificial Sequence
  Description of Artificial Sequence: Synthetic oligonucleotide
  Antisense strand to SEQ ID NO: 2455938
uguguaaugaucuuuaacg

SEQ ID NO: 2455940 - RNA, 19 nt, Artificial Sequence
  Description of Artificial Sequence: Synthetic oligonucleotide
  Sense strand starting at position 2221 of SEQ ID NO: 1887216
gccuacuuacuuuguauau

SEQ ID NO: 2455941 - RNA, 19 nt, Artificial Sequence
  Description of Artificial Sequence: Synthetic oligonucleotide
  Antisense strand to SEQ ID NO: 2455940
auauacaaaguaaguaggc

SEQ ID NO: 2455942 - RNA, 19 nt, Artificial Sequence
  Description of Artificial Sequence: Synthetic oligonucleotide
  Sense strand starting at position 2243 of SEQ ID NO: 1887216
uguguaaacuccucaagaa

SEQ ID NO: 2455943 - RNA, 19 nt, Artificial Sequence
  Description of Artificial Sequence: Synthetic oligonucleotide
  Antisense strand to SEQ ID NO: 2455942
uucuugaggaguuuacaca

SEQ ID NO: 2455944 - RNA, 19 nt, Artificial Sequence
  Description of Artificial Sequence: Synthetic oligonucleotide
  Sense strand starting at position 2316 of SEQ ID NO: 1887216
gacaaaugguuacagacaa

SEQ ID NO: 2455945 - RNA, 19 nt, Artificial Sequence
  Description of Artificial Sequence: Synthetic oligonucleotide
  Antisense strand to SEQ ID NO: 2455944
uugucuguaaccauuuguc

SEQ ID NO: 2455946 - RNA, 19 nt, Artificial Sequence
  Description of Artificial Sequence: Synthetic oligonucleotide
  Sense strand starting at position 2408 of SEQ ID NO: 1887216
gugagaaaguuggucgaug

SEQ ID NO: 2455947 - RNA, 19 nt, Artificial Sequence
  Description of Artificial Sequence: Synthetic oligonucleotide
  Antisense strand to SEQ ID NO: 2455946
caucgaccaacuuucucac

SEQ ID NO: 2455948 - RNA, 19 nt, Artificial Sequence
  Description of Artificial Sequence: Synthetic oligonucleotide
  Sense strand starting at position 2409 of SEQ ID NO: 1887216
ugagaaaguuggucgauga

SEQ ID NO: 2455949 - RNA, 19 nt, Artificial Sequence
  Description of Artificial Sequence: Synthetic oligonucleotide
  Antisense strand to SEQ ID NO: 2455948
ucaucgaccaacuuucuca

SEQ ID NO: 2455950 - RNA, 19 nt, Artificial Sequence
  Description of Artificial Sequence: Synthetic oligonucleotide
  Sense strand starting at position 2413 of SEQ ID NO: 1887216
aaaguuggucgaugaagag

SEQ ID NO: 2455951 - RNA, 19 nt, Artificial Sequence
  Description of Artificial Sequence: Synthetic oligonucleotide
  Antisense strand to SEQ ID NO: 2455950
cucuucaucgaccaacuuu

SEQ ID NO: 2455952 - RNA, 19 nt, Artificial Sequence
  Description of Artificial Sequence: Synthetic oligonucleotide
  Sense strand starting at position 2519 of SEQ ID NO: 1887216
cugacaaccuggugaagau

SEQ ID NO: 2455953 - RNA, 19 nt, Artificial Sequence
  Description of Artificial Sequence: Synthetic oligonucleotide
  Antisense strand to SEQ ID NO: 2455952
aucuucaccagguugucag

SEQ ID NO: 2455954 - RNA, 19 nt, Artificial Sequence
  Description of Artificial Sequence: Synthetic oligonucleotide
  Sense strand starting at position 3349 of SEQ ID NO: 1887216
cuauacaauuucugggaga

SEQ ID NO: 2455955 - RNA, 19 nt, Artificial Sequence
  Description of Artificial Sequence: Synthetic oligonucleotide
  Antisense strand to SEQ ID NO: 2455954
ucucccagaaauuguauag

SEQ ID NO: 2455956 - RNA, 19 nt, Artificial Sequence
  Description of Artificial Sequence: Synthetic oligonucleotide
  Sense strand starting at position 45 of SEQ ID NO: 1887217
ugcgcuugugguguagaca

SEQ ID NO: 2455957 - RNA, 19 nt, Artificial Sequence
  Description of Artificial Sequence: Synthetic oligonucleotide
  Antisense strand to SEQ ID NO: 2455956
ugucuacaccacaagcgca

SEQ ID NO: 2455958 - RNA, 19 nt, Artificial Sequence
  Description of Artificial Sequence: Synthetic oligonucleotide
  Sense strand starting at position 56 of SEQ ID NO: 1887217
uguagacagugucuugaga

SEQ ID NO: 2455959 - RNA, 19 nt, Artificial Sequence
  Description of Artificial Sequence: Synthetic oligonucleotide
  Antisense strand to SEQ ID NO: 2455958
ucucaagacacugucuaca

SEQ ID NO: 2455960 - RNA, 19 nt, Artificial Sequence
  Description of Artificial Sequence: Synthetic oligonucleotide
  Sense strand starting at position 67 of SEQ ID NO: 1887217
ucuugagacuuccuguuau

SEQ ID NO: 2455961 - RNA, 19 nt, Artificial Sequence
  Description of Artificial Sequence: Synthetic oligonucleotide
  Antisense strand to SEQ ID NO: 2455960
auaacaggaagucucaaga

SEQ ID NO: 2455962 - RNA, 19 nt, Artificial Sequence
  Description of Artificial Sequence: Synthetic oligonucleotide
  Sense strand starting at position 104 of SEQ ID NO: 1887217
aggcacuauccuggaagga

SEQ ID NO: 2455963 - RNA, 19 nt, Artificial Sequence
  Description of Artificial Sequence: Synthetic oligonucleotide
  Antisense strand to SEQ ID NO: 2455962
uccuuccaggauagugccu

SEQ ID NO: 2455964 - RNA, 19 nt, Artificial Sequence
  Description of Artificial Sequence: Synthetic oligonucleotide
  Sense strand starting at position 214 of SEQ ID NO: 1887217
auauuuaucuuguaggaga

SEQ ID NO: 2455965 - RNA, 19 nt, Artificial Sequence
  Description of Artificial Sequence: Synthetic oligonucleotide
  Antisense strand to SEQ ID NO: 2455964
ucuccuacaagauaaauau

SEQ ID NO: 2455966 - RNA, 19 nt, Artificial Sequence
  Description of Artificial Sequence: Synthetic oligonucleotide
  Sense strand starting at position 250 of SEQ ID NO: 1887217
ggagcaaaguccuugagag

SEQ ID NO: 2455967 - RNA, 19 nt, Artificial Sequence
  Description of Artificial Sequence: Synthetic oligonucleotide
  Antisense strand to SEQ ID NO: 2455966
cucucaaggacuuugcucc

SEQ ID NO: 2455968 - RNA, 19 nt, Artificial Sequence
  Description of Artificial Sequence: Synthetic oligonucleotide
  Sense strand starting at position 442 of SEQ ID NO: 1887217
gggcaaguuacugaaucuu

SEQ ID NO: 2455969 - RNA, 19 nt, Artificial Sequence
  Description of Artificial Sequence: Synthetic oligonucleotide
  Antisense strand to SEQ ID NO: 2455968
aagauucaguaacuugccc

SEQ ID NO: 2455970 - RNA, 19 nt, Artificial Sequence
  Description of Artificial Sequence: Synthetic oligonucleotide
  Sense strand starting at position 598 of SEQ ID NO: 1887217
cggcuuuggccugagauga

SEQ ID NO: 2455971 - RNA, 19 nt, Artificial Sequence
  Description of Artificial Sequence: Synthetic oligonucleotide
  Antisense strand to SEQ ID NO: 2455970
ucaucucaggccaaagccg

SEQ ID NO: 2455972 - RNA, 19 nt, Artificial Sequence
  Description of Artificial Sequence: Synthetic oligonucleotide
  Sense strand starting at position 833 of SEQ ID NO: 1887217
augcuuuggcaccagauca

SEQ ID NO: 2455973 - RNA, 19 nt, Artificial Sequence
  Description of Artificial Sequence: Synthetic oligonucleotide
  Antisense strand to SEQ ID NO: 2455972
ugaucuggugccaaagcau

SEQ ID NO: 2455974 - RNA, 19 nt, Artificial Sequence
  Description of Artificial Sequence: Synthetic oligonucleotide
  Sense strand starting at position 874 of SEQ ID NO: 1887217
agcugugugauuugccaga

SEQ ID NO: 2455975 - RNA, 19 nt, Artificial Sequence
  Description of Artificial Sequence: Synthetic oligonucleotide
  Antisense strand to SEQ ID NO: 2455974
ucuggcaaaucacacagcu

SEQ ID NO: 2455976 - RNA, 19 nt, Artificial Sequence
  Description of Artificial Sequence: Synthetic oligonucleotide
  Sense strand starting at position 893 of SEQ ID NO: 1887217
ggccgacugacugaagauu

SEQ ID NO: 2455977 - RNA, 19 nt, Artificial Sequence
  Description of Artificial Sequence: Synthetic oligonucleotide
  Antisense strand to SEQ ID NO: 2455976
aaucuucagucagucggcc

SEQ ID NO: 2455978 - RNA, 19 nt, Artificial Sequence
  Description of Artificial Sequence: Synthetic oligonucleotide
  Sense strand starting at position 1008 of SEQ ID NO: 1887217
aguguauaauauccaaguu

SEQ ID NO: 2455979 - RNA, 19 nt, Artificial Sequence
  Description of Artificial Sequence: Synthetic oligonucleotide
  Antisense strand to SEQ ID NO: 2455978
aacuuggauauuauacacu

SEQ ID NO: 2455980 - RNA, 19 nt, Artificial Sequence
  Description of Artificial Sequence: Synthetic oligonucleotide
  Sense strand starting at position 1051 of SEQ ID NO: 1887217
gacuuugacuaagugacuu

SEQ ID NO: 2455981 - RNA, 19 nt, Artificial Sequence
  Description of Artificial Sequence: Synthetic oligonucleotide
  Antisense strand to SEQ ID NO: 2455980
aagucacuuagucaaaguc

SEQ ID NO: 2455982 - RNA, 19 nt, Artificial Sequence
  Description of Artificial Sequence: Synthetic oligonucleotide
  Sense strand starting at position 1112 of SEQ ID NO: 1887217
accucuuaagaugguggaa

SEQ ID NO: 2455983 - RNA, 19 nt, Artificial Sequence
  Description of Artificial Sequence: Synthetic oligonucleotide
  Antisense strand to SEQ ID NO: 2455982
uuccaccaucuuaagaggu

SEQ ID NO: 2455984 - RNA, 19 nt, Artificial Sequence
  Description of Artificial Sequence: Synthetic oligonucleotide
  Sense strand starting at position 1555 of SEQ ID NO: 1887217
uugcaucuuguugauggaa

SEQ ID NO: 2455985 - RNA, 19 nt, Artificial Sequence
  Description of Artificial Sequence: Synthetic oligonucleotide
  Antisense strand to SEQ ID NO: 2455984
uuccaucaacaagaugcaa

SEQ ID NO: 2455986 - RNA, 19 nt, Artificial Sequence
  Description of Artificial Sequence: Synthetic oligonucleotide
  Sense strand starting at position 1733 of SEQ ID NO: 1887217
ugaggaaguuaugcuggau

SEQ ID NO: 2455987 - RNA, 19 nt, Artificial Sequence
  Description of Artificial Sequence: Synthetic oligonucleotide
  Antisense strand to SEQ ID NO: 2455986
auccagcauaacuuccuca

SEQ ID NO: 2455988 - RNA, 19 nt, Artificial Sequence
  Description of Artificial Sequence: Synthetic oligonucleotide
  Sense strand starting at position 1736 of SEQ ID NO: 1887217
ggaaguuaugcuggauccu

SEQ ID NO: 2455989 - RNA, 19 nt, Artificial Sequence
  Description of Artificial Sequence: Synthetic oligonucleotide
  Antisense strand to SEQ ID NO: 2455988
aggauccagcauaacuucc

SEQ ID NO: 2455990 - RNA, 19 nt, Artificial Sequence
  Description of Artificial Sequence: Synthetic oligonucleotide
  Sense strand starting at position 1737 of SEQ ID NO: 1887217
gaaguuaugcuggauccua

SEQ ID NO: 2455991 - RNA, 19 nt, Artificial Sequence
  Description of Artificial Sequence: Synthetic oligonucleotide
  Antisense strand to SEQ ID NO: 2455990
uaggauccagcauaacuuc

SEQ ID NO: 2455992 - RNA, 19 nt, Artificial Sequence
  Description of Artificial Sequence: Synthetic oligonucleotide
  Sense strand starting at position 1799 of SEQ ID NO: 1887217
ggaguuaucugugcucaga

SEQ ID NO: 2455993 - RNA, 19 nt, Artificial Sequence
  Description of Artificial Sequence: Synthetic oligonucleotide
  Antisense strand to SEQ ID NO: 2455992
ucugagcacagauaacucc

SEQ ID NO: 2455994 - RNA, 19 nt, Artificial Sequence
  Description of Artificial Sequence: Synthetic oligonucleotide
  Sense strand starting at position 1802 of SEQ ID NO: 1887217
guuaucugugcucagaaca

SEQ ID NO: 2455995 - RNA, 19 nt, Artificial Sequence
  Description of Artificial Sequence: Synthetic oligonucleotide
  Antisense strand to SEQ ID NO: 2455994
uguucugagcacagauaac

SEQ ID NO: 2455996 - RNA, 19 nt, Artificial Sequence
  Description of Artificial Sequence: Synthetic oligonucleotide
  Sense strand starting at position 2044 of SEQ ID NO: 1887217
aguguuaaccauugaccca

SEQ ID NO: 2455997 - RNA, 19 nt, Artificial Sequence
  Description of Artificial Sequence: Synthetic oligonucleotide
  Antisense strand to SEQ ID NO: 2455996
ugggucaaugguuaacacu

SEQ ID NO: 2455998 - RNA, 19 nt, Artificial Sequence
  Description of Artificial Sequence: Synthetic oligonucleotide
  Sense strand starting at position 2214 of SEQ ID NO: 1887217
gcguuaacuccuucuguuc

SEQ ID NO: 2455999 - RNA, 19 nt, Artificial Sequence
  Description of Artificial Sequence: Synthetic oligonucleotide
  Antisense strand to SEQ ID NO: 2455998
gaacagaaggaguuaacgc

SEQ ID NO: 2456000 - RNA, 19 nt, Artificial Sequence
  Description of Artificial Sequence: Synthetic oligonucleotide
  Sense strand starting at position 2369 of SEQ ID NO: 1887217
agcugagcacuuuauguga

SEQ ID NO: 2456001 - RNA, 19 nt, Artificial Sequence
  Description of Artificial Sequence: Synthetic oligonucleotide
  Antisense strand to SEQ ID NO: 2456000
ucacauaaagugcucagcu

SEQ ID NO: 2456002 - RNA, 19 nt, Artificial Sequence
  Description of Artificial Sequence: Synthetic oligonucleotide
  Sense strand starting at position 2439 of SEQ ID NO: 1887217
ucagucuaagauugacagu

SEQ ID NO: 2456003 - RNA, 19 nt, Artificial Sequence
  Description of Artificial Sequence: Synthetic oligonucleotide
  Antisense strand to SEQ ID NO: 2456002
acugucaaucuuagacuga

SEQ ID NO: 2456004 - RNA, 19 nt, Artificial Sequence
  Description of Artificial Sequence: Synthetic oligonucleotide
  Sense strand starting at position 2530 of SEQ ID NO: 1887217
cuacaucuugugugacacu

SEQ ID NO: 2456005 - RNA, 19 nt, Artificial Sequence
  Description of Artificial Sequence: Synthetic oligonucleotide
  Antisense strand to SEQ ID NO: 2456004
agugucacacaagauguag

SEQ ID NO: 2456006 - RNA, 19 nt, Artificial Sequence
  Description of Artificial Sequence: Synthetic oligonucleotide
  Sense strand starting at position 2632 of SEQ ID NO: 1887217
cuuauauauguugagcuuu

SEQ ID NO: 2456007 - RNA, 19 nt, Artificial Sequence
  Description of Artificial Sequence: Synthetic oligonucleotide
  Antisense strand to SEQ ID NO: 2456006
aaagcucaacauauauaag

SEQ ID NO: 2456008 - RNA, 19 nt, Artificial Sequence
  Description of Artificial Sequence: Synthetic oligonucleotide
  Sense strand starting at position 2634 of SEQ ID NO: 1887217
uauauauguugagcuuuga

SEQ ID NO: 2456009 - RNA, 19 nt, Artificial Sequence
  Description of Artificial Sequence: Synthetic oligonucleotide
  Antisense strand to SEQ ID NO: 2456008
ucaaagcucaacauauaua

SEQ ID NO: 2456010 - RNA, 19 nt, Artificial Sequence
  Description of Artificial Sequence: Synthetic oligonucleotide
  Sense strand starting at position 2668 of SEQ ID NO: 1887217
cgaugaagguuaguuucuu

SEQ ID NO: 2456011 - RNA, 19 nt, Artificial Sequence
  Description of Artificial Sequence: Synthetic oligonucleotide
  Antisense strand to SEQ ID NO: 2456010
aagaaacuaaccuucaucg

SEQ ID NO: 2456012 - RNA, 19 nt, Artificial Sequence
  Description of Artificial Sequence: Synthetic oligonucleotide
  Sense strand starting at position 2669 of SEQ ID NO: 1887217
gaugaagguuaguuucuuu

SEQ ID NO: 2456013 - RNA, 19 nt, Artificial Sequence
  Description of Artificial Sequence: Synthetic oligonucleotide
  Antisense strand to SEQ ID NO: 2456012
aaagaaacuaaccuucauc

SEQ ID NO: 2456014 - RNA, 19 nt, Artificial Sequence
  Description of Artificial Sequence: Synthetic oligonucleotide
  Sense strand starting at position 2716 of SEQ ID NO: 1887217
agcaaagauugucucuuau

SEQ ID NO: 2456015 - RNA, 19 nt, Artificial Sequence
  Description of Artificial Sequence: Synthetic oligonucleotide
  Antisense strand to SEQ ID NO: 2456014
auaagagacaaucuuugcu

SEQ ID NO: 2456016 - RNA, 19 nt, Artificial Sequence
  Description of Artificial Sequence: Synthetic oligonucleotide
  Sense strand starting at position 2907 of SEQ ID NO: 1887217
ggugguaaagacugacauu

SEQ ID NO: 2456017 - RNA, 19 nt, Artificial Sequence
  Description of Artificial Sequence: Synthetic oligonucleotide
  Antisense strand to SEQ ID NO: 2456016
aaugucagucuuuaccacc

SEQ ID NO: 2456018 - RNA, 19 nt, Artificial Sequence
  Description of Artificial Sequence: Synthetic oligonucleotide
  Sense strand starting at position 2939 of SEQ ID NO: 1887217
guacaagucaguuacugua

SEQ ID NO: 2456019 - RNA, 19 nt, Artificial Sequence
  Description of Artificial Sequence: Synthetic oligonucleotide
  Antisense strand to SEQ ID NO: 2456018
uacaguaacugacuuguac

SEQ ID NO: 2456020 - RNA, 19 nt, Artificial Sequence
  Description of Artificial Sequence: Synthetic oligonucleotide
  Sense strand starting at position 2971 of SEQ ID NO: 1887217
guaacuacaccauggguua

SEQ ID NO: 2456021 - RNA, 19 nt, Artificial Sequence
  Description of Artificial Sequence: Synthetic oligonucleotide
  Antisense strand to SEQ ID NO: 2456020
uaacccaugguguaguuac

SEQ ID NO: 2456022 - RNA, 19 nt, Artificial Sequence
  Description of Artificial Sequence: Synthetic oligonucleotide
  Sense strand starting at position 3097 of SEQ ID NO: 1887217
gcagaagcucugggugaaa

SEQ ID NO: 2456023 - RNA, 19 nt, Artificial Sequence
  Description of Artificial Sequence: Synthetic oligonucleotide
  Antisense strand to SEQ ID NO: 2456022
uuucacccagagcuucugc

SEQ ID NO: 2456024 - RNA, 19 nt, Artificial Sequence
  Description of Artificial Sequence: Synthetic oligonucleotide
  Sense strand starting at position 3286 of SEQ ID NO: 1887217
caaguuguaguuuggaaga

SEQ ID NO: 2456025 - RNA, 19 nt, Artificial Sequence
  Description of Artificial Sequence: Synthetic oligonucleotide
  Antisense strand to SEQ ID NO: 2456024
ucuuccaaacuacaacuug

SEQ ID NO: 2456026 - RNA, 19 nt, Artificial Sequence
  Description of Artificial Sequence: Synthetic oligonucleotide
  Sense strand starting at position 3300 of SEQ ID NO: 1887217
gaagaaauugugggucuua

SEQ ID NO: 2456027 - RNA, 19 nt, Artificial Sequence
  Description of Artificial Sequence: Synthetic oligonucleotide
  Antisense strand to SEQ ID NO: 2456026
uaagacccacaauuucuuc

SEQ ID NO: 2456028 - RNA, 19 nt, Artificial Sequence
  Description of Artificial Sequence: Synthetic oligonucleotide
  Sense strand starting at position 3301 of SEQ ID NO: 1887217
aagaaauugugggucuuau

SEQ ID NO: 2456029 - RNA, 19 nt, Artificial Sequence
  Description of Artificial Sequence: Synthetic oligonucleotide
  Antisense strand to SEQ ID NO: 2456028
auaagacccacaauuucuu

SEQ ID NO: 2456030 - RNA, 19 nt, Artificial Sequence
  Description of Artificial Sequence: Synthetic oligonucleotide
  Sense strand starting at position 3395 of SEQ ID NO: 1887217
uguuucugagguuaucaga

SEQ ID NO: 2456031 - RNA, 19 nt, Artificial Sequence
  Description of Artificial Sequence: Synthetic oligonucleotide
  Antisense strand to SEQ ID NO: 2456030
ucugauaaccucagaaaca

SEQ ID NO: 2456032 - RNA, 19 nt, Artificial Sequence
  Description of Artificial Sequence: Synthetic oligonucleotide
  Sense strand starting at position 3405 of SEQ ID NO: 1887217
guuaucagaguaugaugau

SEQ ID NO: 2456033 - RNA, 19 nt, Artificial Sequence
  Description of Artificial Sequence: Synthetic oligonucleotide
  Antisense strand to SEQ ID NO: 2456032
aucaucauacucugauaac

SEQ ID NO: 2456034 - RNA, 19 nt, Artificial Sequence
  Description of Artificial Sequence: Synthetic oligonucleotide
  Sense strand starting at position 3914 of SEQ ID NO: 1887217
cuaucucaccuugguggaa

SEQ ID NO: 2456035 - RNA, 19 nt, Artificial Sequence
  Description of Artificial Sequence: Synthetic oligonucleotide
  Antisense strand to SEQ ID NO: 2456034
uuccaccaaggugagauag

SEQ ID NO: 2456036 - RNA, 19 nt, Artificial Sequence
  Description of Artificial Sequence: Synthetic oligonucleotide
  Sense strand starting at position 34 of SEQ ID NO: 1887218
acgagucugcaugagucuu

SEQ ID NO: 2456037 - RNA, 19 nt, Artificial Sequence
  Description of Artificial Sequence: Synthetic oligonucleotide
  Antisense strand to SEQ ID NO: 2456036
aagacucaugcagacucgu

SEQ ID NO: 2456038 - RNA, 19 nt, Artificial Sequence
  Description of Artificial Sequence: Synthetic oligonucleotide
  Sense strand starting at position 182 of SEQ ID NO: 1887218
gugggauuagcuuauccca

SEQ ID NO: 2456039 - RNA, 19 nt, Artificial Sequence
  Description of Artificial Sequence: Synthetic oligonucleotide
  Antisense strand to SEQ ID NO: 2456038
ugggauaagcuaaucccac

SEQ ID NO: 2456040 - RNA, 19 nt, Artificial Sequence
  Description of Artificial Sequence: Synthetic oligonucleotide
  Sense strand starting at position 248 of SEQ ID NO: 1887218
ccuugaagugauugcaagu

SEQ ID NO: 2456041 - RNA, 19 nt, Artificial Sequence
  Description of Artificial Sequence: Synthetic oligonucleotide
  Antisense strand to SEQ ID NO: 2456040
acuugcaaucacuucaagg

SEQ ID NO: 2456042 - RNA, 19 nt, Artificial Sequence
  Description of Artificial Sequence: Synthetic oligonucleotide
  Sense strand starting at position 273 of SEQ ID NO: 1887218
gcaugaaacugcucuuuau

SEQ ID NO: 2456043 - RNA, 19 nt, Artificial Sequence
  Description of Artificial Sequence: Synthetic oligonucleotide
  Antisense strand to SEQ ID NO: 2456042
auaaagagcaguuucaugc

SEQ ID NO: 2456044 - RNA, 19 nt, Artificial Sequence
  Description of Artificial Sequence: Synthetic oligonucleotide
  Sense strand starting at position 398 of SEQ ID NO: 1887218
gagccuuguccugaaaucc

SEQ ID NO: 2456045 - RNA, 19 nt, Artificial Sequence
  Description of Artificial Sequence: Synthetic oligonucleotide
  Antisense strand to SEQ ID NO: 2456044
ggauuucaggacaaggcuc

SEQ ID NO: 2456046 - RNA, 19 nt, Artificial Sequence
  Description of Artificial Sequence: Synthetic oligonucleotide
  Sense strand starting at position 406 of SEQ ID NO: 1887218
uccugaaauccuggagggu

SEQ ID NO: 2456047 - RNA, 19 nt, Artificial Sequence
  Description of Artificial Sequence: Synthetic oligonucleotide
  Antisense strand to SEQ ID NO: 2456046
acccuccaggauuucagga

SEQ ID NO: 2456048 - RNA, 19 nt, Artificial Sequence
  Description of Artificial Sequence: Synthetic oligonucleotide
  Sense strand starting at position 425 of SEQ ID NO: 1887218
gcuccuuggacaggacaaa

SEQ ID NO: 2456049 - RNA, 19 nt, Artificial Sequence
  Description of Artificial Sequence: Synthetic oligonucleotide
  Antisense strand to SEQ ID NO: 2456048
uuuguccuguccaaggagc

SEQ ID NO: 2456050 - RNA, 19 nt, Artificial Sequence
  Description of Artificial Sequence: Synthetic oligonucleotide
  Sense strand starting at position 482 of SEQ ID NO: 1887218
cagagucuuccagggcuga

SEQ ID NO: 2456051 - RNA, 19 nt, Artificial Sequence
  Description of Artificial Sequence: Synthetic oligonucleotide
  Antisense strand to SEQ ID NO: 2456050
ucagcccuggaagacucug

SEQ ID NO: 2456052 - RNA, 19 nt, Artificial Sequence
  Description of Artificial Sequence: Synthetic oligonucleotide
  Sense strand starting at position 549 of SEQ ID NO: 1887218
cugggaguuccuuacagcu

SEQ ID NO: 2456053 - RNA, 19 nt, Artificial Sequence
  Description of Artificial Sequence: Synthetic oligonucleotide
  Antisense strand to SEQ ID NO: 2456052
agcuguaaggaacucccag

SEQ ID NO: 2456054 - RNA, 19 nt, Artificial Sequence
  Description of Artificial Sequence: Synthetic oligonucleotide
  Sense strand starting at position 619 of SEQ ID NO: 1887218
ggauguacacuuuaauguu

SEQ ID NO: 2456055 - RNA, 19 nt, Artificial Sequence
  Description of Artificial Sequence: Synthetic oligonucleotide
  Antisense strand to SEQ ID NO: 2456054
aacauuaaaguguacaucc

SEQ ID NO: 2456056 - RNA, 19 nt, Artificial Sequence
  Description of Artificial Sequence: Synthetic oligonucleotide
  Sense strand starting at position 625 of SEQ ID NO: 1887218
acacuuuaauguuugagga

SEQ ID NO: 2456057 - RNA, 19 nt, Artificial Sequence
  Description of Artificial Sequence: Synthetic oligonucleotide
  Antisense strand to SEQ ID NO: 2456056
uccucaaacauuaaagugu

SEQ ID NO: 2456058 - RNA, 19 nt, Artificial Sequence
  Description of Artificial Sequence: Synthetic oligonucleotide
  Sense strand starting at position 626 of SEQ ID NO: 1887218
cacuuuaauguuugaggag

SEQ ID NO: 2456059 - RNA, 19 nt, Artificial Sequence
  Description of Artificial Sequence: Synthetic oligonucleotide
  Antisense strand to SEQ ID NO: 2456058
cuccucaaacauuaaagug

SEQ ID NO: 2456060 - RNA, 19 nt, Artificial Sequence
  Description of Artificial Sequence: Synthetic oligonucleotide
  Sense strand starting at position 649 of SEQ ID NO: 1887218
gagacucagccaggaugau

SEQ ID NO: 2456061 - RNA, 19 nt, Artificial Sequence
  Description of Artificial Sequence: Synthetic oligonucleotide
  Antisense strand to SEQ ID NO: 2456060
aucauccuggcugagucuc

SEQ ID NO: 2456062 - RNA, 19 nt, Artificial Sequence
  Description of Artificial Sequence: Synthetic oligonucleotide
  Sense strand starting at position 896 of SEQ ID NO: 1887218
acugaaaguuugcuguuua

SEQ ID NO: 2456063 - RNA, 19 nt, Artificial Sequence
  Description of Artificial Sequence: Synthetic oligonucleotide
  Antisense strand to SEQ ID NO: 2456062
uaaacagcaaacuuucagu

SEQ ID NO: 2456064 - RNA, 19 nt, Artificial Sequence
  Description of Artificial Sequence: Synthetic oligonucleotide
  Sense strand starting at position 908 of SEQ ID NO: 1887218
cuguuuaauuuagaguauc

SEQ ID NO: 2456065 - RNA, 19 nt, Artificial Sequence
  Description of Artificial Sequence: Synthetic oligonucleotide
  Antisense strand to SEQ ID NO: 2456064
gauacucuaaauuaaacag

SEQ ID NO: 2456066 - RNA, 19 nt, Artificial Sequence
  Description of Artificial Sequence: Synthetic oligonucleotide
  Sense strand starting at position 1148 of SEQ ID NO: 1887218
uggugaaucugaccucuca

SEQ ID NO: 2456067 - RNA, 19 nt, Artificial Sequence
  Description of Artificial Sequence: Synthetic oligonucleotide
  Antisense strand to SEQ ID NO: 2456066
ugagaggucagauucacca

SEQ ID NO: 2456068 - RNA, 19 nt, Artificial Sequence
  Description of Artificial Sequence: Synthetic oligonucleotide
  Sense strand starting at position 1309 of SEQ ID NO: 1887218
cccagaugcugagugacua

SEQ ID NO: 2456069 - RNA, 19 nt, Artificial Sequence
  Description of Artificial Sequence: Synthetic oligonucleotide
  Antisense strand to SEQ ID NO: 2456068
uagucacucagcaucuggg

SEQ ID NO: 2456070 - RNA, 19 nt, Artificial Sequence
  Description of Artificial Sequence: Synthetic oligonucleotide
  Sense strand starting at position 1426 of SEQ ID NO: 1887218
aguauucugaaccgcagaa

SEQ ID NO: 2456071 - RNA, 19 nt, Artificial Sequence
  Description of Artificial Sequence: Synthetic oligonucleotide
  Antisense strand to SEQ ID NO: 2456070
uucugcgguucagaauacu

SEQ ID NO: 2456072 - RNA, 19 nt, Artificial Sequence
  Description of Artificial Sequence: Synthetic oligonucleotide
  Sense strand starting at position 1430 of SEQ ID NO: 1887218
uucugaaccgcagaaagua

SEQ ID NO: 2456073 - RNA, 19 nt, Artificial Sequence
  Description of Artificial Sequence: Synthetic oligonucleotide
  Antisense strand to SEQ ID NO: 2456072
uacuuucugcgguucagaa

SEQ ID NO: 2456074 - RNA, 19 nt, Artificial Sequence
  Description of Artificial Sequence: Synthetic oligonucleotide
  Sense strand starting at position 1808 of SEQ ID NO: 1887218
auccuaggcccguaguaaa

SEQ ID NO: 2456075 - RNA, 19 nt, Artificial Sequence
  Description of Artificial Sequence: Synthetic oligonucleotide
  Antisense strand to SEQ ID NO: 2456074
uuuacuacgggccuaggau

SEQ ID NO: 2456076 - RNA, 19 nt, Artificial Sequence
  Description of Artificial Sequence: Synthetic oligonucleotide
  Sense strand starting at position 1892 of SEQ ID NO: 1887218
acaguucccugucuugaaa

SEQ ID NO: 2456077 - RNA, 19 nt, Artificial Sequence
  Description of Artificial Sequence: Synthetic oligonucleotide
  Antisense strand to SEQ ID NO: 2456076
uuucaagacagggaacugu

SEQ ID NO: 2456078 - RNA, 19 nt, Artificial Sequence
  Description of Artificial Sequence: Synthetic oligonucleotide
  Sense strand starting at position 1980 of SEQ ID NO: 1887218
cucuuaggcccugagugaa

SEQ ID NO: 2456079 - RNA, 19 nt, Artificial Sequence
  Description of Artificial Sequence: Synthetic oligonucleotide
  Antisense strand to SEQ ID NO: 2456078
uucacucagggccuaagag

SEQ ID NO: 2456080 - RNA, 19 nt, Artificial Sequence
  Description of Artificial Sequence: Synthetic oligonucleotide
  Sense strand starting at position 2056 of SEQ ID NO: 1887218
aggguuuguauuuggucua

SEQ ID NO: 2456081 - RNA, 19 nt, Artificial Sequence
  Description of Artificial Sequence: Synthetic oligonucleotide
  Antisense strand to SEQ ID NO: 2456080
uagaccaaauacaaacccu

SEQ ID NO: 2456082 - RNA, 19 nt, Artificial Sequence
  Description of Artificial Sequence: Synthetic oligonucleotide
  Sense strand starting at position 2059 of SEQ ID NO: 1887218
guuuguauuuggucuacag

SEQ ID NO: 2456083 - RNA, 19 nt, Artificial Sequence
  Description of Artificial Sequence: Synthetic oligonucleotide
  Antisense strand to SEQ ID NO: 2456082
cuguagaccaaauacaaac

SEQ ID NO: 2456084 - RNA, 19 nt, Artificial Sequence
  Description of Artificial Sequence: Synthetic oligonucleotide
  Sense strand starting at position 2099 of SEQ ID NO: 1887218
ggacuuaggccucauuauc

SEQ ID NO: 2456085 - RNA, 19 nt, Artificial Sequence
  Description of Artificial Sequence: Synthetic oligonucleotide
  Antisense strand to SEQ ID NO: 2456084
gauaaugaggccuaagucc

SEQ ID NO: 2456086 - RNA, 19 nt, Artificial Sequence
  Description of Artificial Sequence: Synthetic oligonucleotide
  Sense strand starting at position 2152 of SEQ ID NO: 1887218
uggaaacccuuaguaggua

SEQ ID NO: 2456087 - RNA, 19 nt, Artificial Sequence
  Description of Artificial Sequence: Synthetic oligonucleotide
  Antisense strand to SEQ ID NO: 2456086
uaccuacuaaggguuucca

SEQ ID NO: 2456088 - RNA, 19 nt, Artificial Sequence
  Description of Artificial Sequence: Synthetic oligonucleotide
  Sense strand starting at position 2188 of SEQ ID NO: 1887218
gcgggaaaucagugauggu

SEQ ID NO: 2456089 - RNA, 19 nt, Artificial Sequence
  Description of Artificial Sequence: Synthetic oligonucleotide
  Antisense strand to SEQ ID NO: 2456088
accaucacugauuucccgc

SEQ ID NO: 2456090 - RNA, 19 nt, Artificial Sequence
  Description of Artificial Sequence: Synthetic oligonucleotide
  Sense strand starting at position 2189 of SEQ ID NO: 1887218
cgggaaaucagugauggua

SEQ ID NO: 2456091 - RNA, 19 nt, Artificial Sequence
  Description of Artificial Sequence: Synthetic oligonucleotide
  Antisense strand to SEQ ID NO: 2456090
uaccaucacugauuucccg

SEQ ID NO: 2456092 - RNA, 19 nt, Artificial Sequence
  Description of Artificial Sequence: Synthetic oligonucleotide
  Sense strand starting at position 3023 of SEQ ID NO: 1887218
gaggcuggaguuuggaaua

SEQ ID NO: 2456093 - RNA, 19 nt, Artificial Sequence
  Description of Artificial Sequence: Synthetic oligonucleotide
  Antisense strand to SEQ ID NO: 2456092
uauuccaaacuccagccuc

SEQ ID NO: 2456094 - RNA, 19 nt, Artificial Sequence
  Description of Artificial Sequence: Synthetic oligonucleotide
  Sense strand starting at position 3067 of SEQ ID NO: 1887218
uuugcaugucugugaaaug

SEQ ID NO: 2456095 - RNA, 19 nt, Artificial Sequence
  Description of Artificial Sequence: Synthetic oligonucleotide
  Antisense strand to SEQ ID NO: 2456094
cauuucacagacaugcaaa

SEQ ID NO: 2456096 - RNA, 19 nt, Artificial Sequence
  Description of Artificial Sequence: Synthetic oligonucleotide
  Sense strand starting at position 3077 of SEQ ID NO: 1887218
ugugaaaugacaggugaug

SEQ ID NO: 2456097 - RNA, 19 nt, Artificial Sequence
  Description of Artificial Sequence: Synthetic oligonucleotide
  Antisense strand to SEQ ID NO: 2456096
caucaccugucauuucaca

SEQ ID NO: 2456098 - RNA, 19 nt, Artificial Sequence
  Description of Artificial Sequence: Synthetic oligonucleotide
  Sense strand starting at position 3110 of SEQ ID NO: 1887218
ggcaguuugagagaaguaa

SEQ ID NO: 2456099 - RNA, 19 nt, Artificial Sequence
  Description of Artificial Sequence: Synthetic oligonucleotide
  Antisense strand to SEQ ID NO: 2456098
uuacuucucucaaacugcc

SEQ ID NO: 2456100 - RNA, 19 nt, Artificial Sequence
  Description of Artificial Sequence: Synthetic oligonucleotide
  Sense strand starting at position 3208 of SEQ ID NO: 1887218
cagucugagccuuaucaag

SEQ ID NO: 2456101 - RNA, 19 nt, Artificial Sequence
  Description of Artificial Sequence: Synthetic oligonucleotide
  Antisense strand to SEQ ID NO: 2456100
cuugauaaggcucagacug

SEQ ID NO: 2456102 - RNA, 19 nt, Artificial Sequence
  Description of Artificial Sequence: Synthetic oligonucleotide
  Sense strand starting at position 3210 of SEQ ID NO: 1887218
gucugagccuuaucaagac

SEQ ID NO: 2456103 - RNA, 19 nt, Artificial Sequence
  Description of Artificial Sequence: Synthetic oligonucleotide
  Antisense strand to SEQ ID NO: 2456102
gucuugauaaggcucagac

SEQ ID NO: 2456104 - RNA, 19 nt, Artificial Sequence
  Description of Artificial Sequence: Synthetic oligonucleotide
  Sense strand starting at position 3411 of SEQ ID NO: 1887218
agagucagcgcugucuuua

SEQ ID NO: 2456105 - RNA, 19 nt, Artificial Sequence
  Description of Artificial Sequence: Synthetic oligonucleotide
  Antisense strand to SEQ ID NO: 2456104
uaaagacagcgcugacucu

SEQ ID NO: 2456106 - RNA, 19 nt, Artificial Sequence
  Description of Artificial Sequence: Synthetic oligonucleotide
  Sense strand starting at position 3412 of SEQ ID NO: 1887218
gagucagcgcugucuuuaa

SEQ ID NO: 2456107 - RNA, 19 nt, Artificial Sequence
  Description of Artificial Sequence: Synthetic oligonucleotide
  Antisense strand to SEQ ID NO: 2456106
uuaaagacagcgcugacuc

SEQ ID NO: 2456108 - RNA, 19 nt, Artificial Sequence
  Description of Artificial Sequence: Synthetic oligonucleotide
  Sense strand starting at position 3423 of SEQ ID NO: 1887218
gucuuuaaucuguauucca

SEQ ID NO: 2456109 - RNA, 19 nt, Artificial Sequence
  Description of Artificial Sequence: Synthetic oligonucleotide
  Antisense strand to SEQ ID NO: 2456108
uggaauacagauuaaagac

SEQ ID NO: 2456110 - RNA, 19 nt, Artificial Sequence
  Description of Artificial Sequence: Synthetic oligonucleotide
  Sense strand starting at position 3430 of SEQ ID NO: 1887218
aucuguauuccacaggcau

SEQ ID NO: 2456111 - RNA, 19 nt, Artificial Sequence
  Description of Artificial Sequence: Synthetic oligonucleotide
  Antisense strand to SEQ ID NO: 2456110
augccuguggaauacagau

SEQ ID NO: 2456112 - RNA, 19 nt, Artificial Sequence
  Description of Artificial Sequence: Synthetic oligonucleotide
  Sense strand starting at position 3563 of SEQ ID NO: 1887218
gccugucuccuccagacua

SEQ ID NO: 2456113 - RNA, 19 nt, Artificial Sequence
  Description of Artificial Sequence: Synthetic oligonucleotide
  Antisense strand to SEQ ID NO: 2456112
uagucuggaggagacaggc

SEQ ID NO: 2456114 - RNA, 19 nt, Artificial Sequence
  Description of Artificial Sequence: Synthetic oligonucleotide
  Sense strand starting at position 3615 of SEQ ID NO: 1887218
ccaaauaggcgguauucuu

SEQ ID NO: 2456115 - RNA, 19 nt, Artificial Sequence
  Description of Artificial Sequence: Synthetic oligonucleotide
  Antisense strand to SEQ ID NO: 2456114
aagaauaccgccuauuugg

SEQ ID NO: 2456116 - RNA, 19 nt, Artificial Sequence
  Description of Artificial Sequence: Synthetic oligonucleotide
  Sense strand starting at position 1991 of SEQ ID NO: 1887219
caaggagugccugacacuu

SEQ ID NO: 2456117 - RNA, 19 nt, Artificial Sequence
  Description of Artificial Sequence: Synthetic oligonucleotide
  Antisense strand to SEQ ID NO: 2456116
aagugucaggcacuccuug

SEQ ID NO: 2456118 - RNA, 19 nt, Artificial Sequence
  Description of Artificial Sequence: Synthetic oligonucleotide
  Sense strand starting at position 2003 of SEQ ID NO: 1887219
gacacuuggugcccaauau

SEQ ID NO: 2456119 - RNA, 19 nt, Artificial Sequence
  Description of Artificial Sequence: Synthetic oligonucleotide
  Antisense strand to SEQ ID NO: 2456118
auauugggcaccaaguguc

SEQ ID NO: 2456120 - RNA, 19 nt, Artificial Sequence
  Description of Artificial Sequence: Synthetic oligonucleotide
  Sense strand starting at position 2004 of SEQ ID NO: 1887219
acacuuggugcccaauaua

SEQ ID NO: 2456121 - RNA, 19 nt, Artificial Sequence
  Description of Artificial Sequence: Synthetic oligonucleotide
  Antisense strand to SEQ ID NO: 2456120
uauauugggcaccaagugu

SEQ ID NO: 2456122 - RNA, 19 nt, Artificial Sequence
  Description of Artificial Sequence: Synthetic oligonucleotide
  Sense strand starting at position 2154 of SEQ ID NO: 1887219
cuagguuuggcaggaggaa

SEQ ID NO: 2456123 - RNA, 19 nt, Artificial Sequence
  Description of Artificial Sequence: Synthetic oligonucleotide
  Antisense strand to SEQ ID NO: 2456122
uuccuccugccaaaccuag

SEQ ID NO: 2456124 - RNA, 19 nt, Artificial Sequence
  Description of Artificial Sequence: Synthetic oligonucleotide
  Sense strand starting at position 2191 of SEQ ID NO: 1887219
ggcuacugaugaucccaua

SEQ ID NO: 2456125 - RNA, 19 nt, Artificial Sequence
  Description of Artificial Sequence: Synthetic oligonucleotide
  Antisense strand to SEQ ID NO: 2456124
uaugggaucaucaguagcc

SEQ ID NO: 2456126 - RNA, 19 nt, Artificial Sequence
  Description of Artificial Sequence: Synthetic oligonucleotide
  Sense strand starting at position 2440 of SEQ ID NO: 1887219
ggccuuaagagggagugua

SEQ ID NO: 2456127 - RNA, 19 nt, Artificial Sequence
  Description of Artificial Sequence: Synthetic oligonucleotide
  Antisense strand to SEQ ID NO: 2456126
uacacucccucuuaaggcc

SEQ ID NO: 2456128 - RNA, 19 nt, Artificial Sequence
  Description of Artificial Sequence: Synthetic oligonucleotide
  Sense strand starting at position 2601 of SEQ ID NO: 1887219
ugggaagcauuccuuuaug

SEQ ID NO: 2456129 - RNA, 19 nt, Artificial Sequence
  Description of Artificial Sequence: Synthetic oligonucleotide
  Antisense strand to SEQ ID NO: 2456128
cauaaaggaaugcuuccca

SEQ ID NO: 2456130 - RNA, 19 nt, Artificial Sequence
  Description of Artificial Sequence: Synthetic oligonucleotide
  Sense strand starting at position 2680 of SEQ ID NO: 1887219
ccacuuggucccgaagcuu

SEQ ID NO: 2456131 - RNA, 19 nt, Artificial Sequence
  Description of Artificial Sequence: Synthetic oligonucleotide
  Antisense strand to SEQ ID NO: 2456130
aagcuucgggaccaagugg

SEQ ID NO: 2456132 - RNA, 19 nt, Artificial Sequence
  Description of Artificial Sequence: Synthetic oligonucleotide
  Sense strand starting at position 2700 of SEQ ID NO: 1887219
ccuguuuccuccucgcaga

SEQ ID NO: 2456133 - RNA, 19 nt, Artificial Sequence
  Description of Artificial Sequence: Synthetic oligonucleotide
  Antisense strand to SEQ ID NO: 2456132
ucugcgaggaggaaacagg

SEQ ID NO: 2456134 - RNA, 19 nt, Artificial Sequence
  Description of Artificial Sequence: Synthetic oligonucleotide
  Sense strand starting at position 2767 of SEQ ID NO: 1887219
cggcguguuugagacugau

SEQ ID NO: 2456135 - RNA, 19 nt, Artificial Sequence
  Description of Artificial Sequence: Synthetic oligonucleotide
  Antisense strand to SEQ ID NO: 2456134
aucagucucaaacacgccg

SEQ ID NO: 2456136 - RNA, 19 nt, Artificial Sequence
  Description of Artificial Sequence: Synthetic oligonucleotide
  Sense strand starting at position 2770 of SEQ ID NO: 1887219
cguguuugagacugauaag

SEQ ID NO: 2456137 - RNA, 19 nt, Artificial Sequence
  Description of Artificial Sequence: Synthetic oligonucleotide
  Antisense strand to SEQ ID NO: 2456136
cuuaucagucucaaacacg

SEQ ID NO: 2456138 - RNA, 19 nt, Artificial Sequence
  Description of Artificial Sequence: Synthetic oligonucleotide
  Sense strand starting at position 2771 of SEQ ID NO: 1887219
guguuugagacugauaagc

SEQ ID NO: 2456139 - RNA, 19 nt, Artificial Sequence
  Description of Artificial Sequence: Synthetic oligonucleotide
  Antisense strand to SEQ ID NO: 2456138
gcuuaucagucucaaacac

SEQ ID NO: 2456140 - RNA, 19 nt, Artificial Sequence
  Description of Artificial Sequence: Synthetic oligonucleotide
  Sense strand starting at position 2773 of SEQ ID NO: 1887219
guuugagacugauaagcga

SEQ ID NO: 2456141 - RNA, 19 nt, Artificial Sequence
  Description of Artificial Sequence: Synthetic oligonucleotide
  Antisense strand to SEQ ID NO: 2456140
ucgcuuaucagucucaaac

SEQ ID NO: 2456142 - RNA, 19 nt, Artificial Sequence
  Description of Artificial Sequence: Synthetic oligonucleotide
  Sense strand starting at position 2878 of SEQ ID NO: 1887219
ugggcauuaucucguuuga

SEQ ID NO: 2456143 - RNA, 19 nt, Artificial Sequence
  Description of Artificial Sequence: Synthetic oligonucleotide
  Antisense strand to SEQ ID NO: 2456142
ucaaacgagauaaugccca

SEQ ID NO: 2456144 - RNA, 19 nt, Artificial Sequence
  Description of Artificial Sequence: Synthetic oligonucleotide
  Sense strand starting at position 2880 of SEQ ID NO: 1887219
ggcauuaucucguuugagg

SEQ ID NO: 2456145 - RNA, 19 nt, Artificial Sequence
  Description of Artificial Sequence: Synthetic oligonucleotide
  Antisense strand to SEQ ID NO: 2456144
ccucaaacgagauaaugcc

SEQ ID NO: 2456146 - RNA, 19 nt, Artificial Sequence
  Description of Artificial Sequence: Synthetic oligonucleotide
  Sense strand starting at position 2920 of SEQ ID NO: 1887219
cugacacuugugggagauu

SEQ ID NO: 2456147 - RNA, 19 nt, Artificial Sequence
  Description of Artificial Sequence: Synthetic oligonucleotide
  Antisense strand to SEQ ID NO: 2456146
aaucucccacaagugucag

SEQ ID NO: 2456148 - RNA, 19 nt, Artificial Sequence
  Description of Artificial Sequence: Synthetic oligonucleotide
  Sense strand starting at position 2921 of SEQ ID NO: 1887219
ugacacuugugggagauuu

SEQ ID NO: 2456149 - RNA, 19 nt, Artificial Sequence
  Description of Artificial Sequence: Synthetic oligonucleotide
  Antisense strand to SEQ ID NO: 2456148
aaaucucccacaaguguca

SEQ ID NO: 2456150 - RNA, 19 nt, Artificial Sequence
  Description of Artificial Sequence: Synthetic oligonucleotide
  Sense strand starting at position 3034 of SEQ ID NO: 1887219
aguagaaaguggugcuuga

SEQ ID NO: 2456151 - RNA, 19 nt, Artificial Sequence
  Description of Artificial Sequence: Synthetic oligonucleotide
  Antisense strand to SEQ ID NO: 2456150
ucaagcaccacuuucuacu

SEQ ID NO: 2456152 - RNA, 19 nt, Artificial Sequence
  Description of Artificial Sequence: Synthetic oligonucleotide
  Sense strand starting at position 3103 of SEQ ID NO: 1887219
uucugcugcugguguuaga

SEQ ID NO: 2456153 - RNA, 19 nt, Artificial Sequence
  Description of Artificial Sequence: Synthetic oligonucleotide
  Antisense strand to SEQ ID NO: 2456152
ucuaacaccagcagcagaa

SEQ ID NO: 2456154 - RNA, 19 nt, Artificial Sequence
  Description of Artificial Sequence: Synthetic oligonucleotide
  Sense strand starting at position 3210 of SEQ ID NO: 1887219
ccacucguguccuguggau

SEQ ID NO: 2456155 - RNA, 19 nt, Artificial Sequence
  Description of Artificial Sequence: Synthetic oligonucleotide
  Antisense strand to SEQ ID NO: 2456154
auccacaggacacgagugg

SEQ ID NO: 2456156 - RNA, 19 nt, Artificial Sequence
  Description of Artificial Sequence: Synthetic oligonucleotide
  Sense strand starting at position 3259 of SEQ ID NO: 1887219
gggcgucuugugagugaca

SEQ ID NO: 2456157 - RNA, 19 nt, Artificial Sequence
  Description of Artificial Sequence: Synthetic oligonucleotide
  Antisense strand to SEQ ID NO: 2456156
ugucacucacaagacgccc

SEQ ID NO: 2456158 - RNA, 19 nt, Artificial Sequence
  Description of Artificial Sequence: Synthetic oligonucleotide
  Sense strand starting at position 3434 of SEQ ID NO: 1887219
guccuugguuuccacauuu

SEQ ID NO: 2456159 - RNA, 19 nt, Artificial Sequence
  Description of Artificial Sequence: Synthetic oligonucleotide
  Antisense strand to SEQ ID NO: 2456158
aaauguggaaaccaaggac

SEQ ID NO: 2456160 - RNA, 19 nt, Artificial Sequence
  Description of Artificial Sequence: Synthetic oligonucleotide
  Sense strand starting at position 3489 of SEQ ID NO: 1887219
gcuuguuugcuuugaggaa

SEQ ID NO: 2456161 - RNA, 19 nt, Artificial Sequence
  Description of Artificial Sequence: Synthetic oligonucleotide
  Antisense strand to SEQ ID NO: 2456160
uuccucaaagcaaacaagc

SEQ ID NO: 2456162 - RNA, 19 nt, Artificial Sequence
  Description of Artificial Sequence: Synthetic oligonucleotide
  Sense strand starting at position 3490 of SEQ ID NO: 1887219
cuuguuugcuuugaggaaa

SEQ ID NO: 2456163 - RNA, 19 nt, Artificial Sequence
  Description of Artificial Sequence: Synthetic oligonucleotide
  Antisense strand to SEQ ID NO: 2456162
uuuccucaaagcaaacaag

SEQ ID NO: 2456164 - RNA, 19 nt, Artificial Sequence
  Description of Artificial Sequence: Synthetic oligonucleotide
  Sense strand starting at position 3525 of SEQ ID NO: 1887219
ggcuuuaacgcuggcuuga

SEQ ID NO: 2456165 - RNA, 19 nt, Artificial Sequence
  Description of Artificial Sequence: Synthetic oligonucleotide
  Antisense strand to SEQ ID NO: 2456164
ucaagccagcguuaaagcc

SEQ ID NO: 2456166 - RNA, 19 nt, Artificial Sequence
  Description of Artificial Sequence: Synthetic oligonucleotide
  Sense strand starting at position 3595 of SEQ ID NO: 1887219
gagggcugcucucaguguu

SEQ ID NO: 2456167 - RNA, 19 nt, Artificial Sequence
  Description of Artificial Sequence: Synthetic oligonucleotide
  Antisense strand to SEQ ID NO: 2456166
aacacugagagcagcccuc

SEQ ID NO: 2456168 - RNA, 19 nt, Artificial Sequence
  Description of Artificial Sequence: Synthetic oligonucleotide
  Sense strand starting at position 3723 of SEQ ID NO: 1887219
gccucacuucugugaccuu

SEQ ID NO: 2456169 - RNA, 19 nt, Artificial Sequence
  Description of Artificial Sequence: Synthetic oligonucleotide
  Antisense strand to SEQ ID NO: 2456168
aaggucacagaagugaggc

SEQ ID NO: 2456170 - RNA, 19 nt, Artificial Sequence
  Description of Artificial Sequence: Synthetic oligonucleotide
  Sense strand starting at position 3748 of SEQ ID NO: 1887219
accugagccugaguugaaa

SEQ ID NO: 2456171 - RNA, 19 nt, Artificial Sequence
  Description of Artificial Sequence: Synthetic oligonucleotide
  Antisense strand to SEQ ID NO: 2456170
uuucaacucaggcucaggu

SEQ ID NO: 2456172 - RNA, 19 nt, Artificial Sequence
  Description of Artificial Sequence: Synthetic oligonucleotide
  Sense strand starting at position 3750 of SEQ ID NO: 1887219
cugagccugaguugaaagu

SEQ ID NO: 2456173 - RNA, 19 nt, Artificial Sequence
  Description of Artificial Sequence: Synthetic oligonucleotide
  Antisense strand to SEQ ID NO: 2456172
acuuucaacucaggcucag

SEQ ID NO: 2456174 - RNA, 19 nt, Artificial Sequence
  Description of Artificial Sequence: Synthetic oligonucleotide
  Sense strand starting at position 3763 of SEQ ID NO: 1887219
gaaagucaguccuccaggu

SEQ ID NO: 2456175 - RNA, 19 nt, Artificial Sequence
  Description of Artificial Sequence: Synthetic oligonucleotide
  Antisense strand to SEQ ID NO: 2456174
accuggaggacugacuuuc

SEQ ID NO: 2456176 - RNA, 19 nt, Artificial Sequence
  Description of Artificial Sequence: Synthetic oligonucleotide
  Sense strand starting at position 158 of SEQ ID NO: 1887220
cuuguauaacuuugggcaa

SEQ ID NO: 2456177 - RNA, 19 nt, Artificial Sequence
  Description of Artificial Sequence: Synthetic oligonucleotide
  Antisense strand to SEQ ID NO: 2456176
uugcccaaaguuauacaag

SEQ ID NO: 2456178 - RNA, 19 nt, Artificial Sequence
  Description of Artificial Sequence: Synthetic oligonucleotide
  Sense strand starting at position 199 of SEQ ID NO: 1887220
uuacuuacucagcagcaga

SEQ ID NO: 2456179 - RNA, 19 nt, Artificial Sequence
  Description of Artificial Sequence: Synthetic oligonucleotide
  Antisense strand to SEQ ID NO: 2456178
ucugcugcugaguaaguaa

SEQ ID NO: 2456180 - RNA, 19 nt, Artificial Sequence
  Description of Artificial Sequence: Synthetic oligonucleotide
  Sense strand starting at position 557 of SEQ ID NO: 1887220
uuaugagagugcuuggcaa

SEQ ID NO: 2456181 - RNA, 19 nt, Artificial Sequence
  Description of Artificial Sequence: Synthetic oligonucleotide
  Antisense strand to SEQ ID NO: 2456180
uugccaagcacucucauaa

SEQ ID NO: 2456182 - RNA, 19 nt, Artificial Sequence
  Description of Artificial Sequence: Synthetic oligonucleotide
  Sense strand starting at position 605 of SEQ ID NO: 1887220
uuccauuaucugggcaauc

SEQ ID NO: 2456183 - RNA, 19 nt, Artificial Sequence
  Description of Artificial Sequence: Synthetic oligonucleotide
  Antisense strand to SEQ ID NO: 2456182
gauugcccagauaauggaa

SEQ ID NO: 2456184 - RNA, 19 nt, Artificial Sequence
  Description of Artificial Sequence: Synthetic oligonucleotide
  Sense strand starting at position 607 of SEQ ID NO: 1887220
ccauuaucugggcaaucgu

SEQ ID NO: 2456185 - RNA, 19 nt, Artificial Sequence
  Description of Artificial Sequence: Synthetic oligonucleotide
  Antisense strand to SEQ ID NO: 2456184
acgauugcccagauaaugg

SEQ ID NO: 2456186 - RNA, 19 nt, Artificial Sequence
  Description of Artificial Sequence: Synthetic oligonucleotide
  Sense strand starting at position 878 of SEQ ID NO: 1887220
ccagauuuguauuaaacag

SEQ ID NO: 2456187 - RNA, 19 nt, Artificial Sequence
  Description of Artificial Sequence: Synthetic oligonucleotide
  Antisense strand to SEQ ID NO: 2456186
cuguuuaauacaaaucugg

SEQ ID NO: 2456188 - RNA, 19 nt, Artificial Sequence
  Description of Artificial Sequence: Synthetic oligonucleotide
  Sense strand starting at position 1098 of SEQ ID NO: 1887220
gggcaaagacgcuacucau

SEQ ID NO: 2456189 - RNA, 19 nt, Artificial Sequence
  Description of Artificial Sequence: Synthetic oligonucleotide
  Antisense strand to SEQ ID NO: 2456188
augaguagcgucuuugccc

SEQ ID NO: 2456190 - RNA, 19 nt, Artificial Sequence
  Description of Artificial Sequence: Synthetic oligonucleotide
  Sense strand starting at position 1174 of SEQ ID NO: 1887220
cuuguaugucaacacguau

SEQ ID NO: 2456191 - RNA, 19 nt, Artificial Sequence
  Description of Artificial Sequence: Synthetic oligonucleotide
  Antisense strand to SEQ ID NO: 2456190
auacguguugacauacaag

SEQ ID NO: 2456192 - RNA, 19 nt, Artificial Sequence
  Description of Artificial Sequence: Synthetic oligonucleotide
  Sense strand starting at position 1181 of SEQ ID NO: 1887220
gucaacacguauucucaua

SEQ ID NO: 2456193 - RNA, 19 nt, Artificial Sequence
  Description of Artificial Sequence: Synthetic oligonucleotide
  Antisense strand to SEQ ID NO: 2456192
uaugagaauacguguugac

SEQ ID NO: 2456194 - RNA, 19 nt, Artificial Sequence
  Description of Artificial Sequence: Synthetic oligonucleotide
  Sense strand starting at position 1249 of SEQ ID NO: 1887220
ugugcuuucucauuucuag

SEQ ID NO: 2456195 - RNA, 19 nt, Artificial Sequence
  Description of Artificial Sequence: Synthetic oligonucleotide
  Antisense strand to SEQ ID NO: 2456194
cuagaaaugagaaagcaca

SEQ ID NO: 2456196 - RNA, 19 nt, Artificial Sequence
  Description of Artificial Sequence: Synthetic oligonucleotide
  Sense strand starting at position 1252 of SEQ ID NO: 1887220
gcuuucucauuucuaguga

SEQ ID NO: 2456197 - RNA, 19 nt, Artificial Sequence
  Description of Artificial Sequence: Synthetic oligonucleotide
  Antisense strand to SEQ ID NO: 2456196
ucacuagaaaugagaaagc

SEQ ID NO: 2456198 - RNA, 19 nt, Artificial Sequence
  Description of Artificial Sequence: Synthetic oligonucleotide
  Sense strand starting at position 1305 of SEQ ID NO: 1887220
uguuaagggcuccaucuau

SEQ ID NO: 2456199 - RNA, 19 nt, Artificial Sequence
  Description of Artificial Sequence: Synthetic oligonucleotide
  Antisense strand to SEQ ID NO: 2456198
auagauggagcccuuaaca

SEQ ID NO: 2456200 - RNA, 19 nt, Artificial Sequence
  Description of Artificial Sequence: Synthetic oligonucleotide
  Sense strand starting at position 1424 of SEQ ID NO: 1887220
uacggcuuuccagaaguuu

SEQ ID NO: 2456201 - RNA, 19 nt, Artificial Sequence
  Description of Artificial Sequence: Synthetic oligonucleotide
  Antisense strand to SEQ ID NO: 2456200
aaacuucuggaaagccgua

SEQ ID NO: 2456202 - RNA, 19 nt, Artificial Sequence
  Description of Artificial Sequence: Synthetic oligonucleotide
  Sense strand starting at position 1541 of SEQ ID NO: 1887220
acuccugaugcugaauuaa

SEQ ID NO: 2456203 - RNA, 19 nt, Artificial Sequence
  Description of Artificial Sequence: Synthetic oligonucleotide
  Antisense strand to SEQ ID NO: 2456202
uuaauucagcaucaggagu

SEQ ID NO: 2456204 - RNA, 19 nt, Artificial Sequence
  Description of Artificial Sequence: Synthetic oligonucleotide
  Sense strand starting at position 1811 of SEQ ID NO: 1887220
cgagauuaucgucaccacu

SEQ ID NO: 2456205 - RNA, 19 nt, Artificial Sequence
  Description of Artificial Sequence: Synthetic oligonucleotide
  Antisense strand to SEQ ID NO: 2456204
aguggugacgauaaucucg

SEQ ID NO: 2456206 - RNA, 19 nt, Artificial Sequence
  Description of Artificial Sequence: Synthetic oligonucleotide
  Sense strand starting at position 1825 of SEQ ID NO: 1887220
ccacuucgucucugaggaa

SEQ ID NO: 2456207 - RNA, 19 nt, Artificial Sequence
  Description of Artificial Sequence: Synthetic oligonucleotide
  Antisense strand to SEQ ID NO: 2456206
uuccucagagacgaagugg

SEQ ID NO: 2456208 - RNA, 19 nt, Artificial Sequence
  Description of Artificial Sequence: Synthetic oligonucleotide
  Sense strand starting at position 1843 of SEQ ID NO: 1887220
agggaagccaaguauguua

SEQ ID NO: 2456209 - RNA, 19 nt, Artificial Sequence
  Description of Artificial Sequence: Synthetic oligonucleotide
  Antisense strand to SEQ ID NO: 2456208
uaacauacuuggcuucccu

SEQ ID NO: 2456210 - RNA, 19 nt, Artificial Sequence
  Description of Artificial Sequence: Synthetic oligonucleotide
  Sense strand starting at position 1855 of SEQ ID NO: 1887220
uauguuagugucgugucaa

SEQ ID NO: 2456211 - RNA, 19 nt, Artificial Sequence
  Description of Artificial Sequence: Synthetic oligonucleotide
  Antisense strand to SEQ ID NO: 2456210
uugacacgacacuaacaua

SEQ ID NO: 2456212 - RNA, 19 nt, Artificial Sequence
  Description of Artificial Sequence: Synthetic oligonucleotide
  Sense strand starting at position 2031 of SEQ ID NO: 1887220
gcaaucucuccggaacucu

SEQ ID NO: 2456213 - RNA, 19 nt, Artificial Sequence
  Description of Artificial Sequence: Synthetic oligonucleotide
  Antisense strand to SEQ ID NO: 2456212
agaguuccggagagauugc

SEQ ID NO: 2456214 - RNA, 19 nt, Artificial Sequence
  Description of Artificial Sequence: Synthetic oligonucleotide
  Sense strand starting at position 2188 of SEQ ID NO: 1887220
aaaccaggccugugaagaa

SEQ ID NO: 2456215 - RNA, 19 nt, Artificial Sequence
  Description of Artificial Sequence: Synthetic oligonucleotide
  Antisense strand to SEQ ID NO: 2456214
uucuucacaggccugguuu

SEQ ID NO: 2456216 - RNA, 19 nt, Artificial Sequence
  Description of Artificial Sequence: Synthetic oligonucleotide
  Sense strand starting at position 2237 of SEQ ID NO: 1887220
ucacuucugccagaaaguc

SEQ ID NO: 2456217 - RNA, 19 nt, Artificial Sequence
  Description of Artificial Sequence: Synthetic oligonucleotide
  Antisense strand to SEQ ID NO: 2456216
gacuuucuggcagaaguga

SEQ ID NO: 2456218 - RNA, 19 nt, Artificial Sequence
  Description of Artificial Sequence: Synthetic oligonucleotide
  Sense strand starting at position 2245 of SEQ ID NO: 1887220
gccagaaagucauugagcu

SEQ ID NO: 2456219 - RNA, 19 nt, Artificial Sequence
  Description of Artificial Sequence: Synthetic oligonucleotide
  Antisense strand to SEQ ID NO: 2456218
agcucaaugacuuucuggc

SEQ ID NO: 2456220 - RNA, 19 nt, Artificial Sequence
  Description of Artificial Sequence: Synthetic oligonucleotide
  Sense strand starting at position 2246 of SEQ ID NO: 1887220
ccagaaagucauugagcuu

SEQ ID NO: 2456221 - RNA, 19 nt, Artificial Sequence
  Description of Artificial Sequence: Synthetic oligonucleotide
  Antisense strand to SEQ ID NO: 2456220
aagcucaaugacuuucugg

SEQ ID NO: 2456222 - RNA, 19 nt, Artificial Sequence
  Description of Artificial Sequence: Synthetic oligonucleotide
  Sense strand starting at position 2360 of SEQ ID NO: 1887220
uuaauugcucugcggauuu

SEQ ID NO: 2456223 - RNA, 19 nt, Artificial Sequence
  Description of Artificial Sequence: Synthetic oligonucleotide
  Antisense strand to SEQ ID NO: 2456222
aaauccgcagagcaauuaa

SEQ ID NO: 2456224 - RNA, 19 nt, Artificial Sequence
  Description of Artificial Sequence: Synthetic oligonucleotide
  Sense strand starting at position 2429 of SEQ ID NO: 1887220
aggagagauuccgagggaa

SEQ ID NO: 2456225 - RNA, 19 nt, Artificial Sequence
  Description of Artificial Sequence: Synthetic oligonucleotide
  Antisense strand to SEQ ID NO: 2456224
uucccucggaaucucuccu

SEQ ID NO: 2456226 - RNA, 19 nt, Artificial Sequence
  Description of Artificial Sequence: Synthetic oligonucleotide
  Sense strand starting at position 2767 of SEQ ID NO: 1887220
gugcaaucauaacuuauug

SEQ ID NO: 2456227 - RNA, 19 nt, Artificial Sequence
  Description of Artificial Sequence: Synthetic oligonucleotide
  Antisense strand to SEQ ID NO: 2456226
caauaaguuaugauugcac

SEQ ID NO: 2456228 - RNA, 19 nt, Artificial Sequence
  Description of Artificial Sequence: Synthetic oligonucleotide
  Sense strand starting at position 3075 of SEQ ID NO: 1887220
uuugaaagcuaguuuaagu

SEQ ID NO: 2456229 - RNA, 19 nt, Artificial Sequence
  Description of Artificial Sequence: Synthetic oligonucleotide
  Antisense strand to SEQ ID NO: 2456228
acuuaaacuagcuuucaaa

SEQ ID NO: 2456230 - RNA, 19 nt, Artificial Sequence
  Description of Artificial Sequence: Synthetic oligonucleotide
  Sense strand starting at position 3083 of SEQ ID NO: 1887220
cuaguuuaaguuugcaaga

SEQ ID NO: 2456231 - RNA, 19 nt, Artificial Sequence
  Description of Artificial Sequence: Synthetic oligonucleotide
  Antisense strand to SEQ ID NO: 2456230
ucuugcaaacuuaaacuag

SEQ ID NO: 2456232 - RNA, 19 nt, Artificial Sequence
  Description of Artificial Sequence: Synthetic oligonucleotide
  Sense strand starting at position 3183 of SEQ ID NO: 1887220
uauuguccugcagauggua

SEQ ID NO: 2456233 - RNA, 19 nt, Artificial Sequence
  Description of Artificial Sequence: Synthetic oligonucleotide
  Antisense strand to SEQ ID NO: 2456232
uaccaucugcaggacaaua

SEQ ID NO: 2456234 - RNA, 19 nt, Artificial Sequence
  Description of Artificial Sequence: Synthetic oligonucleotide
  Sense strand starting at position 3186 of SEQ ID NO: 1887220
uguccugcagaugguaaua

SEQ ID NO: 2456235 - RNA, 19 nt, Artificial Sequence
  Description of Artificial Sequence: Synthetic oligonucleotide
  Antisense strand to SEQ ID NO: 2456234
uauuaccaucugcaggaca

SEQ ID NO: 2456236 - RNA, 19 nt, Artificial Sequence
  Description of Artificial Sequence: Synthetic oligonucleotide
  Sense strand starting at position 3657 of SEQ ID NO: 1887220
uuugguauuuaccugcuau

SEQ ID NO: 2456237 - RNA, 19 nt, Artificial Sequence
  Description of Artificial Sequence: Synthetic oligonucleotide
  Antisense strand to SEQ ID NO: 2456236
auagcagguaaauaccaaa

SEQ ID NO: 2456238 - RNA, 19 nt, Artificial Sequence
  Description of Artificial Sequence: Synthetic oligonucleotide
  Sense strand starting at position 3667 of SEQ ID NO: 1887220
accugcuaugcucacagua

SEQ ID NO: 2456239 - RNA, 19 nt, Artificial Sequence
  Description of Artificial Sequence: Synthetic oligonucleotide
  Antisense strand to SEQ ID NO: 2456238
uacugugagcauagcaggu

SEQ ID NO: 2456240 - RNA, 19 nt, Artificial Sequence
  Description of Artificial Sequence: Synthetic oligonucleotide
  Sense strand starting at position 3718 of SEQ ID NO: 1887220
caguaauucuggccauuag

SEQ ID NO: 2456241 - RNA, 19 nt, Artificial Sequence
  Description of Artificial Sequence: Synthetic oligonucleotide
  Antisense strand to SEQ ID NO: 2456240
cuaauggccagaauuacug

SEQ ID NO: 2456242 - RNA, 19 nt, Artificial Sequence
  Description of Artificial Sequence: Synthetic oligonucleotide
  Sense strand starting at position 3784 of SEQ ID NO: 1887220
aaggaagaauguguucuau

SEQ ID NO: 2456243 - RNA, 19 nt, Artificial Sequence
  Description of Artificial Sequence: Synthetic oligonucleotide
  Antisense strand to SEQ ID NO: 2456242
auagaacacauucuuccuu

SEQ ID NO: 2456244 - RNA, 19 nt, Artificial Sequence
  Description of Artificial Sequence: Synthetic oligonucleotide
  Sense strand starting at position 3786 of SEQ ID NO: 1887220
ggaagaauguguucuaucc

SEQ ID NO: 2456245 - RNA, 19 nt, Artificial Sequence
  Description of Artificial Sequence: Synthetic oligonucleotide
  Antisense strand to SEQ ID NO: 2456244
ggauagaacacauucuucc

SEQ ID NO: 2456246 - RNA, 19 nt, Artificial Sequence
  Description of Artificial Sequence: Synthetic oligonucleotide
  Sense strand starting at position 3840 of SEQ ID NO: 1887220
ugggaauucuaagugugga

SEQ ID NO: 2456247 - RNA, 19 nt, Artificial Sequence
  Description of Artificial Sequence: Synthetic oligonucleotide
  Antisense strand to SEQ ID NO: 2456246
uccacacuuagaauuccca

SEQ ID NO: 2456248 - RNA, 19 nt, Artificial Sequence
  Description of Artificial Sequence: Synthetic oligonucleotide
  Sense strand starting at position 3841 of SEQ ID NO: 1887220
gggaauucuaaguguggaa

SEQ ID NO: 2456249 - RNA, 19 nt, Artificial Sequence
  Description of Artificial Sequence: Synthetic oligonucleotide
  Antisense strand to SEQ ID NO: 2456248
uuccacacuuagaauuccc

SEQ ID NO: 2456250 - RNA, 19 nt, Artificial Sequence
  Description of Artificial Sequence: Synthetic oligonucleotide
  Sense strand starting at position 3843 of SEQ ID NO: 1887220
gaauucuaaguguggaauu

SEQ ID NO: 2456251 - RNA, 19 nt, Artificial Sequence
  Description of Artificial Sequence: Synthetic oligonucleotide
  Antisense strand to SEQ ID NO: 2456250
aauuccacacuuagaauuc

SEQ ID NO: 2456252 - RNA, 19 nt, Artificial Sequence
  Description of Artificial Sequence: Synthetic oligonucleotide
  Sense strand starting at position 3956 of SEQ ID NO: 1887220
cugguuucuguacauguau

SEQ ID NO: 2456253 - RNA, 19 nt, Artificial Sequence
  Description of Artificial Sequence: Synthetic oligonucleotide
  Antisense strand to SEQ ID NO: 2456252
auacauguacagaaaccag

SEQ ID NO: 2456254 - RNA, 19 nt, Artificial Sequence
  Description of Artificial Sequence: Synthetic oligonucleotide
  Sense strand starting at position 3979 of SEQ ID NO: 1887220
ucguuuaauccucacaaug

SEQ ID NO: 2456255 - RNA, 19 nt, Artificial Sequence
  Description of Artificial Sequence: Synthetic oligonucleotide
  Antisense strand to SEQ ID NO: 2456254
cauugugaggauuaaacga

SEQ ID NO: 2456256 - RNA, 19 nt, Artificial Sequence
  Description of Artificial Sequence: Synthetic oligonucleotide
  Sense strand starting at position 266 of SEQ ID NO: 1887221
ccgccagauccuugggaua

SEQ ID NO: 2456257 - RNA, 19 nt, Artificial Sequence
  Description of Artificial Sequence: Synthetic oligonucleotide
  Antisense strand to SEQ ID NO: 2456256
uaucccaaggaucuggcgg

SEQ ID NO: 2456258 - RNA, 19 nt, Artificial Sequence
  Description of Artificial Sequence: Synthetic oligonucleotide
  Sense strand starting at position 269 of SEQ ID NO: 1887221
ccagauccuugggauauau

SEQ ID NO: 2456259 - RNA, 19 nt, Artificial Sequence
  Description of Artificial Sequence: Synthetic oligonucleotide
  Antisense strand to SEQ ID NO: 2456258
auauaucccaaggaucugg

SEQ ID NO: 2456260 - RNA, 19 nt, Artificial Sequence
  Description of Artificial Sequence: Synthetic oligonucleotide
  Sense strand starting at position 280 of SEQ ID NO: 1887221
ggauauauguucuuacguu

SEQ ID NO: 2456261 - RNA, 19 nt, Artificial Sequence
  Description of Artificial Sequence: Synthetic oligonucleotide
  Antisense strand to SEQ ID NO: 2456260
aacguaagaacauauaucc

SEQ ID NO: 2456262 - RNA, 19 nt, Artificial Sequence
  Description of Artificial Sequence: Synthetic oligonucleotide
  Sense strand starting at position 315 of SEQ ID NO: 1887221
cucacuuuggcuugaauua

SEQ ID NO: 2456263 - RNA, 19 nt, Artificial Sequence
  Description of Artificial Sequence: Synthetic oligonucleotide
  Antisense strand to SEQ ID NO: 2456262
uaauucaagccaaagugag

SEQ ID NO: 2456264 - RNA, 19 nt, Artificial Sequence
  Description of Artificial Sequence: Synthetic oligonucleotide
  Sense strand starting at position 316 of SEQ ID NO: 1887221
ucacuuuggcuugaauuau

SEQ ID NO: 2456265 - RNA, 19 nt, Artificial Sequence
  Description of Artificial Sequence: Synthetic oligonucleotide
  Antisense strand to SEQ ID NO: 2456264
auaauucaagccaaaguga

SEQ ID NO: 2456266 - RNA, 19 nt, Artificial Sequence
  Description of Artificial Sequence: Synthetic oligonucleotide
  Sense strand starting at position 908 of SEQ ID NO: 1887221
gcugaauuaugcccucuua

SEQ ID NO: 2456267 - RNA, 19 nt, Artificial Sequence
  Description of Artificial Sequence: Synthetic oligonucleotide
  Antisense strand to SEQ ID NO: 2456266
uaagagggcauaauucagc

SEQ ID NO: 2456268 - RNA, 19 nt, Artificial Sequence
  Description of Artificial Sequence: Synthetic oligonucleotide
  Sense strand starting at position 919 of SEQ ID NO: 1887221
cccucuuaagugugaucau

SEQ ID NO: 2456269 - RNA, 19 nt, Artificial Sequence
  Description of Artificial Sequence: Synthetic oligonucleotide
  Antisense strand to SEQ ID NO: 2456268
augaucacacuuaagaggg

SEQ ID NO: 2456270 - RNA, 19 nt, Artificial Sequence
  Description of Artificial Sequence: Synthetic oligonucleotide
  Sense strand starting at position 1001 of SEQ ID NO: 1887221
aucucuguauccguaacau

SEQ ID NO: 2456271 - RNA, 19 nt, Artificial Sequence
  Description of Artificial Sequence: Synthetic oligonucleotide
  Antisense strand to SEQ ID NO: 2456270
auguuacggauacagagau

SEQ ID NO: 2456272 - RNA, 19 nt, Artificial Sequence
  Description of Artificial Sequence: Synthetic oligonucleotide
  Sense strand starting at position 1005 of SEQ ID NO: 1887221
cuguauccguaacauuuaa

SEQ ID NO: 2456273 - RNA, 19 nt, Artificial Sequence
  Description of Artificial Sequence: Synthetic oligonucleotide
  Antisense strand to SEQ ID NO: 2456272
uuaaauguuacggauacag

SEQ ID NO: 2456274 - RNA, 19 nt, Artificial Sequence
  Description of Artificial Sequence: Synthetic oligonucleotide
  Sense strand starting at position 1033 of SEQ ID NO: 1887221
aggccaauguaucaacaaa

SEQ ID NO: 2456275 - RNA, 19 nt, Artificial Sequence
  Description of Artificial Sequence: Synthetic oligonucleotide
  Antisense strand to SEQ ID NO: 2456274
uuuguugauacauuggccu

SEQ ID NO: 2456276 - RNA, 19 nt, Artificial Sequence
  Description of Artificial Sequence: Synthetic oligonucleotide
  Sense strand starting at position 1074 of SEQ ID NO: 1887221
acaguaacauuguuuauga

SEQ ID NO: 2456277 - RNA, 19 nt, Artificial Sequence
  Description of Artificial Sequence: Synthetic oligonucleotide
  Antisense strand to SEQ ID NO: 2456276
ucauaaacaauguuacugu

SEQ ID NO: 2456278 - RNA, 19 nt, Artificial Sequence
  Description of Artificial Sequence: Synthetic oligonucleotide
  Sense strand starting at position 1353 of SEQ ID NO: 1887221
ugucaccaugcuugacaua

SEQ ID NO: 2456279 - RNA, 19 nt, Artificial Sequence
  Description of Artificial Sequence: Synthetic oligonucleotide
  Antisense strand to SEQ ID NO: 2456278
uaugucaagcauggugaca

SEQ ID NO: 2456280 - RNA, 19 nt, Artificial Sequence
  Description of Artificial Sequence: Synthetic oligonucleotide
  Sense strand starting at position 1505 of SEQ ID NO: 1887221
guaacauaaugugcuuuaa

SEQ ID NO: 2456281 - RNA, 19 nt, Artificial Sequence
  Description of Artificial Sequence: Synthetic oligonucleotide
  Antisense strand to SEQ ID NO: 2456280
uuaaagcacauuauguuac

SEQ ID NO: 2456282 - RNA, 19 nt, Artificial Sequence
  Description of Artificial Sequence: Synthetic oligonucleotide
  Sense strand starting at position 1689 of SEQ ID NO: 1887221
cccuacuugcgaugggaga

SEQ ID NO: 2456283 - RNA, 19 nt, Artificial Sequence
  Description of Artificial Sequence: Synthetic oligonucleotide
  Antisense strand to SEQ ID NO: 2456282
ucucccaucgcaaguaggg

SEQ ID NO: 2456284 - RNA, 19 nt, Artificial Sequence
  Description of Artificial Sequence: Synthetic oligonucleotide
  Sense strand starting at position 1690 of SEQ ID NO: 1887221
ccuacuugcgaugggagaa

SEQ ID NO: 2456285 - RNA, 19 nt, Artificial Sequence
  Description of Artificial Sequence: Synthetic oligonucleotide
  Antisense strand to SEQ ID NO: 2456284
uucucccaucgcaaguagg

SEQ ID NO: 2456286 - RNA, 19 nt, Artificial Sequence
  Description of Artificial Sequence: Synthetic oligonucleotide
  Sense strand starting at position 2012 of SEQ ID NO: 1887221
gugauaacuuaccauagag

SEQ ID NO: 2456287 - RNA, 19 nt, Artificial Sequence
  Description of Artificial Sequence: Synthetic oligonucleotide
  Antisense strand to SEQ ID NO: 2456286
cucuaugguaaguuaucac

SEQ ID NO: 2456288 - RNA, 19 nt, Artificial Sequence
  Description of Artificial Sequence: Synthetic oligonucleotide
  Sense strand starting at position 2044 of SEQ ID NO: 1887221
agucgaugacuuuggaucu

SEQ ID NO: 2456289 - RNA, 19 nt, Artificial Sequence
  Description of Artificial Sequence: Synthetic oligonucleotide
  Antisense strand to SEQ ID NO: 2456288
agauccaaagucaucgacu

SEQ ID NO: 2456290 - RNA, 19 nt, Artificial Sequence
  Description of Artificial Sequence: Synthetic oligonucleotide
  Sense strand starting at position 2196 of SEQ ID NO: 1887221
gguuccuggagccgugaaa

SEQ ID NO: 2456291 - RNA, 19 nt, Artificial Sequence
  Description of Artificial Sequence: Synthetic oligonucleotide
  Antisense strand to SEQ ID NO: 2456290
uuucacggcuccaggaacc

SEQ ID NO: 2456292 - RNA, 19 nt, Artificial Sequence
  Description of Artificial Sequence: Synthetic oligonucleotide
  Sense strand starting at position 2207 of SEQ ID NO: 1887221
ccgugaaagcauuaucucu

SEQ ID NO: 2456293 - RNA, 19 nt, Artificial Sequence
  Description of Artificial Sequence: Synthetic oligonucleotide
  Antisense strand to SEQ ID NO: 2456292
agagauaaugcuuucacgg

SEQ ID NO: 2456294 - RNA, 19 nt, Artificial Sequence
  Description of Artificial Sequence: Synthetic oligonucleotide
  Sense strand starting at position 2209 of SEQ ID NO: 1887221
gugaaagcauuaucucucu

SEQ ID NO: 2456295 - RNA, 19 nt, Artificial Sequence
  Description of Artificial Sequence: Synthetic oligonucleotide
  Antisense strand to SEQ ID NO: 2456294
agagagauaaugcuuucac

SEQ ID NO: 2456296 - RNA, 19 nt, Artificial Sequence
  Description of Artificial Sequence: Synthetic oligonucleotide
  Sense strand starting at position 2267 of SEQ ID NO: 1887221
uccugucuuguagaugaga

SEQ ID NO: 2456297 - RNA, 19 nt, Artificial Sequence
  Description of Artificial Sequence: Synthetic oligonucleotide
  Antisense strand to SEQ ID NO: 2456296
ucucaucuacaagacagga

SEQ ID NO: 2456298 - RNA, 19 nt, Artificial Sequence
  Description of Artificial Sequence: Synthetic oligonucleotide
  Sense strand starting at position 2269 of SEQ ID NO: 1887221
cugucuuguagaugagaag

SEQ ID NO: 2456299 - RNA, 19 nt, Artificial Sequence
  Description of Artificial Sequence: Synthetic oligonucleotide
  Antisense strand to SEQ ID NO: 2456298
cuucucaucuacaagacag

SEQ ID NO: 2456300 - RNA, 19 nt, Artificial Sequence
  Description of Artificial Sequence: Synthetic oligonucleotide
  Sense strand starting at position 2270 of SEQ ID NO: 1887221
ugucuuguagaugagaagu

SEQ ID NO: 2456301 - RNA, 19 nt, Artificial Sequence
  Description of Artificial Sequence: Synthetic oligonucleotide
  Antisense strand to SEQ ID NO: 2456300
acuucucaucuacaagaca

SEQ ID NO: 2456302 - RNA, 19 nt, Artificial Sequence
  Description of Artificial Sequence: Synthetic oligonucleotide
  Sense strand starting at position 2298 of SEQ ID NO: 1887221
cggagaugcuugguuacuu

SEQ ID NO: 2456303 - RNA, 19 nt, Artificial Sequence
  Description of Artificial Sequence: Synthetic oligonucleotide
  Antisense strand to SEQ ID NO: 2456302
aaguaaccaagcaucuccg

SEQ ID NO: 2456304 - RNA, 19 nt, Artificial Sequence
  Description of Artificial Sequence: Synthetic oligonucleotide
  Sense strand starting at position 2299 of SEQ ID NO: 1887221
ggagaugcuugguuacuuu

SEQ ID NO: 2456305 - RNA, 19 nt, Artificial Sequence
  Description of Artificial Sequence: Synthetic oligonucleotide
  Antisense strand to SEQ ID NO: 2456304
aaaguaaccaagcaucucc

SEQ ID NO: 2456306 - RNA, 19 nt, Artificial Sequence
  Description of Artificial Sequence: Synthetic oligonucleotide
  Sense strand starting at position 2557 of SEQ ID NO: 1887221
acaggaaucuugcucugag

SEQ ID NO: 2456307 - RNA, 19 nt, Artificial Sequence
  Description of Artificial Sequence: Synthetic oligonucleotide
  Antisense strand to SEQ ID NO: 2456306
cucagagcaagauuccugu

SEQ ID NO: 2456308 - RNA, 19 nt, Artificial Sequence
  Description of Artificial Sequence: Synthetic oligonucleotide
  Sense strand starting at position 2558 of SEQ ID NO: 1887221
caggaaucuugcucugagu

SEQ ID NO: 2456309 - RNA, 19 nt, Artificial Sequence
  Description of Artificial Sequence: Synthetic oligonucleotide
  Antisense strand to SEQ ID NO: 2456308
acucagagcaagauuccug

SEQ ID NO: 2456310 - RNA, 19 nt, Artificial Sequence
  Description of Artificial Sequence: Synthetic oligonucleotide
  Sense strand starting at position 2560 of SEQ ID NO: 1887221
ggaaucuugcucugagucu

SEQ ID NO: 2456311 - RNA, 19 nt, Artificial Sequence
  Description of Artificial Sequence: Synthetic oligonucleotide
  Antisense strand to SEQ ID NO: 2456310
agacucagagcaagauucc

SEQ ID NO: 2456312 - RNA, 19 nt, Artificial Sequence
  Description of Artificial Sequence: Synthetic oligonucleotide
  Sense strand starting at position 2593 of SEQ ID NO: 1887221
ggaagaauugcuggaccuu

SEQ ID NO: 2456313 - RNA, 19 nt, Artificial Sequence
  Description of Artificial Sequence: Synthetic oligonucleotide
  Antisense strand to SEQ ID NO: 2456312
aagguccagcaauucuucc

SEQ ID NO: 2456314 - RNA, 19 nt, Artificial Sequence
  Description of Artificial Sequence: Synthetic oligonucleotide
  Sense strand starting at position 2686 of SEQ ID NO: 1887221
gaugcauugcuaggucaua

SEQ ID NO: 2456315 - RNA, 19 nt, Artificial Sequence
  Description of Artificial Sequence: Synthetic oligonucleotide
  Antisense strand to SEQ ID NO: 2456314
uaugaccuagcaaugcauc

SEQ ID NO: 2456316 - RNA, 19 nt, Artificial Sequence
  Description of Artificial Sequence: Synthetic oligonucleotide
  Sense strand starting at position 2698 of SEQ ID NO: 1887221
ggucauacagcucauaaag

SEQ ID NO: 2456317 - RNA, 19 nt, Artificial Sequence
  Description of Artificial Sequence: Synthetic oligonucleotide
  Antisense strand to SEQ ID NO: 2456316
cuuuaugagcuguaugacc

SEQ ID NO: 2456318 - RNA, 19 nt, Artificial Sequence
  Description of Artificial Sequence: Synthetic oligonucleotide
  Sense strand starting at position 3183 of SEQ ID NO: 1887221
guggcucgacccuguaauu

SEQ ID NO: 2456319 - RNA, 19 nt, Artificial Sequence
  Description of Artificial Sequence: Synthetic oligonucleotide
  Antisense strand to SEQ ID NO: 2456318
aauuacagggucgagccac

SEQ ID NO: 2456320 - RNA, 19 nt, Artificial Sequence
  Description of Artificial Sequence: Synthetic oligonucleotide
  Sense strand starting at position 3546 of SEQ ID NO: 1887221
ucacaaugucuuugaguug

SEQ ID NO: 2456321 - RNA, 19 nt, Artificial Sequence
  Description of Artificial Sequence: Synthetic oligonucleotide
  Antisense strand to SEQ ID NO: 2456320
caacucaaagacauuguga

SEQ ID NO: 2456322 - RNA, 19 nt, Artificial Sequence
  Description of Artificial Sequence: Synthetic oligonucleotide
  Sense strand starting at position 3549 of SEQ ID NO: 1887221
caaugucuuugaguugucu

SEQ ID NO: 2456323 - RNA, 19 nt, Artificial Sequence
  Description of Artificial Sequence: Synthetic oligonucleotide
  Antisense strand to SEQ ID NO: 2456322
agacaacucaaagacauug

SEQ ID NO: 2456324 - RNA, 19 nt, Artificial Sequence
  Description of Artificial Sequence: Synthetic oligonucleotide
  Sense strand starting at position 3551 of SEQ ID NO: 1887221
augucuuugaguugucuca

SEQ ID NO: 2456325 - RNA, 19 nt, Artificial Sequence
  Description of Artificial Sequence: Synthetic oligonucleotide
  Antisense strand to SEQ ID NO: 2456324
ugagacaacucaaagacau

SEQ ID NO: 2456326 - RNA, 19 nt, Artificial Sequence
  Description of Artificial Sequence: Synthetic oligonucleotide
  Sense strand starting at position 3553 of SEQ ID NO: 1887221
gucuuugaguugucucacu

SEQ ID NO: 2456327 - RNA, 19 nt, Artificial Sequence
  Description of Artificial Sequence: Synthetic oligonucleotide
  Antisense strand to SEQ ID NO: 2456326
agugagacaacucaaagac

SEQ ID NO: 2456328 - RNA, 19 nt, Artificial Sequence
  Description of Artificial Sequence: Synthetic oligonucleotide
  Sense strand starting at position 3558 of SEQ ID NO: 1887221
ugaguugucucacucacau

SEQ ID NO: 2456329 - RNA, 19 nt, Artificial Sequence
  Description of Artificial Sequence: Synthetic oligonucleotide
  Antisense strand to SEQ ID NO: 2456328
augugagugagacaacuca

SEQ ID NO: 2456330 - RNA, 19 nt, Artificial Sequence
  Description of Artificial Sequence: Synthetic oligonucleotide
  Sense strand starting at position 3715 of SEQ ID NO: 1887221
ucagcuuaacuggaguaaa

SEQ ID NO: 2456331 - RNA, 19 nt, Artificial Sequence
  Description of Artificial Sequence: Synthetic oligonucleotide
  Antisense strand to SEQ ID NO: 2456330
uuuacuccaguuaagcuga

SEQ ID NO: 2456332 - RNA, 19 nt, Artificial Sequence
  Description of Artificial Sequence: Synthetic oligonucleotide
  Sense strand starting at position 3728 of SEQ ID NO: 1887221
aguaaacagguuuguaaac

SEQ ID NO: 2456333 - RNA, 19 nt, Artificial Sequence
  Description of Artificial Sequence: Synthetic oligonucleotide
  Antisense strand to SEQ ID NO: 2456332
guuuacaaaccuguuuacu

SEQ ID NO: 2456334 - RNA, 19 nt, Artificial Sequence
  Description of Artificial Sequence: Synthetic oligonucleotide
  Sense strand starting at position 3729 of SEQ ID NO: 1887221
guaaacagguuuguaaaca

SEQ ID NO: 2456335 - RNA, 19 nt, Artificial Sequence
  Description of Artificial Sequence: Synthetic oligonucleotide
  Antisense strand to SEQ ID NO: 2456334
uguuuacaaaccuguuuac

SEQ ID NO: 2456336 - RNA, 19 nt, Artificial Sequence
  Description of Artificial Sequence: Synthetic oligonucleotide
  Sense strand starting at position 264 of SEQ ID NO: 1887222
agauaagucuaaccaaguu

SEQ ID NO: 2456337 - RNA, 19 nt, Artificial Sequence
  Description of Artificial Sequence: Synthetic oligonucleotide
  Antisense strand to SEQ ID NO: 2456336
aacuugguuagacuuaucu

SEQ ID NO: 2456338 - RNA, 19 nt, Artificial Sequence
  Description of Artificial Sequence: Synthetic oligonucleotide
  Sense strand starting at position 385 of SEQ ID NO: 1887222
ugcauauuucugugcuugu

SEQ ID NO: 2456339 - RNA, 19 nt, Artificial Sequence
  Description of Artificial Sequence: Synthetic oligonucleotide
  Antisense strand to SEQ ID NO: 2456338
acaagcacagaaauaugca

SEQ ID NO: 2456340 - RNA, 19 nt, Artificial Sequence
  Description of Artificial Sequence: Synthetic oligonucleotide
  Sense strand starting at position 386 of SEQ ID NO: 1887222
gcauauuucugugcuuguu

SEQ ID NO: 2456341 - RNA, 19 nt, Artificial Sequence
  Description of Artificial Sequence: Synthetic oligonucleotide
  Antisense strand to SEQ ID NO: 2456340
aacaagcacagaaauaugc

SEQ ID NO: 2456342 - RNA, 19 nt, Artificial Sequence
  Description of Artificial Sequence: Synthetic oligonucleotide
  Sense strand starting at position 388 of SEQ ID NO: 1887222
auauuucugugcuuguuau

SEQ ID NO: 2456343 - RNA, 19 nt, Artificial Sequence
  Description of Artificial Sequence: Synthetic oligonucleotide
  Antisense strand to SEQ ID NO: 2456342
auaacaagcacagaaauau

SEQ ID NO: 2456344 - RNA, 19 nt, Artificial Sequence
  Description of Artificial Sequence: Synthetic oligonucleotide
  Sense strand starting at position 395 of SEQ ID NO: 1887222
ugugcuuguuauuuauuga

SEQ ID NO: 2456345 - RNA, 19 nt, Artificial Sequence
  Description of Artificial Sequence: Synthetic oligonucleotide
  Antisense strand to SEQ ID NO: 2456344
ucaauaaauaacaagcaca

SEQ ID NO: 2456346 - RNA, 19 nt, Artificial Sequence
  Description of Artificial Sequence: Synthetic oligonucleotide
  Sense strand starting at position 812 of SEQ ID NO: 1887222
guaauacagggcugacaaa

SEQ ID NO: 2456347 - RNA, 19 nt, Artificial Sequence
  Description of Artificial Sequence: Synthetic oligonucleotide
  Antisense strand to SEQ ID NO: 2456346
uuugucagcccuguauuac

SEQ ID NO: 2456348 - RNA, 19 nt, Artificial Sequence
  Description of Artificial Sequence: Synthetic oligonucleotide
  Sense strand starting at position 1055 of SEQ ID NO: 1887222
gccugagauuaaguaauga

SEQ ID NO: 2456349 - RNA, 19 nt, Artificial Sequence
  Description of Artificial Sequence: Synthetic oligonucleotide
  Antisense strand to SEQ ID NO: 2456348
ucauuacuuaaucucaggc

SEQ ID NO: 2456350 - RNA, 19 nt, Artificial Sequence
  Description of Artificial Sequence: Synthetic oligonucleotide
  Sense strand starting at position 1580 of SEQ ID NO: 1887222
guauuaaggugggcucagu

SEQ ID NO: 2456351 - RNA, 19 nt, Artificial Sequence
  Description of Artificial Sequence: Synthetic oligonucleotide
  Antisense strand to SEQ ID NO: 2456350
acugagcccaccuuaauac

SEQ ID NO: 2456352 - RNA, 19 nt, Artificial Sequence
  Description of Artificial Sequence: Synthetic oligonucleotide
  Sense strand starting at position 1785 of SEQ ID NO: 1887222
ccguuccaucaguauaaca

SEQ ID NO: 2456353 - RNA, 19 nt, Artificial Sequence
  Description of Artificial Sequence: Synthetic oligonucleotide
  Antisense strand to SEQ ID NO: 2456352
uguuauacugauggaacgg

SEQ ID NO: 2456354 - RNA, 19 nt, Artificial Sequence
  Description of Artificial Sequence: Synthetic oligonucleotide
  Sense strand starting at position 1787 of SEQ ID NO: 1887222
guuccaucaguauaacauu

SEQ ID NO: 2456355 - RNA, 19 nt, Artificial Sequence
  Description of Artificial Sequence: Synthetic oligonucleotide
  Antisense strand to SEQ ID NO: 2456354
aauguuauacugauggaac

SEQ ID NO: 2456356 - RNA, 19 nt, Artificial Sequence
  Description of Artificial Sequence: Synthetic oligonucleotide
  Sense strand starting at position 1953 of SEQ ID NO: 1887222
cucaauaggucauuagcca

SEQ ID NO: 2456357 - RNA, 19 nt, Artificial Sequence
  Description of Artificial Sequence: Synthetic oligonucleotide
  Antisense strand to SEQ ID NO: 2456356
uggcuaaugaccuauugag

SEQ ID NO: 2456358 - RNA, 19 nt, Artificial Sequence
  Description of Artificial Sequence: Synthetic oligonucleotide
  Sense strand starting at position 2027 of SEQ ID NO: 1887222
cuguguugucagcacaauu

SEQ ID NO: 2456359 - RNA, 19 nt, Artificial Sequence
  Description of Artificial Sequence: Synthetic oligonucleotide
  Antisense strand to SEQ ID NO: 2456358
aauugugcugacaacacag

SEQ ID NO: 2456360 - RNA, 19 nt, Artificial Sequence
  Description of Artificial Sequence: Synthetic oligonucleotide
  Sense strand starting at position 2104 of SEQ ID NO: 1887222
ccacguccuguggauauaa

SEQ ID NO: 2456361 - RNA, 19 nt, Artificial Sequence
  Description of Artificial Sequence: Synthetic oligonucleotide
  Antisense strand to SEQ ID NO: 2456360
uuauauccacaggacgugg

SEQ ID NO: 2456362 - RNA, 19 nt, Artificial Sequence
  Description of Artificial Sequence: Synthetic oligonucleotide
  Sense strand starting at position 2155 of SEQ ID NO: 1887222
cuagacaugguucggaguu

SEQ ID NO: 2456363 - RNA, 19 nt, Artificial Sequence
  Description of Artificial Sequence: Synthetic oligonucleotide
  Antisense strand to SEQ ID NO: 2456362
aacuccgaaccaugucuag

SEQ ID NO: 2456364 - RNA, 19 nt, Artificial Sequence
  Description of Artificial Sequence: Synthetic oligonucleotide
  Sense strand starting at position 2200 of SEQ ID NO: 1887222
ccgcacaugcuuugauaga

SEQ ID NO: 2456365 - RNA, 19 nt, Artificial Sequence
  Description of Artificial Sequence: Synthetic oligonucleotide
  Antisense strand to SEQ ID NO: 2456364
ucuaucaaagcaugugcgg

SEQ ID NO: 2456366 - RNA, 19 nt, Artificial Sequence
  Description of Artificial Sequence: Synthetic oligonucleotide
  Sense strand starting at position 2215 of SEQ ID NO: 1887222
uagacuguacgcuauagau

SEQ ID NO: 2456367 - RNA, 19 nt, Artificial Sequence
  Description of Artificial Sequence: Synthetic oligonucleotide
  Antisense strand to SEQ ID NO: 2456366
aucuauagcguacagucua

SEQ ID NO: 2456368 - RNA, 19 nt, Artificial Sequence
  Description of Artificial Sequence: Synthetic oligonucleotide
  Sense strand starting at position 2217 of SEQ ID NO: 1887222
gacuguacgcuauagauua

SEQ ID NO: 2456369 - RNA, 19 nt, Artificial Sequence
  Description of Artificial Sequence: Synthetic oligonucleotide
  Antisense strand to SEQ ID NO: 2456368
uaaucuauagcguacaguc

SEQ ID NO: 2456370 - RNA, 19 nt, Artificial Sequence
  Description of Artificial Sequence: Synthetic oligonucleotide
  Sense strand starting at position 2274 of SEQ ID NO: 1887222
cccgauucucacggaaagu

SEQ ID NO: 2456371 - RNA, 19 nt, Artificial Sequence
  Description of Artificial Sequence: Synthetic oligonucleotide
  Antisense strand to SEQ ID NO: 2456370
acuuuccgugagaaucggg

SEQ ID NO: 2456372 - RNA, 19 nt, Artificial Sequence
  Description of Artificial Sequence: Synthetic oligonucleotide
  Sense strand starting at position 2275 of SEQ ID NO: 1887222
ccgauucucacggaaagua

SEQ ID NO: 2456373 - RNA, 19 nt, Artificial Sequence
  Description of Artificial Sequence: Synthetic oligonucleotide
  Antisense strand to SEQ ID NO: 2456372
uacuuuccgugagaaucgg

SEQ ID NO: 2456374 - RNA, 19 nt, Artificial Sequence
  Description of Artificial Sequence: Synthetic oligonucleotide
  Sense strand starting at position 2291 of SEQ ID NO: 1887222
guagccuauuucuuacuau

SEQ ID NO: 2456375 - RNA, 19 nt, Artificial Sequence
  Description of Artificial Sequence: Synthetic oligonucleotide
  Antisense strand to SEQ ID NO: 2456374
auaguaagaaauaggcuac

SEQ ID NO: 2456376 - RNA, 19 nt, Artificial Sequence
  Description of Artificial Sequence: Synthetic oligonucleotide
  Sense strand starting at position 2312 of SEQ ID NO: 1887222
acacucugacaucgaaauu

SEQ ID NO: 2456377 - RNA, 19 nt, Artificial Sequence
  Description of Artificial Sequence: Synthetic oligonucleotide
  Antisense strand to SEQ ID NO: 2456376
aauuucgaugucagagugu

SEQ ID NO: 2456378 - RNA, 19 nt, Artificial Sequence
  Description of Artificial Sequence: Synthetic oligonucleotide
  Sense strand starting at position 2343 of SEQ ID NO: 1887222
cgacucaacccuugcucua

SEQ ID NO: 2456379 - RNA, 19 nt, Artificial Sequence
  Description of Artificial Sequence: Synthetic oligonucleotide
  Antisense strand to SEQ ID NO: 2456378
uagagcaaggguugagucg

SEQ ID NO: 2456380 - RNA, 19 nt, Artificial Sequence
  Description of Artificial Sequence: Synthetic oligonucleotide
  Sense strand starting at position 2839 of SEQ ID NO: 1887222
cugccuuauuacguaauaa

SEQ ID NO: 2456381 - RNA, 19 nt, Artificial Sequence
  Description of Artificial Sequence: Synthetic oligonucleotide
  Antisense strand to SEQ ID NO: 2456380
uuauuacguaauaaggcag

SEQ ID NO: 2456382 - RNA, 19 nt, Artificial Sequence
  Description of Artificial Sequence: Synthetic oligonucleotide
  Sense strand starting at position 2921 of SEQ ID NO: 1887222
ggaaguaucuucucuacga

SEQ ID NO: 2456383 - RNA, 19 nt, Artificial Sequence
  Description of Artificial Sequence: Synthetic oligonucleotide
  Antisense strand to SEQ ID NO: 2456382
ucguagagaagauacuucc

SEQ ID NO: 2456384 - RNA, 19 nt, Artificial Sequence
  Description of Artificial Sequence: Synthetic oligonucleotide
  Sense strand starting at position 2922 of SEQ ID NO: 1887222
gaaguaucuucucuacgag

SEQ ID NO: 2456385 - RNA, 19 nt, Artificial Sequence
  Description of Artificial Sequence: Synthetic oligonucleotide
  Antisense strand to SEQ ID NO: 2456384
cucguagagaagauacuuc

SEQ ID NO: 2456386 - RNA, 19 nt, Artificial Sequence
  Description of Artificial Sequence: Synthetic oligonucleotide
  Sense strand starting at position 2931 of SEQ ID NO: 1887222
ucucuacgagcuuaagagu

SEQ ID NO: 2456387 - RNA, 19 nt, Artificial Sequence
  Description of Artificial Sequence: Synthetic oligonucleotide
  Antisense strand to SEQ ID NO: 2456386
acucuuaagcucguagaga

SEQ ID NO: 2456388 - RNA, 19 nt, Artificial Sequence
  Description of Artificial Sequence: Synthetic oligonucleotide
  Sense strand starting at position 2940 of SEQ ID NO: 1887222
gcuuaagaguaguuaggga

SEQ ID NO: 2456389 - RNA, 19 nt, Artificial Sequence
  Description of Artificial Sequence: Synthetic oligonucleotide
  Antisense strand to SEQ ID NO: 2456388
ucccuaacuacucuuaagc

SEQ ID NO: 2456390 - RNA, 19 nt, Artificial Sequence
  Description of Artificial Sequence: Synthetic oligonucleotide
  Sense strand starting at position 3006 of SEQ ID NO: 1887222
uuaauagugccaggcacuu

SEQ ID NO: 2456391 - RNA, 19 nt, Artificial Sequence
  Description of Artificial Sequence: Synthetic oligonucleotide
  Antisense strand to SEQ ID NO: 2456390
aagugccuggcacuauuaa

SEQ ID NO: 2456392 - RNA, 19 nt, Artificial Sequence
  Description of Artificial Sequence: Synthetic oligonucleotide
  Sense strand starting at position 3018 of SEQ ID NO: 1887222
ggcacuuaucugcacacua

SEQ ID NO: 2456393 - RNA, 19 nt, Artificial Sequence
  Description of Artificial Sequence: Synthetic oligonucleotide
  Antisense strand to SEQ ID NO: 2456392
uagugugcagauaagugcc

SEQ ID NO: 2456394 - RNA, 19 nt, Artificial Sequence
  Description of Artificial Sequence: Synthetic oligonucleotide
  Sense strand starting at position 3033 of SEQ ID NO: 1887222
acuagagaauaggaauuaa

SEQ ID NO: 2456395 - RNA, 19 nt, Artificial Sequence
  Description of Artificial Sequence: Synthetic oligonucleotide
  Antisense strand to SEQ ID NO: 2456394
uuaauuccuauucucuagu

SEQ ID NO: 2456396 - RNA, 19 nt, Artificial Sequence
  Description of Artificial Sequence: Synthetic oligonucleotide
  Sense strand starting at position 3121 of SEQ ID NO: 1887222
cuaaacgguuucguugaau

SEQ ID NO: 2456397 - RNA, 19 nt, Artificial Sequence
  Description of Artificial Sequence: Synthetic oligonucleotide
  Antisense strand to SEQ ID NO: 2456396
auucaacgaaaccguuuag

SEQ ID NO: 2456398 - RNA, 19 nt, Artificial Sequence
  Description of Artificial Sequence: Synthetic oligonucleotide
  Sense strand starting at position 3124 of SEQ ID NO: 1887222
aacgguuucguugaaugua

SEQ ID NO: 2456399 - RNA, 19 nt, Artificial Sequence
  Description of Artificial Sequence: Synthetic oligonucleotide
  Antisense strand to SEQ ID NO: 2456398
uacauucaacgaaaccguu

SEQ ID NO: 2456400 - RNA, 19 nt, Artificial Sequence
  Description of Artificial Sequence: Synthetic oligonucleotide
  Sense strand starting at position 3127 of SEQ ID NO: 1887222
gguuucguugaauguaaua

SEQ ID NO: 2456401 - RNA, 19 nt, Artificial Sequence
  Description of Artificial Sequence: Synthetic oligonucleotide
  Antisense strand to SEQ ID NO: 2456400
uauuacauucaacgaaacc

SEQ ID NO: 2456402 - RNA, 19 nt, Artificial Sequence
  Description of Artificial Sequence: Synthetic oligonucleotide
  Sense strand starting at position 3150 of SEQ ID NO: 1887222
ugagaagugcugcagauca

SEQ ID NO: 2456403 - RNA, 19 nt, Artificial Sequence
  Description of Artificial Sequence: Synthetic oligonucleotide
  Antisense strand to SEQ ID NO: 2456402
ugaucugcagcacuucuca

SEQ ID NO: 2456404 - RNA, 19 nt, Artificial Sequence
  Description of Artificial Sequence: Synthetic oligonucleotide
  Sense strand starting at position 3152 of SEQ ID NO: 1887222
agaagugcugcagaucauu

SEQ ID NO: 2456405 - RNA, 19 nt, Artificial Sequence
  Description of Artificial Sequence: Synthetic oligonucleotide
  Antisense strand to SEQ ID NO: 2456404
aaugaucugcagcacuucu

SEQ ID NO: 2456406 - RNA, 19 nt, Artificial Sequence
  Description of Artificial Sequence: Synthetic oligonucleotide
  Sense strand starting at position 3173 of SEQ ID NO: 1887222
aucuauguguucuugguau

SEQ ID NO: 2456407 - RNA, 19 nt, Artificial Sequence
  Description of Artificial Sequence: Synthetic oligonucleotide
  Antisense strand to SEQ ID NO: 2456406
auaccaagaacacauagau

SEQ ID NO: 2456408 - RNA, 19 nt, Artificial Sequence
  Description of Artificial Sequence: Synthetic oligonucleotide
  Sense strand starting at position 3175 of SEQ ID NO: 1887222
cuauguguucuugguauca

SEQ ID NO: 2456409 - RNA, 19 nt, Artificial Sequence
  Description of Artificial Sequence: Synthetic oligonucleotide
  Antisense strand to SEQ ID NO: 2456408
ugauaccaagaacacauag

SEQ ID NO: 2456410 - RNA, 19 nt, Artificial Sequence
  Description of Artificial Sequence: Synthetic oligonucleotide
  Sense strand starting at position 3681 of SEQ ID NO: 1887222
cggauuacaucagagaaca

SEQ ID NO: 2456411 - RNA, 19 nt, Artificial Sequence
  Description of Artificial Sequence: Synthetic oligonucleotide
  Antisense strand to SEQ ID NO: 2456410
uguucucugauguaauccg

SEQ ID NO: 2456412 - RNA, 19 nt, Artificial Sequence
  Description of Artificial Sequence: Synthetic oligonucleotide
  Sense strand starting at position 3790 of SEQ ID NO: 1887222
aaguaauugcaguauguag

SEQ ID NO: 2456413 - RNA, 19 nt, Artificial Sequence
  Description of Artificial Sequence: Synthetic oligonucleotide
  Antisense strand to SEQ ID NO: 2456412
cuacauacugcaauuacuu

SEQ ID NO: 2456414 - RNA, 19 nt, Artificial Sequence
  Description of Artificial Sequence: Synthetic oligonucleotide
  Sense strand starting at position 3799 of SEQ ID NO: 1887222
caguauguaguauguuaga

SEQ ID NO: 2456415 - RNA, 19 nt, Artificial Sequence
  Description of Artificial Sequence: Synthetic oligonucleotide
  Antisense strand to SEQ ID NO: 2456414
ucuaacauacuacauacug

SEQ ID NO: 2456416 - RNA, 19 nt, Artificial Sequence
  Description of Artificial Sequence: Synthetic oligonucleotide
  Sense strand starting at position 60 of SEQ ID NO: 1887223
gggaaagcuggugacuauu

SEQ ID NO: 2456417 - RNA, 19 nt, Artificial Sequence
  Description of Artificial Sequence: Synthetic oligonucleotide
  Antisense strand to SEQ ID NO: 2456416
aauagucaccagcuuuccc

SEQ ID NO: 2456418 - RNA, 19 nt, Artificial Sequence
  Description of Artificial Sequence: Synthetic oligonucleotide
  Sense strand starting at position 415 of SEQ ID NO: 1887223
uuacccaucugauuggcaa

SEQ ID NO: 2456419 - RNA, 19 nt, Artificial Sequence
  Description of Artificial Sequence: Synthetic oligonucleotide
  Antisense strand to SEQ ID NO: 2456418
uugccaaucagauggguaa

SEQ ID NO: 2456420 - RNA, 19 nt, Artificial Sequence
  Description of Artificial Sequence: Synthetic oligonucleotide
  Sense strand starting at position 582 of SEQ ID NO: 1887223
gugggaauguauucaacag

SEQ ID NO: 2456421 - RNA, 19 nt, Artificial Sequence
  Description of Artificial Sequence: Synthetic oligonucleotide
  Antisense strand to SEQ ID NO: 2456420
cuguugaauacauucccac

SEQ ID NO: 2456422 - RNA, 19 nt, Artificial Sequence
  Description of Artificial Sequence: Synthetic oligonucleotide
  Sense strand starting at position 629 of SEQ ID NO: 1887223
guauaaagauccucacuga

SEQ ID NO: 2456423 - RNA, 19 nt, Artificial Sequence
  Description of Artificial Sequence: Synthetic oligonucleotide
  Antisense strand to SEQ ID NO: 2456422
ucagugaggaucuuuauac

SEQ ID NO: 2456424 - RNA, 19 nt, Artificial Sequence
  Description of Artificial Sequence: Synthetic oligonucleotide
  Sense strand starting at position 730 of SEQ ID NO: 1887223
aauaguaugcauugguuaa

SEQ ID NO: 2456425 - RNA, 19 nt, Artificial Sequence
  Description of Artificial Sequence: Synthetic oligonucleotide
  Antisense strand to SEQ ID NO: 2456424
uuaaccaaugcauacuauu

SEQ ID NO: 2456426 - RNA, 19 nt, Artificial Sequence
  Description of Artificial Sequence: Synthetic oligonucleotide
  Sense strand starting at position 752 of SEQ ID NO: 1887223
gaaugaggcagauguaugu

SEQ ID NO: 2456427 - RNA, 19 nt, Artificial Sequence
  Description of Artificial Sequence: Synthetic oligonucleotide
  Antisense strand to SEQ ID NO: 2456426
acauacaucugccucauuc

SEQ ID NO: 2456428 - RNA, 19 nt, Artificial Sequence
  Description of Artificial Sequence: Synthetic oligonucleotide
  Sense strand starting at position 768 of SEQ ID NO: 1887223
ugucuacugguccaggaaa

SEQ ID NO: 2456429 - RNA, 19 nt, Artificial Sequence
  Description of Artificial Sequence: Synthetic oligonucleotide
  Antisense strand to SEQ ID NO: 2456428
uuuccuggaccaguagaca

SEQ ID NO: 2456430 - RNA, 19 nt, Artificial Sequence
  Description of Artificial Sequence: Synthetic oligonucleotide
  Sense strand starting at position 770 of SEQ ID NO: 1887223
ucuacugguccaggaaaug

SEQ ID NO: 2456431 - RNA, 19 nt, Artificial Sequence
  Description of Artificial Sequence: Synthetic oligonucleotide
  Antisense strand to SEQ ID NO: 2456430
cauuuccuggaccaguaga

SEQ ID NO: 2456432 - RNA, 19 nt, Artificial Sequence
  Description of Artificial Sequence: Synthetic oligonucleotide
  Sense strand starting at position 775 of SEQ ID NO: 1887223
ugguccaggaaaugucuaa

SEQ ID NO: 2456433 - RNA, 19 nt, Artificial Sequence
  Description of Artificial Sequence: Synthetic oligonucleotide
  Antisense strand to SEQ ID NO: 2456432
uuagacauuuccuggacca

SEQ ID NO: 2456434 - RNA, 19 nt, Artificial Sequence
  Description of Artificial Sequence: Synthetic oligonucleotide
  Sense strand starting at position 1387 of SEQ ID NO: 1887223
gagccuggucaauacggua

SEQ ID NO: 2456435 - RNA, 19 nt, Artificial Sequence
  Description of Artificial Sequence: Synthetic oligonucleotide
  Antisense strand to SEQ ID NO: 2456434
uaccguauugaccaggcuc

SEQ ID NO: 2456436 - RNA, 19 nt, Artificial Sequence
  Description of Artificial Sequence: Synthetic oligonucleotide
  Sense strand starting at position 1726 of SEQ ID NO: 1887223
ugugguugagcgagaccuu

SEQ ID NO: 2456437 - RNA, 19 nt, Artificial Sequence
  Description of Artificial Sequence: Synthetic oligonucleotide
  Antisense strand to SEQ ID NO: 2456436
aaggucucgcucaaccaca

SEQ ID NO: 2456438 - RNA, 19 nt, Artificial Sequence
  Description of Artificial Sequence: Synthetic oligonucleotide
  Sense strand starting at position 1864 of SEQ ID NO: 1887223
uacugcuucuaugugggau

SEQ ID NO: 2456439 - RNA, 19 nt, Artificial Sequence
  Description of Artificial Sequence: Synthetic oligonucleotide
  Antisense strand to SEQ ID NO: 2456438
aucccacauagaagcagua

SEQ ID NO: 2456440 - RNA, 19 nt, Artificial Sequence
  Description of Artificial Sequence: Synthetic oligonucleotide
  Sense strand starting at position 1988 of SEQ ID NO: 1887223
gccuuuguaggaggguaaa

SEQ ID NO: 2456441 - RNA, 19 nt, Artificial Sequence
  Description of Artificial Sequence: Synthetic oligonucleotide
  Antisense strand to SEQ ID NO: 2456440
uuuacccuccuacaaaggc

SEQ ID NO: 2456442 - RNA, 19 nt, Artificial Sequence
  Description of Artificial Sequence: Synthetic oligonucleotide
  Sense strand starting at position 2568 of SEQ ID NO: 1887223
accacuaugccuggaugau

SEQ ID NO: 2456443 - RNA, 19 nt, Artificial Sequence
  Description of Artificial Sequence: Synthetic oligonucleotide
  Antisense strand to SEQ ID NO: 2456442
aucauccaggcauaguggu

SEQ ID NO: 2456444 - RNA, 19 nt, Artificial Sequence
  Description of Artificial Sequence: Synthetic oligonucleotide
  Sense strand starting at position 2719 of SEQ ID NO: 1887223
guucucuuauucuuaagag

SEQ ID NO: 2456445 - RNA, 19 nt, Artificial Sequence
  Description of Artificial Sequence: Synthetic oligonucleotide
  Antisense strand to SEQ ID NO: 2456444
cucuuaagaauaagagaac

SEQ ID NO: 2456446 - RNA, 19 nt, Artificial Sequence
  Description of Artificial Sequence: Synthetic oligonucleotide
  Sense strand starting at position 2812 of SEQ ID NO: 1887223
agggaagggucauaaugaa

SEQ ID NO: 2456447 - RNA, 19 nt, Artificial Sequence
  Description of Artificial Sequence: Synthetic oligonucleotide
  Antisense strand to SEQ ID NO: 2456446
uucauuaugacccuucccu

SEQ ID NO: 2456448 - RNA, 19 nt, Artificial Sequence
  Description of Artificial Sequence: Synthetic oligonucleotide
  Sense strand starting at position 2858 of SEQ ID NO: 1887223
uucugucguguagauuuau

SEQ ID NO: 2456449 - RNA, 19 nt, Artificial Sequence
  Description of Artificial Sequence: Synthetic oligonucleotide
  Antisense strand to SEQ ID NO: 2456448
auaaaucuacacgacagaa

SEQ ID NO: 2456450 - RNA, 19 nt, Artificial Sequence
  Description of Artificial Sequence: Synthetic oligonucleotide
  Sense strand starting at position 2942 of SEQ ID NO: 1887223
aagggauuccuacggccua

SEQ ID NO: 2456451 - RNA, 19 nt, Artificial Sequence
  Description of Artificial Sequence: Synthetic oligonucleotide
  Antisense strand to SEQ ID NO: 2456450
uaggccguaggaaucccuu

SEQ ID NO: 2456452 - RNA, 19 nt, Artificial Sequence
  Description of Artificial Sequence: Synthetic oligonucleotide
  Sense strand starting at position 2947 of SEQ ID NO: 1887223
auuccuacggccuaggaaa

SEQ ID NO: 2456453 - RNA, 19 nt, Artificial Sequence
  Description of Artificial Sequence: Synthetic oligonucleotide
  Antisense strand to SEQ ID NO: 2456452
uuuccuaggccguaggaau

SEQ ID NO: 2456454 - RNA, 19 nt, Artificial Sequence
  Description of Artificial Sequence: Synthetic oligonucleotide
  Sense strand starting at position 2970 of SEQ ID NO: 1887223
aagucagcucuugaaugca

SEQ ID NO: 2456455 - RNA, 19 nt, Artificial Sequence
  Description of Artificial Sequence: Synthetic oligonucleotide
  Antisense strand to SEQ ID NO: 2456454
ugcauucaagagcugacuu

SEQ ID NO: 2456456 - RNA, 19 nt, Artificial Sequence
  Description of Artificial Sequence: Synthetic oligonucleotide
  Sense strand starting at position 2989 of SEQ ID NO: 1887223
ggugcugaccuugaauaca

SEQ ID NO: 2456457 - RNA, 19 nt, Artificial Sequence
  Description of Artificial Sequence: Synthetic oligonucleotide
  Antisense strand to SEQ ID NO: 2456456
uguauucaaggucagcacc

SEQ ID NO: 2456458 - RNA, 19 nt, Artificial Sequence
  Description of Artificial Sequence: Synthetic oligonucleotide
  Sense strand starting at position 3259 of SEQ ID NO: 1887223
acaaauacgccagacaucu

SEQ ID NO: 2456459 - RNA, 19 nt, Artificial Sequence
  Description of Artificial Sequence: Synthetic oligonucleotide
  Antisense strand to SEQ ID NO: 2456458
agaugucuggcguauuugu

SEQ ID NO: 2456460 - RNA, 19 nt, Artificial Sequence
  Description of Artificial Sequence: Synthetic oligonucleotide
  Sense strand starting at position 3348 of SEQ ID NO: 1887223
uggugauaagcucauuguu

SEQ ID NO: 2456461 - RNA, 19 nt, Artificial Sequence
  Description of Artificial Sequence: Synthetic oligonucleotide
  Antisense strand to SEQ ID NO: 2456460
aacaaugagcuuaucacca

SEQ ID NO: 2456462 - RNA, 19 nt, Artificial Sequence
  Description of Artificial Sequence: Synthetic oligonucleotide
  Sense strand starting at position 3353 of SEQ ID NO: 1887223
auaagcucauuguuuguaa

SEQ ID NO: 2456463 - RNA, 19 nt, Artificial Sequence
  Description of Artificial Sequence: Synthetic oligonucleotide
  Antisense strand to SEQ ID NO: 2456462
uuacaaacaaugagcuuau

SEQ ID NO: 2456464 - RNA, 19 nt, Artificial Sequence
  Description of Artificial Sequence: Synthetic oligonucleotide
  Sense strand starting at position 3356 of SEQ ID NO: 1887223
agcucauuguuuguaaaua

SEQ ID NO: 2456465 - RNA, 19 nt, Artificial Sequence
  Description of Artificial Sequence: Synthetic oligonucleotide
  Antisense strand to SEQ ID NO: 2456464
uauuuacaaacaaugagcu

SEQ ID NO: 2456466 - RNA, 19 nt, Artificial Sequence
  Description of Artificial Sequence: Synthetic oligonucleotide
  Sense strand starting at position 3467 of SEQ ID NO: 1887223
aggaauaugccauggucua

SEQ ID NO: 2456467 - RNA, 19 nt, Artificial Sequence
  Description of Artificial Sequence: Synthetic oligonucleotide
  Antisense strand to SEQ ID NO: 2456466
uagaccauggcauauuccu

SEQ ID NO: 2456468 - RNA, 19 nt, Artificial Sequence
  Description of Artificial Sequence: Synthetic oligonucleotide
  Sense strand starting at position 3468 of SEQ ID NO: 1887223
ggaauaugccauggucuau

SEQ ID NO: 2456469 - RNA, 19 nt, Artificial Sequence
  Description of Artificial Sequence: Synthetic oligonucleotide
  Antisense strand to SEQ ID NO: 2456468
auagaccauggcauauucc

SEQ ID NO: 2456470 - RNA, 19 nt, Artificial Sequence
  Description of Artificial Sequence: Synthetic oligonucleotide
  Sense strand starting at position 3480 of SEQ ID NO: 1887223
ggucuaucacccuaguauc

SEQ ID NO: 2456471 - RNA, 19 nt, Artificial Sequence
  Description of Artificial Sequence: Synthetic oligonucleotide
  Antisense strand to SEQ ID NO: 2456470
gauacuagggugauagacc

SEQ ID NO: 2456472 - RNA, 19 nt, Artificial Sequence
  Description of Artificial Sequence: Synthetic oligonucleotide
  Sense strand starting at position 3585 of SEQ ID NO: 1887223
ccuaacagcugguuagagu

SEQ ID NO: 2456473 - RNA, 19 nt, Artificial Sequence
  Description of Artificial Sequence: Synthetic oligonucleotide
  Antisense strand to SEQ ID NO: 2456472
acucuaaccagcuguuagg

SEQ ID NO: 2456474 - RNA, 19 nt, Artificial Sequence
  Description of Artificial Sequence: Synthetic oligonucleotide
  Sense strand starting at position 3586 of SEQ ID NO: 1887223
cuaacagcugguuagaguu

SEQ ID NO: 2456475 - RNA, 19 nt, Artificial Sequence
  Description of Artificial Sequence: Synthetic oligonucleotide
  Antisense strand to SEQ ID NO: 2456474
aacucuaaccagcuguuag

SEQ ID NO: 2456476 - RNA, 19 nt, Artificial Sequence
  Description of Artificial Sequence: Synthetic oligonucleotide
  Sense strand starting at position 3592 of SEQ ID NO: 1887223
gcugguuagaguuaaauag

SEQ ID NO: 2456477 - RNA, 19 nt, Artificial Sequence
  Description of Artificial Sequence: Synthetic oligonucleotide
  Antisense strand to SEQ ID NO: 2456476
cuauuuaacucuaaccagc

SEQ ID NO: 2456478 - RNA, 19 nt, Artificial Sequence
  Description of Artificial Sequence: Synthetic oligonucleotide
  Sense strand starting at position 3651 of SEQ ID NO: 1887223
gaacacuuaccgugauaug

SEQ ID NO: 2456479 - RNA, 19 nt, Artificial Sequence
  Description of Artificial Sequence: Synthetic oligonucleotide
  Antisense strand to SEQ ID NO: 2456478
cauaucacgguaaguguuc

SEQ ID NO: 2456480 - RNA, 19 nt, Artificial Sequence
  Description of Artificial Sequence: Synthetic oligonucleotide
  Sense strand starting at position 3787 of SEQ ID NO: 1887223
uugaacuuaugaguaacuu

SEQ ID NO: 2456481 - RNA, 19 nt, Artificial Sequence
  Description of Artificial Sequence: Synthetic oligonucleotide
  Antisense strand to SEQ ID NO: 2456480
aaguuacucauaaguucaa

SEQ ID NO: 2456482 - RNA, 19 nt, Artificial Sequence
  Description of Artificial Sequence: Synthetic oligonucleotide
  Sense strand starting at position 3796 of SEQ ID NO: 1887223
ugaguaacuuccuuuguca

SEQ ID NO: 2456483 - RNA, 19 nt, Artificial Sequence
  Description of Artificial Sequence: Synthetic oligonucleotide
  Antisense strand to SEQ ID NO: 2456482
ugacaaaggaaguuacuca

SEQ ID NO: 2456484 - RNA, 19 nt, Artificial Sequence
  Description of Artificial Sequence: Synthetic oligonucleotide
  Sense strand starting at position 3798 of SEQ ID NO: 1887223
aguaacuuccuuugucaau

SEQ ID NO: 2456485 - RNA, 19 nt, Artificial Sequence
  Description of Artificial Sequence: Synthetic oligonucleotide
  Antisense strand to SEQ ID NO: 2456484
auugacaaaggaaguuacu

SEQ ID NO: 2456486 - RNA, 19 nt, Artificial Sequence
  Description of Artificial Sequence: Synthetic oligonucleotide
  Sense strand starting at position 3799 of SEQ ID NO: 1887223
guaacuuccuuugucaaug

SEQ ID NO: 2456487 - RNA, 19 nt, Artificial Sequence
  Description of Artificial Sequence: Synthetic oligonucleotide
  Antisense strand to SEQ ID NO: 2456486
cauugacaaaggaaguuac

SEQ ID NO: 2456488 - RNA, 19 nt, Artificial Sequence
  Description of Artificial Sequence: Synthetic oligonucleotide
  Sense strand starting at position 3877 of SEQ ID NO: 1887223
cucuccuaaucauuggaga

SEQ ID NO: 2456489 - RNA, 19 nt, Artificial Sequence
  Description of Artificial Sequence: Synthetic oligonucleotide
  Antisense strand to SEQ ID NO: 2456488
ucuccaaugauuaggagag

SEQ ID NO: 2456490 - RNA, 19 nt, Artificial Sequence
  Description of Artificial Sequence: Synthetic oligonucleotide
  Sense strand starting at position 3878 of SEQ ID NO: 1887223
ucuccuaaucauuggagau

SEQ ID NO: 2456491 - RNA, 19 nt, Artificial Sequence
  Description of Artificial Sequence: Synthetic oligonucleotide
  Antisense strand to SEQ ID NO: 2456490
aucuccaaugauuaggaga

SEQ ID NO: 2456492 - RNA, 19 nt, Artificial Sequence
  Description of Artificial Sequence: Synthetic oligonucleotide
  Sense strand starting at position 3902 of SEQ ID NO: 1887223
ggaauacuuuaauugguau

SEQ ID NO: 2456493 - RNA, 19 nt, Artificial Sequence
  Description of Artificial Sequence: Synthetic oligonucleotide
  Antisense strand to SEQ ID NO: 2456492
auaccaauuaaaguauucc

SEQ ID NO: 2456494 - RNA, 19 nt, Artificial Sequence
  Description of Artificial Sequence: Synthetic oligonucleotide
  Sense strand starting at position 3948 of SEQ ID NO: 1887223
gauagagcuucuguguuag

SEQ ID NO: 2456495 - RNA, 19 nt, Artificial Sequence
  Description of Artificial Sequence: Synthetic oligonucleotide
  Antisense strand to SEQ ID NO: 2456494
cuaacacagaagcucuauc

SEQ ID NO: 2456496 - RNA, 19 nt, Artificial Sequence
  Description of Artificial Sequence: Synthetic oligonucleotide
  Sense strand starting at position 448 of SEQ ID NO: 1887224
ucaguuucuuuacucuaga

SEQ ID NO: 2456497 - RNA, 19 nt, Artificial Sequence
  Description of Artificial Sequence: Synthetic oligonucleotide
  Antisense strand to SEQ ID NO: 2456496
ucuagaguaaagaaacuga

SEQ ID NO: 2456498 - RNA, 19 nt, Artificial Sequence
  Description of Artificial Sequence: Synthetic oligonucleotide
  Sense strand starting at position 785 of SEQ ID NO: 1887224
aaguguugggauuauacga

SEQ ID NO: 2456499 - RNA, 19 nt, Artificial Sequence
  Description of Artificial Sequence: Synthetic oligonucleotide
  Antisense strand to SEQ ID NO: 2456498
ucguauaaucccaacacuu

SEQ ID NO: 2456500 - RNA, 19 nt, Artificial Sequence
  Description of Artificial Sequence: Synthetic oligonucleotide
  Sense strand starting at position 843 of SEQ ID NO: 1887224
acaggugaugcauauccau

SEQ ID NO: 2456501 - RNA, 19 nt, Artificial Sequence
  Description of Artificial Sequence: Synthetic oligonucleotide
  Antisense strand to SEQ ID NO: 2456500
auggauaugcaucaccugu

SEQ ID NO: 2456502 - RNA, 19 nt, Artificial Sequence
  Description of Artificial Sequence: Synthetic oligonucleotide
  Sense strand starting at position 925 of SEQ ID NO: 1887224
agccaagugccuuagaaug

SEQ ID NO: 2456503 - RNA, 19 nt, Artificial Sequence
  Description of Artificial Sequence: Synthetic oligonucleotide
  Antisense strand to SEQ ID NO: 2456502
cauucuaaggcacuuggcu

SEQ ID NO: 2456504 - RNA, 19 nt, Artificial Sequence
  Description of Artificial Sequence: Synthetic oligonucleotide
  Sense strand starting at position 1087 of SEQ ID NO: 1887224
augaaacagcucuggcuau

SEQ ID NO: 2456505 - RNA, 19 nt, Artificial Sequence
  Description of Artificial Sequence: Synthetic oligonucleotide
  Antisense strand to SEQ ID NO: 2456504
auagccagagcuguuucau

SEQ ID NO: 2456506 - RNA, 19 nt, Artificial Sequence
  Description of Artificial Sequence: Synthetic oligonucleotide
  Sense strand starting at position 1101 of SEQ ID NO: 1887224
gcuauuaagcaagggugaa

SEQ ID NO: 2456507 - RNA, 19 nt, Artificial Sequence
  Description of Artificial Sequence: Synthetic oligonucleotide
  Antisense strand to SEQ ID NO: 2456506
uucacccuugcuuaauagc

SEQ ID NO: 2456508 - RNA, 19 nt, Artificial Sequence
  Description of Artificial Sequence: Synthetic oligonucleotide
  Sense strand starting at position 1102 of SEQ ID NO: 1887224
cuauuaagcaagggugaaa

SEQ ID NO: 2456509 - RNA, 19 nt, Artificial Sequence
  Description of Artificial Sequence: Synthetic oligonucleotide
  Antisense strand to SEQ ID NO: 2456508
uuucacccuugcuuaauag

SEQ ID NO: 2456510 - RNA, 19 nt, Artificial Sequence
  Description of Artificial Sequence: Synthetic oligonucleotide
  Sense strand starting at position 1167 of SEQ ID NO: 1887224
agggaucucuuagcccaua

SEQ ID NO: 2456511 - RNA, 19 nt, Artificial Sequence
  Description of Artificial Sequence: Synthetic oligonucleotide
  Antisense strand to SEQ ID NO: 2456510
uaugggcuaagagaucccu

SEQ ID NO: 2456512 - RNA, 19 nt, Artificial Sequence
  Description of Artificial Sequence: Synthetic oligonucleotide
  Sense strand starting at position 1172 of SEQ ID NO: 1887224
ucucuuagcccauagugaa

SEQ ID NO: 2456513 - RNA, 19 nt, Artificial Sequence
  Description of Artificial Sequence: Synthetic oligonucleotide
  Antisense strand to SEQ ID NO: 2456512
uucacuaugggcuaagaga

SEQ ID NO: 2456514 - RNA, 19 nt, Artificial Sequence
  Description of Artificial Sequence: Synthetic oligonucleotide
  Sense strand starting at position 1252 of SEQ ID NO: 1887224
ccauuugacucaggaaaug

SEQ ID NO: 2456515 - RNA, 19 nt, Artificial Sequence
  Description of Artificial Sequence: Synthetic oligonucleotide
  Antisense strand to SEQ ID NO: 2456514
cauuuccugagucaaaugg

SEQ ID NO: 2456516 - RNA, 19 nt, Artificial Sequence
  Description of Artificial Sequence: Synthetic oligonucleotide
  Sense strand starting at position 1277 of SEQ ID NO: 1887224
ggaagcaaugguuacguuu

SEQ ID NO: 2456517 - RNA, 19 nt, Artificial Sequence
  Description of Artificial Sequence: Synthetic oligonucleotide
  Antisense strand to SEQ ID NO: 2456516
aaacguaaccauugcuucc

SEQ ID NO: 2456518 - RNA, 19 nt, Artificial Sequence
  Description of Artificial Sequence: Synthetic oligonucleotide
  Sense strand starting at position 1324 of SEQ ID NO: 1887224
gcaggucucgagaguguua

SEQ ID NO: 2456519 - RNA, 19 nt, Artificial Sequence
  Description of Artificial Sequence: Synthetic oligonucleotide
  Antisense strand to SEQ ID NO: 2456518
uaacacucucgagaccugc

SEQ ID NO: 2456520 - RNA, 19 nt, Artificial Sequence
  Description of Artificial Sequence: Synthetic oligonucleotide
  Sense strand starting at position 1376 of SEQ ID NO: 1887224
agagaagacuucucugguc

SEQ ID NO: 2456521 - RNA, 19 nt, Artificial Sequence
  Description of Artificial Sequence: Synthetic oligonucleotide
  Antisense strand to SEQ ID NO: 2456520
gaccagagaagucuucucu

SEQ ID NO: 2456522 - RNA, 19 nt, Artificial Sequence
  Description of Artificial Sequence: Synthetic oligonucleotide
  Sense strand starting at position 1378 of SEQ ID NO: 1887224
agaagacuucucugguccu

SEQ ID NO: 2456523 - RNA, 19 nt, Artificial Sequence
  Description of Artificial Sequence: Synthetic oligonucleotide
  Antisense strand to SEQ ID NO: 2456522
aggaccagagaagucuucu

SEQ ID NO: 2456524 - RNA, 19 nt, Artificial Sequence
  Description of Artificial Sequence: Synthetic oligonucleotide
  Sense strand starting at position 1416 of SEQ ID NO: 1887224
cuaaaucagcccugaagga

SEQ ID NO: 2456525 - RNA, 19 nt, Artificial Sequence
  Description of Artificial Sequence: Synthetic oligonucleotide
  Antisense strand to SEQ ID NO: 2456524
uccuucagggcugauuuag

SEQ ID NO: 2456526 - RNA, 19 nt, Artificial Sequence
  Description of Artificial Sequence: Synthetic oligonucleotide
  Sense strand starting at position 1609 of SEQ ID NO: 1887224
uuaggaguugaauguggua

SEQ ID NO: 2456527 - RNA, 19 nt, Artificial Sequence
  Description of Artificial Sequence: Synthetic oligonucleotide
  Antisense strand to SEQ ID NO: 2456526
uaccacauucaacuccuaa

SEQ ID NO: 2456528 - RNA, 19 nt, Artificial Sequence
  Description of Artificial Sequence: Synthetic oligonucleotide
  Sense strand starting at position 1611 of SEQ ID NO: 1887224
aggaguugaaugugguaaa

SEQ ID NO: 2456529 - RNA, 19 nt, Artificial Sequence
  Description of Artificial Sequence: Synthetic oligonucleotide
  Antisense strand to SEQ ID NO: 2456528
uuuaccacauucaacuccu

SEQ ID NO: 2456530 - RNA, 19 nt, Artificial Sequence
  Description of Artificial Sequence: Synthetic oligonucleotide
  Sense strand starting at position 1630 of SEQ ID NO: 1887224
gagcauacccuuugggaua

SEQ ID NO: 2456531 - RNA, 19 nt, Artificial Sequence
  Description of Artificial Sequence: Synthetic oligonucleotide
  Antisense strand to SEQ ID NO: 2456530
uaucccaaaggguaugcuc

SEQ ID NO: 2456532 - RNA, 19 nt, Artificial Sequence
  Description of Artificial Sequence: Synthetic oligonucleotide
  Sense strand starting at position 1769 of SEQ ID NO: 1887224
guuauuaacucaucuagua

SEQ ID NO: 2456533 - RNA, 19 nt, Artificial Sequence
  Description of Artificial Sequence: Synthetic oligonucleotide
  Antisense strand to SEQ ID NO: 2456532
uacuagaugaguuaauaac

SEQ ID NO: 2456534 - RNA, 19 nt, Artificial Sequence
  Description of Artificial Sequence: Synthetic oligonucleotide
  Sense strand starting at position 1805 of SEQ ID NO: 1887224
cuagaaacauggcuguaga

SEQ ID NO: 2456535 - RNA, 19 nt, Artificial Sequence
  Description of Artificial Sequence: Synthetic oligonucleotide
  Antisense strand to SEQ ID NO: 2456534
ucuacagccauguuucuag

SEQ ID NO: 2456536 - RNA, 19 nt, Artificial Sequence
  Description of Artificial Sequence: Synthetic oligonucleotide
  Sense strand starting at position 1806 of SEQ ID NO: 1887224
uagaaacauggcuguagau

SEQ ID NO: 2456537 - RNA, 19 nt, Artificial Sequence
  Description of Artificial Sequence: Synthetic oligonucleotide
  Antisense strand to SEQ ID NO: 2456536
aucuacagccauguuucua

SEQ ID NO: 2456538 - RNA, 19 nt, Artificial Sequence
  Description of Artificial Sequence: Synthetic oligonucleotide
  Sense strand starting at position 1829 of SEQ ID NO: 1887224
auauaagcuggcuacaaua

SEQ ID NO: 2456539 - RNA, 19 nt, Artificial Sequence
  Description of Artificial Sequence: Synthetic oligonucleotide
  Antisense strand to SEQ ID NO: 2456538
uauuguagccagcuuauau

SEQ ID NO: 2456540 - RNA, 19 nt, Artificial Sequence
  Description of Artificial Sequence: Synthetic oligonucleotide
  Sense strand starting at position 2003 of SEQ ID NO: 1887224
uccacaaugucuucuggga

SEQ ID NO: 2456541 - RNA, 19 nt, Artificial Sequence
  Description of Artificial Sequence: Synthetic oligonucleotide
  Antisense strand to SEQ ID NO: 2456540
ucccagaagacauugugga

SEQ ID NO: 2456542 - RNA, 19 nt, Artificial Sequence
  Description of Artificial Sequence: Synthetic oligonucleotide
  Sense strand starting at position 2007 of SEQ ID NO: 1887224
caaugucuucugggacuga

SEQ ID NO: 2456543 - RNA, 19 nt, Artificial Sequence
  Description of Artificial Sequence: Synthetic oligonucleotide
  Antisense strand to SEQ ID NO: 2456542
ucagucccagaagacauug

SEQ ID NO: 2456544 - RNA, 19 nt, Artificial Sequence
  Description of Artificial Sequence: Synthetic oligonucleotide
  Sense strand starting at position 2027 of SEQ ID NO: 1887224
aggucucacccuugauaca

SEQ ID NO: 2456545 - RNA, 19 nt, Artificial Sequence
  Description of Artificial Sequence: Synthetic oligonucleotide
  Antisense strand to SEQ ID NO: 2456544
uguaucaagggugagaccu

SEQ ID NO: 2456546 - RNA, 19 nt, Artificial Sequence
  Description of Artificial Sequence: Synthetic oligonucleotide
  Sense strand starting at position 2028 of SEQ ID NO: 1887224
ggucucacccuugauacaa

SEQ ID NO: 2456547 - RNA, 19 nt, Artificial Sequence
  Description of Artificial Sequence: Synthetic oligonucleotide
  Antisense strand to SEQ ID NO: 2456546
uuguaucaagggugagacc

SEQ ID NO: 2456548 - RNA, 19 nt, Artificial Sequence
  Description of Artificial Sequence: Synthetic oligonucleotide
  Sense strand starting at position 2183 of SEQ ID NO: 1887224
gaaauuaaagcuugaguca

SEQ ID NO: 2456549 - RNA, 19 nt, Artificial Sequence
  Description of Artificial Sequence: Synthetic oligonucleotide
  Antisense strand to SEQ ID NO: 2456548
ugacucaagcuuuaauuuc

SEQ ID NO: 2456550 - RNA, 19 nt, Artificial Sequence
  Description of Artificial Sequence: Synthetic oligonucleotide
  Sense strand starting at position 2240 of SEQ ID NO: 1887224
agaaucuggugccuacuaa

SEQ ID NO: 2456551 - RNA, 19 nt, Artificial Sequence
  Description of Artificial Sequence: Synthetic oligonucleotide
  Antisense strand to SEQ ID NO: 2456550
uuaguaggcaccagauucu

SEQ ID NO: 2456552 - RNA, 19 nt, Artificial Sequence
  Description of Artificial Sequence: Synthetic oligonucleotide
  Sense strand starting at position 2306 of SEQ ID NO: 1887224
gcuucuagaugaucuggga

SEQ ID NO: 2456553 - RNA, 19 nt, Artificial Sequence
  Description of Artificial Sequence: Synthetic oligonucleotide
  Antisense strand to SEQ ID NO: 2456552
ucccagaucaucuagaagc

SEQ ID NO: 2456554 - RNA, 19 nt, Artificial Sequence
  Description of Artificial Sequence: Synthetic oligonucleotide
  Sense strand starting at position 2348 of SEQ ID NO: 1887224
cucuauacggcugaaaguu

SEQ ID NO: 2456555 - RNA, 19 nt, Artificial Sequence
  Description of Artificial Sequence: Synthetic oligonucleotide
  Antisense strand to SEQ ID NO: 2456554
aacuuucagccguauagag

SEQ ID NO: 2456556 - RNA, 19 nt, Artificial Sequence
  Description of Artificial Sequence: Synthetic oligonucleotide
  Sense strand starting at position 2449 of SEQ ID NO: 1887224
cuggaucuguugguuuaaa

SEQ ID NO: 2456557 - RNA, 19 nt, Artificial Sequence
  Description of Artificial Sequence: Synthetic oligonucleotide
  Antisense strand to SEQ ID NO: 2456556
uuuaaaccaacagauccag

SEQ ID NO: 2456558 - RNA, 19 nt, Artificial Sequence
  Description of Artificial Sequence: Synthetic oligonucleotide
  Sense strand starting at position 2450 of SEQ ID NO: 1887224
uggaucuguugguuuaaag

SEQ ID NO: 2456559 - RNA, 19 nt, Artificial Sequence
  Description of Artificial Sequence: Synthetic oligonucleotide
  Antisense strand to SEQ ID NO: 2456558
cuuuaaaccaacagaucca

SEQ ID NO: 2456560 - RNA, 19 nt, Artificial Sequence
  Description of Artificial Sequence: Synthetic oligonucleotide
  Sense strand starting at position 2457 of SEQ ID NO: 1887224
guugguuuaaagcauaagu

SEQ ID NO: 2456561 - RNA, 19 nt, Artificial Sequence
  Description of Artificial Sequence: Synthetic oligonucleotide
  Antisense strand to SEQ ID NO: 2456560
acuuaugcuuuaaaccaac

SEQ ID NO: 2456562 - RNA, 19 nt, Artificial Sequence
  Description of Artificial Sequence: Synthetic oligonucleotide
  Sense strand starting at position 2459 of SEQ ID NO: 1887224
ugguuuaaagcauaaguuu

SEQ ID NO: 2456563 - RNA, 19 nt, Artificial Sequence
  Description of Artificial Sequence: Synthetic oligonucleotide
  Antisense strand to SEQ ID NO: 2456562
aaacuuaugcuuuaaacca

SEQ ID NO: 2456564 - RNA, 19 nt, Artificial Sequence
  Description of Artificial Sequence: Synthetic oligonucleotide
  Sense strand starting at position 2540 of SEQ ID NO: 1887224
gcaugaugccaucaaucug

SEQ ID NO: 2456565 - RNA, 19 nt, Artificial Sequence
  Description of Artificial Sequence: Synthetic oligonucleotide
  Antisense strand to SEQ ID NO: 2456564
cagauugauggcaucaugc

SEQ ID NO: 2456566 - RNA, 19 nt, Artificial Sequence
  Description of Artificial Sequence: Synthetic oligonucleotide
  Sense strand starting at position 2555 of SEQ ID NO: 1887224
ucugcugucccagauccaa

SEQ ID NO: 2456567 - RNA, 19 nt, Artificial Sequence
  Description of Artificial Sequence: Synthetic oligonucleotide
  Antisense strand to SEQ ID NO: 2456566
uuggaucugggacagcaga

SEQ ID NO: 2456568 - RNA, 19 nt, Artificial Sequence
  Description of Artificial Sequence: Synthetic oligonucleotide
  Sense strand starting at position 2678 of SEQ ID NO: 1887224
gggugacccuuucugaaga

SEQ ID NO: 2456569 - RNA, 19 nt, Artificial Sequence
  Description of Artificial Sequence: Synthetic oligonucleotide
  Antisense strand to SEQ ID NO: 2456568
ucuucagaaagggucaccc

SEQ ID NO: 2456570 - RNA, 19 nt, Artificial Sequence
  Description of Artificial Sequence: Synthetic oligonucleotide
  Sense strand starting at position 3311 of SEQ ID NO: 1887224
aguccuggccgucaagaaa

SEQ ID NO: 2456571 - RNA, 19 nt, Artificial Sequence
  Description of Artificial Sequence: Synthetic oligonucleotide
  Antisense strand to SEQ ID NO: 2456570
uuucuugacggccaggacu

SEQ ID NO: 2456572 - RNA, 19 nt, Artificial Sequence
  Description of Artificial Sequence: Synthetic oligonucleotide
  Sense strand starting at position 3381 of SEQ ID NO: 1887224
gacgaagugacuggaucua

SEQ ID NO: 2456573 - RNA, 19 nt, Artificial Sequence
  Description of Artificial Sequence: Synthetic oligonucleotide
  Antisense strand to SEQ ID NO: 2456572
uagauccagucacuucguc

SEQ ID NO: 2456574 - RNA, 19 nt, Artificial Sequence
  Description of Artificial Sequence: Synthetic oligonucleotide
  Sense strand starting at position 3841 of SEQ ID NO: 1887224
cuuucuuaccgggaauccu

SEQ ID NO: 2456575 - RNA, 19 nt, Artificial Sequence
  Description of Artificial Sequence: Synthetic oligonucleotide
  Antisense strand to SEQ ID NO: 2456574
aggauucccgguaagaaag

SEQ ID NO: 2456576 - RNA, 19 nt, Artificial Sequence
  Description of Artificial Sequence: Synthetic oligonucleotide
  Sense strand starting at position 183 of SEQ ID NO: 1887225
ggcauagugucuguucuga

SEQ ID NO: 2456577 - RNA, 19 nt, Artificial Sequence
  Description of Artificial Sequence: Synthetic oligonucleotide
  Antisense strand to SEQ ID NO: 2456576
ucagaacagacacuaugcc

SEQ ID NO: 2456578 - RNA, 19 nt, Artificial Sequence
  Description of Artificial Sequence: Synthetic oligonucleotide
  Sense strand starting at position 185 of SEQ ID NO: 1887225
cauagugucuguucugaaa

SEQ ID NO: 2456579 - RNA, 19 nt, Artificial Sequence
  Description of Artificial Sequence: Synthetic oligonucleotide
  Antisense strand to SEQ ID NO: 2456578
uuucagaacagacacuaug

SEQ ID NO: 2456580 - RNA, 19 nt, Artificial Sequence
  Description of Artificial Sequence: Synthetic oligonucleotide
  Sense strand starting at position 214 of SEQ ID NO: 1887225
ggauccagcuuagaagaca

SEQ ID NO: 2456581 - RNA, 19 nt, Artificial Sequence
  Description of Artificial Sequence: Synthetic oligonucleotide
  Antisense strand to SEQ ID NO: 2456580
ugucuucuaagcuggaucc

SEQ ID NO: 2456582 - RNA, 19 nt, Artificial Sequence
  Description of Artificial Sequence: Synthetic oligonucleotide
  Sense strand starting at position 256 of SEQ ID NO: 1887225
gggaaacaacccuguauug

SEQ ID NO: 2456583 - RNA, 19 nt, Artificial Sequence
  Description of Artificial Sequence: Synthetic oligonucleotide
  Antisense strand to SEQ ID NO: 2456582
caauacaggguuguuuccc

SEQ ID NO: 2456584 - RNA, 19 nt, Artificial Sequence
  Description of Artificial Sequence: Synthetic oligonucleotide
  Sense strand starting at position 258 of SEQ ID NO: 1887225
gaaacaacccuguauugug

SEQ ID NO: 2456585 - RNA, 19 nt, Artificial Sequence
  Description of Artificial Sequence: Synthetic oligonucleotide
  Antisense strand to SEQ ID NO: 2456584
cacaauacaggguuguuuc

SEQ ID NO: 2456586 - RNA, 19 nt, Artificial Sequence
  Description of Artificial Sequence: Synthetic oligonucleotide
  Sense strand starting at position 266 of SEQ ID NO: 1887225
ccuguauugugguuaggga

SEQ ID NO: 2456587 - RNA, 19 nt, Artificial Sequence
  Description of Artificial Sequence: Synthetic oligonucleotide
  Antisense strand to SEQ ID NO: 2456586
ucccuaaccacaauacagg

SEQ ID NO: 2456588 - RNA, 19 nt, Artificial Sequence
  Description of Artificial Sequence: Synthetic oligonucleotide
  Sense strand starting at position 267 of SEQ ID NO: 1887225
cuguauugugguuagggau

SEQ ID NO: 2456589 - RNA, 19 nt, Artificial Sequence
  Description of Artificial Sequence: Synthetic oligonucleotide
  Antisense strand to SEQ ID NO: 2456588
aucccuaaccacaauacag

SEQ ID NO: 2456590 - RNA, 19 nt, Artificial Sequence
  Description of Artificial Sequence: Synthetic oligonucleotide
  Sense strand starting at position 402 of SEQ ID NO: 1887225
ggaguugaaucauagaacc

SEQ ID NO: 2456591 - RNA, 19 nt, Artificial Sequence
  Description of Artificial Sequence: Synthetic oligonucleotide
  Antisense strand to SEQ ID NO: 2456590
gguucuaugauucaacucc

SEQ ID NO: 2456592 - RNA, 19 nt, Artificial Sequence
  Description of Artificial Sequence: Synthetic oligonucleotide
  Sense strand starting at position 429 of SEQ ID NO: 1887225
ugggcuauugugggaacuu

SEQ ID NO: 2456593 - RNA, 19 nt, Artificial Sequence
  Description of Artificial Sequence: Synthetic oligonucleotide
  Antisense strand to SEQ ID NO: 2456592
aaguucccacaauagccca

SEQ ID NO: 2456594 - RNA, 19 nt, Artificial Sequence
  Description of Artificial Sequence: Synthetic oligonucleotide
  Sense strand starting at position 441 of SEQ ID NO: 1887225
ggaacuuaaugaguccaua

SEQ ID NO: 2456595 - RNA, 19 nt, Artificial Sequence
  Description of Artificial Sequence: Synthetic oligonucleotide
  Antisense strand to SEQ ID NO: 2456594
uauggacucauuaaguucc

SEQ ID NO: 2456596 - RNA, 19 nt, Artificial Sequence
  Description of Artificial Sequence: Synthetic oligonucleotide
  Sense strand starting at position 461 of SEQ ID NO: 1887225
augcuaacugcuuagaaga

SEQ ID NO: 2456597 - RNA, 19 nt, Artificial Sequence
  Description of Artificial Sequence: Synthetic oligonucleotide
  Antisense strand to SEQ ID NO: 2456596
ucuucuaagcaguuagcau

SEQ ID NO: 2456598 - RNA, 19 nt, Artificial Sequence
  Description of Artificial Sequence: Synthetic oligonucleotide
  Sense strand starting at position 481 of SEQ ID NO: 1887225
gcauguaggaauugcucaa

SEQ ID NO: 2456599 - RNA, 19 nt, Artificial Sequence
  Description of Artificial Sequence: Synthetic oligonucleotide
  Antisense strand to SEQ ID NO: 2456598
uugagcaauuccuacaugc

SEQ ID NO: 2456600 - RNA, 19 nt, Artificial Sequence
  Description of Artificial Sequence: Synthetic oligonucleotide
  Sense strand starting at position 566 of SEQ ID NO: 1887225
ggagucaucacuuguugaa

SEQ ID NO: 2456601 - RNA, 19 nt, Artificial Sequence
  Description of Artificial Sequence: Synthetic oligonucleotide
  Antisense strand to SEQ ID NO: 2456600
uucaacaagugaugacucc

SEQ ID NO: 2456602 - RNA, 19 nt, Artificial Sequence
  Description of Artificial Sequence: Synthetic oligonucleotide
  Sense strand starting at position 568 of SEQ ID NO: 1887225
agucaucacuuguugaaac

SEQ ID NO: 2456603 - RNA, 19 nt, Artificial Sequence
  Description of Artificial Sequence: Synthetic oligonucleotide
  Antisense strand to SEQ ID NO: 2456602
guuucaacaagugaugacu

SEQ ID NO: 2456604 - RNA, 19 nt, Artificial Sequence
  Description of Artificial Sequence: Synthetic oligonucleotide
  Sense strand starting at position 588 of SEQ ID NO: 1887225
ugaacauugccuuaggauc

SEQ ID NO: 2456605 - RNA, 19 nt, Artificial Sequence
  Description of Artificial Sequence: Synthetic oligonucleotide
  Antisense strand to SEQ ID NO: 2456604
gauccuaaggcaauguuca

SEQ ID NO: 2456606 - RNA, 19 nt, Artificial Sequence
  Description of Artificial Sequence: Synthetic oligonucleotide
  Sense strand starting at position 664 of SEQ ID NO: 1887225
guaauagaagacugagucu

SEQ ID NO: 2456607 - RNA, 19 nt, Artificial Sequence
  Description of Artificial Sequence: Synthetic oligonucleotide
  Antisense strand to SEQ ID NO: 2456606
agacucagucuucuauuac

SEQ ID NO: 2456608 - RNA, 19 nt, Artificial Sequence
  Description of Artificial Sequence: Synthetic oligonucleotide
  Sense strand starting at position 673 of SEQ ID NO: 1887225
gacugagucucugccuaua

SEQ ID NO: 2456609 - RNA, 19 nt, Artificial Sequence
  Description of Artificial Sequence: Synthetic oligonucleotide
  Antisense strand to SEQ ID NO: 2456608
uauaggcagagacucaguc

SEQ ID NO: 2456610 - RNA, 19 nt, Artificial Sequence
  Description of Artificial Sequence: Synthetic oligonucleotide
  Sense strand starting at position 676 of SEQ ID NO: 1887225
ugagucucugccuauaaau

SEQ ID NO: 2456611 - RNA, 19 nt, Artificial Sequence
  Description of Artificial Sequence: Synthetic oligonucleotide
  Antisense strand to SEQ ID NO: 2456610
auuuauaggcagagacuca

SEQ ID NO: 2456612 - RNA, 19 nt, Artificial Sequence
  Description of Artificial Sequence: Synthetic oligonucleotide
  Sense strand starting at position 712 of SEQ ID NO: 1887225
cagagaucgccugacaaau

SEQ ID NO: 2456613 - RNA, 19 nt, Artificial Sequence
  Description of Artificial Sequence: Synthetic oligonucleotide
  Antisense strand to SEQ ID NO: 2456612
auuugucaggcgaucucug

SEQ ID NO: 2456614 - RNA, 19 nt, Artificial Sequence
  Description of Artificial Sequence: Synthetic oligonucleotide
  Sense strand starting at position 755 of SEQ ID NO: 1887225
guaguaacuugacaggaga

SEQ ID NO: 2456615 - RNA, 19 nt, Artificial Sequence
  Description of Artificial Sequence: Synthetic oligonucleotide
  Antisense strand to SEQ ID NO: 2456614
ucuccugucaaguuacuac

SEQ ID NO: 2456616 - RNA, 19 nt, Artificial Sequence
  Description of Artificial Sequence: Synthetic oligonucleotide
  Sense strand starting at position 1342 of SEQ ID NO: 1887225
gaagaucuguuccagauua

SEQ ID NO: 2456617 - RNA, 19 nt, Artificial Sequence
  Description of Artificial Sequence: Synthetic oligonucleotide
  Antisense strand to SEQ ID NO: 2456616
uaaucuggaacagaucuuc

SEQ ID NO: 2456618 - RNA, 19 nt, Artificial Sequence
  Description of Artificial Sequence: Synthetic oligonucleotide
  Sense strand starting at position 1450 of SEQ ID NO: 1887225
gauauaguauuugaacaug

SEQ ID NO: 2456619 - RNA, 19 nt, Artificial Sequence
  Description of Artificial Sequence: Synthetic oligonucleotide
  Antisense strand to SEQ ID NO: 2456618
cauguucaaauacuauauc

SEQ ID NO: 2456620 - RNA, 19 nt, Artificial Sequence
  Description of Artificial Sequence: Synthetic oligonucleotide
  Sense strand starting at position 1462 of SEQ ID NO: 1887225
gaacauggacuguguagau

SEQ ID NO: 2456621 - RNA, 19 nt, Artificial Sequence
  Description of Artificial Sequence: Synthetic oligonucleotide
  Antisense strand to SEQ ID NO: 2456620
aucuacacaguccauguuc

SEQ ID NO: 2456622 - RNA, 19 nt, Artificial Sequence
  Description of Artificial Sequence: Synthetic oligonucleotide
  Sense strand starting at position 1582 of SEQ ID NO: 1887225
uggaaagcauauggaaaua

SEQ ID NO: 2456623 - RNA, 19 nt, Artificial Sequence
  Description of Artificial Sequence: Synthetic oligonucleotide
  Antisense strand to SEQ ID NO: 2456622
uauuuccauaugcuuucca

SEQ ID NO: 2456624 - RNA, 19 nt, Artificial Sequence
  Description of Artificial Sequence: Synthetic oligonucleotide
  Sense strand starting at position 2031 of SEQ ID NO: 1887225
agacaaguauaugaagaua

SEQ ID NO: 2456625 - RNA, 19 nt, Artificial Sequence
  Description of Artificial Sequence: Synthetic oligonucleotide
  Antisense strand to SEQ ID NO: 2456624
uaucuucauauacuugucu

SEQ ID NO: 2456626 - RNA, 19 nt, Artificial Sequence
  Description of Artificial Sequence: Synthetic oligonucleotide
  Sense strand starting at position 2057 of SEQ ID NO: 1887225
cuaggauguuccuugaaga

SEQ ID NO: 2456627 - RNA, 19 nt, Artificial Sequence
  Description of Artificial Sequence: Synthetic oligonucleotide
  Antisense strand to SEQ ID NO: 2456626
ucuucaaggaacauccuag

SEQ ID NO: 2456628 - RNA, 19 nt, Artificial Sequence
  Description of Artificial Sequence: Synthetic oligonucleotide
  Sense strand starting at position 2068 of SEQ ID NO: 1887225
cuugaagaguuguuaauau

SEQ ID NO: 2456629 - RNA, 19 nt, Artificial Sequence
  Description of Artificial Sequence: Synthetic oligonucleotide
  Antisense strand to SEQ ID NO: 2456628
auauuaacaacucuucaag

SEQ ID NO: 2456630 - RNA, 19 nt, Artificial Sequence
  Description of Artificial Sequence: Synthetic oligonucleotide
  Sense strand starting at position 2411 of SEQ ID NO: 1887225
agcauaucugcuggcuuga

SEQ ID NO: 2456631 - RNA, 19 nt, Artificial Sequence
  Description of Artificial Sequence: Synthetic oligonucleotide
  Antisense strand to SEQ ID NO: 2456630
ucaagccagcagauaugcu

SEQ ID NO: 2456632 - RNA, 19 nt, Artificial Sequence
  Description of Artificial Sequence: Synthetic oligonucleotide
  Sense strand starting at position 2552 of SEQ ID NO: 1887225
ugacuaguguucucuauga

SEQ ID NO: 2456633 - RNA, 19 nt, Artificial Sequence
  Description of Artificial Sequence: Synthetic oligonucleotide
  Antisense strand to SEQ ID NO: 2456632
ucauagagaacacuaguca

SEQ ID NO: 2456634 - RNA, 19 nt, Artificial Sequence
  Description of Artificial Sequence: Synthetic oligonucleotide
  Sense strand starting at position 2554 of SEQ ID NO: 1887225
acuaguguucucuaugauc

SEQ ID NO: 2456635 - RNA, 19 nt, Artificial Sequence
  Description of Artificial Sequence: Synthetic oligonucleotide
  Antisense strand to SEQ ID NO: 2456634
gaucauagagaacacuagu

SEQ ID NO: 2456636 - RNA, 19 nt, Artificial Sequence
  Description of Artificial Sequence: Synthetic oligonucleotide
  Sense strand starting at position 2667 of SEQ ID NO: 1887225
gucuacugucaauaaugcu

SEQ ID NO: 2456637 - RNA, 19 nt, Artificial Sequence
  Description of Artificial Sequence: Synthetic oligonucleotide
  Antisense strand to SEQ ID NO: 2456636
agcauuauugacaguagac

SEQ ID NO: 2456638 - RNA, 19 nt, Artificial Sequence
  Description of Artificial Sequence: Synthetic oligonucleotide
  Sense strand starting at position 3114 of SEQ ID NO: 1887225
ugauguuuauggucauaca

SEQ ID NO: 2456639 - RNA, 19 nt, Artificial Sequence
  Description of Artificial Sequence: Synthetic oligonucleotide
  Antisense strand to SEQ ID NO: 2456638
uguaugaccauaaacauca

SEQ ID NO: 2456640 - RNA, 19 nt, Artificial Sequence
  Description of Artificial Sequence: Synthetic oligonucleotide
  Sense strand starting at position 3115 of SEQ ID NO: 1887225
gauguuuauggucauacac

SEQ ID NO: 2456641 - RNA, 19 nt, Artificial Sequence
  Description of Artificial Sequence: Synthetic oligonucleotide
  Antisense strand to SEQ ID NO: 2456640
guguaugaccauaaacauc

SEQ ID NO: 2456642 - RNA, 19 nt, Artificial Sequence
  Description of Artificial Sequence: Synthetic oligonucleotide
  Sense strand starting at position 3137 of SEQ ID NO: 1887225
gccucaucccucugcuaug

SEQ ID NO: 2456643 - RNA, 19 nt, Artificial Sequence
  Description of Artificial Sequence: Synthetic oligonucleotide
  Antisense strand to SEQ ID NO: 2456642
cauagcagagggaugaggc

SEQ ID NO: 2456644 - RNA, 19 nt, Artificial Sequence
  Description of Artificial Sequence: Synthetic oligonucleotide
  Sense strand starting at position 3173 of SEQ ID NO: 1887225
caaggcauuuguguuguga

SEQ ID NO: 2456645 - RNA, 19 nt, Artificial Sequence
  Description of Artificial Sequence: Synthetic oligonucleotide
  Antisense strand to SEQ ID NO: 2456644
ucacaacacaaaugccuug

SEQ ID NO: 2456646 - RNA, 19 nt, Artificial Sequence
  Description of Artificial Sequence: Synthetic oligonucleotide
  Sense strand starting at position 3260 of SEQ ID NO: 1887225
ugcguuaggagauggagaa

SEQ ID NO: 2456647 - RNA, 19 nt, Artificial Sequence
  Description of Artificial Sequence: Synthetic oligonucleotide
  Antisense strand to SEQ ID NO: 2456646
uucuccaucuccuaacgca

SEQ ID NO: 2456648 - RNA, 19 nt, Artificial Sequence
  Description of Artificial Sequence: Synthetic oligonucleotide
  Sense strand starting at position 3281 of SEQ ID NO: 1887225
agcagaucaugugcaguuu

SEQ ID NO: 2456649 - RNA, 19 nt, Artificial Sequence
  Description of Artificial Sequence: Synthetic oligonucleotide
  Antisense strand to SEQ ID NO: 2456648
aaacugcacaugaucugcu

SEQ ID NO: 2456650 - RNA, 19 nt, Artificial Sequence
  Description of Artificial Sequence: Synthetic oligonucleotide
  Sense strand starting at position 3326 of SEQ ID NO: 1887225
ggaagauccagcuguagca

SEQ ID NO: 2456651 - RNA, 19 nt, Artificial Sequence
  Description of Artificial Sequence: Synthetic oligonucleotide
  Antisense strand to SEQ ID NO: 2456650
ugcuacagcuggaucuucc

SEQ ID NO: 2456652 - RNA, 19 nt, Artificial Sequence
  Description of Artificial Sequence: Synthetic oligonucleotide
  Sense strand starting at position 3409 of SEQ ID NO: 1887225
guacgaaugccugugcuca

SEQ ID NO: 2456653 - RNA, 19 nt, Artificial Sequence
  Description of Artificial Sequence: Synthetic oligonucleotide
  Antisense strand to SEQ ID NO: 2456652
ugagcacaggcauucguac

SEQ ID NO: 2456654 - RNA, 19 nt, Artificial Sequence
  Description of Artificial Sequence: Synthetic oligonucleotide
  Sense strand starting at position 3630 of SEQ ID NO: 1887225
cgucauccauccucauaca

SEQ ID NO: 2456655 - RNA, 19 nt, Artificial Sequence
  Description of Artificial Sequence: Synthetic oligonucleotide
  Antisense strand to SEQ ID NO: 2456654
uguaugaggauggaugacg

SEQ ID NO: 2456656 - RNA, 19 nt, Artificial Sequence
  Description of Artificial Sequence: Synthetic oligonucleotide
  Sense strand starting at position 183 of SEQ ID NO: 1887226
ggcauagugucuguucuga

SEQ ID NO: 2456657 - RNA, 19 nt, Artificial Sequence
  Description of Artificial Sequence: Synthetic oligonucleotide
  Antisense strand to SEQ ID NO: 2456656
ucagaacagacacuaugcc

SEQ ID NO: 2456658 - RNA, 19 nt, Artificial Sequence
  Description of Artificial Sequence: Synthetic oligonucleotide
  Sense strand starting at position 185 of SEQ ID NO: 1887226
cauagugucuguucugaaa

SEQ ID NO: 2456659 - RNA, 19 nt, Artificial Sequence
  Description of Artificial Sequence: Synthetic oligonucleotide
  Antisense strand to SEQ ID NO: 2456658
uuucagaacagacacuaug

SEQ ID NO: 2456660 - RNA, 19 nt, Artificial Sequence
  Description of Artificial Sequence: Synthetic oligonucleotide
  Sense strand starting at position 214 of SEQ ID NO: 1887226
ggauccagcuuagaagaca

SEQ ID NO: 2456661 - RNA, 19 nt, Artificial Sequence
  Description of Artificial Sequence: Synthetic oligonucleotide
  Antisense strand to SEQ ID NO: 2456660
ugucuucuaagcuggaucc

SEQ ID NO: 2456662 - RNA, 19 nt, Artificial Sequence
  Description of Artificial Sequence: Synthetic oligonucleotide
  Sense strand starting at position 256 of SEQ ID NO: 1887226
gggaaacaacccuguauug

SEQ ID NO: 2456663 - RNA, 19 nt, Artificial Sequence
  Description of Artificial Sequence: Synthetic oligonucleotide
  Antisense strand to SEQ ID NO: 2456662
caauacaggguuguuuccc

SEQ ID NO: 2456664 - RNA, 19 nt, Artificial Sequence
  Description of Artificial Sequence: Synthetic oligonucleotide
  Sense strand starting at position 258 of SEQ ID NO: 1887226
gaaacaacccuguauugug

SEQ ID NO: 2456665 - RNA, 19 nt, Artificial Sequence
  Description of Artificial Sequence: Synthetic oligonucleotide
  Antisense strand to SEQ ID NO: 2456664
cacaauacaggguuguuuc

SEQ ID NO: 2456666 - RNA, 19 nt, Artificial Sequence
  Description of Artificial Sequence: Synthetic oligonucleotide
  Sense strand starting at position 266 of SEQ ID NO: 1887226
ccuguauugugguuaggga

SEQ ID NO: 2456667 - RNA, 19 nt, Artificial Sequence
  Description of Artificial Sequence: Synthetic oligonucleotide
  Antisense strand to SEQ ID NO: 2456666
ucccuaaccacaauacagg

SEQ ID NO: 2456668 - RNA, 19 nt, Artificial Sequence
  Description of Artificial Sequence: Synthetic oligonucleotide
  Sense strand starting at position 267 of SEQ ID NO: 1887226
cuguauugugguuagggau

SEQ ID NO: 2456669 - RNA, 19 nt, Artificial Sequence
  Description of Artificial Sequence: Synthetic oligonucleotide
  Antisense strand to SEQ ID NO: 2456668
aucccuaaccacaauacag

SEQ ID NO: 2456670 - RNA, 19 nt, Artificial Sequence
  Description of Artificial Sequence: Synthetic oligonucleotide
  Sense strand starting at position 402 of SEQ ID NO: 1887226
ggaguugaaucauagaacc

SEQ ID NO: 2456671 - RNA, 19 nt, Artificial Sequence
  Description of Artificial Sequence: Synthetic oligonucleotide
  Antisense strand to SEQ ID NO: 2456670
gguucuaugauucaacucc

SEQ ID NO: 2456672 - RNA, 19 nt, Artificial Sequence
  Description of Artificial Sequence: Synthetic oligonucleotide
  Sense strand starting at position 429 of SEQ ID NO: 1887226
ugggcuauugugggaacuu

SEQ ID NO: 2456673 - RNA, 19 nt, Artificial Sequence
  Description of Artificial Sequence: Synthetic oligonucleotide
  Antisense strand to SEQ ID NO: 2456672
aaguucccacaauagccca

SEQ ID NO: 2456674 - RNA, 19 nt, Artificial Sequence
  Description of Artificial Sequence: Synthetic oligonucleotide
  Sense strand starting at position 441 of SEQ ID NO: 1887226
ggaacuuaaugaguccaua

SEQ ID NO: 2456675 - RNA, 19 nt, Artificial Sequence
  Description of Artificial Sequence: Synthetic oligonucleotide
  Antisense strand to SEQ ID NO: 2456674
uauggacucauuaaguucc

SEQ ID NO: 2456676 - RNA, 19 nt, Artificial Sequence
  Description of Artificial Sequence: Synthetic oligonucleotide
  Sense strand starting at position 461 of SEQ ID NO: 1887226
augcuaacugcuuagaaga

SEQ ID NO: 2456677 - RNA, 19 nt, Artificial Sequence
  Description of Artificial Sequence: Synthetic oligonucleotide
  Antisense strand to SEQ ID NO: 2456676
ucuucuaagcaguuagcau

SEQ ID NO: 2456678 - RNA, 19 nt, Artificial Sequence
  Description of Artificial Sequence: Synthetic oligonucleotide
  Sense strand starting at position 481 of SEQ ID NO: 1887226
gcauguaggaauugcucaa

SEQ ID NO: 2456679 - RNA, 19 nt, Artificial Sequence
  Description of Artificial Sequence: Synthetic oligonucleotide
  Antisense strand to SEQ ID NO: 2456678
uugagcaauuccuacaugc

SEQ ID NO: 2456680 - RNA, 19 nt, Artificial Sequence
  Description of Artificial Sequence: Synthetic oligonucleotide
  Sense strand starting at position 566 of SEQ ID NO: 1887226
ggagucaucacuuguugaa

SEQ ID NO: 2456681 - RNA, 19 nt, Artificial Sequence
  Description of Artificial Sequence: Synthetic oligonucleotide
  Antisense strand to SEQ ID NO: 2456680
uucaacaagugaugacucc

SEQ ID NO: 2456682 - RNA, 19 nt, Artificial Sequence
  Description of Artificial Sequence: Synthetic oligonucleotide
  Sense strand starting at position 568 of SEQ ID NO: 1887226
agucaucacuuguugaaac

SEQ ID NO: 2456683 - RNA, 19 nt, Artificial Sequence
  Description of Artificial Sequence: Synthetic oligonucleotide
  Antisense strand to SEQ ID NO: 2456682
guuucaacaagugaugacu

SEQ ID NO: 2456684 - RNA, 19 nt, Artificial Sequence
  Description of Artificial Sequence: Synthetic oligonucleotide
  Sense strand starting at position 588 of SEQ ID NO: 1887226
ugaacauugccuuaggauc

SEQ ID NO: 2456685 - RNA, 19 nt, Artificial Sequence
  Description of Artificial Sequence: Synthetic oligonucleotide
  Antisense strand to SEQ ID NO: 2456684
gauccuaaggcaauguuca

SEQ ID NO: 2456686 - RNA, 19 nt, Artificial Sequence
  Description of Artificial Sequence: Synthetic oligonucleotide
  Sense strand starting at position 664 of SEQ ID NO: 1887226
guaauagaagacugagucu

SEQ ID NO: 2456687 - RNA, 19 nt, Artificial Sequence
  Description of Artificial Sequence: Synthetic oligonucleotide
  Antisense strand to SEQ ID NO: 2456686
agacucagucuucuauuac

SEQ ID NO: 2456688 - RNA, 19 nt, Artificial Sequence
  Description of Artificial Sequence: Synthetic oligonucleotide
  Sense strand starting at position 673 of SEQ ID NO: 1887226
gacugagucucugccuaua

SEQ ID NO: 2456689 - RNA, 19 nt, Artificial Sequence
  Description of Artificial Sequence: Synthetic oligonucleotide
  Antisense strand to SEQ ID NO: 2456688
uauaggcagagacucaguc

SEQ ID NO: 2456690 - RNA, 19 nt, Artificial Sequence
  Description of Artificial Sequence: Synthetic oligonucleotide
  Sense strand starting at position 676 of SEQ ID NO: 1887226
ugagucucugccuauaaau

SEQ ID NO: 2456691 - RNA, 19 nt, Artificial Sequence
  Description of Artificial Sequence: Synthetic oligonucleotide
  Antisense strand to SEQ ID NO: 2456690
auuuauaggcagagacuca

SEQ ID NO: 2456692 - RNA, 19 nt, Artificial Sequence
  Description of Artificial Sequence: Synthetic oligonucleotide
  Sense strand starting at position 712 of SEQ ID NO: 1887226
cagagaucgccugacaaau

SEQ ID NO: 2456693 - RNA, 19 nt, Artificial Sequence
  Description of Artificial Sequence: Synthetic oligonucleotide
  Antisense strand to SEQ ID NO: 2456692
auuugucaggcgaucucug

SEQ ID NO: 2456694 - RNA, 19 nt, Artificial Sequence
  Description of Artificial Sequence: Synthetic oligonucleotide
  Sense strand starting at position 755 of SEQ ID NO: 1887226
guaguaacuugacaggaga

SEQ ID NO: 2456695 - RNA, 19 nt, Artificial Sequence
  Description of Artificial Sequence: Synthetic oligonucleotide
  Antisense strand to SEQ ID NO: 2456694
ucuccugucaaguuacuac

SEQ ID NO: 2456696 - RNA, 19 nt, Artificial Sequence
  Description of Artificial Sequence: Synthetic oligonucleotide
  Sense strand starting at position 1342 of SEQ ID NO: 1887226
gaagaucuguuccagauua

SEQ ID NO: 2456697 - RNA, 19 nt, Artificial Sequence
  Description of Artificial Sequence: Synthetic oligonucleotide
  Antisense strand to SEQ ID NO: 2456696
uaaucuggaacagaucuuc

SEQ ID NO: 2456698 - RNA, 19 nt, Artificial Sequence
  Description of Artificial Sequence: Synthetic oligonucleotide
  Sense strand starting at position 1450 of SEQ ID NO: 1887226
gauauaguauuugaacaug

SEQ ID NO: 2456699 - RNA, 19 nt, Artificial Sequence
  Description of Artificial Sequence: Synthetic oligonucleotide
  Antisense strand to SEQ ID NO: 2456698
cauguucaaauacuauauc

SEQ ID NO: 2456700 - RNA, 19 nt, Artificial Sequence
  Description of Artificial Sequence: Synthetic oligonucleotide
  Sense strand starting at position 1462 of SEQ ID NO: 1887226
gaacauggacuguguagau

SEQ ID NO: 2456701 - RNA, 19 nt, Artificial Sequence
  Description of Artificial Sequence: Synthetic oligonucleotide
  Antisense strand to SEQ ID NO: 2456700
aucuacacaguccauguuc

SEQ ID NO: 2456702 - RNA, 19 nt, Artificial Sequence
  Description of Artificial Sequence: Synthetic oligonucleotide
  Sense strand starting at position 1582 of SEQ ID NO: 1887226
uggaaagcauauggaaaua

SEQ ID NO: 2456703 - RNA, 19 nt, Artificial Sequence
  Description of Artificial Sequence: Synthetic oligonucleotide
  Antisense strand to SEQ ID NO: 2456702
uauuuccauaugcuuucca

SEQ ID NO: 2456704 - RNA, 19 nt, Artificial Sequence
  Description of Artificial Sequence: Synthetic oligonucleotide
  Sense strand starting at position 2031 of SEQ ID NO: 1887226
agacaaguauaugaagaua

SEQ ID NO: 2456705 - RNA, 19 nt, Artificial Sequence
  Description of Artificial Sequence: Synthetic oligonucleotide
  Antisense strand to SEQ ID NO: 2456704
uaucuucauauacuugucu

SEQ ID NO: 2456706 - RNA, 19 nt, Artificial Sequence
  Description of Artificial Sequence: Synthetic oligonucleotide
  Sense strand starting at position 2057 of SEQ ID NO: 1887226
cuaggauguuccuugaaga

SEQ ID NO: 2456707 - RNA, 19 nt, Artificial Sequence
  Description of Artificial Sequence: Synthetic oligonucleotide
  Antisense strand to SEQ ID NO: 2456706
ucuucaaggaacauccuag

SEQ ID NO: 2456708 - RNA, 19 nt, Artificial Sequence
  Description of Artificial Sequence: Synthetic oligonucleotide
  Sense strand starting at position 2068 of SEQ ID NO: 1887226
cuugaagaguuguuaauau

SEQ ID NO: 2456709 - RNA, 19 nt, Artificial Sequence
  Description of Artificial Sequence: Synthetic oligonucleotide
  Antisense strand to SEQ ID NO: 2456708
auauuaacaacucuucaag

SEQ ID NO: 2456710 - RNA, 19 nt, Artificial Sequence
  Description of Artificial Sequence: Synthetic oligonucleotide
  Sense strand starting at position 2411 of SEQ ID NO: 1887226
agcauaucugcuggcuuga

SEQ ID NO: 2456711 - RNA, 19 nt, Artificial Sequence
  Description of Artificial Sequence: Synthetic oligonucleotide
  Antisense strand to SEQ ID NO: 2456710
ucaagccagcagauaugcu

SEQ ID NO: 2456712 - RNA, 19 nt, Artificial Sequence
  Description of Artificial Sequence: Synthetic oligonucleotide
  Sense strand starting at position 2552 of SEQ ID NO: 1887226
ugacuaguguucucuauga

SEQ ID NO: 2456713 - RNA, 19 nt, Artificial Sequence
  Description of Artificial Sequence: Synthetic oligonucleotide
  Antisense strand to SEQ ID NO: 2456712
ucauagagaacacuaguca

SEQ ID NO: 2456714 - RNA, 19 nt, Artificial Sequence
  Description of Artificial Sequence: Synthetic oligonucleotide
  Sense strand starting at position 2554 of SEQ ID NO: 1887226
acuaguguucucuaugauc

SEQ ID NO: 2456715 - RNA, 19 nt, Artificial Sequence
  Description of Artificial Sequence: Synthetic oligonucleotide
  Antisense strand to SEQ ID NO: 2456714
gaucauagagaacacuagu

SEQ ID NO: 2456716 - RNA, 19 nt, Artificial Sequence
  Description of Artificial Sequence: Synthetic oligonucleotide
  Sense strand starting at position 2667 of SEQ ID NO: 1887226
gucuacugucaauaaugcu

SEQ ID NO: 2456717 - RNA, 19 nt, Artificial Sequence
  Description of Artificial Sequence: Synthetic oligonucleotide
  Antisense strand to SEQ ID NO: 2456716
agcauuauugacaguagac

SEQ ID NO: 2456718 - RNA, 19 nt, Artificial Sequence
  Description of Artificial Sequence: Synthetic oligonucleotide
  Sense strand starting at position 3114 of SEQ ID NO: 1887226
ugauguuuauggucauaca

SEQ ID NO: 2456719 - RNA, 19 nt, Artificial Sequence
  Description of Artificial Sequence: Synthetic oligonucleotide
  Antisense strand to SEQ ID NO: 2456718
uguaugaccauaaacauca

SEQ ID NO: 2456720 - RNA, 19 nt, Artificial Sequence
  Description of Artificial Sequence: Synthetic oligonucleotide
  Sense strand starting at position 3115 of SEQ ID NO: 1887226
gauguuuauggucauacac

SEQ ID NO: 2456721 - RNA, 19 nt, Artificial Sequence
  Description of Artificial Sequence: Synthetic oligonucleotide
  Antisense strand to SEQ ID NO: 2456720
guguaugaccauaaacauc

SEQ ID NO: 2456722 - RNA, 19 nt, Artificial Sequence
  Description of Artificial Sequence: Synthetic oligonucleotide
  Sense strand starting at position 3137 of SEQ ID NO: 1887226
gccucaucccucugcuaug

SEQ ID NO: 2456723 - RNA, 19 nt, Artificial Sequence
  Description of Artificial Sequence: Synthetic oligonucleotide
  Antisense strand to SEQ ID NO: 2456722
cauagcagagggaugaggc

SEQ ID NO: 2456724 - RNA, 19 nt, Artificial Sequence
  Description of Artificial Sequence: Synthetic oligonucleotide
  Sense strand starting at position 3173 of SEQ ID NO: 1887226
caaggcauuuguguuguga

SEQ ID NO: 2456725 - RNA, 19 nt, Artificial Sequence
  Description of Artificial Sequence: Synthetic oligonucleotide
  Antisense strand to SEQ ID NO: 2456724
ucacaacacaaaugccuug

SEQ ID NO: 2456726 - RNA, 19 nt, Artificial Sequence
  Description of Artificial Sequence: Synthetic oligonucleotide
  Sense strand starting at position 3260 of SEQ ID NO: 1887226
ugcguuaggagauggagaa

SEQ ID NO: 2456727 - RNA, 19 nt, Artificial Sequence
  Description of Artificial Sequence: Synthetic oligonucleotide
  Antisense strand to SEQ ID NO: 2456726
uucuccaucuccuaacgca

SEQ ID NO: 2456728 - RNA, 19 nt, Artificial Sequence
  Description of Artificial Sequence: Synthetic oligonucleotide
  Sense strand starting at position 3281 of SEQ ID NO: 1887226
agcagaucaugugcaguuu

SEQ ID NO: 2456729 - RNA, 19 nt, Artificial Sequence
  Description of Artificial Sequence: Synthetic oligonucleotide
  Antisense strand to SEQ ID NO: 2456728
aaacugcacaugaucugcu

SEQ ID NO: 2456730 - RNA, 19 nt, Artificial Sequence
  Description of Artificial Sequence: Synthetic oligonucleotide
  Sense strand starting at position 3326 of SEQ ID NO: 1887226
ggaagauccagcuguagca

SEQ ID NO: 2456731 - RNA, 19 nt, Artificial Sequence
  Description of Artificial Sequence: Synthetic oligonucleotide
  Antisense strand to SEQ ID NO: 2456730
ugcuacagcuggaucuucc

SEQ ID NO: 2456732 - RNA, 19 nt, Artificial Sequence
  Description of Artificial Sequence: Synthetic oligonucleotide
  Sense strand starting at position 3409 of SEQ ID NO: 1887226
guacgaaugccugugcuca

SEQ ID NO: 2456733 - RNA, 19 nt, Artificial Sequence
  Description of Artificial Sequence: Synthetic oligonucleotide
  Antisense strand to SEQ ID NO: 2456732
ugagcacaggcauucguac

SEQ ID NO: 2456734 - RNA, 19 nt, Artificial Sequence
  Description of Artificial Sequence: Synthetic oligonucleotide
  Sense strand starting at position 3630 of SEQ ID NO: 1887226
cgucauccauccucauaca

SEQ ID NO: 2456735 - RNA, 19 nt, Artificial Sequence
  Description of Artificial Sequence: Synthetic oligonucleotide
  Antisense strand to SEQ ID NO: 2456734
uguaugaggauggaugacg

SEQ ID NO: 2456736 - RNA, 19 nt, Artificial Sequence
  Description of Artificial Sequence: Synthetic oligonucleotide
  Sense strand starting at position 543 of SEQ ID NO: 1887227
gcaguugauccacagggau

SEQ ID NO: 2456737 - RNA, 19 nt, Artificial Sequence
  Description of Artificial Sequence: Synthetic oligonucleotide
  Antisense strand to SEQ ID NO: 2456736
aucccuguggaucaacugc

SEQ ID NO: 2456738 - RNA, 19 nt, Artificial Sequence
  Description of Artificial Sequence: Synthetic oligonucleotide
  Sense strand starting at position 567 of SEQ ID NO: 1887227
ugucaaacucagcgaaacu

SEQ ID NO: 2456739 - RNA, 19 nt, Artificial Sequence
  Description of Artificial Sequence: Synthetic oligonucleotide
  Antisense strand to SEQ ID NO: 2456738
aguuucgcugaguuugaca

SEQ ID NO: 2456740 - RNA, 19 nt, Artificial Sequence
  Description of Artificial Sequence: Synthetic oligonucleotide
  Sense strand starting at position 578 of SEQ ID NO: 1887227
gcgaaacuugcuuggcagu

SEQ ID NO: 2456741 - RNA, 19 nt, Artificial Sequence
  Description of Artificial Sequence: Synthetic oligonucleotide
  Antisense strand to SEQ ID NO: 2456740
acugccaagcaaguuucgc

SEQ ID NO: 2456742 - RNA, 19 nt, Artificial Sequence
  Description of Artificial Sequence: Synthetic oligonucleotide
  Sense strand starting at position 579 of SEQ ID NO: 1887227
cgaaacuugcuuggcaguu

SEQ ID NO: 2456743 - RNA, 19 nt, Artificial Sequence
  Description of Artificial Sequence: Synthetic oligonucleotide
  Antisense strand to SEQ ID NO: 2456742
aacugccaagcaaguuucg

SEQ ID NO: 2456744 - RNA, 19 nt, Artificial Sequence
  Description of Artificial Sequence: Synthetic oligonucleotide
  Sense strand starting at position 601 of SEQ ID NO: 1887227
gcaaguagcuaugggaaca

SEQ ID NO: 2456745 - RNA, 19 nt, Artificial Sequence
  Description of Artificial Sequence: Synthetic oligonucleotide
  Antisense strand to SEQ ID NO: 2456744
uguucccauagcuacuugc

SEQ ID NO: 2456746 - RNA, 19 nt, Artificial Sequence
  Description of Artificial Sequence: Synthetic oligonucleotide
  Sense strand starting at position 771 of SEQ ID NO: 1887227
uccagucagcauugucauu

SEQ ID NO: 2456747 - RNA, 19 nt, Artificial Sequence
  Description of Artificial Sequence: Synthetic oligonucleotide
  Antisense strand to SEQ ID NO: 2456746
aaugacaaugcugacugga

SEQ ID NO: 2456748 - RNA, 19 nt, Artificial Sequence
  Description of Artificial Sequence: Synthetic oligonucleotide
  Sense strand starting at position 810 of SEQ ID NO: 1887227
uuuccagcgucugagaacu

SEQ ID NO: 2456749 - RNA, 19 nt, Artificial Sequence
  Description of Artificial Sequence: Synthetic oligonucleotide
  Antisense strand to SEQ ID NO: 2456748
aguucucagacgcuggaaa

SEQ ID NO: 2456750 - RNA, 19 nt, Artificial Sequence
  Description of Artificial Sequence: Synthetic oligonucleotide
  Sense strand starting at position 827 of SEQ ID NO: 1887227
cucagauggugacaagaaa

SEQ ID NO: 2456751 - RNA, 19 nt, Artificial Sequence
  Description of Artificial Sequence: Synthetic oligonucleotide
  Antisense strand to SEQ ID NO: 2456750
uuucuugucaccaucugag

SEQ ID NO: 2456752 - RNA, 19 nt, Artificial Sequence
  Description of Artificial Sequence: Synthetic oligonucleotide
  Sense strand starting at position 1687 of SEQ ID NO: 1887227
gggaguguuccagaucuac

SEQ ID NO: 2456753 - RNA, 19 nt, Artificial Sequence
  Description of Artificial Sequence: Synthetic oligonucleotide
  Antisense strand to SEQ ID NO: 2456752
guagaucuggaacacuccc

SEQ ID NO: 2456754 - RNA, 19 nt, Artificial Sequence
  Description of Artificial Sequence: Synthetic oligonucleotide
  Sense strand starting at position 1703 of SEQ ID NO: 1887227
uacgcuuaccuguggauau

SEQ ID NO: 2456755 - RNA, 19 nt, Artificial Sequence
  Description of Artificial Sequence: Synthetic oligonucleotide
  Antisense strand to SEQ ID NO: 2456754
auauccacagguaagcgua

SEQ ID NO: 2456756 - RNA, 19 nt, Artificial Sequence
  Description of Artificial Sequence: Synthetic oligonucleotide
  Sense strand starting at position 1704 of SEQ ID NO: 1887227
acgcuuaccuguggauaua

SEQ ID NO: 2456757 - RNA, 19 nt, Artificial Sequence
  Description of Artificial Sequence: Synthetic oligonucleotide
  Antisense strand to SEQ ID NO: 2456756
uauauccacagguaagcgu

SEQ ID NO: 2456758 - RNA, 19 nt, Artificial Sequence
  Description of Artificial Sequence: Synthetic oligonucleotide
  Sense strand starting at position 2116 of SEQ ID NO: 1887227
uccauaucuccaugcugga

SEQ ID NO: 2456759 - RNA, 19 nt, Artificial Sequence
  Description of Artificial Sequence: Synthetic oligonucleotide
  Antisense strand to SEQ ID NO: 2456758
uccagcauggagauaugga

SEQ ID NO: 2456760 - RNA, 19 nt, Artificial Sequence
  Description of Artificial Sequence: Synthetic oligonucleotide
  Sense strand starting at position 2119 of SEQ ID NO: 1887227
auaucuccaugcuggaaga

SEQ ID NO: 2456761 - RNA, 19 nt, Artificial Sequence
  Description of Artificial Sequence: Synthetic oligonucleotide
  Antisense strand to SEQ ID NO: 2456760
ucuuccagcauggagauau

SEQ ID NO: 2456762 - RNA, 19 nt, Artificial Sequence
  Description of Artificial Sequence: Synthetic oligonucleotide
  Sense strand starting at position 2200 of SEQ ID NO: 1887227
gacacuucugacgggcaga

SEQ ID NO: 2456763 - RNA, 19 nt, Artificial Sequence
  Description of Artificial Sequence: Synthetic oligonucleotide
  Antisense strand to SEQ ID NO: 2456762
ucugcccgucagaaguguc

SEQ ID NO: 2456764 - RNA, 19 nt, Artificial Sequence
  Description of Artificial Sequence: Synthetic oligonucleotide
  Sense strand starting at position 2919 of SEQ ID NO: 1887227
gccaauauauagcauauga
